United States Patent Application Publication US 2015/0141320 A1 - sequence listing, part 15

SEQ ID NO: 425150 - DNA, 15 bp, Homo sapiens
gcagacttcttttct

SEQ ID NO: 425151 - DNA, 15 bp, Homo sapiens
tgcagacttcttttc

SEQ ID NO: 425152 - DNA, 15 bp, Homo sapiens
ttgcagacttctttt

SEQ ID NO: 425153 - DNA, 15 bp, Homo sapiens
attgcagacttcttt

SEQ ID NO: 425154 - DNA, 15 bp, Homo sapiens
tattgcagacttctt

SEQ ID NO: 425155 - DNA, 15 bp, Homo sapiens
ttattgcagacttct

SEQ ID NO: 425156 - DNA, 15 bp, Homo sapiens
tttattgcagacttc

SEQ ID NO: 425157 - DNA, 15 bp, Homo sapiens
ttttattgcagactt

SEQ ID NO: 425158 - DNA, 15 bp, Homo sapiens
tttttattgcagact

SEQ ID NO: 425159 - DNA, 15 bp, Homo sapiens
atttttattgcagac

SEQ ID NO: 425160 - DNA, 15 bp, Homo sapiens
gatttttattgcaga

SEQ ID NO: 425161 - DNA, 15 bp, Homo sapiens
ggatttttattgcag

SEQ ID NO: 425162 - DNA, 15 bp, Homo sapiens
tggatttttattgca

SEQ ID NO: 425163 - DNA, 15 bp, Homo sapiens
ttggatttttattgc

SEQ ID NO: 425164 - DNA, 15 bp, Homo sapiens
tttggatttttattg

SEQ ID NO: 425165 - DNA, 15 bp, Homo sapiens
ctttggatttttatt

SEQ ID NO: 425166 - DNA, 15 bp, Homo sapiens
tctttggatttttat

SEQ ID NO: 425167 - DNA, 15 bp, Homo sapiens
ttctttggattttta

SEQ ID NO: 425168 - DNA, 15 bp, Homo sapiens
attctttggattttt

SEQ ID NO: 425169 - DNA, 15 bp, Homo sapiens
cattctttggatttt

SEQ ID NO: 425170 - DNA, 15 bp, Homo sapiens
acattctttggattt

SEQ ID NO: 425171 - DNA, 15 bp, Homo sapiens
tacattctttggatt

SEQ ID NO: 425172 - DNA, 15 bp, Homo sapiens
atacattctttggat

SEQ ID NO: 425173 - DNA, 15 bp, Homo sapiens
aatacattctttgga

SEQ ID NO: 425174 - DNA, 15 bp, Homo sapiens
gaatacattctttgg

SEQ ID NO: 425175 - DNA, 15 bp, Homo sapiens
agaatacattctttg

SEQ ID NO: 425176 - DNA, 15 bp, Homo sapiens
gagaatacattcttt

SEQ ID NO: 425177 - DNA, 15 bp, Homo sapiens
agagaatacattctt

SEQ ID NO: 425178 - DNA, 15 bp, Homo sapiens
gagagaatacattct

SEQ ID NO: 425179 - DNA, 15 bp, Homo sapiens
agagagaatacattc

SEQ ID NO: 425180 - DNA, 15 bp, Homo sapiens
aagagagaatacatt

SEQ ID NO: 425181 - DNA, 15 bp, Homo sapiens
taagagagaatacat

SEQ ID NO: 425182 - DNA, 15 bp, Homo sapiens
ataagagagaataca

SEQ ID NO: 425183 - DNA, 15 bp, Homo sapiens
aataagagagaatac

SEQ ID NO: 425184 - DNA, 15 bp, Homo sapiens
aaataagagagaata

SEQ ID NO: 425185 - DNA, 15 bp, Homo sapiens
gaaataagagagaat

SEQ ID NO: 425186 - DNA, 15 bp, Homo sapiens
tgaaataagagagaa

SEQ ID NO: 425187 - DNA, 15 bp, Homo sapiens
atgaaataagagaga

SEQ ID NO: 425188 - DNA, 15 bp, Homo sapiens
aatgaaataagagag

SEQ ID NO: 425189 - DNA, 15 bp, Homo sapiens
gaatgaaataagaga

SEQ ID NO: 425190 - DNA, 15 bp, Homo sapiens
agaatgaaataagag

SEQ ID NO: 425191 - DNA, 15 bp, Homo sapiens
aagaatgaaataaga

SEQ ID NO: 425192 - DNA, 15 bp, Homo sapiens
gaagaatgaaataag

SEQ ID NO: 425193 - DNA, 15 bp, Homo sapiens
agaagaatgaaataa

SEQ ID NO: 425194 - DNA, 15 bp, Homo sapiens
gagaagaatgaaata

SEQ ID NO: 425195 - DNA, 15 bp, Homo sapiens
tgagaagaatgaaat

SEQ ID NO: 425196 - DNA, 15 bp, Homo sapiens
ttgagaagaatgaaa

SEQ ID NO: 425197 - DNA, 15 bp, Homo sapiens
tttgagaagaatgaa

SEQ ID NO: 425198 - DNA, 15 bp, Homo sapiens
ttttgagaagaatga

SEQ ID NO: 425199 - DNA, 15 bp, Homo sapiens
cttttgagaagaatg

SEQ ID NO: 425200 - DNA, 15 bp, Homo sapiens
tcttttgagaagaat

SEQ ID NO: 425201 - DNA, 15 bp, Homo sapiens
gtcttttgagaagaa

SEQ ID NO: 425202 - DNA, 15 bp, Homo sapiens
tgtcttttgagaaga

SEQ ID NO: 425203 - DNA, 15 bp, Homo sapiens
ttgtcttttgagaag

SEQ ID NO: 425204 - DNA, 15 bp, Homo sapiens
attgtcttttgagaa

SEQ ID NO: 425205 - DNA, 15 bp, Homo sapiens
tattgtcttttgaga

SEQ ID NO: 425206 - DNA, 15 bp, Homo sapiens
ctattgtcttttgag

SEQ ID NO: 425207 - DNA, 15 bp, Homo sapiens
actattgtcttttga

SEQ ID NO: 425208 - DNA, 15 bp, Homo sapiens
cactattgtcttttg

SEQ ID NO: 425209 - DNA, 15 bp, Homo sapiens
acactattgtctttt

SEQ ID NO: 425210 - DNA, 15 bp, Homo sapiens
aacactattgtcttt

SEQ ID NO: 425211 - DNA, 15 bp, Homo sapiens
gaacactattgtctt

SEQ ID NO: 425212 - DNA, 15 bp, Homo sapiens
agaacactattgtct

SEQ ID NO: 425213 - DNA, 15 bp, Homo sapiens
cagaacactattgtc

SEQ ID NO: 425214 - DNA, 15 bp, Homo sapiens
gcagaacactattgt

SEQ ID NO: 425215 - DNA, 15 bp, Homo sapiens
tgcagaacactattg

SEQ ID NO: 425216 - DNA, 15 bp, Homo sapiens
ttgcagaacactatt

SEQ ID NO: 425217 - DNA, 15 bp, Homo sapiens
attgcagaacactat

SEQ ID NO: 425218 - DNA, 15 bp, Homo sapiens
cattgcagaacacta

SEQ ID NO: 425219 - DNA, 15 bp, Homo sapiens
gcattgcagaacact

SEQ ID NO: 425220 - DNA, 15 bp, Homo sapiens
tgcattgcagaacac

SEQ ID NO: 425221 - DNA, 15 bp, Homo sapiens
gtgcattgcagaaca

SEQ ID NO: 425222 - DNA, 15 bp, Homo sapiens
agtgcattgcagaac

SEQ ID NO: 425223 - DNA, 15 bp, Homo sapiens
gagtgcattgcagaa

SEQ ID NO: 425224 - DNA, 15 bp, Homo sapiens
agagtgcattgcaga

SEQ ID NO: 425225 - DNA, 15 bp, Homo sapiens
aagagtgcattgcag

SEQ ID NO: 425226 - DNA, 15 bp, Homo sapiens
gaagagtgcattgca

SEQ ID NO: 425227 - DNA, 15 bp, Homo sapiens
agaagagtgcattgc

SEQ ID NO: 425228 - DNA, 15 bp, Homo sapiens
aagaagagtgcattg

SEQ ID NO: 425229 - DNA, 15 bp, Homo sapiens
aaagaagagtgcatt

SEQ ID NO: 425230 - DNA, 15 bp, Homo sapiens
aaaagaagagtgcat

SEQ ID NO: 425231 - DNA, 15 bp, Homo sapiens
gaaaagaagagtgca

SEQ ID NO: 425232 - DNA, 15 bp, Homo sapiens
ggaaaagaagagtgc

SEQ ID NO: 425233 - DNA, 15 bp, Homo sapiens
aggaaaagaagagtg

SEQ ID NO: 425234 - DNA, 15 bp, Homo sapiens
gaggaaaagaagagt

SEQ ID NO: 425235 - DNA, 15 bp, Homo sapiens
agaggaaaagaagag

SEQ ID NO: 425236 - DNA, 15 bp, Homo sapiens
tagaggaaaagaaga

SEQ ID NO: 425237 - DNA, 15 bp, Homo sapiens
gtagaggaaaagaag

SEQ ID NO: 425238 - DNA, 15 bp, Homo sapiens
tgtagaggaaaagaa

SEQ ID NO: 425239 - DNA, 15 bp, Homo sapiens
ttgtagaggaaaaga

SEQ ID NO: 425240 - DNA, 15 bp, Homo sapiens
gttgtagaggaaaag

SEQ ID NO: 425241 - DNA, 15 bp, Homo sapiens
agttgtagaggaaaa

SEQ ID NO: 425242 - DNA, 15 bp, Homo sapiens
cagttgtagaggaaa

SEQ ID NO: 425243 - DNA, 15 bp, Homo sapiens
ccagttgtagaggaa

SEQ ID NO: 425244 - DNA, 15 bp, Homo sapiens
cccagttgtagagga

SEQ ID NO: 425245 - DNA, 15 bp, Homo sapiens
gcccagttgtagagg

SEQ ID NO: 425246 - DNA, 15 bp, Homo sapiens
tgcccagttgtagag

SEQ ID NO: 425247 - DNA, 15 bp, Homo sapiens
ctgcccagttgtaga

SEQ ID NO: 425248 - DNA, 15 bp, Homo sapiens
actgcccagttgtag

SEQ ID NO: 425249 - DNA, 15 bp, Homo sapiens
tactgcccagttgta

SEQ ID NO: 425250 - DNA, 15 bp, Homo sapiens
ttactgcccagttgt

SEQ ID NO: 425251 - DNA, 15 bp, Homo sapiens
cttactgcccagttg

SEQ ID NO: 425252 - DNA, 15 bp, Homo sapiens
gcttactgcccagtt

SEQ ID NO: 425253 - DNA, 15 bp, Homo sapiens
tgcttactgcccagt

SEQ ID NO: 425254 - DNA, 15 bp, Homo sapiens
ctgcttactgcccag

SEQ ID NO: 425255 - DNA, 15 bp, Homo sapiens
cctgcttactgccca

SEQ ID NO: 425256 - DNA, 15 bp, Homo sapiens
ccctgcttactgccc

SEQ ID NO: 425257 - DNA, 15 bp, Homo sapiens
gccctgcttactgcc

SEQ ID NO: 425258 - DNA, 15 bp, Homo sapiens
agccctgcttactgc

SEQ ID NO: 425259 - DNA, 15 bp, Homo sapiens
tagccctgcttactg

SEQ ID NO: 425260 - DNA, 15 bp, Homo sapiens
atagccctgcttact

SEQ ID NO: 425261 - DNA, 15 bp, Homo sapiens
aatagccctgcttac

SEQ ID NO: 425262 - DNA, 15 bp, Homo sapiens
gaatagccctgctta

SEQ ID NO: 425263 - DNA, 15 bp, Homo sapiens
tgaatagccctgctt

SEQ ID NO: 425264 - DNA, 15 bp, Homo sapiens
atgaatagccctgct

SEQ ID NO: 425265 - DNA, 15 bp, Homo sapiens
aatgaatagccctgc

SEQ ID NO: 425266 - DNA, 15 bp, Homo sapiens
gaatgaatagccctg

SEQ ID NO: 425267 - DNA, 15 bp, Homo sapiens
tgaatgaatagccct

SEQ ID NO: 425268 - DNA, 15 bp, Homo sapiens
ttgaatgaatagccc

SEQ ID NO: 425269 - DNA, 15 bp, Homo sapiens
attgaatgaatagcc

SEQ ID NO: 425270 - DNA, 15 bp, Homo sapiens
gattgaatgaatagc

SEQ ID NO: 425271 - DNA, 15 bp, Homo sapiens
agattgaatgaatag

SEQ ID NO: 425272 - DNA, 15 bp, Homo sapiens
aagattgaatgaata

SEQ ID NO: 425273 - DNA, 15 bp, Homo sapiens
gaagattgaatgaat

SEQ ID NO: 425274 - DNA, 15 bp, Homo sapiens
agaagattgaatgaa

SEQ ID NO: 425275 - DNA, 15 bp, Homo sapiens
tagaagattgaatga

SEQ ID NO: 425276 - DNA, 15 bp, Homo sapiens
ctagaagattgaatg

SEQ ID NO: 425277 - DNA, 15 bp, Homo sapiens
cctagaagattgaat

SEQ ID NO: 425278 - DNA, 15 bp, Homo sapiens
gcctagaagattgaa

SEQ ID NO: 425279 - DNA, 15 bp, Homo sapiens
tgcctagaagattga

SEQ ID NO: 425280 - DNA, 15 bp, Homo sapiens
atgcctagaagattg

SEQ ID NO: 425281 - DNA, 15 bp, Homo sapiens
gatgcctagaagatt

SEQ ID NO: 425282 - DNA, 15 bp, Homo sapiens
tgatgcctagaagat

SEQ ID NO: 425283 - DNA, 15 bp, Homo sapiens
ttgatgcctagaaga

SEQ ID NO: 425284 - DNA, 15 bp, Homo sapiens
tttgatgcctagaag

SEQ ID NO: 425285 - DNA, 15 bp, Homo sapiens
atttgatgcctagaa

SEQ ID NO: 425286 - DNA, 15 bp, Homo sapiens
aatttgatgcctaga

SEQ ID NO: 425287 - DNA, 15 bp, Homo sapiens
caatttgatgcctag

SEQ ID NO: 425288 - DNA, 15 bp, Homo sapiens
ccaatttgatgccta

SEQ ID NO: 425289 - DNA, 15 bp, Homo sapiens
cccaatttgatgcct

SEQ ID NO: 425290 - DNA, 15 bp, Homo sapiens
tcccaatttgatgcc

SEQ ID NO: 425291 - DNA, 15 bp, Homo sapiens
ctcccaatttgatgc

SEQ ID NO: 425292 - DNA, 15 bp, Homo sapiens
tctcccaatttgatg

SEQ ID NO: 425293 - DNA, 15 bp, Homo sapiens
ctctcccaatttgat

SEQ ID NO: 425294 - DNA, 15 bp, Homo sapiens
tctctcccaatttga

SEQ ID NO: 425295 - DNA, 15 bp, Homo sapiens
ttctctcccaatttg

SEQ ID NO: 425296 - DNA, 15 bp, Homo sapiens
tttctctcccaattt

SEQ ID NO: 425297 - DNA, 15 bp, Homo sapiens
ttttctctcccaatt

SEQ ID NO: 425298 - DNA, 15 bp, Homo sapiens
cttttctctcccaat

SEQ ID NO: 425299 - DNA, 15 bp, Homo sapiens
acttttctctcccaa

SEQ ID NO: 425300 - DNA, 15 bp, Homo sapiens
tacttttctctccca

SEQ ID NO: 425301 - DNA, 15 bp, Homo sapiens
atacttttctctccc

SEQ ID NO: 425302 - DNA, 15 bp, Homo sapiens
aatacttttctctcc

SEQ ID NO: 425303 - DNA, 15 bp, Homo sapiens
aaatacttttctctc

SEQ ID NO: 425304 - DNA, 15 bp, Homo sapiens
aaaatacttttctct

SEQ ID NO: 425305 - DNA, 15 bp, Homo sapiens
aaaaatacttttctc

SEQ ID NO: 425306 - DNA, 15 bp, Homo sapiens
gaaaaatacttttct

SEQ ID NO: 425307 - DNA, 15 bp, Homo sapiens
tgaaaaatacttttc

SEQ ID NO: 425308 - DNA, 15 bp, Homo sapiens
atgaaaaatactttt

SEQ ID NO: 425309 - DNA, 15 bp, Homo sapiens
aatgaaaaatacttt

SEQ ID NO: 425310 - DNA, 15 bp, Homo sapiens
gaatgaaaaatactt

SEQ ID NO: 425311 - DNA, 15 bp, Homo sapiens
agaatgaaaaatact

SEQ ID NO: 425312 - DNA, 15 bp, Homo sapiens
aagaatgaaaaatac

SEQ ID NO: 425313 - DNA, 15 bp, Homo sapiens
caagaatgaaaaata

SEQ ID NO: 425314 - DNA, 15 bp, Homo sapiens
acaagaatgaaaaat

SEQ ID NO: 425315 - DNA, 15 bp, Homo sapiens
aacaagaatgaaaaa

SEQ ID NO: 425316 - DNA, 15 bp, Homo sapiens
taacaagaatgaaaa

SEQ ID NO: 425317 - DNA, 15 bp, Homo sapiens
ataacaagaatgaaa

SEQ ID NO: 425318 - DNA, 15 bp, Homo sapiens
cataacaagaatgaa

SEQ ID NO: 425319 - DNA, 15 bp, Homo sapiens
tcataacaagaatga

SEQ ID NO: 425320 - DNA, 15 bp, Homo sapiens
ttcataacaagaatg

SEQ ID NO: 425321 - DNA, 15 bp, Homo sapiens
cttcataacaagaat

SEQ ID NO: 425322 - DNA, 15 bp, Homo sapiens
gcttcataacaagaa

SEQ ID NO: 425323 - DNA, 15 bp, Homo sapiens
tgcttcataacaaga

SEQ ID NO: 425324 - DNA, 15 bp, Homo sapiens
atgcttcataacaag

SEQ ID NO: 425325 - DNA, 15 bp, Homo sapiens
gatgcttcataacaa

SEQ ID NO: 425326 - DNA, 15 bp, Homo sapiens
tgatgcttcataaca

SEQ ID NO: 425327 - DNA, 15 bp, Homo sapiens
ttgatgcttcataac

SEQ ID NO: 425328 - DNA, 15 bp, Homo sapiens
cttgatgcttcataa

SEQ ID NO: 425329 - DNA, 15 bp, Homo sapiens
tcttgatgcttcata

SEQ ID NO: 425330 - DNA, 15 bp, Homo sapiens
ctcttgatgcttcat

SEQ ID NO: 425331 - DNA, 15 bp, Homo sapiens
tctcttgatgcttca

SEQ ID NO: 425332 - DNA, 15 bp, Homo sapiens
gtctcttgatgcttc

SEQ ID NO: 425333 - DNA, 15 bp, Homo sapiens
agtctcttgatgctt

SEQ ID NO: 425334 - DNA, 15 bp, Homo sapiens
tagtctcttgatgct

SEQ ID NO: 425335 - DNA, 15 bp, Homo sapiens
atagtctcttgatgc

SEQ ID NO: 425336 - DNA, 15 bp, Homo sapiens
aatagtctcttgatg

SEQ ID NO: 425337 - DNA, 15 bp, Homo sapiens
gaatagtctcttgat

SEQ ID NO: 425338 - DNA, 15 bp, Homo sapiens
tgaatagtctcttga

SEQ ID NO: 425339 - DNA, 15 bp, Homo sapiens
ctgaatagtctcttg

SEQ ID NO: 425340 - DNA, 15 bp, Homo sapiens
actgaatagtctctt

SEQ ID NO: 425341 - DNA, 15 bp, Homo sapiens
tactgaatagtctct

SEQ ID NO: 425342 - DNA, 15 bp, Homo sapiens
ctactgaatagtctc

SEQ ID NO: 425343 - DNA, 15 bp, Homo sapiens
actactgaatagtct

SEQ ID NO: 425344 - DNA, 15 bp, Homo sapiens
tactactgaatagtc

SEQ ID NO: 425345 - DNA, 15 bp, Homo sapiens
gtactactgaatagt

SEQ ID NO: 425346 - DNA, 15 bp, Homo sapiens
agtactactgaatag

SEQ ID NO: 425347 - DNA, 15 bp, Homo sapiens
aagtactactgaata

SEQ ID NO: 425348 - DNA, 15 bp, Homo sapiens
caagtactactgaat

SEQ ID NO: 425349 - DNA, 15 bp, Homo sapiens
gcaagtactactgaa

SEQ ID NO: 425350 - DNA, 15 bp, Homo sapiens
ggcaagtactactga

SEQ ID NO: 425351 - DNA, 15 bp, Homo sapiens
tggcaagtactactg

SEQ ID NO: 425352 - DNA, 15 bp, Homo sapiens
ctggcaagtactact

SEQ ID NO: 425353 - DNA, 15 bp, Homo sapiens
actggcaagtactac

SEQ ID NO: 425354 - DNA, 15 bp, Homo sapiens
aactggcaagtacta

SEQ ID NO: 425355 - DNA, 15 bp, Homo sapiens
gaactggcaagtact

SEQ ID NO: 425356 - DNA, 15 bp, Homo sapiens
ggaactggcaagtac

SEQ ID NO: 425357 - DNA, 15 bp, Homo sapiens
gggaactggcaagta

SEQ ID NO: 425358 - DNA, 15 bp, Homo sapiens
tgggaactggcaagt

SEQ ID NO: 425359 - DNA, 15 bp, Homo sapiens
ttgggaactggcaag

SEQ ID NO: 425360 - DNA, 15 bp, Homo sapiens
tttgggaactggcaa

SEQ ID NO: 425361 - DNA, 15 bp, Homo sapiens
ttttgggaactggca

SEQ ID NO: 425362 - DNA, 15 bp, Homo sapiens
attttgggaactggc

SEQ ID NO: 425363 - DNA, 15 bp, Homo sapiens
aattttgggaactgg

SEQ ID NO: 425364 - DNA, 15 bp, Homo sapiens
taattttgggaactg

SEQ ID NO: 425365 - DNA, 15 bp, Homo sapiens
ataattttgggaact

SEQ ID NO: 425366 - DNA, 15 bp, Homo sapiens
tataattttgggaac

SEQ ID NO: 425367 - DNA, 15 bp, Homo sapiens
gtataattttgggaa

SEQ ID NO: 425368 - DNA, 15 bp, Homo sapiens
agtataattttggga

SEQ ID NO: 425369 - DNA, 15 bp, Homo sapiens
cagtataattttggg

SEQ ID NO: 425370 - DNA, 15 bp, Homo sapiens
tcagtataattttgg

SEQ ID NO: 425371 - DNA, 15 bp, Homo sapiens
gtcagtataattttg

SEQ ID NO: 425372 - DNA, 15 bp, Homo sapiens
tgtcagtataatttt

SEQ ID NO: 425373 - DNA, 15 bp, Homo sapiens
atgtcagtataattt

SEQ ID NO: 425374 - DNA, 15 bp, Homo sapiens
aatgtcagtataatt

SEQ ID NO: 425375 - DNA, 15 bp, Homo sapiens
aaatgtcagtataat

SEQ ID NO: 425376 - DNA, 15 bp, Homo sapiens
taaatgtcagtataa

SEQ ID NO: 425377 - DNA, 15 bp, Homo sapiens
ttaaatgtcagtata

SEQ ID NO: 425378 - DNA, 15 bp, Homo sapiens
cttaaatgtcagtat

SEQ ID NO: 425379 - DNA, 15 bp, Homo sapiens
ccttaaatgtcagta

SEQ ID NO: 425380 - DNA, 15 bp, Homo sapiens
cccttaaatgtcagt

SEQ ID NO: 425381 - DNA, 15 bp, Homo sapiens
ccccttaaatgtcag

SEQ ID NO: 425382 - DNA, 15 bp, Homo sapiens
accccttaaatgtca

SEQ ID NO: 425383 - DNA, 15 bp, Homo sapiens
taccccttaaatgtc

SEQ ID NO: 425384 - DNA, 15 bp, Homo sapiens
ctaccccttaaatgt

SEQ ID NO: 425385 - DNA, 15 bp, Homo sapiens
actaccccttaaatg

SEQ ID NO: 425386 - DNA, 15 bp, Homo sapiens
aactaccccttaaat

SEQ ID NO: 425387 - DNA, 15 bp, Homo sapiens
taactaccccttaaa

SEQ ID NO: 425388 - DNA, 15 bp, Homo sapiens
ctaactaccccttaa

SEQ ID NO: 425389 - DNA, 15 bp, Homo sapiens
tctaactacccctta

SEQ ID NO: 425390 - DNA, 15 bp, Homo sapiens
ctctaactacccctt

SEQ ID NO: 425391 - DNA, 15 bp, Homo sapiens
tctctaactacccct

SEQ ID NO: 425392 - DNA, 15 bp, Homo sapiens
ttctctaactacccc

SEQ ID NO: 425393 - DNA, 15 bp, Homo sapiens
tttctctaactaccc

SEQ ID NO: 425394 - DNA, 15 bp, Homo sapiens
atttctctaactacc

SEQ ID NO: 425395 - DNA, 15 bp, Homo sapiens
tatttctctaactac

SEQ ID NO: 425396 - DNA, 15 bp, Homo sapiens
ttatttctctaacta

SEQ ID NO: 425397 - DNA, 15 bp, Homo sapiens
cttatttctctaact

SEQ ID NO: 425398 - DNA, 15 bp, Homo sapiens
tcttatttctctaac

SEQ ID NO: 425399 - DNA, 15 bp, Homo sapiens
ttcttatttctctaa

SEQ ID NO: 425400 - DNA, 15 bp, Homo sapiens
attcttatttctcta

SEQ ID NO: 425401 - DNA, 15 bp, Homo sapiens
gattcttatttctct

SEQ ID NO: 425402 - DNA, 15 bp, Homo sapiens
ggattcttatttctc

SEQ ID NO: 425403 - DNA, 15 bp, Homo sapiens
tggattcttatttct

SEQ ID NO: 425404 - DNA, 15 bp, Homo sapiens
gtggattcttatttc

SEQ ID NO: 425405 - DNA, 15 bp, Homo sapiens
tgtggattcttattt

SEQ ID NO: 425406 - DNA, 15 bp, Homo sapiens
ttgtggattcttatt

SEQ ID NO: 425407 - DNA, 15 bp, Homo sapiens
tttgtggattcttat

SEQ ID NO: 425408 - DNA, 15 bp, Homo sapiens
ttttgtggattctta

SEQ ID NO: 425409 - DNA, 15 bp, Homo sapiens
cttttgtggattctt

SEQ ID NO: 425410 - DNA, 15 bp, Homo sapiens
tcttttgtggattct

SEQ ID NO: 425411 - DNA, 15 bp, Homo sapiens
ttcttttgtggattc

SEQ ID NO: 425412 - DNA, 15 bp, Homo sapiens
tttcttttgtggatt

SEQ ID NO: 425413 - DNA, 15 bp, Homo sapiens
atttcttttgtggat

SEQ ID NO: 425414 - DNA, 15 bp, Homo sapiens
catttcttttgtgga

SEQ ID NO: 425415 - DNA, 15 bp, Homo sapiens
ccatttcttttgtgg

SEQ ID NO: 425416 - DNA, 15 bp, Homo sapiens
tccatttcttttgtg

SEQ ID NO: 425417 - DNA, 15 bp, Homo sapiens
ttccatttcttttgt

SEQ ID NO: 425418 - DNA, 15 bp, Homo sapiens
cttccatttcttttg

SEQ ID NO: 425419 - DNA, 15 bp, Homo sapiens
ccttccatttctttt

SEQ ID NO: 425420 - DNA, 15 bp, Homo sapiens
tccttccatttcttt

SEQ ID NO: 425421 - DNA, 15 bp, Homo sapiens
ctccttccatttctt

SEQ ID NO: 425422 - DNA, 15 bp, Homo sapiens
gctccttccatttct

SEQ ID NO: 425423 - DNA, 15 bp, Homo sapiens
tgctccttccatttc

SEQ ID NO: 425424 - DNA, 15 bp, Homo sapiens
ctgctccttccattt

SEQ ID NO: 425425 - DNA, 15 bp, Homo sapiens
gctgctccttccatt

SEQ ID NO: 425426 - DNA, 15 bp, Homo sapiens
agctgctccttccat

SEQ ID NO: 425427 - DNA, 15 bp, Homo sapiens
tagctgctccttcca

SEQ ID NO: 425428 - DNA, 15 bp, Homo sapiens
ctagctgctccttcc

SEQ ID NO: 425429 - DNA, 15 bp, Homo sapiens
tctagctgctccttc

SEQ ID NO: 425430 - DNA, 15 bp, Homo sapiens
atctagctgctcctt

SEQ ID NO: 425431 - DNA, 15 bp, Homo sapiens
tatctagctgctcct

SEQ ID NO: 425432 - DNA, 15 bp, Homo sapiens
ttatctagctgctcc

SEQ ID NO: 425433 - DNA, 15 bp, Homo sapiens
cttatctagctgctc

SEQ ID NO: 425434 - DNA, 15 bp, Homo sapiens
tcttatctagctgct

SEQ ID NO: 425435 - DNA, 15 bp, Homo sapiens
ttcttatctagctgc

SEQ ID NO: 425436 - DNA, 15 bp, Homo sapiens
cttcttatctagctg

SEQ ID NO: 425437 - DNA, 15 bp, Homo sapiens
tcttcttatctagct

SEQ ID NO: 425438 - DNA, 15 bp, Homo sapiens
ttcttcttatctagc

SEQ ID NO: 425439 - DNA, 15 bp, Homo sapiens
cttcttcttatctag

SEQ ID NO: 425440 - DNA, 15 bp, Homo sapiens
ccttcttcttatcta

SEQ ID NO: 425441 - DNA, 15 bp, Homo sapiens
tccttcttcttatct

SEQ ID NO: 425442 - DNA, 15 bp, Homo sapiens
ttccttcttcttatc

SEQ ID NO: 425443 - DNA, 15 bp, Homo sapiens
tttccttcttcttat

SEQ ID NO: 425444 - DNA, 15 bp, Homo sapiens
ctttccttcttctta

SEQ ID NO: 425445 - DNA, 15 bp, Homo sapiens
gctttccttcttctt

SEQ ID NO: 425446 - DNA, 15 bp, Homo sapiens
agctttccttcttct

SEQ ID NO: 425447 - DNA, 15 bp, Homo sapiens
tagctttccttcttc

SEQ ID NO: 425448 - DNA, 15 bp, Homo sapiens
ttagctttccttctt

SEQ ID NO: 425449 - DNA, 15 bp, Homo sapiens
cttagctttccttct

SEQ ID NO: 425450 - DNA, 15 bp, Homo sapiens
tcttagctttccttc

SEQ ID NO: 425451 - DNA, 15 bp, Homo sapiens
ctcttagctttcctt

SEQ ID NO: 425452 - DNA, 15 bp, Homo sapiens
cctcttagctttcct

SEQ ID NO: 425453 - DNA, 15 bp, Homo sapiens
acctcttagctttcc

SEQ ID NO: 425454 - DNA, 15 bp, Homo sapiens
gacctcttagctttc

SEQ ID NO: 425455 - DNA, 15 bp, Homo sapiens
tgacctcttagcttt

SEQ ID NO: 425456 - DNA, 15 bp, Homo sapiens
atgacctcttagctt

SEQ ID NO: 425457 - DNA, 15 bp, Homo sapiens
aatgacctcttagct

SEQ ID NO: 425458 - DNA, 15 bp, Homo sapiens
caatgacctcttagc

SEQ ID NO: 425459 - DNA, 15 bp, Homo sapiens
acaatgacctcttag

SEQ ID NO: 425460 - DNA, 15 bp, Homo sapiens
gacaatgacctctta

SEQ ID NO: 425461 - DNA, 15 bp, Homo sapiens
ggacaatgacctctt

SEQ ID NO: 425462 - DNA, 15 bp, Homo sapiens
aggacaatgacctct

SEQ ID NO: 425463 - DNA, 15 bp, Homo sapiens
gaggacaatgacctc

SEQ ID NO: 425464 - DNA, 15 bp, Homo sapiens
agaggacaatgacct

SEQ ID NO: 425465 - DNA, 15 bp, Homo sapiens
tagaggacaatgacc

SEQ ID NO: 425466 - DNA, 15 bp, Homo sapiens
ttagaggacaatgac

SEQ ID NO: 425467 - DNA, 15 bp, Homo sapiens
cttagaggacaatga

SEQ ID NO: 425468 - DNA, 15 bp, Homo sapiens
acttagaggacaatg

SEQ ID NO: 425469 - DNA, 15 bp, Homo sapiens
gacttagaggacaat

SEQ ID NO: 425470 - DNA, 15 bp, Homo sapiens
tgacttagaggacaa

SEQ ID NO: 425471 - DNA, 15 bp, Homo sapiens
ttgacttagaggaca

SEQ ID NO: 425472 - DNA, 15 bp, Homo sapiens
cttgacttagaggac

SEQ ID NO: 425473 - DNA, 15 bp, Homo sapiens
ccttgacttagagga

SEQ ID NO: 425474 - DNA, 15 bp, Homo sapiens
accttgacttagagg

SEQ ID NO: 425475 - DNA, 15 bp, Homo sapiens
aaccttgacttagag

SEQ ID NO: 425476 - DNA, 15 bp, Homo sapiens
caaccttgacttaga

SEQ ID NO: 425477 - DNA, 15 bp, Homo sapiens
gcaaccttgacttag

SEQ ID NO: 425478 - DNA, 15 bp, Homo sapiens
tgcaaccttgactta

SEQ ID NO: 425479 - DNA, 15 bp, Homo sapiens
ttgcaaccttgactt

SEQ ID NO: 425480 - DNA, 15 bp, Homo sapiens
tttgcaaccttgact

SEQ ID NO: 425481 - DNA, 15 bp, Homo sapiens
ctttgcaaccttgac

SEQ ID NO: 425482 - DNA, 15 bp, Homo sapiens
gctttgcaaccttga

SEQ ID NO: 425483 - DNA, 15 bp, Homo sapiens
tgctttgcaaccttg

SEQ ID NO: 425484 - DNA, 15 bp, Homo sapiens
atgctttgcaacctt

SEQ ID NO: 425485 - DNA, 15 bp, Homo sapiens
aatgctttgcaacct

SEQ ID NO: 425486 - DNA, 15 bp, Homo sapiens
aaatgctttgcaacc

SEQ ID NO: 425487 - DNA, 15 bp, Homo sapiens
taaatgctttgcaac

SEQ ID NO: 425488 - DNA, 15 bp, Homo sapiens
gtaaatgctttgcaa

SEQ ID NO: 425489 - DNA, 15 bp, Homo sapiens
tgtaaatgctttgca

SEQ ID NO: 425490 - DNA, 15 bp, Homo sapiens
ttgtaaatgctttgc

SEQ ID NO: 425491 - DNA, 15 bp, Homo sapiens
gttgtaaatgctttg

SEQ ID NO: 425492 - DNA, 15 bp, Homo sapiens
tgttgtaaatgcttt

SEQ ID NO: 425493 - DNA, 15 bp, Homo sapiens
atgttgtaaatgctt

SEQ ID NO: 425494 - DNA, 15 bp, Homo sapiens
aatgttgtaaatgct

SEQ ID NO: 425495 - DNA, 15 bp, Homo sapiens
aaatgttgtaaatgc

SEQ ID NO: 425496 - DNA, 15 bp, Homo sapiens
gaaatgttgtaaatg

SEQ ID NO: 425497 - DNA, 15 bp, Homo sapiens
agaaatgttgtaaat

SEQ ID NO: 425498 - DNA, 15 bp, Homo sapiens
gagaaatgttgtaaa

SEQ ID NO: 425499 - DNA, 15 bp, Homo sapiens
agagaaatgttgtaa

SEQ ID NO: 425500 - DNA, 15 bp, Homo sapiens
aagagaaatgttgta

SEQ ID NO: 425501 - DNA, 15 bp, Homo sapiens
aaagagaaatgttgt

SEQ ID NO: 425502 - DNA, 15 bp, Homo sapiens
taaagagaaatgttg

SEQ ID NO: 425503 - DNA, 15 bp, Homo sapiens
ataaagagaaatgtt

SEQ ID NO: 425504 - DNA, 15 bp, Homo sapiens
tataaagagaaatgt

SEQ ID NO: 425505 - DNA, 15 bp, Homo sapiens
ctataaagagaaatg

SEQ ID NO: 425506 - DNA, 15 bp, Homo sapiens
actataaagagaaat

SEQ ID NO: 425507 - DNA, 15 bp, Homo sapiens
tactataaagagaaa

SEQ ID NO: 425508 - DNA, 15 bp, Homo sapiens
ctactataaagagaa

SEQ ID NO: 425509 - DNA, 15 bp, Homo sapiens
tctactataaagaga

SEQ ID NO: 425510 - DNA, 15 bp, Homo sapiens
ttctactataaagag

SEQ ID NO: 425511 - DNA, 15 bp, Homo sapiens
cttctactataaaga

SEQ ID NO: 425512 - DNA, 15 bp, Homo sapiens
ccttctactataaag

SEQ ID NO: 425513 - DNA, 15 bp, Homo sapiens
tccttctactataaa

SEQ ID NO: 425514 - DNA, 15 bp, Homo sapiens
ttccttctactataa

SEQ ID NO: 425515 - DNA, 15 bp, Homo sapiens
tttccttctactata

SEQ ID NO: 425516 - DNA, 15 bp, Homo sapiens
atttccttctactat

SEQ ID NO: 425517 - DNA, 15 bp, Homo sapiens
catttccttctacta

SEQ ID NO: 425518 - DNA, 15 bp, Homo sapiens
tcatttccttctact

SEQ ID NO: 425519 - DNA, 15 bp, Homo sapiens
ctcatttccttctac

SEQ ID NO: 425520 - DNA, 15 bp, Homo sapiens
gctcatttccttcta

SEQ ID NO: 425521 - DNA, 15 bp, Homo sapiens
tgctcatttccttct

SEQ ID NO: 425522 - DNA, 15 bp, Homo sapiens
ttgctcatttccttc

SEQ ID NO: 425523 - DNA, 15 bp, Homo sapiens
gttgctcatttcctt

SEQ ID NO: 425524 - DNA, 15 bp, Homo sapiens
tgttgctcatttcct

SEQ ID NO: 425525 - DNA, 15 bp, Homo sapiens
ctgttgctcatttcc

SEQ ID NO: 425526 - DNA, 15 bp, Homo sapiens
actgttgctcatttc

SEQ ID NO: 425527 - DNA, 15 bp, Homo sapiens
tactgttgctcattt

SEQ ID NO: 425528 - DNA, 15 bp, Homo sapiens
atactgttgctcatt

SEQ ID NO: 425529 - DNA, 15 bp, Homo sapiens
gatactgttgctcat

SEQ ID NO: 425530 - DNA, 15 bp, Homo sapiens
tgatactgttgctca

SEQ ID NO: 425531 - DNA, 15 bp, Homo sapiens
ttgatactgttgctc

SEQ ID NO: 425532 - DNA, 15 bp, Homo sapiens
tttgatactgttgct

SEQ ID NO: 425533 - DNA, 15 bp, Homo sapiens
atttgatactgttgc

SEQ ID NO: 425534 - DNA, 15 bp, Homo sapiens
aatttgatactgttg

SEQ ID NO: 425535 - DNA, 15 bp, Homo sapiens
gaatttgatactgtt

SEQ ID NO: 425536 - DNA, 15 bp, Homo sapiens
tgaatttgatactgt

SEQ ID NO: 425537 - DNA, 15 bp, Homo sapiens
ctgaatttgatactg

SEQ ID NO: 425538 - DNA, 15 bp, Homo sapiens
gctgaatttgatact

SEQ ID NO: 425539 - DNA, 15 bp, Homo sapiens
tgctgaatttgatac

SEQ ID NO: 425540 - DNA, 15 bp, Homo sapiens
ttgctgaatttgata

SEQ ID NO: 425541 - DNA, 15 bp, Homo sapiens
cttgctgaatttgat

SEQ ID NO: 425542 - DNA, 15 bp, Homo sapiens
gcttgctgaatttga

SEQ ID NO: 425543 - DNA, 15 bp, Homo sapiens
agcttgctgaatttg

SEQ ID NO: 425544 - DNA, 15 bp, Homo sapiens
cagcttgctgaattt

SEQ ID NO: 425545 - DNA, 15 bp, Homo sapiens
tcagcttgctgaatt

SEQ ID NO: 425546 - DNA, 15 bp, Homo sapiens
ctcagcttgctgaat

SEQ ID NO: 425547 - DNA, 15 bp, Homo sapiens
tctcagcttgctgaa

SEQ ID NO: 425548 - DNA, 15 bp, Homo sapiens
ctctcagcttgctga

SEQ ID NO: 425549 - DNA, 15 bp, Homo sapiens
gctctcagcttgctg

SEQ ID NO: 425550 - DNA, 15 bp, Homo sapiens
agctctcagcttgct

SEQ ID NO: 425551 - DNA, 15 bp, Homo sapiens
aagctctcagcttgc

SEQ ID NO: 425552 - DNA, 15 bp, Homo sapiens
taagctctcagcttg

SEQ ID NO: 425553 - DNA, 15 bp, Homo sapiens
ttaagctctcagctt

SEQ ID NO: 425554 - DNA, 15 bp, Homo sapiens
cttaagctctcagct

SEQ ID NO: 425555 - DNA, 15 bp, Homo sapiens
acttaagctctcagc

SEQ ID NO: 425556 - DNA, 15 bp, Homo sapiens
tacttaagctctcag

SEQ ID NO: 425557 - DNA, 15 bp, Homo sapiens
ttacttaagctctca

SEQ ID NO: 425558 - DNA, 15 bp, Homo sapiens
tttacttaagctctc

SEQ ID NO: 425559 - DNA, 15 bp, Homo sapiens
atttacttaagctct

SEQ ID NO: 425560 - DNA, 15 bp, Homo sapiens
catttacttaagctc

SEQ ID NO: 425561 - DNA, 15 bp, Homo sapiens
acatttacttaagct

SEQ ID NO: 425562 - DNA, 15 bp, Homo sapiens
cacatttacttaagc

SEQ ID NO: 425563 - DNA, 15 bp, Homo sapiens
ccacatttacttaag

SEQ ID NO: 425564 - DNA, 15 bp, Homo sapiens
tccacatttacttaa

SEQ ID NO: 425565 - DNA, 15 bp, Homo sapiens
ctccacatttactta

SEQ ID NO: 425566 - DNA, 15 bp, Homo sapiens
tctccacatttactt

SEQ ID NO: 425567 - DNA, 15 bp, Homo sapiens
ctctccacatttact

SEQ ID NO: 425568 - DNA, 15 bp, Homo sapiens
tctctccacatttac

SEQ ID NO: 425569 - DNA, 15 bp, Homo sapiens
gtctctccacattta

SEQ ID NO: 425570 - DNA, 15 bp, Homo sapiens
tgtctctccacattt

SEQ ID NO: 425571 - DNA, 15 bp, Homo sapiens
ttgtctctccacatt

SEQ ID NO: 425572 - DNA, 15 bp, Homo sapiens
gttgtctctccacat

SEQ ID NO: 425573 - DNA, 15 bp, Homo sapiens
agttgtctctccaca

SEQ ID NO: 425574 - DNA, 15 bp, Homo sapiens
tagttgtctctccac

SEQ ID NO: 425575 - DNA, 15 bp, Homo sapiens
atagttgtctctcca

SEQ ID NO: 425576 - DNA, 15 bp, Homo sapiens
aatagttgtctctcc

SEQ ID NO: 425577 - DNA, 15 bp, Homo sapiens
taatagttgtctctc

SEQ ID NO: 425578 - DNA, 15 bp, Homo sapiens
ataatagttgtctct

SEQ ID NO: 425579 - DNA, 15 bp, Homo sapiens
tataatagttgtctc

SEQ ID NO: 425580 - DNA, 15 bp, Homo sapiens
atataatagttgtct

SEQ ID NO: 425581 - DNA, 15 bp, Homo sapiens
tatataatagttgtc

SEQ ID NO: 425582 - DNA, 15 bp, Homo sapiens
atatataatagttgt

SEQ ID NO: 425583 - DNA, 15 bp, Homo sapiens
tatatataatagttg

SEQ ID NO: 425584 - DNA, 15 bp, Homo sapiens
gtatatataatagtt

SEQ ID NO: 425585 - DNA, 15 bp, Homo sapiens
ggtatatataatagt

SEQ ID NO: 425586 - DNA, 15 bp, Homo sapiens
aggtatatataatag

SEQ ID NO: 425587 - DNA, 15 bp, Homo sapiens
caggtatatataata

SEQ ID NO: 425588 - DNA, 15 bp, Homo sapiens
gcaggtatatataat

SEQ ID NO: 425589 - DNA, 15 bp, Homo sapiens
agcaggtatatataa

SEQ ID NO: 425590 - DNA, 15 bp, Homo sapiens
cagcaggtatatata

SEQ ID NO: 425591 - DNA, 15 bp, Homo sapiens
ccagcaggtatatat

SEQ ID NO: 425592 - DNA, 15 bp, Homo sapiens
cccagcaggtatata

SEQ ID NO: 425593 - DNA, 15 bp, Homo sapiens
tcccagcaggtatat

SEQ ID NO: 425594 - DNA, 15 bp, Homo sapiens
ttcccagcaggtata

SEQ ID NO: 425595 - DNA, 15 bp, Homo sapiens
cttcccagcaggtat

SEQ ID NO: 425596 - DNA, 15 bp, Homo sapiens
acttcccagcaggta

SEQ ID NO: 425597 - DNA, 15 bp, Homo sapiens
gacttcccagcaggt

SEQ ID NO: 425598 - DNA, 15 bp, Homo sapiens
tgacttcccagcagg

SEQ ID NO: 425599 - DNA, 15 bp, Homo sapiens
atgacttcccagcag

SEQ ID NO: 425600 - DNA, 15 bp, Homo sapiens
tatgacttcccagca

SEQ ID NO: 425601 - DNA, 15 bp, Homo sapiens
ctatgacttcccagc

SEQ ID NO: 425602 - DNA, 15 bp, Homo sapiens
gctatgacttcccag

SEQ ID NO: 425603 - DNA, 15 bp, Homo sapiens
tgctatgacttccca

SEQ ID NO: 425604 - DNA, 15 bp, Homo sapiens
ttgctatgacttccc

SEQ ID NO: 425605 - DNA, 15 bp, Homo sapiens
gttgctatgacttcc

SEQ ID NO: 425606 - DNA, 15 bp, Homo sapiens
ggttgctatgacttc

SEQ ID NO: 425607 - DNA, 15 bp, Homo sapiens
aggttgctatgactt

SEQ ID NO: 425608 - DNA, 15 bp, Homo sapiens
aaggttgctatgact

SEQ ID NO: 425609 - DNA, 15 bp, Homo sapiens
taaggttgctatgac

SEQ ID NO: 425610 - DNA, 15 bp, Homo sapiens
ctaaggttgctatga

SEQ ID NO: 425611 - DNA, 15 bp, Homo sapiens
tctaaggttgctatg

SEQ ID NO: 425612 - DNA, 15 bp, Homo sapiens
ttctaaggttgctat

SEQ ID NO: 425613 - DNA, 15 bp, Homo sapiens
cttctaaggttgcta

SEQ ID NO: 425614 - DNA, 15 bp, Homo sapiens
tcttctaaggttgct

SEQ ID NO: 425615 - DNA, 15 bp, Homo sapiens
ctcttctaaggttgc

SEQ ID NO: 425616 - DNA, 15 bp, Homo sapiens
tctcttctaaggttg

SEQ ID NO: 425617 - DNA, 15 bp, Homo sapiens
ctctcttctaaggtt

SEQ ID NO: 425618 - DNA, 15 bp, Homo sapiens
gctctcttctaaggt

SEQ ID NO: 425619 - DNA, 15 bp, Homo sapiens
agctctcttctaagg

SEQ ID NO: 425620 - DNA, 15 bp, Homo sapiens
cagctctcttctaag

SEQ ID NO: 425621 - DNA, 15 bp, Homo sapiens
ccagctctcttctaa

SEQ ID NO: 425622 - DNA, 15 bp, Homo sapiens
accagctctcttcta

SEQ ID NO: 425623 - DNA, 15 bp, Homo sapiens
gaccagctctcttct

SEQ ID NO: 425624 - DNA, 15 bp, Homo sapiens
agaccagctctcttc

SEQ ID NO: 425625 - DNA, 15 bp, Homo sapiens
cagaccagctctctt

SEQ ID NO: 425626 - DNA, 15 bp, Homo sapiens
ccagaccagctctct

SEQ ID NO: 425627 - DNA, 15 bp, Homo sapiens
accagaccagctctc

SEQ ID NO: 425628 - DNA, 15 bp, Homo sapiens
caccagaccagctct

SEQ ID NO: 425629 - DNA, 15 bp, Homo sapiens
acaccagaccagctc

SEQ ID NO: 425630 - DNA, 15 bp, Homo sapiens
tacaccagaccagct

SEQ ID NO: 425631 - DNA, 15 bp, Homo sapiens
ctacaccagaccagc

SEQ ID NO: 425632 - DNA, 15 bp, Homo sapiens
actacaccagaccag

SEQ ID NO: 425633 - DNA, 15 bp, Homo sapiens
tactacaccagacca

SEQ ID NO: 425634 - DNA, 15 bp, Homo sapiens
gtactacaccagacc

SEQ ID NO: 425635 - DNA, 15 bp, Homo sapiens
tgtactacaccagac

SEQ ID NO: 425636 - DNA, 15 bp, Homo sapiens
ttgtactacaccaga

SEQ ID NO: 425637 - DNA, 15 bp, Homo sapiens
tttgtactacaccag

SEQ ID NO: 425638 - DNA, 15 bp, Homo sapiens
atttgtactacacca

SEQ ID NO: 425639 - DNA, 15 bp, Homo sapiens
catttgtactacacc

SEQ ID NO: 425640 - DNA, 15 bp, Homo sapiens
acatttgtactacac

SEQ ID NO: 425641 - DNA, 15 bp, Homo sapiens
aacatttgtactaca

SEQ ID NO: 425642 - DNA, 15 bp, Homo sapiens
caacatttgtactac

SEQ ID NO: 425643 - DNA, 15 bp, Homo sapiens
tcaacatttgtacta

SEQ ID NO: 425644 - DNA, 15 bp, Homo sapiens
atcaacatttgtact

SEQ ID NO: 425645 - DNA, 15 bp, Homo sapiens
aatcaacatttgtac

SEQ ID NO: 425646 - DNA, 15 bp, Homo sapiens
aaatcaacatttgta

SEQ ID NO: 425647 - DNA, 15 bp, Homo sapiens
caaatcaacatttgt

SEQ ID NO: 425648 - DNA, 15 bp, Homo sapiens
acaaatcaacatttg

SEQ ID NO: 425649 - DNA, 15 bp, Homo sapiens
aacaaatcaacattt

SEQ ID NO: 425650 - DNA, 15 bp, Homo sapiens
taacaaatcaacatt

SEQ ID NO: 425651 - DNA, 15 bp, Homo sapiens
ataacaaatcaacat

SEQ ID NO: 425652 - DNA, 15 bp, Homo sapiens
aataacaaatcaaca

SEQ ID NO: 425653 - DNA, 15 bp, Homo sapiens
gaataacaaatcaac

SEQ ID NO: 425654 - DNA, 15 bp, Homo sapiens
agaataacaaatcaa

SEQ ID NO: 425655 - DNA, 15 bp, Homo sapiens
cagaataacaaatca

SEQ ID NO: 425656 - DNA, 15 bp, Homo sapiens
tcagaataacaaatc

SEQ ID NO: 425657 - DNA, 15 bp, Homo sapiens
gtcagaataacaaat

SEQ ID NO: 425658 - DNA, 15 bp, Homo sapiens
agtcagaataacaaa

SEQ ID NO: 425659 - DNA, 15 bp, Homo sapiens
gagtcagaataacaa

SEQ ID NO: 425660 - DNA, 15 bp, Homo sapiens
agagtcagaataaca

SEQ ID NO: 425661 - DNA, 15 bp, Homo sapiens
aagagtcagaataac

SEQ ID NO: 425662 - DNA, 15 bp, Homo sapiens
gaagagtcagaataa

SEQ ID NO: 425663 - DNA, 15 bp, Homo sapiens
ggaagagtcagaata

SEQ ID NO: 425664 - DNA, 15 bp, Homo sapiens
tggaagagtcagaat

SEQ ID NO: 425665 - DNA, 15 bp, Homo sapiens
atggaagagtcagaa

SEQ ID NO: 425666 - DNA, 15 bp, Homo sapiens
catggaagagtcaga

SEQ ID NO: 425667 - DNA, 15 bp, Homo sapiens
ccatggaagagtcag

SEQ ID NO: 425668 - DNA, 15 bp, Homo sapiens
tccatggaagagtca

SEQ ID NO: 425669 - DNA, 15 bp, Homo sapiens
gtccatggaagagtc

SEQ ID NO: 425670 - DNA, 15 bp, Homo sapiens
agtccatggaagagt

SEQ ID NO: 425671 - DNA, 15 bp, Homo sapiens
cagtccatggaagag

SEQ ID NO: 425672 - DNA, 15 bp, Homo sapiens
gcagtccatggaaga

SEQ ID NO: 425673 - DNA, 15 bp, Homo sapiens
tgcagtccatggaag

SEQ ID NO: 425674 - DNA, 15 bp, Homo sapiens
gtgcagtccatggaa

SEQ ID NO: 425675 - DNA, 15 bp, Homo sapiens
agtgcagtccatgga

SEQ ID NO: 425676 - DNA, 15 bp, Homo sapiens
gagtgcagtccatgg

SEQ ID NO: 425677 - DNA, 15 bp, Homo sapiens
ggagtgcagtccatg

SEQ ID NO: 425678 - DNA, 15 bp, Homo sapiens
aggagtgcagtccat

SEQ ID NO: 425679 - DNA, 15 bp, Homo sapiens
aaggagtgcagtcca

SEQ ID NO: 425680 - DNA, 15 bp, Homo sapiens
taaggagtgcagtcc

SEQ ID NO: 425681 - DNA, 15 bp, Homo sapiens
ctaaggagtgcagtc

SEQ ID NO: 425682 - DNA, 15 bp, Homo sapiens
tctaaggagtgcagt

SEQ ID NO: 425683 - DNA, 15 bp, Homo sapiens
ttctaaggagtgcag

SEQ ID NO: 425684 - DNA, 15 bp, Homo sapiens
cttctaaggagtgca

SEQ ID NO: 425685 - DNA, 15 bp, Homo sapiens
gcttctaaggagtgc

SEQ ID NO: 425686 - DNA, 15 bp, Homo sapiens
tgcttctaaggagtg

SEQ ID NO: 425687 - DNA, 15 bp, Homo sapiens
ctgcttctaaggagt

SEQ ID NO: 425688 - DNA, 15 bp, Homo sapiens
cctgcttctaaggag

SEQ ID NO: 425689 - DNA, 15 bp, Homo sapiens
acctgcttctaagga

SEQ ID NO: 425690 - DNA, 15 bp, Homo sapiens
gacctgcttctaagg

SEQ ID NO: 425691 - DNA, 15 bp, Homo sapiens
agacctgcttctaag

SEQ ID NO: 425692 - DNA, 15 bp, Homo sapiens
cagacctgcttctaa

SEQ ID NO: 425693 - DNA, 15 bp, Homo sapiens
tcagacctgcttcta

SEQ ID NO: 425694 - DNA, 15 bp, Homo sapiens
ttcagacctgcttct

SEQ ID NO: 425695 - DNA, 15 bp, Homo sapiens
attcagacctgcttc

SEQ ID NO: 425696 - DNA, 15 bp, Homo sapiens
cattcagacctgctt

SEQ ID NO: 425697 - DNA, 15 bp, Homo sapiens
acattcagacctgct

SEQ ID NO: 425698 - DNA, 15 bp, Homo sapiens
aacattcagacctgc

SEQ ID NO: 425699 - DNA, 15 bp, Homo sapiens
aaacattcagacctg

SEQ ID NO: 425700 - DNA, 15 bp, Homo sapiens
aaaacattcagacct

SEQ ID NO: 425701 - DNA, 15 bp, Homo sapiens
caaaacattcagacc

SEQ ID NO: 425702 - DNA, 15 bp, Homo sapiens
ccaaaacattcagac

SEQ ID NO: 425703 - DNA, 15 bp, Homo sapiens
accaaaacattcaga

SEQ ID NO: 425704 - DNA, 15 bp, Homo sapiens
gaccaaaacattcag

SEQ ID NO: 425705 - DNA, 15 bp, Homo sapiens
ggaccaaaacattca

SEQ ID NO: 425706 - DNA, 15 bp, Homo sapiens
gggaccaaaacattc

SEQ ID NO: 425707 - DNA, 15 bp, Homo sapiens
ggggaccaaaacatt

SEQ ID NO: 425708 - DNA, 15 bp, Homo sapiens
tggggaccaaaacat

SEQ ID NO: 425709 - DNA, 15 bp, Homo sapiens
gtggggaccaaaaca

SEQ ID NO: 425710 - DNA, 15 bp, Homo sapiens
tgtggggaccaaaac

SEQ ID NO: 425711 - DNA, 15 bp, Homo sapiens
ctgtggggaccaaaa

SEQ ID NO: 425712 - DNA, 15 bp, Homo sapiens
actgtggggaccaaa

SEQ ID NO: 425713 - DNA, 15 bp, Homo sapiens
tactgtggggaccaa

SEQ ID NO: 425714 - DNA, 15 bp, Homo sapiens
gtactgtggggacca

SEQ ID NO: 425715 - DNA, 15 bp, Homo sapiens
ggtactgtggggacc

SEQ ID NO: 425716 - DNA, 15 bp, Homo sapiens
aggtactgtggggac

SEQ ID NO: 425717 - DNA, 15 bp, Homo sapiens
taggtactgtgggga

SEQ ID NO: 425718 - DNA, 15 bp, Homo sapiens
ctaggtactgtgggg

SEQ ID NO: 425719 - DNA, 15 bp, Homo sapiens
cctaggtactgtggg

SEQ ID NO: 425720 - DNA, 15 bp, Homo sapiens
tcctaggtactgtgg

SEQ ID NO: 425721 - DNA, 15 bp, Homo sapiens
gtcctaggtactgtg

SEQ ID NO: 425722 - DNA, 15 bp, Homo sapiens
tgtcctaggtactgt

SEQ ID NO: 425723 - DNA, 15 bp, Homo sapiens
ctgtcctaggtactg

SEQ ID NO: 425724 - DNA, 15 bp, Homo sapiens
actgtcctaggtact

SEQ ID NO: 425725 - DNA, 15 bp, Homo sapiens
cactgtcctaggtac

SEQ ID NO: 425726 - DNA, 15 bp, Homo sapiens
gcactgtcctaggta

SEQ ID NO: 425727 - DNA, 15 bp, Homo sapiens
ggcactgtcctaggt

SEQ ID NO: 425728 - DNA, 15 bp, Homo sapiens
aggcactgtcctagg

SEQ ID NO: 425729 - DNA, 15 bp, Homo sapiens
caggcactgtcctag

SEQ ID NO: 425730 - DNA, 15 bp, Homo sapiens
ccaggcactgtccta

SEQ ID NO: 425731 - DNA, 15 bp, Homo sapiens
tccaggcactgtcct

SEQ ID NO: 425732 - DNA, 15 bp, Homo sapiens
ttccaggcactgtcc

SEQ ID NO: 425733 - DNA, 15 bp, Homo sapiens
attccaggcactgtc

SEQ ID NO: 425734 - DNA, 15 bp, Homo sapiens
cattccaggcactgt

SEQ ID NO: 425735 - DNA, 15 bp, Homo sapiens
acattccaggcactg

SEQ ID NO: 425736 - DNA, 15 bp, Homo sapiens
tacattccaggcact

SEQ ID NO: 425737 - DNA, 15 bp, Homo sapiens
ttacattccaggcac

SEQ ID NO: 425738 - DNA, 15 bp, Homo sapiens
cttacattccaggca

SEQ ID NO: 425739 - DNA, 15 bp, Homo sapiens
tcttacattccaggc

SEQ ID NO: 425740 - DNA, 15 bp, Homo sapiens
ctcttacattccagg

SEQ ID NO: 425741 - DNA, 15 bp, Homo sapiens
cctcttacattccag

SEQ ID NO: 425742 - DNA, 15 bp, Homo sapiens
gcctcttacattcca

SEQ ID NO: 425743 - DNA, 15 bp, Homo sapiens
tgcctcttacattcc

SEQ ID NO: 425744 - DNA, 15 bp, Homo sapiens
gtgcctcttacattc

SEQ ID NO: 425745 - DNA, 15 bp, Homo sapiens
agtgcctcttacatt

SEQ ID NO: 425746 - DNA, 15 bp, Homo sapiens
aagtgcctcttacat

SEQ ID NO: 425747 - DNA, 15 bp, Homo sapiens
taagtgcctcttaca

SEQ ID NO: 425748 - DNA, 15 bp, Homo sapiens
ttaagtgcctcttac

SEQ ID NO: 425749 - DNA, 15 bp, Homo sapiens
attaagtgcctctta

SEQ ID NO: 425750 - DNA, 15 bp, Homo sapiens
tattaagtgcctctt

SEQ ID NO: 425751 - DNA, 15 bp, Homo sapiens
ttattaagtgcctct

SEQ ID NO: 425752 - DNA, 15 bp, Homo sapiens
tttattaagtgcctc

SEQ ID NO: 425753 - DNA, 15 bp, Homo sapiens
atttattaagtgcct

SEQ ID NO: 425754 - DNA, 15 bp, Homo sapiens
catttattaagtgcc

SEQ ID NO: 425755 - DNA, 15 bp, Homo sapiens
acatttattaagtgc

SEQ ID NO: 425756 - DNA, 15 bp, Homo sapiens
aacatttattaagtg

SEQ ID NO: 425757 - DNA, 15 bp, Homo sapiens
aaacatttattaagt

SEQ ID NO: 425758 - DNA, 15 bp, Homo sapiens
caaacatttattaag

SEQ ID NO: 425759 - DNA, 15 bp, Homo sapiens
ccaaacatttattaa

SEQ ID NO: 425760 - DNA, 15 bp, Homo sapiens
gccaaacatttatta

SEQ ID NO: 425761 - DNA, 15 bp, Homo sapiens
tgccaaacatttatt

SEQ ID NO: 425762 - DNA, 15 bp, Homo sapiens
ttgccaaacatttat

SEQ ID NO: 425763 - DNA, 15 bp, Homo sapiens
tttgccaaacattta

SEQ ID NO: 425764 - DNA, 15 bp, Homo sapiens
atttgccaaacattt

SEQ ID NO: 425765 - DNA, 15 bp, Homo sapiens
catttgccaaacatt

SEQ ID NO: 425766 - DNA, 15 bp, Homo sapiens
tcatttgccaaacat

SEQ ID NO: 425767 - DNA, 15 bp, Homo sapiens
ttcatttgccaaaca

SEQ ID NO: 425768 - DNA, 15 bp, Homo sapiens
attcatttgccaaac

SEQ ID NO: 425769 - DNA, 15 bp, Homo sapiens
cattcatttgccaaa

SEQ ID NO: 425770 - DNA, 15 bp, Homo sapiens
tcattcatttgccaa

SEQ ID NO: 425771 - DNA, 15 bp, Homo sapiens
ttcattcatttgcca

SEQ ID NO: 425772 - DNA, 15 bp, Homo sapiens
gttcattcatttgcc

SEQ ID NO: 425773 - DNA, 15 bp, Homo sapiens
agttcattcatttgc

SEQ ID NO: 425774 - DNA, 15 bp, Homo sapiens
tagttcattcatttg

SEQ ID NO: 425775 - DNA, 15 bp, Homo sapiens
ttagttcattcattt

SEQ ID NO: 425776 - DNA, 15 bp, Homo sapiens
tttagttcattcatt

SEQ ID NO: 425777 - DNA, 15 bp, Homo sapiens
ttttagttcattcat

SEQ ID NO: 425778 - DNA, 15 bp, Homo sapiens
gttttagttcattca

SEQ ID NO: 425779 - DNA, 15 bp, Homo sapiens
tgttttagttcattc

SEQ ID NO: 425780 - DNA, 15 bp, Homo sapiens
ttgttttagttcatt

SEQ ID NO: 425781 - DNA, 15 bp, Homo sapiens
tttgttttagttcat

SEQ ID NO: 425782 - DNA, 15 bp, Homo sapiens
ctttgttttagttca

SEQ ID NO: 425783 - DNA, 15 bp, Homo sapiens
actttgttttagttc

SEQ ID NO: 425784 - DNA, 15 bp, Homo sapiens
tactttgttttagtt

SEQ ID NO: 425785 - DNA, 15 bp, Homo sapiens
ttactttgttttagt

SEQ ID NO: 425786 - DNA, 15 bp, Homo sapiens
tttactttgttttag

SEQ ID NO: 425787 - DNA, 15 bp, Homo sapiens
ctttactttgtttta

SEQ ID NO: 425788 - DNA, 15 bp, Homo sapiens
actttactttgtttt

SEQ ID NO: 425789 - DNA, 15 bp, Homo sapiens
tactttactttgttt

SEQ ID NO: 425790 - DNA, 15 bp, Homo sapiens
atactttactttgtt

SEQ ID NO: 425791 - DNA, 15 bp, Homo sapiens
catactttactttgt

SEQ ID NO: 425792 - DNA, 15 bp, Homo sapiens
acatactttactttg

SEQ ID NO: 425793 - DNA, 15 bp, Homo sapiens
tacatactttacttt

SEQ ID NO: 425794 - DNA, 15 bp, Homo sapiens
ctacatactttactt

SEQ ID NO: 425795 - DNA, 15 bp, Homo sapiens
actacatactttact

SEQ ID NO: 425796 - DNA, 15 bp, Homo sapiens
aactacatactttac

SEQ ID NO: 425797 - DNA, 15 bp, Homo sapiens
caactacatacttta

SEQ ID NO: 425798 - DNA, 15 bp, Homo sapiens
tcaactacatacttt

SEQ ID NO: 425799 - DNA, 15 bp, Homo sapiens
atcaactacatactt

SEQ ID NO: 425800 - DNA, 15 bp, Homo sapiens
aatcaactacatact

SEQ ID NO: 425801 - DNA, 15 bp, Homo sapiens
aaatcaactacatac

SEQ ID NO: 425802 - DNA, 15 bp, Homo sapiens
caaatcaactacata

SEQ ID NO: 425803 - DNA, 15 bp, Homo sapiens
ccaaatcaactacat

SEQ ID NO: 425804 - DNA, 15 bp, Homo sapiens
tccaaatcaactaca

SEQ ID NO: 425805 - DNA, 15 bp, Homo sapiens
ctccaaatcaactac

SEQ ID NO: 425806 - DNA, 15 bp, Homo sapiens
cctccaaatcaacta

SEQ ID NO: 425807 - DNA, 15 bp, Homo sapiens
ccctccaaatcaact

SEQ ID NO: 425808 - DNA, 15 bp, Homo sapiens
tccctccaaatcaac

SEQ ID NO: 425809 - DNA, 15 bp, Homo sapiens
ttccctccaaatcaa

SEQ ID NO: 425810 - DNA, 15 bp, Homo sapiens
tttccctccaaatca

SEQ ID NO: 425811 - DNA, 15 bp, Homo sapiens
cttttccctccaaat

SEQ ID NO: 425812 - DNA, 15 bp, Homo sapiens
tcttttccctccaaa

SEQ ID NO: 425813 - DNA, 15 bp, Homo sapiens
atcttttccctccaa

SEQ ID NO: 425814 - DNA, 15 bp, Homo sapiens
gatcttttccctcca

SEQ ID NO: 425815 - DNA, 15 bp, Homo sapiens
ggatcttttccctcc

SEQ ID NO: 425816 - DNA, 15 bp, Homo sapiens
gggatcttttccctc

SEQ ID NO: 425817 - DNA, 15 bp, Homo sapiens
tgggatcttttccct

SEQ ID NO: 425818 - DNA, 15 bp, Homo sapiens
ttgggatcttttccc

SEQ ID NO: 425819 - DNA, 15 bp, Homo sapiens
attgggatcttttcc

SEQ ID NO: 425820 - DNA, 15 bp, Homo sapiens
cattgggatcttttc

SEQ ID NO: 425821 - DNA, 15 bp, Homo sapiens
tcattgggatctttt

SEQ ID NO: 425822 - DNA, 15 bp, Homo sapiens
gtcattgggatcttt

SEQ ID NO: 425823 - DNA, 15 bp, Homo sapiens
tgtcattgggatctt

SEQ ID NO: 425824 - DNA, 15 bp, Homo sapiens
atgtcattgggatct

SEQ ID NO: 425825 - DNA, 15 bp, Homo sapiens
aatgtcattgggatc

SEQ ID NO: 425826 - DNA, 15 bp, Homo sapiens
aaatgtcattgggat

SEQ ID NO: 425827 - DNA, 15 bp, Homo sapiens
taaatgtcattggga

SEQ ID NO: 425828 - DNA, 15 bp, Homo sapiens
ttaaatgtcattggg

SEQ ID NO: 425829 - DNA, 15 bp, Homo sapiens
tttaaatgtcattgg

SEQ ID NO: 425830 - DNA, 15 bp, Homo sapiens
ttttaaatgtcattg

SEQ ID NO: 425831 - DNA, 15 bp, Homo sapiens
gttttaaatgtcatt

SEQ ID NO: 425832 - DNA, 15 bp, Homo sapiens
agttttaaatgtcat

SEQ ID NO: 425833 - DNA, 15 bp, Homo sapiens
cagttttaaatgtca

SEQ ID NO: 425834 - DNA, 15 bp, Homo sapiens
gcagttttaaatgtc

SEQ ID NO: 425835 - DNA, 15 bp, Homo sapiens
agcagttttaaatgt

SEQ ID NO: 425836 - DNA, 15 bp, Homo sapiens
aagcagttttaaatg

SEQ ID NO: 425837 - DNA, 15 bp, Homo sapiens
caagcagttttaaat

SEQ ID NO: 425838 - DNA, 15 bp, Homo sapiens
acaagcagttttaaa

SEQ ID NO: 425839 - DNA, 15 bp, Homo sapiens
tacaagcagttttaa

SEQ ID NO: 425840 - DNA, 15 bp, Homo sapiens
ttacaagcagtttta

SEQ ID NO: 425841 - DNA, 15 bp, Homo sapiens
attacaagcagtttt

SEQ ID NO: 425842 - DNA, 15 bp, Homo sapiens
tattacaagcagttt

SEQ ID NO: 425843 - DNA, 15 bp, Homo sapiens
ttattacaagcagtt

SEQ ID NO: 425844 - DNA, 15 bp, Homo sapiens
cttattacaagcagt

SEQ ID NO: 425845 - DNA, 15 bp, Homo sapiens
tcttattacaagcag

SEQ ID NO: 425846 - DNA, 15 bp, Homo sapiens
atcttattacaagca

SEQ ID NO: 425847 - DNA, 15 bp, Homo sapiens
catcttattacaagc

SEQ ID NO: 425848 - DNA, 15 bp, Homo sapiens
gcatcttattacaag

SEQ ID NO: 425849 - DNA, 15 bp, Homo sapiens
tgcatcttattacaa

SEQ ID NO: 425850 - DNA, 15 bp, Homo sapiens
gtgcatcttattaca

SEQ ID NO: 425851 - DNA, 15 bp, Homo sapiens
ggtgcatcttattac

SEQ ID NO: 425852 - DNA, 15 bp, Homo sapiens
tggtgcatcttatta

SEQ ID NO: 425853 - DNA, 15 bp, Homo sapiens
ttggtgcatcttatt

SEQ ID NO: 425854 - DNA, 15 bp, Homo sapiens
attggtgcatcttat

SEQ ID NO: 425855 - DNA, 15 bp, Homo sapiens
tattggtgcatctta

SEQ ID NO: 425856 - DNA, 15 bp, Homo sapiens
atattggtgcatctt

SEQ ID NO: 425857 - DNA, 15 bp, Homo sapiens
aatattggtgcatct

SEQ ID NO: 425858 - DNA, 15 bp, Homo sapiens
aaatattggtgcatc

SEQ ID NO: 425859 - DNA, 15 bp, Homo sapiens
gaaatattggtgcat

SEQ ID NO: 425860 - DNA, 15 bp, Homo sapiens
ggaaatattggtgca

SEQ ID NO: 425861 - DNA, 15 bp, Homo sapiens
aggaaatattggtgc

SEQ ID NO: 425862 - DNA, 15 bp, Homo sapiens
aaggaaatattggtg

SEQ ID NO: 425863 - DNA, 15 bp, Homo sapiens
taaggaaatattggt

SEQ ID NO: 425864 - DNA, 15 bp, Homo sapiens
ttaaggaaatattgg

SEQ ID NO: 425865 - DNA, 15 bp, Homo sapiens
attaaggaaatattg

SEQ ID NO: 425866 - DNA, 15 bp, Homo sapiens
aattaaggaaatatt

SEQ ID NO: 425867 - DNA, 15 bp, Homo sapiens
taattaaggaaatat

SEQ ID NO: 425868 - DNA, 15 bp, Homo sapiens
ttaattaaggaaata

SEQ ID NO: 425869 - DNA, 15 bp, Homo sapiens
tttaattaaggaaat

SEQ ID NO: 425870 - DNA, 15 bp, Homo sapiens
atttaattaaggaaa

SEQ ID NO: 425871 - DNA, 15 bp, Homo sapiens
gatttaattaaggaa

SEQ ID NO: 425872 - DNA, 15 bp, Homo sapiens
ggatttaattaagga

SEQ ID NO: 425873 - DNA, 15 bp, Homo sapiens
gggatttaattaagg

SEQ ID NO: 425874 - DNA, 15 bp, Homo sapiens
agggatttaattaag

SEQ ID NO: 425875 - DNA, 15 bp, Homo sapiens
tagggatttaattaa

SEQ ID NO: 425876 - DNA, 15 bp, Homo sapiens
ttagggatttaatta

SEQ ID NO: 425877 - DNA, 15 bp, Homo sapiens
cttagggatttaatt

SEQ ID NO: 425878 - DNA, 15 bp, Homo sapiens
acttagggatttaat

SEQ ID NO: 425879 - DNA, 15 bp, Homo sapiens
gacttagggatttaa

SEQ ID NO: 425880 - DNA, 15 bp, Homo sapiens
agacttagggattta

SEQ ID NO: 425881 - DNA, 15 bp, Homo sapiens
tagacttagggattt

SEQ ID NO: 425882 - DNA, 15 bp, Homo sapiens
ttagacttagggatt

SEQ ID NO: 425883 - DNA, 15 bp, Homo sapiens
tttagacttagggat

SEQ ID NO: 425884 - DNA, 15 bp, Homo sapiens
ttttagacttaggga

SEQ ID NO: 425885 - DNA, 15 bp, Homo sapiens
attttagacttaggg

SEQ ID NO: 425886 - DNA, 15 bp, Homo sapiens
aattttagacttagg

SEQ ID NO: 425887 - DNA, 15 bp, Homo sapiens
taattttagacttag

SEQ ID NO: 425888 - DNA, 15 bp, Homo sapiens
ataattttagactta

SEQ ID NO: 425889 - DNA, 15 bp, Homo sapiens
gataattttagactt

SEQ ID NO: 425890 - DNA, 15 bp, Homo sapiens
tgataattttagact

SEQ ID NO: 425891 - DNA, 15 bp, Homo sapiens
gtgataattttagac

SEQ ID NO: 425892 - DNA, 15 bp, Homo sapiens
ggtgataattttaga

SEQ ID NO: 425893 - DNA, 15 bp, Homo sapiens
tggtgataattttag

SEQ ID NO: 425894 - DNA, 15 bp, Homo sapiens
atggtgataatttta

SEQ ID NO: 425895 - DNA, 15 bp, Homo sapiens
tatggtgataatttt

SEQ ID NO: 425896 - DNA, 15 bp, Homo sapiens
atatggtgataattt

SEQ ID NO: 425897 - DNA, 15 bp, Homo sapiens
tatatggtgataatt

SEQ ID NO: 425898 - DNA, 15 bp, Homo sapiens
atatatggtgataat

SEQ ID NO: 425899 - DNA, 15 bp, Homo sapiens
aatatatggtgataa

SEQ ID NO: 425900 - DNA, 15 bp, Homo sapiens
aaatatatggtgata

SEQ ID NO: 425901 - DNA, 15 bp, Homo sapiens
caaatatatggtgat

SEQ ID NO: 425902 - DNA, 15 bp, Homo sapiens
ccaaatatatggtga

SEQ ID NO: 425903 - DNA, 15 bp, Homo sapiens
gccaaatatatggtg

SEQ ID NO: 425904 - DNA, 15 bp, Homo sapiens
agccaaatatatggt

SEQ ID NO: 425905 - DNA, 15 bp, Homo sapiens
aagccaaatatatgg

SEQ ID NO: 425906 - DNA, 15 bp, Homo sapiens
gaagccaaatatatg

SEQ ID NO: 425907 - DNA, 15 bp, Homo sapiens
agaagccaaatatat

SEQ ID NO: 425908 - DNA, 15 bp, Homo sapiens
aagaagccaaatata

SEQ ID NO: 425909 - DNA, 15 bp, Homo sapiens
gaagaagccaaatat

SEQ ID NO: 425910 - DNA, 15 bp, Homo sapiens
ggaagaagccaaata

SEQ ID NO: 425911 - DNA, 15 bp, Homo sapiens
gggaagaagccaaat

SEQ ID NO: 425912 - DNA, 15 bp, Homo sapiens
ggggaagaagccaaa

SEQ ID NO: 425913 - DNA, 15 bp, Homo sapiens
tggggaagaagccaa

SEQ ID NO: 425914 - DNA, 15 bp, Homo sapiens
ttggggaagaagcca

SEQ ID NO: 425915 - DNA, 15 bp, Homo sapiens
tttggggaagaagcc

SEQ ID NO: 425916 - DNA, 15 bp, Homo sapiens
ctttggggaagaagc

SEQ ID NO: 425917 - DNA, 15 bp, Homo sapiens
cctttggggaagaag

SEQ ID NO: 425918 - DNA, 15 bp, Homo sapiens
gcctttggggaagaa

SEQ ID NO: 425919 - DNA, 15 bp, Homo sapiens
ggcctttggggaaga

SEQ ID NO: 425920 - DNA, 15 bp, Homo sapiens
gggcctttggggaag

SEQ ID NO: 425921 - DNA, 15 bp, Homo sapiens
agggcctttggggaa

SEQ ID NO: 425922 - DNA, 15 bp, Homo sapiens
cagggcctttgggga

SEQ ID NO: 425923 - DNA, 15 bp, Homo sapiens
tcagggcctttgggg

SEQ ID NO: 425924 - DNA, 15 bp, Homo sapiens
ttcagggcctttggg

SEQ ID NO: 425925 - DNA, 15 bp, Homo sapiens
cttcagggcctttgg

SEQ ID NO: 425926 - DNA, 15 bp, Homo sapiens
gcttcagggcctttg

SEQ ID NO: 425927 - DNA, 15 bp, Homo sapiens
ggcttcagggccttt

SEQ ID NO: 425928 - DNA, 15 bp, Homo sapiens
tggcttcagggcctt

SEQ ID NO: 425929 - DNA, 15 bp, Homo sapiens
ttggcttcagggcct

SEQ ID NO: 425930 - DNA, 15 bp, Homo sapiens
tttggcttcagggcc

SEQ ID NO: 425931 - DNA, 15 bp, Homo sapiens
ttttggcttcagggc

SEQ ID NO: 425932 - DNA, 15 bp, Homo sapiens
gttttggcttcaggg

SEQ ID NO: 425933 - DNA, 15 bp, Homo sapiens
tgttttggcttcagg

SEQ ID NO: 425934 - DNA, 15 bp, Homo sapiens
ttgttttggcttcag

SEQ ID NO: 425935 - DNA, 15 bp, Homo sapiens
gttgttttggcttca

SEQ ID NO: 425936 - DNA, 15 bp, Homo sapiens
agttgttttggcttc

SEQ ID NO: 425937 - DNA, 15 bp, Homo sapiens
gagttgttttggctt

SEQ ID NO: 425938 - DNA, 15 bp, Homo sapiens
tgagttgttttggct

SEQ ID NO: 425939 - DNA, 15 bp, Homo sapiens
ctgagttgttttggc

SEQ ID NO: 425940 - DNA, 15 bp, Homo sapiens
actgagttgttttgg

SEQ ID NO: 425941 - DNA, 15 bp, Homo sapiens
aactgagttgttttg

SEQ ID NO: 425942 - DNA, 15 bp, Homo sapiens
gaactgagttgtttt

SEQ ID NO: 425943 - DNA, 15 bp, Homo sapiens
ggaactgagttgttt

SEQ ID NO: 425944 - DNA, 15 bp, Homo sapiens
aggaactgagttgtt

SEQ ID NO: 425945 - DNA, 15 bp, Homo sapiens
taggaactgagttgt

SEQ ID NO: 425946 - DNA, 15 bp, Homo sapiens
ttaggaactgagttg

SEQ ID NO: 425947 - DNA, 15 bp, Homo sapiens
cttaggaactgagtt

SEQ ID NO: 425948 - DNA, 15 bp, Homo sapiens
ccttaggaactgagt

SEQ ID NO: 425949 - DNA, 15 bp, Homo sapiens
tccttaggaactgag

SEQ ID NO: 425950 - DNA, 15 bp, Homo sapiens
ctccttaggaactga

SEQ ID NO: 425951 - DNA, 15 bp, Homo sapiens
tctccttaggaactg

SEQ ID NO: 425952 - DNA, 15 bp, Homo sapiens
ttctccttaggaact

SEQ ID NO: 425953 - DNA, 15 bp, Homo sapiens
attctccttaggaac

SEQ ID NO: 425954 - DNA, 15 bp, Homo sapiens
tattctccttaggaa

SEQ ID NO: 425955 - DNA, 15 bp, Homo sapiens
atattctccttagga

SEQ ID NO: 425956 - DNA, 15 bp, Homo sapiens
tatattctccttagg

SEQ ID NO: 425957 - DNA, 15 bp, Homo sapiens
atatattctccttag

SEQ ID NO: 425958 - DNA, 15 bp, Homo sapiens
tatatattctcctta

SEQ ID NO: 425959 - DNA, 15 bp, Homo sapiens
ttatatattctcctt

SEQ ID NO: 425960 - DNA, 15 bp, Homo sapiens
attatatattctcct

SEQ ID NO: 425961 - DNA, 15 bp, Homo sapiens
gattatatattctcc

SEQ ID NO: 425962 - DNA, 15 bp, Homo sapiens
agattatatattctc

SEQ ID NO: 425963 - DNA, 15 bp, Homo sapiens
cagattatatattct

SEQ ID NO: 425964 - DNA, 15 bp, Homo sapiens
gcagattatatattc

SEQ ID NO: 425965 - DNA, 15 bp, Homo sapiens
ggcagattatatatt

SEQ ID NO: 425966 - DNA, 15 bp, Homo sapiens
tggcagattatatat

SEQ ID NO: 425967 - DNA, 15 bp, Homo sapiens
gtggcagattatata

SEQ ID NO: 425968 - DNA, 15 bp, Homo sapiens
ggtggcagattatat

SEQ ID NO: 425969 - DNA, 15 bp, Homo sapiens
aggtggcagattata

SEQ ID NO: 425970 - DNA, 15 bp, Homo sapiens
taggtggcagattat

SEQ ID NO: 425971 - DNA, 15 bp, Homo sapiens
gtaggtggcagatta

SEQ ID NO: 425972 - DNA, 15 bp, Homo sapiens
tgtaggtggcagatt

SEQ ID NO: 425973 - DNA, 15 bp, Homo sapiens
ttgtaggtggcagat

SEQ ID NO: 425974 - DNA, 15 bp, Homo sapiens
tttgtaggtggcaga

SEQ ID NO: 425975 - DNA, 15 bp, Homo sapiens
ctttgtaggtggcag

SEQ ID NO: 425976 - DNA, 15 bp, Homo sapiens
tctttgtaggtggca

SEQ ID NO: 425977 - DNA, 15 bp, Homo sapiens
atctttgtaggtggc

SEQ ID NO: 425978 - DNA, 15 bp, Homo sapiens
tatctttgtaggtgg

SEQ ID NO: 425979 - DNA, 15 bp, Homo sapiens
ttatctttgtaggtg

SEQ ID NO: 425980 - DNA, 15 bp, Homo sapiens
tttatctttgtaggt

SEQ ID NO: 425981 - DNA, 15 bp, Homo sapiens
ctttatctttgtagg

SEQ ID NO: 425982 - DNA, 15 bp, Homo sapiens
actttatctttgtag

SEQ ID NO: 425983 - DNA, 15 bp, Homo sapiens
gactttatctttgta

SEQ ID NO: 425984 - DNA, 15 bp, Homo sapiens
agactttatctttgt

SEQ ID NO: 425985 - DNA, 15 bp, Homo sapiens
gagactttatctttg

SEQ ID NO: 425986 - DNA, 15 bp, Homo sapiens
tgagactttatcttt

SEQ ID NO: 425987 - DNA, 15 bp, Homo sapiens
ttgagactttatctt

SEQ ID NO: 425988 - DNA, 15 bp, Homo sapiens
tttgagactttatct

SEQ ID NO: 425989 - DNA, 15 bp, Homo sapiens
gtttgagactttatc

SEQ ID NO: 425990 - DNA, 15 bp, Homo sapiens
tgtttgagactttat

SEQ ID NO: 425991 - DNA, 15 bp, Homo sapiens
atgtttgagacttta

SEQ ID NO: 425992 - DNA, 15 bp, Homo sapiens
tatgtttgagacttt

SEQ ID NO: 425993 - DNA, 15 bp, Homo sapiens
ttatgtttgagactt

SEQ ID NO: 425994 - DNA, 15 bp, Homo sapiens
cttatgtttgagact

SEQ ID NO: 425995 - DNA, 15 bp, Homo sapiens
tcttatgtttgagac

SEQ ID NO: 425996 - DNA, 15 bp, Homo sapiens
ttcttatgtttgaga

SEQ ID NO: 425997 - DNA, 15 bp, Homo sapiens
cttcttatgtttgag

SEQ ID NO: 425998 - DNA, 15 bp, Homo sapiens
gcttcttatgtttga

SEQ ID NO: 425999 - DNA, 15 bp, Homo sapiens
tgcttcttatgtttg

SEQ ID NO: 426000 - DNA, 15 bp, Homo sapiens
ttgcttcttatgttt

SEQ ID NO: 426001 - DNA, 15 bp, Homo sapiens
gttgcttcttatgtt

SEQ ID NO: 426002 - DNA, 15 bp, Homo sapiens
ggttgcttcttatgt

SEQ ID NO: 426003 - DNA, 15 bp, Homo sapiens
gggttgcttcttatg

SEQ ID NO: 426004 - DNA, 15 bp, Homo sapiens
agggttgcttcttat

SEQ ID NO: 426005 - DNA, 15 bp, Homo sapiens
tagggttgcttctta

SEQ ID NO: 426006 - DNA, 15 bp, Homo sapiens
ttagggttgcttctt

SEQ ID NO: 426007 - DNA, 15 bp, Homo sapiens
tttagggttgcttct

SEQ ID NO: 426008 - DNA, 15 bp, Homo sapiens
atttagggttgcttc

SEQ ID NO: 426009 - DNA, 15 bp, Homo sapiens
aatttagggttgctt

SEQ ID NO: 426010 - DNA, 15 bp, Homo sapiens
aaatttagggttgct

SEQ ID NO: 426011 - DNA, 15 bp, Homo sapiens
gaaatttagggttgc

SEQ ID NO: 426012 - DNA, 15 bp, Homo sapiens
agaaatttagggttg

SEQ ID NO: 426013 - DNA, 15 bp, Homo sapiens
cagaaatttagggtt

SEQ ID NO: 426014 - DNA, 15 bp, Homo sapiens
acagaaatttagggt

SEQ ID NO: 426015 - DNA, 15 bp, Homo sapiens
cacagaaatttaggg

SEQ ID NO: 426016 - DNA, 15 bp, Homo sapiens
gcacagaaatttagg

SEQ ID NO: 426017 - DNA, 15 bp, Homo sapiens
agcacagaaatttag

SEQ ID NO: 426018 - DNA, 15 bp, Homo sapiens
aagcacagaaattta

SEQ ID NO: 426019 - DNA, 15 bp, Homo sapiens
taagcacagaaattt

SEQ ID NO: 426020 - DNA, 15 bp, Homo sapiens
ctaagcacagaaatt

SEQ ID NO: 426021 - DNA, 15 bp, Homo sapiens
tctaagcacagaaat

SEQ ID NO: 426022 - DNA, 15 bp, Homo sapiens
ctctaagcacagaaa

SEQ ID NO: 426023 - DNA, 15 bp, Homo sapiens
actctaagcacagaa

SEQ ID NO: 426024 - DNA, 15 bp, Homo sapiens
cactctaagcacaga

SEQ ID NO: 426025 - DNA, 15 bp, Homo sapiens
tcactctaagcacag

SEQ ID NO: 426026 - DNA, 15 bp, Homo sapiens
gtcactctaagcaca

SEQ ID NO: 426027 - DNA, 15 bp, Homo sapiens
ggtcactctaagcac

SEQ ID NO: 426028 - DNA, 15 bp, Homo sapiens
aggtcactctaagca

SEQ ID NO: 426029 - DNA, 15 bp, Homo sapiens
aaggtcactctaagc

SEQ ID NO: 426030 - DNA, 15 bp, Homo sapiens
aaaggtcactctaag

SEQ ID NO: 426031 - DNA, 15 bp, Homo sapiens
aaaaggtcactctaa

SEQ ID NO: 426032 - DNA, 15 bp, Homo sapiens
caaaaggtcactcta

SEQ ID NO: 426033 - DNA, 15 bp, Homo sapiens
tcaaaaggtcactct

SEQ ID NO: 426034 - DNA, 15 bp, Homo sapiens
ctcaaaaggtcactc

SEQ ID NO: 426035 - DNA, 15 bp, Homo sapiens
actcaaaaggtcact

SEQ ID NO: 426036 - DNA, 15 bp, Homo sapiens
aactcaaaaggtcac

SEQ ID NO: 426037 - DNA, 15 bp, Homo sapiens
caactcaaaaggtca

SEQ ID NO: 426038 - DNA, 15 bp, Homo sapiens
gcaactcaaaaggtc

SEQ ID NO: 426039 - DNA, 15 bp, Homo sapiens
ggcaactcaaaaggt

SEQ ID NO: 426040 - DNA, 15 bp, Homo sapiens
tggcaactcaaaagg

SEQ ID NO: 426041 - DNA, 15 bp, Homo sapiens
ctggcaactcaaaag

SEQ ID NO: 426042 - DNA, 15 bp, Homo sapiens
tctggcaactcaaaa

SEQ ID NO: 426043 - DNA, 15 bp, Homo sapiens
ctctggcaactcaaa

SEQ ID NO: 426044 - DNA, 15 bp, Homo sapiens
actctggcaactcaa

SEQ ID NO: 426045 - DNA, 15 bp, Homo sapiens
cactctggcaactca

SEQ ID NO: 426046 - DNA, 15 bp, Homo sapiens
tcactctggcaactc

SEQ ID NO: 426047 - DNA, 15 bp, Homo sapiens
atcactctggcaact

SEQ ID NO: 426048 - DNA, 15 bp, Homo sapiens
catcactctggcaac

SEQ ID NO: 426049 - DNA, 15 bp, Homo sapiens
acatcactctggcaa

SEQ ID NO: 426050 - DNA, 15 bp, Homo sapiens
gacatcactctggca

SEQ ID NO: 426051 - DNA, 15 bp, Homo sapiens
tgacatcactctggc

SEQ ID NO: 426052 - DNA, 15 bp, Homo sapiens
atgacatcactctgg

SEQ ID NO: 426053 - DNA, 15 bp, Homo sapiens
aatgacatcactctg

SEQ ID NO: 426054 - DNA, 15 bp, Homo sapiens
taatgacatcactct

SEQ ID NO: 426055 - DNA, 15 bp, Homo sapiens
ctaatgacatcactc

SEQ ID NO: 426056 - DNA, 15 bp, Homo sapiens
actaatgacatcact

SEQ ID NO: 426057 - DNA, 15 bp, Homo sapiens
cactaatgacatcac

SEQ ID NO: 426058 - DNA, 15 bp, Homo sapiens
acactaatgacatca

SEQ ID NO: 426059 - DNA, 15 bp, Homo sapiens
aacactaatgacatc

SEQ ID NO: 426060 - DNA, 15 bp, Homo sapiens
taacactaatgacat

SEQ ID NO: 426061 - DNA, 15 bp, Homo sapiens
gtaacactaatgaca

SEQ ID NO: 426062 - DNA, 15 bp, Homo sapiens
tgtaacactaatgac

SEQ ID NO: 426063 - DNA, 15 bp, Homo sapiens
ctgtaacactaatga

SEQ ID NO: 426064 - DNA, 15 bp, Homo sapiens
actgtaacactaatg

SEQ ID NO: 426065 - DNA, 15 bp, Homo sapiens
aactgtaacactaat

SEQ ID NO: 426066 - DNA, 15 bp, Homo sapiens
aaactgtaacactaa

SEQ ID NO: 426067 - DNA, 15 bp, Homo sapiens
aaaactgtaacacta

SEQ ID NO: 426068 - DNA, 15 bp, Homo sapiens
gaaaactgtaacact

SEQ ID NO: 426069 - DNA, 15 bp, Homo sapiens
cagaaaactgtaaca

SEQ ID NO: 426070 - DNA, 15 bp, Homo sapiens
gcagaaaactgtaac

SEQ ID NO: 426071 - DNA, 15 bp, Homo sapiens
tgcagaaaactgtaa

SEQ ID NO: 426072 - DNA, 15 bp, Homo sapiens
ttgcagaaaactgta

SEQ ID NO: 426073 - DNA, 15 bp, Homo sapiens
cttgcagaaaactgt

SEQ ID NO: 426074 - DNA, 15 bp, Homo sapiens
ccttgcagaaaactg

SEQ ID NO: 426075 - DNA, 15 bp, Homo sapiens
accttgcagaaaact

SEQ ID NO: 426076 - DNA, 15 bp, Homo sapiens
aaccttgcagaaaac

SEQ ID NO: 426077 - DNA, 15 bp, Homo sapiens
taaccttgcagaaaa

SEQ ID NO: 426078 - DNA, 15 bp, Homo sapiens
ctaaccttgcagaaa

SEQ ID NO: 426079 - DNA, 15 bp, Homo sapiens
cctaaccttgcagaa

SEQ ID NO: 426080 - DNA, 15 bp, Homo sapiens
gcctaaccttgcaga

SEQ ID NO: 426081 - DNA, 15 bp, Homo sapiens
tgcctaaccttgcag

SEQ ID NO: 426082 - DNA, 15 bp, Homo sapiens
atgcctaaccttgca

SEQ ID NO: 426083 - DNA, 15 bp, Homo sapiens
tatgcctaaccttgc

SEQ ID NO: 426084 - DNA, 15 bp, Homo sapiens
atatgcctaaccttg

SEQ ID NO: 426085 - DNA, 15 bp, Homo sapiens
tatatgcctaacctt

SEQ ID NO: 426086 - DNA, 15 bp, Homo sapiens
ttatatgcctaacct

SEQ ID NO: 426087 - DNA, 15 bp, Homo sapiens
cttatatgcctaacc

SEQ ID NO: 426088 - DNA, 15 bp, Homo sapiens
acttatatgcctaac

SEQ ID NO: 426089 - DNA, 15 bp, Homo sapiens
tacttatatgcctaa

SEQ ID NO: 426090 - DNA, 15 bp, Homo sapiens
atacttatatgccta

SEQ ID NO: 426091 - DNA, 15 bp, Homo sapiens
catacttatatgcct

SEQ ID NO: 426092 - DNA, 15 bp, Homo sapiens
acatacttatatgcc

SEQ ID NO: 426093 - DNA, 15 bp, Homo sapiens
cacatacttatatgc

SEQ ID NO: 426094 - DNA, 15 bp, Homo sapiens
acacatacttatatg

SEQ ID NO: 426095 - DNA, 15 bp, Homo sapiens
aacacatacttatat

SEQ ID NO: 426096 - DNA, 15 bp, Homo sapiens
taacacatacttata

SEQ ID NO: 426097 - DNA, 15 bp, Homo sapiens
ttaacacatacttat

SEQ ID NO: 426098 - DNA, 15 bp, Homo sapiens
tttaacacatactta

SEQ ID NO: 426099 - DNA, 15 bp, Homo sapiens
atttaacacatactt

SEQ ID NO: 426100 - DNA, 15 bp, Homo sapiens
tatttaacacatact

SEQ ID NO: 426101 - DNA, 15 bp, Homo sapiens
ctatttaacacatac

SEQ ID NO: 426102 - DNA, 15 bp, Homo sapiens
actatttaacacata

SEQ ID NO: 426103 - DNA, 15 bp, Homo sapiens
aactatttaacacat

SEQ ID NO: 426104 - DNA, 15 bp, Homo sapiens
gaactatttaacaca

SEQ ID NO: 426105 - DNA, 15 bp, Homo sapiens
ggaactatttaacac

SEQ ID NO: 426106 - DNA, 15 bp, Homo sapiens
tggaactatttaaca

SEQ ID NO: 426107 - DNA, 15 bp, Homo sapiens
atggaactatttaac

SEQ ID NO: 426108 - DNA, 15 bp, Homo sapiens
catggaactatttaa

SEQ ID NO: 426109 - DNA, 15 bp, Homo sapiens
ccatggaactattta

SEQ ID NO: 426110 - DNA, 15 bp, Homo sapiens
cccatggaactattt

SEQ ID NO: 426111 - DNA, 15 bp, Homo sapiens
gcccatggaactatt

SEQ ID NO: 426112 - DNA, 15 bp, Homo sapiens
agcccatggaactat

SEQ ID NO: 426113 - DNA, 15 bp, Homo sapiens
gagcccatggaacta

SEQ ID NO: 426114 - DNA, 15 bp, Homo sapiens
ggagcccatggaact

SEQ ID NO: 426115 - DNA, 15 bp, Homo sapiens
aggagcccatggaac

SEQ ID NO: 426116 - DNA, 15 bp, Homo sapiens
caggagcccatggaa

SEQ ID NO: 426117 - DNA, 15 bp, Homo sapiens
gcaggagcccatgga

SEQ ID NO: 426118 - DNA, 15 bp, Homo sapiens
agcaggagcccatgg

SEQ ID NO: 426119 - DNA, 15 bp, Homo sapiens
aagcaggagcccatg

SEQ ID NO: 426120 - DNA, 15 bp, Homo sapiens
caagcaggagcccat

SEQ ID NO: 426121 - DNA, 15 bp, Homo sapiens
gcaagcaggagccca

SEQ ID NO: 426122 - DNA, 15 bp, Homo sapiens
agcaagcaggagccc

SEQ ID NO: 426123 - DNA, 15 bp, Homo sapiens
gagcaagcaggagcc

SEQ ID NO: 426124 - DNA, 15 bp, Homo sapiens
tgagcaagcaggagc

SEQ ID NO: 426125 - DNA, 15 bp, Homo sapiens
atgagcaagcaggag

SEQ ID NO: 426126 - DNA, 15 bp, Homo sapiens
aatgagcaagcagga

SEQ ID NO: 426127 - DNA, 15 bp, Homo sapiens
aaatgagcaagcagg

SEQ ID NO: 426128 - DNA, 15 bp, Homo sapiens
taaatgagcaagcag

SEQ ID NO: 426129 - DNA, 15 bp, Homo sapiens
ttaaatgagcaagca

SEQ ID NO: 426130 - DNA, 15 bp, Homo sapiens
attaaatgagcaagc

SEQ ID NO: 426131 - DNA, 15 bp, Homo sapiens
tattaaatgagcaag

SEQ ID NO: 426132 - DNA, 15 bp, Homo sapiens
ttattaaatgagcaa

SEQ ID NO: 426133 - DNA, 15 bp, Homo sapiens
tttattaaatgagca

SEQ ID NO: 426134 - DNA, 15 bp, Homo sapiens
ctttattaaatgagc

SEQ ID NO: 426135 - DNA, 15 bp, Homo sapiens
tctttattaaatgag

SEQ ID NO: 426136 - DNA, 15 bp, Homo sapiens
ttctttattaaatga

SEQ ID NO: 426137 - DNA, 15 bp, Homo sapiens
cttctttattaaatg

SEQ ID NO: 426138 - DNA, 15 bp, Homo sapiens
tcttctttattaaat

SEQ ID NO: 426139 - DNA, 15 bp, Homo sapiens
ctcttctttattaaa

SEQ ID NO: 426140 - DNA, 15 bp, Homo sapiens
actcttctttattaa

SEQ ID NO: 426141 - DNA, 15 bp, Homo sapiens
aactcttctttatta

SEQ ID NO: 426142 - DNA, 15 bp, Homo sapiens
gaactcttctttatt

SEQ ID NO: 426143 - DNA, 15 bp, Homo sapiens
tgaactcttctttat

SEQ ID NO: 426144 - DNA, 15 bp, Homo sapiens
atgaactcttcttta

SEQ ID NO: 426145 - DNA, 15 bp, Homo sapiens
aatgaactcttcttt

SEQ ID NO: 426146 - DNA, 15 bp, Homo sapiens
taatgaactcttctt

SEQ ID NO: 426147 - DNA, 15 bp, Homo sapiens
ttaatgaactcttct

SEQ ID NO: 426148 - DNA, 15 bp, Homo sapiens
cttaatgaactcttc

SEQ ID NO: 426149 - DNA, 15 bp, Homo sapiens
tcttaatgaactctt

SEQ ID NO: 426150 - DNA, 15 bp, Homo sapiens
ctcttaatgaactct

SEQ ID NO: 426151 - DNA, 15 bp, Homo sapiens
actcttaatgaactc

SEQ ID NO: 426152 - DNA, 15 bp, Homo sapiens
tactcttaatgaact

SEQ ID NO: 426153 - DNA, 15 bp, Homo sapiens
atactcttaatgaac

SEQ ID NO: 426154 - DNA, 15 bp, Homo sapiens
gatactcttaatgaa

SEQ ID NO: 426155 - DNA, 15 bp, Homo sapiens
ggatactcttaatga

SEQ ID NO: 426156 - DNA, 15 bp, Homo sapiens
gggatactcttaatg

SEQ ID NO: 426157 - DNA, 15 bp, Homo sapiens
tgggatactcttaat

SEQ ID NO: 426158 - DNA, 15 bp, Homo sapiens
ttgggatactcttaa

SEQ ID NO: 426159 - DNA, 15 bp, Homo sapiens
tttgggatactctta

SEQ ID NO: 426160 - DNA, 15 bp, Homo sapiens
atttgggatactctt

SEQ ID NO: 426161 - DNA, 15 bp, Homo sapiens
catttgggatactct

SEQ ID NO: 426162 - DNA, 15 bp, Homo sapiens
gcatttgggatactc

SEQ ID NO: 426163 - DNA, 15 bp, Homo sapiens
cgcatttgggatact

SEQ ID NO: 426164 - DNA, 15 bp, Homo sapiens
acgcatttgggatac

SEQ ID NO: 426165 - DNA, 15 bp, Homo sapiens
tacgcatttgggata

SEQ ID NO: 426166 - DNA, 15 bp, Homo sapiens
ctacgcatttgggat

SEQ ID NO: 426167 - DNA, 15 bp, Homo sapiens
gctacgcatttggga

SEQ ID NO: 426168 - DNA, 15 bp, Homo sapiens
agctacgcatttggg

SEQ ID NO: 426169 - DNA, 15 bp, Homo sapiens
gagctacgcatttgg

SEQ ID NO: 426170 - DNA, 15 bp, Homo sapiens
tgagctacgcatttg

SEQ ID NO: 426171 - DNA, 15 bp, Homo sapiens
ctgagctacgcattt

SEQ ID NO: 426172 - DNA, 15 bp, Homo sapiens
cctgagctacgcatt

SEQ ID NO: 426173 - DNA, 15 bp, Homo sapiens
ccctgagctacgcat

SEQ ID NO: 426174 - DNA, 15 bp, Homo sapiens
gccctgagctacgca

SEQ ID NO: 426175 - DNA, 15 bp, Homo sapiens
ggccctgagctacgc

SEQ ID NO: 426176 - DNA, 15 bp, Homo sapiens
tggccctgagctacg

SEQ ID NO: 426177 - DNA, 15 bp, Homo sapiens
gtggccctgagctac

SEQ ID NO: 426178 - DNA, 15 bp, Homo sapiens
agtggccctgagcta

SEQ ID NO: 426179 - DNA, 15 bp, Homo sapiens
cagtggccctgagct

SEQ ID NO: 426180 - DNA, 15 bp, Homo sapiens
tcagtggccctgagc

SEQ ID NO: 426181 - DNA, 15 bp, Homo sapiens
gtcagtggccctgag

SEQ ID NO: 426182 - DNA, 15 bp, Homo sapiens
tgtcagtggccctga

SEQ ID NO: 426183 - DNA, 15 bp, Homo sapiens
gtgtcagtggccctg

SEQ ID NO: 426184 - DNA, 15 bp, Homo sapiens
agtgtcagtggccct

SEQ ID NO: 426185 - DNA, 15 bp, Homo sapiens
tagtgtcagtggccc

SEQ ID NO: 426186 - DNA, 15 bp, Homo sapiens
ctagtgtcagtggcc

SEQ ID NO: 426187 - DNA, 15 bp, Homo sapiens
tctagtgtcagtggc

SEQ ID NO: 426188 - DNA, 15 bp, Homo sapiens
ttctagtgtcagtgg

SEQ ID NO: 426189 - DNA, 15 bp, Homo sapiens
tttctagtgtcagtg

SEQ ID NO: 426190 - DNA, 15 bp, Homo sapiens
ttttctagtgtcagt

SEQ ID NO: 426191 - DNA, 15 bp, Homo sapiens
gttttctagtgtcag

SEQ ID NO: 426192 - DNA, 15 bp, Homo sapiens
agttttctagtgtca

SEQ ID NO: 426193 - DNA, 15 bp, Homo sapiens
cagttttctagtgtc

SEQ ID NO: 426194 - DNA, 15 bp, Homo sapiens
gcagttttctagtgt

SEQ ID NO: 426195 - DNA, 15 bp, Homo sapiens
tgcagttttctagtg

SEQ ID NO: 426196 - DNA, 15 bp, Homo sapiens
ttgcagttttctagt

SEQ ID NO: 426197 - DNA, 15 bp, Homo sapiens
gttgcagttttctag

SEQ ID NO: 426198 - DNA, 15 bp, Homo sapiens
ggttgcagttttcta

SEQ ID NO: 426199 - DNA, 15 bp, Homo sapiens
tggttgcagttttct

SEQ ID NO: 426200 - DNA, 15 bp, Homo sapiens
gtggttgcagttttc

SEQ ID NO: 426201 - DNA, 15 bp, Homo sapiens
agtggttgcagtttt

SEQ ID NO: 426202 - DNA, 15 bp, Homo sapiens
aagtggttgcagttt

SEQ ID NO: 426203 - DNA, 15 bp, Homo sapiens
aaagtggttgcagtt

SEQ ID NO: 426204 - DNA, 15 bp, Homo sapiens
caaagtggttgcagt

SEQ ID NO: 426205 - DNA, 15 bp, Homo sapiens
acaaagtggttgcag

SEQ ID NO: 426206 - DNA, 15 bp, Homo sapiens
aacaaagtggttgca

SEQ ID NO: 426207 - DNA, 15 bp, Homo sapiens
gaacaaagtggttgc

SEQ ID NO: 426208 - DNA, 15 bp, Homo sapiens
agaacaaagtggttg

SEQ ID NO: 426209 - DNA, 15 bp, Homo sapiens
aagaacaaagtggtt

SEQ ID NO: 426210 - DNA, 15 bp, Homo sapiens
aaagaacaaagtggt

SEQ ID NO: 426211 - DNA, 15 bp, Homo sapiens
gaaagaacaaagtgg

SEQ ID NO: 426212 - DNA, 15 bp, Homo sapiens
ggaaagaacaaagtg

SEQ ID NO: 426213 - DNA, 15 bp, Homo sapiens
gggaaagaacaaagt

SEQ ID NO: 426214 - DNA, 15 bp, Homo sapiens
agggaaagaacaaag

SEQ ID NO: 426215 - DNA, 15 bp, Homo sapiens
cagggaaagaacaaa

SEQ ID NO: 426216 - DNA, 15 bp, Homo sapiens
gcagggaaagaacaa

SEQ ID NO: 426217 - DNA, 15 bp, Homo sapiens
ggcagggaaagaaca

SEQ ID NO: 426218 - DNA, 15 bp, Homo sapiens
gggcagggaaagaac

SEQ ID NO: 426219 - DNA, 15 bp, Homo sapiens
ggggcagggaaagaa

SEQ ID NO: 426220 - DNA, 15 bp, Homo sapiens
cggggcagggaaaga

SEQ ID NO: 426221 - DNA, 15 bp, Homo sapiens
acggggcagggaaag

SEQ ID NO: 426222 - DNA, 15 bp, Homo sapiens
tacggggcagggaaa

SEQ ID NO: 426223 - DNA, 15 bp, Homo sapiens
atacggggcagggaa

SEQ ID NO: 426224 - DNA, 15 bp, Homo sapiens
gatacggggcaggga

SEQ ID NO: 426225 - DNA, 15 bp, Homo sapiens
agatacggggcaggg

SEQ ID NO: 426226 - DNA, 15 bp, Homo sapiens
gagatacggggcagg

SEQ ID NO: 426227 - DNA, 15 bp, Homo sapiens
tgagatacggggcag

SEQ ID NO: 426228 - DNA, 15 bp, Homo sapiens
gtgagatacggggca

SEQ ID NO: 426229 - DNA, 15 bp, Homo sapiens
agtgagatacggggc

SEQ ID NO: 426230 - DNA, 15 bp, Homo sapiens
aagtgagatacgggg

SEQ ID NO: 426231 - DNA, 15 bp, Homo sapiens
caagtgagatacggg

SEQ ID NO: 426232 - DNA, 15 bp, Homo sapiens
acaagtgagatacgg

SEQ ID NO: 426233 - DNA, 15 bp, Homo sapiens
gacaagtgagatacg

SEQ ID NO: 426234 - DNA, 15 bp, Homo sapiens
ggacaagtgagatac

SEQ ID NO: 426235 - DNA, 15 bp, Homo sapiens
aggacaagtgagata

SEQ ID NO: 426236 - DNA, 15 bp, Homo sapiens
aaggacaagtgagat

SEQ ID NO: 426237 - DNA, 15 bp, Homo sapiens
caaggacaagtgaga

SEQ ID NO: 426238 - DNA, 15 bp, Homo sapiens
gcaaggacaagtgag

SEQ ID NO: 426239 - DNA, 15 bp, Homo sapiens
tgcaaggacaagtga

SEQ ID NO: 426240 - DNA, 15 bp, Homo sapiens
ctgcaaggacaagtg

SEQ ID NO: 426241 - DNA, 15 bp, Homo sapiens
gctgcaaggacaagt

SEQ ID NO: 426242 - DNA, 15 bp, Homo sapiens
agctgcaaggacaag

SEQ ID NO: 426243 - DNA, 15 bp, Homo sapiens
cagctgcaaggacaa

SEQ ID NO: 426244 - DNA, 15 bp, Homo sapiens
acagctgcaaggaca

SEQ ID NO: 426245 - DNA, 15 bp, Homo sapiens
gacagctgcaaggac

SEQ ID NO: 426246 - DNA, 15 bp, Homo sapiens
tgacagctgcaagga

SEQ ID NO: 426247 - DNA, 15 bp, Homo sapiens
gtgacagctgcaagg

SEQ ID NO: 426248 - DNA, 15 bp, Homo sapiens
ggtgacagctgcaag

SEQ ID NO: 426249 - DNA, 15 bp, Homo sapiens
aggtgacagctgcaa

SEQ ID NO: 426250 - DNA, 15 bp, Homo sapiens
aaggtgacagctgca

SEQ ID NO: 426251 - DNA, 15 bp, Homo sapiens
caaggtgacagctgc

SEQ ID NO: 426252 - DNA, 15 bp, Homo sapiens
tcaaggtgacagctg

SEQ ID NO: 426253 - DNA, 15 bp, Homo sapiens
ctcaaggtgacagct

SEQ ID NO: 426254 - DNA, 15 bp, Homo sapiens
cctcaaggtgacagc

SEQ ID NO: 426255 - DNA, 15 bp, Homo sapiens
gcctcaaggtgacag

SEQ ID NO: 426256 - DNA, 15 bp, Homo sapiens
ggcctcaaggtgaca

SEQ ID NO: 426257 - DNA, 15 bp, Homo sapiens
aggcctcaaggtgac

SEQ ID NO: 426258 - DNA, 15 bp, Homo sapiens
gaggcctcaaggtga

SEQ ID NO: 426259 - DNA, 15 bp, Homo sapiens
tgaggcctcaaggtg

SEQ ID NO: 426260 - DNA, 15 bp, Homo sapiens
ctgaggcctcaaggt

SEQ ID NO: 426261 - DNA, 15 bp, Homo sapiens
gctgaggcctcaagg

SEQ ID NO: 426262 - DNA, 15 bp, Homo sapiens
tgctgaggcctcaag

SEQ ID NO: 426263 - DNA, 15 bp, Homo sapiens
gtgctgaggcctcaa

SEQ ID NO: 426264 - DNA, 15 bp, Homo sapiens
agtgctgaggcctca

SEQ ID NO: 426265 - DNA, 15 bp, Homo sapiens
cagtgctgaggcctc

SEQ ID NO: 426266 - DNA, 15 bp, Homo sapiens
ccagtgctgaggcct

SEQ ID NO: 426267 - DNA, 15 bp, Homo sapiens
accagtgctgaggcc

SEQ ID NO: 426268 - DNA, 15 bp, Homo sapiens
taccagtgctgaggc

SEQ ID NO: 426269 - DNA, 15 bp, Homo sapiens
ctaccagtgctgagg

SEQ ID NO: 426270 - DNA, 15 bp, Homo sapiens
cctaccagtgctgag

SEQ ID NO: 426271 - DNA, 15 bp, Homo sapiens
tcctaccagtgctga

SEQ ID NO: 426272 - DNA, 15 bp, Homo sapiens
ttcctaccagtgctg

SEQ ID NO: 426273 - DNA, 15 bp, Homo sapiens
cttcctaccagtgct

SEQ ID NO: 426274 - DNA, 15 bp, Homo sapiens
acttcctaccagtgc

SEQ ID NO: 426275 - DNA, 15 bp, Homo sapiens
cacttcctaccagtg

SEQ ID NO: 426276 - DNA, 15 bp, Homo sapiens
tcacttcctaccagt

SEQ ID NO: 426277 - DNA, 15 bp, Homo sapiens
ctcacttcctaccag

SEQ ID NO: 426278 - DNA, 15 bp, Homo sapiens
tctcacttcctacca

SEQ ID NO: 426279 - DNA, 15 bp, Homo sapiens
ttctcacttcctacc

SEQ ID NO: 426280 - DNA, 15 bp, Homo sapiens
cttctcacttcctac

SEQ ID NO: 426281 - DNA, 15 bp, Homo sapiens
tcttctcacttccta

SEQ ID NO: 426282 - DNA, 15 bp, Homo sapiens
gtcttctcacttcct

SEQ ID NO: 426283 - DNA, 15 bp, Homo sapiens
tgtcttctcacttcc

SEQ ID NO: 426284 - DNA, 15 bp, Homo sapiens
gtgtcttctcacttc

SEQ ID NO: 426285 - DNA, 15 bp, Homo sapiens
agtgtcttctcactt

SEQ ID NO: 426286 - DNA, 15 bp, Homo sapiens
cagtgtcttctcact

SEQ ID NO: 426287 - DNA, 15 bp, Homo sapiens
tcagtgtcttctcac

SEQ ID NO: 426288 - DNA, 15 bp, Homo sapiens
ctcagtgtcttctca

SEQ ID NO: 426289 - DNA, 15 bp, Homo sapiens
tctcagtgtcttctc

SEQ ID NO: 426290 - DNA, 15 bp, Homo sapiens
ttctcagtgtcttct

SEQ ID NO: 426291 - DNA, 15 bp, Homo sapiens
cttctcagtgtcttc

SEQ ID NO: 426292 - DNA, 15 bp, Homo sapiens
acttctcagtgtctt

SEQ ID NO: 426293 - DNA, 15 bp, Homo sapiens
cacttctcagtgtct

SEQ ID NO: 426294 - DNA, 15 bp, Homo sapiens
ccacttctcagtgtc

SEQ ID NO: 426295 - DNA, 15 bp, Homo sapiens
gccacttctcagtgt

SEQ ID NO: 426296 - DNA, 15 bp, Homo sapiens
tgccacttctcagtg

SEQ ID NO: 426297 - DNA, 15 bp, Homo sapiens
gtgccacttctcagt

SEQ ID NO: 426298 - DNA, 15 bp, Homo sapiens
ggtgccacttctcag

SEQ ID NO: 426299 - DNA, 15 bp, Homo sapiens
gggtgccacttctca

SEQ ID NO: 426300 - DNA, 15 bp, Homo sapiens
tgggtgccacttctc

SEQ ID NO: 426301 - DNA, 15 bp, Homo sapiens
ctgggtgccacttct

SEQ ID NO: 426302 - DNA, 15 bp, Homo sapiens
actgggtgccacttc

SEQ ID NO: 426303 - DNA, 15 bp, Homo sapiens
tactgggtgccactt

SEQ ID NO: 426304 - DNA, 15 bp, Homo sapiens
ctactgggtgccact

SEQ ID NO: 426305 - DNA, 15 bp, Homo sapiens
tctactgggtgccac

SEQ ID NO: 426306 - DNA, 15 bp, Homo sapiens
ttctactgggtgcca

SEQ ID NO: 426307 - DNA, 15 bp, Homo sapiens
cttctactgggtgcc

SEQ ID NO: 426308 - DNA, 15 bp, Homo sapiens
gcttctactgggtgc

SEQ ID NO: 426309 - DNA, 15 bp, Homo sapiens
agcttctactgggtg

SEQ ID NO: 426310 - DNA, 15 bp, Homo sapiens
aagcttctactgggt

SEQ ID NO: 426311 - DNA, 15 bp, Homo sapiens
gaagcttctactggg

SEQ ID NO: 426312 - DNA, 15 bp, Homo sapiens
agaagcttctactgg

SEQ ID NO: 426313 - DNA, 15 bp, Homo sapiens
tagaagcttctactg

SEQ ID NO: 426314 - DNA, 15 bp, Homo sapiens
ctagaagcttctact

SEQ ID NO: 426315 - DNA, 15 bp, Homo sapiens
tctagaagcttctac

SEQ ID NO: 426316 - DNA, 15 bp, Homo sapiens
ttctagaagcttcta

SEQ ID NO: 426317 - DNA, 15 bp, Homo sapiens
tttctagaagcttct

SEQ ID NO: 426318 - DNA, 15 bp, Homo sapiens
gtttctagaagcttc

SEQ ID NO: 426319 - DNA, 15 bp, Homo sapiens
tgtttctagaagctt

SEQ ID NO: 426320 - DNA, 15 bp, Homo sapiens
ctgtttctagaagct

SEQ ID NO: 426321 - DNA, 15 bp, Homo sapiens
tctgtttctagaagc

SEQ ID NO: 426322 - DNA, 15 bp, Homo sapiens
ttctgtttctagaag

SEQ ID NO: 426323 - DNA, 15 bp, Homo sapiens
tttctgtttctagaa

SEQ ID NO: 426324 - DNA, 15 bp, Homo sapiens
ctttctgtttctaga

SEQ ID NO: 426325 - DNA, 15 bp, Homo sapiens
tctttctgtttctag

SEQ ID NO: 426326 - DNA, 15 bp, Homo sapiens
ctctttctgtttcta

SEQ ID NO: 426327 - DNA, 15 bp, Homo sapiens
actctttctgtttct

SEQ ID NO: 426328 - DNA, 15 bp, Homo sapiens
tactctttctgtttc

SEQ ID NO: 426329 - DNA, 15 bp, Homo sapiens
atactctttctgttt

SEQ ID NO: 426330 - DNA, 15 bp, Homo sapiens
gatactctttctgtt

SEQ ID NO: 426331 - DNA, 15 bp, Homo sapiens
ggatactctttctgt

SEQ ID NO: 426332 - DNA, 15 bp, Homo sapiens
tggatactctttctg

SEQ ID NO: 426333 - DNA, 15 bp, Homo sapiens
atggatactctttct

SEQ ID NO: 426334 - DNA, 15 bp, Homo sapiens
tatggatactctttc

SEQ ID NO: 426335 - DNA, 15 bp, Homo sapiens
ttatggatactcttt

SEQ ID NO: 426336 - DNA, 15 bp, Homo sapiens
tttatggatactctt

SEQ ID NO: 426337 - DNA, 15 bp, Homo sapiens
atttatggatactct

SEQ ID NO: 426338 - DNA, 15 bp, Homo sapiens
tatttatggatactc

SEQ ID NO: 426339 - DNA, 15 bp, Homo sapiens
ttatttatggatact

SEQ ID NO: 426340 - DNA, 15 bp, Homo sapiens
attatttatggatac

SEQ ID NO: 426341 - DNA, 15 bp, Homo sapiens
aattatttatggata

SEQ ID NO: 426342 - DNA, 15 bp, Homo sapiens
taattatttatggat

SEQ ID NO: 426343 - DNA, 15 bp, Homo sapiens
ttaattatttatgga

SEQ ID NO: 426344 - DNA, 15 bp, Homo sapiens
tttaattatttatgg

SEQ ID NO: 426345 - DNA, 15 bp, Homo sapiens
gtttaattatttatg

SEQ ID NO: 426346 - DNA, 15 bp, Homo sapiens
agtttaattatttat

SEQ ID NO: 426347 - DNA, 15 bp, Homo sapiens
aagtttaattattta

SEQ ID NO: 426348 - DNA, 15 bp, Homo sapiens
taagtttaattattt

SEQ ID NO: 426349 - DNA, 15 bp, Homo sapiens
ataagtttaattatt

SEQ ID NO: 426350 - DNA, 15 bp, Homo sapiens
cataagtttaattat

SEQ ID NO: 426351 - DNA, 15 bp, Homo sapiens
tcataagtttaatta

SEQ ID NO: 426352 - DNA, 15 bp, Homo sapiens
ttcataagtttaatt

SEQ ID NO: 426353 - DNA, 15 bp, Homo sapiens
tttcataagtttaat

SEQ ID NO: 426354 - DNA, 15 bp, Homo sapiens
atttcataagtttaa

SEQ ID NO: 426355 - DNA, 15 bp, Homo sapiens
gatttcataagttta

SEQ ID NO: 426356 - DNA, 15 bp, Homo sapiens
tgatttcataagttt

SEQ ID NO: 426357 - DNA, 15 bp, Homo sapiens
ctgatttcataagtt

SEQ ID NO: 426358 - DNA, 15 bp, Homo sapiens
tctgatttcataagt

SEQ ID NO: 426359 - DNA, 15 bp, Homo sapiens
ttctgatttcataag

SEQ ID NO: 426360 - DNA, 15 bp, Homo sapiens
gttctgatttcataa

SEQ ID NO: 426361 - DNA, 15 bp, Homo sapiens
ggttctgatttcata

SEQ ID NO: 426362 - DNA, 15 bp, Homo sapiens
aggttctgatttcat

SEQ ID NO: 426363 - DNA, 15 bp, Homo sapiens
caggttctgatttca

SEQ ID NO: 426364 - DNA, 15 bp, Homo sapiens
tcaggttctgatttc

SEQ ID NO: 426365 - DNA, 15 bp, Homo sapiens
ctcaggttctgattt

SEQ ID NO: 426366 - DNA, 15 bp, Homo sapiens
tctcaggttctgatt

SEQ ID NO: 426367 - DNA, 15 bp, Homo sapiens
ctctcaggttctgat

SEQ ID NO: 426368 - DNA, 15 bp, Homo sapiens
cctctcaggttctga

SEQ ID NO: 426369 - DNA, 15 bp, Homo sapiens
acctctcaggttctg

SEQ ID NO: 426370 - DNA, 15 bp, Homo sapiens
aacctctcaggttct

SEQ ID NO: 426371 - DNA, 15 bp, Homo sapiens
taacctctcaggttc

SEQ ID NO: 426372 - DNA, 15 bp, Homo sapiens
ataacctctcaggtt

SEQ ID NO: 426373 - DNA, 15 bp, Homo sapiens
tataacctctcaggt

SEQ ID NO: 426374 - DNA, 15 bp, Homo sapiens
ctataacctctcagg

SEQ ID NO: 426375 - DNA, 15 bp, Homo sapiens
actataacctctcag

SEQ ID NO: 426376 - DNA, 15 bp, Homo sapiens
gactataacctctca

SEQ ID NO: 426377 - DNA, 15 bp, Homo sapiens
tgactataacctctc

SEQ ID NO: 426378 - DNA, 15 bp, Homo sapiens
atgactataacctct

SEQ ID NO: 426379 - DNA, 15 bp, Homo sapiens
catgactataacctc

SEQ ID NO: 426380 - DNA, 15 bp, Homo sapiens
acatgactataacct

SEQ ID NO: 426381 - DNA, 15 bp, Homo sapiens
aacatgactataacc

SEQ ID NO: 426382 - DNA, 15 bp, Homo sapiens
aaacatgactataac

SEQ ID NO: 426383 - DNA, 15 bp, Homo sapiens
gaaacatgactataa

SEQ ID NO: 426384 - DNA, 15 bp, Homo sapiens
agaaacatgactata

SEQ ID NO: 426385 - DNA, 15 bp, Homo sapiens
gagaaacatgactat

SEQ ID NO: 426386 - DNA, 15 bp, Homo sapiens
cgagaaacatgacta

SEQ ID NO: 426387 - DNA, 15 bp, Homo sapiens
ccgagaaacatgact

SEQ ID NO: 426388 - DNA, 15 bp, Homo sapiens
gccgagaaacatgac

SEQ ID NO: 426389 - DNA, 15 bp, Homo sapiens
agccgagaaacatga

SEQ ID NO: 426390 - DNA, 15 bp, Homo sapiens
cagccgagaaacatg

SEQ ID NO: 426391 - DNA, 15 bp, Homo sapiens
gcagccgagaaacat

SEQ ID NO: 426392 - DNA, 15 bp, Homo sapiens
ggcagccgagaaaca

SEQ ID NO: 426393 - DNA, 15 bp, Homo sapiens
gggcagccgagaaac

SEQ ID NO: 426394 - DNA, 15 bp, Homo sapiens
tgggcagccgagaaa

SEQ ID NO: 426395 - DNA, 15 bp, Homo sapiens
atgggcagccgagaa

SEQ ID NO: 426396 - DNA, 15 bp, Homo sapiens
gatgggcagccgaga

SEQ ID NO: 426397 - DNA, 15 bp, Homo sapiens
tgatgggcagccgag

SEQ ID NO: 426398 - DNA, 15 bp, Homo sapiens
atgatgggcagccga

SEQ ID NO: 426399 - DNA, 15 bp, Homo sapiens
tatgatgggcagccg

SEQ ID NO: 426400 - DNA, 15 bp, Homo sapiens
ttatgatgggcagcc

SEQ ID NO: 426401 - DNA, 15 bp, Homo sapiens
attatgatgggcagc

SEQ ID NO: 426402 - DNA, 15 bp, Homo sapiens
aattatgatgggcag

SEQ ID NO: 426403 - DNA, 15 bp, Homo sapiens
taattatgatgggca

SEQ ID NO: 426404 - DNA, 15 bp, Homo sapiens
gtaattatgatgggc

SEQ ID NO: 426405 - DNA, 15 bp, Homo sapiens
ggtaattatgatggg

SEQ ID NO: 426406 - DNA, 15 bp, Homo sapiens
aggtaattatgatgg

SEQ ID NO: 426407 - DNA, 15 bp, Homo sapiens
caggtaattatgatg

SEQ ID NO: 426408 - DNA, 15 bp, Homo sapiens
ccaggtaattatgat

SEQ ID NO: 426409 - DNA, 15 bp, Homo sapiens
tccaggtaattatga

SEQ ID NO: 426410 - DNA, 15 bp, Homo sapiens
gtccaggtaattatg

SEQ ID NO: 426411 - DNA, 15 bp, Homo sapiens
tgtccaggtaattat

SEQ ID NO: 426412 - DNA, 15 bp, Homo sapiens
ctgtccaggtaatta

SEQ ID NO: 426413 - DNA, 15 bp, Homo sapiens
gctgtccaggtaatt

SEQ ID NO: 426414 - DNA, 15 bp, Homo sapiens
agctgtccaggtaat

SEQ ID NO: 426415 - DNA, 15 bp, Homo sapiens
aagctgtccaggtaa

SEQ ID NO: 426416 - DNA, 15 bp, Homo sapiens
gaagctgtccaggta

SEQ ID NO: 426417 - DNA, 15 bp, Homo sapiens
ggaagctgtccaggt

SEQ ID NO: 426418 - DNA, 15 bp, Homo sapiens
tggaagctgtccagg

SEQ ID NO: 426419 - DNA, 15 bp, Homo sapiens
ttggaagctgtccag

SEQ ID NO: 426420 - DNA, 15 bp, Homo sapiens
tttggaagctgtcca

SEQ ID NO: 426421 - DNA, 15 bp, Homo sapiens
ttttggaagctgtcc

SEQ ID NO: 426422 - DNA, 15 bp, Homo sapiens
tttttggaagctgtc

SEQ ID NO: 426423 - DNA, 15 bp, Homo sapiens
atttttggaagctgt

SEQ ID NO: 426424 - DNA, 15 bp, Homo sapiens
tatttttggaagctg

SEQ ID NO: 426425 - DNA, 15 bp, Homo sapiens
gtatttttggaagct

SEQ ID NO: 426426 - DNA, 15 bp, Homo sapiens
tgtatttttggaagc

SEQ ID NO: 426427 - DNA, 15 bp, Homo sapiens
atgtatttttggaag

SEQ ID NO: 426428 - DNA, 15 bp, Homo sapiens
aatgtatttttggaa

SEQ ID NO: 426429 - DNA, 15 bp, Homo sapiens
taatgtatttttgga

SEQ ID NO: 426430 - DNA, 15 bp, Homo sapiens
ttaatgtatttttgg

SEQ ID NO: 426431 - DNA, 15 bp, Homo sapiens
attaatgtatttttg

SEQ ID NO: 426432 - DNA, 15 bp, Homo sapiens
cattaatgtattttt

SEQ ID NO: 426433 - DNA, 15 bp, Homo sapiens
gcattaatgtatttt

SEQ ID NO: 426434 - DNA, 15 bp, Homo sapiens
ggcattaatgtattt

SEQ ID NO: 426435 - DNA, 15 bp, Homo sapiens
tggcattaatgtatt

SEQ ID NO: 426436 - DNA, 15 bp, Homo sapiens
ctggcattaatgtat

SEQ ID NO: 426437 - DNA, 15 bp, Homo sapiens
tctggcattaatgta

SEQ ID NO: 426438 - DNA, 15 bp, Homo sapiens
ctctggcattaatgt

SEQ ID NO: 426439 - DNA, 15 bp, Homo sapiens
cctctggcattaatg

SEQ ID NO: 426440 - DNA, 15 bp, Homo sapiens
gcctctggcattaat

SEQ ID NO: 426441 - DNA, 15 bp, Homo sapiens
ggcctctggcattaa

SEQ ID NO: 426442 - DNA, 15 bp, Homo sapiens
gggcctctggcatta

SEQ ID NO: 426443 - DNA, 15 bp, Homo sapiens
tgggcctctggcatt

SEQ ID NO: 426444 - DNA, 15 bp, Homo sapiens
gtgggcctctggcat

SEQ ID NO: 426445 - DNA, 15 bp, Homo sapiens
agtgggcctctggca

SEQ ID NO: 426446 - DNA, 15 bp, Homo sapiens
gagtgggcctctggc

SEQ ID NO: 426447 - DNA, 15 bp, Homo sapiens
ggagtgggcctctgg

SEQ ID NO: 426448 - DNA, 15 bp, Homo sapiens
gggagtgggcctctg

SEQ ID NO: 426449 - DNA, 15 bp, Homo sapiens
tgggagtgggcctct

SEQ ID NO: 426450 - DNA, 15 bp, Homo sapiens
ctgggagtgggcctc

SEQ ID NO: 426451 - DNA, 15 bp, Homo sapiens
tctgggagtgggcct

SEQ ID NO: 426452 - DNA, 15 bp, Homo sapiens
ctctgggagtgggcc

SEQ ID NO: 426453 - DNA, 15 bp, Homo sapiens
tctctgggagtgggc

SEQ ID NO: 426454 - DNA, 15 bp, Homo sapiens
atctctgggagtggg

SEQ ID NO: 426455 - DNA, 15 bp, Homo sapiens
aatctctgggagtgg

SEQ ID NO: 426456 - DNA, 15 bp, Homo sapiens
gaatctctgggagtg

SEQ ID NO: 426457 - DNA, 15 bp, Homo sapiens
agaatctctgggagt

SEQ ID NO: 426458 - DNA, 15 bp, Homo sapiens
gagaatctctgggag

SEQ ID NO: 426459 - DNA, 15 bp, Homo sapiens
tgagaatctctggga

SEQ ID NO: 426460 - DNA, 15 bp, Homo sapiens
gtgagaatctctggg

SEQ ID NO: 426461 - DNA, 15 bp, Homo sapiens
agtgagaatctctgg

SEQ ID NO: 426462 - DNA, 15 bp, Homo sapiens
cagtgagaatctctg

SEQ ID NO: 426463 - DNA, 15 bp, Homo sapiens
ccagtgagaatctct

SEQ ID NO: 426464 - DNA, 15 bp, Homo sapiens
gccagtgagaatctc

SEQ ID NO: 426465 - DNA, 15 bp, Homo sapiens
ggccagtgagaatct

SEQ ID NO: 426466 - DNA, 15 bp, Homo sapiens
aggccagtgagaatc

SEQ ID NO: 426467 - DNA, 15 bp, Homo sapiens
caggccagtgagaat

SEQ ID NO: 426468 - DNA, 15 bp, Homo sapiens
ccaggccagtgagaa

SEQ ID NO: 426469 - DNA, 15 bp, Homo sapiens
tccaggccagtgaga

SEQ ID NO: 426470 - DNA, 15 bp, Homo sapiens
ctccaggccagtgag

SEQ ID NO: 426471 - DNA, 15 bp, Homo sapiens
actccaggccagtga

SEQ ID NO: 426472 - DNA, 15 bp, Homo sapiens
cactccaggccagtg

SEQ ID NO: 426473 - DNA, 15 bp, Homo sapiens
tcactccaggccagt

SEQ ID NO: 426474 - DNA, 15 bp, Homo sapiens
ctcactccaggccag

SEQ ID NO: 426475 - DNA, 15 bp, Homo sapiens
tctcactccaggcca

SEQ ID NO: 426476 - DNA, 15 bp, Homo sapiens
atctcactccaggcc

SEQ ID NO: 426477 - DNA, 15 bp, Homo sapiens
gatctcactccaggc

SEQ ID NO: 426478 - DNA, 15 bp, Homo sapiens
ggatctcactccagg

SEQ ID NO: 426479 - DNA, 15 bp, Homo sapiens
tggatctcactccag

SEQ ID NO: 426480 - DNA, 15 bp, Homo sapiens
ctggatctcactcca

SEQ ID NO: 426481 - DNA, 15 bp, Homo sapiens
cctggatctcactcc

SEQ ID NO: 426482 - DNA, 15 bp, Homo sapiens
gcctggatctcactc

SEQ ID NO: 426483 - DNA, 15 bp, Homo sapiens
tgcctggatctcact

SEQ ID NO: 426484 - DNA, 15 bp, Homo sapiens
gtgcctggatctcac

SEQ ID NO: 426485 - DNA, 15 bp, Homo sapiens
ggtgcctggatctca

SEQ ID NO: 426486 - DNA, 15 bp, Homo sapiens
tggtgcctggatctc

SEQ ID NO: 426487 - DNA, 15 bp, Homo sapiens
ctggtgcctggatct

SEQ ID NO: 426488 - DNA, 15 bp, Homo sapiens
actggtgcctggatc

SEQ ID NO: 426489 - DNA, 15 bp, Homo sapiens
tactggtgcctggat

SEQ ID NO: 426490 - DNA, 15 bp, Homo sapiens
atactggtgcctgga

SEQ ID NO: 426491 - DNA, 15 bp, Homo sapiens
aatactggtgcctgg

SEQ ID NO: 426492 - DNA, 15 bp, Homo sapiens
aaatactggtgcctg

SEQ ID NO: 426493 - DNA, 15 bp, Homo sapiens
aaaatactggtgcct

SEQ ID NO: 426494 - DNA, 15 bp, Homo sapiens
aaaaatactggtgcc

SEQ ID NO: 426495 - DNA, 15 bp, Homo sapiens
aaaaaatactggtgc

SEQ ID NO: 426496 - DNA, 15 bp, Homo sapiens
taaaaaatactggtg

SEQ ID NO: 426497 - DNA, 15 bp, Homo sapiens
ttaaaaaatactggt

SEQ ID NO: 426498 - DNA, 15 bp, Homo sapiens
tttaaaaaatactgg

SEQ ID NO: 426499 - DNA, 15 bp, Homo sapiens
ttttaaaaaatactg

SEQ ID NO: 426500 - DNA, 15 bp, Homo sapiens
attttaaaaaatact

SEQ ID NO: 426501 - DNA, 15 bp, Homo sapiens
aattttaaaaaatac

SEQ ID NO: 426502 - DNA, 15 bp, Homo sapiens
gaattttaaaaaata

SEQ ID NO: 426503 - DNA, 15 bp, Homo sapiens
agaattttaaaaaat

SEQ ID NO: 426504 - DNA, 15 bp, Homo sapiens
aagaattttaaaaaa

SEQ ID NO: 426505 - DNA, 15 bp, Homo sapiens
gaagaattttaaaaa

SEQ ID NO: 426506 - DNA, 15 bp, Homo sapiens
ggaagaattttaaaa

SEQ ID NO: 426507 - DNA, 15 bp, Homo sapiens
tggaagaattttaaa

SEQ ID NO: 426508 - DNA, 15 bp, Homo sapiens
ctggaagaattttaa

SEQ ID NO: 426509 - DNA, 15 bp, Homo sapiens
tctggaagaatttta

SEQ ID NO: 426510 - DNA, 15 bp, Homo sapiens
atctggaagaatttt

SEQ ID NO: 426511 - DNA, 15 bp, Homo sapiens
tatctggaagaattt

SEQ ID NO: 426512 - DNA, 15 bp, Homo sapiens
ttatctggaagaatt

SEQ ID NO: 426513 - DNA, 15 bp, Homo sapiens
attatctggaagaat

SEQ ID NO: 426514 - DNA, 15 bp, Homo sapiens
aattatctggaagaa

SEQ ID NO: 426515 - DNA, 15 bp, Homo sapiens
gaattatctggaaga

SEQ ID NO: 426516 - DNA, 15 bp, Homo sapiens
agaattatctggaag

SEQ ID NO: 426517 - DNA, 15 bp, Homo sapiens
tagaattatctggaa

SEQ ID NO: 426518 - DNA, 15 bp, Homo sapiens
ttagaattatctgga

SEQ ID NO: 426519 - DNA, 15 bp, Homo sapiens
attagaattatctgg

SEQ ID NO: 426520 - DNA, 15 bp, Homo sapiens
cattagaattatctg

SEQ ID NO: 426521 - DNA, 15 bp, Homo sapiens
acattagaattatct

SEQ ID NO: 426522 - DNA, 15 bp, Homo sapiens
cacattagaattatc

SEQ ID NO: 426523 - DNA, 15 bp, Homo sapiens
acacattagaattat

SEQ ID NO: 426524 - DNA, 15 bp, Homo sapiens
cacacattagaatta

SEQ ID NO: 426525 - DNA, 15 bp, Homo sapiens
tcacacattagaatt

SEQ ID NO: 426526 - DNA, 15 bp, Homo sapiens
gtcacacattagaat

SEQ ID NO: 426527 - DNA, 15 bp, Homo sapiens
ggtcacacattagaa

SEQ ID NO: 426528 - DNA, 15 bp, Homo sapiens
tggtcacacattaga

SEQ ID NO: 426529 - DNA, 15 bp, Homo sapiens
ctggtcacacattag

SEQ ID NO: 426530 - DNA, 15 bp, Homo sapiens
gctggtcacacatta

SEQ ID NO: 426531 - DNA, 15 bp, Homo sapiens
tgctggtcacacatt

SEQ ID NO: 426532 - DNA, 15 bp, Homo sapiens
atgctggtcacacat

SEQ ID NO: 426533 - DNA, 15 bp, Homo sapiens
aatgctggtcacaca

SEQ ID NO: 426534 - DNA, 15 bp, Homo sapiens
gaatgctggtcacac

SEQ ID NO: 426535 - DNA, 15 bp, Homo sapiens
tgaatgctggtcaca

SEQ ID NO: 426536 - DNA, 15 bp, Homo sapiens
ctgaatgctggtcac

SEQ ID NO: 426537 - DNA, 15 bp, Homo sapiens
tctgaatgctggtca

SEQ ID NO: 426538 - DNA, 15 bp, Homo sapiens
ctctgaatgctggtc

SEQ ID NO: 426539 - DNA, 15 bp, Homo sapiens
cctctgaatgctggt

SEQ ID NO: 426540 - DNA, 15 bp, Homo sapiens
gcctctgaatgctgg

SEQ ID NO: 426541 - DNA, 15 bp, Homo sapiens
tgcctctgaatgctg

SEQ ID NO: 426542 - DNA, 15 bp, Homo sapiens
gtgcctctgaatgct

SEQ ID NO: 426543 - DNA, 15 bp, Homo sapiens
agtgcctctgaatgc

SEQ ID NO: 426544 - DNA, 15 bp, Homo sapiens
tagtgcctctgaatg

SEQ ID NO: 426545 - DNA, 15 bp, Homo sapiens
atagtgcctctgaat

SEQ ID NO: 426546 - DNA, 15 bp, Homo sapiens
gatagtgcctctgaa

SEQ ID NO: 426547 - DNA, 15 bp, Homo sapiens
agatagtgcctctga

SEQ ID NO: 426548 - DNA, 15 bp, Homo sapiens
aagatagtgcctctg

SEQ ID NO: 426549 - DNA, 15 bp, Homo sapiens
aaagatagtgcctct

SEQ ID NO: 426550 - DNA, 15 bp, Homo sapiens
taaagatagtgcctc

SEQ ID NO: 426551 - DNA, 15 bp, Homo sapiens
ataaagatagtgcct

SEQ ID NO: 426552 - DNA, 15 bp, Homo sapiens
cataaagatagtgcc

SEQ ID NO: 426553 - DNA, 15 bp, Homo sapiens
acataaagatagtgc

SEQ ID NO: 426554 - DNA, 15 bp, Homo sapiens
gacataaagatagtg

SEQ ID NO: 426555 - DNA, 15 bp, Homo sapiens
agacataaagatagt

SEQ ID NO: 426556 - DNA, 15 bp, Homo sapiens
aagacataaagatag

SEQ ID NO: 426557 - DNA, 15 bp, Homo sapiens
aaagacataaagata

SEQ ID NO: 426558 - DNA, 15 bp, Homo sapiens
taaagacataaagat

SEQ ID NO: 426559 - DNA, 15 bp, Homo sapiens
ataaagacataaaga

SEQ ID NO: 426560 - DNA, 15 bp, Homo sapiens
tataaagacataaag

SEQ ID NO: 426561 - DNA, 15 bp, Homo sapiens
atataaagacataaa

SEQ ID NO: 426562 - DNA, 15 bp, Homo sapiens
gatataaagacataa

SEQ ID NO: 426563 - DNA, 15 bp, Homo sapiens
agatataaagacata

SEQ ID NO: 426564 - DNA, 15 bp, Homo sapiens
tgagatataaagaca

SEQ ID NO: 426565 - DNA, 15 bp, Homo sapiens
ctgagatataaagac

SEQ ID NO: 426566 - DNA, 15 bp, Homo sapiens
attctgagatataaa

SEQ ID NO: 426567 - DNA, 15 bp, Homo sapiens
cattctgagatataa

SEQ ID NO: 426568 - DNA, 15 bp, Homo sapiens
ccattctgagatata

SEQ ID NO: 426569 - DNA, 15 bp, Homo sapiens
cccattctgagatat

SEQ ID NO: 426570 - DNA, 15 bp, Homo sapiens
acccattctgagata

SEQ ID NO: 426571 - DNA, 15 bp, Homo sapiens
tacccattctgagat

SEQ ID NO: 426572 - DNA, 15 bp, Homo sapiens
atacccattctgaga

SEQ ID NO: 426573 - DNA, 15 bp, Homo sapiens
gatacccattctgag

SEQ ID NO: 426574 - DNA, 15 bp, Homo sapiens
tgatacccattctga

SEQ ID NO: 426575 - DNA, 15 bp, Homo sapiens
ctgatacccattctg

SEQ ID NO: 426576 - DNA, 15 bp, Homo sapiens
tctgatacccattct

SEQ ID NO: 426577 - DNA, 15 bp, Homo sapiens
ttctgatacccattc

SEQ ID NO: 426578 - DNA, 15 bp, Homo sapiens
gttctgatacccatt

SEQ ID NO: 426579 - DNA, 15 bp, Homo sapiens
agttctgatacccat

SEQ ID NO: 426580 - DNA, 15 bp, Homo sapiens
aagttctgataccca

SEQ ID NO: 426581 - DNA, 15 bp, Homo sapiens
taagttctgataccc

SEQ ID NO: 426582 - DNA, 15 bp, Homo sapiens
ttaagttctgatacc

SEQ ID NO: 426583 - DNA, 15 bp, Homo sapiens
attaagttctgatac

SEQ ID NO: 426584 - DNA, 15 bp, Homo sapiens
cattaagttctgata

SEQ ID NO: 426585 - DNA, 15 bp, Homo sapiens
gcattaagttctgat

SEQ ID NO: 426586 - DNA, 15 bp, Homo sapiens
agcattaagttctga

SEQ ID NO: 426587 - DNA, 15 bp, Homo sapiens
tagcattaagttctg

SEQ ID NO: 426588 - DNA, 15 bp, Homo sapiens
ttagcattaagttct

SEQ ID NO: 426589 - DNA, 15 bp, Homo sapiens
attagcattaagttc

SEQ ID NO: 426590 - DNA, 15 bp, Homo sapiens
cattagcattaagtt

SEQ ID NO: 426591 - DNA, 15 bp, Homo sapiens
tcattagcattaagt

SEQ ID NO: 426592 - DNA, 15 bp, Homo sapiens
ctcattagcattaag

SEQ ID NO: 426593 - DNA, 15 bp, Homo sapiens
tctcattagcattaa

SEQ ID NO: 426594 - DNA, 15 bp, Homo sapiens
ttctcattagcatta

SEQ ID NO: 426595 - DNA, 15 bp, Homo sapiens
tttctcattagcatt

SEQ ID NO: 426596 - DNA, 15 bp, Homo sapiens
ctttctcattagcat

SEQ ID NO: 426597 - DNA, 15 bp, Homo sapiens
actttctcattagca

SEQ ID NO: 426598 - DNA, 15 bp, Homo sapiens
tactttctcattagc

SEQ ID NO: 426599 - DNA, 15 bp, Homo sapiens
gtactttctcattag

SEQ ID NO: 426600 - DNA, 15 bp, Homo sapiens
agtactttctcatta

SEQ ID NO: 426601 - DNA, 15 bp, Homo sapiens
aagtactttctcatt

SEQ ID NO: 426602 - DNA, 15 bp, Homo sapiens
gaagtactttctcat

SEQ ID NO: 426603 - DNA, 15 bp, Homo sapiens
tgaagtactttctca

SEQ ID NO: 426604 - DNA, 15 bp, Homo sapiens
ctgaagtactttctc

SEQ ID NO: 426605 - DNA, 15 bp, Homo sapiens
tctgaagtactttct

SEQ ID NO: 426606 - DNA, 15 bp, Homo sapiens
atctgaagtactttc

SEQ ID NO: 426607 - DNA, 15 bp, Homo sapiens
aatctgaagtacttt

SEQ ID NO: 426608 - DNA, 15 bp, Homo sapiens
aaatctgaagtactt

SEQ ID NO: 426609 - DNA, 15 bp, Homo sapiens
aaaatctgaagtact

SEQ ID NO: 426610 - DNA, 15 bp, Homo sapiens
taaaatctgaagtac

SEQ ID NO: 426611 - DNA, 15 bp, Homo sapiens
ataaaatctgaagta

SEQ ID NO: 426612 - DNA, 15 bp, Homo sapiens
gataaaatctgaagt

SEQ ID NO: 426613 - DNA, 15 bp, Homo sapiens
tgataaaatctgaag

SEQ ID NO: 426614 - DNA, 15 bp, Homo sapiens
gtgataaaatctgaa

SEQ ID NO: 426615 - DNA, 15 bp, Homo sapiens
ggtgataaaatctga

SEQ ID NO: 426616 - DNA, 15 bp, Homo sapiens
gggtgataaaatctg

SEQ ID NO: 426617 - DNA, 15 bp, Homo sapiens
agggtgataaaatct

SEQ ID NO: 426618 - DNA, 15 bp, Homo sapiens
tagggtgataaaatc

SEQ ID NO: 426619 - DNA, 15 bp, Homo sapiens
atagggtgataaaat

SEQ ID NO: 426620 - DNA, 15 bp, Homo sapiens
catagggtgataaaa

SEQ ID NO: 426621 - DNA, 15 bp, Homo sapiens
acatagggtgataaa

SEQ ID NO: 426622 - DNA, 15 bp, Homo sapiens
gacatagggtgataa

SEQ ID NO: 426623 - DNA, 15 bp, Homo sapiens
agacatagggtgata

SEQ ID NO: 426624 - DNA, 15 bp, Homo sapiens
gagacatagggtgat

SEQ ID NO: 426625 - DNA, 15 bp, Homo sapiens
tgagacatagggtga

SEQ ID NO: 426626 - DNA, 15 bp, Homo sapiens
ctgagacatagggtg

SEQ ID NO: 426627 - DNA, 15 bp, Homo sapiens
tctgagacatagggt

SEQ ID NO: 426628 - DNA, 15 bp, Homo sapiens
ttctgagacataggg

SEQ ID NO: 426629 - DNA, 15 bp, Homo sapiens
tttctgagacatagg

SEQ ID NO: 426630 - DNA, 15 bp, Homo sapiens
ttttctgagacatag

SEQ ID NO: 426631 - DNA, 15 bp, Homo sapiens
gttttctgagacata

SEQ ID NO: 426632 - DNA, 15 bp, Homo sapiens
ggttttctgagacat

SEQ ID NO: 426633 - DNA, 15 bp, Homo sapiens
tggttttctgagaca

SEQ ID NO: 426634 - DNA, 15 bp, Homo sapiens
gtggttttctgagac

SEQ ID NO: 426635 - DNA, 15 bp, Homo sapiens
agtggttttctgaga

SEQ ID NO: 426636 - DNA, 15 bp, Homo sapiens
aagtggttttctgag

SEQ ID NO: 426637 - DNA, 15 bp, Homo sapiens
aaagtggttttctga

SEQ ID NO: 426638 - DNA, 15 bp, Homo sapiens
aaaagtggttttctg

SEQ ID NO: 426639 - DNA, 15 bp, Homo sapiens
gaaaagtggttttct

SEQ ID NO: 426640 - DNA, 15 bp, Homo sapiens
ggaaaagtggttttc

SEQ ID NO: 426641 - DNA, 15 bp, Homo sapiens
aggaaaagtggtttt

SEQ ID NO: 426642 - DNA, 15 bp, Homo sapiens
gaggaaaagtggttt

SEQ ID NO: 426643 - DNA, 15 bp, Homo sapiens
agaggaaaagtggtt

SEQ ID NO: 426644 - DNA, 15 bp, Homo sapiens
tagaggaaaagtggt

SEQ ID NO: 426645 - DNA, 15 bp, Homo sapiens
atagaggaaaagtgg

SEQ ID NO: 426646 - DNA, 15 bp, Homo sapiens
aatagaggaaaagtg

SEQ ID NO: 426647 - DNA, 15 bp, Homo sapiens
caatagaggaaaagt

SEQ ID NO: 426648 - DNA, 15 bp, Homo sapiens
tcaatagaggaaaag

SEQ ID NO: 426649 - DNA, 15 bp, Homo sapiens
ctcaatagaggaaaa

SEQ ID NO: 426650 - DNA, 15 bp, Homo sapiens
actcaatagaggaaa

SEQ ID NO: 426651 - DNA, 15 bp, Homo sapiens
cactcaatagaggaa

SEQ ID NO: 426652 - DNA, 15 bp, Homo sapiens
gcactcaatagagga

SEQ ID NO: 426653 - DNA, 15 bp, Homo sapiens
ggcactcaatagagg

SEQ ID NO: 426654 - DNA, 15 bp, Homo sapiens
tggcactcaatagag

SEQ ID NO: 426655 - DNA, 15 bp, Homo sapiens
gtggcactcaataga

SEQ ID NO: 426656 - DNA, 15 bp, Homo sapiens
agtggcactcaatag

SEQ ID NO: 426657 - DNA, 15 bp, Homo sapiens
cagtggcactcaata

SEQ ID NO: 426658 - DNA, 15 bp, Homo sapiens
tcagtggcactcaat

SEQ ID NO: 426659 - DNA, 15 bp, Homo sapiens
gtcagtggcactcaa

SEQ ID NO: 426660 - DNA, 15 bp, Homo sapiens
ggtcagtggcactca

SEQ ID NO: 426661 - DNA, 15 bp, Homo sapiens
gggtcagtggcactc

SEQ ID NO: 426662 - DNA, 15 bp, Homo sapiens
tgggtcagtggcact

SEQ ID NO: 426663 - DNA, 15 bp, Homo sapiens
atgggtcagtggcac

SEQ ID NO: 426664 - DNA, 15 bp, Homo sapiens
tatgggtcagtggca

SEQ ID NO: 426665 - DNA, 15 bp, Homo sapiens
ttatgggtcagtggc

SEQ ID NO: 426666 - DNA, 15 bp, Homo sapiens
cttatgggtcagtgg

SEQ ID NO: 426667 - DNA, 15 bp, Homo sapiens
tcttatgggtcagtg

SEQ ID NO: 426668 - DNA, 15 bp, Homo sapiens
ttcttatgggtcagt

SEQ ID NO: 426669 - DNA, 15 bp, Homo sapiens
tttcttatgggtcag

SEQ ID NO: 426670 - DNA, 15 bp, Homo sapiens
ttttcttatgggtca

SEQ ID NO: 426671 - DNA, 15 bp, Homo sapiens
tttttcttatgggtc

SEQ ID NO: 426672 - DNA, 15 bp, Homo sapiens
ttttttcttatgggt

SEQ ID NO: 426673 - DNA, 15 bp, Homo sapiens
cttttttcttatggg

SEQ ID NO: 426674 - DNA, 15 bp, Homo sapiens
tcttttttcttatgg

SEQ ID NO: 426675 - DNA, 15 bp, Homo sapiens
atcttttttcttatg

SEQ ID NO: 426676 - DNA, 15 bp, Homo sapiens
gatcttttttcttat

SEQ ID NO: 426677 - DNA, 15 bp, Homo sapiens
tgatcttttttctta

SEQ ID NO: 426678 - DNA, 15 bp, Homo sapiens
ttgatcttttttctt

SEQ ID NO: 426679 - DNA, 15 bp, Homo sapiens
attgatcttttttct

SEQ ID NO: 426680 - DNA, 15 bp, Homo sapiens
tattgatcttttttc

SEQ ID NO: 426681 - DNA, 15 bp, Homo sapiens
ctattgatctttttt

SEQ ID NO: 426682 - DNA, 15 bp, Homo sapiens
actattgatcttttt

SEQ ID NO: 426683 - DNA, 15 bp, Homo sapiens
gactattgatctttt

SEQ ID NO: 426684 - DNA, 15 bp, Homo sapiens
agactattgatcttt

SEQ ID NO: 426685 - DNA, 15 bp, Homo sapiens
tagactattgatctt

SEQ ID NO: 426686 - DNA, 15 bp, Homo sapiens
ttagactattgatct

SEQ ID NO: 426687 - DNA, 15 bp, Homo sapiens
tttagactattgatc

SEQ ID NO: 426688 - DNA, 15 bp, Homo sapiens
atttagactattgat

SEQ ID NO: 426689 - DNA, 15 bp, Homo sapiens
catttagactattga

SEQ ID NO: 426690 - DNA, 15 bp, Homo sapiens
acatttagactattg

SEQ ID NO: 426691 - DNA, 15 bp, Homo sapiens
tacatttagactatt

SEQ ID NO: 426692 - DNA, 15 bp, Homo sapiens
gtacatttagactat

SEQ ID NO: 426693 - DNA, 15 bp, Homo sapiens
tgtacatttagacta

SEQ ID NO: 426694 - DNA, 15 bp, Homo sapiens
ttgtacatttagact

SEQ ID NO: 426695 - DNA, 15 bp, Homo sapiens
cttgtacatttagac

SEQ ID NO: 426696 - DNA, 15 bp, Homo sapiens
acttgtacatttaga

SEQ ID NO: 426697 - DNA, 15 bp, Homo sapiens
tacttgtacatttag

SEQ ID NO: 426698 - DNA, 15 bp, Homo sapiens
gtacttgtacattta

SEQ ID NO: 426699 - DNA, 15 bp, Homo sapiens
tgtacttgtacattt

SEQ ID NO: 426700 - DNA, 15 bp, Homo sapiens
ttgtacttgtacatt

SEQ ID NO: 426701 - DNA, 15 bp, Homo sapiens
tttgtacttgtacat

SEQ ID NO: 426702 - DNA, 15 bp, Homo sapiens
ctttgtacttgtaca

SEQ ID NO: 426703 - DNA, 15 bp, Homo sapiens
actttgtacttgtac

SEQ ID NO: 426704 - DNA, 15 bp, Homo sapiens
cactttgtacttgta

SEQ ID NO: 426705 - DNA, 15 bp, Homo sapiens
tcactttgtacttgt

SEQ ID NO: 426706 - DNA, 15 bp, Homo sapiens
gtcactttgtacttg

SEQ ID NO: 426707 - DNA, 15 bp, Homo sapiens
agtcactttgtactt

SEQ ID NO: 426708 - DNA, 15 bp, Homo sapiens
aagtcactttgtact

SEQ ID NO: 426709 - DNA, 15 bp, Homo sapiens
taagtcactttgtac

SEQ ID NO: 426710 - DNA, 15 bp, Homo sapiens
ttaagtcactttgta

SEQ ID NO: 426711 - DNA, 15 bp, Homo sapiens
attaagtcactttgt

SEQ ID NO: 426712 - DNA, 15 bp, Homo sapiens
gattaagtcactttg

SEQ ID NO: 426713 - DNA, 15 bp, Homo sapiens
cgattaagtcacttt

SEQ ID NO: 426714 - DNA, 15 bp, Homo sapiens
tcgattaagtcactt

SEQ ID NO: 426715 - DNA, 15 bp, Homo sapiens
ttcgattaagtcact

SEQ ID NO: 426716 - DNA, 15 bp, Homo sapiens
attcgattaagtcac

SEQ ID NO: 426717 - DNA, 15 bp, Homo sapiens
aattcgattaagtca

SEQ ID NO: 426718 - DNA, 15 bp, Homo sapiens
aaattcgattaagtc

SEQ ID NO: 426719 - DNA, 15 bp, Homo sapiens
aaaattcgattaagt

SEQ ID NO: 426720 - DNA, 15 bp, Homo sapiens
aaaaattcgattaag

SEQ ID NO: 426721 - DNA, 15 bp, Homo sapiens
aaaaaattcgattaa

SEQ ID NO: 426722 - DNA, 15 bp, Homo sapiens
aaaaaaattcgatta

SEQ ID NO: 426723 - DNA, 15 bp, Homo sapiens
taaaaaaattcgatt

SEQ ID NO: 426724 - DNA, 15 bp, Homo sapiens
gtaaaaaaattcgat

SEQ ID NO: 426725 - DNA, 15 bp, Homo sapiens
tgtaaaaaaattcga

SEQ ID NO: 426726 - DNA, 15 bp, Homo sapiens
ttgtaaaaaaattcg

SEQ ID NO: 426727 - DNA, 15 bp, Homo sapiens
tttgtaaaaaaattc

SEQ ID NO: 426728 - DNA, 15 bp, Homo sapiens
ttttgtaaaaaaatt

SEQ ID NO: 426729 - DNA, 15 bp, Homo sapiens
tttttgtaaaaaaat

SEQ ID NO: 426730 - DNA, 15 bp, Homo sapiens
ctttttgtaaaaaaa

SEQ ID NO: 426731 - DNA, 15 bp, Homo sapiens
tctttttgtaaaaaa

SEQ ID NO: 426732 - DNA, 15 bp, Homo sapiens
ctctttttgtaaaaa

SEQ ID NO: 426733 - DNA, 15 bp, Homo sapiens
tctctttttgtaaaa

SEQ ID NO: 426734 - DNA, 15 bp, Homo sapiens
ttctctttttgtaaa

SEQ ID NO: 426735 - DNA, 15 bp, Homo sapiens
tttctctttttgtaa

SEQ ID NO: 426736 - DNA, 15 bp, Homo sapiens
ttttctctttttgta

SEQ ID NO: 426737 - DNA, 15 bp, Homo sapiens
attttctctttttgt

SEQ ID NO: 426738 - DNA, 15 bp, Homo sapiens
aattttctctttttg

SEQ ID NO: 426739 - DNA, 15 bp, Homo sapiens
gaattttctcttttt

SEQ ID NO: 426740 - DNA, 15 bp, Homo sapiens
tgaattttctctttt

SEQ ID NO: 426741 - DNA, 15 bp, Homo sapiens
ttgaattttctcttt

SEQ ID NO: 426742 - DNA, 15 bp, Homo sapiens
attgaattttctctt

SEQ ID NO: 426743 - DNA, 15 bp, Homo sapiens
gattgaattttctct

SEQ ID NO: 426744 - DNA, 15 bp, Homo sapiens
ggattgaattttctc

SEQ ID NO: 426745 - DNA, 15 bp, Homo sapiens
tggattgaattttct

SEQ ID NO: 426746 - DNA, 15 bp, Homo sapiens
atggattgaattttc

SEQ ID NO: 426747 - DNA, 15 bp, Homo sapiens
aatggattgaatttt

SEQ ID NO: 426748 - DNA, 15 bp, Homo sapiens
aaatggattgaattt

SEQ ID NO: 426749 - DNA, 15 bp, Homo sapiens
caaatggattgaatt

SEQ ID NO: 426750 - DNA, 15 bp, Homo sapiens
acaaatggattgaat

SEQ ID NO: 426751 - DNA, 15 bp, Homo sapiens
aacaaatggattgaa

SEQ ID NO: 426752 - DNA, 15 bp, Homo sapiens
aaacaaatggattga

SEQ ID NO: 426753 - DNA, 15 bp, Homo sapiens
aaaacaaatggattg

SEQ ID NO: 426754 - DNA, 15 bp, Homo sapiens
aaaaacaaatggatt

SEQ ID NO: 426755 - DNA, 15 bp, Homo sapiens
taaaaacaaatggat

SEQ ID NO: 426756 - DNA, 15 bp, Homo sapiens
ttaaaaacaaatgga

SEQ ID NO: 426757 - DNA, 15 bp, Homo sapiens
cttaaaaacaaatgg

SEQ ID NO: 426758 - DNA, 15 bp, Homo sapiens
acttaaaaacaaatg

SEQ ID NO: 426759 - DNA, 15 bp, Homo sapiens
aacttaaaaacaaat

SEQ ID NO: 426760 - DNA, 15 bp, Homo sapiens
aaacttaaaaacaaa

SEQ ID NO: 426761 - DNA, 15 bp, Homo sapiens
taaacttaaaaacaa

SEQ ID NO: 426762 - DNA, 15 bp, Homo sapiens
ttaaacttaaaaaca

SEQ ID NO: 426763 - DNA, 15 bp, Homo sapiens
attaaacttaaaaac

SEQ ID NO: 426764 - DNA, 15 bp, Homo sapiens
tattaaacttaaaaa

SEQ ID NO: 426765 - DNA, 15 bp, Homo sapiens
ttattaaacttaaaa

SEQ ID NO: 426766 - DNA, 15 bp, Homo sapiens
gttattaaacttaaa

SEQ ID NO: 426767 - DNA, 15 bp, Homo sapiens
cgttattaaacttaa

SEQ ID NO: 426768 - DNA, 15 bp, Homo sapiens
ccgttattaaactta

SEQ ID NO: 426769 - DNA, 15 bp, Homo sapiens
cccgttattaaactt

SEQ ID NO: 426770 - DNA, 15 bp, Homo sapiens
ccccgttattaaact

SEQ ID NO: 426771 - DNA, 15 bp, Homo sapiens
accccgttattaaac

SEQ ID NO: 426772 - DNA, 15 bp, Homo sapiens
caccccgttattaaa

SEQ ID NO: 426773 - DNA, 15 bp, Homo sapiens
tcaccccgttattaa

SEQ ID NO: 426774 - DNA, 15 bp, Homo sapiens
ttcaccccgttatta

SEQ ID NO: 426775 - DNA, 15 bp, Homo sapiens
tttcaccccgttatt

SEQ ID NO: 426776 - DNA, 15 bp, Homo sapiens
ttttcaccccgttat

SEQ ID NO: 426777 - DNA, 15 bp, Homo sapiens
tttttcaccccgtta

SEQ ID NO: 426778 - DNA, 15 bp, Homo sapiens
ttttttcaccccgtt

SEQ ID NO: 426779 - DNA, 15 bp, Homo sapiens
cttttttcaccccgt

SEQ ID NO: 426780 - DNA, 15 bp, Homo sapiens
tcttttttcaccccg

SEQ ID NO: 426781 - DNA, 15 bp, Homo sapiens
ctcttttttcacccc

SEQ ID NO: 426782 - DNA, 15 bp, Homo sapiens
actcttttttcaccc

SEQ ID NO: 426783 - DNA, 15 bp, Homo sapiens
tactcttttttcacc

SEQ ID NO: 426784 - DNA, 15 bp, Homo sapiens
ttactcttttttcac

SEQ ID NO: 426785 - DNA, 15 bp, Homo sapiens
tttactcttttttca

SEQ ID NO: 426786 - DNA, 15 bp, Homo sapiens
gtttactcttttttc

SEQ ID NO: 426787 - DNA, 15 bp, Homo sapiens
agtttactctttttt

SEQ ID NO: 426788 - DNA, 15 bp, Homo sapiens
tagtttactcttttt

SEQ ID NO: 426789 - DNA, 15 bp, Homo sapiens
atagtttactctttt

SEQ ID NO: 426790 - DNA, 15 bp, Homo sapiens
aatagtttactcttt

SEQ ID NO: 426791 - DNA, 15 bp, Homo sapiens
caatagtttactctt

SEQ ID NO: 426792 - DNA, 15 bp, Homo sapiens
ccaatagtttactct

SEQ ID NO: 426793 - DNA, 15 bp, Homo sapiens
accaatagtttactc

SEQ ID NO: 426794 - DNA, 15 bp, Homo sapiens
aaccaatagtttact

SEQ ID NO: 426795 - DNA, 15 bp, Homo sapiens
taaccaatagtttac

SEQ ID NO: 426796 - DNA, 15 bp, Homo sapiens
ctaaccaatagttta

SEQ ID NO: 426797 - DNA, 15 bp, Homo sapiens
actaaccaatagttt

SEQ ID NO: 426798 - DNA, 15 bp, Homo sapiens
cactaaccaatagtt

SEQ ID NO: 426799 - DNA, 15 bp, Homo sapiens
acactaaccaatagt

SEQ ID NO: 426800 - DNA, 15 bp, Homo sapiens
cacactaaccaatag

SEQ ID NO: 426801 - DNA, 15 bp, Homo sapiens
acacactaaccaata

SEQ ID NO: 426802 - DNA, 15 bp, Homo sapiens
cacacactaaccaat

SEQ ID NO: 426803 - DNA, 15 bp, Homo sapiens
gcacacactaaccaa

SEQ ID NO: 426804 - DNA, 15 bp, Homo sapiens
ggcacacactaacca

SEQ ID NO: 426805 - DNA, 15 bp, Homo sapiens
tggcacacactaacc

SEQ ID NO: 426806 - DNA, 15 bp, Homo sapiens
gtggcacacactaac

SEQ ID NO: 426807 - DNA, 15 bp, Homo sapiens
agtggcacacactaa

SEQ ID NO: 426808 - DNA, 15 bp, Homo sapiens
tagtggcacacacta

SEQ ID NO: 426809 - DNA, 15 bp, Homo sapiens
ttagtggcacacact

SEQ ID NO: 426810 - DNA, 15 bp, Homo sapiens
gttagtggcacacac

SEQ ID NO: 426811 - DNA, 15 bp, Homo sapiens
ggttagtggcacaca

SEQ ID NO: 426812 - DNA, 15 bp, Homo sapiens
tggttagtggcacac

SEQ ID NO: 426813 - DNA, 15 bp, Homo sapiens
ttggttagtggcaca

SEQ ID NO: 426814 - DNA, 15 bp, Homo sapiens
attggttagtggcac

SEQ ID NO: 426815 - DNA, 15 bp, Homo sapiens
aattggttagtggca

SEQ ID NO: 426816 - DNA, 15 bp, Homo sapiens
taattggttagtggc

SEQ ID NO: 426817 - DNA, 15 bp, Homo sapiens
ataattggttagtgg

SEQ ID NO: 426818 - DNA, 15 bp, Homo sapiens
aataattggttagtg

SEQ ID NO: 426819 - DNA, 15 bp, Homo sapiens
taataattggttagt

SEQ ID NO: 426820 - DNA, 15 bp, Homo sapiens
ataataattggttag

SEQ ID NO: 426821 - DNA, 15 bp, Homo sapiens
cataataattggtta

SEQ ID NO: 426822 - DNA, 15 bp, Homo sapiens
acataataattggtt

SEQ ID NO: 426823 - DNA, 15 bp, Homo sapiens
aacataataattggt

SEQ ID NO: 426824 - DNA, 15 bp, Homo sapiens
taacataataattgg

SEQ ID NO: 426825 - DNA, 15 bp, Homo sapiens
ataacataataattg

SEQ ID NO: 426826 - DNA, 15 bp, Homo sapiens
aataacataataatt

SEQ ID NO: 426827 - DNA, 15 bp, Homo sapiens
taataacataataat

SEQ ID NO: 426828 - DNA, 15 bp, Homo sapiens
ataataacataataa

SEQ ID NO: 426829 - DNA, 15 bp, Homo sapiens
cataataacataata

SEQ ID NO: 426830 - DNA, 15 bp, Homo sapiens
acataataacataat

SEQ ID NO: 426831 - DNA, 15 bp, Homo sapiens
aacataataacataa

SEQ ID NO: 426832 - DNA, 15 bp, Homo sapiens
aaacataataacata

SEQ ID NO: 426833 - DNA, 15 bp, Homo sapiens
gaaacataataacat

SEQ ID NO: 426834 - DNA, 15 bp, Homo sapiens
tgaaacataataaca

SEQ ID NO: 426835 - DNA, 15 bp, Homo sapiens
atgaaacataataac

SEQ ID NO: 426836 - DNA, 15 bp, Homo sapiens
catgaaacataataa

SEQ ID NO: 426837 - DNA, 15 bp, Homo sapiens
ccatgaaacataata

SEQ ID NO: 426838 - DNA, 15 bp, Homo sapiens
accatgaaacataat

SEQ ID NO: 426839 - DNA, 15 bp, Homo sapiens
gaccatgaaacataa

SEQ ID NO: 426840 - DNA, 15 bp, Homo sapiens
agaccatgaaacata

SEQ ID NO: 426841 - DNA, 15 bp, Homo sapiens
tagaccatgaaacat

SEQ ID NO: 426842 - DNA, 15 bp, Homo sapiens
gtagaccatgaaaca

SEQ ID NO: 426843 - DNA, 15 bp, Homo sapiens
agtagaccatgaaac

SEQ ID NO: 426844 - DNA, 15 bp, Homo sapiens
aagtagaccatgaaa

SEQ ID NO: 426845 - DNA, 15 bp, Homo sapiens
aaagtagaccatgaa

SEQ ID NO: 426846 - DNA, 15 bp, Homo sapiens
taaagtagaccatga

SEQ ID NO: 426847 - DNA, 15 bp, Homo sapiens
ttaaagtagaccatg

SEQ ID NO: 426848 - DNA, 15 bp, Homo sapiens
tttaaagtagaccat

SEQ ID NO: 426849 - DNA, 15 bp, Homo sapiens
gtttaaagtagacca

SEQ ID NO: 426850 - DNA, 15 bp, Homo sapiens
tgtttaaagtagacc

SEQ ID NO: 426851 - DNA, 15 bp, Homo sapiens
gtgtttaaagtagac

SEQ ID NO: 426852 - DNA, 15 bp, Homo sapiens
agtgtttaaagtaga

SEQ ID NO: 426853 - DNA, 15 bp, Homo sapiens
aagtgtttaaagtag

SEQ ID NO: 426854 - DNA, 15 bp, Homo sapiens
aaagtgtttaaagta

SEQ ID NO: 426855 - DNA, 15 bp, Homo sapiens
aaaagtgtttaaagt

SEQ ID NO: 426856 - DNA, 15 bp, Homo sapiens
taaaagtgtttaaag

SEQ ID NO: 426857 - DNA, 15 bp, Homo sapiens
gtaaaagtgtttaaa

SEQ ID NO: 426858 - DNA, 15 bp, Homo sapiens
tgtaaaagtgtttaa

SEQ ID NO: 426859 - DNA, 15 bp, Homo sapiens
atgtaaaagtgttta

SEQ ID NO: 426860 - DNA, 15 bp, Homo sapiens
catgtaaaagtgttt

SEQ ID NO: 426861 - DNA, 15 bp, Homo sapiens
acatgtaaaagtgtt

SEQ ID NO: 426862 - DNA, 15 bp, Homo sapiens
tacatgtaaaagtgt

SEQ ID NO: 426863 - DNA, 15 bp, Homo sapiens
atacatgtaaaagtg

SEQ ID NO: 426864 - DNA, 15 bp, Homo sapiens
aatacatgtaaaagt

SEQ ID NO: 426865 - DNA, 15 bp, Homo sapiens
caatacatgtaaaag

SEQ ID NO: 426866 - DNA, 15 bp, Homo sapiens
acaatacatgtaaaa

SEQ ID NO: 426867 - DNA, 15 bp, Homo sapiens
aacaatacatgtaaa

SEQ ID NO: 426868 - DNA, 15 bp, Homo sapiens
aaacaatacatgtaa

SEQ ID NO: 426869 - DNA, 15 bp, Homo sapiens
aaaacaatacatgta

SEQ ID NO: 426870 - DNA, 15 bp, Homo sapiens
taaaacaatacatgt

SEQ ID NO: 426871 - DNA, 15 bp, Homo sapiens
gtaaaacaatacatg

SEQ ID NO: 426872 - DNA, 15 bp, Homo sapiens
agtaaaacaatacat

SEQ ID NO: 426873 - DNA, 15 bp, Homo sapiens
aagtaaaacaataca

SEQ ID NO: 426874 - DNA, 15 bp, Homo sapiens
taagtaaaacaatac

SEQ ID NO: 426875 - DNA, 15 bp, Homo sapiens
ctaagtaaaacaata

SEQ ID NO: 426876 - DNA, 15 bp, Homo sapiens
actaagtaaaacaat

SEQ ID NO: 426877 - DNA, 15 bp, Homo sapiens
gactaagtaaaacaa

SEQ ID NO: 426878 - DNA, 15 bp, Homo sapiens
agactaagtaaaaca

SEQ ID NO: 426879 - DNA, 15 bp, Homo sapiens
gagactaagtaaaac

SEQ ID NO: 426880 - DNA, 15 bp, Homo sapiens
ggagactaagtaaaa

SEQ ID NO: 426881 - DNA, 15 bp, Homo sapiens
gggagactaagtaaa

SEQ ID NO: 426882 - DNA, 15 bp, Homo sapiens
tgggagactaagtaa

SEQ ID NO: 426883 - DNA, 15 bp, Homo sapiens
ttgggagactaagta

SEQ ID NO: 426884 - DNA, 15 bp, Homo sapiens
cttgggagactaagt

SEQ ID NO: 426885 - DNA, 15 bp, Homo sapiens
gcttgggagactaag

SEQ ID NO: 426886 - DNA, 15 bp, Homo sapiens
tgcttgggagactaa

SEQ ID NO: 426887 - DNA, 15 bp, Homo sapiens
ttgcttgggagacta

SEQ ID NO: 426888 - DNA, 15 bp, Homo sapiens
gttgcttgggagact

SEQ ID NO: 426889 - DNA, 15 bp, Homo sapiens
ggttgcttgggagac

SEQ ID NO: 426890 - DNA, 15 bp, Homo sapiens
gggttgcttgggaga

SEQ ID NO: 426891 - DNA, 15 bp, Homo sapiens
tgggttgcttgggag

SEQ ID NO: 426892 - DNA, 15 bp, Homo sapiens
ctgggttgcttggga

SEQ ID NO: 426893 - DNA, 15 bp, Homo sapiens
tctgggttgcttggg

SEQ ID NO: 426894 - DNA, 15 bp, Homo sapiens
ttctgggttgcttgg

SEQ ID NO: 426895 - DNA, 15 bp, Homo sapiens
tttctgggttgcttg

SEQ ID NO: 426896 - DNA, 15 bp, Homo sapiens
ctttctgggttgctt

SEQ ID NO: 426897 - DNA, 15 bp, Homo sapiens
cctttctgggttgct

SEQ ID NO: 426898 - DNA, 15 bp, Homo sapiens
gcctttctgggttgc

SEQ ID NO: 426899 - DNA, 15 bp, Homo sapiens
tgcctttctgggttg

SEQ ID NO: 426900 - DNA, 15 bp, Homo sapiens
ttgcctttctgggtt

SEQ ID NO: 426901 - DNA, 15 bp, Homo sapiens
tttgcctttctgggt

SEQ ID NO: 426902 - DNA, 15 bp, Homo sapiens
atttgcctttctggg

SEQ ID NO: 426903 - DNA, 15 bp, Homo sapiens
tatttgcctttctgg

SEQ ID NO: 426904 - DNA, 15 bp, Homo sapiens
atatttgcctttctg

SEQ ID NO: 426905 - DNA, 15 bp, Homo sapiens
aatatttgcctttct

SEQ ID NO: 426906 - DNA, 15 bp, Homo sapiens
taatatttgcctttc

SEQ ID NO: 426907 - DNA, 15 bp, Homo sapiens
ataatatttgccttt

SEQ ID NO: 426908 - DNA, 15 bp, Homo sapiens
aataatatttgcctt

SEQ ID NO: 426909 - DNA, 15 bp, Homo sapiens
taataatatttgcct

SEQ ID NO: 426910 - DNA, 15 bp, Homo sapiens
ataataatatttgcc

SEQ ID NO: 426911 - DNA, 15 bp, Homo sapiens
aataataatatttgc

SEQ ID NO: 426912 - DNA, 15 bp, Homo sapiens
gaataataatatttg

SEQ ID NO: 426913 - DNA, 15 bp, Homo sapiens
ggaataataatattt

SEQ ID NO: 426914 - DNA, 15 bp, Homo sapiens
gggaataataatatt

SEQ ID NO: 426915 - DNA, 15 bp, Homo sapiens
tgggaataataatat

SEQ ID NO: 426916 - DNA, 15 bp, Homo sapiens
atgggaataataata

SEQ ID NO: 426917 - DNA, 15 bp, Homo sapiens
aatgggaataataat

SEQ ID NO: 426918 - DNA, 15 bp, Homo sapiens
aaatgggaataataa

SEQ ID NO: 426919 - DNA, 15 bp, Homo sapiens
aaaatgggaataata

SEQ ID NO: 426920 - DNA, 15 bp, Homo sapiens
aaaaatgggaataat

SEQ ID NO: 426921 - DNA, 15 bp, Homo sapiens
taaaaatgggaataa

SEQ ID NO: 426922 - DNA, 15 bp, Homo sapiens
gtaaaaatgggaata

SEQ ID NO: 426923 - DNA, 15 bp, Homo sapiens
tgtaaaaatgggaat

SEQ ID NO: 426924 - DNA, 15 bp, Homo sapiens
ctgtaaaaatgggaa

SEQ ID NO: 426925 - DNA, 15 bp, Homo sapiens
gctgtaaaaatggga

SEQ ID NO: 426926 - DNA, 15 bp, Homo sapiens
agctgtaaaaatggg

SEQ ID NO: 426927 - DNA, 15 bp, Homo sapiens
cagctgtaaaaatgg

SEQ ID NO: 426928 - DNA, 15 bp, Homo sapiens
tcagctgtaaaaatg

SEQ ID NO: 426929 - DNA, 15 bp, Homo sapiens
ctcagctgtaaaaat

SEQ ID NO: 426930 - DNA, 15 bp, Homo sapiens
cctcagctgtaaaaa

SEQ ID NO: 426931 - DNA, 15 bp, Homo sapiens
tcctcagctgtaaaa

SEQ ID NO: 426932 - DNA, 15 bp, Homo sapiens
ttcctcagctgtaaa

SEQ ID NO: 426933 - DNA, 15 bp, Homo sapiens
tttcctcagctgtaa

SEQ ID NO: 426934 - DNA, 15 bp, Homo sapiens
gtttcctcagctgta

SEQ ID NO: 426935 - DNA, 15 bp, Homo sapiens
tgtttcctcagctgt

SEQ ID NO: 426936 - DNA, 15 bp, Homo sapiens
ttgtttcctcagctg

SEQ ID NO: 426937 - DNA, 15 bp, Homo sapiens
tttgtttcctcagct

SEQ ID NO: 426938 - DNA, 15 bp, Homo sapiens
ttttgtttcctcagc

SEQ ID NO: 426939 - DNA, 15 bp, Homo sapiens
tttttgtttcctcag

SEQ ID NO: 426940 - DNA, 15 bp, Homo sapiens
gtttttgtttcctca

SEQ ID NO: 426941 - DNA, 15 bp, Homo sapiens
agtttttgtttcctc

SEQ ID NO: 426942 - DNA, 15 bp, Homo sapiens
gagtttttgtttcct

SEQ ID NO: 426943 - DNA, 15 bp, Homo sapiens
tgagtttttgtttcc

SEQ ID NO: 426944 - DNA, 15 bp, Homo sapiens
ctgagtttttgtttc

SEQ ID NO: 426945 - DNA, 15 bp, Homo sapiens
tctgagtttttgttt

SEQ ID NO: 426946 - DNA, 15 bp, Homo sapiens
ctctgagtttttgtt

SEQ ID NO: 426947 - DNA, 15 bp, Homo sapiens
tctctgagtttttgt

SEQ ID NO: 426948 - DNA, 15 bp, Homo sapiens
gtctctgagtttttg

SEQ ID NO: 426949 - DNA, 15 bp, Homo sapiens
cgtctctgagttttt

SEQ ID NO: 426950 - DNA, 15 bp, Homo sapiens
acgtctctgagtttt

SEQ ID NO: 426951 - DNA, 15 bp, Homo sapiens
aacgtctctgagttt

SEQ ID NO: 426952 - DNA, 15 bp, Homo sapiens
taacgtctctgagtt

SEQ ID NO: 426953 - DNA, 15 bp, Homo sapiens
ttaacgtctctgagt

SEQ ID NO: 426954 - DNA, 15 bp, Homo sapiens
tttaacgtctctgag

SEQ ID NO: 426955 - DNA, 15 bp, Homo sapiens
atttaacgtctctga

SEQ ID NO: 426956 - DNA, 15 bp, Homo sapiens
aatttaacgtctctg

SEQ ID NO: 426957 - DNA, 15 bp, Homo sapiens
caatttaacgtctct

SEQ ID NO: 426958 - DNA, 15 bp, Homo sapiens
tcaatttaacgtctc

SEQ ID NO: 426959 - DNA, 15 bp, Homo sapiens
gtcaatttaacgtct

SEQ ID NO: 426960 - DNA, 15 bp, Homo sapiens
agtcaatttaacgtc

SEQ ID NO: 426961 - DNA, 15 bp, Homo sapiens
aagtcaatttaacgt

SEQ ID NO: 426962 - DNA, 15 bp, Homo sapiens
caagtcaatttaacg

SEQ ID NO: 426963 - DNA, 15 bp, Homo sapiens
acaagtcaatttaac

SEQ ID NO: 426964 - DNA, 15 bp, Homo sapiens
gacaagtcaatttaa

SEQ ID NO: 426965 - DNA, 15 bp, Homo sapiens
ggacaagtcaattta

SEQ ID NO: 426966 - DNA, 15 bp, Homo sapiens
tggacaagtcaattt

SEQ ID NO: 426967 - DNA, 15 bp, Homo sapiens
ttggacaagtcaatt

SEQ ID NO: 426968 - DNA, 15 bp, Homo sapiens
tttggacaagtcaat

SEQ ID NO: 426969 - DNA, 15 bp, Homo sapiens
ctttggacaagtcaa

SEQ ID NO: 426970 - DNA, 15 bp, Homo sapiens
actttggacaagtca

SEQ ID NO: 426971 - DNA, 15 bp, Homo sapiens
gactttggacaagtc

SEQ ID NO: 426972 - DNA, 15 bp, Homo sapiens
tgactttggacaagt

SEQ ID NO: 426973 - DNA, 15 bp, Homo sapiens
gtgactttggacaag

SEQ ID NO: 426974 - DNA, 15 bp, Homo sapiens
tgtgactttggacaa

SEQ ID NO: 426975 - DNA, 15 bp, Homo sapiens
ctgtgactttggaca

SEQ ID NO: 426976 - DNA, 15 bp, Homo sapiens
tctgtgactttggac

SEQ ID NO: 426977 - DNA, 15 bp, Homo sapiens
ctctgtgactttgga

SEQ ID NO: 426978 - DNA, 15 bp, Homo sapiens
actctgtgactttgg

SEQ ID NO: 426979 - DNA, 15 bp, Homo sapiens
aactctgtgactttg

SEQ ID NO: 426980 - DNA, 15 bp, Homo sapiens
caactctgtgacttt

SEQ ID NO: 426981 - DNA, 15 bp, Homo sapiens
ccaactctgtgactt

SEQ ID NO: 426982 - DNA, 15 bp, Homo sapiens
gccaactctgtgact

SEQ ID NO: 426983 - DNA, 15 bp, Homo sapiens
tgccaactctgtgac

SEQ ID NO: 426984 - DNA, 15 bp, Homo sapiens
atgccaactctgtga

SEQ ID NO: 426985 - DNA, 15 bp, Homo sapiens
tatgccaactctgtg

SEQ ID NO: 426986 - DNA, 15 bp, Homo sapiens
atatgccaactctgt

SEQ ID NO: 426987 - DNA, 15 bp, Homo sapiens
catatgccaactctg

SEQ ID NO: 426988 - DNA, 15 bp, Homo sapiens
ccatatgccaactct

SEQ ID NO: 426989 - DNA, 15 bp, Homo sapiens
accatatgccaactc

SEQ ID NO: 426990 - DNA, 15 bp, Homo sapiens
caccatatgccaact

SEQ ID NO: 426991 - DNA, 15 bp, Homo sapiens
tcaccatatgccaac

SEQ ID NO: 426992 - DNA, 15 bp, Homo sapiens
atcaccatatgccaa

SEQ ID NO: 426993 - DNA, 15 bp, Homo sapiens
catcaccatatgcca

SEQ ID NO: 426994 - DNA, 15 bp, Homo sapiens
gcatcaccatatgcc

SEQ ID NO: 426995 - DNA, 15 bp, Homo sapiens
ggcatcaccatatgc

SEQ ID NO: 426996 - DNA, 15 bp, Homo sapiens
tggcatcaccatatg

SEQ ID NO: 426997 - DNA, 15 bp, Homo sapiens
ctggcatcaccatat

SEQ ID NO: 426998 - DNA, 15 bp, Homo sapiens
cctggcatcaccata

SEQ ID NO: 426999 - DNA, 15 bp, Homo sapiens
tcctggcatcaccat

SEQ ID NO: 427000 - DNA, 15 bp, Homo sapiens
ctcctggcatcacca

SEQ ID NO: 427001 - DNA, 15 bp, Homo sapiens
cctcctggcatcacc

SEQ ID NO: 427002 - DNA, 15 bp, Homo sapiens
gcctcctggcatcac

SEQ ID NO: 427003 - DNA, 15 bp, Homo sapiens
tgcctcctggcatca

SEQ ID NO: 427004 - DNA, 15 bp, Homo sapiens
ttgcctcctggcatc

SEQ ID NO: 427005 - DNA, 15 bp, Homo sapiens
tttgcctcctggcat

SEQ ID NO: 427006 - DNA, 15 bp, Homo sapiens
gtttgcctcctggca

SEQ ID NO: 427007 - DNA, 15 bp, Homo sapiens
tgtttgcctcctggc

SEQ ID NO: 427008 - DNA, 15 bp, Homo sapiens
ttgtttgcctcctgg

SEQ ID NO: 427009 - DNA, 15 bp, Homo sapiens
tttgtttgcctcctg

SEQ ID NO: 427010 - DNA, 15 bp, Homo sapiens
gtttgtttgcctcct

SEQ ID NO: 427011 - DNA, 15 bp, Homo sapiens
tgtttgtttgcctcc

SEQ ID NO: 427012 - DNA, 15 bp, Homo sapiens
ttgtttgtttgcctc

SEQ ID NO: 427013 - DNA, 15 bp, Homo sapiens
tttgtttgtttgcct

SEQ ID NO: 427014 - DNA, 15 bp, Homo sapiens
atttgtttgtttgcc

SEQ ID NO: 427015 - DNA, 15 bp, Homo sapiens
catttgtttgtttgc

SEQ ID NO: 427016 - DNA, 15 bp, Homo sapiens
ccatttgtttgtttg

SEQ ID NO: 427017 - DNA, 15 bp, Homo sapiens
gccatttgtttgttt

SEQ ID NO: 427018 - DNA, 15 bp, Homo sapiens
ggccatttgtttgtt

SEQ ID NO: 427019 - DNA, 15 bp, Homo sapiens
gggccatttgtttgt

SEQ ID NO: 427020 - DNA, 15 bp, Homo sapiens
ggggccatttgtttg

SEQ ID NO: 427021 - DNA, 15 bp, Homo sapiens
tggggccatttgttt

SEQ ID NO: 427022 - DNA, 15 bp, Homo sapiens
atggggccatttgtt

SEQ ID NO: 427023 - DNA, 15 bp, Homo sapiens
gatggggccatttgt

SEQ ID NO: 427024 - DNA, 15 bp, Homo sapiens
agatggggccatttg

SEQ ID NO: 427025 - DNA, 15 bp, Homo sapiens
cagatggggccattt

SEQ ID NO: 427026 - DNA, 15 bp, Homo sapiens
gcagatggggccatt

SEQ ID NO: 427027 - DNA, 15 bp, Homo sapiens
agcagatggggccat

SEQ ID NO: 427028 - DNA, 15 bp, Homo sapiens
cagcagatggggcca

SEQ ID NO: 427029 - DNA, 15 bp, Homo sapiens
gcagcagatggggcc

SEQ ID NO: 427030 - DNA, 15 bp, Homo sapiens
agcagcagatggggc

SEQ ID NO: 427031 - DNA, 15 bp, Homo sapiens
gagcagcagatgggg

SEQ ID NO: 427032 - DNA, 15 bp, Homo sapiens
agagcagcagatggg

SEQ ID NO: 427033 - DNA, 15 bp, Homo sapiens
gagagcagcagatgg

SEQ ID NO: 427034 - DNA, 15 bp, Homo sapiens
tgagagcagcagatg

SEQ ID NO: 427035 - DNA, 15 bp, Homo sapiens
gtgagagcagcagat

SEQ ID NO: 427036 - DNA, 15 bp, Homo sapiens
agtgagagcagcaga

SEQ ID NO: 427037 - DNA, 15 bp, Homo sapiens
aagtgagagcagcag

SEQ ID NO: 427038 - DNA, 15 bp, Homo sapiens
taagtgagagcagca

SEQ ID NO: 427039 - DNA, 15 bp, Homo sapiens
ataagtgagagcagc

SEQ ID NO: 427040 - DNA, 15 bp, Homo sapiens
gataagtgagagcag

SEQ ID NO: 427041 - DNA, 15 bp, Homo sapiens
agataagtgagagca

SEQ ID NO: 427042 - DNA, 15 bp, Homo sapiens
aagataagtgagagc

SEQ ID NO: 427043 - DNA, 15 bp, Homo sapiens
aaagataagtgagag

SEQ ID NO: 427044 - DNA, 15 bp, Homo sapiens
aaaagataagtgaga

SEQ ID NO: 427045 - DNA, 15 bp, Homo sapiens
gaaaagataagtgag

SEQ ID NO: 427046 - DNA, 15 bp, Homo sapiens
tgaaaagataagtga

SEQ ID NO: 427047 - DNA, 15 bp, Homo sapiens
atgaaaagataagtg

SEQ ID NO: 427048 - DNA, 15 bp, Homo sapiens
gatgaaaagataagt

SEQ ID NO: 427049 - DNA, 15 bp, Homo sapiens
tgatgaaaagataag

SEQ ID NO: 427050 - DNA, 15 bp, Homo sapiens
ctgatgaaaagataa

SEQ ID NO: 427051 - DNA, 15 bp, Homo sapiens
cctgatgaaaagata

SEQ ID NO: 427052 - DNA, 15 bp, Homo sapiens
gcctgatgaaaagat

SEQ ID NO: 427053 - DNA, 15 bp, Homo sapiens
ggcctgatgaaaaga

SEQ ID NO: 427054 - DNA, 15 bp, Homo sapiens
tggcctgatgaaaag

SEQ ID NO: 427055 - DNA, 15 bp, Homo sapiens
atggcctgatgaaaa

SEQ ID NO: 427056 - DNA, 15 bp, Homo sapiens
catggcctgatgaaa

SEQ ID NO: 427057 - DNA, 15 bp, Homo sapiens
acatggcctgatgaa

SEQ ID NO: 427058 - DNA, 15 bp, Homo sapiens
aacatggcctgatga

SEQ ID NO: 427059 - DNA, 15 bp, Homo sapiens
caacatggcctgatg

SEQ ID NO: 427060 - DNA, 15 bp, Homo sapiens
gcaacatggcctgat

SEQ ID NO: 427061 - DNA, 15 bp, Homo sapiens
ggcaacatggcctga

SEQ ID NO: 427062 - DNA, 15 bp, Homo sapiens
gggcaacatggcctg

SEQ ID NO: 427063 - DNA, 15 bp, Homo sapiens
agggcaacatggcct

SEQ ID NO: 427064 - DNA, 15 bp, Homo sapiens
tagggcaacatggcc

SEQ ID NO: 427065 - DNA, 15 bp, Homo sapiens
atagggcaacatggc

SEQ ID NO: 427066 - DNA, 15 bp, Homo sapiens
gatagggcaacatgg

SEQ ID NO: 427067 - DNA, 15 bp, Homo sapiens
agatagggcaacatg

SEQ ID NO: 427068 - DNA, 15 bp, Homo sapiens
tagatagggcaacat

SEQ ID NO: 427069 - DNA, 15 bp, Homo sapiens
ttagatagggcaaca

SEQ ID NO: 427070 - DNA, 15 bp, Homo sapiens
tttagatagggcaac

SEQ ID NO: 427071 - DNA, 15 bp, Homo sapiens
ctttagatagggcaa

SEQ ID NO: 427072 - DNA, 15 bp, Homo sapiens
tctttagatagggca

SEQ ID NO: 427073 - DNA, 15 bp, Homo sapiens
ttctttagatagggc

SEQ ID NO: 427074 - DNA, 15 bp, Homo sapiens
tttctttagataggg

SEQ ID NO: 427075 - DNA, 15 bp, Homo sapiens
ttttctttagatagg

SEQ ID NO: 427076 - DNA, 15 bp, Homo sapiens
attttctttagatag

SEQ ID NO: 427077 - DNA, 15 bp, Homo sapiens
gattttctttagata

SEQ ID NO: 427078 - DNA, 15 bp, Homo sapiens
agattttctttagat

SEQ ID NO: 427079 - DNA, 15 bp, Homo sapiens
aagattttctttaga

SEQ ID NO: 427080 - DNA, 15 bp, Homo sapiens
taagattttctttag

SEQ ID NO: 427081 - DNA, 15 bp, Homo sapiens
ctaagattttcttta

SEQ ID NO: 427082 - DNA, 15 bp, Homo sapiens
actaagattttcttt

SEQ ID NO: 427083 - DNA, 15 bp, Homo sapiens
cactaagattttctt

SEQ ID NO: 427084 - DNA, 15 bp, Homo sapiens
tcactaagattttct

SEQ ID NO: 427085 - DNA, 15 bp, Homo sapiens
ttcactaagattttc

SEQ ID NO: 427086 - DNA, 15 bp, Homo sapiens
attcactaagatttt

SEQ ID NO: 427087 - DNA, 15 bp, Homo sapiens
cattcactaagattt

SEQ ID NO: 427088 - DNA, 15 bp, Homo sapiens
tcattcactaagatt

SEQ ID NO: 427089 - DNA, 15 bp, Homo sapiens
atcattcactaagat

SEQ ID NO: 427090 - DNA, 15 bp, Homo sapiens
tatcattcactaaga

SEQ ID NO: 427091 - DNA, 15 bp, Homo sapiens
gtatcattcactaag

SEQ ID NO: 427092 - DNA, 15 bp, Homo sapiens
agtatcattcactaa

SEQ ID NO: 427093 - DNA, 15 bp, Homo sapiens
aagtatcattcacta

SEQ ID NO: 427094 - DNA, 15 bp, Homo sapiens
gaagtatcattcact

SEQ ID NO: 427095 - DNA, 15 bp, Homo sapiens
tgaagtatcattcac

SEQ ID NO: 427096 - DNA, 15 bp, Homo sapiens
gtgaagtatcattca

SEQ ID NO: 427097 - DNA, 15 bp, Homo sapiens
ggtgaagtatcattc

SEQ ID NO: 427098 - DNA, 15 bp, Homo sapiens
tggtgaagtatcatt

SEQ ID NO: 427099 - DNA, 15 bp, Homo sapiens
ttggtgaagtatcat

SEQ ID NO: 427100 - DNA, 15 bp, Homo sapiens
cttggtgaagtatca

SEQ ID NO: 427101 - DNA, 15 bp, Homo sapiens
gcttggtgaagtatc

SEQ ID NO: 427102 - DNA, 15 bp, Homo sapiens
tgcttggtgaagtat

SEQ ID NO: 427103 - DNA, 15 bp, Homo sapiens
ttgcttggtgaagta

SEQ ID NO: 427104 - DNA, 15 bp, Homo sapiens
gttgcttggtgaagt

SEQ ID NO: 427105 - DNA, 15 bp, Homo sapiens
tgttgcttggtgaag

SEQ ID NO: 427106 - DNA, 15 bp, Homo sapiens
ctgttgcttggtgaa

SEQ ID NO: 427107 - DNA, 15 bp, Homo sapiens
tctgttgcttggtga

SEQ ID NO: 427108 - DNA, 15 bp, Homo sapiens
ttctgttgcttggtg

SEQ ID NO: 427109 - DNA, 15 bp, Homo sapiens
tttctgttgcttggt

SEQ ID NO: 427110 - DNA, 15 bp, Homo sapiens
atttctgttgcttgg

SEQ ID NO: 427111 - DNA, 15 bp, Homo sapiens
aatttctgttgcttg

SEQ ID NO: 427112 - DNA, 15 bp, Homo sapiens
aaatttctgttgctt

SEQ ID NO: 427113 - DNA, 15 bp, Homo sapiens
aaaatttctgttgct

SEQ ID NO: 427114 - DNA, 15 bp, Homo sapiens
gaaaatttctgttgc

SEQ ID NO: 427115 - DNA, 15 bp, Homo sapiens
agaaaatttctgttg

SEQ ID NO: 427116 - DNA, 15 bp, Homo sapiens
cagaaaatttctgtt

SEQ ID NO: 427117 - DNA, 15 bp, Homo sapiens
acagaaaatttctgt

SEQ ID NO: 427118 - DNA, 15 bp, Homo sapiens
gacagaaaatttctg

SEQ ID NO: 427119 - DNA, 15 bp, Homo sapiens
ggacagaaaatttct

SEQ ID NO: 427120 - DNA, 15 bp, Homo sapiens
tggacagaaaatttc

SEQ ID NO: 427121 - DNA, 15 bp, Homo sapiens
ttggacagaaaattt

SEQ ID NO: 427122 - DNA, 15 bp, Homo sapiens
cttggacagaaaatt

SEQ ID NO: 427123 - DNA, 15 bp, Homo sapiens
gcttggacagaaaat

SEQ ID NO: 427124 - DNA, 15 bp, Homo sapiens
ggcttggacagaaaa

SEQ ID NO: 427125 - DNA, 15 bp, Homo sapiens
tggcttggacagaaa

SEQ ID NO: 427126 - DNA, 15 bp, Homo sapiens
ttggcttggacagaa

SEQ ID NO: 427127 - DNA, 15 bp, Homo sapiens
attggcttggacaga

SEQ ID NO: 427128 - DNA, 15 bp, Homo sapiens
cattggcttggacag

SEQ ID NO: 427129 - DNA, 15 bp, Homo sapiens
tcattggcttggaca

SEQ ID NO: 427130 - DNA, 15 bp, Homo sapiens
ttcattggcttggac

SEQ ID NO: 427131 - DNA, 15 bp, Homo sapiens
tttcattggcttgga

SEQ ID NO: 427132 - DNA, 15 bp, Homo sapiens
ctttcattggcttgg

SEQ ID NO: 427133 - DNA, 15 bp, Homo sapiens
cctttcattggcttg

SEQ ID NO: 427134 - DNA, 15 bp, Homo sapiens
ccctttcattggctt

SEQ ID NO: 427135 - DNA, 15 bp, Homo sapiens
tccctttcattggct

SEQ ID NO: 427136 - DNA, 15 bp, Homo sapiens
atccctttcattggc

SEQ ID NO: 427137 - DNA, 15 bp, Homo sapiens
tatccctttcattgg

SEQ ID NO: 427138 - DNA, 15 bp, Homo sapiens
ctatccctttcattg

SEQ ID NO: 427139 - DNA, 15 bp, Homo sapiens
tctatccctttcatt

SEQ ID NO: 427140 - DNA, 15 bp, Homo sapiens
atctatccctttcat

SEQ ID NO: 427141 - DNA, 15 bp, Homo sapiens
catctatccctttca

SEQ ID NO: 427142 - DNA, 15 bp, Homo sapiens
ccatctatccctttc

SEQ ID NO: 427143 - DNA, 15 bp, Homo sapiens
tccatctatcccttt

SEQ ID NO: 427144 - DNA, 15 bp, Homo sapiens
ctccatctatccctt

SEQ ID NO: 427145 - DNA, 15 bp, Homo sapiens
gctccatctatccct

SEQ ID NO: 427146 - DNA, 15 bp, Homo sapiens
agctccatctatccc

SEQ ID NO: 427147 - DNA, 15 bp, Homo sapiens
cagctccatctatcc

SEQ ID NO: 427148 - DNA, 15 bp, Homo sapiens
ccagctccatctatc

SEQ ID NO: 427149 - DNA, 15 bp, Homo sapiens
tccagctccatctat

SEQ ID NO: 427150 - DNA, 15 bp, Homo sapiens
gtccagctccatcta

SEQ ID NO: 427151 - DNA, 15 bp, Homo sapiens
tgtccagctccatct

SEQ ID NO: 427152 - DNA, 15 bp, Homo sapiens
ttgtccagctccatc

SEQ ID NO: 427153 - DNA, 15 bp, Homo sapiens
attgtccagctccat

SEQ ID NO: 427154 - DNA, 15 bp, Homo sapiens
aattgtccagctcca

SEQ ID NO: 427155 - DNA, 15 bp, Homo sapiens
caattgtccagctcc

SEQ ID NO: 427156 - DNA, 15 bp, Homo sapiens
tcaattgtccagctc

SEQ ID NO: 427157 - DNA, 15 bp, Homo sapiens
ttcaattgtccagct

SEQ ID NO: 427158 - DNA, 15 bp, Homo sapiens
tttcaattgtccagc

SEQ ID NO: 427159 - DNA, 15 bp, Homo sapiens
ctttcaattgtccag

SEQ ID NO: 427160 - DNA, 15 bp, Homo sapiens
tctttcaattgtcca

SEQ ID NO: 427161 - DNA, 15 bp, Homo sapiens
ttctttcaattgtcc

SEQ ID NO: 427162 - DNA, 15 bp, Homo sapiens
cttctttcaattgtc

SEQ ID NO: 427163 - DNA, 15 bp, Homo sapiens
ccttctttcaattgt

SEQ ID NO: 427164 - DNA, 15 bp, Homo sapiens
tccttctttcaattg

SEQ ID NO: 427165 - DNA, 15 bp, Homo sapiens
ttccttctttcaatt

SEQ ID NO: 427166 - DNA, 15 bp, Homo sapiens
tttccttctttcaat

SEQ ID NO: 427167 - DNA, 15 bp, Homo sapiens
ctttccttctttcaa

SEQ ID NO: 427168 - DNA, 15 bp, Homo sapiens
tctttccttctttca

SEQ ID NO: 427169 - DNA, 15 bp, Homo sapiens
ctctttccttctttc

SEQ ID NO: 427170 - DNA, 15 bp, Homo sapiens
tctctttccttcttt

SEQ ID NO: 427171 - DNA, 15 bp, Homo sapiens
ttctctttccttctt

SEQ ID NO: 427172 - DNA, 15 bp, Homo sapiens
cttctctttccttct

SEQ ID NO: 427173 - DNA, 15 bp, Homo sapiens
tcttctctttccttc

SEQ ID NO: 427174 - DNA, 15 bp, Homo sapiens
ttcttctctttcctt

SEQ ID NO: 427175 - DNA, 15 bp, Homo sapiens
cttcttctctttcct

SEQ ID NO: 427176 - DNA, 15 bp, Homo sapiens
acttcttctctttcc

SEQ ID NO: 427177 - DNA, 15 bp, Homo sapiens
tacttcttctctttc

SEQ ID NO: 427178 - DNA, 15 bp, Homo sapiens
ctacttcttctcttt

SEQ ID NO: 427179 - DNA, 15 bp, Homo sapiens
tctacttcttctctt

SEQ ID NO: 427180 - DNA, 15 bp, Homo sapiens
ctctacttcttctct

SEQ ID NO: 427181 - DNA, 15 bp, Homo sapiens
tctctacttcttctc

SEQ ID NO: 427182 - DNA, 15 bp, Homo sapiens
ctctctacttcttct

SEQ ID NO: 427183 - DNA, 15 bp, Homo sapiens
actctctacttcttc

SEQ ID NO: 427184 - DNA, 15 bp, Homo sapiens
tactctctacttctt

SEQ ID NO: 427185 - DNA, 15 bp, Homo sapiens
ttactctctacttct

SEQ ID NO: 427186 - DNA, 15 bp, Homo sapiens
cttactctctacttc

SEQ ID NO: 427187 - DNA, 15 bp, Homo sapiens
tcttactctctactt

SEQ ID NO: 427188 - DNA, 15 bp, Homo sapiens
ttcttactctctact

SEQ ID NO: 427189 - DNA, 15 bp, Homo sapiens
cttcttactctctac

SEQ ID NO: 427190 - DNA, 15 bp, Homo sapiens
tcttcttactctcta

SEQ ID NO: 427191 - DNA, 15 bp, Homo sapiens
ttcttcttactctct

SEQ ID NO: 427192 - DNA, 15 bp, Homo sapiens
attcttcttactctc

SEQ ID NO: 427193 - DNA, 15 bp, Homo sapiens
cattcttcttactct

SEQ ID NO: 427194 - DNA, 15 bp, Homo sapiens
tcattcttcttactc

SEQ ID NO: 427195 - DNA, 15 bp, Homo sapiens
ttcattcttcttact

SEQ ID NO: 427196 - DNA, 15 bp, Homo sapiens
tttcattcttcttac

SEQ ID NO: 427197 - DNA, 15 bp, Homo sapiens
ctttcattcttctta

SEQ ID NO: 427198 - DNA, 15 bp, Homo sapiens
tctttcattcttctt

SEQ ID NO: 427199 - DNA, 15 bp, Homo sapiens
gtctttcattcttct

SEQ ID NO: 427200 - DNA, 15 bp, Homo sapiens
tgtctttcattcttc

SEQ ID NO: 427201 - DNA, 15 bp, Homo sapiens
ctgtctttcattctt

SEQ ID NO: 427202 - DNA, 15 bp, Homo sapiens
actgtctttcattct

SEQ ID NO: 427203 - DNA, 15 bp, Homo sapiens
cactgtctttcattc

SEQ ID NO: 427204 - DNA, 15 bp, Homo sapiens
gcactgtctttcatt

SEQ ID NO: 427205 - DNA, 15 bp, Homo sapiens
tgcactgtctttcat

SEQ ID NO: 427206 - DNA, 15 bp, Homo sapiens
ttgcactgtctttca

SEQ ID NO: 427207 - DNA, 15 bp, Homo sapiens
cttgcactgtctttc

SEQ ID NO: 427208 - DNA, 15 bp, Homo sapiens
gcttgcactgtcttt

SEQ ID NO: 427209 - DNA, 15 bp, Homo sapiens
agcttgcactgtctt

SEQ ID NO: 427210 - DNA, 15 bp, Homo sapiens
tagcttgcactgtct

SEQ ID NO: 427211 - DNA, 15 bp, Homo sapiens
ttagcttgcactgtc

SEQ ID NO: 427212 - DNA, 15 bp, Homo sapiens
cttagcttgcactgt

SEQ ID NO: 427213 - DNA, 15 bp, Homo sapiens
ccttagcttgcactg

SEQ ID NO: 427214 - DNA, 15 bp, Homo sapiens
cccttagcttgcact

SEQ ID NO: 427215 - DNA, 15 bp, Homo sapiens
tcccttagcttgcac

SEQ ID NO: 427216 - DNA, 15 bp, Homo sapiens
ttcccttagcttgca

SEQ ID NO: 427217 - DNA, 15 bp, Homo sapiens
cttcccttagcttgc

SEQ ID NO: 427218 - DNA, 15 bp, Homo sapiens
ccttcccttagcttg

SEQ ID NO: 427219 - DNA, 15 bp, Homo sapiens
cccttcccttagctt

SEQ ID NO: 427220 - DNA, 15 bp, Homo sapiens
acccttcccttagct

SEQ ID NO: 427221 - DNA, 15 bp, Homo sapiens
gacccttcccttagc

SEQ ID NO: 427222 - DNA, 15 bp, Homo sapiens
tgacccttcccttag

SEQ ID NO: 427223 - DNA, 15 bp, Homo sapiens
ctgacccttccctta

SEQ ID NO: 427224 - DNA, 15 bp, Homo sapiens
tctgacccttccctt

SEQ ID NO: 427225 - DNA, 15 bp, Homo sapiens
ttctgacccttccct

SEQ ID NO: 427226 - DNA, 15 bp, Homo sapiens
tttctgacccttccc

SEQ ID NO: 427227 - DNA, 15 bp, Homo sapiens
ctttctgacccttcc

SEQ ID NO: 427228 - DNA, 15 bp, Homo sapiens
cctttctgacccttc

SEQ ID NO: 427229 - DNA, 15 bp, Homo sapiens
tcctttctgaccctt

SEQ ID NO: 427230 - DNA, 15 bp, Homo sapiens
ttcctttctgaccct

SEQ ID NO: 427231 - DNA, 15 bp, Homo sapiens
tttcctttctgaccc

SEQ ID NO: 427232 - DNA, 15 bp, Homo sapiens
gtttcctttctgacc

SEQ ID NO: 427233 - DNA, 15 bp, Homo sapiens
tgtttcctttctgac

SEQ ID NO: 427234 - DNA, 15 bp, Homo sapiens
atgtttcctttctga

SEQ ID NO: 427235 - DNA, 15 bp, Homo sapiens
gatgtttcctttctg

SEQ ID NO: 427236 - DNA, 15 bp, Homo sapiens
tgatgtttcctttct

SEQ ID NO: 427237 - DNA, 15 bp, Homo sapiens
ttgatgtttcctttc

SEQ ID NO: 427238 - DNA, 15 bp, Homo sapiens
gttgatgtttccttt

SEQ ID NO: 427239 - DNA, 15 bp, Homo sapiens
agttgatgtttcctt

SEQ ID NO: 427240 - DNA, 15 bp, Homo sapiens
cagttgatgtttcct

SEQ ID NO: 427241 - DNA, 15 bp, Homo sapiens
gcagttgatgtttcc

SEQ ID NO: 427242 - DNA, 15 bp, Homo sapiens
tgcagttgatgtttc

SEQ ID NO: 427243 - DNA, 15 bp, Homo sapiens
gtgcagttgatgttt

SEQ ID NO: 427244 - DNA, 15 bp, Homo sapiens
ggtgcagttgatgtt

SEQ ID NO: 427245 - DNA, 15 bp, Homo sapiens
gggtgcagttgatgt

SEQ ID NO: 427246 - DNA, 15 bp, Homo sapiens
tgggtgcagttgatg

SEQ ID NO: 427247 - DNA, 15 bp, Homo sapiens
ctgggtgcagttgat

SEQ ID NO: 427248 - DNA, 15 bp, Homo sapiens
gctgggtgcagttga

SEQ ID NO: 427249 - DNA, 15 bp, Homo sapiens
tgctgggtgcagttg

SEQ ID NO: 427250 - DNA, 15 bp, Homo sapiens
ctgctgggtgcagtt

SEQ ID NO: 427251 - DNA, 15 bp, Homo sapiens
tctgctgggtgcagt

SEQ ID NO: 427252 - DNA, 15 bp, Homo sapiens
atctgctgggtgcag

SEQ ID NO: 427253 - DNA, 15 bp, Homo sapiens
catctgctgggtgca

SEQ ID NO: 427254 - DNA, 15 bp, Homo sapiens
tcatctgctgggtgc

SEQ ID NO: 427255 - DNA, 15 bp, Homo sapiens
ctcatctgctgggtg

SEQ ID NO: 427256 - DNA, 15 bp, Homo sapiens
actcatctgctgggt

SEQ ID NO: 427257 - DNA, 15 bp, Homo sapiens
gactcatctgctggg

SEQ ID NO: 427258 - DNA, 15 bp, Homo sapiens
tgactcatctgctgg

SEQ ID NO: 427259 - DNA, 15 bp, Homo sapiens
gtgactcatctgctg

SEQ ID NO: 427260 - DNA, 15 bp, Homo sapiens
tgtgactcatctgct

SEQ ID NO: 427261 - DNA, 15 bp, Homo sapiens
ctgtgactcatctgc

SEQ ID NO: 427262 - DNA, 15 bp, Homo sapiens
actgtgactcatctg

SEQ ID NO: 427263 - DNA, 15 bp, Homo sapiens
cactgtgactcatct

SEQ ID NO: 427264 - DNA, 15 bp, Homo sapiens
gcactgtgactcatc

SEQ ID NO: 427265 - DNA, 15 bp, Homo sapiens
tgcactgtgactcat

SEQ ID NO: 427266 - DNA, 15 bp, Homo sapiens
atgcactgtgactca

SEQ ID NO: 427267 - DNA, 15 bp, Homo sapiens
catgcactgtgactc

SEQ ID NO: 427268 - DNA, 15 bp, Homo sapiens
tcatgcactgtgact

SEQ ID NO: 427269 - DNA, 15 bp, Homo sapiens
ctcatgcactgtgac

SEQ ID NO: 427270 - DNA, 15 bp, Homo sapiens
cctcatgcactgtga

SEQ ID NO: 427271 - DNA, 15 bp, Homo sapiens
gcctcatgcactgtg

SEQ ID NO: 427272 - DNA, 15 bp, Homo sapiens
ggcctcatgcactgt

SEQ ID NO: 427273 - DNA, 15 bp, Homo sapiens
tggcctcatgcactg

SEQ ID NO: 427274 - DNA, 15 bp, Homo sapiens
ttggcctcatgcact

SEQ ID NO: 427275 - DNA, 15 bp, Homo sapiens
tttggcctcatgcac

SEQ ID NO: 427276 - DNA, 15 bp, Homo sapiens
ctttggcctcatgca

SEQ ID NO: 427277 - DNA, 15 bp, Homo sapiens
actttggcctcatgc

SEQ ID NO: 427278 - DNA, 15 bp, Homo sapiens
gactttggcctcatg

SEQ ID NO: 427279 - DNA, 15 bp, Homo sapiens
tgactttggcctcat

SEQ ID NO: 427280 - DNA, 15 bp, Homo sapiens
atgactttggcctca

SEQ ID NO: 427281 - DNA, 15 bp, Homo sapiens
tatgactttggcctc

SEQ ID NO: 427282 - DNA, 15 bp, Homo sapiens
gtatgactttggcct

SEQ ID NO: 427283 - DNA, 15 bp, Homo sapiens
agtatgactttggcc

SEQ ID NO: 427284 - DNA, 15 bp, Homo sapiens
tagtatgactttggc

SEQ ID NO: 427285 - DNA, 15 bp, Homo sapiens
ttagtatgactttgg

SEQ ID NO: 427286 - DNA, 15 bp, Homo sapiens
attagtatgactttg

SEQ ID NO: 427287 - DNA, 15 bp, Homo sapiens
cattagtatgacttt

SEQ ID NO: 427288 - DNA, 15 bp, Homo sapiens
ccattagtatgactt

SEQ ID NO: 427289 - DNA, 15 bp, Homo sapiens
gccattagtatgact

SEQ ID NO: 427290 - DNA, 15 bp, Homo sapiens
ggccattagtatgac

SEQ ID NO: 427291 - DNA, 15 bp, Homo sapiens
tggccattagtatga

SEQ ID NO: 427292 - DNA, 15 bp, Homo sapiens
gtggccattagtatg

SEQ ID NO: 427293 - DNA, 15 bp, Homo sapiens
tgtggccattagtat

SEQ ID NO: 427294 - DNA, 15 bp, Homo sapiens
atgtggccattagta

SEQ ID NO: 427295 - DNA, 15 bp, Homo sapiens
aatgtggccattagt

SEQ ID NO: 427296 - DNA, 15 bp, Homo sapiens
aaatgtggccattag

SEQ ID NO: 427297 - DNA, 15 bp, Homo sapiens
gaaatgtggccatta

SEQ ID NO: 427298 - DNA, 15 bp, Homo sapiens
ggaaatgtggccatt

SEQ ID NO: 427299 - DNA, 15 bp, Homo sapiens
gggaaatgtggccat

SEQ ID NO: 427300 - DNA, 15 bp, Homo sapiens
tgggaaatgtggcca

SEQ ID NO: 427301 - DNA, 15 bp, Homo sapiens
ttgggaaatgtggcc

SEQ ID NO: 427302 - DNA, 15 bp, Homo sapiens
attgggaaatgtggc

SEQ ID NO: 427303 - DNA, 15 bp, Homo sapiens
tattgggaaatgtgg

SEQ ID NO: 427304 - DNA, 15 bp, Homo sapiens
gtattgggaaatgtg

SEQ ID NO: 427305 - DNA, 15 bp, Homo sapiens
tgtattgggaaatgt

SEQ ID NO: 427306 - DNA, 15 bp, Homo sapiens
atgtattgggaaatg

SEQ ID NO: 427307 - DNA, 15 bp, Homo sapiens
tatgtattgggaaat

SEQ ID NO: 427308 - DNA, 15 bp, Homo sapiens
gtatgtattgggaaa

SEQ ID NO: 427309 - DNA, 15 bp, Homo sapiens
agtatgtattgggaa

SEQ ID NO: 427310 - DNA, 15 bp, Homo sapiens
aagtatgtattggga

SEQ ID NO: 427311 - DNA, 15 bp, Homo sapiens
taagtatgtattggg

SEQ ID NO: 427312 - DNA, 15 bp, Homo sapiens
ctaagtatgtattgg

SEQ ID NO: 427313 - DNA, 15 bp, Homo sapiens
tctaagtatgtattg

SEQ ID NO: 427314 - DNA, 15 bp, Homo sapiens
atctaagtatgtatt

SEQ ID NO: 427315 - DNA, 15 bp, Homo sapiens
catctaagtatgtat

SEQ ID NO: 427316 - DNA, 15 bp, Homo sapiens
ccatctaagtatgta

SEQ ID NO: 427317 - DNA, 15 bp, Homo sapiens
accatctaagtatgt

SEQ ID NO: 427318 - DNA, 15 bp, Homo sapiens
gaccatctaagtatg

SEQ ID NO: 427319 - DNA, 15 bp, Homo sapiens
tgaccatctaagtat

SEQ ID NO: 427320 - DNA, 15 bp, Homo sapiens
ttgaccatctaagta

SEQ ID NO: 427321 - DNA, 15 bp, Homo sapiens
cttgaccatctaagt

SEQ ID NO: 427322 - DNA, 15 bp, Homo sapiens
ccttgaccatctaag

SEQ ID NO: 427323 - DNA, 15 bp, Homo sapiens
gccttgaccatctaa

SEQ ID NO: 427324 - DNA, 15 bp, Homo sapiens
tgccttgaccatcta

SEQ ID NO: 427325 - DNA, 15 bp, Homo sapiens
ctgccttgaccatct

SEQ ID NO: 427326 - DNA, 15 bp, Homo sapiens
gctgccttgaccatc

SEQ ID NO: 427327 - DNA, 15 bp, Homo sapiens
tgctgccttgaccat

SEQ ID NO: 427328 - DNA, 15 bp, Homo sapiens
ttgctgccttgacca

SEQ ID NO: 427329 - DNA, 15 bp, Homo sapiens
tttgctgccttgacc

SEQ ID NO: 427330 - DNA, 15 bp, Homo sapiens
atttgctgccttgac

SEQ ID NO: 427331 - DNA, 15 bp, Homo sapiens
tatttgctgccttga

SEQ ID NO: 427332 - DNA, 15 bp, Homo sapiens
gtatttgctgccttg

SEQ ID NO: 427333 - DNA, 15 bp, Homo sapiens
tgtatttgctgcctt

SEQ ID NO: 427334 - DNA, 15 bp, Homo sapiens
ctgtatttgctgcct

SEQ ID NO: 427335 - DNA, 15 bp, Homo sapiens
gctgtatttgctgcc

SEQ ID NO: 427336 - DNA, 15 bp, Homo sapiens
ggctgtatttgctgc

SEQ ID NO: 427337 - DNA, 15 bp, Homo sapiens
tggctgtatttgctg

SEQ ID NO: 427338 - DNA, 15 bp, Homo sapiens
ctggctgtatttgct

SEQ ID NO: 427339 - DNA, 15 bp, Homo sapiens
actggctgtatttgc

SEQ ID NO: 427340 - DNA, 15 bp, Homo sapiens
cactggctgtatttg

SEQ ID NO: 427341 - DNA, 15 bp, Homo sapiens
acactggctgtattt

SEQ ID NO: 427342 - DNA, 15 bp, Homo sapiens
cacactggctgtatt

SEQ ID NO: 427343 - DNA, 15 bp, Homo sapiens
acacactggctgtat

SEQ ID NO: 427344 - DNA, 15 bp, Homo sapiens
aacacactggctgta

SEQ ID NO: 427345 - DNA, 15 bp, Homo sapiens
taacacactggctgt

SEQ ID NO: 427346 - DNA, 15 bp, Homo sapiens
gtaacacactggctg

SEQ ID NO: 427347 - DNA, 15 bp, Homo sapiens
agtaacacactggct

SEQ ID NO: 427348 - DNA, 15 bp, Homo sapiens
tagtaacacactggc

SEQ ID NO: 427349 - DNA, 15 bp, Homo sapiens
atagtaacacactgg

SEQ ID NO: 427350 - DNA, 15 bp, Homo sapiens
catagtaacacactg

SEQ ID NO: 427351 - DNA, 15 bp, Homo sapiens
acatagtaacacact

SEQ ID NO: 427352 - DNA, 15 bp, Homo sapiens
cacatagtaacacac

SEQ ID NO: 427353 - DNA, 15 bp, Homo sapiens
acacatagtaacaca

SEQ ID NO: 427354 - DNA, 15 bp, Homo sapiens
gacacatagtaacac

SEQ ID NO: 427355 - DNA, 15 bp, Homo sapiens
ggacacatagtaaca

SEQ ID NO: 427356 - DNA, 15 bp, Homo sapiens
aggacacatagtaac

SEQ ID NO: 427357 - DNA, 15 bp, Homo sapiens
caggacacatagtaa

SEQ ID NO: 427358 - DNA, 15 bp, Homo sapiens
ccaggacacatagta

SEQ ID NO: 427359 - DNA, 15 bp, Homo sapiens
tccaggacacatagt

SEQ ID NO: 427360 - DNA, 15 bp, Homo sapiens
atccaggacacatag

SEQ ID NO: 427361 - DNA, 15 bp, Homo sapiens
aatccaggacacata

SEQ ID NO: 427362 - DNA, 15 bp, Homo sapiens
caatccaggacacat

SEQ ID NO: 427363 - DNA, 15 bp, Homo sapiens
acaatccaggacaca

SEQ ID NO: 427364 - DNA, 15 bp, Homo sapiens
cacaatccaggacac

SEQ ID NO: 427365 - DNA, 15 bp, Homo sapiens
gcacaatccaggaca

SEQ ID NO: 427366 - DNA, 15 bp, Homo sapiens
agcacaatccaggac

SEQ ID NO: 427367 - DNA, 15 bp, Homo sapiens
cagcacaatccagga

SEQ ID NO: 427368 - DNA, 15 bp, Homo sapiens
acagcacaatccagg

SEQ ID NO: 427369 - DNA, 15 bp, Homo sapiens
tacagcacaatccag

SEQ ID NO: 427370 - DNA, 15 bp, Homo sapiens
ttacagcacaatcca

SEQ ID NO: 427371 - DNA, 15 bp, Homo sapiens
cttacagcacaatcc

SEQ ID NO: 427372 - DNA, 15 bp, Homo sapiens
ccttacagcacaatc

SEQ ID NO: 427373 - DNA, 15 bp, Homo sapiens
cccttacagcacaat

SEQ ID NO: 427374 - DNA, 15 bp, Homo sapiens
acccttacagcacaa

SEQ ID NO: 427375 - DNA, 15 bp, Homo sapiens
cacccttacagcaca

SEQ ID NO: 427376 - DNA, 15 bp, Homo sapiens
gcacccttacagcac

SEQ ID NO: 427377 - DNA, 15 bp, Homo sapiens
tgcacccttacagca

SEQ ID NO: 427378 - DNA, 15 bp, Homo sapiens
atgcacccttacagc

SEQ ID NO: 427379 - DNA, 15 bp, Homo sapiens
catgcacccttacag

SEQ ID NO: 427380 - DNA, 15 bp, Homo sapiens
tcatgcacccttaca

SEQ ID NO: 427381 - DNA, 15 bp, Homo sapiens
ctcatgcacccttac

SEQ ID NO: 427382 - DNA, 15 bp, Homo sapiens
tctcatgcaccctta

SEQ ID NO: 427383 - DNA, 15 bp, Homo sapiens
tgtctcatgcaccct

SEQ ID NO: 427384 - DNA, 15 bp, Homo sapiens
gtgtctcatgcaccc

SEQ ID NO: 427385 - DNA, 15 bp, Homo sapiens
tgtgtctcatgcacc

SEQ ID NO: 427386 - DNA, 15 bp, Homo sapiens
ctgtgtctcatgcac

SEQ ID NO: 427387 - DNA, 15 bp, Homo sapiens
actgtgtctcatgca

SEQ ID NO: 427388 - DNA, 15 bp, Homo sapiens
gactgtgtctcatgc

SEQ ID NO: 427389 - DNA, 15 bp, Homo sapiens
ggactgtgtctcatg

SEQ ID NO: 427390 - DNA, 15 bp, Homo sapiens
aggactgtgtctcat

SEQ ID NO: 427391 - DNA, 15 bp, Homo sapiens
caggactgtgtctca

SEQ ID NO: 427392 - DNA, 15 bp, Homo sapiens
gcaggactgtgtctc

SEQ ID NO: 427393 - DNA, 15 bp, Homo sapiens
ggcaggactgtgtct

SEQ ID NO: 427394 - DNA, 15 bp, Homo sapiens
gggcaggactgtgtc

SEQ ID NO: 427395 - DNA, 15 bp, Homo sapiens
agggcaggactgtgt

SEQ ID NO: 427396 - DNA, 15 bp, Homo sapiens
tagggcaggactgtg

SEQ ID NO: 427397 - DNA, 15 bp, Homo sapiens
gtagggcaggactgt

SEQ ID NO: 427398 - DNA, 15 bp, Homo sapiens
tgtagggcaggactg

SEQ ID NO: 427399 - DNA, 15 bp, Homo sapiens
ctgtagggcaggact

SEQ ID NO: 427400 - DNA, 15 bp, Homo sapiens
tctgtagggcaggac

SEQ ID NO: 427401 - DNA, 15 bp, Homo sapiens
atctgtagggcagga

SEQ ID NO: 427402 - DNA, 15 bp, Homo sapiens
catctgtagggcagg

SEQ ID NO: 427403 - DNA, 15 bp, Homo sapiens
gcatctgtagggcag

SEQ ID NO: 427404 - DNA, 15 bp, Homo sapiens
agcatctgtagggca

SEQ ID NO: 427405 - DNA, 15 bp, Homo sapiens
aagcatctgtagggc

SEQ ID NO: 427406 - DNA, 15 bp, Homo sapiens
taagcatctgtaggg

SEQ ID NO: 427407 - DNA, 15 bp, Homo sapiens
ataagcatctgtagg

SEQ ID NO: 427408 - DNA, 15 bp, Homo sapiens
tataagcatctgtag

SEQ ID NO: 427409 - DNA, 15 bp, Homo sapiens
ttataagcatctgta

SEQ ID NO: 427410 - DNA, 15 bp, Homo sapiens
gttataagcatctgt

SEQ ID NO: 427411 - DNA, 15 bp, Homo sapiens
ggttataagcatctg

SEQ ID NO: 427412 - DNA, 15 bp, Homo sapiens
aggttataagcatct

SEQ ID NO: 427413 - DNA, 15 bp, Homo sapiens
taggttataagcatc

SEQ ID NO: 427414 - DNA, 15 bp, Homo sapiens
ctaggttataagcat

SEQ ID NO: 427415 - DNA, 15 bp, Homo sapiens
gctaggttataagca

SEQ ID NO: 427416 - DNA, 15 bp, Homo sapiens
tgctaggttataagc

SEQ ID NO: 427417 - DNA, 15 bp, Homo sapiens
atgctaggttataag

SEQ ID NO: 427418 - DNA, 15 bp, Homo sapiens
catgctaggttataa

SEQ ID NO: 427419 - DNA, 15 bp, Homo sapiens
ccatgctaggttata

SEQ ID NO: 427420 - DNA, 15 bp, Homo sapiens
cccatgctaggttat

SEQ ID NO: 427421 - DNA, 15 bp, Homo sapiens
tcccatgctaggtta

SEQ ID NO: 427422 - DNA, 15 bp, Homo sapiens
ctcccatgctaggtt

SEQ ID NO: 427423 - DNA, 15 bp, Homo sapiens
cctcccatgctaggt

SEQ ID NO: 427424 - DNA, 15 bp, Homo sapiens
gcctcccatgctagg

SEQ ID NO: 427425 - DNA, 15 bp, Homo sapiens
tgcctcccatgctag

SEQ ID NO: 427426 - DNA, 15 bp, Homo sapiens
ctgcctcccatgcta

SEQ ID NO: 427427 - DNA, 15 bp, Homo sapiens
tctgcctcccatgct

SEQ ID NO: 427428 - DNA, 15 bp, Homo sapiens
atctgcctcccatgc

SEQ ID NO: 427429 - DNA, 15 bp, Homo sapiens
aatctgcctcccatg

SEQ ID NO: 427430 - DNA, 15 bp, Homo sapiens
aaatctgcctcccat

SEQ ID NO: 427431 - DNA, 15 bp, Homo sapiens
caaatctgcctccca

SEQ ID NO: 427432 - DNA, 15 bp, Homo sapiens
gcaaatctgcctccc

SEQ ID NO: 427433 - DNA, 15 bp, Homo sapiens
tgcaaatctgcctcc

SEQ ID NO: 427434 - DNA, 15 bp, Homo sapiens
gtgcaaatctgcctc

SEQ ID NO: 427435 - DNA, 15 bp, Homo sapiens
cgtgcaaatctgcct

SEQ ID NO: 427436 - DNA, 15 bp, Homo sapiens
gcgtgcaaatctgcc

SEQ ID NO: 427437 - DNA, 15 bp, Homo sapiens
tgcgtgcaaatctgc

SEQ ID NO: 427438 - DNA, 15 bp, Homo sapiens
ttgcgtgcaaatctg

SEQ ID NO: 427439 - DNA, 15 bp, Homo sapiens
tttgcgtgcaaatct

SEQ ID NO: 427440 - DNA, 15 bp, Homo sapiens
gtttgcgtgcaaatc

SEQ ID NO: 427441 - DNA, 15 bp, Homo sapiens
tgtttgcgtgcaaat

SEQ ID NO: 427442 - DNA, 15 bp, Homo sapiens
ctgtttgcgtgcaaa

SEQ ID NO: 427443 - DNA, 15 bp, Homo sapiens
cctgtttgcgtgcaa

SEQ ID NO: 427444 - DNA, 15 bp, Homo sapiens
tcctgtttgcgtgca

SEQ ID NO: 427445 - DNA, 15 bp, Homo sapiens
atcctgtttgcgtgc

SEQ ID NO: 427446 - DNA, 15 bp, Homo sapiens
tatcctgtttgcgtg

SEQ ID NO: 427447 - DNA, 15 bp, Homo sapiens
ctatcctgtttgcgt

SEQ ID NO: 427448 - DNA, 15 bp, Homo sapiens
tctatcctgtttgcg

SEQ ID NO: 427449 - DNA, 15 bp, Homo sapiens
atctatcctgtttgc

SEQ ID NO: 427450 - DNA, 15 bp, Homo sapiens
aatctatcctgtttg

SEQ ID NO: 427451 - DNA, 15 bp, Homo sapiens
aaatctatcctgttt

SEQ ID NO: 427452 - DNA, 15 bp, Homo sapiens
aaaatctatcctgtt

SEQ ID NO: 427453 - DNA, 15 bp, Homo sapiens
caaaatctatcctgt

SEQ ID NO: 427454 - DNA, 15 bp, Homo sapiens
gcaaaatctatcctg

SEQ ID NO: 427455 - DNA, 15 bp, Homo sapiens
ggcaaaatctatcct

SEQ ID NO: 427456 - DNA, 15 bp, Homo sapiens
aggcaaaatctatcc

SEQ ID NO: 427457 - DNA, 15 bp, Homo sapiens
aaggcaaaatctatc

SEQ ID NO: 427458 - DNA, 15 bp, Homo sapiens
caaggcaaaatctat

SEQ ID NO: 427459 - DNA, 15 bp, Homo sapiens
gcaaggcaaaatcta

SEQ ID NO: 427460 - DNA, 15 bp, Homo sapiens
ggcaaggcaaaatct

SEQ ID NO: 427461 - DNA, 15 bp, Homo sapiens
aggcaaggcaaaatc

SEQ ID NO: 427462 - DNA, 15 bp, Homo sapiens
aaggcaaggcaaaat

SEQ ID NO: 427463 - DNA, 15 bp, Homo sapiens
taaggcaaggcaaaa

SEQ ID NO: 427464 - DNA, 15 bp, Homo sapiens
ctaaggcaaggcaaa

SEQ ID NO: 427465 - DNA, 15 bp, Homo sapiens
gctaaggcaaggcaa

SEQ ID NO: 427466 - DNA, 15 bp, Homo sapiens
tgctaaggcaaggca

SEQ ID NO: 427467 - DNA, 15 bp, Homo sapiens
ctgctaaggcaaggc

SEQ ID NO: 427468 - DNA, 15 bp, Homo sapiens
tctgctaaggcaagg

SEQ ID NO: 427469 - DNA, 15 bp, Homo sapiens
ttctgctaaggcaag

SEQ ID NO: 427470 - DNA, 15 bp, Homo sapiens
cttctgctaaggcaa

SEQ ID NO: 427471 - DNA, 15 bp, Homo sapiens
acttctgctaaggca

SEQ ID NO: 427472 - DNA, 15 bp, Homo sapiens
tacttctgctaaggc

SEQ ID NO: 427473 - DNA, 15 bp, Homo sapiens
ttacttctgctaagg

SEQ ID NO: 427474 - DNA, 15 bp, Homo sapiens
cttacttctgctaag

SEQ ID NO: 427475 - DNA, 15 bp, Homo sapiens
acttacttctgctaa

SEQ ID NO: 427476 - DNA, 15 bp, Homo sapiens
tacttacttctgcta

SEQ ID NO: 427477 - DNA, 15 bp, Homo sapiens
gtacttacttctgct

SEQ ID NO: 427478 - DNA, 15 bp, Homo sapiens
ggtacttacttctgc

SEQ ID NO: 427479 - DNA, 15 bp, Homo sapiens
cggtacttacttctg

SEQ ID NO: 427480 - DNA, 15 bp, Homo sapiens
tcggtacttacttct

SEQ ID NO: 427481 - DNA, 15 bp, Homo sapiens
ctcggtacttacttc

SEQ ID NO: 427482 - DNA, 15 bp, Homo sapiens
tctcggtacttactt

SEQ ID NO: 427483 - DNA, 15 bp, Homo sapiens
ttctcggtacttact

SEQ ID NO: 427484 - DNA, 15 bp, Homo sapiens
gttctcggtacttac

SEQ ID NO: 427485 - DNA, 15 bp, Homo sapiens
agttctcggtactta

SEQ ID NO: 427486 - DNA, 15 bp, Homo sapiens
cagttctcggtactt

SEQ ID NO: 427487 - DNA, 15 bp, Homo sapiens
ccagttctcggtact

SEQ ID NO: 427488 - DNA, 15 bp, Homo sapiens
cccagttctcggtac

SEQ ID NO: 427489 - DNA, 15 bp, Homo sapiens
tcccagttctcggta

SEQ ID NO: 427490 - DNA, 15 bp, Homo sapiens
ctcccagttctcggt

SEQ ID NO: 427491 - DNA, 15 bp, Homo sapiens
gctcccagttctcgg

SEQ ID NO: 427492 - DNA, 15 bp, Homo sapiens
tgctcccagttctcg

SEQ ID NO: 427493 - DNA, 15 bp, Homo sapiens
ctgctcccagttctc

SEQ ID NO: 427494 - DNA, 15 bp, Homo sapiens
tctgctcccagttct

SEQ ID NO: 427495 - DNA, 15 bp, Homo sapiens
ctctgctcccagttc

SEQ ID NO: 427496 - DNA, 15 bp, Homo sapiens
tctctgctcccagtt

SEQ ID NO: 427497 - DNA, 15 bp, Homo sapiens
atctctgctcccagt

SEQ ID NO: 427498 - DNA, 15 bp, Homo sapiens
catctctgctcccag

SEQ ID NO: 427499 - DNA, 15 bp, Homo sapiens
tcatctctgctccca

SEQ ID NO: 427500 - DNA, 15 bp, Homo sapiens
ttcatctctgctccc

SEQ ID NO: 427501 - DNA, 15 bp, Homo sapiens
cttcatctctgctcc

SEQ ID NO: 427502 - DNA, 15 bp, Homo sapiens
tcttcatctctgctc

SEQ ID NO: 427503 - DNA, 15 bp, Homo sapiens
ttcttcatctctgct

SEQ ID NO: 427504 - DNA, 15 bp, Homo sapiens
tttcttcatctctgc

SEQ ID NO: 427505 - DNA, 15 bp, Homo sapiens
gtttcttcatctctg

SEQ ID NO: 427506 - DNA, 15 bp, Homo sapiens
agtttcttcatctct

SEQ ID NO: 427507 - DNA, 15 bp, Homo sapiens
cagtttcttcatctc

SEQ ID NO: 427508 - DNA, 15 bp, Homo sapiens
acagtttcttcatct

SEQ ID NO: 427509 - DNA, 15 bp, Homo sapiens
aacagtttcttcatc

SEQ ID NO: 427510 - DNA, 15 bp, Homo sapiens
gaacagtttcttcat

SEQ ID NO: 427511 - DNA, 15 bp, Homo sapiens
tgaacagtttcttca

SEQ ID NO: 427512 - DNA, 15 bp, Homo sapiens
atgaacagtttcttc

SEQ ID NO: 427513 - DNA, 15 bp, Homo sapiens
tatgaacagtttctt

SEQ ID NO: 427514 - DNA, 15 bp, Homo sapiens
atatgaacagtttct

SEQ ID NO: 427515 - DNA, 15 bp, Homo sapiens
catatgaacagtttc

SEQ ID NO: 427516 - DNA, 15 bp, Homo sapiens
ccatatgaacagttt

SEQ ID NO: 427517 - DNA, 15 bp, Homo sapiens
cccatatgaacagtt

SEQ ID NO: 427518 - DNA, 15 bp, Homo sapiens
acccatatgaacagt

SEQ ID NO: 427519 - DNA, 15 bp, Homo sapiens
gacccatatgaacag

SEQ ID NO: 427520 - DNA, 15 bp, Homo sapiens
tgacccatatgaaca

SEQ ID NO: 427521 - DNA, 15 bp, Homo sapiens
ctgacccatatgaac

SEQ ID NO: 427522 - DNA, 15 bp, Homo sapiens
tctgacccatatgaa

SEQ ID NO: 427523 - DNA, 15 bp, Homo sapiens
ctctgacccatatga

SEQ ID NO: 427524 - DNA, 15 bp, Homo sapiens
tctctgacccatatg

SEQ ID NO: 427525 - DNA, 15 bp, Homo sapiens
ttctctgacccatat

SEQ ID NO: 427526 - DNA, 15 bp, Homo sapiens
cttctctgacccata

SEQ ID NO: 427527 - DNA, 15 bp, Homo sapiens
tcttctctgacccat

SEQ ID NO: 427528 - DNA, 15 bp, Homo sapiens
gtcttctctgaccca

SEQ ID NO: 427529 - DNA, 15 bp, Homo sapiens
ggtcttctctgaccc

SEQ ID NO: 427530 - DNA, 15 bp, Homo sapiens
aggtcttctctgacc

SEQ ID NO: 427531 - DNA, 15 bp, Homo sapiens
gaggtcttctctgac

SEQ ID NO: 427532 - DNA, 15 bp, Homo sapiens
tgaggtcttctctga

SEQ ID NO: 427533 - DNA, 15 bp, Homo sapiens
gtgaggtcttctctg

SEQ ID NO: 427534 - DNA, 15 bp, Homo sapiens
tgtgaggtcttctct

SEQ ID NO: 427535 - DNA, 15 bp, Homo sapiens
ctgtgaggtcttctc

SEQ ID NO: 427536 - DNA, 15 bp, Homo sapiens
tctgtgaggtcttct

SEQ ID NO: 427537 - DNA, 15 bp, Homo sapiens
ttctgtgaggtcttc

SEQ ID NO: 427538 - DNA, 15 bp, Homo sapiens
cttctgtgaggtctt

SEQ ID NO: 427539 - DNA, 15 bp, Homo sapiens
tcttctgtgaggtct

SEQ ID NO: 427540 - DNA, 15 bp, Homo sapiens
ctcttctgtgaggtc

SEQ ID NO: 427541 - DNA, 15 bp, Homo sapiens
cctcttctgtgaggt

SEQ ID NO: 427542 - DNA, 15 bp, Homo sapiens
ccctcttctgtgagg

SEQ ID NO: 427543 - DNA, 15 bp, Homo sapiens
accctcttctgtgag

SEQ ID NO: 427544 - DNA, 15 bp, Homo sapiens
gaccctcttctgtga

SEQ ID NO: 427545 - DNA, 15 bp, Homo sapiens
tgaccctcttctgtg

SEQ ID NO: 427546 - DNA, 15 bp, Homo sapiens
atgaccctcttctgt

SEQ ID NO: 427547 - DNA, 15 bp, Homo sapiens
gatgaccctcttctg

SEQ ID NO: 427548 - DNA, 15 bp, Homo sapiens
agatgaccctcttct

SEQ ID NO: 427549 - DNA, 15 bp, Homo sapiens
cagatgaccctcttc

SEQ ID NO: 427550 - DNA, 15 bp, Homo sapiens
tcagatgaccctctt

SEQ ID NO: 427551 - DNA, 15 bp, Homo sapiens
ctcagatgaccctct

SEQ ID NO: 427552 - DNA, 15 bp, Homo sapiens
tctcagatgaccctc

SEQ ID NO: 427553 - DNA, 15 bp, Homo sapiens
atctcagatgaccct

SEQ ID NO: 427554 - DNA, 15 bp, Homo sapiens
catctcagatgaccc

SEQ ID NO: 427555 - DNA, 15 bp, Homo sapiens
ccatctcagatgacc

SEQ ID NO: 427556 - DNA, 15 bp, Homo sapiens
gccatctcagatgac

SEQ ID NO: 427557 - DNA, 15 bp, Homo sapiens
agccatctcagatga

SEQ ID NO: 427558 - DNA, 15 bp, Homo sapiens
aagccatctcagatg

SEQ ID NO: 427559 - DNA, 15 bp, Homo sapiens
aaagccatctcagat

SEQ ID NO: 427560 - DNA, 15 bp, Homo sapiens
caaagccatctcaga

SEQ ID NO: 427561 - DNA, 15 bp, Homo sapiens
tcaaagccatctcag

SEQ ID NO: 427562 - DNA, 15 bp, Homo sapiens
ttcaaagccatctca

SEQ ID NO: 427563 - DNA, 15 bp, Homo sapiens
tttcaaagccatctc

SEQ ID NO: 427564 - DNA, 15 bp, Homo sapiens
gtttcaaagccatct

SEQ ID NO: 427565 - DNA, 15 bp, Homo sapiens
tgtttcaaagccatc

SEQ ID NO: 427566 - DNA, 15 bp, Homo sapiens
ctgtttcaaagccat

SEQ ID NO: 427567 - DNA, 15 bp, Homo sapiens
cctgtttcaaagcca

SEQ ID NO: 427568 - DNA, 15 bp, Homo sapiens
ccctgtttcaaagcc

SEQ ID NO: 427569 - DNA, 15 bp, Homo sapiens
accctgtttcaaagc

SEQ ID NO: 427570 - DNA, 15 bp, Homo sapiens
taccctgtttcaaag

SEQ ID NO: 427571 - DNA, 15 bp, Homo sapiens
ttaccctgtttcaaa

SEQ ID NO: 427572 - DNA, 15 bp, Homo sapiens
gttaccctgtttcaa

SEQ ID NO: 427573 - DNA, 15 bp, Homo sapiens
agttaccctgtttca

SEQ ID NO: 427574 - DNA, 15 bp, Homo sapiens
gagttaccctgtttc

SEQ ID NO: 427575 - DNA, 15 bp, Homo sapiens
tgagttaccctgttt

SEQ ID NO: 427576 - DNA, 15 bp, Homo sapiens
atgagttaccctgtt

SEQ ID NO: 427577 - DNA, 15 bp, Homo sapiens
aatgagttaccctgt

SEQ ID NO: 427578 - DNA, 15 bp, Homo sapiens
gaatgagttaccctg

SEQ ID NO: 427579 - DNA, 15 bp, Homo sapiens
tgaatgagttaccct

SEQ ID NO: 427580 - DNA, 15 bp, Homo sapiens
gtgaatgagttaccc

SEQ ID NO: 427581 - DNA, 15 bp, Homo sapiens
ggtgaatgagttacc

SEQ ID NO: 427582 - DNA, 15 bp, Homo sapiens
tggtgaatgagttac

SEQ ID NO: 427583 - DNA, 15 bp, Homo sapiens
atggtgaatgagtta

SEQ ID NO: 427584 - DNA, 15 bp, Homo sapiens
catggtgaatgagtt

SEQ ID NO: 427585 - DNA, 15 bp, Homo sapiens
tcatggtgaatgagt

SEQ ID NO: 427586 - DNA, 15 bp, Homo sapiens
ttcatggtgaatgag

SEQ ID NO: 427587 - DNA, 15 bp, Homo sapiens
cttcatggtgaatga

SEQ ID NO: 427588 - DNA, 15 bp, Homo sapiens
ccttcatggtgaatg

SEQ ID NO: 427589 - DNA, 15 bp, Homo sapiens
gccttcatggtgaat

SEQ ID NO: 427590 - DNA, 15 bp, Homo sapiens
tgccttcatggtgaa

SEQ ID NO: 427591 - DNA, 15 bp, Homo sapiens
ctgccttcatggtga

SEQ ID NO: 427592 - DNA, 15 bp, Homo sapiens
tctgccttcatggtg

SEQ ID NO: 427593 - DNA, 15 bp, Homo sapiens
ttctgccttcatggt

SEQ ID NO: 427594 - DNA, 15 bp, Homo sapiens
cttctgccttcatgg

SEQ ID NO: 427595 - DNA, 15 bp, Homo sapiens
ccttctgccttcatg

SEQ ID NO: 427596 - DNA, 15 bp, Homo sapiens
tccttctgccttcat

SEQ ID NO: 427597 - DNA, 15 bp, Homo sapiens
ttccttctgccttca

SEQ ID NO: 427598 - DNA, 15 bp, Homo sapiens
attccttctgccttc

SEQ ID NO: 427599 - DNA, 15 bp, Homo sapiens
cattccttctgcctt

SEQ ID NO: 427600 - DNA, 15 bp, Homo sapiens
ccattccttctgcct

SEQ ID NO: 427601 - DNA, 15 bp, Homo sapiens
gccattccttctgcc

SEQ ID NO: 427602 - DNA, 15 bp, Homo sapiens
ggccattccttctgc

SEQ ID NO: 427603 - DNA, 15 bp, Homo sapiens
cggccattccttctg

SEQ ID NO: 427604 - DNA, 15 bp, Homo sapiens
tcggccattccttct

SEQ ID NO: 427605 - DNA, 15 bp, Homo sapiens
ttcggccattccttc

SEQ ID NO: 427606 - DNA, 15 bp, Homo sapiens
gttcggccattcctt

SEQ ID NO: 427607 - DNA, 15 bp, Homo sapiens
agttcggccattcct

SEQ ID NO: 427608 - DNA, 15 bp, Homo sapiens
cagttcggccattcc

SEQ ID NO: 427609 - DNA, 15 bp, Homo sapiens
tcagttcggccattc

SEQ ID NO: 427610 - DNA, 15 bp, Homo sapiens
ttcagttcggccatt

SEQ ID NO: 427611 - DNA, 15 bp, Homo sapiens
attcagttcggccat

SEQ ID NO: 427612 - DNA, 15 bp, Homo sapiens
gattcagttcggcca

SEQ ID NO: 427613 - DNA, 15 bp, Homo sapiens
tgattcagttcggcc

SEQ ID NO: 427614 - DNA, 15 bp, Homo sapiens
atgattcagttcggc

SEQ ID NO: 427615 - DNA, 15 bp, Homo sapiens
catgattcagttcgg

SEQ ID NO: 427616 - DNA, 15 bp, Homo sapiens
ccatgattcagttcg

SEQ ID NO: 427617 - DNA, 15 bp, Homo sapiens
tccatgattcagttc

SEQ ID NO: 427618 - DNA, 15 bp, Homo sapiens
ttccatgattcagtt

SEQ ID NO: 427619 - DNA, 15 bp, Homo sapiens
tttccatgattcagt

SEQ ID NO: 427620 - DNA, 15 bp, Homo sapiens
gtttccatgattcag

SEQ ID NO: 427621 - DNA, 15 bp, Homo sapiens
tgtttccatgattca

SEQ ID NO: 427622 - DNA, 15 bp, Homo sapiens
ctgtttccatgattc

SEQ ID NO: 427623 - DNA, 15 bp, Homo sapiens
tctgtttccatgatt

SEQ ID NO: 427624 - DNA, 15 bp, Homo sapiens
ttctgtttccatgat

SEQ ID NO: 427625 - DNA, 15 bp, Homo sapiens
tttctgtttccatga

SEQ ID NO: 427626 - DNA, 15 bp, Homo sapiens
gtttctgtttccatg

SEQ ID NO: 427627 - DNA, 15 bp, Homo sapiens
agtttctgtttccat

SEQ ID NO: 427628 - DNA, 15 bp, Homo sapiens
tagtttctgtttcca

SEQ ID NO: 427629 - DNA, 15 bp, Homo sapiens
ctagtttctgtttcc

SEQ ID NO: 427630 - DNA, 15 bp, Homo sapiens
gctagtttctgtttc

SEQ ID NO: 427631 - DNA, 15 bp, Homo sapiens
tgctagtttctgttt

SEQ ID NO: 427632 - DNA, 15 bp, Homo sapiens
ttgctagtttctgtt

SEQ ID NO: 427633 - DNA, 15 bp, Homo sapiens
cttgctagtttctgt

SEQ ID NO: 427634 - DNA, 15 bp, Homo sapiens
ccttgctagtttctg

SEQ ID NO: 427635 - DNA, 15 bp, Homo sapiens
accttgctagtttct

SEQ ID NO: 427636 - DNA, 15 bp, Homo sapiens
caccttgctagtttc

SEQ ID NO: 427637 - DNA, 15 bp, Homo sapiens
acaccttgctagttt

SEQ ID NO: 427638 - DNA, 15 bp, Homo sapiens
cacaccttgctagtt

SEQ ID NO: 427639 - DNA, 15 bp, Homo sapiens
acacaccttgctagt

SEQ ID NO: 427640 - DNA, 15 bp, Homo sapiens
cacacaccttgctag

SEQ ID NO: 427641 - DNA, 15 bp, Homo sapiens
gcacacaccttgcta

SEQ ID NO: 427642 - DNA, 15 bp, Homo sapiens
agcacacaccttgct

SEQ ID NO: 427643 - DNA, 15 bp, Homo sapiens
aagcacacaccttgc

SEQ ID NO: 427644 - DNA, 15 bp, Homo sapiens
caagcacacaccttg

SEQ ID NO: 427645 - DNA, 15 bp, Homo sapiens
tcaagcacacacctt

SEQ ID NO: 427646 - DNA, 15 bp, Homo sapiens
ctcaagcacacacct

SEQ ID NO: 427647 - DNA, 15 bp, Homo sapiens
tctcaagcacacacc

SEQ ID NO: 427648 - DNA, 15 bp, Homo sapiens
ttctcaagcacacac

SEQ ID NO: 427649 - DNA, 15 bp, Homo sapiens
tttctcaagcacaca

SEQ ID NO: 427650 - DNA, 15 bp, Homo sapiens
atttctcaagcacac

SEQ ID NO: 427651 - DNA, 15 bp, Homo sapiens
catttctcaagcaca

SEQ ID NO: 427652 - DNA, 15 bp, Homo sapiens
ccatttctcaagcac

SEQ ID NO: 427653 - DNA, 15 bp, Homo sapiens
tccatttctcaagca

SEQ ID NO: 427654 - DNA, 15 bp, Homo sapiens
ttccatttctcaagc

SEQ ID NO: 427655 - DNA, 15 bp, Homo sapiens
tttccatttctcaag

SEQ ID NO: 427656 - DNA, 15 bp, Homo sapiens
ctttccatttctcaa

SEQ ID NO: 427657 - DNA, 15 bp, Homo sapiens
cctttccatttctca

SEQ ID NO: 427658 - DNA, 15 bp, Homo sapiens
ccctttccatttctc

SEQ ID NO: 427659 - DNA, 15 bp, Homo sapiens
gccctttccatttct

SEQ ID NO: 427660 - DNA, 15 bp, Homo sapiens
ggccctttccatttc

SEQ ID NO: 427661 - DNA, 15 bp, Homo sapiens
gggccctttccattt

SEQ ID NO: 427662 - DNA, 15 bp, Homo sapiens
agggccctttccatt

SEQ ID NO: 427663 - DNA, 15 bp, Homo sapiens
aagggccctttccat

SEQ ID NO: 427664 - DNA, 15 bp, Homo sapiens
aaagggccctttcca

SEQ ID NO: 427665 - DNA, 15 bp, Homo sapiens
taaagggccctttcc

SEQ ID NO: 427666 - DNA, 15 bp, Homo sapiens
ataaagggccctttc

SEQ ID NO: 427667 - DNA, 15 bp, Homo sapiens
tataaagggcccttt

SEQ ID NO: 427668 - DNA, 15 bp, Homo sapiens
ttataaagggccctt

SEQ ID NO: 427669 - DNA, 15 bp, Homo sapiens
tttataaagggccct

SEQ ID NO: 427670 - DNA, 15 bp, Homo sapiens
atttataaagggccc

SEQ ID NO: 427671 - DNA, 15 bp, Homo sapiens
aatttataaagggcc

SEQ ID NO: 427672 - DNA, 15 bp, Homo sapiens
aaatttataaagggc

SEQ ID NO: 427673 - DNA, 15 bp, Homo sapiens
gaaatttataaaggg

SEQ ID NO: 427674 - DNA, 15 bp, Homo sapiens
agaaatttataaagg

SEQ ID NO: 427675 - DNA, 15 bp, Homo sapiens
cagaaatttataaag

SEQ ID NO: 427676 - DNA, 15 bp, Homo sapiens
tcagaaatttataaa

SEQ ID NO: 427677 - DNA, 15 bp, Homo sapiens
ctcagaaatttataa

SEQ ID NO: 427678 - DNA, 15 bp, Homo sapiens
tctcagaaatttata

SEQ ID NO: 427679 - DNA, 15 bp, Homo sapiens
gtctcagaaatttat

SEQ ID NO: 427680 - DNA, 15 bp, Homo sapiens
cgtctcagaaattta

SEQ ID NO: 427681 - DNA, 15 bp, Homo sapiens
ccgtctcagaaattt

SEQ ID NO: 427682 - DNA, 15 bp, Homo sapiens
cccgtctcagaaatt

SEQ ID NO: 427683 - DNA, 15 bp, Homo sapiens
ccccgtctcagaaat

SEQ ID NO: 427684 - DNA, 15 bp, Homo sapiens
tccccgtctcagaaa

SEQ ID NO: 427685 - DNA, 15 bp, Homo sapiens
ttccccgtctcagaa

SEQ ID NO: 427686 - DNA, 15 bp, Homo sapiens
tttccccgtctcaga

SEQ ID NO: 427687 - DNA, 15 bp, Homo sapiens
atttccccgtctcag

SEQ ID NO: 427688 - DNA, 15 bp, Homo sapiens
aatttccccgtctca

SEQ ID NO: 427689 - DNA, 15 bp, Homo sapiens
taatttccccgtctc

SEQ ID NO: 427690 - DNA, 15 bp, Homo sapiens
ataatttccccgtct

SEQ ID NO: 427691 - DNA, 15 bp, Homo sapiens
gataatttccccgtc

SEQ ID NO: 427692 - DNA, 15 bp, Homo sapiens
tgataatttccccgt

SEQ ID NO: 427693 - DNA, 15 bp, Homo sapiens
gtgataatttccccg

SEQ ID NO: 427694 - DNA, 15 bp, Homo sapiens
tgtgataatttcccc

SEQ ID NO: 427695 - DNA, 15 bp, Homo sapiens
atgtgataatttccc

SEQ ID NO: 427696 - DNA, 15 bp, Homo sapiens
aatgtgataatttcc

SEQ ID NO: 427697 - DNA, 15 bp, Homo sapiens
gaatgtgataatttc

SEQ ID NO: 427698 - DNA, 15 bp, Homo sapiens
agaatgtgataattt

SEQ ID NO: 427699 - DNA, 15 bp, Homo sapiens
gagaatgtgataatt

SEQ ID NO: 427700 - DNA, 15 bp, Homo sapiens
tgagaatgtgataat

SEQ ID NO: 427701 - DNA, 15 bp, Homo sapiens
gtgagaatgtgataa

SEQ ID NO: 427702 - DNA, 15 bp, Homo sapiens
agtgagaatgtgata

SEQ ID NO: 427703 - DNA, 15 bp, Homo sapiens
cagtgagaatgtgat

SEQ ID NO: 427704 - DNA, 15 bp, Homo sapiens
tcagtgagaatgtga

SEQ ID NO: 427705 - DNA, 15 bp, Homo sapiens
gtcagtgagaatgtg

SEQ ID NO: 427706 - DNA, 15 bp, Homo sapiens
agtcagtgagaatgt

SEQ ID NO: 427707 - DNA, 15 bp, Homo sapiens
gagtcagtgagaatg

SEQ ID NO: 427708 - DNA, 15 bp, Homo sapiens
ggagtcagtgagaat

SEQ ID NO: 427709 - DNA, 15 bp, Homo sapiens
gggagtcagtgagaa

SEQ ID NO: 427710 - DNA, 15 bp, Homo sapiens
agggagtcagtgaga

SEQ ID NO: 427711 - DNA, 15 bp, Homo sapiens
gagggagtcagtgag

SEQ ID NO: 427712 - DNA, 15 bp, Homo sapiens
ggagggagtcagtga

SEQ ID NO: 427713 - DNA, 15 bp, Homo sapiens
aggagggagtcagtg

SEQ ID NO: 427714 - DNA, 15 bp, Homo sapiens
aaggagggagtcagt

SEQ ID NO: 427715 - DNA, 15 bp, Homo sapiens
aaaggagggagtcag

SEQ ID NO: 427716 - DNA, 15 bp, Homo sapiens
aaaaggagggagtca

SEQ ID NO: 427717 - DNA, 15 bp, Homo sapiens
taaaaggagggagtc

SEQ ID NO: 427718 - DNA, 15 bp, Homo sapiens
gtaaaaggagggagt

SEQ ID NO: 427719 - DNA, 15 bp, Homo sapiens
agtaaaaggagggag

SEQ ID NO: 427720 - DNA, 15 bp, Homo sapiens
gagtaaaaggaggga

SEQ ID NO: 427721 - DNA, 15 bp, Homo sapiens
tgagtaaaaggaggg

SEQ ID NO: 427722 - DNA, 15 bp, Homo sapiens
ctgagtaaaaggagg

SEQ ID NO: 427723 - DNA, 15 bp, Homo sapiens
cctgagtaaaaggag

SEQ ID NO: 427724 - DNA, 15 bp, Homo sapiens
ccctgagtaaaagga

SEQ ID NO: 427725 - DNA, 15 bp, Homo sapiens
gccctgagtaaaagg

SEQ ID NO: 427726 - DNA, 15 bp, Homo sapiens
agccctgagtaaaag

SEQ ID NO: 427727 - DNA, 15 bp, Homo sapiens
cagccctgagtaaaa

SEQ ID NO: 427728 - DNA, 15 bp, Homo sapiens
tcagccctgagtaaa

SEQ ID NO: 427729 - DNA, 15 bp, Homo sapiens
ctcagccctgagtaa

SEQ ID NO: 427730 - DNA, 15 bp, Homo sapiens
tctcagccctgagta

SEQ ID NO: 427731 - DNA, 15 bp, Homo sapiens
atctcagccctgagt

SEQ ID NO: 427732 - DNA, 15 bp, Homo sapiens
aatctcagccctgag

SEQ ID NO: 427733 - DNA, 15 bp, Homo sapiens
taatctcagccctga

SEQ ID NO: 427734 - DNA, 15 bp, Homo sapiens
ataatctcagccctg

SEQ ID NO: 427735 - DNA, 15 bp, Homo sapiens
tataatctcagccct

SEQ ID NO: 427736 - DNA, 15 bp, Homo sapiens
atataatctcagccc

SEQ ID NO: 427737 - DNA, 15 bp, Homo sapiens
gatataatctcagcc

SEQ ID NO: 427738 - DNA, 15 bp, Homo sapiens
agatataatctcagc

SEQ ID NO: 427739 - DNA, 15 bp, Homo sapiens
aagatataatctcag

SEQ ID NO: 427740 - DNA, 15 bp, Homo sapiens
aaagatataatctca

SEQ ID NO: 427741 - DNA, 15 bp, Homo sapiens
taaagatataatctc

SEQ ID NO: 427742 - DNA, 15 bp, Homo sapiens
ttaaagatataatct

SEQ ID NO: 427743 - DNA, 15 bp, Homo sapiens
cttaaagatataatc

SEQ ID NO: 427744 - DNA, 15 bp, Homo sapiens
gcttaaagatataat

SEQ ID NO: 427745 - DNA, 15 bp, Homo sapiens
agcttaaagatataa

SEQ ID NO: 427746 - DNA, 15 bp, Homo sapiens
aagcttaaagatata

SEQ ID NO: 427747 - DNA, 15 bp, Homo sapiens
aaagcttaaagatat

SEQ ID NO: 427748 - DNA, 15 bp, Homo sapiens
caaagcttaaagata

SEQ ID NO: 427749 - DNA, 15 bp, Homo sapiens
tcaaagcttaaagat

SEQ ID NO: 427750 - DNA, 15 bp, Homo sapiens
ttcaaagcttaaaga

SEQ ID NO: 427751 - DNA, 15 bp, Homo sapiens
attcaaagcttaaag

SEQ ID NO: 427752 - DNA, 15 bp, Homo sapiens
aattcaaagcttaaa

SEQ ID NO: 427753 - DNA, 15 bp, Homo sapiens
aaattcaaagcttaa

SEQ ID NO: 427754 - DNA, 15 bp, Homo sapiens
aaaattcaaagctta

SEQ ID NO: 427755 - DNA, 15 bp, Homo sapiens
gaaaattcaaagctt

SEQ ID NO: 427756 - DNA, 15 bp, Homo sapiens
tgaaaattcaaagct

SEQ ID NO: 427757 - DNA, 15 bp, Homo sapiens
gtgaaaattcaaagc

SEQ ID NO: 427758 - DNA, 15 bp, Homo sapiens
tgtgaaaattcaaag

SEQ ID NO: 427759 - DNA, 15 bp, Homo sapiens
atgtgaaaattcaaa

SEQ ID NO: 427760 - DNA, 15 bp, Homo sapiens
gatgtgaaaattcaa

SEQ ID NO: 427761 - DNA, 15 bp, Homo sapiens
tgatgtgaaaattca

SEQ ID NO: 427762 - DNA, 15 bp, Homo sapiens
atgatgtgaaaattc

SEQ ID NO: 427763 - DNA, 15 bp, Homo sapiens
tatgatgtgaaaatt

SEQ ID NO: 427764 - DNA, 15 bp, Homo sapiens
gtatgatgtgaaaat

SEQ ID NO: 427765 - DNA, 15 bp, Homo sapiens
agtatgatgtgaaaa

SEQ ID NO: 427766 - DNA, 15 bp, Homo sapiens
gagtatgatgtgaaa

SEQ ID NO: 427767 - DNA, 15 bp, Homo sapiens
tgagtatgatgtgaa

SEQ ID NO: 427768 - DNA, 15 bp, Homo sapiens
atgagtatgatgtga

SEQ ID NO: 427769 - DNA, 15 bp, Homo sapiens
gatgagtatgatgtg

SEQ ID NO: 427770 - DNA, 15 bp, Homo sapiens
agatgagtatgatgt

SEQ ID NO: 427771 - DNA, 15 bp, Homo sapiens
cagatgagtatgatg

SEQ ID NO: 427772 - DNA, 15 bp, Homo sapiens
gcagatgagtatgat

SEQ ID NO: 427773 - DNA, 15 bp, Homo sapiens
tgcagatgagtatga

SEQ ID NO: 427774 - DNA, 15 bp, Homo sapiens
ctgcagatgagtatg

SEQ ID NO: 427775 - DNA, 15 bp, Homo sapiens
actgcagatgagtat

SEQ ID NO: 427776 - DNA, 15 bp, Homo sapiens
aactgcagatgagta

SEQ ID NO: 427777 - DNA, 15 bp, Homo sapiens
taactgcagatgagt

SEQ ID NO: 427778 - DNA, 15 bp, Homo sapiens
gtaactgcagatgag

SEQ ID NO: 427779 - DNA, 15 bp, Homo sapiens
tgtaactgcagatga

SEQ ID NO: 427780 - DNA, 15 bp, Homo sapiens
atgtaactgcagatg

SEQ ID NO: 427781 - DNA, 15 bp, Homo sapiens
tatgtaactgcagat

SEQ ID NO: 427782 - DNA, 15 bp, Homo sapiens
ctatgtaactgcaga

SEQ ID NO: 427783 - DNA, 15 bp, Homo sapiens
cctatgtaactgcag

SEQ ID NO: 427784 - DNA, 15 bp, Homo sapiens
tcctatgtaactgca

SEQ ID NO: 427785 - DNA, 15 bp, Homo sapiens
ttcctatgtaactgc

SEQ ID NO: 427786 - DNA, 15 bp, Homo sapiens
attcctatgtaactg

SEQ ID NO: 427787 - DNA, 15 bp, Homo sapiens
cattcctatgtaact

SEQ ID NO: 427788 - DNA, 15 bp, Homo sapiens
ccattcctatgtaac

SEQ ID NO: 427789 - DNA, 15 bp, Homo sapiens
accattcctatgtaa

SEQ ID NO: 427790 - DNA, 15 bp, Homo sapiens
aaccattcctatgta

SEQ ID NO: 427791 - DNA, 15 bp, Homo sapiens
gaaccattcctatgt

SEQ ID NO: 427792 - DNA, 15 bp, Homo sapiens
agaaccattcctatg

SEQ ID NO: 427793 - DNA, 15 bp, Homo sapiens
cagaaccattcctat

SEQ ID NO: 427794 - DNA, 15 bp, Homo sapiens
gcagaaccattccta

SEQ ID NO: 427795 - DNA, 15 bp, Homo sapiens
ggcagaaccattcct

SEQ ID NO: 427796 - DNA, 15 bp, Homo sapiens
tggcagaaccattcc

SEQ ID NO: 427797 - DNA, 15 bp, Homo sapiens
ctggcagaaccattc

SEQ ID NO: 427798 - DNA, 15 bp, Homo sapiens
cctggcagaaccatt

SEQ ID NO: 427799 - DNA, 15 bp, Homo sapiens
acctggcagaaccat

SEQ ID NO: 427800 - DNA, 15 bp, Homo sapiens
aacctggcagaacca

SEQ ID NO: 427801 - DNA, 15 bp, Homo sapiens
gaacctggcagaacc

SEQ ID NO: 427802 - DNA, 15 bp, Homo sapiens
tgaacctggcagaac

SEQ ID NO: 427803 - DNA, 15 bp, Homo sapiens
gtgaacctggcagaa

SEQ ID NO: 427804 - DNA, 15 bp, Homo sapiens
agtgaacctggcaga

SEQ ID NO: 427805 - DNA, 15 bp, Homo sapiens
gagtgaacctggcag

SEQ ID NO: 427806 - DNA, 15 bp, Homo sapiens
ggagtgaacctggca

SEQ ID NO: 427807 - DNA, 15 bp, Homo sapiens
tggagtgaacctggc

SEQ ID NO: 427808 - DNA, 15 bp, Homo sapiens
ctggagtgaacctgg

SEQ ID NO: 427809 - DNA, 15 bp, Homo sapiens
actggagtgaacctg

SEQ ID NO: 427810 - DNA, 15 bp, Homo sapiens
aactggagtgaacct

SEQ ID NO: 427811 - DNA, 15 bp, Homo sapiens
gaactggagtgaacc

SEQ ID NO: 427812 - DNA, 15 bp, Homo sapiens
ggaactggagtgaac

SEQ ID NO: 427813 - DNA, 15 bp, Homo sapiens
aggaactggagtgaa

SEQ ID NO: 427814 - DNA, 15 bp, Homo sapiens
taggaactggagtga

SEQ ID NO: 427815 - DNA, 15 bp, Homo sapiens
ctaggaactggagtg

SEQ ID NO: 427816 - DNA, 15 bp, Homo sapiens
tctaggaactggagt

SEQ ID NO: 427817 - DNA, 15 bp, Homo sapiens
atctaggaactggag

SEQ ID NO: 427818 - DNA, 15 bp, Homo sapiens
gatctaggaactgga

SEQ ID NO: 427819 - DNA, 15 bp, Homo sapiens
tgatctaggaactgg

SEQ ID NO: 427820 - DNA, 15 bp, Homo sapiens
atgatctaggaactg

SEQ ID NO: 427821 - DNA, 15 bp, Homo sapiens
aatgatctaggaact

SEQ ID NO: 427822 - DNA, 15 bp, Homo sapiens
aaatgatctaggaac

SEQ ID NO: 427823 - DNA, 15 bp, Homo sapiens
taaatgatctaggaa

SEQ ID NO: 427824 - DNA, 15 bp, Homo sapiens
ttaaatgatctagga

SEQ ID NO: 427825 - DNA, 15 bp, Homo sapiens
attaaatgatctagg

SEQ ID NO: 427826 - DNA, 15 bp, Homo sapiens
cattaaatgatctag

SEQ ID NO: 427827 - DNA, 15 bp, Homo sapiens
ccattaaatgatcta

SEQ ID NO: 427828 - DNA, 15 bp, Homo sapiens
accattaaatgatct

SEQ ID NO: 427829 - DNA, 15 bp, Homo sapiens
caccattaaatgatc

SEQ ID NO: 427830 - DNA, 15 bp, Homo sapiens
ccaccattaaatgat

SEQ ID NO: 427831 - DNA, 15 bp, Homo sapiens
tccaccattaaatga

SEQ ID NO: 427832 - DNA, 15 bp, Homo sapiens
ttccaccattaaatg

SEQ ID NO: 427833 - DNA, 15 bp, Homo sapiens
attccaccattaaat

SEQ ID NO: 427834 - DNA, 15 bp, Homo sapiens
aattccaccattaaa

SEQ ID NO: 427835 - DNA, 15 bp, Homo sapiens
taattccaccattaa

SEQ ID NO: 427836 - DNA, 15 bp, Homo sapiens
ctaattccaccatta

SEQ ID NO: 427837 - DNA, 15 bp, Homo sapiens
tctaattccaccatt

SEQ ID NO: 427838 - DNA, 15 bp, Homo sapiens
atctaattccaccat

SEQ ID NO: 427839 - DNA, 15 bp, Homo sapiens
aatctaattccacca

SEQ ID NO: 427840 - DNA, 15 bp, Homo sapiens
gaatctaattccacc

SEQ ID NO: 427841 - DNA, 15 bp, Homo sapiens
tgaatctaattccac

SEQ ID NO: 427842 - DNA, 15 bp, Homo sapiens
ctgaatctaattcca

SEQ ID NO: 427843 - DNA, 15 bp, Homo sapiens
cctgaatctaattcc

SEQ ID NO: 427844 - DNA, 15 bp, Homo sapiens
acctgaatctaattc

SEQ ID NO: 427845 - DNA, 15 bp, Homo sapiens
aacctgaatctaatt

SEQ ID NO: 427846 - DNA, 15 bp, Homo sapiens
aaacctgaatctaat

SEQ ID NO: 427847 - DNA, 15 bp, Homo sapiens
gaaacctgaatctaa

SEQ ID NO: 427848 - DNA, 15 bp, Homo sapiens
ggaaacctgaatcta

SEQ ID NO: 427849 - DNA, 15 bp, Homo sapiens
aggaaacctgaatct

SEQ ID NO: 427850 - DNA, 15 bp, Homo sapiens
gaggaaacctgaatc

SEQ ID NO: 427851 - DNA, 15 bp, Homo sapiens
agaggaaacctgaat

SEQ ID NO: 427852 - DNA, 15 bp, Homo sapiens
gagaggaaacctgaa

SEQ ID NO: 427853 - DNA, 15 bp, Homo sapiens
ggagaggaaacctga

SEQ ID NO: 427854 - DNA, 15 bp, Homo sapiens
aggagaggaaacctg

SEQ ID NO: 427855 - DNA, 15 bp, Homo sapiens
gaggagaggaaacct

SEQ ID NO: 427856 - DNA, 15 bp, Homo sapiens
tgaggagaggaaacc

SEQ ID NO: 427857 - DNA, 15 bp, Homo sapiens
gtgaggagaggaaac

SEQ ID NO: 427858 - DNA, 15 bp, Homo sapiens
agtgaggagaggaaa

SEQ ID NO: 427859 - DNA, 15 bp, Homo sapiens
cagtgaggagaggaa

SEQ ID NO: 427860 - DNA, 15 bp, Homo sapiens
gcagtgaggagagga

SEQ ID NO: 427861 - DNA, 15 bp, Homo sapiens
ggcagtgaggagagg

SEQ ID NO: 427862 - DNA, 15 bp, Homo sapiens
gggcagtgaggagag

SEQ ID NO: 427863 - DNA, 15 bp, Homo sapiens
tgggcagtgaggaga

SEQ ID NO: 427864 - DNA, 15 bp, Homo sapiens
gtgggcagtgaggag

SEQ ID NO: 427865 - DNA, 15 bp, Homo sapiens
tgtgggcagtgagga

SEQ ID NO: 427866 - DNA, 15 bp, Homo sapiens
ctgtgggcagtgagg

SEQ ID NO: 427867 - DNA, 15 bp, Homo sapiens
gctgtgggcagtgag

SEQ ID NO: 427868 - DNA, 15 bp, Homo sapiens
agctgtgggcagtga

SEQ ID NO: 427869 - DNA, 15 bp, Homo sapiens
gagctgtgggcagtg

SEQ ID NO: 427870 - DNA, 15 bp, Homo sapiens
agagctgtgggcagt

SEQ ID NO: 427871 - DNA, 15 bp, Homo sapiens
cagagctgtgggcag

SEQ ID NO: 427872 - DNA, 15 bp, Homo sapiens
acagagctgtgggca

SEQ ID NO: 427873 - DNA, 15 bp, Homo sapiens
aacagagctgtgggc

SEQ ID NO: 427874 - DNA, 15 bp, Homo sapiens
gaacagagctgtggg

SEQ ID NO: 427875 - DNA, 15 bp, Homo sapiens
tgaacagagctgtgg

SEQ ID NO: 427876 - DNA, 15 bp, Homo sapiens
ctgaacagagctgtg

SEQ ID NO: 427877 - DNA, 15 bp, Homo sapiens
gctgaacagagctgt

SEQ ID NO: 427878 - DNA, 15 bp, Homo sapiens
ggctgaacagagctg

SEQ ID NO: 427879 - DNA, 15 bp, Homo sapiens
tggctgaacagagct

SEQ ID NO: 427880 - DNA, 15 bp, Homo sapiens
gtggctgaacagagc

SEQ ID NO: 427881 - DNA, 15 bp, Homo sapiens
agtggctgaacagag

SEQ ID NO: 427882 - DNA, 15 bp, Homo sapiens
tagtggctgaacaga

SEQ ID NO: 427883 - DNA, 15 bp, Homo sapiens
atagtggctgaacag

SEQ ID NO: 427884 - DNA, 15 bp, Homo sapiens
tatagtggctgaaca

SEQ ID NO: 427885 - DNA, 15 bp, Homo sapiens
gtatagtggctgaac

SEQ ID NO: 427886 - DNA, 15 bp, Homo sapiens
tgtatagtggctgaa

SEQ ID NO: 427887 - DNA, 15 bp, Homo sapiens
ttgtatagtggctga

SEQ ID NO: 427888 - DNA, 15 bp, Homo sapiens
gttgtatagtggctg

SEQ ID NO: 427889 - DNA, 15 bp, Homo sapiens
cgttgtatagtggct

SEQ ID NO: 427890 - DNA, 15 bp, Homo sapiens
gcgttgtatagtggc

SEQ ID NO: 427891 - DNA, 15 bp, Homo sapiens
tgcgttgtatagtgg

SEQ ID NO: 427892 - DNA, 15 bp, Homo sapiens
ctgcgttgtatagtg

SEQ ID NO: 427893 - DNA, 15 bp, Homo sapiens
tctgcgttgtatagt

SEQ ID NO: 427894 - DNA, 15 bp, Homo sapiens
atctgcgttgtatag

SEQ ID NO: 427895 - DNA, 15 bp, Homo sapiens
gatctgcgttgtata

SEQ ID NO: 427896 - DNA, 15 bp, Homo sapiens
agatctgcgttgtat

SEQ ID NO: 427897 - DNA, 15 bp, Homo sapiens
gagatctgcgttgta

SEQ ID NO: 427898 - DNA, 15 bp, Homo sapiens
agagatctgcgttgt

SEQ ID NO: 427899 - DNA, 15 bp, Homo sapiens
cagagatctgcgttg

SEQ ID NO: 427900 - DNA, 15 bp, Homo sapiens
acagagatctgcgtt

SEQ ID NO: 427901 - DNA, 15 bp, Homo sapiens
aacagagatctgcgt

SEQ ID NO: 427902 - DNA, 15 bp, Homo sapiens
aaacagagatctgcg

SEQ ID NO: 427903 - DNA, 15 bp, Homo sapiens
aaaacagagatctgc

SEQ ID NO: 427904 - DNA, 15 bp, Homo sapiens
taaaacagagatctg

SEQ ID NO: 427905 - DNA, 15 bp, Homo sapiens
gtaaaacagagatct

SEQ ID NO: 427906 - DNA, 15 bp, Homo sapiens
cgtaaaacagagatc

SEQ ID NO: 427907 - DNA, 15 bp, Homo sapiens
acgtaaaacagagat

SEQ ID NO: 427908 - DNA, 15 bp, Homo sapiens
cacgtaaaacagaga

SEQ ID NO: 427909 - DNA, 15 bp, Homo sapiens
tcacgtaaaacagag

SEQ ID NO: 427910 - DNA, 15 bp, Homo sapiens
ctcacgtaaaacaga

SEQ ID NO: 427911 - DNA, 15 bp, Homo sapiens
cctcacgtaaaacag

SEQ ID NO: 427912 - DNA, 15 bp, Homo sapiens
tcctcacgtaaaaca

SEQ ID NO: 427913 - DNA, 15 bp, Homo sapiens
atcctcacgtaaaac

SEQ ID NO: 427914 - DNA, 15 bp, Homo sapiens
aatcctcacgtaaaa

SEQ ID NO: 427915 - DNA, 15 bp, Homo sapiens
gaatcctcacgtaaa

SEQ ID NO: 427916 - DNA, 15 bp, Homo sapiens
ggaatcctcacgtaa

SEQ ID NO: 427917 - DNA, 15 bp, Homo sapiens
tggaatcctcacgta

SEQ ID NO: 427918 - DNA, 15 bp, Homo sapiens
ttggaatcctcacgt

SEQ ID NO: 427919 - DNA, 15 bp, Homo sapiens
tttggaatcctcacg

SEQ ID NO: 427920 - DNA, 15 bp, Homo sapiens
atttggaatcctcac

SEQ ID NO: 427921 - DNA, 15 bp, Homo sapiens
aatttggaatcctca

SEQ ID NO: 427922 - DNA, 15 bp, Homo sapiens
taatttggaatcctc

SEQ ID NO: 427923 - DNA, 15 bp, Homo sapiens
gtaatttggaatcct

SEQ ID NO: 427924 - DNA, 15 bp, Homo sapiens
tgtaatttggaatcc

SEQ ID NO: 427925 - DNA, 15 bp, Homo sapiens
ttgtaatttggaatc

SEQ ID NO: 427926 - DNA, 15 bp, Homo sapiens
tttgtaatttggaat

SEQ ID NO: 427927 - DNA, 15 bp, Homo sapiens
ttttgtaatttggaa

SEQ ID NO: 427928 - DNA, 15 bp, Homo sapiens
attttgtaatttgga

SEQ ID NO: 427929 - DNA, 15 bp, Homo sapiens
aattttgtaatttgg

SEQ ID NO: 427930 - DNA, 15 bp, Homo sapiens
caattttgtaatttg

SEQ ID NO: 427931 - DNA, 15 bp, Homo sapiens
acaattttgtaattt

SEQ ID NO: 427932 - DNA, 15 bp, Homo sapiens
cacaattttgtaatt

SEQ ID NO: 427933 - DNA, 15 bp, Homo sapiens
acacaattttgtaat

SEQ ID NO: 427934 - DNA, 15 bp, Homo sapiens
tacacaattttgtaa

SEQ ID NO: 427935 - DNA, 15 bp, Homo sapiens
ttacacaattttgta

SEQ ID NO: 427936 - DNA, 15 bp, Homo sapiens
tttacacaattttgt

SEQ ID NO: 427937 - DNA, 15 bp, Homo sapiens
ctttacacaattttg

SEQ ID NO: 427938 - DNA, 15 bp, Homo sapiens
actttacacaatttt

SEQ ID NO: 427939 - DNA, 15 bp, Homo sapiens
tactttacacaattt

SEQ ID NO: 427940 - DNA, 15 bp, Homo sapiens
gtactttacacaatt

SEQ ID NO: 427941 - DNA, 15 bp, Homo sapiens
agtactttacacaat

SEQ ID NO: 427942 - DNA, 15 bp, Homo sapiens
aagtactttacacaa

SEQ ID NO: 427943 - DNA, 15 bp, Homo sapiens
aaagtactttacaca

SEQ ID NO: 427944 - DNA, 15 bp, Homo sapiens
gaaagtactttacac

SEQ ID NO: 427945 - DNA, 15 bp, Homo sapiens
agaaagtactttaca

SEQ ID NO: 427946 - DNA, 15 bp, Homo sapiens
aagaaagtactttac

SEQ ID NO: 427947 - DNA, 15 bp, Homo sapiens
aaagaaagtacttta

SEQ ID NO: 427948 - DNA, 15 bp, Homo sapiens
aaaagaaagtacttt

SEQ ID NO: 427949 - DNA, 15 bp, Homo sapiens
aaaaagaaagtactt

SEQ ID NO: 427950 - DNA, 15 bp, Homo sapiens
aaaaaagaaagtact

SEQ ID NO: 427951 - DNA, 15 bp, Homo sapiens
caaaaaagaaagtac

SEQ ID NO: 427952 - DNA, 15 bp, Homo sapiens
ccaaaaaagaaagta

SEQ ID NO: 427953 - DNA, 15 bp, Homo sapiens
accaaaaaagaaagt

SEQ ID NO: 427954 - DNA, 15 bp, Homo sapiens
gaccaaaaaagaaag

SEQ ID NO: 427955 - DNA, 15 bp, Homo sapiens
agaccaaaaaagaaa

SEQ ID NO: 427956 - DNA, 15 bp, Homo sapiens
gagaccaaaaaagaa

SEQ ID NO: 427957 - DNA, 15 bp, Homo sapiens
agagaccaaaaaaga

SEQ ID NO: 427958 - DNA, 15 bp, Homo sapiens
tagagaccaaaaaag

SEQ ID NO: 427959 - DNA, 15 bp, Homo sapiens
atagagaccaaaaaa

SEQ ID NO: 427960 - DNA, 15 bp, Homo sapiens
tatagagaccaaaaa

SEQ ID NO: 427961 - DNA, 15 bp, Homo sapiens
atatagagaccaaaa

SEQ ID NO: 427962 - DNA, 15 bp, Homo sapiens
gatatagagaccaaa

SEQ ID NO: 427963 - DNA, 15 bp, Homo sapiens
ggatatagagaccaa

SEQ ID NO: 427964 - DNA, 15 bp, Homo sapiens
gggatatagagacca

SEQ ID NO: 427965 - DNA, 15 bp, Homo sapiens
agggatatagagacc

SEQ ID NO: 427966 - DNA, 15 bp, Homo sapiens
tagggatatagagac

SEQ ID NO: 427967 - DNA, 15 bp, Homo sapiens
atagggatatagaga

SEQ ID NO: 427968 - DNA, 15 bp, Homo sapiens
gatagggatatagag

SEQ ID NO: 427969 - DNA, 15 bp, Homo sapiens
ggatagggatataga

SEQ ID NO: 427970 - DNA, 15 bp, Homo sapiens
aggatagggatatag

SEQ ID NO: 427971 - DNA, 15 bp, Homo sapiens
caggatagggatata

SEQ ID NO: 427972 - DNA, 15 bp, Homo sapiens
tcaggatagggatat

SEQ ID NO: 427973 - DNA, 15 bp, Homo sapiens
atcaggatagggata

SEQ ID NO: 427974 - DNA, 15 bp, Homo sapiens
gatcaggatagggat

SEQ ID NO: 427975 - DNA, 15 bp, Homo sapiens
tgatcaggataggga

SEQ ID NO: 427976 - DNA, 15 bp, Homo sapiens
gtgatcaggataggg

SEQ ID NO: 427977 - DNA, 15 bp, Homo sapiens
tgtgatcaggatagg

SEQ ID NO: 427978 - DNA, 15 bp, Homo sapiens
ttgtgatcaggatag

SEQ ID NO: 427979 - DNA, 15 bp, Homo sapiens
attgtgatcaggata

SEQ ID NO: 427980 - DNA, 15 bp, Homo sapiens
aattgtgatcaggat

SEQ ID NO: 427981 - DNA, 15 bp, Homo sapiens
gaattgtgatcagga

SEQ ID NO: 427982 - DNA, 15 bp, Homo sapiens
tgaattgtgatcagg

SEQ ID NO: 427983 - DNA, 15 bp, Homo sapiens
ttgaattgtgatcag

SEQ ID NO: 427984 - DNA, 15 bp, Homo sapiens
tttgaattgtgatca

SEQ ID NO: 427985 - DNA, 15 bp, Homo sapiens
atttgaattgtgatc

SEQ ID NO: 427986 - DNA, 15 bp, Homo sapiens
catttgaattgtgat

SEQ ID NO: 427987 - DNA, 15 bp, Homo sapiens
tcatttgaattgtga

SEQ ID NO: 427988 - DNA, 15 bp, Homo sapiens
ttcatttgaattgtg

SEQ ID NO: 427989 - DNA, 15 bp, Homo sapiens
tttcatttgaattgt

SEQ ID NO: 427990 - DNA, 15 bp, Homo sapiens
ttttcatttgaattg

SEQ ID NO: 427991 - DNA, 15 bp, Homo sapiens
cttttcatttgaatt

SEQ ID NO: 427992 - DNA, 15 bp, Homo sapiens
acttttcatttgaat

SEQ ID NO: 427993 - DNA, 15 bp, Homo sapiens
aacttttcatttgaa

SEQ ID NO: 427994 - DNA, 15 bp, Homo sapiens
aaacttttcatttga

SEQ ID NO: 427995 - DNA, 15 bp, Homo sapiens
gaaacttttcatttg

SEQ ID NO: 427996 - DNA, 15 bp, Homo sapiens
agaaacttttcattt

SEQ ID NO: 427997 - DNA, 15 bp, Homo sapiens
aagaaacttttcatt

SEQ ID NO: 427998 - DNA, 15 bp, Homo sapiens
caagaaacttttcat

SEQ ID NO: 427999 - DNA, 15 bp, Homo sapiens
acaagaaacttttca

SEQ ID NO: 428000 - DNA, 15 bp, Homo sapiens
gacaagaaacttttc

SEQ ID NO: 428001 - DNA, 15 bp, Homo sapiens
ggacaagaaactttt

SEQ ID NO: 428002 - DNA, 15 bp, Homo sapiens
aggacaagaaacttt

SEQ ID NO: 428003 - DNA, 15 bp, Homo sapiens
taggacaagaaactt

SEQ ID NO: 428004 - DNA, 15 bp, Homo sapiens
ataggacaagaaact

SEQ ID NO: 428005 - DNA, 15 bp, Homo sapiens
tataggacaagaaac

SEQ ID NO: 428006 - DNA, 15 bp, Homo sapiens
ttataggacaagaaa

SEQ ID NO: 428007 - DNA, 15 bp, Homo sapiens
tttataggacaagaa

SEQ ID NO: 428008 - DNA, 15 bp, Homo sapiens
ttttataggacaaga

SEQ ID NO: 428009 - DNA, 15 bp, Homo sapiens
attttataggacaag

SEQ ID NO: 428010 - DNA, 15 bp, Homo sapiens
cattttataggacaa

SEQ ID NO: 428011 - DNA, 15 bp, Homo sapiens
tcattttataggaca

SEQ ID NO: 428012 - DNA, 15 bp, Homo sapiens
ctcattttataggac

SEQ ID NO: 428013 - DNA, 15 bp, Homo sapiens
gctcattttatagga

SEQ ID NO: 428014 - DNA, 15 bp, Homo sapiens
tgctcattttatagg

SEQ ID NO: 428015 - DNA, 15 bp, Homo sapiens
ttgctcattttatag

SEQ ID NO: 428016 - DNA, 15 bp, Homo sapiens
tttgctcattttata

SEQ ID NO: 428017 - DNA, 15 bp, Homo sapiens
ttttgctcattttat

SEQ ID NO: 428018 - DNA, 15 bp, Homo sapiens
attttgctcatttta

SEQ ID NO: 428019 - DNA, 15 bp, Homo sapiens
aattttgctcatttt

SEQ ID NO: 428020 - DNA, 15 bp, Homo sapiens
caattttgctcattt

SEQ ID NO: 428021 - DNA, 15 bp, Homo sapiens
tcaattttgctcatt

SEQ ID NO: 428022 - DNA, 15 bp, Homo sapiens
ttcaattttgctcat

SEQ ID NO: 428023 - DNA, 15 bp, Homo sapiens
attcaattttgctca

SEQ ID NO: 428024 - DNA, 15 bp, Homo sapiens
aattcaattttgctc

SEQ ID NO: 428025 - DNA, 15 bp, Homo sapiens
taattcaattttgct

SEQ ID NO: 428026 - DNA, 15 bp, Homo sapiens
ttaattcaattttgc

SEQ ID NO: 428027 - DNA, 15 bp, Homo sapiens
attaattcaattttg

SEQ ID NO: 428028 - DNA, 15 bp, Homo sapiens
tattaattcaatttt

SEQ ID NO: 428029 - DNA, 15 bp, Homo sapiens
atattaattcaattt

SEQ ID NO: 428030 - DNA, 15 bp, Homo sapiens
gatattaattcaatt

SEQ ID NO: 428031 - DNA, 15 bp, Homo sapiens
agatattaattcaat

SEQ ID NO: 428032 - DNA, 15 bp, Homo sapiens
aagatattaattcaa

SEQ ID NO: 428033 - DNA, 15 bp, Homo sapiens
taagatattaattca

SEQ ID NO: 428034 - DNA, 15 bp, Homo sapiens
ttaagatattaattc

SEQ ID NO: 428035 - DNA, 15 bp, Homo sapiens
cttaagatattaatt

SEQ ID NO: 428036 - DNA, 15 bp, Homo sapiens
ccttaagatattaat

SEQ ID NO: 428037 - DNA, 15 bp, Homo sapiens
tccttaagatattaa

SEQ ID NO: 428038 - DNA, 15 bp, Homo sapiens
ctccttaagatatta

SEQ ID NO: 428039 - DNA, 15 bp, Homo sapiens
actccttaagatatt

SEQ ID NO: 428040 - DNA, 15 bp, Homo sapiens
aactccttaagatat

SEQ ID NO: 428041 - DNA, 15 bp, Homo sapiens
gaactccttaagata

SEQ ID NO: 428042 - DNA, 15 bp, Homo sapiens
tgaactccttaagat

SEQ ID NO: 428043 - DNA, 15 bp, Homo sapiens
ctgaactccttaaga

SEQ ID NO: 428044 - DNA, 15 bp, Homo sapiens
cctgaactccttaag

SEQ ID NO: 428045 - DNA, 15 bp, Homo sapiens
ccctgaactccttaa

SEQ ID NO: 428046 - DNA, 15 bp, Homo sapiens
cccctgaactcctta

SEQ ID NO: 428047 - DNA, 15 bp, Homo sapiens
ccccctgaactcctt

SEQ ID NO: 428048 - DNA, 15 bp, Homo sapiens
cccccctgaactcct

SEQ ID NO: 428049 - DNA, 15 bp, Homo sapiens
gcccccctgaactcc

SEQ ID NO: 428050 - DNA, 15 bp, Homo sapiens
agcccccctgaactc

SEQ ID NO: 428051 - DNA, 15 bp, Homo sapiens
cagcccccctgaact

SEQ ID NO: 428052 - DNA, 15 bp, Homo sapiens
acagcccccctgaac

SEQ ID NO: 428053 - DNA, 15 bp, Homo sapiens
gacagcccccctgaa

SEQ ID NO: 428054 - DNA, 15 bp, Homo sapiens
agacagcccccctga

SEQ ID NO: 428055 - DNA, 15 bp, Homo sapiens
aagacagcccccctg

SEQ ID NO: 428056 - DNA, 15 bp, Homo sapiens
aaagacagcccccct

SEQ ID NO: 428057 - DNA, 15 bp, Homo sapiens
caaagacagcccccc

SEQ ID NO: 428058 - DNA, 15 bp, Homo sapiens
tcaaagacagccccc

SEQ ID NO: 428059 - DNA, 15 bp, Homo sapiens
ctcaaagacagcccc

SEQ ID NO: 428060 - DNA, 15 bp, Homo sapiens
gctcaaagacagccc

SEQ ID NO: 428061 - DNA, 15 bp, Homo sapiens
agctcaaagacagcc

SEQ ID NO: 428062 - DNA, 15 bp, Homo sapiens
cagctcaaagacagc

SEQ ID NO: 428063 - DNA, 15 bp, Homo sapiens
ccagctcaaagacag

SEQ ID NO: 428064 - DNA, 15 bp, Homo sapiens
cccagctcaaagaca

SEQ ID NO: 428065 - DNA, 15 bp, Homo sapiens
tcccagctcaaagac

SEQ ID NO: 428066 - DNA, 15 bp, Homo sapiens
ttcccagctcaaaga

SEQ ID NO: 428067 - DNA, 15 bp, Homo sapiens
tttcccagctcaaag

SEQ ID NO: 428068 - DNA, 15 bp, Homo sapiens
ctttcccagctcaaa

SEQ ID NO: 428069 - DNA, 15 bp, Homo sapiens
tctttcccagctcaa

SEQ ID NO: 428070 - DNA, 15 bp, Homo sapiens
ttctttcccagctca

SEQ ID NO: 428071 - DNA, 15 bp, Homo sapiens
gttctttcccagctc

SEQ ID NO: 428072 - DNA, 15 bp, Homo sapiens
ggttctttcccagct

SEQ ID NO: 428073 - DNA, 15 bp, Homo sapiens
aggttctttcccagc

SEQ ID NO: 428074 - DNA, 15 bp, Homo sapiens
gaggttctttcccag

SEQ ID NO: 428075 - DNA, 15 bp, Homo sapiens
ggaggttctttccca

SEQ ID NO: 428076 - DNA, 15 bp, Homo sapiens
tggaggttctttccc

SEQ ID NO: 428077 - DNA, 15 bp, Homo sapiens
ttggaggttctttcc

SEQ ID NO: 428078 - DNA, 15 bp, Homo sapiens
cttggaggttctttc

SEQ ID NO: 428079 - DNA, 15 bp, Homo sapiens
gcttggaggttcttt

SEQ ID NO: 428080 - DNA, 15 bp, Homo sapiens
ggcttggaggttctt

SEQ ID NO: 428081 - DNA, 15 bp, Homo sapiens
tggcttggaggttct

SEQ ID NO: 428082 - DNA, 15 bp, Homo sapiens
ctggcttggaggttc

SEQ ID NO: 428083 - DNA, 15 bp, Homo sapiens
gctggcttggaggtt

SEQ ID NO: 428084 - DNA, 15 bp, Homo sapiens
agctggcttggaggt

SEQ ID NO: 428085 - DNA, 15 bp, Homo sapiens
aagctggcttggagg

SEQ ID NO: 428086 - DNA, 15 bp, Homo sapiens
gaagctggcttggag

SEQ ID NO: 428087 - DNA, 15 bp, Homo sapiens
ggaagctggcttgga

SEQ ID NO: 428088 - DNA, 15 bp, Homo sapiens
tggaagctggcttgg

SEQ ID NO: 428089 - DNA, 15 bp, Homo sapiens
atggaagctggcttg

SEQ ID NO: 428090 - DNA, 15 bp, Homo sapiens
aatggaagctggctt

SEQ ID NO: 428091 - DNA, 15 bp, Homo sapiens
taatggaagctggct

SEQ ID NO: 428092 - DNA, 15 bp, Homo sapiens
ttaatggaagctggc

SEQ ID NO: 428093 - DNA, 15 bp, Homo sapiens
gttaatggaagctgg

SEQ ID NO: 428094 - DNA, 15 bp, Homo sapiens
tgttaatggaagctg

SEQ ID NO: 428095 - DNA, 15 bp, Homo sapiens
atgttaatggaagct

SEQ ID NO: 428096 - DNA, 15 bp, Homo sapiens
tatgttaatggaagc

SEQ ID NO: 428097 - DNA, 15 bp, Homo sapiens
atatgttaatggaag

SEQ ID NO: 428098 - DNA, 15 bp, Homo sapiens
aatatgttaatggaa

SEQ ID NO: 428099 - DNA, 15 bp, Homo sapiens
aaatatgttaatgga

SEQ ID NO: 428100 - DNA, 15 bp, Homo sapiens
caaatatgttaatgg

SEQ ID NO: 428101 - DNA, 15 bp, Homo sapiens
ccaaatatgttaatg

SEQ ID NO: 428102 - DNA, 15 bp, Homo sapiens
tccaaatatgttaat

SEQ ID NO: 428103 - DNA, 15 bp, Homo sapiens
ttccaaatatgttaa

SEQ ID NO: 428104 - DNA, 15 bp, Homo sapiens
attccaaatatgtta

SEQ ID NO: 428105 - DNA, 15 bp, Homo sapiens
aattccaaatatgtt

SEQ ID NO: 428106 - DNA, 15 bp, Homo sapiens
gaattccaaatatgt

SEQ ID NO: 428107 - DNA, 15 bp, Homo sapiens
agaattccaaatatg

SEQ ID NO: 428108 - DNA, 15 bp, Homo sapiens
tagaattccaaatat

SEQ ID NO: 428109 - DNA, 15 bp, Homo sapiens
ctagaattccaaata

SEQ ID NO: 428110 - DNA, 15 bp, Homo sapiens
cctagaattccaaat

SEQ ID NO: 428111 - DNA, 15 bp, Homo sapiens
acctagaattccaaa

SEQ ID NO: 428112 - DNA, 15 bp, Homo sapiens
cacctagaattccaa

SEQ ID NO: 428113 - DNA, 15 bp, Homo sapiens
acacctagaattcca

SEQ ID NO: 428114 - DNA, 15 bp, Homo sapiens
aacacctagaattcc

SEQ ID NO: 428115 - DNA, 15 bp, Homo sapiens
aaacacctagaattc

SEQ ID NO: 428116 - DNA, 15 bp, Homo sapiens
gaaacacctagaatt

SEQ ID NO: 428117 - DNA, 15 bp, Homo sapiens
agaaacacctagaat

SEQ ID NO: 428118 - DNA, 15 bp, Homo sapiens
aagaaacacctagaa

SEQ ID NO: 428119 - DNA, 15 bp, Homo sapiens
aaagaaacacctaga

SEQ ID NO: 428120 - DNA, 15 bp, Homo sapiens
caaagaaacacctag

SEQ ID NO: 428121 - DNA, 15 bp, Homo sapiens
tcaaagaaacaccta

SEQ ID NO: 428122 - DNA, 15 bp, Homo sapiens
ttcaaagaaacacct

SEQ ID NO: 428123 - DNA, 15 bp, Homo sapiens
cttcaaagaaacacc

SEQ ID NO: 428124 - DNA, 15 bp, Homo sapiens
gcttcaaagaaacac

SEQ ID NO: 428125 - DNA, 15 bp, Homo sapiens
ggcttcaaagaaaca

SEQ ID NO: 428126 - DNA, 15 bp, Homo sapiens
aggcttcaaagaaac

SEQ ID NO: 428127 - DNA, 15 bp, Homo sapiens
caggcttcaaagaaa

SEQ ID NO: 428128 - DNA, 15 bp, Homo sapiens
ccaggcttcaaagaa

SEQ ID NO: 428129 - DNA, 15 bp, Homo sapiens
tccaggcttcaaaga

SEQ ID NO: 428130 - DNA, 15 bp, Homo sapiens
ttccaggcttcaaag

SEQ ID NO: 428131 - DNA, 15 bp, Homo sapiens
tttccaggcttcaaa

SEQ ID NO: 428132 - DNA, 15 bp, Homo sapiens
atttccaggcttcaa

SEQ ID NO: 428133 - DNA, 15 bp, Homo sapiens
aatttccaggcttca

SEQ ID NO: 428134 - DNA, 15 bp, Homo sapiens
aaatttccaggcttc

SEQ ID NO: 428135 - DNA, 15 bp, Homo sapiens
aaaatttccaggctt

SEQ ID NO: 428136 - DNA, 15 bp, Homo sapiens
aaaaatttccaggct

SEQ ID NO: 428137 - DNA, 15 bp, Homo sapiens
aaaaaatttccaggc

SEQ ID NO: 428138 - DNA, 15 bp, Homo sapiens
aaaaaaatttccagg

SEQ ID NO: 428139 - DNA, 15 bp, Homo sapiens
taaaaaaatttccag

SEQ ID NO: 428140 - DNA, 15 bp, Homo sapiens
gttaaaaaaatttcc

SEQ ID NO: 428141 - DNA, 15 bp, Homo sapiens
ggttaaaaaaatttc

SEQ ID NO: 428142 - DNA, 15 bp, Homo sapiens
aggttaaaaaaattt

SEQ ID NO: 428143 - DNA, 15 bp, Homo sapiens
caggttaaaaaaatt

SEQ ID NO: 428144 - DNA, 15 bp, Homo sapiens
gcaggttaaaaaaat

SEQ ID NO: 428145 - DNA, 15 bp, Homo sapiens
tgcaggttaaaaaaa

SEQ ID NO: 428146 - DNA, 15 bp, Homo sapiens
gtgcaggttaaaaaa

SEQ ID NO: 428147 - DNA, 15 bp, Homo sapiens
tgtgcaggttaaaaa

SEQ ID NO: 428148 - DNA, 15 bp, Homo sapiens
ctgtgcaggttaaaa

SEQ ID NO: 428149 - DNA, 15 bp, Homo sapiens
tctgtgcaggttaaa

SEQ ID NO: 428150 - DNA, 15 bp, Homo sapiens
ttctgtgcaggttaa

SEQ ID NO: 428151 - DNA, 15 bp, Homo sapiens
gttctgtgcaggtta

SEQ ID NO: 428152 - DNA, 15 bp, Homo sapiens
ggttctgtgcaggtt

SEQ ID NO: 428153 - DNA, 15 bp, Homo sapiens
aggttctgtgcaggt

SEQ ID NO: 428154 - DNA, 15 bp, Homo sapiens
aaggttctgtgcagg

SEQ ID NO: 428155 - DNA, 15 bp, Homo sapiens
aaaggttctgtgcag

SEQ ID NO: 428156 - DNA, 15 bp, Homo sapiens
caaaggttctgtgca

SEQ ID NO: 428157 - DNA, 15 bp, Homo sapiens
acaaaggttctgtgc

SEQ ID NO: 428158 - DNA, 15 bp, Homo sapiens
tacaaaggttctgtg

SEQ ID NO: 428159 - DNA, 15 bp, Homo sapiens
gtacaaaggttctgt

SEQ ID NO: 428160 - DNA, 15 bp, Homo sapiens
agtacaaaggttctg

SEQ ID NO: 428161 - DNA, 15 bp, Homo sapiens
cagtacaaaggttct

SEQ ID NO: 428162 - DNA, 15 bp, Homo sapiens
acagtacaaaggttc

SEQ ID NO: 428163 - DNA, 15 bp, Homo sapiens
aacagtacaaaggtt

SEQ ID NO: 428164 - DNA, 15 bp, Homo sapiens
caacagtacaaaggt

SEQ ID NO: 428165 - DNA, 15 bp, Homo sapiens
gcaacagtacaaagg

SEQ ID NO: 428166 - DNA, 15 bp, Homo sapiens
ggcaacagtacaaag

SEQ ID NO: 428167 - DNA, 15 bp, Homo sapiens
aggcaacagtacaaa

SEQ ID NO: 428168 - DNA, 15 bp, Homo sapiens
aaggcaacagtacaa

SEQ ID NO: 428169 - DNA, 15 bp, Homo sapiens
aaaggcaacagtaca

SEQ ID NO: 428170 - DNA, 15 bp, Homo sapiens
taaaggcaacagtac

SEQ ID NO: 428171 - DNA, 15 bp, Homo sapiens
ttaaaggcaacagta

SEQ ID NO: 428172 - DNA, 15 bp, Homo sapiens
tttaaaggcaacagt

SEQ ID NO: 428173 - DNA, 15 bp, Homo sapiens
ctttaaaggcaacag

SEQ ID NO: 428174 - DNA, 15 bp, Homo sapiens
gctttaaaggcaaca

SEQ ID NO: 428175 - DNA, 15 bp, Homo sapiens
tgctttaaaggcaac

SEQ ID NO: 428176 - DNA, 15 bp, Homo sapiens
ctgctttaaaggcaa

SEQ ID NO: 428177 - DNA, 15 bp, Homo sapiens
gctgctttaaaggca

SEQ ID NO: 428178 - DNA, 15 bp, Homo sapiens
agctgctttaaaggc

SEQ ID NO: 428179 - DNA, 15 bp, Homo sapiens
tagctgctttaaagg

SEQ ID NO: 428180 - DNA, 15 bp, Homo sapiens
gtagctgctttaaag

SEQ ID NO: 428181 - DNA, 15 bp, Homo sapiens
agtagctgctttaaa

SEQ ID NO: 428182 - DNA, 15 bp, Homo sapiens
gagtagctgctttaa

SEQ ID NO: 428183 - DNA, 15 bp, Homo sapiens
ggagtagctgcttta

SEQ ID NO: 428184 - DNA, 15 bp, Homo sapiens
gggagtagctgcttt

SEQ ID NO: 428185 - DNA, 15 bp, Homo sapiens
agggagtagctgctt

SEQ ID NO: 428186 - DNA, 15 bp, Homo sapiens
aagggagtagctgct

SEQ ID NO: 428187 - DNA, 15 bp, Homo sapiens
aaagggagtagctgc

SEQ ID NO: 428188 - DNA, 15 bp, Homo sapiens
aaaagggagtagctg

SEQ ID NO: 428189 - DNA, 15 bp, Homo sapiens
taaaagggagtagct

SEQ ID NO: 428190 - DNA, 15 bp, Homo sapiens
ataaaagggagtagc

SEQ ID NO: 428191 - DNA, 15 bp, Homo sapiens
aataaaagggagtag

SEQ ID NO: 428192 - DNA, 15 bp, Homo sapiens
aaataaaagggagta

SEQ ID NO: 428193 - DNA, 15 bp, Homo sapiens
aaaataaaagggagt

SEQ ID NO: 428194 - DNA, 15 bp, Homo sapiens
taaaataaaagggag

SEQ ID NO: 428195 - DNA, 15 bp, Homo sapiens
ttaaaataaaaggga

SEQ ID NO: 428196 - DNA, 15 bp, Homo sapiens
attaaaataaaaggg

SEQ ID NO: 428197 - DNA, 15 bp, Homo sapiens
aattaaaataaaagg

SEQ ID NO: 428198 - DNA, 15 bp, Homo sapiens
taattaaaataaaag

SEQ ID NO: 428199 - DNA, 15 bp, Homo sapiens
ttaattaaaataaaa

SEQ ID NO: 428200 - DNA, 15 bp, Homo sapiens
gttaattaaaataaa

SEQ ID NO: 428201 - DNA, 15 bp, Homo sapiens
tgttaattaaaataa

SEQ ID NO: 428202 - DNA, 15 bp, Homo sapiens
ttgttaattaaaata

SEQ ID NO: 428203 - DNA, 15 bp, Homo sapiens
attgttaattaaaat

SEQ ID NO: 428204 - DNA, 15 bp, Homo sapiens
cattgttaattaaaa

SEQ ID NO: 428205 - DNA, 15 bp, Homo sapiens
tcattgttaattaaa

SEQ ID NO: 428206 - DNA, 15 bp, Homo sapiens
gtcattgttaattaa

SEQ ID NO: 428207 - DNA, 15 bp, Homo sapiens
agtcattgttaatta

SEQ ID NO: 428208 - DNA, 15 bp, Homo sapiens
aagtcattgttaatt

SEQ ID NO: 428209 - DNA, 15 bp, Homo sapiens
gaagtcattgttaat

SEQ ID NO: 428210 - DNA, 15 bp, Homo sapiens
tgaagtcattgttaa

SEQ ID NO: 428211 - DNA, 15 bp, Homo sapiens
ctgaagtcattgtta

SEQ ID NO: 428212 - DNA, 15 bp, Homo sapiens
gctgaagtcattgtt

SEQ ID NO: 428213 - DNA, 15 bp, Homo sapiens
tgctgaagtcattgt

SEQ ID NO: 428214 - DNA, 15 bp, Homo sapiens
ctgctgaagtcattg

SEQ ID NO: 428215 - DNA, 15 bp, Homo sapiens
cctgctgaagtcatt

SEQ ID NO: 428216 - DNA, 15 bp, Homo sapiens
acctgctgaagtcat

SEQ ID NO: 428217 - DNA, 15 bp, Homo sapiens
aacctgctgaagtca

SEQ ID NO: 428218 - DNA, 15 bp, Homo sapiens
aaacctgctgaagtc

SEQ ID NO: 428219 - DNA, 15 bp, Homo sapiens
aaaacctgctgaagt

SEQ ID NO: 428220 - DNA, 15 bp, Homo sapiens
taaaacctgctgaag

SEQ ID NO: 428221 - DNA, 15 bp, Homo sapiens
ttaaaacctgctgaa

SEQ ID NO: 428222 - DNA, 15 bp, Homo sapiens
tttaaaacctgctga

SEQ ID NO: 428223 - DNA, 15 bp, Homo sapiens
atttaaaacctgctg

SEQ ID NO: 428224 - DNA, 15 bp, Homo sapiens
tatttaaaacctgct

SEQ ID NO: 428225 - DNA, 15 bp, Homo sapiens
ttatttaaaacctgc

SEQ ID NO: 428226 - DNA, 15 bp, Homo sapiens
attatttaaaacctg

SEQ ID NO: 428227 - DNA, 15 bp, Homo sapiens
cattatttaaaacct

SEQ ID NO: 428228 - DNA, 15 bp, Homo sapiens
ccattatttaaaacc

SEQ ID NO: 428229 - DNA, 15 bp, Homo sapiens
accattatttaaaac

SEQ ID NO: 428230 - DNA, 15 bp, Homo sapiens
aaccattatttaaaa

SEQ ID NO: 428231 - DNA, 15 bp, Homo sapiens
aaaccattatttaaa

SEQ ID NO: 428232 - DNA, 15 bp, Homo sapiens
caaaccattatttaa

SEQ ID NO: 428233 - DNA, 15 bp, Homo sapiens
acaaaccattattta

SEQ ID NO: 428234 - DNA, 15 bp, Homo sapiens
gacaaaccattattt

SEQ ID NO: 428235 - DNA, 15 bp, Homo sapiens
agacaaaccattatt

SEQ ID NO: 428236 - DNA, 15 bp, Homo sapiens
aagacaaaccattat

SEQ ID NO: 428237 - DNA, 15 bp, Homo sapiens
aaagacaaaccatta

SEQ ID NO: 428238 - DNA, 15 bp, Homo sapiens
taaagacaaaccatt

SEQ ID NO: 428239 - DNA, 15 bp, Homo sapiens
ataaagacaaaccat

SEQ ID NO: 428240 - DNA, 15 bp, Homo sapiens
cataaagacaaacca

SEQ ID NO: 428241 - DNA, 15 bp, Homo sapiens
tcataaagacaaacc

SEQ ID NO: 428242 - DNA, 15 bp, Homo sapiens
ttcataaagacaaac

SEQ ID NO: 428243 - DNA, 15 bp, Homo sapiens
tttcataaagacaaa

SEQ ID NO: 428244 - DNA, 15 bp, Homo sapiens
ctttcataaagacaa

SEQ ID NO: 428245 - DNA, 15 bp, Homo sapiens
tctttcataaagaca

SEQ ID NO: 428246 - DNA, 15 bp, Homo sapiens
ttctttcataaagac

SEQ ID NO: 428247 - DNA, 15 bp, Homo sapiens
tttctttcataaaga

SEQ ID NO: 428248 - DNA, 15 bp, Homo sapiens
ttttctttcataaag

SEQ ID NO: 428249 - DNA, 15 bp, Homo sapiens
gttttctttcataaa

SEQ ID NO: 428250 - DNA, 15 bp, Homo sapiens
agttttctttcataa

SEQ ID NO: 428251 - DNA, 15 bp, Homo sapiens
tagttttctttcata

SEQ ID NO: 428252 - DNA, 15 bp, Homo sapiens
ctagttttctttcat

SEQ ID NO: 428253 - DNA, 15 bp, Homo sapiens
cctagttttctttca

SEQ ID NO: 428254 - DNA, 15 bp, Homo sapiens
ccctagttttctttc

SEQ ID NO: 428255 - DNA, 15 bp, Homo sapiens
accctagttttcttt

SEQ ID NO: 428256 - DNA, 15 bp, Homo sapiens
caccctagttttctt

SEQ ID NO: 428257 - DNA, 15 bp, Homo sapiens
ccaccctagttttct

SEQ ID NO: 428258 - DNA, 15 bp, Homo sapiens
tccaccctagttttc

SEQ ID NO: 428259 - DNA, 15 bp, Homo sapiens
ttccaccctagtttt

SEQ ID NO: 428260 - DNA, 15 bp, Homo sapiens
tttccaccctagttt

SEQ ID NO: 428261 - DNA, 15 bp, Homo sapiens
gtttccaccctagtt

SEQ ID NO: 428262 - DNA, 15 bp, Homo sapiens
tgtttccaccctagt

SEQ ID NO: 428263 - DNA, 15 bp, Homo sapiens
gtgtttccaccctag

SEQ ID NO: 428264 - DNA, 15 bp, Homo sapiens
agtgtttccacccta

SEQ ID NO: 428265 - DNA, 15 bp, Homo sapiens
gagtgtttccaccct

SEQ ID NO: 428266 - DNA, 15 bp, Homo sapiens
ggagtgtttccaccc

SEQ ID NO: 428267 - DNA, 15 bp, Homo sapiens
tggagtgtttccacc

SEQ ID NO: 428268 - DNA, 15 bp, Homo sapiens
ttggagtgtttccac

SEQ ID NO: 428269 - DNA, 15 bp, Homo sapiens
tttggagtgtttcca

SEQ ID NO: 428270 - DNA, 15 bp, Homo sapiens
atttggagtgtttcc

SEQ ID NO: 428271 - DNA, 15 bp, Homo sapiens
gatttggagtgtttc

SEQ ID NO: 428272 - DNA, 15 bp, Homo sapiens
ggatttggagtgttt

SEQ ID NO: 428273 - DNA, 15 bp, Homo sapiens
tggatttggagtgtt

SEQ ID NO: 428274 - DNA, 15 bp, Homo sapiens
gtggatttggagtgt

SEQ ID NO: 428275 - DNA, 15 bp, Homo sapiens
agtggatttggagtg

SEQ ID NO: 428276 - DNA, 15 bp, Homo sapiens
aagtggatttggagt

SEQ ID NO: 428277 - DNA, 15 bp, Homo sapiens
taagtggatttggag

SEQ ID NO: 428278 - DNA, 15 bp, Homo sapiens
ataagtggatttgga

SEQ ID NO: 428279 - DNA, 15 bp, Homo sapiens
aataagtggatttgg

SEQ ID NO: 428280 - DNA, 15 bp, Homo sapiens
caataagtggatttg

SEQ ID NO: 428281 - DNA, 15 bp, Homo sapiens
ccaataagtggattt

SEQ ID NO: 428282 - DNA, 15 bp, Homo sapiens
tccaataagtggatt

SEQ ID NO: 428283 - DNA, 15 bp, Homo sapiens
ttccaataagtggat

SEQ ID NO: 428284 - DNA, 15 bp, Homo sapiens
attccaataagtgga

SEQ ID NO: 428285 - DNA, 15 bp, Homo sapiens
tattccaataagtgg

SEQ ID NO: 428286 - DNA, 15 bp, Homo sapiens
ttattccaataagtg

SEQ ID NO: 428287 - DNA, 15 bp, Homo sapiens
tttattccaataagt

SEQ ID NO: 428288 - DNA, 15 bp, Homo sapiens
gtttattccaataag

SEQ ID NO: 428289 - DNA, 15 bp, Homo sapiens
agtttattccaataa

SEQ ID NO: 428290 - DNA, 15 bp, Homo sapiens
cagtttattccaata

SEQ ID NO: 428291 - DNA, 15 bp, Homo sapiens
tcagtttattccaat

SEQ ID NO: 428292 - DNA, 15 bp, Homo sapiens
ctcagtttattccaa

SEQ ID NO: 428293 - DNA, 15 bp, Homo sapiens
cctcagtttattcca

SEQ ID NO: 428294 - DNA, 15 bp, Homo sapiens
tcctcagtttattcc

SEQ ID NO: 428295 - DNA, 15 bp, Homo sapiens
ctcctcagtttattc

SEQ ID NO: 428296 - DNA, 15 bp, Homo sapiens
actcctcagtttatt

SEQ ID NO: 428297 - DNA, 15 bp, Homo sapiens
gactcctcagtttat

SEQ ID NO: 428298 - DNA, 15 bp, Homo sapiens
tgactcctcagttta

SEQ ID NO: 428299 - DNA, 15 bp, Homo sapiens
gtgactcctcagttt

SEQ ID NO: 428300 - DNA, 15 bp, Homo sapiens
agtgactcctcagtt

SEQ ID NO: 428301 - DNA, 15 bp, Homo sapiens
tagtgactcctcagt

SEQ ID NO: 428302 - DNA, 15 bp, Homo sapiens
ttagtgactcctcag

SEQ ID NO: 428303 - DNA, 15 bp, Homo sapiens
cttagtgactcctca

SEQ ID NO: 428304 - DNA, 15 bp, Homo sapiens
acttagtgactcctc

SEQ ID NO: 428305 - DNA, 15 bp, Homo sapiens
gacttagtgactcct

SEQ ID NO: 428306 - DNA, 15 bp, Homo sapiens
ggacttagtgactcc

SEQ ID NO: 428307 - DNA, 15 bp, Homo sapiens
aggacttagtgactc

SEQ ID NO: 428308 - DNA, 15 bp, Homo sapiens
aaggacttagtgact

SEQ ID NO: 428309 - DNA, 15 bp, Homo sapiens
aaaggacttagtgac

SEQ ID NO: 428310 - DNA, 15 bp, Homo sapiens
gaaaggacttagtga

SEQ ID NO: 428311 - DNA, 15 bp, Homo sapiens
ggaaaggacttagtg

SEQ ID NO: 428312 - DNA, 15 bp, Homo sapiens
tggaaaggacttagt

SEQ ID NO: 428313 - DNA, 15 bp, Homo sapiens
ttggaaaggacttag

SEQ ID NO: 428314 - DNA, 15 bp, Homo sapiens
gttggaaaggactta

SEQ ID NO: 428315 - DNA, 15 bp, Homo sapiens
tgttggaaaggactt

SEQ ID NO: 428316 - DNA, 15 bp, Homo sapiens
ttgttggaaaggact

SEQ ID NO: 428317 - DNA, 15 bp, Homo sapiens
cttgttggaaaggac

SEQ ID NO: 428318 - DNA, 15 bp, Homo sapiens
tcttgttggaaagga

SEQ ID NO: 428319 - DNA, 15 bp, Homo sapiens
atcttgttggaaagg

SEQ ID NO: 428320 - DNA, 15 bp, Homo sapiens
aatcttgttggaaag

SEQ ID NO: 428321 - DNA, 15 bp, Homo sapiens
aaatcttgttggaaa

SEQ ID NO: 428322 - DNA, 15 bp, Homo sapiens
taaatcttgttggaa

SEQ ID NO: 428323 - DNA, 15 bp, Homo sapiens
ctaaatcttgttgga

SEQ ID NO: 428324 - DNA, 15 bp, Homo sapiens
tctaaatcttgttgg

SEQ ID NO: 428325 - DNA, 15 bp, Homo sapiens
gtctaaatcttgttg

SEQ ID NO: 428326 - DNA, 15 bp, Homo sapiens
tgtctaaatcttgtt

SEQ ID NO: 428327 - DNA, 15 bp, Homo sapiens
ctgtctaaatcttgt

SEQ ID NO: 428328 - DNA, 15 bp, Homo sapiens
actgtctaaatcttg

SEQ ID NO: 428329 - DNA, 15 bp, Homo sapiens
aactgtctaaatctt

SEQ ID NO: 428330 - DNA, 15 bp, Homo sapiens
gaactgtctaaatct

SEQ ID NO: 428331 - DNA, 15 bp, Homo sapiens
tgaactgtctaaatc

SEQ ID NO: 428332 - DNA, 15 bp, Homo sapiens
atgaactgtctaaat

SEQ ID NO: 428333 - DNA, 15 bp, Homo sapiens
aatgaactgtctaaa

SEQ ID NO: 428334 - DNA, 15 bp, Homo sapiens
taatgaactgtctaa

SEQ ID NO: 428335 - DNA, 15 bp, Homo sapiens
ctaatgaactgtcta

SEQ ID NO: 428336 - DNA, 15 bp, Homo sapiens
tctaatgaactgtct

SEQ ID NO: 428337 - DNA, 15 bp, Homo sapiens
ttctaatgaactgtc

SEQ ID NO: 428338 - DNA, 15 bp, Homo sapiens
attctaatgaactgt

SEQ ID NO: 428339 - DNA, 15 bp, Homo sapiens
tattctaatgaactg

SEQ ID NO: 428340 - DNA, 15 bp, Homo sapiens
ttattctaatgaact

SEQ ID NO: 428341 - DNA, 15 bp, Homo sapiens
tttattctaatgaac

SEQ ID NO: 428342 - DNA, 15 bp, Homo sapiens
atttattctaatgaa

SEQ ID NO: 428343 - DNA, 15 bp, Homo sapiens
tatttattctaatga

SEQ ID NO: 428344 - DNA, 15 bp, Homo sapiens
atatttattctaatg

SEQ ID NO: 428345 - DNA, 15 bp, Homo sapiens
tatatttattctaat

SEQ ID NO: 428346 - DNA, 15 bp, Homo sapiens
atatatttattctaa

SEQ ID NO: 428347 - DNA, 15 bp, Homo sapiens
tatatatttattcta

SEQ ID NO: 428348 - DNA, 15 bp, Homo sapiens
atatatatttattct

SEQ ID NO: 428349 - DNA, 15 bp, Homo sapiens
aatatatatttattc

SEQ ID NO: 428350 - DNA, 15 bp, Homo sapiens
aaatatatatttatt

SEQ ID NO: 428351 - DNA, 15 bp, Homo sapiens
taaatatatatttat

SEQ ID NO: 428352 - DNA, 15 bp, Homo sapiens
ttaaatatatattta

SEQ ID NO: 428353 - DNA, 15 bp, Homo sapiens
attaaatatatattt

SEQ ID NO: 428354 - DNA, 15 bp, Homo sapiens
gattaaatatatatt

SEQ ID NO: 428355 - DNA, 15 bp, Homo sapiens
agattaaatatatat

SEQ ID NO: 428356 - DNA, 15 bp, Homo sapiens
gagattaaatatata

SEQ ID NO: 428357 - DNA, 15 bp, Homo sapiens
ggagattaaatatat

SEQ ID NO: 428358 - DNA, 15 bp, Homo sapiens
gggagattaaatata

SEQ ID NO: 428359 - DNA, 15 bp, Homo sapiens
agggagattaaatat

SEQ ID NO: 428360 - DNA, 15 bp, Homo sapiens
gagggagattaaata

SEQ ID NO: 428361 - DNA, 15 bp, Homo sapiens
agagggagattaaat

SEQ ID NO: 428362 - DNA, 15 bp, Homo sapiens
aagagggagattaaa

SEQ ID NO: 428363 - DNA, 15 bp, Homo sapiens
aaagagggagattaa

SEQ ID NO: 428364 - DNA, 15 bp, Homo sapiens
gaaagagggagatta

SEQ ID NO: 428365 - DNA, 15 bp, Homo sapiens
agaaagagggagatt

SEQ ID NO: 428366 - DNA, 15 bp, Homo sapiens
tagaaagagggagat

SEQ ID NO: 428367 - DNA, 15 bp, Homo sapiens
atagaaagagggaga

SEQ ID NO: 428368 - DNA, 15 bp, Homo sapiens
tatagaaagagggag

SEQ ID NO: 428369 - DNA, 15 bp, Homo sapiens
atatagaaagaggga

SEQ ID NO: 428370 - DNA, 15 bp, Homo sapiens
gatatagaaagaggg

SEQ ID NO: 428371 - DNA, 15 bp, Homo sapiens
tgatatagaaagagg

SEQ ID NO: 428372 - DNA, 15 bp, Homo sapiens
atgatatagaaagag

SEQ ID NO: 428373 - DNA, 15 bp, Homo sapiens
gatgatatagaaaga

SEQ ID NO: 428374 - DNA, 15 bp, Homo sapiens
agatgatatagaaag

SEQ ID NO: 428375 - DNA, 15 bp, Homo sapiens
aagatgatatagaaa

SEQ ID NO: 428376 - DNA, 15 bp, Homo sapiens
caagatgatatagaa

SEQ ID NO: 428377 - DNA, 15 bp, Homo sapiens
tcaagatgatataga

SEQ ID NO: 428378 - DNA, 15 bp, Homo sapiens
ttcaagatgatatag

SEQ ID NO: 428379 - DNA, 15 bp, Homo sapiens
tttcaagatgatata

SEQ ID NO: 428380 - DNA, 15 bp, Homo sapiens
gtttcaagatgatat

SEQ ID NO: 428381 - DNA, 15 bp, Homo sapiens
tgtttcaagatgata

SEQ ID NO: 428382 - DNA, 15 bp, Homo sapiens
ctgtttcaagatgat

SEQ ID NO: 428383 - DNA, 15 bp, Homo sapiens
tctgtttcaagatga

SEQ ID NO: 428384 - DNA, 15 bp, Homo sapiens
ctctgtttcaagatg

SEQ ID NO: 428385 - DNA, 15 bp, Homo sapiens
gctctgtttcaagat

SEQ ID NO: 428386 - DNA, 15 bp, Homo sapiens
tgctctgtttcaaga

SEQ ID NO: 428387 - DNA, 15 bp, Homo sapiens
ttgctctgtttcaag

SEQ ID NO: 428388 - DNA, 15 bp, Homo sapiens
tttgctctgtttcaa

SEQ ID NO: 428389 - DNA, 15 bp, Homo sapiens
ctttgctctgtttca

SEQ ID NO: 428390 - DNA, 15 bp, Homo sapiens
tctttgctctgtttc

SEQ ID NO: 428391 - DNA, 15 bp, Homo sapiens
atctttgctctgttt

SEQ ID NO: 428392 - DNA, 15 bp, Homo sapiens
tatctttgctctgtt

SEQ ID NO: 428393 - DNA, 15 bp, Homo sapiens
gtatctttgctctgt

SEQ ID NO: 428394 - DNA, 15 bp, Homo sapiens
tgtatctttgctctg

SEQ ID NO: 428395 - DNA, 15 bp, Homo sapiens
ttgtatctttgctct

SEQ ID NO: 428396 - DNA, 15 bp, Homo sapiens
attgtatctttgctc

SEQ ID NO: 428397 - DNA, 15 bp, Homo sapiens
cattgtatctttgct

SEQ ID NO: 428398 - DNA, 15 bp, Homo sapiens
gcattgtatctttgc

SEQ ID NO: 428399 - DNA, 15 bp, Homo sapiens
agcattgtatctttg

SEQ ID NO: 428400 - DNA, 15 bp, Homo sapiens
cagcattgtatcttt

SEQ ID NO: 428401 - DNA, 15 bp, Homo sapiens
ccagcattgtatctt

SEQ ID NO: 428402 - DNA, 15 bp, Homo sapiens
tccagcattgtatct

SEQ ID NO: 428403 - DNA, 15 bp, Homo sapiens
ttccagcattgtatc

SEQ ID NO: 428404 - DNA, 15 bp, Homo sapiens
attccagcattgtat

SEQ ID NO: 428405 - DNA, 15 bp, Homo sapiens
tattccagcattgta

SEQ ID NO: 428406 - DNA, 15 bp, Homo sapiens
ttattccagcattgt

SEQ ID NO: 428407 - DNA, 15 bp, Homo sapiens
attattccagcattg

SEQ ID NO: 428408 - DNA, 15 bp, Homo sapiens
cattattccagcatt

SEQ ID NO: 428409 - DNA, 15 bp, Homo sapiens
tcattattccagcat

SEQ ID NO: 428410 - DNA, 15 bp, Homo sapiens
gtcattattccagca

SEQ ID NO: 428411 - DNA, 15 bp, Homo sapiens
tgtcattattccagc

SEQ ID NO: 428412 - DNA, 15 bp, Homo sapiens
gtgtcattattccag

SEQ ID NO: 428413 - DNA, 15 bp, Homo sapiens
tgtgtcattattcca

SEQ ID NO: 428414 - DNA, 15 bp, Homo sapiens
gtgtgtcattattcc

SEQ ID NO: 428415 - DNA, 15 bp, Homo sapiens
tgtgtgtcattattc

SEQ ID NO: 428416 - DNA, 15 bp, Homo sapiens
ctgtgtgtcattatt

SEQ ID NO: 428417 - DNA, 15 bp, Homo sapiens
actgtgtgtcattat

SEQ ID NO: 428418 - DNA, 15 bp, Homo sapiens
gactgtgtgtcatta

SEQ ID NO: 428419 - DNA, 15 bp, Homo sapiens
agactgtgtgtcatt

SEQ ID NO: 428420 - DNA, 15 bp, Homo sapiens
cagactgtgtgtcat

SEQ ID NO: 428421 - DNA, 15 bp, Homo sapiens
tcagactgtgtgtca

SEQ ID NO: 428422 - DNA, 15 bp, Homo sapiens
ttcagactgtgtgtc

SEQ ID NO: 428423 - DNA, 15 bp, Homo sapiens
tttcagactgtgtgt

SEQ ID NO: 428424 - DNA, 15 bp, Homo sapiens
ttttcagactgtgtg

SEQ ID NO: 428425 - DNA, 15 bp, Homo sapiens
tttttcagactgtgt

SEQ ID NO: 428426 - DNA, 15 bp, Homo sapiens
atttttcagactgtg

SEQ ID NO: 428427 - DNA, 15 bp, Homo sapiens
tatttttcagactgt

SEQ ID NO: 428428 - DNA, 15 bp, Homo sapiens
atatttttcagactg

SEQ ID NO: 428429 - DNA, 15 bp, Homo sapiens
aatatttttcagact

SEQ ID NO: 428430 - DNA, 15 bp, Homo sapiens
gaatatttttcagac

SEQ ID NO: 428431 - DNA, 15 bp, Homo sapiens
agaatatttttcaga

SEQ ID NO: 428432 - DNA, 15 bp, Homo sapiens
tagaatatttttcag

SEQ ID NO: 428433 - DNA, 15 bp, Homo sapiens
ttagaatatttttca

SEQ ID NO: 428434 - DNA, 15 bp, Homo sapiens
tttagaatatttttc

SEQ ID NO: 428435 - DNA, 15 bp, Homo sapiens
atttagaatattttt

SEQ ID NO: 428436 - DNA, 15 bp, Homo sapiens
catttagaatatttt

SEQ ID NO: 428437 - DNA, 15 bp, Homo sapiens
acatttagaatattt

SEQ ID NO: 428438 - DNA, 15 bp, Homo sapiens
tacatttagaatatt

SEQ ID NO: 428439 - DNA, 15 bp, Homo sapiens
atacatttagaatat

SEQ ID NO: 428440 - DNA, 15 bp, Homo sapiens
aatacatttagaata

SEQ ID NO: 428441 - DNA, 15 bp, Homo sapiens
caatacatttagaat

SEQ ID NO: 428442 - DNA, 15 bp, Homo sapiens
tcaatacatttagaa

SEQ ID NO: 428443 - DNA, 15 bp, Homo sapiens
ttcaatacatttaga

SEQ ID NO: 428444 - DNA, 15 bp, Homo sapiens
tttcaatacatttag

SEQ ID NO: 428445 - DNA, 15 bp, Homo sapiens
atttcaatacattta

SEQ ID NO: 428446 - DNA, 15 bp, Homo sapiens
gatttcaatacattt

SEQ ID NO: 428447 - DNA, 15 bp, Homo sapiens
tgatttcaatacatt

SEQ ID NO: 428448 - DNA, 15 bp, Homo sapiens
gtgatttcaatacat

SEQ ID NO: 428449 - DNA, 15 bp, Homo sapiens
agtgatttcaataca

SEQ ID NO: 428450 - DNA, 15 bp, Homo sapiens
cagtgatttcaatac

SEQ ID NO: 428451 - DNA, 15 bp, Homo sapiens
gcagtgatttcaata

SEQ ID NO: 428452 - DNA, 15 bp, Homo sapiens
tgcagtgatttcaat

SEQ ID NO: 428453 - DNA, 15 bp, Homo sapiens
ctgcagtgatttcaa

SEQ ID NO: 428454 - DNA, 15 bp, Homo sapiens
gctgcagtgatttca

SEQ ID NO: 428455 - DNA, 15 bp, Homo sapiens
agctgcagtgatttc

SEQ ID NO: 428456 - DNA, 15 bp, Homo sapiens
gagctgcagtgattt

SEQ ID NO: 428457 - DNA, 15 bp, Homo sapiens
ggagctgcagtgatt

SEQ ID NO: 428458 - DNA, 15 bp, Homo sapiens
aggagctgcagtgat

SEQ ID NO: 428459 - DNA, 15 bp, Homo sapiens
aaggagctgcagtga

SEQ ID NO: 428460 - DNA, 15 bp, Homo sapiens
aaaggagctgcagtg

SEQ ID NO: 428461 - DNA, 15 bp, Homo sapiens
gaaaggagctgcagt

SEQ ID NO: 428462 - DNA, 15 bp, Homo sapiens
tgaaaggagctgcag

SEQ ID NO: 428463 - DNA, 15 bp, Homo sapiens
gtgaaaggagctgca

SEQ ID NO: 428464 - DNA, 15 bp, Homo sapiens
agtgaaaggagctgc

SEQ ID NO: 428465 - DNA, 15 bp, Homo sapiens
aagtgaaaggagctg

SEQ ID NO: 428466 - DNA, 15 bp, Homo sapiens
aaagtgaaaggagct

SEQ ID NO: 428467 - DNA, 15 bp, Homo sapiens
caaagtgaaaggagc

SEQ ID NO: 428468 - DNA, 15 bp, Homo sapiens
acaaagtgaaaggag

SEQ ID NO: 428469 - DNA, 15 bp, Homo sapiens
tacaaagtgaaagga

SEQ ID NO: 428470 - DNA, 15 bp, Homo sapiens
atacaaagtgaaagg

SEQ ID NO: 428471 - DNA, 15 bp, Homo sapiens
tatacaaagtgaaag

SEQ ID NO: 428472 - DNA, 15 bp, Homo sapiens
ctatacaaagtgaaa

SEQ ID NO: 428473 - DNA, 15 bp, Homo sapiens
actatacaaagtgaa

SEQ ID NO: 428474 - DNA, 15 bp, Homo sapiens
aactatacaaagtga

SEQ ID NO: 428475 - DNA, 15 bp, Homo sapiens
aaactatacaaagtg

SEQ ID NO: 428476 - DNA, 15 bp, Homo sapiens
gaaactatacaaagt

SEQ ID NO: 428477 - DNA, 15 bp, Homo sapiens
tgaaactatacaaag

SEQ ID NO: 428478 - DNA, 15 bp, Homo sapiens
ttgaaactatacaaa

SEQ ID NO: 428479 - DNA, 15 bp, Homo sapiens
tttgaaactatacaa

SEQ ID NO: 428480 - DNA, 15 bp, Homo sapiens
ttttgaaactataca

SEQ ID NO: 428481 - DNA, 15 bp, Homo sapiens
gttttgaaactatac

SEQ ID NO: 428482 - DNA, 15 bp, Homo sapiens
tgttttgaaactata

SEQ ID NO: 428483 - DNA, 15 bp, Homo sapiens
atgttttgaaactat

SEQ ID NO: 428484 - DNA, 15 bp, Homo sapiens
aatgttttgaaacta

SEQ ID NO: 428485 - DNA, 15 bp, Homo sapiens
aaatgttttgaaact

SEQ ID NO: 428486 - DNA, 15 bp, Homo sapiens
taaatgttttgaaac

SEQ ID NO: 428487 - DNA, 15 bp, Homo sapiens
ataaatgttttgaaa

SEQ ID NO: 428488 - DNA, 15 bp, Homo sapiens
tataaatgttttgaa

SEQ ID NO: 428489 - DNA, 15 bp, Homo sapiens
ttataaatgttttga

SEQ ID NO: 428490 - DNA, 15 bp, Homo sapiens
attataaatgttttg

SEQ ID NO: 428491 - DNA, 15 bp, Homo sapiens
aattataaatgtttt

SEQ ID NO: 428492 - DNA, 15 bp, Homo sapiens
aaattataaatgttt

SEQ ID NO: 428493 - DNA, 15 bp, Homo sapiens
caaattataaatgtt

SEQ ID NO: 428494 - DNA, 15 bp, Homo sapiens
acaaattataaatgt

SEQ ID NO: 428495 - DNA, 15 bp, Homo sapiens
tacaaattataaatg

SEQ ID NO: 428496 - DNA, 15 bp, Homo sapiens
atacaaattataaat

SEQ ID NO: 428497 - DNA, 15 bp, Homo sapiens
catacaaattataaa

SEQ ID NO: 428498 - DNA, 15 bp, Homo sapiens
tcatacaaattataa

SEQ ID NO: 428499 - DNA, 15 bp, Homo sapiens
atcatacaaattata

SEQ ID NO: 428500 - DNA, 15 bp, Homo sapiens
catcatacaaattat

SEQ ID NO: 428501 - DNA, 15 bp, Homo sapiens
acatcatacaaatta

SEQ ID NO: 428502 - DNA, 15 bp, Homo sapiens
cacatcatacaaatt

SEQ ID NO: 428503 - DNA, 15 bp, Homo sapiens
acacatcatacaaat

SEQ ID NO: 428504 - DNA, 15 bp, Homo sapiens
gacacatcatacaaa

SEQ ID NO: 428505 - DNA, 15 bp, Homo sapiens
agacacatcatacaa

SEQ ID NO: 428506 - DNA, 15 bp, Homo sapiens
tagacacatcataca

SEQ ID NO: 428507 - DNA, 15 bp, Homo sapiens
atagacacatcatac

SEQ ID NO: 428508 - DNA, 15 bp, Homo sapiens
aatagacacatcata

SEQ ID NO: 428509 - DNA, 15 bp, Homo sapiens
taatagacacatcat

SEQ ID NO: 428510 - DNA, 15 bp, Homo sapiens
ttaatagacacatca

SEQ ID NO: 428511 - DNA, 15 bp, Homo sapiens
tttaatagacacatc

SEQ ID NO: 428512 - DNA, 15 bp, Homo sapiens
atttaatagacacat

SEQ ID NO: 428513 - DNA, 15 bp, Homo sapiens
catttaatagacaca

SEQ ID NO: 428514 - DNA, 15 bp, Homo sapiens
gcatttaatagacac

SEQ ID NO: 428515 - DNA, 15 bp, Homo sapiens
agcatttaatagaca

SEQ ID NO: 428516 - DNA, 15 bp, Homo sapiens
cagcatttaatagac

SEQ ID NO: 428517 - DNA, 15 bp, Homo sapiens
gcagcatttaataga

SEQ ID NO: 428518 - DNA, 15 bp, Homo sapiens
ggcagcatttaatag

SEQ ID NO: 428519 - DNA, 15 bp, Homo sapiens
aggcagcatttaata

SEQ ID NO: 428520 - DNA, 15 bp, Homo sapiens
taggcagcatttaat

SEQ ID NO: 428521 - DNA, 15 bp, Homo sapiens
ttaggcagcatttaa

SEQ ID NO: 428522 - DNA, 15 bp, Homo sapiens
attaggcagcattta

SEQ ID NO: 428523 - DNA, 15 bp, Homo sapiens
tattaggcagcattt

SEQ ID NO: 428524 - DNA, 15 bp, Homo sapiens
ctattaggcagcatt

SEQ ID NO: 428525 - DNA, 15 bp, Homo sapiens
gctattaggcagcat

SEQ ID NO: 428526 - DNA, 15 bp, Homo sapiens
ggctattaggcagca

SEQ ID NO: 428527 - DNA, 15 bp, Homo sapiens
tggctattaggcagc

SEQ ID NO: 428528 - DNA, 15 bp, Homo sapiens
ctggctattaggcag

SEQ ID NO: 428529 - DNA, 15 bp, Homo sapiens
cctggctattaggca

SEQ ID NO: 428530 - DNA, 15 bp, Homo sapiens
tcctggctattaggc

SEQ ID NO: 428531 - DNA, 15 bp, Homo sapiens
ttcctggctattagg

SEQ ID NO: 428532 - DNA, 15 bp, Homo sapiens
gttcctggctattag

SEQ ID NO: 428533 - DNA, 15 bp, Homo sapiens
tgttcctggctatta

SEQ ID NO: 428534 - DNA, 15 bp, Homo sapiens
ctgttcctggctatt

SEQ ID NO: 428535 - DNA, 15 bp, Homo sapiens
cctgttcctggctat

SEQ ID NO: 428536 - DNA, 15 bp, Homo sapiens
tcctgttcctggcta

SEQ ID NO: 428537 - DNA, 15 bp, Homo sapiens
gtcctgttcctggct

SEQ ID NO: 428538 - DNA, 15 bp, Homo sapiens
tgtcctgttcctggc

SEQ ID NO: 428539 - DNA, 15 bp, Homo sapiens
ctgtcctgttcctgg

SEQ ID NO: 428540 - DNA, 15 bp, Homo sapiens
gctgtcctgttcctg

SEQ ID NO: 428541 - DNA, 15 bp, Homo sapiens
tgctgtcctgttcct

SEQ ID NO: 428542 - DNA, 15 bp, Homo sapiens
gtgctgtcctgttcc

SEQ ID NO: 428543 - DNA, 15 bp, Homo sapiens
agtgctgtcctgttc

SEQ ID NO: 428544 - DNA, 15 bp, Homo sapiens
gagtgctgtcctgtt

SEQ ID NO: 428545 - DNA, 15 bp, Homo sapiens
tgagtgctgtcctgt

SEQ ID NO: 428546 - DNA, 15 bp, Homo sapiens
ctgagtgctgtcctg

SEQ ID NO: 428547 - DNA, 15 bp, Homo sapiens
cctgagtgctgtcct

SEQ ID NO: 428548 - DNA, 15 bp, Homo sapiens
tcctgagtgctgtcc

SEQ ID NO: 428549 - DNA, 15 bp, Homo sapiens
ttcctgagtgctgtc

SEQ ID NO: 428550 - DNA, 15 bp, Homo sapiens
attcctgagtgctgt

SEQ ID NO: 428551 - DNA, 15 bp, Homo sapiens
aattcctgagtgctg

SEQ ID NO: 428552 - DNA, 15 bp, Homo sapiens
aaattcctgagtgct

SEQ ID NO: 428553 - DNA, 15 bp, Homo sapiens
taaattcctgagtgc

SEQ ID NO: 428554 - DNA, 15 bp, Homo sapiens
ataaattcctgagtg

SEQ ID NO: 428555 - DNA, 15 bp, Homo sapiens
aataaattcctgagt

SEQ ID NO: 428556 - DNA, 15 bp, Homo sapiens
caataaattcctgag

SEQ ID NO: 428557 - DNA, 15 bp, Homo sapiens
ccaataaattcctga

SEQ ID NO: 428558 - DNA, 15 bp, Homo sapiens
accaataaattcctg

SEQ ID NO: 428559 - DNA, 15 bp, Homo sapiens
aaccaataaattcct

SEQ ID NO: 428560 - DNA, 15 bp, Homo sapiens
aaaccaataaattcc

SEQ ID NO: 428561 - DNA, 15 bp, Homo sapiens
taaaccaataaattc

SEQ ID NO: 428562 - DNA, 15 bp, Homo sapiens
ctaaaccaataaatt

SEQ ID NO: 428563 - DNA, 15 bp, Homo sapiens
gctaaaccaataaat

SEQ ID NO: 428564 - DNA, 15 bp, Homo sapiens
agctaaaccaataaa

SEQ ID NO: 428565 - DNA, 15 bp, Homo sapiens
tagctaaaccaataa

SEQ ID NO: 428566 - DNA, 15 bp, Homo sapiens
ctagctaaaccaata

SEQ ID NO: 428567 - DNA, 15 bp, Homo sapiens
tctagctaaaccaat

SEQ ID NO: 428568 - DNA, 15 bp, Homo sapiens
gtctagctaaaccaa

SEQ ID NO: 428569 - DNA, 15 bp, Homo sapiens
agtctagctaaacca

SEQ ID NO: 428570 - DNA, 15 bp, Homo sapiens
gagtctagctaaacc

SEQ ID NO: 428571 - DNA, 15 bp, Homo sapiens
tgagtctagctaaac

SEQ ID NO: 428572 - DNA, 15 bp, Homo sapiens
ttgagtctagctaaa

SEQ ID NO: 428573 - DNA, 15 bp, Homo sapiens
tttgagtctagctaa

SEQ ID NO: 428574 - DNA, 15 bp, Homo sapiens
atttgagtctagcta

SEQ ID NO: 428575 - DNA, 15 bp, Homo sapiens
aatttgagtctagct

SEQ ID NO: 428576 - DNA, 15 bp, Homo sapiens
caatttgagtctagc

SEQ ID NO: 428577 - DNA, 15 bp, Homo sapiens
acaatttgagtctag

SEQ ID NO: 428578 - DNA, 15 bp, Homo sapiens
cacaatttgagtcta

SEQ ID NO: 428579 - DNA, 15 bp, Homo sapiens
gcacaatttgagtct

SEQ ID NO: 428580 - DNA, 15 bp, Homo sapiens
ggcacaatttgagtc

SEQ ID NO: 428581 - DNA, 15 bp, Homo sapiens
gggcacaatttgagt

SEQ ID NO: 428582 - DNA, 15 bp, Homo sapiens
tgggcacaatttgag

SEQ ID NO: 428583 - DNA, 15 bp, Homo sapiens
ttgggcacaatttga

SEQ ID NO: 428584 - DNA, 15 bp, Homo sapiens
tttgggcacaatttg

SEQ ID NO: 428585 - DNA, 15 bp, Homo sapiens
gtttgggcacaattt

SEQ ID NO: 428586 - DNA, 15 bp, Homo sapiens
ggtttgggcacaatt

SEQ ID NO: 428587 - DNA, 15 bp, Homo sapiens
gggtttgggcacaat

SEQ ID NO: 428588 - DNA, 15 bp, Homo sapiens
agggtttgggcacaa

SEQ ID NO: 428589 - DNA, 15 bp, Homo sapiens
cagggtttgggcaca

SEQ ID NO: 428590 - DNA, 15 bp, Homo sapiens
acagggtttgggcac

SEQ ID NO: 428591 - DNA, 15 bp, Homo sapiens
cacagggtttgggca

SEQ ID NO: 428592 - DNA, 15 bp, Homo sapiens
tcacagggtttgggc

SEQ ID NO: 428593 - DNA, 15 bp, Homo sapiens
ttcacagggtttggg

SEQ ID NO: 428594 - DNA, 15 bp, Homo sapiens
cttcacagggtttgg

SEQ ID NO: 428595 - DNA, 15 bp, Homo sapiens
ccttcacagggtttg

SEQ ID NO: 428596 - DNA, 15 bp, Homo sapiens
tccttcacagggttt

SEQ ID NO: 428597 - DNA, 15 bp, Homo sapiens
ttccttcacagggtt

SEQ ID NO: 428598 - DNA, 15 bp, Homo sapiens
attccttcacagggt

SEQ ID NO: 428599 - DNA, 15 bp, Homo sapiens
cattccttcacaggg

SEQ ID NO: 428600 - DNA, 15 bp, Homo sapiens
tcattccttcacagg

SEQ ID NO: 428601 - DNA, 15 bp, Homo sapiens
gtcattccttcacag

SEQ ID NO: 428602 - DNA, 15 bp, Homo sapiens
agtcattccttcaca

SEQ ID NO: 428603 - DNA, 15 bp, Homo sapiens
tagtcattccttcac

SEQ ID NO: 428604 - DNA, 15 bp, Homo sapiens
ttagtcattccttca

SEQ ID NO: 428605 - DNA, 15 bp, Homo sapiens
tttagtcattccttc

SEQ ID NO: 428606 - DNA, 15 bp, Homo sapiens
ctttagtcattcctt

SEQ ID NO: 428607 - DNA, 15 bp, Homo sapiens
gctttagtcattcct

SEQ ID NO: 428608 - DNA, 15 bp, Homo sapiens
tgctttagtcattcc

SEQ ID NO: 428609 - DNA, 15 bp, Homo sapiens
ttgctttagtcattc

SEQ ID NO: 428610 - DNA, 15 bp, Homo sapiens
attgctttagtcatt

SEQ ID NO: 428611 - DNA, 15 bp, Homo sapiens
gattgctttagtcat

SEQ ID NO: 428612 - DNA, 15 bp, Homo sapiens
tgattgctttagtca

SEQ ID NO: 428613 - DNA, 15 bp, Homo sapiens
ctgattgctttagtc

SEQ ID NO: 428614 - DNA, 15 bp, Homo sapiens
tctgattgctttagt

SEQ ID NO: 428615 - DNA, 15 bp, Homo sapiens
ctctgattgctttag

SEQ ID NO: 428616 - DNA, 15 bp, Homo sapiens
cctctgattgcttta

SEQ ID NO: 428617 - DNA, 15 bp, Homo sapiens
tcctctgattgcttt

SEQ ID NO: 428618 - DNA, 15 bp, Homo sapiens
atcctctgattgctt

SEQ ID NO: 428619 - DNA, 15 bp, Homo sapiens
aatcctctgattgct

SEQ ID NO: 428620 - DNA, 15 bp, Homo sapiens
gaatcctctgattgc

SEQ ID NO: 428621 - DNA, 15 bp, Homo sapiens
ggaatcctctgattg

SEQ ID NO: 428622 - DNA, 15 bp, Homo sapiens
tggaatcctctgatt

SEQ ID NO: 428623 - DNA, 15 bp, Homo sapiens
gtggaatcctctgat

SEQ ID NO: 428624 - DNA, 15 bp, Homo sapiens
ggtggaatcctctga

SEQ ID NO: 428625 - DNA, 15 bp, Homo sapiens
tggtggaatcctctg

SEQ ID NO: 428626 - DNA, 15 bp, Homo sapiens
ctggtggaatcctct

SEQ ID NO: 428627 - DNA, 15 bp, Homo sapiens
tctggtggaatcctc

SEQ ID NO: 428628 - DNA, 15 bp, Homo sapiens
ctctggtggaatcct

SEQ ID NO: 428629 - DNA, 15 bp, Homo sapiens
actctggtggaatcc

SEQ ID NO: 428630 - DNA, 15 bp, Homo sapiens
gactctggtggaatc

SEQ ID NO: 428631 - DNA, 15 bp, Homo sapiens
ggactctggtggaat

SEQ ID NO: 428632 - DNA, 15 bp, Homo sapiens
tggactctggtggaa

SEQ ID NO: 428633 - DNA, 15 bp, Homo sapiens
ttggactctggtgga

SEQ ID NO: 428634 - DNA, 15 bp, Homo sapiens
cttggactctggtgg

SEQ ID NO: 428635 - DNA, 15 bp, Homo sapiens
acttggactctggtg

SEQ ID NO: 428636 - DNA, 15 bp, Homo sapiens
aacttggactctggt

SEQ ID NO: 428637 - DNA, 15 bp, Homo sapiens
caacttggactctgg

SEQ ID NO: 428638 - DNA, 15 bp, Homo sapiens
tcaacttggactctg

SEQ ID NO: 428639 - DNA, 15 bp, Homo sapiens
ttcaacttggactct

SEQ ID NO: 428640 - DNA, 15 bp, Homo sapiens
tttcaacttggactc

SEQ ID NO: 428641 - DNA, 15 bp, Homo sapiens
atttcaacttggact

SEQ ID NO: 428642 - DNA, 15 bp, Homo sapiens
tatttcaacttggac

SEQ ID NO: 428643 - DNA, 15 bp, Homo sapiens
ttatttcaacttgga

SEQ ID NO: 428644 - DNA, 15 bp, Homo sapiens
gttatttcaacttgg

SEQ ID NO: 428645 - DNA, 15 bp, Homo sapiens
agttatttcaacttg

SEQ ID NO: 428646 - DNA, 15 bp, Homo sapiens
aagttatttcaactt

SEQ ID NO: 428647 - DNA, 15 bp, Homo sapiens
gaagttatttcaact

SEQ ID NO: 428648 - DNA, 15 bp, Homo sapiens
agaagttatttcaac

SEQ ID NO: 428649 - DNA, 15 bp, Homo sapiens
aagaagttatttcaa

SEQ ID NO: 428650 - DNA, 15 bp, Homo sapiens
caagaagttatttca

SEQ ID NO: 428651 - DNA, 15 bp, Homo sapiens
tcaagaagttatttc

SEQ ID NO: 428652 - DNA, 15 bp, Homo sapiens
ttcaagaagttattt

SEQ ID NO: 428653 - DNA, 15 bp, Homo sapiens
tttcaagaagttatt

SEQ ID NO: 428654 - DNA, 15 bp, Homo sapiens
ctttcaagaagttat

SEQ ID NO: 428655 - DNA, 15 bp, Homo sapiens
actttcaagaagtta

SEQ ID NO: 428656 - DNA, 15 bp, Homo sapiens
aactttcaagaagtt

SEQ ID NO: 428657 - DNA, 15 bp, Homo sapiens
aaactttcaagaagt

SEQ ID NO: 428658 - DNA, 15 bp, Homo sapiens
taaactttcaagaag

SEQ ID NO: 428659 - DNA, 15 bp, Homo sapiens
ttaaactttcaagaa

SEQ ID NO: 428660 - DNA, 15 bp, Homo sapiens
cttaaactttcaaga

SEQ ID NO: 428661 - DNA, 15 bp, Homo sapiens
gcttaaactttcaag

SEQ ID NO: 428662 - DNA, 15 bp, Homo sapiens
ggcttaaactttcaa

SEQ ID NO: 428663 - DNA, 15 bp, Homo sapiens
tggcttaaactttca

SEQ ID NO: 428664 - DNA, 15 bp, Homo sapiens
ttggcttaaactttc

SEQ ID NO: 428665 - DNA, 15 bp, Homo sapiens
attggcttaaacttt

SEQ ID NO: 428666 - DNA, 15 bp, Homo sapiens
gattggcttaaactt

SEQ ID NO: 428667 - DNA, 15 bp, Homo sapiens
ggattggcttaaact

SEQ ID NO: 428668 - DNA, 15 bp, Homo sapiens
aggattggcttaaac

SEQ ID NO: 428669 - DNA, 15 bp, Homo sapiens
gaggattggcttaaa

SEQ ID NO: 428670 - DNA, 15 bp, Homo sapiens
tgaggattggcttaa

SEQ ID NO: 428671 - DNA, 15 bp, Homo sapiens
atgaggattggctta

SEQ ID NO: 428672 - DNA, 15 bp, Homo sapiens
aatgaggattggctt

SEQ ID NO: 428673 - DNA, 15 bp, Homo sapiens
gaatgaggattggct

SEQ ID NO: 428674 - DNA, 15 bp, Homo sapiens
agaatgaggattggc

SEQ ID NO: 428675 - DNA, 15 bp, Homo sapiens
aagaatgaggattgg

SEQ ID NO: 428676 - DNA, 15 bp, Homo sapiens
taagaatgaggattg

SEQ ID NO: 428677 - DNA, 15 bp, Homo sapiens
ataagaatgaggatt

SEQ ID NO: 428678 - DNA, 15 bp, Homo sapiens
cataagaatgaggat

SEQ ID NO: 428679 - DNA, 15 bp, Homo sapiens
tcataagaatgagga

SEQ ID NO: 428680 - DNA, 15 bp, Homo sapiens
ttcataagaatgagg

SEQ ID NO: 428681 - DNA, 15 bp, Homo sapiens
cttcataagaatgag

SEQ ID NO: 428682 - DNA, 15 bp, Homo sapiens
acttcataagaatga

SEQ ID NO: 428683 - DNA, 15 bp, Homo sapiens
tacttcataagaatg

SEQ ID NO: 428684 - DNA, 15 bp, Homo sapiens
ttacttcataagaat

SEQ ID NO: 428685 - DNA, 15 bp, Homo sapiens
attacttcataagaa

SEQ ID NO: 428686 - DNA, 15 bp, Homo sapiens
aattacttcataaga

SEQ ID NO: 428687 - DNA, 15 bp, Homo sapiens
gaattacttcataag

SEQ ID NO: 428688 - DNA, 15 bp, Homo sapiens
tgaattacttcataa

SEQ ID NO: 428689 - DNA, 15 bp, Homo sapiens
atgaattacttcata

SEQ ID NO: 428690 - DNA, 15 bp, Homo sapiens
aatgaattacttcat

SEQ ID NO: 428691 - DNA, 15 bp, Homo sapiens
gaatgaattacttca

SEQ ID NO: 428692 - DNA, 15 bp, Homo sapiens
tgaatgaattacttc

SEQ ID NO: 428693 - DNA, 15 bp, Homo sapiens
ttgaatgaattactt

SEQ ID NO: 428694 - DNA, 15 bp, Homo sapiens
attgaatgaattact

SEQ ID NO: 428695 - DNA, 15 bp, Homo sapiens
aattgaatgaattac

SEQ ID NO: 428696 - DNA, 15 bp, Homo sapiens
aaattgaatgaatta

SEQ ID NO: 428697 - DNA, 15 bp, Homo sapiens
taaattgaatgaatt

SEQ ID NO: 428698 - DNA, 15 bp, Homo sapiens
ctaaattgaatgaat

SEQ ID NO: 428699 - DNA, 15 bp, Homo sapiens
tctaaattgaatgaa

SEQ ID NO: 428700 - DNA, 15 bp, Homo sapiens
atctaaattgaatga

SEQ ID NO: 428701 - DNA, 15 bp, Homo sapiens
catctaaattgaatg

SEQ ID NO: 428702 - DNA, 15 bp, Homo sapiens
tcatctaaattgaat

SEQ ID NO: 428703 - DNA, 15 bp, Homo sapiens
ttcatctaaattgaa

SEQ ID NO: 428704 - DNA, 15 bp, Homo sapiens
tttcatctaaattga

SEQ ID NO: 428705 - DNA, 15 bp, Homo sapiens
ttttcatctaaattg

SEQ ID NO: 428706 - DNA, 15 bp, Homo sapiens
cttttcatctaaatt

SEQ ID NO: 428707 - DNA, 15 bp, Homo sapiens
acttttcatctaaat

SEQ ID NO: 428708 - DNA, 15 bp, Homo sapiens
tacttttcatctaaa

SEQ ID NO: 428709 - DNA, 15 bp, Homo sapiens
atacttttcatctaa

SEQ ID NO: 428710 - DNA, 15 bp, Homo sapiens
aatacttttcatcta

SEQ ID NO: 428711 - DNA, 15 bp, Homo sapiens
gaatacttttcatct

SEQ ID NO: 428712 - DNA, 15 bp, Homo sapiens
agaatacttttcatc

SEQ ID NO: 428713 - DNA, 15 bp, Homo sapiens
aagaatacttttcat

SEQ ID NO: 428714 - DNA, 15 bp, Homo sapiens
taagaatacttttca

SEQ ID NO: 428715 - DNA, 15 bp, Homo sapiens
ataagaatacttttc

SEQ ID NO: 428716 - DNA, 15 bp, Homo sapiens
aataagaatactttt

SEQ ID NO: 428717 - DNA, 15 bp, Homo sapiens
aaataagaatacttt

SEQ ID NO: 428718 - DNA, 15 bp, Homo sapiens
gaaataagaatactt

SEQ ID NO: 428719 - DNA, 15 bp, Homo sapiens
ggaaataagaatact

SEQ ID NO: 428720 - DNA, 15 bp, Homo sapiens
aggaaataagaatac

SEQ ID NO: 428721 - DNA, 15 bp, Homo sapiens
caggaaataagaata

SEQ ID NO: 428722 - DNA, 15 bp, Homo sapiens
tcaggaaataagaat

SEQ ID NO: 428723 - DNA, 15 bp, Homo sapiens
ttcaggaaataagaa

SEQ ID NO: 428724 - DNA, 15 bp, Homo sapiens
tttcaggaaataaga

SEQ ID NO: 428725 - DNA, 15 bp, Homo sapiens
ctttcaggaaataag

SEQ ID NO: 428726 - DNA, 15 bp, Homo sapiens
actttcaggaaataa

SEQ ID NO: 428727 - DNA, 15 bp, Homo sapiens
aactttcaggaaata

SEQ ID NO: 428728 - DNA, 15 bp, Homo sapiens
taactttcaggaaat

SEQ ID NO: 428729 - DNA, 15 bp, Homo sapiens
ttaactttcaggaaa

SEQ ID NO: 428730 - DNA, 15 bp, Homo sapiens
gttaactttcaggaa

SEQ ID NO: 428731 - DNA, 15 bp, Homo sapiens
agttaactttcagga

SEQ ID NO: 428732 - DNA, 15 bp, Homo sapiens
cagttaactttcagg

SEQ ID NO: 428733 - DNA, 15 bp, Homo sapiens
ccagttaactttcag

SEQ ID NO: 428734 - DNA, 15 bp, Homo sapiens
accagttaactttca

SEQ ID NO: 428735 - DNA, 15 bp, Homo sapiens
aaccagttaactttc

SEQ ID NO: 428736 - DNA, 15 bp, Homo sapiens
aaaccagttaacttt

SEQ ID NO: 428737 - DNA, 15 bp, Homo sapiens
aaaaccagttaactt

SEQ ID NO: 428738 - DNA, 15 bp, Homo sapiens
taaaaccagttaact

SEQ ID NO: 428739 - DNA, 15 bp, Homo sapiens
ttaaaaccagttaac

SEQ ID NO: 428740 - DNA, 15 bp, Homo sapiens
attaaaaccagttaa

SEQ ID NO: 428741 - DNA, 15 bp, Homo sapiens
tattaaaaccagtta

SEQ ID NO: 428742 - DNA, 15 bp, Homo sapiens
ttattaaaaccagtt

SEQ ID NO: 428743 - DNA, 15 bp, Homo sapiens
attattaaaaccagt

SEQ ID NO: 428744 - DNA, 15 bp, Homo sapiens
cattattaaaaccag

SEQ ID NO: 428745 - DNA, 15 bp, Homo sapiens
ccattattaaaacca

SEQ ID NO: 428746 - DNA, 15 bp, Homo sapiens
tccattattaaaacc

SEQ ID NO: 428747 - DNA, 15 bp, Homo sapiens
atccattattaaaac

SEQ ID NO: 428748 - DNA, 15 bp, Homo sapiens
catccattattaaaa

SEQ ID NO: 428749 - DNA, 15 bp, Homo sapiens
acatccattattaaa

SEQ ID NO: 428750 - DNA, 15 bp, Homo sapiens
tacatccattattaa

SEQ ID NO: 428751 - DNA, 15 bp, Homo sapiens
ctacatccattatta

SEQ ID NO: 428752 - DNA, 15 bp, Homo sapiens
actacatccattatt

SEQ ID NO: 428753 - DNA, 15 bp, Homo sapiens
gactacatccattat

SEQ ID NO: 428754 - DNA, 15 bp, Homo sapiens
ggactacatccatta

SEQ ID NO: 428755 - DNA, 15 bp, Homo sapiens
gggactacatccatt

SEQ ID NO: 428756 - DNA, 15 bp, Homo sapiens
agggactacatccat

SEQ ID NO: 428757 - DNA, 15 bp, Homo sapiens
tagggactacatcca

SEQ ID NO: 428758 - DNA, 15 bp, Homo sapiens
atagggactacatcc

SEQ ID NO: 428759 - DNA, 15 bp, Homo sapiens
aatagggactacatc

SEQ ID NO: 428760 - DNA, 15 bp, Homo sapiens
gaatagggactacat

SEQ ID NO: 428761 - DNA, 15 bp, Homo sapiens
agaatagggactaca

SEQ ID NO: 428762 - DNA, 15 bp, Homo sapiens
tagaatagggactac

SEQ ID NO: 428763 - DNA, 15 bp, Homo sapiens
atagaatagggacta

SEQ ID NO: 428764 - DNA, 15 bp, Homo sapiens
aatagaatagggact

SEQ ID NO: 428765 - DNA, 15 bp, Homo sapiens
aaatagaatagggac

SEQ ID NO: 428766 - DNA, 15 bp, Homo sapiens
caaatagaataggga

SEQ ID NO: 428767 - DNA, 15 bp, Homo sapiens
tcaaatagaataggg

SEQ ID NO: 428768 - DNA, 15 bp, Homo sapiens
atcaaatagaatagg

SEQ ID NO: 428769 - DNA, 15 bp, Homo sapiens
tatcaaatagaatag

SEQ ID NO: 428770 - DNA, 15 bp, Homo sapiens
atatcaaatagaata

SEQ ID NO: 428771 - DNA, 15 bp, Homo sapiens
aatatcaaatagaat

SEQ ID NO: 428772 - DNA, 15 bp, Homo sapiens
aaatatcaaatagaa

SEQ ID NO: 428773 - DNA, 15 bp, Homo sapiens
aaaatatcaaataga

SEQ ID NO: 428774 - DNA, 15 bp, Homo sapiens
taaaatatcaaatag

SEQ ID NO: 428775 - DNA, 15 bp, Homo sapiens
ctaaaatatcaaata

SEQ ID NO: 428776 - DNA, 15 bp, Homo sapiens
tctaaaatatcaaat

SEQ ID NO: 428777 - DNA, 15 bp, Homo sapiens
ctctaaaatatcaaa

SEQ ID NO: 428778 - DNA, 15 bp, Homo sapiens
tctctaaaatatcaa

SEQ ID NO: 428779 - DNA, 15 bp, Homo sapiens
atctctaaaatatca

SEQ ID NO: 428780 - DNA, 15 bp, Homo sapiens
catctctaaaatatc

SEQ ID NO: 428781 - DNA, 15 bp, Homo sapiens
acatctctaaaatat

SEQ ID NO: 428782 - DNA, 15 bp, Homo sapiens
aacatctctaaaata

SEQ ID NO: 428783 - DNA, 15 bp, Homo sapiens
gaacatctctaaaat

SEQ ID NO: 428784 - DNA, 15 bp, Homo sapiens
tgaacatctctaaaa

SEQ ID NO: 428785 - DNA, 15 bp, Homo sapiens
ttgaacatctctaaa

SEQ ID NO: 428786 - DNA, 15 bp, Homo sapiens
tttgaacatctctaa

SEQ ID NO: 428787 - DNA, 15 bp, Homo sapiens
ttttgaacatctcta

SEQ ID NO: 428788 - DNA, 15 bp, Homo sapiens
tttttgaacatctct

SEQ ID NO: 428789 - DNA, 15 bp, Homo sapiens
ctttttgaacatctc

SEQ ID NO: 428790 - DNA, 15 bp, Homo sapiens
tctttttgaacatct

SEQ ID NO: 428791 - DNA, 15 bp, Homo sapiens
ttctttttgaacatc

SEQ ID NO: 428792 - DNA, 15 bp, Homo sapiens
tttctttttgaacat

SEQ ID NO: 428793 - DNA, 15 bp, Homo sapiens
gtttctttttgaaca

SEQ ID NO: 428794 - DNA, 15 bp, Homo sapiens
tgtttctttttgaac

SEQ ID NO: 428795 - DNA, 15 bp, Homo sapiens
ttgtttctttttgaa

SEQ ID NO: 428796 - DNA, 15 bp, Homo sapiens
tttgtttctttttga

SEQ ID NO: 428797 - DNA, 15 bp, Homo sapiens
atttgtttctttttg

SEQ ID NO: 428798 - DNA, 15 bp, Homo sapiens
tatttgtttcttttt

SEQ ID NO: 428799 - DNA, 15 bp, Homo sapiens
ttatttgtttctttt

SEQ ID NO: 428800 - DNA, 15 bp, Homo sapiens
gttatttgtttcttt

SEQ ID NO: 428801 - DNA, 15 bp, Homo sapiens
agttatttgtttctt

SEQ ID NO: 428802 - DNA, 15 bp, Homo sapiens
aagttatttgtttct

SEQ ID NO: 428803 - DNA, 15 bp, Homo sapiens
aaagttatttgtttc

SEQ ID NO: 428804 - DNA, 15 bp, Homo sapiens
taaagttatttgttt

SEQ ID NO: 428805 - DNA, 15 bp, Homo sapiens
ttaaagttatttgtt

SEQ ID NO: 428806 - DNA, 15 bp, Homo sapiens
tttaaagttatttgt

SEQ ID NO: 428807 - DNA, 15 bp, Homo sapiens
gtttaaagttatttg

SEQ ID NO: 428808 - DNA, 15 bp, Homo sapiens
tgtttaaagttattt

SEQ ID NO: 428809 - DNA, 15 bp, Homo sapiens
ttgtttaaagttatt

SEQ ID NO: 428810 - DNA, 15 bp, Homo sapiens
gttgtttaaagttat

SEQ ID NO: 428811 - DNA, 15 bp, Homo sapiens
ggttgtttaaagtta

SEQ ID NO: 428812 - DNA, 15 bp, Homo sapiens
tggttgtttaaagtt

SEQ ID NO: 428813 - DNA, 15 bp, Homo sapiens
ctggttgtttaaagt

SEQ ID NO: 428814 - DNA, 15 bp, Homo sapiens
cctggttgtttaaag

SEQ ID NO: 428815 - DNA, 15 bp, Homo sapiens
gcctggttgtttaaa

SEQ ID NO: 428816 - DNA, 15 bp, Homo sapiens
ggcctggttgtttaa

SEQ ID NO: 428817 - DNA, 15 bp, Homo sapiens
aggcctggttgttta

SEQ ID NO: 428818 - DNA, 15 bp, Homo sapiens
taggcctggttgttt

SEQ ID NO: 428819 - DNA, 15 bp, Homo sapiens
ttaggcctggttgtt

SEQ ID NO: 428820 - DNA, 15 bp, Homo sapiens
cttaggcctggttgt

SEQ ID NO: 428821 - DNA, 15 bp, Homo sapiens
gcttaggcctggttg

SEQ ID NO: 428822 - DNA, 15 bp, Homo sapiens
ggcttaggcctggtt

SEQ ID NO: 428823 - DNA, 15 bp, Homo sapiens
tggcttaggcctggt

SEQ ID NO: 428824 - DNA, 15 bp, Homo sapiens
atggcttaggcctgg

SEQ ID NO: 428825 - DNA, 15 bp, Homo sapiens
aatggcttaggcctg

SEQ ID NO: 428826 - DNA, 15 bp, Homo sapiens
aaatggcttaggcct

SEQ ID NO: 428827 - DNA, 15 bp, Homo sapiens
taaatggcttaggcc

SEQ ID NO: 428828 - DNA, 15 bp, Homo sapiens
ttaaatggcttaggc

SEQ ID NO: 428829 - DNA, 15 bp, Homo sapiens
tttaaatggcttagg

SEQ ID NO: 428830 - DNA, 15 bp, Homo sapiens
ctttaaatggcttag

SEQ ID NO: 428831 - DNA, 15 bp, Homo sapiens
tctttaaatggctta

SEQ ID NO: 428832 - DNA, 15 bp, Homo sapiens
ctctttaaatggctt

SEQ ID NO: 428833 - DNA, 15 bp, Homo sapiens
tctctttaaatggct

SEQ ID NO: 428834 - DNA, 15 bp, Homo sapiens
atctctttaaatggc

SEQ ID NO: 428835 - DNA, 15 bp, Homo sapiens
tatctctttaaatgg

SEQ ID NO: 428836 - DNA, 15 bp, Homo sapiens
ctatctctttaaatg

SEQ ID NO: 428837 - DNA, 15 bp, Homo sapiens
gctatctctttaaat

SEQ ID NO: 428838 - DNA, 15 bp, Homo sapiens
tgctatctctttaaa

SEQ ID NO: 428839 - DNA, 15 bp, Homo sapiens
ctgctatctctttaa

SEQ ID NO: 428840 - DNA, 15 bp, Homo sapiens
tctgctatctcttta

SEQ ID NO: 428841 - DNA, 15 bp, Homo sapiens
atctgctatctcttt

SEQ ID NO: 428842 - DNA, 15 bp, Homo sapiens
aatctgctatctctt

SEQ ID NO: 428843 - DNA, 15 bp, Homo sapiens
aaatctgctatctct

SEQ ID NO: 428844 - DNA, 15 bp, Homo sapiens
taaatctgctatctc

SEQ ID NO: 428845 - DNA, 15 bp, Homo sapiens
ttaaatctgctatct

SEQ ID NO: 428846 - DNA, 15 bp, Homo sapiens
attaaatctgctatc

SEQ ID NO: 428847 - DNA, 15 bp, Homo sapiens
aattaaatctgctat

SEQ ID NO: 428848 - DNA, 15 bp, Homo sapiens
aaattaaatctgcta

SEQ ID NO: 428849 - DNA, 15 bp, Homo sapiens
gaaattaaatctgct

SEQ ID NO: 428850 - DNA, 15 bp, Homo sapiens
agaaattaaatctgc

SEQ ID NO: 428851 - DNA, 15 bp, Homo sapiens
tagaaattaaatctg

SEQ ID NO: 428852 - DNA, 15 bp, Homo sapiens
gtagaaattaaatct

SEQ ID NO: 428853 - DNA, 15 bp, Homo sapiens
cgtagaaattaaatc

SEQ ID NO: 428854 - DNA, 15 bp, Homo sapiens
acgtagaaattaaat

SEQ ID NO: 428855 - DNA, 15 bp, Homo sapiens
gacgtagaaattaaa

SEQ ID NO: 428856 - DNA, 15 bp, Homo sapiens
agacgtagaaattaa

SEQ ID NO: 428857 - DNA, 15 bp, Homo sapiens
aagacgtagaaatta

SEQ ID NO: 428858 - DNA, 15 bp, Homo sapiens
aaagacgtagaaatt

SEQ ID NO: 428859 - DNA, 15 bp, Homo sapiens
gaaagacgtagaaat

SEQ ID NO: 428860 - DNA, 15 bp, Homo sapiens
agaaagacgtagaaa

SEQ ID NO: 428861 - DNA, 15 bp, Homo sapiens
tagaaagacgtagaa

SEQ ID NO: 428862 - DNA, 15 bp, Homo sapiens
ttagaaagacgtaga

SEQ ID NO: 428863 - DNA, 15 bp, Homo sapiens
tttagaaagacgtag

SEQ ID NO: 428864 - DNA, 15 bp, Homo sapiens
atttagaaagacgta

SEQ ID NO: 428865 - DNA, 15 bp, Homo sapiens
gatttagaaagacgt

SEQ ID NO: 428866 - DNA, 15 bp, Homo sapiens
agatttagaaagacg

SEQ ID NO: 428867 - DNA, 15 bp, Homo sapiens
tagatttagaaagac

SEQ ID NO: 428868 - DNA, 15 bp, Homo sapiens
ctagatttagaaaga

SEQ ID NO: 428869 - DNA, 15 bp, Homo sapiens
actagatttagaaag

SEQ ID NO: 428870 - DNA, 15 bp, Homo sapiens
cactagatttagaaa

SEQ ID NO: 428871 - DNA, 15 bp, Homo sapiens
acactagatttagaa

SEQ ID NO: 428872 - DNA, 15 bp, Homo sapiens
gacactagatttaga

SEQ ID NO: 428873 - DNA, 15 bp, Homo sapiens
agacactagatttag

SEQ ID NO: 428874 - DNA, 15 bp, Homo sapiens
tagacactagattta

SEQ ID NO: 428875 - DNA, 15 bp, Homo sapiens
ctagacactagattt

SEQ ID NO: 428876 - DNA, 15 bp, Homo sapiens
cctagacactagatt

SEQ ID NO: 428877 - DNA, 15 bp, Homo sapiens
ccctagacactagat

SEQ ID NO: 428878 - DNA, 15 bp, Homo sapiens
gccctagacactaga

SEQ ID NO: 428879 - DNA, 15 bp, Homo sapiens
tgccctagacactag

SEQ ID NO: 428880 - DNA, 15 bp, Homo sapiens
atgccctagacacta

SEQ ID NO: 428881 - DNA, 15 bp, Homo sapiens
gatgccctagacact

SEQ ID NO: 428882 - DNA, 15 bp, Homo sapiens
ggatgccctagacac

SEQ ID NO: 428883 - DNA, 15 bp, Homo sapiens
tggatgccctagaca

SEQ ID NO: 428884 - DNA, 15 bp, Homo sapiens
atggatgccctagac

SEQ ID NO: 428885 - DNA, 15 bp, Homo sapiens
aatggatgccctaga

SEQ ID NO: 428886 - DNA, 15 bp, Homo sapiens
gaatggatgccctag

SEQ ID NO: 428887 - DNA, 15 bp, Homo sapiens
tgaatggatgcccta

SEQ ID NO: 428888 - DNA, 15 bp, Homo sapiens
ctgaatggatgccct

SEQ ID NO: 428889 - DNA, 15 bp, Homo sapiens
cctgaatggatgccc

SEQ ID NO: 428890 - DNA, 15 bp, Homo sapiens
acctgaatggatgcc

SEQ ID NO: 428891 - DNA, 15 bp, Homo sapiens
cacctgaatggatgc

SEQ ID NO: 428892 - DNA, 15 bp, Homo sapiens
tcacctgaatggatg

SEQ ID NO: 428893 - DNA, 15 bp, Homo sapiens
ttcacctgaatggat

SEQ ID NO: 428894 - DNA, 15 bp, Homo sapiens
attcacctgaatgga

SEQ ID NO: 428895 - DNA, 15 bp, Homo sapiens
gattcacctgaatgg

SEQ ID NO: 428896 - DNA, 15 bp, Homo sapiens
ggattcacctgaatg

SEQ ID NO: 428897 - DNA, 15 bp, Homo sapiens
aggattcacctgaat

SEQ ID NO: 428898 - DNA, 15 bp, Homo sapiens
aaggattcacctgaa

SEQ ID NO: 428899 - DNA, 15 bp, Homo sapiens
aaaggattcacctga

SEQ ID NO: 428900 - DNA, 15 bp, Homo sapiens
caaaggattcacctg

SEQ ID NO: 428901 - DNA, 15 bp, Homo sapiens
tcaaaggattcacct

SEQ ID NO: 428902 - DNA, 15 bp, Homo sapiens
atcaaaggattcacc

SEQ ID NO: 428903 - DNA, 15 bp, Homo sapiens
aatcaaaggattcac

SEQ ID NO: 428904 - DNA, 15 bp, Homo sapiens
gaatcaaaggattca

SEQ ID NO: 428905 - DNA, 15 bp, Homo sapiens
ggaatcaaaggattc

SEQ ID NO: 428906 - DNA, 15 bp, Homo sapiens
aggaatcaaaggatt

SEQ ID NO: 428907 - DNA, 15 bp, Homo sapiens
caggaatcaaaggat

SEQ ID NO: 428908 - DNA, 15 bp, Homo sapiens
gcaggaatcaaagga

SEQ ID NO: 428909 - DNA, 15 bp, Homo sapiens
ggcaggaatcaaagg

SEQ ID NO: 428910 - DNA, 15 bp, Homo sapiens
tggcaggaatcaaag

SEQ ID NO: 428911 - DNA, 15 bp, Homo sapiens
atggcaggaatcaaa

SEQ ID NO: 428912 - DNA, 15 bp, Homo sapiens
aatggcaggaatcaa

SEQ ID NO: 428913 - DNA, 15 bp, Homo sapiens
taatggcaggaatca

SEQ ID NO: 428914 - DNA, 15 bp, Homo sapiens
ataatggcaggaatc

SEQ ID NO: 428915 - DNA, 15 bp, Homo sapiens
gataatggcaggaat

SEQ ID NO: 428916 - DNA, 15 bp, Homo sapiens
ggataatggcaggaa

SEQ ID NO: 428917 - DNA, 15 bp, Homo sapiens
aggataatggcagga

SEQ ID NO: 428918 - DNA, 15 bp, Homo sapiens
taggataatggcagg

SEQ ID NO: 428919 - DNA, 15 bp, Homo sapiens
ctaggataatggcag

SEQ ID NO: 428920 - DNA, 15 bp, Homo sapiens
tctaggataatggca

SEQ ID NO: 428921 - DNA, 15 bp, Homo sapiens
ttctaggataatggc

SEQ ID NO: 428922 - DNA, 15 bp, Homo sapiens
gttctaggataatgg

SEQ ID NO: 428923 - DNA, 15 bp, Homo sapiens
tgttctaggataatg

SEQ ID NO: 428924 - DNA, 15 bp, Homo sapiens
ttgttctaggataat

SEQ ID NO: 428925 - DNA, 15 bp, Homo sapiens
cttgttctaggataa

SEQ ID NO: 428926 - DNA, 15 bp, Homo sapiens
tcttgttctaggata

SEQ ID NO: 428927 - DNA, 15 bp, Homo sapiens
ctcttgttctaggat

SEQ ID NO: 428928 - DNA, 15 bp, Homo sapiens
actcttgttctagga

SEQ ID NO: 428929 - DNA, 15 bp, Homo sapiens
tactcttgttctagg

SEQ ID NO: 428930 - DNA, 15 bp, Homo sapiens
ctactcttgttctag

SEQ ID NO: 428931 - DNA, 15 bp, Homo sapiens
tctactcttgttcta

SEQ ID NO: 428932 - DNA, 15 bp, Homo sapiens
atctactcttgttct

SEQ ID NO: 428933 - DNA, 15 bp, Homo sapiens
catctactcttgttc

SEQ ID NO: 428934 - DNA, 15 bp, Homo sapiens
acatctactcttgtt

SEQ ID NO: 428935 - DNA, 15 bp, Homo sapiens
tacatctactcttgt

SEQ ID NO: 428936 - DNA, 15 bp, Homo sapiens
atacatctactcttg

SEQ ID NO: 428937 - DNA, 15 bp, Homo sapiens
catacatctactctt

SEQ ID NO: 428938 - DNA, 15 bp, Homo sapiens
tcatacatctactct

SEQ ID NO: 428939 - DNA, 15 bp, Homo sapiens
ttcatacatctactc

SEQ ID NO: 428940 - DNA, 15 bp, Homo sapiens
attcatacatctact

SEQ ID NO: 428941 - DNA, 15 bp, Homo sapiens
aattcatacatctac

SEQ ID NO: 428942 - DNA, 15 bp, Homo sapiens
gaattcatacatcta

SEQ ID NO: 428943 - DNA, 15 bp, Homo sapiens
agaattcatacatct

SEQ ID NO: 428944 - DNA, 15 bp, Homo sapiens
aagaattcatacatc

SEQ ID NO: 428945 - DNA, 15 bp, Homo sapiens
caagaattcatacat

SEQ ID NO: 428946 - DNA, 15 bp, Homo sapiens
gcaagaattcataca

SEQ ID NO: 428947 - DNA, 15 bp, Homo sapiens
tgcaagaattcatac

SEQ ID NO: 428948 - DNA, 15 bp, Homo sapiens
atgcaagaattcata

SEQ ID NO: 428949 - DNA, 15 bp, Homo sapiens
gatgcaagaattcat

SEQ ID NO: 428950 - DNA, 15 bp, Homo sapiens
agatgcaagaattca

SEQ ID NO: 428951 - DNA, 15 bp, Homo sapiens
cagatgcaagaattc

SEQ ID NO: 428952 - DNA, 15 bp, Homo sapiens
acagatgcaagaatt

SEQ ID NO: 428953 - DNA, 15 bp, Homo sapiens
tacagatgcaagaat

SEQ ID NO: 428954 - DNA, 15 bp, Homo sapiens
gtacagatgcaagaa

SEQ ID NO: 428955 - DNA, 15 bp, Homo sapiens
agtacagatgcaaga

SEQ ID NO: 428956 - DNA, 15 bp, Homo sapiens
cagtacagatgcaag

SEQ ID NO: 428957 - DNA, 15 bp, Homo sapiens
ccagtacagatgcaa

SEQ ID NO: 428958 - DNA, 15 bp, Homo sapiens
accagtacagatgca

SEQ ID NO: 428959 - DNA, 15 bp, Homo sapiens
aaccagtacagatgc

SEQ ID NO: 428960 - DNA, 15 bp, Homo sapiens
taaccagtacagatg

SEQ ID NO: 428961 - DNA, 15 bp, Homo sapiens
gtaaccagtacagat

SEQ ID NO: 428962 - DNA, 15 bp, Homo sapiens
agtaaccagtacaga

SEQ ID NO: 428963 - DNA, 15 bp, Homo sapiens
tagtaaccagtacag

SEQ ID NO: 428964 - DNA, 15 bp, Homo sapiens
ttagtaaccagtaca

SEQ ID NO: 428965 - DNA, 15 bp, Homo sapiens
tttagtaaccagtac

SEQ ID NO: 428966 - DNA, 15 bp, Homo sapiens
gtttagtaaccagta

SEQ ID NO: 428967 - DNA, 15 bp, Homo sapiens
agtttagtaaccagt

SEQ ID NO: 428968 - DNA, 15 bp, Homo sapiens
gagtttagtaaccag

SEQ ID NO: 428969 - DNA, 15 bp, Homo sapiens
agagtttagtaacca

SEQ ID NO: 428970 - DNA, 15 bp, Homo sapiens
gagagtttagtaacc

SEQ ID NO: 428971 - DNA, 15 bp, Homo sapiens
tgagagtttagtaac

SEQ ID NO: 428972 - DNA, 15 bp, Homo sapiens
ctgagagtttagtaa

SEQ ID NO: 428973 - DNA, 15 bp, Homo sapiens
gctgagagtttagta

SEQ ID NO: 428974 - DNA, 15 bp, Homo sapiens
ggctgagagtttagt

SEQ ID NO: 428975 - DNA, 15 bp, Homo sapiens
aggctgagagtttag

SEQ ID NO: 428976 - DNA, 15 bp, Homo sapiens
gaggctgagagttta

SEQ ID NO: 428977 - DNA, 15 bp, Homo sapiens
agaggctgagagttt

SEQ ID NO: 428978 - DNA, 15 bp, Homo sapiens
cagaggctgagagtt

SEQ ID NO: 428979 - DNA, 15 bp, Homo sapiens
acagaggctgagagt

SEQ ID NO: 428980 - DNA, 15 bp, Homo sapiens
aacagaggctgagag

SEQ ID NO: 428981 - DNA, 15 bp, Homo sapiens
gaacagaggctgaga

SEQ ID NO: 428982 - DNA, 15 bp, Homo sapiens
agaacagaggctgag

SEQ ID NO: 428983 - DNA, 15 bp, Homo sapiens
tagaacagaggctga

SEQ ID NO: 428984 - DNA, 15 bp, Homo sapiens
gtagaacagaggctg

SEQ ID NO: 428985 - DNA, 15 bp, Homo sapiens
ggtagaacagaggct

SEQ ID NO: 428986 - DNA, 15 bp, Homo sapiens
aggtagaacagaggc

SEQ ID NO: 428987 - DNA, 15 bp, Homo sapiens
gaggtagaacagagg

SEQ ID NO: 428988 - DNA, 15 bp, Homo sapiens
ggaggtagaacagag

SEQ ID NO: 428989 - DNA, 15 bp, Homo sapiens
gggaggtagaacaga

SEQ ID NO: 428990 - DNA, 15 bp, Homo sapiens
tgggaggtagaacag

SEQ ID NO: 428991 - DNA, 15 bp, Homo sapiens
gtgggaggtagaaca

SEQ ID NO: 428992 - DNA, 15 bp, Homo sapiens
tgtgggaggtagaac

SEQ ID NO: 428993 - DNA, 15 bp, Homo sapiens
ctgtgggaggtagaa

SEQ ID NO: 428994 - DNA, 15 bp, Homo sapiens
actgtgggaggtaga

SEQ ID NO: 428995 - DNA, 15 bp, Homo sapiens
gactgtgggaggtag

SEQ ID NO: 428996 - DNA, 15 bp, Homo sapiens
agactgtgggaggta

SEQ ID NO: 428997 - DNA, 15 bp, Homo sapiens
gagactgtgggaggt

SEQ ID NO: 428998 - DNA, 15 bp, Homo sapiens
agagactgtgggagg

SEQ ID NO: 428999 - DNA, 15 bp, Homo sapiens
cagagactgtgggag

SEQ ID NO: 429000 - DNA, 15 bp, Homo sapiens
acagagactgtggga

SEQ ID NO: 429001 - DNA, 15 bp, Homo sapiens
aacagagactgtggg

SEQ ID NO: 429002 - DNA, 15 bp, Homo sapiens
gaacagagactgtgg

SEQ ID NO: 429003 - DNA, 15 bp, Homo sapiens
ggaacagagactgtg

SEQ ID NO: 429004 - DNA, 15 bp, Homo sapiens
gggaacagagactgt

SEQ ID NO: 429005 - DNA, 15 bp, Homo sapiens
ggggaacagagactg

SEQ ID NO: 429006 - DNA, 15 bp, Homo sapiens
tggggaacagagact

SEQ ID NO: 429007 - DNA, 15 bp, Homo sapiens
atggggaacagagac

SEQ ID NO: 429008 - DNA, 15 bp, Homo sapiens
tatggggaacagaga

SEQ ID NO: 429009 - DNA, 15 bp, Homo sapiens
ctatggggaacagag

SEQ ID NO: 429010 - DNA, 15 bp, Homo sapiens
gctatggggaacaga

SEQ ID NO: 429011 - DNA, 15 bp, Homo sapiens
agctatggggaacag

SEQ ID NO: 429012 - DNA, 15 bp, Homo sapiens
gagctatggggaaca

SEQ ID NO: 429013 - DNA, 15 bp, Homo sapiens
agagctatggggaac

SEQ ID NO: 429014 - DNA, 15 bp, Homo sapiens
cagagctatggggaa

SEQ ID NO: 429015 - DNA, 15 bp, Homo sapiens
tcagagctatgggga

SEQ ID NO: 429016 - DNA, 15 bp, Homo sapiens
atcagagctatgggg

SEQ ID NO: 429017 - DNA, 15 bp, Homo sapiens
catcagagctatggg

SEQ ID NO: 429018 - DNA, 15 bp, Homo sapiens
gcatcagagctatgg

SEQ ID NO: 429019 - DNA, 15 bp, Homo sapiens
agcatcagagctatg

SEQ ID NO: 429020 - DNA, 15 bp, Homo sapiens
cagcatcagagctat

SEQ ID NO: 429021 - DNA, 15 bp, Homo sapiens
tcagcatcagagcta

SEQ ID NO: 429022 - DNA, 15 bp, Homo sapiens
gtcagcatcagagct

SEQ ID NO: 429023 - DNA, 15 bp, Homo sapiens
ggtcagcatcagagc

SEQ ID NO: 429024 - DNA, 15 bp, Homo sapiens
gggtcagcatcagag

SEQ ID NO: 429025 - DNA, 15 bp, Homo sapiens
tgggtcagcatcaga

SEQ ID NO: 429026 - DNA, 15 bp, Homo sapiens
ttgggtcagcatcag

SEQ ID NO: 429027 - DNA, 15 bp, Homo sapiens
cttgggtcagcatca

SEQ ID NO: 429028 - DNA, 15 bp, Homo sapiens
ccttgggtcagcatc

SEQ ID NO: 429029 - DNA, 15 bp, Homo sapiens
cccttgggtcagcat

SEQ ID NO: 429030 - DNA, 15 bp, Homo sapiens
acccttgggtcagca

SEQ ID NO: 429031 - DNA, 15 bp, Homo sapiens
aacccttgggtcagc

SEQ ID NO: 429032 - DNA, 15 bp, Homo sapiens
taacccttgggtcag

SEQ ID NO: 429033 - DNA, 15 bp, Homo sapiens
ataacccttgggtca

SEQ ID NO: 429034 - DNA, 15 bp, Homo sapiens
tataacccttgggtc

SEQ ID NO: 429035 - DNA, 15 bp, Homo sapiens
ctataacccttgggt

SEQ ID NO: 429036 - DNA, 15 bp, Homo sapiens
tctataacccttggg

SEQ ID NO: 429037 - DNA, 15 bp, Homo sapiens
ttctataacccttgg

SEQ ID NO: 429038 - DNA, 15 bp, Homo sapiens
cttctataacccttg

SEQ ID NO: 429039 - DNA, 15 bp, Homo sapiens
ccttctataaccctt

SEQ ID NO: 429040 - DNA, 15 bp, Homo sapiens
tccttctataaccct

SEQ ID NO: 429041 - DNA, 15 bp, Homo sapiens
ctccttctataaccc

SEQ ID NO: 429042 - DNA, 15 bp, Homo sapiens
tctccttctataacc

SEQ ID NO: 429043 - DNA, 15 bp, Homo sapiens
atctccttctataac

SEQ ID NO: 429044 - DNA, 15 bp, Homo sapiens
gatctccttctataa

SEQ ID NO: 429045 - DNA, 15 bp, Homo sapiens
tgatctccttctata

SEQ ID NO: 429046 - DNA, 15 bp, Homo sapiens
ttgatctccttctat

SEQ ID NO: 429047 - DNA, 15 bp, Homo sapiens
gttgatctccttcta

SEQ ID NO: 429048 - DNA, 15 bp, Homo sapiens
agttgatctccttct

SEQ ID NO: 429049 - DNA, 15 bp, Homo sapiens
gagttgatctccttc

SEQ ID NO: 429050 - DNA, 15 bp, Homo sapiens
ggagttgatctcctt

SEQ ID NO: 429051 - DNA, 15 bp, Homo sapiens
gggagttgatctcct

SEQ ID NO: 429052 - DNA, 15 bp, Homo sapiens
tgggagttgatctcc

SEQ ID NO: 429053 - DNA, 15 bp, Homo sapiens
ttgggagttgatctc

SEQ ID NO: 429054 - DNA, 15 bp, Homo sapiens
tttgggagttgatct

SEQ ID NO: 429055 - DNA, 15 bp, Homo sapiens
gtttgggagttgatc

SEQ ID NO: 429056 - DNA, 15 bp, Homo sapiens
ggtttgggagttgat

SEQ ID NO: 429057 - DNA, 15 bp, Homo sapiens
aggtttgggagttga

SEQ ID NO: 429058 - DNA, 15 bp, Homo sapiens
taggtttgggagttg

SEQ ID NO: 429059 - DNA, 15 bp, Homo sapiens
ttaggtttgggagtt

SEQ ID NO: 429060 - DNA, 15 bp, Homo sapiens
attaggtttgggagt

SEQ ID NO: 429061 - DNA, 15 bp, Homo sapiens
gattaggtttgggag

SEQ ID NO: 429062 - DNA, 15 bp, Homo sapiens
ggattaggtttggga

SEQ ID NO: 429063 - DNA, 15 bp, Homo sapiens
gggattaggtttggg

SEQ ID NO: 429064 - DNA, 15 bp, Homo sapiens
tgggattaggtttgg

SEQ ID NO: 429065 - DNA, 15 bp, Homo sapiens
ctgggattaggtttg

SEQ ID NO: 429066 - DNA, 15 bp, Homo sapiens
tctgggattaggttt

SEQ ID NO: 429067 - DNA, 15 bp, Homo sapiens
ttctgggattaggtt

SEQ ID NO: 429068 - DNA, 15 bp, Homo sapiens
tttctgggattaggt

SEQ ID NO: 429069 - DNA, 15 bp, Homo sapiens
ctttctgggattagg

SEQ ID NO: 429070 - DNA, 15 bp, Homo sapiens
actttctgggattag

SEQ ID NO: 429071 - DNA, 15 bp, Homo sapiens
tactttctgggatta

SEQ ID NO: 429072 - DNA, 15 bp, Homo sapiens
ttactttctgggatt

SEQ ID NO: 429073 - DNA, 15 bp, Homo sapiens
tttactttctgggat

SEQ ID NO: 429074 - DNA, 15 bp, Homo sapiens
atttactttctggga

SEQ ID NO: 429075 - DNA, 15 bp, Homo sapiens
tatttactttctggg

SEQ ID NO: 429076 - DNA, 15 bp, Homo sapiens
gtatttactttctgg

SEQ ID NO: 429077 - DNA, 15 bp, Homo sapiens
tgtatttactttctg

SEQ ID NO: 429078 - DNA, 15 bp, Homo sapiens
gtgtatttactttct

SEQ ID NO: 429079 - DNA, 15 bp, Homo sapiens
tgtgtatttactttc

SEQ ID NO: 429080 - DNA, 15 bp, Homo sapiens
ttgtgtatttacttt

SEQ ID NO: 429081 - DNA, 15 bp, Homo sapiens
gttgtgtatttactt

SEQ ID NO: 429082 - DNA, 15 bp, Homo sapiens
cgttgtgtatttact

SEQ ID NO: 429083 - DNA, 15 bp, Homo sapiens
tcgttgtgtatttac

SEQ ID NO: 429084 - DNA, 15 bp, Homo sapiens
atcgttgtgtattta

SEQ ID NO: 429085 - DNA, 15 bp, Homo sapiens
tatcgttgtgtattt

SEQ ID NO: 429086 - DNA, 15 bp, Homo sapiens
atatcgttgtgtatt

SEQ ID NO: 429087 - DNA, 15 bp, Homo sapiens
tatatcgttgtgtat

SEQ ID NO: 429088 - DNA, 15 bp, Homo sapiens
ctatatcgttgtgta

SEQ ID NO: 429089 - DNA, 15 bp, Homo sapiens
actatatcgttgtgt

SEQ ID NO: 429090 - DNA, 15 bp, Homo sapiens
tactatatcgttgtg

SEQ ID NO: 429091 - DNA, 15 bp, Homo sapiens
atactatatcgttgt

SEQ ID NO: 429092 - DNA, 15 bp, Homo sapiens
tatactatatcgttg

SEQ ID NO: 429093 - DNA, 15 bp, Homo sapiens
atatactatatcgtt

SEQ ID NO: 429094 - DNA, 15 bp, Homo sapiens
catatactatatcgt

SEQ ID NO: 429095 - DNA, 15 bp, Homo sapiens
gcatatactatatcg

SEQ ID NO: 429096 - DNA, 15 bp, Homo sapiens
agcatatactatatc

SEQ ID NO: 429097 - DNA, 15 bp, Homo sapiens
aagcatatactatat

SEQ ID NO: 429098 - DNA, 15 bp, Homo sapiens
taagcatatactata

SEQ ID NO: 429099 - DNA, 15 bp, Homo sapiens
ctaagcatatactat

SEQ ID NO: 429100 - DNA, 15 bp, Homo sapiens
tctaagcatatacta

SEQ ID NO: 429101 - DNA, 15 bp, Homo sapiens
atctaagcatatact

SEQ ID NO: 429102 - DNA, 15 bp, Homo sapiens
gatctaagcatatac

SEQ ID NO: 429103 - DNA, 15 bp, Homo sapiens
ggatctaagcatata

SEQ ID NO: 429104 - DNA, 15 bp, Homo sapiens
tggatctaagcatat

SEQ ID NO: 429105 - DNA, 15 bp, Homo sapiens
atggatctaagcata

SEQ ID NO: 429106 - DNA, 15 bp, Homo sapiens
aatggatctaagcat

SEQ ID NO: 429107 - DNA, 15 bp, Homo sapiens
gaatggatctaagca

SEQ ID NO: 429108 - DNA, 15 bp, Homo sapiens
agaatggatctaagc

SEQ ID NO: 429109 - DNA, 15 bp, Homo sapiens
aagaatggatctaag

SEQ ID NO: 429110 - DNA, 15 bp, Homo sapiens
gaagaatggatctaa

SEQ ID NO: 429111 - DNA, 15 bp, Homo sapiens
tgaagaatggatcta

SEQ ID NO: 429112 - DNA, 15 bp, Homo sapiens
ctgaagaatggatct

SEQ ID NO: 429113 - DNA, 15 bp, Homo sapiens
actgaagaatggatc

SEQ ID NO: 429114 - DNA, 15 bp, Homo sapiens
aactgaagaatggat

SEQ ID NO: 429115 - DNA, 15 bp, Homo sapiens
aaactgaagaatgga

SEQ ID NO: 429116 - DNA, 15 bp, Homo sapiens
taaactgaagaatgg

SEQ ID NO: 429117 - DNA, 15 bp, Homo sapiens
ataaactgaagaatg

SEQ ID NO: 429118 - DNA, 15 bp, Homo sapiens
aataaactgaagaat

SEQ ID NO: 429119 - DNA, 15 bp, Homo sapiens
caataaactgaagaa

SEQ ID NO: 429120 - DNA, 15 bp, Homo sapiens
tcaataaactgaaga

SEQ ID NO: 429121 - DNA, 15 bp, Homo sapiens
ttcaataaactgaag

SEQ ID NO: 429122 - DNA, 15 bp, Homo sapiens
attcaataaactgaa

SEQ ID NO: 429123 - DNA, 15 bp, Homo sapiens
gattcaataaactga

SEQ ID NO: 429124 - DNA, 15 bp, Homo sapiens
tgattcaataaactg

SEQ ID NO: 429125 - DNA, 15 bp, Homo sapiens
gtgattcaataaact

SEQ ID NO: 429126 - DNA, 15 bp, Homo sapiens
tgtgattcaataaac

SEQ ID NO: 429127 - DNA, 15 bp, Homo sapiens
ttgtgattcaataaa

SEQ ID NO: 429128 - DNA, 15 bp, Homo sapiens
tttgtgattcaataa

SEQ ID NO: 429129 - DNA, 15 bp, Homo sapiens
ttttgtgattcaata

SEQ ID NO: 429130 - DNA, 15 bp, Homo sapiens
attttgtgattcaat

SEQ ID NO: 429131 - DNA, 15 bp, Homo sapiens
tattttgtgattcaa

SEQ ID NO: 429132 - DNA, 15 bp, Homo sapiens
atattttgtgattca

SEQ ID NO: 429133 - DNA, 15 bp, Homo sapiens
aatattttgtgattc

SEQ ID NO: 429134 - DNA, 15 bp, Homo sapiens
caatattttgtgatt

SEQ ID NO: 429135 - DNA, 15 bp, Homo sapiens
ccaatattttgtgat

SEQ ID NO: 429136 - DNA, 15 bp, Homo sapiens
gccaatattttgtga

SEQ ID NO: 429137 - DNA, 15 bp, Homo sapiens
cgccaatattttgtg

SEQ ID NO: 429138 - DNA, 15 bp, Homo sapiens
gcgccaatattttgt

SEQ ID NO: 429139 - DNA, 15 bp, Homo sapiens
agcgccaatattttg

SEQ ID NO: 429140 - DNA, 15 bp, Homo sapiens
cagcgccaatatttt

SEQ ID NO: 429141 - DNA, 15 bp, Homo sapiens
tcagcgccaatattt

SEQ ID NO: 429142 - DNA, 15 bp, Homo sapiens
ctcagcgccaatatt

SEQ ID NO: 429143 - DNA, 15 bp, Homo sapiens
tctcagcgccaatat

SEQ ID NO: 429144 - DNA, 15 bp, Homo sapiens
ctctcagcgccaata

SEQ ID NO: 429145 - DNA, 15 bp, Homo sapiens
cctctcagcgccaat

SEQ ID NO: 429146 - DNA, 15 bp, Homo sapiens
tcctctcagcgccaa

SEQ ID NO: 429147 - DNA, 15 bp, Homo sapiens
ttcctctcagcgcca

SEQ ID NO: 429148 - DNA, 15 bp, Homo sapiens
attcctctcagcgcc

SEQ ID NO: 429149 - DNA, 15 bp, Homo sapiens
gattcctctcagcgc

SEQ ID NO: 429150 - DNA, 15 bp, Homo sapiens
agattcctctcagcg

SEQ ID NO: 429151 - DNA, 15 bp, Homo sapiens
aagattcctctcagc

SEQ ID NO: 429152 - DNA, 15 bp, Homo sapiens
taagattcctctcag

SEQ ID NO: 429153 - DNA, 15 bp, Homo sapiens
ctaagattcctctca

SEQ ID NO: 429154 - DNA, 15 bp, Homo sapiens
tctaagattcctctc

SEQ ID NO: 429155 - DNA, 15 bp, Homo sapiens
ttctaagattcctct

SEQ ID NO: 429156 - DNA, 15 bp, Homo sapiens
cttctaagattcctc

SEQ ID NO: 429157 - DNA, 15 bp, Homo sapiens
gcttctaagattcct

SEQ ID NO: 429158 - DNA, 15 bp, Homo sapiens
ggcttctaagattcc

SEQ ID NO: 429159 - DNA, 15 bp, Homo sapiens
tggcttctaagattc

SEQ ID NO: 429160 - DNA, 15 bp, Homo sapiens
ttggcttctaagatt

SEQ ID NO: 429161 - DNA, 15 bp, Homo sapiens
gttggcttctaagat

SEQ ID NO: 429162 - DNA, 15 bp, Homo sapiens
tgttggcttctaaga

SEQ ID NO: 429163 - DNA, 15 bp, Homo sapiens
ctgttggcttctaag

SEQ ID NO: 429164 - DNA, 15 bp, Homo sapiens
actgttggcttctaa

SEQ ID NO: 429165 - DNA, 15 bp, Homo sapiens
aactgttggcttcta

SEQ ID NO: 429166 - DNA, 15 bp, Homo sapiens
aaactgttggcttct

SEQ ID NO: 429167 - DNA, 15 bp, Homo sapiens
gaaactgttggcttc

SEQ ID NO: 429168 - DNA, 15 bp, Homo sapiens
tgaaactgttggctt

SEQ ID NO: 429169 - DNA, 15 bp, Homo sapiens
ttgaaactgttggct

SEQ ID NO: 429170 - DNA, 15 bp, Homo sapiens
tttgaaactgttggc

SEQ ID NO: 429171 - DNA, 15 bp, Homo sapiens
gtttgaaactgttgg

SEQ ID NO: 429172 - DNA, 15 bp, Homo sapiens
agtttgaaactgttg

SEQ ID NO: 429173 - DNA, 15 bp, Homo sapiens
gagtttgaaactgtt

SEQ ID NO: 429174 - DNA, 15 bp, Homo sapiens
agagtttgaaactgt

SEQ ID NO: 429175 - DNA, 15 bp, Homo sapiens
gagagtttgaaactg

SEQ ID NO: 429176 - DNA, 15 bp, Homo sapiens
ggagagtttgaaact

SEQ ID NO: 429177 - DNA, 15 bp, Homo sapiens
cggagagtttgaaac

SEQ ID NO: 429178 - DNA, 15 bp, Homo sapiens
acggagagtttgaaa

SEQ ID NO: 429179 - DNA, 15 bp, Homo sapiens
cacggagagtttgaa

SEQ ID NO: 429180 - DNA, 15 bp, Homo sapiens
ccacggagagtttga

SEQ ID NO: 429181 - DNA, 15 bp, Homo sapiens
accacggagagtttg

SEQ ID NO: 429182 - DNA, 15 bp, Homo sapiens
taccacggagagttt

SEQ ID NO: 429183 - DNA, 15 bp, Homo sapiens
gtaccacggagagtt

SEQ ID NO: 429184 - DNA, 15 bp, Homo sapiens
tgtaccacggagagt

SEQ ID NO: 429185 - DNA, 15 bp, Homo sapiens
ctgtaccacggagag

SEQ ID NO: 429186 - DNA, 15 bp, Homo sapiens
tctgtaccacggaga

SEQ ID NO: 429187 - DNA, 15 bp, Homo sapiens
gtctgtaccacggag

SEQ ID NO: 429188 - DNA, 15 bp, Homo sapiens
agtctgtaccacgga

SEQ ID NO: 429189 - DNA, 15 bp, Homo sapiens
tagtctgtaccacgg

SEQ ID NO: 429190 - DNA, 15 bp, Homo sapiens
ttagtctgtaccacg

SEQ ID NO: 429191 - DNA, 15 bp, Homo sapiens
cttagtctgtaccac

SEQ ID NO: 429192 - DNA, 15 bp, Homo sapiens
gcttagtctgtacca

SEQ ID NO: 429193 - DNA, 15 bp, Homo sapiens
ggcttagtctgtacc

SEQ ID NO: 429194 - DNA, 15 bp, Homo sapiens
gggcttagtctgtac

SEQ ID NO: 429195 - DNA, 15 bp, Homo sapiens
agggcttagtctgta

SEQ ID NO: 429196 - DNA, 15 bp, Homo sapiens
tagggcttagtctgt

SEQ ID NO: 429197 - DNA, 15 bp, Homo sapiens
ttagggcttagtctg

SEQ ID NO: 429198 - DNA, 15 bp, Homo sapiens
tttagggcttagtct

SEQ ID NO: 429199 - DNA, 15 bp, Homo sapiens
ctttagggcttagtc

SEQ ID NO: 429200 - DNA, 15 bp, Homo sapiens
tctttagggcttagt

SEQ ID NO: 429201 - DNA, 15 bp, Homo sapiens
atctttagggcttag

SEQ ID NO: 429202 - DNA, 15 bp, Homo sapiens
catctttagggctta

SEQ ID NO: 429203 - DNA, 15 bp, Homo sapiens
acatctttagggctt

SEQ ID NO: 429204 - DNA, 15 bp, Homo sapiens
aacatctttagggct

SEQ ID NO: 429205 - DNA, 15 bp, Homo sapiens
taacatctttagggc

SEQ ID NO: 429206 - DNA, 15 bp, Homo sapiens
ttaacatctttaggg

SEQ ID NO: 429207 - DNA, 15 bp, Homo sapiens
cttaacatctttagg

SEQ ID NO: 429208 - DNA, 15 bp, Homo sapiens
acttaacatctttag

SEQ ID NO: 429209 - DNA, 15 bp, Homo sapiens
cacttaacatcttta

SEQ ID NO: 429210 - DNA, 15 bp, Homo sapiens
tcacttaacatcttt

SEQ ID NO: 429211 - DNA, 15 bp, Homo sapiens
gtcacttaacatctt

SEQ ID NO: 429212 - DNA, 15 bp, Homo sapiens
agtcacttaacatct

SEQ ID NO: 429213 - DNA, 15 bp, Homo sapiens
aagtcacttaacatc

SEQ ID NO: 429214 - DNA, 15 bp, Homo sapiens
aaagtcacttaacat

SEQ ID NO: 429215 - DNA, 15 bp, Homo sapiens
gaaagtcacttaaca

SEQ ID NO: 429216 - DNA, 15 bp, Homo sapiens
agaaagtcacttaac

SEQ ID NO: 429217 - DNA, 15 bp, Homo sapiens
gagaaagtcacttaa

SEQ ID NO: 429218 - DNA, 15 bp, Homo sapiens
tgagaaagtcactta

SEQ ID NO: 429219 - DNA, 15 bp, Homo sapiens
ttgagaaagtcactt

SEQ ID NO: 429220 - DNA, 15 bp, Homo sapiens
cttgagaaagtcact

SEQ ID NO: 429221 - DNA, 15 bp, Homo sapiens
ccttgagaaagtcac

SEQ ID NO: 429222 - DNA, 15 bp, Homo sapiens
accttgagaaagtca

SEQ ID NO: 429223 - DNA, 15 bp, Homo sapiens
gaccttgagaaagtc

SEQ ID NO: 429224 - DNA, 15 bp, Homo sapiens
tgaccttgagaaagt

SEQ ID NO: 429225 - DNA, 15 bp, Homo sapiens
gtgaccttgagaaag

SEQ ID NO: 429226 - DNA, 15 bp, Homo sapiens
tgtgaccttgagaaa

SEQ ID NO: 429227 - DNA, 15 bp, Homo sapiens
gtgtgaccttgagaa

SEQ ID NO: 429228 - DNA, 15 bp, Homo sapiens
tgtgtgaccttgaga

SEQ ID NO: 429229 - DNA, 15 bp, Homo sapiens
ctgtgtgaccttgag

SEQ ID NO: 429230 - DNA, 15 bp, Homo sapiens
gctgtgtgaccttga

SEQ ID NO: 429231 - DNA, 15 bp, Homo sapiens
agctgtgtgaccttg

SEQ ID NO: 429232 - DNA, 15 bp, Homo sapiens
tagctgtgtgacctt

SEQ ID NO: 429233 - DNA, 15 bp, Homo sapiens
ctagctgtgtgacct

SEQ ID NO: 429234 - DNA, 15 bp, Homo sapiens
actagctgtgtgacc

SEQ ID NO: 429235 - DNA, 15 bp, Homo sapiens
aactagctgtgtgac

SEQ ID NO: 429236 - DNA, 15 bp, Homo sapiens
taactagctgtgtga

SEQ ID NO: 429237 - DNA, 15 bp, Homo sapiens
ctaactagctgtgtg

SEQ ID NO: 429238 - DNA, 15 bp, Homo sapiens
actaactagctgtgt

SEQ ID NO: 429239 - DNA, 15 bp, Homo sapiens
cactaactagctgtg

SEQ ID NO: 429240 - DNA, 15 bp, Homo sapiens
tcactaactagctgt

SEQ ID NO: 429241 - DNA, 15 bp, Homo sapiens
gtcactaactagctg

SEQ ID NO: 429242 - DNA, 15 bp, Homo sapiens
tgtcactaactagct

SEQ ID NO: 429243 - DNA, 15 bp, Homo sapiens
ttgtcactaactagc

SEQ ID NO: 429244 - DNA, 15 bp, Homo sapiens
tttgtcactaactag

SEQ ID NO: 429245 - DNA, 15 bp, Homo sapiens
ttttgtcactaacta

SEQ ID NO: 429246 - DNA, 15 bp, Homo sapiens
gttttgtcactaact

SEQ ID NO: 429247 - DNA, 15 bp, Homo sapiens
tgttttgtcactaac

SEQ ID NO: 429248 - DNA, 15 bp, Homo sapiens
ctgttttgtcactaa

SEQ ID NO: 429249 - DNA, 15 bp, Homo sapiens
cctgttttgtcacta

SEQ ID NO: 429250 - DNA, 15 bp, Homo sapiens
ccctgttttgtcact

SEQ ID NO: 429251 - DNA, 15 bp, Homo sapiens
gccctgttttgtcac

SEQ ID NO: 429252 - DNA, 15 bp, Homo sapiens
ggccctgttttgtca

SEQ ID NO: 429253 - DNA, 15 bp, Homo sapiens
aggccctgttttgtc

SEQ ID NO: 429254 - DNA, 15 bp, Homo sapiens
taggccctgttttgt

SEQ ID NO: 429255 - DNA, 15 bp, Homo sapiens
ataggccctgttttg

SEQ ID NO: 429256 - DNA, 15 bp, Homo sapiens
tataggccctgtttt

SEQ ID NO: 429257 - DNA, 15 bp, Homo sapiens
ttataggccctgttt

SEQ ID NO: 429258 - DNA, 15 bp, Homo sapiens
gttataggccctgtt

SEQ ID NO: 429259 - DNA, 15 bp, Homo sapiens
ggttataggccctgt

SEQ ID NO: 429260 - DNA, 15 bp, Homo sapiens
tggttataggccctg

SEQ ID NO: 429261 - DNA, 15 bp, Homo sapiens
ttggttataggccct

SEQ ID NO: 429262 - DNA, 15 bp, Homo sapiens
attggttataggccc

SEQ ID NO: 429263 - DNA, 15 bp, Homo sapiens
gattggttataggcc

SEQ ID NO: 429264 - DNA, 15 bp, Homo sapiens
tgattggttataggc

SEQ ID NO: 429265 - DNA, 15 bp, Homo sapiens
gtgattggttatagg

SEQ ID NO: 429266 - DNA, 15 bp, Homo sapiens
agtgattggttatag

SEQ ID NO: 429267 - DNA, 15 bp, Homo sapiens
aagtgattggttata

SEQ ID NO: 429268 - DNA, 15 bp, Homo sapiens
taagtgattggttat

SEQ ID NO: 429269 - DNA, 15 bp, Homo sapiens
ataagtgattggtta

SEQ ID NO: 429270 - DNA, 15 bp, Homo sapiens
aataagtgattggtt

SEQ ID NO: 429271 - DNA, 15 bp, Homo sapiens
taataagtgattggt

SEQ ID NO: 429272 - DNA, 15 bp, Homo sapiens
ataataagtgattgg

SEQ ID NO: 429273 - DNA, 15 bp, Homo sapiens
cataataagtgattg

SEQ ID NO: 429274 - DNA, 15 bp, Homo sapiens
tcataataagtgatt

SEQ ID NO: 429275 - DNA, 15 bp, Homo sapiens
ctcataataagtgat

SEQ ID NO: 429276 - DNA, 15 bp, Homo sapiens
actcataataagtga

SEQ ID NO: 429277 - DNA, 15 bp, Homo sapiens
cactcataataagtg

SEQ ID NO: 429278 - DNA, 15 bp, Homo sapiens
gcactcataataagt

SEQ ID NO: 429279 - DNA, 15 bp, Homo sapiens
tgcactcataataag

SEQ ID NO: 429280 - DNA, 15 bp, Homo sapiens
atgcactcataataa

SEQ ID NO: 429281 - DNA, 15 bp, Homo sapiens
catgcactcataata

SEQ ID NO: 429282 - DNA, 15 bp, Homo sapiens
gcatgcactcataat

SEQ ID NO: 429283 - DNA, 15 bp, Homo sapiens
agcatgcactcataa

SEQ ID NO: 429284 - DNA, 15 bp, Homo sapiens
gagcatgcactcata

SEQ ID NO: 429285 - DNA, 15 bp, Homo sapiens
agagcatgcactcat

SEQ ID NO: 429286 - DNA, 15 bp, Homo sapiens
cagagcatgcactca

SEQ ID NO: 429287 - DNA, 15 bp, Homo sapiens
tcagagcatgcactc

SEQ ID NO: 429288 - DNA, 15 bp, Homo sapiens
atcagagcatgcact

SEQ ID NO: 429289 - DNA, 15 bp, Homo sapiens
gatcagagcatgcac

SEQ ID NO: 429290 - DNA, 15 bp, Homo sapiens
ggatcagagcatgca

SEQ ID NO: 429291 - DNA, 15 bp, Homo sapiens
aggatcagagcatgc

SEQ ID NO: 429292 - DNA, 15 bp, Homo sapiens
aaggatcagagcatg

SEQ ID NO: 429293 - DNA, 15 bp, Homo sapiens
aaaggatcagagcat

SEQ ID NO: 429294 - DNA, 15 bp, Homo sapiens
caaaggatcagagca

SEQ ID NO: 429295 - DNA, 15 bp, Homo sapiens
gcaaaggatcagagc

SEQ ID NO: 429296 - DNA, 15 bp, Homo sapiens
agcaaaggatcagag

SEQ ID NO: 429297 - DNA, 15 bp, Homo sapiens
cagcaaaggatcaga

SEQ ID NO: 429298 - DNA, 15 bp, Homo sapiens
gcagcaaaggatcag

SEQ ID NO: 429299 - DNA, 15 bp, Homo sapiens
agcagcaaaggatca

SEQ ID NO: 429300 - DNA, 15 bp, Homo sapiens
gagcagcaaaggatc

SEQ ID NO: 429301 - DNA, 15 bp, Homo sapiens
cgagcagcaaaggat

SEQ ID NO: 429302 - DNA, 15 bp, Homo sapiens
gcgagcagcaaagga

SEQ ID NO: 429303 - DNA, 15 bp, Homo sapiens
agcgagcagcaaagg

SEQ ID NO: 429304 - DNA, 15 bp, Homo sapiens
cagcgagcagcaaag

SEQ ID NO: 429305 - DNA, 15 bp, Homo sapiens
acagcgagcagcaaa

SEQ ID NO: 429306 - DNA, 15 bp, Homo sapiens
aacagcgagcagcaa

SEQ ID NO: 429307 - DNA, 15 bp, Homo sapiens
caacagcgagcagca

SEQ ID NO: 429308 - DNA, 15 bp, Homo sapiens
acaacagcgagcagc

SEQ ID NO: 429309 - DNA, 15 bp, Homo sapiens
aacaacagcgagcag

SEQ ID NO: 429310 - DNA, 15 bp, Homo sapiens
aaacaacagcgagca

SEQ ID NO: 429311 - DNA, 15 bp, Homo sapiens
caaacaacagcgagc

SEQ ID NO: 429312 - DNA, 15 bp, Homo sapiens
gcaaacaacagcgag

SEQ ID NO: 429313 - DNA, 15 bp, Homo sapiens
tgcaaacaacagcga

SEQ ID NO: 429314 - DNA, 15 bp, Homo sapiens
ctgcaaacaacagcg

SEQ ID NO: 429315 - DNA, 15 bp, Homo sapiens
tctgcaaacaacagc

SEQ ID NO: 429316 - DNA, 15 bp, Homo sapiens
gtctgcaaacaacag

SEQ ID NO: 429317 - DNA, 15 bp, Homo sapiens
ggtctgcaaacaaca

SEQ ID NO: 429318 - DNA, 15 bp, Homo sapiens
tggtctgcaaacaac

SEQ ID NO: 429319 - DNA, 15 bp, Homo sapiens
ctggtctgcaaacaa

SEQ ID NO: 429320 - DNA, 15 bp, Homo sapiens
gctggtctgcaaaca

SEQ ID NO: 429321 - DNA, 15 bp, Homo sapiens
tgctggtctgcaaac

SEQ ID NO: 429322 - DNA, 15 bp, Homo sapiens
ttgctggtctgcaaa

SEQ ID NO: 429323 - DNA, 15 bp, Homo sapiens
attgctggtctgcaa

SEQ ID NO: 429324 - DNA, 15 bp, Homo sapiens
tattgctggtctgca

SEQ ID NO: 429325 - DNA, 15 bp, Homo sapiens
atattgctggtctgc

SEQ ID NO: 429326 - DNA, 15 bp, Homo sapiens
gatattgctggtctg

SEQ ID NO: 429327 - DNA, 15 bp, Homo sapiens
tgatattgctggtct

SEQ ID NO: 429328 - DNA, 15 bp, Homo sapiens
ctgatattgctggtc

SEQ ID NO: 429329 - DNA, 15 bp, Homo sapiens
gctgatattgctggt

SEQ ID NO: 429330 - DNA, 15 bp, Homo sapiens
tgctgatattgctgg

SEQ ID NO: 429331 - DNA, 15 bp, Homo sapiens
atgctgatattgctg

SEQ ID NO: 429332 - DNA, 15 bp, Homo sapiens
gatgctgatattgct

SEQ ID NO: 429333 - DNA, 15 bp, Homo sapiens
cgatgctgatattgc

SEQ ID NO: 429334 - DNA, 15 bp, Homo sapiens
gcgatgctgatattg

SEQ ID NO: 429335 - DNA, 15 bp, Homo sapiens
agcgatgctgatatt

SEQ ID NO: 429336 - DNA, 15 bp, Homo sapiens
aagcgatgctgatat

SEQ ID NO: 429337 - DNA, 15 bp, Homo sapiens
caagcgatgctgata

SEQ ID NO: 429338 - DNA, 15 bp, Homo sapiens
tcaagcgatgctgat

SEQ ID NO: 429339 - DNA, 15 bp, Homo sapiens
ctcaagcgatgctga

SEQ ID NO: 429340 - DNA, 15 bp, Homo sapiens
tctcaagcgatgctg

SEQ ID NO: 429341 - DNA, 15 bp, Homo sapiens
ctctcaagcgatgct

SEQ ID NO: 429342 - DNA, 15 bp, Homo sapiens
gctctcaagcgatgc

SEQ ID NO: 429343 - DNA, 15 bp, Homo sapiens
agctctcaagcgatg

SEQ ID NO: 429344 - DNA, 15 bp, Homo sapiens
aagctctcaagcgat

SEQ ID NO: 429345 - DNA, 15 bp, Homo sapiens
caagctctcaagcga

SEQ ID NO: 429346 - DNA, 15 bp, Homo sapiens
acaagctctcaagcg

SEQ ID NO: 429347 - DNA, 15 bp, Homo sapiens
aacaagctctcaagc

SEQ ID NO: 429348 - DNA, 15 bp, Homo sapiens
taacaagctctcaag

SEQ ID NO: 429349 - DNA, 15 bp, Homo sapiens
gtaacaagctctcaa

SEQ ID NO: 429350 - DNA, 15 bp, Homo sapiens
tgtaacaagctctca

SEQ ID NO: 429351 - DNA, 15 bp, Homo sapiens
ttgtaacaagctctc

SEQ ID NO: 429352 - DNA, 15 bp, Homo sapiens
tttgtaacaagctct

SEQ ID NO: 429353 - DNA, 15 bp, Homo sapiens
ctttgtaacaagctc

SEQ ID NO: 429354 - DNA, 15 bp, Homo sapiens
cctttgtaacaagct

SEQ ID NO: 429355 - DNA, 15 bp, Homo sapiens
gcctttgtaacaagc

SEQ ID NO: 429356 - DNA, 15 bp, Homo sapiens
tgcctttgtaacaag

SEQ ID NO: 429357 - DNA, 15 bp, Homo sapiens
ctgcctttgtaacaa

SEQ ID NO: 429358 - DNA, 15 bp, Homo sapiens
cctgcctttgtaaca

SEQ ID NO: 429359 - DNA, 15 bp, Homo sapiens
gcctgcctttgtaac

SEQ ID NO: 429360 - DNA, 15 bp, Homo sapiens
agcctgcctttgtaa

SEQ ID NO: 429361 - DNA, 15 bp, Homo sapiens
gagcctgcctttgta

SEQ ID NO: 429362 - DNA, 15 bp, Homo sapiens
agagcctgcctttgt

SEQ ID NO: 429363 - DNA, 15 bp, Homo sapiens
gagagcctgcctttg

SEQ ID NO: 429364 - DNA, 15 bp, Homo sapiens
tgagagcctgccttt

SEQ ID NO: 429365 - DNA, 15 bp, Homo sapiens
ctgagagcctgcctt

SEQ ID NO: 429366 - DNA, 15 bp, Homo sapiens
tctgagagcctgcct

SEQ ID NO: 429367 - DNA, 15 bp, Homo sapiens
gtctgagagcctgcc

SEQ ID NO: 429368 - DNA, 15 bp, Homo sapiens
agtctgagagcctgc

SEQ ID NO: 429369 - DNA, 15 bp, Homo sapiens
gagtctgagagcctg

SEQ ID NO: 429370 - DNA, 15 bp, Homo sapiens
ggagtctgagagcct

SEQ ID NO: 429371 - DNA, 15 bp, Homo sapiens
tggagtctgagagcc

SEQ ID NO: 429372 - DNA, 15 bp, Homo sapiens
gtggagtctgagagc

SEQ ID NO: 429373 - DNA, 15 bp, Homo sapiens
ggtggagtctgagag

SEQ ID NO: 429374 - DNA, 15 bp, Homo sapiens
gggtggagtctgaga

SEQ ID NO: 429375 - DNA, 15 bp, Homo sapiens
tgggtggagtctgag

SEQ ID NO: 429376 - DNA, 15 bp, Homo sapiens
ttgggtggagtctga

SEQ ID NO: 429377 - DNA, 15 bp, Homo sapiens
cttgggtggagtctg

SEQ ID NO: 429378 - DNA, 15 bp, Homo sapiens
tcttgggtggagtct

SEQ ID NO: 429379 - DNA, 15 bp, Homo sapiens
gtcttgggtggagtc

SEQ ID NO: 429380 - DNA, 15 bp, Homo sapiens
ggtcttgggtggagt

SEQ ID NO: 429381 - DNA, 15 bp, Homo sapiens
gggtcttgggtggag

SEQ ID NO: 429382 - DNA, 15 bp, Homo sapiens
agggtcttgggtgga

SEQ ID NO: 429383 - DNA, 15 bp, Homo sapiens
gagggtcttgggtgg

SEQ ID NO: 429384 - DNA, 15 bp, Homo sapiens
agagggtcttgggtg

SEQ ID NO: 429385 - DNA, 15 bp, Homo sapiens
tagagggtcttgggt

SEQ ID NO: 429386 - DNA, 15 bp, Homo sapiens
ttagagggtcttggg

SEQ ID NO: 429387 - DNA, 15 bp, Homo sapiens
tttagagggtcttgg

SEQ ID NO: 429388 - DNA, 15 bp, Homo sapiens
ctttagagggtcttg

SEQ ID NO: 429389 - DNA, 15 bp, Homo sapiens
gctttagagggtctt

SEQ ID NO: 429390 - DNA, 15 bp, Homo sapiens
tgctttagagggtct

SEQ ID NO: 429391 - DNA, 15 bp, Homo sapiens
ctgctttagagggtc

SEQ ID NO: 429392 - DNA, 15 bp, Homo sapiens
tctgctttagagggt

SEQ ID NO: 429393 - DNA, 15 bp, Homo sapiens
ttctgctttagaggg

SEQ ID NO: 429394 - DNA, 15 bp, Homo sapiens
attctgctttagagg

SEQ ID NO: 429395 - DNA, 15 bp, Homo sapiens
aattctgctttagag

SEQ ID NO: 429396 - DNA, 15 bp, Homo sapiens
aaattctgctttaga

SEQ ID NO: 429397 - DNA, 15 bp, Homo sapiens
caaattctgctttag

SEQ ID NO: 429398 - DNA, 15 bp, Homo sapiens
tcaaattctgcttta

SEQ ID NO: 429399 - DNA, 15 bp, Homo sapiens
ttcaaattctgcttt

SEQ ID NO: 429400 - DNA, 15 bp, Homo sapiens
attcaaattctgctt

SEQ ID NO: 429401 - DNA, 15 bp, Homo sapiens
aattcaaattctgct

SEQ ID NO: 429402 - DNA, 15 bp, Homo sapiens
caattcaaattctgc

SEQ ID NO: 429403 - DNA, 15 bp, Homo sapiens
acaattcaaattctg

SEQ ID NO: 429404 - DNA, 15 bp, Homo sapiens
tacaattcaaattct

SEQ ID NO: 429405 - DNA, 15 bp, Homo sapiens
ttacaattcaaattc

SEQ ID NO: 429406 - DNA, 15 bp, Homo sapiens
gttacaattcaaatt

SEQ ID NO: 429407 - DNA, 15 bp, Homo sapiens
tgttacaattcaaat

SEQ ID NO: 429408 - DNA, 15 bp, Homo sapiens
ttgttacaattcaaa

SEQ ID NO: 429409 - DNA, 15 bp, Homo sapiens
tttgttacaattcaa

SEQ ID NO: 429410 - DNA, 15 bp, Homo sapiens
atttgttacaattca

SEQ ID NO: 429411 - DNA, 15 bp, Homo sapiens
gatttgttacaattc

SEQ ID NO: 429412 - DNA, 15 bp, Homo sapiens
agatttgttacaatt

SEQ ID NO: 429413 - DNA, 15 bp, Homo sapiens
aagatttgttacaat

SEQ ID NO: 429414 - DNA, 15 bp, Homo sapiens
aaagatttgttacaa

SEQ ID NO: 429415 - DNA, 15 bp, Homo sapiens
aaaagatttgttaca

SEQ ID NO: 429416 - DNA, 15 bp, Homo sapiens
aaaaagatttgttac

SEQ ID NO: 429417 - DNA, 15 bp, Homo sapiens
gaaaaagatttgtta

SEQ ID NO: 429418 - DNA, 15 bp, Homo sapiens
agaaaaagatttgtt

SEQ ID NO: 429419 - DNA, 15 bp, Homo sapiens
aagaaaaagatttgt

SEQ ID NO: 429420 - DNA, 15 bp, Homo sapiens
aaagaaaaagatttg

SEQ ID NO: 429421 - DNA, 15 bp, Homo sapiens
aaaagaaaaagattt

SEQ ID NO: 429422 - DNA, 15 bp, Homo sapiens
aaaaagaaaaagatt

SEQ ID NO: 429423 - DNA, 15 bp, Homo sapiens
aaaaaagaaaaagat

SEQ ID NO: 429424 - DNA, 15 bp, Homo sapiens
taaaaaaaaaaagaa

SEQ ID NO: 429425 - DNA, 15 bp, Homo sapiens
ttaaaaaaaaaaaga

SEQ ID NO: 429426 - DNA, 15 bp, Homo sapiens
tttaaaaaaaaaaag

SEQ ID NO: 429427 - DNA, 15 bp, Homo sapiens
gtttaaaaaaaaaaa

SEQ ID NO: 429428 - DNA, 15 bp, Homo sapiens
tgtttaaaaaaaaaa

SEQ ID NO: 429429 - DNA, 15 bp, Homo sapiens
ctgtttaaaaaaaaa

SEQ ID NO: 429430 - DNA, 15 bp, Homo sapiens
cctgtttaaaaaaaa

SEQ ID NO: 429431 - DNA, 15 bp, Homo sapiens
ccctgtttaaaaaaa

SEQ ID NO: 429432 - DNA, 15 bp, Homo sapiens
cccctgtttaaaaaa

SEQ ID NO: 429433 - DNA, 15 bp, Homo sapiens
ccccctgtttaaaaa

SEQ ID NO: 429434 - DNA, 15 bp, Homo sapiens
accccctgtttaaaa

SEQ ID NO: 429435 - DNA, 15 bp, Homo sapiens
caccccctgtttaaa

SEQ ID NO: 429436 - DNA, 15 bp, Homo sapiens
acaccccctgtttaa

SEQ ID NO: 429437 - DNA, 15 bp, Homo sapiens
gacaccccctgttta

SEQ ID NO: 429438 - DNA, 15 bp, Homo sapiens
tgacaccccctgttt

SEQ ID NO: 429439 - DNA, 15 bp, Homo sapiens
gtgacaccccctgtt

SEQ ID NO: 429440 - DNA, 15 bp, Homo sapiens
agtgacaccccctgt

SEQ ID NO: 429441 - DNA, 15 bp, Homo sapiens
cagtgacaccccctg

SEQ ID NO: 429442 - DNA, 15 bp, Homo sapiens
acagtgacaccccct

SEQ ID NO: 429443 - DNA, 15 bp, Homo sapiens
cacagtgacaccccc

SEQ ID NO: 429444 - DNA, 15 bp, Homo sapiens
acacagtgacacccc

SEQ ID NO: 429445 - DNA, 15 bp, Homo sapiens
gacacagtgacaccc

SEQ ID NO: 429446 - DNA, 15 bp, Homo sapiens
tgacacagtgacacc

SEQ ID NO: 429447 - DNA, 15 bp, Homo sapiens
atgacacagtgacac

SEQ ID NO: 429448 - DNA, 15 bp, Homo sapiens
gatgacacagtgaca

SEQ ID NO: 429449 - DNA, 15 bp, Homo sapiens
ggatgacacagtgac

SEQ ID NO: 429450 - DNA, 15 bp, Homo sapiens
tggatgacacagtga

SEQ ID NO: 429451 - DNA, 15 bp, Homo sapiens
ctggatgacacagtg

SEQ ID NO: 429452 - DNA, 15 bp, Homo sapiens
cctggatgacacagt

SEQ ID NO: 429453 - DNA, 15 bp, Homo sapiens
gcctggatgacacag

SEQ ID NO: 429454 - DNA, 15 bp, Homo sapiens
agcctggatgacaca

SEQ ID NO: 429455 - DNA, 15 bp, Homo sapiens
cagcctggatgacac

SEQ ID NO: 429456 - DNA, 15 bp, Homo sapiens
ccactccagcctgga

SEQ ID NO: 429457 - DNA, 15 bp, Homo sapiens
accactccagcctgg

SEQ ID NO: 429458 - DNA, 15 bp, Homo sapiens
caccactccagcctg

SEQ ID NO: 429459 - DNA, 15 bp, Homo sapiens
gcaccactccagcct

SEQ ID NO: 429460 - DNA, 15 bp, Homo sapiens
tgcaccactccagcc

SEQ ID NO: 429461 - DNA, 15 bp, Homo sapiens
ctgcaccactccagc

SEQ ID NO: 429462 - DNA, 15 bp, Homo sapiens
actgcaccactccag

SEQ ID NO: 429463 - DNA, 15 bp, Homo sapiens
cactgcaccactcca

SEQ ID NO: 429464 - DNA, 15 bp, Homo sapiens
tcactgcaccactcc

SEQ ID NO: 429465 - DNA, 15 bp, Homo sapiens
gtcactgcaccactc

SEQ ID NO: 429466 - DNA, 15 bp, Homo sapiens
tgtcactgcaccact

SEQ ID NO: 429467 - DNA, 15 bp, Homo sapiens
gtgtcactgcaccac

SEQ ID NO: 429468 - DNA, 15 bp, Homo sapiens
tgtgtcactgcacca

SEQ ID NO: 429469 - DNA, 15 bp, Homo sapiens
ttgtgtcactgcacc

SEQ ID NO: 429470 - DNA, 15 bp, Homo sapiens
gttgtgtcactgcac

SEQ ID NO: 429471 - DNA, 15 bp, Homo sapiens
ggttgtgtcactgca

SEQ ID NO: 429472 - DNA, 15 bp, Homo sapiens
tggttgtgtcactgc

SEQ ID NO: 429473 - DNA, 15 bp, Homo sapiens
gtggttgtgtcactg

SEQ ID NO: 429474 - DNA, 15 bp, Homo sapiens
cgtggttgtgtcact

SEQ ID NO: 429475 - DNA, 15 bp, Homo sapiens
ccgtggttgtgtcac

SEQ ID NO: 429476 - DNA, 15 bp, Homo sapiens
gccgtggttgtgtca

SEQ ID NO: 429477 - DNA, 15 bp, Homo sapiens
agccgtggttgtgtc

SEQ ID NO: 429478 - DNA, 15 bp, Homo sapiens
gagccgtggttgtgt

SEQ ID NO: 429479 - DNA, 15 bp, Homo sapiens
tgagccgtggttgtg

SEQ ID NO: 429480 - DNA, 15 bp, Homo sapiens
gtgagccgtggttgt

SEQ ID NO: 429481 - DNA, 15 bp, Homo sapiens
agtgagccgtggttg

SEQ ID NO: 429482 - DNA, 15 bp, Homo sapiens
cagtgagccgtggtt

SEQ ID NO: 429483 - DNA, 15 bp, Homo sapiens
gcagtgagccgtggt

SEQ ID NO: 429484 - DNA, 15 bp, Homo sapiens
tgcagtgagccgtgg

SEQ ID NO: 429485 - DNA, 15 bp, Homo sapiens
ctgcagtgagccgtg

SEQ ID NO: 429486 - DNA, 15 bp, Homo sapiens
gctgcagtgagccgt

SEQ ID NO: 429487 - DNA, 15 bp, Homo sapiens
ggctgcagtgagccg

SEQ ID NO: 429488 - DNA, 15 bp, Homo sapiens
aggctgcagtgagcc

SEQ ID NO: 429489 - DNA, 15 bp, Homo sapiens
caggctgcagtgagc

SEQ ID NO: 429490 - DNA, 15 bp, Homo sapiens
ccaggctgcagtgag

SEQ ID NO: 429491 - DNA, 15 bp, Homo sapiens
accaggctgcagtga

SEQ ID NO: 429492 - DNA, 15 bp, Homo sapiens
taccaggctgcagtg

SEQ ID NO: 429493 - DNA, 15 bp, Homo sapiens
gtaccaggctgcagt

SEQ ID NO: 429494 - DNA, 15 bp, Homo sapiens
agtaccaggctgcag

SEQ ID NO: 429495 - DNA, 15 bp, Homo sapiens
gagtaccaggctgca

SEQ ID NO: 429496 - DNA, 15 bp, Homo sapiens
ggagtaccaggctgc

SEQ ID NO: 429497 - DNA, 15 bp, Homo sapiens
gggagtaccaggctg

SEQ ID NO: 429498 - DNA, 15 bp, Homo sapiens
tgggagtaccaggct

SEQ ID NO: 429499 - DNA, 15 bp, Homo sapiens
ctgggagtaccaggc

SEQ ID NO: 429500 - DNA, 15 bp, Homo sapiens
cctgggagtaccagg

SEQ ID NO: 429501 - DNA, 15 bp, Homo sapiens
gcctgggagtaccag

SEQ ID NO: 429502 - DNA, 15 bp, Homo sapiens
agcctgggagtacca

SEQ ID NO: 429503 - DNA, 15 bp, Homo sapiens
tagcctgggagtacc

SEQ ID NO: 429504 - DNA, 15 bp, Homo sapiens
ttagcctgggagtac

SEQ ID NO: 429505 - DNA, 15 bp, Homo sapiens
tttagcctgggagta

SEQ ID NO: 429506 - DNA, 15 bp, Homo sapiens
ctttagcctgggagt

SEQ ID NO: 429507 - DNA, 15 bp, Homo sapiens
gctttagcctgggag

SEQ ID NO: 429508 - DNA, 15 bp, Homo sapiens
agctttagcctggga

SEQ ID NO: 429509 - DNA, 15 bp, Homo sapiens
tagctttagcctggg

SEQ ID NO: 429510 - DNA, 15 bp, Homo sapiens
atagctttagcctgg

SEQ ID NO: 429511 - DNA, 15 bp, Homo sapiens
gatagctttagcctg

SEQ ID NO: 429512 - DNA, 15 bp, Homo sapiens
ggatagctttagcct

SEQ ID NO: 429513 - DNA, 15 bp, Homo sapiens
aggatagctttagcc

SEQ ID NO: 429514 - DNA, 15 bp, Homo sapiens
gaggatagctttagc

SEQ ID NO: 429515 - DNA, 15 bp, Homo sapiens
ggaggatagctttag

SEQ ID NO: 429516 - DNA, 15 bp, Homo sapiens
gggaggatagcttta

SEQ ID NO: 429517 - DNA, 15 bp, Homo sapiens
tgggaggatagcttt

SEQ ID NO: 429518 - DNA, 15 bp, Homo sapiens
gtgggaggatagctt

SEQ ID NO: 429519 - DNA, 15 bp, Homo sapiens
ggtgggaggatagct

SEQ ID NO: 429520 - DNA, 15 bp, Homo sapiens
aggtgggaggatagc

SEQ ID NO: 429521 - DNA, 15 bp, Homo sapiens
aaggtgggaggatag

SEQ ID NO: 429522 - DNA, 15 bp, Homo sapiens
taaggtgggaggata

SEQ ID NO: 429523 - DNA, 15 bp, Homo sapiens
ctaaggtgggaggat

SEQ ID NO: 429524 - DNA, 15 bp, Homo sapiens
gctaaggtgggagga

SEQ ID NO: 429525 - DNA, 15 bp, Homo sapiens
ggctaaggtgggagg

SEQ ID NO: 429526 - DNA, 15 bp, Homo sapiens
aggctaaggtgggag

SEQ ID NO: 429527 - DNA, 15 bp, Homo sapiens
gaggctaaggtggga

SEQ ID NO: 429528 - DNA, 15 bp, Homo sapiens
ggaggctaaggtggg

SEQ ID NO: 429529 - DNA, 15 bp, Homo sapiens
gggaggctaaggtgg

SEQ ID NO: 429530 - DNA, 15 bp, Homo sapiens
cgggaggctaaggtg

SEQ ID NO: 429531 - DNA, 15 bp, Homo sapiens
tcgggaggctaaggt

SEQ ID NO: 429532 - DNA, 15 bp, Homo sapiens
ctcgggaggctaagg

SEQ ID NO: 429533 - DNA, 15 bp, Homo sapiens
actcgggaggctaag

SEQ ID NO: 429534 - DNA, 15 bp, Homo sapiens
tactcgggaggctaa

SEQ ID NO: 429535 - DNA, 15 bp, Homo sapiens
ctactcgggaggcta

SEQ ID NO: 429536 - DNA, 15 bp, Homo sapiens
gttccagctactcgg

SEQ ID NO: 429537 - DNA, 15 bp, Homo sapiens
agttccagctactcg

SEQ ID NO: 429538 - DNA, 15 bp, Homo sapiens
tagttccagctactc

SEQ ID NO: 429539 - DNA, 15 bp, Homo sapiens
gtagttccagctact

SEQ ID NO: 429540 - DNA, 15 bp, Homo sapiens
tgtagttccagctac

SEQ ID NO: 429541 - DNA, 15 bp, Homo sapiens
ctgtagttccagcta

SEQ ID NO: 429542 - DNA, 15 bp, Homo sapiens
cctgtagttccagct

SEQ ID NO: 429543 - DNA, 15 bp, Homo sapiens
gcctgtagttccagc

SEQ ID NO: 429544 - DNA, 15 bp, Homo sapiens
tgcctgtagttccag

SEQ ID NO: 429545 - DNA, 15 bp, Homo sapiens
gtgcctgtagttcca

SEQ ID NO: 429546 - DNA, 15 bp, Homo sapiens
tgtgcctgtagttcc

SEQ ID NO: 429547 - DNA, 15 bp, Homo sapiens
gtgtgcctgtagttc

SEQ ID NO: 429548 - DNA, 15 bp, Homo sapiens
tgtgtgcctgtagtt

SEQ ID NO: 429549 - DNA, 15 bp, Homo sapiens
gtgtgtgcctgtagt

SEQ ID NO: 429550 - DNA, 15 bp, Homo sapiens
agtgtgtgcctgtag

SEQ ID NO: 429551 - DNA, 15 bp, Homo sapiens
tagtgtgtgcctgta

SEQ ID NO: 429552 - DNA, 15 bp, Homo sapiens
gtagtgtgtgcctgt

SEQ ID NO: 429553 - DNA, 15 bp, Homo sapiens
ggtagtgtgtgcctg

SEQ ID NO: 429554 - DNA, 15 bp, Homo sapiens
tggtagtgtgtgcct

SEQ ID NO: 429555 - DNA, 15 bp, Homo sapiens
gtggtagtgtgtgcc

SEQ ID NO: 429556 - DNA, 15 bp, Homo sapiens
tgtggtagtgtgtgc

SEQ ID NO: 429557 - DNA, 15 bp, Homo sapiens
gtgtggtagtgtgtg

SEQ ID NO: 429558 - DNA, 15 bp, Homo sapiens
cgtgtggtagtgtgt

SEQ ID NO: 429559 - DNA, 15 bp, Homo sapiens
acgtgtggtagtgtg

SEQ ID NO: 429560 - DNA, 15 bp, Homo sapiens
cacgtgtggtagtgt

SEQ ID NO: 429561 - DNA, 15 bp, Homo sapiens
ccacgtgtggtagtg

SEQ ID NO: 429562 - DNA, 15 bp, Homo sapiens
gccacgtgtggtagt

SEQ ID NO: 429563 - DNA, 15 bp, Homo sapiens
agccacgtgtggtag

SEQ ID NO: 429564 - DNA, 15 bp, Homo sapiens
tagccacgtgtggta

SEQ ID NO: 429565 - DNA, 15 bp, Homo sapiens
ttagccacgtgtggt

SEQ ID NO: 429566 - DNA, 15 bp, Homo sapiens
attagccacgtgtgg

SEQ ID NO: 429567 - DNA, 15 bp, Homo sapiens
aattagccacgtgtg

SEQ ID NO: 429568 - DNA, 15 bp, Homo sapiens
aaattagccacgtgt

SEQ ID NO: 429569 - DNA, 15 bp, Homo sapiens
aaaattagccacgtg

SEQ ID NO: 429570 - DNA, 15 bp, Homo sapiens
aaaaattagccacgt

SEQ ID NO: 429571 - DNA, 15 bp, Homo sapiens
aaaaaattagccacg

SEQ ID NO: 429572 - DNA, 15 bp, Homo sapiens
aaaaaaattagccac

SEQ ID NO: 429573 - DNA, 15 bp, Homo sapiens
aaaaaaaattagcca

SEQ ID NO: 429574 - DNA, 15 bp, Homo sapiens
taaaaaaaattagcc

SEQ ID NO: 429575 - DNA, 15 bp, Homo sapiens
ataaaaaaaattagc

SEQ ID NO: 429576 - DNA, 15 bp, Homo sapiens
aataaaaaaaattag

SEQ ID NO: 429577 - DNA, 15 bp, Homo sapiens
aaataaaaaaaatta

SEQ ID NO: 429578 - DNA, 15 bp, Homo sapiens
aaaataaaaaaaatt

SEQ ID NO: 429579 - DNA, 15 bp, Homo sapiens
aaaaataaaaaaaat

SEQ ID NO: 429580 - DNA, 15 bp, Homo sapiens
taaaaataaaaaaaa

SEQ ID NO: 429581 - DNA, 15 bp, Homo sapiens
ttaaaaataaaaaaa

SEQ ID NO: 429582 - DNA, 15 bp, Homo sapiens
attaaaaataaaaaa

SEQ ID NO: 429583 - DNA, 15 bp, Homo sapiens
aattaaaaataaaaa

SEQ ID NO: 429584 - DNA, 15 bp, Homo sapiens
aaattaaaaataaaa

SEQ ID NO: 429585 - DNA, 15 bp, Homo sapiens
aaaattaaaaataaa

SEQ ID NO: 429586 - DNA, 15 bp, Homo sapiens
taaaattaaaaataa

SEQ ID NO: 429587 - DNA, 15 bp, Homo sapiens
ataaaattaaaaata

SEQ ID NO: 429588 - DNA, 15 bp, Homo sapiens
cataaaattaaaaat

SEQ ID NO: 429589 - DNA, 15 bp, Homo sapiens
acataaaattaaaaa

SEQ ID NO: 429590 - DNA, 15 bp, Homo sapiens
tacataaaattaaaa

SEQ ID NO: 429591 - DNA, 15 bp, Homo sapiens
ctacataaaattaaa

SEQ ID NO: 429592 - DNA, 15 bp, Homo sapiens
tctacataaaattaa

SEQ ID NO: 429593 - DNA, 15 bp, Homo sapiens
ctctacataaaatta

SEQ ID NO: 429594 - DNA, 15 bp, Homo sapiens
tctctacataaaatt

SEQ ID NO: 429595 - DNA, 15 bp, Homo sapiens
gtctctacataaaat

SEQ ID NO: 429596 - DNA, 15 bp, Homo sapiens
cgtctctacataaaa

SEQ ID NO: 429597 - DNA, 15 bp, Homo sapiens
ccgtctctacataaa

SEQ ID NO: 429598 - DNA, 15 bp, Homo sapiens
cccgtctctacataa

SEQ ID NO: 429599 - DNA, 15 bp, Homo sapiens
tcccgtctctacata

SEQ ID NO: 429600 - DNA, 15 bp, Homo sapiens
atcccgtctctacat

SEQ ID NO: 429601 - DNA, 15 bp, Homo sapiens
gatcccgtctctaca

SEQ ID NO: 429602 - DNA, 15 bp, Homo sapiens
agatcccgtctctac

SEQ ID NO: 429603 - DNA, 15 bp, Homo sapiens
aagatcccgtctcta

SEQ ID NO: 429604 - DNA, 15 bp, Homo sapiens
caagatcccgtctct

SEQ ID NO: 429605 - DNA, 15 bp, Homo sapiens
gcaagatcccgtctc

SEQ ID NO: 429606 - DNA, 15 bp, Homo sapiens
agcaagatcccgtct

SEQ ID NO: 429607 - DNA, 15 bp, Homo sapiens
tagcaagatcccgtc

SEQ ID NO: 429608 - DNA, 15 bp, Homo sapiens
atagcaagatcccgt

SEQ ID NO: 429609 - DNA, 15 bp, Homo sapiens
catagcaagatcccg

SEQ ID NO: 429610 - DNA, 15 bp, Homo sapiens
acatagcaagatccc

SEQ ID NO: 429611 - DNA, 15 bp, Homo sapiens
aacatagcaagatcc

SEQ ID NO: 429612 - DNA, 15 bp, Homo sapiens
caacatagcaagatc

SEQ ID NO: 429613 - DNA, 15 bp, Homo sapiens
gcaacatagcaagat

SEQ ID NO: 429614 - DNA, 15 bp, Homo sapiens
ggcaacatagcaaga

SEQ ID NO: 429615 - DNA, 15 bp, Homo sapiens
tggcaacatagcaag

SEQ ID NO: 429616 - DNA, 15 bp, Homo sapiens
ctggcaacatagcaa

SEQ ID NO: 429617 - DNA, 15 bp, Homo sapiens
cctggcaacatagca

SEQ ID NO: 429618 - DNA, 15 bp, Homo sapiens
acctggcaacatagc

SEQ ID NO: 429619 - DNA, 15 bp, Homo sapiens
gacctggcaacatag

SEQ ID NO: 429620 - DNA, 15 bp, Homo sapiens
agacctggcaacata

SEQ ID NO: 429621 - DNA, 15 bp, Homo sapiens
cagacctggcaacat

SEQ ID NO: 429622 - DNA, 15 bp, Homo sapiens
ccagacctggcaaca

SEQ ID NO: 429623 - DNA, 15 bp, Homo sapiens
accagacctggcaac

SEQ ID NO: 429624 - DNA, 15 bp, Homo sapiens
gaccagacctggcaa

SEQ ID NO: 429625 - DNA, 15 bp, Homo sapiens
agaccagacctggca

SEQ ID NO: 429626 - DNA, 15 bp, Homo sapiens
gagaccagacctggc

SEQ ID NO: 429627 - DNA, 15 bp, Homo sapiens
tgagaccagacctgg

SEQ ID NO: 429628 - DNA, 15 bp, Homo sapiens
ttgagaccagacctg

SEQ ID NO: 429629 - DNA, 15 bp, Homo sapiens
tttgagaccagacct

SEQ ID NO: 429630 - DNA, 15 bp, Homo sapiens
atttgagaccagacc

SEQ ID NO: 429631 - DNA, 15 bp, Homo sapiens
aatttgagaccagac

SEQ ID NO: 429632 - DNA, 15 bp, Homo sapiens
gaatttgagaccaga

SEQ ID NO: 429633 - DNA, 15 bp, Homo sapiens
ggaatttgagaccag

SEQ ID NO: 429634 - DNA, 15 bp, Homo sapiens
aggaatttgagacca

SEQ ID NO: 429635 - DNA, 15 bp, Homo sapiens
caggaatttgagacc

SEQ ID NO: 429636 - DNA, 15 bp, Homo sapiens
ccaggaatttgagac

SEQ ID NO: 429637 - DNA, 15 bp, Homo sapiens
tccaggaatttgaga

SEQ ID NO: 429638 - DNA, 15 bp, Homo sapiens
gtccaggaatttgag

SEQ ID NO: 429639 - DNA, 15 bp, Homo sapiens
agtccaggaatttga

SEQ ID NO: 429640 - DNA, 15 bp, Homo sapiens
gagtccaggaatttg

SEQ ID NO: 429641 - DNA, 15 bp, Homo sapiens
tgagtccaggaattt

SEQ ID NO: 429642 - DNA, 15 bp, Homo sapiens
ttgagtccaggaatt

SEQ ID NO: 429643 - DNA, 15 bp, Homo sapiens
cttgagtccaggaat

SEQ ID NO: 429644 - DNA, 15 bp, Homo sapiens
gcttgagtccaggaa

SEQ ID NO: 429645 - DNA, 15 bp, Homo sapiens
cgcttgagtccagga

SEQ ID NO: 429646 - DNA, 15 bp, Homo sapiens
tcgcttgagtccagg

SEQ ID NO: 429647 - DNA, 15 bp, Homo sapiens
atcgcttgagtccag

SEQ ID NO: 429648 - DNA, 15 bp, Homo sapiens
gatcgcttgagtcca

SEQ ID NO: 429649 - DNA, 15 bp, Homo sapiens
ggatcgcttgagtcc

SEQ ID NO: 429650 - DNA, 15 bp, Homo sapiens
aggatcgcttgagtc

SEQ ID NO: 429651 - DNA, 15 bp, Homo sapiens
gaggatcgcttgagt

SEQ ID NO: 429652 - DNA, 15 bp, Homo sapiens
gggaggatcgcttga

SEQ ID NO: 429653 - DNA, 15 bp, Homo sapiens
agggaggatcgcttg

SEQ ID NO: 429654 - DNA, 15 bp, Homo sapiens
tagggaggatcgctt

SEQ ID NO: 429655 - DNA, 15 bp, Homo sapiens
gtagggaggatcgct

SEQ ID NO: 429656 - DNA, 15 bp, Homo sapiens
agtagggaggatcgc

SEQ ID NO: 429657 - DNA, 15 bp, Homo sapiens
tagtagggaggatcg

SEQ ID NO: 429658 - DNA, 15 bp, Homo sapiens
ttagtagggaggatc

SEQ ID NO: 429659 - DNA, 15 bp, Homo sapiens
cttagtagggaggat

SEQ ID NO: 429660 - DNA, 15 bp, Homo sapiens
gcttagtagggagga

SEQ ID NO: 429661 - DNA, 15 bp, Homo sapiens
ggcttagtagggagg

SEQ ID NO: 429662 - DNA, 15 bp, Homo sapiens
aggcttagtagggag

SEQ ID NO: 429663 - DNA, 15 bp, Homo sapiens
gaggcttagtaggga

SEQ ID NO: 429664 - DNA, 15 bp, Homo sapiens
agaggcttagtaggg

SEQ ID NO: 429665 - DNA, 15 bp, Homo sapiens
gagaggcttagtagg

SEQ ID NO: 429666 - DNA, 15 bp, Homo sapiens
tgagaggcttagtag

SEQ ID NO: 429667 - DNA, 15 bp, Homo sapiens
ttgagaggcttagta

SEQ ID NO: 429668 - DNA, 15 bp, Homo sapiens
tttgagaggcttagt

SEQ ID NO: 429669 - DNA, 15 bp, Homo sapiens
atttgagaggcttag

SEQ ID NO: 429670 - DNA, 15 bp, Homo sapiens
aatttgagaggctta

SEQ ID NO: 429671 - DNA, 15 bp, Homo sapiens
caatttgagaggctt

SEQ ID NO: 429672 - DNA, 15 bp, Homo sapiens
gcaatttgagaggct

SEQ ID NO: 429673 - DNA, 15 bp, Homo sapiens
agcaatttgagaggc

SEQ ID NO: 429674 - DNA, 15 bp, Homo sapiens
cagcaatttgagagg

SEQ ID NO: 429675 - DNA, 15 bp, Homo sapiens
ccagcaatttgagag

SEQ ID NO: 429676 - DNA, 15 bp, Homo sapiens
cccagcaatttgaga

SEQ ID NO: 429677 - DNA, 15 bp, Homo sapiens
tcccagcaatttgag

SEQ ID NO: 429678 - DNA, 15 bp, Homo sapiens
atcccagcaatttga

SEQ ID NO: 429679 - DNA, 15 bp, Homo sapiens
aatcccagcaatttg

SEQ ID NO: 429680 - DNA, 15 bp, Homo sapiens
taatcccagcaattt

SEQ ID NO: 429681 - DNA, 15 bp, Homo sapiens
ataatcccagcaatt

SEQ ID NO: 429682 - DNA, 15 bp, Homo sapiens
tataatcccagcaat

SEQ ID NO: 429683 - DNA, 15 bp, Homo sapiens
ctataatcccagcaa

SEQ ID NO: 429684 - DNA, 15 bp, Homo sapiens
tgcctataatcccag

SEQ ID NO: 429685 - DNA, 15 bp, Homo sapiens
atgcctataatccca

SEQ ID NO: 429686 - DNA, 15 bp, Homo sapiens
tatgcctataatccc

SEQ ID NO: 429687 - DNA, 15 bp, Homo sapiens
ttatgcctataatcc

SEQ ID NO: 429688 - DNA, 15 bp, Homo sapiens
cttatgcctataatc

SEQ ID NO: 429689 - DNA, 15 bp, Homo sapiens
gcttatgcctataat

SEQ ID NO: 429690 - DNA, 15 bp, Homo sapiens
ggcttatgcctataa

SEQ ID NO: 429691 - DNA, 15 bp, Homo sapiens
tggcttatgcctata

SEQ ID NO: 429692 - DNA, 15 bp, Homo sapiens
gtggcttatgcctat

SEQ ID NO: 429693 - DNA, 15 bp, Homo sapiens
ggtggcttatgccta

SEQ ID NO: 429694 - DNA, 15 bp, Homo sapiens
gtggtggcttatgcc

SEQ ID NO: 429695 - DNA, 15 bp, Homo sapiens
tgtggtggcttatgc

SEQ ID NO: 429696 - DNA, 15 bp, Homo sapiens
ttgtggtggcttatg

SEQ ID NO: 429697 - DNA, 15 bp, Homo sapiens
gttgtggtggcttat

SEQ ID NO: 429698 - DNA, 15 bp, Homo sapiens
agttgtggtggctta

SEQ ID NO: 429699 - DNA, 15 bp, Homo sapiens
cagttgtggtggctt

SEQ ID NO: 429700 - DNA, 15 bp, Homo sapiens
ccagttgtggtggct

SEQ ID NO: 429701 - DNA, 15 bp, Homo sapiens
gccagttgtggtggc

SEQ ID NO: 429702 - DNA, 15 bp, Homo sapiens
ggccagttgtggtgg

SEQ ID NO: 429703 - DNA, 15 bp, Homo sapiens
gggccagttgtggtg

SEQ ID NO: 429704 - DNA, 15 bp, Homo sapiens
tgggccagttgtggt

SEQ ID NO: 429705 - DNA, 15 bp, Homo sapiens
ttgggccagttgtgg

SEQ ID NO: 429706 - DNA, 15 bp, Homo sapiens
tttgggccagttgtg

SEQ ID NO: 429707 - DNA, 15 bp, Homo sapiens
atttgggccagttgt

SEQ ID NO: 429708 - DNA, 15 bp, Homo sapiens
gatttgggccagttg

SEQ ID NO: 429709 - DNA, 15 bp, Homo sapiens
agatttgggccagtt

SEQ ID NO: 429710 - DNA, 15 bp, Homo sapiens
aagatttgggccagt

SEQ ID NO: 429711 - DNA, 15 bp, Homo sapiens
aaagatttgggccag

SEQ ID NO: 429712 - DNA, 15 bp, Homo sapiens
taaagatttgggcca

SEQ ID NO: 429713 - DNA, 15 bp, Homo sapiens
ctaaagatttgggcc

SEQ ID NO: 429714 - DNA, 15 bp, Homo sapiens
cctaaagatttgggc

SEQ ID NO: 429715 - DNA, 15 bp, Homo sapiens
acctaaagatttggg

SEQ ID NO: 429716 - DNA, 15 bp, Homo sapiens
gacctaaagatttgg

SEQ ID NO: 429717 - DNA, 15 bp, Homo sapiens
tgacctaaagatttg

SEQ ID NO: 429718 - DNA, 15 bp, Homo sapiens
atgacctaaagattt

SEQ ID NO: 429719 - DNA, 15 bp, Homo sapiens
aatgacctaaagatt

SEQ ID NO: 429720 - DNA, 15 bp, Homo sapiens
gaatgacctaaagat

SEQ ID NO: 429721 - DNA, 15 bp, Homo sapiens
tgaatgacctaaaga

SEQ ID NO: 429722 - DNA, 15 bp, Homo sapiens
atgaatgacctaaag

SEQ ID NO: 429723 - DNA, 15 bp, Homo sapiens
tatgaatgacctaaa

SEQ ID NO: 429724 - DNA, 15 bp, Homo sapiens
atatgaatgacctaa

SEQ ID NO: 429725 - DNA, 15 bp, Homo sapiens
catatgaatgaccta

SEQ ID NO: 429726 - DNA, 15 bp, Homo sapiens
gcatatgaatgacct

SEQ ID NO: 429727 - DNA, 15 bp, Homo sapiens
tgcatatgaatgacc

SEQ ID NO: 429728 - DNA, 15 bp, Homo sapiens
gtgcatatgaatgac

SEQ ID NO: 429729 - DNA, 15 bp, Homo sapiens
tgtgcatatgaatga

SEQ ID NO: 429730 - DNA, 15 bp, Homo sapiens
atgtgcatatgaatg

SEQ ID NO: 429731 - DNA, 15 bp, Homo sapiens
aatgtgcatatgaat

SEQ ID NO: 429732 - DNA, 15 bp, Homo sapiens
taatgtgcatatgaa

SEQ ID NO: 429733 - DNA, 15 bp, Homo sapiens
gtaatgtgcatatga

SEQ ID NO: 429734 - DNA, 15 bp, Homo sapiens
tgtaatgtgcatatg

SEQ ID NO: 429735 - DNA, 15 bp, Homo sapiens
ctgtaatgtgcatat

SEQ ID NO: 429736 - DNA, 15 bp, Homo sapiens
tctgtaatgtgcata

SEQ ID NO: 429737 - DNA, 15 bp, Homo sapiens
ctctgtaatgtgcat

SEQ ID NO: 429738 - DNA, 15 bp, Homo sapiens
gctctgtaatgtgca

SEQ ID NO: 429739 - DNA, 15 bp, Homo sapiens
agctctgtaatgtgc

SEQ ID NO: 429740 - DNA, 15 bp, Homo sapiens
cagctctgtaatgtg

SEQ ID NO: 429741 - DNA, 15 bp, Homo sapiens
tcagctctgtaatgt

SEQ ID NO: 429742 - DNA, 15 bp, Homo sapiens
ttcagctctgtaatg

SEQ ID NO: 429743 - DNA, 15 bp, Homo sapiens
cttcagctctgtaat

SEQ ID NO: 429744 - DNA, 15 bp, Homo sapiens
gcttcagctctgtaa

SEQ ID NO: 429745 - DNA, 15 bp, Homo sapiens
agcttcagctctgta

SEQ ID NO: 429746 - DNA, 15 bp, Homo sapiens
tagcttcagctctgt

SEQ ID NO: 429747 - DNA, 15 bp, Homo sapiens
ttagcttcagctctg

SEQ ID NO: 429748 - DNA, 15 bp, Homo sapiens
cttagcttcagctct

SEQ ID NO: 429749 - DNA, 15 bp, Homo sapiens
gcttagcttcagctc

SEQ ID NO: 429750 - DNA, 15 bp, Homo sapiens
ggcttagcttcagct

SEQ ID NO: 429751 - DNA, 15 bp, Homo sapiens
tggcttagcttcagc

SEQ ID NO: 429752 - DNA, 15 bp, Homo sapiens
ctggcttagcttcag

SEQ ID NO: 429753 - DNA, 15 bp, Homo sapiens
cctggcttagcttca

SEQ ID NO: 429754 - DNA, 15 bp, Homo sapiens
gcctggcttagcttc

SEQ ID NO: 429755 - DNA, 15 bp, Homo sapiens
tgcctggcttagctt

SEQ ID NO: 429756 - DNA, 15 bp, Homo sapiens
gtgcctggcttagct

SEQ ID NO: 429757 - DNA, 15 bp, Homo sapiens
tgtgcctggcttagc

SEQ ID NO: 429758 - DNA, 15 bp, Homo sapiens
atgtgcctggcttag

SEQ ID NO: 429759 - DNA, 15 bp, Homo sapiens
aatgtgcctggctta

SEQ ID NO: 429760 - DNA, 15 bp, Homo sapiens
caatgtgcctggctt

SEQ ID NO: 429761 - DNA, 15 bp, Homo sapiens
ccaatgtgcctggct

SEQ ID NO: 429762 - DNA, 15 bp, Homo sapiens
gccaatgtgcctggc

SEQ ID NO: 429763 - DNA, 15 bp, Homo sapiens
tgccaatgtgcctgg

SEQ ID NO: 429764 - DNA, 15 bp, Homo sapiens
gtgccaatgtgcctg

SEQ ID NO: 429765 - DNA, 15 bp, Homo sapiens
cgtgccaatgtgcct

SEQ ID NO: 429766 - DNA, 15 bp, Homo sapiens
gcgtgccaatgtgcc

SEQ ID NO: 429767 - DNA, 15 bp, Homo sapiens
tgcgtgccaatgtgc

SEQ ID NO: 429768 - DNA, 15 bp, Homo sapiens
gtgcgtgccaatgtg

SEQ ID NO: 429769 - DNA, 15 bp, Homo sapiens
ggtgcgtgccaatgt

SEQ ID NO: 429770 - DNA, 15 bp, Homo sapiens
cggtgcgtgccaatg

SEQ ID NO: 429771 - DNA, 15 bp, Homo sapiens
ccggtgcgtgccaat

SEQ ID NO: 429772 - DNA, 15 bp, Homo sapiens
accggtgcgtgccaa

SEQ ID NO: 429773 - DNA, 15 bp, Homo sapiens
taccggtgcgtgcca

SEQ ID NO: 429774 - DNA, 15 bp, Homo sapiens
ctaccggtgcgtgcc

SEQ ID NO: 429775 - DNA, 15 bp, Homo sapiens
actaccggtgcgtgc

SEQ ID NO: 429776 - DNA, 15 bp, Homo sapiens
gactaccggtgcgtg

SEQ ID NO: 429777 - DNA, 15 bp, Homo sapiens
ggactaccggtgcgt

SEQ ID NO: 429778 - DNA, 15 bp, Homo sapiens
gggactaccggtgcg

SEQ ID NO: 429779 - DNA, 15 bp, Homo sapiens
tgggactaccggtgc

SEQ ID NO: 429780 - DNA, 15 bp, Homo sapiens
ttgggactaccggtg

SEQ ID NO: 429781 - DNA, 15 bp, Homo sapiens
gttgggactaccggt

SEQ ID NO: 429782 - DNA, 15 bp, Homo sapiens
agttgggactaccgg

SEQ ID NO: 429783 - DNA, 15 bp, Homo sapiens
tagttgggactaccg

SEQ ID NO: 429784 - DNA, 15 bp, Homo sapiens
gtagttgggactacc

SEQ ID NO: 429785 - DNA, 15 bp, Homo sapiens
agtagttgggactac

SEQ ID NO: 429786 - DNA, 15 bp, Homo sapiens
cagtagttgggacta

SEQ ID NO: 429787 - DNA, 15 bp, Homo sapiens
ccagtagttgggact

SEQ ID NO: 429788 - DNA, 15 bp, Homo sapiens
cccagtagttgggac

SEQ ID NO: 429789 - DNA, 15 bp, Homo sapiens
ccccagtagttggga

SEQ ID NO: 429790 - DNA, 15 bp, Homo sapiens
tccccagtagttggg

SEQ ID NO: 429791 - DNA, 15 bp, Homo sapiens
ttccccagtagttgg

SEQ ID NO: 429792 - DNA, 15 bp, Homo sapiens
cttccccagtagttg

SEQ ID NO: 429793 - DNA, 15 bp, Homo sapiens
gcttccccagtagtt

SEQ ID NO: 429794 - DNA, 15 bp, Homo sapiens
agcttccccagtagt

SEQ ID NO: 429795 - DNA, 15 bp, Homo sapiens
cagcttccccagtag

SEQ ID NO: 429796 - DNA, 15 bp, Homo sapiens
tcagcttccccagta

SEQ ID NO: 429797 - DNA, 15 bp, Homo sapiens
ctcagcttccccagt

SEQ ID NO: 429798 - DNA, 15 bp, Homo sapiens
cctcagcttccccag

SEQ ID NO: 429799 - DNA, 15 bp, Homo sapiens
tcctcagcttcccca

SEQ ID NO: 429800 - DNA, 15 bp, Homo sapiens
ctcctcagcttcccc

SEQ ID NO: 429801 - DNA, 15 bp, Homo sapiens
cctcctcagcttccc

SEQ ID NO: 429802 - DNA, 15 bp, Homo sapiens
acctcctcagcttcc

SEQ ID NO: 429803 - DNA, 15 bp, Homo sapiens
tacctcctcagcttc

SEQ ID NO: 429804 - DNA, 15 bp, Homo sapiens
ctacctcctcagctt

SEQ ID NO: 429805 - DNA, 15 bp, Homo sapiens
cctacctcctcagct

SEQ ID NO: 429806 - DNA, 15 bp, Homo sapiens
tcctacctcctcagc

SEQ ID NO: 429807 - DNA, 15 bp, Homo sapiens
atcctacctcctcag

SEQ ID NO: 429808 - DNA, 15 bp, Homo sapiens
aatcctacctcctca

SEQ ID NO: 429809 - DNA, 15 bp, Homo sapiens
aaatcctacctcctc

SEQ ID NO: 429810 - DNA, 15 bp, Homo sapiens
gaaatcctacctcct

SEQ ID NO: 429811 - DNA, 15 bp, Homo sapiens
agaaatcctacctcc

SEQ ID NO: 429812 - DNA, 15 bp, Homo sapiens
aagaaatcctacctc

SEQ ID NO: 429813 - DNA, 15 bp, Homo sapiens
caagaaatcctacct

SEQ ID NO: 429814 - DNA, 15 bp, Homo sapiens
tcaagaaatcctacc

SEQ ID NO: 429815 - DNA, 15 bp, Homo sapiens
ttcaagaaatcctac

SEQ ID NO: 429816 - DNA, 15 bp, Homo sapiens
gttcaagaaatccta

SEQ ID NO: 429817 - DNA, 15 bp, Homo sapiens
ggttcaagaaatcct

SEQ ID NO: 429818 - DNA, 15 bp, Homo sapiens
gggttcaagaaatcc

SEQ ID NO: 429819 - DNA, 15 bp, Homo sapiens
tgggttcaagaaatc

SEQ ID NO: 429820 - DNA, 15 bp, Homo sapiens
ctgggttcaagaaat

SEQ ID NO: 429821 - DNA, 15 bp, Homo sapiens
cctgggttcaagaaa

SEQ ID NO: 429822 - DNA, 15 bp, Homo sapiens
tcctgggttcaagaa

SEQ ID NO: 429823 - DNA, 15 bp, Homo sapiens
ctcctgggttcaaga

SEQ ID NO: 429824 - DNA, 15 bp, Homo sapiens
actcctgggttcaag

SEQ ID NO: 429825 - DNA, 15 bp, Homo sapiens
aactcctgggttcaa

SEQ ID NO: 429826 - DNA, 15 bp, Homo sapiens
aaactcctgggttca

SEQ ID NO: 429827 - DNA, 15 bp, Homo sapiens
caaactcctgggttc

SEQ ID NO: 429828 - DNA, 15 bp, Homo sapiens
tcaaactcctgggtt

SEQ ID NO: 429829 - DNA, 15 bp, Homo sapiens
ctcaaactcctgggt

SEQ ID NO: 429830 - DNA, 15 bp, Homo sapiens
cctcaaactcctggg

SEQ ID NO: 429831 - DNA, 15 bp, Homo sapiens
gcctcaaactcctgg

SEQ ID NO: 429832 - DNA, 15 bp, Homo sapiens
agcctcaaactcctg

SEQ ID NO: 429833 - DNA, 15 bp, Homo sapiens
cagcctcaaactcct

SEQ ID NO: 429834 - DNA, 15 bp, Homo sapiens
gcagcctcaaactcc

SEQ ID NO: 429835 - DNA, 15 bp, Homo sapiens
tgcagcctcaaactc

SEQ ID NO: 429836 - DNA, 15 bp, Homo sapiens
ctgcagcctcaaact

SEQ ID NO: 429837 - DNA, 15 bp, Homo sapiens
actgcagcctcaaac

SEQ ID NO: 429838 - DNA, 15 bp, Homo sapiens
cactgcagcctcaaa

SEQ ID NO: 429839 - DNA, 15 bp, Homo sapiens
tcactgcagcctcaa

SEQ ID NO: 429840 - DNA, 15 bp, Homo sapiens
ctcactgcagcctca

SEQ ID NO: 429841 - DNA, 15 bp, Homo sapiens
gctcactgcagcctc

SEQ ID NO: 429842 - DNA, 15 bp, Homo sapiens
agctcactgcagcct

SEQ ID NO: 429843 - DNA, 15 bp, Homo sapiens
tagctcactgcagcc

SEQ ID NO: 429844 - DNA, 15 bp, Homo sapiens
atagctcactgcagc

SEQ ID NO: 429845 - DNA, 15 bp, Homo sapiens
catagctcactgcag

SEQ ID NO: 429846 - DNA, 15 bp, Homo sapiens
tcatagctcactgca

SEQ ID NO: 429847 - DNA, 15 bp, Homo sapiens
gtcatagctcactgc

SEQ ID NO: 429848 - DNA, 15 bp, Homo sapiens
agtcatagctcactg

SEQ ID NO: 429849 - DNA, 15 bp, Homo sapiens
cagtcatagctcact

SEQ ID NO: 429850 - DNA, 15 bp, Homo sapiens
gcagtcatagctcac

SEQ ID NO: 429851 - DNA, 15 bp, Homo sapiens
cgcagtcatagctca

SEQ ID NO: 429852 - DNA, 15 bp, Homo sapiens
gcgcagtcatagctc

SEQ ID NO: 429853 - DNA, 15 bp, Homo sapiens
tgcgcagtcatagct

SEQ ID NO: 429854 - DNA, 15 bp, Homo sapiens
atgcgcagtcatagc

SEQ ID NO: 429855 - DNA, 15 bp, Homo sapiens
catgcgcagtcatag

SEQ ID NO: 429856 - DNA, 15 bp, Homo sapiens
acatgcgcagtcata

SEQ ID NO: 429857 - DNA, 15 bp, Homo sapiens
cacatgcgcagtcat

SEQ ID NO: 429858 - DNA, 15 bp, Homo sapiens
tcacatgcgcagtca

SEQ ID NO: 429859 - DNA, 15 bp, Homo sapiens
ttcacatgcgcagtc

SEQ ID NO: 429860 - DNA, 15 bp, Homo sapiens
attcacatgcgcagt

SEQ ID NO: 429861 - DNA, 15 bp, Homo sapiens
tattcacatgcgcag

SEQ ID NO: 429862 - DNA, 15 bp, Homo sapiens
ctattcacatgcgca

SEQ ID NO: 429863 - DNA, 15 bp, Homo sapiens
gctattcacatgcgc

SEQ ID NO: 429864 - DNA, 15 bp, Homo sapiens
ggctattcacatgcg

SEQ ID NO: 429865 - DNA, 15 bp, Homo sapiens
tggctattcacatgc

SEQ ID NO: 429866 - DNA, 15 bp, Homo sapiens
gtggctattcacatg

SEQ ID NO: 429867 - DNA, 15 bp, Homo sapiens
agtggctattcacat

SEQ ID NO: 429868 - DNA, 15 bp, Homo sapiens
cagtggctattcaca

SEQ ID NO: 429869 - DNA, 15 bp, Homo sapiens
gcagtggctattcac

SEQ ID NO: 429870 - DNA, 15 bp, Homo sapiens
tgcagtggctattca

SEQ ID NO: 429871 - DNA, 15 bp, Homo sapiens
atgcagtggctattc

SEQ ID NO: 429872 - DNA, 15 bp, Homo sapiens
aatgcagtggctatt

SEQ ID NO: 429873 - DNA, 15 bp, Homo sapiens
gaatgcagtggctat

SEQ ID NO: 429874 - DNA, 15 bp, Homo sapiens
ggaatgcagtggcta

SEQ ID NO: 429875 - DNA, 15 bp, Homo sapiens
aggaatgcagtggct

SEQ ID NO: 429876 - DNA, 15 bp, Homo sapiens
caggaatgcagtggc

SEQ ID NO: 429877 - DNA, 15 bp, Homo sapiens
gcaggaatgcagtgg

SEQ ID NO: 429878 - DNA, 15 bp, Homo sapiens
ggcaggaatgcagtg

SEQ ID NO: 429879 - DNA, 15 bp, Homo sapiens
aggcaggaatgcagt

SEQ ID NO: 429880 - DNA, 15 bp, Homo sapiens
caggcaggaatgcag

SEQ ID NO: 429881 - DNA, 15 bp, Homo sapiens
ccaggcaggaatgca

SEQ ID NO: 429882 - DNA, 15 bp, Homo sapiens
cccaggcaggaatgc

SEQ ID NO: 429883 - DNA, 15 bp, Homo sapiens
tcccaggcaggaatg

SEQ ID NO: 429884 - DNA, 15 bp, Homo sapiens
ttcccaggcaggaat

SEQ ID NO: 429885 - DNA, 15 bp, Homo sapiens
tttcccaggcaggaa

SEQ ID NO: 429886 - DNA, 15 bp, Homo sapiens
atttcccaggcagga

SEQ ID NO: 429887 - DNA, 15 bp, Homo sapiens
catttcccaggcagg

SEQ ID NO: 429888 - DNA, 15 bp, Homo sapiens
acatttcccaggcag

SEQ ID NO: 429889 - DNA, 15 bp, Homo sapiens
tacatttcccaggca

SEQ ID NO: 429890 - DNA, 15 bp, Homo sapiens
ctacatttcccaggc

SEQ ID NO: 429891 - DNA, 15 bp, Homo sapiens
gctacatttcccagg

SEQ ID NO: 429892 - DNA, 15 bp, Homo sapiens
tgctacatttcccag

SEQ ID NO: 429893 - DNA, 15 bp, Homo sapiens
ttgctacatttccca

SEQ ID NO: 429894 - DNA, 15 bp, Homo sapiens
cttgctacatttccc

SEQ ID NO: 429895 - DNA, 15 bp, Homo sapiens
acttgctacatttcc

SEQ ID NO: 429896 - DNA, 15 bp, Homo sapiens
aacttgctacatttc

SEQ ID NO: 429897 - DNA, 15 bp, Homo sapiens
gaacttgctacattt

SEQ ID NO: 429898 - DNA, 15 bp, Homo sapiens
agaacttgctacatt

SEQ ID NO: 429899 - DNA, 15 bp, Homo sapiens
gagaacttgctacat

SEQ ID NO: 429900 - DNA, 15 bp, Homo sapiens
tgagaacttgctaca

SEQ ID NO: 429901 - DNA, 15 bp, Homo sapiens
atgagaacttgctac

SEQ ID NO: 429902 - DNA, 15 bp, Homo sapiens
gatgagaacttgcta

SEQ ID NO: 429903 - DNA, 15 bp, Homo sapiens
agatgagaacttgct

SEQ ID NO: 429904 - DNA, 15 bp, Homo sapiens
gagatgagaacttgc

SEQ ID NO: 429905 - DNA, 15 bp, Homo sapiens
agagatgagaacttg

SEQ ID NO: 429906 - DNA, 15 bp, Homo sapiens
tagagatgagaactt

SEQ ID NO: 429907 - DNA, 15 bp, Homo sapiens
ttagagatgagaact

SEQ ID NO: 429908 - DNA, 15 bp, Homo sapiens
tttagagatgagaac

SEQ ID NO: 429909 - DNA, 15 bp, Homo sapiens
ctttagagatgagaa

SEQ ID NO: 429910 - DNA, 15 bp, Homo sapiens
tctttagagatgaga

SEQ ID NO: 429911 - DNA, 15 bp, Homo sapiens
ttctttagagatgag

SEQ ID NO: 429912 - DNA, 15 bp, Homo sapiens
attctttagagatga

SEQ ID NO: 429913 - DNA, 15 bp, Homo sapiens
tattctttagagatg

SEQ ID NO: 429914 - DNA, 15 bp, Homo sapiens
atattctttagagat

SEQ ID NO: 429915 - DNA, 15 bp, Homo sapiens
tatattctttagaga

SEQ ID NO: 429916 - DNA, 15 bp, Homo sapiens
atatattctttagag

SEQ ID NO: 429917 - DNA, 15 bp, Homo sapiens
aatatattctttaga

SEQ ID NO: 429918 - DNA, 15 bp, Homo sapiens
aaatatattctttag

SEQ ID NO: 429919 - DNA, 15 bp, Homo sapiens
aaaatatattcttta

SEQ ID NO: 429920 - DNA, 15 bp, Homo sapiens
aaaaatatattcttt

SEQ ID NO: 429921 - DNA, 15 bp, Homo sapiens
gaaaaatatattctt

SEQ ID NO: 429922 - DNA, 15 bp, Homo sapiens
tgaaaaatatattct

SEQ ID NO: 429923 - DNA, 15 bp, Homo sapiens
atgaaaaatatattc

SEQ ID NO: 429924 - DNA, 15 bp, Homo sapiens
aatgaaaaatatatt

SEQ ID NO: 429925 - DNA, 15 bp, Homo sapiens
aaatgaaaaatatat

SEQ ID NO: 429926 - DNA, 15 bp, Homo sapiens
taaatgaaaaatata

SEQ ID NO: 429927 - DNA, 15 bp, Homo sapiens
ttaaatgaaaaatat

SEQ ID NO: 429928 - DNA, 15 bp, Homo sapiens
tttaaatgaaaaata

SEQ ID NO: 429929 - DNA, 15 bp, Homo sapiens
ttttaaatgaaaaat

SEQ ID NO: 429930 - DNA, 15 bp, Homo sapiens
tttttaaatgaaaaa

SEQ ID NO: 429931 - DNA, 15 bp, Homo sapiens
gtttttaaatgaaaa

SEQ ID NO: 429932 - DNA, 15 bp, Homo sapiens
agtttttaaatgaaa

SEQ ID NO: 429933 - DNA, 15 bp, Homo sapiens
tagtttttaaatgaa

SEQ ID NO: 429934 - DNA, 15 bp, Homo sapiens
ttagtttttaaatga

SEQ ID NO: 429935 - DNA, 15 bp, Homo sapiens
tttagtttttaaatg

SEQ ID NO: 429936 - DNA, 15 bp, Homo sapiens
ttttagtttttaaat

SEQ ID NO: 429937 - DNA, 15 bp, Homo sapiens
cttttagtttttaaa

SEQ ID NO: 429938 - DNA, 15 bp, Homo sapiens
tcttttagtttttaa

SEQ ID NO: 429939 - DNA, 15 bp, Homo sapiens
ttcttttagttttta

SEQ ID NO: 429940 - DNA, 15 bp, Homo sapiens
attcttttagttttt

SEQ ID NO: 429941 - DNA, 15 bp, Homo sapiens
cattcttttagtttt

SEQ ID NO: 429942 - DNA, 15 bp, Homo sapiens
ccattcttttagttt

SEQ ID NO: 429943 - DNA, 15 bp, Homo sapiens
tccattcttttagtt

SEQ ID NO: 429944 - DNA, 15 bp, Homo sapiens
ttccattcttttagt

SEQ ID NO: 429945 - DNA, 15 bp, Homo sapiens
cttccattcttttag

SEQ ID NO: 429946 - DNA, 15 bp, Homo sapiens
ccttccattctttta

SEQ ID NO: 429947 - DNA, 15 bp, Homo sapiens
gccttccattctttt

SEQ ID NO: 429948 - DNA, 15 bp, Homo sapiens
tgccttccattcttt

SEQ ID NO: 429949 - DNA, 15 bp, Homo sapiens
ttgccttccattctt

SEQ ID NO: 429950 - DNA, 15 bp, Homo sapiens
cttgccttccattct

SEQ ID NO: 429951 - DNA, 15 bp, Homo sapiens
acttgccttccattc

SEQ ID NO: 429952 - DNA, 15 bp, Homo sapiens
tacttgccttccatt

SEQ ID NO: 429953 - DNA, 15 bp, Homo sapiens
ctacttgccttccat

SEQ ID NO: 429954 - DNA, 15 bp, Homo sapiens
tctacttgccttcca

SEQ ID NO: 429955 - DNA, 15 bp, Homo sapiens
atctacttgccttcc

SEQ ID NO: 429956 - DNA, 15 bp, Homo sapiens
tatctacttgccttc

SEQ ID NO: 429957 - DNA, 15 bp, Homo sapiens
gtatctacttgcctt

SEQ ID NO: 429958 - DNA, 15 bp, Homo sapiens
agtatctacttgcct

SEQ ID NO: 429959 - DNA, 15 bp, Homo sapiens
cagtatctacttgcc

SEQ ID NO: 429960 - DNA, 15 bp, Homo sapiens
ccagtatctacttgc

SEQ ID NO: 429961 - DNA, 15 bp, Homo sapiens
accagtatctacttg

SEQ ID NO: 429962 - DNA, 15 bp, Homo sapiens
aaccagtatctactt

SEQ ID NO: 429963 - DNA, 15 bp, Homo sapiens
aaaccagtatctact

SEQ ID NO: 429964 - DNA, 15 bp, Homo sapiens
caaaccagtatctac

SEQ ID NO: 429965 - DNA, 15 bp, Homo sapiens
tcaaaccagtatcta

SEQ ID NO: 429966 - DNA, 15 bp, Homo sapiens
ttcaaaccagtatct

SEQ ID NO: 429967 - DNA, 15 bp, Homo sapiens
cttcaaaccagtatc

SEQ ID NO: 429968 - DNA, 15 bp, Homo sapiens
gcttcaaaccagtat

SEQ ID NO: 429969 - DNA, 15 bp, Homo sapiens
tgcttcaaaccagta

SEQ ID NO: 429970 - DNA, 15 bp, Homo sapiens
atgcttcaaaccagt

SEQ ID NO: 429971 - DNA, 15 bp, Homo sapiens
catgcttcaaaccag

SEQ ID NO: 429972 - DNA, 15 bp, Homo sapiens
ccatgcttcaaacca

SEQ ID NO: 429973 - DNA, 15 bp, Homo sapiens
cccatgcttcaaacc

SEQ ID NO: 429974 - DNA, 15 bp, Homo sapiens
acccatgcttcaaac

SEQ ID NO: 429975 - DNA, 15 bp, Homo sapiens
gacccatgcttcaaa

SEQ ID NO: 429976 - DNA, 15 bp, Homo sapiens
agacccatgcttcaa

SEQ ID NO: 429977 - DNA, 15 bp, Homo sapiens
tagacccatgcttca

SEQ ID NO: 429978 - DNA, 15 bp, Homo sapiens
gtagacccatgcttc

SEQ ID NO: 429979 - DNA, 15 bp, Homo sapiens
ggtagacccatgctt

SEQ ID NO: 429980 - DNA, 15 bp, Homo sapiens
aggtagacccatgct

SEQ ID NO: 429981 - DNA, 15 bp, Homo sapiens
gaggtagacccatgc

SEQ ID NO: 429982 - DNA, 15 bp, Homo sapiens
agaggtagacccatg

SEQ ID NO: 429983 - DNA, 15 bp, Homo sapiens
aagaggtagacccat

SEQ ID NO: 429984 - DNA, 15 bp, Homo sapiens
gaagaggtagaccca

SEQ ID NO: 429985 - DNA, 15 bp, Homo sapiens
agaagaggtagaccc

SEQ ID NO: 429986 - DNA, 15 bp, Homo sapiens
tagaagaggtagacc

SEQ ID NO: 429987 - DNA, 15 bp, Homo sapiens
ttagaagaggtagac

SEQ ID NO: 429988 - DNA, 15 bp, Homo sapiens
tttagaagaggtaga

SEQ ID NO: 429989 - DNA, 15 bp, Homo sapiens
atttagaagaggtag

SEQ ID NO: 429990 - DNA, 15 bp, Homo sapiens
catttagaagaggta

SEQ ID NO: 429991 - DNA, 15 bp, Homo sapiens
acatttagaagaggt

SEQ ID NO: 429992 - DNA, 15 bp, Homo sapiens
tacatttagaagagg

SEQ ID NO: 429993 - DNA, 15 bp, Homo sapiens
ttacatttagaagag

SEQ ID NO: 429994 - DNA, 15 bp, Homo sapiens
cttacatttagaaga

SEQ ID NO: 429995 - DNA, 15 bp, Homo sapiens
gcttacatttagaag

SEQ ID NO: 429996 - DNA, 15 bp, Homo sapiens
tgcttacatttagaa

SEQ ID NO: 429997 - DNA, 15 bp, Homo sapiens
ttgcttacatttaga

SEQ ID NO: 429998 - DNA, 15 bp, Homo sapiens
tttgcttacatttag

SEQ ID NO: 429999 - DNA, 15 bp, Homo sapiens
ttttgcttacattta

SEQ ID NO: 430000 - DNA, 15 bp, Homo sapiens
tttttgcttacattt

SEQ ID NO: 430001 - DNA, 15 bp, Homo sapiens
atttttgcttacatt

SEQ ID NO: 430002 - DNA, 15 bp, Homo sapiens
gatttttgcttacat

SEQ ID NO: 430003 - DNA, 15 bp, Homo sapiens
agatttttgcttaca

SEQ ID NO: 430004 - DNA, 15 bp, Homo sapiens
gagatttttgcttac

SEQ ID NO: 430005 - DNA, 15 bp, Homo sapiens
tgagatttttgctta

SEQ ID NO: 430006 - DNA, 15 bp, Homo sapiens
ttgagatttttgctt

SEQ ID NO: 430007 - DNA, 15 bp, Homo sapiens
gttgagatttttgct

SEQ ID NO: 430008 - DNA, 15 bp, Homo sapiens
ggttgagatttttgc

SEQ ID NO: 430009 - DNA, 15 bp, Homo sapiens
aggttgagatttttg

SEQ ID NO: 430010 - DNA, 15 bp, Homo sapiens
aaggttgagattttt

SEQ ID NO: 430011 - DNA, 15 bp, Homo sapiens
gaaggttgagatttt

SEQ ID NO: 430012 - DNA, 15 bp, Homo sapiens
agaaggttgagattt

SEQ ID NO: 430013 - DNA, 15 bp, Homo sapiens
cagaaggttgagatt

SEQ ID NO: 430014 - DNA, 15 bp, Homo sapiens
tcagaaggttgagat

SEQ ID NO: 430015 - DNA, 15 bp, Homo sapiens
ttcagaaggttgaga

SEQ ID NO: 430016 - DNA, 15 bp, Homo sapiens
tttcagaaggttgag

SEQ ID NO: 430017 - DNA, 15 bp, Homo sapiens
gctttcagaaggttg

SEQ ID NO: 430018 - DNA, 15 bp, Homo sapiens
tgctttcagaaggtt

SEQ ID NO: 430019 - DNA, 15 bp, Homo sapiens
atgctttcagaaggt

SEQ ID NO: 430020 - DNA, 15 bp, Homo sapiens
gatgctttcagaagg

SEQ ID NO: 430021 - DNA, 15 bp, Homo sapiens
tgatgctttcagaag

SEQ ID NO: 430022 - DNA, 15 bp, Homo sapiens
atgatgctttcagaa

SEQ ID NO: 430023 - DNA, 15 bp, Homo sapiens
aatgatgctttcaga

SEQ ID NO: 430024 - DNA, 15 bp, Homo sapiens
aaatgatgctttcag

SEQ ID NO: 430025 - DNA, 15 bp, Homo sapiens
taaatgatgctttca

SEQ ID NO: 430026 - DNA, 15 bp, Homo sapiens
ctaaatgatgctttc

SEQ ID NO: 430027 - DNA, 15 bp, Homo sapiens
tctaaatgatgcttt

SEQ ID NO: 430028 - DNA, 15 bp, Homo sapiens
ttctaaatgatgctt

SEQ ID NO: 430029 - DNA, 15 bp, Homo sapiens
gttctaaatgatgct

SEQ ID NO: 430030 - DNA, 15 bp, Homo sapiens
ggttctaaatgatgc

SEQ ID NO: 430031 - DNA, 15 bp, Homo sapiens
aggttctaaatgatg

SEQ ID NO: 430032 - DNA, 15 bp, Homo sapiens
caggttctaaatgat

SEQ ID NO: 430033 - DNA, 15 bp, Homo sapiens
ccaggttctaaatga

SEQ ID NO: 430034 - DNA, 15 bp, Homo sapiens
tccaggttctaaatg

SEQ ID NO: 430035 - DNA, 15 bp, Homo sapiens
ttccaggttctaaat

SEQ ID NO: 430036 - DNA, 15 bp, Homo sapiens
tttccaggttctaaa

SEQ ID NO: 430037 - DNA, 15 bp, Homo sapiens
atttccaggttctaa

SEQ ID NO: 430038 - DNA, 15 bp, Homo sapiens
tatttccaggttcta

SEQ ID NO: 430039 - DNA, 15 bp, Homo sapiens
ttatttccaggttct

SEQ ID NO: 430040 - DNA, 15 bp, Homo sapiens
attatttccaggttc

SEQ ID NO: 430041 - DNA, 15 bp, Homo sapiens
tattatttccaggtt

SEQ ID NO: 430042 - DNA, 15 bp, Homo sapiens
atattatttccaggt

SEQ ID NO: 430043 - DNA, 15 bp, Homo sapiens
gatattatttccagg

SEQ ID NO: 430044 - DNA, 15 bp, Homo sapiens
tgatattatttccag

SEQ ID NO: 430045 - DNA, 15 bp, Homo sapiens
gtgatattatttcca

SEQ ID NO: 430046 - DNA, 15 bp, Homo sapiens
agtgatattatttcc

SEQ ID NO: 430047 - DNA, 15 bp, Homo sapiens
tagtgatattatttc

SEQ ID NO: 430048 - DNA, 15 bp, Homo sapiens
gtagtgatattattt

SEQ ID NO: 430049 - DNA, 15 bp, Homo sapiens
ggtagtgatattatt

SEQ ID NO: 430050 - DNA, 15 bp, Homo sapiens
gggtagtgatattat

SEQ ID NO: 430051 - DNA, 15 bp, Homo sapiens
tgggtagtgatatta

SEQ ID NO: 430052 - DNA, 15 bp, Homo sapiens
gtgggtagtgatatt

SEQ ID NO: 430053 - DNA, 15 bp, Homo sapiens
ggtgggtagtgatat

SEQ ID NO: 430054 - DNA, 15 bp, Homo sapiens
aggtgggtagtgata

SEQ ID NO: 430055 - DNA, 15 bp, Homo sapiens
aaggtgggtagtgat

SEQ ID NO: 430056 - DNA, 15 bp, Homo sapiens
caaggtgggtagtga

SEQ ID NO: 430057 - DNA, 15 bp, Homo sapiens
gcaaggtgggtagtg

SEQ ID NO: 430058 - DNA, 15 bp, Homo sapiens
tgcaaggtgggtagt

SEQ ID NO: 430059 - DNA, 15 bp, Homo sapiens
ctgcaaggtgggtag

SEQ ID NO: 430060 - DNA, 15 bp, Homo sapiens
tctgcaaggtgggta

SEQ ID NO: 430061 - DNA, 15 bp, Homo sapiens
ctctgcaaggtgggt

SEQ ID NO: 430062 - DNA, 15 bp, Homo sapiens
actctgcaaggtggg

SEQ ID NO: 430063 - DNA, 15 bp, Homo sapiens
aactctgcaaggtgg

SEQ ID NO: 430064 - DNA, 15 bp, Homo sapiens
aaactctgcaaggtg

SEQ ID NO: 430065 - DNA, 15 bp, Homo sapiens
aaaactctgcaaggt

SEQ ID NO: 430066 - DNA, 15 bp, Homo sapiens
gaaaactctgcaagg

SEQ ID NO: 430067 - DNA, 15 bp, Homo sapiens
tgaaaactctgcaag

SEQ ID NO: 430068 - DNA, 15 bp, Homo sapiens
atgaaaactctgcaa

SEQ ID NO: 430069 - DNA, 15 bp, Homo sapiens
aatgaaaactctgca

SEQ ID NO: 430070 - DNA, 15 bp, Homo sapiens
caatgaaaactctgc

SEQ ID NO: 430071 - DNA, 15 bp, Homo sapiens
acaatgaaaactctg

SEQ ID NO: 430072 - DNA, 15 bp, Homo sapiens
tacaatgaaaactct

SEQ ID NO: 430073 - DNA, 15 bp, Homo sapiens
atacaatgaaaactc

SEQ ID NO: 430074 - DNA, 15 bp, Homo sapiens
tatacaatgaaaact

SEQ ID NO: 430075 - DNA, 15 bp, Homo sapiens
ttatacaatgaaaac

SEQ ID NO: 430076 - DNA, 15 bp, Homo sapiens
cttatacaatgaaaa

SEQ ID NO: 430077 - DNA, 15 bp, Homo sapiens
gcttatacaatgaaa

SEQ ID NO: 430078 - DNA, 15 bp, Homo sapiens
tgcttatacaatgaa

SEQ ID NO: 430079 - DNA, 15 bp, Homo sapiens
atgcttatacaatga

SEQ ID NO: 430080 - DNA, 15 bp, Homo sapiens
tatgcttatacaatg

SEQ ID NO: 430081 - DNA, 15 bp, Homo sapiens
ttatgcttatacaat

SEQ ID NO: 430082 - DNA, 15 bp, Homo sapiens
gttatgcttatacaa

SEQ ID NO: 430083 - DNA, 15 bp, Homo sapiens
tgttatgcttataca

SEQ ID NO: 430084 - DNA, 15 bp, Homo sapiens
gtgttatgcttatac

SEQ ID NO: 430085 - DNA, 15 bp, Homo sapiens
tgtgttatgcttata

SEQ ID NO: 430086 - DNA, 15 bp, Homo sapiens
ctgtgttatgcttat

SEQ ID NO: 430087 - DNA, 15 bp, Homo sapiens
tctgtgttatgctta

SEQ ID NO: 430088 - DNA, 15 bp, Homo sapiens
atctgtgttatgctt

SEQ ID NO: 430089 - DNA, 15 bp, Homo sapiens
tatctgtgttatgct

SEQ ID NO: 430090 - DNA, 15 bp, Homo sapiens
atatctgtgttatgc

SEQ ID NO: 430091 - DNA, 15 bp, Homo sapiens
tatatctgtgttatg

SEQ ID NO: 430092 - DNA, 15 bp, Homo sapiens
atatatctgtgttat

SEQ ID NO: 430093 - DNA, 15 bp, Homo sapiens
catatatctgtgtta

SEQ ID NO: 430094 - DNA, 15 bp, Homo sapiens
gcatatatctgtgtt

SEQ ID NO: 430095 - DNA, 15 bp, Homo sapiens
tgcatatatctgtgt

SEQ ID NO: 430096 - DNA, 15 bp, Homo sapiens
atgcatatatctgtg

SEQ ID NO: 430097 - DNA, 15 bp, Homo sapiens
catgcatatatctgt

SEQ ID NO: 430098 - DNA, 15 bp, Homo sapiens
acatgcatatatctg

SEQ ID NO: 430099 - DNA, 15 bp, Homo sapiens
aacatgcatatatct

SEQ ID NO: 430100 - DNA, 15 bp, Homo sapiens
gaacatgcatatatc

SEQ ID NO: 430101 - DNA, 15 bp, Homo sapiens
atgaacatgcatata

SEQ ID NO: 430102 - DNA, 15 bp, Homo sapiens
aatgaacatgcatat

SEQ ID NO: 430103 - DNA, 15 bp, Homo sapiens
aaatgaacatgcata

SEQ ID NO: 430104 - DNA, 15 bp, Homo sapiens
gaaatgaacatgcat

SEQ ID NO: 430105 - DNA, 15 bp, Homo sapiens
tgaaatgaacatgca

SEQ ID NO: 430106 - DNA, 15 bp, Homo sapiens
atgaaatgaacatgc

SEQ ID NO: 430107 - DNA, 15 bp, Homo sapiens
catgaaatgaacatg

SEQ ID NO: 430108 - DNA, 15 bp, Homo sapiens
tcatgaaatgaacat

SEQ ID NO: 430109 - DNA, 15 bp, Homo sapiens
ttcatgaaatgaaca

SEQ ID NO: 430110 - DNA, 15 bp, Homo sapiens
tttcatgaaatgaac

SEQ ID NO: 430111 - DNA, 15 bp, Homo sapiens
atttcatgaaatgaa

SEQ ID NO: 430112 - DNA, 15 bp, Homo sapiens
tatttcatgaaatga

SEQ ID NO: 430113 - DNA, 15 bp, Homo sapiens
gtatttcatgaaatg

SEQ ID NO: 430114 - DNA, 15 bp, Homo sapiens
cgtatttcatgaaat

SEQ ID NO: 430115 - DNA, 15 bp, Homo sapiens
acgtatttcatgaaa

SEQ ID NO: 430116 - DNA, 15 bp, Homo sapiens
tacgtatttcatgaa

SEQ ID NO: 430117 - DNA, 15 bp, Homo sapiens
atacgtatttcatga

SEQ ID NO: 430118 - DNA, 15 bp, Homo sapiens
catacgtatttcatg

SEQ ID NO: 430119 - DNA, 15 bp, Homo sapiens
acatacgtatttcat

SEQ ID NO: 430120 - DNA, 15 bp, Homo sapiens
cacatacgtatttca

SEQ ID NO: 430121 - DNA, 15 bp, Homo sapiens
gcacatacgtatttc

SEQ ID NO: 430122 - DNA, 15 bp, Homo sapiens
tgcacatacgtattt

SEQ ID NO: 430123 - DNA, 15 bp, Homo sapiens
atgcacatacgtatt

SEQ ID NO: 430124 - DNA, 15 bp, Homo sapiens
tatgcacatacgtat

SEQ ID NO: 430125 - DNA, 15 bp, Homo sapiens
ttatgcacatacgta

SEQ ID NO: 430126 - DNA, 15 bp, Homo sapiens
tttatgcacatacgt

SEQ ID NO: 430127 - DNA, 15 bp, Homo sapiens
atttatgcacatacg

SEQ ID NO: 430128 - DNA, 15 bp, Homo sapiens
tatttatgcacatac

SEQ ID NO: 430129 - DNA, 15 bp, Homo sapiens
ttatttatgcacata

SEQ ID NO: 430130 - DNA, 15 bp, Homo sapiens
attatttatgcacat

SEQ ID NO: 430131 - DNA, 15 bp, Homo sapiens
tattatttatgcaca

SEQ ID NO: 430132 - DNA, 15 bp, Homo sapiens
gtattatttatgcac

SEQ ID NO: 430133 - DNA, 15 bp, Homo sapiens
tgtattatttatgca

SEQ ID NO: 430134 - DNA, 15 bp, Homo sapiens
atgtattatttatgc

SEQ ID NO: 430135 - DNA, 15 bp, Homo sapiens
aatgtattatttatg

SEQ ID NO: 430136 - DNA, 15 bp, Homo sapiens
gaatgtattatttat

SEQ ID NO: 430137 - DNA, 15 bp, Homo sapiens
tgaatgtattattta

SEQ ID NO: 430138 - DNA, 15 bp, Homo sapiens
ttgaatgtattattt

SEQ ID NO: 430139 - DNA, 15 bp, Homo sapiens
tttgaatgtattatt

SEQ ID NO: 430140 - DNA, 15 bp, Homo sapiens
ctttgaatgtattat

SEQ ID NO: 430141 - DNA, 15 bp, Homo sapiens
actttgaatgtatta

SEQ ID NO: 430142 - DNA, 15 bp, Homo sapiens
cactttgaatgtatt

SEQ ID NO: 430143 - DNA, 15 bp, Homo sapiens
acactttgaatgtat

SEQ ID NO: 430144 - DNA, 15 bp, Homo sapiens
cacactttgaatgta

SEQ ID NO: 430145 - DNA, 15 bp, Homo sapiens
acacactttgaatgt

SEQ ID NO: 430146 - DNA, 15 bp, Homo sapiens
cacacactttgaatg

SEQ ID NO: 430147 - DNA, 15 bp, Homo sapiens
ccacacactttgaat

SEQ ID NO: 430148 - DNA, 15 bp, Homo sapiens
gccacacactttgaa

SEQ ID NO: 430149 - DNA, 15 bp, Homo sapiens
tgccacacactttga

SEQ ID NO: 430150 - DNA, 15 bp, Homo sapiens
atgccacacactttg

SEQ ID NO: 430151 - DNA, 15 bp, Homo sapiens
tatgccacacacttt

SEQ ID NO: 430152 - DNA, 15 bp, Homo sapiens
atatgccacacactt

SEQ ID NO: 430153 - DNA, 15 bp, Homo sapiens
tatatgccacacact

SEQ ID NO: 430154 - DNA, 15 bp, Homo sapiens
ctatatgccacacac

SEQ ID NO: 430155 - DNA, 15 bp, Homo sapiens
actatatgccacaca

SEQ ID NO: 430156 - DNA, 15 bp, Homo sapiens
tactatatgccacac

SEQ ID NO: 430157 - DNA, 15 bp, Homo sapiens
ctactatatgccaca

SEQ ID NO: 430158 - DNA, 15 bp, Homo sapiens
tctactatatgccac

SEQ ID NO: 430159 - DNA, 15 bp, Homo sapiens
atctactatatgcca

SEQ ID NO: 430160 - DNA, 15 bp, Homo sapiens
tatctactatatgcc

SEQ ID NO: 430161 - DNA, 15 bp, Homo sapiens
ttatctactatatgc

SEQ ID NO: 430162 - DNA, 15 bp, Homo sapiens
attatctactatatg

SEQ ID NO: 430163 - DNA, 15 bp, Homo sapiens
tattatctactatat

SEQ ID NO: 430164 - DNA, 15 bp, Homo sapiens
atattatctactata

SEQ ID NO: 430165 - DNA, 15 bp, Homo sapiens
catattatctactat

SEQ ID NO: 430166 - DNA, 15 bp, Homo sapiens
ccatattatctacta

SEQ ID NO: 430167 - DNA, 15 bp, Homo sapiens
accatattatctact

SEQ ID NO: 430168 - DNA, 15 bp, Homo sapiens
taccatattatctac

SEQ ID NO: 430169 - DNA, 15 bp, Homo sapiens
ataccatattatcta

SEQ ID NO: 430170 - DNA, 15 bp, Homo sapiens
tataccatattatct

SEQ ID NO: 430171 - DNA, 15 bp, Homo sapiens
atataccatattatc

SEQ ID NO: 430172 - DNA, 15 bp, Homo sapiens
tatataccatattat

SEQ ID NO: 430173 - DNA, 15 bp, Homo sapiens
ctatataccatatta

SEQ ID NO: 430174 - DNA, 15 bp, Homo sapiens
actatataccatatt

SEQ ID NO: 430175 - DNA, 15 bp, Homo sapiens
tactatataccatat

SEQ ID NO: 430176 - DNA, 15 bp, Homo sapiens
ctactatataccata

SEQ ID NO: 430177 - DNA, 15 bp, Homo sapiens
gctactatataccat

SEQ ID NO: 430178 - DNA, 15 bp, Homo sapiens
agctactatatacca

SEQ ID NO: 430179 - DNA, 15 bp, Homo sapiens
tagctactatatacc

SEQ ID NO: 430180 - DNA, 15 bp, Homo sapiens
ttagctactatatac

SEQ ID NO: 430181 - DNA, 15 bp, Homo sapiens
attagctactatata

SEQ ID NO: 430182 - DNA, 15 bp, Homo sapiens
cattagctactatat

SEQ ID NO: 430183 - DNA, 15 bp, Homo sapiens
acattagctactata

SEQ ID NO: 430184 - DNA, 15 bp, Homo sapiens
aacattagctactat

SEQ ID NO: 430185 - DNA, 15 bp, Homo sapiens
taacattagctacta

SEQ ID NO: 430186 - DNA, 15 bp, Homo sapiens
ataacattagctact

SEQ ID NO: 430187 - DNA, 15 bp, Homo sapiens
aataacattagctac

SEQ ID NO: 430188 - DNA, 15 bp, Homo sapiens
aaataacattagcta

SEQ ID NO: 430189 - DNA, 15 bp, Homo sapiens
gaaataacattagct

SEQ ID NO: 430190 - DNA, 15 bp, Homo sapiens
ggaaataacattagc

SEQ ID NO: 430191 - DNA, 15 bp, Homo sapiens
gggaaataacattag

SEQ ID NO: 430192 - DNA, 15 bp, Homo sapiens
tgggaaataacatta

SEQ ID NO: 430193 - DNA, 15 bp, Homo sapiens
atgggaaataacatt

SEQ ID NO: 430194 - DNA, 15 bp, Homo sapiens
gatgggaaataacat

SEQ ID NO: 430195 - DNA, 15 bp, Homo sapiens
agatgggaaataaca

SEQ ID NO: 430196 - DNA, 15 bp, Homo sapiens
gagatgggaaataac

SEQ ID NO: 430197 - DNA, 15 bp, Homo sapiens
tgagatgggaaataa

SEQ ID NO: 430198 - DNA, 15 bp, Homo sapiens
atgagatgggaaata

SEQ ID NO: 430199 - DNA, 15 bp, Homo sapiens
catgagatgggaaat

SEQ ID NO: 430200 - DNA, 15 bp, Homo sapiens
gcatgagatgggaaa

SEQ ID NO: 430201 - DNA, 15 bp, Homo sapiens
agcatgagatgggaa

SEQ ID NO: 430202 - DNA, 15 bp, Homo sapiens
aagcatgagatggga

SEQ ID NO: 430203 - DNA, 15 bp, Homo sapiens
taagcatgagatggg

SEQ ID NO: 430204 - DNA, 15 bp, Homo sapiens
ataagcatgagatgg

SEQ ID NO: 430205 - DNA, 15 bp, Homo sapiens
gataagcatgagatg

SEQ ID NO: 430206 - DNA, 15 bp, Homo sapiens
tgataagcatgagat

SEQ ID NO: 430207 - DNA, 15 bp, Homo sapiens
atgataagcatgaga

SEQ ID NO: 430208 - DNA, 15 bp, Homo sapiens
aatgataagcatgag

SEQ ID NO: 430209 - DNA, 15 bp, Homo sapiens
taatgataagcatga

SEQ ID NO: 430210 - DNA, 15 bp, Homo sapiens
ttaatgataagcatg

SEQ ID NO: 430211 - DNA, 15 bp, Homo sapiens
attaatgataagcat

SEQ ID NO: 430212 - DNA, 15 bp, Homo sapiens
tattaatgataagca

SEQ ID NO: 430213 - DNA, 15 bp, Homo sapiens
atattaatgataagc

SEQ ID NO: 430214 - DNA, 15 bp, Homo sapiens
aatattaatgataag

SEQ ID NO: 430215 - DNA, 15 bp, Homo sapiens
caatattaatgataa

SEQ ID NO: 430216 - DNA, 15 bp, Homo sapiens
acaatattaatgata

SEQ ID NO: 430217 - DNA, 15 bp, Homo sapiens
cacaatattaatgat

SEQ ID NO: 430218 - DNA, 15 bp, Homo sapiens
gcacaatattaatga

SEQ ID NO: 430219 - DNA, 15 bp, Homo sapiens
agcacaatattaatg

SEQ ID NO: 430220 - DNA, 15 bp, Homo sapiens
aagcacaatattaat

SEQ ID NO: 430221 - DNA, 15 bp, Homo sapiens
taagcacaatattaa

SEQ ID NO: 430222 - DNA, 15 bp, Homo sapiens
ttaagcacaatatta

SEQ ID NO: 430223 - DNA, 15 bp, Homo sapiens
gttaagcacaatatt

SEQ ID NO: 430224 - DNA, 15 bp, Homo sapiens
ggttaagcacaatat

SEQ ID NO: 430225 - DNA, 15 bp, Homo sapiens
tggttaagcacaata

SEQ ID NO: 430226 - DNA, 15 bp, Homo sapiens
ttggttaagcacaat

SEQ ID NO: 430227 - DNA, 15 bp, Homo sapiens
tttggttaagcacaa

SEQ ID NO: 430228 - DNA, 15 bp, Homo sapiens
gtttggttaagcaca

SEQ ID NO: 430229 - DNA, 15 bp, Homo sapiens
agtttggttaagcac

SEQ ID NO: 430230 - DNA, 15 bp, Homo sapiens
cagtttggttaagca

SEQ ID NO: 430231 - DNA, 15 bp, Homo sapiens
tcagtttggttaagc

SEQ ID NO: 430232 - DNA, 15 bp, Homo sapiens
ttcagtttggttaag

SEQ ID NO: 430233 - DNA, 15 bp, Homo sapiens
tttcagtttggttaa

SEQ ID NO: 430234 - DNA, 15 bp, Homo sapiens
ctttcagtttggtta

SEQ ID NO: 430235 - DNA, 15 bp, Homo sapiens
gctttcagtttggtt

SEQ ID NO: 430236 - DNA, 15 bp, Homo sapiens
ggctttcagtttggt

SEQ ID NO: 430237 - DNA, 15 bp, Homo sapiens
tggctttcagtttgg

SEQ ID NO: 430238 - DNA, 15 bp, Homo sapiens
gtggctttcagtttg

SEQ ID NO: 430239 - DNA, 15 bp, Homo sapiens
agtggctttcagttt

SEQ ID NO: 430240 - DNA, 15 bp, Homo sapiens
ggattcagactgcag

SEQ ID NO: 430241 - DNA, 15 bp, Homo sapiens
gggattcagactgca

SEQ ID NO: 430242 - DNA, 15 bp, Homo sapiens
tgggattcagactgc

SEQ ID NO: 430243 - DNA, 15 bp, Homo sapiens
ctgggattcagactg

SEQ ID NO: 430244 - DNA, 15 bp, Homo sapiens
gctgggattcagact

SEQ ID NO: 430245 - DNA, 15 bp, Homo sapiens
agctgggattcagac

SEQ ID NO: 430246 - DNA, 15 bp, Homo sapiens
aagctgggattcaga

SEQ ID NO: 430247 - DNA, 15 bp, Homo sapiens
aaagctgggattcag

SEQ ID NO: 430248 - DNA, 15 bp, Homo sapiens
aaaagctgggattca

SEQ ID NO: 430249 - DNA, 15 bp, Homo sapiens
gaaaagctgggattc

SEQ ID NO: 430250 - DNA, 15 bp, Homo sapiens
ggaaaagctgggatt

SEQ ID NO: 430251 - DNA, 15 bp, Homo sapiens
tggaaaagctgggat

SEQ ID NO: 430252 - DNA, 15 bp, Homo sapiens
atggaaaagctggga

SEQ ID NO: 430253 - DNA, 15 bp, Homo sapiens
aatggaaaagctggg

SEQ ID NO: 430254 - DNA, 15 bp, Homo sapiens
aaatggaaaagctgg

SEQ ID NO: 430255 - DNA, 15 bp, Homo sapiens
caaatggaaaagctg

SEQ ID NO: 430256 - DNA, 15 bp, Homo sapiens
gcaaatggaaaagct

SEQ ID NO: 430257 - DNA, 15 bp, Homo sapiens
ggcaaatggaaaagc

SEQ ID NO: 430258 - DNA, 15 bp, Homo sapiens
tggcaaatggaaaag

SEQ ID NO: 430259 - DNA, 15 bp, Homo sapiens
atggcaaatggaaaa

SEQ ID NO: 430260 - DNA, 15 bp, Homo sapiens
aatggcaaatggaaa

SEQ ID NO: 430261 - DNA, 15 bp, Homo sapiens
caatggcaaatggaa

SEQ ID NO: 430262 - DNA, 15 bp, Homo sapiens
ccaatggcaaatgga

SEQ ID NO: 430263 - DNA, 15 bp, Homo sapiens
cccaatggcaaatgg

SEQ ID NO: 430264 - DNA, 15 bp, Homo sapiens
tcccaatggcaaatg

SEQ ID NO: 430265 - DNA, 15 bp, Homo sapiens
gtcccaatggcaaat

SEQ ID NO: 430266 - DNA, 15 bp, Homo sapiens
ggtcccaatggcaaa

SEQ ID NO: 430267 - DNA, 15 bp, Homo sapiens
aggtcccaatggcaa

SEQ ID NO: 430268 - DNA, 15 bp, Homo sapiens
aaggtcccaatggca

SEQ ID NO: 430269 - DNA, 15 bp, Homo sapiens
caaggtcccaatggc

SEQ ID NO: 430270 - DNA, 15 bp, Homo sapiens
tcaaggtcccaatgg

SEQ ID NO: 430271 - DNA, 15 bp, Homo sapiens
ctcaaggtcccaatg

SEQ ID NO: 430272 - DNA, 15 bp, Homo sapiens
tctcaaggtcccaat

SEQ ID NO: 430273 - DNA, 15 bp, Homo sapiens
ttctcaaggtcccaa

SEQ ID NO: 430274 - DNA, 15 bp, Homo sapiens
tttctcaaggtccca

SEQ ID NO: 430275 - DNA, 15 bp, Homo sapiens
ctttctcaaggtccc

SEQ ID NO: 430276 - DNA, 15 bp, Homo sapiens
actttctcaaggtcc

SEQ ID NO: 430277 - DNA, 15 bp, Homo sapiens
aactttctcaaggtc

SEQ ID NO: 430278 - DNA, 15 bp, Homo sapiens
aaactttctcaaggt

SEQ ID NO: 430279 - DNA, 15 bp, Homo sapiens
aaaactttctcaagg

SEQ ID NO: 430280 - DNA, 15 bp, Homo sapiens
gaaaactttctcaag

SEQ ID NO: 430281 - DNA, 15 bp, Homo sapiens
agaaaactttctcaa

SEQ ID NO: 430282 - DNA, 15 bp, Homo sapiens
aagaaaactttctca

SEQ ID NO: 430283 - DNA, 15 bp, Homo sapiens
gaagaaaactttctc

SEQ ID NO: 430284 - DNA, 15 bp, Homo sapiens
agaagaaaactttct

SEQ ID NO: 430285 - DNA, 15 bp, Homo sapiens
aagaagaaaactttc

SEQ ID NO: 430286 - DNA, 15 bp, Homo sapiens
gaagaagaaaacttt

SEQ ID NO: 430287 - DNA, 15 bp, Homo sapiens
agaagaagaaaactt

SEQ ID NO: 430288 - DNA, 15 bp, Homo sapiens
aagaagaagaaaact

SEQ ID NO: 430289 - DNA, 15 bp, Homo sapiens
aaagaagaagaaaac

SEQ ID NO: 430290 - DNA, 15 bp, Homo sapiens
aaaagaagaagaaaa

SEQ ID NO: 430291 - DNA, 15 bp, Homo sapiens
taaaagaagaagaaa

SEQ ID NO: 430292 - DNA, 15 bp, Homo sapiens
ctaaaagaagaagaa

SEQ ID NO: 430293 - DNA, 15 bp, Homo sapiens
tctaaaagaagaaga

SEQ ID NO: 430294 - DNA, 15 bp, Homo sapiens
gtctaaaagaagaag

SEQ ID NO: 430295 - DNA, 15 bp, Homo sapiens
tgtctaaaagaagaa

SEQ ID NO: 430296 - DNA, 15 bp, Homo sapiens
ctgtctaaaagaaga

SEQ ID NO: 430297 - DNA, 15 bp, Homo sapiens
tctgtctaaaagaag

SEQ ID NO: 430298 - DNA, 15 bp, Homo sapiens
ctctgtctaaaagaa

SEQ ID NO: 430299 - DNA, 15 bp, Homo sapiens
actctgtctaaaaga

SEQ ID NO: 430300 - DNA, 15 bp, Homo sapiens
gactctgtctaaaag

SEQ ID NO: 430301 - DNA, 15 bp, Homo sapiens
agactctgtctaaaa

SEQ ID NO: 430302 - DNA, 15 bp, Homo sapiens
aagactctgtctaaa

SEQ ID NO: 430303 - DNA, 15 bp, Homo sapiens
caagactctgtctaa

SEQ ID NO: 430304 - DNA, 15 bp, Homo sapiens
gcaagactctgtcta

SEQ ID NO: 430305 - DNA, 15 bp, Homo sapiens
agcaagactctgtct

SEQ ID NO: 430306 - DNA, 15 bp, Homo sapiens
gagcaagactctgtc

SEQ ID NO: 430307 - DNA, 15 bp, Homo sapiens
agagcaagactctgt

SEQ ID NO: 430308 - DNA, 15 bp, Homo sapiens
cagagcaagactctg

SEQ ID NO: 430309 - DNA, 15 bp, Homo sapiens
acagagcaagactct

SEQ ID NO: 430310 - DNA, 15 bp, Homo sapiens
tgacagagcaagact

SEQ ID NO: 430311 - DNA, 15 bp, Homo sapiens
cggtgacagagcaag

SEQ ID NO: 430312 - DNA, 15 bp, Homo sapiens
tcggtgacagagcaa

SEQ ID NO: 430313 - DNA, 15 bp, Homo sapiens
ttcggtgacagagca

SEQ ID NO: 430314 - DNA, 15 bp, Homo sapiens
cttcggtgacagagc

SEQ ID NO: 430315 - DNA, 15 bp, Homo sapiens
gcttcggtgacagag

SEQ ID NO: 430316 - DNA, 15 bp, Homo sapiens
agcttcggtgacaga

SEQ ID NO: 430317 - DNA, 15 bp, Homo sapiens
cagcttcggtgacag

SEQ ID NO: 430318 - DNA, 15 bp, Homo sapiens
ccagcttcggtgaca

SEQ ID NO: 430319 - DNA, 15 bp, Homo sapiens
tccagcttcggtgac

SEQ ID NO: 430320 - DNA, 15 bp, Homo sapiens
ctccagcttcggtga

SEQ ID NO: 430321 - DNA, 15 bp, Homo sapiens
actccagcttcggtg

SEQ ID NO: 430322 - DNA, 15 bp, Homo sapiens
cactccagcttcggt

SEQ ID NO: 430323 - DNA, 15 bp, Homo sapiens
gcactccagcttcgg

SEQ ID NO: 430324 - DNA, 15 bp, Homo sapiens
tgcactccagcttcg

SEQ ID NO: 430325 - DNA, 15 bp, Homo sapiens
ttgcactccagcttc

SEQ ID NO: 430326 - DNA, 15 bp, Homo sapiens
cttgcactccagctt

SEQ ID NO: 430327 - DNA, 15 bp, Homo sapiens
acttgcactccagct

SEQ ID NO: 430328 - DNA, 15 bp, Homo sapiens
cacttgcactccagc

SEQ ID NO: 430329 - DNA, 15 bp, Homo sapiens
ccacttgcactccag

SEQ ID NO: 430330 - DNA, 15 bp, Homo sapiens
accacttgcactcca

SEQ ID NO: 430331 - DNA, 15 bp, Homo sapiens
taccacttgcactcc

SEQ ID NO: 430332 - DNA, 15 bp, Homo sapiens
ataccacttgcactc

SEQ ID NO: 430333 - DNA, 15 bp, Homo sapiens
tataccacttgcact

SEQ ID NO: 430334 - DNA, 15 bp, Homo sapiens
ttataccacttgcac

SEQ ID NO: 430335 - DNA, 15 bp, Homo sapiens
attataccacttgca

SEQ ID NO: 430336 - DNA, 15 bp, Homo sapiens
gattataccacttgc

SEQ ID NO: 430337 - DNA, 15 bp, Homo sapiens
agattataccacttg

SEQ ID NO: 430338 - DNA, 15 bp, Homo sapiens
gagattataccactt

SEQ ID NO: 430339 - DNA, 15 bp, Homo sapiens
tgagattataccact

SEQ ID NO: 430340 - DNA, 15 bp, Homo sapiens
ctgagattataccac

SEQ ID NO: 430341 - DNA, 15 bp, Homo sapiens
gctgagattatacca

SEQ ID NO: 430342 - DNA, 15 bp, Homo sapiens
agctgagattatacc

SEQ ID NO: 430343 - DNA, 15 bp, Homo sapiens
gagctgagattatac

SEQ ID NO: 430344 - DNA, 15 bp, Homo sapiens
tgagctgagattata

SEQ ID NO: 430345 - DNA, 15 bp, Homo sapiens
gtgagctgagattat

SEQ ID NO: 430346 - DNA, 15 bp, Homo sapiens
agtgagctgagatta

SEQ ID NO: 430347 - DNA, 15 bp, Homo sapiens
cagtgagctgagatt

SEQ ID NO: 430348 - DNA, 15 bp, Homo sapiens
ctgcagtgagctgag

SEQ ID NO: 430349 - DNA, 15 bp, Homo sapiens
gctgcagtgagctga

SEQ ID NO: 430350 - DNA, 15 bp, Homo sapiens
ggctgcagtgagctg

SEQ ID NO: 430351 - DNA, 15 bp, Homo sapiens
aggctgcagtgagct

SEQ ID NO: 430352 - DNA, 15 bp, Homo sapiens
gaggctgcagtgagc

SEQ ID NO: 430353 - DNA, 15 bp, Homo sapiens
cggaggctgcagtga

SEQ ID NO: 430354 - DNA, 15 bp, Homo sapiens
gcggaggctgcagtg

SEQ ID NO: 430355 - DNA, 15 bp, Homo sapiens
ggcggaggctgcagt

SEQ ID NO: 430356 - DNA, 15 bp, Homo sapiens
aggcggaggctgcag

SEQ ID NO: 430357 - DNA, 15 bp, Homo sapiens
gaggcggaggctgca

SEQ ID NO: 430358 - DNA, 15 bp, Homo sapiens
ggaggcggaggctgc

SEQ ID NO: 430359 - DNA, 15 bp, Homo sapiens
aggaggcggaggctg

SEQ ID NO: 430360 - DNA, 15 bp, Homo sapiens
caggaggcggaggct

SEQ ID NO: 430361 - DNA, 15 bp, Homo sapiens
ccaggaggcggaggc

SEQ ID NO: 430362 - DNA, 15 bp, Homo sapiens
cccaggaggcggagg

SEQ ID NO: 430363 - DNA, 15 bp, Homo sapiens
acccaggaggcggag

SEQ ID NO: 430364 - DNA, 15 bp, Homo sapiens
aaacccaggaggcgg

SEQ ID NO: 430365 - DNA, 15 bp, Homo sapiens
taaacccaggaggcg

SEQ ID NO: 430366 - DNA, 15 bp, Homo sapiens
ttaaacccaggaggc

SEQ ID NO: 430367 - DNA, 15 bp, Homo sapiens
cttaaacccaggagg

SEQ ID NO: 430368 - DNA, 15 bp, Homo sapiens
acttaaacccaggag

SEQ ID NO: 430369 - DNA, 15 bp, Homo sapiens
cacttaaacccagga

SEQ ID NO: 430370 - DNA, 15 bp, Homo sapiens
tcacttaaacccagg

SEQ ID NO: 430371 - DNA, 15 bp, Homo sapiens
atcacttaaacccag

SEQ ID NO: 430372 - DNA, 15 bp, Homo sapiens
aatcacttaaaccca

SEQ ID NO: 430373 - DNA, 15 bp, Homo sapiens
gaatcacttaaaccc

SEQ ID NO: 430374 - DNA, 15 bp, Homo sapiens
agaatcacttaaacc

SEQ ID NO: 430375 - DNA, 15 bp, Homo sapiens
gagaatcacttaaac

SEQ ID NO: 430376 - DNA, 15 bp, Homo sapiens
agagaatcacttaaa

SEQ ID NO: 430377 - DNA, 15 bp, Homo sapiens
aagagaatcacttaa

SEQ ID NO: 430378 - DNA, 15 bp, Homo sapiens
caagagaatcactta

SEQ ID NO: 430379 - DNA, 15 bp, Homo sapiens
acaagagaatcactt

SEQ ID NO: 430380 - DNA, 15 bp, Homo sapiens
gacaagagaatcact

SEQ ID NO: 430381 - DNA, 15 bp, Homo sapiens
agacaagagaatcac

SEQ ID NO: 430382 - DNA, 15 bp, Homo sapiens
gagacaagagaatca

SEQ ID NO: 430383 - DNA, 15 bp, Homo sapiens
tgagacaagagaatc

SEQ ID NO: 430384 - DNA, 15 bp, Homo sapiens
ctgagacaagagaat

SEQ ID NO: 430385 - DNA, 15 bp, Homo sapiens
gctgagacaagagaa

SEQ ID NO: 430386 - DNA, 15 bp, Homo sapiens
ggctgagacaagaga

SEQ ID NO: 430387 - DNA, 15 bp, Homo sapiens
aggctgagacaagag

SEQ ID NO: 430388 - DNA, 15 bp, Homo sapiens
gaggctgagacaaga

SEQ ID NO: 430389 - DNA, 15 bp, Homo sapiens
ggaggctgagacaag

SEQ ID NO: 430390 - DNA, 15 bp, Homo sapiens
gggaggctgagacaa

SEQ ID NO: 430391 - DNA, 15 bp, Homo sapiens
tgggaggctgagaca

SEQ ID NO: 430392 - DNA, 15 bp, Homo sapiens
ttgggaggctgagac

SEQ ID NO: 430393 - DNA, 15 bp, Homo sapiens
cttgggaggctgaga

SEQ ID NO: 430394 - DNA, 15 bp, Homo sapiens
ataatcccagctact

SEQ ID NO: 430395 - DNA, 15 bp, Homo sapiens
cataatcccagctac

SEQ ID NO: 430396 - DNA, 15 bp, Homo sapiens
ccataatcccagcta

SEQ ID NO: 430397 - DNA, 15 bp, Homo sapiens
cccataatcccagct

SEQ ID NO: 430398 - DNA, 15 bp, Homo sapiens
acccataatcccagc

SEQ ID NO: 430399 - DNA, 15 bp, Homo sapiens
cacccataatcccag

SEQ ID NO: 430400 - DNA, 15 bp, Homo sapiens
acacccataatccca

SEQ ID NO: 430401 - DNA, 15 bp, Homo sapiens
cacacccataatccc

SEQ ID NO: 430402 - DNA, 15 bp, Homo sapiens
acacacccataatcc

SEQ ID NO: 430403 - DNA, 15 bp, Homo sapiens
cacacacccataatc

SEQ ID NO: 430404 - DNA, 15 bp, Homo sapiens
gcacacacccataat

SEQ ID NO: 430405 - DNA, 15 bp, Homo sapiens
ggcacacacccataa

SEQ ID NO: 430406 - DNA, 15 bp, Homo sapiens
tggcacacacccata

SEQ ID NO: 430407 - DNA, 15 bp, Homo sapiens
gtggcacacacccat

SEQ ID NO: 430408 - DNA, 15 bp, Homo sapiens
ggtggcacacaccca

SEQ ID NO: 430409 - DNA, 15 bp, Homo sapiens
tggtggcacacaccc

SEQ ID NO: 430410 - DNA, 15 bp, Homo sapiens
gtggtggcacacacc

SEQ ID NO: 430411 - DNA, 15 bp, Homo sapiens
cgtggtggcacacac

SEQ ID NO: 430412 - DNA, 15 bp, Homo sapiens
gcgtggtggcacaca

SEQ ID NO: 430413 - DNA, 15 bp, Homo sapiens
ggcgtggtggcacac

SEQ ID NO: 430414 - DNA, 15 bp, Homo sapiens
gggcgtggtggcaca

SEQ ID NO: 430415 - DNA, 15 bp, Homo sapiens
agggcgtggtggcac

SEQ ID NO: 430416 - DNA, 15 bp, Homo sapiens
cagggcgtggtggca

SEQ ID NO: 430417 - DNA, 15 bp, Homo sapiens
gcagggcgtggtggc

SEQ ID NO: 430418 - DNA, 15 bp, Homo sapiens
agcagggcgtggtgg

SEQ ID NO: 430419 - DNA, 15 bp, Homo sapiens
tagcagggcgtggtg

SEQ ID NO: 430420 - DNA, 15 bp, Homo sapiens
ttagcagggcgtggt

SEQ ID NO: 430421 - DNA, 15 bp, Homo sapiens
attagcagggcgtgg

SEQ ID NO: 430422 - DNA, 15 bp, Homo sapiens
aattagcagggcgtg

SEQ ID NO: 430423 - DNA, 15 bp, Homo sapiens
aaattagcagggcgt

SEQ ID NO: 430424 - DNA, 15 bp, Homo sapiens
aaaattagcagggcg

SEQ ID NO: 430425 - DNA, 15 bp, Homo sapiens
aaaaattagcagggc

SEQ ID NO: 430426 - DNA, 15 bp, Homo sapiens
caaaaattagcaggg

SEQ ID NO: 430427 - DNA, 15 bp, Homo sapiens
acaaaaattagcagg

SEQ ID NO: 430428 - DNA, 15 bp, Homo sapiens
tacaaaaattagcag

SEQ ID NO: 430429 - DNA, 15 bp, Homo sapiens
atacaaaaattagca

SEQ ID NO: 430430 - DNA, 15 bp, Homo sapiens
gaaaatacaaaaatt

SEQ ID NO: 430431 - DNA, 15 bp, Homo sapiens
tgaaaatacaaaaat

SEQ ID NO: 430432 - DNA, 15 bp, Homo sapiens
ctgaaaatacaaaaa

SEQ ID NO: 430433 - DNA, 15 bp, Homo sapiens
actgaaaatacaaaa

SEQ ID NO: 430434 - DNA, 15 bp, Homo sapiens
tactgaaaatacaaa

SEQ ID NO: 430435 - DNA, 15 bp, Homo sapiens
ctactgaaaatacaa

SEQ ID NO: 430436 - DNA, 15 bp, Homo sapiens
tctactgaaaataca

SEQ ID NO: 430437 - DNA, 15 bp, Homo sapiens
ctctactgaaaatac

SEQ ID NO: 430438 - DNA, 15 bp, Homo sapiens
tctctactgaaaata

SEQ ID NO: 430439 - DNA, 15 bp, Homo sapiens
atctctactgaaaat

SEQ ID NO: 430440 - DNA, 15 bp, Homo sapiens
catctctactgaaaa

SEQ ID NO: 430441 - DNA, 15 bp, Homo sapiens
ccatctctactgaaa

SEQ ID NO: 430442 - DNA, 15 bp, Homo sapiens
cccatctctactgaa

SEQ ID NO: 430443 - DNA, 15 bp, Homo sapiens
ccccatctctactga

SEQ ID NO: 430444 - DNA, 15 bp, Homo sapiens
accccatctctactg

SEQ ID NO: 430445 - DNA, 15 bp, Homo sapiens
aaccccatctctact

SEQ ID NO: 430446 - DNA, 15 bp, Homo sapiens
aaaaccccatctcta

SEQ ID NO: 430447 - DNA, 15 bp, Homo sapiens
taaaaccccatctct

SEQ ID NO: 430448 - DNA, 15 bp, Homo sapiens
gtaaaaccccatctc

SEQ ID NO: 430449 - DNA, 15 bp, Homo sapiens
ggtaaaaccccatct

SEQ ID NO: 430450 - DNA, 15 bp, Homo sapiens
gggtaaaaccccatc

SEQ ID NO: 430451 - DNA, 15 bp, Homo sapiens
agggtaaaaccccat

SEQ ID NO: 430452 - DNA, 15 bp, Homo sapiens
cagggtaaaacccca

SEQ ID NO: 430453 - DNA, 15 bp, Homo sapiens
gcagggtaaaacccc

SEQ ID NO: 430454 - DNA, 15 bp, Homo sapiens
agcagggtaaaaccc

SEQ ID NO: 430455 - DNA, 15 bp, Homo sapiens
cagcagggtaaaacc

SEQ ID NO: 430456 - DNA, 15 bp, Homo sapiens
acagcagggtaaaac

SEQ ID NO: 430457 - DNA, 15 bp, Homo sapiens
gacagcagggtaaaa

SEQ ID NO: 430458 - DNA, 15 bp, Homo sapiens
ggacagcagggtaaa

SEQ ID NO: 430459 - DNA, 15 bp, Homo sapiens
tggacagcagggtaa

SEQ ID NO: 430460 - DNA, 15 bp, Homo sapiens
ctggacagcagggta

SEQ ID NO: 430461 - DNA, 15 bp, Homo sapiens
cctggacagcagggt

SEQ ID NO: 430462 - DNA, 15 bp, Homo sapiens
gcctggacagcaggg

SEQ ID NO: 430463 - DNA, 15 bp, Homo sapiens
agcctggacagcagg

SEQ ID NO: 430464 - DNA, 15 bp, Homo sapiens
cagcctggacagcag

SEQ ID NO: 430465 - DNA, 15 bp, Homo sapiens
ccagcctggacagca

SEQ ID NO: 430466 - DNA, 15 bp, Homo sapiens
accagcctggacagc

SEQ ID NO: 430467 - DNA, 15 bp, Homo sapiens
gaccagcctggacag

SEQ ID NO: 430468 - DNA, 15 bp, Homo sapiens
agaccagcctggaca

SEQ ID NO: 430469 - DNA, 15 bp, Homo sapiens
gagaccagcctggac

SEQ ID NO: 430470 - DNA, 15 bp, Homo sapiens
tgagaccagcctgga

SEQ ID NO: 430471 - DNA, 15 bp, Homo sapiens
ttgagaccagcctgg

SEQ ID NO: 430472 - DNA, 15 bp, Homo sapiens
gatcacttgaggtca

SEQ ID NO: 430473 - DNA, 15 bp, Homo sapiens
agatcacttgaggtc

SEQ ID NO: 430474 - DNA, 15 bp, Homo sapiens
cagatcacttgaggt

SEQ ID NO: 430475 - DNA, 15 bp, Homo sapiens
gcagatcacttgagg

SEQ ID NO: 430476 - DNA, 15 bp, Homo sapiens
gggcagatcacttga

SEQ ID NO: 430477 - DNA, 15 bp, Homo sapiens
cgggcagatcacttg

SEQ ID NO: 430478 - DNA, 15 bp, Homo sapiens
gcgggcagatcactt

SEQ ID NO: 430479 - DNA, 15 bp, Homo sapiens
ggcgggcagatcact

SEQ ID NO: 430480 - DNA, 15 bp, Homo sapiens
aggcgggcagatcac

SEQ ID NO: 430481 - DNA, 15 bp, Homo sapiens
gaggcgggcagatca

SEQ ID NO: 430482 - DNA, 15 bp, Homo sapiens
tgaggcgggcagatc

SEQ ID NO: 430483 - DNA, 15 bp, Homo sapiens
ttgaggcgggcagat

SEQ ID NO: 430484 - DNA, 15 bp, Homo sapiens
gttgaggcgggcaga

SEQ ID NO: 430485 - DNA, 15 bp, Homo sapiens
ggttgaggcgggcag

SEQ ID NO: 430486 - DNA, 15 bp, Homo sapiens
aggttgaggcgggca

SEQ ID NO: 430487 - DNA, 15 bp, Homo sapiens
gaggttgaggcgggc

SEQ ID NO: 430488 - DNA, 15 bp, Homo sapiens
ggaggttgaggcggg

SEQ ID NO: 430489 - DNA, 15 bp, Homo sapiens
gggaggttgaggcgg

SEQ ID NO: 430490 - DNA, 15 bp, Homo sapiens
tgggaggttgaggcg

SEQ ID NO: 430491 - DNA, 15 bp, Homo sapiens
ttgggaggttgaggc

SEQ ID NO: 430492 - DNA, 15 bp, Homo sapiens
tttgggaggttgagg

SEQ ID NO: 430493 - DNA, 15 bp, Homo sapiens
ctttgggaggttgag

SEQ ID NO: 430494 - DNA, 15 bp, Homo sapiens
actttgggaggttga

SEQ ID NO: 430495 - DNA, 15 bp, Homo sapiens
cactttgggaggttg

SEQ ID NO: 430496 - DNA, 15 bp, Homo sapiens
acactttgggaggtt

SEQ ID NO: 430497 - DNA, 15 bp, Homo sapiens
aacactttgggaggt

SEQ ID NO: 430498 - DNA, 15 bp, Homo sapiens
caacactttgggagg

SEQ ID NO: 430499 - DNA, 15 bp, Homo sapiens
ccaacactttgggag

SEQ ID NO: 430500 - DNA, 15 bp, Homo sapiens
tccaacactttggga

SEQ ID NO: 430501 - DNA, 15 bp, Homo sapiens
ttccaacactttggg

SEQ ID NO: 430502 - DNA, 15 bp, Homo sapiens
attccaacactttgg

SEQ ID NO: 430503 - DNA, 15 bp, Homo sapiens
aattccaacactttg

SEQ ID NO: 430504 - DNA, 15 bp, Homo sapiens
taattccaacacttt

SEQ ID NO: 430505 - DNA, 15 bp, Homo sapiens
gtaattccaacactt

SEQ ID NO: 430506 - DNA, 15 bp, Homo sapiens
tgtaattccaacact

SEQ ID NO: 430507 - DNA, 15 bp, Homo sapiens
ctgtaattccaacac

SEQ ID NO: 430508 - DNA, 15 bp, Homo sapiens
cctgtaattccaaca

SEQ ID NO: 430509 - DNA, 15 bp, Homo sapiens
gcctgtaattccaac

SEQ ID NO: 430510 - DNA, 15 bp, Homo sapiens
cgcctgtaattccaa

SEQ ID NO: 430511 - DNA, 15 bp, Homo sapiens
acgcctgtaattcca

SEQ ID NO: 430512 - DNA, 15 bp, Homo sapiens
cacgcctgtaattcc

SEQ ID NO: 430513 - DNA, 15 bp, Homo sapiens
tcacgcctgtaattc

SEQ ID NO: 430514 - DNA, 15 bp, Homo sapiens
ctcacgcctgtaatt

SEQ ID NO: 430515 - DNA, 15 bp, Homo sapiens
atggctcacgcctgt

SEQ ID NO: 430516 - DNA, 15 bp, Homo sapiens
catggctcacgcctg

SEQ ID NO: 430517 - DNA, 15 bp, Homo sapiens
ccatggctcacgcct

SEQ ID NO: 430518 - DNA, 15 bp, Homo sapiens
accatggctcacgcc

SEQ ID NO: 430519 - DNA, 15 bp, Homo sapiens
taccatggctcacgc

SEQ ID NO: 430520 - DNA, 15 bp, Homo sapiens
gtaccatggctcacg

SEQ ID NO: 430521 - DNA, 15 bp, Homo sapiens
ggtaccatggctcac

SEQ ID NO: 430522 - DNA, 15 bp, Homo sapiens
aggtaccatggctca

SEQ ID NO: 430523 - DNA, 15 bp, Homo sapiens
caggtaccatggctc

SEQ ID NO: 430524 - DNA, 15 bp, Homo sapiens
ccaggtaccatggct

SEQ ID NO: 430525 - DNA, 15 bp, Homo sapiens
gccaggtaccatggc

SEQ ID NO: 430526 - DNA, 15 bp, Homo sapiens
ggccaggtaccatgg

SEQ ID NO: 430527 - DNA, 15 bp, Homo sapiens
tggccaggtaccatg

SEQ ID NO: 430528 - DNA, 15 bp, Homo sapiens
ttggccaggtaccat

SEQ ID NO: 430529 - DNA, 15 bp, Homo sapiens
cttggccaggtacca

SEQ ID NO: 430530 - DNA, 15 bp, Homo sapiens
tcttggccaggtacc

SEQ ID NO: 430531 - DNA, 15 bp, Homo sapiens
ttcttggccaggtac

SEQ ID NO: 430532 - DNA, 15 bp, Homo sapiens
tttcttggccaggta

SEQ ID NO: 430533 - DNA, 15 bp, Homo sapiens
ctttcttggccaggt

SEQ ID NO: 430534 - DNA, 15 bp, Homo sapiens
actttcttggccagg

SEQ ID NO: 430535 - DNA, 15 bp, Homo sapiens
aactttcttggccag

SEQ ID NO: 430536 - DNA, 15 bp, Homo sapiens
aaactttcttggcca

SEQ ID NO: 430537 - DNA, 15 bp, Homo sapiens
aaaactttcttggcc

SEQ ID NO: 430538 - DNA, 15 bp, Homo sapiens
gaaaactttcttggc

SEQ ID NO: 430539 - DNA, 15 bp, Homo sapiens
agaaaactttcttgg

SEQ ID NO: 430540 - DNA, 15 bp, Homo sapiens
aagaaaactttcttg

SEQ ID NO: 430541 - DNA, 15 bp, Homo sapiens
taagaaaactttctt

SEQ ID NO: 430542 - DNA, 15 bp, Homo sapiens
ttaagaaaactttct

SEQ ID NO: 430543 - DNA, 15 bp, Homo sapiens
cttaagaaaactttc

SEQ ID NO: 430544 - DNA, 15 bp, Homo sapiens
acttaagaaaacttt

SEQ ID NO: 430545 - DNA, 15 bp, Homo sapiens
gacttaagaaaactt

SEQ ID NO: 430546 - DNA, 15 bp, Homo sapiens
ggacttaagaaaact

SEQ ID NO: 430547 - DNA, 15 bp, Homo sapiens
gggacttaagaaaac

SEQ ID NO: 430548 - DNA, 15 bp, Homo sapiens
agggacttaagaaaa

SEQ ID NO: 430549 - DNA, 15 bp, Homo sapiens
gagggacttaagaaa

SEQ ID NO: 430550 - DNA, 15 bp, Homo sapiens
agagggacttaagaa

SEQ ID NO: 430551 - DNA, 15 bp, Homo sapiens
cagagggacttaaga

SEQ ID NO: 430552 - DNA, 15 bp, Homo sapiens
acagagggacttaag

SEQ ID NO: 430553 - DNA, 15 bp, Homo sapiens
gacagagggacttaa

SEQ ID NO: 430554 - DNA, 15 bp, Homo sapiens
ggacagagggactta

SEQ ID NO: 430555 - DNA, 15 bp, Homo sapiens
gggacagagggactt

SEQ ID NO: 430556 - DNA, 15 bp, Homo sapiens
agggacagagggact

SEQ ID NO: 430557 - DNA, 15 bp, Homo sapiens
gagggacagagggac

SEQ ID NO: 430558 - DNA, 15 bp, Homo sapiens
tgagggacagaggga

SEQ ID NO: 430559 - DNA, 15 bp, Homo sapiens
ctgagggacagaggg

SEQ ID NO: 430560 - DNA, 15 bp, Homo sapiens
actgagggacagagg

SEQ ID NO: 430561 - DNA, 15 bp, Homo sapiens
aactgagggacagag

SEQ ID NO: 430562 - DNA, 15 bp, Homo sapiens
aaactgagggacaga

SEQ ID NO: 430563 - DNA, 15 bp, Homo sapiens
gaaactgagggacag

SEQ ID NO: 430564 - DNA, 15 bp, Homo sapiens
ggaaactgagggaca

SEQ ID NO: 430565 - DNA, 15 bp, Homo sapiens
aggaaactgagggac

SEQ ID NO: 430566 - DNA, 15 bp, Homo sapiens
gaggaaactgaggga

SEQ ID NO: 430567 - DNA, 15 bp, Homo sapiens
tgaggaaactgaggg

SEQ ID NO: 430568 - DNA, 15 bp, Homo sapiens
atgaggaaactgagg

SEQ ID NO: 430569 - DNA, 15 bp, Homo sapiens
gatgaggaaactgag

SEQ ID NO: 430570 - DNA, 15 bp, Homo sapiens
ggatgaggaaactga

SEQ ID NO: 430571 - DNA, 15 bp, Homo sapiens
tggatgaggaaactg

SEQ ID NO: 430572 - DNA, 15 bp, Homo sapiens
ttggatgaggaaact

SEQ ID NO: 430573 - DNA, 15 bp, Homo sapiens
tttggatgaggaaac

SEQ ID NO: 430574 - DNA, 15 bp, Homo sapiens
ttttggatgaggaaa

SEQ ID NO: 430575 - DNA, 15 bp, Homo sapiens
tttttggatgaggaa

SEQ ID NO: 430576 - DNA, 15 bp, Homo sapiens
atttttggatgagga

SEQ ID NO: 430577 - DNA, 15 bp, Homo sapiens
catttttggatgagg

SEQ ID NO: 430578 - DNA, 15 bp, Homo sapiens
ccatttttggatgag

SEQ ID NO: 430579 - DNA, 15 bp, Homo sapiens
tccatttttggatga

SEQ ID NO: 430580 - DNA, 15 bp, Homo sapiens
ttccatttttggatg

SEQ ID NO: 430581 - DNA, 15 bp, Homo sapiens
cttccatttttggat

SEQ ID NO: 430582 - DNA, 15 bp, Homo sapiens
acttccatttttgga

SEQ ID NO: 430583 - DNA, 15 bp, Homo sapiens
tacttccatttttgg

SEQ ID NO: 430584 - DNA, 15 bp, Homo sapiens
ttacttccatttttg

SEQ ID NO: 430585 - DNA, 15 bp, Homo sapiens
attacttccattttt

SEQ ID NO: 430586 - DNA, 15 bp, Homo sapiens
aattacttccatttt

SEQ ID NO: 430587 - DNA, 15 bp, Homo sapiens
taattacttccattt

SEQ ID NO: 430588 - DNA, 15 bp, Homo sapiens
ataattacttccatt

SEQ ID NO: 430589 - DNA, 15 bp, Homo sapiens
tataattacttccat

SEQ ID NO: 430590 - DNA, 15 bp, Homo sapiens
ttataattacttcca

SEQ ID NO: 430591 - DNA, 15 bp, Homo sapiens
attataattacttcc

SEQ ID NO: 430592 - DNA, 15 bp, Homo sapiens
tattataattacttc

SEQ ID NO: 430593 - DNA, 15 bp, Homo sapiens
atattataattactt

SEQ ID NO: 430594 - DNA, 15 bp, Homo sapiens
aatattataattact

SEQ ID NO: 430595 - DNA, 15 bp, Homo sapiens
aaatattataattac

SEQ ID NO: 430596 - DNA, 15 bp, Homo sapiens
caaatattataatta

SEQ ID NO: 430597 - DNA, 15 bp, Homo sapiens
gcaaatattataatt

SEQ ID NO: 430598 - DNA, 15 bp, Homo sapiens
agcaaatattataat

SEQ ID NO: 430599 - DNA, 15 bp, Homo sapiens
gagcaaatattataa

SEQ ID NO: 430600 - DNA, 15 bp, Homo sapiens
cgagcaaatattata

SEQ ID NO: 430601 - DNA, 15 bp, Homo sapiens
acgagcaaatattat

SEQ ID NO: 430602 - DNA, 15 bp, Homo sapiens
aacgagcaaatatta

SEQ ID NO: 430603 - DNA, 15 bp, Homo sapiens
aaacgagcaaatatt

SEQ ID NO: 430604 - DNA, 15 bp, Homo sapiens
caaacgagcaaatat

SEQ ID NO: 430605 - DNA, 15 bp, Homo sapiens
tcaaacgagcaaata

SEQ ID NO: 430606 - DNA, 15 bp, Homo sapiens
ttcaaacgagcaaat

SEQ ID NO: 430607 - DNA, 15 bp, Homo sapiens
attcaaacgagcaaa

SEQ ID NO: 430608 - DNA, 15 bp, Homo sapiens
aattcaaacgagcaa

SEQ ID NO: 430609 - DNA, 15 bp, Homo sapiens
taattcaaacgagca

SEQ ID NO: 430610 - DNA, 15 bp, Homo sapiens
ttaattcaaacgagc

SEQ ID NO: 430611 - DNA, 15 bp, Homo sapiens
attaattcaaacgag

SEQ ID NO: 430612 - DNA, 15 bp, Homo sapiens
cattaattcaaacga

SEQ ID NO: 430613 - DNA, 15 bp, Homo sapiens
gcattaattcaaacg

SEQ ID NO: 430614 - DNA, 15 bp, Homo sapiens
tgcattaattcaaac

SEQ ID NO: 430615 - DNA, 15 bp, Homo sapiens
ttgcattaattcaaa

SEQ ID NO: 430616 - DNA, 15 bp, Homo sapiens
gttgcattaattcaa

SEQ ID NO: 430617 - DNA, 15 bp, Homo sapiens
tgttgcattaattca

SEQ ID NO: 430618 - DNA, 15 bp, Homo sapiens
gtgttgcattaattc

SEQ ID NO: 430619 - DNA, 15 bp, Homo sapiens
agtgttgcattaatt

SEQ ID NO: 430620 - DNA, 15 bp, Homo sapiens
aagtgttgcattaat

SEQ ID NO: 430621 - DNA, 15 bp, Homo sapiens
caagtgttgcattaa

SEQ ID NO: 430622 - DNA, 15 bp, Homo sapiens
tcaagtgttgcatta

SEQ ID NO: 430623 - DNA, 15 bp, Homo sapiens
gtcaagtgttgcatt

SEQ ID NO: 430624 - DNA, 15 bp, Homo sapiens
tgtcaagtgttgcat

SEQ ID NO: 430625 - DNA, 15 bp, Homo sapiens
atgtcaagtgttgca

SEQ ID NO: 430626 - DNA, 15 bp, Homo sapiens
tatgtcaagtgttgc

SEQ ID NO: 430627 - DNA, 15 bp, Homo sapiens
atatgtcaagtgttg

SEQ ID NO: 430628 - DNA, 15 bp, Homo sapiens
tatatgtcaagtgtt

SEQ ID NO: 430629 - DNA, 15 bp, Homo sapiens
ctatatgtcaagtgt

SEQ ID NO: 430630 - DNA, 15 bp, Homo sapiens
actatatgtcaagtg

SEQ ID NO: 430631 - DNA, 15 bp, Homo sapiens
gactatatgtcaagt

SEQ ID NO: 430632 - DNA, 15 bp, Homo sapiens
tgactatatgtcaag

SEQ ID NO: 430633 - DNA, 15 bp, Homo sapiens
ttgactatatgtcaa

SEQ ID NO: 430634 - DNA, 15 bp, Homo sapiens
attgactatatgtca

SEQ ID NO: 430635 - DNA, 15 bp, Homo sapiens
tattgactatatgtc

SEQ ID NO: 430636 - DNA, 15 bp, Homo sapiens
ttattgactatatgt

SEQ ID NO: 430637 - DNA, 15 bp, Homo sapiens
tttattgactatatg

SEQ ID NO: 430638 - DNA, 15 bp, Homo sapiens
atttattgactatat

SEQ ID NO: 430639 - DNA, 15 bp, Homo sapiens
catttattgactata

SEQ ID NO: 430640 - DNA, 15 bp, Homo sapiens
gcatttattgactat

SEQ ID NO: 430641 - DNA, 15 bp, Homo sapiens
agcatttattgacta

SEQ ID NO: 430642 - DNA, 15 bp, Homo sapiens
cagcatttattgact

SEQ ID NO: 430643 - DNA, 15 bp, Homo sapiens
ccagcatttattgac

SEQ ID NO: 430644 - DNA, 15 bp, Homo sapiens
accagcatttattga

SEQ ID NO: 430645 - DNA, 15 bp, Homo sapiens
aaccagcatttattg

SEQ ID NO: 430646 - DNA, 15 bp, Homo sapiens
caaccagcatttatt

SEQ ID NO: 430647 - DNA, 15 bp, Homo sapiens
acaaccagcatttat

SEQ ID NO: 430648 - DNA, 15 bp, Homo sapiens
cacaaccagcattta

SEQ ID NO: 430649 - DNA, 15 bp, Homo sapiens
tcacaaccagcattt

SEQ ID NO: 430650 - DNA, 15 bp, Homo sapiens
atcacaaccagcatt

SEQ ID NO: 430651 - DNA, 15 bp, Homo sapiens
catcacaaccagcat

SEQ ID NO: 430652 - DNA, 15 bp, Homo sapiens
tcatcacaaccagca

SEQ ID NO: 430653 - DNA, 15 bp, Homo sapiens
atcatcacaaccagc

SEQ ID NO: 430654 - DNA, 15 bp, Homo sapiens
catcatcacaaccag

SEQ ID NO: 430655 - DNA, 15 bp, Homo sapiens
tcatcatcacaacca

SEQ ID NO: 430656 - DNA, 15 bp, Homo sapiens
gtcatcatcacaacc

SEQ ID NO: 430657 - DNA, 15 bp, Homo sapiens
cgtcatcatcacaac

SEQ ID NO: 430658 - DNA, 15 bp, Homo sapiens
acgtcatcatcacaa

SEQ ID NO: 430659 - DNA, 15 bp, Homo sapiens
aacgtcatcatcaca

SEQ ID NO: 430660 - DNA, 15 bp, Homo sapiens
taacgtcatcatcac

SEQ ID NO: 430661 - DNA, 15 bp, Homo sapiens
gtaacgtcatcatca

SEQ ID NO: 430662 - DNA, 15 bp, Homo sapiens
ggtaacgtcatcatc

SEQ ID NO: 430663 - DNA, 15 bp, Homo sapiens
tggtaacgtcatcat

SEQ ID NO: 430664 - DNA, 15 bp, Homo sapiens
atggtaacgtcatca

SEQ ID NO: 430665 - DNA, 15 bp, Homo sapiens
catggtaacgtcatc

SEQ ID NO: 430666 - DNA, 15 bp, Homo sapiens
acatggtaacgtcat

SEQ ID NO: 430667 - DNA, 15 bp, Homo sapiens
tacatggtaacgtca

SEQ ID NO: 430668 - DNA, 15 bp, Homo sapiens
ctacatggtaacgtc

SEQ ID NO: 430669 - DNA, 15 bp, Homo sapiens
cctacatggtaacgt

SEQ ID NO: 430670 - DNA, 15 bp, Homo sapiens
acctacatggtaacg

SEQ ID NO: 430671 - DNA, 15 bp, Homo sapiens
aacctacatggtaac

SEQ ID NO: 430672 - DNA, 15 bp, Homo sapiens
caacctacatggtaa

SEQ ID NO: 430673 - DNA, 15 bp, Homo sapiens
acaacctacatggta

SEQ ID NO: 430674 - DNA, 15 bp, Homo sapiens
aacaacctacatggt

SEQ ID NO: 430675 - DNA, 15 bp, Homo sapiens
taacaacctacatgg

SEQ ID NO: 430676 - DNA, 15 bp, Homo sapiens
ataacaacctacatg

SEQ ID NO: 430677 - DNA, 15 bp, Homo sapiens
aataacaacctacat

SEQ ID NO: 430678 - DNA, 15 bp, Homo sapiens
aaataacaacctaca

SEQ ID NO: 430679 - DNA, 15 bp, Homo sapiens
caaataacaacctac

SEQ ID NO: 430680 - DNA, 15 bp, Homo sapiens
acaaataacaaccta

SEQ ID NO: 430681 - DNA, 15 bp, Homo sapiens
cacaaataacaacct

SEQ ID NO: 430682 - DNA, 15 bp, Homo sapiens
ccacaaataacaacc

SEQ ID NO: 430683 - DNA, 15 bp, Homo sapiens
accacaaataacaac

SEQ ID NO: 430684 - DNA, 15 bp, Homo sapiens
gaccacaaataacaa

SEQ ID NO: 430685 - DNA, 15 bp, Homo sapiens
ggaccacaaataaca

SEQ ID NO: 430686 - DNA, 15 bp, Homo sapiens
aggaccacaaataac

SEQ ID NO: 430687 - DNA, 15 bp, Homo sapiens
gaggaccacaaataa

SEQ ID NO: 430688 - DNA, 15 bp, Homo sapiens
ggaggaccacaaata

SEQ ID NO: 430689 - DNA, 15 bp, Homo sapiens
gggaggaccacaaat

SEQ ID NO: 430690 - DNA, 15 bp, Homo sapiens
ggggaggaccacaaa

SEQ ID NO: 430691 - DNA, 15 bp, Homo sapiens
tggggaggaccacaa

SEQ ID NO: 430692 - DNA, 15 bp, Homo sapiens
ttggggaggaccaca

SEQ ID NO: 430693 - DNA, 15 bp, Homo sapiens
tttggggaggaccac

SEQ ID NO: 430694 - DNA, 15 bp, Homo sapiens
atttggggaggacca

SEQ ID NO: 430695 - DNA, 15 bp, Homo sapiens
catttggggaggacc

SEQ ID NO: 430696 - DNA, 15 bp, Homo sapiens
tcatttggggaggac

SEQ ID NO: 430697 - DNA, 15 bp, Homo sapiens
ctcatttggggagga

SEQ ID NO: 430698 - DNA, 15 bp, Homo sapiens
tctcatttggggagg

SEQ ID NO: 430699 - DNA, 15 bp, Homo sapiens
ctctcatttggggag

SEQ ID NO: 430700 - DNA, 15 bp, Homo sapiens
tctctcatttgggga

SEQ ID NO: 430701 - DNA, 15 bp, Homo sapiens
gtctctcatttgggg

SEQ ID NO: 430702 - DNA, 15 bp, Homo sapiens
tgtctctcatttggg

SEQ ID NO: 430703 - DNA, 15 bp, Homo sapiens
atgtctctcatttgg

SEQ ID NO: 430704 - DNA, 15 bp, Homo sapiens
gatgtctctcatttg

SEQ ID NO: 430705 - DNA, 15 bp, Homo sapiens
ggatgtctctcattt

SEQ ID NO: 430706 - DNA, 15 bp, Homo sapiens
tggatgtctctcatt

SEQ ID NO: 430707 - DNA, 15 bp, Homo sapiens
atggatgtctctcat

SEQ ID NO: 430708 - DNA, 15 bp, Homo sapiens
catggatgtctctca

SEQ ID NO: 430709 - DNA, 15 bp, Homo sapiens
ccatggatgtctctc

SEQ ID NO: 430710 - DNA, 15 bp, Homo sapiens
accatggatgtctct

SEQ ID NO: 430711 - DNA, 15 bp, Homo sapiens
caccatggatgtctc

SEQ ID NO: 430712 - DNA, 15 bp, Homo sapiens
ccaccatggatgtct

SEQ ID NO: 430713 - DNA, 15 bp, Homo sapiens
tccaccatggatgtc

SEQ ID NO: 430714 - DNA, 15 bp, Homo sapiens
ttccaccatggatgt

SEQ ID NO: 430715 - DNA, 15 bp, Homo sapiens
gttccaccatggatg

SEQ ID NO: 430716 - DNA, 15 bp, Homo sapiens
agttccaccatggat

SEQ ID NO: 430717 - DNA, 15 bp, Homo sapiens
tagttccaccatgga

SEQ ID NO: 430718 - DNA, 15 bp, Homo sapiens
atagttccaccatgg

SEQ ID NO: 430719 - DNA, 15 bp, Homo sapiens
aatagttccaccatg

SEQ ID NO: 430720 - DNA, 15 bp, Homo sapiens
taatagttccaccat

SEQ ID NO: 430721 - DNA, 15 bp, Homo sapiens
ataatagttccacca

SEQ ID NO: 430722 - DNA, 15 bp, Homo sapiens
cataatagttccacc

SEQ ID NO: 430723 - DNA, 15 bp, Homo sapiens
tcataatagttccac

SEQ ID NO: 430724 - DNA, 15 bp, Homo sapiens
ttcataatagttcca

SEQ ID NO: 430725 - DNA, 15 bp, Homo sapiens
cttcataatagttcc

SEQ ID NO: 430726 - DNA, 15 bp, Homo sapiens
gcttcataatagttc

SEQ ID NO: 430727 - DNA, 15 bp, Homo sapiens
ggcttcataatagtt

SEQ ID NO: 430728 - DNA, 15 bp, Homo sapiens
aggcttcataatagt

SEQ ID NO: 430729 - DNA, 15 bp, Homo sapiens
gaggcttcataatag

SEQ ID NO: 430730 - DNA, 15 bp, Homo sapiens
cgaggcttcataata

SEQ ID NO: 430731 - DNA, 15 bp, Homo sapiens
tcgaggcttcataat

SEQ ID NO: 430732 - DNA, 15 bp, Homo sapiens
ttcgaggcttcataa

SEQ ID NO: 430733 - DNA, 15 bp, Homo sapiens
tttcgaggcttcata

SEQ ID NO: 430734 - DNA, 15 bp, Homo sapiens
ttttcgaggcttcat

SEQ ID NO: 430735 - DNA, 15 bp, Homo sapiens
gttttcgaggcttca

SEQ ID NO: 430736 - DNA, 15 bp, Homo sapiens
ggttttcgaggcttc

SEQ ID NO: 430737 - DNA, 15 bp, Homo sapiens
tggttttcgaggctt

SEQ ID NO: 430738 - DNA, 15 bp, Homo sapiens
gtggttttcgaggct

SEQ ID NO: 430739 - DNA, 15 bp, Homo sapiens
ggtggttttcgaggc

SEQ ID NO: 430740 - DNA, 15 bp, Homo sapiens
tggtggttttcgagg

SEQ ID NO: 430741 - DNA, 15 bp, Homo sapiens
ctggtggttttcgag

SEQ ID NO: 430742 - DNA, 15 bp, Homo sapiens
cctggtggttttcga

SEQ ID NO: 430743 - DNA, 15 bp, Homo sapiens
gcctggtggttttcg

SEQ ID NO: 430744 - DNA, 15 bp, Homo sapiens
agcctggtggttttc

SEQ ID NO: 430745 - DNA, 15 bp, Homo sapiens
aagcctggtggtttt

SEQ ID NO: 430746 - DNA, 15 bp, Homo sapiens
caagcctggtggttt

SEQ ID NO: 430747 - DNA, 15 bp, Homo sapiens
tcaagcctggtggtt

SEQ ID NO: 430748 - DNA, 15 bp, Homo sapiens
ttcaagcctggtggt

SEQ ID NO: 430749 - DNA, 15 bp, Homo sapiens
gttcaagcctggtgg

SEQ ID NO: 430750 - DNA, 15 bp, Homo sapiens
tgttcaagcctggtg

SEQ ID NO: 430751 - DNA, 15 bp, Homo sapiens
ttgttcaagcctggt

SEQ ID NO: 430752 - DNA, 15 bp, Homo sapiens
attgttcaagcctgg

SEQ ID NO: 430753 - DNA, 15 bp, Homo sapiens
gattgttcaagcctg

SEQ ID NO: 430754 - DNA, 15 bp, Homo sapiens
agattgttcaagcct

SEQ ID NO: 430755 - DNA, 15 bp, Homo sapiens
tagattgttcaagcc

SEQ ID NO: 430756 - DNA, 15 bp, Homo sapiens
ctagattgttcaagc

SEQ ID NO: 430757 - DNA, 15 bp, Homo sapiens
tctagattgttcaag

SEQ ID NO: 430758 - DNA, 15 bp, Homo sapiens
ttctagattgttcaa

SEQ ID NO: 430759 - DNA, 15 bp, Homo sapiens
tttctagattgttca

SEQ ID NO: 430760 - DNA, 15 bp, Homo sapiens
atttctagattgttc

SEQ ID NO: 430761 - DNA, 15 bp, Homo sapiens
tatttctagattgtt

SEQ ID NO: 430762 - DNA, 15 bp, Homo sapiens
ttatttctagattgt

SEQ ID NO: 430763 - DNA, 15 bp, Homo sapiens
tttatttctagattg

SEQ ID NO: 430764 - DNA, 15 bp, Homo sapiens
ttttatttctagatt

SEQ ID NO: 430765 - DNA, 15 bp, Homo sapiens
cttttatttctagat

SEQ ID NO: 430766 - DNA, 15 bp, Homo sapiens
ccttttatttctaga

SEQ ID NO: 430767 - DNA, 15 bp, Homo sapiens
gccttttatttctag

SEQ ID NO: 430768 - DNA, 15 bp, Homo sapiens
tgccttttatttcta

SEQ ID NO: 430769 - DNA, 15 bp, Homo sapiens
atgccttttatttct

SEQ ID NO: 430770 - DNA, 15 bp, Homo sapiens
aatgccttttatttc

SEQ ID NO: 430771 - DNA, 15 bp, Homo sapiens
aaatgccttttattt

SEQ ID NO: 430772 - DNA, 15 bp, Homo sapiens
caaatgccttttatt

SEQ ID NO: 430773 - DNA, 15 bp, Homo sapiens
acaaatgccttttat

SEQ ID NO: 430774 - DNA, 15 bp, Homo sapiens
cacaaatgcctttta

SEQ ID NO: 430775 - DNA, 15 bp, Homo sapiens
acacaaatgcctttt

SEQ ID NO: 430776 - DNA, 15 bp, Homo sapiens
cacacaaatgccttt

SEQ ID NO: 430777 - DNA, 15 bp, Homo sapiens
tcacacaaatgcctt

SEQ ID NO: 430778 - DNA, 15 bp, Homo sapiens
gtcacacaaatgcct

SEQ ID NO: 430779 - DNA, 15 bp, Homo sapiens
agtcacacaaatgcc

SEQ ID NO: 430780 - DNA, 15 bp, Homo sapiens
cagtcacacaaatgc

SEQ ID NO: 430781 - DNA, 15 bp, Homo sapiens
ccagtcacacaaatg

SEQ ID NO: 430782 - DNA, 15 bp, Homo sapiens
tccagtcacacaaat

SEQ ID NO: 430783 - DNA, 15 bp, Homo sapiens
atccagtcacacaaa

SEQ ID NO: 430784 - DNA, 15 bp, Homo sapiens
aatccagtcacacaa

SEQ ID NO: 430785 - DNA, 15 bp, Homo sapiens
gaatccagtcacaca

SEQ ID NO: 430786 - DNA, 15 bp, Homo sapiens
agaatccagtcacac

SEQ ID NO: 430787 - DNA, 15 bp, Homo sapiens
gagaatccagtcaca

SEQ ID NO: 430788 - DNA, 15 bp, Homo sapiens
cgagaatccagtcac

SEQ ID NO: 430789 - DNA, 15 bp, Homo sapiens
tcgagaatccagtca

SEQ ID NO: 430790 - DNA, 15 bp, Homo sapiens
ctcgagaatccagtc

SEQ ID NO: 430791 - DNA, 15 bp, Homo sapiens
actcgagaatccagt

SEQ ID NO: 430792 - DNA, 15 bp, Homo sapiens
aactcgagaatccag

SEQ ID NO: 430793 - DNA, 15 bp, Homo sapiens
gaactcgagaatcca

SEQ ID NO: 430794 - DNA, 15 bp, Homo sapiens
agaactcgagaatcc

SEQ ID NO: 430795 - DNA, 15 bp, Homo sapiens
aagaactcgagaatc

SEQ ID NO: 430796 - DNA, 15 bp, Homo sapiens
aaagaactcgagaat

SEQ ID NO: 430797 - DNA, 15 bp, Homo sapiens
aaaagaactcgagaa

SEQ ID NO: 430798 - DNA, 15 bp, Homo sapiens
aaaaagaactcgaga

SEQ ID NO: 430799 - DNA, 15 bp, Homo sapiens
gaaaaagaactcgag

SEQ ID NO: 430800 - DNA, 15 bp, Homo sapiens
ggaaaaagaactcga

SEQ ID NO: 430801 - DNA, 15 bp, Homo sapiens
tggaaaaagaactcg

SEQ ID NO: 430802 - DNA, 15 bp, Homo sapiens
ctggaaaaagaactc

SEQ ID NO: 430803 - DNA, 15 bp, Homo sapiens
gctggaaaaagaact

SEQ ID NO: 430804 - DNA, 15 bp, Homo sapiens
tgctggaaaaagaac

SEQ ID NO: 430805 - DNA, 15 bp, Homo sapiens
gtgctggaaaaagaa

SEQ ID NO: 430806 - DNA, 15 bp, Homo sapiens
ggtgctggaaaaaga

SEQ ID NO: 430807 - DNA, 15 bp, Homo sapiens
cggtgctggaaaaag

SEQ ID NO: 430808 - DNA, 15 bp, Homo sapiens
acggtgctggaaaaa

SEQ ID NO: 430809 - DNA, 15 bp, Homo sapiens
cacggtgctggaaaa

SEQ ID NO: 430810 - DNA, 15 bp, Homo sapiens
gcacggtgctggaaa

SEQ ID NO: 430811 - DNA, 15 bp, Homo sapiens
agcacggtgctggaa

SEQ ID NO: 430812 - DNA, 15 bp, Homo sapiens
aagcacggtgctgga

SEQ ID NO: 430813 - DNA, 15 bp, Homo sapiens
aaagcacggtgctgg

SEQ ID NO: 430814 - DNA, 15 bp, Homo sapiens
caaagcacggtgctg

SEQ ID NO: 430815 - DNA, 15 bp, Homo sapiens
ccaaagcacggtgct

SEQ ID NO: 430816 - DNA, 15 bp, Homo sapiens
tccaaagcacggtgc

SEQ ID NO: 430817 - DNA, 15 bp, Homo sapiens
gtccaaagcacggtg

SEQ ID NO: 430818 - DNA, 15 bp, Homo sapiens
agtccaaagcacggt

SEQ ID NO: 430819 - DNA, 15 bp, Homo sapiens
aagtccaaagcacgg

SEQ ID NO: 430820 - DNA, 15 bp, Homo sapiens
aaagtccaaagcacg

SEQ ID NO: 430821 - DNA, 15 bp, Homo sapiens
gaaagtccaaagcac

SEQ ID NO: 430822 - DNA, 15 bp, Homo sapiens
tgaaagtccaaagca

SEQ ID NO: 430823 - DNA, 15 bp, Homo sapiens
atgaaagtccaaagc

SEQ ID NO: 430824 - DNA, 15 bp, Homo sapiens
aatgaaagtccaaag

SEQ ID NO: 430825 - DNA, 15 bp, Homo sapiens
aaatgaaagtccaaa

SEQ ID NO: 430826 - DNA, 15 bp, Homo sapiens
gaaatgaaagtccaa

SEQ ID NO: 430827 - DNA, 15 bp, Homo sapiens
agaaatgaaagtcca

SEQ ID NO: 430828 - DNA, 15 bp, Homo sapiens
tagaaatgaaagtcc

SEQ ID NO: 430829 - DNA, 15 bp, Homo sapiens
ttagaaatgaaagtc

SEQ ID NO: 430830 - DNA, 15 bp, Homo sapiens
attagaaatgaaagt

SEQ ID NO: 430831 - DNA, 15 bp, Homo sapiens
aattagaaatgaaag

SEQ ID NO: 430832 - DNA, 15 bp, Homo sapiens
aaattagaaatgaaa

SEQ ID NO: 430833 - DNA, 15 bp, Homo sapiens
taaattagaaatgaa

SEQ ID NO: 430834 - DNA, 15 bp, Homo sapiens
ataaattagaaatga

SEQ ID NO: 430835 - DNA, 15 bp, Homo sapiens
cataaattagaaatg

SEQ ID NO: 430836 - DNA, 15 bp, Homo sapiens
acataaattagaaat

SEQ ID NO: 430837 - DNA, 15 bp, Homo sapiens
tacataaattagaaa

SEQ ID NO: 430838 - DNA, 15 bp, Homo sapiens
ttacataaattagaa

SEQ ID NO: 430839 - DNA, 15 bp, Homo sapiens
tttacataaattaga

SEQ ID NO: 430840 - DNA, 15 bp, Homo sapiens
ttttacataaattag

SEQ ID NO: 430841 - DNA, 15 bp, Homo sapiens
tttttacataaatta

SEQ ID NO: 430842 - DNA, 15 bp, Homo sapiens
atttttacataaatt

SEQ ID NO: 430843 - DNA, 15 bp, Homo sapiens
aatttttacataaat

SEQ ID NO: 430844 - DNA, 15 bp, Homo sapiens
gaatttttacataaa

SEQ ID NO: 430845 - DNA, 15 bp, Homo sapiens
agaatttttacataa

SEQ ID NO: 430846 - DNA, 15 bp, Homo sapiens
cagaatttttacata

SEQ ID NO: 430847 - DNA, 15 bp, Homo sapiens
ccagaatttttacat

SEQ ID NO: 430848 - DNA, 15 bp, Homo sapiens
gccagaatttttaca

SEQ ID NO: 430849 - DNA, 15 bp, Homo sapiens
tgccagaatttttac

SEQ ID NO: 430850 - DNA, 15 bp, Homo sapiens
ttgccagaattttta

SEQ ID NO: 430851 - DNA, 15 bp, Homo sapiens
attgccagaattttt

SEQ ID NO: 430852 - DNA, 15 bp, Homo sapiens
gattgccagaatttt

SEQ ID NO: 430853 - DNA, 15 bp, Homo sapiens
agattgccagaattt

SEQ ID NO: 430854 - DNA, 15 bp, Homo sapiens
tagattgccagaatt

SEQ ID NO: 430855 - DNA, 15 bp, Homo sapiens
gtagattgccagaat

SEQ ID NO: 430856 - DNA, 15 bp, Homo sapiens
cgtagattgccagaa

SEQ ID NO: 430857 - DNA, 15 bp, Homo sapiens
tcgtagattgccaga

SEQ ID NO: 430858 - DNA, 15 bp, Homo sapiens
atcgtagattgccag

SEQ ID NO: 430859 - DNA, 15 bp, Homo sapiens
catcgtagattgcca

SEQ ID NO: 430860 - DNA, 15 bp, Homo sapiens
tcatcgtagattgcc

SEQ ID NO: 430861 - DNA, 15 bp, Homo sapiens
atcatcgtagattgc

SEQ ID NO: 430862 - DNA, 15 bp, Homo sapiens
tatcatcgtagattg

SEQ ID NO: 430863 - DNA, 15 bp, Homo sapiens
gtatcatcgtagatt

SEQ ID NO: 430864 - DNA, 15 bp, Homo sapiens
tgtatcatcgtagat

SEQ ID NO: 430865 - DNA, 15 bp, Homo sapiens
gtgtatcatcgtaga

SEQ ID NO: 430866 - DNA, 15 bp, Homo sapiens
agtgtatcatcgtag

SEQ ID NO: 430867 - DNA, 15 bp, Homo sapiens
tagtgtatcatcgta

SEQ ID NO: 430868 - DNA, 15 bp, Homo sapiens
ttagtgtatcatcgt

SEQ ID NO: 430869 - DNA, 15 bp, Homo sapiens
cttagtgtatcatcg

SEQ ID NO: 430870 - DNA, 15 bp, Homo sapiens
acttagtgtatcatc

SEQ ID NO: 430871 - DNA, 15 bp, Homo sapiens
cacttagtgtatcat

SEQ ID NO: 430872 - DNA, 15 bp, Homo sapiens
tcacttagtgtatca

SEQ ID NO: 430873 - DNA, 15 bp, Homo sapiens
ttcacttagtgtatc

SEQ ID NO: 430874 - DNA, 15 bp, Homo sapiens
attcacttagtgtat

SEQ ID NO: 430875 - DNA, 15 bp, Homo sapiens
aattcacttagtgta

SEQ ID NO: 430876 - DNA, 15 bp, Homo sapiens
caattcacttagtgt

SEQ ID NO: 430877 - DNA, 15 bp, Homo sapiens
tcaattcacttagtg

SEQ ID NO: 430878 - DNA, 15 bp, Homo sapiens
ctcaattcacttagt

SEQ ID NO: 430879 - DNA, 15 bp, Homo sapiens
tctcaattcacttag

SEQ ID NO: 430880 - DNA, 15 bp, Homo sapiens
ttctcaattcactta

SEQ ID NO: 430881 - DNA, 15 bp, Homo sapiens
cttctcaattcactt

SEQ ID NO: 430882 - DNA, 15 bp, Homo sapiens
ccttctcaattcact

SEQ ID NO: 430883 - DNA, 15 bp, Homo sapiens
tccttctcaattcac

SEQ ID NO: 430884 - DNA, 15 bp, Homo sapiens
ttccttctcaattca

SEQ ID NO: 430885 - DNA, 15 bp, Homo sapiens
attccttctcaattc

SEQ ID NO: 430886 - DNA, 15 bp, Homo sapiens
gattccttctcaatt

SEQ ID NO: 430887 - DNA, 15 bp, Homo sapiens
agattccttctcaat

SEQ ID NO: 430888 - DNA, 15 bp, Homo sapiens
tagattccttctcaa

SEQ ID NO: 430889 - DNA, 15 bp, Homo sapiens
ctagattccttctca

SEQ ID NO: 430890 - DNA, 15 bp, Homo sapiens
cctagattccttctc

SEQ ID NO: 430891 - DNA, 15 bp, Homo sapiens
ccctagattccttct

SEQ ID NO: 430892 - DNA, 15 bp, Homo sapiens
tccctagattccttc

SEQ ID NO: 430893 - DNA, 15 bp, Homo sapiens
ctccctagattcctt

SEQ ID NO: 430894 - DNA, 15 bp, Homo sapiens
cctccctagattcct

SEQ ID NO: 430895 - DNA, 15 bp, Homo sapiens
tcctccctagattcc

SEQ ID NO: 430896 - DNA, 15 bp, Homo sapiens
atcctccctagattc

SEQ ID NO: 430897 - DNA, 15 bp, Homo sapiens
gatcctccctagatt

SEQ ID NO: 430898 - DNA, 15 bp, Homo sapiens
agatcctccctagat

SEQ ID NO: 430899 - DNA, 15 bp, Homo sapiens
cagatcctccctaga

SEQ ID NO: 430900 - DNA, 15 bp, Homo sapiens
tcagatcctccctag

SEQ ID NO: 430901 - DNA, 15 bp, Homo sapiens
ctcagatcctcccta

SEQ ID NO: 430902 - DNA, 15 bp, Homo sapiens
actcagatcctccct

SEQ ID NO: 430903 - DNA, 15 bp, Homo sapiens
aactcagatcctccc

SEQ ID NO: 430904 - DNA, 15 bp, Homo sapiens
taactcagatcctcc

SEQ ID NO: 430905 - DNA, 15 bp, Homo sapiens
ctaactcagatcctc

SEQ ID NO: 430906 - DNA, 15 bp, Homo sapiens
cctaactcagatcct

SEQ ID NO: 430907 - DNA, 15 bp, Homo sapiens
gcctaactcagatcc

SEQ ID NO: 430908 - DNA, 15 bp, Homo sapiens
agcctaactcagatc

SEQ ID NO: 430909 - DNA, 15 bp, Homo sapiens
aagcctaactcagat

SEQ ID NO: 430910 - DNA, 15 bp, Homo sapiens
gaagcctaactcaga

SEQ ID NO: 430911 - DNA, 15 bp, Homo sapiens
tgaagcctaactcag

SEQ ID NO: 430912 - DNA, 15 bp, Homo sapiens
gtgaagcctaactca

SEQ ID NO: 430913 - DNA, 15 bp, Homo sapiens
cgtgaagcctaactc

SEQ ID NO: 430914 - DNA, 15 bp, Homo sapiens
ccgtgaagcctaact

SEQ ID NO: 430915 - DNA, 15 bp, Homo sapiens
accgtgaagcctaac

SEQ ID NO: 430916 - DNA, 15 bp, Homo sapiens
taccgtgaagcctaa

SEQ ID NO: 430917 - DNA, 15 bp, Homo sapiens
ttaccgtgaagccta

SEQ ID NO: 430918 - DNA, 15 bp, Homo sapiens
gttaccgtgaagcct

SEQ ID NO: 430919 - DNA, 15 bp, Homo sapiens
agttaccgtgaagcc

SEQ ID NO: 430920 - DNA, 15 bp, Homo sapiens
aagttaccgtgaagc

SEQ ID NO: 430921 - DNA, 15 bp, Homo sapiens
caagttaccgtgaag

SEQ ID NO: 430922 - DNA, 15 bp, Homo sapiens
tcaagttaccgtgaa

SEQ ID NO: 430923 - DNA, 15 bp, Homo sapiens
ctcaagttaccgtga

SEQ ID NO: 430924 - DNA, 15 bp, Homo sapiens
tctcaagttaccgtg

SEQ ID NO: 430925 - DNA, 15 bp, Homo sapiens
ttctcaagttaccgt

SEQ ID NO: 430926 - DNA, 15 bp, Homo sapiens
attctcaagttaccg

SEQ ID NO: 430927 - DNA, 15 bp, Homo sapiens
tattctcaagttacc

SEQ ID NO: 430928 - DNA, 15 bp, Homo sapiens
ttattctcaagttac

SEQ ID NO: 430929 - DNA, 15 bp, Homo sapiens
tttattctcaagtta

SEQ ID NO: 430930 - DNA, 15 bp, Homo sapiens
ctttattctcaagtt

SEQ ID NO: 430931 - DNA, 15 bp, Homo sapiens
tctttattctcaagt

SEQ ID NO: 430932 - DNA, 15 bp, Homo sapiens
atctttattctcaag

SEQ ID NO: 430933 - DNA, 15 bp, Homo sapiens
aatctttattctcaa

SEQ ID NO: 430934 - DNA, 15 bp, Homo sapiens
aaatctttattctca

SEQ ID NO: 430935 - DNA, 15 bp, Homo sapiens
taaatctttattctc

SEQ ID NO: 430936 - DNA, 15 bp, Homo sapiens
ttaaatctttattct

SEQ ID NO: 430937 - DNA, 15 bp, Homo sapiens
cttaaatctttattc

SEQ ID NO: 430938 - DNA, 15 bp, Homo sapiens
ccttaaatctttatt

SEQ ID NO: 430939 - DNA, 15 bp, Homo sapiens
tccttaaatctttat

SEQ ID NO: 430940 - DNA, 15 bp, Homo sapiens
ttccttaaatcttta

SEQ ID NO: 430941 - DNA, 15 bp, Homo sapiens
tttccttaaatcttt

SEQ ID NO: 430942 - DNA, 15 bp, Homo sapiens
atttccttaaatctt

SEQ ID NO: 430943 - DNA, 15 bp, Homo sapiens
catttccttaaatct

SEQ ID NO: 430944 - DNA, 15 bp, Homo sapiens
ccatttccttaaatc

SEQ ID NO: 430945 - DNA, 15 bp, Homo sapiens
tccatttccttaaat

SEQ ID NO: 430946 - DNA, 15 bp, Homo sapiens
ctccatttccttaaa

SEQ ID NO: 430947 - DNA, 15 bp, Homo sapiens
gctccatttccttaa

SEQ ID NO: 430948 - DNA, 15 bp, Homo sapiens
ggctccatttcctta

SEQ ID NO: 430949 - DNA, 15 bp, Homo sapiens
tggctccatttcctt

SEQ ID NO: 430950 - DNA, 15 bp, Homo sapiens
atggctccatttcct

SEQ ID NO: 430951 - DNA, 15 bp, Homo sapiens
tatggctccatttcc

SEQ ID NO: 430952 - DNA, 15 bp, Homo sapiens
ttatggctccatttc

SEQ ID NO: 430953 - DNA, 15 bp, Homo sapiens
attatggctccattt

SEQ ID NO: 430954 - DNA, 15 bp, Homo sapiens
cattatggctccatt

SEQ ID NO: 430955 - DNA, 15 bp, Homo sapiens
tcattatggctccat

SEQ ID NO: 430956 - DNA, 15 bp, Homo sapiens
atcattatggctcca

SEQ ID NO: 430957 - DNA, 15 bp, Homo sapiens
aatcattatggctcc

SEQ ID NO: 430958 - DNA, 15 bp, Homo sapiens
aaatcattatggctc

SEQ ID NO: 430959 - DNA, 15 bp, Homo sapiens
aaaatcattatggct

SEQ ID NO: 430960 - DNA, 15 bp, Homo sapiens
aaaaatcattatggc

SEQ ID NO: 430961 - DNA, 15 bp, Homo sapiens
taaaaatcattatgg

SEQ ID NO: 430962 - DNA, 15 bp, Homo sapiens
ttaaaaatcattatg

SEQ ID NO: 430963 - DNA, 15 bp, Homo sapiens
cttaaaaatcattat

SEQ ID NO: 430964 - DNA, 15 bp, Homo sapiens
tcttaaaaatcatta

SEQ ID NO: 430965 - DNA, 15 bp, Homo sapiens
ttcttaaaaatcatt

SEQ ID NO: 430966 - DNA, 15 bp, Homo sapiens
attcttaaaaatcat

SEQ ID NO: 430967 - DNA, 15 bp, Homo sapiens
aattcttaaaaatca

SEQ ID NO: 430968 - DNA, 15 bp, Homo sapiens
aaattcttaaaaatc

SEQ ID NO: 430969 - DNA, 15 bp, Homo sapiens
caaattcttaaaaat

SEQ ID NO: 430970 - DNA, 15 bp, Homo sapiens
tcaaattcttaaaaa

SEQ ID NO: 430971 - DNA, 15 bp, Homo sapiens
atcaaattcttaaaa

SEQ ID NO: 430972 - DNA, 15 bp, Homo sapiens
catcaaattcttaaa

SEQ ID NO: 430973 - DNA, 15 bp, Homo sapiens
acatcaaattcttaa

SEQ ID NO: 430974 - DNA, 15 bp, Homo sapiens
aacatcaaattctta

SEQ ID NO: 430975 - DNA, 15 bp, Homo sapiens
aaacatcaaattctt

SEQ ID NO: 430976 - DNA, 15 bp, Homo sapiens
caaacatcaaattct

SEQ ID NO: 430977 - DNA, 15 bp, Homo sapiens
gcaaacatcaaattc

SEQ ID NO: 430978 - DNA, 15 bp, Homo sapiens
ggcaaacatcaaatt

SEQ ID NO: 430979 - DNA, 15 bp, Homo sapiens
aggcaaacatcaaat

SEQ ID NO: 430980 - DNA, 15 bp, Homo sapiens
aaggcaaacatcaaa

SEQ ID NO: 430981 - DNA, 15 bp, Homo sapiens
taaggcaaacatcaa

SEQ ID NO: 430982 - DNA, 15 bp, Homo sapiens
ttaaggcaaacatca

SEQ ID NO: 430983 - DNA, 15 bp, Homo sapiens
tttaaggcaaacatc

SEQ ID NO: 430984 - DNA, 15 bp, Homo sapiens
ttttaaggcaaacat

SEQ ID NO: 430985 - DNA, 15 bp, Homo sapiens
attttaaggcaaaca

SEQ ID NO: 430986 - DNA, 15 bp, Homo sapiens
cattttaaggcaaac

SEQ ID NO: 430987 - DNA, 15 bp, Homo sapiens
acattttaaggcaaa

SEQ ID NO: 430988 - DNA, 15 bp, Homo sapiens
tacattttaaggcaa

SEQ ID NO: 430989 - DNA, 15 bp, Homo sapiens
ctacattttaaggca

SEQ ID NO: 430990 - DNA, 15 bp, Homo sapiens
gctacattttaaggc

SEQ ID NO: 430991 - DNA, 15 bp, Homo sapiens
agctacattttaagg

SEQ ID NO: 430992 - DNA, 15 bp, Homo sapiens
aagctacattttaag

SEQ ID NO: 430993 - DNA, 15 bp, Homo sapiens
aaagctacattttaa

SEQ ID NO: 430994 - DNA, 15 bp, Homo sapiens
aaaagctacatttta

SEQ ID NO: 430995 - DNA, 15 bp, Homo sapiens
gaaaagctacatttt

SEQ ID NO: 430996 - DNA, 15 bp, Homo sapiens
tgaaaagctacattt

SEQ ID NO: 430997 - DNA, 15 bp, Homo sapiens
ctgaaaagctacatt

SEQ ID NO: 430998 - DNA, 15 bp, Homo sapiens
tctgaaaagctacat

SEQ ID NO: 430999 - DNA, 15 bp, Homo sapiens
gtctgaaaagctaca

SEQ ID NO: 431000 - DNA, 15 bp, Homo sapiens
ggtctgaaaagctac

SEQ ID NO: 431001 - DNA, 15 bp, Homo sapiens
tggtctgaaaagcta

SEQ ID NO: 431002 - DNA, 15 bp, Homo sapiens
ctggtctgaaaagct

SEQ ID NO: 431003 - DNA, 15 bp, Homo sapiens
cctggtctgaaaagc

SEQ ID NO: 431004 - DNA, 15 bp, Homo sapiens
acctggtctgaaaag

SEQ ID NO: 431005 - DNA, 15 bp, Homo sapiens
cacctggtctgaaaa

SEQ ID NO: 431006 - DNA, 15 bp, Homo sapiens
acacctggtctgaaa

SEQ ID NO: 431007 - DNA, 15 bp, Homo sapiens
cacacctggtctgaa

SEQ ID NO: 431008 - DNA, 15 bp, Homo sapiens
tcacacctggtctga

SEQ ID NO: 431009 - DNA, 15 bp, Homo sapiens
atcacacctggtctg

SEQ ID NO: 431010 - DNA, 15 bp, Homo sapiens
catcacacctggtct

SEQ ID NO: 431011 - DNA, 15 bp, Homo sapiens
ccatcacacctggtc

SEQ ID NO: 431012 - DNA, 15 bp, Homo sapiens
gccatcacacctggt

SEQ ID NO: 431013 - DNA, 15 bp, Homo sapiens
agccatcacacctgg

SEQ ID NO: 431014 - DNA, 15 bp, Homo sapiens
gagccatcacacctg

SEQ ID NO: 431015 - DNA, 15 bp, Homo sapiens
tgagccatcacacct

SEQ ID NO: 431016 - DNA, 15 bp, Homo sapiens
gtgagccatcacacc

SEQ ID NO: 431017 - DNA, 15 bp, Homo sapiens
tgtgagccatcacac

SEQ ID NO: 431018 - DNA, 15 bp, Homo sapiens
gtgtgagccatcaca

SEQ ID NO: 431019 - DNA, 15 bp, Homo sapiens
ggtgtgagccatcac

SEQ ID NO: 431020 - DNA, 15 bp, Homo sapiens
aggtgtgagccatca

SEQ ID NO: 431021 - DNA, 15 bp, Homo sapiens
caggtgtgagccatc

SEQ ID NO: 431022 - DNA, 15 bp, Homo sapiens
acaggtgtgagccat

SEQ ID NO: 431023 - DNA, 15 bp, Homo sapiens
gttacaggtgtgagc

SEQ ID NO: 431024 - DNA, 15 bp, Homo sapiens
ggttacaggtgtgag

SEQ ID NO: 431025 - DNA, 15 bp, Homo sapiens
gggttacaggtgtga

SEQ ID NO: 431026 - DNA, 15 bp, Homo sapiens
ggggttacaggtgtg

SEQ ID NO: 431027 - DNA, 15 bp, Homo sapiens
tggggttacaggtgt

SEQ ID NO: 431028 - DNA, 15 bp, Homo sapiens
ctggggttacaggtg

SEQ ID NO: 431029 - DNA, 15 bp, Homo sapiens
gctggggttacaggt

SEQ ID NO: 431030 - DNA, 15 bp, Homo sapiens
tgctggggttacagg

SEQ ID NO: 431031 - DNA, 15 bp, Homo sapiens
gtgctggggttacag

SEQ ID NO: 431032 - DNA, 15 bp, Homo sapiens
agtgctggggttaca

SEQ ID NO: 431033 - DNA, 15 bp, Homo sapiens
gagtgctggggttac

SEQ ID NO: 431034 - DNA, 15 bp, Homo sapiens
agagtgctggggtta

SEQ ID NO: 431035 - DNA, 15 bp, Homo sapiens
aagagtgctggggtt

SEQ ID NO: 431036 - DNA, 15 bp, Homo sapiens
taagagtgctggggt

SEQ ID NO: 431037 - DNA, 15 bp, Homo sapiens
ctaagagtgctgggg

SEQ ID NO: 431038 - DNA, 15 bp, Homo sapiens
tctaagagtgctggg

SEQ ID NO: 431039 - DNA, 15 bp, Homo sapiens
ctctaagagtgctgg

SEQ ID NO: 431040 - DNA, 15 bp, Homo sapiens
cctctaagagtgctg

SEQ ID NO: 431041 - DNA, 15 bp, Homo sapiens
gcctctaagagtgct

SEQ ID NO: 431042 - DNA, 15 bp, Homo sapiens
ggcctctaagagtgc

SEQ ID NO: 431043 - DNA, 15 bp, Homo sapiens
tggcctctaagagtg

SEQ ID NO: 431044 - DNA, 15 bp, Homo sapiens
ctggcctctaagagt

SEQ ID NO: 431045 - DNA, 15 bp, Homo sapiens
cctggcctctaagag

SEQ ID NO: 431046 - DNA, 15 bp, Homo sapiens
ccctggcctctaaga

SEQ ID NO: 431047 - DNA, 15 bp, Homo sapiens
accctggcctctaag

SEQ ID NO: 431048 - DNA, 15 bp, Homo sapiens
caccctggcctctaa

SEQ ID NO: 431049 - DNA, 15 bp, Homo sapiens
ccaccctggcctcta

SEQ ID NO: 431050 - DNA, 15 bp, Homo sapiens
cccaccctggcctct

SEQ ID NO: 431051 - DNA, 15 bp, Homo sapiens
tcccaccctggcctc

SEQ ID NO: 431052 - DNA, 15 bp, Homo sapiens
gtcccaccctggcct

SEQ ID NO: 431053 - DNA, 15 bp, Homo sapiens
tgtcccaccctggcc

SEQ ID NO: 431054 - DNA, 15 bp, Homo sapiens
ttgtcccaccctggc

SEQ ID NO: 431055 - DNA, 15 bp, Homo sapiens
attgtcccaccctgg

SEQ ID NO: 431056 - DNA, 15 bp, Homo sapiens
aattgtcccaccctg

SEQ ID NO: 431057 - DNA, 15 bp, Homo sapiens
caattgtcccaccct

SEQ ID NO: 431058 - DNA, 15 bp, Homo sapiens
tcaattgtcccaccc

SEQ ID NO: 431059 - DNA, 15 bp, Homo sapiens
ctcaattgtcccacc

SEQ ID NO: 431060 - DNA, 15 bp, Homo sapiens
gctcaattgtcccac

SEQ ID NO: 431061 - DNA, 15 bp, Homo sapiens
ggctcaattgtccca

SEQ ID NO: 431062 - DNA, 15 bp, Homo sapiens
gggctcaattgtccc

SEQ ID NO: 431063 - DNA, 15 bp, Homo sapiens
tgggctcaattgtcc

SEQ ID NO: 431064 - DNA, 15 bp, Homo sapiens
ctgggctcaattgtc

SEQ ID NO: 431065 - DNA, 15 bp, Homo sapiens
cctgggctcaattgt

SEQ ID NO: 431066 - DNA, 15 bp, Homo sapiens
tcctgggctcaattg

SEQ ID NO: 431067 - DNA, 15 bp, Homo sapiens
ctcctgggctcaatt

SEQ ID NO: 431068 - DNA, 15 bp, Homo sapiens
actcctgggctcaat

SEQ ID NO: 431069 - DNA, 15 bp, Homo sapiens
gaactcctgggctca

SEQ ID NO: 431070 - DNA, 15 bp, Homo sapiens
cgaactcctgggctc

SEQ ID NO: 431071 - DNA, 15 bp, Homo sapiens
tcgaactcctgggct

SEQ ID NO: 431072 - DNA, 15 bp, Homo sapiens
ctcgaactcctgggc

SEQ ID NO: 431073 - DNA, 15 bp, Homo sapiens
tctcgaactcctggg

SEQ ID NO: 431074 - DNA, 15 bp, Homo sapiens
gtctcgaactcctgg

SEQ ID NO: 431075 - DNA, 15 bp, Homo sapiens
ggtctcgaactcctg

SEQ ID NO: 431076 - DNA, 15 bp, Homo sapiens
tggtctcgaactcct

SEQ ID NO: 431077 - DNA, 15 bp, Homo sapiens
ctggtctcgaactcc

SEQ ID NO: 431078 - DNA, 15 bp, Homo sapiens
gctggtctcgaactc

SEQ ID NO: 431079 - DNA, 15 bp, Homo sapiens
ggctggtctcgaact

SEQ ID NO: 431080 - DNA, 15 bp, Homo sapiens
aggctggtctcgaac

SEQ ID NO: 431081 - DNA, 15 bp, Homo sapiens
caggctggtctcgaa

SEQ ID NO: 431082 - DNA, 15 bp, Homo sapiens
ccaggctggtctcga

SEQ ID NO: 431083 - DNA, 15 bp, Homo sapiens
tccaggctggtctcg

SEQ ID NO: 431084 - DNA, 15 bp, Homo sapiens
gtccaggctggtctc

SEQ ID NO: 431085 - DNA, 15 bp, Homo sapiens
tgtccaggctggtct

SEQ ID NO: 431086 - DNA, 15 bp, Homo sapiens
ttgtccaggctggtc

SEQ ID NO: 431087 - DNA, 15 bp, Homo sapiens
gttgtccaggctggt

SEQ ID NO: 431088 - DNA, 15 bp, Homo sapiens
ggttgtccaggctgg

SEQ ID NO: 431089 - DNA, 15 bp, Homo sapiens
tggttgtccaggctg

SEQ ID NO: 431090 - DNA, 15 bp, Homo sapiens
ttggttgtccaggct

SEQ ID NO: 431091 - DNA, 15 bp, Homo sapiens
tttggttgtccaggc

SEQ ID NO: 431092 - DNA, 15 bp, Homo sapiens
ctttggttgtccagg

SEQ ID NO: 431093 - DNA, 15 bp, Homo sapiens
cctttggttgtccag

SEQ ID NO: 431094 - DNA, 15 bp, Homo sapiens
tcctttggttgtcca

SEQ ID NO: 431095 - DNA, 15 bp, Homo sapiens
ctcctttggttgtcc

SEQ ID NO: 431096 - DNA, 15 bp, Homo sapiens
tctcctttggttgtc

SEQ ID NO: 431097 - DNA, 15 bp, Homo sapiens
gtctcctttggttgt

SEQ ID NO: 431098 - DNA, 15 bp, Homo sapiens
tgtctcctttggttg

SEQ ID NO: 431099 - DNA, 15 bp, Homo sapiens
ctgtctcctttggtt

SEQ ID NO: 431100 - DNA, 15 bp, Homo sapiens
tctgtctcctttggt

SEQ ID NO: 431101 - DNA, 15 bp, Homo sapiens
gtctgtctcctttgg

SEQ ID NO: 431102 - DNA, 15 bp, Homo sapiens
tgtctgtctcctttg

SEQ ID NO: 431103 - DNA, 15 bp, Homo sapiens
gtgtctgtctccttt

SEQ ID NO: 431104 - DNA, 15 bp, Homo sapiens
ggtgtctgtctcctt

SEQ ID NO: 431105 - DNA, 15 bp, Homo sapiens
aggtgtctgtctcct

SEQ ID NO: 431106 - DNA, 15 bp, Homo sapiens
aaggtgtctgtctcc

SEQ ID NO: 431107 - DNA, 15 bp, Homo sapiens
gaaggtgtctgtctc

SEQ ID NO: 431108 - DNA, 15 bp, Homo sapiens
agaaggtgtctgtct

SEQ ID NO: 431109 - DNA, 15 bp, Homo sapiens
gagaaggtgtctgtc

SEQ ID NO: 431110 - DNA, 15 bp, Homo sapiens
agagaaggtgtctgt

SEQ ID NO: 431111 - DNA, 15 bp, Homo sapiens
tagagaaggtgtctg

SEQ ID NO: 431112 - DNA, 15 bp, Homo sapiens
gtagagaaggtgtct

SEQ ID NO: 431113 - DNA, 15 bp, Homo sapiens
tgtagagaaggtgtc

SEQ ID NO: 431114 - DNA, 15 bp, Homo sapiens
ttgtagagaaggtgt

SEQ ID NO: 431115 - DNA, 15 bp, Homo sapiens
tttgtagagaaggtg

SEQ ID NO: 431116 - DNA, 15 bp, Homo sapiens
ttttgtagagaaggt

SEQ ID NO: 431117 - DNA, 15 bp, Homo sapiens
tttttgtagagaagg

SEQ ID NO: 431118 - DNA, 15 bp, Homo sapiens
ttttttgtagagaag

SEQ ID NO: 431119 - DNA, 15 bp, Homo sapiens
attttttgtagagaa

SEQ ID NO: 431120 - DNA, 15 bp, Homo sapiens
aattttttgtagaga

SEQ ID NO: 431121 - DNA, 15 bp, Homo sapiens
taattttttgtagag

SEQ ID NO: 431122 - DNA, 15 bp, Homo sapiens
ctaattttttgtaga

SEQ ID NO: 431123 - DNA, 15 bp, Homo sapiens
gctaattttttgtag

SEQ ID NO: 431124 - DNA, 15 bp, Homo sapiens
agctaattttttgta

SEQ ID NO: 431125 - DNA, 15 bp, Homo sapiens
cagctaattttttgt

SEQ ID NO: 431126 - DNA, 15 bp, Homo sapiens
ccagctaattttttg

SEQ ID NO: 431127 - DNA, 15 bp, Homo sapiens
cccagctaatttttt

SEQ ID NO: 431128 - DNA, 15 bp, Homo sapiens
acccagctaattttt

SEQ ID NO: 431129 - DNA, 15 bp, Homo sapiens
cacccagctaatttt

SEQ ID NO: 431130 - DNA, 15 bp, Homo sapiens
acacccagctaattt

SEQ ID NO: 431131 - DNA, 15 bp, Homo sapiens
cacacccagctaatt

SEQ ID NO: 431132 - DNA, 15 bp, Homo sapiens
ccacacccagctaat

SEQ ID NO: 431133 - DNA, 15 bp, Homo sapiens
accacacccagctaa

SEQ ID NO: 431134 - DNA, 15 bp, Homo sapiens
caccacacccagcta

SEQ ID NO: 431135 - DNA, 15 bp, Homo sapiens
ccaccacacccagct

SEQ ID NO: 431136 - DNA, 15 bp, Homo sapiens
tccaccacacccagc

SEQ ID NO: 431137 - DNA, 15 bp, Homo sapiens
ctccaccacacccag

SEQ ID NO: 431138 - DNA, 15 bp, Homo sapiens
actccaccacaccca

SEQ ID NO: 431139 - DNA, 15 bp, Homo sapiens
tactccaccacaccc

SEQ ID NO: 431140 - DNA, 15 bp, Homo sapiens
ctactccaccacacc

SEQ ID NO: 431141 - DNA, 15 bp, Homo sapiens
gctactccaccacac

SEQ ID NO: 431142 - DNA, 15 bp, Homo sapiens
agctactccaccaca

SEQ ID NO: 431143 - DNA, 15 bp, Homo sapiens
cagctactccaccac

SEQ ID NO: 431144 - DNA, 15 bp, Homo sapiens
acagctactccacca

SEQ ID NO: 431145 - DNA, 15 bp, Homo sapiens
tacagctactccacc

SEQ ID NO: 431146 - DNA, 15 bp, Homo sapiens
ctacagctactccac

SEQ ID NO: 431147 - DNA, 15 bp, Homo sapiens
actacagctactcca

SEQ ID NO: 431148 - DNA, 15 bp, Homo sapiens
gactacagctactcc

SEQ ID NO: 431149 - DNA, 15 bp, Homo sapiens
ggactacagctactc

SEQ ID NO: 431150 - DNA, 15 bp, Homo sapiens
aggactacagctact

SEQ ID NO: 431151 - DNA, 15 bp, Homo sapiens
taggactacagctac

SEQ ID NO: 431152 - DNA, 15 bp, Homo sapiens
ctaggactacagcta

SEQ ID NO: 431153 - DNA, 15 bp, Homo sapiens
gctaggactacagct

SEQ ID NO: 431154 - DNA, 15 bp, Homo sapiens
agctaggactacagc

SEQ ID NO: 431155 - DNA, 15 bp, Homo sapiens
tagctaggactacag

SEQ ID NO: 431156 - DNA, 15 bp, Homo sapiens
gtagctaggactaca

SEQ ID NO: 431157 - DNA, 15 bp, Homo sapiens
ttgagtagctaggac

SEQ ID NO: 431158 - DNA, 15 bp, Homo sapiens
cttgagtagctagga

SEQ ID NO: 431159 - DNA, 15 bp, Homo sapiens
tcttgagtagctagg

SEQ ID NO: 431160 - DNA, 15 bp, Homo sapiens
ctcttgagtagctag

SEQ ID NO: 431161 - DNA, 15 bp, Homo sapiens
cctcttgagtagcta

SEQ ID NO: 431162 - DNA, 15 bp, Homo sapiens
gcctcttgagtagct

SEQ ID NO: 431163 - DNA, 15 bp, Homo sapiens
agcctcttgagtagc

SEQ ID NO: 431164 - DNA, 15 bp, Homo sapiens
tagcctcttgagtag

SEQ ID NO: 431165 - DNA, 15 bp, Homo sapiens
ctagcctcttgagta

SEQ ID NO: 431166 - DNA, 15 bp, Homo sapiens
cctagcctcttgagt

SEQ ID NO: 431167 - DNA, 15 bp, Homo sapiens
gcctagcctcttgag

SEQ ID NO: 431168 - DNA, 15 bp, Homo sapiens
tgcctagcctcttga

SEQ ID NO: 431169 - DNA, 15 bp, Homo sapiens
ctgcctagcctcttg

SEQ ID NO: 431170 - DNA, 15 bp, Homo sapiens
gctgcctagcctctt

SEQ ID NO: 431171 - DNA, 15 bp, Homo sapiens
tgctgcctagcctct

SEQ ID NO: 431172 - DNA, 15 bp, Homo sapiens
ctgctgcctagcctc

SEQ ID NO: 431173 - DNA, 15 bp, Homo sapiens
cctgctgcctagcct

SEQ ID NO: 431174 - DNA, 15 bp, Homo sapiens
tcctgctgcctagcc

SEQ ID NO: 431175 - DNA, 15 bp, Homo sapiens
atcctgctgcctagc

SEQ ID NO: 431176 - DNA, 15 bp, Homo sapiens
aatcctgctgcctag

SEQ ID NO: 431177 - DNA, 15 bp, Homo sapiens
caatcctgctgccta

SEQ ID NO: 431178 - DNA, 15 bp, Homo sapiens
gcaatcctgctgcct

SEQ ID NO: 431179 - DNA, 15 bp, Homo sapiens
agcaatcctgctgcc

SEQ ID NO: 431180 - DNA, 15 bp, Homo sapiens
aagcaatcctgctgc

SEQ ID NO: 431181 - DNA, 15 bp, Homo sapiens
caagcaatcctgctg

SEQ ID NO: 431182 - DNA, 15 bp, Homo sapiens
tcaagcaatcctgct

SEQ ID NO: 431183 - DNA, 15 bp, Homo sapiens
ctcaagcaatcctgc

SEQ ID NO: 431184 - DNA, 15 bp, Homo sapiens
gctcaagcaatcctg

SEQ ID NO: 431185 - DNA, 15 bp, Homo sapiens
ggctcaagcaatcct

SEQ ID NO: 431186 - DNA, 15 bp, Homo sapiens
gggctcaagcaatcc

SEQ ID NO: 431187 - DNA, 15 bp, Homo sapiens
ggggctcaagcaatc

SEQ ID NO: 431188 - DNA, 15 bp, Homo sapiens
tggggctcaagcaat

SEQ ID NO: 431189 - DNA, 15 bp, Homo sapiens
ttggggctcaagcaa

SEQ ID NO: 431190 - DNA, 15 bp, Homo sapiens
cttggggctcaagca

SEQ ID NO: 431191 - DNA, 15 bp, Homo sapiens
tcttggggctcaagc

SEQ ID NO: 431192 - DNA, 15 bp, Homo sapiens
ctcttggggctcaag

SEQ ID NO: 431193 - DNA, 15 bp, Homo sapiens
actcttggggctcaa

SEQ ID NO: 431194 - DNA, 15 bp, Homo sapiens
aactcttggggctca

SEQ ID NO: 431195 - DNA, 15 bp, Homo sapiens
gaactcttggggctc

SEQ ID NO: 431196 - DNA, 15 bp, Homo sapiens
tgaactcttggggct

SEQ ID NO: 431197 - DNA, 15 bp, Homo sapiens
ttgaactcttggggc

SEQ ID NO: 431198 - DNA, 15 bp, Homo sapiens
cttgaactcttgggg

SEQ ID NO: 431199 - DNA, 15 bp, Homo sapiens
ccttgaactcttggg

SEQ ID NO: 431200 - DNA, 15 bp, Homo sapiens
gccttgaactcttgg

SEQ ID NO: 431201 - DNA, 15 bp, Homo sapiens
agccttgaactcttg

SEQ ID NO: 431202 - DNA, 15 bp, Homo sapiens
cagccttgaactctt

SEQ ID NO: 431203 - DNA, 15 bp, Homo sapiens
gcagccttgaactct

SEQ ID NO: 431204 - DNA, 15 bp, Homo sapiens
tgcagccttgaactc

SEQ ID NO: 431205 - DNA, 15 bp, Homo sapiens
ctgcagccttgaact

SEQ ID NO: 431206 - DNA, 15 bp, Homo sapiens
actgcagccttgaac

SEQ ID NO: 431207 - DNA, 15 bp, Homo sapiens
aactgcagccttgaa

SEQ ID NO: 431208 - DNA, 15 bp, Homo sapiens
taactgcagccttga

SEQ ID NO: 431209 - DNA, 15 bp, Homo sapiens
ctaactgcagccttg

SEQ ID NO: 431210 - DNA, 15 bp, Homo sapiens
gctaactgcagcctt

SEQ ID NO: 431211 - DNA, 15 bp, Homo sapiens
agctaactgcagcct

SEQ ID NO: 431212 - DNA, 15 bp, Homo sapiens
tagctaactgcagcc

SEQ ID NO: 431213 - DNA, 15 bp, Homo sapiens
atagctaactgcagc

SEQ ID NO: 431214 - DNA, 15 bp, Homo sapiens
catagctaactgcag

SEQ ID NO: 431215 - DNA, 15 bp, Homo sapiens
tcatagctaactgca

SEQ ID NO: 431216 - DNA, 15 bp, Homo sapiens
atcatagctaactgc

SEQ ID NO: 431217 - DNA, 15 bp, Homo sapiens
gatcatagctaactg

SEQ ID NO: 431218 - DNA, 15 bp, Homo sapiens
agatcatagctaact

SEQ ID NO: 431219 - DNA, 15 bp, Homo sapiens
gagatcatagctaac

SEQ ID NO: 431220 - DNA, 15 bp, Homo sapiens
tgagatcatagctaa

SEQ ID NO: 431221 - DNA, 15 bp, Homo sapiens
gtgagatcatagcta

SEQ ID NO: 431222 - DNA, 15 bp, Homo sapiens
ggtgagatcatagct

SEQ ID NO: 431223 - DNA, 15 bp, Homo sapiens
tggtgagatcatagc

SEQ ID NO: 431224 - DNA, 15 bp, Homo sapiens
gtggtgagatcatag

SEQ ID NO: 431225 - DNA, 15 bp, Homo sapiens
tgtggtgagatcata

SEQ ID NO: 431226 - DNA, 15 bp, Homo sapiens
ctgtggtgagatcat

SEQ ID NO: 431227 - DNA, 15 bp, Homo sapiens
gctgtggtgagatca

SEQ ID NO: 431228 - DNA, 15 bp, Homo sapiens
tgctgtggtgagatc

SEQ ID NO: 431229 - DNA, 15 bp, Homo sapiens
gtgctgtggtgagat

SEQ ID NO: 431230 - DNA, 15 bp, Homo sapiens
agtgctgtggtgaga

SEQ ID NO: 431231 - DNA, 15 bp, Homo sapiens
gagtgctgtggtgag

SEQ ID NO: 431232 - DNA, 15 bp, Homo sapiens
ggagtgctgtggtga

SEQ ID NO: 431233 - DNA, 15 bp, Homo sapiens
tggagtgctgtggtg

SEQ ID NO: 431234 - DNA, 15 bp, Homo sapiens
ctggagtgctgtggt

SEQ ID NO: 431235 - DNA, 15 bp, Homo sapiens
gctggagtgctgtgg

SEQ ID NO: 431236 - DNA, 15 bp, Homo sapiens
ggctggagtgctgtg

SEQ ID NO: 431237 - DNA, 15 bp, Homo sapiens
aggctggagtgctgt

SEQ ID NO: 431238 - DNA, 15 bp, Homo sapiens
caggctggagtgctg

SEQ ID NO: 431239 - DNA, 15 bp, Homo sapiens
ccaggctggagtgct

SEQ ID NO: 431240 - DNA, 15 bp, Homo sapiens
acccaggctggagtg

SEQ ID NO: 431241 - DNA, 15 bp, Homo sapiens
gacccaggctggagt

SEQ ID NO: 431242 - DNA, 15 bp, Homo sapiens
tgacccaggctggag

SEQ ID NO: 431243 - DNA, 15 bp, Homo sapiens
gtgacccaggctgga

SEQ ID NO: 431244 - DNA, 15 bp, Homo sapiens
tgtgacccaggctgg

SEQ ID NO: 431245 - DNA, 15 bp, Homo sapiens
ctgtgacccaggctg

SEQ ID NO: 431246 - DNA, 15 bp, Homo sapiens
tctgtgacccaggct

SEQ ID NO: 431247 - DNA, 15 bp, Homo sapiens
ctctgtgacccaggc

SEQ ID NO: 431248 - DNA, 15 bp, Homo sapiens
gctctgtgacccagg

SEQ ID NO: 431249 - DNA, 15 bp, Homo sapiens
tgctctgtgacccag

SEQ ID NO: 431250 - DNA, 15 bp, Homo sapiens
ttgctctgtgaccca

SEQ ID NO: 431251 - DNA, 15 bp, Homo sapiens
cttgctctgtgaccc

SEQ ID NO: 431252 - DNA, 15 bp, Homo sapiens
acttgctctgtgacc

SEQ ID NO: 431253 - DNA, 15 bp, Homo sapiens
gacttgctctgtgac

SEQ ID NO: 431254 - DNA, 15 bp, Homo sapiens
ggacttgctctgtga

SEQ ID NO: 431255 - DNA, 15 bp, Homo sapiens
aggacttgctctgtg

SEQ ID NO: 431256 - DNA, 15 bp, Homo sapiens
aaggacttgctctgt

SEQ ID NO: 431257 - DNA, 15 bp, Homo sapiens
caaggacttgctctg

SEQ ID NO: 431258 - DNA, 15 bp, Homo sapiens
tcaaggacttgctct

SEQ ID NO: 431259 - DNA, 15 bp, Homo sapiens
gtcaaggacttgctc

SEQ ID NO: 431260 - DNA, 15 bp, Homo sapiens
agtcaaggacttgct

SEQ ID NO: 431261 - DNA, 15 bp, Homo sapiens
gagtcaaggacttgc

SEQ ID NO: 431262 - DNA, 15 bp, Homo sapiens
agagtcaaggacttg

SEQ ID NO: 431263 - DNA, 15 bp, Homo sapiens
aagagtcaaggactt

SEQ ID NO: 431264 - DNA, 15 bp, Homo sapiens
caagagtcaaggact

SEQ ID NO: 431265 - DNA, 15 bp, Homo sapiens
tcaagagtcaaggac

SEQ ID NO: 431266 - DNA, 15 bp, Homo sapiens
ttcaagagtcaagga

SEQ ID NO: 431267 - DNA, 15 bp, Homo sapiens
tttcaagagtcaagg

SEQ ID NO: 431268 - DNA, 15 bp, Homo sapiens
ttttcaagagtcaag

SEQ ID NO: 431269 - DNA, 15 bp, Homo sapiens
tttttcaagagtcaa

SEQ ID NO: 431270 - DNA, 15 bp, Homo sapiens
ttttttcaagagtca

SEQ ID NO: 431271 - DNA, 15 bp, Homo sapiens
tttttttcaagagtc

SEQ ID NO: 431272 - DNA, 15 bp, Homo sapiens
ttttttttcaagagt

SEQ ID NO: 431273 - DNA, 15 bp, Homo sapiens
attttttttcaagag

SEQ ID NO: 431274 - DNA, 15 bp, Homo sapiens
aattttttttcaaga

SEQ ID NO: 431275 - DNA, 15 bp, Homo sapiens
gaattttttttcaag

SEQ ID NO: 431276 - DNA, 15 bp, Homo sapiens
agaattttttttcaa

SEQ ID NO: 431277 - DNA, 15 bp, Homo sapiens
aagaattttttttca

SEQ ID NO: 431278 - DNA, 15 bp, Homo sapiens
aaagaattttttttc

SEQ ID NO: 431279 - DNA, 15 bp, Homo sapiens
gaaagaatttttttt

SEQ ID NO: 431280 - DNA, 15 bp, Homo sapiens
ggaaagaattttttt

SEQ ID NO: 431281 - DNA, 15 bp, Homo sapiens
tggaaagaatttttt

SEQ ID NO: 431282 - DNA, 15 bp, Homo sapiens
ctggaaagaattttt

SEQ ID NO: 431283 - DNA, 15 bp, Homo sapiens
cctggaaagaatttt

SEQ ID NO: 431284 - DNA, 15 bp, Homo sapiens
gcctggaaagaattt

SEQ ID NO: 431285 - DNA, 15 bp, Homo sapiens
tgcctggaaagaatt

SEQ ID NO: 431286 - DNA, 15 bp, Homo sapiens
ttgcctggaaagaat

SEQ ID NO: 431287 - DNA, 15 bp, Homo sapiens
attgcctggaaagaa

SEQ ID NO: 431288 - DNA, 15 bp, Homo sapiens
cattgcctggaaaga

SEQ ID NO: 431289 - DNA, 15 bp, Homo sapiens
acattgcctggaaag

SEQ ID NO: 431290 - DNA, 15 bp, Homo sapiens
aacattgcctggaaa

SEQ ID NO: 431291 - DNA, 15 bp, Homo sapiens
taacattgcctggaa

SEQ ID NO: 431292 - DNA, 15 bp, Homo sapiens
ctaacattgcctgga

SEQ ID NO: 431293 - DNA, 15 bp, Homo sapiens
actaacattgcctgg

SEQ ID NO: 431294 - DNA, 15 bp, Homo sapiens
aactaacattgcctg

SEQ ID NO: 431295 - DNA, 15 bp, Homo sapiens
aaactaacattgcct

SEQ ID NO: 431296 - DNA, 15 bp, Homo sapiens
aaaactaacattgcc

SEQ ID NO: 431297 - DNA, 15 bp, Homo sapiens
taaaactaacattgc

SEQ ID NO: 431298 - DNA, 15 bp, Homo sapiens
ttaaaactaacattg

SEQ ID NO: 431299 - DNA, 15 bp, Homo sapiens
tttaaaactaacatt

SEQ ID NO: 431300 - DNA, 15 bp, Homo sapiens
ttttaaaactaacat

SEQ ID NO: 431301 - DNA, 15 bp, Homo sapiens
tttttaaaactaaca

SEQ ID NO: 431302 - DNA, 15 bp, Homo sapiens
ctttttaaaactaac

SEQ ID NO: 431303 - DNA, 15 bp, Homo sapiens
actttttaaaactaa

SEQ ID NO: 431304 - DNA, 15 bp, Homo sapiens
aactttttaaaacta

SEQ ID NO: 431305 - DNA, 15 bp, Homo sapiens
caactttttaaaact

SEQ ID NO: 431306 - DNA, 15 bp, Homo sapiens
gcaactttttaaaac

SEQ ID NO: 431307 - DNA, 15 bp, Homo sapiens
agcaactttttaaaa

SEQ ID NO: 431308 - DNA, 15 bp, Homo sapiens
tagcaactttttaaa

SEQ ID NO: 431309 - DNA, 15 bp, Homo sapiens
ctagcaactttttaa

SEQ ID NO: 431310 - DNA, 15 bp, Homo sapiens
tctagcaacttttta

SEQ ID NO: 431311 - DNA, 15 bp, Homo sapiens
ctctagcaacttttt

SEQ ID NO: 431312 - DNA, 15 bp, Homo sapiens
actctagcaactttt

SEQ ID NO: 431313 - DNA, 15 bp, Homo sapiens
tactctagcaacttt

SEQ ID NO: 431314 - DNA, 15 bp, Homo sapiens
atactctagcaactt

SEQ ID NO: 431315 - DNA, 15 bp, Homo sapiens
aatactctagcaact

SEQ ID NO: 431316 - DNA, 15 bp, Homo sapiens
caatactctagcaac

SEQ ID NO: 431317 - DNA, 15 bp, Homo sapiens
acaatactctagcaa

SEQ ID NO: 431318 - DNA, 15 bp, Homo sapiens
aacaatactctagca

SEQ ID NO: 431319 - DNA, 15 bp, Homo sapiens
taacaatactctagc

SEQ ID NO: 431320 - DNA, 15 bp, Homo sapiens
ttaacaatactctag

SEQ ID NO: 431321 - DNA, 15 bp, Homo sapiens
cttaacaatactcta

SEQ ID NO: 431322 - DNA, 15 bp, Homo sapiens
acttaacaatactct

SEQ ID NO: 431323 - DNA, 15 bp, Homo sapiens
tacttaacaatactc

SEQ ID NO: 431324 - DNA, 15 bp, Homo sapiens
atacttaacaatact

SEQ ID NO: 431325 - DNA, 15 bp, Homo sapiens
tatacttaacaatac

SEQ ID NO: 431326 - DNA, 15 bp, Homo sapiens
ctatacttaacaata

SEQ ID NO: 431327 - DNA, 15 bp, Homo sapiens
tctatacttaacaat

SEQ ID NO: 431328 - DNA, 15 bp, Homo sapiens
atctatacttaacaa

SEQ ID NO: 431329 - DNA, 15 bp, Homo sapiens
gatctatacttaaca

SEQ ID NO: 431330 - DNA, 15 bp, Homo sapiens
tgatctatacttaac

SEQ ID NO: 431331 - DNA, 15 bp, Homo sapiens
gtgatctatacttaa

SEQ ID NO: 431332 - DNA, 15 bp, Homo sapiens
agtgatctatactta

SEQ ID NO: 431333 - DNA, 15 bp, Homo sapiens
aagtgatctatactt

SEQ ID NO: 431334 - DNA, 15 bp, Homo sapiens
taagtgatctatact

SEQ ID NO: 431335 - DNA, 15 bp, Homo sapiens
ttaagtgatctatac

SEQ ID NO: 431336 - DNA, 15 bp, Homo sapiens
attaagtgatctata

SEQ ID NO: 431337 - DNA, 15 bp, Homo sapiens
gattaagtgatctat

SEQ ID NO: 431338 - DNA, 15 bp, Homo sapiens
agattaagtgatcta

SEQ ID NO: 431339 - DNA, 15 bp, Homo sapiens
tagattaagtgatct

SEQ ID NO: 431340 - DNA, 15 bp, Homo sapiens
atagattaagtgatc

SEQ ID NO: 431341 - DNA, 15 bp, Homo sapiens
catagattaagtgat

SEQ ID NO: 431342 - DNA, 15 bp, Homo sapiens
acatagattaagtga

SEQ ID NO: 431343 - DNA, 15 bp, Homo sapiens
gacatagattaagtg

SEQ ID NO: 431344 - DNA, 15 bp, Homo sapiens
tgacatagattaagt

SEQ ID NO: 431345 - DNA, 15 bp, Homo sapiens
gtgacatagattaag

SEQ ID NO: 431346 - DNA, 15 bp, Homo sapiens
agtgacatagattaa

SEQ ID NO: 431347 - DNA, 15 bp, Homo sapiens
gagtgacatagatta

SEQ ID NO: 431348 - DNA, 15 bp, Homo sapiens
agagtgacatagatt

SEQ ID NO: 431349 - DNA, 15 bp, Homo sapiens
aagagtgacatagat

SEQ ID NO: 431350 - DNA, 15 bp, Homo sapiens
aaagagtgacataga

SEQ ID NO: 431351 - DNA, 15 bp, Homo sapiens
caaagagtgacatag

SEQ ID NO: 431352 - DNA, 15 bp, Homo sapiens
ccaaagagtgacata

SEQ ID NO: 431353 - DNA, 15 bp, Homo sapiens
tccaaagagtgacat

SEQ ID NO: 431354 - DNA, 15 bp, Homo sapiens
ttccaaagagtgaca

SEQ ID NO: 431355 - DNA, 15 bp, Homo sapiens
tttccaaagagtgac

SEQ ID NO: 431356 - DNA, 15 bp, Homo sapiens
ctttccaaagagtga

SEQ ID NO: 431357 - DNA, 15 bp, Homo sapiens
tctttccaaagagtg

SEQ ID NO: 431358 - DNA, 15 bp, Homo sapiens
ttctttccaaagagt

SEQ ID NO: 431359 - DNA, 15 bp, Homo sapiens
attctttccaaagag

SEQ ID NO: 431360 - DNA, 15 bp, Homo sapiens
cattctttccaaaga

SEQ ID NO: 431361 - DNA, 15 bp, Homo sapiens
gcattctttccaaag

SEQ ID NO: 431362 - DNA, 15 bp, Homo sapiens
tgcattctttccaaa

SEQ ID NO: 431363 - DNA, 15 bp, Homo sapiens
ctgcattctttccaa

SEQ ID NO: 431364 - DNA, 15 bp, Homo sapiens
actgcattctttcca

SEQ ID NO: 431365 - DNA, 15 bp, Homo sapiens
cactgcattctttcc

SEQ ID NO: 431366 - DNA, 15 bp, Homo sapiens
gcactgcattctttc

SEQ ID NO: 431367 - DNA, 15 bp, Homo sapiens
tgcactgcattcttt

SEQ ID NO: 431368 - DNA, 15 bp, Homo sapiens
atgcactgcattctt

SEQ ID NO: 431369 - DNA, 15 bp, Homo sapiens
tatgcactgcattct

SEQ ID NO: 431370 - DNA, 15 bp, Homo sapiens
ttatgcactgcattc

SEQ ID NO: 431371 - DNA, 15 bp, Homo sapiens
tttatgcactgcatt

SEQ ID NO: 431372 - DNA, 15 bp, Homo sapiens
ttttatgcactgcat

SEQ ID NO: 431373 - DNA, 15 bp, Homo sapiens
tttttatgcactgca

SEQ ID NO: 431374 - DNA, 15 bp, Homo sapiens
ctttttatgcactgc

SEQ ID NO: 431375 - DNA, 15 bp, Homo sapiens
tctttttatgcactg

SEQ ID NO: 431376 - DNA, 15 bp, Homo sapiens
ttctttttatgcact

SEQ ID NO: 431377 - DNA, 15 bp, Homo sapiens
attctttttatgcac

SEQ ID NO: 431378 - DNA, 15 bp, Homo sapiens
tattctttttatgca

SEQ ID NO: 431379 - DNA, 15 bp, Homo sapiens
gtattctttttatgc

SEQ ID NO: 431380 - DNA, 15 bp, Homo sapiens
agtattctttttatg

SEQ ID NO: 431381 - DNA, 15 bp, Homo sapiens
gagtattctttttat

SEQ ID NO: 431382 - DNA, 15 bp, Homo sapiens
tgagtattcttttta

SEQ ID NO: 431383 - DNA, 15 bp, Homo sapiens
ttgagtattcttttt

SEQ ID NO: 431384 - DNA, 15 bp, Homo sapiens
tttgagtattctttt

SEQ ID NO: 431385 - DNA, 15 bp, Homo sapiens
atttgagtattcttt

SEQ ID NO: 431386 - DNA, 15 bp, Homo sapiens
aatttgagtattctt

SEQ ID NO: 431387 - DNA, 15 bp, Homo sapiens
aaatttgagtattct

SEQ ID NO: 431388 - DNA, 15 bp, Homo sapiens
aaaatttgagtattc

SEQ ID NO: 431389 - DNA, 15 bp, Homo sapiens
caaaatttgagtatt

SEQ ID NO: 431390 - DNA, 15 bp, Homo sapiens
tcaaaatttgagtat

SEQ ID NO: 431391 - DNA, 15 bp, Homo sapiens
atcaaaatttgagta

SEQ ID NO: 431392 - DNA, 15 bp, Homo sapiens
gatcaaaatttgagt

SEQ ID NO: 431393 - DNA, 15 bp, Homo sapiens
agatcaaaatttgag

SEQ ID NO: 431394 - DNA, 15 bp, Homo sapiens
gagatcaaaatttga

SEQ ID NO: 431395 - DNA, 15 bp, Homo sapiens
tgagatcaaaatttg

SEQ ID NO: 431396 - DNA, 15 bp, Homo sapiens
ctgagatcaaaattt

SEQ ID NO: 431397 - DNA, 15 bp, Homo sapiens
tctgagatcaaaatt

SEQ ID NO: 431398 - DNA, 15 bp, Homo sapiens
atctgagatcaaaat

SEQ ID NO: 431399 - DNA, 15 bp, Homo sapiens
aatctgagatcaaaa

SEQ ID NO: 431400 - DNA, 15 bp, Homo sapiens
taatctgagatcaaa

SEQ ID NO: 431401 - DNA, 15 bp, Homo sapiens
ataatctgagatcaa

SEQ ID NO: 431402 - DNA, 15 bp, Homo sapiens
aataatctgagatca

SEQ ID NO: 431403 - DNA, 15 bp, Homo sapiens
aaataatctgagatc

SEQ ID NO: 431404 - DNA, 15 bp, Homo sapiens
aaaataatctgagat

SEQ ID NO: 431405 - DNA, 15 bp, Homo sapiens
gaaaataatctgaga

SEQ ID NO: 431406 - DNA, 15 bp, Homo sapiens
agaaaataatctgag

SEQ ID NO: 431407 - DNA, 15 bp, Homo sapiens
gagaaaataatctga

SEQ ID NO: 431408 - DNA, 15 bp, Homo sapiens
ggagaaaataatctg

SEQ ID NO: 431409 - DNA, 15 bp, Homo sapiens
tggagaaaataatct

SEQ ID NO: 431410 - DNA, 15 bp, Homo sapiens
ttggagaaaataatc

SEQ ID NO: 431411 - DNA, 15 bp, Homo sapiens
attggagaaaataat

SEQ ID NO: 431412 - DNA, 15 bp, Homo sapiens
cattggagaaaataa

SEQ ID NO: 431413 - DNA, 15 bp, Homo sapiens
acattggagaaaata

SEQ ID NO: 431414 - DNA, 15 bp, Homo sapiens
tacattggagaaaat

SEQ ID NO: 431415 - DNA, 15 bp, Homo sapiens
ttacattggagaaaa

SEQ ID NO: 431416 - DNA, 15 bp, Homo sapiens
tttacattggagaaa

SEQ ID NO: 431417 - DNA, 15 bp, Homo sapiens
ttttacattggagaa

SEQ ID NO: 431418 - DNA, 15 bp, Homo sapiens
tttttacattggaga

SEQ ID NO: 431419 - DNA, 15 bp, Homo sapiens
ttttttacattggag

SEQ ID NO: 431420 - DNA, 15 bp, Homo sapiens
cttttttacattgga

SEQ ID NO: 431421 - DNA, 15 bp, Homo sapiens
acttttttacattgg

SEQ ID NO: 431422 - DNA, 15 bp, Homo sapiens
tacttttttacattg

SEQ ID NO: 431423 - DNA, 15 bp, Homo sapiens
gtacttttttacatt

SEQ ID NO: 431424 - DNA, 15 bp, Homo sapiens
agtacttttttacat

SEQ ID NO: 431425 - DNA, 15 bp, Homo sapiens
aagtacttttttaca

SEQ ID NO: 431426 - DNA, 15 bp, Homo sapiens
aaagtacttttttac

SEQ ID NO: 431427 - DNA, 15 bp, Homo sapiens
gaaagtactttttta

SEQ ID NO: 431428 - DNA, 15 bp, Homo sapiens
ggaaagtactttttt

SEQ ID NO: 431429 - DNA, 15 bp, Homo sapiens
tggaaagtacttttt

SEQ ID NO: 431430 - DNA, 15 bp, Homo sapiens
atggaaagtactttt

SEQ ID NO: 431431 - DNA, 15 bp, Homo sapiens
gatggaaagtacttt

SEQ ID NO: 431432 - DNA, 15 bp, Homo sapiens
ggatggaaagtactt

SEQ ID NO: 431433 - DNA, 15 bp, Homo sapiens
tggatggaaagtact

SEQ ID NO: 431434 - DNA, 15 bp, Homo sapiens
ttggatggaaagtac

SEQ ID NO: 431435 - DNA, 15 bp, Homo sapiens
tttggatggaaagta

SEQ ID NO: 431436 - DNA, 15 bp, Homo sapiens
ttttggatggaaagt

SEQ ID NO: 431437 - DNA, 15 bp, Homo sapiens
tttttggatggaaag

SEQ ID NO: 431438 - DNA, 15 bp, Homo sapiens
atttttggatggaaa

SEQ ID NO: 431439 - DNA, 15 bp, Homo sapiens
gatttttggatggaa

SEQ ID NO: 431440 - DNA, 15 bp, Homo sapiens
ggatttttggatgga

SEQ ID NO: 431441 - DNA, 15 bp, Homo sapiens
tggatttttggatgg

SEQ ID NO: 431442 - DNA, 15 bp, Homo sapiens
atggatttttggatg

SEQ ID NO: 431443 - DNA, 15 bp, Homo sapiens
gatggatttttggat

SEQ ID NO: 431444 - DNA, 15 bp, Homo sapiens
ggatggatttttgga

SEQ ID NO: 431445 - DNA, 15 bp, Homo sapiens
tggatggatttttgg

SEQ ID NO: 431446 - DNA, 15 bp, Homo sapiens
gtggatggatttttg

SEQ ID NO: 431447 - DNA, 15 bp, Homo sapiens
tgtggatggattttt

SEQ ID NO: 431448 - DNA, 15 bp, Homo sapiens
gtgtggatggatttt

SEQ ID NO: 431449 - DNA, 15 bp, Homo sapiens
tgtgtggatggattt

SEQ ID NO: 431450 - DNA, 15 bp, Homo sapiens
ttgtgtggatggatt

SEQ ID NO: 431451 - DNA, 15 bp, Homo sapiens
gttgtgtggatggat

SEQ ID NO: 431452 - DNA, 15 bp, Homo sapiens
ggttgtgtggatgga

SEQ ID NO: 431453 - DNA, 15 bp, Homo sapiens
aggttgtgtggatgg

SEQ ID NO: 431454 - DNA, 15 bp, Homo sapiens
gaggttgtgtggatg

SEQ ID NO: 431455 - DNA, 15 bp, Homo sapiens
tgaggttgtgtggat

SEQ ID NO: 431456 - DNA, 15 bp, Homo sapiens
ctgaggttgtgtgga

SEQ ID NO: 431457 - DNA, 15 bp, Homo sapiens
tctgaggttgtgtgg

SEQ ID NO: 431458 - DNA, 15 bp, Homo sapiens
gtctgaggttgtgtg

SEQ ID NO: 431459 - DNA, 15 bp, Homo sapiens
agtctgaggttgtgt

SEQ ID NO: 431460 - DNA, 15 bp, Homo sapiens
aagtctgaggttgtg

SEQ ID NO: 431461 - DNA, 15 bp, Homo sapiens
aaagtctgaggttgt

SEQ ID NO: 431462 - DNA, 15 bp, Homo sapiens
gaaagtctgaggttg

SEQ ID NO: 431463 - DNA, 15 bp, Homo sapiens
ggaaagtctgaggtt

SEQ ID NO: 431464 - DNA, 15 bp, Homo sapiens
tggaaagtctgaggt

SEQ ID NO: 431465 - DNA, 15 bp, Homo sapiens
ttggaaagtctgagg

SEQ ID NO: 431466 - DNA, 15 bp, Homo sapiens
tttggaaagtctgag

SEQ ID NO: 431467 - DNA, 15 bp, Homo sapiens
ttttggaaagtctga

SEQ ID NO: 431468 - DNA, 15 bp, Homo sapiens
tttttggaaagtctg

SEQ ID NO: 431469 - DNA, 15 bp, Homo sapiens
ttttttggaaagtct

SEQ ID NO: 431470 - DNA, 15 bp, Homo sapiens
cttttttggaaagtc

SEQ ID NO: 431471 - DNA, 15 bp, Homo sapiens
gcttttttggaaagt

SEQ ID NO: 431472 - DNA, 15 bp, Homo sapiens
tgcttttttggaaag

SEQ ID NO: 431473 - DNA, 15 bp, Homo sapiens
ttgcttttttggaaa

SEQ ID NO: 431474 - DNA, 15 bp, Homo sapiens
cttgcttttttggaa

SEQ ID NO: 431475 - DNA, 15 bp, Homo sapiens
tcttgcttttttgga

SEQ ID NO: 431476 - DNA, 15 bp, Homo sapiens
ttcttgcttttttgg

SEQ ID NO: 431477 - DNA, 15 bp, Homo sapiens
attcttgcttttttg

SEQ ID NO: 431478 - DNA, 15 bp, Homo sapiens
aattcttgctttttt

SEQ ID NO: 431479 - DNA, 15 bp, Homo sapiens
aaattcttgcttttt

SEQ ID NO: 431480 - DNA, 15 bp, Homo sapiens
aaaattcttgctttt

SEQ ID NO: 431481 - DNA, 15 bp, Homo sapiens
aaaaattcttgcttt

SEQ ID NO: 431482 - DNA, 15 bp, Homo sapiens
aaaaaattcttgctt

SEQ ID NO: 431483 - DNA, 15 bp, Homo sapiens
aaaaaaattcttgct

SEQ ID NO: 431484 - DNA, 15 bp, Homo sapiens
taaaaaaattcttgc

SEQ ID NO: 431485 - DNA, 15 bp, Homo sapiens
ttaaaaaaattcttg

SEQ ID NO: 431486 - DNA, 15 bp, Homo sapiens
tttaaaaaaattctt

SEQ ID NO: 431487 - DNA, 15 bp, Homo sapiens
ttttaaaaaaattct

SEQ ID NO: 431488 - DNA, 15 bp, Homo sapiens
tttttaaaaaaattc

SEQ ID NO: 431489 - DNA, 15 bp, Homo sapiens
atttttaaaaaaatt

SEQ ID NO: 431490 - DNA, 15 bp, Homo sapiens
gatttttaaaaaaat

SEQ ID NO: 431491 - DNA, 15 bp, Homo sapiens
agatttttaaaaaaa

SEQ ID NO: 431492 - DNA, 15 bp, Homo sapiens
gagatttttaaaaaa

SEQ ID NO: 431493 - DNA, 15 bp, Homo sapiens
tgagatttttaaaaa

SEQ ID NO: 431494 - DNA, 15 bp, Homo sapiens
gtgagatttttaaaa

SEQ ID NO: 431495 - DNA, 15 bp, Homo sapiens
tgtgagatttttaaa

SEQ ID NO: 431496 - DNA, 15 bp, Homo sapiens
atgtgagatttttaa

SEQ ID NO: 431497 - DNA, 15 bp, Homo sapiens
catgtgagattttta

SEQ ID NO: 431498 - DNA, 15 bp, Homo sapiens
tcatgtgagattttt

SEQ ID NO: 431499 - DNA, 15 bp, Homo sapiens
ttcatgtgagatttt

SEQ ID NO: 431500 - DNA, 15 bp, Homo sapiens
tttcatgtgagattt

SEQ ID NO: 431501 - DNA, 15 bp, Homo sapiens
gtttcatgtgagatt

SEQ ID NO: 431502 - DNA, 15 bp, Homo sapiens
agtttcatgtgagat

SEQ ID NO: 431503 - DNA, 15 bp, Homo sapiens
aagtttcatgtgaga

SEQ ID NO: 431504 - DNA, 15 bp, Homo sapiens
gaagtttcatgtgag

SEQ ID NO: 431505 - DNA, 15 bp, Homo sapiens
tgaagtttcatgtga

SEQ ID NO: 431506 - DNA, 15 bp, Homo sapiens
ctgaagtttcatgtg

SEQ ID NO: 431507 - DNA, 15 bp, Homo sapiens
gctgaagtttcatgt

SEQ ID NO: 431508 - DNA, 15 bp, Homo sapiens
tgctgaagtttcatg

SEQ ID NO: 431509 - DNA, 15 bp, Homo sapiens
atgctgaagtttcat

SEQ ID NO: 431510 - DNA, 15 bp, Homo sapiens
tatgctgaagtttca

SEQ ID NO: 431511 - DNA, 15 bp, Homo sapiens
gtatgctgaagtttc

SEQ ID NO: 431512 - DNA, 15 bp, Homo sapiens
ggtatgctgaagttt

SEQ ID NO: 431513 - DNA, 15 bp, Homo sapiens
aggtatgctgaagtt

SEQ ID NO: 431514 - DNA, 15 bp, Homo sapiens
taggtatgctgaagt

SEQ ID NO: 431515 - DNA, 15 bp, Homo sapiens
ttaggtatgctgaag

SEQ ID NO: 431516 - DNA, 15 bp, Homo sapiens
attaggtatgctgaa

SEQ ID NO: 431517 - DNA, 15 bp, Homo sapiens
tattaggtatgctga

SEQ ID NO: 431518 - DNA, 15 bp, Homo sapiens
gtattaggtatgctg

SEQ ID NO: 431519 - DNA, 15 bp, Homo sapiens
tgtattaggtatgct

SEQ ID NO: 431520 - DNA, 15 bp, Homo sapiens
ctgtattaggtatgc

SEQ ID NO: 431521 - DNA, 15 bp, Homo sapiens
tctgtattaggtatg

SEQ ID NO: 431522 - DNA, 15 bp, Homo sapiens
ttctgtattaggtat

SEQ ID NO: 431523 - DNA, 15 bp, Homo sapiens
gttctgtattaggta

SEQ ID NO: 431524 - DNA, 15 bp, Homo sapiens
agttctgtattaggt

SEQ ID NO: 431525 - DNA, 15 bp, Homo sapiens
aagttctgtattagg

SEQ ID NO: 431526 - DNA, 15 bp, Homo sapiens
aaagttctgtattag

SEQ ID NO: 431527 - DNA, 15 bp, Homo sapiens
taaagttctgtatta

SEQ ID NO: 431528 - DNA, 15 bp, Homo sapiens
gtaaagttctgtatt

SEQ ID NO: 431529 - DNA, 15 bp, Homo sapiens
tgtaaagttctgtat

SEQ ID NO: 431530 - DNA, 15 bp, Homo sapiens
gtgtaaagttctgta

SEQ ID NO: 431531 - DNA, 15 bp, Homo sapiens
tgtgtaaagttctgt

SEQ ID NO: 431532 - DNA, 15 bp, Homo sapiens
gtgtgtaaagttctg

SEQ ID NO: 431533 - DNA, 15 bp, Homo sapiens
agtgtgtaaagttct

SEQ ID NO: 431534 - DNA, 15 bp, Homo sapiens
gagtgtgtaaagttc

SEQ ID NO: 431535 - DNA, 15 bp, Homo sapiens
tgagtgtgtaaagtt

SEQ ID NO: 431536 - DNA, 15 bp, Homo sapiens
ctgagtgtgtaaagt

SEQ ID NO: 431537 - DNA, 15 bp, Homo sapiens
actgagtgtgtaaag

SEQ ID NO: 431538 - DNA, 15 bp, Homo sapiens
cactgagtgtgtaaa

SEQ ID NO: 431539 - DNA, 15 bp, Homo sapiens
tcactgagtgtgtaa

SEQ ID NO: 431540 - DNA, 15 bp, Homo sapiens
ttcactgagtgtgta

SEQ ID NO: 431541 - DNA, 15 bp, Homo sapiens
tttcactgagtgtgt

SEQ ID NO: 431542 - DNA, 15 bp, Homo sapiens
ctttcactgagtgtg

SEQ ID NO: 431543 - DNA, 15 bp, Homo sapiens
actttcactgagtgt

SEQ ID NO: 431544 - DNA, 15 bp, Homo sapiens
aactttcactgagtg

SEQ ID NO: 431545 - DNA, 15 bp, Homo sapiens
aaactttcactgagt

SEQ ID NO: 431546 - DNA, 15 bp, Homo sapiens
aaaactttcactgag

SEQ ID NO: 431547 - DNA, 15 bp, Homo sapiens
aaaaactttcactga

SEQ ID NO: 431548 - DNA, 15 bp, Homo sapiens
caaaaactttcactg

SEQ ID NO: 431549 - DNA, 15 bp, Homo sapiens
tcaaaaactttcact

SEQ ID NO: 431550 - DNA, 15 bp, Homo sapiens
gtcaaaaactttcac

SEQ ID NO: 431551 - DNA, 15 bp, Homo sapiens
ggtcaaaaactttca

SEQ ID NO: 431552 - DNA, 15 bp, Homo sapiens
aggtcaaaaactttc

SEQ ID NO: 431553 - DNA, 15 bp, Homo sapiens
aaggtcaaaaacttt

SEQ ID NO: 431554 - DNA, 15 bp, Homo sapiens
aaaggtcaaaaactt

SEQ ID NO: 431555 - DNA, 15 bp, Homo sapiens
aaaaggtcaaaaact

SEQ ID NO: 431556 - DNA, 15 bp, Homo sapiens
gaaaaggtcaaaaac

SEQ ID NO: 431557 - DNA, 15 bp, Homo sapiens
tgaaaaggtcaaaaa

SEQ ID NO: 431558 - DNA, 15 bp, Homo sapiens
ctgaaaaggtcaaaa

SEQ ID NO: 431559 - DNA, 15 bp, Homo sapiens
tctgaaaaggtcaaa

SEQ ID NO: 431560 - DNA, 15 bp, Homo sapiens
ttctgaaaaggtcaa

SEQ ID NO: 431561 - DNA, 15 bp, Homo sapiens
cttctgaaaaggtca

SEQ ID NO: 431562 - DNA, 15 bp, Homo sapiens
gcttctgaaaaggtc

SEQ ID NO: 431563 - DNA, 15 bp, Homo sapiens
tgcttctgaaaaggt

SEQ ID NO: 431564 - DNA, 15 bp, Homo sapiens
atgcttctgaaaagg

SEQ ID NO: 431565 - DNA, 15 bp, Homo sapiens
catgcttctgaaaag

SEQ ID NO: 431566 - DNA, 15 bp, Homo sapiens
acatgcttctgaaaa

SEQ ID NO: 431567 - DNA, 15 bp, Homo sapiens
gacatgcttctgaaa

SEQ ID NO: 431568 - DNA, 15 bp, Homo sapiens
tgacatgcttctgaa

SEQ ID NO: 431569 - DNA, 15 bp, Homo sapiens
ttgacatgcttctga

SEQ ID NO: 431570 - DNA, 15 bp, Homo sapiens
attgacatgcttctg

SEQ ID NO: 431571 - DNA, 15 bp, Homo sapiens
cattgacatgcttct

SEQ ID NO: 431572 - DNA, 15 bp, Homo sapiens
acattgacatgcttc

SEQ ID NO: 431573 - DNA, 15 bp, Homo sapiens
tacattgacatgctt

SEQ ID NO: 431574 - DNA, 15 bp, Homo sapiens
ttacattgacatgct

SEQ ID NO: 431575 - DNA, 15 bp, Homo sapiens
attacattgacatgc

SEQ ID NO: 431576 - DNA, 15 bp, Homo sapiens
aattacattgacatg

SEQ ID NO: 431577 - DNA, 15 bp, Homo sapiens
gaattacattgacat

SEQ ID NO: 431578 - DNA, 15 bp, Homo sapiens
agaattacattgaca

SEQ ID NO: 431579 - DNA, 15 bp, Homo sapiens
aagaattacattgac

SEQ ID NO: 431580 - DNA, 15 bp, Homo sapiens
gaagaattacattga

SEQ ID NO: 431581 - DNA, 15 bp, Homo sapiens
agaagaattacattg

SEQ ID NO: 431582 - DNA, 15 bp, Homo sapiens
cagaagaattacatt

SEQ ID NO: 431583 - DNA, 15 bp, Homo sapiens
ccagaagaattacat

SEQ ID NO: 431584 - DNA, 15 bp, Homo sapiens
accagaagaattaca

SEQ ID NO: 431585 - DNA, 15 bp, Homo sapiens
gaccagaagaattac

SEQ ID NO: 431586 - DNA, 15 bp, Homo sapiens
tgaccagaagaatta

SEQ ID NO: 431587 - DNA, 15 bp, Homo sapiens
ttgaccagaagaatt

SEQ ID NO: 431588 - DNA, 15 bp, Homo sapiens
tttgaccagaagaat

SEQ ID NO: 431589 - DNA, 15 bp, Homo sapiens
atttgaccagaagaa

SEQ ID NO: 431590 - DNA, 15 bp, Homo sapiens
gatttgaccagaaga

SEQ ID NO: 431591 - DNA, 15 bp, Homo sapiens
agatttgaccagaag

SEQ ID NO: 431592 - DNA, 15 bp, Homo sapiens
aagatttgaccagaa

SEQ ID NO: 431593 - DNA, 15 bp, Homo sapiens
taagatttgaccaga

SEQ ID NO: 431594 - DNA, 15 bp, Homo sapiens
ctaagatttgaccag

SEQ ID NO: 431595 - DNA, 15 bp, Homo sapiens
cctaagatttgacca

SEQ ID NO: 431596 - DNA, 15 bp, Homo sapiens
acctaagatttgacc

SEQ ID NO: 431597 - DNA, 15 bp, Homo sapiens
aacctaagatttgac

SEQ ID NO: 431598 - DNA, 15 bp, Homo sapiens
taacctaagatttga

SEQ ID NO: 431599 - DNA, 15 bp, Homo sapiens
ataacctaagatttg

SEQ ID NO: 431600 - DNA, 15 bp, Homo sapiens
gataacctaagattt

SEQ ID NO: 431601 - DNA, 15 bp, Homo sapiens
tgataacctaagatt

SEQ ID NO: 431602 - DNA, 15 bp, Homo sapiens
atgataacctaagat

SEQ ID NO: 431603 - DNA, 15 bp, Homo sapiens
aatgataacctaaga

SEQ ID NO: 431604 - DNA, 15 bp, Homo sapiens
aaatgataacctaag

SEQ ID NO: 431605 - DNA, 15 bp, Homo sapiens
caaatgataacctaa

SEQ ID NO: 431606 - DNA, 15 bp, Homo sapiens
tcaaatgataaccta

SEQ ID NO: 431607 - DNA, 15 bp, Homo sapiens
ctcaaatgataacct

SEQ ID NO: 431608 - DNA, 15 bp, Homo sapiens
tctcaaatgataacc

SEQ ID NO: 431609 - DNA, 15 bp, Homo sapiens
ctctcaaatgataac

SEQ ID NO: 431610 - DNA, 15 bp, Homo sapiens
tctctcaaatgataa

SEQ ID NO: 431611 - DNA, 15 bp, Homo sapiens
ctctctcaaatgata

SEQ ID NO: 431612 - DNA, 15 bp, Homo sapiens
tctctctcaaatgat

SEQ ID NO: 431613 - DNA, 15 bp, Homo sapiens
gtctctctcaaatga

SEQ ID NO: 431614 - DNA, 15 bp, Homo sapiens
tgtctctctcaaatg

SEQ ID NO: 431615 - DNA, 15 bp, Homo sapiens
atgtctctctcaaat

SEQ ID NO: 431616 - DNA, 15 bp, Homo sapiens
aatgtctctctcaaa

SEQ ID NO: 431617 - DNA, 15 bp, Homo sapiens
aaatgtctctctcaa

SEQ ID NO: 431618 - DNA, 15 bp, Homo sapiens
gaaatgtctctctca

SEQ ID NO: 431619 - DNA, 15 bp, Homo sapiens
agaaatgtctctctc

SEQ ID NO: 431620 - DNA, 15 bp, Homo sapiens
aagaaatgtctctct

SEQ ID NO: 431621 - DNA, 15 bp, Homo sapiens
aaagaaatgtctctc

SEQ ID NO: 431622 - DNA, 15 bp, Homo sapiens
aaaagaaatgtctct

SEQ ID NO: 431623 - DNA, 15 bp, Homo sapiens
taaaagaaatgtctc

SEQ ID NO: 431624 - DNA, 15 bp, Homo sapiens
ttaaaagaaatgtct

SEQ ID NO: 431625 - DNA, 15 bp, Homo sapiens
tttaaaagaaatgtc

SEQ ID NO: 431626 - DNA, 15 bp, Homo sapiens
gtttaaaagaaatgt

SEQ ID NO: 431627 - DNA, 15 bp, Homo sapiens
ggtttaaaagaaatg

SEQ ID NO: 431628 - DNA, 15 bp, Homo sapiens
gggtttaaaagaaat

SEQ ID NO: 431629 - DNA, 15 bp, Homo sapiens
tgggtttaaaagaaa

SEQ ID NO: 431630 - DNA, 15 bp, Homo sapiens
atgggtttaaaagaa

SEQ ID NO: 431631 - DNA, 15 bp, Homo sapiens
aatgggtttaaaaga

SEQ ID NO: 431632 - DNA, 15 bp, Homo sapiens
aaatgggtttaaaag

SEQ ID NO: 431633 - DNA, 15 bp, Homo sapiens
gaaatgggtttaaaa

SEQ ID NO: 431634 - DNA, 15 bp, Homo sapiens
agaaatgggtttaaa

SEQ ID NO: 431635 - DNA, 15 bp, Homo sapiens
gagaaatgggtttaa

SEQ ID NO: 431636 - DNA, 15 bp, Homo sapiens
ggagaaatgggttta

SEQ ID NO: 431637 - DNA, 15 bp, Homo sapiens
gggagaaatgggttt

SEQ ID NO: 431638 - DNA, 15 bp, Homo sapiens
ggggagaaatgggtt

SEQ ID NO: 431639 - DNA, 15 bp, Homo sapiens
tggggagaaatgggt

SEQ ID NO: 431640 - DNA, 15 bp, Homo sapiens
ttggggagaaatggg

SEQ ID NO: 431641 - DNA, 15 bp, Homo sapiens
tttggggagaaatgg

SEQ ID NO: 431642 - DNA, 15 bp, Homo sapiens
ttttggggagaaatg

SEQ ID NO: 431643 - DNA, 15 bp, Homo sapiens
tttttggggagaaat

SEQ ID NO: 431644 - DNA, 15 bp, Homo sapiens
ttttttggggagaaa

SEQ ID NO: 431645 - DNA, 15 bp, Homo sapiens
gttttttggggagaa

SEQ ID NO: 431646 - DNA, 15 bp, Homo sapiens
agttttttggggaga

SEQ ID NO: 431647 - DNA, 15 bp, Homo sapiens
tagttttttggggag

SEQ ID NO: 431648 - DNA, 15 bp, Homo sapiens
ttagttttttgggga

SEQ ID NO: 431649 - DNA, 15 bp, Homo sapiens
tttagttttttgggg

SEQ ID NO: 431650 - DNA, 15 bp, Homo sapiens
atttagttttttggg

SEQ ID NO: 431651 - DNA, 15 bp, Homo sapiens
tatttagttttttgg

SEQ ID NO: 431652 - DNA, 15 bp, Homo sapiens
ctatttagttttttg

SEQ ID NO: 431653 - DNA, 15 bp, Homo sapiens
gctatttagtttttt

SEQ ID NO: 431654 - DNA, 15 bp, Homo sapiens
tgctatttagttttt

SEQ ID NO: 431655 - DNA, 15 bp, Homo sapiens
ttgctatttagtttt

SEQ ID NO: 431656 - DNA, 15 bp, Homo sapiens
tttgctatttagttt

SEQ ID NO: 431657 - DNA, 15 bp, Homo sapiens
ctttgctatttagtt

SEQ ID NO: 431658 - DNA, 15 bp, Homo sapiens
tctttgctatttagt

SEQ ID NO: 431659 - DNA, 15 bp, Homo sapiens
ttctttgctatttag

SEQ ID NO: 431660 - DNA, 15 bp, Homo sapiens
attctttgctattta

SEQ ID NO: 431661 - DNA, 15 bp, Homo sapiens
aattctttgctattt

SEQ ID NO: 431662 - DNA, 15 bp, Homo sapiens
gaattctttgctatt

SEQ ID NO: 431663 - DNA, 15 bp, Homo sapiens
tgaattctttgctat

SEQ ID NO: 431664 - DNA, 15 bp, Homo sapiens
ttgaattctttgcta

SEQ ID NO: 431665 - DNA, 15 bp, Homo sapiens
tttgaattctttgct

SEQ ID NO: 431666 - DNA, 15 bp, Homo sapiens
gtttgaattctttgc

SEQ ID NO: 431667 - DNA, 15 bp, Homo sapiens
agtttgaattctttg

SEQ ID NO: 431668 - DNA, 15 bp, Homo sapiens
cagtttgaattcttt

SEQ ID NO: 431669 - DNA, 15 bp, Homo sapiens
tcagtttgaattctt

SEQ ID NO: 431670 - DNA, 15 bp, Homo sapiens
ctcagtttgaattct

SEQ ID NO: 431671 - DNA, 15 bp, Homo sapiens
actcagtttgaattc

SEQ ID NO: 431672 - DNA, 15 bp, Homo sapiens
aactcagtttgaatt

SEQ ID NO: 431673 - DNA, 15 bp, Homo sapiens
taactcagtttgaat

SEQ ID NO: 431674 - DNA, 15 bp, Homo sapiens
ttaactcagtttgaa

SEQ ID NO: 431675 - DNA, 15 bp, Homo sapiens
gttaactcagtttga

SEQ ID NO: 431676 - DNA, 15 bp, Homo sapiens
agttaactcagtttg

SEQ ID NO: 431677 - DNA, 15 bp, Homo sapiens
aagttaactcagttt

SEQ ID NO: 431678 - DNA, 15 bp, Homo sapiens
taagttaactcagtt

SEQ ID NO: 431679 - DNA, 15 bp, Homo sapiens
ctaagttaactcagt

SEQ ID NO: 431680 - DNA, 15 bp, Homo sapiens
tctaagttaactcag

SEQ ID NO: 431681 - DNA, 15 bp, Homo sapiens
ttctaagttaactca

SEQ ID NO: 431682 - DNA, 15 bp, Homo sapiens
tttctaagttaactc

SEQ ID NO: 431683 - DNA, 15 bp, Homo sapiens
atttctaagttaact

SEQ ID NO: 431684 - DNA, 15 bp, Homo sapiens
tatttctaagttaac

SEQ ID NO: 431685 - DNA, 15 bp, Homo sapiens
atatttctaagttaa

SEQ ID NO: 431686 - DNA, 15 bp, Homo sapiens
aatatttctaagtta

SEQ ID NO: 431687 - DNA, 15 bp, Homo sapiens
aaatatttctaagtt

SEQ ID NO: 431688 - DNA, 15 bp, Homo sapiens
taaatatttctaagt

SEQ ID NO: 431689 - DNA, 15 bp, Homo sapiens
ttaaatatttctaag

SEQ ID NO: 431690 - DNA, 15 bp, Homo sapiens
tttaaatatttctaa

SEQ ID NO: 431691 - DNA, 15 bp, Homo sapiens
ttttaaatatttcta

SEQ ID NO: 431692 - DNA, 15 bp, Homo sapiens
attttaaatatttct

SEQ ID NO: 431693 - DNA, 15 bp, Homo sapiens
gattttaaatatttc

SEQ ID NO: 431694 - DNA, 15 bp, Homo sapiens
agattttaaatattt

SEQ ID NO: 431695 - DNA, 15 bp, Homo sapiens
cagattttaaatatt

SEQ ID NO: 431696 - DNA, 15 bp, Homo sapiens
acagattttaaatat

SEQ ID NO: 431697 - DNA, 15 bp, Homo sapiens
aacagattttaaata

SEQ ID NO: 431698 - DNA, 15 bp, Homo sapiens
aaacagattttaaat

SEQ ID NO: 431699 - DNA, 15 bp, Homo sapiens
aaaacagattttaaa

SEQ ID NO: 431700 - DNA, 15 bp, Homo sapiens
caaaacagattttaa

SEQ ID NO: 431701 - DNA, 15 bp, Homo sapiens
tcaaaacagatttta

SEQ ID NO: 431702 - DNA, 15 bp, Homo sapiens
atcaaaacagatttt

SEQ ID NO: 431703 - DNA, 15 bp, Homo sapiens
aatcaaaacagattt

SEQ ID NO: 431704 - DNA, 15 bp, Homo sapiens
taatcaaaacagatt

SEQ ID NO: 431705 - DNA, 15 bp, Homo sapiens
gtaatcaaaacagat

SEQ ID NO: 431706 - DNA, 15 bp, Homo sapiens
tgtaatcaaaacaga

SEQ ID NO: 431707 - DNA, 15 bp, Homo sapiens
atgtaatcaaaacag

SEQ ID NO: 431708 - DNA, 15 bp, Homo sapiens
catgtaatcaaaaca

SEQ ID NO: 431709 - DNA, 15 bp, Homo sapiens
acatgtaatcaaaac

SEQ ID NO: 431710 - DNA, 15 bp, Homo sapiens
cacatgtaatcaaaa

SEQ ID NO: 431711 - DNA, 15 bp, Homo sapiens
ccacatgtaatcaaa

SEQ ID NO: 431712 - DNA, 15 bp, Homo sapiens
accacatgtaatcaa

SEQ ID NO: 431713 - DNA, 15 bp, Homo sapiens
aaccacatgtaatca

SEQ ID NO: 431714 - DNA, 15 bp, Homo sapiens
taaccacatgtaatc

SEQ ID NO: 431715 - DNA, 15 bp, Homo sapiens
ataaccacatgtaat

SEQ ID NO: 431716 - DNA, 15 bp, Homo sapiens
cataaccacatgtaa

SEQ ID NO: 431717 - DNA, 15 bp, Homo sapiens
tcataaccacatgta

SEQ ID NO: 431718 - DNA, 15 bp, Homo sapiens
ttcataaccacatgt

SEQ ID NO: 431719 - DNA, 15 bp, Homo sapiens
attcataaccacatg

SEQ ID NO: 431720 - DNA, 15 bp, Homo sapiens
aattcataaccacat

SEQ ID NO: 431721 - DNA, 15 bp, Homo sapiens
caattcataaccaca

SEQ ID NO: 431722 - DNA, 15 bp, Homo sapiens
acaattcataaccac

SEQ ID NO: 431723 - DNA, 15 bp, Homo sapiens
aacaattcataacca

SEQ ID NO: 431724 - DNA, 15 bp, Homo sapiens
gaacaattcataacc

SEQ ID NO: 431725 - DNA, 15 bp, Homo sapiens
agaacaattcataac

SEQ ID NO: 431726 - DNA, 15 bp, Homo sapiens
aagaacaattcataa

SEQ ID NO: 431727 - DNA, 15 bp, Homo sapiens
aaagaacaattcata

SEQ ID NO: 431728 - DNA, 15 bp, Homo sapiens
gaaagaacaattcat

SEQ ID NO: 431729 - DNA, 15 bp, Homo sapiens
ggaaagaacaattca

SEQ ID NO: 431730 - DNA, 15 bp, Homo sapiens
aggaaagaacaattc

SEQ ID NO: 431731 - DNA, 15 bp, Homo sapiens
taggaaagaacaatt

SEQ ID NO: 431732 - DNA, 15 bp, Homo sapiens
ttaggaaagaacaat

SEQ ID NO: 431733 - DNA, 15 bp, Homo sapiens
gttaggaaagaacaa

SEQ ID NO: 431734 - DNA, 15 bp, Homo sapiens
cgttaggaaagaaca

SEQ ID NO: 431735 - DNA, 15 bp, Homo sapiens
gcgttaggaaagaac

SEQ ID NO: 431736 - DNA, 15 bp, Homo sapiens
tgcgttaggaaagaa

SEQ ID NO: 431737 - DNA, 15 bp, Homo sapiens
gtgcgttaggaaaga

SEQ ID NO: 431738 - DNA, 15 bp, Homo sapiens
agtgcgttaggaaag

SEQ ID NO: 431739 - DNA, 15 bp, Homo sapiens
aagtgcgttaggaaa

SEQ ID NO: 431740 - DNA, 15 bp, Homo sapiens
taagtgcgttaggaa

SEQ ID NO: 431741 - DNA, 15 bp, Homo sapiens
ctaagtgcgttagga

SEQ ID NO: 431742 - DNA, 15 bp, Homo sapiens
actaagtgcgttagg

SEQ ID NO: 431743 - DNA, 15 bp, Homo sapiens
tactaagtgcgttag

SEQ ID NO: 431744 - DNA, 15 bp, Homo sapiens
atactaagtgcgtta

SEQ ID NO: 431745 - DNA, 15 bp, Homo sapiens
tatactaagtgcgtt

SEQ ID NO: 431746 - DNA, 15 bp, Homo sapiens
atatactaagtgcgt

SEQ ID NO: 431747 - DNA, 15 bp, Homo sapiens
gatatactaagtgcg

SEQ ID NO: 431748 - DNA, 15 bp, Homo sapiens
agatatactaagtgc

SEQ ID NO: 431749 - DNA, 15 bp, Homo sapiens
gagatatactaagtg

SEQ ID NO: 431750 - DNA, 15 bp, Homo sapiens
agagatatactaagt

SEQ ID NO: 431751 - DNA, 15 bp, Homo sapiens
aagagatatactaag

SEQ ID NO: 431752 - DNA, 15 bp, Homo sapiens
caagagatatactaa

SEQ ID NO: 431753 - DNA, 15 bp, Homo sapiens
acaagagatatacta

SEQ ID NO: 431754 - DNA, 15 bp, Homo sapiens
cacaagagatatact

SEQ ID NO: 431755 - DNA, 15 bp, Homo sapiens
acacaagagatatac

SEQ ID NO: 431756 - DNA, 15 bp, Homo sapiens
gacacaagagatata

SEQ ID NO: 431757 - DNA, 15 bp, Homo sapiens
tgacacaagagatat

SEQ ID NO: 431758 - DNA, 15 bp, Homo sapiens
ttgacacaagagata

SEQ ID NO: 431759 - DNA, 15 bp, Homo sapiens
cttgacacaagagat

SEQ ID NO: 431760 - DNA, 15 bp, Homo sapiens
acttgacacaagaga

SEQ ID NO: 431761 - DNA, 15 bp, Homo sapiens
tacttgacacaagag

SEQ ID NO: 431762 - DNA, 15 bp, Homo sapiens
atacttgacacaaga

SEQ ID NO: 431763 - DNA, 15 bp, Homo sapiens
aatacttgacacaag

SEQ ID NO: 431764 - DNA, 15 bp, Homo sapiens
aaatacttgacacaa

SEQ ID NO: 431765 - DNA, 15 bp, Homo sapiens
taaatacttgacaca

SEQ ID NO: 431766 - DNA, 15 bp, Homo sapiens
gtaaatacttgacac

SEQ ID NO: 431767 - DNA, 15 bp, Homo sapiens
ggtaaatacttgaca

SEQ ID NO: 431768 - DNA, 15 bp, Homo sapiens
gggtaaatacttgac

SEQ ID NO: 431769 - DNA, 15 bp, Homo sapiens
tgggtaaatacttga

SEQ ID NO: 431770 - DNA, 15 bp, Homo sapiens
atgggtaaatacttg

SEQ ID NO: 431771 - DNA, 15 bp, Homo sapiens
aatgggtaaatactt

SEQ ID NO: 431772 - DNA, 15 bp, Homo sapiens
caatgggtaaatact

SEQ ID NO: 431773 - DNA, 15 bp, Homo sapiens
gcaatgggtaaatac

SEQ ID NO: 431774 - DNA, 15 bp, Homo sapiens
tgcaatgggtaaata

SEQ ID NO: 431775 - DNA, 15 bp, Homo sapiens
ttgcaatgggtaaat

SEQ ID NO: 431776 - DNA, 15 bp, Homo sapiens
tttgcaatgggtaaa

SEQ ID NO: 431777 - DNA, 15 bp, Homo sapiens
ttttgcaatgggtaa

SEQ ID NO: 431778 - DNA, 15 bp, Homo sapiens
tttttgcaatgggta

SEQ ID NO: 431779 - DNA, 15 bp, Homo sapiens
ctttttgcaatgggt

SEQ ID NO: 431780 - DNA, 15 bp, Homo sapiens
cctttttgcaatggg

SEQ ID NO: 431781 - DNA, 15 bp, Homo sapiens
ccctttttgcaatgg

SEQ ID NO: 431782 - DNA, 15 bp, Homo sapiens
gccctttttgcaatg

SEQ ID NO: 431783 - DNA, 15 bp, Homo sapiens
agccctttttgcaat

SEQ ID NO: 431784 - DNA, 15 bp, Homo sapiens
gagccctttttgcaa

SEQ ID NO: 431785 - DNA, 15 bp, Homo sapiens
agagccctttttgca

SEQ ID NO: 431786 - DNA, 15 bp, Homo sapiens
cagagccctttttgc

SEQ ID NO: 431787 - DNA, 15 bp, Homo sapiens
tcagagccctttttg

SEQ ID NO: 431788 - DNA, 15 bp, Homo sapiens
atcagagcccttttt

SEQ ID NO: 431789 - DNA, 15 bp, Homo sapiens
catcagagccctttt

SEQ ID NO: 431790 - DNA, 15 bp, Homo sapiens
tcatcagagcccttt

SEQ ID NO: 431791 - DNA, 15 bp, Homo sapiens
ttcatcagagccctt

SEQ ID NO: 431792 - DNA, 15 bp, Homo sapiens
attcatcagagccct

SEQ ID NO: 431793 - DNA, 15 bp, Homo sapiens
aattcatcagagccc

SEQ ID NO: 431794 - DNA, 15 bp, Homo sapiens
aaattcatcagagcc

SEQ ID NO: 431795 - DNA, 15 bp, Homo sapiens
aaaattcatcagagc

SEQ ID NO: 431796 - DNA, 15 bp, Homo sapiens
aaaaattcatcagag

SEQ ID NO: 431797 - DNA, 15 bp, Homo sapiens
taaaaattcatcaga

SEQ ID NO: 431798 - DNA, 15 bp, Homo sapiens
ctaaaaattcatcag

SEQ ID NO: 431799 - DNA, 15 bp, Homo sapiens
cctaaaaattcatca

SEQ ID NO: 431800 - DNA, 15 bp, Homo sapiens
gcctaaaaattcatc

SEQ ID NO: 431801 - DNA, 15 bp, Homo sapiens
ggcctaaaaattcat

SEQ ID NO: 431802 - DNA, 15 bp, Homo sapiens
aggcctaaaaattca

SEQ ID NO: 431803 - DNA, 15 bp, Homo sapiens
aaggcctaaaaattc

SEQ ID NO: 431804 - DNA, 15 bp, Homo sapiens
gaaggcctaaaaatt

SEQ ID NO: 431805 - DNA, 15 bp, Homo sapiens
tgaaggcctaaaaat

SEQ ID NO: 431806 - DNA, 15 bp, Homo sapiens
gtgaaggcctaaaaa

SEQ ID NO: 431807 - DNA, 15 bp, Homo sapiens
tgtgaaggcctaaaa

SEQ ID NO: 431808 - DNA, 15 bp, Homo sapiens
gtgtgaaggcctaaa

SEQ ID NO: 431809 - DNA, 15 bp, Homo sapiens
agtgtgaaggcctaa

SEQ ID NO: 431810 - DNA, 15 bp, Homo sapiens
aagtgtgaaggccta

SEQ ID NO: 431811 - DNA, 15 bp, Homo sapiens
gaagtgtgaaggcct

SEQ ID NO: 431812 - DNA, 15 bp, Homo sapiens
tgaagtgtgaaggcc

SEQ ID NO: 431813 - DNA, 15 bp, Homo sapiens
gtgaagtgtgaaggc

SEQ ID NO: 431814 - DNA, 15 bp, Homo sapiens
tgtgaagtgtgaagg

SEQ ID NO: 431815 - DNA, 15 bp, Homo sapiens
ctgtgaagtgtgaag

SEQ ID NO: 431816 - DNA, 15 bp, Homo sapiens
gctgtgaagtgtgaa

SEQ ID NO: 431817 - DNA, 15 bp, Homo sapiens
agctgtgaagtgtga

SEQ ID NO: 431818 - DNA, 15 bp, Homo sapiens
aagctgtgaagtgtg

SEQ ID NO: 431819 - DNA, 15 bp, Homo sapiens
gaagctgtgaagtgt

SEQ ID NO: 431820 - DNA, 15 bp, Homo sapiens
agaagctgtgaagtg

SEQ ID NO: 431821 - DNA, 15 bp, Homo sapiens
tagaagctgtgaagt

SEQ ID NO: 431822 - DNA, 15 bp, Homo sapiens
gtagaagctgtgaag

SEQ ID NO: 431823 - DNA, 15 bp, Homo sapiens
ggtagaagctgtgaa

SEQ ID NO: 431824 - DNA, 15 bp, Homo sapiens
aggtagaagctgtga

SEQ ID NO: 431825 - DNA, 15 bp, Homo sapiens
gaggtagaagctgtg

SEQ ID NO: 431826 - DNA, 15 bp, Homo sapiens
ggaggtagaagctgt

SEQ ID NO: 431827 - DNA, 15 bp, Homo sapiens
tggaggtagaagctg

SEQ ID NO: 431828 - DNA, 15 bp, Homo sapiens
ttggaggtagaagct

SEQ ID NO: 431829 - DNA, 15 bp, Homo sapiens
tttggaggtagaagc

SEQ ID NO: 431830 - DNA, 15 bp, Homo sapiens
atttggaggtagaag

SEQ ID NO: 431831 - DNA, 15 bp, Homo sapiens
aatttggaggtagaa

SEQ ID NO: 431832 - DNA, 15 bp, Homo sapiens
caatttggaggtaga

SEQ ID NO: 431833 - DNA, 15 bp, Homo sapiens
ccaatttggaggtag

SEQ ID NO: 431834 - DNA, 15 bp, Homo sapiens
cccaatttggaggta

SEQ ID NO: 431835 - DNA, 15 bp, Homo sapiens
tcccaatttggaggt

SEQ ID NO: 431836 - DNA, 15 bp, Homo sapiens
ttcccaatttggagg

SEQ ID NO: 431837 - DNA, 15 bp, Homo sapiens
tttcccaatttggag

SEQ ID NO: 431838 - DNA, 15 bp, Homo sapiens
atttcccaatttgga

SEQ ID NO: 431839 - DNA, 15 bp, Homo sapiens
aatttcccaatttgg

SEQ ID NO: 431840 - DNA, 15 bp, Homo sapiens
aaatttcccaatttg

SEQ ID NO: 431841 - DNA, 15 bp, Homo sapiens
gaaatttcccaattt

SEQ ID NO: 431842 - DNA, 15 bp, Homo sapiens
agaaatttcccaatt

SEQ ID NO: 431843 - DNA, 15 bp, Homo sapiens
gagaaatttcccaat

SEQ ID NO: 431844 - DNA, 15 bp, Homo sapiens
ggagaaatttcccaa

SEQ ID NO: 431845 - DNA, 15 bp, Homo sapiens
aggagaaatttccca

SEQ ID NO: 431846 - DNA, 15 bp, Homo sapiens
aaggagaaatttccc

SEQ ID NO: 431847 - DNA, 15 bp, Homo sapiens
gaaggagaaatttcc

SEQ ID NO: 431848 - DNA, 15 bp, Homo sapiens
cgaaggagaaatttc

SEQ ID NO: 431849 - DNA, 15 bp, Homo sapiens
acgaaggagaaattt

SEQ ID NO: 431850 - DNA, 15 bp, Homo sapiens
tacgaaggagaaatt

SEQ ID NO: 431851 - DNA, 15 bp, Homo sapiens
ctacgaaggagaaat

SEQ ID NO: 431852 - DNA, 15 bp, Homo sapiens
tctacgaaggagaaa

SEQ ID NO: 431853 - DNA, 15 bp, Homo sapiens
ttctacgaaggagaa

SEQ ID NO: 431854 - DNA, 15 bp, Homo sapiens
cttctacgaaggaga

SEQ ID NO: 431855 - DNA, 15 bp, Homo sapiens
tcttctacgaaggag

SEQ ID NO: 431856 - DNA, 15 bp, Homo sapiens
ctcttctacgaagga

SEQ ID NO: 431857 - DNA, 15 bp, Homo sapiens
gctcttctacgaagg

SEQ ID NO: 431858 - DNA, 15 bp, Homo sapiens
tgctcttctacgaag

SEQ ID NO: 431859 - DNA, 15 bp, Homo sapiens
gtgctcttctacgaa

SEQ ID NO: 431860 - DNA, 15 bp, Homo sapiens
tgtgctcttctacga

SEQ ID NO: 431861 - DNA, 15 bp, Homo sapiens
ttgtgctcttctacg

SEQ ID NO: 431862 - DNA, 15 bp, Homo sapiens
attgtgctcttctac

SEQ ID NO: 431863 - DNA, 15 bp, Homo sapiens
tattgtgctcttcta

SEQ ID NO: 431864 - DNA, 15 bp, Homo sapiens
ttattgtgctcttct

SEQ ID NO: 431865 - DNA, 15 bp, Homo sapiens
tttattgtgctcttc

SEQ ID NO: 431866 - DNA, 15 bp, Homo sapiens
atttattgtgctctt

SEQ ID NO: 431867 - DNA, 15 bp, Homo sapiens
aatttattgtgctct

SEQ ID NO: 431868 - DNA, 15 bp, Homo sapiens
caatttattgtgctc

SEQ ID NO: 431869 - DNA, 15 bp, Homo sapiens
ccaatttattgtgct

SEQ ID NO: 431870 - DNA, 15 bp, Homo sapiens
gccaatttattgtgc

SEQ ID NO: 431871 - DNA, 15 bp, Homo sapiens
tgccaatttattgtg

SEQ ID NO: 431872 - DNA, 15 bp, Homo sapiens
gtgccaatttattgt

SEQ ID NO: 431873 - DNA, 15 bp, Homo sapiens
agtgccaatttattg

SEQ ID NO: 431874 - DNA, 15 bp, Homo sapiens
aagtgccaatttatt

SEQ ID NO: 431875 - DNA, 15 bp, Homo sapiens
caagtgccaatttat

SEQ ID NO: 431876 - DNA, 15 bp, Homo sapiens
gcaagtgccaattta

SEQ ID NO: 431877 - DNA, 15 bp, Homo sapiens
agcaagtgccaattt

SEQ ID NO: 431878 - DNA, 15 bp, Homo sapiens
gagcaagtgccaatt

SEQ ID NO: 431879 - DNA, 15 bp, Homo sapiens
tgagcaagtgccaat

SEQ ID NO: 431880 - DNA, 15 bp, Homo sapiens
gtgagcaagtgccaa

SEQ ID NO: 431881 - DNA, 15 bp, Homo sapiens
tgtgagcaagtgcca

SEQ ID NO: 431882 - DNA, 15 bp, Homo sapiens
gtgtgagcaagtgcc

SEQ ID NO: 431883 - DNA, 15 bp, Homo sapiens
agtgtgagcaagtgc

SEQ ID NO: 431884 - DNA, 15 bp, Homo sapiens
aagtgtgagcaagtg

SEQ ID NO: 431885 - DNA, 15 bp, Homo sapiens
aaagtgtgagcaagt

SEQ ID NO: 431886 - DNA, 15 bp, Homo sapiens
taaagtgtgagcaag

SEQ ID NO: 431887 - DNA, 15 bp, Homo sapiens
ataaagtgtgagcaa

SEQ ID NO: 431888 - DNA, 15 bp, Homo sapiens
tataaagtgtgagca

SEQ ID NO: 431889 - DNA, 15 bp, Homo sapiens
ttataaagtgtgagc

SEQ ID NO: 431890 - DNA, 15 bp, Homo sapiens
tttataaagtgtgag

SEQ ID NO: 431891 - DNA, 15 bp, Homo sapiens
gtttataaagtgtga

SEQ ID NO: 431892 - DNA, 15 bp, Homo sapiens
agtttataaagtgtg

SEQ ID NO: 431893 - DNA, 15 bp, Homo sapiens
tagtttataaagtgt

SEQ ID NO: 431894 - DNA, 15 bp, Homo sapiens
ttagtttataaagtg

SEQ ID NO: 431895 - DNA, 15 bp, Homo sapiens
attagtttataaagt

SEQ ID NO: 431896 - DNA, 15 bp, Homo sapiens
aattagtttataaag

SEQ ID NO: 431897 - DNA, 15 bp, Homo sapiens
caattagtttataaa

SEQ ID NO: 431898 - DNA, 15 bp, Homo sapiens
tcaattagtttataa

SEQ ID NO: 431899 - DNA, 15 bp, Homo sapiens
gtcaattagtttata

SEQ ID NO: 431900 - DNA, 15 bp, Homo sapiens
agtcaattagtttat

SEQ ID NO: 431901 - DNA, 15 bp, Homo sapiens
tagtcaattagttta

SEQ ID NO: 431902 - DNA, 15 bp, Homo sapiens
atagtcaattagttt

SEQ ID NO: 431903 - DNA, 15 bp, Homo sapiens
tatagtcaattagtt

SEQ ID NO: 431904 - DNA, 15 bp, Homo sapiens
ttatagtcaattagt

SEQ ID NO: 431905 - DNA, 15 bp, Homo sapiens
attatagtcaattag

SEQ ID NO: 431906 - DNA, 15 bp, Homo sapiens
cattatagtcaatta

SEQ ID NO: 431907 - DNA, 15 bp, Homo sapiens
acattatagtcaatt

SEQ ID NO: 431908 - DNA, 15 bp, Homo sapiens
tacattatagtcaat

SEQ ID NO: 431909 - DNA, 15 bp, Homo sapiens
ctacattatagtcaa

SEQ ID NO: 431910 - DNA, 15 bp, Homo sapiens
tctacattatagtca

SEQ ID NO: 431911 - DNA, 15 bp, Homo sapiens
ttctacattatagtc

SEQ ID NO: 431912 - DNA, 15 bp, Homo sapiens
tttctacattatagt

SEQ ID NO: 431913 - DNA, 15 bp, Homo sapiens
ttttctacattatag

SEQ ID NO: 431914 - DNA, 15 bp, Homo sapiens
tttttctacattata

SEQ ID NO: 431915 - DNA, 15 bp, Homo sapiens
atttttctacattat

SEQ ID NO: 431916 - DNA, 15 bp, Homo sapiens
tatttttctacatta

SEQ ID NO: 431917 - DNA, 15 bp, Homo sapiens
atatttttctacatt

SEQ ID NO: 431918 - DNA, 15 bp, Homo sapiens
tatatttttctacat

SEQ ID NO: 431919 - DNA, 15 bp, Homo sapiens
atatatttttctaca

SEQ ID NO: 431920 - DNA, 15 bp, Homo sapiens
tatatatttttctac

SEQ ID NO: 431921 - DNA, 15 bp, Homo sapiens
atatatatttttcta

SEQ ID NO: 431922 - DNA, 15 bp, Homo sapiens
aatatatatttttct

SEQ ID NO: 431923 - DNA, 15 bp, Homo sapiens
aaatatatatttttc

SEQ ID NO: 431924 - DNA, 15 bp, Homo sapiens
aaaatatatattttt

SEQ ID NO: 431925 - DNA, 15 bp, Homo sapiens
taaaatatatatttt

SEQ ID NO: 431926 - DNA, 15 bp, Homo sapiens
ttaaaatatatattt

SEQ ID NO: 431927 - DNA, 15 bp, Homo sapiens
attaaaatatatatt

SEQ ID NO: 431928 - DNA, 15 bp, Homo sapiens
tattaaaatatatat

SEQ ID NO: 431929 - DNA, 15 bp, Homo sapiens
ctattaaaatatata

SEQ ID NO: 431930 - DNA, 15 bp, Homo sapiens
tctattaaaatatat

SEQ ID NO: 431931 - DNA, 15 bp, Homo sapiens
ttctattaaaatata

SEQ ID NO: 431932 - DNA, 15 bp, Homo sapiens
cttctattaaaatat

SEQ ID NO: 431933 - DNA, 15 bp, Homo sapiens
ccttctattaaaata

SEQ ID NO: 431934 - DNA, 15 bp, Homo sapiens
tccttctattaaaat

SEQ ID NO: 431935 - DNA, 15 bp, Homo sapiens
ttccttctattaaaa

SEQ ID NO: 431936 - DNA, 15 bp, Homo sapiens
tttccttctattaaa

SEQ ID NO: 431937 - DNA, 15 bp, Homo sapiens
gtttccttctattaa

SEQ ID NO: 431938 - DNA, 15 bp, Homo sapiens
tgtttccttctatta

SEQ ID NO: 431939 - DNA, 15 bp, Homo sapiens
ttgtttccttctatt

SEQ ID NO: 431940 - DNA, 15 bp, Homo sapiens
tttgtttccttctat

SEQ ID NO: 431941 - DNA, 15 bp, Homo sapiens
ttttgtttccttcta

SEQ ID NO: 431942 - DNA, 15 bp, Homo sapiens
attttgtttccttct

SEQ ID NO: 431943 - DNA, 15 bp, Homo sapiens
tattttgtttccttc

SEQ ID NO: 431944 - DNA, 15 bp, Homo sapiens
atattttgtttcctt

SEQ ID NO: 431945 - DNA, 15 bp, Homo sapiens
gatattttgtttcct

SEQ ID NO: 431946 - DNA, 15 bp, Homo sapiens
ggatattttgtttcc

SEQ ID NO: 431947 - DNA, 15 bp, Homo sapiens
tggatattttgtttc

SEQ ID NO: 431948 - DNA, 15 bp, Homo sapiens
ttggatattttgttt

SEQ ID NO: 431949 - DNA, 15 bp, Homo sapiens
gttggatattttgtt

SEQ ID NO: 431950 - DNA, 15 bp, Homo sapiens
tgttggatattttgt

SEQ ID NO: 431951 - DNA, 15 bp, Homo sapiens
gtgttggatattttg

SEQ ID NO: 431952 - DNA, 15 bp, Homo sapiens
ggtgttggatatttt

SEQ ID NO: 431953 - DNA, 15 bp, Homo sapiens
aggtgttggatattt

SEQ ID NO: 431954 - DNA, 15 bp, Homo sapiens
aaggtgttggatatt

SEQ ID NO: 431955 - DNA, 15 bp, Homo sapiens
taaggtgttggatat

SEQ ID NO: 431956 - DNA, 15 bp, Homo sapiens
ctaaggtgttggata

SEQ ID NO: 431957 - DNA, 15 bp, Homo sapiens
tctaaggtgttggat

SEQ ID NO: 431958 - DNA, 15 bp, Homo sapiens
ctctaaggtgttgga

SEQ ID NO: 431959 - DNA, 15 bp, Homo sapiens
tctctaaggtgttgg

SEQ ID NO: 431960 - DNA, 15 bp, Homo sapiens
ttctctaaggtgttg

SEQ ID NO: 431961 - DNA, 15 bp, Homo sapiens
tttctctaaggtgtt

SEQ ID NO: 431962 - DNA, 15 bp, Homo sapiens
ctttctctaaggtgt

SEQ ID NO: 431963 - DNA, 15 bp, Homo sapiens
actttctctaaggtg

SEQ ID NO: 431964 - DNA, 15 bp, Homo sapiens
tactttctctaaggt

SEQ ID NO: 431965 - DNA, 15 bp, Homo sapiens
ttactttctctaagg

SEQ ID NO: 431966 - DNA, 15 bp, Homo sapiens
cttactttctctaag

SEQ ID NO: 431967 - DNA, 15 bp, Homo sapiens
gcttactttctctaa

SEQ ID NO: 431968 - DNA, 15 bp, Homo sapiens
tgcttactttctcta

SEQ ID NO: 431969 - DNA, 15 bp, Homo sapiens
ttgcttactttctct

SEQ ID NO: 431970 - DNA, 15 bp, Homo sapiens
attgcttactttctc

SEQ ID NO: 431971 - DNA, 15 bp, Homo sapiens
tattgcttactttct

SEQ ID NO: 431972 - DNA, 15 bp, Homo sapiens
ttattgcttactttc

SEQ ID NO: 431973 - DNA, 15 bp, Homo sapiens
cttattgcttacttt

SEQ ID NO: 431974 - DNA, 15 bp, Homo sapiens
tcttattgcttactt

SEQ ID NO: 431975 - DNA, 15 bp, Homo sapiens
ttcttattgcttact

SEQ ID NO: 431976 - DNA, 15 bp, Homo sapiens
tttcttattgcttac

SEQ ID NO: 431977 - DNA, 15 bp, Homo sapiens
ttttcttattgctta

SEQ ID NO: 431978 - DNA, 15 bp, Homo sapiens
attttcttattgctt

SEQ ID NO: 431979 - DNA, 15 bp, Homo sapiens
gattttcttattgct

SEQ ID NO: 431980 - DNA, 15 bp, Homo sapiens
tgattttcttattgc

SEQ ID NO: 431981 - DNA, 15 bp, Homo sapiens
atgattttcttattg

SEQ ID NO: 431982 - DNA, 15 bp, Homo sapiens
catgattttcttatt

SEQ ID NO: 431983 - DNA, 15 bp, Homo sapiens
ccatgattttcttat

SEQ ID NO: 431984 - DNA, 15 bp, Homo sapiens
accatgattttctta

SEQ ID NO: 431985 - DNA, 15 bp, Homo sapiens
aaccatgattttctt

SEQ ID NO: 431986 - DNA, 15 bp, Homo sapiens
gaaccatgattttct

SEQ ID NO: 431987 - DNA, 15 bp, Homo sapiens
agaaccatgattttc

SEQ ID NO: 431988 - DNA, 15 bp, Homo sapiens
gagaaccatgatttt

SEQ ID NO: 431989 - DNA, 15 bp, Homo sapiens
agagaaccatgattt

SEQ ID NO: 431990 - DNA, 15 bp, Homo sapiens
aagagaaccatgatt

SEQ ID NO: 431991 - DNA, 15 bp, Homo sapiens
caagagaaccatgat

SEQ ID NO: 431992 - DNA, 15 bp, Homo sapiens
acaagagaaccatga

SEQ ID NO: 431993 - DNA, 15 bp, Homo sapiens
cacaagagaaccatg

SEQ ID NO: 431994 - DNA, 15 bp, Homo sapiens
tcacaagagaaccat

SEQ ID NO: 431995 - DNA, 15 bp, Homo sapiens
ttcacaagagaacca

SEQ ID NO: 431996 - DNA, 15 bp, Homo sapiens
gttcacaagagaacc

SEQ ID NO: 431997 - DNA, 15 bp, Homo sapiens
tgttcacaagagaac

SEQ ID NO: 431998 - DNA, 15 bp, Homo sapiens
atgttcacaagagaa

SEQ ID NO: 431999 - DNA, 15 bp, Homo sapiens
aatgttcacaagaga

SEQ ID NO: 432000 - DNA, 15 bp, Homo sapiens
aaatgttcacaagag

SEQ ID NO: 432001 - DNA, 15 bp, Homo sapiens
aaaatgttcacaaga

SEQ ID NO: 432002 - DNA, 15 bp, Homo sapiens
aaaaatgttcacaag

SEQ ID NO: 432003 - DNA, 15 bp, Homo sapiens
gaaaaatgttcacaa

SEQ ID NO: 432004 - DNA, 15 bp, Homo sapiens
agaaaaatgttcaca

SEQ ID NO: 432005 - DNA, 15 bp, Homo sapiens
tagaaaaatgttcac

SEQ ID NO: 432006 - DNA, 15 bp, Homo sapiens
ttagaaaaatgttca

SEQ ID NO: 432007 - DNA, 15 bp, Homo sapiens
attagaaaaatgttc

SEQ ID NO: 432008 - DNA, 15 bp, Homo sapiens
cattagaaaaatgtt

SEQ ID NO: 432009 - DNA, 15 bp, Homo sapiens
gcattagaaaaatgt

SEQ ID NO: 432010 - DNA, 15 bp, Homo sapiens
tgcattagaaaaatg

SEQ ID NO: 432011 - DNA, 15 bp, Homo sapiens
ttgcattagaaaaat

SEQ ID NO: 432012 - DNA, 15 bp, Homo sapiens
tttgcattagaaaaa

SEQ ID NO: 432013 - DNA, 15 bp, Homo sapiens
ctttgcattagaaaa

SEQ ID NO: 432014 - DNA, 15 bp, Homo sapiens
actttgcattagaaa

SEQ ID NO: 432015 - DNA, 15 bp, Homo sapiens
cactttgcattagaa

SEQ ID NO: 432016 - DNA, 15 bp, Homo sapiens
gcactttgcattaga

SEQ ID NO: 432017 - DNA, 15 bp, Homo sapiens
agcactttgcattag

SEQ ID NO: 432018 - DNA, 15 bp, Homo sapiens
cagcactttgcatta

SEQ ID NO: 432019 - DNA, 15 bp, Homo sapiens
ccagcactttgcatt

SEQ ID NO: 432020 - DNA, 15 bp, Homo sapiens
gccagcactttgcat

SEQ ID NO: 432021 - DNA, 15 bp, Homo sapiens
ggccagcactttgca

SEQ ID NO: 432022 - DNA, 15 bp, Homo sapiens
gggccagcactttgc

SEQ ID NO: 432023 - DNA, 15 bp, Homo sapiens
ggggccagcactttg

SEQ ID NO: 432024 - DNA, 15 bp, Homo sapiens
aggggccagcacttt

SEQ ID NO: 432025 - DNA, 15 bp, Homo sapiens
taggggccagcactt

SEQ ID NO: 432026 - DNA, 15 bp, Homo sapiens
ttaggggccagcact

SEQ ID NO: 432027 - DNA, 15 bp, Homo sapiens
cttaggggccagcac

SEQ ID NO: 432028 - DNA, 15 bp, Homo sapiens
ccttaggggccagca

SEQ ID NO: 432029 - DNA, 15 bp, Homo sapiens
tccttaggggccagc

SEQ ID NO: 432030 - DNA, 15 bp, Homo sapiens
ttccttaggggccag

SEQ ID NO: 432031 - DNA, 15 bp, Homo sapiens
cttccttaggggcca

SEQ ID NO: 432032 - DNA, 15 bp, Homo sapiens
ccttccttaggggcc

SEQ ID NO: 432033 - DNA, 15 bp, Homo sapiens
tccttccttaggggc

SEQ ID NO: 432034 - DNA, 15 bp, Homo sapiens
gtccttccttagggg

SEQ ID NO: 432035 - DNA, 15 bp, Homo sapiens
ggtccttccttaggg

SEQ ID NO: 432036 - DNA, 15 bp, Homo sapiens
aggtccttccttagg

SEQ ID NO: 432037 - DNA, 15 bp, Homo sapiens
taggtccttccttag

SEQ ID NO: 432038 - DNA, 15 bp, Homo sapiens
gtaggtccttcctta

SEQ ID NO: 432039 - DNA, 15 bp, Homo sapiens
ggtaggtccttcctt

SEQ ID NO: 432040 - DNA, 15 bp, Homo sapiens
tggtaggtccttcct

SEQ ID NO: 432041 - DNA, 15 bp, Homo sapiens
gtggtaggtccttcc

SEQ ID NO: 432042 - DNA, 15 bp, Homo sapiens
tgtggtaggtccttc

SEQ ID NO: 432043 - DNA, 15 bp, Homo sapiens
gtgtggtaggtcctt

SEQ ID NO: 432044 - DNA, 15 bp, Homo sapiens
agtgtggtaggtcct

SEQ ID NO: 432045 - DNA, 15 bp, Homo sapiens
gagtgtggtaggtcc

SEQ ID NO: 432046 - DNA, 15 bp, Homo sapiens
ggagtgtggtaggtc

SEQ ID NO: 432047 - DNA, 15 bp, Homo sapiens
aggagtgtggtaggt

SEQ ID NO: 432048 - DNA, 15 bp, Homo sapiens
gaggagtgtggtagg

SEQ ID NO: 432049 - DNA, 15 bp, Homo sapiens
ggaggagtgtggtag

SEQ ID NO: 432050 - DNA, 15 bp, Homo sapiens
aggaggagtgtggta

SEQ ID NO: 432051 - DNA, 15 bp, Homo sapiens
gaggaggagtgtggt

SEQ ID NO: 432052 - DNA, 15 bp, Homo sapiens
agaggaggagtgtgg

SEQ ID NO: 432053 - DNA, 15 bp, Homo sapiens
aagaggaggagtgtg

SEQ ID NO: 432054 - DNA, 15 bp, Homo sapiens
aaagaggaggagtgt

SEQ ID NO: 432055 - DNA, 15 bp, Homo sapiens
caaagaggaggagtg

SEQ ID NO: 432056 - DNA, 15 bp, Homo sapiens
gcaaagaggaggagt

SEQ ID NO: 432057 - DNA, 15 bp, Homo sapiens
agcaaagaggaggag

SEQ ID NO: 432058 - DNA, 15 bp, Homo sapiens
cagcaaagaggagga

SEQ ID NO: 432059 - DNA, 15 bp, Homo sapiens
ccagcaaagaggagg

SEQ ID NO: 432060 - DNA, 15 bp, Homo sapiens
gccagcaaagaggag

SEQ ID NO: 432061 - DNA, 15 bp, Homo sapiens
agccagcaaagagga

SEQ ID NO: 432062 - DNA, 15 bp, Homo sapiens
cagccagcaaagagg

SEQ ID NO: 432063 - DNA, 15 bp, Homo sapiens
ccagccagcaaagag

SEQ ID NO: 432064 - DNA, 15 bp, Homo sapiens
tccagccagcaaaga

SEQ ID NO: 432065 - DNA, 15 bp, Homo sapiens
ttccagccagcaaag

SEQ ID NO: 432066 - DNA, 15 bp, Homo sapiens
attccagccagcaaa

SEQ ID NO: 432067 - DNA, 15 bp, Homo sapiens
tattccagccagcaa

SEQ ID NO: 432068 - DNA, 15 bp, Homo sapiens
gtattccagccagca

SEQ ID NO: 432069 - DNA, 15 bp, Homo sapiens
agtattccagccagc

SEQ ID NO: 432070 - DNA, 15 bp, Homo sapiens
cagtattccagccag

SEQ ID NO: 432071 - DNA, 15 bp, Homo sapiens
ccagtattccagcca

SEQ ID NO: 432072 - DNA, 15 bp, Homo sapiens
gccagtattccagcc

SEQ ID NO: 432073 - DNA, 15 bp, Homo sapiens
agccagtattccagc

SEQ ID NO: 432074 - DNA, 15 bp, Homo sapiens
aagccagtattccag

SEQ ID NO: 432075 - DNA, 15 bp, Homo sapiens
taagccagtattcca

SEQ ID NO: 432076 - DNA, 15 bp, Homo sapiens
ctaagccagtattcc

SEQ ID NO: 432077 - DNA, 15 bp, Homo sapiens
actaagccagtattc

SEQ ID NO: 432078 - DNA, 15 bp, Homo sapiens
gactaagccagtatt

SEQ ID NO: 432079 - DNA, 15 bp, Homo sapiens
tgactaagccagtat

SEQ ID NO: 432080 - DNA, 15 bp, Homo sapiens
ctgactaagccagta

SEQ ID NO: 432081 - DNA, 15 bp, Homo sapiens
cctgactaagccagt

SEQ ID NO: 432082 - DNA, 15 bp, Homo sapiens
ccctgactaagccag

SEQ ID NO: 432083 - DNA, 15 bp, Homo sapiens
accctgactaagcca

SEQ ID NO: 432084 - DNA, 15 bp, Homo sapiens
aaccctgactaagcc

SEQ ID NO: 432085 - DNA, 15 bp, Homo sapiens
gaaccctgactaagc

SEQ ID NO: 432086 - DNA, 15 bp, Homo sapiens
ggaaccctgactaag

SEQ ID NO: 432087 - DNA, 15 bp, Homo sapiens
gggaaccctgactaa

SEQ ID NO: 432088 - DNA, 15 bp, Homo sapiens
tgggaaccctgacta

SEQ ID NO: 432089 - DNA, 15 bp, Homo sapiens
ctgggaaccctgact

SEQ ID NO: 432090 - DNA, 15 bp, Homo sapiens
gctgggaaccctgac

SEQ ID NO: 432091 - DNA, 15 bp, Homo sapiens
ggctgggaaccctga

SEQ ID NO: 432092 - DNA, 15 bp, Homo sapiens
tggctgggaaccctg

SEQ ID NO: 432093 - DNA, 15 bp, Homo sapiens
atggctgggaaccct

SEQ ID NO: 432094 - DNA, 15 bp, Homo sapiens
gatggctgggaaccc

SEQ ID NO: 432095 - DNA, 15 bp, Homo sapiens
agatggctgggaacc

SEQ ID NO: 432096 - DNA, 15 bp, Homo sapiens
gagatggctgggaac

SEQ ID NO: 432097 - DNA, 15 bp, Homo sapiens
ggagatggctgggaa

SEQ ID NO: 432098 - DNA, 15 bp, Homo sapiens
gggagatggctggga

SEQ ID NO: 432099 - DNA, 15 bp, Homo sapiens
ggggagatggctggg

SEQ ID NO: 432100 - DNA, 15 bp, Homo sapiens
tggggagatggctgg

SEQ ID NO: 432101 - DNA, 15 bp, Homo sapiens
ctggggagatggctg

SEQ ID NO: 432102 - DNA, 15 bp, Homo sapiens
actggggagatggct

SEQ ID NO: 432103 - DNA, 15 bp, Homo sapiens
cactggggagatggc

SEQ ID NO: 432104 - DNA, 15 bp, Homo sapiens
ccactggggagatgg

SEQ ID NO: 432105 - DNA, 15 bp, Homo sapiens
cccactggggagatg

SEQ ID NO: 432106 - DNA, 15 bp, Homo sapiens
gcccactggggagat

SEQ ID NO: 432107 - DNA, 15 bp, Homo sapiens
tgcccactggggaga

SEQ ID NO: 432108 - DNA, 15 bp, Homo sapiens
ctgcccactggggag

SEQ ID NO: 432109 - DNA, 15 bp, Homo sapiens
cctgcccactgggga

SEQ ID NO: 432110 - DNA, 15 bp, Homo sapiens
tcctgcccactgggg

SEQ ID NO: 432111 - DNA, 15 bp, Homo sapiens
atcctgcccactggg

SEQ ID NO: 432112 - DNA, 15 bp, Homo sapiens
gatcctgcccactgg

SEQ ID NO: 432113 - DNA, 15 bp, Homo sapiens
agatcctgcccactg

SEQ ID NO: 432114 - DNA, 15 bp, Homo sapiens
gagatcctgcccact

SEQ ID NO: 432115 - DNA, 15 bp, Homo sapiens
agagatcctgcccac

SEQ ID NO: 432116 - DNA, 15 bp, Homo sapiens
aagagatcctgccca

SEQ ID NO: 432117 - DNA, 15 bp, Homo sapiens
gaagagatcctgccc

SEQ ID NO: 432118 - DNA, 15 bp, Homo sapiens
agaagagatcctgcc

SEQ ID NO: 432119 - DNA, 15 bp, Homo sapiens
cagaagagatcctgc

SEQ ID NO: 432120 - DNA, 15 bp, Homo sapiens
ccagaagagatcctg

SEQ ID NO: 432121 - DNA, 15 bp, Homo sapiens
cccagaagagatcct

SEQ ID NO: 432122 - DNA, 15 bp, Homo sapiens
tcccagaagagatcc

SEQ ID NO: 432123 - DNA, 15 bp, Homo sapiens
ttcccagaagagatc

SEQ ID NO: 432124 - DNA, 15 bp, Homo sapiens
tttcccagaagagat

SEQ ID NO: 432125 - DNA, 15 bp, Homo sapiens
ttttcccagaagaga

SEQ ID NO: 432126 - DNA, 15 bp, Homo sapiens
tttttcccagaagag

SEQ ID NO: 432127 - DNA, 15 bp, Homo sapiens
atttttcccagaaga

SEQ ID NO: 432128 - DNA, 15 bp, Homo sapiens
tatttttcccagaag

SEQ ID NO: 432129 - DNA, 15 bp, Homo sapiens
gtatttttcccagaa

SEQ ID NO: 432130 - DNA, 15 bp, Homo sapiens
agtatttttcccaga

SEQ ID NO: 432131 - DNA, 15 bp, Homo sapiens
cagtatttttcccag

SEQ ID NO: 432132 - DNA, 15 bp, Homo sapiens
acagtatttttccca

SEQ ID NO: 432133 - DNA, 15 bp, Homo sapiens
cacagtatttttccc

SEQ ID NO: 432134 - DNA, 15 bp, Homo sapiens
tcacagtatttttcc

SEQ ID NO: 432135 - DNA, 15 bp, Homo sapiens
gtcacagtatttttc

SEQ ID NO: 432136 - DNA, 15 bp, Homo sapiens
tgtcacagtattttt

SEQ ID NO: 432137 - DNA, 15 bp, Homo sapiens
ctgtcacagtatttt

SEQ ID NO: 432138 - DNA, 15 bp, Homo sapiens
actgtcacagtattt

SEQ ID NO: 432139 - DNA, 15 bp, Homo sapiens
cactgtcacagtatt

SEQ ID NO: 432140 - DNA, 15 bp, Homo sapiens
acactgtcacagtat

SEQ ID NO: 432141 - DNA, 15 bp, Homo sapiens
aacactgtcacagta

SEQ ID NO: 432142 - DNA, 15 bp, Homo sapiens
aaacactgtcacagt

SEQ ID NO: 432143 - DNA, 15 bp, Homo sapiens
caaacactgtcacag

SEQ ID NO: 432144 - DNA, 15 bp, Homo sapiens
acaaacactgtcaca

SEQ ID NO: 432145 - DNA, 15 bp, Homo sapiens
tacaaacactgtcac

SEQ ID NO: 432146 - DNA, 15 bp, Homo sapiens
ctacaaacactgtca

SEQ ID NO: 432147 - DNA, 15 bp, Homo sapiens
actacaaacactgtc

SEQ ID NO: 432148 - DNA, 15 bp, Homo sapiens
gactacaaacactgt

SEQ ID NO: 432149 - DNA, 15 bp, Homo sapiens
ggactacaaacactg

SEQ ID NO: 432150 - DNA, 15 bp, Homo sapiens
aggactacaaacact

SEQ ID NO: 432151 - DNA, 15 bp, Homo sapiens
caggactacaaacac

SEQ ID NO: 432152 - DNA, 15 bp, Homo sapiens
gcaggactacaaaca

SEQ ID NO: 432153 - DNA, 15 bp, Homo sapiens
ggcaggactacaaac

SEQ ID NO: 432154 - DNA, 15 bp, Homo sapiens
aggcaggactacaaa

SEQ ID NO: 432155 - DNA, 15 bp, Homo sapiens
aaggcaggactacaa

SEQ ID NO: 432156 - DNA, 15 bp, Homo sapiens
gaaggcaggactaca

SEQ ID NO: 432157 - DNA, 15 bp, Homo sapiens
agaaggcaggactac

SEQ ID NO: 432158 - DNA, 15 bp, Homo sapiens
cagaaggcaggacta

SEQ ID NO: 432159 - DNA, 15 bp, Homo sapiens
gcagaaggcaggact

SEQ ID NO: 432160 - DNA, 15 bp, Homo sapiens
agcagaaggcaggac

SEQ ID NO: 432161 - DNA, 15 bp, Homo sapiens
cagcagaaggcagga

SEQ ID NO: 432162 - DNA, 15 bp, Homo sapiens
ccagcagaaggcagg

SEQ ID NO: 432163 - DNA, 15 bp, Homo sapiens
cccagcagaaggcag

SEQ ID NO: 432164 - DNA, 15 bp, Homo sapiens
acccagcagaaggca

SEQ ID NO: 432165 - DNA, 15 bp, Homo sapiens
aacccagcagaaggc

SEQ ID NO: 432166 - DNA, 15 bp, Homo sapiens
gaacccagcagaagg

SEQ ID NO: 432167 - DNA, 15 bp, Homo sapiens
agaacccagcagaag

SEQ ID NO: 432168 - DNA, 15 bp, Homo sapiens
aagaacccagcagaa

SEQ ID NO: 432169 - DNA, 15 bp, Homo sapiens
aaagaacccagcaga

SEQ ID NO: 432170 - DNA, 15 bp, Homo sapiens
gaaagaacccagcag

SEQ ID NO: 432171 - DNA, 15 bp, Homo sapiens
agaaagaacccagca

SEQ ID NO: 432172 - DNA, 15 bp, Homo sapiens
aagaaagaacccagc

SEQ ID NO: 432173 - DNA, 15 bp, Homo sapiens
caagaaagaacccag

SEQ ID NO: 432174 - DNA, 15 bp, Homo sapiens
ccaagaaagaaccca

SEQ ID NO: 432175 - DNA, 15 bp, Homo sapiens
accaagaaagaaccc

SEQ ID NO: 432176 - DNA, 15 bp, Homo sapiens
caccaagaaagaacc

SEQ ID NO: 432177 - DNA, 15 bp, Homo sapiens
acaccaagaaagaac

SEQ ID NO: 432178 - DNA, 15 bp, Homo sapiens
tacaccaagaaagaa

SEQ ID NO: 432179 - DNA, 15 bp, Homo sapiens
gtacaccaagaaaga

SEQ ID NO: 432180 - DNA, 15 bp, Homo sapiens
ggtacaccaagaaag

SEQ ID NO: 432181 - DNA, 15 bp, Homo sapiens
aggtacaccaagaaa

SEQ ID NO: 432182 - DNA, 15 bp, Homo sapiens
gaggtacaccaagaa

SEQ ID NO: 432183 - DNA, 15 bp, Homo sapiens
ggaggtacaccaaga

SEQ ID NO: 432184 - DNA, 15 bp, Homo sapiens
tggaggtacaccaag

SEQ ID NO: 432185 - DNA, 15 bp, Homo sapiens
ttggaggtacaccaa

SEQ ID NO: 432186 - DNA, 15 bp, Homo sapiens
cttggaggtacacca

SEQ ID NO: 432187 - DNA, 15 bp, Homo sapiens
tcttggaggtacacc

SEQ ID NO: 432188 - DNA, 15 bp, Homo sapiens
ttcttggaggtacac

SEQ ID NO: 432189 - DNA, 15 bp, Homo sapiens
attcttggaggtaca

SEQ ID NO: 432190 - DNA, 15 bp, Homo sapiens
tattcttggaggtac

SEQ ID NO: 432191 - DNA, 15 bp, Homo sapiens
ctattcttggaggta

SEQ ID NO: 432192 - DNA, 15 bp, Homo sapiens
tctattcttggaggt

SEQ ID NO: 432193 - DNA, 15 bp, Homo sapiens
ttctattcttggagg

SEQ ID NO: 432194 - DNA, 15 bp, Homo sapiens
attctattcttggag

SEQ ID NO: 432195 - DNA, 15 bp, Homo sapiens
gattctattcttgga

SEQ ID NO: 432196 - DNA, 15 bp, Homo sapiens
tgattctattcttgg

SEQ ID NO: 432197 - DNA, 15 bp, Homo sapiens
atgattctattcttg

SEQ ID NO: 432198 - DNA, 15 bp, Homo sapiens
tatgattctattctt

SEQ ID NO: 432199 - DNA, 15 bp, Homo sapiens
ctatgattctattct

SEQ ID NO: 432200 - DNA, 15 bp, Homo sapiens
tctatgattctattc

SEQ ID NO: 432201 - DNA, 15 bp, Homo sapiens
ttctatgattctatt

SEQ ID NO: 432202 - DNA, 15 bp, Homo sapiens
tttctatgattctat

SEQ ID NO: 432203 - DNA, 15 bp, Homo sapiens
atttctatgattcta

SEQ ID NO: 432204 - DNA, 15 bp, Homo sapiens
catttctatgattct

SEQ ID NO: 432205 - DNA, 15 bp, Homo sapiens
acatttctatgattc

SEQ ID NO: 432206 - DNA, 15 bp, Homo sapiens
tacatttctatgatt

SEQ ID NO: 432207 - DNA, 15 bp, Homo sapiens
ctacatttctatgat

SEQ ID NO: 432208 - DNA, 15 bp, Homo sapiens
tctacatttctatga

SEQ ID NO: 432209 - DNA, 15 bp, Homo sapiens
ctctacatttctatg

SEQ ID NO: 432210 - DNA, 15 bp, Homo sapiens
gctctacatttctat

SEQ ID NO: 432211 - DNA, 15 bp, Homo sapiens
agctctacatttcta

SEQ ID NO: 432212 - DNA, 15 bp, Homo sapiens
tagctctacatttct

SEQ ID NO: 432213 - DNA, 15 bp, Homo sapiens
ctagctctacatttc

SEQ ID NO: 432214 - DNA, 15 bp, Homo sapiens
tctagctctacattt

SEQ ID NO: 432215 - DNA, 15 bp, Homo sapiens
ttctagctctacatt

SEQ ID NO: 432216 - DNA, 15 bp, Homo sapiens
tttctagctctacat

SEQ ID NO: 432217 - DNA, 15 bp, Homo sapiens
atttctagctctaca

SEQ ID NO: 432218 - DNA, 15 bp, Homo sapiens
aatttctagctctac

SEQ ID NO: 432219 - DNA, 15 bp, Homo sapiens
taatttctagctcta

SEQ ID NO: 432220 - DNA, 15 bp, Homo sapiens
ataatttctagctct

SEQ ID NO: 432221 - DNA, 15 bp, Homo sapiens
aataatttctagctc

SEQ ID NO: 432222 - DNA, 15 bp, Homo sapiens
aaataatttctagct

SEQ ID NO: 432223 - DNA, 15 bp, Homo sapiens
aaaataatttctagc

SEQ ID NO: 432224 - DNA, 15 bp, Homo sapiens
caaaataatttctag

SEQ ID NO: 432225 - DNA, 15 bp, Homo sapiens
ccaaaataatttcta

SEQ ID NO: 432226 - DNA, 15 bp, Homo sapiens
tccaaaataatttct

SEQ ID NO: 432227 - DNA, 15 bp, Homo sapiens
ctccaaaataatttc

SEQ ID NO: 432228 - DNA, 15 bp, Homo sapiens
tctccaaaataattt

SEQ ID NO: 432229 - DNA, 15 bp, Homo sapiens
atctccaaaataatt

SEQ ID NO: 432230 - DNA, 15 bp, Homo sapiens
aatctccaaaataat

SEQ ID NO: 432231 - DNA, 15 bp, Homo sapiens
aaatctccaaaataa

SEQ ID NO: 432232 - DNA, 15 bp, Homo sapiens
aaaatctccaaaata

SEQ ID NO: 432233 - DNA, 15 bp, Homo sapiens
caaaatctccaaaat

SEQ ID NO: 432234 - DNA, 15 bp, Homo sapiens
gcaaaatctccaaaa

SEQ ID NO: 432235 - DNA, 15 bp, Homo sapiens
tgcaaaatctccaaa

SEQ ID NO: 432236 - DNA, 15 bp, Homo sapiens
atgcaaaatctccaa

SEQ ID NO: 432237 - DNA, 15 bp, Homo sapiens
tatgcaaaatctcca

SEQ ID NO: 432238 - DNA, 15 bp, Homo sapiens
atatgcaaaatctcc

SEQ ID NO: 432239 - DNA, 15 bp, Homo sapiens
aatatgcaaaatctc

SEQ ID NO: 432240 - DNA, 15 bp, Homo sapiens
aaatatgcaaaatct

SEQ ID NO: 432241 - DNA, 15 bp, Homo sapiens
caaatatgcaaaatc

SEQ ID NO: 432242 - DNA, 15 bp, Homo sapiens
tcaaatatgcaaaat

SEQ ID NO: 432243 - DNA, 15 bp, Homo sapiens
ttcaaatatgcaaaa

SEQ ID NO: 432244 - DNA, 15 bp, Homo sapiens
tttcaaatatgcaaa

SEQ ID NO: 432245 - DNA, 15 bp, Homo sapiens
ttttcaaatatgcaa

SEQ ID NO: 432246 - DNA, 15 bp, Homo sapiens
tttttcaaatatgca

SEQ ID NO: 432247 - DNA, 15 bp, Homo sapiens
ttttttcaaatatgc

SEQ ID NO: 432248 - DNA, 15 bp, Homo sapiens
attttttcaaatatg

SEQ ID NO: 432249 - DNA, 15 bp, Homo sapiens
cattttttcaaatat

SEQ ID NO: 432250 - DNA, 15 bp, Homo sapiens
tcattttttcaaata

SEQ ID NO: 432251 - DNA, 15 bp, Homo sapiens
ttcattttttcaaat

SEQ ID NO: 432252 - DNA, 15 bp, Homo sapiens
cttcattttttcaaa

SEQ ID NO: 432253 - DNA, 15 bp, Homo sapiens
acttcattttttcaa

SEQ ID NO: 432254 - DNA, 15 bp, Homo sapiens
gacttcattttttca

SEQ ID NO: 432255 - DNA, 15 bp, Homo sapiens
ggacttcattttttc

SEQ ID NO: 432256 - DNA, 15 bp, Homo sapiens
tggacttcatttttt

SEQ ID NO: 432257 - DNA, 15 bp, Homo sapiens
ctggacttcattttt

SEQ ID NO: 432258 - DNA, 15 bp, Homo sapiens
tctggacttcatttt

SEQ ID NO: 432259 - DNA, 15 bp, Homo sapiens
ttctggacttcattt

SEQ ID NO: 432260 - DNA, 15 bp, Homo sapiens
tttctggacttcatt

SEQ ID NO: 432261 - DNA, 15 bp, Homo sapiens
ttttctggacttcat

SEQ ID NO: 432262 - DNA, 15 bp, Homo sapiens
cttttctggacttca

SEQ ID NO: 432263 - DNA, 15 bp, Homo sapiens
ccttttctggacttc

SEQ ID NO: 432264 - DNA, 15 bp, Homo sapiens
cccttttctggactt

SEQ ID NO: 432265 - DNA, 15 bp, Homo sapiens
tcccttttctggact

SEQ ID NO: 432266 - DNA, 15 bp, Homo sapiens
ttcccttttctggac

SEQ ID NO: 432267 - DNA, 15 bp, Homo sapiens
cttcccttttctgga

SEQ ID NO: 432268 - DNA, 15 bp, Homo sapiens
acttcccttttctgg

SEQ ID NO: 432269 - DNA, 15 bp, Homo sapiens
tacttcccttttctg

SEQ ID NO: 432270 - DNA, 15 bp, Homo sapiens
ttacttcccttttct

SEQ ID NO: 432271 - DNA, 15 bp, Homo sapiens
attacttcccttttc

SEQ ID NO: 432272 - DNA, 15 bp, Homo sapiens
aattacttccctttt

SEQ ID NO: 432273 - DNA, 15 bp, Homo sapiens
aaattacttcccttt

SEQ ID NO: 432274 - DNA, 15 bp, Homo sapiens
taaattacttccctt

SEQ ID NO: 432275 - DNA, 15 bp, Homo sapiens
gtaaattacttccct

SEQ ID NO: 432276 - DNA, 15 bp, Homo sapiens
ggtaaattacttccc

SEQ ID NO: 432277 - DNA, 15 bp, Homo sapiens
gggtaaattacttcc

SEQ ID NO: 432278 - DNA, 15 bp, Homo sapiens
tgggtaaattacttc

SEQ ID NO: 432279 - DNA, 15 bp, Homo sapiens
ttgggtaaattactt

SEQ ID NO: 432280 - DNA, 15 bp, Homo sapiens
cttgggtaaattact

SEQ ID NO: 432281 - DNA, 15 bp, Homo sapiens
ccttgggtaaattac

SEQ ID NO: 432282 - DNA, 15 bp, Homo sapiens
gccttgggtaaatta

SEQ ID NO: 432283 - DNA, 15 bp, Homo sapiens
ggccttgggtaaatt

SEQ ID NO: 432284 - DNA, 15 bp, Homo sapiens
aggccttgggtaaat

SEQ ID NO: 432285 - DNA, 15 bp, Homo sapiens
taggccttgggtaaa

SEQ ID NO: 432286 - DNA, 15 bp, Homo sapiens
ttaggccttgggtaa

SEQ ID NO: 432287 - DNA, 15 bp, Homo sapiens
gttaggccttgggta

SEQ ID NO: 432288 - DNA, 15 bp, Homo sapiens
tgttaggccttgggt

SEQ ID NO: 432289 - DNA, 15 bp, Homo sapiens
gtgttaggccttggg

SEQ ID NO: 432290 - DNA, 15 bp, Homo sapiens
ggtgttaggccttgg

SEQ ID NO: 432291 - DNA, 15 bp, Homo sapiens
aggtgttaggccttg

SEQ ID NO: 432292 - DNA, 15 bp, Homo sapiens
taggtgttaggcctt

SEQ ID NO: 432293 - DNA, 15 bp, Homo sapiens
ttaggtgttaggcct

SEQ ID NO: 432294 - DNA, 15 bp, Homo sapiens
attaggtgttaggcc

SEQ ID NO: 432295 - DNA, 15 bp, Homo sapiens
tattaggtgttaggc

SEQ ID NO: 432296 - DNA, 15 bp, Homo sapiens
ctattaggtgttagg

SEQ ID NO: 432297 - DNA, 15 bp, Homo sapiens
tctattaggtgttag

SEQ ID NO: 432298 - DNA, 15 bp, Homo sapiens
gtctattaggtgtta

SEQ ID NO: 432299 - DNA, 15 bp, Homo sapiens
tgtctattaggtgtt

SEQ ID NO: 432300 - DNA, 15 bp, Homo sapiens
ttgtctattaggtgt

SEQ ID NO: 432301 - DNA, 15 bp, Homo sapiens
attgtctattaggtg

SEQ ID NO: 432302 - DNA, 15 bp, Homo sapiens
tattgtctattaggt

SEQ ID NO: 432303 - DNA, 15 bp, Homo sapiens
ctattgtctattagg

SEQ ID NO: 432304 - DNA, 15 bp, Homo sapiens
cctattgtctattag

SEQ ID NO: 432305 - DNA, 15 bp, Homo sapiens
tcctattgtctatta

SEQ ID NO: 432306 - DNA, 15 bp, Homo sapiens
gtcctattgtctatt

SEQ ID NO: 432307 - DNA, 15 bp, Homo sapiens
agtcctattgtctat

SEQ ID NO: 432308 - DNA, 15 bp, Homo sapiens
cagtcctattgtcta

SEQ ID NO: 432309 - DNA, 15 bp, Homo sapiens
ccagtcctattgtct

SEQ ID NO: 432310 - DNA, 15 bp, Homo sapiens
tccagtcctattgtc

SEQ ID NO: 432311 - DNA, 15 bp, Homo sapiens
ctccagtcctattgt

SEQ ID NO: 432312 - DNA, 15 bp, Homo sapiens
gctccagtcctattg

SEQ ID NO: 432313 - DNA, 15 bp, Homo sapiens
ggctccagtcctatt

SEQ ID NO: 432314 - DNA, 15 bp, Homo sapiens
gggctccagtcctat

SEQ ID NO: 432315 - DNA, 15 bp, Homo sapiens
agggctccagtccta

SEQ ID NO: 432316 - DNA, 15 bp, Homo sapiens
tagggctccagtcct

SEQ ID NO: 432317 - DNA, 15 bp, Homo sapiens
atagggctccagtcc

SEQ ID NO: 432318 - DNA, 15 bp, Homo sapiens
gatagggctccagtc

SEQ ID NO: 432319 - DNA, 15 bp, Homo sapiens
agatagggctccagt

SEQ ID NO: 432320 - DNA, 15 bp, Homo sapiens
tagatagggctccag

SEQ ID NO: 432321 - DNA, 15 bp, Homo sapiens
ttagatagggctcca

SEQ ID NO: 432322 - DNA, 15 bp, Homo sapiens
attagatagggctcc

SEQ ID NO: 432323 - DNA, 15 bp, Homo sapiens
cattagatagggctc

SEQ ID NO: 432324 - DNA, 15 bp, Homo sapiens
ccattagatagggct

SEQ ID NO: 432325 - DNA, 15 bp, Homo sapiens
accattagatagggc

SEQ ID NO: 432326 - DNA, 15 bp, Homo sapiens
gaccattagataggg

SEQ ID NO: 432327 - DNA, 15 bp, Homo sapiens
agaccattagatagg

SEQ ID NO: 432328 - DNA, 15 bp, Homo sapiens
gagaccattagatag

SEQ ID NO: 432329 - DNA, 15 bp, Homo sapiens
ggagaccattagata

SEQ ID NO: 432330 - DNA, 15 bp, Homo sapiens
tggagaccattagat

SEQ ID NO: 432331 - DNA, 15 bp, Homo sapiens
atggagaccattaga

SEQ ID NO: 432332 - DNA, 15 bp, Homo sapiens
aatggagaccattag

SEQ ID NO: 432333 - DNA, 15 bp, Homo sapiens
caatggagaccatta

SEQ ID NO: 432334 - DNA, 15 bp, Homo sapiens
gcaatggagaccatt

SEQ ID NO: 432335 - DNA, 15 bp, Homo sapiens
agcaatggagaccat

SEQ ID NO: 432336 - DNA, 15 bp, Homo sapiens
aagcaatggagacca

SEQ ID NO: 432337 - DNA, 15 bp, Homo sapiens
gaagcaatggagacc

SEQ ID NO: 432338 - DNA, 15 bp, Homo sapiens
ggaagcaatggagac

SEQ ID NO: 432339 - DNA, 15 bp, Homo sapiens
tggaagcaatggaga

SEQ ID NO: 432340 - DNA, 15 bp, Homo sapiens
ttggaagcaatggag

SEQ ID NO: 432341 - DNA, 15 bp, Homo sapiens
tttggaagcaatgga

SEQ ID NO: 432342 - DNA, 15 bp, Homo sapiens
gtttggaagcaatgg

SEQ ID NO: 432343 - DNA, 15 bp, Homo sapiens
ggtttggaagcaatg

SEQ ID NO: 432344 - DNA, 15 bp, Homo sapiens
gggtttggaagcaat

SEQ ID NO: 432345 - DNA, 15 bp, Homo sapiens
tgggtttggaagcaa

SEQ ID NO: 432346 - DNA, 15 bp, Homo sapiens
ttgggtttggaagca

SEQ ID NO: 432347 - DNA, 15 bp, Homo sapiens
gttgggtttggaagc

SEQ ID NO: 432348 - DNA, 15 bp, Homo sapiens
agttgggtttggaag

SEQ ID NO: 432349 - DNA, 15 bp, Homo sapiens
cagttgggtttggaa

SEQ ID NO: 432350 - DNA, 15 bp, Homo sapiens
gcagttgggtttgga

SEQ ID NO: 432351 - DNA, 15 bp, Homo sapiens
agcagttgggtttgg

SEQ ID NO: 432352 - DNA, 15 bp, Homo sapiens
cagcagttgggtttg

SEQ ID NO: 432353 - DNA, 15 bp, Homo sapiens
gcagcagttgggttt

SEQ ID NO: 432354 - DNA, 15 bp, Homo sapiens
agcagcagttgggtt

SEQ ID NO: 432355 - DNA, 15 bp, Homo sapiens
aagcagcagttgggt

SEQ ID NO: 432356 - DNA, 15 bp, Homo sapiens
aaagcagcagttggg

SEQ ID NO: 432357 - DNA, 15 bp, Homo sapiens
caaagcagcagttgg

SEQ ID NO: 432358 - DNA, 15 bp, Homo sapiens
ccaaagcagcagttg

SEQ ID NO: 432359 - DNA, 15 bp, Homo sapiens
tccaaagcagcagtt

SEQ ID NO: 432360 - DNA, 15 bp, Homo sapiens
ttccaaagcagcagt

SEQ ID NO: 432361 - DNA, 15 bp, Homo sapiens
cttccaaagcagcag

SEQ ID NO: 432362 - DNA, 15 bp, Homo sapiens
tcttccaaagcagca

SEQ ID NO: 432363 - DNA, 15 bp, Homo sapiens
ttcttccaaagcagc

SEQ ID NO: 432364 - DNA, 15 bp, Homo sapiens
gttcttccaaagcag

SEQ ID NO: 432365 - DNA, 15 bp, Homo sapiens
agttcttccaaagca

SEQ ID NO: 432366 - DNA, 15 bp, Homo sapiens
gagttcttccaaagc

SEQ ID NO: 432367 - DNA, 15 bp, Homo sapiens
tgagttcttccaaag

SEQ ID NO: 432368 - DNA, 15 bp, Homo sapiens
ctgagttcttccaaa

SEQ ID NO: 432369 - DNA, 15 bp, Homo sapiens
tctgagttcttccaa

SEQ ID NO: 432370 - DNA, 15 bp, Homo sapiens
ttctgagttcttcca

SEQ ID NO: 432371 - DNA, 15 bp, Homo sapiens
attctgagttcttcc

SEQ ID NO: 432372 - DNA, 15 bp, Homo sapiens
gattctgagttcttc

SEQ ID NO: 432373 - DNA, 15 bp, Homo sapiens
ggattctgagttctt

SEQ ID NO: 432374 - DNA, 15 bp, Homo sapiens
tggattctgagttct

SEQ ID NO: 432375 - DNA, 15 bp, Homo sapiens
atggattctgagttc

SEQ ID NO: 432376 - DNA, 15 bp, Homo sapiens
tatggattctgagtt

SEQ ID NO: 432377 - DNA, 15 bp, Homo sapiens
ttatggattctgagt

SEQ ID NO: 432378 - DNA, 15 bp, Homo sapiens
attatggattctgag

SEQ ID NO: 432379 - DNA, 15 bp, Homo sapiens
aattatggattctga

SEQ ID NO: 432380 - DNA, 15 bp, Homo sapiens
aaattatggattctg

SEQ ID NO: 432381 - DNA, 15 bp, Homo sapiens
gaaattatggattct

SEQ ID NO: 432382 - DNA, 15 bp, Homo sapiens
tgaaattatggattc

SEQ ID NO: 432383 - DNA, 15 bp, Homo sapiens
gtgaaattatggatt

SEQ ID NO: 432384 - DNA, 15 bp, Homo sapiens
tgtgaaattatggat

SEQ ID NO: 432385 - DNA, 15 bp, Homo sapiens
ctgtgaaattatgga

SEQ ID NO: 432386 - DNA, 15 bp, Homo sapiens
tctgtgaaattatgg

SEQ ID NO: 432387 - DNA, 15 bp, Homo sapiens
gtctgtgaaattatg

SEQ ID NO: 432388 - DNA, 15 bp, Homo sapiens
tgtctgtgaaattat

SEQ ID NO: 432389 - DNA, 15 bp, Homo sapiens
atgtctgtgaaatta

SEQ ID NO: 432390 - DNA, 15 bp, Homo sapiens
aatgtctgtgaaatt

SEQ ID NO: 432391 - DNA, 15 bp, Homo sapiens
aaatgtctgtgaaat

SEQ ID NO: 432392 - DNA, 15 bp, Homo sapiens
aaaatgtctgtgaaa

SEQ ID NO: 432393 - DNA, 15 bp, Homo sapiens
aaaaatgtctgtgaa

SEQ ID NO: 432394 - DNA, 15 bp, Homo sapiens
taaaaatgtctgtga

SEQ ID NO: 432395 - DNA, 15 bp, Homo sapiens
ctaaaaatgtctgtg

SEQ ID NO: 432396 - DNA, 15 bp, Homo sapiens
gctaaaaatgtctgt

SEQ ID NO: 432397 - DNA, 15 bp, Homo sapiens
agctaaaaatgtctg

SEQ ID NO: 432398 - DNA, 15 bp, Homo sapiens
aagctaaaaatgtct

SEQ ID NO: 432399 - DNA, 15 bp, Homo sapiens
gaagctaaaaatgtc

SEQ ID NO: 432400 - DNA, 15 bp, Homo sapiens
cgaagctaaaaatgt

SEQ ID NO: 432401 - DNA, 15 bp, Homo sapiens
acgaagctaaaaatg

SEQ ID NO: 432402 - DNA, 15 bp, Homo sapiens
tacgaagctaaaaat

SEQ ID NO: 432403 - DNA, 15 bp, Homo sapiens
atacgaagctaaaaa

SEQ ID NO: 432404 - DNA, 15 bp, Homo sapiens
aatacgaagctaaaa

SEQ ID NO: 432405 - DNA, 15 bp, Homo sapiens
taatacgaagctaaa

SEQ ID NO: 432406 - DNA, 15 bp, Homo sapiens
ataatacgaagctaa

SEQ ID NO: 432407 - DNA, 15 bp, Homo sapiens
aataatacgaagcta

SEQ ID NO: 432408 - DNA, 15 bp, Homo sapiens
caataatacgaagct

SEQ ID NO: 432409 - DNA, 15 bp, Homo sapiens
acaataatacgaagc

SEQ ID NO: 432410 - DNA, 15 bp, Homo sapiens
aacaataatacgaag

SEQ ID NO: 432411 - DNA, 15 bp, Homo sapiens
taacaataatacgaa

SEQ ID NO: 432412 - DNA, 15 bp, Homo sapiens
ataacaataatacga

SEQ ID NO: 432413 - DNA, 15 bp, Homo sapiens
aataacaataatacg

SEQ ID NO: 432414 - DNA, 15 bp, Homo sapiens
taataacaataatac

SEQ ID NO: 432415 - DNA, 15 bp, Homo sapiens
ttaataacaataata

SEQ ID NO: 432416 - DNA, 15 bp, Homo sapiens
attaataacaataat

SEQ ID NO: 432417 - DNA, 15 bp, Homo sapiens
tattaataacaataa

SEQ ID NO: 432418 - DNA, 15 bp, Homo sapiens
ctattaataacaata

SEQ ID NO: 432419 - DNA, 15 bp, Homo sapiens
tctattaataacaat

SEQ ID NO: 432420 - DNA, 15 bp, Homo sapiens
atctattaataacaa

SEQ ID NO: 432421 - DNA, 15 bp, Homo sapiens
catctattaataaca

SEQ ID NO: 432422 - DNA, 15 bp, Homo sapiens
acatctattaataac

SEQ ID NO: 432423 - DNA, 15 bp, Homo sapiens
tacatctattaataa

SEQ ID NO: 432424 - DNA, 15 bp, Homo sapiens
ctacatctattaata

SEQ ID NO: 432425 - DNA, 15 bp, Homo sapiens
tctacatctattaat

SEQ ID NO: 432426 - DNA, 15 bp, Homo sapiens
ttctacatctattaa

SEQ ID NO: 432427 - DNA, 15 bp, Homo sapiens
gttctacatctatta

SEQ ID NO: 432428 - DNA, 15 bp, Homo sapiens
agttctacatctatt

SEQ ID NO: 432429 - DNA, 15 bp, Homo sapiens
tagttctacatctat

SEQ ID NO: 432430 - DNA, 15 bp, Homo sapiens
atagttctacatcta

SEQ ID NO: 432431 - DNA, 15 bp, Homo sapiens
tatagttctacatct

SEQ ID NO: 432432 - DNA, 15 bp, Homo sapiens
atatagttctacatc

SEQ ID NO: 432433 - DNA, 15 bp, Homo sapiens
catatagttctacat

SEQ ID NO: 432434 - DNA, 15 bp, Homo sapiens
acatatagttctaca

SEQ ID NO: 432435 - DNA, 15 bp, Homo sapiens
cacatatagttctac

SEQ ID NO: 432436 - DNA, 15 bp, Homo sapiens
gcacatatagttcta

SEQ ID NO: 432437 - DNA, 15 bp, Homo sapiens
tgcacatatagttct

SEQ ID NO: 432438 - DNA, 15 bp, Homo sapiens
ctgcacatatagttc

SEQ ID NO: 432439 - DNA, 15 bp, Homo sapiens
tctgcacatatagtt

SEQ ID NO: 432440 - DNA, 15 bp, Homo sapiens
ttctgcacatatagt

SEQ ID NO: 432441 - DNA, 15 bp, Homo sapiens
cttctgcacatatag

SEQ ID NO: 432442 - DNA, 15 bp, Homo sapiens
tcttctgcacatata

SEQ ID NO: 432443 - DNA, 15 bp, Homo sapiens
atcttctgcacatat

SEQ ID NO: 432444 - DNA, 15 bp, Homo sapiens
tatcttctgcacata

SEQ ID NO: 432445 - DNA, 15 bp, Homo sapiens
ttatcttctgcacat

SEQ ID NO: 432446 - DNA, 15 bp, Homo sapiens
tttatcttctgcaca

SEQ ID NO: 432447 - DNA, 15 bp, Homo sapiens
gtttatcttctgcac

SEQ ID NO: 432448 - DNA, 15 bp, Homo sapiens
tgtttatcttctgca

SEQ ID NO: 432449 - DNA, 15 bp, Homo sapiens
atgtttatcttctgc

SEQ ID NO: 432450 - DNA, 15 bp, Homo sapiens
aatgtttatcttctg

SEQ ID NO: 432451 - DNA, 15 bp, Homo sapiens
gaatgtttatcttct

SEQ ID NO: 432452 - DNA, 15 bp, Homo sapiens
tgaatgtttatcttc

SEQ ID NO: 432453 - DNA, 15 bp, Homo sapiens
ctgaatgtttatctt

SEQ ID NO: 432454 - DNA, 15 bp, Homo sapiens
actgaatgtttatct

SEQ ID NO: 432455 - DNA, 15 bp, Homo sapiens
cactgaatgtttatc

SEQ ID NO: 432456 - DNA, 15 bp, Homo sapiens
tcactgaatgtttat

SEQ ID NO: 432457 - DNA, 15 bp, Homo sapiens
atcactgaatgttta

SEQ ID NO: 432458 - DNA, 15 bp, Homo sapiens
aatcactgaatgttt

SEQ ID NO: 432459 - DNA, 15 bp, Homo sapiens
gaatcactgaatgtt

SEQ ID NO: 432460 - DNA, 15 bp, Homo sapiens
tgaatcactgaatgt

SEQ ID NO: 432461 - DNA, 15 bp, Homo sapiens
ttgaatcactgaatg

SEQ ID NO: 432462 - DNA, 15 bp, Homo sapiens
attgaatcactgaat

SEQ ID NO: 432463 - DNA, 15 bp, Homo sapiens
gattgaatcactgaa

SEQ ID NO: 432464 - DNA, 15 bp, Homo sapiens
tgattgaatcactga

SEQ ID NO: 432465 - DNA, 15 bp, Homo sapiens
atgattgaatcactg

SEQ ID NO: 432466 - DNA, 15 bp, Homo sapiens
aatgattgaatcact

SEQ ID NO: 432467 - DNA, 15 bp, Homo sapiens
taatgattgaatcac

SEQ ID NO: 432468 - DNA, 15 bp, Homo sapiens
ttaatgattgaatca

SEQ ID NO: 432469 - DNA, 15 bp, Homo sapiens
tttaatgattgaatc

SEQ ID NO: 432470 - DNA, 15 bp, Homo sapiens
ttttaatgattgaat

SEQ ID NO: 432471 - DNA, 15 bp, Homo sapiens
attttaatgattgaa

SEQ ID NO: 432472 - DNA, 15 bp, Homo sapiens
tattttaatgattga

SEQ ID NO: 432473 - DNA, 15 bp, Homo sapiens
ttattttaatgattg

SEQ ID NO: 432474 - DNA, 15 bp, Homo sapiens
gttattttaatgatt

SEQ ID NO: 432475 - DNA, 15 bp, Homo sapiens
tgttattttaatgat

SEQ ID NO: 432476 - DNA, 15 bp, Homo sapiens
atgttattttaatga

SEQ ID NO: 432477 - DNA, 15 bp, Homo sapiens
aatgttattttaatg

SEQ ID NO: 432478 - DNA, 15 bp, Homo sapiens
aaatgttattttaat

SEQ ID NO: 432479 - DNA, 15 bp, Homo sapiens
caaatgttattttaa

SEQ ID NO: 432480 - DNA, 15 bp, Homo sapiens
gcaaatgttatttta

SEQ ID NO: 432481 - DNA, 15 bp, Homo sapiens
tgcaaatgttatttt

SEQ ID NO: 432482 - DNA, 15 bp, Homo sapiens
atgcaaatgttattt

SEQ ID NO: 432483 - DNA, 15 bp, Homo sapiens
tatgcaaatgttatt

SEQ ID NO: 432484 - DNA, 15 bp, Homo sapiens
ttatgcaaatgttat

SEQ ID NO: 432485 - DNA, 15 bp, Homo sapiens
gttatgcaaatgtta

SEQ ID NO: 432486 - DNA, 15 bp, Homo sapiens
tgttatgcaaatgtt

SEQ ID NO: 432487 - DNA, 15 bp, Homo sapiens
atgttatgcaaatgt

SEQ ID NO: 432488 - DNA, 15 bp, Homo sapiens
catgttatgcaaatg

SEQ ID NO: 432489 - DNA, 15 bp, Homo sapiens
acatgttatgcaaat

SEQ ID NO: 432490 - DNA, 15 bp, Homo sapiens
aacatgttatgcaaa

SEQ ID NO: 432491 - DNA, 15 bp, Homo sapiens
caacatgttatgcaa

SEQ ID NO: 432492 - DNA, 15 bp, Homo sapiens
acaacatgttatgca

SEQ ID NO: 432493 - DNA, 15 bp, Homo sapiens
cacaacatgttatgc

SEQ ID NO: 432494 - DNA, 15 bp, Homo sapiens
tcacaacatgttatg

SEQ ID NO: 432495 - DNA, 15 bp, Homo sapiens
ttcacaacatgttat

SEQ ID NO: 432496 - DNA, 15 bp, Homo sapiens
attcacaacatgtta

SEQ ID NO: 432497 - DNA, 15 bp, Homo sapiens
cattcacaacatgtt

SEQ ID NO: 432498 - DNA, 15 bp, Homo sapiens
acattcacaacatgt

SEQ ID NO: 432499 - DNA, 15 bp, Homo sapiens
tacattcacaacatg

SEQ ID NO: 432500 - DNA, 15 bp, Homo sapiens
atacattcacaacat

SEQ ID NO: 432501 - DNA, 15 bp, Homo sapiens
aatacattcacaaca

SEQ ID NO: 432502 - DNA, 15 bp, Homo sapiens
caatacattcacaac

SEQ ID NO: 432503 - DNA, 15 bp, Homo sapiens
acaatacattcacaa

SEQ ID NO: 432504 - DNA, 15 bp, Homo sapiens
tacaatacattcaca

SEQ ID NO: 432505 - DNA, 15 bp, Homo sapiens
atacaatacattcac

SEQ ID NO: 432506 - DNA, 15 bp, Homo sapiens
tatacaatacattca

SEQ ID NO: 432507 - DNA, 15 bp, Homo sapiens
atatacaatacattc

SEQ ID NO: 432508 - DNA, 15 bp, Homo sapiens
tatatacaatacatt

SEQ ID NO: 432509 - DNA, 15 bp, Homo sapiens
ttatatacaatacat

SEQ ID NO: 432510 - DNA, 15 bp, Homo sapiens
attatatacaataca

SEQ ID NO: 432511 - DNA, 15 bp, Homo sapiens
tattatatacaatac

SEQ ID NO: 432512 - DNA, 15 bp, Homo sapiens
ctattatatacaata

SEQ ID NO: 432513 - DNA, 15 bp, Homo sapiens
tctattatatacaat

SEQ ID NO: 432514 - DNA, 15 bp, Homo sapiens
gtctattatatacaa

SEQ ID NO: 432515 - DNA, 15 bp, Homo sapiens
tgtctattatataca

SEQ ID NO: 432516 - DNA, 15 bp, Homo sapiens
ttgtctattatatac

SEQ ID NO: 432517 - DNA, 15 bp, Homo sapiens
gttgtctattatata

SEQ ID NO: 432518 - DNA, 15 bp, Homo sapiens
ggttgtctattatat

SEQ ID NO: 432519 - DNA, 15 bp, Homo sapiens
tggttgtctattata

SEQ ID NO: 432520 - DNA, 15 bp, Homo sapiens
ttggttgtctattat

SEQ ID NO: 432521 - DNA, 15 bp, Homo sapiens
tttggttgtctatta

SEQ ID NO: 432522 - DNA, 15 bp, Homo sapiens
atttggttgtctatt

SEQ ID NO: 432523 - DNA, 15 bp, Homo sapiens
aatttggttgtctat

SEQ ID NO: 432524 - DNA, 15 bp, Homo sapiens
aaatttggttgtcta

SEQ ID NO: 432525 - DNA, 15 bp, Homo sapiens
taaatttggttgtct

SEQ ID NO: 432526 - DNA, 15 bp, Homo sapiens
gtaaatttggttgtc

SEQ ID NO: 432527 - DNA, 15 bp, Homo sapiens
agtaaatttggttgt

SEQ ID NO: 432528 - DNA, 15 bp, Homo sapiens
tagtaaatttggttg

SEQ ID NO: 432529 - DNA, 15 bp, Homo sapiens
ttagtaaatttggtt

SEQ ID NO: 432530 - DNA, 15 bp, Homo sapiens
tttagtaaatttggt

SEQ ID NO: 432531 - DNA, 15 bp, Homo sapiens
ttttagtaaatttgg

SEQ ID NO: 432532 - DNA, 15 bp, Homo sapiens
attttagtaaatttg

SEQ ID NO: 432533 - DNA, 15 bp, Homo sapiens
aattttagtaaattt

SEQ ID NO: 432534 - DNA, 15 bp, Homo sapiens
aaattttagtaaatt

SEQ ID NO: 432535 - DNA, 15 bp, Homo sapiens
taaattttagtaaat

SEQ ID NO: 432536 - DNA, 15 bp, Homo sapiens
ataaattttagtaaa

SEQ ID NO: 432537 - DNA, 15 bp, Homo sapiens
tataaattttagtaa

SEQ ID NO: 432538 - DNA, 15 bp, Homo sapiens
ttataaattttagta

SEQ ID NO: 432539 - DNA, 15 bp, Homo sapiens
attataaattttagt

SEQ ID NO: 432540 - DNA, 15 bp, Homo sapiens
cattataaattttag

SEQ ID NO: 432541 - DNA, 15 bp, Homo sapiens
acattataaatttta

SEQ ID NO: 432542 - DNA, 15 bp, Homo sapiens
gacattataaatttt

SEQ ID NO: 432543 - DNA, 15 bp, Homo sapiens
agacattataaattt

SEQ ID NO: 432544 - DNA, 15 bp, Homo sapiens
tagacattataaatt

SEQ ID NO: 432545 - DNA, 15 bp, Homo sapiens
atagacattataaat

SEQ ID NO: 432546 - DNA, 15 bp, Homo sapiens
tatagacattataaa

SEQ ID NO: 432547 - DNA, 15 bp, Homo sapiens
atatagacattataa

SEQ ID NO: 432548 - DNA, 15 bp, Homo sapiens
aatatagacattata

SEQ ID NO: 432549 - DNA, 15 bp, Homo sapiens
aaatatagacattat

SEQ ID NO: 432550 - DNA, 15 bp, Homo sapiens
aaaatatagacatta

SEQ ID NO: 432551 - DNA, 15 bp, Homo sapiens
aaaaatatagacatt

SEQ ID NO: 432552 - DNA, 15 bp, Homo sapiens
aaaaaatatagacat

SEQ ID NO: 432553 - DNA, 15 bp, Homo sapiens
taaaaaatatagaca

SEQ ID NO: 432554 - DNA, 15 bp, Homo sapiens
ttaaaaaatatagac

SEQ ID NO: 432555 - DNA, 15 bp, Homo sapiens
tttaaaaaatataga

SEQ ID NO: 432556 - DNA, 15 bp, Homo sapiens
ttttaaaaaatatag

SEQ ID NO: 432557 - DNA, 15 bp, Homo sapiens
cttttaaaaaatata

SEQ ID NO: 432558 - DNA, 15 bp, Homo sapiens
acttttaaaaaatat

SEQ ID NO: 432559 - DNA, 15 bp, Homo sapiens
aacttttaaaaaata

SEQ ID NO: 432560 - DNA, 15 bp, Homo sapiens
aaacttttaaaaaat

SEQ ID NO: 432561 - DNA, 15 bp, Homo sapiens
taaacttttaaaaaa

SEQ ID NO: 432562 - DNA, 15 bp, Homo sapiens
ttaaacttttaaaaa

SEQ ID NO: 432563 - DNA, 15 bp, Homo sapiens
tttaaacttttaaaa

SEQ ID NO: 432564 - DNA, 15 bp, Homo sapiens
gtttaaacttttaaa

SEQ ID NO: 432565 - DNA, 15 bp, Homo sapiens
tgtttaaacttttaa

SEQ ID NO: 432566 - DNA, 15 bp, Homo sapiens
gtgtttaaactttta

SEQ ID NO: 432567 - DNA, 15 bp, Homo sapiens
agtgtttaaactttt

SEQ ID NO: 432568 - DNA, 15 bp, Homo sapiens
cagtgtttaaacttt

SEQ ID NO: 432569 - DNA, 15 bp, Homo sapiens
acagtgtttaaactt

SEQ ID NO: 432570 - DNA, 15 bp, Homo sapiens
cacagtgtttaaact

SEQ ID NO: 432571 - DNA, 15 bp, Homo sapiens
tcacagtgtttaaac

SEQ ID NO: 432572 - DNA, 15 bp, Homo sapiens
ttcacagtgtttaaa

SEQ ID NO: 432573 - DNA, 15 bp, Homo sapiens
tttcacagtgtttaa

SEQ ID NO: 432574 - DNA, 15 bp, Homo sapiens
ttttcacagtgttta

SEQ ID NO: 432575 - DNA, 15 bp, Homo sapiens
attttcacagtgttt

SEQ ID NO: 432576 - DNA, 15 bp, Homo sapiens
tattttcacagtgtt

SEQ ID NO: 432577 - DNA, 15 bp, Homo sapiens
ttattttcacagtgt

SEQ ID NO: 432578 - DNA, 15 bp, Homo sapiens
attattttcacagtg

SEQ ID NO: 432579 - DNA, 15 bp, Homo sapiens
cattattttcacagt

SEQ ID NO: 432580 - DNA, 15 bp, Homo sapiens
acattattttcacag

SEQ ID NO: 432581 - DNA, 15 bp, Homo sapiens
gacattattttcaca

SEQ ID NO: 432582 - DNA, 15 bp, Homo sapiens
tgacattattttcac

SEQ ID NO: 432583 - DNA, 15 bp, Homo sapiens
atgacattattttca

SEQ ID NO: 432584 - DNA, 15 bp, Homo sapiens
gatgacattattttc

SEQ ID NO: 432585 - DNA, 15 bp, Homo sapiens
tgatgacattatttt

SEQ ID NO: 432586 - DNA, 15 bp, Homo sapiens
atgatgacattattt

SEQ ID NO: 432587 - DNA, 15 bp, Homo sapiens
gatgatgacattatt

SEQ ID NO: 432588 - DNA, 15 bp, Homo sapiens
agatgatgacattat

SEQ ID NO: 432589 - DNA, 15 bp, Homo sapiens
aagatgatgacatta

SEQ ID NO: 432590 - DNA, 15 bp, Homo sapiens
caagatgatgacatt

SEQ ID NO: 432591 - DNA, 15 bp, Homo sapiens
tcaagatgatgacat

SEQ ID NO: 432592 - DNA, 15 bp, Homo sapiens
ttcaagatgatgaca

SEQ ID NO: 432593 - DNA, 15 bp, Homo sapiens
attcaagatgatgac

SEQ ID NO: 432594 - DNA, 15 bp, Homo sapiens
tattcaagatgatga

SEQ ID NO: 432595 - DNA, 15 bp, Homo sapiens
ttattcaagatgatg

SEQ ID NO: 432596 - DNA, 15 bp, Homo sapiens
tttattcaagatgat

SEQ ID NO: 432597 - DNA, 15 bp, Homo sapiens
ttttattcaagatga

SEQ ID NO: 432598 - DNA, 15 bp, Homo sapiens
tttttattcaagatg

SEQ ID NO: 432599 - DNA, 15 bp, Homo sapiens
atttttattcaagat

SEQ ID NO: 432600 - DNA, 15 bp, Homo sapiens
catttttattcaaga

SEQ ID NO: 432601 - DNA, 15 bp, Homo sapiens
acatttttattcaag

SEQ ID NO: 432602 - DNA, 15 bp, Homo sapiens
tacatttttattcaa

SEQ ID NO: 432603 - DNA, 15 bp, Homo sapiens
atacatttttattca

SEQ ID NO: 432604 - DNA, 15 bp, Homo sapiens
gatacatttttattc

SEQ ID NO: 432605 - DNA, 15 bp, Homo sapiens
ggatacatttttatt

SEQ ID NO: 432606 - DNA, 15 bp, Homo sapiens
cggatacatttttat

SEQ ID NO: 432607 - DNA, 15 bp, Homo sapiens
acggatacattttta

SEQ ID NO: 432608 - DNA, 15 bp, Homo sapiens
cacggatacattttt

SEQ ID NO: 432609 - DNA, 15 bp, Homo sapiens
acacggatacatttt

SEQ ID NO: 432610 - DNA, 15 bp, Homo sapiens
aacacggatacattt

SEQ ID NO: 432611 - DNA, 15 bp, Homo sapiens
taacacggatacatt

SEQ ID NO: 432612 - DNA, 15 bp, Homo sapiens
ataacacggatacat

SEQ ID NO: 432613 - DNA, 15 bp, Homo sapiens
gataacacggataca

SEQ ID NO: 432614 - DNA, 15 bp, Homo sapiens
tgataacacggatac

SEQ ID NO: 432615 - DNA, 15 bp, Homo sapiens
atgataacacggata

SEQ ID NO: 432616 - DNA, 15 bp, Homo sapiens
aatgataacacggat

SEQ ID NO: 432617 - DNA, 15 bp, Homo sapiens
taatgataacacgga

SEQ ID NO: 432618 - DNA, 15 bp, Homo sapiens
ttaatgataacacgg

SEQ ID NO: 432619 - DNA, 15 bp, Homo sapiens
gttaatgataacacg

SEQ ID NO: 432620 - DNA, 15 bp, Homo sapiens
cgttaatgataacac

SEQ ID NO: 432621 - DNA, 15 bp, Homo sapiens
tcgttaatgataaca

SEQ ID NO: 432622 - DNA, 15 bp, Homo sapiens
ttcgttaatgataac

SEQ ID NO: 432623 - DNA, 15 bp, Homo sapiens
attcgttaatgataa

SEQ ID NO: 432624 - DNA, 15 bp, Homo sapiens
aattcgttaatgata

SEQ ID NO: 432625 - DNA, 15 bp, Homo sapiens
gaattcgttaatgat

SEQ ID NO: 432626 - DNA, 15 bp, Homo sapiens
tgaattcgttaatga

SEQ ID NO: 432627 - DNA, 15 bp, Homo sapiens
ttgaattcgttaatg

SEQ ID NO: 432628 - DNA, 15 bp, Homo sapiens
gttgaattcgttaat

SEQ ID NO: 432629 - DNA, 15 bp, Homo sapiens
ggttgaattcgttaa

SEQ ID NO: 432630 - DNA, 15 bp, Homo sapiens
tggttgaattcgtta

SEQ ID NO: 432631 - DNA, 15 bp, Homo sapiens
ttggttgaattcgtt

SEQ ID NO: 432632 - DNA, 15 bp, Homo sapiens
gttggttgaattcgt

SEQ ID NO: 432633 - DNA, 15 bp, Homo sapiens
tgttggttgaattcg

SEQ ID NO: 432634 - DNA, 15 bp, Homo sapiens
atgttggttgaattc

SEQ ID NO: 432635 - DNA, 15 bp, Homo sapiens
aatgttggttgaatt

SEQ ID NO: 432636 - DNA, 15 bp, Homo sapiens
aaatgttggttgaat

SEQ ID NO: 432637 - DNA, 15 bp, Homo sapiens
aaaatgttggttgaa

SEQ ID NO: 432638 - DNA, 15 bp, Homo sapiens
aaaaatgttggttga

SEQ ID NO: 432639 - DNA, 15 bp, Homo sapiens
caaaaatgttggttg

SEQ ID NO: 432640 - DNA, 15 bp, Homo sapiens
gcaaaaatgttggtt

SEQ ID NO: 432641 - DNA, 15 bp, Homo sapiens
tgcaaaaatgttggt

SEQ ID NO: 432642 - DNA, 15 bp, Homo sapiens
ctgcaaaaatgttgg

SEQ ID NO: 432643 - DNA, 15 bp, Homo sapiens
actgcaaaaatgttg

SEQ ID NO: 432644 - DNA, 15 bp, Homo sapiens
aactgcaaaaatgtt

SEQ ID NO: 432645 - DNA, 15 bp, Homo sapiens
aaactgcaaaaatgt

SEQ ID NO: 432646 - DNA, 15 bp, Homo sapiens
gaaactgcaaaaatg

SEQ ID NO: 432647 - DNA, 15 bp, Homo sapiens
tgaaactgcaaaaat

SEQ ID NO: 432648 - DNA, 15 bp, Homo sapiens
gtgaaactgcaaaaa

SEQ ID NO: 432649 - DNA, 15 bp, Homo sapiens
ggtgaaactgcaaaa

SEQ ID NO: 432650 - DNA, 15 bp, Homo sapiens
tggtgaaactgcaaa

SEQ ID NO: 432651 - DNA, 15 bp, Homo sapiens
atggtgaaactgcaa

SEQ ID NO: 432652 - DNA, 15 bp, Homo sapiens
aatggtgaaactgca

SEQ ID NO: 432653 - DNA, 15 bp, Homo sapiens
taatggtgaaactgc

SEQ ID NO: 432654 - DNA, 15 bp, Homo sapiens
ctaatggtgaaactg

SEQ ID NO: 432655 - DNA, 15 bp, Homo sapiens
gctaatggtgaaact

SEQ ID NO: 432656 - DNA, 15 bp, Homo sapiens
tgctaatggtgaaac

SEQ ID NO: 432657 - DNA, 15 bp, Homo sapiens
ctgctaatggtgaaa

SEQ ID NO: 432658 - DNA, 15 bp, Homo sapiens
tctgctaatggtgaa

SEQ ID NO: 432659 - DNA, 15 bp, Homo sapiens
gtctgctaatggtga

SEQ ID NO: 432660 - DNA, 15 bp, Homo sapiens
tgtctgctaatggtg

SEQ ID NO: 432661 - DNA, 15 bp, Homo sapiens
atgtctgctaatggt

SEQ ID NO: 432662 - DNA, 15 bp, Homo sapiens
tatgtctgctaatgg

SEQ ID NO: 432663 - DNA, 15 bp, Homo sapiens
ctatgtctgctaatg

SEQ ID NO: 432664 - DNA, 15 bp, Homo sapiens
actatgtctgctaat

SEQ ID NO: 432665 - DNA, 15 bp, Homo sapiens
gactatgtctgctaa

SEQ ID NO: 432666 - DNA, 15 bp, Homo sapiens
tgactatgtctgcta

SEQ ID NO: 432667 - DNA, 15 bp, Homo sapiens
atgactatgtctgct

SEQ ID NO: 432668 - DNA, 15 bp, Homo sapiens
tatgactatgtctgc

SEQ ID NO: 432669 - DNA, 15 bp, Homo sapiens
ttatgactatgtctg

SEQ ID NO: 432670 - DNA, 15 bp, Homo sapiens
cttatgactatgtct

SEQ ID NO: 432671 - DNA, 15 bp, Homo sapiens
acttatgactatgtc

SEQ ID NO: 432672 - DNA, 15 bp, Homo sapiens
cacttatgactatgt

SEQ ID NO: 432673 - DNA, 15 bp, Homo sapiens
acacttatgactatg

SEQ ID NO: 432674 - DNA, 15 bp, Homo sapiens
cacacttatgactat

SEQ ID NO: 432675 - DNA, 15 bp, Homo sapiens
tcacacttatgacta

SEQ ID NO: 432676 - DNA, 15 bp, Homo sapiens
ttcacacttatgact

SEQ ID NO: 432677 - DNA, 15 bp, Homo sapiens
tttcacacttatgac

SEQ ID NO: 432678 - DNA, 15 bp, Homo sapiens
ttttcacacttatga

SEQ ID NO: 432679 - DNA, 15 bp, Homo sapiens
attttcacacttatg

SEQ ID NO: 432680 - DNA, 15 bp, Homo sapiens
tattttcacacttat

SEQ ID NO: 432681 - DNA, 15 bp, Homo sapiens
atattttcacactta

SEQ ID NO: 432682 - DNA, 15 bp, Homo sapiens
tatattttcacactt

SEQ ID NO: 432683 - DNA, 15 bp, Homo sapiens
ctatattttcacact

SEQ ID NO: 432684 - DNA, 15 bp, Homo sapiens
tctatattttcacac

SEQ ID NO: 432685 - DNA, 15 bp, Homo sapiens
ttctatattttcaca

SEQ ID NO: 432686 - DNA, 15 bp, Homo sapiens
tttctatattttcac

SEQ ID NO: 432687 - DNA, 15 bp, Homo sapiens
ttttctatattttca

SEQ ID NO: 432688 - DNA, 15 bp, Homo sapiens
cttttctatattttc

SEQ ID NO: 432689 - DNA, 15 bp, Homo sapiens
tcttttctatatttt

SEQ ID NO: 432690 - DNA, 15 bp, Homo sapiens
gtcttttctatattt

SEQ ID NO: 432691 - DNA, 15 bp, Homo sapiens
tgtcttttctatatt

SEQ ID NO: 432692 - DNA, 15 bp, Homo sapiens
ctgtcttttctatat

SEQ ID NO: 432693 - DNA, 15 bp, Homo sapiens
tctgtcttttctata

SEQ ID NO: 432694 - DNA, 15 bp, Homo sapiens
ttctgtcttttctat

SEQ ID NO: 432695 - DNA, 15 bp, Homo sapiens
tttctgtcttttcta

SEQ ID NO: 432696 - DNA, 15 bp, Homo sapiens
ttttctgtcttttct

SEQ ID NO: 432697 - DNA, 15 bp, Homo sapiens
gttttctgtcttttc

SEQ ID NO: 432698 - DNA, 15 bp, Homo sapiens
tgttttctgtctttt

SEQ ID NO: 432699 - DNA, 15 bp, Homo sapiens
ctgttttctgtcttt

SEQ ID NO: 432700 - DNA, 15 bp, Homo sapiens
cctgttttctgtctt

SEQ ID NO: 432701 - DNA, 15 bp, Homo sapiens
acctgttttctgtct

SEQ ID NO: 432702 - DNA, 15 bp, Homo sapiens
gacctgttttctgtc

SEQ ID NO: 432703 - DNA, 15 bp, Homo sapiens
agacctgttttctgt

SEQ ID NO: 432704 - DNA, 15 bp, Homo sapiens
aagacctgttttctg

SEQ ID NO: 432705 - DNA, 15 bp, Homo sapiens
caagacctgttttct

SEQ ID NO: 432706 - DNA, 15 bp, Homo sapiens
acaagacctgttttc

SEQ ID NO: 432707 - DNA, 15 bp, Homo sapiens
aacaagacctgtttt

SEQ ID NO: 432708 - DNA, 15 bp, Homo sapiens
gaacaagacctgttt

SEQ ID NO: 432709 - DNA, 15 bp, Homo sapiens
agaacaagacctgtt

SEQ ID NO: 432710 - DNA, 15 bp, Homo sapiens
gagaacaagacctgt

SEQ ID NO: 432711 - DNA, 15 bp, Homo sapiens
tgagaacaagacctg

SEQ ID NO: 432712 - DNA, 15 bp, Homo sapiens
gtgagaacaagacct

SEQ ID NO: 432713 - DNA, 15 bp, Homo sapiens
ggtgagaacaagacc

SEQ ID NO: 432714 - DNA, 15 bp, Homo sapiens
aggtgagaacaagac

SEQ ID NO: 432715 - DNA, 15 bp, Homo sapiens
gaggtgagaacaaga

SEQ ID NO: 432716 - DNA, 15 bp, Homo sapiens
cgaggtgagaacaag

SEQ ID NO: 432717 - DNA, 15 bp, Homo sapiens
gcgaggtgagaacaa

SEQ ID NO: 432718 - DNA, 15 bp, Homo sapiens
ggcgaggtgagaaca

SEQ ID NO: 432719 - DNA, 15 bp, Homo sapiens
tggcgaggtgagaac

SEQ ID NO: 432720 - DNA, 15 bp, Homo sapiens
ctggcgaggtgagaa

SEQ ID NO: 432721 - DNA, 15 bp, Homo sapiens
gctggcgaggtgaga

SEQ ID NO: 432722 - DNA, 15 bp, Homo sapiens
tgctggcgaggtgag

SEQ ID NO: 432723 - DNA, 15 bp, Homo sapiens
ttgctggcgaggtga

SEQ ID NO: 432724 - DNA, 15 bp, Homo sapiens
tttgctggcgaggtg

SEQ ID NO: 432725 - DNA, 15 bp, Homo sapiens
atttgctggcgaggt

SEQ ID NO: 432726 - DNA, 15 bp, Homo sapiens
aatttgctggcgagg

SEQ ID NO: 432727 - DNA, 15 bp, Homo sapiens
caatttgctggcgag

SEQ ID NO: 432728 - DNA, 15 bp, Homo sapiens
ccaatttgctggcga

SEQ ID NO: 432729 - DNA, 15 bp, Homo sapiens
cccaatttgctggcg

SEQ ID NO: 432730 - DNA, 15 bp, Homo sapiens
tcccaatttgctggc

SEQ ID NO: 432731 - DNA, 15 bp, Homo sapiens
ttcccaatttgctgg

SEQ ID NO: 432732 - DNA, 15 bp, Homo sapiens
cttcccaatttgctg

SEQ ID NO: 432733 - DNA, 15 bp, Homo sapiens
ccttcccaatttgct

SEQ ID NO: 432734 - DNA, 15 bp, Homo sapiens
gccttcccaatttgc

SEQ ID NO: 432735 - DNA, 15 bp, Homo sapiens
agccttcccaatttg

SEQ ID NO: 432736 - DNA, 15 bp, Homo sapiens
cagccttcccaattt

SEQ ID NO: 432737 - DNA, 15 bp, Homo sapiens
tcagccttcccaatt

SEQ ID NO: 432738 - DNA, 15 bp, Homo sapiens
gtcagccttcccaat

SEQ ID NO: 432739 - DNA, 15 bp, Homo sapiens
tgtcagccttcccaa

SEQ ID NO: 432740 - DNA, 15 bp, Homo sapiens
atgtcagccttccca

SEQ ID NO: 432741 - DNA, 15 bp, Homo sapiens
tatgtcagccttccc

SEQ ID NO: 432742 - DNA, 15 bp, Homo sapiens
ttatgtcagccttcc

SEQ ID NO: 432743 - DNA, 15 bp, Homo sapiens
tttatgtcagccttc

SEQ ID NO: 432744 - DNA, 15 bp, Homo sapiens
ttttatgtcagcctt

SEQ ID NO: 432745 - DNA, 15 bp, Homo sapiens
gttttatgtcagcct

SEQ ID NO: 432746 - DNA, 15 bp, Homo sapiens
tgttttatgtcagcc

SEQ ID NO: 432747 - DNA, 15 bp, Homo sapiens
ctgttttatgtcagc

SEQ ID NO: 432748 - DNA, 15 bp, Homo sapiens
cctgttttatgtcag

SEQ ID NO: 432749 - DNA, 15 bp, Homo sapiens
gcctgttttatgtca

SEQ ID NO: 432750 - DNA, 15 bp, Homo sapiens
tgcctgttttatgtc

SEQ ID NO: 432751 - DNA, 15 bp, Homo sapiens
ttgcctgttttatgt

SEQ ID NO: 432752 - DNA, 15 bp, Homo sapiens
cttgcctgttttatg

SEQ ID NO: 432753 - DNA, 15 bp, Homo sapiens
acttgcctgttttat

SEQ ID NO: 432754 - DNA, 15 bp, Homo sapiens
tacttgcctgtttta

SEQ ID NO: 432755 - DNA, 15 bp, Homo sapiens
atacttgcctgtttt

SEQ ID NO: 432756 - DNA, 15 bp, Homo sapiens
catacttgcctgttt

SEQ ID NO: 432757 - DNA, 15 bp, Homo sapiens
tcatacttgcctgtt

SEQ ID NO: 432758 - DNA, 15 bp, Homo sapiens
atcatacttgcctgt

SEQ ID NO: 432759 - DNA, 15 bp, Homo sapiens
tatcatacttgcctg

SEQ ID NO: 432760 - DNA, 15 bp, Homo sapiens
gtatcatacttgcct

SEQ ID NO: 432761 - DNA, 15 bp, Homo sapiens
agtatcatacttgcc

SEQ ID NO: 432762 - DNA, 15 bp, Homo sapiens
cagtatcatacttgc

SEQ ID NO: 432763 - DNA, 15 bp, Homo sapiens
acagtatcatacttg

SEQ ID NO: 432764 - DNA, 15 bp, Homo sapiens
cacagtatcatactt

SEQ ID NO: 432765 - DNA, 15 bp, Homo sapiens
acacagtatcatact

SEQ ID NO: 432766 - DNA, 15 bp, Homo sapiens
cacacagtatcatac

SEQ ID NO: 432767 - DNA, 15 bp, Homo sapiens
acacacagtatcata

SEQ ID NO: 432768 - DNA, 15 bp, Homo sapiens
aacacacagtatcat

SEQ ID NO: 432769 - DNA, 15 bp, Homo sapiens
aaacacacagtatca

SEQ ID NO: 432770 - DNA, 15 bp, Homo sapiens
gaaacacacagtatc

SEQ ID NO: 432771 - DNA, 15 bp, Homo sapiens
ggaaacacacagtat

SEQ ID NO: 432772 - DNA, 15 bp, Homo sapiens
tggaaacacacagta

SEQ ID NO: 432773 - DNA, 15 bp, Homo sapiens
ctggaaacacacagt

SEQ ID NO: 432774 - DNA, 15 bp, Homo sapiens
gctggaaacacacag

SEQ ID NO: 432775 - DNA, 15 bp, Homo sapiens
agctggaaacacaca

SEQ ID NO: 432776 - DNA, 15 bp, Homo sapiens
cagctggaaacacac

SEQ ID NO: 432777 - DNA, 15 bp, Homo sapiens
acagctggaaacaca

SEQ ID NO: 432778 - DNA, 15 bp, Homo sapiens
cacagctggaaacac

SEQ ID NO: 432779 - DNA, 15 bp, Homo sapiens
tcacagctggaaaca

SEQ ID NO: 432780 - DNA, 15 bp, Homo sapiens
atcacagctggaaac

SEQ ID NO: 432781 - DNA, 15 bp, Homo sapiens
tatcacagctggaaa

SEQ ID NO: 432782 - DNA, 15 bp, Homo sapiens
atatcacagctggaa

SEQ ID NO: 432783 - DNA, 15 bp, Homo sapiens
gatatcacagctgga

SEQ ID NO: 432784 - DNA, 15 bp, Homo sapiens
tgatatcacagctgg

SEQ ID NO: 432785 - DNA, 15 bp, Homo sapiens
gtgatatcacagctg

SEQ ID NO: 432786 - DNA, 15 bp, Homo sapiens
cgtgatatcacagct

SEQ ID NO: 432787 - DNA, 15 bp, Homo sapiens
acgtgatatcacagc

SEQ ID NO: 432788 - DNA, 15 bp, Homo sapiens
cacgtgatatcacag

SEQ ID NO: 432789 - DNA, 15 bp, Homo sapiens
ccacgtgatatcaca

SEQ ID NO: 432790 - DNA, 15 bp, Homo sapiens
gccacgtgatatcac

SEQ ID NO: 432791 - DNA, 15 bp, Homo sapiens
cgccacgtgatatca

SEQ ID NO: 432792 - DNA, 15 bp, Homo sapiens
acgccacgtgatatc

SEQ ID NO: 432793 - DNA, 15 bp, Homo sapiens
cacgccacgtgatat

SEQ ID NO: 432794 - DNA, 15 bp, Homo sapiens
tcacgccacgtgata

SEQ ID NO: 432795 - DNA, 15 bp, Homo sapiens
ctcacgccacgtgat

SEQ ID NO: 432796 - DNA, 15 bp, Homo sapiens
actcacgccacgtga

SEQ ID NO: 432797 - DNA, 15 bp, Homo sapiens
gactcacgccacgtg

SEQ ID NO: 432798 - DNA, 15 bp, Homo sapiens
ggactcacgccacgt

SEQ ID NO: 432799 - DNA, 15 bp, Homo sapiens
gggactcacgccacg

SEQ ID NO: 432800 - DNA, 15 bp, Homo sapiens
tgggactcacgccac

SEQ ID NO: 432801 - DNA, 15 bp, Homo sapiens
atgggactcacgcca

SEQ ID NO: 432802 - DNA, 15 bp, Homo sapiens
catgggactcacgcc

SEQ ID NO: 432803 - DNA, 15 bp, Homo sapiens
ccatgggactcacgc

SEQ ID NO: 432804 - DNA, 15 bp, Homo sapiens
gccatgggactcacg

SEQ ID NO: 432805 - DNA, 15 bp, Homo sapiens
tgccatgggactcac

SEQ ID NO: 432806 - DNA, 15 bp, Homo sapiens
ctgccatgggactca

SEQ ID NO: 432807 - DNA, 15 bp, Homo sapiens
gctgccatgggactc

SEQ ID NO: 432808 - DNA, 15 bp, Homo sapiens
tgctgccatgggact

SEQ ID NO: 432809 - DNA, 15 bp, Homo sapiens
gtgctgccatgggac

SEQ ID NO: 432810 - DNA, 15 bp, Homo sapiens
tgtgctgccatggga

SEQ ID NO: 432811 - DNA, 15 bp, Homo sapiens
ttgtgctgccatggg

SEQ ID NO: 432812 - DNA, 15 bp, Homo sapiens
tttgtgctgccatgg

SEQ ID NO: 432813 - DNA, 15 bp, Homo sapiens
atttgtgctgccatg

SEQ ID NO: 432814 - DNA, 15 bp, Homo sapiens
catttgtgctgccat

SEQ ID NO: 432815 - DNA, 15 bp, Homo sapiens
tcatttgtgctgcca

SEQ ID NO: 432816 - DNA, 15 bp, Homo sapiens
ctcatttgtgctgcc

SEQ ID NO: 432817 - DNA, 15 bp, Homo sapiens
cctcatttgtgctgc

SEQ ID NO: 432818 - DNA, 15 bp, Homo sapiens
ccctcatttgtgctg

SEQ ID NO: 432819 - DNA, 15 bp, Homo sapiens
cccctcatttgtgct

SEQ ID NO: 432820 - DNA, 15 bp, Homo sapiens
gcccctcatttgtgc

SEQ ID NO: 432821 - DNA, 15 bp, Homo sapiens
tgcccctcatttgtg

SEQ ID NO: 432822 - DNA, 15 bp, Homo sapiens
gtgcccctcatttgt

SEQ ID NO: 432823 - DNA, 15 bp, Homo sapiens
agtgcccctcatttg

SEQ ID NO: 432824 - DNA, 15 bp, Homo sapiens
aagtgcccctcattt

SEQ ID NO: 432825 - DNA, 15 bp, Homo sapiens
taagtgcccctcatt

SEQ ID NO: 432826 - DNA, 15 bp, Homo sapiens
ttaagtgcccctcat

SEQ ID NO: 432827 - DNA, 15 bp, Homo sapiens
gttaagtgcccctca

SEQ ID NO: 432828 - DNA, 15 bp, Homo sapiens
agttaagtgcccctc

SEQ ID NO: 432829 - DNA, 15 bp, Homo sapiens
cagttaagtgcccct

SEQ ID NO: 432830 - DNA, 15 bp, Homo sapiens
acagttaagtgcccc

SEQ ID NO: 432831 - DNA, 15 bp, Homo sapiens
cacagttaagtgccc

SEQ ID NO: 432832 - DNA, 15 bp, Homo sapiens
ccacagttaagtgcc

SEQ ID NO: 432833 - DNA, 15 bp, Homo sapiens
accacagttaagtgc

SEQ ID NO: 432834 - DNA, 15 bp, Homo sapiens
taccacagttaagtg

SEQ ID NO: 432835 - DNA, 15 bp, Homo sapiens
ctaccacagttaagt

SEQ ID NO: 432836 - DNA, 15 bp, Homo sapiens
tctaccacagttaag

SEQ ID NO: 432837 - DNA, 15 bp, Homo sapiens
ttctaccacagttaa

SEQ ID NO: 432838 - DNA, 15 bp, Homo sapiens
cttctaccacagtta

SEQ ID NO: 432839 - DNA, 15 bp, Homo sapiens
tcttctaccacagtt

SEQ ID NO: 432840 - DNA, 15 bp, Homo sapiens
ttcttctaccacagt

SEQ ID NO: 432841 - DNA, 15 bp, Homo sapiens
tttcttctaccacag

SEQ ID NO: 432842 - DNA, 15 bp, Homo sapiens
ttttcttctaccaca

SEQ ID NO: 432843 - DNA, 15 bp, Homo sapiens
tttttcttctaccac

SEQ ID NO: 432844 - DNA, 15 bp, Homo sapiens
ctttttcttctacca

SEQ ID NO: 432845 - DNA, 15 bp, Homo sapiens
tctttttcttctacc

SEQ ID NO: 432846 - DNA, 15 bp, Homo sapiens
ttctttttcttctac

SEQ ID NO: 432847 - DNA, 15 bp, Homo sapiens
cttctttttcttcta

SEQ ID NO: 432848 - DNA, 15 bp, Homo sapiens
ccttctttttcttct

SEQ ID NO: 432849 - DNA, 15 bp, Homo sapiens
gccttctttttcttc

SEQ ID NO: 432850 - DNA, 15 bp, Homo sapiens
agccttctttttctt

SEQ ID NO: 432851 - DNA, 15 bp, Homo sapiens
gagccttctttttct

SEQ ID NO: 432852 - DNA, 15 bp, Homo sapiens
ggagccttctttttc

SEQ ID NO: 432853 - DNA, 15 bp, Homo sapiens
gggagccttcttttt

SEQ ID NO: 432854 - DNA, 15 bp, Homo sapiens
agggagccttctttt

SEQ ID NO: 432855 - DNA, 15 bp, Homo sapiens
gagggagccttcttt

SEQ ID NO: 432856 - DNA, 15 bp, Homo sapiens
tgagggagccttctt

SEQ ID NO: 432857 - DNA, 15 bp, Homo sapiens
ttgagggagccttct

SEQ ID NO: 432858 - DNA, 15 bp, Homo sapiens
cttgagggagccttc

SEQ ID NO: 432859 - DNA, 15 bp, Homo sapiens
acttgagggagcctt

SEQ ID NO: 432860 - DNA, 15 bp, Homo sapiens
tacttgagggagcct

SEQ ID NO: 432861 - DNA, 15 bp, Homo sapiens
ctacttgagggagcc

SEQ ID NO: 432862 - DNA, 15 bp, Homo sapiens
cctacttgagggagc

SEQ ID NO: 432863 - DNA, 15 bp, Homo sapiens
acctacttgagggag

SEQ ID NO: 432864 - DNA, 15 bp, Homo sapiens
tacctacttgaggga

SEQ ID NO: 432865 - DNA, 15 bp, Homo sapiens
ttacctacttgaggg

SEQ ID NO: 432866 - DNA, 15 bp, Homo sapiens
gttacctacttgagg

SEQ ID NO: 432867 - DNA, 15 bp, Homo sapiens
tgttacctacttgag

SEQ ID NO: 432868 - DNA, 15 bp, Homo sapiens
gtgttacctacttga

SEQ ID NO: 432869 - DNA, 15 bp, Homo sapiens
ggtgttacctacttg

SEQ ID NO: 432870 - DNA, 15 bp, Homo sapiens
tggtgttacctactt

SEQ ID NO: 432871 - DNA, 15 bp, Homo sapiens
ttggtgttacctact

SEQ ID NO: 432872 - DNA, 15 bp, Homo sapiens
tttggtgttacctac

SEQ ID NO: 432873 - DNA, 15 bp, Homo sapiens
gtttggtgttaccta

SEQ ID NO: 432874 - DNA, 15 bp, Homo sapiens
agtttggtgttacct

SEQ ID NO: 432875 - DNA, 15 bp, Homo sapiens
aagtttggtgttacc

SEQ ID NO: 432876 - DNA, 15 bp, Homo sapiens
caagtttggtgttac

SEQ ID NO: 432877 - DNA, 15 bp, Homo sapiens
tcaagtttggtgtta

SEQ ID NO: 432878 - DNA, 15 bp, Homo sapiens
ttcaagtttggtgtt

SEQ ID NO: 432879 - DNA, 15 bp, Homo sapiens
cttcaagtttggtgt

SEQ ID NO: 432880 - DNA, 15 bp, Homo sapiens
gcttcaagtttggtg

SEQ ID NO: 432881 - DNA, 15 bp, Homo sapiens
agcttcaagtttggt

SEQ ID NO: 432882 - DNA, 15 bp, Homo sapiens
aagcttcaagtttgg

SEQ ID NO: 432883 - DNA, 15 bp, Homo sapiens
taagcttcaagtttg

SEQ ID NO: 432884 - DNA, 15 bp, Homo sapiens
ttaagcttcaagttt

SEQ ID NO: 432885 - DNA, 15 bp, Homo sapiens
tttaagcttcaagtt

SEQ ID NO: 432886 - DNA, 15 bp, Homo sapiens
ttttaagcttcaagt

SEQ ID NO: 432887 - DNA, 15 bp, Homo sapiens
attttaagcttcaag

SEQ ID NO: 432888 - DNA, 15 bp, Homo sapiens
tattttaagcttcaa

SEQ ID NO: 432889 - DNA, 15 bp, Homo sapiens
ttattttaagcttca

SEQ ID NO: 432890 - DNA, 15 bp, Homo sapiens
tttattttaagcttc

SEQ ID NO: 432891 - DNA, 15 bp, Homo sapiens
ctttattttaagctt

SEQ ID NO: 432892 - DNA, 15 bp, Homo sapiens
cctttattttaagct

SEQ ID NO: 432893 - DNA, 15 bp, Homo sapiens
tcctttattttaagc

SEQ ID NO: 432894 - DNA, 15 bp, Homo sapiens
ctcctttattttaag

SEQ ID NO: 432895 - DNA, 15 bp, Homo sapiens
tctcctttattttaa

SEQ ID NO: 432896 - DNA, 15 bp, Homo sapiens
atctcctttatttta

SEQ ID NO: 432897 - DNA, 15 bp, Homo sapiens
aatctcctttatttt

SEQ ID NO: 432898 - DNA, 15 bp, Homo sapiens
aaatctcctttattt

SEQ ID NO: 432899 - DNA, 15 bp, Homo sapiens
taaatctcctttatt

SEQ ID NO: 432900 - DNA, 15 bp, Homo sapiens
ctaaatctcctttat

SEQ ID NO: 432901 - DNA, 15 bp, Homo sapiens
cctaaatctccttta

SEQ ID NO: 432902 - DNA, 15 bp, Homo sapiens
tcctaaatctccttt

SEQ ID NO: 432903 - DNA, 15 bp, Homo sapiens
ttcctaaatctcctt

SEQ ID NO: 432904 - DNA, 15 bp, Homo sapiens
gttcctaaatctcct

SEQ ID NO: 432905 - DNA, 15 bp, Homo sapiens
tgttcctaaatctcc

SEQ ID NO: 432906 - DNA, 15 bp, Homo sapiens
ttgttcctaaatctc

SEQ ID NO: 432907 - DNA, 15 bp, Homo sapiens
tttgttcctaaatct

SEQ ID NO: 432908 - DNA, 15 bp, Homo sapiens
ctttgttcctaaatc

SEQ ID NO: 432909 - DNA, 15 bp, Homo sapiens
cctttgttcctaaat

SEQ ID NO: 432910 - DNA, 15 bp, Homo sapiens
ccctttgttcctaaa

SEQ ID NO: 432911 - DNA, 15 bp, Homo sapiens
gccctttgttcctaa

SEQ ID NO: 432912 - DNA, 15 bp, Homo sapiens
tgccctttgttccta

SEQ ID NO: 432913 - DNA, 15 bp, Homo sapiens
atgccctttgttcct

SEQ ID NO: 432914 - DNA, 15 bp, Homo sapiens
aatgccctttgttcc

SEQ ID NO: 432915 - DNA, 15 bp, Homo sapiens
taatgccctttgttc

SEQ ID NO: 432916 - DNA, 15 bp, Homo sapiens
ttaatgccctttgtt

SEQ ID NO: 432917 - DNA, 15 bp, Homo sapiens
tttaatgccctttgt

SEQ ID NO: 432918 - DNA, 15 bp, Homo sapiens
ttttaatgccctttg

SEQ ID NO: 432919 - DNA, 15 bp, Homo sapiens
cttttaatgcccttt

SEQ ID NO: 432920 - DNA, 15 bp, Homo sapiens
ccttttaatgccctt

SEQ ID NO: 432921 - DNA, 15 bp, Homo sapiens
tccttttaatgccct

SEQ ID NO: 432922 - DNA, 15 bp, Homo sapiens
ctccttttaatgccc

SEQ ID NO: 432923 - DNA, 15 bp, Homo sapiens
tctccttttaatgcc

SEQ ID NO: 432924 - DNA, 15 bp, Homo sapiens
ctctccttttaatgc

SEQ ID NO: 432925 - DNA, 15 bp, Homo sapiens
tctctccttttaatg

SEQ ID NO: 432926 - DNA, 15 bp, Homo sapiens
ctctctccttttaat

SEQ ID NO: 432927 - DNA, 15 bp, Homo sapiens
tctctctccttttaa

SEQ ID NO: 432928 - DNA, 15 bp, Homo sapiens
ttctctctcctttta

SEQ ID NO: 432929 - DNA, 15 bp, Homo sapiens
gttctctctcctttt

SEQ ID NO: 432930 - DNA, 15 bp, Homo sapiens
tgttctctctccttt

SEQ ID NO: 432931 - DNA, 15 bp, Homo sapiens
ctgttctctctcctt

SEQ ID NO: 432932 - DNA, 15 bp, Homo sapiens
gctgttctctctcct

SEQ ID NO: 432933 - DNA, 15 bp, Homo sapiens
ggctgttctctctcc

SEQ ID NO: 432934 - DNA, 15 bp, Homo sapiens
aggctgttctctctc

SEQ ID NO: 432935 - DNA, 15 bp, Homo sapiens
caggctgttctctct

SEQ ID NO: 432936 - DNA, 15 bp, Homo sapiens
acaggctgttctctc

SEQ ID NO: 432937 - DNA, 15 bp, Homo sapiens
cacaggctgttctct

SEQ ID NO: 432938 - DNA, 15 bp, Homo sapiens
gcacaggctgttctc

SEQ ID NO: 432939 - DNA, 15 bp, Homo sapiens
ggcacaggctgttct

SEQ ID NO: 432940 - DNA, 15 bp, Homo sapiens
tggcacaggctgttc

SEQ ID NO: 432941 - DNA, 15 bp, Homo sapiens
ttggcacaggctgtt

SEQ ID NO: 432942 - DNA, 15 bp, Homo sapiens
cttggcacaggctgt

SEQ ID NO: 432943 - DNA, 15 bp, Homo sapiens
gcttggcacaggctg

SEQ ID NO: 432944 - DNA, 15 bp, Homo sapiens
tgcttggcacaggct

SEQ ID NO: 432945 - DNA, 15 bp, Homo sapiens
ttgcttggcacaggc

SEQ ID NO: 432946 - DNA, 15 bp, Homo sapiens
cttgcttggcacagg

SEQ ID NO: 432947 - DNA, 15 bp, Homo sapiens
acttgcttggcacag

SEQ ID NO: 432948 - DNA, 15 bp, Homo sapiens
tacttgcttggcaca

SEQ ID NO: 432949 - DNA, 15 bp, Homo sapiens
ctacttgcttggcac

SEQ ID NO: 432950 - DNA, 15 bp, Homo sapiens
cctacttgcttggca

SEQ ID NO: 432951 - DNA, 15 bp, Homo sapiens
acctacttgcttggc

SEQ ID NO: 432952 - DNA, 15 bp, Homo sapiens
aacctacttgcttgg

SEQ ID NO: 432953 - DNA, 15 bp, Homo sapiens
caacctacttgcttg

SEQ ID NO: 432954 - DNA, 15 bp, Homo sapiens
tcaacctacttgctt

SEQ ID NO: 432955 - DNA, 15 bp, Homo sapiens
gtcaacctacttgct

SEQ ID NO: 432956 - DNA, 15 bp, Homo sapiens
tgtcaacctacttgc

SEQ ID NO: 432957 - DNA, 15 bp, Homo sapiens
ctgtcaacctacttg

SEQ ID NO: 432958 - DNA, 15 bp, Homo sapiens
gctgtcaacctactt

SEQ ID NO: 432959 - DNA, 15 bp, Homo sapiens
tgctgtcaacctact

SEQ ID NO: 432960 - DNA, 15 bp, Homo sapiens
gtgctgtcaacctac

SEQ ID NO: 432961 - DNA, 15 bp, Homo sapiens
cgtgctgtcaaccta

SEQ ID NO: 432962 - DNA, 15 bp, Homo sapiens
acgtgctgtcaacct

SEQ ID NO: 432963 - DNA, 15 bp, Homo sapiens
cacgtgctgtcaacc

SEQ ID NO: 432964 - DNA, 15 bp, Homo sapiens
ccacgtgctgtcaac

SEQ ID NO: 432965 - DNA, 15 bp, Homo sapiens
gccacgtgctgtcaa

SEQ ID NO: 432966 - DNA, 15 bp, Homo sapiens
tgccacgtgctgtca

SEQ ID NO: 432967 - DNA, 15 bp, Homo sapiens
ctgccacgtgctgtc

SEQ ID NO: 432968 - DNA, 15 bp, Homo sapiens
tctgccacgtgctgt

SEQ ID NO: 432969 - DNA, 15 bp, Homo sapiens
atctgccacgtgctg

SEQ ID NO: 432970 - DNA, 15 bp, Homo sapiens
aatctgccacgtgct

SEQ ID NO: 432971 - DNA, 15 bp, Homo sapiens
aaatctgccacgtgc

SEQ ID NO: 432972 - DNA, 15 bp, Homo sapiens
caaatctgccacgtg

SEQ ID NO: 432973 - DNA, 15 bp, Homo sapiens
ccaaatctgccacgt

SEQ ID NO: 432974 - DNA, 15 bp, Homo sapiens
tccaaatctgccacg

SEQ ID NO: 432975 - DNA, 15 bp, Homo sapiens
ctccaaatctgccac

SEQ ID NO: 432976 - DNA, 15 bp, Homo sapiens
tctccaaatctgcca

SEQ ID NO: 432977 - DNA, 15 bp, Homo sapiens
ctctccaaatctgcc

SEQ ID NO: 432978 - DNA, 15 bp, Homo sapiens
gctctccaaatctgc

SEQ ID NO: 432979 - DNA, 15 bp, Homo sapiens
tgctctccaaatctg

SEQ ID NO: 432980 - DNA, 15 bp, Homo sapiens
ttgctctccaaatct

SEQ ID NO: 432981 - DNA, 15 bp, Homo sapiens
cttgctctccaaatc

SEQ ID NO: 432982 - DNA, 15 bp, Homo sapiens
acttgctctccaaat

SEQ ID NO: 432983 - DNA, 15 bp, Homo sapiens
tacttgctctccaaa

SEQ ID NO: 432984 - DNA, 15 bp, Homo sapiens
gtacttgctctccaa

SEQ ID NO: 432985 - DNA, 15 bp, Homo sapiens
tgtacttgctctcca

SEQ ID NO: 432986 - DNA, 15 bp, Homo sapiens
atgtacttgctctcc

SEQ ID NO: 432987 - DNA, 15 bp, Homo sapiens
gatgtacttgctctc

SEQ ID NO: 432988 - DNA, 15 bp, Homo sapiens
ggatgtacttgctct

SEQ ID NO: 432989 - DNA, 15 bp, Homo sapiens
tggatgtacttgctc

SEQ ID NO: 432990 - DNA, 15 bp, Homo sapiens
atggatgtacttgct

SEQ ID NO: 432991 - DNA, 15 bp, Homo sapiens
tatggatgtacttgc

SEQ ID NO: 432992 - DNA, 15 bp, Homo sapiens
atatggatgtacttg

SEQ ID NO: 432993 - DNA, 15 bp, Homo sapiens
catatggatgtactt

SEQ ID NO: 432994 - DNA, 15 bp, Homo sapiens
ccatatggatgtact

SEQ ID NO: 432995 - DNA, 15 bp, Homo sapiens
gccatatggatgtac

SEQ ID NO: 432996 - DNA, 15 bp, Homo sapiens
agccatatggatgta

SEQ ID NO: 432997 - DNA, 15 bp, Homo sapiens
cagccatatggatgt

SEQ ID NO: 432998 - DNA, 15 bp, Homo sapiens
gcagccatatggatg

SEQ ID NO: 432999 - DNA, 15 bp, Homo sapiens
tgcagccatatggat

SEQ ID NO: 433000 - DNA, 15 bp, Homo sapiens
atgcagccatatgga

SEQ ID NO: 433001 - DNA, 15 bp, Homo sapiens
gatgcagccatatgg

SEQ ID NO: 433002 - DNA, 15 bp, Homo sapiens
ggatgcagccatatg

SEQ ID NO: 433003 - DNA, 15 bp, Homo sapiens
gggatgcagccatat

SEQ ID NO: 433004 - DNA, 15 bp, Homo sapiens
tgggatgcagccata

SEQ ID NO: 433005 - DNA, 15 bp, Homo sapiens
ctgggatgcagccat

SEQ ID NO: 433006 - DNA, 15 bp, Homo sapiens
tctgggatgcagcca

SEQ ID NO: 433007 - DNA, 15 bp, Homo sapiens
ttctgggatgcagcc

SEQ ID NO: 433008 - DNA, 15 bp, Homo sapiens
attctgggatgcagc

SEQ ID NO: 433009 - DNA, 15 bp, Homo sapiens
aattctgggatgcag

SEQ ID NO: 433010 - DNA, 15 bp, Homo sapiens
taattctgggatgca

SEQ ID NO: 433011 - DNA, 15 bp, Homo sapiens
ttaattctgggatgc

SEQ ID NO: 433012 - DNA, 15 bp, Homo sapiens
tttaattctgggatg

SEQ ID NO: 433013 - DNA, 15 bp, Homo sapiens
atttaattctgggat

SEQ ID NO: 433014 - DNA, 15 bp, Homo sapiens
catttaattctggga

SEQ ID NO: 433015 - DNA, 15 bp, Homo sapiens
tcatttaattctggg

SEQ ID NO: 433016 - DNA, 15 bp, Homo sapiens
ctcatttaattctgg

SEQ ID NO: 433017 - DNA, 15 bp, Homo sapiens
cctcatttaattctg

SEQ ID NO: 433018 - DNA, 15 bp, Homo sapiens
ccctcatttaattct

SEQ ID NO: 433019 - DNA, 15 bp, Homo sapiens
accctcatttaattc

SEQ ID NO: 433020 - DNA, 15 bp, Homo sapiens
caccctcatttaatt

SEQ ID NO: 433021 - DNA, 15 bp, Homo sapiens
tcaccctcatttaat

SEQ ID NO: 433022 - DNA, 15 bp, Homo sapiens
ttcaccctcatttaa

SEQ ID NO: 433023 - DNA, 15 bp, Homo sapiens
cttcaccctcattta

SEQ ID NO: 433024 - DNA, 15 bp, Homo sapiens
tcttcaccctcattt

SEQ ID NO: 433025 - DNA, 15 bp, Homo sapiens
gtcttcaccctcatt

SEQ ID NO: 433026 - DNA, 15 bp, Homo sapiens
tgtcttcaccctcat

SEQ ID NO: 433027 - DNA, 15 bp, Homo sapiens
ctgtcttcaccctca

SEQ ID NO: 433028 - DNA, 15 bp, Homo sapiens
cctgtcttcaccctc

SEQ ID NO: 433029 - DNA, 15 bp, Homo sapiens
gcctgtcttcaccct

SEQ ID NO: 433030 - DNA, 15 bp, Homo sapiens
tgcctgtcttcaccc

SEQ ID NO: 433031 - DNA, 15 bp, Homo sapiens
ctgcctgtcttcacc

SEQ ID NO: 433032 - DNA, 15 bp, Homo sapiens
cctgcctgtcttcac

SEQ ID NO: 433033 - DNA, 15 bp, Homo sapiens
ccctgcctgtcttca

SEQ ID NO: 433034 - DNA, 15 bp, Homo sapiens
tccctgcctgtcttc

SEQ ID NO: 433035 - DNA, 15 bp, Homo sapiens
gtccctgcctgtctt

SEQ ID NO: 433036 - DNA, 15 bp, Homo sapiens
ggtccctgcctgtct

SEQ ID NO: 433037 - DNA, 15 bp, Homo sapiens
tggtccctgcctgtc

SEQ ID NO: 433038 - DNA, 15 bp, Homo sapiens
ctggtccctgcctgt

SEQ ID NO: 433039 - DNA, 15 bp, Homo sapiens
tctggtccctgcctg

SEQ ID NO: 433040 - DNA, 15 bp, Homo sapiens
atctggtccctgcct

SEQ ID NO: 433041 - DNA, 15 bp, Homo sapiens
gatctggtccctgcc

SEQ ID NO: 433042 - DNA, 15 bp, Homo sapiens
tgatctggtccctgc

SEQ ID NO: 433043 - DNA, 15 bp, Homo sapiens
gtgatctggtccctg

SEQ ID NO: 433044 - DNA, 15 bp, Homo sapiens
tgtgatctggtccct

SEQ ID NO: 433045 - DNA, 15 bp, Homo sapiens
ttgtgatctggtccc

SEQ ID NO: 433046 - DNA, 15 bp, Homo sapiens
tttgtgatctggtcc

SEQ ID NO: 433047 - DNA, 15 bp, Homo sapiens
ctttgtgatctggtc

SEQ ID NO: 433048 - DNA, 15 bp, Homo sapiens
tctttgtgatctggt

SEQ ID NO: 433049 - DNA, 15 bp, Homo sapiens
ctctttgtgatctgg

SEQ ID NO: 433050 - DNA, 15 bp, Homo sapiens
gctctttgtgatctg

SEQ ID NO: 433051 - DNA, 15 bp, Homo sapiens
agctctttgtgatct

SEQ ID NO: 433052 - DNA, 15 bp, Homo sapiens
aagctctttgtgatc

SEQ ID NO: 433053 - DNA, 15 bp, Homo sapiens
aaagctctttgtgat

SEQ ID NO: 433054 - DNA, 15 bp, Homo sapiens
caaagctctttgtga

SEQ ID NO: 433055 - DNA, 15 bp, Homo sapiens
acaaagctctttgtg

SEQ ID NO: 433056 - DNA, 15 bp, Homo sapiens
cacaaagctctttgt

SEQ ID NO: 433057 - DNA, 15 bp, Homo sapiens
gcacaaagctctttg

SEQ ID NO: 433058 - DNA, 15 bp, Homo sapiens
tgcacaaagctcttt

SEQ ID NO: 433059 - DNA, 15 bp, Homo sapiens
atgcacaaagctctt

SEQ ID NO: 433060 - DNA, 15 bp, Homo sapiens
gatgcacaaagctct

SEQ ID NO: 433061 - DNA, 15 bp, Homo sapiens
tgatgcacaaagctc

SEQ ID NO: 433062 - DNA, 15 bp, Homo sapiens
atgatgcacaaagct

SEQ ID NO: 433063 - DNA, 15 bp, Homo sapiens
catgatgcacaaagc

SEQ ID NO: 433064 - DNA, 15 bp, Homo sapiens
gcatgatgcacaaag

SEQ ID NO: 433065 - DNA, 15 bp, Homo sapiens
agcatgatgcacaaa

SEQ ID NO: 433066 - DNA, 15 bp, Homo sapiens
tagcatgatgcacaa

SEQ ID NO: 433067 - DNA, 15 bp, Homo sapiens
ttagcatgatgcaca

SEQ ID NO: 433068 - DNA, 15 bp, Homo sapiens
tttagcatgatgcac

SEQ ID NO: 433069 - DNA, 15 bp, Homo sapiens
ttttagcatgatgca

SEQ ID NO: 433070 - DNA, 15 bp, Homo sapiens
gttttagcatgatgc

SEQ ID NO: 433071 - DNA, 15 bp, Homo sapiens
tgttttagcatgatg

SEQ ID NO: 433072 - DNA, 15 bp, Homo sapiens
atgttttagcatgat

SEQ ID NO: 433073 - DNA, 15 bp, Homo sapiens
aatgttttagcatga

SEQ ID NO: 433074 - DNA, 15 bp, Homo sapiens
aaatgttttagcatg

SEQ ID NO: 433075 - DNA, 15 bp, Homo sapiens
gaaatgttttagcat

SEQ ID NO: 433076 - DNA, 15 bp, Homo sapiens
tgaaatgttttagca

SEQ ID NO: 433077 - DNA, 15 bp, Homo sapiens
ctgaaatgttttagc

SEQ ID NO: 433078 - DNA, 15 bp, Homo sapiens
actgaaatgttttag

SEQ ID NO: 433079 - DNA, 15 bp, Homo sapiens
aactgaaatgtttta

SEQ ID NO: 433080 - DNA, 15 bp, Homo sapiens
aaactgaaatgtttt

SEQ ID NO: 433081 - DNA, 15 bp, Homo sapiens
aaaactgaaatgttt

SEQ ID NO: 433082 - DNA, 15 bp, Homo sapiens
taaaactgaaatgtt

SEQ ID NO: 433083 - DNA, 15 bp, Homo sapiens
gtaaaactgaaatgt

SEQ ID NO: 433084 - DNA, 15 bp, Homo sapiens
ggtaaaactgaaatg

SEQ ID NO: 433085 - DNA, 15 bp, Homo sapiens
tggtaaaactgaaat

SEQ ID NO: 433086 - DNA, 15 bp, Homo sapiens
ctggtaaaactgaaa

SEQ ID NO: 433087 - DNA, 15 bp, Homo sapiens
tctggtaaaactgaa

SEQ ID NO: 433088 - DNA, 15 bp, Homo sapiens
ttctggtaaaactga

SEQ ID NO: 433089 - DNA, 15 bp, Homo sapiens
tttctggtaaaactg

SEQ ID NO: 433090 - DNA, 15 bp, Homo sapiens
ttttctggtaaaact

SEQ ID NO: 433091 - DNA, 15 bp, Homo sapiens
attttctggtaaaac

SEQ ID NO: 433092 - DNA, 15 bp, Homo sapiens
tattttctggtaaaa

SEQ ID NO: 433093 - DNA, 15 bp, Homo sapiens
ctattttctggtaaa

SEQ ID NO: 433094 - DNA, 15 bp, Homo sapiens
actattttctggtaa

SEQ ID NO: 433095 - DNA, 15 bp, Homo sapiens
cactattttctggta

SEQ ID NO: 433096 - DNA, 15 bp, Homo sapiens
tcactattttctggt

SEQ ID NO: 433097 - DNA, 15 bp, Homo sapiens
ctcactattttctgg

SEQ ID NO: 433098 - DNA, 15 bp, Homo sapiens
tctcactattttctg

SEQ ID NO: 433099 - DNA, 15 bp, Homo sapiens
ttctcactattttct

SEQ ID NO: 433100 - DNA, 15 bp, Homo sapiens
cttctcactattttc

SEQ ID NO: 433101 - DNA, 15 bp, Homo sapiens
ccttctcactatttt

SEQ ID NO: 433102 - DNA, 15 bp, Homo sapiens
accttctcactattt

SEQ ID NO: 433103 - DNA, 15 bp, Homo sapiens
caccttctcactatt

SEQ ID NO: 433104 - DNA, 15 bp, Homo sapiens
acaccttctcactat

SEQ ID NO: 433105 - DNA, 15 bp, Homo sapiens
aacaccttctcacta

SEQ ID NO: 433106 - DNA, 15 bp, Homo sapiens
caacaccttctcact

SEQ ID NO: 433107 - DNA, 15 bp, Homo sapiens
tcaacaccttctcac

SEQ ID NO: 433108 - DNA, 15 bp, Homo sapiens
ttcaacaccttctca

SEQ ID NO: 433109 - DNA, 15 bp, Homo sapiens
attcaacaccttctc

SEQ ID NO: 433110 - DNA, 15 bp, Homo sapiens
tattcaacaccttct

SEQ ID NO: 433111 - DNA, 15 bp, Homo sapiens
ttattcaacaccttc

SEQ ID NO: 433112 - DNA, 15 bp, Homo sapiens
attattcaacacctt

SEQ ID NO: 433113 - DNA, 15 bp, Homo sapiens
aattattcaacacct

SEQ ID NO: 433114 - DNA, 15 bp, Homo sapiens
caattattcaacacc

SEQ ID NO: 433115 - DNA, 15 bp, Homo sapiens
acaattattcaacac

SEQ ID NO: 433116 - DNA, 15 bp, Homo sapiens
tacaattattcaaca

SEQ ID NO: 433117 - DNA, 15 bp, Homo sapiens
atacaattattcaac

SEQ ID NO: 433118 - DNA, 15 bp, Homo sapiens
catacaattattcaa

SEQ ID NO: 433119 - DNA, 15 bp, Homo sapiens
gcatacaattattca

SEQ ID NO: 433120 - DNA, 15 bp, Homo sapiens
agcatacaattattc

SEQ ID NO: 433121 - DNA, 15 bp, Homo sapiens
cagcatacaattatt

SEQ ID NO: 433122 - DNA, 15 bp, Homo sapiens
acagcatacaattat

SEQ ID NO: 433123 - DNA, 15 bp, Homo sapiens
tacagcatacaatta

SEQ ID NO: 433124 - DNA, 15 bp, Homo sapiens
ttacagcatacaatt

SEQ ID NO: 433125 - DNA, 15 bp, Homo sapiens
tttacagcatacaat

SEQ ID NO: 433126 - DNA, 15 bp, Homo sapiens
atttacagcatacaa

SEQ ID NO: 433127 - DNA, 15 bp, Homo sapiens
aatttacagcataca

SEQ ID NO: 433128 - DNA, 15 bp, Homo sapiens
taatttacagcatac

SEQ ID NO: 433129 - DNA, 15 bp, Homo sapiens
ttaatttacagcata

SEQ ID NO: 433130 - DNA, 15 bp, Homo sapiens
tttaatttacagcat

SEQ ID NO: 433131 - DNA, 15 bp, Homo sapiens
gtttaatttacagca

SEQ ID NO: 433132 - DNA, 15 bp, Homo sapiens
tgtttaatttacagc

SEQ ID NO: 433133 - DNA, 15 bp, Homo sapiens
ttgtttaatttacag

SEQ ID NO: 433134 - DNA, 15 bp, Homo sapiens
attgtttaatttaca

SEQ ID NO: 433135 - DNA, 15 bp, Homo sapiens
cattgtttaatttac

SEQ ID NO: 433136 - DNA, 15 bp, Homo sapiens
acattgtttaattta

SEQ ID NO: 433137 - DNA, 15 bp, Homo sapiens
cacattgtttaattt

SEQ ID NO: 433138 - DNA, 15 bp, Homo sapiens
tcacattgtttaatt

SEQ ID NO: 433139 - DNA, 15 bp, Homo sapiens
gtcacattgtttaat

SEQ ID NO: 433140 - DNA, 15 bp, Homo sapiens
agtcacattgtttaa

SEQ ID NO: 433141 - DNA, 15 bp, Homo sapiens
cagtcacattgttta

SEQ ID NO: 433142 - DNA, 15 bp, Homo sapiens
tcagtcacattgttt

SEQ ID NO: 433143 - DNA, 15 bp, Homo sapiens
ttcagtcacattgtt

SEQ ID NO: 433144 - DNA, 15 bp, Homo sapiens
tttcagtcacattgt

SEQ ID NO: 433145 - DNA, 15 bp, Homo sapiens
atttcagtcacattg

SEQ ID NO: 433146 - DNA, 15 bp, Homo sapiens
aatttcagtcacatt

SEQ ID NO: 433147 - DNA, 15 bp, Homo sapiens
taatttcagtcacat

SEQ ID NO: 433148 - DNA, 15 bp, Homo sapiens
ataatttcagtcaca

SEQ ID NO: 433149 - DNA, 15 bp, Homo sapiens
tataatttcagtcac

SEQ ID NO: 433150 - DNA, 15 bp, Homo sapiens
gtataatttcagtca

SEQ ID NO: 433151 - DNA, 15 bp, Homo sapiens
agtataatttcagtc

SEQ ID NO: 433152 - DNA, 15 bp, Homo sapiens
tagtataatttcagt

SEQ ID NO: 433153 - DNA, 15 bp, Homo sapiens
atagtataatttcag

SEQ ID NO: 433154 - DNA, 15 bp, Homo sapiens
tatagtataatttca

SEQ ID NO: 433155 - DNA, 15 bp, Homo sapiens
ttatagtataatttc

SEQ ID NO: 433156 - DNA, 15 bp, Homo sapiens
tttatagtataattt

SEQ ID NO: 433157 - DNA, 15 bp, Homo sapiens
ttttatagtataatt

SEQ ID NO: 433158 - DNA, 15 bp, Homo sapiens
gttttatagtataat

SEQ ID NO: 433159 - DNA, 15 bp, Homo sapiens
agttttatagtataa

SEQ ID NO: 433160 - DNA, 15 bp, Homo sapiens
gagttttatagtata

SEQ ID NO: 433161 - DNA, 15 bp, Homo sapiens
agagttttatagtat

SEQ ID NO: 433162 - DNA, 15 bp, Homo sapiens
tagagttttatagta

SEQ ID NO: 433163 - DNA, 15 bp, Homo sapiens
atagagttttatagt

SEQ ID NO: 433164 - DNA, 15 bp, Homo sapiens
catagagttttatag

SEQ ID NO: 433165 - DNA, 15 bp, Homo sapiens
acatagagttttata

SEQ ID NO: 433166 - DNA, 15 bp, Homo sapiens
aacatagagttttat

SEQ ID NO: 433167 - DNA, 15 bp, Homo sapiens
caacatagagtttta

SEQ ID NO: 433168 - DNA, 15 bp, Homo sapiens
acaacatagagtttt

SEQ ID NO: 433169 - DNA, 15 bp, Homo sapiens
cacaacatagagttt

SEQ ID NO: 433170 - DNA, 15 bp, Homo sapiens
acacaacatagagtt

SEQ ID NO: 433171 - DNA, 15 bp, Homo sapiens
aacacaacatagagt

SEQ ID NO: 433172 - DNA, 15 bp, Homo sapiens
caacacaacatagag

SEQ ID NO: 433173 - DNA, 15 bp, Homo sapiens
ccaacacaacataga

SEQ ID NO: 433174 - DNA, 15 bp, Homo sapiens
accaacacaacatag

SEQ ID NO: 433175 - DNA, 15 bp, Homo sapiens
aaccaacacaacata

SEQ ID NO: 433176 - DNA, 15 bp, Homo sapiens
aaaccaacacaacat

SEQ ID NO: 433177 - DNA, 15 bp, Homo sapiens
caaaccaacacaaca

SEQ ID NO: 433178 - DNA, 15 bp, Homo sapiens
ccaaaccaacacaac

SEQ ID NO: 433179 - DNA, 15 bp, Homo sapiens
accaaaccaacacaa

SEQ ID NO: 433180 - DNA, 15 bp, Homo sapiens
aaccaaaccaacaca

SEQ ID NO: 433181 - DNA, 15 bp, Homo sapiens
aaaccaaaccaacac

SEQ ID NO: 433182 - DNA, 15 bp, Homo sapiens
aaaaccaaaccaaca

SEQ ID NO: 433183 - DNA, 15 bp, Homo sapiens
aaaaaccaaaccaac

SEQ ID NO: 433184 - DNA, 15 bp, Homo sapiens
gaaaaaccaaaccaa

SEQ ID NO: 433185 - DNA, 15 bp, Homo sapiens
ggaaaaaccaaacca

SEQ ID NO: 433186 - DNA, 15 bp, Homo sapiens
gggaaaaaccaaacc

SEQ ID NO: 433187 - DNA, 15 bp, Homo sapiens
agggaaaaaccaaac

SEQ ID NO: 433188 - DNA, 15 bp, Homo sapiens
cagggaaaaaccaaa

SEQ ID NO: 433189 - DNA, 15 bp, Homo sapiens
gcagggaaaaaccaa

SEQ ID NO: 433190 - DNA, 15 bp, Homo sapiens
agcagggaaaaacca

SEQ ID NO: 433191 - DNA, 15 bp, Homo sapiens
gagcagggaaaaacc

SEQ ID NO: 433192 - DNA, 15 bp, Homo sapiens
ggagcagggaaaaac

SEQ ID NO: 433193 - DNA, 15 bp, Homo sapiens
aggagcagggaaaaa

SEQ ID NO: 433194 - DNA, 15 bp, Homo sapiens
aaggagcagggaaaa

SEQ ID NO: 433195 - DNA, 15 bp, Homo sapiens
taaggagcagggaaa

SEQ ID NO: 433196 - DNA, 15 bp, Homo sapiens
ttaaggagcagggaa

SEQ ID NO: 433197 - DNA, 15 bp, Homo sapiens
attaaggagcaggga

SEQ ID NO: 433198 - DNA, 15 bp, Homo sapiens
tattaaggagcaggg

SEQ ID NO: 433199 - DNA, 15 bp, Homo sapiens
atattaaggagcagg

SEQ ID NO: 433200 - DNA, 15 bp, Homo sapiens
gatattaaggagcag

SEQ ID NO: 433201 - DNA, 15 bp, Homo sapiens
tgatattaaggagca

SEQ ID NO: 433202 - DNA, 15 bp, Homo sapiens
ctgatattaaggagc

SEQ ID NO: 433203 - DNA, 15 bp, Homo sapiens
tctgatattaaggag

SEQ ID NO: 433204 - DNA, 15 bp, Homo sapiens
atctgatattaagga

SEQ ID NO: 433205 - DNA, 15 bp, Homo sapiens
tatctgatattaagg

SEQ ID NO: 433206 - DNA, 15 bp, Homo sapiens
gtatctgatattaag

SEQ ID NO: 433207 - DNA, 15 bp, Homo sapiens
ggtatctgatattaa

SEQ ID NO: 433208 - DNA, 15 bp, Homo sapiens
aggtatctgatatta

SEQ ID NO: 433209 - DNA, 15 bp, Homo sapiens
aaggtatctgatatt

SEQ ID NO: 433210 - DNA, 15 bp, Homo sapiens
caaggtatctgatat

SEQ ID NO: 433211 - DNA, 15 bp, Homo sapiens
ccaaggtatctgata

SEQ ID NO: 433212 - DNA, 15 bp, Homo sapiens
accaaggtatctgat

SEQ ID NO: 433213 - DNA, 15 bp, Homo sapiens
taccaaggtatctga

SEQ ID NO: 433214 - DNA, 15 bp, Homo sapiens
ctaccaaggtatctg

SEQ ID NO: 433215 - DNA, 15 bp, Homo sapiens
tctaccaaggtatct

SEQ ID NO: 433216 - DNA, 15 bp, Homo sapiens
ttctaccaaggtatc

SEQ ID NO: 433217 - DNA, 15 bp, Homo sapiens
gttctaccaaggtat

SEQ ID NO: 433218 - DNA, 15 bp, Homo sapiens
tgttctaccaaggta

SEQ ID NO: 433219 - DNA, 15 bp, Homo sapiens
gtgttctaccaaggt

SEQ ID NO: 433220 - DNA, 15 bp, Homo sapiens
ggtgttctaccaagg

SEQ ID NO: 433221 - DNA, 15 bp, Homo sapiens
aggtgttctaccaag

SEQ ID NO: 433222 - DNA, 15 bp, Homo sapiens
taggtgttctaccaa

SEQ ID NO: 433223 - DNA, 15 bp, Homo sapiens
ttaggtgttctacca

SEQ ID NO: 433224 - DNA, 15 bp, Homo sapiens
cttaggtgttctacc

SEQ ID NO: 433225 - DNA, 15 bp, Homo sapiens
tcttaggtgttctac

SEQ ID NO: 433226 - DNA, 15 bp, Homo sapiens
ctcttaggtgttcta

SEQ ID NO: 433227 - DNA, 15 bp, Homo sapiens
actcttaggtgttct

SEQ ID NO: 433228 - DNA, 15 bp, Homo sapiens
tactcttaggtgttc

SEQ ID NO: 433229 - DNA, 15 bp, Homo sapiens
ctactcttaggtgtt

SEQ ID NO: 433230 - DNA, 15 bp, Homo sapiens
tctactcttaggtgt

SEQ ID NO: 433231 - DNA, 15 bp, Homo sapiens
ttctactcttaggtg

SEQ ID NO: 433232 - DNA, 15 bp, Homo sapiens
attctactcttaggt

SEQ ID NO: 433233 - DNA, 15 bp, Homo sapiens
cattctactcttagg

SEQ ID NO: 433234 - DNA, 15 bp, Homo sapiens
acattctactcttag

SEQ ID NO: 433235 - DNA, 15 bp, Homo sapiens
cacattctactctta

SEQ ID NO: 433236 - DNA, 15 bp, Homo sapiens
ccacattctactctt

SEQ ID NO: 433237 - DNA, 15 bp, Homo sapiens
accacattctactct

SEQ ID NO: 433238 - DNA, 15 bp, Homo sapiens
taccacattctactc

SEQ ID NO: 433239 - DNA, 15 bp, Homo sapiens
ttaccacattctact

SEQ ID NO: 433240 - DNA, 15 bp, Homo sapiens
cttaccacattctac

SEQ ID NO: 433241 - DNA, 15 bp, Homo sapiens
tcttaccacattcta

SEQ ID NO: 433242 - DNA, 15 bp, Homo sapiens
gtcttaccacattct

SEQ ID NO: 433243 - DNA, 15 bp, Homo sapiens
ggtcttaccacattc

SEQ ID NO: 433244 - DNA, 15 bp, Homo sapiens
tggtcttaccacatt

SEQ ID NO: 433245 - DNA, 15 bp, Homo sapiens
gtggtcttaccacat

SEQ ID NO: 433246 - DNA, 15 bp, Homo sapiens
ggtggtcttaccaca

SEQ ID NO: 433247 - DNA, 15 bp, Homo sapiens
tggtggtcttaccac

SEQ ID NO: 433248 - DNA, 15 bp, Homo sapiens
ctggtggtcttacca

SEQ ID NO: 433249 - DNA, 15 bp, Homo sapiens
tctggtggtcttacc

SEQ ID NO: 433250 - DNA, 15 bp, Homo sapiens
ttctggtggtcttac

SEQ ID NO: 433251 - DNA, 15 bp, Homo sapiens
attctggtggtctta

SEQ ID NO: 433252 - DNA, 15 bp, Homo sapiens
gattctggtggtctt

SEQ ID NO: 433253 - DNA, 15 bp, Homo sapiens
agattctggtggtct

SEQ ID NO: 433254 - DNA, 15 bp, Homo sapiens
tagattctggtggtc

SEQ ID NO: 433255 - DNA, 15 bp, Homo sapiens
ctagattctggtggt

SEQ ID NO: 433256 - DNA, 15 bp, Homo sapiens
actagattctggtgg

SEQ ID NO: 433257 - DNA, 15 bp, Homo sapiens
aactagattctggtg

SEQ ID NO: 433258 - DNA, 15 bp, Homo sapiens
caactagattctggt

SEQ ID NO: 433259 - DNA, 15 bp, Homo sapiens
acaactagattctgg

SEQ ID NO: 433260 - DNA, 15 bp, Homo sapiens
cacaactagattctg

SEQ ID NO: 433261 - DNA, 15 bp, Homo sapiens
ccacaactagattct

SEQ ID NO: 433262 - DNA, 15 bp, Homo sapiens
accacaactagattc

SEQ ID NO: 433263 - DNA, 15 bp, Homo sapiens
aaccacaactagatt

SEQ ID NO: 433264 - DNA, 15 bp, Homo sapiens
caaccacaactagat

SEQ ID NO: 433265 - DNA, 15 bp, Homo sapiens
acaaccacaactaga

SEQ ID NO: 433266 - DNA, 15 bp, Homo sapiens
tacaaccacaactag

SEQ ID NO: 433267 - DNA, 15 bp, Homo sapiens
ctacaaccacaacta

SEQ ID NO: 433268 - DNA, 15 bp, Homo sapiens
tctacaaccacaact

SEQ ID NO: 433269 - DNA, 15 bp, Homo sapiens
ctctacaaccacaac

SEQ ID NO: 433270 - DNA, 15 bp, Homo sapiens
gctctacaaccacaa

SEQ ID NO: 433271 - DNA, 15 bp, Homo sapiens
agctctacaaccaca

SEQ ID NO: 433272 - DNA, 15 bp, Homo sapiens
cagctctacaaccac

SEQ ID NO: 433273 - DNA, 15 bp, Homo sapiens
tcagctctacaacca

SEQ ID NO: 433274 - DNA, 15 bp, Homo sapiens
gtcagctctacaacc

SEQ ID NO: 433275 - DNA, 15 bp, Homo sapiens
cgtcagctctacaac

SEQ ID NO: 433276 - DNA, 15 bp, Homo sapiens
tcgtcagctctacaa

SEQ ID NO: 433277 - DNA, 15 bp, Homo sapiens
ttcgtcagctctaca

SEQ ID NO: 433278 - DNA, 15 bp, Homo sapiens
tttcgtcagctctac

SEQ ID NO: 433279 - DNA, 15 bp, Homo sapiens
ttttcgtcagctcta

SEQ ID NO: 433280 - DNA, 15 bp, Homo sapiens
attttcgtcagctct

SEQ ID NO: 433281 - DNA, 15 bp, Homo sapiens
gattttcgtcagctc

SEQ ID NO: 433282 - DNA, 15 bp, Homo sapiens
agattttcgtcagct

SEQ ID NO: 433283 - DNA, 15 bp, Homo sapiens
gagattttcgtcagc

SEQ ID NO: 433284 - DNA, 15 bp, Homo sapiens
tgagattttcgtcag

SEQ ID NO: 433285 - DNA, 15 bp, Homo sapiens
ttgagattttcgtca

SEQ ID NO: 433286 - DNA, 15 bp, Homo sapiens
attgagattttcgtc

SEQ ID NO: 433287 - DNA, 15 bp, Homo sapiens
cattgagattttcgt

SEQ ID NO: 433288 - DNA, 15 bp, Homo sapiens
acattgagattttcg

SEQ ID NO: 433289 - DNA, 15 bp, Homo sapiens
gacattgagattttc

SEQ ID NO: 433290 - DNA, 15 bp, Homo sapiens
agacattgagatttt

SEQ ID NO: 433291 - DNA, 15 bp, Homo sapiens
cagacattgagattt

SEQ ID NO: 433292 - DNA, 15 bp, Homo sapiens
gcagacattgagatt

SEQ ID NO: 433293 - DNA, 15 bp, Homo sapiens
tgcagacattgagat

SEQ ID NO: 433294 - DNA, 15 bp, Homo sapiens
atgcagacattgaga

SEQ ID NO: 433295 - DNA, 15 bp, Homo sapiens
gatgcagacattgag

SEQ ID NO: 433296 - DNA, 15 bp, Homo sapiens
agatgcagacattga

SEQ ID NO: 433297 - DNA, 15 bp, Homo sapiens
tagatgcagacattg

SEQ ID NO: 433298 - DNA, 15 bp, Homo sapiens
atagatgcagacatt

SEQ ID NO: 433299 - DNA, 15 bp, Homo sapiens
tatagatgcagacat

SEQ ID NO: 433300 - DNA, 15 bp, Homo sapiens
ttatagatgcagaca

SEQ ID NO: 433301 - DNA, 15 bp, Homo sapiens
tttatagatgcagac

SEQ ID NO: 433302 - DNA, 15 bp, Homo sapiens
ttttatagatgcaga

SEQ ID NO: 433303 - DNA, 15 bp, Homo sapiens
attttatagatgcag

SEQ ID NO: 433304 - DNA, 15 bp, Homo sapiens
cattttatagatgca

SEQ ID NO: 433305 - DNA, 15 bp, Homo sapiens
ccattttatagatgc

SEQ ID NO: 433306 - DNA, 15 bp, Homo sapiens
tccattttatagatg

SEQ ID NO: 433307 - DNA, 15 bp, Homo sapiens
ttccattttatagat

SEQ ID NO: 433308 - DNA, 15 bp, Homo sapiens
tttccattttataga

SEQ ID NO: 433309 - DNA, 15 bp, Homo sapiens
atttccattttatag

SEQ ID NO: 433310 - DNA, 15 bp, Homo sapiens
aatttccattttata

SEQ ID NO: 433311 - DNA, 15 bp, Homo sapiens
caatttccattttat

SEQ ID NO: 433312 - DNA, 15 bp, Homo sapiens
acaatttccatttta

SEQ ID NO: 433313 - DNA, 15 bp, Homo sapiens
aacaatttccatttt

SEQ ID NO: 433314 - DNA, 15 bp, Homo sapiens
taacaatttccattt

SEQ ID NO: 433315 - DNA, 15 bp, Homo sapiens
ataacaatttccatt

SEQ ID NO: 433316 - DNA, 15 bp, Homo sapiens
tataacaatttccat

SEQ ID NO: 433317 - DNA, 15 bp, Homo sapiens
ctataacaatttcca

SEQ ID NO: 433318 - DNA, 15 bp, Homo sapiens
cctataacaatttcc

SEQ ID NO: 433319 - DNA, 15 bp, Homo sapiens
ccctataacaatttc

SEQ ID NO: 433320 - DNA, 15 bp, Homo sapiens
accctataacaattt

SEQ ID NO: 433321 - DNA, 15 bp, Homo sapiens
aaccctataacaatt

SEQ ID NO: 433322 - DNA, 15 bp, Homo sapiens
caaccctataacaat

SEQ ID NO: 433323 - DNA, 15 bp, Homo sapiens
acaaccctataacaa

SEQ ID NO: 433324 - DNA, 15 bp, Homo sapiens
tacaaccctataaca

SEQ ID NO: 433325 - DNA, 15 bp, Homo sapiens
ttacaaccctataac

SEQ ID NO: 433326 - DNA, 15 bp, Homo sapiens
tttacaaccctataa

SEQ ID NO: 433327 - DNA, 15 bp, Homo sapiens
ttttacaaccctata

SEQ ID NO: 433328 - DNA, 15 bp, Homo sapiens
tttttacaaccctat

SEQ ID NO: 433329 - DNA, 15 bp, Homo sapiens
ctttttacaacccta

SEQ ID NO: 433330 - DNA, 15 bp, Homo sapiens
actttttacaaccct

SEQ ID NO: 433331 - DNA, 15 bp, Homo sapiens
tactttttacaaccc

SEQ ID NO: 433332 - DNA, 15 bp, Homo sapiens
gtactttttacaacc

SEQ ID NO: 433333 - DNA, 15 bp, Homo sapiens
tgtactttttacaac

SEQ ID NO: 433334 - DNA, 15 bp, Homo sapiens
gtgtactttttacaa

SEQ ID NO: 433335 - DNA, 15 bp, Homo sapiens
tgtgtactttttaca

SEQ ID NO: 433336 - DNA, 15 bp, Homo sapiens
ttgtgtactttttac

SEQ ID NO: 433337 - DNA, 15 bp, Homo sapiens
cttgtgtacttttta

SEQ ID NO: 433338 - DNA, 15 bp, Homo sapiens
acttgtgtacttttt

SEQ ID NO: 433339 - DNA, 15 bp, Homo sapiens
aacttgtgtactttt

SEQ ID NO: 433340 - DNA, 15 bp, Homo sapiens
taacttgtgtacttt

SEQ ID NO: 433341 - DNA, 15 bp, Homo sapiens
ttaacttgtgtactt

SEQ ID NO: 433342 - DNA, 15 bp, Homo sapiens
cttaacttgtgtact

SEQ ID NO: 433343 - DNA, 15 bp, Homo sapiens
acttaacttgtgtac

SEQ ID NO: 433344 - DNA, 15 bp, Homo sapiens
gacttaacttgtgta

SEQ ID NO: 433345 - DNA, 15 bp, Homo sapiens
ggacttaacttgtgt

SEQ ID NO: 433346 - DNA, 15 bp, Homo sapiens
aggacttaacttgtg

SEQ ID NO: 433347 - DNA, 15 bp, Homo sapiens
caggacttaacttgt

SEQ ID NO: 433348 - DNA, 15 bp, Homo sapiens
acaggacttaacttg

SEQ ID NO: 433349 - DNA, 15 bp, Homo sapiens
aacaggacttaactt

SEQ ID NO: 433350 - DNA, 15 bp, Homo sapiens
taacaggacttaact

SEQ ID NO: 433351 - DNA, 15 bp, Homo sapiens
ttaacaggacttaac

SEQ ID NO: 433352 - DNA, 15 bp, Homo sapiens
cttaacaggacttaa

SEQ ID NO: 433353 - DNA, 15 bp, Homo sapiens
gcttaacaggactta

SEQ ID NO: 433354 - DNA, 15 bp, Homo sapiens
tgcttaacaggactt

SEQ ID NO: 433355 - DNA, 15 bp, Homo sapiens
atgcttaacaggact

SEQ ID NO: 433356 - DNA, 15 bp, Homo sapiens
aatgcttaacaggac

SEQ ID NO: 433357 - DNA, 15 bp, Homo sapiens
aaatgcttaacagga

SEQ ID NO: 433358 - DNA, 15 bp, Homo sapiens
caaatgcttaacagg

SEQ ID NO: 433359 - DNA, 15 bp, Homo sapiens
gcaaatgcttaacag

SEQ ID NO: 433360 - DNA, 15 bp, Homo sapiens
cgcaaatgcttaaca

SEQ ID NO: 433361 - DNA, 15 bp, Homo sapiens
acgcaaatgcttaac

SEQ ID NO: 433362 - DNA, 15 bp, Homo sapiens
gacgcaaatgcttaa

SEQ ID NO: 433363 - DNA, 15 bp, Homo sapiens
agacgcaaatgctta

SEQ ID NO: 433364 - DNA, 15 bp, Homo sapiens
cagacgcaaatgctt

SEQ ID NO: 433365 - DNA, 15 bp, Homo sapiens
gcagacgcaaatgct

SEQ ID NO: 433366 - DNA, 15 bp, Homo sapiens
agcagacgcaaatgc

SEQ ID NO: 433367 - DNA, 15 bp, Homo sapiens
cagcagacgcaaatg

SEQ ID NO: 433368 - DNA, 15 bp, Homo sapiens
acagcagacgcaaat

SEQ ID NO: 433369 - DNA, 15 bp, Homo sapiens
tacagcagacgcaaa

SEQ ID NO: 433370 - DNA, 15 bp, Homo sapiens
atacagcagacgcaa

SEQ ID NO: 433371 - DNA, 15 bp, Homo sapiens
aatacagcagacgca

SEQ ID NO: 433372 - DNA, 15 bp, Homo sapiens
caatacagcagacgc

SEQ ID NO: 433373 - DNA, 15 bp, Homo sapiens
gcaatacagcagacg

SEQ ID NO: 433374 - DNA, 15 bp, Homo sapiens
tgcaatacagcagac

SEQ ID NO: 433375 - DNA, 15 bp, Homo sapiens
ttgcaatacagcaga

SEQ ID NO: 433376 - DNA, 15 bp, Homo sapiens
tttgcaatacagcag

SEQ ID NO: 433377 - DNA, 15 bp, Homo sapiens
gtttgcaatacagca

SEQ ID NO: 433378 - DNA, 15 bp, Homo sapiens
tgtttgcaatacagc

SEQ ID NO: 433379 - DNA, 15 bp, Homo sapiens
gtgtttgcaatacag

SEQ ID NO: 433380 - DNA, 15 bp, Homo sapiens
agtgtttgcaataca

SEQ ID NO: 433381 - DNA, 15 bp, Homo sapiens
gagtgtttgcaatac

SEQ ID NO: 433382 - DNA, 15 bp, Homo sapiens
tgagtgtttgcaata

SEQ ID NO: 433383 - DNA, 15 bp, Homo sapiens
ttgagtgtttgcaat

SEQ ID NO: 433384 - DNA, 15 bp, Homo sapiens
attgagtgtttgcaa

SEQ ID NO: 433385 - DNA, 15 bp, Homo sapiens
tattgagtgtttgca

SEQ ID NO: 433386 - DNA, 15 bp, Homo sapiens
ttattgagtgtttgc

SEQ ID NO: 433387 - DNA, 15 bp, Homo sapiens
tttattgagtgtttg

SEQ ID NO: 433388 - DNA, 15 bp, Homo sapiens
atttattgagtgttt

SEQ ID NO: 433389 - DNA, 15 bp, Homo sapiens
tatttattgagtgtt

SEQ ID NO: 433390 - DNA, 15 bp, Homo sapiens
ctatttattgagtgt

SEQ ID NO: 433391 - DNA, 15 bp, Homo sapiens
tctatttattgagtg

SEQ ID NO: 433392 - DNA, 15 bp, Homo sapiens
ttctatttattgagt

SEQ ID NO: 433393 - DNA, 15 bp, Homo sapiens
tttctatttattgag

SEQ ID NO: 433394 - DNA, 15 bp, Homo sapiens
gtttctatttattga

SEQ ID NO: 433395 - DNA, 15 bp, Homo sapiens
agtttctatttattg

SEQ ID NO: 433396 - DNA, 15 bp, Homo sapiens
cagtttctatttatt

SEQ ID NO: 433397 - DNA, 15 bp, Homo sapiens
ccagtttctatttat

SEQ ID NO: 433398 - DNA, 15 bp, Homo sapiens
gccagtttctattta

SEQ ID NO: 433399 - DNA, 15 bp, Homo sapiens
tgccagtttctattt

SEQ ID NO: 433400 - DNA, 15 bp, Homo sapiens
atgccagtttctatt

SEQ ID NO: 433401 - DNA, 15 bp, Homo sapiens
gatgccagtttctat

SEQ ID NO: 433402 - DNA, 15 bp, Homo sapiens
tgatgccagtttcta

SEQ ID NO: 433403 - DNA, 15 bp, Homo sapiens
atgatgccagtttct

SEQ ID NO: 433404 - DNA, 15 bp, Homo sapiens
gatgatgccagtttc

SEQ ID NO: 433405 - DNA, 15 bp, Homo sapiens
agatgatgccagttt

SEQ ID NO: 433406 - DNA, 15 bp, Homo sapiens
aagatgatgccagtt

SEQ ID NO: 433407 - DNA, 15 bp, Homo sapiens
gaagatgatgccagt

SEQ ID NO: 433408 - DNA, 15 bp, Homo sapiens
cgaagatgatgccag

SEQ ID NO: 433409 - DNA, 15 bp, Homo sapiens
acgaagatgatgcca

SEQ ID NO: 433410 - DNA, 15 bp, Homo sapiens
gacgaagatgatgcc

SEQ ID NO: 433411 - DNA, 15 bp, Homo sapiens
tgacgaagatgatgc

SEQ ID NO: 433412 - DNA, 15 bp, Homo sapiens
atgacgaagatgatg

SEQ ID NO: 433413 - DNA, 15 bp, Homo sapiens
gatgacgaagatgat

SEQ ID NO: 433414 - DNA, 15 bp, Homo sapiens
cgatgacgaagatga

SEQ ID NO: 433415 - DNA, 15 bp, Homo sapiens
acgatgacgaagatg

SEQ ID NO: 433416 - DNA, 15 bp, Homo sapiens
aacgatgacgaagat

SEQ ID NO: 433417 - DNA, 15 bp, Homo sapiens
caacgatgacgaaga

SEQ ID NO: 433418 - DNA, 15 bp, Homo sapiens
acaacgatgacgaag

SEQ ID NO: 433419 - DNA, 15 bp, Homo sapiens
tacaacgatgacgaa

SEQ ID NO: 433420 - DNA, 15 bp, Homo sapiens
ttacaacgatgacga

SEQ ID NO: 433421 - DNA, 15 bp, Homo sapiens
tttacaacgatgacg

SEQ ID NO: 433422 - DNA, 15 bp, Homo sapiens
ttttacaacgatgac

SEQ ID NO: 433423 - DNA, 15 bp, Homo sapiens
tttttacaacgatga

SEQ ID NO: 433424 - DNA, 15 bp, Homo sapiens
ctttttacaacgatg

SEQ ID NO: 433425 - DNA, 15 bp, Homo sapiens
gctttttacaacgat

SEQ ID NO: 433426 - DNA, 15 bp, Homo sapiens
agctttttacaacga

SEQ ID NO: 433427 - DNA, 15 bp, Homo sapiens
cagctttttacaacg

SEQ ID NO: 433428 - DNA, 15 bp, Homo sapiens
tcagctttttacaac

SEQ ID NO: 433429 - DNA, 15 bp, Homo sapiens
ttcagctttttacaa

SEQ ID NO: 433430 - DNA, 15 bp, Homo sapiens
attcagctttttaca

SEQ ID NO: 433431 - DNA, 15 bp, Homo sapiens
aattcagctttttac

SEQ ID NO: 433432 - DNA, 15 bp, Homo sapiens
caattcagcttttta

SEQ ID NO: 433433 - DNA, 15 bp, Homo sapiens
gcaattcagcttttt

SEQ ID NO: 433434 - DNA, 15 bp, Homo sapiens
tgcaattcagctttt

SEQ ID NO: 433435 - DNA, 15 bp, Homo sapiens
ctgcaattcagcttt

SEQ ID NO: 433436 - DNA, 15 bp, Homo sapiens
tctgcaattcagctt

SEQ ID NO: 433437 - DNA, 15 bp, Homo sapiens
ttctgcaattcagct

SEQ ID NO: 433438 - DNA, 15 bp, Homo sapiens
tttctgcaattcagc

SEQ ID NO: 433439 - DNA, 15 bp, Homo sapiens
ttttctgcaattcag

SEQ ID NO: 433440 - DNA, 15 bp, Homo sapiens
attttctgcaattca

SEQ ID NO: 433441 - DNA, 15 bp, Homo sapiens
cattttctgcaattc

SEQ ID NO: 433442 - DNA, 15 bp, Homo sapiens
ccattttctgcaatt

SEQ ID NO: 433443 - DNA, 15 bp, Homo sapiens
tccattttctgcaat

SEQ ID NO: 433444 - DNA, 15 bp, Homo sapiens
atccattttctgcaa

SEQ ID NO: 433445 - DNA, 15 bp, Homo sapiens
aatccattttctgca

SEQ ID NO: 433446 - DNA, 15 bp, Homo sapiens
taatccattttctgc

SEQ ID NO: 433447 - DNA, 15 bp, Homo sapiens
ctaatccattttctg

SEQ ID NO: 433448 - DNA, 15 bp, Homo sapiens
tctaatccattttct

SEQ ID NO: 433449 - DNA, 15 bp, Homo sapiens
ttctaatccattttc

SEQ ID NO: 433450 - DNA, 15 bp, Homo sapiens
attctaatccatttt

SEQ ID NO: 433451 - DNA, 15 bp, Homo sapiens
cattctaatccattt

SEQ ID NO: 433452 - DNA, 15 bp, Homo sapiens
gcattctaatccatt

SEQ ID NO: 433453 - DNA, 15 bp, Homo sapiens
ggcattctaatccat

SEQ ID NO: 433454 - DNA, 15 bp, Homo sapiens
cggcattctaatcca

SEQ ID NO: 433455 - DNA, 15 bp, Homo sapiens
tcggcattctaatcc

SEQ ID NO: 433456 - DNA, 15 bp, Homo sapiens
ctcggcattctaatc

SEQ ID NO: 433457 - DNA, 15 bp, Homo sapiens
tctcggcattctaat

SEQ ID NO: 433458 - DNA, 15 bp, Homo sapiens
ctctcggcattctaa

SEQ ID NO: 433459 - DNA, 15 bp, Homo sapiens
actctcggcattcta

SEQ ID NO: 433460 - DNA, 15 bp, Homo sapiens
aactctcggcattct

SEQ ID NO: 433461 - DNA, 15 bp, Homo sapiens
gaactctcggcattc

SEQ ID NO: 433462 - DNA, 15 bp, Homo sapiens
tgaactctcggcatt

SEQ ID NO: 433463 - DNA, 15 bp, Homo sapiens
atgaactctcggcat

SEQ ID NO: 433464 - DNA, 15 bp, Homo sapiens
aatgaactctcggca

SEQ ID NO: 433465 - DNA, 15 bp, Homo sapiens
aaatgaactctcggc

SEQ ID NO: 433466 - DNA, 15 bp, Homo sapiens
aaaatgaactctcgg

SEQ ID NO: 433467 - DNA, 15 bp, Homo sapiens
taaaatgaactctcg

SEQ ID NO: 433468 - DNA, 15 bp, Homo sapiens
ttaaaatgaactctc

SEQ ID NO: 433469 - DNA, 15 bp, Homo sapiens
gttaaaatgaactct

SEQ ID NO: 433470 - DNA, 15 bp, Homo sapiens
tgttaaaatgaactc

SEQ ID NO: 433471 - DNA, 15 bp, Homo sapiens
atgttaaaatgaact

SEQ ID NO: 433472 - DNA, 15 bp, Homo sapiens
gatgttaaaatgaac

SEQ ID NO: 433473 - DNA, 15 bp, Homo sapiens
agatgttaaaatgaa

SEQ ID NO: 433474 - DNA, 15 bp, Homo sapiens
cagatgttaaaatga

SEQ ID NO: 433475 - DNA, 15 bp, Homo sapiens
ccagatgttaaaatg

SEQ ID NO: 433476 - DNA, 15 bp, Homo sapiens
tccagatgttaaaat

SEQ ID NO: 433477 - DNA, 15 bp, Homo sapiens
gtccagatgttaaaa

SEQ ID NO: 433478 - DNA, 15 bp, Homo sapiens
agtccagatgttaaa

SEQ ID NO: 433479 - DNA, 15 bp, Homo sapiens
aagtccagatgttaa

SEQ ID NO: 433480 - DNA, 15 bp, Homo sapiens
taagtccagatgtta

SEQ ID NO: 433481 - DNA, 15 bp, Homo sapiens
ttaagtccagatgtt

SEQ ID NO: 433482 - DNA, 15 bp, Homo sapiens
cttaagtccagatgt

SEQ ID NO: 433483 - DNA, 15 bp, Homo sapiens
tcttaagtccagatg

SEQ ID NO: 433484 - DNA, 15 bp, Homo sapiens
ttcttaagtccagat

SEQ ID NO: 433485 - DNA, 15 bp, Homo sapiens
gttcttaagtccaga

SEQ ID NO: 433486 - DNA, 15 bp, Homo sapiens
tgttcttaagtccag

SEQ ID NO: 433487 - DNA, 15 bp, Homo sapiens
ctgttcttaagtcca

SEQ ID NO: 433488 - DNA, 15 bp, Homo sapiens
actgttcttaagtcc

SEQ ID NO: 433489 - DNA, 15 bp, Homo sapiens
aactgttcttaagtc

SEQ ID NO: 433490 - DNA, 15 bp, Homo sapiens
caactgttcttaagt

SEQ ID NO: 433491 - DNA, 15 bp, Homo sapiens
acaactgttcttaag

SEQ ID NO: 433492 - DNA, 15 bp, Homo sapiens
gacaactgttcttaa

SEQ ID NO: 433493 - DNA, 15 bp, Homo sapiens
agacaactgttctta

SEQ ID NO: 433494 - DNA, 15 bp, Homo sapiens
cagacaactgttctt

SEQ ID NO: 433495 - DNA, 15 bp, Homo sapiens
tcagacaactgttct

SEQ ID NO: 433496 - DNA, 15 bp, Homo sapiens
atcagacaactgttc

SEQ ID NO: 433497 - DNA, 15 bp, Homo sapiens
aatcagacaactgtt

SEQ ID NO: 433498 - DNA, 15 bp, Homo sapiens
gaatcagacaactgt

SEQ ID NO: 433499 - DNA, 15 bp, Homo sapiens
agaatcagacaactg

SEQ ID NO: 433500 - DNA, 15 bp, Homo sapiens
cagaatcagacaact

SEQ ID NO: 433501 - DNA, 15 bp, Homo sapiens
gcagaatcagacaac

SEQ ID NO: 433502 - DNA, 15 bp, Homo sapiens
agcagaatcagacaa

SEQ ID NO: 433503 - DNA, 15 bp, Homo sapiens
aagcagaatcagaca

SEQ ID NO: 433504 - DNA, 15 bp, Homo sapiens
taagcagaatcagac

SEQ ID NO: 433505 - DNA, 15 bp, Homo sapiens
ttaagcagaatcaga

SEQ ID NO: 433506 - DNA, 15 bp, Homo sapiens
attaagcagaatcag

SEQ ID NO: 433507 - DNA, 15 bp, Homo sapiens
gattaagcagaatca

SEQ ID NO: 433508 - DNA, 15 bp, Homo sapiens
agattaagcagaatc

SEQ ID NO: 433509 - DNA, 15 bp, Homo sapiens
tagattaagcagaat

SEQ ID NO: 433510 - DNA, 15 bp, Homo sapiens
atagattaagcagaa

SEQ ID NO: 433511 - DNA, 15 bp, Homo sapiens
tatagattaagcaga

SEQ ID NO: 433512 - DNA, 15 bp, Homo sapiens
atatagattaagcag

SEQ ID NO: 433513 - DNA, 15 bp, Homo sapiens
aatatagattaagca

SEQ ID NO: 433514 - DNA, 15 bp, Homo sapiens
caatatagattaagc

SEQ ID NO: 433515 - DNA, 15 bp, Homo sapiens
gcaatatagattaag

SEQ ID NO: 433516 - DNA, 15 bp, Homo sapiens
agcaatatagattaa

SEQ ID NO: 433517 - DNA, 15 bp, Homo sapiens
aagcaatatagatta

SEQ ID NO: 433518 - DNA, 15 bp, Homo sapiens
taagcaatatagatt

SEQ ID NO: 433519 - DNA, 15 bp, Homo sapiens
gtaagcaatatagat

SEQ ID NO: 433520 - DNA, 15 bp, Homo sapiens
cgtaagcaatataga

SEQ ID NO: 433521 - DNA, 15 bp, Homo sapiens
tcgtaagcaatatag

SEQ ID NO: 433522 - DNA, 15 bp, Homo sapiens
atcgtaagcaatata

SEQ ID NO: 433523 - DNA, 15 bp, Homo sapiens
tatcgtaagcaatat

SEQ ID NO: 433524 - DNA, 15 bp, Homo sapiens
ttatcgtaagcaata

SEQ ID NO: 433525 - DNA, 15 bp, Homo sapiens
attatcgtaagcaat

SEQ ID NO: 433526 - DNA, 15 bp, Homo sapiens
tattatcgtaagcaa

SEQ ID NO: 433527 - DNA, 15 bp, Homo sapiens
ctattatcgtaagca

SEQ ID NO: 433528 - DNA, 15 bp, Homo sapiens
tctattatcgtaagc

SEQ ID NO: 433529 - DNA, 15 bp, Homo sapiens
ctctattatcgtaag

SEQ ID NO: 433530 - DNA, 15 bp, Homo sapiens
gctctattatcgtaa

SEQ ID NO: 433531 - DNA, 15 bp, Homo sapiens
agctctattatcgta

SEQ ID NO: 433532 - DNA, 15 bp, Homo sapiens
gagctctattatcgt

SEQ ID NO: 433533 - DNA, 15 bp, Homo sapiens
ggagctctattatcg

SEQ ID NO: 433534 - DNA, 15 bp, Homo sapiens
aggagctctattatc

SEQ ID NO: 433535 - DNA, 15 bp, Homo sapiens
aaggagctctattat

SEQ ID NO: 433536 - DNA, 15 bp, Homo sapiens
aaaggagctctatta

SEQ ID NO: 433537 - DNA, 15 bp, Homo sapiens
taaaggagctctatt

SEQ ID NO: 433538 - DNA, 15 bp, Homo sapiens
ttaaaggagctctat

SEQ ID NO: 433539 - DNA, 15 bp, Homo sapiens
cttaaaggagctcta

SEQ ID NO: 433540 - DNA, 15 bp, Homo sapiens
tcttaaaggagctct

SEQ ID NO: 433541 - DNA, 15 bp, Homo sapiens
ctcttaaaggagctc

SEQ ID NO: 433542 - DNA, 15 bp, Homo sapiens
tctcttaaaggagct

SEQ ID NO: 433543 - DNA, 15 bp, Homo sapiens
ttctcttaaaggagc

SEQ ID NO: 433544 - DNA, 15 bp, Homo sapiens
gttctcttaaaggag

SEQ ID NO: 433545 - DNA, 15 bp, Homo sapiens
agttctcttaaagga

SEQ ID NO: 433546 - DNA, 15 bp, Homo sapiens
tagttctcttaaagg

SEQ ID NO: 433547 - DNA, 15 bp, Homo sapiens
gtagttctcttaaag

SEQ ID NO: 433548 - DNA, 15 bp, Homo sapiens
agtagttctcttaaa

SEQ ID NO: 433549 - DNA, 15 bp, Homo sapiens
aagtagttctcttaa

SEQ ID NO: 433550 - DNA, 15 bp, Homo sapiens
aaagtagttctctta

SEQ ID NO: 433551 - DNA, 15 bp, Homo sapiens
caaagtagttctctt

SEQ ID NO: 433552 - DNA, 15 bp, Homo sapiens
acaaagtagttctct

SEQ ID NO: 433553 - DNA, 15 bp, Homo sapiens
gacaaagtagttctc

SEQ ID NO: 433554 - DNA, 15 bp, Homo sapiens
tgacaaagtagttct

SEQ ID NO: 433555 - DNA, 15 bp, Homo sapiens
ctgacaaagtagttc

SEQ ID NO: 433556 - DNA, 15 bp, Homo sapiens
tctgacaaagtagtt

SEQ ID NO: 433557 - DNA, 15 bp, Homo sapiens
ctctgacaaagtagt

SEQ ID NO: 433558 - DNA, 15 bp, Homo sapiens
cctctgacaaagtag

SEQ ID NO: 433559 - DNA, 15 bp, Homo sapiens
gcctctgacaaagta

SEQ ID NO: 433560 - DNA, 15 bp, Homo sapiens
tgcctctgacaaagt

SEQ ID NO: 433561 - DNA, 15 bp, Homo sapiens
atgcctctgacaaag

SEQ ID NO: 433562 - DNA, 15 bp, Homo sapiens
catgcctctgacaaa

SEQ ID NO: 433563 - DNA, 15 bp, Homo sapiens
ccatgcctctgacaa

SEQ ID NO: 433564 - DNA, 15 bp, Homo sapiens
gccatgcctctgaca

SEQ ID NO: 433565 - DNA, 15 bp, Homo sapiens
agccatgcctctgac

SEQ ID NO: 433566 - DNA, 15 bp, Homo sapiens
tagccatgcctctga

SEQ ID NO: 433567 - DNA, 15 bp, Homo sapiens
ctagccatgcctctg

SEQ ID NO: 433568 - DNA, 15 bp, Homo sapiens
cctagccatgcctct

SEQ ID NO: 433569 - DNA, 15 bp, Homo sapiens
tcctagccatgcctc

SEQ ID NO: 433570 - DNA, 15 bp, Homo sapiens
ttcctagccatgcct

SEQ ID NO: 433571 - DNA, 15 bp, Homo sapiens
tttcctagccatgcc

SEQ ID NO: 433572 - DNA, 15 bp, Homo sapiens
ttttcctagccatgc

SEQ ID NO: 433573 - DNA, 15 bp, Homo sapiens
cttttcctagccatg

SEQ ID NO: 433574 - DNA, 15 bp, Homo sapiens
tcttttcctagccat

SEQ ID NO: 433575 - DNA, 15 bp, Homo sapiens
gtcttttcctagcca

SEQ ID NO: 433576 - DNA, 15 bp, Homo sapiens
tgtcttttcctagcc

SEQ ID NO: 433577 - DNA, 15 bp, Homo sapiens
atgtcttttcctagc

SEQ ID NO: 433578 - DNA, 15 bp, Homo sapiens
gatgtcttttcctag

SEQ ID NO: 433579 - DNA, 15 bp, Homo sapiens
tgatgtcttttccta

SEQ ID NO: 433580 - DNA, 15 bp, Homo sapiens
ctgatgtcttttcct

SEQ ID NO: 433581 - DNA, 15 bp, Homo sapiens
actgatgtcttttcc

SEQ ID NO: 433582 - DNA, 15 bp, Homo sapiens
aactgatgtcttttc

SEQ ID NO: 433583 - DNA, 15 bp, Homo sapiens
taactgatgtctttt

SEQ ID NO: 433584 - DNA, 15 bp, Homo sapiens
ctaactgatgtcttt

SEQ ID NO: 433585 - DNA, 15 bp, Homo sapiens
gctaactgatgtctt

SEQ ID NO: 433586 - DNA, 15 bp, Homo sapiens
tgctaactgatgtct

SEQ ID NO: 433587 - DNA, 15 bp, Homo sapiens
ttgctaactgatgtc

SEQ ID NO: 433588 - DNA, 15 bp, Homo sapiens
tttgctaactgatgt

SEQ ID NO: 433589 - DNA, 15 bp, Homo sapiens
ttttgctaactgatg

SEQ ID NO: 433590 - DNA, 15 bp, Homo sapiens
attttgctaactgat

SEQ ID NO: 433591 - DNA, 15 bp, Homo sapiens
tattttgctaactga

SEQ ID NO: 433592 - DNA, 15 bp, Homo sapiens
gtattttgctaactg

SEQ ID NO: 433593 - DNA, 15 bp, Homo sapiens
tgtattttgctaact

SEQ ID NO: 433594 - DNA, 15 bp, Homo sapiens
gtgtattttgctaac

SEQ ID NO: 433595 - DNA, 15 bp, Homo sapiens
agtgtattttgctaa

SEQ ID NO: 433596 - DNA, 15 bp, Homo sapiens
cagtgtattttgcta

SEQ ID NO: 433597 - DNA, 15 bp, Homo sapiens
tcagtgtattttgct

SEQ ID NO: 433598 - DNA, 15 bp, Homo sapiens
atcagtgtattttgc

SEQ ID NO: 433599 - DNA, 15 bp, Homo sapiens
aatcagtgtattttg

SEQ ID NO: 433600 - DNA, 15 bp, Homo sapiens
taatcagtgtatttt

SEQ ID NO: 433601 - DNA, 15 bp, Homo sapiens
ataatcagtgtattt

SEQ ID NO: 433602 - DNA, 15 bp, Homo sapiens
cataatcagtgtatt

SEQ ID NO: 433603 - DNA, 15 bp, Homo sapiens
acataatcagtgtat

SEQ ID NO: 433604 - DNA, 15 bp, Homo sapiens
tacataatcagtgta

SEQ ID NO: 433605 - DNA, 15 bp, Homo sapiens
atacataatcagtgt

SEQ ID NO: 433606 - DNA, 15 bp, Homo sapiens
aatacataatcagtg

SEQ ID NO: 433607 - DNA, 15 bp, Homo sapiens
aaatacataatcagt

SEQ ID NO: 433608 - DNA, 15 bp, Homo sapiens
caaatacataatcag

SEQ ID NO: 433609 - DNA, 15 bp, Homo sapiens
tcaaatacataatca

SEQ ID NO: 433610 - DNA, 15 bp, Homo sapiens
ttcaaatacataatc

SEQ ID NO: 433611 - DNA, 15 bp, Homo sapiens
tttcaaatacataat

SEQ ID NO: 433612 - DNA, 15 bp, Homo sapiens
ctttcaaatacataa

SEQ ID NO: 433613 - DNA, 15 bp, Homo sapiens
cctttcaaatacata

SEQ ID NO: 433614 - DNA, 15 bp, Homo sapiens
tcctttcaaatacat

SEQ ID NO: 433615 - DNA, 15 bp, Homo sapiens
ttcctttcaaataca

SEQ ID NO: 433616 - DNA, 15 bp, Homo sapiens
tttcctttcaaatac

SEQ ID NO: 433617 - DNA, 15 bp, Homo sapiens
atttcctttcaaata

SEQ ID NO: 433618 - DNA, 15 bp, Homo sapiens
aatttcctttcaaat

SEQ ID NO: 433619 - DNA, 15 bp, Homo sapiens
aaatttcctttcaaa

SEQ ID NO: 433620 - DNA, 15 bp, Homo sapiens
aaaatttcctttcaa

SEQ ID NO: 433621 - DNA, 15 bp, Homo sapiens
gaaaatttcctttca

SEQ ID NO: 433622 - DNA, 15 bp, Homo sapiens
ggaaaatttcctttc

SEQ ID NO: 433623 - DNA, 15 bp, Homo sapiens
tggaaaatttccttt

SEQ ID NO: 433624 - DNA, 15 bp, Homo sapiens
gtggaaaatttcctt

SEQ ID NO: 433625 - DNA, 15 bp, Homo sapiens
agtggaaaatttcct

SEQ ID NO: 433626 - DNA, 15 bp, Homo sapiens
cagtggaaaatttcc

SEQ ID NO: 433627 - DNA, 15 bp, Homo sapiens
tcagtggaaaatttc

SEQ ID NO: 433628 - DNA, 15 bp, Homo sapiens
atcagtggaaaattt

SEQ ID NO: 433629 - DNA, 15 bp, Homo sapiens
aatcagtggaaaatt

SEQ ID NO: 433630 - DNA, 15 bp, Homo sapiens
aaatcagtggaaaat

SEQ ID NO: 433631 - DNA, 15 bp, Homo sapiens
aaaatcagtggaaaa

SEQ ID NO: 433632 - DNA, 15 bp, Homo sapiens
caaaatcagtggaaa

SEQ ID NO: 433633 - DNA, 15 bp, Homo sapiens
acaaaatcagtggaa

SEQ ID NO: 433634 - DNA, 15 bp, Homo sapiens
aacaaaatcagtgga

SEQ ID NO: 433635 - DNA, 15 bp, Homo sapiens
caacaaaatcagtgg

SEQ ID NO: 433636 - DNA, 15 bp, Homo sapiens
acaacaaaatcagtg

SEQ ID NO: 433637 - DNA, 15 bp, Homo sapiens
gacaacaaaatcagt

SEQ ID NO: 433638 - DNA, 15 bp, Homo sapiens
ggacaacaaaatcag

SEQ ID NO: 433639 - DNA, 15 bp, Homo sapiens
tggacaacaaaatca

SEQ ID NO: 433640 - DNA, 15 bp, Homo sapiens
ttggacaacaaaatc

SEQ ID NO: 433641 - DNA, 15 bp, Homo sapiens
cttggacaacaaaat

SEQ ID NO: 433642 - DNA, 15 bp, Homo sapiens
tcttggacaacaaaa

SEQ ID NO: 433643 - DNA, 15 bp, Homo sapiens
ctcttggacaacaaa

SEQ ID NO: 433644 - DNA, 15 bp, Homo sapiens
tctcttggacaacaa

SEQ ID NO: 433645 - DNA, 15 bp, Homo sapiens
ttctcttggacaaca

SEQ ID NO: 433646 - DNA, 15 bp, Homo sapiens
attctcttggacaac

SEQ ID NO: 433647 - DNA, 15 bp, Homo sapiens
cattctcttggacaa

SEQ ID NO: 433648 - DNA, 15 bp, Homo sapiens
acattctcttggaca

SEQ ID NO: 433649 - DNA, 15 bp, Homo sapiens
tacattctcttggac

SEQ ID NO: 433650 - DNA, 15 bp, Homo sapiens
gtacattctcttgga

SEQ ID NO: 433651 - DNA, 15 bp, Homo sapiens
cgtacattctcttgg

SEQ ID NO: 433652 - DNA, 15 bp, Homo sapiens
tcgtacattctcttg

SEQ ID NO: 433653 - DNA, 15 bp, Homo sapiens
ttcgtacattctctt

SEQ ID NO: 433654 - DNA, 15 bp, Homo sapiens
tttcgtacattctct

SEQ ID NO: 433655 - DNA, 15 bp, Homo sapiens
ttttcgtacattctc

SEQ ID NO: 433656 - DNA, 15 bp, Homo sapiens
cttttcgtacattct

SEQ ID NO: 433657 - DNA, 15 bp, Homo sapiens
tcttttcgtacattc

SEQ ID NO: 433658 - DNA, 15 bp, Homo sapiens
ttcttttcgtacatt

SEQ ID NO: 433659 - DNA, 15 bp, Homo sapiens
tttcttttcgtacat

SEQ ID NO: 433660 - DNA, 15 bp, Homo sapiens
ttttcttttcgtaca

SEQ ID NO: 433661 - DNA, 15 bp, Homo sapiens
gttttcttttcgtac

SEQ ID NO: 433662 - DNA, 15 bp, Homo sapiens
agttttcttttcgta

SEQ ID NO: 433663 - DNA, 15 bp, Homo sapiens
aagttttcttttcgt

SEQ ID NO: 433664 - DNA, 15 bp, Homo sapiens
caagttttcttttcg

SEQ ID NO: 433665 - DNA, 15 bp, Homo sapiens
ccaagttttcttttc

SEQ ID NO: 433666 - DNA, 15 bp, Homo sapiens
cccaagttttctttt

SEQ ID NO: 433667 - DNA, 15 bp, Homo sapiens
acccaagttttcttt

SEQ ID NO: 433668 - DNA, 15 bp, Homo sapiens
aacccaagttttctt

SEQ ID NO: 433669 - DNA, 15 bp, Homo sapiens
aaacccaagttttct

SEQ ID NO: 433670 - DNA, 15 bp, Homo sapiens
gaaacccaagttttc

SEQ ID NO: 433671 - DNA, 15 bp, Homo sapiens
tgaaacccaagtttt

SEQ ID NO: 433672 - DNA, 15 bp, Homo sapiens
ctgaaacccaagttt

SEQ ID NO: 433673 - DNA, 15 bp, Homo sapiens
gctgaaacccaagtt

SEQ ID NO: 433674 - DNA, 15 bp, Homo sapiens
tgctgaaacccaagt

SEQ ID NO: 433675 - DNA, 15 bp, Homo sapiens
ctgctgaaacccaag

SEQ ID NO: 433676 - DNA, 15 bp, Homo sapiens
actgctgaaacccaa

SEQ ID NO: 433677 - DNA, 15 bp, Homo sapiens
aactgctgaaaccca

SEQ ID NO: 433678 - DNA, 15 bp, Homo sapiens
taactgctgaaaccc

SEQ ID NO: 433679 - DNA, 15 bp, Homo sapiens
ctaactgctgaaacc

SEQ ID NO: 433680 - DNA, 15 bp, Homo sapiens
cctaactgctgaaac

SEQ ID NO: 433681 - DNA, 15 bp, Homo sapiens
tcctaactgctgaaa

SEQ ID NO: 433682 - DNA, 15 bp, Homo sapiens
ctcctaactgctgaa

SEQ ID NO: 433683 - DNA, 15 bp, Homo sapiens
gctcctaactgctga

SEQ ID NO: 433684 - DNA, 15 bp, Homo sapiens
tgctcctaactgctg

SEQ ID NO: 433685 - DNA, 15 bp, Homo sapiens
ctgctcctaactgct

SEQ ID NO: 433686 - DNA, 15 bp, Homo sapiens
actgctcctaactgc

SEQ ID NO: 433687 - DNA, 15 bp, Homo sapiens
tactgctcctaactg

SEQ ID NO: 433688 - DNA, 15 bp, Homo sapiens
atactgctcctaact

SEQ ID NO: 433689 - DNA, 15 bp, Homo sapiens
gatactgctcctaac

SEQ ID NO: 433690 - DNA, 15 bp, Homo sapiens
ggatactgctcctaa

SEQ ID NO: 433691 - DNA, 15 bp, Homo sapiens
aggatactgctccta

SEQ ID NO: 433692 - DNA, 15 bp, Homo sapiens
caggatactgctcct

SEQ ID NO: 433693 - DNA, 15 bp, Homo sapiens
tcaggatactgctcc

SEQ ID NO: 433694 - DNA, 15 bp, Homo sapiens
ctcaggatactgctc

SEQ ID NO: 433695 - DNA, 15 bp, Homo sapiens
tctcaggatactgct

SEQ ID NO: 433696 - DNA, 15 bp, Homo sapiens
ttctcaggatactgc

SEQ ID NO: 433697 - DNA, 15 bp, Homo sapiens
cttctcaggatactg

SEQ ID NO: 433698 - DNA, 15 bp, Homo sapiens
tcttctcaggatact

SEQ ID NO: 433699 - DNA, 15 bp, Homo sapiens
ctcttctcaggatac

SEQ ID NO: 433700 - DNA, 15 bp, Homo sapiens
gctcttctcaggata

SEQ ID NO: 433701 - DNA, 15 bp, Homo sapiens
agctcttctcaggat

SEQ ID NO: 433702 - DNA, 15 bp, Homo sapiens
tagctcttctcagga

SEQ ID NO: 433703 - DNA, 15 bp, Homo sapiens
atagctcttctcagg

SEQ ID NO: 433704 - DNA, 15 bp, Homo sapiens
catagctcttctcag

SEQ ID NO: 433705 - DNA, 15 bp, Homo sapiens
acatagctcttctca

SEQ ID NO: 433706 - DNA, 15 bp, Homo sapiens
cacatagctcttctc

SEQ ID NO: 433707 - DNA, 15 bp, Homo sapiens
gcacatagctcttct

SEQ ID NO: 433708 - DNA, 15 bp, Homo sapiens
agcacatagctcttc

SEQ ID NO: 433709 - DNA, 15 bp, Homo sapiens
aagcacatagctctt

SEQ ID NO: 433710 - DNA, 15 bp, Homo sapiens
caagcacatagctct

SEQ ID NO: 433711 - DNA, 15 bp, Homo sapiens
tcaagcacatagctc

SEQ ID NO: 433712 - DNA, 15 bp, Homo sapiens
ttcaagcacatagct

SEQ ID NO: 433713 - DNA, 15 bp, Homo sapiens
attcaagcacatagc

SEQ ID NO: 433714 - DNA, 15 bp, Homo sapiens
aattcaagcacatag

SEQ ID NO: 433715 - DNA, 15 bp, Homo sapiens
aaattcaagcacata

SEQ ID NO: 433716 - DNA, 15 bp, Homo sapiens
taaattcaagcacat

SEQ ID NO: 433717 - DNA, 15 bp, Homo sapiens
ataaattcaagcaca

SEQ ID NO: 433718 - DNA, 15 bp, Homo sapiens
aataaattcaagcac

SEQ ID NO: 433719 - DNA, 15 bp, Homo sapiens
taataaattcaagca

SEQ ID NO: 433720 - DNA, 15 bp, Homo sapiens
ctaataaattcaagc

SEQ ID NO: 433721 - DNA, 15 bp, Homo sapiens
actaataaattcaag

SEQ ID NO: 433722 - DNA, 15 bp, Homo sapiens
aactaataaattcaa

SEQ ID NO: 433723 - DNA, 15 bp, Homo sapiens
taactaataaattca

SEQ ID NO: 433724 - DNA, 15 bp, Homo sapiens
gtaactaataaattc

SEQ ID NO: 433725 - DNA, 15 bp, Homo sapiens
tgtaactaataaatt

SEQ ID NO: 433726 - DNA, 15 bp, Homo sapiens
ctgtaactaataaat

SEQ ID NO: 433727 - DNA, 15 bp, Homo sapiens
cctgtaactaataaa

SEQ ID NO: 433728 - DNA, 15 bp, Homo sapiens
acctgtaactaataa

SEQ ID NO: 433729 - DNA, 15 bp, Homo sapiens
tacctgtaactaata

SEQ ID NO: 433730 - DNA, 15 bp, Homo sapiens
ctacctgtaactaat

SEQ ID NO: 433731 - DNA, 15 bp, Homo sapiens
tctacctgtaactaa

SEQ ID NO: 433732 - DNA, 15 bp, Homo sapiens
ttctacctgtaacta

SEQ ID NO: 433733 - DNA, 15 bp, Homo sapiens
cttctacctgtaact

SEQ ID NO: 433734 - DNA, 15 bp, Homo sapiens
tcttctacctgtaac

SEQ ID NO: 433735 - DNA, 15 bp, Homo sapiens
gtcttctacctgtaa

SEQ ID NO: 433736 - DNA, 15 bp, Homo sapiens
tgtcttctacctgta

SEQ ID NO: 433737 - DNA, 15 bp, Homo sapiens
ctgtcttctacctgt

SEQ ID NO: 433738 - DNA, 15 bp, Homo sapiens
tctgtcttctacctg

SEQ ID NO: 433739 - DNA, 15 bp, Homo sapiens
ttctgtcttctacct

SEQ ID NO: 433740 - DNA, 15 bp, Homo sapiens
tttctgtcttctacc

SEQ ID NO: 433741 - DNA, 15 bp, Homo sapiens
atttctgtcttctac

SEQ ID NO: 433742 - DNA, 15 bp, Homo sapiens
catttctgtcttcta

SEQ ID NO: 433743 - DNA, 15 bp, Homo sapiens
gcatttctgtcttct

SEQ ID NO: 433744 - DNA, 15 bp, Homo sapiens
ggcatttctgtcttc

SEQ ID NO: 433745 - DNA, 15 bp, Homo sapiens
tggcatttctgtctt

SEQ ID NO: 433746 - DNA, 15 bp, Homo sapiens
ttggcatttctgtct

SEQ ID NO: 433747 - DNA, 15 bp, Homo sapiens
cttggcatttctgtc

SEQ ID NO: 433748 - DNA, 15 bp, Homo sapiens
ccttggcatttctgt

SEQ ID NO: 433749 - DNA, 15 bp, Homo sapiens
accttggcatttctg

SEQ ID NO: 433750 - DNA, 15 bp, Homo sapiens
aaccttggcatttct

SEQ ID NO: 433751 - DNA, 15 bp, Homo sapiens
gaaccttggcatttc

SEQ ID NO: 433752 - DNA, 15 bp, Homo sapiens
tgaaccttggcattt

SEQ ID NO: 433753 - DNA, 15 bp, Homo sapiens
atgaaccttggcatt

SEQ ID NO: 433754 - DNA, 15 bp, Homo sapiens
tatgaaccttggcat

SEQ ID NO: 433755 - DNA, 15 bp, Homo sapiens
ctatgaaccttggca

SEQ ID NO: 433756 - DNA, 15 bp, Homo sapiens
tctatgaaccttggc

SEQ ID NO: 433757 - DNA, 15 bp, Homo sapiens
atctatgaaccttgg

SEQ ID NO: 433758 - DNA, 15 bp, Homo sapiens
tatctatgaaccttg

SEQ ID NO: 433759 - DNA, 15 bp, Homo sapiens
ctatctatgaacctt

SEQ ID NO: 433760 - DNA, 15 bp, Homo sapiens
gctatctatgaacct

SEQ ID NO: 433761 - DNA, 15 bp, Homo sapiens
tgctatctatgaacc

SEQ ID NO: 433762 - DNA, 15 bp, Homo sapiens
ttgctatctatgaac

SEQ ID NO: 433763 - DNA, 15 bp, Homo sapiens
attgctatctatgaa

SEQ ID NO: 433764 - DNA, 15 bp, Homo sapiens
aattgctatctatga

SEQ ID NO: 433765 - DNA, 15 bp, Homo sapiens
caattgctatctatg

SEQ ID NO: 433766 - DNA, 15 bp, Homo sapiens
ccaattgctatctat

SEQ ID NO: 433767 - DNA, 15 bp, Homo sapiens
cccaattgctatcta

SEQ ID NO: 433768 - DNA, 15 bp, Homo sapiens
ccccaattgctatct

SEQ ID NO: 433769 - DNA, 15 bp, Homo sapiens
tccccaattgctatc

SEQ ID NO: 433770 - DNA, 15 bp, Homo sapiens
atccccaattgctat

SEQ ID NO: 433771 - DNA, 15 bp, Homo sapiens
tatccccaattgcta

SEQ ID NO: 433772 - DNA, 15 bp, Homo sapiens
ttatccccaattgct

SEQ ID NO: 433773 - DNA, 15 bp, Homo sapiens
tttatccccaattgc

SEQ ID NO: 433774 - DNA, 15 bp, Homo sapiens
ttttatccccaattg

SEQ ID NO: 433775 - DNA, 15 bp, Homo sapiens
tttttatccccaatt

SEQ ID NO: 433776 - DNA, 15 bp, Homo sapiens
atttttatccccaat

SEQ ID NO: 433777 - DNA, 15 bp, Homo sapiens
tatttttatccccaa

SEQ ID NO: 433778 - DNA, 15 bp, Homo sapiens
ttatttttatcccca

SEQ ID NO: 433779 - DNA, 15 bp, Homo sapiens
tttatttttatcccc

SEQ ID NO: 433780 - DNA, 15 bp, Homo sapiens
gtttatttttatccc

SEQ ID NO: 433781 - DNA, 15 bp, Homo sapiens
agtttatttttatcc

SEQ ID NO: 433782 - DNA, 15 bp, Homo sapiens
aagtttatttttatc

SEQ ID NO: 433783 - DNA, 15 bp, Homo sapiens
aaagtttatttttat

SEQ ID NO: 433784 - DNA, 15 bp, Homo sapiens
aaaagtttattttta

SEQ ID NO: 433785 - DNA, 15 bp, Homo sapiens
aaaaagtttattttt

SEQ ID NO: 433786 - DNA, 15 bp, Homo sapiens
aaaaaagtttatttt

SEQ ID NO: 433787 - DNA, 15 bp, Homo sapiens
taaaaaagtttattt

SEQ ID NO: 433788 - DNA, 15 bp, Homo sapiens
ataaaaaagtttatt

SEQ ID NO: 433789 - DNA, 15 bp, Homo sapiens
cataaaaaagtttat

SEQ ID NO: 433790 - DNA, 15 bp, Homo sapiens
gcataaaaaagttta

SEQ ID NO: 433791 - DNA, 15 bp, Homo sapiens
ggcataaaaaagttt

SEQ ID NO: 433792 - DNA, 15 bp, Homo sapiens
aggcataaaaaagtt

SEQ ID NO: 433793 - DNA, 15 bp, Homo sapiens
gaggcataaaaaagt

SEQ ID NO: 433794 - DNA, 15 bp, Homo sapiens
ggaggcataaaaaag

SEQ ID NO: 433795 - DNA, 15 bp, Homo sapiens
gggaggcataaaaaa

SEQ ID NO: 433796 - DNA, 15 bp, Homo sapiens
agggaggcataaaaa

SEQ ID NO: 433797 - DNA, 15 bp, Homo sapiens
gagggaggcataaaa

SEQ ID NO: 433798 - DNA, 15 bp, Homo sapiens
agagggaggcataaa

SEQ ID NO: 433799 - DNA, 15 bp, Homo sapiens
cagagggaggcataa

SEQ ID NO: 433800 - DNA, 15 bp, Homo sapiens
acagagggaggcata

SEQ ID NO: 433801 - DNA, 15 bp, Homo sapiens
aacagagggaggcat

SEQ ID NO: 433802 - DNA, 15 bp, Homo sapiens
caacagagggaggca

SEQ ID NO: 433803 - DNA, 15 bp, Homo sapiens
tcaacagagggaggc

SEQ ID NO: 433804 - DNA, 15 bp, Homo sapiens
gtcaacagagggagg

SEQ ID NO: 433805 - DNA, 15 bp, Homo sapiens
cgtcaacagagggag

SEQ ID NO: 433806 - DNA, 15 bp, Homo sapiens
ccgtcaacagaggga

SEQ ID NO: 433807 - DNA, 15 bp, Homo sapiens
tccgtcaacagaggg

SEQ ID NO: 433808 - DNA, 15 bp, Homo sapiens
gtccgtcaacagagg

SEQ ID NO: 433809 - DNA, 15 bp, Homo sapiens
tgtccgtcaacagag

SEQ ID NO: 433810 - DNA, 15 bp, Homo sapiens
ctgtccgtcaacaga

SEQ ID NO: 433811 - DNA, 15 bp, Homo sapiens
cctgtccgtcaacag

SEQ ID NO: 433812 - DNA, 15 bp, Homo sapiens
acctgtccgtcaaca

SEQ ID NO: 433813 - DNA, 15 bp, Homo sapiens
gacctgtccgtcaac

SEQ ID NO: 433814 - DNA, 15 bp, Homo sapiens
tgacctgtccgtcaa

SEQ ID NO: 433815 - DNA, 15 bp, Homo sapiens
gtgacctgtccgtca

SEQ ID NO: 433816 - DNA, 15 bp, Homo sapiens
ggtgacctgtccgtc

SEQ ID NO: 433817 - DNA, 15 bp, Homo sapiens
tggtgacctgtccgt

SEQ ID NO: 433818 - DNA, 15 bp, Homo sapiens
ttggtgacctgtccg

SEQ ID NO: 433819 - DNA, 15 bp, Homo sapiens
tttggtgacctgtcc

SEQ ID NO: 433820 - DNA, 15 bp, Homo sapiens
ttttggtgacctgtc

SEQ ID NO: 433821 - DNA, 15 bp, Homo sapiens
cttttggtgacctgt

SEQ ID NO: 433822 - DNA, 15 bp, Homo sapiens
tcttttggtgacctg

SEQ ID NO: 433823 - DNA, 15 bp, Homo sapiens
ctcttttggtgacct

SEQ ID NO: 433824 - DNA, 15 bp, Homo sapiens
tctcttttggtgacc

SEQ ID NO: 433825 - DNA, 15 bp, Homo sapiens
ctctcttttggtgac

SEQ ID NO: 433826 - DNA, 15 bp, Homo sapiens
tctctcttttggtga

SEQ ID NO: 433827 - DNA, 15 bp, Homo sapiens
ctctctcttttggtg

SEQ ID NO: 433828 - DNA, 15 bp, Homo sapiens
actctctcttttggt

SEQ ID NO: 433829 - DNA, 15 bp, Homo sapiens
tactctctcttttgg

SEQ ID NO: 433830 - DNA, 15 bp, Homo sapiens
atactctctcttttg

SEQ ID NO: 433831 - DNA, 15 bp, Homo sapiens
tatactctctctttt

SEQ ID NO: 433832 - DNA, 15 bp, Homo sapiens
atatactctctcttt

SEQ ID NO: 433833 - DNA, 15 bp, Homo sapiens
aatatactctctctt

SEQ ID NO: 433834 - DNA, 15 bp, Homo sapiens
taatatactctctct

SEQ ID NO: 433835 - DNA, 15 bp, Homo sapiens
ataatatactctctc

SEQ ID NO: 433836 - DNA, 15 bp, Homo sapiens
cataatatactctct

SEQ ID NO: 433837 - DNA, 15 bp, Homo sapiens
gcataatatactctc

SEQ ID NO: 433838 - DNA, 15 bp, Homo sapiens
agcataatatactct

SEQ ID NO: 433839 - DNA, 15 bp, Homo sapiens
aagcataatatactc

SEQ ID NO: 433840 - DNA, 15 bp, Homo sapiens
aaagcataatatact

SEQ ID NO: 433841 - DNA, 15 bp, Homo sapiens
aaaagcataatatac

SEQ ID NO: 433842 - DNA, 15 bp, Homo sapiens
taaaagcataatata

SEQ ID NO: 433843 - DNA, 15 bp, Homo sapiens
ttaaaagcataatat

SEQ ID NO: 433844 - DNA, 15 bp, Homo sapiens
attaaaagcataata

SEQ ID NO: 433845 - DNA, 15 bp, Homo sapiens
aattaaaagcataat

SEQ ID NO: 433846 - DNA, 15 bp, Homo sapiens
aaattaaaagcataa

SEQ ID NO: 433847 - DNA, 15 bp, Homo sapiens
caaattaaaagcata

SEQ ID NO: 433848 - DNA, 15 bp, Homo sapiens
gcaaattaaaagcat

SEQ ID NO: 433849 - DNA, 15 bp, Homo sapiens
agcaaattaaaagca

SEQ ID NO: 433850 - DNA, 15 bp, Homo sapiens
tagcaaattaaaagc

SEQ ID NO: 433851 - DNA, 15 bp, Homo sapiens
atagcaaattaaaag

SEQ ID NO: 433852 - DNA, 15 bp, Homo sapiens
aatagcaaattaaaa

SEQ ID NO: 433853 - DNA, 15 bp, Homo sapiens
taatagcaaattaaa

SEQ ID NO: 433854 - DNA, 15 bp, Homo sapiens
gtaatagcaaattaa

SEQ ID NO: 433855 - DNA, 15 bp, Homo sapiens
tgtaatagcaaatta

SEQ ID NO: 433856 - DNA, 15 bp, Homo sapiens
atgtaatagcaaatt

SEQ ID NO: 433857 - DNA, 15 bp, Homo sapiens
catgtaatagcaaat

SEQ ID NO: 433858 - DNA, 15 bp, Homo sapiens
ccatgtaatagcaaa

SEQ ID NO: 433859 - DNA, 15 bp, Homo sapiens
accatgtaatagcaa

SEQ ID NO: 433860 - DNA, 15 bp, Homo sapiens
taccatgtaatagca

SEQ ID NO: 433861 - DNA, 15 bp, Homo sapiens
ttaccatgtaatagc

SEQ ID NO: 433862 - DNA, 15 bp, Homo sapiens
gttaccatgtaatag

SEQ ID NO: 433863 - DNA, 15 bp, Homo sapiens
agttaccatgtaata

SEQ ID NO: 433864 - DNA, 15 bp, Homo sapiens
tagttaccatgtaat

SEQ ID NO: 433865 - DNA, 15 bp, Homo sapiens
ttagttaccatgtaa

SEQ ID NO: 433866 - DNA, 15 bp, Homo sapiens
attagttaccatgta

SEQ ID NO: 433867 - DNA, 15 bp, Homo sapiens
tattagttaccatgt

SEQ ID NO: 433868 - DNA, 15 bp, Homo sapiens
ctattagttaccatg

SEQ ID NO: 433869 - DNA, 15 bp, Homo sapiens
actattagttaccat

SEQ ID NO: 433870 - DNA, 15 bp, Homo sapiens
aactattagttacca

SEQ ID NO: 433871 - DNA, 15 bp, Homo sapiens
aaactattagttacc

SEQ ID NO: 433872 - DNA, 15 bp, Homo sapiens
taaactattagttac

SEQ ID NO: 433873 - DNA, 15 bp, Homo sapiens
ataaactattagtta

SEQ ID NO: 433874 - DNA, 15 bp, Homo sapiens
tataaactattagtt

SEQ ID NO: 433875 - DNA, 15 bp, Homo sapiens
ttataaactattagt

SEQ ID NO: 433876 - DNA, 15 bp, Homo sapiens
tttataaactattag

SEQ ID NO: 433877 - DNA, 15 bp, Homo sapiens
ttttataaactatta

SEQ ID NO: 433878 - DNA, 15 bp, Homo sapiens
attttataaactatt

SEQ ID NO: 433879 - DNA, 15 bp, Homo sapiens
tattttataaactat

SEQ ID NO: 433880 - DNA, 15 bp, Homo sapiens
gtattttataaacta

SEQ ID NO: 433881 - DNA, 15 bp, Homo sapiens
ggtattttataaact

SEQ ID NO: 433882 - DNA, 15 bp, Homo sapiens
gggtattttataaac

SEQ ID NO: 433883 - DNA, 15 bp, Homo sapiens
agggtattttataaa

SEQ ID NO: 433884 - DNA, 15 bp, Homo sapiens
aagggtattttataa

SEQ ID NO: 433885 - DNA, 15 bp, Homo sapiens
taagggtattttata

SEQ ID NO: 433886 - DNA, 15 bp, Homo sapiens
gtaagggtattttat

SEQ ID NO: 433887 - DNA, 15 bp, Homo sapiens
tgtaagggtatttta

SEQ ID NO: 433888 - DNA, 15 bp, Homo sapiens
gtgtaagggtatttt

SEQ ID NO: 433889 - DNA, 15 bp, Homo sapiens
ggtgtaagggtattt

SEQ ID NO: 433890 - DNA, 15 bp, Homo sapiens
tggtgtaagggtatt

SEQ ID NO: 433891 - DNA, 15 bp, Homo sapiens
atggtgtaagggtat

SEQ ID NO: 433892 - DNA, 15 bp, Homo sapiens
tatggtgtaagggta

SEQ ID NO: 433893 - DNA, 15 bp, Homo sapiens
ttatggtgtaagggt

SEQ ID NO: 433894 - DNA, 15 bp, Homo sapiens
attatggtgtaaggg

SEQ ID NO: 433895 - DNA, 15 bp, Homo sapiens
cattatggtgtaagg

SEQ ID NO: 433896 - DNA, 15 bp, Homo sapiens
tcattatggtgtaag

SEQ ID NO: 433897 - DNA, 15 bp, Homo sapiens
gtcattatggtgtaa

SEQ ID NO: 433898 - DNA, 15 bp, Homo sapiens
agtcattatggtgta

SEQ ID NO: 433899 - DNA, 15 bp, Homo sapiens
cagtcattatggtgt

SEQ ID NO: 433900 - DNA, 15 bp, Homo sapiens
tcagtcattatggtg

SEQ ID NO: 433901 - DNA, 15 bp, Homo sapiens
ttcagtcattatggt

SEQ ID NO: 433902 - DNA, 15 bp, Homo sapiens
cttcagtcattatgg

SEQ ID NO: 433903 - DNA, 15 bp, Homo sapiens
acttcagtcattatg

SEQ ID NO: 433904 - DNA, 15 bp, Homo sapiens
aacttcagtcattat

SEQ ID NO: 433905 - DNA, 15 bp, Homo sapiens
aaacttcagtcatta

SEQ ID NO: 433906 - DNA, 15 bp, Homo sapiens
taaacttcagtcatt

SEQ ID NO: 433907 - DNA, 15 bp, Homo sapiens
ataaacttcagtcat

SEQ ID NO: 433908 - DNA, 15 bp, Homo sapiens
aataaacttcagtca

SEQ ID NO: 433909 - DNA, 15 bp, Homo sapiens
aaataaacttcagtc

SEQ ID NO: 433910 - DNA, 15 bp, Homo sapiens
aaaataaacttcagt

SEQ ID NO: 433911 - DNA, 15 bp, Homo sapiens
aaaaataaacttcag

SEQ ID NO: 433912 - DNA, 15 bp, Homo sapiens
aaaaaataaacttca

SEQ ID NO: 433913 - DNA, 15 bp, Homo sapiens
caaaaaataaacttc

SEQ ID NO: 433914 - DNA, 15 bp, Homo sapiens
gcaaaaaataaactt

SEQ ID NO: 433915 - DNA, 15 bp, Homo sapiens
agcaaaaaataaact

SEQ ID NO: 433916 - DNA, 15 bp, Homo sapiens
cagcaaaaaataaac

SEQ ID NO: 433917 - DNA, 15 bp, Homo sapiens
acagcaaaaaataaa

SEQ ID NO: 433918 - DNA, 15 bp, Homo sapiens
cacagcaaaaaataa

SEQ ID NO: 433919 - DNA, 15 bp, Homo sapiens
acacagcaaaaaata

SEQ ID NO: 433920 - DNA, 15 bp, Homo sapiens
aacacagcaaaaaat

SEQ ID NO: 433921 - DNA, 15 bp, Homo sapiens
aaacacagcaaaaaa

SEQ ID NO: 433922 - DNA, 15 bp, Homo sapiens
aaaacacagcaaaaa

SEQ ID NO: 433923 - DNA, 15 bp, Homo sapiens
aaaaacacagcaaaa

SEQ ID NO: 433924 - DNA, 15 bp, Homo sapiens
caaaaacacagcaaa

SEQ ID NO: 433925 - DNA, 15 bp, Homo sapiens
acaaaaacacagcaa

SEQ ID NO: 433926 - DNA, 15 bp, Homo sapiens
tacaaaaacacagca

SEQ ID NO: 433927 - DNA, 15 bp, Homo sapiens
atacaaaaacacagc

SEQ ID NO: 433928 - DNA, 15 bp, Homo sapiens
aatacaaaaacacag

SEQ ID NO: 433929 - DNA, 15 bp, Homo sapiens
aaatacaaaaacaca

SEQ ID NO: 433930 - DNA, 15 bp, Homo sapiens
caaatacaaaaacac

SEQ ID NO: 433931 - DNA, 15 bp, Homo sapiens
ccaaatacaaaaaca

SEQ ID NO: 433932 - DNA, 15 bp, Homo sapiens
tccaaatacaaaaac

SEQ ID NO: 433933 - DNA, 15 bp, Homo sapiens
ttccaaatacaaaaa

SEQ ID NO: 433934 - DNA, 15 bp, Homo sapiens
attccaaatacaaaa

SEQ ID NO: 433935 - DNA, 15 bp, Homo sapiens
tattccaaatacaaa

SEQ ID NO: 433936 - DNA, 15 bp, Homo sapiens
gtattccaaatacaa

SEQ ID NO: 433937 - DNA, 15 bp, Homo sapiens
agtattccaaataca

SEQ ID NO: 433938 - DNA, 15 bp, Homo sapiens
aagtattccaaatac

SEQ ID NO: 433939 - DNA, 15 bp, Homo sapiens
aaagtattccaaata

SEQ ID NO: 433940 - DNA, 15 bp, Homo sapiens
gaaagtattccaaat

SEQ ID NO: 433941 - DNA, 15 bp, Homo sapiens
agaaagtattccaaa

SEQ ID NO: 433942 - DNA, 15 bp, Homo sapiens
cagaaagtattccaa

SEQ ID NO: 433943 - DNA, 15 bp, Homo sapiens
acagaaagtattcca

SEQ ID NO: 433944 - DNA, 15 bp, Homo sapiens
gacagaaagtattcc

SEQ ID NO: 433945 - DNA, 15 bp, Homo sapiens
ggacagaaagtattc

SEQ ID NO: 433946 - DNA, 15 bp, Homo sapiens
aggacagaaagtatt

SEQ ID NO: 433947 - DNA, 15 bp, Homo sapiens
aaggacagaaagtat

SEQ ID NO: 433948 - DNA, 15 bp, Homo sapiens
caaggacagaaagta

SEQ ID NO: 433949 - DNA, 15 bp, Homo sapiens
acaaggacagaaagt

SEQ ID NO: 433950 - DNA, 15 bp, Homo sapiens
cacaaggacagaaag

SEQ ID NO: 433951 - DNA, 15 bp, Homo sapiens
gcacaaggacagaaa

SEQ ID NO: 433952 - DNA, 15 bp, Homo sapiens
ggcacaaggacagaa

SEQ ID NO: 433953 - DNA, 15 bp, Homo sapiens
tggcacaaggacaga

SEQ ID NO: 433954 - DNA, 15 bp, Homo sapiens
ttggcacaaggacag

SEQ ID NO: 433955 - DNA, 15 bp, Homo sapiens
tttggcacaaggaca

SEQ ID NO: 433956 - DNA, 15 bp, Homo sapiens
atttggcacaaggac

SEQ ID NO: 433957 - DNA, 15 bp, Homo sapiens
aatttggcacaagga

SEQ ID NO: 433958 - DNA, 15 bp, Homo sapiens
caatttggcacaagg

SEQ ID NO: 433959 - DNA, 15 bp, Homo sapiens
ccaatttggcacaag

SEQ ID NO: 433960 - DNA, 15 bp, Homo sapiens
tccaatttggcacaa

SEQ ID NO: 433961 - DNA, 15 bp, Homo sapiens
ttccaatttggcaca

SEQ ID NO: 433962 - DNA, 15 bp, Homo sapiens
tttccaatttggcac

SEQ ID NO: 433963 - DNA, 15 bp, Homo sapiens
atttccaatttggca

SEQ ID NO: 433964 - DNA, 15 bp, Homo sapiens
aatttccaatttggc

SEQ ID NO: 433965 - DNA, 15 bp, Homo sapiens
aaatttccaatttgg

SEQ ID NO: 433966 - DNA, 15 bp, Homo sapiens
caaatttccaatttg

SEQ ID NO: 433967 - DNA, 15 bp, Homo sapiens
ccaaatttccaattt

SEQ ID NO: 433968 - DNA, 15 bp, Homo sapiens
tccaaatttccaatt

SEQ ID NO: 433969 - DNA, 15 bp, Homo sapiens
ttccaaatttccaat

SEQ ID NO: 433970 - DNA, 15 bp, Homo sapiens
attccaaatttccaa

SEQ ID NO: 433971 - DNA, 15 bp, Homo sapiens
tattccaaatttcca

SEQ ID NO: 433972 - DNA, 15 bp, Homo sapiens
atattccaaatttcc

SEQ ID NO: 433973 - DNA, 15 bp, Homo sapiens
tatattccaaatttc

SEQ ID NO: 433974 - DNA, 15 bp, Homo sapiens
ctatattccaaattt

SEQ ID NO: 433975 - DNA, 15 bp, Homo sapiens
actatattccaaatt

SEQ ID NO: 433976 - DNA, 15 bp, Homo sapiens
aactatattccaaat

SEQ ID NO: 433977 - DNA, 15 bp, Homo sapiens
aaactatattccaaa

SEQ ID NO: 433978 - DNA, 15 bp, Homo sapiens
taaactatattccaa

SEQ ID NO: 433979 - DNA, 15 bp, Homo sapiens
ctaaactatattcca

SEQ ID NO: 433980 - DNA, 15 bp, Homo sapiens
actaaactatattcc

SEQ ID NO: 433981 - DNA, 15 bp, Homo sapiens
tactaaactatattc

SEQ ID NO: 433982 - DNA, 15 bp, Homo sapiens
ttactaaactatatt

SEQ ID NO: 433983 - DNA, 15 bp, Homo sapiens
attactaaactatat

SEQ ID NO: 433984 - DNA, 15 bp, Homo sapiens
aattactaaactata

SEQ ID NO: 433985 - DNA, 15 bp, Homo sapiens
aaattactaaactat

SEQ ID NO: 433986 - DNA, 15 bp, Homo sapiens
gaaattactaaacta

SEQ ID NO: 433987 - DNA, 15 bp, Homo sapiens
tgaaattactaaact

SEQ ID NO: 433988 - DNA, 15 bp, Homo sapiens
ttgaaattactaaac

SEQ ID NO: 433989 - DNA, 15 bp, Homo sapiens
attgaaattactaaa

SEQ ID NO: 433990 - DNA, 15 bp, Homo sapiens
aattgaaattactaa

SEQ ID NO: 433991 - DNA, 15 bp, Homo sapiens
aaattgaaattacta

SEQ ID NO: 433992 - DNA, 15 bp, Homo sapiens
caaattgaaattact

SEQ ID NO: 433993 - DNA, 15 bp, Homo sapiens
ccaaattgaaattac

SEQ ID NO: 433994 - DNA, 15 bp, Homo sapiens
accaaattgaaatta

SEQ ID NO: 433995 - DNA, 15 bp, Homo sapiens
aaccaaattgaaatt

SEQ ID NO: 433996 - DNA, 15 bp, Homo sapiens
caaccaaattgaaat

SEQ ID NO: 433997 - DNA, 15 bp, Homo sapiens
acaaccaaattgaaa

SEQ ID NO: 433998 - DNA, 15 bp, Homo sapiens
tacaaccaaattgaa

SEQ ID NO: 433999 - DNA, 15 bp, Homo sapiens
atacaaccaaattga

SEQ ID NO: 434000 - DNA, 15 bp, Homo sapiens
aatacaaccaaattg

SEQ ID NO: 434001 - DNA, 15 bp, Homo sapiens
aaatacaaccaaatt

SEQ ID NO: 434002 - DNA, 15 bp, Homo sapiens
taaatacaaccaaat

SEQ ID NO: 434003 - DNA, 15 bp, Homo sapiens
ttaaatacaaccaaa

SEQ ID NO: 434004 - DNA, 15 bp, Homo sapiens
tttaaatacaaccaa

SEQ ID NO: 434005 - DNA, 15 bp, Homo sapiens
ttttaaatacaacca

SEQ ID NO: 434006 - DNA, 15 bp, Homo sapiens
tttttaaatacaacc

SEQ ID NO: 434007 - DNA, 15 bp, Homo sapiens
atttttaaatacaac

SEQ ID NO: 434008 - DNA, 15 bp, Homo sapiens
aatttttaaatacaa

SEQ ID NO: 434009 - DNA, 15 bp, Homo sapiens
taatttttaaataca

SEQ ID NO: 434010 - DNA, 15 bp, Homo sapiens
ctaatttttaaatac

SEQ ID NO: 434011 - DNA, 15 bp, Homo sapiens
cctaatttttaaata

SEQ ID NO: 434012 - DNA, 15 bp, Homo sapiens
ccctaatttttaaat

SEQ ID NO: 434013 - DNA, 15 bp, Homo sapiens
tccctaatttttaaa

SEQ ID NO: 434014 - DNA, 15 bp, Homo sapiens
ctccctaatttttaa

SEQ ID NO: 434015 - DNA, 15 bp, Homo sapiens
cctccctaattttta

SEQ ID NO: 434016 - DNA, 15 bp, Homo sapiens
gcctccctaattttt

SEQ ID NO: 434017 - DNA, 15 bp, Homo sapiens
ggcctccctaatttt

SEQ ID NO: 434018 - DNA, 15 bp, Homo sapiens
aggcctccctaattt

SEQ ID NO: 434019 - DNA, 15 bp, Homo sapiens
taggcctccctaatt

SEQ ID NO: 434020 - DNA, 15 bp, Homo sapiens
ttaggcctccctaat

SEQ ID NO: 434021 - DNA, 15 bp, Homo sapiens
tttaggcctccctaa

SEQ ID NO: 434022 - DNA, 15 bp, Homo sapiens
atttaggcctcccta

SEQ ID NO: 434023 - DNA, 15 bp, Homo sapiens
aatttaggcctccct

SEQ ID NO: 434024 - DNA, 15 bp, Homo sapiens
taatttaggcctccc

SEQ ID NO: 434025 - DNA, 15 bp, Homo sapiens
ctaatttaggcctcc

SEQ ID NO: 434026 - DNA, 15 bp, Homo sapiens
tctaatttaggcctc

SEQ ID NO: 434027 - DNA, 15 bp, Homo sapiens
atctaatttaggcct

SEQ ID NO: 434028 - DNA, 15 bp, Homo sapiens
aatctaatttaggcc

SEQ ID NO: 434029 - DNA, 15 bp, Homo sapiens
aaatctaatttaggc

SEQ ID NO: 434030 - DNA, 15 bp, Homo sapiens
taaatctaatttagg

SEQ ID NO: 434031 - DNA, 15 bp, Homo sapiens
gtaaatctaatttag

SEQ ID NO: 434032 - DNA, 15 bp, Homo sapiens
agtaaatctaattta

SEQ ID NO: 434033 - DNA, 15 bp, Homo sapiens
cagtaaatctaattt

SEQ ID NO: 434034 - DNA, 15 bp, Homo sapiens
acagtaaatctaatt

SEQ ID NO: 434035 - DNA, 15 bp, Homo sapiens
gacagtaaatctaat

SEQ ID NO: 434036 - DNA, 15 bp, Homo sapiens
agacagtaaatctaa

SEQ ID NO: 434037 - DNA, 15 bp, Homo sapiens
aagacagtaaatcta

SEQ ID NO: 434038 - DNA, 15 bp, Homo sapiens
aaagacagtaaatct

SEQ ID NO: 434039 - DNA, 15 bp, Homo sapiens
taaagacagtaaatc

SEQ ID NO: 434040 - DNA, 15 bp, Homo sapiens
ataaagacagtaaat

SEQ ID NO: 434041 - DNA, 15 bp, Homo sapiens
tataaagacagtaaa

SEQ ID NO: 434042 - DNA, 15 bp, Homo sapiens
ttataaagacagtaa

SEQ ID NO: 434043 - DNA, 15 bp, Homo sapiens
attataaagacagta

SEQ ID NO: 434044 - DNA, 15 bp, Homo sapiens
cattataaagacagt

SEQ ID NO: 434045 - DNA, 15 bp, Homo sapiens
gcattataaagacag

SEQ ID NO: 434046 - DNA, 15 bp, Homo sapiens
ggcattataaagaca

SEQ ID NO: 434047 - DNA, 15 bp, Homo sapiens
tggcattataaagac

SEQ ID NO: 434048 - DNA, 15 bp, Homo sapiens
atggcattataaaga

SEQ ID NO: 434049 - DNA, 15 bp, Homo sapiens
gatggcattataaag

SEQ ID NO: 434050 - DNA, 15 bp, Homo sapiens
agatggcattataaa

SEQ ID NO: 434051 - DNA, 15 bp, Homo sapiens
aagatggcattataa

SEQ ID NO: 434052 - DNA, 15 bp, Homo sapiens
aaagatggcattata

SEQ ID NO: 434053 - DNA, 15 bp, Homo sapiens
gaaagatggcattat

SEQ ID NO: 434054 - DNA, 15 bp, Homo sapiens
agaaagatggcatta

SEQ ID NO: 434055 - DNA, 15 bp, Homo sapiens
tagaaagatggcatt

SEQ ID NO: 434056 - DNA, 15 bp, Homo sapiens
atagaaagatggcat

SEQ ID NO: 434057 - DNA, 15 bp, Homo sapiens
tatagaaagatggca

SEQ ID NO: 434058 - DNA, 15 bp, Homo sapiens
ttatagaaagatggc

SEQ ID NO: 434059 - DNA, 15 bp, Homo sapiens
tttatagaaagatgg

SEQ ID NO: 434060 - DNA, 15 bp, Homo sapiens
ttttatagaaagatg

SEQ ID NO: 434061 - DNA, 15 bp, Homo sapiens
tttttatagaaagat

SEQ ID NO: 434062 - DNA, 15 bp, Homo sapiens
ttttttatagaaaga

SEQ ID NO: 434063 - DNA, 15 bp, Homo sapiens
tttttttatagaaag

SEQ ID NO: 434064 - DNA, 15 bp, Homo sapiens
ctttttttatagaaa

SEQ ID NO: 434065 - DNA, 15 bp, Homo sapiens
tctttttttatagaa

SEQ ID NO: 434066 - DNA, 15 bp, Homo sapiens
gtctttttttataga

SEQ ID NO: 434067 - DNA, 15 bp, Homo sapiens
agtctttttttatag

SEQ ID NO: 434068 - DNA, 15 bp, Homo sapiens
cagtctttttttata

SEQ ID NO: 434069 - DNA, 15 bp, Homo sapiens
acagtctttttttat

SEQ ID NO: 434070 - DNA, 15 bp, Homo sapiens
tacagtcttttttta

SEQ ID NO: 434071 - DNA, 15 bp, Homo sapiens
atacagtcttttttt

SEQ ID NO: 434072 - DNA, 15 bp, Homo sapiens
gatacagtctttttt

SEQ ID NO: 434073 - DNA, 15 bp, Homo sapiens
agatacagtcttttt

SEQ ID NO: 434074 - DNA, 15 bp, Homo sapiens
gagatacagtctttt

SEQ ID NO: 434075 - DNA, 15 bp, Homo sapiens
tgagatacagtcttt

SEQ ID NO: 434076 - DNA, 15 bp, Homo sapiens
ttgagatacagtctt

SEQ ID NO: 434077 - DNA, 15 bp, Homo sapiens
attgagatacagtct

SEQ ID NO: 434078 - DNA, 15 bp, Homo sapiens
cattgagatacagtc

SEQ ID NO: 434079 - DNA, 15 bp, Homo sapiens
acattgagatacagt

SEQ ID NO: 434080 - DNA, 15 bp, Homo sapiens
aacattgagatacag

SEQ ID NO: 434081 - DNA, 15 bp, Homo sapiens
gaacattgagataca

SEQ ID NO: 434082 - DNA, 15 bp, Homo sapiens
ggaacattgagatac

SEQ ID NO: 434083 - DNA, 15 bp, Homo sapiens
tggaacattgagata

SEQ ID NO: 434084 - DNA, 15 bp, Homo sapiens
atggaacattgagat

SEQ ID NO: 434085 - DNA, 15 bp, Homo sapiens
tatggaacattgaga

SEQ ID NO: 434086 - DNA, 15 bp, Homo sapiens
ttatggaacattgag

SEQ ID NO: 434087 - DNA, 15 bp, Homo sapiens
tttatggaacattga

SEQ ID NO: 434088 - DNA, 15 bp, Homo sapiens
ttttatggaacattg

SEQ ID NO: 434089 - DNA, 15 bp, Homo sapiens
attttatggaacatt

SEQ ID NO: 434090 - DNA, 15 bp, Homo sapiens
tattttatggaacat

SEQ ID NO: 434091 - DNA, 15 bp, Homo sapiens
ttattttatggaaca

SEQ ID NO: 434092 - DNA, 15 bp, Homo sapiens
attattttatggaac

SEQ ID NO: 434093 - DNA, 15 bp, Homo sapiens
tattattttatggaa

SEQ ID NO: 434094 - DNA, 15 bp, Homo sapiens
ctattattttatgga

SEQ ID NO: 434095 - DNA, 15 bp, Homo sapiens
cctattattttatgg

SEQ ID NO: 434096 - DNA, 15 bp, Homo sapiens
acctattattttatg

SEQ ID NO: 434097 - DNA, 15 bp, Homo sapiens
aacctattattttat

SEQ ID NO: 434098 - DNA, 15 bp, Homo sapiens
aaacctattatttta

SEQ ID NO: 434099 - DNA, 15 bp, Homo sapiens
taaacctattatttt

SEQ ID NO: 434100 - DNA, 15 bp, Homo sapiens
gtaaacctattattt

SEQ ID NO: 434101 - DNA, 15 bp, Homo sapiens
agtaaacctattatt

SEQ ID NO: 434102 - DNA, 15 bp, Homo sapiens
aagtaaacctattat

SEQ ID NO: 434103 - DNA, 15 bp, Homo sapiens
aaagtaaacctatta

SEQ ID NO: 434104 - DNA, 15 bp, Homo sapiens
gaaagtaaacctatt

SEQ ID NO: 434105 - DNA, 15 bp, Homo sapiens
agaaagtaaacctat

SEQ ID NO: 434106 - DNA, 15 bp, Homo sapiens
cagaaagtaaaccta

SEQ ID NO: 434107 - DNA, 15 bp, Homo sapiens
acagaaagtaaacct

SEQ ID NO: 434108 - DNA, 15 bp, Homo sapiens
tacagaaagtaaacc

SEQ ID NO: 434109 - DNA, 15 bp, Homo sapiens
atacagaaagtaaac

SEQ ID NO: 434110 - DNA, 15 bp, Homo sapiens
aatacagaaagtaaa

SEQ ID NO: 434111 - DNA, 15 bp, Homo sapiens
gaatacagaaagtaa

SEQ ID NO: 434112 - DNA, 15 bp, Homo sapiens
agaatacagaaagta

SEQ ID NO: 434113 - DNA, 15 bp, Homo sapiens
tagaatacagaaagt

SEQ ID NO: 434114 - DNA, 15 bp, Homo sapiens
atagaatacagaaag

SEQ ID NO: 434115 - DNA, 15 bp, Homo sapiens
aatagaatacagaaa

SEQ ID NO: 434116 - DNA, 15 bp, Homo sapiens
aaatagaatacagaa

SEQ ID NO: 434117 - DNA, 15 bp, Homo sapiens
aaaatagaatacaga

SEQ ID NO: 434118 - DNA, 15 bp, Homo sapiens
caaaatagaatacag

SEQ ID NO: 434119 - DNA, 15 bp, Homo sapiens
acaaaatagaataca

SEQ ID NO: 434120 - DNA, 15 bp, Homo sapiens
aacaaaatagaatac

SEQ ID NO: 434121 - DNA, 15 bp, Homo sapiens
taacaaaatagaata

SEQ ID NO: 434122 - DNA, 15 bp, Homo sapiens
ctaacaaaatagaat

SEQ ID NO: 434123 - DNA, 15 bp, Homo sapiens
actaacaaaatagaa

SEQ ID NO: 434124 - DNA, 15 bp, Homo sapiens
cactaacaaaataga

SEQ ID NO: 434125 - DNA, 15 bp, Homo sapiens
gcactaacaaaatag

SEQ ID NO: 434126 - DNA, 15 bp, Homo sapiens
agcactaacaaaata

SEQ ID NO: 434127 - DNA, 15 bp, Homo sapiens
gagcactaacaaaat

SEQ ID NO: 434128 - DNA, 15 bp, Homo sapiens
ggagcactaacaaaa

SEQ ID NO: 434129 - DNA, 15 bp, Homo sapiens
aggagcactaacaaa

SEQ ID NO: 434130 - DNA, 15 bp, Homo sapiens
taggagcactaacaa

SEQ ID NO: 434131 - DNA, 15 bp, Homo sapiens
ataggagcactaaca

SEQ ID NO: 434132 - DNA, 15 bp, Homo sapiens
tataggagcactaac

SEQ ID NO: 434133 - DNA, 15 bp, Homo sapiens
atataggagcactaa

SEQ ID NO: 434134 - DNA, 15 bp, Homo sapiens
gatataggagcacta

SEQ ID NO: 434135 - DNA, 15 bp, Homo sapiens
ggatataggagcact

SEQ ID NO: 434136 - DNA, 15 bp, Homo sapiens
gggatataggagcac

SEQ ID NO: 434137 - DNA, 15 bp, Homo sapiens
agggatataggagca

SEQ ID NO: 434138 - DNA, 15 bp, Homo sapiens
gagggatataggagc

SEQ ID NO: 434139 - DNA, 15 bp, Homo sapiens
ggagggatataggag

SEQ ID NO: 434140 - DNA, 15 bp, Homo sapiens
gggagggatatagga

SEQ ID NO: 434141 - DNA, 15 bp, Homo sapiens
agggagggatatagg

SEQ ID NO: 434142 - DNA, 15 bp, Homo sapiens
cagggagggatatag

SEQ ID NO: 434143 - DNA, 15 bp, Homo sapiens
acagggagggatata

SEQ ID NO: 434144 - DNA, 15 bp, Homo sapiens
tacagggagggatat

SEQ ID NO: 434145 - DNA, 15 bp, Homo sapiens
ttacagggagggata

SEQ ID NO: 434146 - DNA, 15 bp, Homo sapiens
cttacagggagggat

SEQ ID NO: 434147 - DNA, 15 bp, Homo sapiens
tcttacagggaggga

SEQ ID NO: 434148 - DNA, 15 bp, Homo sapiens
ctcttacagggaggg

SEQ ID NO: 434149 - DNA, 15 bp, Homo sapiens
tctcttacagggagg

SEQ ID NO: 434150 - DNA, 15 bp, Homo sapiens
ctctcttacagggag

SEQ ID NO: 434151 - DNA, 15 bp, Homo sapiens
tctctcttacaggga

SEQ ID NO: 434152 - DNA, 15 bp, Homo sapiens
ttctctcttacaggg

SEQ ID NO: 434153 - DNA, 15 bp, Homo sapiens
tttctctcttacagg

SEQ ID NO: 434154 - DNA, 15 bp, Homo sapiens
ttttctctcttacag

SEQ ID NO: 434155 - DNA, 15 bp, Homo sapiens
attttctctcttaca

SEQ ID NO: 434156 - DNA, 15 bp, Homo sapiens
gattttctctcttac

SEQ ID NO: 434157 - DNA, 15 bp, Homo sapiens
tgattttctctctta

SEQ ID NO: 434158 - DNA, 15 bp, Homo sapiens
ctgattttctctctt

SEQ ID NO: 434159 - DNA, 15 bp, Homo sapiens
tctgattttctctct

SEQ ID NO: 434160 - DNA, 15 bp, Homo sapiens
ttctgattttctctc

SEQ ID NO: 434161 - DNA, 15 bp, Homo sapiens
cttctgattttctct

SEQ ID NO: 434162 - DNA, 15 bp, Homo sapiens
tcttctgattttctc

SEQ ID NO: 434163 - DNA, 15 bp, Homo sapiens
ttcttctgattttct

SEQ ID NO: 434164 - DNA, 15 bp, Homo sapiens
attcttctgattttc

SEQ ID NO: 434165 - DNA, 15 bp, Homo sapiens
aattcttctgatttt

SEQ ID NO: 434166 - DNA, 15 bp, Homo sapiens
aaattcttctgattt

SEQ ID NO: 434167 - DNA, 15 bp, Homo sapiens
caaattcttctgatt

SEQ ID NO: 434168 - DNA, 15 bp, Homo sapiens
ccaaattcttctgat

SEQ ID NO: 434169 - DNA, 15 bp, Homo sapiens
tccaaattcttctga

SEQ ID NO: 434170 - DNA, 15 bp, Homo sapiens
ttccaaattcttctg

SEQ ID NO: 434171 - DNA, 15 bp, Homo sapiens
tttccaaattcttct

SEQ ID NO: 434172 - DNA, 15 bp, Homo sapiens
ctttccaaattcttc

SEQ ID NO: 434173 - DNA, 15 bp, Homo sapiens
actttccaaattctt

SEQ ID NO: 434174 - DNA, 15 bp, Homo sapiens
cactttccaaattct

SEQ ID NO: 434175 - DNA, 15 bp, Homo sapiens
acactttccaaattc

SEQ ID NO: 434176 - DNA, 15 bp, Homo sapiens
gacactttccaaatt

SEQ ID NO: 434177 - DNA, 15 bp, Homo sapiens
tgacactttccaaat

SEQ ID NO: 434178 - DNA, 15 bp, Homo sapiens
atgacactttccaaa

SEQ ID NO: 434179 - DNA, 15 bp, Homo sapiens
catgacactttccaa

SEQ ID NO: 434180 - DNA, 15 bp, Homo sapiens
tcatgacactttcca

SEQ ID NO: 434181 - DNA, 15 bp, Homo sapiens
ttcatgacactttcc

SEQ ID NO: 434182 - DNA, 15 bp, Homo sapiens
attcatgacactttc

SEQ ID NO: 434183 - DNA, 15 bp, Homo sapiens
aattcatgacacttt

SEQ ID NO: 434184 - DNA, 15 bp, Homo sapiens
caattcatgacactt

SEQ ID NO: 434185 - DNA, 15 bp, Homo sapiens
ccaattcatgacact

SEQ ID NO: 434186 - DNA, 15 bp, Homo sapiens
gccaattcatgacac

SEQ ID NO: 434187 - DNA, 15 bp, Homo sapiens
tgccaattcatgaca

SEQ ID NO: 434188 - DNA, 15 bp, Homo sapiens
ttgccaattcatgac

SEQ ID NO: 434189 - DNA, 15 bp, Homo sapiens
gttgccaattcatga

SEQ ID NO: 434190 - DNA, 15 bp, Homo sapiens
tgttgccaattcatg

SEQ ID NO: 434191 - DNA, 15 bp, Homo sapiens
ctgttgccaattcat

SEQ ID NO: 434192 - DNA, 15 bp, Homo sapiens
actgttgccaattca

SEQ ID NO: 434193 - DNA, 15 bp, Homo sapiens
tactgttgccaattc

SEQ ID NO: 434194 - DNA, 15 bp, Homo sapiens
gtactgttgccaatt

SEQ ID NO: 434195 - DNA, 15 bp, Homo sapiens
agtactgttgccaat

SEQ ID NO: 434196 - DNA, 15 bp, Homo sapiens
cagtactgttgccaa

SEQ ID NO: 434197 - DNA, 15 bp, Homo sapiens
ccagtactgttgcca

SEQ ID NO: 434198 - DNA, 15 bp, Homo sapiens
tccagtactgttgcc

SEQ ID NO: 434199 - DNA, 15 bp, Homo sapiens
ttccagtactgttgc

SEQ ID NO: 434200 - DNA, 15 bp, Homo sapiens
tttccagtactgttg

SEQ ID NO: 434201 - DNA, 15 bp, Homo sapiens
ctttccagtactgtt

SEQ ID NO: 434202 - DNA, 15 bp, Homo sapiens
tctttccagtactgt

SEQ ID NO: 434203 - DNA, 15 bp, Homo sapiens
atctttccagtactg

SEQ ID NO: 434204 - DNA, 15 bp, Homo sapiens
catctttccagtact

SEQ ID NO: 434205 - DNA, 15 bp, Homo sapiens
tcatctttccagtac

SEQ ID NO: 434206 - DNA, 15 bp, Homo sapiens
ctcatctttccagta

SEQ ID NO: 434207 - DNA, 15 bp, Homo sapiens
tctcatctttccagt

SEQ ID NO: 434208 - DNA, 15 bp, Homo sapiens
atctcatctttccag

SEQ ID NO: 434209 - DNA, 15 bp, Homo sapiens
aatctcatctttcca

SEQ ID NO: 434210 - DNA, 15 bp, Homo sapiens
caatctcatctttcc

SEQ ID NO: 434211 - DNA, 15 bp, Homo sapiens
ccaatctcatctttc

SEQ ID NO: 434212 - DNA, 15 bp, Homo sapiens
accaatctcatcttt

SEQ ID NO: 434213 - DNA, 15 bp, Homo sapiens
aaccaatctcatctt

SEQ ID NO: 434214 - DNA, 15 bp, Homo sapiens
gaaccaatctcatct

SEQ ID NO: 434215 - DNA, 15 bp, Homo sapiens
ggaaccaatctcatc

SEQ ID NO: 434216 - DNA, 15 bp, Homo sapiens
gggaaccaatctcat

SEQ ID NO: 434217 - DNA, 15 bp, Homo sapiens
tgggaaccaatctca

SEQ ID NO: 434218 - DNA, 15 bp, Homo sapiens
ctgggaaccaatctc

SEQ ID NO: 434219 - DNA, 15 bp, Homo sapiens
gctgggaaccaatct

SEQ ID NO: 434220 - DNA, 15 bp, Homo sapiens
ggctgggaaccaatc

SEQ ID NO: 434221 - DNA, 15 bp, Homo sapiens
tggctgggaaccaat

SEQ ID NO: 434222 - DNA, 15 bp, Homo sapiens
atggctgggaaccaa

SEQ ID NO: 434223 - DNA, 15 bp, Homo sapiens
aatggctgggaacca

SEQ ID NO: 434224 - DNA, 15 bp, Homo sapiens
aaatggctgggaacc

SEQ ID NO: 434225 - DNA, 15 bp, Homo sapiens
taaatggctgggaac

SEQ ID NO: 434226 - DNA, 15 bp, Homo sapiens
gtaaatggctgggaa

SEQ ID NO: 434227 - DNA, 15 bp, Homo sapiens
agtaaatggctggga

SEQ ID NO: 434228 - DNA, 15 bp, Homo sapiens
aagtaaatggctggg

SEQ ID NO: 434229 - DNA, 15 bp, Homo sapiens
caagtaaatggctgg

SEQ ID NO: 434230 - DNA, 15 bp, Homo sapiens
gcaagtaaatggctg

SEQ ID NO: 434231 - DNA, 15 bp, Homo sapiens
agcaagtaaatggct

SEQ ID NO: 434232 - DNA, 15 bp, Homo sapiens
tagcaagtaaatggc

SEQ ID NO: 434233 - DNA, 15 bp, Homo sapiens
atagcaagtaaatgg

SEQ ID NO: 434234 - DNA, 15 bp, Homo sapiens
aatagcaagtaaatg

SEQ ID NO: 434235 - DNA, 15 bp, Homo sapiens
aaatagcaagtaaat

SEQ ID NO: 434236 - DNA, 15 bp, Homo sapiens
aaaatagcaagtaaa

SEQ ID NO: 434237 - DNA, 15 bp, Homo sapiens
taaaatagcaagtaa

SEQ ID NO: 434238 - DNA, 15 bp, Homo sapiens
ttaaaatagcaagta

SEQ ID NO: 434239 - DNA, 15 bp, Homo sapiens
attaaaatagcaagt

SEQ ID NO: 434240 - DNA, 15 bp, Homo sapiens
gattaaaatagcaag

SEQ ID NO: 434241 - DNA, 15 bp, Homo sapiens
tgattaaaatagcaa

SEQ ID NO: 434242 - DNA, 15 bp, Homo sapiens
ttgattaaaatagca

SEQ ID NO: 434243 - DNA, 15 bp, Homo sapiens
gttgattaaaatagc

SEQ ID NO: 434244 - DNA, 15 bp, Homo sapiens
tgttgattaaaatag

SEQ ID NO: 434245 - DNA, 15 bp, Homo sapiens
atgttgattaaaata

SEQ ID NO: 434246 - DNA, 15 bp, Homo sapiens
gatgttgattaaaat

SEQ ID NO: 434247 - DNA, 15 bp, Homo sapiens
tgatgttgattaaaa

SEQ ID NO: 434248 - DNA, 15 bp, Homo sapiens
ttgatgttgattaaa

SEQ ID NO: 434249 - DNA, 15 bp, Homo sapiens
tttgatgttgattaa

SEQ ID NO: 434250 - DNA, 15 bp, Homo sapiens
ctttgatgttgatta

SEQ ID NO: 434251 - DNA, 15 bp, Homo sapiens
cctttgatgttgatt

SEQ ID NO: 434252 - DNA, 15 bp, Homo sapiens
acctttgatgttgat

SEQ ID NO: 434253 - DNA, 15 bp, Homo sapiens
tacctttgatgttga

SEQ ID NO: 434254 - DNA, 15 bp, Homo sapiens
ttacctttgatgttg

SEQ ID NO: 434255 - DNA, 15 bp, Homo sapiens
cttacctttgatgtt

SEQ ID NO: 434256 - DNA, 15 bp, Homo sapiens
acttacctttgatgt

SEQ ID NO: 434257 - DNA, 15 bp, Homo sapiens
gacttacctttgatg

SEQ ID NO: 434258 - DNA, 15 bp, Homo sapiens
tgacttacctttgat

SEQ ID NO: 434259 - DNA, 15 bp, Homo sapiens
ttgacttacctttga

SEQ ID NO: 434260 - DNA, 15 bp, Homo sapiens
attgacttacctttg

SEQ ID NO: 434261 - DNA, 15 bp, Homo sapiens
tattgacttaccttt

SEQ ID NO: 434262 - DNA, 15 bp, Homo sapiens
atattgacttacctt

SEQ ID NO: 434263 - DNA, 15 bp, Homo sapiens
aatattgacttacct

SEQ ID NO: 434264 - DNA, 15 bp, Homo sapiens
aaatattgacttacc

SEQ ID NO: 434265 - DNA, 15 bp, Homo sapiens
caaatattgacttac

SEQ ID NO: 434266 - DNA, 15 bp, Homo sapiens
gcaaatattgactta

SEQ ID NO: 434267 - DNA, 15 bp, Homo sapiens
tgcaaatattgactt

SEQ ID NO: 434268 - DNA, 15 bp, Homo sapiens
atgcaaatattgact

SEQ ID NO: 434269 - DNA, 15 bp, Homo sapiens
catgcaaatattgac

SEQ ID NO: 434270 - DNA, 15 bp, Homo sapiens
acatgcaaatattga

SEQ ID NO: 434271 - DNA, 15 bp, Homo sapiens
cacatgcaaatattg

SEQ ID NO: 434272 - DNA, 15 bp, Homo sapiens
gcacatgcaaatatt

SEQ ID NO: 434273 - DNA, 15 bp, Homo sapiens
cgcacatgcaaatat

SEQ ID NO: 434274 - DNA, 15 bp, Homo sapiens
acgcacatgcaaata

SEQ ID NO: 434275 - DNA, 15 bp, Homo sapiens
cacgcacatgcaaat

SEQ ID NO: 434276 - DNA, 15 bp, Homo sapiens
acacgcacatgcaaa

SEQ ID NO: 434277 - DNA, 15 bp, Homo sapiens
aacacgcacatgcaa

SEQ ID NO: 434278 - DNA, 15 bp, Homo sapiens
taacacgcacatgca

SEQ ID NO: 434279 - DNA, 15 bp, Homo sapiens
ttaacacgcacatgc

SEQ ID NO: 434280 - DNA, 15 bp, Homo sapiens
tttaacacgcacatg

SEQ ID NO: 434281 - DNA, 15 bp, Homo sapiens
ttttaacacgcacat

SEQ ID NO: 434282 - DNA, 15 bp, Homo sapiens
attttaacacgcaca

SEQ ID NO: 434283 - DNA, 15 bp, Homo sapiens
aattttaacacgcac

SEQ ID NO: 434284 - DNA, 15 bp, Homo sapiens
caattttaacacgca

SEQ ID NO: 434285 - DNA, 15 bp, Homo sapiens
acaattttaacacgc

SEQ ID NO: 434286 - DNA, 15 bp, Homo sapiens
aacaattttaacacg

SEQ ID NO: 434287 - DNA, 15 bp, Homo sapiens
aaacaattttaacac

SEQ ID NO: 434288 - DNA, 15 bp, Homo sapiens
caaacaattttaaca

SEQ ID NO: 434289 - DNA, 15 bp, Homo sapiens
acaaacaattttaac

SEQ ID NO: 434290 - DNA, 15 bp, Homo sapiens
tacaaacaattttaa

SEQ ID NO: 434291 - DNA, 15 bp, Homo sapiens
ctacaaacaatttta

SEQ ID NO: 434292 - DNA, 15 bp, Homo sapiens
tctacaaacaatttt

SEQ ID NO: 434293 - DNA, 15 bp, Homo sapiens
gtctacaaacaattt

SEQ ID NO: 434294 - DNA, 15 bp, Homo sapiens
agtctacaaacaatt

SEQ ID NO: 434295 - DNA, 15 bp, Homo sapiens
gagtctacaaacaat

SEQ ID NO: 434296 - DNA, 15 bp, Homo sapiens
agagtctacaaacaa

SEQ ID NO: 434297 - DNA, 15 bp, Homo sapiens
cagagtctacaaaca

SEQ ID NO: 434298 - DNA, 15 bp, Homo sapiens
gcagagtctacaaac

SEQ ID NO: 434299 - DNA, 15 bp, Homo sapiens
tgcagagtctacaaa

SEQ ID NO: 434300 - DNA, 15 bp, Homo sapiens
ctgcagagtctacaa

SEQ ID NO: 434301 - DNA, 15 bp, Homo sapiens
gctgcagagtctaca

SEQ ID NO: 434302 - DNA, 15 bp, Homo sapiens
agctgcagagtctac

SEQ ID NO: 434303 - DNA, 15 bp, Homo sapiens
aagctgcagagtcta

SEQ ID NO: 434304 - DNA, 15 bp, Homo sapiens
taagctgcagagtct

SEQ ID NO: 434305 - DNA, 15 bp, Homo sapiens
ataagctgcagagtc

SEQ ID NO: 434306 - DNA, 15 bp, Homo sapiens
aataagctgcagagt

SEQ ID NO: 434307 - DNA, 15 bp, Homo sapiens
taataagctgcagag

SEQ ID NO: 434308 - DNA, 15 bp, Homo sapiens
gtaataagctgcaga

SEQ ID NO: 434309 - DNA, 15 bp, Homo sapiens
tgtaataagctgcag

SEQ ID NO: 434310 - DNA, 15 bp, Homo sapiens
gtgtaataagctgca

SEQ ID NO: 434311 - DNA, 15 bp, Homo sapiens
agtgtaataagctgc

SEQ ID NO: 434312 - DNA, 15 bp, Homo sapiens
cagtgtaataagctg

SEQ ID NO: 434313 - DNA, 15 bp, Homo sapiens
acagtgtaataagct

SEQ ID NO: 434314 - DNA, 15 bp, Homo sapiens
aacagtgtaataagc

SEQ ID NO: 434315 - DNA, 15 bp, Homo sapiens
taacagtgtaataag

SEQ ID NO: 434316 - DNA, 15 bp, Homo sapiens
ataacagtgtaataa

SEQ ID NO: 434317 - DNA, 15 bp, Homo sapiens
tataacagtgtaata

SEQ ID NO: 434318 - DNA, 15 bp, Homo sapiens
atataacagtgtaat

SEQ ID NO: 434319 - DNA, 15 bp, Homo sapiens
gatataacagtgtaa

SEQ ID NO: 434320 - DNA, 15 bp, Homo sapiens
cgatataacagtgta

SEQ ID NO: 434321 - DNA, 15 bp, Homo sapiens
acgatataacagtgt

SEQ ID NO: 434322 - DNA, 15 bp, Homo sapiens
tacgatataacagtg

SEQ ID NO: 434323 - DNA, 15 bp, Homo sapiens
ctacgatataacagt

SEQ ID NO: 434324 - DNA, 15 bp, Homo sapiens
tctacgatataacag

SEQ ID NO: 434325 - DNA, 15 bp, Homo sapiens
atctacgatataaca

SEQ ID NO: 434326 - DNA, 15 bp, Homo sapiens
aatctacgatataac

SEQ ID NO: 434327 - DNA, 15 bp, Homo sapiens
taatctacgatataa

SEQ ID NO: 434328 - DNA, 15 bp, Homo sapiens
ataatctacgatata

SEQ ID NO: 434329 - DNA, 15 bp, Homo sapiens
cataatctacgatat

SEQ ID NO: 434330 - DNA, 15 bp, Homo sapiens
gcataatctacgata

SEQ ID NO: 434331 - DNA, 15 bp, Homo sapiens
ggcataatctacgat

SEQ ID NO: 434332 - DNA, 15 bp, Homo sapiens
gggcataatctacga

SEQ ID NO: 434333 - DNA, 15 bp, Homo sapiens
tgggcataatctacg

SEQ ID NO: 434334 - DNA, 15 bp, Homo sapiens
gtgggcataatctac

SEQ ID NO: 434335 - DNA, 15 bp, Homo sapiens
agtgggcataatcta

SEQ ID NO: 434336 - DNA, 15 bp, Homo sapiens
aagtgggcataatct

SEQ ID NO: 434337 - DNA, 15 bp, Homo sapiens
caagtgggcataatc

SEQ ID NO: 434338 - DNA, 15 bp, Homo sapiens
tcaagtgggcataat

SEQ ID NO: 434339 - DNA, 15 bp, Homo sapiens
gtcaagtgggcataa

SEQ ID NO: 434340 - DNA, 15 bp, Homo sapiens
tgtcaagtgggcata

SEQ ID NO: 434341 - DNA, 15 bp, Homo sapiens
ctgtcaagtgggcat

SEQ ID NO: 434342 - DNA, 15 bp, Homo sapiens
gctgtcaagtgggca

SEQ ID NO: 434343 - DNA, 15 bp, Homo sapiens
tgctgtcaagtgggc

SEQ ID NO: 434344 - DNA, 15 bp, Homo sapiens
atgctgtcaagtggg

SEQ ID NO: 434345 - DNA, 15 bp, Homo sapiens
catgctgtcaagtgg

SEQ ID NO: 434346 - DNA, 15 bp, Homo sapiens
ccatgctgtcaagtg

SEQ ID NO: 434347 - DNA, 15 bp, Homo sapiens
tccatgctgtcaagt

SEQ ID NO: 434348 - DNA, 15 bp, Homo sapiens
ctccatgctgtcaag

SEQ ID NO: 434349 - DNA, 15 bp, Homo sapiens
tctccatgctgtcaa

SEQ ID NO: 434350 - DNA, 15 bp, Homo sapiens
atctccatgctgtca

SEQ ID NO: 434351 - DNA, 15 bp, Homo sapiens
tatctccatgctgtc

SEQ ID NO: 434352 - DNA, 15 bp, Homo sapiens
ctatctccatgctgt

SEQ ID NO: 434353 - DNA, 15 bp, Homo sapiens
gctatctccatgctg

SEQ ID NO: 434354 - DNA, 15 bp, Homo sapiens
ggctatctccatgct

SEQ ID NO: 434355 - DNA, 15 bp, Homo sapiens
aggctatctccatgc

SEQ ID NO: 434356 - DNA, 15 bp, Homo sapiens
gaggctatctccatg

SEQ ID NO: 434357 - DNA, 15 bp, Homo sapiens
tgaggctatctccat

SEQ ID NO: 434358 - DNA, 15 bp, Homo sapiens
ttgaggctatctcca

SEQ ID NO: 434359 - DNA, 15 bp, Homo sapiens
gttgaggctatctcc

SEQ ID NO: 434360 - DNA, 15 bp, Homo sapiens
agttgaggctatctc

SEQ ID NO: 434361 - DNA, 15 bp, Homo sapiens
gagttgaggctatct

SEQ ID NO: 434362 - DNA, 15 bp, Homo sapiens
agagttgaggctatc

SEQ ID NO: 434363 - DNA, 15 bp, Homo sapiens
aagagttgaggctat

SEQ ID NO: 434364 - DNA, 15 bp, Homo sapiens
gaagagttgaggcta

SEQ ID NO: 434365 - DNA, 15 bp, Homo sapiens
agaagagttgaggct

SEQ ID NO: 434366 - DNA, 15 bp, Homo sapiens
aagaagagttgaggc

SEQ ID NO: 434367 - DNA, 15 bp, Homo sapiens
aaagaagagttgagg

SEQ ID NO: 434368 - DNA, 15 bp, Homo sapiens
caaagaagagttgag

SEQ ID NO: 434369 - DNA, 15 bp, Homo sapiens
gcaaagaagagttga

SEQ ID NO: 434370 - DNA, 15 bp, Homo sapiens
cgcaaagaagagttg

SEQ ID NO: 434371 - DNA, 15 bp, Homo sapiens
acgcaaagaagagtt

SEQ ID NO: 434372 - DNA, 15 bp, Homo sapiens
cacgcaaagaagagt

SEQ ID NO: 434373 - DNA, 15 bp, Homo sapiens
acacgcaaagaagag

SEQ ID NO: 434374 - DNA, 15 bp, Homo sapiens
tacacgcaaagaaga

SEQ ID NO: 434375 - DNA, 15 bp, Homo sapiens
ttacacgcaaagaag

SEQ ID NO: 434376 - DNA, 15 bp, Homo sapiens
attacacgcaaagaa

SEQ ID NO: 434377 - DNA, 15 bp, Homo sapiens
aattacacgcaaaga

SEQ ID NO: 434378 - DNA, 15 bp, Homo sapiens
taattacacgcaaag

SEQ ID NO: 434379 - DNA, 15 bp, Homo sapiens
ctaattacacgcaaa

SEQ ID NO: 434380 - DNA, 15 bp, Homo sapiens
cctaattacacgcaa

SEQ ID NO: 434381 - DNA, 15 bp, Homo sapiens
ccctaattacacgca

SEQ ID NO: 434382 - DNA, 15 bp, Homo sapiens
tccctaattacacgc

SEQ ID NO: 434383 - DNA, 15 bp, Homo sapiens
ttccctaattacacg

SEQ ID NO: 434384 - DNA, 15 bp, Homo sapiens
tttccctaattacac

SEQ ID NO: 434385 - DNA, 15 bp, Homo sapiens
gtttccctaattaca

SEQ ID NO: 434386 - DNA, 15 bp, Homo sapiens
ggtttccctaattac

SEQ ID NO: 434387 - DNA, 15 bp, Homo sapiens
gggtttccctaatta

SEQ ID NO: 434388 - DNA, 15 bp, Homo sapiens
tgggtttccctaatt

SEQ ID NO: 434389 - DNA, 15 bp, Homo sapiens
atgggtttccctaat

SEQ ID NO: 434390 - DNA, 15 bp, Homo sapiens
tatgggtttccctaa

SEQ ID NO: 434391 - DNA, 15 bp, Homo sapiens
atatgggtttcccta

SEQ ID NO: 434392 - DNA, 15 bp, Homo sapiens
tatatgggtttccct

SEQ ID NO: 434393 - DNA, 15 bp, Homo sapiens
ttatatgggtttccc

SEQ ID NO: 434394 - DNA, 15 bp, Homo sapiens
attatatgggtttcc

SEQ ID NO: 434395 - DNA, 15 bp, Homo sapiens
cattatatgggtttc

SEQ ID NO: 434396 - DNA, 15 bp, Homo sapiens
tcattatatgggttt

SEQ ID NO: 434397 - DNA, 15 bp, Homo sapiens
ttcattatatgggtt

SEQ ID NO: 434398 - DNA, 15 bp, Homo sapiens
attcattatatgggt

SEQ ID NO: 434399 - DNA, 15 bp, Homo sapiens
gattcattatatggg

SEQ ID NO: 434400 - DNA, 15 bp, Homo sapiens
agattcattatatgg

SEQ ID NO: 434401 - DNA, 15 bp, Homo sapiens
cagattcattatatg

SEQ ID NO: 434402 - DNA, 15 bp, Homo sapiens
gcagattcattatat

SEQ ID NO: 434403 - DNA, 15 bp, Homo sapiens
tgcagattcattata

SEQ ID NO: 434404 - DNA, 15 bp, Homo sapiens
ctgcagattcattat

SEQ ID NO: 434405 - DNA, 15 bp, Homo sapiens
cctgcagattcatta

SEQ ID NO: 434406 - DNA, 15 bp, Homo sapiens
tcctgcagattcatt

SEQ ID NO: 434407 - DNA, 15 bp, Homo sapiens
gtcctgcagattcat

SEQ ID NO: 434408 - DNA, 15 bp, Homo sapiens
tgtcctgcagattca

SEQ ID NO: 434409 - DNA, 15 bp, Homo sapiens
ctgtcctgcagattc

SEQ ID NO: 434410 - DNA, 15 bp, Homo sapiens
tctgtcctgcagatt

SEQ ID NO: 434411 - DNA, 15 bp, Homo sapiens
ctctgtcctgcagat

SEQ ID NO: 434412 - DNA, 15 bp, Homo sapiens
tctctgtcctgcaga

SEQ ID NO: 434413 - DNA, 15 bp, Homo sapiens
ttctctgtcctgcag

SEQ ID NO: 434414 - DNA, 15 bp, Homo sapiens
tttctctgtcctgca

SEQ ID NO: 434415 - DNA, 15 bp, Homo sapiens
ttttctctgtcctgc

SEQ ID NO: 434416 - DNA, 15 bp, Homo sapiens
tttttctctgtcctg

SEQ ID NO: 434417 - DNA, 15 bp, Homo sapiens
ctttttctctgtcct

SEQ ID NO: 434418 - DNA, 15 bp, Homo sapiens
tctttttctctgtcc

SEQ ID NO: 434419 - DNA, 15 bp, Homo sapiens
gtctttttctctgtc

SEQ ID NO: 434420 - DNA, 15 bp, Homo sapiens
agtctttttctctgt

SEQ ID NO: 434421 - DNA, 15 bp, Homo sapiens
aagtctttttctctg

SEQ ID NO: 434422 - DNA, 15 bp, Homo sapiens
caagtctttttctct

SEQ ID NO: 434423 - DNA, 15 bp, Homo sapiens
acaagtctttttctc

SEQ ID NO: 434424 - DNA, 15 bp, Homo sapiens
cacaagtctttttct

SEQ ID NO: 434425 - DNA, 15 bp, Homo sapiens
acacaagtctttttc

SEQ ID NO: 434426 - DNA, 15 bp, Homo sapiens
aacacaagtcttttt

SEQ ID NO: 434427 - DNA, 15 bp, Homo sapiens
caacacaagtctttt

SEQ ID NO: 434428 - DNA, 15 bp, Homo sapiens
acaacacaagtcttt

SEQ ID NO: 434429 - DNA, 15 bp, Homo sapiens
tacaacacaagtctt

SEQ ID NO: 434430 - DNA, 15 bp, Homo sapiens
gtacaacacaagtct

SEQ ID NO: 434431 - DNA, 15 bp, Homo sapiens
tgtacaacacaagtc

SEQ ID NO: 434432 - DNA, 15 bp, Homo sapiens
gtgtacaacacaagt

SEQ ID NO: 434433 - DNA, 15 bp, Homo sapiens
ggtgtacaacacaag

SEQ ID NO: 434434 - DNA, 15 bp, Homo sapiens
aggtgtacaacacaa

SEQ ID NO: 434435 - DNA, 15 bp, Homo sapiens
aaggtgtacaacaca

SEQ ID NO: 434436 - DNA, 15 bp, Homo sapiens
taaggtgtacaacac

SEQ ID NO: 434437 - DNA, 15 bp, Homo sapiens
gtaaggtgtacaaca

SEQ ID NO: 434438 - DNA, 15 bp, Homo sapiens
ggtaaggtgtacaac

SEQ ID NO: 434439 - DNA, 15 bp, Homo sapiens
gggtaaggtgtacaa

SEQ ID NO: 434440 - DNA, 15 bp, Homo sapiens
agggtaaggtgtaca

SEQ ID NO: 434441 - DNA, 15 bp, Homo sapiens
cagggtaaggtgtac

SEQ ID NO: 434442 - DNA, 15 bp, Homo sapiens
acagggtaaggtgta

SEQ ID NO: 434443 - DNA, 15 bp, Homo sapiens
cacagggtaaggtgt

SEQ ID NO: 434444 - DNA, 15 bp, Homo sapiens
tcacagggtaaggtg

SEQ ID NO: 434445 - DNA, 15 bp, Homo sapiens
ttcacagggtaaggt

SEQ ID NO: 434446 - DNA, 15 bp, Homo sapiens
attcacagggtaagg

SEQ ID NO: 434447 - DNA, 15 bp, Homo sapiens
tattcacagggtaag

SEQ ID NO: 434448 - DNA, 15 bp, Homo sapiens
atattcacagggtaa

SEQ ID NO: 434449 - DNA, 15 bp, Homo sapiens
tatattcacagggta

SEQ ID NO: 434450 - DNA, 15 bp, Homo sapiens
gtatattcacagggt

SEQ ID NO: 434451 - DNA, 15 bp, Homo sapiens
agtatattcacaggg

SEQ ID NO: 434452 - DNA, 15 bp, Homo sapiens
tagtatattcacagg

SEQ ID NO: 434453 - DNA, 15 bp, Homo sapiens
gtagtatattcacag

SEQ ID NO: 434454 - DNA, 15 bp, Homo sapiens
tgtagtatattcaca

SEQ ID NO: 434455 - DNA, 15 bp, Homo sapiens
ttgtagtatattcac

SEQ ID NO: 434456 - DNA, 15 bp, Homo sapiens
tttgtagtatattca

SEQ ID NO: 434457 - DNA, 15 bp, Homo sapiens
ttttgtagtatattc

SEQ ID NO: 434458 - DNA, 15 bp, Homo sapiens
attttgtagtatatt

SEQ ID NO: 434459 - DNA, 15 bp, Homo sapiens
cattttgtagtatat

SEQ ID NO: 434460 - DNA, 15 bp, Homo sapiens
tcattttgtagtata

SEQ ID NO: 434461 - DNA, 15 bp, Homo sapiens
atcattttgtagtat

SEQ ID NO: 434462 - DNA, 15 bp, Homo sapiens
tatcattttgtagta

SEQ ID NO: 434463 - DNA, 15 bp, Homo sapiens
ctatcattttgtagt

SEQ ID NO: 434464 - DNA, 15 bp, Homo sapiens
actatcattttgtag

SEQ ID NO: 434465 - DNA, 15 bp, Homo sapiens
cactatcattttgta

SEQ ID NO: 434466 - DNA, 15 bp, Homo sapiens
tcactatcattttgt

SEQ ID NO: 434467 - DNA, 15 bp, Homo sapiens
gtcactatcattttg

SEQ ID NO: 434468 - DNA, 15 bp, Homo sapiens
agtcactatcatttt

SEQ ID NO: 434469 - DNA, 15 bp, Homo sapiens
aagtcactatcattt

SEQ ID NO: 434470 - DNA, 15 bp, Homo sapiens
aaagtcactatcatt

SEQ ID NO: 434471 - DNA, 15 bp, Homo sapiens
taaagtcactatcat

SEQ ID NO: 434472 - DNA, 15 bp, Homo sapiens
ctaaagtcactatca

SEQ ID NO: 434473 - DNA, 15 bp, Homo sapiens
cctaaagtcactatc

SEQ ID NO: 434474 - DNA, 15 bp, Homo sapiens
acctaaagtcactat

SEQ ID NO: 434475 - DNA, 15 bp, Homo sapiens
tacctaaagtcacta

SEQ ID NO: 434476 - DNA, 15 bp, Homo sapiens
ctacctaaagtcact

SEQ ID NO: 434477 - DNA, 15 bp, Homo sapiens
cctacctaaagtcac

SEQ ID NO: 434478 - DNA, 15 bp, Homo sapiens
tcctacctaaagtca

SEQ ID NO: 434479 - DNA, 15 bp, Homo sapiens
ttcctacctaaagtc

SEQ ID NO: 434480 - DNA, 15 bp, Homo sapiens
gttcctacctaaagt

SEQ ID NO: 434481 - DNA, 15 bp, Homo sapiens
tgttcctacctaaag

SEQ ID NO: 434482 - DNA, 15 bp, Homo sapiens
atgttcctacctaaa

SEQ ID NO: 434483 - DNA, 15 bp, Homo sapiens
aatgttcctacctaa

SEQ ID NO: 434484 - DNA, 15 bp, Homo sapiens
taatgttcctaccta

SEQ ID NO: 434485 - DNA, 15 bp, Homo sapiens
gtaatgttcctacct

SEQ ID NO: 434486 - DNA, 15 bp, Homo sapiens
agtaatgttcctacc

SEQ ID NO: 434487 - DNA, 15 bp, Homo sapiens
aagtaatgttcctac

SEQ ID NO: 434488 - DNA, 15 bp, Homo sapiens
aaagtaatgttccta

SEQ ID NO: 434489 - DNA, 15 bp, Homo sapiens
caaagtaatgttcct

SEQ ID NO: 434490 - DNA, 15 bp, Homo sapiens
gcaaagtaatgttcc

SEQ ID NO: 434491 - DNA, 15 bp, Homo sapiens
tgcaaagtaatgttc

SEQ ID NO: 434492 - DNA, 15 bp, Homo sapiens
atgcaaagtaatgtt

SEQ ID NO: 434493 - DNA, 15 bp, Homo sapiens
aatgcaaagtaatgt

SEQ ID NO: 434494 - DNA, 15 bp, Homo sapiens
aaatgcaaagtaatg

SEQ ID NO: 434495 - DNA, 15 bp, Homo sapiens
gaaatgcaaagtaat

SEQ ID NO: 434496 - DNA, 15 bp, Homo sapiens
ggaaatgcaaagtaa

SEQ ID NO: 434497 - DNA, 15 bp, Homo sapiens
aggaaatgcaaagta

SEQ ID NO: 434498 - DNA, 15 bp, Homo sapiens
taggaaatgcaaagt

SEQ ID NO: 434499 - DNA, 15 bp, Homo sapiens
ttaggaaatgcaaag

SEQ ID NO: 434500 - DNA, 15 bp, Homo sapiens
cttaggaaatgcaaa

SEQ ID NO: 434501 - DNA, 15 bp, Homo sapiens
tcttaggaaatgcaa

SEQ ID NO: 434502 - DNA, 15 bp, Homo sapiens
ttcttaggaaatgca

SEQ ID NO: 434503 - DNA, 15 bp, Homo sapiens
attcttaggaaatgc

SEQ ID NO: 434504 - DNA, 15 bp, Homo sapiens
aattcttaggaaatg

SEQ ID NO: 434505 - DNA, 15 bp, Homo sapiens
caattcttaggaaat

SEQ ID NO: 434506 - DNA, 15 bp, Homo sapiens
gcaattcttaggaaa

SEQ ID NO: 434507 - DNA, 15 bp, Homo sapiens
tgcaattcttaggaa

SEQ ID NO: 434508 - DNA, 15 bp, Homo sapiens
ctgcaattcttagga

SEQ ID NO: 434509 - DNA, 15 bp, Homo sapiens
tctgcaattcttagg

SEQ ID NO: 434510 - DNA, 15 bp, Homo sapiens
atctgcaattcttag

SEQ ID NO: 434511 - DNA, 15 bp, Homo sapiens
aatctgcaattctta

SEQ ID NO: 434512 - DNA, 15 bp, Homo sapiens
caatctgcaattctt

SEQ ID NO: 434513 - DNA, 15 bp, Homo sapiens
tcaatctgcaattct

SEQ ID NO: 434514 - DNA, 15 bp, Homo sapiens
atcaatctgcaattc

SEQ ID NO: 434515 - DNA, 15 bp, Homo sapiens
catcaatctgcaatt

SEQ ID NO: 434516 - DNA, 15 bp, Homo sapiens
gcatcaatctgcaat

SEQ ID NO: 434517 - DNA, 15 bp, Homo sapiens
tgcatcaatctgcaa

SEQ ID NO: 434518 - DNA, 15 bp, Homo sapiens
gtgcatcaatctgca

SEQ ID NO: 434519 - DNA, 15 bp, Homo sapiens
tgtgcatcaatctgc

SEQ ID NO: 434520 - DNA, 15 bp, Homo sapiens
atgtgcatcaatctg

SEQ ID NO: 434521 - DNA, 15 bp, Homo sapiens
tatgtgcatcaatct

SEQ ID NO: 434522 - DNA, 15 bp, Homo sapiens
ttatgtgcatcaatc

SEQ ID NO: 434523 - DNA, 15 bp, Homo sapiens
cttatgtgcatcaat

SEQ ID NO: 434524 - DNA, 15 bp, Homo sapiens
gcttatgtgcatcaa

SEQ ID NO: 434525 - DNA, 15 bp, Homo sapiens
agcttatgtgcatca

SEQ ID NO: 434526 - DNA, 15 bp, Homo sapiens
tagcttatgtgcatc

SEQ ID NO: 434527 - DNA, 15 bp, Homo sapiens
ttagcttatgtgcat

SEQ ID NO: 434528 - DNA, 15 bp, Homo sapiens
cttagcttatgtgca

SEQ ID NO: 434529 - DNA, 15 bp, Homo sapiens
gcttagcttatgtgc

SEQ ID NO: 434530 - DNA, 15 bp, Homo sapiens
tgcttagcttatgtg

SEQ ID NO: 434531 - DNA, 15 bp, Homo sapiens
ttgcttagcttatgt

SEQ ID NO: 434532 - DNA, 15 bp, Homo sapiens
attgcttagcttatg

SEQ ID NO: 434533 - DNA, 15 bp, Homo sapiens
cattgcttagcttat

SEQ ID NO: 434534 - DNA, 15 bp, Homo sapiens
acattgcttagctta

SEQ ID NO: 434535 - DNA, 15 bp, Homo sapiens
cacattgcttagctt

SEQ ID NO: 434536 - DNA, 15 bp, Homo sapiens
gcacattgcttagct

SEQ ID NO: 434537 - DNA, 15 bp, Homo sapiens
tgcacattgcttagc

SEQ ID NO: 434538 - DNA, 15 bp, Homo sapiens
ctgcacattgcttag

SEQ ID NO: 434539 - DNA, 15 bp, Homo sapiens
tctgcacattgctta

SEQ ID NO: 434540 - DNA, 15 bp, Homo sapiens
atctgcacattgctt

SEQ ID NO: 434541 - DNA, 15 bp, Homo sapiens
aatctgcacattgct

SEQ ID NO: 434542 - DNA, 15 bp, Homo sapiens
aaatctgcacattgc

SEQ ID NO: 434543 - DNA, 15 bp, Homo sapiens
caaatctgcacattg

SEQ ID NO: 434544 - DNA, 15 bp, Homo sapiens
gcaaatctgcacatt

SEQ ID NO: 434545 - DNA, 15 bp, Homo sapiens
ggcaaatctgcacat

SEQ ID NO: 434546 - DNA, 15 bp, Homo sapiens
tggcaaatctgcaca

SEQ ID NO: 434547 - DNA, 15 bp, Homo sapiens
ctggcaaatctgcac

SEQ ID NO: 434548 - DNA, 15 bp, Homo sapiens
gctggcaaatctgca

SEQ ID NO: 434549 - DNA, 15 bp, Homo sapiens
tgctggcaaatctgc

SEQ ID NO: 434550 - DNA, 15 bp, Homo sapiens
gtgctggcaaatctg

SEQ ID NO: 434551 - DNA, 15 bp, Homo sapiens
agtgctggcaaatct

SEQ ID NO: 434552 - DNA, 15 bp, Homo sapiens
aagtgctggcaaatc

SEQ ID NO: 434553 - DNA, 15 bp, Homo sapiens
aaagtgctggcaaat

SEQ ID NO: 434554 - DNA, 15 bp, Homo sapiens
aaaagtgctggcaaa

SEQ ID NO: 434555 - DNA, 15 bp, Homo sapiens
taaaagtgctggcaa

SEQ ID NO: 434556 - DNA, 15 bp, Homo sapiens
ctaaaagtgctggca

SEQ ID NO: 434557 - DNA, 15 bp, Homo sapiens
tctaaaagtgctggc

SEQ ID NO: 434558 - DNA, 15 bp, Homo sapiens
gtctaaaagtgctgg

SEQ ID NO: 434559 - DNA, 15 bp, Homo sapiens
agtctaaaagtgctg

SEQ ID NO: 434560 - DNA, 15 bp, Homo sapiens
cagtctaaaagtgct

SEQ ID NO: 434561 - DNA, 15 bp, Homo sapiens
gcagtctaaaagtgc

SEQ ID NO: 434562 - DNA, 15 bp, Homo sapiens
tgcagtctaaaagtg

SEQ ID NO: 434563 - DNA, 15 bp, Homo sapiens
atgcagtctaaaagt

SEQ ID NO: 434564 - DNA, 15 bp, Homo sapiens
gatgcagtctaaaag

SEQ ID NO: 434565 - DNA, 15 bp, Homo sapiens
cgatgcagtctaaaa

SEQ ID NO: 434566 - DNA, 15 bp, Homo sapiens
tcgatgcagtctaaa

SEQ ID NO: 434567 - DNA, 15 bp, Homo sapiens
ttcgatgcagtctaa

SEQ ID NO: 434568 - DNA, 15 bp, Homo sapiens
attcgatgcagtcta

SEQ ID NO: 434569 - DNA, 15 bp, Homo sapiens
gattcgatgcagtct

SEQ ID NO: 434570 - DNA, 15 bp, Homo sapiens
agattcgatgcagtc

SEQ ID NO: 434571 - DNA, 15 bp, Homo sapiens
aagattcgatgcagt

SEQ ID NO: 434572 - DNA, 15 bp, Homo sapiens
taagattcgatgcag

SEQ ID NO: 434573 - DNA, 15 bp, Homo sapiens
gtaagattcgatgca

SEQ ID NO: 434574 - DNA, 15 bp, Homo sapiens
ggtaagattcgatgc

SEQ ID NO: 434575 - DNA, 15 bp, Homo sapiens
aggtaagattcgatg

SEQ ID NO: 434576 - DNA, 15 bp, Homo sapiens
aaggtaagattcgat

SEQ ID NO: 434577 - DNA, 15 bp, Homo sapiens
aaaggtaagattcga

SEQ ID NO: 434578 - DNA, 15 bp, Homo sapiens
gaaaggtaagattcg

SEQ ID NO: 434579 - DNA, 15 bp, Homo sapiens
ggaaaggtaagattc

SEQ ID NO: 434580 - DNA, 15 bp, Homo sapiens
aggaaaggtaagatt

SEQ ID NO: 434581 - DNA, 15 bp, Homo sapiens
aaggaaaggtaagat

SEQ ID NO: 434582 - DNA, 15 bp, Homo sapiens
aaaggaaaggtaaga

SEQ ID NO: 434583 - DNA, 15 bp, Homo sapiens
aaaaggaaaggtaag

SEQ ID NO: 434584 - DNA, 15 bp, Homo sapiens
gaaaaggaaaggtaa

SEQ ID NO: 434585 - DNA, 15 bp, Homo sapiens
ggaaaaggaaaggta

SEQ ID NO: 434586 - DNA, 15 bp, Homo sapiens
aggaaaaggaaaggt

SEQ ID NO: 434587 - DNA, 15 bp, Homo sapiens
aaggaaaaggaaagg

SEQ ID NO: 434588 - DNA, 15 bp, Homo sapiens
aaaggaaaaggaaag

SEQ ID NO: 434589 - DNA, 15 bp, Homo sapiens
gaaaggaaaaggaaa

SEQ ID NO: 434590 - DNA, 15 bp, Homo sapiens
agaaaggaaaaggaa

SEQ ID NO: 434591 - DNA, 15 bp, Homo sapiens
tagaaaggaaaagga

SEQ ID NO: 434592 - DNA, 15 bp, Homo sapiens
atagaaaggaaaagg

SEQ ID NO: 434593 - DNA, 15 bp, Homo sapiens
aatagaaaggaaaag

SEQ ID NO: 434594 - DNA, 15 bp, Homo sapiens
gaatagaaaggaaaa

SEQ ID NO: 434595 - DNA, 15 bp, Homo sapiens
agaatagaaaggaaa

SEQ ID NO: 434596 - DNA, 15 bp, Homo sapiens
cagaatagaaaggaa

SEQ ID NO: 434597 - DNA, 15 bp, Homo sapiens
tcagaatagaaagga

SEQ ID NO: 434598 - DNA, 15 bp, Homo sapiens
atcagaatagaaagg

SEQ ID NO: 434599 - DNA, 15 bp, Homo sapiens
catcagaatagaaag

SEQ ID NO: 434600 - DNA, 15 bp, Homo sapiens
tcatcagaatagaaa

SEQ ID NO: 434601 - DNA, 15 bp, Homo sapiens
ttcatcagaatagaa

SEQ ID NO: 434602 - DNA, 15 bp, Homo sapiens
cttcatcagaataga

SEQ ID NO: 434603 - DNA, 15 bp, Homo sapiens
gcttcatcagaatag

SEQ ID NO: 434604 - DNA, 15 bp, Homo sapiens
cgcttcatcagaata

SEQ ID NO: 434605 - DNA, 15 bp, Homo sapiens
acgcttcatcagaat

SEQ ID NO: 434606 - DNA, 15 bp, Homo sapiens
gacgcttcatcagaa

SEQ ID NO: 434607 - DNA, 15 bp, Homo sapiens
tgacgcttcatcaga

SEQ ID NO: 434608 - DNA, 15 bp, Homo sapiens
ttgacgcttcatcag

SEQ ID NO: 434609 - DNA, 15 bp, Homo sapiens
attgacgcttcatca

SEQ ID NO: 434610 - DNA, 15 bp, Homo sapiens
tattgacgcttcatc

SEQ ID NO: 434611 - DNA, 15 bp, Homo sapiens
ttattgacgcttcat

SEQ ID NO: 434612 - DNA, 15 bp, Homo sapiens
gttattgacgcttca

SEQ ID NO: 434613 - DNA, 15 bp, Homo sapiens
cgttattgacgcttc

SEQ ID NO: 434614 - DNA, 15 bp, Homo sapiens
acgttattgacgctt

SEQ ID NO: 434615 - DNA, 15 bp, Homo sapiens
cacgttattgacgct

SEQ ID NO: 434616 - DNA, 15 bp, Homo sapiens
tcacgttattgacgc

SEQ ID NO: 434617 - DNA, 15 bp, Homo sapiens
ctcacgttattgacg

SEQ ID NO: 434618 - DNA, 15 bp, Homo sapiens
actcacgttattgac

SEQ ID NO: 434619 - DNA, 15 bp, Homo sapiens
aactcacgttattga

SEQ ID NO: 434620 - DNA, 15 bp, Homo sapiens
gaactcacgttattg

SEQ ID NO: 434621 - DNA, 15 bp, Homo sapiens
tgaactcacgttatt

SEQ ID NO: 434622 - DNA, 15 bp, Homo sapiens
gtgaactcacgttat

SEQ ID NO: 434623 - DNA, 15 bp, Homo sapiens
tgtgaactcacgtta

SEQ ID NO: 434624 - DNA, 15 bp, Homo sapiens
gtgtgaactcacgtt

SEQ ID NO: 434625 - DNA, 15 bp, Homo sapiens
ggtgtgaactcacgt

SEQ ID NO: 434626 - DNA, 15 bp, Homo sapiens
tggtgtgaactcacg

SEQ ID NO: 434627 - DNA, 15 bp, Homo sapiens
atggtgtgaactcac

SEQ ID NO: 434628 - DNA, 15 bp, Homo sapiens
aatggtgtgaactca

SEQ ID NO: 434629 - DNA, 15 bp, Homo sapiens
taatggtgtgaactc

SEQ ID NO: 434630 - DNA, 15 bp, Homo sapiens
ttaatggtgtgaact

SEQ ID NO: 434631 - DNA, 15 bp, Homo sapiens
tttaatggtgtgaac

SEQ ID NO: 434632 - DNA, 15 bp, Homo sapiens
ttttaatggtgtgaa

SEQ ID NO: 434633 - DNA, 15 bp, Homo sapiens
gttttaatggtgtga

SEQ ID NO: 434634 - DNA, 15 bp, Homo sapiens
ggttttaatggtgtg

SEQ ID NO: 434635 - DNA, 15 bp, Homo sapiens
aggttttaatggtgt

SEQ ID NO: 434636 - DNA, 15 bp, Homo sapiens
aaggttttaatggtg

SEQ ID NO: 434637 - DNA, 15 bp, Homo sapiens
taaggttttaatggt

SEQ ID NO: 434638 - DNA, 15 bp, Homo sapiens
gtaaggttttaatgg

SEQ ID NO: 434639 - DNA, 15 bp, Homo sapiens
agtaaggttttaatg

SEQ ID NO: 434640 - DNA, 15 bp, Homo sapiens
aagtaaggttttaat

SEQ ID NO: 434641 - DNA, 15 bp, Homo sapiens
caagtaaggttttaa

SEQ ID NO: 434642 - DNA, 15 bp, Homo sapiens
tcaagtaaggtttta

SEQ ID NO: 434643 - DNA, 15 bp, Homo sapiens
gtcaagtaaggtttt

SEQ ID NO: 434644 - DNA, 15 bp, Homo sapiens
agtcaagtaaggttt

SEQ ID NO: 434645 - DNA, 15 bp, Homo sapiens
aagtcaagtaaggtt

SEQ ID NO: 434646 - DNA, 15 bp, Homo sapiens
taagtcaagtaaggt

SEQ ID NO: 434647 - DNA, 15 bp, Homo sapiens
ctaagtcaagtaagg

SEQ ID NO: 434648 - DNA, 15 bp, Homo sapiens
actaagtcaagtaag

SEQ ID NO: 434649 - DNA, 15 bp, Homo sapiens
tactaagtcaagtaa

SEQ ID NO: 434650 - DNA, 15 bp, Homo sapiens
gtactaagtcaagta

SEQ ID NO: 434651 - DNA, 15 bp, Homo sapiens
agtactaagtcaagt

SEQ ID NO: 434652 - DNA, 15 bp, Homo sapiens
gagtactaagtcaag

SEQ ID NO: 434653 - DNA, 15 bp, Homo sapiens
tgagtactaagtcaa

SEQ ID NO: 434654 - DNA, 15 bp, Homo sapiens
ctgagtactaagtca

SEQ ID NO: 434655 - DNA, 15 bp, Homo sapiens
actgagtactaagtc

SEQ ID NO: 434656 - DNA, 15 bp, Homo sapiens
aactgagtactaagt

SEQ ID NO: 434657 - DNA, 15 bp, Homo sapiens
aaactgagtactaag

SEQ ID NO: 434658 - DNA, 15 bp, Homo sapiens
taaactgagtactaa

SEQ ID NO: 434659 - DNA, 15 bp, Homo sapiens
ataaactgagtacta

SEQ ID NO: 434660 - DNA, 15 bp, Homo sapiens
tataaactgagtact

SEQ ID NO: 434661 - DNA, 15 bp, Homo sapiens
gtataaactgagtac

SEQ ID NO: 434662 - DNA, 15 bp, Homo sapiens
ggtataaactgagta

SEQ ID NO: 434663 - DNA, 15 bp, Homo sapiens
tggtataaactgagt

SEQ ID NO: 434664 - DNA, 15 bp, Homo sapiens
atggtataaactgag

SEQ ID NO: 434665 - DNA, 15 bp, Homo sapiens
tatggtataaactga

SEQ ID NO: 434666 - DNA, 15 bp, Homo sapiens
atatggtataaactg

SEQ ID NO: 434667 - DNA, 15 bp, Homo sapiens
tatatggtataaact

SEQ ID NO: 434668 - DNA, 15 bp, Homo sapiens
ttatatggtataaac

SEQ ID NO: 434669 - DNA, 15 bp, Homo sapiens
tttatatggtataaa

SEQ ID NO: 434670 - DNA, 15 bp, Homo sapiens
gtttatatggtataa

SEQ ID NO: 434671 - DNA, 15 bp, Homo sapiens
ggtttatatggtata

SEQ ID NO: 434672 - DNA, 15 bp, Homo sapiens
tggtttatatggtat

SEQ ID NO: 434673 - DNA, 15 bp, Homo sapiens
atggtttatatggta

SEQ ID NO: 434674 - DNA, 15 bp, Homo sapiens
catggtttatatggt

SEQ ID NO: 434675 - DNA, 15 bp, Homo sapiens
acatggtttatatgg

SEQ ID NO: 434676 - DNA, 15 bp, Homo sapiens
tacatggtttatatg

SEQ ID NO: 434677 - DNA, 15 bp, Homo sapiens
ttacatggtttatat

SEQ ID NO: 434678 - DNA, 15 bp, Homo sapiens
tttacatggtttata

SEQ ID NO: 434679 - DNA, 15 bp, Homo sapiens
ctttacatggtttat

SEQ ID NO: 434680 - DNA, 15 bp, Homo sapiens
tctttacatggttta

SEQ ID NO: 434681 - DNA, 15 bp, Homo sapiens
atctttacatggttt

SEQ ID NO: 434682 - DNA, 15 bp, Homo sapiens
catctttacatggtt

SEQ ID NO: 434683 - DNA, 15 bp, Homo sapiens
ccatctttacatggt

SEQ ID NO: 434684 - DNA, 15 bp, Homo sapiens
accatctttacatgg

SEQ ID NO: 434685 - DNA, 15 bp, Homo sapiens
aaccatctttacatg

SEQ ID NO: 434686 - DNA, 15 bp, Homo sapiens
gaaccatctttacat

SEQ ID NO: 434687 - DNA, 15 bp, Homo sapiens
ggaaccatctttaca

SEQ ID NO: 434688 - DNA, 15 bp, Homo sapiens
aggaaccatctttac

SEQ ID NO: 434689 - DNA, 15 bp, Homo sapiens
aaggaaccatcttta

SEQ ID NO: 434690 - DNA, 15 bp, Homo sapiens
caaggaaccatcttt

SEQ ID NO: 434691 - DNA, 15 bp, Homo sapiens
ccaaggaaccatctt

SEQ ID NO: 434692 - DNA, 15 bp, Homo sapiens
tccaaggaaccatct

SEQ ID NO: 434693 - DNA, 15 bp, Homo sapiens
gtccaaggaaccatc

SEQ ID NO: 434694 - DNA, 15 bp, Homo sapiens
agtccaaggaaccat

SEQ ID NO: 434695 - DNA, 15 bp, Homo sapiens
tagtccaaggaacca

SEQ ID NO: 434696 - DNA, 15 bp, Homo sapiens
ctagtccaaggaacc

SEQ ID NO: 434697 - DNA, 15 bp, Homo sapiens
cctagtccaaggaac

SEQ ID NO: 434698 - DNA, 15 bp, Homo sapiens
ccctagtccaaggaa

SEQ ID NO: 434699 - DNA, 15 bp, Homo sapiens
gccctagtccaagga

SEQ ID NO: 434700 - DNA, 15 bp, Homo sapiens
tgccctagtccaagg

SEQ ID NO: 434701 - DNA, 15 bp, Homo sapiens
gtgccctagtccaag

SEQ ID NO: 434702 - DNA, 15 bp, Homo sapiens
agtgccctagtccaa

SEQ ID NO: 434703 - DNA, 15 bp, Homo sapiens
aagtgccctagtcca

SEQ ID NO: 434704 - DNA, 15 bp, Homo sapiens
aaagtgccctagtcc

SEQ ID NO: 434705 - DNA, 15 bp, Homo sapiens
caaagtgccctagtc

SEQ ID NO: 434706 - DNA, 15 bp, Homo sapiens
ccaaagtgccctagt

SEQ ID NO: 434707 - DNA, 15 bp, Homo sapiens
accaaagtgccctag

SEQ ID NO: 434708 - DNA, 15 bp, Homo sapiens
taccaaagtgcccta

SEQ ID NO: 434709 - DNA, 15 bp, Homo sapiens
gtaccaaagtgccct

SEQ ID NO: 434710 - DNA, 15 bp, Homo sapiens
ggtaccaaagtgccc

SEQ ID NO: 434711 - DNA, 15 bp, Homo sapiens
gggtaccaaagtgcc

SEQ ID NO: 434712 - DNA, 15 bp, Homo sapiens
tgggtaccaaagtgc

SEQ ID NO: 434713 - DNA, 15 bp, Homo sapiens
gtgggtaccaaagtg

SEQ ID NO: 434714 - DNA, 15 bp, Homo sapiens
agtgggtaccaaagt

SEQ ID NO: 434715 - DNA, 15 bp, Homo sapiens
gagtgggtaccaaag

SEQ ID NO: 434716 - DNA, 15 bp, Homo sapiens
tgagtgggtaccaaa

SEQ ID NO: 434717 - DNA, 15 bp, Homo sapiens
ctgagtgggtaccaa

SEQ ID NO: 434718 - DNA, 15 bp, Homo sapiens
tctgagtgggtacca

SEQ ID NO: 434719 - DNA, 15 bp, Homo sapiens
atctgagtgggtacc

SEQ ID NO: 434720 - DNA, 15 bp, Homo sapiens
aatctgagtgggtac

SEQ ID NO: 434721 - DNA, 15 bp, Homo sapiens
taatctgagtgggta

SEQ ID NO: 434722 - DNA, 15 bp, Homo sapiens
ttaatctgagtgggt

SEQ ID NO: 434723 - DNA, 15 bp, Homo sapiens
attaatctgagtggg

SEQ ID NO: 434724 - DNA, 15 bp, Homo sapiens
gattaatctgagtgg

SEQ ID NO: 434725 - DNA, 15 bp, Homo sapiens
tgattaatctgagtg

SEQ ID NO: 434726 - DNA, 15 bp, Homo sapiens
ctgattaatctgagt

SEQ ID NO: 434727 - DNA, 15 bp, Homo sapiens
actgattaatctgag

SEQ ID NO: 434728 - DNA, 15 bp, Homo sapiens
tactgattaatctga

SEQ ID NO: 434729 - DNA, 15 bp, Homo sapiens
ttactgattaatctg

SEQ ID NO: 434730 - DNA, 15 bp, Homo sapiens
attactgattaatct

SEQ ID NO: 434731 - DNA, 15 bp, Homo sapiens
aattactgattaatc

SEQ ID NO: 434732 - DNA, 15 bp, Homo sapiens
aaattactgattaat

SEQ ID NO: 434733 - DNA, 15 bp, Homo sapiens
taaattactgattaa

SEQ ID NO: 434734 - DNA, 15 bp, Homo sapiens
ataaattactgatta

SEQ ID NO: 434735 - DNA, 15 bp, Homo sapiens
aataaattactgatt

SEQ ID NO: 434736 - DNA, 15 bp, Homo sapiens
gaataaattactgat

SEQ ID NO: 434737 - DNA, 15 bp, Homo sapiens
tgaataaattactga

SEQ ID NO: 434738 - DNA, 15 bp, Homo sapiens
atgaataaattactg

SEQ ID NO: 434739 - DNA, 15 bp, Homo sapiens
gatgaataaattact

SEQ ID NO: 434740 - DNA, 15 bp, Homo sapiens
tgatgaataaattac

SEQ ID NO: 434741 - DNA, 15 bp, Homo sapiens
ttgatgaataaatta

SEQ ID NO: 434742 - DNA, 15 bp, Homo sapiens
tttgatgaataaatt

SEQ ID NO: 434743 - DNA, 15 bp, Homo sapiens
gtttgatgaataaat

SEQ ID NO: 434744 - DNA, 15 bp, Homo sapiens
tgtttgatgaataaa

SEQ ID NO: 434745 - DNA, 15 bp, Homo sapiens
atgtttgatgaataa

SEQ ID NO: 434746 - DNA, 15 bp, Homo sapiens
aatgtttgatgaata

SEQ ID NO: 434747 - DNA, 15 bp, Homo sapiens
aaatgtttgatgaat

SEQ ID NO: 434748 - DNA, 15 bp, Homo sapiens
taaatgtttgatgaa

SEQ ID NO: 434749 - DNA, 15 bp, Homo sapiens
ataaatgtttgatga

SEQ ID NO: 434750 - DNA, 15 bp, Homo sapiens
aataaatgtttgatg

SEQ ID NO: 434751 - DNA, 15 bp, Homo sapiens
caataaatgtttgat

SEQ ID NO: 434752 - DNA, 15 bp, Homo sapiens
tcaataaatgtttga

SEQ ID NO: 434753 - DNA, 15 bp, Homo sapiens
ctcaataaatgtttg

SEQ ID NO: 434754 - DNA, 15 bp, Homo sapiens
actcaataaatgttt

SEQ ID NO: 434755 - DNA, 15 bp, Homo sapiens
tactcaataaatgtt

SEQ ID NO: 434756 - DNA, 15 bp, Homo sapiens
atactcaataaatgt

SEQ ID NO: 434757 - DNA, 15 bp, Homo sapiens
aatactcaataaatg

SEQ ID NO: 434758 - DNA, 15 bp, Homo sapiens
gaatactcaataaat

SEQ ID NO: 434759 - DNA, 15 bp, Homo sapiens
tgaatactcaataaa

SEQ ID NO: 434760 - DNA, 15 bp, Homo sapiens
gtgaatactcaataa

SEQ ID NO: 434761 - DNA, 15 bp, Homo sapiens
tgtgaatactcaata

SEQ ID NO: 434762 - DNA, 15 bp, Homo sapiens
ttgtgaatactcaat

SEQ ID NO: 434763 - DNA, 15 bp, Homo sapiens
attgtgaatactcaa

SEQ ID NO: 434764 - DNA, 15 bp, Homo sapiens
aattgtgaatactca

SEQ ID NO: 434765 - DNA, 15 bp, Homo sapiens
gaattgtgaatactc

SEQ ID NO: 434766 - DNA, 15 bp, Homo sapiens
ggaattgtgaatact

SEQ ID NO: 434767 - DNA, 15 bp, Homo sapiens
aggaattgtgaatac

SEQ ID NO: 434768 - DNA, 15 bp, Homo sapiens
aaggaattgtgaata

SEQ ID NO: 434769 - DNA, 15 bp, Homo sapiens
caaggaattgtgaat

SEQ ID NO: 434770 - DNA, 15 bp, Homo sapiens
gcaaggaattgtgaa

SEQ ID NO: 434771 - DNA, 15 bp, Homo sapiens
agcaaggaattgtga

SEQ ID NO: 434772 - DNA, 15 bp, Homo sapiens
cagcaaggaattgtg

SEQ ID NO: 434773 - DNA, 15 bp, Homo sapiens
acagcaaggaattgt

SEQ ID NO: 434774 - DNA, 15 bp, Homo sapiens
tacagcaaggaattg

SEQ ID NO: 434775 - DNA, 15 bp, Homo sapiens
gtacagcaaggaatt

SEQ ID NO: 434776 - DNA, 15 bp, Homo sapiens
tgtacagcaaggaat

SEQ ID NO: 434777 - DNA, 15 bp, Homo sapiens
atgtacagcaaggaa

SEQ ID NO: 434778 - DNA, 15 bp, Homo sapiens
gatgtacagcaagga

SEQ ID NO: 434779 - DNA, 15 bp, Homo sapiens
agatgtacagcaagg

SEQ ID NO: 434780 - DNA, 15 bp, Homo sapiens
gagatgtacagcaag

SEQ ID NO: 434781 - DNA, 15 bp, Homo sapiens
ggagatgtacagcaa

SEQ ID NO: 434782 - DNA, 15 bp, Homo sapiens
tggagatgtacagca

SEQ ID NO: 434783 - DNA, 15 bp, Homo sapiens
gtggagatgtacagc

SEQ ID NO: 434784 - DNA, 15 bp, Homo sapiens
agtggagatgtacag

SEQ ID NO: 434785 - DNA, 15 bp, Homo sapiens
aagtggagatgtaca

SEQ ID NO: 434786 - DNA, 15 bp, Homo sapiens
caagtggagatgtac

SEQ ID NO: 434787 - DNA, 15 bp, Homo sapiens
ccaagtggagatgta

SEQ ID NO: 434788 - DNA, 15 bp, Homo sapiens
tccaagtggagatgt

SEQ ID NO: 434789 - DNA, 15 bp, Homo sapiens
atccaagtggagatg

SEQ ID NO: 434790 - DNA, 15 bp, Homo sapiens
catccaagtggagat

SEQ ID NO: 434791 - DNA, 15 bp, Homo sapiens
acatccaagtggaga

SEQ ID NO: 434792 - DNA, 15 bp, Homo sapiens
aacatccaagtggag

SEQ ID NO: 434793 - DNA, 15 bp, Homo sapiens
gaacatccaagtgga

SEQ ID NO: 434794 - DNA, 15 bp, Homo sapiens
ggaacatccaagtgg

SEQ ID NO: 434795 - DNA, 15 bp, Homo sapiens
tggaacatccaagtg

SEQ ID NO: 434796 - DNA, 15 bp, Homo sapiens
ctggaacatccaagt

SEQ ID NO: 434797 - DNA, 15 bp, Homo sapiens
cctggaacatccaag

SEQ ID NO: 434798 - DNA, 15 bp, Homo sapiens
ccctggaacatccaa

SEQ ID NO: 434799 - DNA, 15 bp, Homo sapiens
accctggaacatcca

SEQ ID NO: 434800 - DNA, 15 bp, Homo sapiens
aaccctggaacatcc

SEQ ID NO: 434801 - DNA, 15 bp, Homo sapiens
taaccctggaacatc

SEQ ID NO: 434802 - DNA, 15 bp, Homo sapiens
gtaaccctggaacat

SEQ ID NO: 434803 - DNA, 15 bp, Homo sapiens
ggtaaccctggaaca

SEQ ID NO: 434804 - DNA, 15 bp, Homo sapiens
cggtaaccctggaac

SEQ ID NO: 434805 - DNA, 15 bp, Homo sapiens
gcggtaaccctggaa

SEQ ID NO: 434806 - DNA, 15 bp, Homo sapiens
tgcggtaaccctgga

SEQ ID NO: 434807 - DNA, 15 bp, Homo sapiens
ttgcggtaaccctgg

SEQ ID NO: 434808 - DNA, 15 bp, Homo sapiens
tttgcggtaaccctg

SEQ ID NO: 434809 - DNA, 15 bp, Homo sapiens
gtttgcggtaaccct

SEQ ID NO: 434810 - DNA, 15 bp, Homo sapiens
ggtttgcggtaaccc

SEQ ID NO: 434811 - DNA, 15 bp, Homo sapiens
aggtttgcggtaacc

SEQ ID NO: 434812 - DNA, 15 bp, Homo sapiens
aaggtttgcggtaac

SEQ ID NO: 434813 - DNA, 15 bp, Homo sapiens
gaaggtttgcggtaa

SEQ ID NO: 434814 - DNA, 15 bp, Homo sapiens
tgaaggtttgcggta

SEQ ID NO: 434815 - DNA, 15 bp, Homo sapiens
gtgaaggtttgcggt

SEQ ID NO: 434816 - DNA, 15 bp, Homo sapiens
agtgaaggtttgcgg

SEQ ID NO: 434817 - DNA, 15 bp, Homo sapiens
aagtgaaggtttgcg

SEQ ID NO: 434818 - DNA, 15 bp, Homo sapiens
caagtgaaggtttgc

SEQ ID NO: 434819 - DNA, 15 bp, Homo sapiens
gcaagtgaaggtttg

SEQ ID NO: 434820 - DNA, 15 bp, Homo sapiens
agcaagtgaaggttt

SEQ ID NO: 434821 - DNA, 15 bp, Homo sapiens
gagcaagtgaaggtt

SEQ ID NO: 434822 - DNA, 15 bp, Homo sapiens
ggagcaagtgaaggt

SEQ ID NO: 434823 - DNA, 15 bp, Homo sapiens
gggagcaagtgaagg

SEQ ID NO: 434824 - DNA, 15 bp, Homo sapiens
tgggagcaagtgaag

SEQ ID NO: 434825 - DNA, 15 bp, Homo sapiens
atgggagcaagtgaa

SEQ ID NO: 434826 - DNA, 15 bp, Homo sapiens
tatgggagcaagtga

SEQ ID NO: 434827 - DNA, 15 bp, Homo sapiens
ttatgggagcaagtg

SEQ ID NO: 434828 - DNA, 15 bp, Homo sapiens
attatgggagcaagt

SEQ ID NO: 434829 - DNA, 15 bp, Homo sapiens
gattatgggagcaag

SEQ ID NO: 434830 - DNA, 15 bp, Homo sapiens
agattatgggagcaa

SEQ ID NO: 434831 - DNA, 15 bp, Homo sapiens
gagattatgggagca

SEQ ID NO: 434832 - DNA, 15 bp, Homo sapiens
agagattatgggagc

SEQ ID NO: 434833 - DNA, 15 bp, Homo sapiens
cagagattatgggag

SEQ ID NO: 434834 - DNA, 15 bp, Homo sapiens
acagagattatggga

SEQ ID NO: 434835 - DNA, 15 bp, Homo sapiens
gacagagattatggg

SEQ ID NO: 434836 - DNA, 15 bp, Homo sapiens
agacagagattatgg

SEQ ID NO: 434837 - DNA, 15 bp, Homo sapiens
aagacagagattatg

SEQ ID NO: 434838 - DNA, 15 bp, Homo sapiens
taagacagagattat

SEQ ID NO: 434839 - DNA, 15 bp, Homo sapiens
ctaagacagagatta

SEQ ID NO: 434840 - DNA, 15 bp, Homo sapiens
tctaagacagagatt

SEQ ID NO: 434841 - DNA, 15 bp, Homo sapiens
ttctaagacagagat

SEQ ID NO: 434842 - DNA, 15 bp, Homo sapiens
tttctaagacagaga

SEQ ID NO: 434843 - DNA, 15 bp, Homo sapiens
ttttctaagacagag

SEQ ID NO: 434844 - DNA, 15 bp, Homo sapiens
attttctaagacaga

SEQ ID NO: 434845 - DNA, 15 bp, Homo sapiens
ccattttctaagaca

SEQ ID NO: 434846 - DNA, 15 bp, Homo sapiens
gccattttctaagac

SEQ ID NO: 434847 - DNA, 15 bp, Homo sapiens
tgccattttctaaga

SEQ ID NO: 434848 - DNA, 15 bp, Homo sapiens
atgccattttctaag

SEQ ID NO: 434849 - DNA, 15 bp, Homo sapiens
catgccattttctaa

SEQ ID NO: 434850 - DNA, 15 bp, Homo sapiens
tcatgccattttcta

SEQ ID NO: 434851 - DNA, 15 bp, Homo sapiens
gtcatgccattttct

SEQ ID NO: 434852 - DNA, 15 bp, Homo sapiens
ggtcatgccattttc

SEQ ID NO: 434853 - DNA, 15 bp, Homo sapiens
tggtcatgccatttt

SEQ ID NO: 434854 - DNA, 15 bp, Homo sapiens
atggtcatgccattt

SEQ ID NO: 434855 - DNA, 15 bp, Homo sapiens
aatggtcatgccatt

SEQ ID NO: 434856 - DNA, 15 bp, Homo sapiens
gaatggtcatgccat

SEQ ID NO: 434857 - DNA, 15 bp, Homo sapiens
tgaatggtcatgcca

SEQ ID NO: 434858 - DNA, 15 bp, Homo sapiens
gtgaatggtcatgcc

SEQ ID NO: 434859 - DNA, 15 bp, Homo sapiens
agtgaatggtcatgc

SEQ ID NO: 434860 - DNA, 15 bp, Homo sapiens
gagtgaatggtcatg

SEQ ID NO: 434861 - DNA, 15 bp, Homo sapiens
tgagtgaatggtcat

SEQ ID NO: 434862 - DNA, 15 bp, Homo sapiens
atgagtgaatggtca

SEQ ID NO: 434863 - DNA, 15 bp, Homo sapiens
aatgagtgaatggtc

SEQ ID NO: 434864 - DNA, 15 bp, Homo sapiens
aaatgagtgaatggt

SEQ ID NO: 434865 - DNA, 15 bp, Homo sapiens
taaatgagtgaatgg

SEQ ID NO: 434866 - DNA, 15 bp, Homo sapiens
gtaaatgagtgaatg

SEQ ID NO: 434867 - DNA, 15 bp, Homo sapiens
ggtaaatgagtgaat

SEQ ID NO: 434868 - DNA, 15 bp, Homo sapiens
tggtaaatgagtgaa

SEQ ID NO: 434869 - DNA, 15 bp, Homo sapiens
ttggtaaatgagtga

SEQ ID NO: 434870 - DNA, 15 bp, Homo sapiens
tttggtaaatgagtg

SEQ ID NO: 434871 - DNA, 15 bp, Homo sapiens
atttggtaaatgagt

SEQ ID NO: 434872 - DNA, 15 bp, Homo sapiens
gatttggtaaatgag

SEQ ID NO: 434873 - DNA, 15 bp, Homo sapiens
ggatttggtaaatga

SEQ ID NO: 434874 - DNA, 15 bp, Homo sapiens
tggatttggtaaatg

SEQ ID NO: 434875 - DNA, 15 bp, Homo sapiens
ctggatttggtaaat

SEQ ID NO: 434876 - DNA, 15 bp, Homo sapiens
tctggatttggtaaa

SEQ ID NO: 434877 - DNA, 15 bp, Homo sapiens
ttctggatttggtaa

SEQ ID NO: 434878 - DNA, 15 bp, Homo sapiens
tttctggatttggta

SEQ ID NO: 434879 - DNA, 15 bp, Homo sapiens
gtttctggatttggt

SEQ ID NO: 434880 - DNA, 15 bp, Homo sapiens
ggtttctggatttgg

SEQ ID NO: 434881 - DNA, 15 bp, Homo sapiens
aggtttctggatttg

SEQ ID NO: 434882 - DNA, 15 bp, Homo sapiens
aaggtttctggattt

SEQ ID NO: 434883 - DNA, 15 bp, Homo sapiens
aaaggtttctggatt

SEQ ID NO: 434884 - DNA, 15 bp, Homo sapiens
caaaggtttctggat

SEQ ID NO: 434885 - DNA, 15 bp, Homo sapiens
tcaaaggtttctgga

SEQ ID NO: 434886 - DNA, 15 bp, Homo sapiens
ctcaaaggtttctgg

SEQ ID NO: 434887 - DNA, 15 bp, Homo sapiens
actcaaaggtttctg

SEQ ID NO: 434888 - DNA, 15 bp, Homo sapiens
tactcaaaggtttct

SEQ ID NO: 434889 - DNA, 15 bp, Homo sapiens
ttactcaaaggtttc

SEQ ID NO: 434890 - DNA, 15 bp, Homo sapiens
attactcaaaggttt

SEQ ID NO: 434891 - DNA, 15 bp, Homo sapiens
cattactcaaaggtt

SEQ ID NO: 434892 - DNA, 15 bp, Homo sapiens
gcattactcaaaggt

SEQ ID NO: 434893 - DNA, 15 bp, Homo sapiens
agcattactcaaagg

SEQ ID NO: 434894 - DNA, 15 bp, Homo sapiens
aagcattactcaaag

SEQ ID NO: 434895 - DNA, 15 bp, Homo sapiens
taagcattactcaaa

SEQ ID NO: 434896 - DNA, 15 bp, Homo sapiens
ctaagcattactcaa

SEQ ID NO: 434897 - DNA, 15 bp, Homo sapiens
actaagcattactca

SEQ ID NO: 434898 - DNA, 15 bp, Homo sapiens
aactaagcattactc

SEQ ID NO: 434899 - DNA, 15 bp, Homo sapiens
gaactaagcattact

SEQ ID NO: 434900 - DNA, 15 bp, Homo sapiens
tgaactaagcattac

SEQ ID NO: 434901 - DNA, 15 bp, Homo sapiens
atgaactaagcatta

SEQ ID NO: 434902 - DNA, 15 bp, Homo sapiens
aatgaactaagcatt

SEQ ID NO: 434903 - DNA, 15 bp, Homo sapiens
aaatgaactaagcat

SEQ ID NO: 434904 - DNA, 15 bp, Homo sapiens
aaaatgaactaagca

SEQ ID NO: 434905 - DNA, 15 bp, Homo sapiens
aaaaatgaactaagc

SEQ ID NO: 434906 - DNA, 15 bp, Homo sapiens
gaaaaatgaactaag

SEQ ID NO: 434907 - DNA, 15 bp, Homo sapiens
agaaaaatgaactaa

SEQ ID NO: 434908 - DNA, 15 bp, Homo sapiens
gagaaaaatgaacta

SEQ ID NO: 434909 - DNA, 15 bp, Homo sapiens
ggagaaaaatgaact

SEQ ID NO: 434910 - DNA, 15 bp, Homo sapiens
aggagaaaaatgaac

SEQ ID NO: 434911 - DNA, 15 bp, Homo sapiens
aaggagaaaaatgaa

SEQ ID NO: 434912 - DNA, 15 bp, Homo sapiens
aaaggagaaaaatga

SEQ ID NO: 434913 - DNA, 15 bp, Homo sapiens
caaaggagaaaaatg

SEQ ID NO: 434914 - DNA, 15 bp, Homo sapiens
acaaaggagaaaaat

SEQ ID NO: 434915 - DNA, 15 bp, Homo sapiens
tacaaaggagaaaaa

SEQ ID NO: 434916 - DNA, 15 bp, Homo sapiens
gtacaaaggagaaaa

SEQ ID NO: 434917 - DNA, 15 bp, Homo sapiens
agtacaaaggagaaa

SEQ ID NO: 434918 - DNA, 15 bp, Homo sapiens
catctggaactgaag

SEQ ID NO: 434919 - DNA, 15 bp, Homo sapiens
acatctggaactgaa

SEQ ID NO: 434920 - DNA, 15 bp, Homo sapiens
gacatctggaactga

SEQ ID NO: 434921 - DNA, 15 bp, Homo sapiens
ggacatctggaactg

SEQ ID NO: 434922 - DNA, 15 bp, Homo sapiens
gggacatctggaact

SEQ ID NO: 434923 - DNA, 15 bp, Homo sapiens
tgggacatctggaac

SEQ ID NO: 434924 - DNA, 15 bp, Homo sapiens
ctgggacatctggaa

SEQ ID NO: 434925 - DNA, 15 bp, Homo sapiens
gctgggacatctgga

SEQ ID NO: 434926 - DNA, 15 bp, Homo sapiens
ggctgggacatctgg

SEQ ID NO: 434927 - DNA, 15 bp, Homo sapiens
tggctgggacatctg

SEQ ID NO: 434928 - DNA, 15 bp, Homo sapiens
ctggctgggacatct

SEQ ID NO: 434929 - DNA, 15 bp, Homo sapiens
tctggctgggacatc

SEQ ID NO: 434930 - DNA, 15 bp, Homo sapiens
atctggctgggacat

SEQ ID NO: 434931 - DNA, 15 bp, Homo sapiens
catctggctgggaca

SEQ ID NO: 434932 - DNA, 15 bp, Homo sapiens
gcatctggctgggac

SEQ ID NO: 434933 - DNA, 15 bp, Homo sapiens
tgcatctggctggga

SEQ ID NO: 434934 - DNA, 15 bp, Homo sapiens
ctgcatctggctggg

SEQ ID NO: 434935 - DNA, 15 bp, Homo sapiens
gctgcatctggctgg

SEQ ID NO: 434936 - DNA, 15 bp, Homo sapiens
tgctgcatctggctg

SEQ ID NO: 434937 - DNA, 15 bp, Homo sapiens
ctgctgcatctggct

SEQ ID NO: 434938 - DNA, 15 bp, Homo sapiens
actgctgcatctggc

SEQ ID NO: 434939 - DNA, 15 bp, Homo sapiens
cactgctgcatctgg

SEQ ID NO: 434940 - DNA, 15 bp, Homo sapiens
acactgctgcatctg

SEQ ID NO: 434941 - DNA, 15 bp, Homo sapiens
gacactgctgcatct

SEQ ID NO: 434942 - DNA, 15 bp, Homo sapiens
ggacactgctgcatc

SEQ ID NO: 434943 - DNA, 15 bp, Homo sapiens
tggacactgctgcat

SEQ ID NO: 434944 - DNA, 15 bp, Homo sapiens
ttggacactgctgca

SEQ ID NO: 434945 - DNA, 15 bp, Homo sapiens
tttggacactgctgc

SEQ ID NO: 434946 - DNA, 15 bp, Homo sapiens
ctttggacactgctg

SEQ ID NO: 434947 - DNA, 15 bp, Homo sapiens
tctttggacactgct

SEQ ID NO: 434948 - DNA, 15 bp, Homo sapiens
ctctttggacactgc

SEQ ID NO: 434949 - DNA, 15 bp, Homo sapiens
tctctttggacactg

SEQ ID NO: 434950 - DNA, 15 bp, Homo sapiens
ctctctttggacact

SEQ ID NO: 434951 - DNA, 15 bp, Homo sapiens
tctctctttggacac

SEQ ID NO: 434952 - DNA, 15 bp, Homo sapiens
ttctctctttggaca

SEQ ID NO: 434953 - DNA, 15 bp, Homo sapiens
tttctctctttggac

SEQ ID NO: 434954 - DNA, 15 bp, Homo sapiens
ctttctctctttgga

SEQ ID NO: 434955 - DNA, 15 bp, Homo sapiens
tctttctctctttgg

SEQ ID NO: 434956 - DNA, 15 bp, Homo sapiens
ctctttctctctttg

SEQ ID NO: 434957 - DNA, 15 bp, Homo sapiens
gctctttctctcttt

SEQ ID NO: 434958 - DNA, 15 bp, Homo sapiens
ggctctttctctctt

SEQ ID NO: 434959 - DNA, 15 bp, Homo sapiens
aggctctttctctct

SEQ ID NO: 434960 - DNA, 15 bp, Homo sapiens
caggctctttctctc

SEQ ID NO: 434961 - DNA, 15 bp, Homo sapiens
acaggctctttctct

SEQ ID NO: 434962 - DNA, 15 bp, Homo sapiens
gacaggctctttctc

SEQ ID NO: 434963 - DNA, 15 bp, Homo sapiens
agacaggctctttct

SEQ ID NO: 434964 - DNA, 15 bp, Homo sapiens
aagacaggctctttc

SEQ ID NO: 434965 - DNA, 15 bp, Homo sapiens
aaagacaggctcttt

SEQ ID NO: 434966 - DNA, 15 bp, Homo sapiens
gaaagacaggctctt

SEQ ID NO: 434967 - DNA, 15 bp, Homo sapiens
agaaagacaggctct

SEQ ID NO: 434968 - DNA, 15 bp, Homo sapiens
aagaaagacaggctc

SEQ ID NO: 434969 - DNA, 15 bp, Homo sapiens
caagaaagacaggct

SEQ ID NO: 434970 - DNA, 15 bp, Homo sapiens
tcaagaaagacaggc

SEQ ID NO: 434971 - DNA, 15 bp, Homo sapiens
atcaagaaagacagg

SEQ ID NO: 434972 - DNA, 15 bp, Homo sapiens
catcaagaaagacag

SEQ ID NO: 434973 - DNA, 15 bp, Homo sapiens
gcatcaagaaagaca

SEQ ID NO: 434974 - DNA, 15 bp, Homo sapiens
tgcatcaagaaagac

SEQ ID NO: 434975 - DNA, 15 bp, Homo sapiens
atgcatcaagaaaga

SEQ ID NO: 434976 - DNA, 15 bp, Homo sapiens
aatgcatcaagaaag

SEQ ID NO: 434977 - DNA, 15 bp, Homo sapiens
aaatgcatcaagaaa

SEQ ID NO: 434978 - DNA, 15 bp, Homo sapiens
aaaatgcatcaagaa

SEQ ID NO: 434979 - DNA, 15 bp, Homo sapiens
aaaaatgcatcaaga

SEQ ID NO: 434980 - DNA, 15 bp, Homo sapiens
gaaaaatgcatcaag

SEQ ID NO: 434981 - DNA, 15 bp, Homo sapiens
agaaaaatgcatcaa

SEQ ID NO: 434982 - DNA, 15 bp, Homo sapiens
aagaaaaatgcatca

SEQ ID NO: 434983 - DNA, 15 bp, Homo sapiens
caagaaaaatgcatc

SEQ ID NO: 434984 - DNA, 15 bp, Homo sapiens
ccaagaaaaatgcat

SEQ ID NO: 434985 - DNA, 15 bp, Homo sapiens
cccaagaaaaatgca

SEQ ID NO: 434986 - DNA, 15 bp, Homo sapiens
tcccaagaaaaatgc

SEQ ID NO: 434987 - DNA, 15 bp, Homo sapiens
atcccaagaaaaatg

SEQ ID NO: 434988 - DNA, 15 bp, Homo sapiens
aatcccaagaaaaat

SEQ ID NO: 434989 - DNA, 15 bp, Homo sapiens
aaatcccaagaaaaa

SEQ ID NO: 434990 - DNA, 15 bp, Homo sapiens
caaatcccaagaaaa

SEQ ID NO: 434991 - DNA, 15 bp, Homo sapiens
ccaaatcccaagaaa

SEQ ID NO: 434992 - DNA, 15 bp, Homo sapiens
tccaaatcccaagaa

SEQ ID NO: 434993 - DNA, 15 bp, Homo sapiens
ttccaaatcccaaga

SEQ ID NO: 434994 - DNA, 15 bp, Homo sapiens
tttccaaatcccaag

SEQ ID NO: 434995 - DNA, 15 bp, Homo sapiens
ttttccaaatcccaa

SEQ ID NO: 434996 - DNA, 15 bp, Homo sapiens
gttttccaaatccca

SEQ ID NO: 434997 - DNA, 15 bp, Homo sapiens
agttttccaaatccc

SEQ ID NO: 434998 - DNA, 15 bp, Homo sapiens
aagttttccaaatcc

SEQ ID NO: 434999 - DNA, 15 bp, Homo sapiens
aaagttttccaaatc

SEQ ID NO: 435000 - DNA, 15 bp, Homo sapiens
aaaagttttccaaat

SEQ ID NO: 435001 - DNA, 15 bp, Homo sapiens
gaaaagttttccaaa

SEQ ID NO: 435002 - DNA, 15 bp, Homo sapiens
ggaaaagttttccaa

SEQ ID NO: 435003 - DNA, 15 bp, Homo sapiens
gggaaaagttttcca

SEQ ID NO: 435004 - DNA, 15 bp, Homo sapiens
tgggaaaagttttcc

SEQ ID NO: 435005 - DNA, 15 bp, Homo sapiens
atgggaaaagttttc

SEQ ID NO: 435006 - DNA, 15 bp, Homo sapiens
gatgggaaaagtttt

SEQ ID NO: 435007 - DNA, 15 bp, Homo sapiens
agatgggaaaagttt

SEQ ID NO: 435008 - DNA, 15 bp, Homo sapiens
aagatgggaaaagtt

SEQ ID NO: 435009 - DNA, 15 bp, Homo sapiens
gaagatgggaaaagt

SEQ ID NO: 435010 - DNA, 15 bp, Homo sapiens
ggaagatgggaaaag

SEQ ID NO: 435011 - DNA, 15 bp, Homo sapiens
gggaagatgggaaaa

SEQ ID NO: 435012 - DNA, 15 bp, Homo sapiens
tgggaagatgggaaa

SEQ ID NO: 435013 - DNA, 15 bp, Homo sapiens
gtgggaagatgggaa

SEQ ID NO: 435014 - DNA, 15 bp, Homo sapiens
tgtgggaagatggga

SEQ ID NO: 435015 - DNA, 15 bp, Homo sapiens
ctgtgggaagatggg

SEQ ID NO: 435016 - DNA, 15 bp, Homo sapiens
cctgtgggaagatgg

SEQ ID NO: 435017 - DNA, 15 bp, Homo sapiens
gcctgtgggaagatg

SEQ ID NO: 435018 - DNA, 15 bp, Homo sapiens
tgcctgtgggaagat

SEQ ID NO: 435019 - DNA, 15 bp, Homo sapiens
ttgcctgtgggaaga

SEQ ID NO: 435020 - DNA, 15 bp, Homo sapiens
gttgcctgtgggaag

SEQ ID NO: 435021 - DNA, 15 bp, Homo sapiens
ggttgcctgtgggaa

SEQ ID NO: 435022 - DNA, 15 bp, Homo sapiens
aggttgcctgtggga

SEQ ID NO: 435023 - DNA, 15 bp, Homo sapiens
gaggttgcctgtggg

SEQ ID NO: 435024 - DNA, 15 bp, Homo sapiens
ggaggttgcctgtgg

SEQ ID NO: 435025 - DNA, 15 bp, Homo sapiens
gggaggttgcctgtg

SEQ ID NO: 435026 - DNA, 15 bp, Homo sapiens
agggaggttgcctgt

SEQ ID NO: 435027 - DNA, 15 bp, Homo sapiens
aagggaggttgcctg

SEQ ID NO: 435028 - DNA, 15 bp, Homo sapiens
gaagggaggttgcct

SEQ ID NO: 435029 - DNA, 15 bp, Homo sapiens
tgaagggaggttgcc

SEQ ID NO: 435030 - DNA, 15 bp, Homo sapiens
atgaagggaggttgc

SEQ ID NO: 435031 - DNA, 15 bp, Homo sapiens
catgaagggaggttg

SEQ ID NO: 435032 - DNA, 15 bp, Homo sapiens
acatgaagggaggtt

SEQ ID NO: 435033 - DNA, 15 bp, Homo sapiens
tacatgaagggaggt

SEQ ID NO: 435034 - DNA, 15 bp, Homo sapiens
atacatgaagggagg

SEQ ID NO: 435035 - DNA, 15 bp, Homo sapiens
gatacatgaagggag

SEQ ID NO: 435036 - DNA, 15 bp, Homo sapiens
ggatacatgaaggga

SEQ ID NO: 435037 - DNA, 15 bp, Homo sapiens
aggatacatgaaggg

SEQ ID NO: 435038 - DNA, 15 bp, Homo sapiens
aaggatacatgaagg

SEQ ID NO: 435039 - DNA, 15 bp, Homo sapiens
caaggatacatgaag

SEQ ID NO: 435040 - DNA, 15 bp, Homo sapiens
acaaggatacatgaa

SEQ ID NO: 435041 - DNA, 15 bp, Homo sapiens
aacaaggatacatga

SEQ ID NO: 435042 - DNA, 15 bp, Homo sapiens
gaacaaggatacatg

SEQ ID NO: 435043 - DNA, 15 bp, Homo sapiens
tgaacaaggatacat

SEQ ID NO: 435044 - DNA, 15 bp, Homo sapiens
gtgaacaaggataca

SEQ ID NO: 435045 - DNA, 15 bp, Homo sapiens
tgtgaacaaggatac

SEQ ID NO: 435046 - DNA, 15 bp, Homo sapiens
ctgtgaacaaggata

SEQ ID NO: 435047 - DNA, 15 bp, Homo sapiens
actgtgaacaaggat

SEQ ID NO: 435048 - DNA, 15 bp, Homo sapiens
cactgtgaacaagga

SEQ ID NO: 435049 - DNA, 15 bp, Homo sapiens
tcactgtgaacaagg

SEQ ID NO: 435050 - DNA, 15 bp, Homo sapiens
ctcactgtgaacaag

SEQ ID NO: 435051 - DNA, 15 bp, Homo sapiens
actcactgtgaacaa

SEQ ID NO: 435052 - DNA, 15 bp, Homo sapiens
aactcactgtgaaca

SEQ ID NO: 435053 - DNA, 15 bp, Homo sapiens
gaactcactgtgaac

SEQ ID NO: 435054 - DNA, 15 bp, Homo sapiens
ggaactcactgtgaa

SEQ ID NO: 435055 - DNA, 15 bp, Homo sapiens
aggaactcactgtga

SEQ ID NO: 435056 - DNA, 15 bp, Homo sapiens
aaggaactcactgtg

SEQ ID NO: 435057 - DNA, 15 bp, Homo sapiens
aaaggaactcactgt

SEQ ID NO: 435058 - DNA, 15 bp, Homo sapiens
caaaggaactcactg

SEQ ID NO: 435059 - DNA, 15 bp, Homo sapiens
gcaaaggaactcact

SEQ ID NO: 435060 - DNA, 15 bp, Homo sapiens
ggcaaaggaactcac

SEQ ID NO: 435061 - DNA, 15 bp, Homo sapiens
gggcaaaggaactca

SEQ ID NO: 435062 - DNA, 15 bp, Homo sapiens
tgggcaaaggaactc

SEQ ID NO: 435063 - DNA, 15 bp, Homo sapiens
gtgggcaaaggaact

SEQ ID NO: 435064 - DNA, 15 bp, Homo sapiens
tgtgggcaaaggaac

SEQ ID NO: 435065 - DNA, 15 bp, Homo sapiens
gtgtgggcaaaggaa

SEQ ID NO: 435066 - DNA, 15 bp, Homo sapiens
ggtgtgggcaaagga

SEQ ID NO: 435067 - DNA, 15 bp, Homo sapiens
aggtgtgggcaaagg

SEQ ID NO: 435068 - DNA, 15 bp, Homo sapiens
taggtgtgggcaaag

SEQ ID NO: 435069 - DNA, 15 bp, Homo sapiens
ttaggtgtgggcaaa

SEQ ID NO: 435070 - DNA, 15 bp, Homo sapiens
tttaggtgtgggcaa

SEQ ID NO: 435071 - DNA, 15 bp, Homo sapiens
gtttaggtgtgggca

SEQ ID NO: 435072 - DNA, 15 bp, Homo sapiens
ggtttaggtgtgggc

SEQ ID NO: 435073 - DNA, 15 bp, Homo sapiens
tggtttaggtgtggg

SEQ ID NO: 435074 - DNA, 15 bp, Homo sapiens
ttggtttaggtgtgg

SEQ ID NO: 435075 - DNA, 15 bp, Homo sapiens
attggtttaggtgtg

SEQ ID NO: 435076 - DNA, 15 bp, Homo sapiens
gattggtttaggtgt

SEQ ID NO: 435077 - DNA, 15 bp, Homo sapiens
tgattggtttaggtg

SEQ ID NO: 435078 - DNA, 15 bp, Homo sapiens
gtgattggtttaggt

SEQ ID NO: 435079 - DNA, 15 bp, Homo sapiens
tgtgattggtttagg

SEQ ID NO: 435080 - DNA, 15 bp, Homo sapiens
ttgtgattggtttag

SEQ ID NO: 435081 - DNA, 15 bp, Homo sapiens
cttgtgattggttta

SEQ ID NO: 435082 - DNA, 15 bp, Homo sapiens
tcttgtgattggttt

SEQ ID NO: 435083 - DNA, 15 bp, Homo sapiens
ttcttgtgattggtt

SEQ ID NO: 435084 - DNA, 15 bp, Homo sapiens
tttcttgtgattggt

SEQ ID NO: 435085 - DNA, 15 bp, Homo sapiens
ctttcttgtgattgg

SEQ ID NO: 435086 - DNA, 15 bp, Homo sapiens
tctttcttgtgattg

SEQ ID NO: 435087 - DNA, 15 bp, Homo sapiens
ttctttcttgtgatt

SEQ ID NO: 435088 - DNA, 15 bp, Homo sapiens
gttctttcttgtgat

SEQ ID NO: 435089 - DNA, 15 bp, Homo sapiens
tgttctttcttgtga

SEQ ID NO: 435090 - DNA, 15 bp, Homo sapiens
ttgttctttcttgtg

SEQ ID NO: 435091 - DNA, 15 bp, Homo sapiens
attgttctttcttgt

SEQ ID NO: 435092 - DNA, 15 bp, Homo sapiens
gattgttctttcttg

SEQ ID NO: 435093 - DNA, 15 bp, Homo sapiens
tgattgttctttctt

SEQ ID NO: 435094 - DNA, 15 bp, Homo sapiens
ctgattgttctttct

SEQ ID NO: 435095 - DNA, 15 bp, Homo sapiens
tctgattgttctttc

SEQ ID NO: 435096 - DNA, 15 bp, Homo sapiens
ttctgattgttcttt

SEQ ID NO: 435097 - DNA, 15 bp, Homo sapiens
attctgattgttctt

SEQ ID NO: 435098 - DNA, 15 bp, Homo sapiens
gattctgattgttct

SEQ ID NO: 435099 - DNA, 15 bp, Homo sapiens
tgattctgattgttc

SEQ ID NO: 435100 - DNA, 15 bp, Homo sapiens
ttgattctgattgtt

SEQ ID NO: 435101 - DNA, 15 bp, Homo sapiens
gttgattctgattgt

SEQ ID NO: 435102 - DNA, 15 bp, Homo sapiens
ggttgattctgattg

SEQ ID NO: 435103 - DNA, 15 bp, Homo sapiens
gggttgattctgatt

SEQ ID NO: 435104 - DNA, 15 bp, Homo sapiens
ggggttgattctgat

SEQ ID NO: 435105 - DNA, 15 bp, Homo sapiens
aggggttgattctga

SEQ ID NO: 435106 - DNA, 15 bp, Homo sapiens
caggggttgattctg

SEQ ID NO: 435107 - DNA, 15 bp, Homo sapiens
tcaggggttgattct

SEQ ID NO: 435108 - DNA, 15 bp, Homo sapiens
gtcaggggttgattc

SEQ ID NO: 435109 - DNA, 15 bp, Homo sapiens
agtcaggggttgatt

SEQ ID NO: 435110 - DNA, 15 bp, Homo sapiens
aagtcaggggttgat

SEQ ID NO: 435111 - DNA, 15 bp, Homo sapiens
caagtcaggggttga

SEQ ID NO: 435112 - DNA, 15 bp, Homo sapiens
ccaagtcaggggttg

SEQ ID NO: 435113 - DNA, 15 bp, Homo sapiens
cccaagtcaggggtt

SEQ ID NO: 435114 - DNA, 15 bp, Homo sapiens
ccccaagtcaggggt

SEQ ID NO: 435115 - DNA, 15 bp, Homo sapiens
gccccaagtcagggg

SEQ ID NO: 435116 - DNA, 15 bp, Homo sapiens
agccccaagtcaggg

SEQ ID NO: 435117 - DNA, 15 bp, Homo sapiens
tagccccaagtcagg

SEQ ID NO: 435118 - DNA, 15 bp, Homo sapiens
ctagccccaagtcag

SEQ ID NO: 435119 - DNA, 15 bp, Homo sapiens
actagccccaagtca

SEQ ID NO: 435120 - DNA, 15 bp, Homo sapiens
cactagccccaagtc

SEQ ID NO: 435121 - DNA, 15 bp, Homo sapiens
acactagccccaagt

SEQ ID NO: 435122 - DNA, 15 bp, Homo sapiens
aacactagccccaag

SEQ ID NO: 435123 - DNA, 15 bp, Homo sapiens
taacactagccccaa

SEQ ID NO: 435124 - DNA, 15 bp, Homo sapiens
gtaacactagcccca

SEQ ID NO: 435125 - DNA, 15 bp, Homo sapiens
tgtaacactagcccc

SEQ ID NO: 435126 - DNA, 15 bp, Homo sapiens
atgtaacactagccc

SEQ ID NO: 435127 - DNA, 15 bp, Homo sapiens
gatgtaacactagcc

SEQ ID NO: 435128 - DNA, 15 bp, Homo sapiens
agatgtaacactagc

SEQ ID NO: 435129 - DNA, 15 bp, Homo sapiens
gagatgtaacactag

SEQ ID NO: 435130 - DNA, 15 bp, Homo sapiens
agagatgtaacacta

SEQ ID NO: 435131 - DNA, 15 bp, Homo sapiens
aagagatgtaacact

SEQ ID NO: 435132 - DNA, 15 bp, Homo sapiens
taagagatgtaacac

SEQ ID NO: 435133 - DNA, 15 bp, Homo sapiens
ttaagagatgtaaca

SEQ ID NO: 435134 - DNA, 15 bp, Homo sapiens
cttaagagatgtaac

SEQ ID NO: 435135 - DNA, 15 bp, Homo sapiens
acttaagagatgtaa

SEQ ID NO: 435136 - DNA, 15 bp, Homo sapiens
gacttaagagatgta

SEQ ID NO: 435137 - DNA, 15 bp, Homo sapiens
tgacttaagagatgt

SEQ ID NO: 435138 - DNA, 15 bp, Homo sapiens
gtgacttaagagatg

SEQ ID NO: 435139 - DNA, 15 bp, Homo sapiens
agtgacttaagagat

SEQ ID NO: 435140 - DNA, 15 bp, Homo sapiens
aagtgacttaagaga

SEQ ID NO: 435141 - DNA, 15 bp, Homo sapiens
caagtgacttaagag

SEQ ID NO: 435142 - DNA, 15 bp, Homo sapiens
ccaagtgacttaaga

SEQ ID NO: 435143 - DNA, 15 bp, Homo sapiens
tccaagtgacttaag

SEQ ID NO: 435144 - DNA, 15 bp, Homo sapiens
ctccaagtgacttaa

SEQ ID NO: 435145 - DNA, 15 bp, Homo sapiens
tctccaagtgactta

SEQ ID NO: 435146 - DNA, 15 bp, Homo sapiens
gtctccaagtgactt

SEQ ID NO: 435147 - DNA, 15 bp, Homo sapiens
cgtctccaagtgact

SEQ ID NO: 435148 - DNA, 15 bp, Homo sapiens
ccgtctccaagtgac

SEQ ID NO: 435149 - DNA, 15 bp, Homo sapiens
cccgtctccaagtga

SEQ ID NO: 435150 - DNA, 15 bp, Homo sapiens
ccccgtctccaagtg

SEQ ID NO: 435151 - DNA, 15 bp, Homo sapiens
accccgtctccaagt

SEQ ID NO: 435152 - DNA, 15 bp, Homo sapiens
taccccgtctccaag

SEQ ID NO: 435153 - DNA, 15 bp, Homo sapiens
ataccccgtctccaa

SEQ ID NO: 435154 - DNA, 15 bp, Homo sapiens
tataccccgtctcca

SEQ ID NO: 435155 - DNA, 15 bp, Homo sapiens
gtataccccgtctcc

SEQ ID NO: 435156 - DNA, 15 bp, Homo sapiens
ggtataccccgtctc

SEQ ID NO: 435157 - DNA, 15 bp, Homo sapiens
gggtataccccgtct

SEQ ID NO: 435158 - DNA, 15 bp, Homo sapiens
ggggtataccccgtc

SEQ ID NO: 435159 - DNA, 15 bp, Homo sapiens
aggggtataccccgt

SEQ ID NO: 435160 - DNA, 15 bp, Homo sapiens
caggggtataccccg

SEQ ID NO: 435161 - DNA, 15 bp, Homo sapiens
tcaggggtatacccc

SEQ ID NO: 435162 - DNA, 15 bp, Homo sapiens
ctcaggggtataccc

SEQ ID NO: 435163 - DNA, 15 bp, Homo sapiens
actcaggggtatacc

SEQ ID NO: 435164 - DNA, 15 bp, Homo sapiens
tactcaggggtatac

SEQ ID NO: 435165 - DNA, 15 bp, Homo sapiens
ctactcaggggtata

SEQ ID NO: 435166 - DNA, 15 bp, Homo sapiens
tctactcaggggtat

SEQ ID NO: 435167 - DNA, 15 bp, Homo sapiens
atctactcaggggta

SEQ ID NO: 435168 - DNA, 15 bp, Homo sapiens
aatctactcaggggt

SEQ ID NO: 435169 - DNA, 15 bp, Homo sapiens
aaatctactcagggg

SEQ ID NO: 435170 - DNA, 15 bp, Homo sapiens
caaatctactcaggg

SEQ ID NO: 435171 - DNA, 15 bp, Homo sapiens
ccaaatctactcagg

SEQ ID NO: 435172 - DNA, 15 bp, Homo sapiens
cccaaatctactcag

SEQ ID NO: 435173 - DNA, 15 bp, Homo sapiens
tcccaaatctactca

SEQ ID NO: 435174 - DNA, 15 bp, Homo sapiens
ttcccaaatctactc

SEQ ID NO: 435175 - DNA, 15 bp, Homo sapiens
cttcccaaatctact

SEQ ID NO: 435176 - DNA, 15 bp, Homo sapiens
ccttcccaaatctac

SEQ ID NO: 435177 - DNA, 15 bp, Homo sapiens
tccttcccaaatcta

SEQ ID NO: 435178 - DNA, 15 bp, Homo sapiens
ttccttcccaaatct

SEQ ID NO: 435179 - DNA, 15 bp, Homo sapiens
cttccttcccaaatc

SEQ ID NO: 435180 - DNA, 15 bp, Homo sapiens
tcttccttcccaaat

SEQ ID NO: 435181 - DNA, 15 bp, Homo sapiens
ttcttccttcccaaa

SEQ ID NO: 435182 - DNA, 15 bp, Homo sapiens
cttcttccttcccaa

SEQ ID NO: 435183 - DNA, 15 bp, Homo sapiens
tcttcttccttccca

SEQ ID NO: 435184 - DNA, 15 bp, Homo sapiens
ttcttcttccttccc

SEQ ID NO: 435185 - DNA, 15 bp, Homo sapiens
tttcttcttccttcc

SEQ ID NO: 435186 - DNA, 15 bp, Homo sapiens
ctttcttcttccttc

SEQ ID NO: 435187 - DNA, 15 bp, Homo sapiens
cctttcttcttcctt

SEQ ID NO: 435188 - DNA, 15 bp, Homo sapiens
ccctttcttcttcct

SEQ ID NO: 435189 - DNA, 15 bp, Homo sapiens
tccctttcttcttcc

SEQ ID NO: 435190 - DNA, 15 bp, Homo sapiens
ttccctttcttcttc

SEQ ID NO: 435191 - DNA, 15 bp, Homo sapiens
gttccctttcttctt

SEQ ID NO: 435192 - DNA, 15 bp, Homo sapiens
tgttccctttcttct

SEQ ID NO: 435193 - DNA, 15 bp, Homo sapiens
ttgttccctttcttc

SEQ ID NO: 435194 - DNA, 15 bp, Homo sapiens
cttgttccctttctt

SEQ ID NO: 435195 - DNA, 15 bp, Homo sapiens
ccttgttccctttct

SEQ ID NO: 435196 - DNA, 15 bp, Homo sapiens
accttgttccctttc

SEQ ID NO: 435197 - DNA, 15 bp, Homo sapiens
caccttgttcccttt

SEQ ID NO: 435198 - DNA, 15 bp, Homo sapiens
acaccttgttccctt

SEQ ID NO: 435199 - DNA, 15 bp, Homo sapiens
aacaccttgttccct

SEQ ID NO: 435200 - DNA, 15 bp, Homo sapiens
caacaccttgttccc

SEQ ID NO: 435201 - DNA, 15 bp, Homo sapiens
acaacaccttgttcc

SEQ ID NO: 435202 - DNA, 15 bp, Homo sapiens
cacaacaccttgttc

SEQ ID NO: 435203 - DNA, 15 bp, Homo sapiens
ccacaacaccttgtt

SEQ ID NO: 435204 - DNA, 15 bp, Homo sapiens
tccacaacaccttgt

SEQ ID NO: 435205 - DNA, 15 bp, Homo sapiens
ttccacaacaccttg

SEQ ID NO: 435206 - DNA, 15 bp, Homo sapiens
gttccacaacacctt

SEQ ID NO: 435207 - DNA, 15 bp, Homo sapiens
tgttccacaacacct

SEQ ID NO: 435208 - DNA, 15 bp, Homo sapiens
ttgttccacaacacc

SEQ ID NO: 435209 - DNA, 15 bp, Homo sapiens
gttgttccacaacac

SEQ ID NO: 435210 - DNA, 15 bp, Homo sapiens
ggttgttccacaaca

SEQ ID NO: 435211 - DNA, 15 bp, Homo sapiens
tggttgttccacaac

SEQ ID NO: 435212 - DNA, 15 bp, Homo sapiens
ttggttgttccacaa

SEQ ID NO: 435213 - DNA, 15 bp, Homo sapiens
tttggttgttccaca

SEQ ID NO: 435214 - DNA, 15 bp, Homo sapiens
ttttggttgttccac

SEQ ID NO: 435215 - DNA, 15 bp, Homo sapiens
tttttggttgttcca

SEQ ID NO: 435216 - DNA, 15 bp, Homo sapiens
atttttggttgttcc

SEQ ID NO: 435217 - DNA, 15 bp, Homo sapiens
catttttggttgttc

SEQ ID NO: 435218 - DNA, 15 bp, Homo sapiens
gcatttttggttgtt

SEQ ID NO: 435219 - DNA, 15 bp, Homo sapiens
ggcatttttggttgt

SEQ ID NO: 435220 - DNA, 15 bp, Homo sapiens
tggcatttttggttg

SEQ ID NO: 435221 - DNA, 15 bp, Homo sapiens
ttggcatttttggtt

SEQ ID NO: 435222 - DNA, 15 bp, Homo sapiens
attggcatttttggt

SEQ ID NO: 435223 - DNA, 15 bp, Homo sapiens
cattggcatttttgg

SEQ ID NO: 435224 - DNA, 15 bp, Homo sapiens
tcattggcatttttg

SEQ ID NO: 435225 - DNA, 15 bp, Homo sapiens
ttcattggcattttt

SEQ ID NO: 435226 - DNA, 15 bp, Homo sapiens
tttcattggcatttt

SEQ ID NO: 435227 - DNA, 15 bp, Homo sapiens
ttttcattggcattt

SEQ ID NO: 435228 - DNA, 15 bp, Homo sapiens
cttttcattggcatt

SEQ ID NO: 435229 - DNA, 15 bp, Homo sapiens
ccttttcattggcat

SEQ ID NO: 435230 - DNA, 15 bp, Homo sapiens
accttttcattggca

SEQ ID NO: 435231 - DNA, 15 bp, Homo sapiens
aaccttttcattggc

SEQ ID NO: 435232 - DNA, 15 bp, Homo sapiens
caaccttttcattgg

SEQ ID NO: 435233 - DNA, 15 bp, Homo sapiens
acaaccttttcattg

SEQ ID NO: 435234 - DNA, 15 bp, Homo sapiens
gacaaccttttcatt

SEQ ID NO: 435235 - DNA, 15 bp, Homo sapiens
agacaaccttttcat

SEQ ID NO: 435236 - DNA, 15 bp, Homo sapiens
gagacaaccttttca

SEQ ID NO: 435237 - DNA, 15 bp, Homo sapiens
ggagacaaccttttc

SEQ ID NO: 435238 - DNA, 15 bp, Homo sapiens
gggagacaacctttt

SEQ ID NO: 435239 - DNA, 15 bp, Homo sapiens
tgggagacaaccttt

SEQ ID NO: 435240 - DNA, 15 bp, Homo sapiens
atgggagacaacctt

SEQ ID NO: 435241 - DNA, 15 bp, Homo sapiens
tatgggagacaacct

SEQ ID NO: 435242 - DNA, 15 bp, Homo sapiens
atatgggagacaacc

SEQ ID NO: 435243 - DNA, 15 bp, Homo sapiens
aatatgggagacaac

SEQ ID NO: 435244 - DNA, 15 bp, Homo sapiens
gaatatgggagacaa

SEQ ID NO: 435245 - DNA, 15 bp, Homo sapiens
ggaatatgggagaca

SEQ ID NO: 435246 - DNA, 15 bp, Homo sapiens
tggaatatgggagac

SEQ ID NO: 435247 - DNA, 15 bp, Homo sapiens
atggaatatgggaga

SEQ ID NO: 435248 - DNA, 15 bp, Homo sapiens
tatggaatatgggag

SEQ ID NO: 435249 - DNA, 15 bp, Homo sapiens
ctatggaatatggga

SEQ ID NO: 435250 - DNA, 15 bp, Homo sapiens
actatggaatatggg

SEQ ID NO: 435251 - DNA, 15 bp, Homo sapiens
gactatggaatatgg

SEQ ID NO: 435252 - DNA, 15 bp, Homo sapiens
tgactatggaatatg

SEQ ID NO: 435253 - DNA, 15 bp, Homo sapiens
atgactatggaatat

SEQ ID NO: 435254 - DNA, 15 bp, Homo sapiens
gatgactatggaata

SEQ ID NO: 435255 - DNA, 15 bp, Homo sapiens
cgatgactatggaat

SEQ ID NO: 435256 - DNA, 15 bp, Homo sapiens
acgatgactatggaa

SEQ ID NO: 435257 - DNA, 15 bp, Homo sapiens
gacgatgactatgga

SEQ ID NO: 435258 - DNA, 15 bp, Homo sapiens
agacgatgactatgg

SEQ ID NO: 435259 - DNA, 15 bp, Homo sapiens
aagacgatgactatg

SEQ ID NO: 435260 - DNA, 15 bp, Homo sapiens
aaagacgatgactat

SEQ ID NO: 435261 - DNA, 15 bp, Homo sapiens
aaaagacgatgacta

SEQ ID NO: 435262 - DNA, 15 bp, Homo sapiens
taaaagacgatgact

SEQ ID NO: 435263 - DNA, 15 bp, Homo sapiens
ataaaagacgatgac

SEQ ID NO: 435264 - DNA, 15 bp, Homo sapiens
aataaaagacgatga

SEQ ID NO: 435265 - DNA, 15 bp, Homo sapiens
aaataaaagacgatg

SEQ ID NO: 435266 - DNA, 15 bp, Homo sapiens
aaaataaaagacgat

SEQ ID NO: 435267 - DNA, 15 bp, Homo sapiens
taaaataaaagacga

SEQ ID NO: 435268 - DNA, 15 bp, Homo sapiens
ataaaataaaagacg

SEQ ID NO: 435269 - DNA, 15 bp, Homo sapiens
aataaaataaaagac

SEQ ID NO: 435270 - DNA, 15 bp, Homo sapiens
aaataaaataaaaga

SEQ ID NO: 435271 - DNA, 15 bp, Homo sapiens
aaaataaaataaaag

SEQ ID NO: 435272 - DNA, 15 bp, Homo sapiens
aaaaaataaaataaa

SEQ ID NO: 435273 - DNA, 15 bp, Homo sapiens
gaaaaaataaaataa

SEQ ID NO: 435274 - DNA, 15 bp, Homo sapiens
tgaaaaaataaaata

SEQ ID NO: 435275 - DNA, 15 bp, Homo sapiens
ctgaaaaaataaaat

SEQ ID NO: 435276 - DNA, 15 bp, Homo sapiens
cctgaaaaaataaaa

SEQ ID NO: 435277 - DNA, 15 bp, Homo sapiens
tcctgaaaaaataaa

SEQ ID NO: 435278 - DNA, 15 bp, Homo sapiens
ttcctgaaaaaataa

SEQ ID NO: 435279 - DNA, 15 bp, Homo sapiens
tttcctgaaaaaata

SEQ ID NO: 435280 - DNA, 15 bp, Homo sapiens
atttcctgaaaaaat

SEQ ID NO: 435281 - DNA, 15 bp, Homo sapiens
catttcctgaaaaaa

SEQ ID NO: 435282 - DNA, 15 bp, Homo sapiens
acatttcctgaaaaa

SEQ ID NO: 435283 - DNA, 15 bp, Homo sapiens
aacatttcctgaaaa

SEQ ID NO: 435284 - DNA, 15 bp, Homo sapiens
aaacatttcctgaaa

SEQ ID NO: 435285 - DNA, 15 bp, Homo sapiens
gaaacatttcctgaa

SEQ ID NO: 435286 - DNA, 15 bp, Homo sapiens
agaaacatttcctga

SEQ ID NO: 435287 - DNA, 15 bp, Homo sapiens
cagaaacatttcctg

SEQ ID NO: 435288 - DNA, 15 bp, Homo sapiens
tcagaaacatttcct

SEQ ID NO: 435289 - DNA, 15 bp, Homo sapiens
ctcagaaacatttcc

SEQ ID NO: 435290 - DNA, 15 bp, Homo sapiens
actcagaaacatttc

SEQ ID NO: 435291 - DNA, 15 bp, Homo sapiens
gactcagaaacattt

SEQ ID NO: 435292 - DNA, 15 bp, Homo sapiens
tgactcagaaacatt

SEQ ID NO: 435293 - DNA, 15 bp, Homo sapiens
atgactcagaaacat

SEQ ID NO: 435294 - DNA, 15 bp, Homo sapiens
tatgactcagaaaca

SEQ ID NO: 435295 - DNA, 15 bp, Homo sapiens
ttatgactcagaaac

SEQ ID NO: 435296 - DNA, 15 bp, Homo sapiens
attatgactcagaaa

SEQ ID NO: 435297 - DNA, 15 bp, Homo sapiens
tattatgactcagaa

SEQ ID NO: 435298 - DNA, 15 bp, Homo sapiens
atattatgactcaga

SEQ ID NO: 435299 - DNA, 15 bp, Homo sapiens
aatattatgactcag

SEQ ID NO: 435300 - DNA, 15 bp, Homo sapiens
gaatattatgactca

SEQ ID NO: 435301 - DNA, 15 bp, Homo sapiens
ggaatattatgactc

SEQ ID NO: 435302 - DNA, 15 bp, Homo sapiens
tggaatattatgact

SEQ ID NO: 435303 - DNA, 15 bp, Homo sapiens
atggaatattatgac

SEQ ID NO: 435304 - DNA, 15 bp, Homo sapiens
tatggaatattatga

SEQ ID NO: 435305 - DNA, 15 bp, Homo sapiens
ctatggaatattatg

SEQ ID NO: 435306 - DNA, 15 bp, Homo sapiens
cctatggaatattat

SEQ ID NO: 435307 - DNA, 15 bp, Homo sapiens
gcctatggaatatta

SEQ ID NO: 435308 - DNA, 15 bp, Homo sapiens
agcctatggaatatt

SEQ ID NO: 435309 - DNA, 15 bp, Homo sapiens
aagcctatggaatat

SEQ ID NO: 435310 - DNA, 15 bp, Homo sapiens
gaagcctatggaata

SEQ ID NO: 435311 - DNA, 15 bp, Homo sapiens
agaagcctatggaat

SEQ ID NO: 435312 - DNA, 15 bp, Homo sapiens
tagaagcctatggaa

SEQ ID NO: 435313 - DNA, 15 bp, Homo sapiens
atagaagcctatgga

SEQ ID NO: 435314 - DNA, 15 bp, Homo sapiens
aatagaagcctatgg

SEQ ID NO: 435315 - DNA, 15 bp, Homo sapiens
aaatagaagcctatg

SEQ ID NO: 435316 - DNA, 15 bp, Homo sapiens
taaatagaagcctat

SEQ ID NO: 435317 - DNA, 15 bp, Homo sapiens
gtaaatagaagccta

SEQ ID NO: 435318 - DNA, 15 bp, Homo sapiens
tgtaaatagaagcct

SEQ ID NO: 435319 - DNA, 15 bp, Homo sapiens
ttgtaaatagaagcc

SEQ ID NO: 435320 - DNA, 15 bp, Homo sapiens
gttgtaaatagaagc

SEQ ID NO: 435321 - DNA, 15 bp, Homo sapiens
agttgtaaatagaag

SEQ ID NO: 435322 - DNA, 15 bp, Homo sapiens
gagttgtaaatagaa

SEQ ID NO: 435323 - DNA, 15 bp, Homo sapiens
agagttgtaaataga

SEQ ID NO: 435324 - DNA, 15 bp, Homo sapiens
gagagttgtaaatag

SEQ ID NO: 435325 - DNA, 15 bp, Homo sapiens
agagagttgtaaata

SEQ ID NO: 435326 - DNA, 15 bp, Homo sapiens
gagagagttgtaaat

SEQ ID NO: 435327 - DNA, 15 bp, Homo sapiens
ggagagagttgtaaa

SEQ ID NO: 435328 - DNA, 15 bp, Homo sapiens
gggagagagttgtaa

SEQ ID NO: 435329 - DNA, 15 bp, Homo sapiens
tgggagagagttgta

SEQ ID NO: 435330 - DNA, 15 bp, Homo sapiens
ctgggagagagttgt

SEQ ID NO: 435331 - DNA, 15 bp, Homo sapiens
cctgggagagagttg

SEQ ID NO: 435332 - DNA, 15 bp, Homo sapiens
tcctgggagagagtt

SEQ ID NO: 435333 - DNA, 15 bp, Homo sapiens
ctcctgggagagagt

SEQ ID NO: 435334 - DNA, 15 bp, Homo sapiens
gctcctgggagagag

SEQ ID NO: 435335 - DNA, 15 bp, Homo sapiens
agctcctgggagaga

SEQ ID NO: 435336 - DNA, 15 bp, Homo sapiens
aagctcctgggagag

SEQ ID NO: 435337 - DNA, 15 bp, Homo sapiens
caagctcctgggaga

SEQ ID NO: 435338 - DNA, 15 bp, Homo sapiens
gcaagctcctgggag

SEQ ID NO: 435339 - DNA, 15 bp, Homo sapiens
tgcaagctcctggga

SEQ ID NO: 435340 - DNA, 15 bp, Homo sapiens
ttgcaagctcctggg

SEQ ID NO: 435341 - DNA, 15 bp, Homo sapiens
cttgcaagctcctgg

SEQ ID NO: 435342 - DNA, 15 bp, Homo sapiens
ccttgcaagctcctg

SEQ ID NO: 435343 - DNA, 15 bp, Homo sapiens
cccttgcaagctcct

SEQ ID NO: 435344 - DNA, 15 bp, Homo sapiens
acccttgcaagctcc

SEQ ID NO: 435345 - DNA, 15 bp, Homo sapiens
aacccttgcaagctc

SEQ ID NO: 435346 - DNA, 15 bp, Homo sapiens
caacccttgcaagct

SEQ ID NO: 435347 - DNA, 15 bp, Homo sapiens
gcaacccttgcaagc

SEQ ID NO: 435348 - DNA, 15 bp, Homo sapiens
agcaacccttgcaag

SEQ ID NO: 435349 - DNA, 15 bp, Homo sapiens
aagcaacccttgcaa

SEQ ID NO: 435350 - DNA, 15 bp, Homo sapiens
gaagcaacccttgca

SEQ ID NO: 435351 - DNA, 15 bp, Homo sapiens
tgaagcaacccttgc

SEQ ID NO: 435352 - DNA, 15 bp, Homo sapiens
gtgaagcaacccttg

SEQ ID NO: 435353 - DNA, 15 bp, Homo sapiens
tgtgaagcaaccctt

SEQ ID NO: 435354 - DNA, 15 bp, Homo sapiens
atgtgaagcaaccct

SEQ ID NO: 435355 - DNA, 15 bp, Homo sapiens
tatgtgaagcaaccc

SEQ ID NO: 435356 - DNA, 15 bp, Homo sapiens
ttatgtgaagcaacc

SEQ ID NO: 435357 - DNA, 15 bp, Homo sapiens
gttatgtgaagcaac

SEQ ID NO: 435358 - DNA, 15 bp, Homo sapiens
agttatgtgaagcaa

SEQ ID NO: 435359 - DNA, 15 bp, Homo sapiens
tagttatgtgaagca

SEQ ID NO: 435360 - DNA, 15 bp, Homo sapiens
ctagttatgtgaagc

SEQ ID NO: 435361 - DNA, 15 bp, Homo sapiens
cctagttatgtgaag

SEQ ID NO: 435362 - DNA, 15 bp, Homo sapiens
gcctagttatgtgaa

SEQ ID NO: 435363 - DNA, 15 bp, Homo sapiens
ggcctagttatgtga

SEQ ID NO: 435364 - DNA, 15 bp, Homo sapiens
tggcctagttatgtg

SEQ ID NO: 435365 - DNA, 15 bp, Homo sapiens
ctggcctagttatgt

SEQ ID NO: 435366 - DNA, 15 bp, Homo sapiens
tctggcctagttatg

SEQ ID NO: 435367 - DNA, 15 bp, Homo sapiens
ctctggcctagttat

SEQ ID NO: 435368 - DNA, 15 bp, Homo sapiens
cctctggcctagtta

SEQ ID NO: 435369 - DNA, 15 bp, Homo sapiens
tcctctggcctagtt

SEQ ID NO: 435370 - DNA, 15 bp, Homo sapiens
ctcctctggcctagt

SEQ ID NO: 435371 - DNA, 15 bp, Homo sapiens
gctcctctggcctag

SEQ ID NO: 435372 - DNA, 15 bp, Homo sapiens
agctcctctggccta

SEQ ID NO: 435373 - DNA, 15 bp, Homo sapiens
aagctcctctggcct

SEQ ID NO: 435374 - DNA, 15 bp, Homo sapiens
aaagctcctctggcc

SEQ ID NO: 435375 - DNA, 15 bp, Homo sapiens
aaaagctcctctggc

SEQ ID NO: 435376 - DNA, 15 bp, Homo sapiens
aaaaagctcctctgg

SEQ ID NO: 435377 - DNA, 15 bp, Homo sapiens
taaaaagctcctctg

SEQ ID NO: 435378 - DNA, 15 bp, Homo sapiens
ataaaaagctcctct

SEQ ID NO: 435379 - DNA, 15 bp, Homo sapiens
aataaaaagctcctc

SEQ ID NO: 435380 - DNA, 15 bp, Homo sapiens
aaataaaaagctcct

SEQ ID NO: 435381 - DNA, 15 bp, Homo sapiens
aaaataaaaagctcc

SEQ ID NO: 435382 - DNA, 15 bp, Homo sapiens
taaaataaaaagctc

SEQ ID NO: 435383 - DNA, 15 bp, Homo sapiens
ataaaataaaaagct

SEQ ID NO: 435384 - DNA, 15 bp, Homo sapiens
aataaaataaaaagc

SEQ ID NO: 435385 - DNA, 15 bp, Homo sapiens
aaataaaataaaaag

SEQ ID NO: 435386 - DNA, 15 bp, Homo sapiens
gaaaataaaataaaa

SEQ ID NO: 435387 - DNA, 15 bp, Homo sapiens
agaaaataaaataaa

SEQ ID NO: 435388 - DNA, 15 bp, Homo sapiens
aagaaaataaaataa

SEQ ID NO: 435389 - DNA, 15 bp, Homo sapiens
aaagaaaataaaata

SEQ ID NO: 435390 - DNA, 15 bp, Homo sapiens
aaaagaaaataaaat

SEQ ID NO: 435391 - DNA, 15 bp, Homo sapiens
aaaaagaaaataaaa

SEQ ID NO: 435392 - DNA, 15 bp, Homo sapiens
caaaaagaaaataaa

SEQ ID NO: 435393 - DNA, 15 bp, Homo sapiens
acaaaaagaaaataa

SEQ ID NO: 435394 - DNA, 15 bp, Homo sapiens
aacaaaaagaaaata

SEQ ID NO: 435395 - DNA, 15 bp, Homo sapiens
aaacaaaaagaaaat

SEQ ID NO: 435396 - DNA, 15 bp, Homo sapiens
aaaacaaaaagaaaa

SEQ ID NO: 435397 - DNA, 15 bp, Homo sapiens
caaaacaaaaagaaa

SEQ ID NO: 435398 - DNA, 15 bp, Homo sapiens
acaaaacaaaaagaa

SEQ ID NO: 435399 - DNA, 15 bp, Homo sapiens
aacaaaacaaaaaga

SEQ ID NO: 435400 - DNA, 15 bp, Homo sapiens
aaacaaaacaaaaag

SEQ ID NO: 435401 - DNA, 15 bp, Homo sapiens
caaacaaaacaaaaa

SEQ ID NO: 435402 - DNA, 15 bp, Homo sapiens
tcaaacaaaacaaaa

SEQ ID NO: 435403 - DNA, 15 bp, Homo sapiens
ctcaaacaaaacaaa

SEQ ID NO: 435404 - DNA, 15 bp, Homo sapiens
actcaaacaaaacaa

SEQ ID NO: 435405 - DNA, 15 bp, Homo sapiens
tactcaaacaaaaca

SEQ ID NO: 435406 - DNA, 15 bp, Homo sapiens
ctactcaaacaaaac

SEQ ID NO: 435407 - DNA, 15 bp, Homo sapiens
cctactcaaacaaaa

SEQ ID NO: 435408 - DNA, 15 bp, Homo sapiens
tcctactcaaacaaa

SEQ ID NO: 435409 - DNA, 15 bp, Homo sapiens
ctcctactcaaacaa

SEQ ID NO: 435410 - DNA, 15 bp, Homo sapiens
actcctactcaaaca

SEQ ID NO: 435411 - DNA, 15 bp, Homo sapiens
gactcctactcaaac

SEQ ID NO: 435412 - DNA, 15 bp, Homo sapiens
agactcctactcaaa

SEQ ID NO: 435413 - DNA, 15 bp, Homo sapiens
gagactcctactcaa

SEQ ID NO: 435414 - DNA, 15 bp, Homo sapiens
cgagactcctactca

SEQ ID NO: 435415 - DNA, 15 bp, Homo sapiens
gcgagactcctactc

SEQ ID NO: 435416 - DNA, 15 bp, Homo sapiens
agcgagactcctact

SEQ ID NO: 435417 - DNA, 15 bp, Homo sapiens
gagcgagactcctac

SEQ ID NO: 435418 - DNA, 15 bp, Homo sapiens
agagcgagactccta

SEQ ID NO: 435419 - DNA, 15 bp, Homo sapiens
cagagcgagactcct

SEQ ID NO: 435420 - DNA, 15 bp, Homo sapiens
acagagcgagactcc

SEQ ID NO: 435421 - DNA, 15 bp, Homo sapiens
tgacagagcgagact

SEQ ID NO: 435422 - DNA, 15 bp, Homo sapiens
gtgacagagcgagac

SEQ ID NO: 435423 - DNA, 15 bp, Homo sapiens
agtgacagagcgaga

SEQ ID NO: 435424 - DNA, 15 bp, Homo sapiens
gagtgacagagcgag

SEQ ID NO: 435425 - DNA, 15 bp, Homo sapiens
tgagtgacagagcga

SEQ ID NO: 435426 - DNA, 15 bp, Homo sapiens
ctgagtgacagagcg

SEQ ID NO: 435427 - DNA, 15 bp, Homo sapiens
cctgagtgacagagc

SEQ ID NO: 435428 - DNA, 15 bp, Homo sapiens
gcctgagtgacagag

SEQ ID NO: 435429 - DNA, 15 bp, Homo sapiens
agcctgagtgacaga

SEQ ID NO: 435430 - DNA, 15 bp, Homo sapiens
cagcctgagtgacag

SEQ ID NO: 435431 - DNA, 15 bp, Homo sapiens
ccagcctgagtgaca

SEQ ID NO: 435432 - DNA, 15 bp, Homo sapiens
tccagcctgagtgac

SEQ ID NO: 435433 - DNA, 15 bp, Homo sapiens
ctccagcctgagtga

SEQ ID NO: 435434 - DNA, 15 bp, Homo sapiens
actccagcctgagtg

SEQ ID NO: 435435 - DNA, 15 bp, Homo sapiens
cactccagcctgagt

SEQ ID NO: 435436 - DNA, 15 bp, Homo sapiens
gcactccagcctgag

SEQ ID NO: 435437 - DNA, 15 bp, Homo sapiens
tgcactccagcctga

SEQ ID NO: 435438 - DNA, 15 bp, Homo sapiens
cgtgccactgcactc

SEQ ID NO: 435439 - DNA, 15 bp, Homo sapiens
tcgtgccactgcact

SEQ ID NO: 435440 - DNA, 15 bp, Homo sapiens
atcgtgccactgcac

SEQ ID NO: 435441 - DNA, 15 bp, Homo sapiens
gatcgtgccactgca

SEQ ID NO: 435442 - DNA, 15 bp, Homo sapiens
agatcgtgccactgc

SEQ ID NO: 435443 - DNA, 15 bp, Homo sapiens
aagatcgtgccactg

SEQ ID NO: 435444 - DNA, 15 bp, Homo sapiens
caagatcgtgccact

SEQ ID NO: 435445 - DNA, 15 bp, Homo sapiens
ccaagatcgtgccac

SEQ ID NO: 435446 - DNA, 15 bp, Homo sapiens
gccaagatcgtgcca

SEQ ID NO: 435447 - DNA, 15 bp, Homo sapiens
agccaagatcgtgcc

SEQ ID NO: 435448 - DNA, 15 bp, Homo sapiens
gagccaagatcgtgc

SEQ ID NO: 435449 - DNA, 15 bp, Homo sapiens
tgagccaagatcgtg

SEQ ID NO: 435450 - DNA, 15 bp, Homo sapiens
gtgagccaagatcgt

SEQ ID NO: 435451 - DNA, 15 bp, Homo sapiens
agtgagccaagatcg

SEQ ID NO: 435452 - DNA, 15 bp, Homo sapiens
agaggttgcagtgag

SEQ ID NO: 435453 - DNA, 15 bp, Homo sapiens
cagaggttgcagtga

SEQ ID NO: 435454 - DNA, 15 bp, Homo sapiens
gcagaggttgcagtg

SEQ ID NO: 435455 - DNA, 15 bp, Homo sapiens
ggcagaggttgcagt

SEQ ID NO: 435456 - DNA, 15 bp, Homo sapiens
aggcagaggttgcag

SEQ ID NO: 435457 - DNA, 15 bp, Homo sapiens
gaggcagaggttgca

SEQ ID NO: 435458 - DNA, 15 bp, Homo sapiens
agaggcagaggttgc

SEQ ID NO: 435459 - DNA, 15 bp, Homo sapiens
gagaggcagaggttg

SEQ ID NO: 435460 - DNA, 15 bp, Homo sapiens
tgagaggcagaggtt

SEQ ID NO: 435461 - DNA, 15 bp, Homo sapiens
ctgagaggcagaggt

SEQ ID NO: 435462 - DNA, 15 bp, Homo sapiens
cctgagaggcagagg

SEQ ID NO: 435463 - DNA, 15 bp, Homo sapiens
acctgagaggcagag

SEQ ID NO: 435464 - DNA, 15 bp, Homo sapiens
aacctgagaggcaga

SEQ ID NO: 435465 - DNA, 15 bp, Homo sapiens
gaacctgagaggcag

SEQ ID NO: 435466 - DNA, 15 bp, Homo sapiens
tgaacctgagaggca

SEQ ID NO: 435467 - DNA, 15 bp, Homo sapiens
ttgaacctgagaggc

SEQ ID NO: 435468 - DNA, 15 bp, Homo sapiens
cttgaacctgagagg

SEQ ID NO: 435469 - DNA, 15 bp, Homo sapiens
acttgaacctgagag

SEQ ID NO: 435470 - DNA, 15 bp, Homo sapiens
cacttgaacctgaga

SEQ ID NO: 435471 - DNA, 15 bp, Homo sapiens
tcacttgaacctgag

SEQ ID NO: 435472 - DNA, 15 bp, Homo sapiens
atcacttgaacctga

SEQ ID NO: 435473 - DNA, 15 bp, Homo sapiens
aatcacttgaacctg

SEQ ID NO: 435474 - DNA, 15 bp, Homo sapiens
gaatcacttgaacct

SEQ ID NO: 435475 - DNA, 15 bp, Homo sapiens
gcacctgtaatccca

SEQ ID NO: 435476 - DNA, 15 bp, Homo sapiens
tgcacctgtaatccc

SEQ ID NO: 435477 - DNA, 15 bp, Homo sapiens
atgcacctgtaatcc

SEQ ID NO: 435478 - DNA, 15 bp, Homo sapiens
catgcacctgtaatc

SEQ ID NO: 435479 - DNA, 15 bp, Homo sapiens
gcatgcacctgtaat

SEQ ID NO: 435480 - DNA, 15 bp, Homo sapiens
ggcatgcacctgtaa

SEQ ID NO: 435481 - DNA, 15 bp, Homo sapiens
tggcatgcacctgta

SEQ ID NO: 435482 - DNA, 15 bp, Homo sapiens
gtggcatgcacctgt

SEQ ID NO: 435483 - DNA, 15 bp, Homo sapiens
ggtggcatgcacctg

SEQ ID NO: 435484 - DNA, 15 bp, Homo sapiens
tggtggcatgcacct

SEQ ID NO: 435485 - DNA, 15 bp, Homo sapiens
atggtggcatgcacc

SEQ ID NO: 435486 - DNA, 15 bp, Homo sapiens
catggtggcatgcac

SEQ ID NO: 435487 - DNA, 15 bp, Homo sapiens
gcatggtggcatgca

SEQ ID NO: 435488 - DNA, 15 bp, Homo sapiens
ggcatggtggcatgc

SEQ ID NO: 435489 - DNA, 15 bp, Homo sapiens
gggcatggtggcatg

SEQ ID NO: 435490 - DNA, 15 bp, Homo sapiens
tgggcatggtggcat

SEQ ID NO: 435491 - DNA, 15 bp, Homo sapiens
ctgggcatggtggca

SEQ ID NO: 435492 - DNA, 15 bp, Homo sapiens
agctgggcatggtgg

SEQ ID NO: 435493 - DNA, 15 bp, Homo sapiens
tagctgggcatggtg

SEQ ID NO: 435494 - DNA, 15 bp, Homo sapiens
ttagctgggcatggt

SEQ ID NO: 435495 - DNA, 15 bp, Homo sapiens
attagctgggcatgg

SEQ ID NO: 435496 - DNA, 15 bp, Homo sapiens
aattagctgggcatg

SEQ ID NO: 435497 - DNA, 15 bp, Homo sapiens
aaattagctgggcat

SEQ ID NO: 435498 - DNA, 15 bp, Homo sapiens
aaaattagctgggca

SEQ ID NO: 435499 - DNA, 15 bp, Homo sapiens
aaaaattagctgggc

SEQ ID NO: 435500 - DNA, 15 bp, Homo sapiens
taatacaaaaattag

SEQ ID NO: 435501 - DNA, 15 bp, Homo sapiens
ataatacaaaaatta

SEQ ID NO: 435502 - DNA, 15 bp, Homo sapiens
aataatacaaaaatt

SEQ ID NO: 435503 - DNA, 15 bp, Homo sapiens
aaataatacaaaaat

SEQ ID NO: 435504 - DNA, 15 bp, Homo sapiens
taaataatacaaaaa

SEQ ID NO: 435505 - DNA, 15 bp, Homo sapiens
ctaaataatacaaaa

SEQ ID NO: 435506 - DNA, 15 bp, Homo sapiens
actaaataatacaaa

SEQ ID NO: 435507 - DNA, 15 bp, Homo sapiens
tactaaataatacaa

SEQ ID NO: 435508 - DNA, 15 bp, Homo sapiens
ctactaaataataca

SEQ ID NO: 435509 - DNA, 15 bp, Homo sapiens
tctactaaataatac

SEQ ID NO: 435510 - DNA, 15 bp, Homo sapiens
ttctactaaataata

SEQ ID NO: 435511 - DNA, 15 bp, Homo sapiens
tttctactaaataat

SEQ ID NO: 435512 - DNA, 15 bp, Homo sapiens
gtttctactaaataa

SEQ ID NO: 435513 - DNA, 15 bp, Homo sapiens
cgtttctactaaata

SEQ ID NO: 435514 - DNA, 15 bp, Homo sapiens
ccgtttctactaaat

SEQ ID NO: 435515 - DNA, 15 bp, Homo sapiens
cccgtttctactaaa

SEQ ID NO: 435516 - DNA, 15 bp, Homo sapiens
ccccgtttctactaa

SEQ ID NO: 435517 - DNA, 15 bp, Homo sapiens
accccgtttctacta

SEQ ID NO: 435518 - DNA, 15 bp, Homo sapiens
aaccccgtttctact

SEQ ID NO: 435519 - DNA, 15 bp, Homo sapiens
aaaccccgtttctac

SEQ ID NO: 435520 - DNA, 15 bp, Homo sapiens
gaaaccccgtttcta

SEQ ID NO: 435521 - DNA, 15 bp, Homo sapiens
tgaaaccccgtttct

SEQ ID NO: 435522 - DNA, 15 bp, Homo sapiens
gtgaaaccccgtttc

SEQ ID NO: 435523 - DNA, 15 bp, Homo sapiens
ggtgaaaccccgttt

SEQ ID NO: 435524 - DNA, 15 bp, Homo sapiens
tggtgaaaccccgtt

SEQ ID NO: 435525 - DNA, 15 bp, Homo sapiens
atggtgaaaccccgt

SEQ ID NO: 435526 - DNA, 15 bp, Homo sapiens
catggtgaaaccccg

SEQ ID NO: 435527 - DNA, 15 bp, Homo sapiens
acatggtgaaacccc

SEQ ID NO: 435528 - DNA, 15 bp, Homo sapiens
gcctggctaacatgg

SEQ ID NO: 435529 - DNA, 15 bp, Homo sapiens
agcctggctaacatg

SEQ ID NO: 435530 - DNA, 15 bp, Homo sapiens
cagcctggctaacat

SEQ ID NO: 435531 - DNA, 15 bp, Homo sapiens
ccagcctggctaaca

SEQ ID NO: 435532 - DNA, 15 bp, Homo sapiens
accagcctggctaac

SEQ ID NO: 435533 - DNA, 15 bp, Homo sapiens
gaccagcctggctaa

SEQ ID NO: 435534 - DNA, 15 bp, Homo sapiens
agaccagcctggcta

SEQ ID NO: 435535 - DNA, 15 bp, Homo sapiens
aagaccagcctggct

SEQ ID NO: 435536 - DNA, 15 bp, Homo sapiens
caagaccagcctggc

SEQ ID NO: 435537 - DNA, 15 bp, Homo sapiens
ctgaggtcaggagtt

SEQ ID NO: 435538 - DNA, 15 bp, Homo sapiens
cctgaggtcaggagt

SEQ ID NO: 435539 - DNA, 15 bp, Homo sapiens
gcctgaggtcaggag

SEQ ID NO: 435540 - DNA, 15 bp, Homo sapiens
cgcctgaggtcagga

SEQ ID NO: 435541 - DNA, 15 bp, Homo sapiens
tcgcctgaggtcagg

SEQ ID NO: 435542 - DNA, 15 bp, Homo sapiens
atcgcctgaggtcag

SEQ ID NO: 435543 - DNA, 15 bp, Homo sapiens
gatcgcctgaggtca

SEQ ID NO: 435544 - DNA, 15 bp, Homo sapiens
ggatcgcctgaggtc

SEQ ID NO: 435545 - DNA, 15 bp, Homo sapiens
aggatcgcctgaggt

SEQ ID NO: 435546 - DNA, 15 bp, Homo sapiens
gaggatcgcctgagg

SEQ ID NO: 435547 - DNA, 15 bp, Homo sapiens
ggaggatcgcctgag

SEQ ID NO: 435548 - DNA, 15 bp, Homo sapiens
gggaggatcgcctga

SEQ ID NO: 435549 - DNA, 15 bp, Homo sapiens
tgggaggatcgcctg

SEQ ID NO: 435550 - DNA, 15 bp, Homo sapiens
atgggaggatcgcct

SEQ ID NO: 435551 - DNA, 15 bp, Homo sapiens
gatgggaggatcgcc

SEQ ID NO: 435552 - DNA, 15 bp, Homo sapiens
agatgggaggatcgc

SEQ ID NO: 435553 - DNA, 15 bp, Homo sapiens
aagatgggaggatcg

SEQ ID NO: 435554 - DNA, 15 bp, Homo sapiens
caagatgggaggatc

SEQ ID NO: 435555 - DNA, 15 bp, Homo sapiens
tcaagatgggaggat

SEQ ID NO: 435556 - DNA, 15 bp, Homo sapiens
ttcaagatgggagga

SEQ ID NO: 435557 - DNA, 15 bp, Homo sapiens
cttcaagatgggagg

SEQ ID NO: 435558 - DNA, 15 bp, Homo sapiens
acttcaagatgggag

SEQ ID NO: 435559 - DNA, 15 bp, Homo sapiens
tacttcaagatggga

SEQ ID NO: 435560 - DNA, 15 bp, Homo sapiens
gtacttcaagatggg

SEQ ID NO: 435561 - DNA, 15 bp, Homo sapiens
agtacttcaagatgg

SEQ ID NO: 435562 - DNA, 15 bp, Homo sapiens
cagtacttcaagatg

SEQ ID NO: 435563 - DNA, 15 bp, Homo sapiens
ccagtacttcaagat

SEQ ID NO: 435564 - DNA, 15 bp, Homo sapiens
cccagtacttcaaga

SEQ ID NO: 435565 - DNA, 15 bp, Homo sapiens
tcccagtacttcaag

SEQ ID NO: 435566 - DNA, 15 bp, Homo sapiens
atcccagtacttcaa

SEQ ID NO: 435567 - DNA, 15 bp, Homo sapiens
aatcccagtacttca

SEQ ID NO: 435568 - DNA, 15 bp, Homo sapiens
taatcccagtacttc

SEQ ID NO: 435569 - DNA, 15 bp, Homo sapiens
gtaatcccagtactt

SEQ ID NO: 435570 - DNA, 15 bp, Homo sapiens
tgtaatcccagtact

SEQ ID NO: 435571 - DNA, 15 bp, Homo sapiens
ctgtaatcccagtac

SEQ ID NO: 435572 - DNA, 15 bp, Homo sapiens
cctgtaatcccagta

SEQ ID NO: 435573 - DNA, 15 bp, Homo sapiens
gcctgtaatcccagt

SEQ ID NO: 435574 - DNA, 15 bp, Homo sapiens
ccgcctgtaatccca

SEQ ID NO: 435575 - DNA, 15 bp, Homo sapiens
cccgcctgtaatccc

SEQ ID NO: 435576 - DNA, 15 bp, Homo sapiens
tcccgcctgtaatcc

SEQ ID NO: 435577 - DNA, 15 bp, Homo sapiens
ctcccgcctgtaatc

SEQ ID NO: 435578 - DNA, 15 bp, Homo sapiens
gctcccgcctgtaat

SEQ ID NO: 435579 - DNA, 15 bp, Homo sapiens
ggctcccgcctgtaa

SEQ ID NO: 435580 - DNA, 15 bp, Homo sapiens
aggctcccgcctgta

SEQ ID NO: 435581 - DNA, 15 bp, Homo sapiens
gaggctcccgcctgt

SEQ ID NO: 435582 - DNA, 15 bp, Homo sapiens
agaggctcccgcctg

SEQ ID NO: 435583 - DNA, 15 bp, Homo sapiens
cagaggctcccgcct

SEQ ID NO: 435584 - DNA, 15 bp, Homo sapiens
acagaggctcccgcc

SEQ ID NO: 435585 - DNA, 15 bp, Homo sapiens
cacagaggctcccgc

SEQ ID NO: 435586 - DNA, 15 bp, Homo sapiens
gcacagaggctcccg

SEQ ID NO: 435587 - DNA, 15 bp, Homo sapiens
ggcacagaggctccc

SEQ ID NO: 435588 - DNA, 15 bp, Homo sapiens
gggcacagaggctcc

SEQ ID NO: 435589 - DNA, 15 bp, Homo sapiens
tgggcacagaggctc

SEQ ID NO: 435590 - DNA, 15 bp, Homo sapiens
ctgggcacagaggct

SEQ ID NO: 435591 - DNA, 15 bp, Homo sapiens
gctgggcacagaggc

SEQ ID NO: 435592 - DNA, 15 bp, Homo sapiens
agctgggcacagagg

SEQ ID NO: 435593 - DNA, 15 bp, Homo sapiens
tagctgggcacagag

SEQ ID NO: 435594 - DNA, 15 bp, Homo sapiens
ctagctgggcacaga

SEQ ID NO: 435595 - DNA, 15 bp, Homo sapiens
tctagctgggcacag

SEQ ID NO: 435596 - DNA, 15 bp, Homo sapiens
ctctagctgggcaca

SEQ ID NO: 435597 - DNA, 15 bp, Homo sapiens
cctctagctgggcac

SEQ ID NO: 435598 - DNA, 15 bp, Homo sapiens
tcctctagctgggca

SEQ ID NO: 435599 - DNA, 15 bp, Homo sapiens
ttcctctagctgggc

SEQ ID NO: 435600 - DNA, 15 bp, Homo sapiens
gttcctctagctggg

SEQ ID NO: 435601 - DNA, 15 bp, Homo sapiens
agttcctctagctgg

SEQ ID NO: 435602 - DNA, 15 bp, Homo sapiens
aagttcctctagctg

SEQ ID NO: 435603 - DNA, 15 bp, Homo sapiens
aaagttcctctagct

SEQ ID NO: 435604 - DNA, 15 bp, Homo sapiens
taaagttcctctagc

SEQ ID NO: 435605 - DNA, 15 bp, Homo sapiens
ttaaagttcctctag

SEQ ID NO: 435606 - DNA, 15 bp, Homo sapiens
tttaaagttcctcta

SEQ ID NO: 435607 - DNA, 15 bp, Homo sapiens
ttttaaagttcctct

SEQ ID NO: 435608 - DNA, 15 bp, Homo sapiens
tttttaaagttcctc

SEQ ID NO: 435609 - DNA, 15 bp, Homo sapiens
ttttttaaagttcct

SEQ ID NO: 435610 - DNA, 15 bp, Homo sapiens
tttttttaaagttcc

SEQ ID NO: 435611 - DNA, 15 bp, Homo sapiens
ctttttttaaagttc

SEQ ID NO: 435612 - DNA, 15 bp, Homo sapiens
tctttttttaaagtt

SEQ ID NO: 435613 - DNA, 15 bp, Homo sapiens
ttctttttttaaagt

SEQ ID NO: 435614 - DNA, 15 bp, Homo sapiens
tttctttttttaaag

SEQ ID NO: 435615 - DNA, 15 bp, Homo sapiens
ttttctttttttaaa

SEQ ID NO: 435616 - DNA, 15 bp, Homo sapiens
aattttcttttttta

SEQ ID NO: 435617 - DNA, 15 bp, Homo sapiens
aaattttcttttttt

SEQ ID NO: 435618 - DNA, 15 bp, Homo sapiens
taaattttctttttt

SEQ ID NO: 435619 - DNA, 15 bp, Homo sapiens
gtaaattttcttttt

SEQ ID NO: 435620 - DNA, 15 bp, Homo sapiens
ggtaaattttctttt

SEQ ID NO: 435621 - DNA, 15 bp, Homo sapiens
tggtaaattttcttt

SEQ ID NO: 435622 - DNA, 15 bp, Homo sapiens
gtggtaaattttctt

SEQ ID NO: 435623 - DNA, 15 bp, Homo sapiens
tgtggtaaattttct

SEQ ID NO: 435624 - DNA, 15 bp, Homo sapiens
ctgtggtaaattttc

SEQ ID NO: 435625 - DNA, 15 bp, Homo sapiens
tctgtggtaaatttt

SEQ ID NO: 435626 - DNA, 15 bp, Homo sapiens
gtctgtggtaaattt

SEQ ID NO: 435627 - DNA, 15 bp, Homo sapiens
ggtctgtggtaaatt

SEQ ID NO: 435628 - DNA, 15 bp, Homo sapiens
tggtctgtggtaaat

SEQ ID NO: 435629 - DNA, 15 bp, Homo sapiens
ttggtctgtggtaaa

SEQ ID NO: 435630 - DNA, 15 bp, Homo sapiens
attggtctgtggtaa

SEQ ID NO: 435631 - DNA, 15 bp, Homo sapiens
aattggtctgtggta

SEQ ID NO: 435632 - DNA, 15 bp, Homo sapiens
taattggtctgtggt

SEQ ID NO: 435633 - DNA, 15 bp, Homo sapiens
ttaattggtctgtgg

SEQ ID NO: 435634 - DNA, 15 bp, Homo sapiens
attaattggtctgtg

SEQ ID NO: 435635 - DNA, 15 bp, Homo sapiens
aattaattggtctgt

SEQ ID NO: 435636 - DNA, 15 bp, Homo sapiens
taattaattggtctg

SEQ ID NO: 435637 - DNA, 15 bp, Homo sapiens
ctaattaattggtct

SEQ ID NO: 435638 - DNA, 15 bp, Homo sapiens
tctaattaattggtc

SEQ ID NO: 435639 - DNA, 15 bp, Homo sapiens
ttctaattaattggt

SEQ ID NO: 435640 - DNA, 15 bp, Homo sapiens
attctaattaattgg

SEQ ID NO: 435641 - DNA, 15 bp, Homo sapiens
gattctaattaattg

SEQ ID NO: 435642 - DNA, 15 bp, Homo sapiens
agattctaattaatt

SEQ ID NO: 435643 - DNA, 15 bp, Homo sapiens
aagattctaattaat

SEQ ID NO: 435644 - DNA, 15 bp, Homo sapiens
aaagattctaattaa

SEQ ID NO: 435645 - DNA, 15 bp, Homo sapiens
caaagattctaatta

SEQ ID NO: 435646 - DNA, 15 bp, Homo sapiens
ccaaagattctaatt

SEQ ID NO: 435647 - DNA, 15 bp, Homo sapiens
accaaagattctaat

SEQ ID NO: 435648 - DNA, 15 bp, Homo sapiens
caccaaagattctaa

SEQ ID NO: 435649 - DNA, 15 bp, Homo sapiens
ccaccaaagattcta

SEQ ID NO: 435650 - DNA, 15 bp, Homo sapiens
accaccaaagattct

SEQ ID NO: 435651 - DNA, 15 bp, Homo sapiens
aaccaccaaagattc

SEQ ID NO: 435652 - DNA, 15 bp, Homo sapiens
caaccaccaaagatt

SEQ ID NO: 435653 - DNA, 15 bp, Homo sapiens
tcaaccaccaaagat

SEQ ID NO: 435654 - DNA, 15 bp, Homo sapiens
ttcaaccaccaaaga

SEQ ID NO: 435655 - DNA, 15 bp, Homo sapiens
tttcaaccaccaaag

SEQ ID NO: 435656 - DNA, 15 bp, Homo sapiens
gtttcaaccaccaaa

SEQ ID NO: 435657 - DNA, 15 bp, Homo sapiens
ggtttcaaccaccaa

SEQ ID NO: 435658 - DNA, 15 bp, Homo sapiens
cggtttcaaccacca

SEQ ID NO: 435659 - DNA, 15 bp, Homo sapiens
ccggtttcaaccacc

SEQ ID NO: 435660 - DNA, 15 bp, Homo sapiens
cccggtttcaaccac

SEQ ID NO: 435661 - DNA, 15 bp, Homo sapiens
gcccggtttcaacca

SEQ ID NO: 435662 - DNA, 15 bp, Homo sapiens
tgcccggtttcaacc

SEQ ID NO: 435663 - DNA, 15 bp, Homo sapiens
atgcccggtttcaac

SEQ ID NO: 435664 - DNA, 15 bp, Homo sapiens
aatgcccggtttcaa

SEQ ID NO: 435665 - DNA, 15 bp, Homo sapiens
taatgcccggtttca

SEQ ID NO: 435666 - DNA, 15 bp, Homo sapiens
ctaatgcccggtttc

SEQ ID NO: 435667 - DNA, 15 bp, Homo sapiens
gctaatgcccggttt

SEQ ID NO: 435668 - DNA, 15 bp, Homo sapiens
tgctaatgcccggtt

SEQ ID NO: 435669 - DNA, 15 bp, Homo sapiens
atgctaatgcccggt

SEQ ID NO: 435670 - DNA, 15 bp, Homo sapiens
aatgctaatgcccgg

SEQ ID NO: 435671 - DNA, 15 bp, Homo sapiens
aaatgctaatgcccg

SEQ ID NO: 435672 - DNA, 15 bp, Homo sapiens
aaaatgctaatgccc

SEQ ID NO: 435673 - DNA, 15 bp, Homo sapiens
caaaatgctaatgcc

SEQ ID NO: 435674 - DNA, 15 bp, Homo sapiens
acaaaatgctaatgc

SEQ ID NO: 435675 - DNA, 15 bp, Homo sapiens
tacaaaatgctaatg

SEQ ID NO: 435676 - DNA, 15 bp, Homo sapiens
ttacaaaatgctaat

SEQ ID NO: 435677 - DNA, 15 bp, Homo sapiens
tttacaaaatgctaa

SEQ ID NO: 435678 - DNA, 15 bp, Homo sapiens
ttttacaaaatgcta

SEQ ID NO: 435679 - DNA, 15 bp, Homo sapiens
attttacaaaatgct

SEQ ID NO: 435680 - DNA, 15 bp, Homo sapiens
gattttacaaaatgc

SEQ ID NO: 435681 - DNA, 15 bp, Homo sapiens
cgattttacaaaatg

SEQ ID NO: 435682 - DNA, 15 bp, Homo sapiens
tcgattttacaaaat

SEQ ID NO: 435683 - DNA, 15 bp, Homo sapiens
atcgattttacaaaa

SEQ ID NO: 435684 - DNA, 15 bp, Homo sapiens
catcgattttacaaa

SEQ ID NO: 435685 - DNA, 15 bp, Homo sapiens
gcatcgattttacaa

SEQ ID NO: 435686 - DNA, 15 bp, Homo sapiens
agcatcgattttaca

SEQ ID NO: 435687 - DNA, 15 bp, Homo sapiens
tagcatcgattttac

SEQ ID NO: 435688 - DNA, 15 bp, Homo sapiens
ctagcatcgatttta

SEQ ID NO: 435689 - DNA, 15 bp, Homo sapiens
cctagcatcgatttt

SEQ ID NO: 435690 - DNA, 15 bp, Homo sapiens
ccctagcatcgattt

SEQ ID NO: 435691 - DNA, 15 bp, Homo sapiens
tccctagcatcgatt

SEQ ID NO: 435692 - DNA, 15 bp, Homo sapiens
atccctagcatcgat

SEQ ID NO: 435693 - DNA, 15 bp, Homo sapiens
aatccctagcatcga

SEQ ID NO: 435694 - DNA, 15 bp, Homo sapiens
gaatccctagcatcg

SEQ ID NO: 435695 - DNA, 15 bp, Homo sapiens
agaatccctagcatc

SEQ ID NO: 435696 - DNA, 15 bp, Homo sapiens
tagaatccctagcat

SEQ ID NO: 435697 - DNA, 15 bp, Homo sapiens
ttagaatccctagca

SEQ ID NO: 435698 - DNA, 15 bp, Homo sapiens
attagaatccctagc

SEQ ID NO: 435699 - DNA, 15 bp, Homo sapiens
gattagaatccctag

SEQ ID NO: 435700 - DNA, 15 bp, Homo sapiens
agattagaatcccta

SEQ ID NO: 435701 - DNA, 15 bp, Homo sapiens
tagattagaatccct

SEQ ID NO: 435702 - DNA, 15 bp, Homo sapiens
atagattagaatccc

SEQ ID NO: 435703 - DNA, 15 bp, Homo sapiens
tatagattagaatcc

SEQ ID NO: 435704 - DNA, 15 bp, Homo sapiens
ttatagattagaatc

SEQ ID NO: 435705 - DNA, 15 bp, Homo sapiens
gttatagattagaat

SEQ ID NO: 435706 - DNA, 15 bp, Homo sapiens
ggttatagattagaa

SEQ ID NO: 435707 - DNA, 15 bp, Homo sapiens
tggttatagattaga

SEQ ID NO: 435708 - DNA, 15 bp, Homo sapiens
ctggttatagattag

SEQ ID NO: 435709 - DNA, 15 bp, Homo sapiens
tctggttatagatta

SEQ ID NO: 435710 - DNA, 15 bp, Homo sapiens
ttctggttatagatt

SEQ ID NO: 435711 - DNA, 15 bp, Homo sapiens
tttctggttatagat

SEQ ID NO: 435712 - DNA, 15 bp, Homo sapiens
gtttctggttataga

SEQ ID NO: 435713 - DNA, 15 bp, Homo sapiens
agtttctggttatag

SEQ ID NO: 435714 - DNA, 15 bp, Homo sapiens
tagtttctggttata

SEQ ID NO: 435715 - DNA, 15 bp, Homo sapiens
gtagtttctggttat

SEQ ID NO: 435716 - DNA, 15 bp, Homo sapiens
tgtagtttctggtta

SEQ ID NO: 435717 - DNA, 15 bp, Homo sapiens
ctgtagtttctggtt

SEQ ID NO: 435718 - DNA, 15 bp, Homo sapiens
actgtagtttctggt

SEQ ID NO: 435719 - DNA, 15 bp, Homo sapiens
gactgtagtttctgg

SEQ ID NO: 435720 - DNA, 15 bp, Homo sapiens
tgactgtagtttctg

SEQ ID NO: 435721 - DNA, 15 bp, Homo sapiens
gtgactgtagtttct

SEQ ID NO: 435722 - DNA, 15 bp, Homo sapiens
agtgactgtagtttc

SEQ ID NO: 435723 - DNA, 15 bp, Homo sapiens
cagtgactgtagttt

SEQ ID NO: 435724 - DNA, 15 bp, Homo sapiens
acagtgactgtagtt

SEQ ID NO: 435725 - DNA, 15 bp, Homo sapiens
aacagtgactgtagt

SEQ ID NO: 435726 - DNA, 15 bp, Homo sapiens
gaacagtgactgtag

SEQ ID NO: 435727 - DNA, 15 bp, Homo sapiens
agaacagtgactgta

SEQ ID NO: 435728 - DNA, 15 bp, Homo sapiens
cagaacagtgactgt

SEQ ID NO: 435729 - DNA, 15 bp, Homo sapiens
gcagaacagtgactg

SEQ ID NO: 435730 - DNA, 15 bp, Homo sapiens
ggcagaacagtgact

SEQ ID NO: 435731 - DNA, 15 bp, Homo sapiens
gggcagaacagtgac

SEQ ID NO: 435732 - DNA, 15 bp, Homo sapiens
agggcagaacagtga

SEQ ID NO: 435733 - DNA, 15 bp, Homo sapiens
aagggcagaacagtg

SEQ ID NO: 435734 - DNA, 15 bp, Homo sapiens
aaagggcagaacagt

SEQ ID NO: 435735 - DNA, 15 bp, Homo sapiens
gaaagggcagaacag

SEQ ID NO: 435736 - DNA, 15 bp, Homo sapiens
tgaaagggcagaaca

SEQ ID NO: 435737 - DNA, 15 bp, Homo sapiens
gtgaaagggcagaac

SEQ ID NO: 435738 - DNA, 15 bp, Homo sapiens
agtgaaagggcagaa

SEQ ID NO: 435739 - DNA, 15 bp, Homo sapiens
aagtgaaagggcaga

SEQ ID NO: 435740 - DNA, 15 bp, Homo sapiens
aaagtgaaagggcag

SEQ ID NO: 435741 - DNA, 15 bp, Homo sapiens
aaaagtgaaagggca

SEQ ID NO: 435742 - DNA, 15 bp, Homo sapiens
gaaaagtgaaagggc

SEQ ID NO: 435743 - DNA, 15 bp, Homo sapiens
tgaaaagtgaaaggg

SEQ ID NO: 435744 - DNA, 15 bp, Homo sapiens
gtgaaaagtgaaagg

SEQ ID NO: 435745 - DNA, 15 bp, Homo sapiens
ggtgaaaagtgaaag

SEQ ID NO: 435746 - DNA, 15 bp, Homo sapiens
gggtgaaaagtgaaa

SEQ ID NO: 435747 - DNA, 15 bp, Homo sapiens
tgggtgaaaagtgaa

SEQ ID NO: 435748 - DNA, 15 bp, Homo sapiens
atgggtgaaaagtga

SEQ ID NO: 435749 - DNA, 15 bp, Homo sapiens
aatgggtgaaaagtg

SEQ ID NO: 435750 - DNA, 15 bp, Homo sapiens
taatgggtgaaaagt

SEQ ID NO: 435751 - DNA, 15 bp, Homo sapiens
gtaatgggtgaaaag

SEQ ID NO: 435752 - DNA, 15 bp, Homo sapiens
agtaatgggtgaaaa

SEQ ID NO: 435753 - DNA, 15 bp, Homo sapiens
cagtaatgggtgaaa

SEQ ID NO: 435754 - DNA, 15 bp, Homo sapiens
ccagtaatgggtgaa

SEQ ID NO: 435755 - DNA, 15 bp, Homo sapiens
tccagtaatgggtga

SEQ ID NO: 435756 - DNA, 15 bp, Homo sapiens
ttccagtaatgggtg

SEQ ID NO: 435757 - DNA, 15 bp, Homo sapiens
attccagtaatgggt

SEQ ID NO: 435758 - DNA, 15 bp, Homo sapiens
aattccagtaatggg

SEQ ID NO: 435759 - DNA, 15 bp, Homo sapiens
caattccagtaatgg

SEQ ID NO: 435760 - DNA, 15 bp, Homo sapiens
acaattccagtaatg

SEQ ID NO: 435761 - DNA, 15 bp, Homo sapiens
aacaattccagtaat

SEQ ID NO: 435762 - DNA, 15 bp, Homo sapiens
aaacaattccagtaa

SEQ ID NO: 435763 - DNA, 15 bp, Homo sapiens
caaacaattccagta

SEQ ID NO: 435764 - DNA, 15 bp, Homo sapiens
acaaacaattccagt

SEQ ID NO: 435765 - DNA, 15 bp, Homo sapiens
tacaaacaattccag

SEQ ID NO: 435766 - DNA, 15 bp, Homo sapiens
atacaaacaattcca

SEQ ID NO: 435767 - DNA, 15 bp, Homo sapiens
catacaaacaattcc

SEQ ID NO: 435768 - DNA, 15 bp, Homo sapiens
gcatacaaacaattc

SEQ ID NO: 435769 - DNA, 15 bp, Homo sapiens
ggcatacaaacaatt

SEQ ID NO: 435770 - DNA, 15 bp, Homo sapiens
gggcatacaaacaat

SEQ ID NO: 435771 - DNA, 15 bp, Homo sapiens
tgggcatacaaacaa

SEQ ID NO: 435772 - DNA, 15 bp, Homo sapiens
atgggcatacaaaca

SEQ ID NO: 435773 - DNA, 15 bp, Homo sapiens
aatgggcatacaaac

SEQ ID NO: 435774 - DNA, 15 bp, Homo sapiens
aaatgggcatacaaa

SEQ ID NO: 435775 - DNA, 15 bp, Homo sapiens
aaaatgggcatacaa

SEQ ID NO: 435776 - DNA, 15 bp, Homo sapiens
gaaaatgggcataca

SEQ ID NO: 435777 - DNA, 15 bp, Homo sapiens
ggaaaatgggcatac

SEQ ID NO: 435778 - DNA, 15 bp, Homo sapiens
aggaaaatgggcata

SEQ ID NO: 435779 - DNA, 15 bp, Homo sapiens
gaggaaaatgggcat

SEQ ID NO: 435780 - DNA, 15 bp, Homo sapiens
tgaggaaaatgggca

SEQ ID NO: 435781 - DNA, 15 bp, Homo sapiens
gtgaggaaaatgggc

SEQ ID NO: 435782 - DNA, 15 bp, Homo sapiens
ggtgaggaaaatggg

SEQ ID NO: 435783 - DNA, 15 bp, Homo sapiens
tggtgaggaaaatgg

SEQ ID NO: 435784 - DNA, 15 bp, Homo sapiens
ctggtgaggaaaatg

SEQ ID NO: 435785 - DNA, 15 bp, Homo sapiens
cctggtgaggaaaat

SEQ ID NO: 435786 - DNA, 15 bp, Homo sapiens
gcctggtgaggaaaa

SEQ ID NO: 435787 - DNA, 15 bp, Homo sapiens
agcctggtgaggaaa

SEQ ID NO: 435788 - DNA, 15 bp, Homo sapiens
cagcctggtgaggaa

SEQ ID NO: 435789 - DNA, 15 bp, Homo sapiens
gcagcctggtgagga

SEQ ID NO: 435790 - DNA, 15 bp, Homo sapiens
tgcagcctggtgagg

SEQ ID NO: 435791 - DNA, 15 bp, Homo sapiens
gtgcagcctggtgag

SEQ ID NO: 435792 - DNA, 15 bp, Homo sapiens
tgtgcagcctggtga

SEQ ID NO: 435793 - DNA, 15 bp, Homo sapiens
gtgtgcagcctggtg

SEQ ID NO: 435794 - DNA, 15 bp, Homo sapiens
agtgtgcagcctggt

SEQ ID NO: 435795 - DNA, 15 bp, Homo sapiens
aagtgtgcagcctgg

SEQ ID NO: 435796 - DNA, 15 bp, Homo sapiens
caagtgtgcagcctg

SEQ ID NO: 435797 - DNA, 15 bp, Homo sapiens
acaagtgtgcagcct

SEQ ID NO: 435798 - DNA, 15 bp, Homo sapiens
aacaagtgtgcagcc

SEQ ID NO: 435799 - DNA, 15 bp, Homo sapiens
taacaagtgtgcagc

SEQ ID NO: 435800 - DNA, 15 bp, Homo sapiens
ttaacaagtgtgcag

SEQ ID NO: 435801 - DNA, 15 bp, Homo sapiens
cttaacaagtgtgca

SEQ ID NO: 435802 - DNA, 15 bp, Homo sapiens
ccttaacaagtgtgc

SEQ ID NO: 435803 - DNA, 15 bp, Homo sapiens
cccttaacaagtgtg

SEQ ID NO: 435804 - DNA, 15 bp, Homo sapiens
acccttaacaagtgt

SEQ ID NO: 435805 - DNA, 15 bp, Homo sapiens
tacccttaacaagtg

SEQ ID NO: 435806 - DNA, 15 bp, Homo sapiens
atacccttaacaagt

SEQ ID NO: 435807 - DNA, 15 bp, Homo sapiens
catacccttaacaag

SEQ ID NO: 435808 - DNA, 15 bp, Homo sapiens
ccatacccttaacaa

SEQ ID NO: 435809 - DNA, 15 bp, Homo sapiens
cccatacccttaaca

SEQ ID NO: 435810 - DNA, 15 bp, Homo sapiens
gcccatacccttaac

SEQ ID NO: 435811 - DNA, 15 bp, Homo sapiens
ggcccatacccttaa

SEQ ID NO: 435812 - DNA, 15 bp, Homo sapiens
tggcccataccctta

SEQ ID NO: 435813 - DNA, 15 bp, Homo sapiens
ctggcccataccctt

SEQ ID NO: 435814 - DNA, 15 bp, Homo sapiens
actggcccataccct

SEQ ID NO: 435815 - DNA, 15 bp, Homo sapiens
gactggcccataccc

SEQ ID NO: 435816 - DNA, 15 bp, Homo sapiens
agactggcccatacc

SEQ ID NO: 435817 - DNA, 15 bp, Homo sapiens
aagactggcccatac

SEQ ID NO: 435818 - DNA, 15 bp, Homo sapiens
gaagactggcccata

SEQ ID NO: 435819 - DNA, 15 bp, Homo sapiens
agaagactggcccat

SEQ ID NO: 435820 - DNA, 15 bp, Homo sapiens
aagaagactggccca

SEQ ID NO: 435821 - DNA, 15 bp, Homo sapiens
aaagaagactggccc

SEQ ID NO: 435822 - DNA, 15 bp, Homo sapiens
caaagaagactggcc

SEQ ID NO: 435823 - DNA, 15 bp, Homo sapiens
acaaagaagactggc

SEQ ID NO: 435824 - DNA, 15 bp, Homo sapiens
aacaaagaagactgg

SEQ ID NO: 435825 - DNA, 15 bp, Homo sapiens
aaacaaagaagactg

SEQ ID NO: 435826 - DNA, 15 bp, Homo sapiens
taaacaaagaagact

SEQ ID NO: 435827 - DNA, 15 bp, Homo sapiens
ataaacaaagaagac

SEQ ID NO: 435828 - DNA, 15 bp, Homo sapiens
cataaacaaagaaga

SEQ ID NO: 435829 - DNA, 15 bp, Homo sapiens
acataaacaaagaag

SEQ ID NO: 435830 - DNA, 15 bp, Homo sapiens
tacataaacaaagaa

SEQ ID NO: 435831 - DNA, 15 bp, Homo sapiens
atacataaacaaaga

SEQ ID NO: 435832 - DNA, 15 bp, Homo sapiens
gatacataaacaaag

SEQ ID NO: 435833 - DNA, 15 bp, Homo sapiens
agatacataaacaaa

SEQ ID NO: 435834 - DNA, 15 bp, Homo sapiens
gagatacataaacaa

SEQ ID NO: 435835 - DNA, 15 bp, Homo sapiens
agagatacataaaca

SEQ ID NO: 435836 - DNA, 15 bp, Homo sapiens
tagagatacataaac

SEQ ID NO: 435837 - DNA, 15 bp, Homo sapiens
ttagagatacataaa

SEQ ID NO: 435838 - DNA, 15 bp, Homo sapiens
attagagatacataa

SEQ ID NO: 435839 - DNA, 15 bp, Homo sapiens
tattagagatacata

SEQ ID NO: 435840 - DNA, 15 bp, Homo sapiens
atattagagatacat

SEQ ID NO: 435841 - DNA, 15 bp, Homo sapiens
gatattagagataca

SEQ ID NO: 435842 - DNA, 15 bp, Homo sapiens
agatattagagatac

SEQ ID NO: 435843 - DNA, 15 bp, Homo sapiens
tagatattagagata

SEQ ID NO: 435844 - DNA, 15 bp, Homo sapiens
ctagatattagagat

SEQ ID NO: 435845 - DNA, 15 bp, Homo sapiens
gctagatattagaga

SEQ ID NO: 435846 - DNA, 15 bp, Homo sapiens
tgctagatattagag

SEQ ID NO: 435847 - DNA, 15 bp, Homo sapiens
gtgctagatattaga

SEQ ID NO: 435848 - DNA, 15 bp, Homo sapiens
tgtgctagatattag

SEQ ID NO: 435849 - DNA, 15 bp, Homo sapiens
ttgtgctagatatta

SEQ ID NO: 435850 - DNA, 15 bp, Homo sapiens
attgtgctagatatt

SEQ ID NO: 435851 - DNA, 15 bp, Homo sapiens
cattgtgctagatat

SEQ ID NO: 435852 - DNA, 15 bp, Homo sapiens
acattgtgctagata

SEQ ID NO: 435853 - DNA, 15 bp, Homo sapiens
gacattgtgctagat

SEQ ID NO: 435854 - DNA, 15 bp, Homo sapiens
agacattgtgctaga

SEQ ID NO: 435855 - DNA, 15 bp, Homo sapiens
cagacattgtgctag

SEQ ID NO: 435856 - DNA, 15 bp, Homo sapiens
ccagacattgtgcta

SEQ ID NO: 435857 - DNA, 15 bp, Homo sapiens
cccagacattgtgct

SEQ ID NO: 435858 - DNA, 15 bp, Homo sapiens
acccagacattgtgc

SEQ ID NO: 435859 - DNA, 15 bp, Homo sapiens
aacccagacattgtg

SEQ ID NO: 435860 - DNA, 15 bp, Homo sapiens
aaacccagacattgt

SEQ ID NO: 435861 - DNA, 15 bp, Homo sapiens
gaaacccagacattg

SEQ ID NO: 435862 - DNA, 15 bp, Homo sapiens
tgaaacccagacatt

SEQ ID NO: 435863 - DNA, 15 bp, Homo sapiens
ctgaaacccagacat

SEQ ID NO: 435864 - DNA, 15 bp, Homo sapiens
cctgaaacccagaca

SEQ ID NO: 435865 - DNA, 15 bp, Homo sapiens
acctgaaacccagac

SEQ ID NO: 435866 - DNA, 15 bp, Homo sapiens
tacctgaaacccaga

SEQ ID NO: 435867 - DNA, 15 bp, Homo sapiens
ttacctgaaacccag

SEQ ID NO: 435868 - DNA, 15 bp, Homo sapiens
attacctgaaaccca

SEQ ID NO: 435869 - DNA, 15 bp, Homo sapiens
tattacctgaaaccc

SEQ ID NO: 435870 - DNA, 15 bp, Homo sapiens
ttattacctgaaacc

SEQ ID NO: 435871 - DNA, 15 bp, Homo sapiens
tttattacctgaaac

SEQ ID NO: 435872 - DNA, 15 bp, Homo sapiens
atttattacctgaaa

SEQ ID NO: 435873 - DNA, 15 bp, Homo sapiens
tatttattacctgaa

SEQ ID NO: 435874 - DNA, 15 bp, Homo sapiens
atatttattacctga

SEQ ID NO: 435875 - DNA, 15 bp, Homo sapiens
aatatttattacctg

SEQ ID NO: 435876 - DNA, 15 bp, Homo sapiens
aaatatttattacct

SEQ ID NO: 435877 - DNA, 15 bp, Homo sapiens
caaatatttattacc

SEQ ID NO: 435878 - DNA, 15 bp, Homo sapiens
ccaaatatttattac

SEQ ID NO: 435879 - DNA, 15 bp, Homo sapiens
accaaatatttatta

SEQ ID NO: 435880 - DNA, 15 bp, Homo sapiens
caccaaatatttatt

SEQ ID NO: 435881 - DNA, 15 bp, Homo sapiens
tcaccaaatatttat

SEQ ID NO: 435882 - DNA, 15 bp, Homo sapiens
ctcaccaaatattta

SEQ ID NO: 435883 - DNA, 15 bp, Homo sapiens
actcaccaaatattt

SEQ ID NO: 435884 - DNA, 15 bp, Homo sapiens
cactcaccaaatatt

SEQ ID NO: 435885 - DNA, 15 bp, Homo sapiens
tcactcaccaaatat

SEQ ID NO: 435886 - DNA, 15 bp, Homo sapiens
ttcactcaccaaata

SEQ ID NO: 435887 - DNA, 15 bp, Homo sapiens
attcactcaccaaat

SEQ ID NO: 435888 - DNA, 15 bp, Homo sapiens
cattcactcaccaaa

SEQ ID NO: 435889 - DNA, 15 bp, Homo sapiens
tcattcactcaccaa

SEQ ID NO: 435890 - DNA, 15 bp, Homo sapiens
ttcattcactcacca

SEQ ID NO: 435891 - DNA, 15 bp, Homo sapiens
attcattcactcacc

SEQ ID NO: 435892 - DNA, 15 bp, Homo sapiens
tattcattcactcac

SEQ ID NO: 435893 - DNA, 15 bp, Homo sapiens
ttattcattcactca

SEQ ID NO: 435894 - DNA, 15 bp, Homo sapiens
cttattcattcactc

SEQ ID NO: 435895 - DNA, 15 bp, Homo sapiens
acttattcattcact

SEQ ID NO: 435896 - DNA, 15 bp, Homo sapiens
cacttattcattcac

SEQ ID NO: 435897 - DNA, 15 bp, Homo sapiens
tcacttattcattca

SEQ ID NO: 435898 - DNA, 15 bp, Homo sapiens
ttcacttattcattc

SEQ ID NO: 435899 - DNA, 15 bp, Homo sapiens
attcacttattcatt

SEQ ID NO: 435900 - DNA, 15 bp, Homo sapiens
cattcacttattcat

SEQ ID NO: 435901 - DNA, 15 bp, Homo sapiens
gcattcacttattca

SEQ ID NO: 435902 - DNA, 15 bp, Homo sapiens
tgcattcacttattc

SEQ ID NO: 435903 - DNA, 15 bp, Homo sapiens
ttgcattcacttatt

SEQ ID NO: 435904 - DNA, 15 bp, Homo sapiens
attgcattcacttat

SEQ ID NO: 435905 - DNA, 15 bp, Homo sapiens
cattgcattcactta

SEQ ID NO: 435906 - DNA, 15 bp, Homo sapiens
acattgcattcactt

SEQ ID NO: 435907 - DNA, 15 bp, Homo sapiens
cacattgcattcact

SEQ ID NO: 435908 - DNA, 15 bp, Homo sapiens
acacattgcattcac

SEQ ID NO: 435909 - DNA, 15 bp, Homo sapiens
gacacattgcattca

SEQ ID NO: 435910 - DNA, 15 bp, Homo sapiens
tgacacattgcattc

SEQ ID NO: 435911 - DNA, 15 bp, Homo sapiens
ttgacacattgcatt

SEQ ID NO: 435912 - DNA, 15 bp, Homo sapiens
tttgacacattgcat

SEQ ID NO: 435913 - DNA, 15 bp, Homo sapiens
atttgacacattgca

SEQ ID NO: 435914 - DNA, 15 bp, Homo sapiens
aatttgacacattgc

SEQ ID NO: 435915 - DNA, 15 bp, Homo sapiens
taatttgacacattg

SEQ ID NO: 435916 - DNA, 15 bp, Homo sapiens
ttaatttgacacatt

SEQ ID NO: 435917 - DNA, 15 bp, Homo sapiens
tttaatttgacacat

SEQ ID NO: 435918 - DNA, 15 bp, Homo sapiens
ttttaatttgacaca

SEQ ID NO: 435919 - DNA, 15 bp, Homo sapiens
cttttaatttgacac

SEQ ID NO: 435920 - DNA, 15 bp, Homo sapiens
ccttttaatttgaca

SEQ ID NO: 435921 - DNA, 15 bp, Homo sapiens
tccttttaatttgac

SEQ ID NO: 435922 - DNA, 15 bp, Homo sapiens
ctccttttaatttga

SEQ ID NO: 435923 - DNA, 15 bp, Homo sapiens
cctccttttaatttg

SEQ ID NO: 435924 - DNA, 15 bp, Homo sapiens
ccctccttttaattt

SEQ ID NO: 435925 - DNA, 15 bp, Homo sapiens
accctccttttaatt

SEQ ID NO: 435926 - DNA, 15 bp, Homo sapiens
aaccctccttttaat

SEQ ID NO: 435927 - DNA, 15 bp, Homo sapiens
gaaccctccttttaa

SEQ ID NO: 435928 - DNA, 15 bp, Homo sapiens
agaaccctcctttta

SEQ ID NO: 435929 - DNA, 15 bp, Homo sapiens
aagaaccctcctttt

SEQ ID NO: 435930 - DNA, 15 bp, Homo sapiens
aaagaaccctccttt

SEQ ID NO: 435931 - DNA, 15 bp, Homo sapiens
caaagaaccctcctt

SEQ ID NO: 435932 - DNA, 15 bp, Homo sapiens
gcaaagaaccctcct

SEQ ID NO: 435933 - DNA, 15 bp, Homo sapiens
agcaaagaaccctcc

SEQ ID NO: 435934 - DNA, 15 bp, Homo sapiens
aagcaaagaaccctc

SEQ ID NO: 435935 - DNA, 15 bp, Homo sapiens
gaagcaaagaaccct

SEQ ID NO: 435936 - DNA, 15 bp, Homo sapiens
ggaagcaaagaaccc

SEQ ID NO: 435937 - DNA, 15 bp, Homo sapiens
tggaagcaaagaacc

SEQ ID NO: 435938 - DNA, 15 bp, Homo sapiens
ttggaagcaaagaac

SEQ ID NO: 435939 - DNA, 15 bp, Homo sapiens
cttggaagcaaagaa

SEQ ID NO: 435940 - DNA, 15 bp, Homo sapiens
ccttggaagcaaaga

SEQ ID NO: 435941 - DNA, 15 bp, Homo sapiens
tccttggaagcaaag

SEQ ID NO: 435942 - DNA, 15 bp, Homo sapiens
ttccttggaagcaaa

SEQ ID NO: 435943 - DNA, 15 bp, Homo sapiens
attccttggaagcaa

SEQ ID NO: 435944 - DNA, 15 bp, Homo sapiens
aattccttggaagca

SEQ ID NO: 435945 - DNA, 15 bp, Homo sapiens
taattccttggaagc

SEQ ID NO: 435946 - DNA, 15 bp, Homo sapiens
ctaattccttggaag

SEQ ID NO: 435947 - DNA, 15 bp, Homo sapiens
cctaattccttggaa

SEQ ID NO: 435948 - DNA, 15 bp, Homo sapiens
tcctaattccttgga

SEQ ID NO: 435949 - DNA, 15 bp, Homo sapiens
gtcctaattccttgg

SEQ ID NO: 435950 - DNA, 15 bp, Homo sapiens
agtcctaattccttg

SEQ ID NO: 435951 - DNA, 15 bp, Homo sapiens
aagtcctaattcctt

SEQ ID NO: 435952 - DNA, 15 bp, Homo sapiens
taagtcctaattcct

SEQ ID NO: 435953 - DNA, 15 bp, Homo sapiens
ataagtcctaattcc

SEQ ID NO: 435954 - DNA, 15 bp, Homo sapiens
aataagtcctaattc

SEQ ID NO: 435955 - DNA, 15 bp, Homo sapiens
caataagtcctaatt

SEQ ID NO: 435956 - DNA, 15 bp, Homo sapiens
gcaataagtcctaat

SEQ ID NO: 435957 - DNA, 15 bp, Homo sapiens
agcaataagtcctaa

SEQ ID NO: 435958 - DNA, 15 bp, Homo sapiens
cagcaataagtccta

SEQ ID NO: 435959 - DNA, 15 bp, Homo sapiens
tcagcaataagtcct

SEQ ID NO: 435960 - DNA, 15 bp, Homo sapiens
ttcagcaataagtcc

SEQ ID NO: 435961 - DNA, 15 bp, Homo sapiens
tttcagcaataagtc

SEQ ID NO: 435962 - DNA, 15 bp, Homo sapiens
ctttcagcaataagt

SEQ ID NO: 435963 - DNA, 15 bp, Homo sapiens
gctttcagcaataag

SEQ ID NO: 435964 - DNA, 15 bp, Homo sapiens
tgctttcagcaataa

SEQ ID NO: 435965 - DNA, 15 bp, Homo sapiens
atgctttcagcaata

SEQ ID NO: 435966 - DNA, 15 bp, Homo sapiens
tatgctttcagcaat

SEQ ID NO: 435967 - DNA, 15 bp, Homo sapiens
atatgctttcagcaa

SEQ ID NO: 435968 - DNA, 15 bp, Homo sapiens
catatgctttcagca

SEQ ID NO: 435969 - DNA, 15 bp, Homo sapiens
gcatatgctttcagc

SEQ ID NO: 435970 - DNA, 15 bp, Homo sapiens
tgcatatgctttcag

SEQ ID NO: 435971 - DNA, 15 bp, Homo sapiens
atgcatatgctttca

SEQ ID NO: 435972 - DNA, 15 bp, Homo sapiens
tatgcatatgctttc

SEQ ID NO: 435973 - DNA, 15 bp, Homo sapiens
atatgcatatgcttt

SEQ ID NO: 435974 - DNA, 15 bp, Homo sapiens
catatgcatatgctt

SEQ ID NO: 435975 - DNA, 15 bp, Homo sapiens
gcatatgcatatgct

SEQ ID NO: 435976 - DNA, 15 bp, Homo sapiens
tgcatatgcatatgc

SEQ ID NO: 435977 - DNA, 15 bp, Homo sapiens
gtgcatatgcatatg

SEQ ID NO: 435978 - DNA, 15 bp, Homo sapiens
tgtgcatatgcatat

SEQ ID NO: 435979 - DNA, 15 bp, Homo sapiens
atgtgcatatgcata

SEQ ID NO: 435980 - DNA, 15 bp, Homo sapiens
tatgtgcatatgcat

SEQ ID NO: 435981 - DNA, 15 bp, Homo sapiens
atatgtgcatatgca

SEQ ID NO: 435982 - DNA, 15 bp, Homo sapiens
tatatgtgcatatgc

SEQ ID NO: 435983 - DNA, 15 bp, Homo sapiens
ttatatgtgcatatg

SEQ ID NO: 435984 - DNA, 15 bp, Homo sapiens
tttatatgtgcatat

SEQ ID NO: 435985 - DNA, 15 bp, Homo sapiens
atttatatgtgcata

SEQ ID NO: 435986 - DNA, 15 bp, Homo sapiens
tatttatatgtgcat

SEQ ID NO: 435987 - DNA, 15 bp, Homo sapiens
atatttatatgtgca

SEQ ID NO: 435988 - DNA, 15 bp, Homo sapiens
catatttatatgtgc

SEQ ID NO: 435989 - DNA, 15 bp, Homo sapiens
tcatatttatatgtg

SEQ ID NO: 435990 - DNA, 15 bp, Homo sapiens
atcatatttatatgt

SEQ ID NO: 435991 - DNA, 15 bp, Homo sapiens
aatcatatttatatg

SEQ ID NO: 435992 - DNA, 15 bp, Homo sapiens
taatcatatttatat

SEQ ID NO: 435993 - DNA, 15 bp, Homo sapiens
gtaatcatatttata

SEQ ID NO: 435994 - DNA, 15 bp, Homo sapiens
tgtaatcatatttat

SEQ ID NO: 435995 - DNA, 15 bp, Homo sapiens
atgtaatcatattta

SEQ ID NO: 435996 - DNA, 15 bp, Homo sapiens
gatgtaatcatattt

SEQ ID NO: 435997 - DNA, 15 bp, Homo sapiens
tgatgtaatcatatt

SEQ ID NO: 435998 - DNA, 15 bp, Homo sapiens
ctgatgtaatcatat

SEQ ID NO: 435999 - DNA, 15 bp, Homo sapiens
gctgatgtaatcata

SEQ ID NO: 436000 - DNA, 15 bp, Homo sapiens
agctgatgtaatcat

SEQ ID NO: 436001 - DNA, 15 bp, Homo sapiens
tagctgatgtaatca

SEQ ID NO: 436002 - DNA, 15 bp, Homo sapiens
ctagctgatgtaatc

SEQ ID NO: 436003 - DNA, 15 bp, Homo sapiens
tctagctgatgtaat

SEQ ID NO: 436004 - DNA, 15 bp, Homo sapiens
ttctagctgatgtaa

SEQ ID NO: 436005 - DNA, 15 bp, Homo sapiens
tttctagctgatgta

SEQ ID NO: 436006 - DNA, 15 bp, Homo sapiens
atttctagctgatgt

SEQ ID NO: 436007 - DNA, 15 bp, Homo sapiens
tatttctagctgatg

SEQ ID NO: 436008 - DNA, 15 bp, Homo sapiens
ctatttctagctgat

SEQ ID NO: 436009 - DNA, 15 bp, Homo sapiens
tctatttctagctga

SEQ ID NO: 436010 - DNA, 15 bp, Homo sapiens
ttctatttctagctg

SEQ ID NO: 436011 - DNA, 15 bp, Homo sapiens
cttctatttctagct

SEQ ID NO: 436012 - DNA, 15 bp, Homo sapiens
ccttctatttctagc

SEQ ID NO: 436013 - DNA, 15 bp, Homo sapiens
cccttctatttctag

SEQ ID NO: 436014 - DNA, 15 bp, Homo sapiens
ccccttctatttcta

SEQ ID NO: 436015 - DNA, 15 bp, Homo sapiens
cccccttctatttct

SEQ ID NO: 436016 - DNA, 15 bp, Homo sapiens
tcccccttctatttc

SEQ ID NO: 436017 - DNA, 15 bp, Homo sapiens
ttcccccttctattt

SEQ ID NO: 436018 - DNA, 15 bp, Homo sapiens
cttcccccttctatt

SEQ ID NO: 436019 - DNA, 15 bp, Homo sapiens
tcttcccccttctat

SEQ ID NO: 436020 - DNA, 15 bp, Homo sapiens
gtcttcccccttcta

SEQ ID NO: 436021 - DNA, 15 bp, Homo sapiens
agtcttcccccttct

SEQ ID NO: 436022 - DNA, 15 bp, Homo sapiens
cagtcttcccccttc

SEQ ID NO: 436023 - DNA, 15 bp, Homo sapiens
tcagtcttccccctt

SEQ ID NO: 436024 - DNA, 15 bp, Homo sapiens
ttcagtcttccccct

SEQ ID NO: 436025 - DNA, 15 bp, Homo sapiens
gttcagtcttccccc

SEQ ID NO: 436026 - DNA, 15 bp, Homo sapiens
tgttcagtcttcccc

SEQ ID NO: 436027 - DNA, 15 bp, Homo sapiens
atgttcagtcttccc

SEQ ID NO: 436028 - DNA, 15 bp, Homo sapiens
aatgttcagtcttcc

SEQ ID NO: 436029 - DNA, 15 bp, Homo sapiens
caatgttcagtcttc

SEQ ID NO: 436030 - DNA, 15 bp, Homo sapiens
tcaatgttcagtctt

SEQ ID NO: 436031 - DNA, 15 bp, Homo sapiens
ctcaatgttcagtct

SEQ ID NO: 436032 - DNA, 15 bp, Homo sapiens
cctcaatgttcagtc

SEQ ID NO: 436033 - DNA, 15 bp, Homo sapiens
acctcaatgttcagt

SEQ ID NO: 436034 - DNA, 15 bp, Homo sapiens
cacctcaatgttcag

SEQ ID NO: 436035 - DNA, 15 bp, Homo sapiens
ccacctcaatgttca

SEQ ID NO: 436036 - DNA, 15 bp, Homo sapiens
gccacctcaatgttc

SEQ ID NO: 436037 - DNA, 15 bp, Homo sapiens
tgccacctcaatgtt

SEQ ID NO: 436038 - DNA, 15 bp, Homo sapiens
ttgccacctcaatgt

SEQ ID NO: 436039 - DNA, 15 bp, Homo sapiens
gttgccacctcaatg

SEQ ID NO: 436040 - DNA, 15 bp, Homo sapiens
tgttgccacctcaat

SEQ ID NO: 436041 - DNA, 15 bp, Homo sapiens
ttgttgccacctcaa

SEQ ID NO: 436042 - DNA, 15 bp, Homo sapiens
attgttgccacctca

SEQ ID NO: 436043 - DNA, 15 bp, Homo sapiens
tattgttgccacctc

SEQ ID NO: 436044 - DNA, 15 bp, Homo sapiens
ttattgttgccacct

SEQ ID NO: 436045 - DNA, 15 bp, Homo sapiens
tttattgttgccacc

SEQ ID NO: 436046 - DNA, 15 bp, Homo sapiens
ctttattgttgccac

SEQ ID NO: 436047 - DNA, 15 bp, Homo sapiens
tctttattgttgcca

SEQ ID NO: 436048 - DNA, 15 bp, Homo sapiens
ttctttattgttgcc

SEQ ID NO: 436049 - DNA, 15 bp, Homo sapiens
tttctttattgttgc

SEQ ID NO: 436050 - DNA, 15 bp, Homo sapiens
atttctttattgttg

SEQ ID NO: 436051 - DNA, 15 bp, Homo sapiens
aatttctttattgtt

SEQ ID NO: 436052 - DNA, 15 bp, Homo sapiens
taatttctttattgt

SEQ ID NO: 436053 - DNA, 15 bp, Homo sapiens
ttaatttctttattg

SEQ ID NO: 436054 - DNA, 15 bp, Homo sapiens
cttaatttctttatt

SEQ ID NO: 436055 - DNA, 15 bp, Homo sapiens
ccttaatttctttat

SEQ ID NO: 436056 - DNA, 15 bp, Homo sapiens
gccttaatttcttta

SEQ ID NO: 436057 - DNA, 15 bp, Homo sapiens
agccttaatttcttt

SEQ ID NO: 436058 - DNA, 15 bp, Homo sapiens
aagccttaatttctt

SEQ ID NO: 436059 - DNA, 15 bp, Homo sapiens
caagccttaatttct

SEQ ID NO: 436060 - DNA, 15 bp, Homo sapiens
tcaagccttaatttc

SEQ ID NO: 436061 - DNA, 15 bp, Homo sapiens
gtcaagccttaattt

SEQ ID NO: 436062 - DNA, 15 bp, Homo sapiens
tgtcaagccttaatt

SEQ ID NO: 436063 - DNA, 15 bp, Homo sapiens
ttgtcaagccttaat

SEQ ID NO: 436064 - DNA, 15 bp, Homo sapiens
attgtcaagccttaa

SEQ ID NO: 436065 - DNA, 15 bp, Homo sapiens
cattgtcaagcctta

SEQ ID NO: 436066 - DNA, 15 bp, Homo sapiens
acattgtcaagcctt

SEQ ID NO: 436067 - DNA, 15 bp, Homo sapiens
tacattgtcaagcct

SEQ ID NO: 436068 - DNA, 15 bp, Homo sapiens
ttacattgtcaagcc

SEQ ID NO: 436069 - DNA, 15 bp, Homo sapiens
cttacattgtcaagc

SEQ ID NO: 436070 - DNA, 15 bp, Homo sapiens
tcttacattgtcaag

SEQ ID NO: 436071 - DNA, 15 bp, Homo sapiens
atcttacattgtcaa

SEQ ID NO: 436072 - DNA, 15 bp, Homo sapiens
tatcttacattgtca

SEQ ID NO: 436073 - DNA, 15 bp, Homo sapiens
gtatcttacattgtc

SEQ ID NO: 436074 - DNA, 15 bp, Homo sapiens
ggtatcttacattgt

SEQ ID NO: 436075 - DNA, 15 bp, Homo sapiens
aggtatcttacattg

SEQ ID NO: 436076 - DNA, 15 bp, Homo sapiens
aaggtatcttacatt

SEQ ID NO: 436077 - DNA, 15 bp, Homo sapiens
taaggtatcttacat

SEQ ID NO: 436078 - DNA, 15 bp, Homo sapiens
ctaaggtatcttaca

SEQ ID NO: 436079 - DNA, 15 bp, Homo sapiens
cctaaggtatcttac

SEQ ID NO: 436080 - DNA, 15 bp, Homo sapiens
acctaaggtatctta

SEQ ID NO: 436081 - DNA, 15 bp, Homo sapiens
tacctaaggtatctt

SEQ ID NO: 436082 - DNA, 15 bp, Homo sapiens
ttacctaaggtatct

SEQ ID NO: 436083 - DNA, 15 bp, Homo sapiens
tttacctaaggtatc

SEQ ID NO: 436084 - DNA, 15 bp, Homo sapiens
atttacctaaggtat

SEQ ID NO: 436085 - DNA, 15 bp, Homo sapiens
tatttacctaaggta

SEQ ID NO: 436086 - DNA, 15 bp, Homo sapiens
ttatttacctaaggt

SEQ ID NO: 436087 - DNA, 15 bp, Homo sapiens
cttatttacctaagg

SEQ ID NO: 436088 - DNA, 15 bp, Homo sapiens
acttatttacctaag

SEQ ID NO: 436089 - DNA, 15 bp, Homo sapiens
aacttatttacctaa

SEQ ID NO: 436090 - DNA, 15 bp, Homo sapiens
taacttatttaccta

SEQ ID NO: 436091 - DNA, 15 bp, Homo sapiens
ataacttatttacct

SEQ ID NO: 436092 - DNA, 15 bp, Homo sapiens
cataacttatttacc

SEQ ID NO: 436093 - DNA, 15 bp, Homo sapiens
acataacttatttac

SEQ ID NO: 436094 - DNA, 15 bp, Homo sapiens
tacataacttattta

SEQ ID NO: 436095 - DNA, 15 bp, Homo sapiens
ttacataacttattt

SEQ ID NO: 436096 - DNA, 15 bp, Homo sapiens
attacataacttatt

SEQ ID NO: 436097 - DNA, 15 bp, Homo sapiens
tattacataacttat

SEQ ID NO: 436098 - DNA, 15 bp, Homo sapiens
atattacataactta

SEQ ID NO: 436099 - DNA, 15 bp, Homo sapiens
catattacataactt

SEQ ID NO: 436100 - DNA, 15 bp, Homo sapiens
ccatattacataact

SEQ ID NO: 436101 - DNA, 15 bp, Homo sapiens
tccatattacataac

SEQ ID NO: 436102 - DNA, 15 bp, Homo sapiens
ctccatattacataa

SEQ ID NO: 436103 - DNA, 15 bp, Homo sapiens
actccatattacata

SEQ ID NO: 436104 - DNA, 15 bp, Homo sapiens
tactccatattacat

SEQ ID NO: 436105 - DNA, 15 bp, Homo sapiens
ttactccatattaca

SEQ ID NO: 436106 - DNA, 15 bp, Homo sapiens
attactccatattac

SEQ ID NO: 436107 - DNA, 15 bp, Homo sapiens
cattactccatatta

SEQ ID NO: 436108 - DNA, 15 bp, Homo sapiens
tcattactccatatt

SEQ ID NO: 436109 - DNA, 15 bp, Homo sapiens
ctcattactccatat

SEQ ID NO: 436110 - DNA, 15 bp, Homo sapiens
actcattactccata

SEQ ID NO: 436111 - DNA, 15 bp, Homo sapiens
aactcattactccat

SEQ ID NO: 436112 - DNA, 15 bp, Homo sapiens
aaactcattactcca

SEQ ID NO: 436113 - DNA, 15 bp, Homo sapiens
caaactcattactcc

SEQ ID NO: 436114 - DNA, 15 bp, Homo sapiens
acaaactcattactc

SEQ ID NO: 436115 - DNA, 15 bp, Homo sapiens
tacaaactcattact

SEQ ID NO: 436116 - DNA, 15 bp, Homo sapiens
ttacaaactcattac

SEQ ID NO: 436117 - DNA, 15 bp, Homo sapiens
cttacaaactcatta

SEQ ID NO: 436118 - DNA, 15 bp, Homo sapiens
gcttacaaactcatt

SEQ ID NO: 436119 - DNA, 15 bp, Homo sapiens
agcttacaaactcat

SEQ ID NO: 436120 - DNA, 15 bp, Homo sapiens
tagcttacaaactca

SEQ ID NO: 436121 - DNA, 15 bp, Homo sapiens
ctagcttacaaactc

SEQ ID NO: 436122 - DNA, 15 bp, Homo sapiens
tctagcttacaaact

SEQ ID NO: 436123 - DNA, 15 bp, Homo sapiens
ttctagcttacaaac

SEQ ID NO: 436124 - DNA, 15 bp, Homo sapiens
tttctagcttacaaa

SEQ ID NO: 436125 - DNA, 15 bp, Homo sapiens
ctttctagcttacaa

SEQ ID NO: 436126 - DNA, 15 bp, Homo sapiens
cctttctagcttaca

SEQ ID NO: 436127 - DNA, 15 bp, Homo sapiens
acctttctagcttac

SEQ ID NO: 436128 - DNA, 15 bp, Homo sapiens
tacctttctagctta

SEQ ID NO: 436129 - DNA, 15 bp, Homo sapiens
ctacctttctagctt

SEQ ID NO: 436130 - DNA, 15 bp, Homo sapiens
gctacctttctagct

SEQ ID NO: 436131 - DNA, 15 bp, Homo sapiens
agctacctttctagc

SEQ ID NO: 436132 - DNA, 15 bp, Homo sapiens
aagctacctttctag

SEQ ID NO: 436133 - DNA, 15 bp, Homo sapiens
caagctacctttcta

SEQ ID NO: 436134 - DNA, 15 bp, Homo sapiens
ccaagctacctttct

SEQ ID NO: 436135 - DNA, 15 bp, Homo sapiens
cccaagctacctttc

SEQ ID NO: 436136 - DNA, 15 bp, Homo sapiens
ccccaagctaccttt

SEQ ID NO: 436137 - DNA, 15 bp, Homo sapiens
accccaagctacctt

SEQ ID NO: 436138 - DNA, 15 bp, Homo sapiens
aaccccaagctacct

SEQ ID NO: 436139 - DNA, 15 bp, Homo sapiens
taaccccaagctacc

SEQ ID NO: 436140 - DNA, 15 bp, Homo sapiens
ctaaccccaagctac

SEQ ID NO: 436141 - DNA, 15 bp, Homo sapiens
tctaaccccaagcta

SEQ ID NO: 436142 - DNA, 15 bp, Homo sapiens
atctaaccccaagct

SEQ ID NO: 436143 - DNA, 15 bp, Homo sapiens
aatctaaccccaagc

SEQ ID NO: 436144 - DNA, 15 bp, Homo sapiens
aaatctaaccccaag

SEQ ID NO: 436145 - DNA, 15 bp, Homo sapiens
gaaatctaaccccaa

SEQ ID NO: 436146 - DNA, 15 bp, Homo sapiens
agaaatctaacccca

SEQ ID NO: 436147 - DNA, 15 bp, Homo sapiens
tagaaatctaacccc

SEQ ID NO: 436148 - DNA, 15 bp, Homo sapiens
ttagaaatctaaccc

SEQ ID NO: 436149 - DNA, 15 bp, Homo sapiens
attagaaatctaacc

SEQ ID NO: 436150 - DNA, 15 bp, Homo sapiens
cattagaaatctaac

SEQ ID NO: 436151 - DNA, 15 bp, Homo sapiens
ccattagaaatctaa

SEQ ID NO: 436152 - DNA, 15 bp, Homo sapiens
cccattagaaatcta

SEQ ID NO: 436153 - DNA, 15 bp, Homo sapiens
acccattagaaatct

SEQ ID NO: 436154 - DNA, 15 bp, Homo sapiens
gacccattagaaatc

SEQ ID NO: 436155 - DNA, 15 bp, Homo sapiens
tgacccattagaaat

SEQ ID NO: 436156 - DNA, 15 bp, Homo sapiens
atgacccattagaaa

SEQ ID NO: 436157 - DNA, 15 bp, Homo sapiens
aatgacccattagaa

SEQ ID NO: 436158 - DNA, 15 bp, Homo sapiens
taatgacccattaga

SEQ ID NO: 436159 - DNA, 15 bp, Homo sapiens
ctaatgacccattag

SEQ ID NO: 436160 - DNA, 15 bp, Homo sapiens
actaatgacccatta

SEQ ID NO: 436161 - DNA, 15 bp, Homo sapiens
cactaatgacccatt

SEQ ID NO: 436162 - DNA, 15 bp, Homo sapiens
acactaatgacccat

SEQ ID NO: 436163 - DNA, 15 bp, Homo sapiens
gacactaatgaccca

SEQ ID NO: 436164 - DNA, 15 bp, Homo sapiens
tgacactaatgaccc

SEQ ID NO: 436165 - DNA, 15 bp, Homo sapiens
ttgacactaatgacc

SEQ ID NO: 436166 - DNA, 15 bp, Homo sapiens
tttgacactaatgac

SEQ ID NO: 436167 - DNA, 15 bp, Homo sapiens
gtttgacactaatga

SEQ ID NO: 436168 - DNA, 15 bp, Homo sapiens
agtttgacactaatg

SEQ ID NO: 436169 - DNA, 15 bp, Homo sapiens
tagtttgacactaat

SEQ ID NO: 436170 - DNA, 15 bp, Homo sapiens
ttagtttgacactaa

SEQ ID NO: 436171 - DNA, 15 bp, Homo sapiens
tttagtttgacacta

SEQ ID NO: 436172 - DNA, 15 bp, Homo sapiens
ctttagtttgacact

SEQ ID NO: 436173 - DNA, 15 bp, Homo sapiens
tctttagtttgacac

SEQ ID NO: 436174 - DNA, 15 bp, Homo sapiens
ctctttagtttgaca

SEQ ID NO: 436175 - DNA, 15 bp, Homo sapiens
tctctttagtttgac

SEQ ID NO: 436176 - DNA, 15 bp, Homo sapiens
atctctttagtttga

SEQ ID NO: 436177 - DNA, 15 bp, Homo sapiens
aatctctttagtttg

SEQ ID NO: 436178 - DNA, 15 bp, Homo sapiens
gaatctctttagttt

SEQ ID NO: 436179 - DNA, 15 bp, Homo sapiens
agaatctctttagtt

SEQ ID NO: 436180 - DNA, 15 bp, Homo sapiens
aagaatctctttagt

SEQ ID NO: 436181 - DNA, 15 bp, Homo sapiens
aaagaatctctttag

SEQ ID NO: 436182 - DNA, 15 bp, Homo sapiens
caaagaatctcttta

SEQ ID NO: 436183 - DNA, 15 bp, Homo sapiens
acaaagaatctcttt

SEQ ID NO: 436184 - DNA, 15 bp, Homo sapiens
gacaaagaatctctt

SEQ ID NO: 436185 - DNA, 15 bp, Homo sapiens
tgacaaagaatctct

SEQ ID NO: 436186 - DNA, 15 bp, Homo sapiens
atgacaaagaatctc

SEQ ID NO: 436187 - DNA, 15 bp, Homo sapiens
tatgacaaagaatct

SEQ ID NO: 436188 - DNA, 15 bp, Homo sapiens
atatgacaaagaatc

SEQ ID NO: 436189 - DNA, 15 bp, Homo sapiens
tatatgacaaagaat

SEQ ID NO: 436190 - DNA, 15 bp, Homo sapiens
ctatatgacaaagaa

SEQ ID NO: 436191 - DNA, 15 bp, Homo sapiens
cctatatgacaaaga

SEQ ID NO: 436192 - DNA, 15 bp, Homo sapiens
gcctatatgacaaag

SEQ ID NO: 436193 - DNA, 15 bp, Homo sapiens
tgcctatatgacaaa

SEQ ID NO: 436194 - DNA, 15 bp, Homo sapiens
ttgcctatatgacaa

SEQ ID NO: 436195 - DNA, 15 bp, Homo sapiens
attgcctatatgaca

SEQ ID NO: 436196 - DNA, 15 bp, Homo sapiens
tattgcctatatgac

SEQ ID NO: 436197 - DNA, 15 bp, Homo sapiens
ttattgcctatatga

SEQ ID NO: 436198 - DNA, 15 bp, Homo sapiens
tttattgcctatatg

SEQ ID NO: 436199 - DNA, 15 bp, Homo sapiens
ttttattgcctatat

SEQ ID NO: 436200 - DNA, 15 bp, Homo sapiens
tttttattgcctata

SEQ ID NO: 436201 - DNA, 15 bp, Homo sapiens
atttttattgcctat

SEQ ID NO: 436202 - DNA, 15 bp, Homo sapiens
aatttttattgccta

SEQ ID NO: 436203 - DNA, 15 bp, Homo sapiens
aaatttttattgcct

SEQ ID NO: 436204 - DNA, 15 bp, Homo sapiens
caaatttttattgcc

SEQ ID NO: 436205 - DNA, 15 bp, Homo sapiens
acaaatttttattgc

SEQ ID NO: 436206 - DNA, 15 bp, Homo sapiens
gacaaatttttattg

SEQ ID NO: 436207 - DNA, 15 bp, Homo sapiens
tgacaaatttttatt

SEQ ID NO: 436208 - DNA, 15 bp, Homo sapiens
ttgacaaatttttat

SEQ ID NO: 436209 - DNA, 15 bp, Homo sapiens
tttgacaaattttta

SEQ ID NO: 436210 - DNA, 15 bp, Homo sapiens
ttttgacaaattttt

SEQ ID NO: 436211 - DNA, 15 bp, Homo sapiens
cttttgacaaatttt

SEQ ID NO: 436212 - DNA, 15 bp, Homo sapiens
acttttgacaaattt

SEQ ID NO: 436213 - DNA, 15 bp, Homo sapiens
aacttttgacaaatt

SEQ ID NO: 436214 - DNA, 15 bp, Homo sapiens
aaacttttgacaaat

SEQ ID NO: 436215 - DNA, 15 bp, Homo sapiens
aaaacttttgacaaa

SEQ ID NO: 436216 - DNA, 15 bp, Homo sapiens
aaaaacttttgacaa

SEQ ID NO: 436217 - DNA, 15 bp, Homo sapiens
aaaaaacttttgaca

SEQ ID NO: 436218 - DNA, 15 bp, Homo sapiens
aaaaaaacttttgac

SEQ ID NO: 436219 - DNA, 15 bp, Homo sapiens
aaaaaaaacttttga

SEQ ID NO: 436220 - DNA, 15 bp, Homo sapiens
aaaaaaaaacttttg

SEQ ID NO: 436221 - DNA, 15 bp, Homo sapiens
aaaaaaaaaactttt

SEQ ID NO: 436222 - DNA, 15 bp, Homo sapiens
aaaaaaaaaaacttt

SEQ ID NO: 436223 - DNA, 15 bp, Homo sapiens
aaaaaaaaaaaactt

SEQ ID NO: 436224 - DNA, 15 bp, Homo sapiens
taaaaaaaaaaaact

SEQ ID NO: 436225 - DNA, 15 bp, Homo sapiens
ttaaaaaaaaaaaac

SEQ ID NO: 436226 - DNA, 15 bp, Homo sapiens
attaaaaaaaaaaaa

SEQ ID NO: 436227 - DNA, 15 bp, Homo sapiens
aattaaaaaaaaaaa

SEQ ID NO: 436228 - DNA, 15 bp, Homo sapiens
caattaaaaaaaaaa

SEQ ID NO: 436229 - DNA, 15 bp, Homo sapiens
tcaattaaaaaaaaa

SEQ ID NO: 436230 - DNA, 15 bp, Homo sapiens
ttcaattaaaaaaaa

SEQ ID NO: 436231 - DNA, 15 bp, Homo sapiens
cttcaattaaaaaaa

SEQ ID NO: 436232 - DNA, 15 bp, Homo sapiens
tcttcaattaaaaaa

SEQ ID NO: 436233 - DNA, 15 bp, Homo sapiens
gtcttcaattaaaaa

SEQ ID NO: 436234 - DNA, 15 bp, Homo sapiens
agtcttcaattaaaa

SEQ ID NO: 436235 - DNA, 15 bp, Homo sapiens
cagtcttcaattaaa

SEQ ID NO: 436236 - DNA, 15 bp, Homo sapiens
tcagtcttcaattaa

SEQ ID NO: 436237 - DNA, 15 bp, Homo sapiens
gtcagtcttcaatta

SEQ ID NO: 436238 - DNA, 15 bp, Homo sapiens
tgtcagtcttcaatt

SEQ ID NO: 436239 - DNA, 15 bp, Homo sapiens
atgtcagtcttcaat

SEQ ID NO: 436240 - DNA, 15 bp, Homo sapiens
catgtcagtcttcaa

SEQ ID NO: 436241 - DNA, 15 bp, Homo sapiens
tcatgtcagtcttca

SEQ ID NO: 436242 - DNA, 15 bp, Homo sapiens
ctcatgtcagtcttc

SEQ ID NO: 436243 - DNA, 15 bp, Homo sapiens
actcatgtcagtctt

SEQ ID NO: 436244 - DNA, 15 bp, Homo sapiens
tactcatgtcagtct

SEQ ID NO: 436245 - DNA, 15 bp, Homo sapiens
ctactcatgtcagtc

SEQ ID NO: 436246 - DNA, 15 bp, Homo sapiens
tctactcatgtcagt

SEQ ID NO: 436247 - DNA, 15 bp, Homo sapiens
gtctactcatgtcag

SEQ ID NO: 436248 - DNA, 15 bp, Homo sapiens
ggtctactcatgtca

SEQ ID NO: 436249 - DNA, 15 bp, Homo sapiens
aggtctactcatgtc

SEQ ID NO: 436250 - DNA, 15 bp, Homo sapiens
aaggtctactcatgt

SEQ ID NO: 436251 - DNA, 15 bp, Homo sapiens
aaaggtctactcatg

SEQ ID NO: 436252 - DNA, 15 bp, Homo sapiens
aaaaggtctactcat

SEQ ID NO: 436253 - DNA, 15 bp, Homo sapiens
caaaaggtctactca

SEQ ID NO: 436254 - DNA, 15 bp, Homo sapiens
tcaaaaggtctactc

SEQ ID NO: 436255 - DNA, 15 bp, Homo sapiens
ctcaaaaggtctact

SEQ ID NO: 436256 - DNA, 15 bp, Homo sapiens
actcaaaaggtctac

SEQ ID NO: 436257 - DNA, 15 bp, Homo sapiens
aactcaaaaggtcta

SEQ ID NO: 436258 - DNA, 15 bp, Homo sapiens
taactcaaaaggtct

SEQ ID NO: 436259 - DNA, 15 bp, Homo sapiens
ctaactcaaaaggtc

SEQ ID NO: 436260 - DNA, 15 bp, Homo sapiens
tctaactcaaaaggt

SEQ ID NO: 436261 - DNA, 15 bp, Homo sapiens
ttctaactcaaaagg

SEQ ID NO: 436262 - DNA, 15 bp, Homo sapiens
tttctaactcaaaag

SEQ ID NO: 436263 - DNA, 15 bp, Homo sapiens
ctttctaactcaaaa

SEQ ID NO: 436264 - DNA, 15 bp, Homo sapiens
actttctaactcaaa

SEQ ID NO: 436265 - DNA, 15 bp, Homo sapiens
tactttctaactcaa

SEQ ID NO: 436266 - DNA, 15 bp, Homo sapiens
ttactttctaactca

SEQ ID NO: 436267 - DNA, 15 bp, Homo sapiens
gttactttctaactc

SEQ ID NO: 436268 - DNA, 15 bp, Homo sapiens
agttactttctaact

SEQ ID NO: 436269 - DNA, 15 bp, Homo sapiens
cagttactttctaac

SEQ ID NO: 436270 - DNA, 15 bp, Homo sapiens
ccagttactttctaa

SEQ ID NO: 436271 - DNA, 15 bp, Homo sapiens
accagttactttcta

SEQ ID NO: 436272 - DNA, 15 bp, Homo sapiens
caccagttactttct

SEQ ID NO: 436273 - DNA, 15 bp, Homo sapiens
acaccagttactttc

SEQ ID NO: 436274 - DNA, 15 bp, Homo sapiens
cacaccagttacttt

SEQ ID NO: 436275 - DNA, 15 bp, Homo sapiens
tcacaccagttactt

SEQ ID NO: 436276 - DNA, 15 bp, Homo sapiens
ttcacaccagttact

SEQ ID NO: 436277 - DNA, 15 bp, Homo sapiens
attcacaccagttac

SEQ ID NO: 436278 - DNA, 15 bp, Homo sapiens
cattcacaccagtta

SEQ ID NO: 436279 - DNA, 15 bp, Homo sapiens
acattcacaccagtt

SEQ ID NO: 436280 - DNA, 15 bp, Homo sapiens
aacattcacaccagt

SEQ ID NO: 436281 - DNA, 15 bp, Homo sapiens
caacattcacaccag

SEQ ID NO: 436282 - DNA, 15 bp, Homo sapiens
tcaacattcacacca

SEQ ID NO: 436283 - DNA, 15 bp, Homo sapiens
ttcaacattcacacc

SEQ ID NO: 436284 - DNA, 15 bp, Homo sapiens
attcaacattcacac

SEQ ID NO: 436285 - DNA, 15 bp, Homo sapiens
cattcaacattcaca

SEQ ID NO: 436286 - DNA, 15 bp, Homo sapiens
acattcaacattcac

SEQ ID NO: 436287 - DNA, 15 bp, Homo sapiens
tacattcaacattca

SEQ ID NO: 436288 - DNA, 15 bp, Homo sapiens
atacattcaacattc

SEQ ID NO: 436289 - DNA, 15 bp, Homo sapiens
tatacattcaacatt

SEQ ID NO: 436290 - DNA, 15 bp, Homo sapiens
gtatacattcaacat

SEQ ID NO: 436291 - DNA, 15 bp, Homo sapiens
agtatacattcaaca

SEQ ID NO: 436292 - DNA, 15 bp, Homo sapiens
cagtatacattcaac

SEQ ID NO: 436293 - DNA, 15 bp, Homo sapiens
ccagtatacattcaa

SEQ ID NO: 436294 - DNA, 15 bp, Homo sapiens
gccagtatacattca

SEQ ID NO: 436295 - DNA, 15 bp, Homo sapiens
agccagtatacattc

SEQ ID NO: 436296 - DNA, 15 bp, Homo sapiens
cagccagtatacatt

SEQ ID NO: 436297 - DNA, 15 bp, Homo sapiens
ccagccagtatacat

SEQ ID NO: 436298 - DNA, 15 bp, Homo sapiens
cccagccagtataca

SEQ ID NO: 436299 - DNA, 15 bp, Homo sapiens
tcccagccagtatac

SEQ ID NO: 436300 - DNA, 15 bp, Homo sapiens
ttcccagccagtata

SEQ ID NO: 436301 - DNA, 15 bp, Homo sapiens
tttcccagccagtat

SEQ ID NO: 436302 - DNA, 15 bp, Homo sapiens
ctttcccagccagta

SEQ ID NO: 436303 - DNA, 15 bp, Homo sapiens
tctttcccagccagt

SEQ ID NO: 436304 - DNA, 15 bp, Homo sapiens
atctttcccagccag

SEQ ID NO: 436305 - DNA, 15 bp, Homo sapiens
catctttcccagcca

SEQ ID NO: 436306 - DNA, 15 bp, Homo sapiens
ccatctttcccagcc

SEQ ID NO: 436307 - DNA, 15 bp, Homo sapiens
cccatctttcccagc

SEQ ID NO: 436308 - DNA, 15 bp, Homo sapiens
acccatctttcccag

SEQ ID NO: 436309 - DNA, 15 bp, Homo sapiens
aacccatctttccca

SEQ ID NO: 436310 - DNA, 15 bp, Homo sapiens
taacccatctttccc

SEQ ID NO: 436311 - DNA, 15 bp, Homo sapiens
ttaacccatctttcc

SEQ ID NO: 436312 - DNA, 15 bp, Homo sapiens
tttaacccatctttc

SEQ ID NO: 436313 - DNA, 15 bp, Homo sapiens
ctttaacccatcttt

SEQ ID NO: 436314 - DNA, 15 bp, Homo sapiens
cctttaacccatctt

SEQ ID NO: 436315 - DNA, 15 bp, Homo sapiens
gcctttaacccatct

SEQ ID NO: 436316 - DNA, 15 bp, Homo sapiens
tgcctttaacccatc

SEQ ID NO: 436317 - DNA, 15 bp, Homo sapiens
ctgcctttaacccat

SEQ ID NO: 436318 - DNA, 15 bp, Homo sapiens
tctgcctttaaccca

SEQ ID NO: 436319 - DNA, 15 bp, Homo sapiens
ttctgcctttaaccc

SEQ ID NO: 436320 - DNA, 15 bp, Homo sapiens
tttctgcctttaacc

SEQ ID NO: 436321 - DNA, 15 bp, Homo sapiens
ctttctgcctttaac

SEQ ID NO: 436322 - DNA, 15 bp, Homo sapiens
tctttctgcctttaa

SEQ ID NO: 436323 - DNA, 15 bp, Homo sapiens
ttctttctgccttta

SEQ ID NO: 436324 - DNA, 15 bp, Homo sapiens
tttctttctgccttt

SEQ ID NO: 436325 - DNA, 15 bp, Homo sapiens
ctttctttctgcctt

SEQ ID NO: 436326 - DNA, 15 bp, Homo sapiens
cctttctttctgcct

SEQ ID NO: 436327 - DNA, 15 bp, Homo sapiens
tcctttctttctgcc

SEQ ID NO: 436328 - DNA, 15 bp, Homo sapiens
ctcctttctttctgc

SEQ ID NO: 436329 - DNA, 15 bp, Homo sapiens
tctcctttctttctg

SEQ ID NO: 436330 - DNA, 15 bp, Homo sapiens
ctctcctttctttct

SEQ ID NO: 436331 - DNA, 15 bp, Homo sapiens
actctcctttctttc

SEQ ID NO: 436332 - DNA, 15 bp, Homo sapiens
tactctcctttcttt

SEQ ID NO: 436333 - DNA, 15 bp, Homo sapiens
gtactctcctttctt

SEQ ID NO: 436334 - DNA, 15 bp, Homo sapiens
agtactctcctttct

SEQ ID NO: 436335 - DNA, 15 bp, Homo sapiens
cagtactctcctttc

SEQ ID NO: 436336 - DNA, 15 bp, Homo sapiens
tcagtactctccttt

SEQ ID NO: 436337 - DNA, 15 bp, Homo sapiens
ctcagtactctcctt

SEQ ID NO: 436338 - DNA, 15 bp, Homo sapiens
actcagtactctcct

SEQ ID NO: 436339 - DNA, 15 bp, Homo sapiens
cactcagtactctcc

SEQ ID NO: 436340 - DNA, 15 bp, Homo sapiens
tcactcagtactctc

SEQ ID NO: 436341 - DNA, 15 bp, Homo sapiens
ttcactcagtactct

SEQ ID NO: 436342 - DNA, 15 bp, Homo sapiens
tttcactcagtactc

SEQ ID NO: 436343 - DNA, 15 bp, Homo sapiens
ttttcactcagtact

SEQ ID NO: 436344 - DNA, 15 bp, Homo sapiens
tttttcactcagtac

SEQ ID NO: 436345 - DNA, 15 bp, Homo sapiens
gtttttcactcagta

SEQ ID NO: 436346 - DNA, 15 bp, Homo sapiens
tgtttttcactcagt

SEQ ID NO: 436347 - DNA, 15 bp, Homo sapiens
atgtttttcactcag

SEQ ID NO: 436348 - DNA, 15 bp, Homo sapiens
aatgtttttcactca

SEQ ID NO: 436349 - DNA, 15 bp, Homo sapiens
aaatgtttttcactc

SEQ ID NO: 436350 - DNA, 15 bp, Homo sapiens
aaaatgtttttcact

SEQ ID NO: 436351 - DNA, 15 bp, Homo sapiens
aaaaatgtttttcac

SEQ ID NO: 436352 - DNA, 15 bp, Homo sapiens
caaaaatgtttttca

SEQ ID NO: 436353 - DNA, 15 bp, Homo sapiens
tcaaaaatgtttttc

SEQ ID NO: 436354 - DNA, 15 bp, Homo sapiens
ttcaaaaatgttttt

SEQ ID NO: 436355 - DNA, 15 bp, Homo sapiens
attcaaaaatgtttt

SEQ ID NO: 436356 - DNA, 15 bp, Homo sapiens
cattcaaaaatgttt

SEQ ID NO: 436357 - DNA, 15 bp, Homo sapiens
ccattcaaaaatgtt

SEQ ID NO: 436358 - DNA, 15 bp, Homo sapiens
accattcaaaaatgt

SEQ ID NO: 436359 - DNA, 15 bp, Homo sapiens
aaccattcaaaaatg

SEQ ID NO: 436360 - DNA, 15 bp, Homo sapiens
taaccattcaaaaat

SEQ ID NO: 436361 - DNA, 15 bp, Homo sapiens
gtaaccattcaaaaa

SEQ ID NO: 436362 - DNA, 15 bp, Homo sapiens
agtaaccattcaaaa

SEQ ID NO: 436363 - DNA, 15 bp, Homo sapiens
cagtaaccattcaaa

SEQ ID NO: 436364 - DNA, 15 bp, Homo sapiens
acagtaaccattcaa

SEQ ID NO: 436365 - DNA, 15 bp, Homo sapiens
cacagtaaccattca

SEQ ID NO: 436366 - DNA, 15 bp, Homo sapiens
acacagtaaccattc

SEQ ID NO: 436367 - DNA, 15 bp, Homo sapiens
cacacagtaaccatt

SEQ ID NO: 436368 - DNA, 15 bp, Homo sapiens
gcacacagtaaccat

SEQ ID NO: 436369 - DNA, 15 bp, Homo sapiens
ggcacacagtaacca

SEQ ID NO: 436370 - DNA, 15 bp, Homo sapiens
aggcacacagtaacc

SEQ ID NO: 436371 - DNA, 15 bp, Homo sapiens
caggcacacagtaac

SEQ ID NO: 436372 - DNA, 15 bp, Homo sapiens
gcaggcacacagtaa

SEQ ID NO: 436373 - DNA, 15 bp, Homo sapiens
ggcaggcacacagta

SEQ ID NO: 436374 - DNA, 15 bp, Homo sapiens
tggcaggcacacagt

SEQ ID NO: 436375 - DNA, 15 bp, Homo sapiens
atggcaggcacacag

SEQ ID NO: 436376 - DNA, 15 bp, Homo sapiens
aatggcaggcacaca

SEQ ID NO: 436377 - DNA, 15 bp, Homo sapiens
caatggcaggcacac

SEQ ID NO: 436378 - DNA, 15 bp, Homo sapiens
acaatggcaggcaca

SEQ ID NO: 436379 - DNA, 15 bp, Homo sapiens
cacaatggcaggcac

SEQ ID NO: 436380 - DNA, 15 bp, Homo sapiens
tcacaatggcaggca

SEQ ID NO: 436381 - DNA, 15 bp, Homo sapiens
ttcacaatggcaggc

SEQ ID NO: 436382 - DNA, 15 bp, Homo sapiens
attcacaatggcagg

SEQ ID NO: 436383 - DNA, 15 bp, Homo sapiens
cattcacaatggcag

SEQ ID NO: 436384 - DNA, 15 bp, Homo sapiens
tcattcacaatggca

SEQ ID NO: 436385 - DNA, 15 bp, Homo sapiens
gtcattcacaatggc

SEQ ID NO: 436386 - DNA, 15 bp, Homo sapiens
tgtcattcacaatgg

SEQ ID NO: 436387 - DNA, 15 bp, Homo sapiens
atgtcattcacaatg

SEQ ID NO: 436388 - DNA, 15 bp, Homo sapiens
aatgtcattcacaat

SEQ ID NO: 436389 - DNA, 15 bp, Homo sapiens
aaatgtcattcacaa

SEQ ID NO: 436390 - DNA, 15 bp, Homo sapiens
aaaatgtcattcaca

SEQ ID NO: 436391 - DNA, 15 bp, Homo sapiens
caaaatgtcattcac

SEQ ID NO: 436392 - DNA, 15 bp, Homo sapiens
acaaaatgtcattca

SEQ ID NO: 436393 - DNA, 15 bp, Homo sapiens
aacaaaatgtcattc

SEQ ID NO: 436394 - DNA, 15 bp, Homo sapiens
aaacaaaatgtcatt

SEQ ID NO: 436395 - DNA, 15 bp, Homo sapiens
taaacaaaatgtcat

SEQ ID NO: 436396 - DNA, 15 bp, Homo sapiens
ctaaacaaaatgtca

SEQ ID NO: 436397 - DNA, 15 bp, Homo sapiens
tctaaacaaaatgtc

SEQ ID NO: 436398 - DNA, 15 bp, Homo sapiens
atctaaacaaaatgt

SEQ ID NO: 436399 - DNA, 15 bp, Homo sapiens
aatctaaacaaaatg

SEQ ID NO: 436400 - DNA, 15 bp, Homo sapiens
taatctaaacaaaat

SEQ ID NO: 436401 - DNA, 15 bp, Homo sapiens
gtaatctaaacaaaa

SEQ ID NO: 436402 - DNA, 15 bp, Homo sapiens
agtaatctaaacaaa

SEQ ID NO: 436403 - DNA, 15 bp, Homo sapiens
tagtaatctaaacaa

SEQ ID NO: 436404 - DNA, 15 bp, Homo sapiens
ttagtaatctaaaca

SEQ ID NO: 436405 - DNA, 15 bp, Homo sapiens
tttagtaatctaaac

SEQ ID NO: 436406 - DNA, 15 bp, Homo sapiens
atttagtaatctaaa

SEQ ID NO: 436407 - DNA, 15 bp, Homo sapiens
gatttagtaatctaa

SEQ ID NO: 436408 - DNA, 15 bp, Homo sapiens
agatttagtaatcta

SEQ ID NO: 436409 - DNA, 15 bp, Homo sapiens
gagatttagtaatct

SEQ ID NO: 436410 - DNA, 15 bp, Homo sapiens
agagatttagtaatc

SEQ ID NO: 436411 - DNA, 15 bp, Homo sapiens
tagagatttagtaat

SEQ ID NO: 436412 - DNA, 15 bp, Homo sapiens
ttagagatttagtaa

SEQ ID NO: 436413 - DNA, 15 bp, Homo sapiens
tttagagatttagta

SEQ ID NO: 436414 - DNA, 15 bp, Homo sapiens
atttagagatttagt

SEQ ID NO: 436415 - DNA, 15 bp, Homo sapiens
tatttagagatttag

SEQ ID NO: 436416 - DNA, 15 bp, Homo sapiens
gtatttagagattta

SEQ ID NO: 436417 - DNA, 15 bp, Homo sapiens
agtatttagagattt

SEQ ID NO: 436418 - DNA, 15 bp, Homo sapiens
tagtatttagagatt

SEQ ID NO: 436419 - DNA, 15 bp, Homo sapiens
ctagtatttagagat

SEQ ID NO: 436420 - DNA, 15 bp, Homo sapiens
gctagtatttagaga

SEQ ID NO: 436421 - DNA, 15 bp, Homo sapiens
ggctagtatttagag

SEQ ID NO: 436422 - DNA, 15 bp, Homo sapiens
gggctagtatttaga

SEQ ID NO: 436423 - DNA, 15 bp, Homo sapiens
ggggctagtatttag

SEQ ID NO: 436424 - DNA, 15 bp, Homo sapiens
tggggctagtattta

SEQ ID NO: 436425 - DNA, 15 bp, Homo sapiens
atggggctagtattt

SEQ ID NO: 436426 - DNA, 15 bp, Homo sapiens
aatggggctagtatt

SEQ ID NO: 436427 - DNA, 15 bp, Homo sapiens
aaatggggctagtat

SEQ ID NO: 436428 - DNA, 15 bp, Homo sapiens
taaatggggctagta

SEQ ID NO: 436429 - DNA, 15 bp, Homo sapiens
ttaaatggggctagt

SEQ ID NO: 436430 - DNA, 15 bp, Homo sapiens
gttaaatggggctag

SEQ ID NO: 436431 - DNA, 15 bp, Homo sapiens
tgttaaatggggcta

SEQ ID NO: 436432 - DNA, 15 bp, Homo sapiens
atgttaaatggggct

SEQ ID NO: 436433 - DNA, 15 bp, Homo sapiens
tatgttaaatggggc

SEQ ID NO: 436434 - DNA, 15 bp, Homo sapiens
atatgttaaatgggg

SEQ ID NO: 436435 - DNA, 15 bp, Homo sapiens
catatgttaaatggg

SEQ ID NO: 436436 - DNA, 15 bp, Homo sapiens
tcatatgttaaatgg

SEQ ID NO: 436437 - DNA, 15 bp, Homo sapiens
ttcatatgttaaatg

SEQ ID NO: 436438 - DNA, 15 bp, Homo sapiens
attcatatgttaaat

SEQ ID NO: 436439 - DNA, 15 bp, Homo sapiens
tattcatatgttaaa

SEQ ID NO: 436440 - DNA, 15 bp, Homo sapiens
ttattcatatgttaa

SEQ ID NO: 436441 - DNA, 15 bp, Homo sapiens
tttattcatatgtta

SEQ ID NO: 436442 - DNA, 15 bp, Homo sapiens
atttattcatatgtt

SEQ ID NO: 436443 - DNA, 15 bp, Homo sapiens
aatttattcatatgt

SEQ ID NO: 436444 - DNA, 15 bp, Homo sapiens
caatttattcatatg

SEQ ID NO: 436445 - DNA, 15 bp, Homo sapiens
gcaatttattcatat

SEQ ID NO: 436446 - DNA, 15 bp, Homo sapiens
tgcaatttattcata

SEQ ID NO: 436447 - DNA, 15 bp, Homo sapiens
atgcaatttattcat

SEQ ID NO: 436448 - DNA, 15 bp, Homo sapiens
tatgcaatttattca

SEQ ID NO: 436449 - DNA, 15 bp, Homo sapiens
atatgcaatttattc

SEQ ID NO: 436450 - DNA, 15 bp, Homo sapiens
aatatgcaatttatt

SEQ ID NO: 436451 - DNA, 15 bp, Homo sapiens
aaatatgcaatttat

SEQ ID NO: 436452 - DNA, 15 bp, Homo sapiens
taaatatgcaattta

SEQ ID NO: 436453 - DNA, 15 bp, Homo sapiens
ttaaatatgcaattt

SEQ ID NO: 436454 - DNA, 15 bp, Homo sapiens
tttaaatatgcaatt

SEQ ID NO: 436455 - DNA, 15 bp, Homo sapiens
ttttaaatatgcaat

SEQ ID NO: 436456 - DNA, 15 bp, Homo sapiens
tttttaaatatgcaa

SEQ ID NO: 436457 - DNA, 15 bp, Homo sapiens
ctttttaaatatgca

SEQ ID NO: 436458 - DNA, 15 bp, Homo sapiens
actttttaaatatgc

SEQ ID NO: 436459 - DNA, 15 bp, Homo sapiens
aactttttaaatatg

SEQ ID NO: 436460 - DNA, 15 bp, Homo sapiens
taactttttaaatat

SEQ ID NO: 436461 - DNA, 15 bp, Homo sapiens
ttaactttttaaata

SEQ ID NO: 436462 - DNA, 15 bp, Homo sapiens
tttaactttttaaat

SEQ ID NO: 436463 - DNA, 15 bp, Homo sapiens
atttaactttttaaa

SEQ ID NO: 436464 - DNA, 15 bp, Homo sapiens
tatttaactttttaa

SEQ ID NO: 436465 - DNA, 15 bp, Homo sapiens
ttatttaacttttta

SEQ ID NO: 436466 - DNA, 15 bp, Homo sapiens
gttatttaacttttt

SEQ ID NO: 436467 - DNA, 15 bp, Homo sapiens
agttatttaactttt

SEQ ID NO: 436468 - DNA, 15 bp, Homo sapiens
aagttatttaacttt

SEQ ID NO: 436469 - DNA, 15 bp, Homo sapiens
gaagttatttaactt

SEQ ID NO: 436470 - DNA, 15 bp, Homo sapiens
agaagttatttaact

SEQ ID NO: 436471 - DNA, 15 bp, Homo sapiens
gagaagttatttaac

SEQ ID NO: 436472 - DNA, 15 bp, Homo sapiens
ggagaagttatttaa

SEQ ID NO: 436473 - DNA, 15 bp, Homo sapiens
tggagaagttattta

SEQ ID NO: 436474 - DNA, 15 bp, Homo sapiens
ctggagaagttattt

SEQ ID NO: 436475 - DNA, 15 bp, Homo sapiens
actggagaagttatt

SEQ ID NO: 436476 - DNA, 15 bp, Homo sapiens
cactggagaagttat

SEQ ID NO: 436477 - DNA, 15 bp, Homo sapiens
gcactggagaagtta

SEQ ID NO: 436478 - DNA, 15 bp, Homo sapiens
tgcactggagaagtt

SEQ ID NO: 436479 - DNA, 15 bp, Homo sapiens
gtgcactggagaagt

SEQ ID NO: 436480 - DNA, 15 bp, Homo sapiens
tgtgcactggagaag

SEQ ID NO: 436481 - DNA, 15 bp, Homo sapiens
gtgtgcactggagaa

SEQ ID NO: 436482 - DNA, 15 bp, Homo sapiens
tgtgtgcactggaga

SEQ ID NO: 436483 - DNA, 15 bp, Homo sapiens
ttgtgtgcactggag

SEQ ID NO: 436484 - DNA, 15 bp, Homo sapiens
gttgtgtgcactgga

SEQ ID NO: 436485 - DNA, 15 bp, Homo sapiens
agttgtgtgcactgg

SEQ ID NO: 436486 - DNA, 15 bp, Homo sapiens
cagttgtgtgcactg

SEQ ID NO: 436487 - DNA, 15 bp, Homo sapiens
acagttgtgtgcact

SEQ ID NO: 436488 - DNA, 15 bp, Homo sapiens
aacagttgtgtgcac

SEQ ID NO: 436489 - DNA, 15 bp, Homo sapiens
taacagttgtgtgca

SEQ ID NO: 436490 - DNA, 15 bp, Homo sapiens
ttaacagttgtgtgc

SEQ ID NO: 436491 - DNA, 15 bp, Homo sapiens
cttaacagttgtgtg

SEQ ID NO: 436492 - DNA, 15 bp, Homo sapiens
acttaacagttgtgt

SEQ ID NO: 436493 - DNA, 15 bp, Homo sapiens
cacttaacagttgtg

SEQ ID NO: 436494 - DNA, 15 bp, Homo sapiens
gcacttaacagttgt

SEQ ID NO: 436495 - DNA, 15 bp, Homo sapiens
tgcacttaacagttg

SEQ ID NO: 436496 - DNA, 15 bp, Homo sapiens
ttgcacttaacagtt

SEQ ID NO: 436497 - DNA, 15 bp, Homo sapiens
tttgcacttaacagt

SEQ ID NO: 436498 - DNA, 15 bp, Homo sapiens
ttttgcacttaacag

SEQ ID NO: 436499 - DNA, 15 bp, Homo sapiens
tttttgcacttaaca

SEQ ID NO: 436500 - DNA, 15 bp, Homo sapiens
gtttttgcacttaac

SEQ ID NO: 436501 - DNA, 15 bp, Homo sapiens
agtttttgcacttaa

SEQ ID NO: 436502 - DNA, 15 bp, Homo sapiens
cagtttttgcactta

SEQ ID NO: 436503 - DNA, 15 bp, Homo sapiens
ccagtttttgcactt

SEQ ID NO: 436504 - DNA, 15 bp, Homo sapiens
tccagtttttgcact

SEQ ID NO: 436505 - DNA, 15 bp, Homo sapiens
ttccagtttttgcac

SEQ ID NO: 436506 - DNA, 15 bp, Homo sapiens
attccagtttttgca

SEQ ID NO: 436507 - DNA, 15 bp, Homo sapiens
gattccagtttttgc

SEQ ID NO: 436508 - DNA, 15 bp, Homo sapiens
ggattccagtttttg

SEQ ID NO: 436509 - DNA, 15 bp, Homo sapiens
tggattccagttttt

SEQ ID NO: 436510 - DNA, 15 bp, Homo sapiens
ctggattccagtttt

SEQ ID NO: 436511 - DNA, 15 bp, Homo sapiens
actggattccagttt

SEQ ID NO: 436512 - DNA, 15 bp, Homo sapiens
aactggattccagtt

SEQ ID NO: 436513 - DNA, 15 bp, Homo sapiens
taactggattccagt

SEQ ID NO: 436514 - DNA, 15 bp, Homo sapiens
ctaactggattccag

SEQ ID NO: 436515 - DNA, 15 bp, Homo sapiens
actaactggattcca

SEQ ID NO: 436516 - DNA, 15 bp, Homo sapiens
gactaactggattcc

SEQ ID NO: 436517 - DNA, 15 bp, Homo sapiens
agactaactggattc

SEQ ID NO: 436518 - DNA, 15 bp, Homo sapiens
cagactaactggatt

SEQ ID NO: 436519 - DNA, 15 bp, Homo sapiens
tcagactaactggat

SEQ ID NO: 436520 - DNA, 15 bp, Homo sapiens
atcagactaactgga

SEQ ID NO: 436521 - DNA, 15 bp, Homo sapiens
aatcagactaactgg

SEQ ID NO: 436522 - DNA, 15 bp, Homo sapiens
gaatcagactaactg

SEQ ID NO: 436523 - DNA, 15 bp, Homo sapiens
ggaatcagactaact

SEQ ID NO: 436524 - DNA, 15 bp, Homo sapiens
gggaatcagactaac

SEQ ID NO: 436525 - DNA, 15 bp, Homo sapiens
tgggaatcagactaa

SEQ ID NO: 436526 - DNA, 15 bp, Homo sapiens
ttgggaatcagacta

SEQ ID NO: 436527 - DNA, 15 bp, Homo sapiens
tttgggaatcagact

SEQ ID NO: 436528 - DNA, 15 bp, Homo sapiens
ctttgggaatcagac

SEQ ID NO: 436529 - DNA, 15 bp, Homo sapiens
actttgggaatcaga

SEQ ID NO: 436530 - DNA, 15 bp, Homo sapiens
aactttgggaatcag

SEQ ID NO: 436531 - DNA, 15 bp, Homo sapiens
gaactttgggaatca

SEQ ID NO: 436532 - DNA, 15 bp, Homo sapiens
ggaactttgggaatc

SEQ ID NO: 436533 - DNA, 15 bp, Homo sapiens
gggaactttgggaat

SEQ ID NO: 436534 - DNA, 15 bp, Homo sapiens
tgggaactttgggaa

SEQ ID NO: 436535 - DNA, 15 bp, Homo sapiens
atgggaactttggga

SEQ ID NO: 436536 - DNA, 15 bp, Homo sapiens
gatgggaactttggg

SEQ ID NO: 436537 - DNA, 15 bp, Homo sapiens
cgatgggaactttgg

SEQ ID NO: 436538 - DNA, 15 bp, Homo sapiens
tcgatgggaactttg

SEQ ID NO: 436539 - DNA, 15 bp, Homo sapiens
gtcgatgggaacttt

SEQ ID NO: 436540 - DNA, 15 bp, Homo sapiens
agtcgatgggaactt

SEQ ID NO: 436541 - DNA, 15 bp, Homo sapiens
tagtcgatgggaact

SEQ ID NO: 436542 - DNA, 15 bp, Homo sapiens
atagtcgatgggaac

SEQ ID NO: 436543 - DNA, 15 bp, Homo sapiens
gatagtcgatgggaa

SEQ ID NO: 436544 - DNA, 15 bp, Homo sapiens
agatagtcgatggga

SEQ ID NO: 436545 - DNA, 15 bp, Homo sapiens
cagatagtcgatggg

SEQ ID NO: 436546 - DNA, 15 bp, Homo sapiens
gcagatagtcgatgg

SEQ ID NO: 436547 - DNA, 15 bp, Homo sapiens
agcagatagtcgatg

SEQ ID NO: 436548 - DNA, 15 bp, Homo sapiens
cagcagatagtcgat

SEQ ID NO: 436549 - DNA, 15 bp, Homo sapiens
ccagcagatagtcga

SEQ ID NO: 436550 - DNA, 15 bp, Homo sapiens
accagcagatagtcg

SEQ ID NO: 436551 - DNA, 15 bp, Homo sapiens
gaccagcagatagtc

SEQ ID NO: 436552 - DNA, 15 bp, Homo sapiens
ggaccagcagatagt

SEQ ID NO: 436553 - DNA, 15 bp, Homo sapiens
aggaccagcagatag

SEQ ID NO: 436554 - DNA, 15 bp, Homo sapiens
gaggaccagcagata

SEQ ID NO: 436555 - DNA, 15 bp, Homo sapiens
cgaggaccagcagat

SEQ ID NO: 436556 - DNA, 15 bp, Homo sapiens
acgaggaccagcaga

SEQ ID NO: 436557 - DNA, 15 bp, Homo sapiens
tacgaggaccagcag

SEQ ID NO: 436558 - DNA, 15 bp, Homo sapiens
ttacgaggaccagca

SEQ ID NO: 436559 - DNA, 15 bp, Homo sapiens
cttacgaggaccagc

SEQ ID NO: 436560 - DNA, 15 bp, Homo sapiens
tcttacgaggaccag

SEQ ID NO: 436561 - DNA, 15 bp, Homo sapiens
ctcttacgaggacca

SEQ ID NO: 436562 - DNA, 15 bp, Homo sapiens
tctcttacgaggacc

SEQ ID NO: 436563 - DNA, 15 bp, Homo sapiens
gtctcttacgaggac

SEQ ID NO: 436564 - DNA, 15 bp, Homo sapiens
agtctcttacgagga

SEQ ID NO: 436565 - DNA, 15 bp, Homo sapiens
aagtctcttacgagg

SEQ ID NO: 436566 - DNA, 15 bp, Homo sapiens
aaagtctcttacgag

SEQ ID NO: 436567 - DNA, 15 bp, Homo sapiens
caaagtctcttacga

SEQ ID NO: 436568 - DNA, 15 bp, Homo sapiens
tcaaagtctcttacg

SEQ ID NO: 436569 - DNA, 15 bp, Homo sapiens
ctcaaagtctcttac

SEQ ID NO: 436570 - DNA, 15 bp, Homo sapiens
cctcaaagtctctta

SEQ ID NO: 436571 - DNA, 15 bp, Homo sapiens
ccctcaaagtctctt

SEQ ID NO: 436572 - DNA, 15 bp, Homo sapiens
gccctcaaagtctct

SEQ ID NO: 436573 - DNA, 15 bp, Homo sapiens
tgccctcaaagtctc

SEQ ID NO: 436574 - DNA, 15 bp, Homo sapiens
atgccctcaaagtct

SEQ ID NO: 436575 - DNA, 15 bp, Homo sapiens
tatgccctcaaagtc

SEQ ID NO: 436576 - DNA, 15 bp, Homo sapiens
ttatgccctcaaagt

SEQ ID NO: 436577 - DNA, 15 bp, Homo sapiens
tttatgccctcaaag

SEQ ID NO: 436578 - DNA, 15 bp, Homo sapiens
gtttatgccctcaaa

SEQ ID NO: 436579 - DNA, 15 bp, Homo sapiens
cgtttatgccctcaa

SEQ ID NO: 436580 - DNA, 15 bp, Homo sapiens
tcgtttatgccctca

SEQ ID NO: 436581 - DNA, 15 bp, Homo sapiens
ctcgtttatgccctc

SEQ ID NO: 436582 - DNA, 15 bp, Homo sapiens
tctcgtttatgccct

SEQ ID NO: 436583 - DNA, 15 bp, Homo sapiens
ttctcgtttatgccc

SEQ ID NO: 436584 - DNA, 15 bp, Homo sapiens
attctcgtttatgcc

SEQ ID NO: 436585 - DNA, 15 bp, Homo sapiens
tattctcgtttatgc

SEQ ID NO: 436586 - DNA, 15 bp, Homo sapiens
ctattctcgtttatg

SEQ ID NO: 436587 - DNA, 15 bp, Homo sapiens
actattctcgtttat

SEQ ID NO: 436588 - DNA, 15 bp, Homo sapiens
cactattctcgttta

SEQ ID NO: 436589 - DNA, 15 bp, Homo sapiens
ccactattctcgttt

SEQ ID NO: 436590 - DNA, 15 bp, Homo sapiens
accactattctcgtt

SEQ ID NO: 436591 - DNA, 15 bp, Homo sapiens
caccactattctcgt

SEQ ID NO: 436592 - DNA, 15 bp, Homo sapiens
ccaccactattctcg

SEQ ID NO: 436593 - DNA, 15 bp, Homo sapiens
accaccactattctc

SEQ ID NO: 436594 - DNA, 15 bp, Homo sapiens
caccaccactattct

SEQ ID NO: 436595 - DNA, 15 bp, Homo sapiens
tcaccaccactattc

SEQ ID NO: 436596 - DNA, 15 bp, Homo sapiens
ttcaccaccactatt

SEQ ID NO: 436597 - DNA, 15 bp, Homo sapiens
tttcaccaccactat

SEQ ID NO: 436598 - DNA, 15 bp, Homo sapiens
ctttcaccaccacta

SEQ ID NO: 436599 - DNA, 15 bp, Homo sapiens
actttcaccaccact

SEQ ID NO: 436600 - DNA, 15 bp, Homo sapiens
tactttcaccaccac

SEQ ID NO: 436601 - DNA, 15 bp, Homo sapiens
ctactttcaccacca

SEQ ID NO: 436602 - DNA, 15 bp, Homo sapiens
gctactttcaccacc

SEQ ID NO: 436603 - DNA, 15 bp, Homo sapiens
tgctactttcaccac

SEQ ID NO: 436604 - DNA, 15 bp, Homo sapiens
ttgctactttcacca

SEQ ID NO: 436605 - DNA, 15 bp, Homo sapiens
gttgctactttcacc

SEQ ID NO: 436606 - DNA, 15 bp, Homo sapiens
tgttgctactttcac

SEQ ID NO: 436607 - DNA, 15 bp, Homo sapiens
ttgttgctactttca

SEQ ID NO: 436608 - DNA, 15 bp, Homo sapiens
cttgttgctactttc

SEQ ID NO: 436609 - DNA, 15 bp, Homo sapiens
ccttgttgctacttt

SEQ ID NO: 436610 - DNA, 15 bp, Homo sapiens
tccttgttgctactt

SEQ ID NO: 436611 - DNA, 15 bp, Homo sapiens
atccttgttgctact

SEQ ID NO: 436612 - DNA, 15 bp, Homo sapiens
aatccttgttgctac

SEQ ID NO: 436613 - DNA, 15 bp, Homo sapiens
taatccttgttgcta

SEQ ID NO: 436614 - DNA, 15 bp, Homo sapiens
ataatccttgttgct

SEQ ID NO: 436615 - DNA, 15 bp, Homo sapiens
tataatccttgttgc

SEQ ID NO: 436616 - DNA, 15 bp, Homo sapiens
ctataatccttgttg

SEQ ID NO: 436617 - DNA, 15 bp, Homo sapiens
gctataatccttgtt

SEQ ID NO: 436618 - DNA, 15 bp, Homo sapiens
tgctataatccttgt

SEQ ID NO: 436619 - DNA, 15 bp, Homo sapiens
ctgctataatccttg

SEQ ID NO: 436620 - DNA, 15 bp, Homo sapiens
actgctataatcctt

SEQ ID NO: 436621 - DNA, 15 bp, Homo sapiens
tactgctataatcct

SEQ ID NO: 436622 - DNA, 15 bp, Homo sapiens
ttactgctataatcc

SEQ ID NO: 436623 - DNA, 15 bp, Homo sapiens
cttactgctataatc

SEQ ID NO: 436624 - DNA, 15 bp, Homo sapiens
tcttactgctataat

SEQ ID NO: 436625 - DNA, 15 bp, Homo sapiens
atcttactgctataa

SEQ ID NO: 436626 - DNA, 15 bp, Homo sapiens
aatcttactgctata

SEQ ID NO: 436627 - DNA, 15 bp, Homo sapiens
aaatcttactgctat

SEQ ID NO: 436628 - DNA, 15 bp, Homo sapiens
aaaatcttactgcta

SEQ ID NO: 436629 - DNA, 15 bp, Homo sapiens
aaaaatcttactgct

SEQ ID NO: 436630 - DNA, 15 bp, Homo sapiens
aaaaaatcttactgc

SEQ ID NO: 436631 - DNA, 15 bp, Homo sapiens
taaaaaatcttactg

SEQ ID NO: 436632 - DNA, 15 bp, Homo sapiens
ctaaaaaatcttact

SEQ ID NO: 436633 - DNA, 15 bp, Homo sapiens
actaaaaaatcttac

SEQ ID NO: 436634 - DNA, 15 bp, Homo sapiens
aactaaaaaatctta

SEQ ID NO: 436635 - DNA, 15 bp, Homo sapiens
taactaaaaaatctt

SEQ ID NO: 436636 - DNA, 15 bp, Homo sapiens
ctaactaaaaaatct

SEQ ID NO: 436637 - DNA, 15 bp, Homo sapiens
tctaactaaaaaatc

SEQ ID NO: 436638 - DNA, 15 bp, Homo sapiens
ttctaactaaaaaat

SEQ ID NO: 436639 - DNA, 15 bp, Homo sapiens
attctaactaaaaaa

SEQ ID NO: 436640 - DNA, 15 bp, Homo sapiens
gattctaactaaaaa

SEQ ID NO: 436641 - DNA, 15 bp, Homo sapiens
tgattctaactaaaa

SEQ ID NO: 436642 - DNA, 15 bp, Homo sapiens
ttgattctaactaaa

SEQ ID NO: 436643 - DNA, 15 bp, Homo sapiens
gttgattctaactaa

SEQ ID NO: 436644 - DNA, 15 bp, Homo sapiens
tgttgattctaacta

SEQ ID NO: 436645 - DNA, 15 bp, Homo sapiens
ctgttgattctaact

SEQ ID NO: 436646 - DNA, 15 bp, Homo sapiens
tctgttgattctaac

SEQ ID NO: 436647 - DNA, 15 bp, Homo sapiens
ttctgttgattctaa

SEQ ID NO: 436648 - DNA, 15 bp, Homo sapiens
gttctgttgattcta

SEQ ID NO: 436649 - DNA, 15 bp, Homo sapiens
agttctgttgattct

SEQ ID NO: 436650 - DNA, 15 bp, Homo sapiens
aagttctgttgattc

SEQ ID NO: 436651 - DNA, 15 bp, Homo sapiens
taagttctgttgatt

SEQ ID NO: 436652 - DNA, 15 bp, Homo sapiens
ttaagttctgttgat

SEQ ID NO: 436653 - DNA, 15 bp, Homo sapiens
attaagttctgttga

SEQ ID NO: 436654 - DNA, 15 bp, Homo sapiens
cattaagttctgttg

SEQ ID NO: 436655 - DNA, 15 bp, Homo sapiens
tcattaagttctgtt

SEQ ID NO: 436656 - DNA, 15 bp, Homo sapiens
gtcattaagttctgt

SEQ ID NO: 436657 - DNA, 15 bp, Homo sapiens
tgtcattaagttctg

SEQ ID NO: 436658 - DNA, 15 bp, Homo sapiens
ttgtcattaagttct

SEQ ID NO: 436659 - DNA, 15 bp, Homo sapiens
attgtcattaagttc

SEQ ID NO: 436660 - DNA, 15 bp, Homo sapiens
cattgtcattaagtt

SEQ ID NO: 436661 - DNA, 15 bp, Homo sapiens
acattgtcattaagt

SEQ ID NO: 436662 - DNA, 15 bp, Homo sapiens
tacattgtcattaag

SEQ ID NO: 436663 - DNA, 15 bp, Homo sapiens
ttacattgtcattaa

SEQ ID NO: 436664 - DNA, 15 bp, Homo sapiens
cttacattgtcatta

SEQ ID NO: 436665 - DNA, 15 bp, Homo sapiens
acttacattgtcatt

SEQ ID NO: 436666 - DNA, 15 bp, Homo sapiens
cacttacattgtcat

SEQ ID NO: 436667 - DNA, 15 bp, Homo sapiens
tcacttacattgtca

SEQ ID NO: 436668 - DNA, 15 bp, Homo sapiens
atcacttacattgtc

SEQ ID NO: 436669 - DNA, 15 bp, Homo sapiens
tatcacttacattgt

SEQ ID NO: 436670 - DNA, 15 bp, Homo sapiens
ttatcacttacattg

SEQ ID NO: 436671 - DNA, 15 bp, Homo sapiens
cttatcacttacatt

SEQ ID NO: 436672 - DNA, 15 bp, Homo sapiens
ccttatcacttacat

SEQ ID NO: 436673 - DNA, 15 bp, Homo sapiens
tccttatcacttaca

SEQ ID NO: 436674 - DNA, 15 bp, Homo sapiens
ttccttatcacttac

SEQ ID NO: 436675 - DNA, 15 bp, Homo sapiens
tttccttatcactta

SEQ ID NO: 436676 - DNA, 15 bp, Homo sapiens
ttttccttatcactt

SEQ ID NO: 436677 - DNA, 15 bp, Homo sapiens
tttttccttatcact

SEQ ID NO: 436678 - DNA, 15 bp, Homo sapiens
ctttttccttatcac

SEQ ID NO: 436679 - DNA, 15 bp, Homo sapiens
cctttttccttatca

SEQ ID NO: 436680 - DNA, 15 bp, Homo sapiens
acctttttccttatc

SEQ ID NO: 436681 - DNA, 15 bp, Homo sapiens
cacctttttccttat

SEQ ID NO: 436682 - DNA, 15 bp, Homo sapiens
acacctttttcctta

SEQ ID NO: 436683 - DNA, 15 bp, Homo sapiens
gacacctttttcctt

SEQ ID NO: 436684 - DNA, 15 bp, Homo sapiens
tgacacctttttcct

SEQ ID NO: 436685 - DNA, 15 bp, Homo sapiens
ttgacacctttttcc

SEQ ID NO: 436686 - DNA, 15 bp, Homo sapiens
tttgacacctttttc

SEQ ID NO: 436687 - DNA, 15 bp, Homo sapiens
gtttgacaccttttt

SEQ ID NO: 436688 - DNA, 15 bp, Homo sapiens
agtttgacacctttt

SEQ ID NO: 436689 - DNA, 15 bp, Homo sapiens
aagtttgacaccttt

SEQ ID NO: 436690 - DNA, 15 bp, Homo sapiens
caagtttgacacctt

SEQ ID NO: 436691 - DNA, 15 bp, Homo sapiens
tcaagtttgacacct

SEQ ID NO: 436692 - DNA, 15 bp, Homo sapiens
gtcaagtttgacacc

SEQ ID NO: 436693 - DNA, 15 bp, Homo sapiens
agtcaagtttgacac

SEQ ID NO: 436694 - DNA, 15 bp, Homo sapiens
cagtcaagtttgaca

SEQ ID NO: 436695 - DNA, 15 bp, Homo sapiens
tcagtcaagtttgac

SEQ ID NO: 436696 - DNA, 15 bp, Homo sapiens
ctcagtcaagtttga

SEQ ID NO: 436697 - DNA, 15 bp, Homo sapiens
actcagtcaagtttg

SEQ ID NO: 436698 - DNA, 15 bp, Homo sapiens
cactcagtcaagttt

SEQ ID NO: 436699 - DNA, 15 bp, Homo sapiens
acactcagtcaagtt

SEQ ID NO: 436700 - DNA, 15 bp, Homo sapiens
aacactcagtcaagt

SEQ ID NO: 436701 - DNA, 15 bp, Homo sapiens
taacactcagtcaag

SEQ ID NO: 436702 - DNA, 15 bp, Homo sapiens
ctaacactcagtcaa

SEQ ID NO: 436703 - DNA, 15 bp, Homo sapiens
tctaacactcagtca

SEQ ID NO: 436704 - DNA, 15 bp, Homo sapiens
ttctaacactcagtc

SEQ ID NO: 436705 - DNA, 15 bp, Homo sapiens
tttctaacactcagt

SEQ ID NO: 436706 - DNA, 15 bp, Homo sapiens
ttttctaacactcag

SEQ ID NO: 436707 - DNA, 15 bp, Homo sapiens
cttttctaacactca

SEQ ID NO: 436708 - DNA, 15 bp, Homo sapiens
ccttttctaacactc

SEQ ID NO: 436709 - DNA, 15 bp, Homo sapiens
tccttttctaacact

SEQ ID NO: 436710 - DNA, 15 bp, Homo sapiens
gtccttttctaacac

SEQ ID NO: 436711 - DNA, 15 bp, Homo sapiens
tgtccttttctaaca

SEQ ID NO: 436712 - DNA, 15 bp, Homo sapiens
ctgtccttttctaac

SEQ ID NO: 436713 - DNA, 15 bp, Homo sapiens
actgtccttttctaa

SEQ ID NO: 436714 - DNA, 15 bp, Homo sapiens
gactgtccttttcta

SEQ ID NO: 436715 - DNA, 15 bp, Homo sapiens
agactgtccttttct

SEQ ID NO: 436716 - DNA, 15 bp, Homo sapiens
tagactgtccttttc

SEQ ID NO: 436717 - DNA, 15 bp, Homo sapiens
ctagactgtcctttt

SEQ ID NO: 436718 - DNA, 15 bp, Homo sapiens
gctagactgtccttt

SEQ ID NO: 436719 - DNA, 15 bp, Homo sapiens
agctagactgtcctt

SEQ ID NO: 436720 - DNA, 15 bp, Homo sapiens
gagctagactgtcct

SEQ ID NO: 436721 - DNA, 15 bp, Homo sapiens
agagctagactgtcc

SEQ ID NO: 436722 - DNA, 15 bp, Homo sapiens
cagagctagactgtc

SEQ ID NO: 436723 - DNA, 15 bp, Homo sapiens
tcagagctagactgt

SEQ ID NO: 436724 - DNA, 15 bp, Homo sapiens
ctcagagctagactg

SEQ ID NO: 436725 - DNA, 15 bp, Homo sapiens
actcagagctagact

SEQ ID NO: 436726 - DNA, 15 bp, Homo sapiens
tactcagagctagac

SEQ ID NO: 436727 - DNA, 15 bp, Homo sapiens
atactcagagctaga

SEQ ID NO: 436728 - DNA, 15 bp, Homo sapiens
catactcagagctag

SEQ ID NO: 436729 - DNA, 15 bp, Homo sapiens
gcatactcagagcta

SEQ ID NO: 436730 - DNA, 15 bp, Homo sapiens
agcatactcagagct

SEQ ID NO: 436731 - DNA, 15 bp, Homo sapiens
cagcatactcagagc

SEQ ID NO: 436732 - DNA, 15 bp, Homo sapiens
tcagcatactcagag

SEQ ID NO: 436733 - DNA, 15 bp, Homo sapiens
ttcagcatactcaga

SEQ ID NO: 436734 - DNA, 15 bp, Homo sapiens
attcagcatactcag

SEQ ID NO: 436735 - DNA, 15 bp, Homo sapiens
aattcagcatactca

SEQ ID NO: 436736 - DNA, 15 bp, Homo sapiens
aaattcagcatactc

SEQ ID NO: 436737 - DNA, 15 bp, Homo sapiens
caaattcagcatact

SEQ ID NO: 436738 - DNA, 15 bp, Homo sapiens
tcaaattcagcatac

SEQ ID NO: 436739 - DNA, 15 bp, Homo sapiens
ctcaaattcagcata

SEQ ID NO: 436740 - DNA, 15 bp, Homo sapiens
tctcaaattcagcat

SEQ ID NO: 436741 - DNA, 15 bp, Homo sapiens
ctctcaaattcagca

SEQ ID NO: 436742 - DNA, 15 bp, Homo sapiens
tctctcaaattcagc

SEQ ID NO: 436743 - DNA, 15 bp, Homo sapiens
atctctcaaattcag

SEQ ID NO: 436744 - DNA, 15 bp, Homo sapiens
aatctctcaaattca

SEQ ID NO: 436745 - DNA, 15 bp, Homo sapiens
gaatctctcaaattc

SEQ ID NO: 436746 - DNA, 15 bp, Homo sapiens
agaatctctcaaatt

SEQ ID NO: 436747 - DNA, 15 bp, Homo sapiens
aagaatctctcaaat

SEQ ID NO: 436748 - DNA, 15 bp, Homo sapiens
taagaatctctcaaa

SEQ ID NO: 436749 - DNA, 15 bp, Homo sapiens
ttaagaatctctcaa

SEQ ID NO: 436750 - DNA, 15 bp, Homo sapiens
tttaagaatctctca

SEQ ID NO: 436751 - DNA, 15 bp, Homo sapiens
ttttaagaatctctc

SEQ ID NO: 436752 - DNA, 15 bp, Homo sapiens
attttaagaatctct

SEQ ID NO: 436753 - DNA, 15 bp, Homo sapiens
tattttaagaatctc

SEQ ID NO: 436754 - DNA, 15 bp, Homo sapiens
atattttaagaatct

SEQ ID NO: 436755 - DNA, 15 bp, Homo sapiens
gatattttaagaatc

SEQ ID NO: 436756 - DNA, 15 bp, Homo sapiens
ggatattttaagaat

SEQ ID NO: 436757 - DNA, 15 bp, Homo sapiens
tggatattttaagaa

SEQ ID NO: 436758 - DNA, 15 bp, Homo sapiens
ctggatattttaaga

SEQ ID NO: 436759 - DNA, 15 bp, Homo sapiens
tctggatattttaag

SEQ ID NO: 436760 - DNA, 15 bp, Homo sapiens
ttctggatattttaa

SEQ ID NO: 436761 - DNA, 15 bp, Homo sapiens
cttctggatatttta

SEQ ID NO: 436762 - DNA, 15 bp, Homo sapiens
tcttctggatatttt

SEQ ID NO: 436763 - DNA, 15 bp, Homo sapiens
atcttctggatattt

SEQ ID NO: 436764 - DNA, 15 bp, Homo sapiens
catcttctggatatt

SEQ ID NO: 436765 - DNA, 15 bp, Homo sapiens
gcatcttctggatat

SEQ ID NO: 436766 - DNA, 15 bp, Homo sapiens
agcatcttctggata

SEQ ID NO: 436767 - DNA, 15 bp, Homo sapiens
aagcatcttctggat

SEQ ID NO: 436768 - DNA, 15 bp, Homo sapiens
aaagcatcttctgga

SEQ ID NO: 436769 - DNA, 15 bp, Homo sapiens
caaagcatcttctgg

SEQ ID NO: 436770 - DNA, 15 bp, Homo sapiens
tcaaagcatcttctg

SEQ ID NO: 436771 - DNA, 15 bp, Homo sapiens
ttcaaagcatcttct

SEQ ID NO: 436772 - DNA, 15 bp, Homo sapiens
tttcaaagcatcttc

SEQ ID NO: 436773 - DNA, 15 bp, Homo sapiens
ctttcaaagcatctt

SEQ ID NO: 436774 - DNA, 15 bp, Homo sapiens
tctttcaaagcatct

SEQ ID NO: 436775 - DNA, 15 bp, Homo sapiens
ctctttcaaagcatc

SEQ ID NO: 436776 - DNA, 15 bp, Homo sapiens
actctttcaaagcat

SEQ ID NO: 436777 - DNA, 15 bp, Homo sapiens
aactctttcaaagca

SEQ ID NO: 436778 - DNA, 15 bp, Homo sapiens
taactctttcaaagc

SEQ ID NO: 436779 - DNA, 15 bp, Homo sapiens
ctaactctttcaaag

SEQ ID NO: 436780 - DNA, 15 bp, Homo sapiens
tctaactctttcaaa

SEQ ID NO: 436781 - DNA, 15 bp, Homo sapiens
ttctaactctttcaa

SEQ ID NO: 436782 - DNA, 15 bp, Homo sapiens
tttctaactctttca

SEQ ID NO: 436783 - DNA, 15 bp, Homo sapiens
gtttctaactctttc

SEQ ID NO: 436784 - DNA, 15 bp, Homo sapiens
tgtttctaactcttt

SEQ ID NO: 436785 - DNA, 15 bp, Homo sapiens
gtgtttctaactctt

SEQ ID NO: 436786 - DNA, 15 bp, Homo sapiens
tgtgtttctaactct

SEQ ID NO: 436787 - DNA, 15 bp, Homo sapiens
ctgtgtttctaactc

SEQ ID NO: 436788 - DNA, 15 bp, Homo sapiens
tctgtgtttctaact

SEQ ID NO: 436789 - DNA, 15 bp, Homo sapiens
gtctgtgtttctaac

SEQ ID NO: 436790 - DNA, 15 bp, Homo sapiens
agtctgtgtttctaa

SEQ ID NO: 436791 - DNA, 15 bp, Homo sapiens
aagtctgtgtttcta

SEQ ID NO: 436792 - DNA, 15 bp, Homo sapiens
aaagtctgtgtttct

SEQ ID NO: 436793 - DNA, 15 bp, Homo sapiens
aaaagtctgtgtttc

SEQ ID NO: 436794 - DNA, 15 bp, Homo sapiens
taaaagtctgtgttt

SEQ ID NO: 436795 - DNA, 15 bp, Homo sapiens
ttaaaagtctgtgtt

SEQ ID NO: 436796 - DNA, 15 bp, Homo sapiens
cttaaaagtctgtgt

SEQ ID NO: 436797 - DNA, 15 bp, Homo sapiens
acttaaaagtctgtg

SEQ ID NO: 436798 - DNA, 15 bp, Homo sapiens
aacttaaaagtctgt

SEQ ID NO: 436799 - DNA, 15 bp, Homo sapiens
caacttaaaagtctg

SEQ ID NO: 436800 - DNA, 15 bp, Homo sapiens
tcaacttaaaagtct

SEQ ID NO: 436801 - DNA, 15 bp, Homo sapiens
ctcaacttaaaagtc

SEQ ID NO: 436802 - DNA, 15 bp, Homo sapiens
cctcaacttaaaagt

SEQ ID NO: 436803 - DNA, 15 bp, Homo sapiens
tcctcaacttaaaag

SEQ ID NO: 436804 - DNA, 15 bp, Homo sapiens
ctcctcaacttaaaa

SEQ ID NO: 436805 - DNA, 15 bp, Homo sapiens
gctcctcaacttaaa

SEQ ID NO: 436806 - DNA, 15 bp, Homo sapiens
tgctcctcaacttaa

SEQ ID NO: 436807 - DNA, 15 bp, Homo sapiens
ttgctcctcaactta

SEQ ID NO: 436808 - DNA, 15 bp, Homo sapiens
cttgctcctcaactt

SEQ ID NO: 436809 - DNA, 15 bp, Homo sapiens
tcttgctcctcaact

SEQ ID NO: 436810 - DNA, 15 bp, Homo sapiens
ctcttgctcctcaac

SEQ ID NO: 436811 - DNA, 15 bp, Homo sapiens
cctcttgctcctcaa

SEQ ID NO: 436812 - DNA, 15 bp, Homo sapiens
acctcttgctcctca

SEQ ID NO: 436813 - DNA, 15 bp, Homo sapiens
gacctcttgctcctc

SEQ ID NO: 436814 - DNA, 15 bp, Homo sapiens
tgacctcttgctcct

SEQ ID NO: 436815 - DNA, 15 bp, Homo sapiens
ctgacctcttgctcc

SEQ ID NO: 436816 - DNA, 15 bp, Homo sapiens
tctgacctcttgctc

SEQ ID NO: 436817 - DNA, 15 bp, Homo sapiens
ttctgacctcttgct

SEQ ID NO: 436818 - DNA, 15 bp, Homo sapiens
cttctgacctcttgc

SEQ ID NO: 436819 - DNA, 15 bp, Homo sapiens
gcttctgacctcttg

SEQ ID NO: 436820 - DNA, 15 bp, Homo sapiens
tgcttctgacctctt

SEQ ID NO: 436821 - DNA, 15 bp, Homo sapiens
ctgcttctgacctct

SEQ ID NO: 436822 - DNA, 15 bp, Homo sapiens
actgcttctgacctc

SEQ ID NO: 436823 - DNA, 15 bp, Homo sapiens
cactgcttctgacct

SEQ ID NO: 436824 - DNA, 15 bp, Homo sapiens
gcactgcttctgacc

SEQ ID NO: 436825 - DNA, 15 bp, Homo sapiens
agcactgcttctgac

SEQ ID NO: 436826 - DNA, 15 bp, Homo sapiens
tagcactgcttctga

SEQ ID NO: 436827 - DNA, 15 bp, Homo sapiens
atagcactgcttctg

SEQ ID NO: 436828 - DNA, 15 bp, Homo sapiens
aatagcactgcttct

SEQ ID NO: 436829 - DNA, 15 bp, Homo sapiens
gaatagcactgcttc

SEQ ID NO: 436830 - DNA, 15 bp, Homo sapiens
tgaatagcactgctt

SEQ ID NO: 436831 - DNA, 15 bp, Homo sapiens
ctgaatagcactgct

SEQ ID NO: 436832 - DNA, 15 bp, Homo sapiens
tctgaatagcactgc

SEQ ID NO: 436833 - DNA, 15 bp, Homo sapiens
atctgaatagcactg

SEQ ID NO: 436834 - DNA, 15 bp, Homo sapiens
catctgaatagcact

SEQ ID NO: 436835 - DNA, 15 bp, Homo sapiens
acatctgaatagcac

SEQ ID NO: 436836 - DNA, 15 bp, Homo sapiens
cacatctgaatagca

SEQ ID NO: 436837 - DNA, 15 bp, Homo sapiens
ccacatctgaatagc

SEQ ID NO: 436838 - DNA, 15 bp, Homo sapiens
cccacatctgaatag

SEQ ID NO: 436839 - DNA, 15 bp, Homo sapiens
tcccacatctgaata

SEQ ID NO: 436840 - DNA, 15 bp, Homo sapiens
ttcccacatctgaat

SEQ ID NO: 436841 - DNA, 15 bp, Homo sapiens
attcccacatctgaa

SEQ ID NO: 436842 - DNA, 15 bp, Homo sapiens
gattcccacatctga

SEQ ID NO: 436843 - DNA, 15 bp, Homo sapiens
tgattcccacatctg

SEQ ID NO: 436844 - DNA, 15 bp, Homo sapiens
atgattcccacatct

SEQ ID NO: 436845 - DNA, 15 bp, Homo sapiens
catgattcccacatc

SEQ ID NO: 436846 - DNA, 15 bp, Homo sapiens
ccatgattcccacat

SEQ ID NO: 436847 - DNA, 15 bp, Homo sapiens
gccatgattcccaca

SEQ ID NO: 436848 - DNA, 15 bp, Homo sapiens
cgccatgattcccac

SEQ ID NO: 436849 - DNA, 15 bp, Homo sapiens
gcgccatgattccca

SEQ ID NO: 436850 - DNA, 15 bp, Homo sapiens
tgcgccatgattccc

SEQ ID NO: 436851 - DNA, 15 bp, Homo sapiens
gtgcgccatgattcc

SEQ ID NO: 436852 - DNA, 15 bp, Homo sapiens
tgtgcgccatgattc

SEQ ID NO: 436853 - DNA, 15 bp, Homo sapiens
ttgtgcgccatgatt

SEQ ID NO: 436854 - DNA, 15 bp, Homo sapiens
cttgtgcgccatgat

SEQ ID NO: 436855 - DNA, 15 bp, Homo sapiens
gcttgtgcgccatga

SEQ ID NO: 436856 - DNA, 15 bp, Homo sapiens
agcttgtgcgccatg

SEQ ID NO: 436857 - DNA, 15 bp, Homo sapiens
cagcttgtgcgccat

SEQ ID NO: 436858 - DNA, 15 bp, Homo sapiens
acagcttgtgcgcca

SEQ ID NO: 436859 - DNA, 15 bp, Homo sapiens
tacagcttgtgcgcc

SEQ ID NO: 436860 - DNA, 15 bp, Homo sapiens
ctacagcttgtgcgc

SEQ ID NO: 436861 - DNA, 15 bp, Homo sapiens
actacagcttgtgcg

SEQ ID NO: 436862 - DNA, 15 bp, Homo sapiens
aactacagcttgtgc

SEQ ID NO: 436863 - DNA, 15 bp, Homo sapiens
caactacagcttgtg

SEQ ID NO: 436864 - DNA, 15 bp, Homo sapiens
tcaactacagcttgt

SEQ ID NO: 436865 - DNA, 15 bp, Homo sapiens
ttcaactacagcttg

SEQ ID NO: 436866 - DNA, 15 bp, Homo sapiens
cttcaactacagctt

SEQ ID NO: 436867 - DNA, 15 bp, Homo sapiens
gcttcaactacagct

SEQ ID NO: 436868 - DNA, 15 bp, Homo sapiens
cgcttcaactacagc

SEQ ID NO: 436869 - DNA, 15 bp, Homo sapiens
tcgcttcaactacag

SEQ ID NO: 436870 - DNA, 15 bp, Homo sapiens
ttcgcttcaactaca

SEQ ID NO: 436871 - DNA, 15 bp, Homo sapiens
cttcgcttcaactac

SEQ ID NO: 436872 - DNA, 15 bp, Homo sapiens
tcttcgcttcaacta

SEQ ID NO: 436873 - DNA, 15 bp, Homo sapiens
gtcttcgcttcaact

SEQ ID NO: 436874 - DNA, 15 bp, Homo sapiens
tgtcttcgcttcaac

SEQ ID NO: 436875 - DNA, 15 bp, Homo sapiens
ttgtcttcgcttcaa

SEQ ID NO: 436876 - DNA, 15 bp, Homo sapiens
tttgtcttcgcttca

SEQ ID NO: 436877 - DNA, 15 bp, Homo sapiens
ctttgtcttcgcttc

SEQ ID NO: 436878 - DNA, 15 bp, Homo sapiens
tctttgtcttcgctt

SEQ ID NO: 436879 - DNA, 15 bp, Homo sapiens
ctctttgtcttcgct

SEQ ID NO: 436880 - DNA, 15 bp, Homo sapiens
actctttgtcttcgc

SEQ ID NO: 436881 - DNA, 15 bp, Homo sapiens
cactctttgtcttcg

SEQ ID NO: 436882 - DNA, 15 bp, Homo sapiens
gcactctttgtcttc

SEQ ID NO: 436883 - DNA, 15 bp, Homo sapiens
tgcactctttgtctt

SEQ ID NO: 436884 - DNA, 15 bp, Homo sapiens
atgcactctttgtct

SEQ ID NO: 436885 - DNA, 15 bp, Homo sapiens
tatgcactctttgtc

SEQ ID NO: 436886 - DNA, 15 bp, Homo sapiens
atatgcactctttgt

SEQ ID NO: 436887 - DNA, 15 bp, Homo sapiens
aatatgcactctttg

SEQ ID NO: 436888 - DNA, 15 bp, Homo sapiens
caatatgcactcttt

SEQ ID NO: 436889 - DNA, 15 bp, Homo sapiens
acaatatgcactctt

SEQ ID NO: 436890 - DNA, 15 bp, Homo sapiens
cacaatatgcactct

SEQ ID NO: 436891 - DNA, 15 bp, Homo sapiens
tcacaatatgcactc

SEQ ID NO: 436892 - DNA, 15 bp, Homo sapiens
ttcacaatatgcact

SEQ ID NO: 436893 - DNA, 15 bp, Homo sapiens
gttcacaatatgcac

SEQ ID NO: 436894 - DNA, 15 bp, Homo sapiens
tgttcacaatatgca

SEQ ID NO: 436895 - DNA, 15 bp, Homo sapiens
atgttcacaatatgc

SEQ ID NO: 436896 - DNA, 15 bp, Homo sapiens
aatgttcacaatatg

SEQ ID NO: 436897 - DNA, 15 bp, Homo sapiens
aaatgttcacaatat

SEQ ID NO: 436898 - DNA, 15 bp, Homo sapiens
taaatgttcacaata

SEQ ID NO: 436899 - DNA, 15 bp, Homo sapiens
ctaaatgttcacaat

SEQ ID NO: 436900 - DNA, 15 bp, Homo sapiens
tctaaatgttcacaa

SEQ ID NO: 436901 - DNA, 15 bp, Homo sapiens
ctctaaatgttcaca

SEQ ID NO: 436902 - DNA, 15 bp, Homo sapiens
actctaaatgttcac

SEQ ID NO: 436903 - DNA, 15 bp, Homo sapiens
cactctaaatgttca

SEQ ID NO: 436904 - DNA, 15 bp, Homo sapiens
tcactctaaatgttc

SEQ ID NO: 436905 - DNA, 15 bp, Homo sapiens
ctcactctaaatgtt

SEQ ID NO: 436906 - DNA, 15 bp, Homo sapiens
cctcactctaaatgt

SEQ ID NO: 436907 - DNA, 15 bp, Homo sapiens
tcctcactctaaatg

SEQ ID NO: 436908 - DNA, 15 bp, Homo sapiens
ctcctcactctaaat

SEQ ID NO: 436909 - DNA, 15 bp, Homo sapiens
cctcctcactctaaa

SEQ ID NO: 436910 - DNA, 15 bp, Homo sapiens
ccctcctcactctaa

SEQ ID NO: 436911 - DNA, 15 bp, Homo sapiens
tccctcctcactcta

SEQ ID NO: 436912 - DNA, 15 bp, Homo sapiens
ttccctcctcactct

SEQ ID NO: 436913 - DNA, 15 bp, Homo sapiens
tttccctcctcactc

SEQ ID NO: 436914 - DNA, 15 bp, Homo sapiens
atttccctcctcact

SEQ ID NO: 436915 - DNA, 15 bp, Homo sapiens
catttccctcctcac

SEQ ID NO: 436916 - DNA, 15 bp, Homo sapiens
acatttccctcctca

SEQ ID NO: 436917 - DNA, 15 bp, Homo sapiens
aacatttccctcctc

SEQ ID NO: 436918 - DNA, 15 bp, Homo sapiens
caacatttccctcct

SEQ ID NO: 436919 - DNA, 15 bp, Homo sapiens
tcaacatttccctcc

SEQ ID NO: 436920 - DNA, 15 bp, Homo sapiens
gtcaacatttccctc

SEQ ID NO: 436921 - DNA, 15 bp, Homo sapiens
tgtcaacatttccct

SEQ ID NO: 436922 - DNA, 15 bp, Homo sapiens
ctgtcaacatttccc

SEQ ID NO: 436923 - DNA, 15 bp, Homo sapiens
tctgtcaacatttcc

SEQ ID NO: 436924 - DNA, 15 bp, Homo sapiens
ttctgtcaacatttc

SEQ ID NO: 436925 - DNA, 15 bp, Homo sapiens
attctgtcaacattt

SEQ ID NO: 436926 - DNA, 15 bp, Homo sapiens
gattctgtcaacatt

SEQ ID NO: 436927 - DNA, 15 bp, Homo sapiens
agattctgtcaacat

SEQ ID NO: 436928 - DNA, 15 bp, Homo sapiens
aagattctgtcaaca

SEQ ID NO: 436929 - DNA, 15 bp, Homo sapiens
taagattctgtcaac

SEQ ID NO: 436930 - DNA, 15 bp, Homo sapiens
ctaagattctgtcaa

SEQ ID NO: 436931 - DNA, 15 bp, Homo sapiens
cctaagattctgtca

SEQ ID NO: 436932 - DNA, 15 bp, Homo sapiens
tcctaagattctgtc

SEQ ID NO: 436933 - DNA, 15 bp, Homo sapiens
atcctaagattctgt

SEQ ID NO: 436934 - DNA, 15 bp, Homo sapiens
gatcctaagattctg

SEQ ID NO: 436935 - DNA, 15 bp, Homo sapiens
tgatcctaagattct

SEQ ID NO: 436936 - DNA, 15 bp, Homo sapiens
atgatcctaagattc

SEQ ID NO: 436937 - DNA, 15 bp, Homo sapiens
gatgatcctaagatt

SEQ ID NO: 436938 - DNA, 15 bp, Homo sapiens
agatgatcctaagat

SEQ ID NO: 436939 - DNA, 15 bp, Homo sapiens
tagatgatcctaaga

SEQ ID NO: 436940 - DNA, 15 bp, Homo sapiens
gtagatgatcctaag

SEQ ID NO: 436941 - DNA, 15 bp, Homo sapiens
tgtagatgatcctaa

SEQ ID NO: 436942 - DNA, 15 bp, Homo sapiens
atgtagatgatccta

SEQ ID NO: 436943 - DNA, 15 bp, Homo sapiens
aatgtagatgatcct

SEQ ID NO: 436944 - DNA, 15 bp, Homo sapiens
aaatgtagatgatcc

SEQ ID NO: 436945 - DNA, 15 bp, Homo sapiens
taaatgtagatgatc

SEQ ID NO: 436946 - DNA, 15 bp, Homo sapiens
ttaaatgtagatgat

SEQ ID NO: 436947 - DNA, 15 bp, Homo sapiens
cttaaatgtagatga

SEQ ID NO: 436948 - DNA, 15 bp, Homo sapiens
acttaaatgtagatg

SEQ ID NO: 436949 - DNA, 15 bp, Homo sapiens
aacttaaatgtagat

SEQ ID NO: 436950 - DNA, 15 bp, Homo sapiens
taacttaaatgtaga

SEQ ID NO: 436951 - DNA, 15 bp, Homo sapiens
ataacttaaatgtag

SEQ ID NO: 436952 - DNA, 15 bp, Homo sapiens
tataacttaaatgta

SEQ ID NO: 436953 - DNA, 15 bp, Homo sapiens
ctataacttaaatgt

SEQ ID NO: 436954 - DNA, 15 bp, Homo sapiens
cctataacttaaatg

SEQ ID NO: 436955 - DNA, 15 bp, Homo sapiens
gcctataacttaaat

SEQ ID NO: 436956 - DNA, 15 bp, Homo sapiens
tgcctataacttaaa

SEQ ID NO: 436957 - DNA, 15 bp, Homo sapiens
ctgcctataacttaa

SEQ ID NO: 436958 - DNA, 15 bp, Homo sapiens
tctgcctataactta

SEQ ID NO: 436959 - DNA, 15 bp, Homo sapiens
ttctgcctataactt

SEQ ID NO: 436960 - DNA, 15 bp, Homo sapiens
cttctgcctataact

SEQ ID NO: 436961 - DNA, 15 bp, Homo sapiens
ccttctgcctataac

SEQ ID NO: 436962 - DNA, 15 bp, Homo sapiens
tccttctgcctataa

SEQ ID NO: 436963 - DNA, 15 bp, Homo sapiens
ctccttctgcctata

SEQ ID NO: 436964 - DNA, 15 bp, Homo sapiens
tctccttctgcctat

SEQ ID NO: 436965 - DNA, 15 bp, Homo sapiens
atctccttctgccta

SEQ ID NO: 436966 - DNA, 15 bp, Homo sapiens
catctccttctgcct

SEQ ID NO: 436967 - DNA, 15 bp, Homo sapiens
tcatctccttctgcc

SEQ ID NO: 436968 - DNA, 15 bp, Homo sapiens
ttcatctccttctgc

SEQ ID NO: 436969 - DNA, 15 bp, Homo sapiens
cttcatctccttctg

SEQ ID NO: 436970 - DNA, 15 bp, Homo sapiens
ccttcatctccttct

SEQ ID NO: 436971 - DNA, 15 bp, Homo sapiens
tccttcatctccttc

SEQ ID NO: 436972 - DNA, 15 bp, Homo sapiens
ttccttcatctcctt

SEQ ID NO: 436973 - DNA, 15 bp, Homo sapiens
cttccttcatctcct

SEQ ID NO: 436974 - DNA, 15 bp, Homo sapiens
tcttccttcatctcc

SEQ ID NO: 436975 - DNA, 15 bp, Homo sapiens
ctcttccttcatctc

SEQ ID NO: 436976 - DNA, 15 bp, Homo sapiens
actcttccttcatct

SEQ ID NO: 436977 - DNA, 15 bp, Homo sapiens
cactcttccttcatc

SEQ ID NO: 436978 - DNA, 15 bp, Homo sapiens
ccactcttccttcat

SEQ ID NO: 436979 - DNA, 15 bp, Homo sapiens
gccactcttccttca

SEQ ID NO: 436980 - DNA, 15 bp, Homo sapiens
ggccactcttccttc

SEQ ID NO: 436981 - DNA, 15 bp, Homo sapiens
tggccactcttcctt

SEQ ID NO: 436982 - DNA, 15 bp, Homo sapiens
ctggccactcttcct

SEQ ID NO: 436983 - DNA, 15 bp, Homo sapiens
tctggccactcttcc

SEQ ID NO: 436984 - DNA, 15 bp, Homo sapiens
ctctggccactcttc

SEQ ID NO: 436985 - DNA, 15 bp, Homo sapiens
cctctggccactctt

SEQ ID NO: 436986 - DNA, 15 bp, Homo sapiens
ccctctggccactct

SEQ ID NO: 436987 - DNA, 15 bp, Homo sapiens
accctctggccactc

SEQ ID NO: 436988 - DNA, 15 bp, Homo sapiens
caccctctggccact

SEQ ID NO: 436989 - DNA, 15 bp, Homo sapiens
tcaccctctggccac

SEQ ID NO: 436990 - DNA, 15 bp, Homo sapiens
ttcaccctctggcca

SEQ ID NO: 436991 - DNA, 15 bp, Homo sapiens
tttcaccctctggcc

SEQ ID NO: 436992 - DNA, 15 bp, Homo sapiens
ctttcaccctctggc

SEQ ID NO: 436993 - DNA, 15 bp, Homo sapiens
cctttcaccctctgg

SEQ ID NO: 436994 - DNA, 15 bp, Homo sapiens
tcctttcaccctctg

SEQ ID NO: 436995 - DNA, 15 bp, Homo sapiens
ttcctttcaccctct

SEQ ID NO: 436996 - DNA, 15 bp, Homo sapiens
tttcctttcaccctc

SEQ ID NO: 436997 - DNA, 15 bp, Homo sapiens
ttttcctttcaccct

SEQ ID NO: 436998 - DNA, 15 bp, Homo sapiens
attttcctttcaccc

SEQ ID NO: 436999 - DNA, 15 bp, Homo sapiens
gattttcctttcacc

SEQ ID NO: 437000 - DNA, 15 bp, Homo sapiens
tgattttcctttcac

SEQ ID NO: 437001 - DNA, 15 bp, Homo sapiens
ttgattttcctttca

SEQ ID NO: 437002 - DNA, 15 bp, Homo sapiens
tttgattttcctttc

SEQ ID NO: 437003 - DNA, 15 bp, Homo sapiens
atttgattttccttt

SEQ ID NO: 437004 - DNA, 15 bp, Homo sapiens
tatttgattttcctt

SEQ ID NO: 437005 - DNA, 15 bp, Homo sapiens
ttatttgattttcct

SEQ ID NO: 437006 - DNA, 15 bp, Homo sapiens
cttatttgattttcc

SEQ ID NO: 437007 - DNA, 15 bp, Homo sapiens
tcttatttgattttc

SEQ ID NO: 437008 - DNA, 15 bp, Homo sapiens
ttcttatttgatttt

SEQ ID NO: 437009 - DNA, 15 bp, Homo sapiens
gttcttatttgattt

SEQ ID NO: 437010 - DNA, 15 bp, Homo sapiens
cgttcttatttgatt

SEQ ID NO: 437011 - DNA, 15 bp, Homo sapiens
acgttcttatttgat

SEQ ID NO: 437012 - DNA, 15 bp, Homo sapiens
gacgttcttatttga

SEQ ID NO: 437013 - DNA, 15 bp, Homo sapiens
agacgttcttatttg

SEQ ID NO: 437014 - DNA, 15 bp, Homo sapiens
aagacgttcttattt

SEQ ID NO: 437015 - DNA, 15 bp, Homo sapiens
taagacgttcttatt

SEQ ID NO: 437016 - DNA, 15 bp, Homo sapiens
ttaagacgttcttat

SEQ ID NO: 437017 - DNA, 15 bp, Homo sapiens
tttaagacgttctta

SEQ ID NO: 437018 - DNA, 15 bp, Homo sapiens
ttttaagacgttctt

SEQ ID NO: 437019 - DNA, 15 bp, Homo sapiens
cttttaagacgttct

SEQ ID NO: 437020 - DNA, 15 bp, Homo sapiens
ccttttaagacgttc

SEQ ID NO: 437021 - DNA, 15 bp, Homo sapiens
tccttttaagacgtt

SEQ ID NO: 437022 - DNA, 15 bp, Homo sapiens
ctccttttaagacgt

SEQ ID NO: 437023 - DNA, 15 bp, Homo sapiens
tctccttttaagacg

SEQ ID NO: 437024 - DNA, 15 bp, Homo sapiens
ctctccttttaagac

SEQ ID NO: 437025 - DNA, 15 bp, Homo sapiens
actctccttttaaga

SEQ ID NO: 437026 - DNA, 15 bp, Homo sapiens
tactctccttttaag

SEQ ID NO: 437027 - DNA, 15 bp, Homo sapiens
atactctccttttaa

SEQ ID NO: 437028 - DNA, 15 bp, Homo sapiens
aatactctcctttta

SEQ ID NO: 437029 - DNA, 15 bp, Homo sapiens
aaatactctcctttt

SEQ ID NO: 437030 - DNA, 15 bp, Homo sapiens
aaaatactctccttt

SEQ ID NO: 437031 - DNA, 15 bp, Homo sapiens
taaaatactctcctt

SEQ ID NO: 437032 - DNA, 15 bp, Homo sapiens
ttaaaatactctcct

SEQ ID NO: 437033 - DNA, 15 bp, Homo sapiens
cttaaaatactctcc

SEQ ID NO: 437034 - DNA, 15 bp, Homo sapiens
ccttaaaatactctc

SEQ ID NO: 437035 - DNA, 15 bp, Homo sapiens
tccttaaaatactct

SEQ ID NO: 437036 - DNA, 15 bp, Homo sapiens
ctccttaaaatactc

SEQ ID NO: 437037 - DNA, 15 bp, Homo sapiens
tctccttaaaatact

SEQ ID NO: 437038 - DNA, 15 bp, Homo sapiens
ttctccttaaaatac

SEQ ID NO: 437039 - DNA, 15 bp, Homo sapiens
cttctccttaaaata

SEQ ID NO: 437040 - DNA, 15 bp, Homo sapiens
tcttctccttaaaat

SEQ ID NO: 437041 - DNA, 15 bp, Homo sapiens
ttcttctccttaaaa

SEQ ID NO: 437042 - DNA, 15 bp, Homo sapiens
cttcttctccttaaa

SEQ ID NO: 437043 - DNA, 15 bp, Homo sapiens
acttcttctccttaa

SEQ ID NO: 437044 - DNA, 15 bp, Homo sapiens
aacttcttctcctta

SEQ ID NO: 437045 - DNA, 15 bp, Homo sapiens
taacttcttctcctt

SEQ ID NO: 437046 - DNA, 15 bp, Homo sapiens
ctaacttcttctcct

SEQ ID NO: 437047 - DNA, 15 bp, Homo sapiens
actaacttcttctcc

SEQ ID NO: 437048 - DNA, 15 bp, Homo sapiens
gactaacttcttctc

SEQ ID NO: 437049 - DNA, 15 bp, Homo sapiens
tgactaacttcttct

SEQ ID NO: 437050 - DNA, 15 bp, Homo sapiens
ttgactaacttcttc

SEQ ID NO: 437051 - DNA, 15 bp, Homo sapiens
cttgactaacttctt

SEQ ID NO: 437052 - DNA, 15 bp, Homo sapiens
tcttgactaacttct

SEQ ID NO: 437053 - DNA, 15 bp, Homo sapiens
ttcttgactaacttc

SEQ ID NO: 437054 - DNA, 15 bp, Homo sapiens
cttcttgactaactt

SEQ ID NO: 437055 - DNA, 15 bp, Homo sapiens
tcttcttgactaact

SEQ ID NO: 437056 - DNA, 15 bp, Homo sapiens
ttcttcttgactaac

SEQ ID NO: 437057 - DNA, 15 bp, Homo sapiens
cttcttcttgactaa

SEQ ID NO: 437058 - DNA, 15 bp, Homo sapiens
tcttcttcttgacta

SEQ ID NO: 437059 - DNA, 15 bp, Homo sapiens
atcttcttcttgact

SEQ ID NO: 437060 - DNA, 15 bp, Homo sapiens
tatcttcttcttgac

SEQ ID NO: 437061 - DNA, 15 bp, Homo sapiens
ttatcttcttcttga

SEQ ID NO: 437062 - DNA, 15 bp, Homo sapiens
attatcttcttcttg

SEQ ID NO: 437063 - DNA, 15 bp, Homo sapiens
aattatcttcttctt

SEQ ID NO: 437064 - DNA, 15 bp, Homo sapiens
aaattatcttcttct

SEQ ID NO: 437065 - DNA, 15 bp, Homo sapiens
taaattatcttcttc

SEQ ID NO: 437066 - DNA, 15 bp, Homo sapiens
ctaaattatcttctt

SEQ ID NO: 437067 - DNA, 15 bp, Homo sapiens
cctaaattatcttct

SEQ ID NO: 437068 - DNA, 15 bp, Homo sapiens
acctaaattatcttc

SEQ ID NO: 437069 - DNA, 15 bp, Homo sapiens
tacctaaattatctt

SEQ ID NO: 437070 - DNA, 15 bp, Homo sapiens
gtacctaaattatct

SEQ ID NO: 437071 - DNA, 15 bp, Homo sapiens
tgtacctaaattatc

SEQ ID NO: 437072 - DNA, 15 bp, Homo sapiens
ctgtacctaaattat

SEQ ID NO: 437073 - DNA, 15 bp, Homo sapiens
gctgtacctaaatta

SEQ ID NO: 437074 - DNA, 15 bp, Homo sapiens
ggctgtacctaaatt

SEQ ID NO: 437075 - DNA, 15 bp, Homo sapiens
aggctgtacctaaat

SEQ ID NO: 437076 - DNA, 15 bp, Homo sapiens
aaggctgtacctaaa

SEQ ID NO: 437077 - DNA, 15 bp, Homo sapiens
aaaggctgtacctaa

SEQ ID NO: 437078 - DNA, 15 bp, Homo sapiens
caaaggctgtaccta

SEQ ID NO: 437079 - DNA, 15 bp, Homo sapiens
tcaaaggctgtacct

SEQ ID NO: 437080 - DNA, 15 bp, Homo sapiens
atcaaaggctgtacc

SEQ ID NO: 437081 - DNA, 15 bp, Homo sapiens
tatcaaaggctgtac

SEQ ID NO: 437082 - DNA, 15 bp, Homo sapiens
ttatcaaaggctgta

SEQ ID NO: 437083 - DNA, 15 bp, Homo sapiens
cttatcaaaggctgt

SEQ ID NO: 437084 - DNA, 15 bp, Homo sapiens
acttatcaaaggctg

SEQ ID NO: 437085 - DNA, 15 bp, Homo sapiens
tacttatcaaaggct

SEQ ID NO: 437086 - DNA, 15 bp, Homo sapiens
gtacttatcaaaggc

SEQ ID NO: 437087 - DNA, 15 bp, Homo sapiens
tgtacttatcaaagg

SEQ ID NO: 437088 - DNA, 15 bp, Homo sapiens
ctgtacttatcaaag

SEQ ID NO: 437089 - DNA, 15 bp, Homo sapiens
tctgtacttatcaaa

SEQ ID NO: 437090 - DNA, 15 bp, Homo sapiens
gtctgtacttatcaa

SEQ ID NO: 437091 - DNA, 15 bp, Homo sapiens
agtctgtacttatca

SEQ ID NO: 437092 - DNA, 15 bp, Homo sapiens
tagtctgtacttatc

SEQ ID NO: 437093 - DNA, 15 bp, Homo sapiens
gtagtctgtacttat

SEQ ID NO: 437094 - DNA, 15 bp, Homo sapiens
agtagtctgtactta

SEQ ID NO: 437095 - DNA, 15 bp, Homo sapiens
gagtagtctgtactt

SEQ ID NO: 437096 - DNA, 15 bp, Homo sapiens
tgagtagtctgtact

SEQ ID NO: 437097 - DNA, 15 bp, Homo sapiens
atgagtagtctgtac

SEQ ID NO: 437098 - DNA, 15 bp, Homo sapiens
aatgagtagtctgta

SEQ ID NO: 437099 - DNA, 15 bp, Homo sapiens
gaatgagtagtctgt

SEQ ID NO: 437100 - DNA, 15 bp, Homo sapiens
tgaatgagtagtctg

SEQ ID NO: 437101 - DNA, 15 bp, Homo sapiens
ttgaatgagtagtct

SEQ ID NO: 437102 - DNA, 15 bp, Homo sapiens
cttgaatgagtagtc

SEQ ID NO: 437103 - DNA, 15 bp, Homo sapiens
tcttgaatgagtagt

SEQ ID NO: 437104 - DNA, 15 bp, Homo sapiens
ttcttgaatgagtag

SEQ ID NO: 437105 - DNA, 15 bp, Homo sapiens
cttcttgaatgagta

SEQ ID NO: 437106 - DNA, 15 bp, Homo sapiens
acttcttgaatgagt

SEQ ID NO: 437107 - DNA, 15 bp, Homo sapiens
aacttcttgaatgag

SEQ ID NO: 437108 - DNA, 15 bp, Homo sapiens
aaacttcttgaatga

SEQ ID NO: 437109 - DNA, 15 bp, Homo sapiens
caaacttcttgaatg

SEQ ID NO: 437110 - DNA, 15 bp, Homo sapiens
gcaaacttcttgaat

SEQ ID NO: 437111 - DNA, 15 bp, Homo sapiens
ggcaaacttcttgaa

SEQ ID NO: 437112 - DNA, 15 bp, Homo sapiens
tggcaaacttcttga

SEQ ID NO: 437113 - DNA, 15 bp, Homo sapiens
atggcaaacttcttg

SEQ ID NO: 437114 - DNA, 15 bp, Homo sapiens
catggcaaacttctt

SEQ ID NO: 437115 - DNA, 15 bp, Homo sapiens
ccatggcaaacttct

SEQ ID NO: 437116 - DNA, 15 bp, Homo sapiens
tccatggcaaacttc

SEQ ID NO: 437117 - DNA, 15 bp, Homo sapiens
gtccatggcaaactt

SEQ ID NO: 437118 - DNA, 15 bp, Homo sapiens
agtccatggcaaact

SEQ ID NO: 437119 - DNA, 15 bp, Homo sapiens
tagtccatggcaaac

SEQ ID NO: 437120 - DNA, 15 bp, Homo sapiens
gtagtccatggcaaa

SEQ ID NO: 437121 - DNA, 15 bp, Homo sapiens
tgtagtccatggcaa

SEQ ID NO: 437122 - DNA, 15 bp, Homo sapiens
atgtagtccatggca

SEQ ID NO: 437123 - DNA, 15 bp, Homo sapiens
gatgtagtccatggc

SEQ ID NO: 437124 - DNA, 15 bp, Homo sapiens
tgatgtagtccatgg

SEQ ID NO: 437125 - DNA, 15 bp, Homo sapiens
atgatgtagtccatg

SEQ ID NO: 437126 - DNA, 15 bp, Homo sapiens
tatgatgtagtccat

SEQ ID NO: 437127 - DNA, 15 bp, Homo sapiens
gtatgatgtagtcca

SEQ ID NO: 437128 - DNA, 15 bp, Homo sapiens
agtatgatgtagtcc

SEQ ID NO: 437129 - DNA, 15 bp, Homo sapiens
tagtatgatgtagtc

SEQ ID NO: 437130 - DNA, 15 bp, Homo sapiens
ttagtatgatgtagt

SEQ ID NO: 437131 - DNA, 15 bp, Homo sapiens
tttagtatgatgtag

SEQ ID NO: 437132 - DNA, 15 bp, Homo sapiens
atttagtatgatgta

SEQ ID NO: 437133 - DNA, 15 bp, Homo sapiens
tatttagtatgatgt

SEQ ID NO: 437134 - DNA, 15 bp, Homo sapiens
ctatttagtatgatg

SEQ ID NO: 437135 - DNA, 15 bp, Homo sapiens
gctatttagtatgat

SEQ ID NO: 437136 - DNA, 15 bp, Homo sapiens
tgctatttagtatga

SEQ ID NO: 437137 - DNA, 15 bp, Homo sapiens
ttgctatttagtatg

SEQ ID NO: 437138 - DNA, 15 bp, Homo sapiens
tttgctatttagtat

SEQ ID NO: 437139 - DNA, 15 bp, Homo sapiens
ctttgctatttagta

SEQ ID NO: 437140 - DNA, 15 bp, Homo sapiens
tttctttgctattta

SEQ ID NO: 437141 - DNA, 15 bp, Homo sapiens
ttttctttgctattt

SEQ ID NO: 437142 - DNA, 15 bp, Homo sapiens
gttttctttgctatt

SEQ ID NO: 437143 - DNA, 15 bp, Homo sapiens
tgttttctttgctat

SEQ ID NO: 437144 - DNA, 15 bp, Homo sapiens
gtgttttctttgcta

SEQ ID NO: 437145 - DNA, 15 bp, Homo sapiens
agtgttttctttgct

SEQ ID NO: 437146 - DNA, 15 bp, Homo sapiens
gagtgttttctttgc

SEQ ID NO: 437147 - DNA, 15 bp, Homo sapiens
tgagtgttttctttg

SEQ ID NO: 437148 - DNA, 15 bp, Homo sapiens
ttgagtgttttcttt

SEQ ID NO: 437149 - DNA, 15 bp, Homo sapiens
gttgagtgttttctt

SEQ ID NO: 437150 - DNA, 15 bp, Homo sapiens
tgttgagtgttttct

SEQ ID NO: 437151 - DNA, 15 bp, Homo sapiens
ctgttgagtgttttc

SEQ ID NO: 437152 - DNA, 15 bp, Homo sapiens
tctgttgagtgtttt

SEQ ID NO: 437153 - DNA, 15 bp, Homo sapiens
ctctgttgagtgttt

SEQ ID NO: 437154 - DNA, 15 bp, Homo sapiens
actctgttgagtgtt

SEQ ID NO: 437155 - DNA, 15 bp, Homo sapiens
cactctgttgagtgt

SEQ ID NO: 437156 - DNA, 15 bp, Homo sapiens
tcactctgttgagtg

SEQ ID NO: 437157 - DNA, 15 bp, Homo sapiens
ttcactctgttgagt

SEQ ID NO: 437158 - DNA, 15 bp, Homo sapiens
tttcactctgttgag

SEQ ID NO: 437159 - DNA, 15 bp, Homo sapiens
ttttcactctgttga

SEQ ID NO: 437160 - DNA, 15 bp, Homo sapiens
cttttcactctgttg

SEQ ID NO: 437161 - DNA, 15 bp, Homo sapiens
ccttttcactctgtt

SEQ ID NO: 437162 - DNA, 15 bp, Homo sapiens
gccttttcactctgt

SEQ ID NO: 437163 - DNA, 15 bp, Homo sapiens
tgccttttcactctg

SEQ ID NO: 437164 - DNA, 15 bp, Homo sapiens
ttgccttttcactct

SEQ ID NO: 437165 - DNA, 15 bp, Homo sapiens
gttgccttttcactc

SEQ ID NO: 437166 - DNA, 15 bp, Homo sapiens
ggttgccttttcact

SEQ ID NO: 437167 - DNA, 15 bp, Homo sapiens
aggttgccttttcac

SEQ ID NO: 437168 - DNA, 15 bp, Homo sapiens
taggttgccttttca

SEQ ID NO: 437169 - DNA, 15 bp, Homo sapiens
gtaggttgccttttc

SEQ ID NO: 437170 - DNA, 15 bp, Homo sapiens
tgtaggttgcctttt

SEQ ID NO: 437171 - DNA, 15 bp, Homo sapiens
ctgtaggttgccttt

SEQ ID NO: 437172 - DNA, 15 bp, Homo sapiens
tctgtaggttgcctt

SEQ ID NO: 437173 - DNA, 15 bp, Homo sapiens
ttctgtaggttgcct

SEQ ID NO: 437174 - DNA, 15 bp, Homo sapiens
attctgtaggttgcc

SEQ ID NO: 437175 - DNA, 15 bp, Homo sapiens
tattctgtaggttgc

SEQ ID NO: 437176 - DNA, 15 bp, Homo sapiens
ctattctgtaggttg

SEQ ID NO: 437177 - DNA, 15 bp, Homo sapiens
cctattctgtaggtt

SEQ ID NO: 437178 - DNA, 15 bp, Homo sapiens
tcctattctgtaggt

SEQ ID NO: 437179 - DNA, 15 bp, Homo sapiens
ctcctattctgtagg

SEQ ID NO: 437180 - DNA, 15 bp, Homo sapiens
tctcctattctgtag

SEQ ID NO: 437181 - DNA, 15 bp, Homo sapiens
ttctcctattctgta

SEQ ID NO: 437182 - DNA, 15 bp, Homo sapiens
cttctcctattctgt

SEQ ID NO: 437183 - DNA, 15 bp, Homo sapiens
tcttctcctattctg

SEQ ID NO: 437184 - DNA, 15 bp, Homo sapiens
atcttctcctattct

SEQ ID NO: 437185 - DNA, 15 bp, Homo sapiens
tatcttctcctattc

SEQ ID NO: 437186 - DNA, 15 bp, Homo sapiens
atatcttctcctatt

SEQ ID NO: 437187 - DNA, 15 bp, Homo sapiens
aatatcttctcctat

SEQ ID NO: 437188 - DNA, 15 bp, Homo sapiens
aaatatcttctccta

SEQ ID NO: 437189 - DNA, 15 bp, Homo sapiens
caaatatcttctcct

SEQ ID NO: 437190 - DNA, 15 bp, Homo sapiens
gcaaatatcttctcc

SEQ ID NO: 437191 - DNA, 15 bp, Homo sapiens
tgcaaatatcttctc

SEQ ID NO: 437192 - DNA, 15 bp, Homo sapiens
ttgcaaatatcttct

SEQ ID NO: 437193 - DNA, 15 bp, Homo sapiens
tttgcaaatatcttc

SEQ ID NO: 437194 - DNA, 15 bp, Homo sapiens
gtttgcaaatatctt

SEQ ID NO: 437195 - DNA, 15 bp, Homo sapiens
agtttgcaaatatct

SEQ ID NO: 437196 - DNA, 15 bp, Homo sapiens
tagtttgcaaatatc

SEQ ID NO: 437197 - DNA, 15 bp, Homo sapiens
atagtttgcaaatat

SEQ ID NO: 437198 - DNA, 15 bp, Homo sapiens
tatagtttgcaaata

SEQ ID NO: 437199 - DNA, 15 bp, Homo sapiens
atatagtttgcaaat

SEQ ID NO: 437200 - DNA, 15 bp, Homo sapiens
tatatagtttgcaaa

SEQ ID NO: 437201 - DNA, 15 bp, Homo sapiens
atatatagtttgcaa

SEQ ID NO: 437202 - DNA, 15 bp, Homo sapiens
gatatatagtttgca

SEQ ID NO: 437203 - DNA, 15 bp, Homo sapiens
agatatatagtttgc

SEQ ID NO: 437204 - DNA, 15 bp, Homo sapiens
cagatatatagtttg

SEQ ID NO: 437205 - DNA, 15 bp, Homo sapiens
gcagatatatagttt

SEQ ID NO: 437206 - DNA, 15 bp, Homo sapiens
agcagatatatagtt

SEQ ID NO: 437207 - DNA, 15 bp, Homo sapiens
tagcagatatatagt

SEQ ID NO: 437208 - DNA, 15 bp, Homo sapiens
ttagcagatatatag

SEQ ID NO: 437209 - DNA, 15 bp, Homo sapiens
tttagcagatatata

SEQ ID NO: 437210 - DNA, 15 bp, Homo sapiens
ctttagcagatatat

SEQ ID NO: 437211 - DNA, 15 bp, Homo sapiens
tctttagcagatata

SEQ ID NO: 437212 - DNA, 15 bp, Homo sapiens
ctctttagcagatat

SEQ ID NO: 437213 - DNA, 15 bp, Homo sapiens
actctttagcagata

SEQ ID NO: 437214 - DNA, 15 bp, Homo sapiens
aactctttagcagat

SEQ ID NO: 437215 - DNA, 15 bp, Homo sapiens
taactctttagcaga

SEQ ID NO: 437216 - DNA, 15 bp, Homo sapiens
ttaactctttagcag

SEQ ID NO: 437217 - DNA, 15 bp, Homo sapiens
attaactctttagca

SEQ ID NO: 437218 - DNA, 15 bp, Homo sapiens
gattaactctttagc

SEQ ID NO: 437219 - DNA, 15 bp, Homo sapiens
ggattaactctttag

SEQ ID NO: 437220 - DNA, 15 bp, Homo sapiens
gggattaactcttta

SEQ ID NO: 437221 - DNA, 15 bp, Homo sapiens
ggggattaactcttt

SEQ ID NO: 437222 - DNA, 15 bp, Homo sapiens
aggggattaactctt

SEQ ID NO: 437223 - DNA, 15 bp, Homo sapiens
caggggattaactct

SEQ ID NO: 437224 - DNA, 15 bp, Homo sapiens
tcaggggattaactc

SEQ ID NO: 437225 - DNA, 15 bp, Homo sapiens
ttcaggggattaact

SEQ ID NO: 437226 - DNA, 15 bp, Homo sapiens
attcaggggattaac

SEQ ID NO: 437227 - DNA, 15 bp, Homo sapiens
tattcaggggattaa

SEQ ID NO: 437228 - DNA, 15 bp, Homo sapiens
gtattcaggggatta

SEQ ID NO: 437229 - DNA, 15 bp, Homo sapiens
tgtattcaggggatt

SEQ ID NO: 437230 - DNA, 15 bp, Homo sapiens
atgtattcaggggat

SEQ ID NO: 437231 - DNA, 15 bp, Homo sapiens
tatgtattcagggga

SEQ ID NO: 437232 - DNA, 15 bp, Homo sapiens
ttatgtattcagggg

SEQ ID NO: 437233 - DNA, 15 bp, Homo sapiens
cttatgtattcaggg

SEQ ID NO: 437234 - DNA, 15 bp, Homo sapiens
ccttatgtattcagg

SEQ ID NO: 437235 - DNA, 15 bp, Homo sapiens
tccttatgtattcag

SEQ ID NO: 437236 - DNA, 15 bp, Homo sapiens
ttccttatgtattca

SEQ ID NO: 437237 - DNA, 15 bp, Homo sapiens
gttccttatgtattc

SEQ ID NO: 437238 - DNA, 15 bp, Homo sapiens
agttccttatgtatt

SEQ ID NO: 437239 - DNA, 15 bp, Homo sapiens
gagttccttatgtat

SEQ ID NO: 437240 - DNA, 15 bp, Homo sapiens
ggagttccttatgta

SEQ ID NO: 437241 - DNA, 15 bp, Homo sapiens
aggagttccttatgt

SEQ ID NO: 437242 - DNA, 15 bp, Homo sapiens
taggagttccttatg

SEQ ID NO: 437243 - DNA, 15 bp, Homo sapiens
gtaggagttccttat

SEQ ID NO: 437244 - DNA, 15 bp, Homo sapiens
tgtaggagttcctta

SEQ ID NO: 437245 - DNA, 15 bp, Homo sapiens
ttgtaggagttcctt

SEQ ID NO: 437246 - DNA, 15 bp, Homo sapiens
gttgtaggagttcct

SEQ ID NO: 437247 - DNA, 15 bp, Homo sapiens
agttgtaggagttcc

SEQ ID NO: 437248 - DNA, 15 bp, Homo sapiens
gagttgtaggagttc

SEQ ID NO: 437249 - DNA, 15 bp, Homo sapiens
tgagttgtaggagtt

SEQ ID NO: 437250 - DNA, 15 bp, Homo sapiens
ttgagttgtaggagt

SEQ ID NO: 437251 - DNA, 15 bp, Homo sapiens
attgagttgtaggag

SEQ ID NO: 437252 - DNA, 15 bp, Homo sapiens
tattgagttgtagga

SEQ ID NO: 437253 - DNA, 15 bp, Homo sapiens
ctattgagttgtagg

SEQ ID NO: 437254 - DNA, 15 bp, Homo sapiens
actattgagttgtag

SEQ ID NO: 437255 - DNA, 15 bp, Homo sapiens
tactattgagttgta

SEQ ID NO: 437256 - DNA, 15 bp, Homo sapiens
ttactattgagttgt

SEQ ID NO: 437257 - DNA, 15 bp, Homo sapiens
tttactattgagttg

SEQ ID NO: 437258 - DNA, 15 bp, Homo sapiens
ttttactattgagtt

SEQ ID NO: 437259 - DNA, 15 bp, Homo sapiens
cttttactattgagt

SEQ ID NO: 437260 - DNA, 15 bp, Homo sapiens
tcttttactattgag

SEQ ID NO: 437261 - DNA, 15 bp, Homo sapiens
ttcttttactattga

SEQ ID NO: 437262 - DNA, 15 bp, Homo sapiens
tttcttttactattg

SEQ ID NO: 437263 - DNA, 15 bp, Homo sapiens
gtttcttttactatt

SEQ ID NO: 437264 - DNA, 15 bp, Homo sapiens
agtttcttttactat

SEQ ID NO: 437265 - DNA, 15 bp, Homo sapiens
tagtttcttttacta

SEQ ID NO: 437266 - DNA, 15 bp, Homo sapiens
ttagtttcttttact

SEQ ID NO: 437267 - DNA, 15 bp, Homo sapiens
attagtttcttttac

SEQ ID NO: 437268 - DNA, 15 bp, Homo sapiens
tattagtttctttta

SEQ ID NO: 437269 - DNA, 15 bp, Homo sapiens
ttattagtttctttt

SEQ ID NO: 437270 - DNA, 15 bp, Homo sapiens
attattagtttcttt

SEQ ID NO: 437271 - DNA, 15 bp, Homo sapiens
gattattagtttctt

SEQ ID NO: 437272 - DNA, 15 bp, Homo sapiens
agattattagtttct

SEQ ID NO: 437273 - DNA, 15 bp, Homo sapiens
cagattattagtttc

SEQ ID NO: 437274 - DNA, 15 bp, Homo sapiens
tcagattattagttt

SEQ ID NO: 437275 - DNA, 15 bp, Homo sapiens
atcagattattagtt

SEQ ID NO: 437276 - DNA, 15 bp, Homo sapiens
aatcagattattagt

SEQ ID NO: 437277 - DNA, 15 bp, Homo sapiens
aaatcagattattag

SEQ ID NO: 437278 - DNA, 15 bp, Homo sapiens
taaatcagattatta

SEQ ID NO: 437279 - DNA, 15 bp, Homo sapiens
ttaaatcagattatt

SEQ ID NO: 437280 - DNA, 15 bp, Homo sapiens
tttaaatcagattat

SEQ ID NO: 437281 - DNA, 15 bp, Homo sapiens
ttttaaatcagatta

SEQ ID NO: 437282 - DNA, 15 bp, Homo sapiens
tttttaaatcagatt

SEQ ID NO: 437283 - DNA, 15 bp, Homo sapiens
ttttttaaatcagat

SEQ ID NO: 437284 - DNA, 15 bp, Homo sapiens
tttttttaaatcaga

SEQ ID NO: 437285 - DNA, 15 bp, Homo sapiens
ctttttttaaatcag

SEQ ID NO: 437286 - DNA, 15 bp, Homo sapiens
cctttttttaaatca

SEQ ID NO: 437287 - DNA, 15 bp, Homo sapiens
gcctttttttaaatc

SEQ ID NO: 437288 - DNA, 15 bp, Homo sapiens
agcctttttttaaat

SEQ ID NO: 437289 - DNA, 15 bp, Homo sapiens
tagcctttttttaaa

SEQ ID NO: 437290 - DNA, 15 bp, Homo sapiens
ttagcctttttttaa

SEQ ID NO: 437291 - DNA, 15 bp, Homo sapiens
cttagccttttttta

SEQ ID NO: 437292 - DNA, 15 bp, Homo sapiens
ccttagccttttttt

SEQ ID NO: 437293 - DNA, 15 bp, Homo sapiens
cccttagcctttttt

SEQ ID NO: 437294 - DNA, 15 bp, Homo sapiens
gcccttagccttttt

SEQ ID NO: 437295 - DNA, 15 bp, Homo sapiens
agcccttagcctttt

SEQ ID NO: 437296 - DNA, 15 bp, Homo sapiens
aagcccttagccttt

SEQ ID NO: 437297 - DNA, 15 bp, Homo sapiens
taagcccttagcctt

SEQ ID NO: 437298 - DNA, 15 bp, Homo sapiens
ttaagcccttagcct

SEQ ID NO: 437299 - DNA, 15 bp, Homo sapiens
tttaagcccttagcc

SEQ ID NO: 437300 - DNA, 15 bp, Homo sapiens
atttaagcccttagc

SEQ ID NO: 437301 - DNA, 15 bp, Homo sapiens
tatttaagcccttag

SEQ ID NO: 437302 - DNA, 15 bp, Homo sapiens
ctatttaagccctta

SEQ ID NO: 437303 - DNA, 15 bp, Homo sapiens
tctatttaagccctt

SEQ ID NO: 437304 - DNA, 15 bp, Homo sapiens
atctatttaagccct

SEQ ID NO: 437305 - DNA, 15 bp, Homo sapiens
tatctatttaagccc

SEQ ID NO: 437306 - DNA, 15 bp, Homo sapiens
atatctatttaagcc

SEQ ID NO: 437307 - DNA, 15 bp, Homo sapiens
aatatctatttaagc

SEQ ID NO: 437308 - DNA, 15 bp, Homo sapiens
aaatatctatttaag

SEQ ID NO: 437309 - DNA, 15 bp, Homo sapiens
gaaatatctatttaa

SEQ ID NO: 437310 - DNA, 15 bp, Homo sapiens
agaaatatctattta

SEQ ID NO: 437311 - DNA, 15 bp, Homo sapiens
gagaaatatctattt

SEQ ID NO: 437312 - DNA, 15 bp, Homo sapiens
tgagaaatatctatt

SEQ ID NO: 437313 - DNA, 15 bp, Homo sapiens
ttgagaaatatctat

SEQ ID NO: 437314 - DNA, 15 bp, Homo sapiens
tttgagaaatatcta

SEQ ID NO: 437315 - DNA, 15 bp, Homo sapiens
ttttgagaaatatct

SEQ ID NO: 437316 - DNA, 15 bp, Homo sapiens
tttttgagaaatatc

SEQ ID NO: 437317 - DNA, 15 bp, Homo sapiens
atttttgagaaatat

SEQ ID NO: 437318 - DNA, 15 bp, Homo sapiens
tatttttgagaaata

SEQ ID NO: 437319 - DNA, 15 bp, Homo sapiens
ctatttttgagaaat

SEQ ID NO: 437320 - DNA, 15 bp, Homo sapiens
tctatttttgagaaa

SEQ ID NO: 437321 - DNA, 15 bp, Homo sapiens
gtctatttttgagaa

SEQ ID NO: 437322 - DNA, 15 bp, Homo sapiens
tgtctatttttgaga

SEQ ID NO: 437323 - DNA, 15 bp, Homo sapiens
atgtctatttttgag

SEQ ID NO: 437324 - DNA, 15 bp, Homo sapiens
gatgtctatttttga

SEQ ID NO: 437325 - DNA, 15 bp, Homo sapiens
agatgtctatttttg

SEQ ID NO: 437326 - DNA, 15 bp, Homo sapiens
tagatgtctattttt

SEQ ID NO: 437327 - DNA, 15 bp, Homo sapiens
ttagatgtctatttt

SEQ ID NO: 437328 - DNA, 15 bp, Homo sapiens
tttagatgtctattt

SEQ ID NO: 437329 - DNA, 15 bp, Homo sapiens
atttagatgtctatt

SEQ ID NO: 437330 - DNA, 15 bp, Homo sapiens
catttagatgtctat

SEQ ID NO: 437331 - DNA, 15 bp, Homo sapiens
ccatttagatgtcta

SEQ ID NO: 437332 - DNA, 15 bp, Homo sapiens
gccatttagatgtct

SEQ ID NO: 437333 - DNA, 15 bp, Homo sapiens
agccatttagatgtc

SEQ ID NO: 437334 - DNA, 15 bp, Homo sapiens
cagccatttagatgt

SEQ ID NO: 437335 - DNA, 15 bp, Homo sapiens
tcagccatttagatg

SEQ ID NO: 437336 - DNA, 15 bp, Homo sapiens
gtcagccatttagat

SEQ ID NO: 437337 - DNA, 15 bp, Homo sapiens
tgtcagccatttaga

SEQ ID NO: 437338 - DNA, 15 bp, Homo sapiens
ctgtcagccatttag

SEQ ID NO: 437339 - DNA, 15 bp, Homo sapiens
cctgtcagccattta

SEQ ID NO: 437340 - DNA, 15 bp, Homo sapiens
acctgtcagccattt

SEQ ID NO: 437341 - DNA, 15 bp, Homo sapiens
tacctgtcagccatt

SEQ ID NO: 437342 - DNA, 15 bp, Homo sapiens
atacctgtcagccat

SEQ ID NO: 437343 - DNA, 15 bp, Homo sapiens
tatacctgtcagcca

SEQ ID NO: 437344 - DNA, 15 bp, Homo sapiens
atatacctgtcagcc

SEQ ID NO: 437345 - DNA, 15 bp, Homo sapiens
catatacctgtcagc

SEQ ID NO: 437346 - DNA, 15 bp, Homo sapiens
tcatatacctgtcag

SEQ ID NO: 437347 - DNA, 15 bp, Homo sapiens
ttcatatacctgtca

SEQ ID NO: 437348 - DNA, 15 bp, Homo sapiens
tttcatatacctgtc

SEQ ID NO: 437349 - DNA, 15 bp, Homo sapiens
gtttcatatacctgt

SEQ ID NO: 437350 - DNA, 15 bp, Homo sapiens
tgtttcatatacctg

SEQ ID NO: 437351 - DNA, 15 bp, Homo sapiens
atgtttcatatacct

SEQ ID NO: 437352 - DNA, 15 bp, Homo sapiens
aatgtttcatatacc

SEQ ID NO: 437353 - DNA, 15 bp, Homo sapiens
caatgtttcatatac

SEQ ID NO: 437354 - DNA, 15 bp, Homo sapiens
gcaatgtttcatata

SEQ ID NO: 437355 - DNA, 15 bp, Homo sapiens
agcaatgtttcatat

SEQ ID NO: 437356 - DNA, 15 bp, Homo sapiens
cagcaatgtttcata

SEQ ID NO: 437357 - DNA, 15 bp, Homo sapiens
tcagcaatgtttcat

SEQ ID NO: 437358 - DNA, 15 bp, Homo sapiens
ttcagcaatgtttca

SEQ ID NO: 437359 - DNA, 15 bp, Homo sapiens
gttcagcaatgtttc

SEQ ID NO: 437360 - DNA, 15 bp, Homo sapiens
ggttcagcaatgttt

SEQ ID NO: 437361 - DNA, 15 bp, Homo sapiens
aggttcagcaatgtt

SEQ ID NO: 437362 - DNA, 15 bp, Homo sapiens
gaggttcagcaatgt

SEQ ID NO: 437363 - DNA, 15 bp, Homo sapiens
tgaggttcagcaatg

SEQ ID NO: 437364 - DNA, 15 bp, Homo sapiens
gtgaggttcagcaat

SEQ ID NO: 437365 - DNA, 15 bp, Homo sapiens
agtgaggttcagcaa

SEQ ID NO: 437366 - DNA, 15 bp, Homo sapiens
tagtgaggttcagca

SEQ ID NO: 437367 - DNA, 15 bp, Homo sapiens
ttagtgaggttcagc

SEQ ID NO: 437368 - DNA, 15 bp, Homo sapiens
attagtgaggttcag

SEQ ID NO: 437369 - DNA, 15 bp, Homo sapiens
gattagtgaggttca

SEQ ID NO: 437370 - DNA, 15 bp, Homo sapiens
tgattagtgaggttc

SEQ ID NO: 437371 - DNA, 15 bp, Homo sapiens
atgattagtgaggtt

SEQ ID NO: 437372 - DNA, 15 bp, Homo sapiens
gatgattagtgaggt

SEQ ID NO: 437373 - DNA, 15 bp, Homo sapiens
tgatgattagtgagg

SEQ ID NO: 437374 - DNA, 15 bp, Homo sapiens
ctgatgattagtgag

SEQ ID NO: 437375 - DNA, 15 bp, Homo sapiens
tctgatgattagtga

SEQ ID NO: 437376 - DNA, 15 bp, Homo sapiens
ctctgatgattagtg

SEQ ID NO: 437377 - DNA, 15 bp, Homo sapiens
tctctgatgattagt

SEQ ID NO: 437378 - DNA, 15 bp, Homo sapiens
ttctctgatgattag

SEQ ID NO: 437379 - DNA, 15 bp, Homo sapiens
tttctctgatgatta

SEQ ID NO: 437380 - DNA, 15 bp, Homo sapiens
atttctctgatgatt

SEQ ID NO: 437381 - DNA, 15 bp, Homo sapiens
catttctctgatgat

SEQ ID NO: 437382 - DNA, 15 bp, Homo sapiens
gcatttctctgatga

SEQ ID NO: 437383 - DNA, 15 bp, Homo sapiens
tgcatttctctgatg

SEQ ID NO: 437384 - DNA, 15 bp, Homo sapiens
ttgcatttctctgat

SEQ ID NO: 437385 - DNA, 15 bp, Homo sapiens
tttgcatttctctga

SEQ ID NO: 437386 - DNA, 15 bp, Homo sapiens
atttgcatttctctg

SEQ ID NO: 437387 - DNA, 15 bp, Homo sapiens
ctttgatttgcattt

SEQ ID NO: 437388 - DNA, 15 bp, Homo sapiens
gctttgatttgcatt

SEQ ID NO: 437389 - DNA, 15 bp, Homo sapiens
ggctttgatttgcat

SEQ ID NO: 437390 - DNA, 15 bp, Homo sapiens
tggctttgatttgca

SEQ ID NO: 437391 - DNA, 15 bp, Homo sapiens
gtggctttgatttgc

SEQ ID NO: 437392 - DNA, 15 bp, Homo sapiens
tgtggctttgatttg

SEQ ID NO: 437393 - DNA, 15 bp, Homo sapiens
ttgtggctttgattt

SEQ ID NO: 437394 - DNA, 15 bp, Homo sapiens
attgtggctttgatt

SEQ ID NO: 437395 - DNA, 15 bp, Homo sapiens
cattgtggctttgat

SEQ ID NO: 437396 - DNA, 15 bp, Homo sapiens
acattgtggctttga

SEQ ID NO: 437397 - DNA, 15 bp, Homo sapiens
tacattgtggctttg

SEQ ID NO: 437398 - DNA, 15 bp, Homo sapiens
ttacattgtggcttt

SEQ ID NO: 437399 - DNA, 15 bp, Homo sapiens
attacattgtggctt

SEQ ID NO: 437400 - DNA, 15 bp, Homo sapiens
cattacattgtggct

SEQ ID NO: 437401 - DNA, 15 bp, Homo sapiens
acattacattgtggc

SEQ ID NO: 437402 - DNA, 15 bp, Homo sapiens
gacattacattgtgg

SEQ ID NO: 437403 - DNA, 15 bp, Homo sapiens
tgacattacattgtg

SEQ ID NO: 437404 - DNA, 15 bp, Homo sapiens
gtgacattacattgt

SEQ ID NO: 437405 - DNA, 15 bp, Homo sapiens
ggtgacattacattg

SEQ ID NO: 437406 - DNA, 15 bp, Homo sapiens
aggtgacattacatt

SEQ ID NO: 437407 - DNA, 15 bp, Homo sapiens
gaggtgacattacat

SEQ ID NO: 437408 - DNA, 15 bp, Homo sapiens
tgaggtgacattaca

SEQ ID NO: 437409 - DNA, 15 bp, Homo sapiens
gtgaggtgacattac

SEQ ID NO: 437410 - DNA, 15 bp, Homo sapiens
cgtgaggtgacatta

SEQ ID NO: 437411 - DNA, 15 bp, Homo sapiens
gcgtgaggtgacatt

SEQ ID NO: 437412 - DNA, 15 bp, Homo sapiens
ggcgtgaggtgacat

SEQ ID NO: 437413 - DNA, 15 bp, Homo sapiens
aggcgtgaggtgaca

SEQ ID NO: 437414 - DNA, 15 bp, Homo sapiens
gaggcgtgaggtgac

SEQ ID NO: 437415 - DNA, 15 bp, Homo sapiens
agaggcgtgaggtga

SEQ ID NO: 437416 - DNA, 15 bp, Homo sapiens
gagaggcgtgaggtg

SEQ ID NO: 437417 - DNA, 15 bp, Homo sapiens
tgagaggcgtgaggt

SEQ ID NO: 437418 - DNA, 15 bp, Homo sapiens
ctgagaggcgtgagg

SEQ ID NO: 437419 - DNA, 15 bp, Homo sapiens
tctgagaggcgtgag

SEQ ID NO: 437420 - DNA, 15 bp, Homo sapiens
ttctgagaggcgtga

SEQ ID NO: 437421 - DNA, 15 bp, Homo sapiens
attctgagaggcgtg

SEQ ID NO: 437422 - DNA, 15 bp, Homo sapiens
cattctgagaggcgt

SEQ ID NO: 437423 - DNA, 15 bp, Homo sapiens
tcattctgagaggcg

SEQ ID NO: 437424 - DNA, 15 bp, Homo sapiens
gtcattctgagaggc

SEQ ID NO: 437425 - DNA, 15 bp, Homo sapiens
agtcattctgagagg

SEQ ID NO: 437426 - DNA, 15 bp, Homo sapiens
tagtcattctgagag

SEQ ID NO: 437427 - DNA, 15 bp, Homo sapiens
atagtcattctgaga

SEQ ID NO: 437428 - DNA, 15 bp, Homo sapiens
aatagtcattctgag

SEQ ID NO: 437429 - DNA, 15 bp, Homo sapiens
taatagtcattctga

SEQ ID NO: 437430 - DNA, 15 bp, Homo sapiens
ttaatagtcattctg

SEQ ID NO: 437431 - DNA, 15 bp, Homo sapiens
gttaatagtcattct

SEQ ID NO: 437432 - DNA, 15 bp, Homo sapiens
tgttaatagtcattc

SEQ ID NO: 437433 - DNA, 15 bp, Homo sapiens
ttgttaatagtcatt

SEQ ID NO: 437434 - DNA, 15 bp, Homo sapiens
tttgttaatagtcat

SEQ ID NO: 437435 - DNA, 15 bp, Homo sapiens
ttttgttaatagtca

SEQ ID NO: 437436 - DNA, 15 bp, Homo sapiens
tttttgttaatagtc

SEQ ID NO: 437437 - DNA, 15 bp, Homo sapiens
ttttttgttaatagt

SEQ ID NO: 437438 - DNA, 15 bp, Homo sapiens
tttttttgttaatag

SEQ ID NO: 437439 - DNA, 15 bp, Homo sapiens
gtttttttgttaata

SEQ ID NO: 437440 - DNA, 15 bp, Homo sapiens
tgtttttttgttaat

SEQ ID NO: 437441 - DNA, 15 bp, Homo sapiens
ttgtttttttgttaa

SEQ ID NO: 437442 - DNA, 15 bp, Homo sapiens
tttgtttttttgtta

SEQ ID NO: 437443 - DNA, 15 bp, Homo sapiens
ttttgtttttttgtt

SEQ ID NO: 437444 - DNA, 15 bp, Homo sapiens
cttttgtttttttgt

SEQ ID NO: 437445 - DNA, 15 bp, Homo sapiens
tcttttgtttttttg

SEQ ID NO: 437446 - DNA, 15 bp, Homo sapiens
gtcttttgttttttt

SEQ ID NO: 437447 - DNA, 15 bp, Homo sapiens
tgtcttttgtttttt

SEQ ID NO: 437448 - DNA, 15 bp, Homo sapiens
ctgtcttttgttttt

SEQ ID NO: 437449 - DNA, 15 bp, Homo sapiens
cctgtcttttgtttt

SEQ ID NO: 437450 - DNA, 15 bp, Homo sapiens
acctgtcttttgttt

SEQ ID NO: 437451 - DNA, 15 bp, Homo sapiens
tacctgtcttttgtt

SEQ ID NO: 437452 - DNA, 15 bp, Homo sapiens
atacctgtcttttgt

SEQ ID NO: 437453 - DNA, 15 bp, Homo sapiens
aatacctgtcttttg

SEQ ID NO: 437454 - DNA, 15 bp, Homo sapiens
caatacctgtctttt

SEQ ID NO: 437455 - DNA, 15 bp, Homo sapiens
ccaatacctgtcttt

SEQ ID NO: 437456 - DNA, 15 bp, Homo sapiens
accaatacctgtctt

SEQ ID NO: 437457 - DNA, 15 bp, Homo sapiens
caccaatacctgtct

SEQ ID NO: 437458 - DNA, 15 bp, Homo sapiens
tcaccaatacctgtc

SEQ ID NO: 437459 - DNA, 15 bp, Homo sapiens
ctcaccaatacctgt

SEQ ID NO: 437460 - DNA, 15 bp, Homo sapiens
cctcaccaatacctg

SEQ ID NO: 437461 - DNA, 15 bp, Homo sapiens
tcctcaccaatacct

SEQ ID NO: 437462 - DNA, 15 bp, Homo sapiens
atcctcaccaatacc

SEQ ID NO: 437463 - DNA, 15 bp, Homo sapiens
tatcctcaccaatac

SEQ ID NO: 437464 - DNA, 15 bp, Homo sapiens
gtatcctcaccaata

SEQ ID NO: 437465 - DNA, 15 bp, Homo sapiens
cgtatcctcaccaat

SEQ ID NO: 437466 - DNA, 15 bp, Homo sapiens
ccgtatcctcaccaa

SEQ ID NO: 437467 - DNA, 15 bp, Homo sapiens
tccgtatcctcacca

SEQ ID NO: 437468 - DNA, 15 bp, Homo sapiens
gtccgtatcctcacc

SEQ ID NO: 437469 - DNA, 15 bp, Homo sapiens
tgtccgtatcctcac

SEQ ID NO: 437470 - DNA, 15 bp, Homo sapiens
ttgtccgtatcctca

SEQ ID NO: 437471 - DNA, 15 bp, Homo sapiens
tttgtccgtatcctc

SEQ ID NO: 437472 - DNA, 15 bp, Homo sapiens
atttgtccgtatcct

SEQ ID NO: 437473 - DNA, 15 bp, Homo sapiens
aatttgtccgtatcc

SEQ ID NO: 437474 - DNA, 15 bp, Homo sapiens
caatttgtccgtatc

SEQ ID NO: 437475 - DNA, 15 bp, Homo sapiens
ccaatttgtccgtat

SEQ ID NO: 437476 - DNA, 15 bp, Homo sapiens
tccaatttgtccgta

SEQ ID NO: 437477 - DNA, 15 bp, Homo sapiens
ttccaatttgtccgt

SEQ ID NO: 437478 - DNA, 15 bp, Homo sapiens
gttccaatttgtccg

SEQ ID NO: 437479 - DNA, 15 bp, Homo sapiens
ggttccaatttgtcc

SEQ ID NO: 437480 - DNA, 15 bp, Homo sapiens
gggttccaatttgtc

SEQ ID NO: 437481 - DNA, 15 bp, Homo sapiens
agggttccaatttgt

SEQ ID NO: 437482 - DNA, 15 bp, Homo sapiens
aagggttccaatttg

SEQ ID NO: 437483 - DNA, 15 bp, Homo sapiens
caagggttccaattt

SEQ ID NO: 437484 - DNA, 15 bp, Homo sapiens
gcaagggttccaatt

SEQ ID NO: 437485 - DNA, 15 bp, Homo sapiens
tgcaagggttccaat

SEQ ID NO: 437486 - DNA, 15 bp, Homo sapiens
atgcaagggttccaa

SEQ ID NO: 437487 - DNA, 15 bp, Homo sapiens
tatgcaagggttcca

SEQ ID NO: 437488 - DNA, 15 bp, Homo sapiens
gtatgcaagggttcc

SEQ ID NO: 437489 - DNA, 15 bp, Homo sapiens
ggtatgcaagggttc

SEQ ID NO: 437490 - DNA, 15 bp, Homo sapiens
cggtatgcaagggtt

SEQ ID NO: 437491 - DNA, 15 bp, Homo sapiens
acggtatgcaagggt

SEQ ID NO: 437492 - DNA, 15 bp, Homo sapiens
aacggtatgcaaggg

SEQ ID NO: 437493 - DNA, 15 bp, Homo sapiens
caacggtatgcaagg

SEQ ID NO: 437494 - DNA, 15 bp, Homo sapiens
ccaacggtatgcaag

SEQ ID NO: 437495 - DNA, 15 bp, Homo sapiens
accaacggtatgcaa

SEQ ID NO: 437496 - DNA, 15 bp, Homo sapiens
caccaacggtatgca

SEQ ID NO: 437497 - DNA, 15 bp, Homo sapiens
ccaccaacggtatgc

SEQ ID NO: 437498 - DNA, 15 bp, Homo sapiens
cccaccaacggtatg

SEQ ID NO: 437499 - DNA, 15 bp, Homo sapiens
tcccaccaacggtat

SEQ ID NO: 437500 - DNA, 15 bp, Homo sapiens
ttcccaccaacggta

SEQ ID NO: 437501 - DNA, 15 bp, Homo sapiens
attcccaccaacggt

SEQ ID NO: 437502 - DNA, 15 bp, Homo sapiens
cattcccaccaacgg

SEQ ID NO: 437503 - DNA, 15 bp, Homo sapiens
gcattcccaccaacg

SEQ ID NO: 437504 - DNA, 15 bp, Homo sapiens
tgcattcccaccaac

SEQ ID NO: 437505 - DNA, 15 bp, Homo sapiens
ttgcattcccaccaa

SEQ ID NO: 437506 - DNA, 15 bp, Homo sapiens
tttgcattcccacca

SEQ ID NO: 437507 - DNA, 15 bp, Homo sapiens
ttttgcattcccacc

SEQ ID NO: 437508 - DNA, 15 bp, Homo sapiens
cttttgcattcccac

SEQ ID NO: 437509 - DNA, 15 bp, Homo sapiens
ccttttgcattccca

SEQ ID NO: 437510 - DNA, 15 bp, Homo sapiens
tccttttgcattccc

SEQ ID NO: 437511 - DNA, 15 bp, Homo sapiens
atccttttgcattcc

SEQ ID NO: 437512 - DNA, 15 bp, Homo sapiens
catccttttgcattc

SEQ ID NO: 437513 - DNA, 15 bp, Homo sapiens
gcatccttttgcatt

SEQ ID NO: 437514 - DNA, 15 bp, Homo sapiens
tgcatccttttgcat

SEQ ID NO: 437515 - DNA, 15 bp, Homo sapiens
ctgcatccttttgca

SEQ ID NO: 437516 - DNA, 15 bp, Homo sapiens
gctgcatccttttgc

SEQ ID NO: 437517 - DNA, 15 bp, Homo sapiens
agctgcatccttttg

SEQ ID NO: 437518 - DNA, 15 bp, Homo sapiens
cagctgcatcctttt

SEQ ID NO: 437519 - DNA, 15 bp, Homo sapiens
gcagctgcatccttt

SEQ ID NO: 437520 - DNA, 15 bp, Homo sapiens
agcagctgcatcctt

SEQ ID NO: 437521 - DNA, 15 bp, Homo sapiens
tagcagctgcatcct

SEQ ID NO: 437522 - DNA, 15 bp, Homo sapiens
atagcagctgcatcc

SEQ ID NO: 437523 - DNA, 15 bp, Homo sapiens
catagcagctgcatc

SEQ ID NO: 437524 - DNA, 15 bp, Homo sapiens
ccatagcagctgcat

SEQ ID NO: 437525 - DNA, 15 bp, Homo sapiens
tccatagcagctgca

SEQ ID NO: 437526 - DNA, 15 bp, Homo sapiens
ttccatagcagctgc

SEQ ID NO: 437527 - DNA, 15 bp, Homo sapiens
cttccatagcagctg

SEQ ID NO: 437528 - DNA, 15 bp, Homo sapiens
tcttccatagcagct

SEQ ID NO: 437529 - DNA, 15 bp, Homo sapiens
gtcttccatagcagc

SEQ ID NO: 437530 - DNA, 15 bp, Homo sapiens
tgtcttccatagcag

SEQ ID NO: 437531 - DNA, 15 bp, Homo sapiens
ctgtcttccatagca

SEQ ID NO: 437532 - DNA, 15 bp, Homo sapiens
actgtcttccatagc

SEQ ID NO: 437533 - DNA, 15 bp, Homo sapiens
tactgtcttccatag

SEQ ID NO: 437534 - DNA, 15 bp, Homo sapiens
atactgtcttccata

SEQ ID NO: 437535 - DNA, 15 bp, Homo sapiens
catactgtcttccat

SEQ ID NO: 437536 - DNA, 15 bp, Homo sapiens
ccatactgtcttcca

SEQ ID NO: 437537 - DNA, 15 bp, Homo sapiens
tccatactgtcttcc

SEQ ID NO: 437538 - DNA, 15 bp, Homo sapiens
atccatactgtcttc

SEQ ID NO: 437539 - DNA, 15 bp, Homo sapiens
catccatactgtctt

SEQ ID NO: 437540 - DNA, 15 bp, Homo sapiens
acatccatactgtct

SEQ ID NO: 437541 - DNA, 15 bp, Homo sapiens
aacatccatactgtc

SEQ ID NO: 437542 - DNA, 15 bp, Homo sapiens
gaacatccatactgt

SEQ ID NO: 437543 - DNA, 15 bp, Homo sapiens
ggaacatccatactg

SEQ ID NO: 437544 - DNA, 15 bp, Homo sapiens
aggaacatccatact

SEQ ID NO: 437545 - DNA, 15 bp, Homo sapiens
gaggaacatccatac

SEQ ID NO: 437546 - DNA, 15 bp, Homo sapiens
tgaggaacatccata

SEQ ID NO: 437547 - DNA, 15 bp, Homo sapiens
ttgaggaacatccat

SEQ ID NO: 437548 - DNA, 15 bp, Homo sapiens
tttgaggaacatcca

SEQ ID NO: 437549 - DNA, 15 bp, Homo sapiens
ttttgaggaacatcc

SEQ ID NO: 437550 - DNA, 15 bp, Homo sapiens
tttttgaggaacatc

SEQ ID NO: 437551 - DNA, 15 bp, Homo sapiens
ttttttgaggaacat

SEQ ID NO: 437552 - DNA, 15 bp, Homo sapiens
attttttgaggaaca

SEQ ID NO: 437553 - DNA, 15 bp, Homo sapiens
aattttttgaggaac

SEQ ID NO: 437554 - DNA, 15 bp, Homo sapiens
taattttttgaggaa

SEQ ID NO: 437555 - DNA, 15 bp, Homo sapiens
ttaattttttgagga

SEQ ID NO: 437556 - DNA, 15 bp, Homo sapiens
tttaattttttgagg

SEQ ID NO: 437557 - DNA, 15 bp, Homo sapiens
ttttaattttttgag

SEQ ID NO: 437558 - DNA, 15 bp, Homo sapiens
cttttaattttttga

SEQ ID NO: 437559 - DNA, 15 bp, Homo sapiens
acttttaattttttg

SEQ ID NO: 437560 - DNA, 15 bp, Homo sapiens
tacttttaatttttt

SEQ ID NO: 437561 - DNA, 15 bp, Homo sapiens
ctacttttaattttt

SEQ ID NO: 437562 - DNA, 15 bp, Homo sapiens
tctacttttaatttt

SEQ ID NO: 437563 - DNA, 15 bp, Homo sapiens
ttctacttttaattt

SEQ ID NO: 437564 - DNA, 15 bp, Homo sapiens
gttctacttttaatt

SEQ ID NO: 437565 - DNA, 15 bp, Homo sapiens
agttctacttttaat

SEQ ID NO: 437566 - DNA, 15 bp, Homo sapiens
tagttctacttttaa

SEQ ID NO: 437567 - DNA, 15 bp, Homo sapiens
gtagttctactttta

SEQ ID NO: 437568 - DNA, 15 bp, Homo sapiens
agtagttctactttt

SEQ ID NO: 437569 - DNA, 15 bp, Homo sapiens
cagtagttctacttt

SEQ ID NO: 437570 - DNA, 15 bp, Homo sapiens
acagtagttctactt

SEQ ID NO: 437571 - DNA, 15 bp, Homo sapiens
tacagtagttctact

SEQ ID NO: 437572 - DNA, 15 bp, Homo sapiens
atacagtagttctac

SEQ ID NO: 437573 - DNA, 15 bp, Homo sapiens
catacagtagttcta

SEQ ID NO: 437574 - DNA, 15 bp, Homo sapiens
tcatacagtagttct

SEQ ID NO: 437575 - DNA, 15 bp, Homo sapiens
atcatacagtagttc

SEQ ID NO: 437576 - DNA, 15 bp, Homo sapiens
gatcatacagtagtt

SEQ ID NO: 437577 - DNA, 15 bp, Homo sapiens
ggatcatacagtagt

SEQ ID NO: 437578 - DNA, 15 bp, Homo sapiens
tggatcatacagtag

SEQ ID NO: 437579 - DNA, 15 bp, Homo sapiens
ctggatcatacagta

SEQ ID NO: 437580 - DNA, 15 bp, Homo sapiens
gctggatcatacagt

SEQ ID NO: 437581 - DNA, 15 bp, Homo sapiens
tgctggatcatacag

SEQ ID NO: 437582 - DNA, 15 bp, Homo sapiens
ttgctggatcataca

SEQ ID NO: 437583 - DNA, 15 bp, Homo sapiens
attgctggatcatac

SEQ ID NO: 437584 - DNA, 15 bp, Homo sapiens
gattgctggatcata

SEQ ID NO: 437585 - DNA, 15 bp, Homo sapiens
ggattgctggatcat

SEQ ID NO: 437586 - DNA, 15 bp, Homo sapiens
gggattgctggatca

SEQ ID NO: 437587 - DNA, 15 bp, Homo sapiens
tgggattgctggatc

SEQ ID NO: 437588 - DNA, 15 bp, Homo sapiens
gtgggattgctggat

SEQ ID NO: 437589 - DNA, 15 bp, Homo sapiens
agtgggattgctgga

SEQ ID NO: 437590 - DNA, 15 bp, Homo sapiens
gagtgggattgctgg

SEQ ID NO: 437591 - DNA, 15 bp, Homo sapiens
ggagtgggattgctg

SEQ ID NO: 437592 - DNA, 15 bp, Homo sapiens
aggagtgggattgct

SEQ ID NO: 437593 - DNA, 15 bp, Homo sapiens
caggagtgggattgc

SEQ ID NO: 437594 - DNA, 15 bp, Homo sapiens
ccaggagtgggattg

SEQ ID NO: 437595 - DNA, 15 bp, Homo sapiens
cccaggagtgggatt

SEQ ID NO: 437596 - DNA, 15 bp, Homo sapiens
acccaggagtgggat

SEQ ID NO: 437597 - DNA, 15 bp, Homo sapiens
tacccaggagtggga

SEQ ID NO: 437598 - DNA, 15 bp, Homo sapiens
atacccaggagtggg

SEQ ID NO: 437599 - DNA, 15 bp, Homo sapiens
aatacccaggagtgg

SEQ ID NO: 437600 - DNA, 15 bp, Homo sapiens
aaatacccaggagtg

SEQ ID NO: 437601 - DNA, 15 bp, Homo sapiens
gaaatacccaggagt

SEQ ID NO: 437602 - DNA, 15 bp, Homo sapiens
agaaatacccaggag

SEQ ID NO: 437603 - DNA, 15 bp, Homo sapiens
gagaaatacccagga

SEQ ID NO: 437604 - DNA, 15 bp, Homo sapiens
ggagaaatacccagg

SEQ ID NO: 437605 - DNA, 15 bp, Homo sapiens
tggagaaatacccag

SEQ ID NO: 437606 - DNA, 15 bp, Homo sapiens
ttggagaaataccca

SEQ ID NO: 437607 - DNA, 15 bp, Homo sapiens
tttggagaaataccc

SEQ ID NO: 437608 - DNA, 15 bp, Homo sapiens
ttttggagaaatacc

SEQ ID NO: 437609 - DNA, 15 bp, Homo sapiens
cttttggagaaatac

SEQ ID NO: 437610 - DNA, 15 bp, Homo sapiens
tcttttggagaaata

SEQ ID NO: 437611 - DNA, 15 bp, Homo sapiens
gtcttttggagaaat

SEQ ID NO: 437612 - DNA, 15 bp, Homo sapiens
agtcttttggagaaa

SEQ ID NO: 437613 - DNA, 15 bp, Homo sapiens
aagtcttttggagaa

SEQ ID NO: 437614 - DNA, 15 bp, Homo sapiens
caagtcttttggaga

SEQ ID NO: 437615 - DNA, 15 bp, Homo sapiens
tcaagtcttttggag

SEQ ID NO: 437616 - DNA, 15 bp, Homo sapiens
ttcaagtcttttgga

SEQ ID NO: 437617 - DNA, 15 bp, Homo sapiens
tttcaagtcttttgg

SEQ ID NO: 437618 - DNA, 15 bp, Homo sapiens
atttcaagtcttttg

SEQ ID NO: 437619 - DNA, 15 bp, Homo sapiens
gatttcaagtctttt

SEQ ID NO: 437620 - DNA, 15 bp, Homo sapiens
tgatttcaagtcttt

SEQ ID NO: 437621 - DNA, 15 bp, Homo sapiens
ctgatttcaagtctt

SEQ ID NO: 437622 - DNA, 15 bp, Homo sapiens
cctgatttcaagtct

SEQ ID NO: 437623 - DNA, 15 bp, Homo sapiens
tcctgatttcaagtc

SEQ ID NO: 437624 - DNA, 15 bp, Homo sapiens
atcctgatttcaagt

SEQ ID NO: 437625 - DNA, 15 bp, Homo sapiens
gatcctgatttcaag

SEQ ID NO: 437626 - DNA, 15 bp, Homo sapiens
agatcctgatttcaa

SEQ ID NO: 437627 - DNA, 15 bp, Homo sapiens
aagatcctgatttca

SEQ ID NO: 437628 - DNA, 15 bp, Homo sapiens
caagatcctgatttc

SEQ ID NO: 437629 - DNA, 15 bp, Homo sapiens
tcaagatcctgattt

SEQ ID NO: 437630 - DNA, 15 bp, Homo sapiens
gtcaagatcctgatt

SEQ ID NO: 437631 - DNA, 15 bp, Homo sapiens
agtcaagatcctgat

SEQ ID NO: 437632 - DNA, 15 bp, Homo sapiens
gagtcaagatcctga

SEQ ID NO: 437633 - DNA, 15 bp, Homo sapiens
agagtcaagatcctg

SEQ ID NO: 437634 - DNA, 15 bp, Homo sapiens
aagagtcaagatcct

SEQ ID NO: 437635 - DNA, 15 bp, Homo sapiens
gaagagtcaagatcc

SEQ ID NO: 437636 - DNA, 15 bp, Homo sapiens
tgaagagtcaagatc

SEQ ID NO: 437637 - DNA, 15 bp, Homo sapiens
ttgaagagtcaagat

SEQ ID NO: 437638 - DNA, 15 bp, Homo sapiens
cttgaagagtcaaga

SEQ ID NO: 437639 - DNA, 15 bp, Homo sapiens
tcttgaagagtcaag

SEQ ID NO: 437640 - DNA, 15 bp, Homo sapiens
atcttgaagagtcaa

SEQ ID NO: 437641 - DNA, 15 bp, Homo sapiens
gatcttgaagagtca

SEQ ID NO: 437642 - DNA, 15 bp, Homo sapiens
ggatcttgaagagtc

SEQ ID NO: 437643 - DNA, 15 bp, Homo sapiens
aggatcttgaagagt

SEQ ID NO: 437644 - DNA, 15 bp, Homo sapiens
caggatcttgaagag

SEQ ID NO: 437645 - DNA, 15 bp, Homo sapiens
tcaggatcttgaaga

SEQ ID NO: 437646 - DNA, 15 bp, Homo sapiens
ttcaggatcttgaag

SEQ ID NO: 437647 - DNA, 15 bp, Homo sapiens
cttcaggatcttgaa

SEQ ID NO: 437648 - DNA, 15 bp, Homo sapiens
tcttcaggatcttga

SEQ ID NO: 437649 - DNA, 15 bp, Homo sapiens
ctcttcaggatcttg

SEQ ID NO: 437650 - DNA, 15 bp, Homo sapiens
gctcttcaggatctt

SEQ ID NO: 437651 - DNA, 15 bp, Homo sapiens
tgctcttcaggatct

SEQ ID NO: 437652 - DNA, 15 bp, Homo sapiens
gtgctcttcaggatc

SEQ ID NO: 437653 - DNA, 15 bp, Homo sapiens
agtgctcttcaggat

SEQ ID NO: 437654 - DNA, 15 bp, Homo sapiens
gagtgctcttcagga

SEQ ID NO: 437655 - DNA, 15 bp, Homo sapiens
ggagtgctcttcagg

SEQ ID NO: 437656 - DNA, 15 bp, Homo sapiens
aggagtgctcttcag

SEQ ID NO: 437657 - DNA, 15 bp, Homo sapiens
gaggagtgctcttca

SEQ ID NO: 437658 - DNA, 15 bp, Homo sapiens
ggaggagtgctcttc

SEQ ID NO: 437659 - DNA, 15 bp, Homo sapiens
aggaggagtgctctt

SEQ ID NO: 437660 - DNA, 15 bp, Homo sapiens
aaggaggagtgctct

SEQ ID NO: 437661 - DNA, 15 bp, Homo sapiens
aaaggaggagtgctc

SEQ ID NO: 437662 - DNA, 15 bp, Homo sapiens
aaaaggaggagtgct

SEQ ID NO: 437663 - DNA, 15 bp, Homo sapiens
taaaaggaggagtgc

SEQ ID NO: 437664 - DNA, 15 bp, Homo sapiens
gtaaaaggaggagtg

SEQ ID NO: 437665 - DNA, 15 bp, Homo sapiens
ggtaaaaggaggagt

SEQ ID NO: 437666 - DNA, 15 bp, Homo sapiens
tggtaaaaggaggag

SEQ ID NO: 437667 - DNA, 15 bp, Homo sapiens
gtggtaaaaggagga

SEQ ID NO: 437668 - DNA, 15 bp, Homo sapiens
tgtggtaaaaggagg

SEQ ID NO: 437669 - DNA, 15 bp, Homo sapiens
ctgtggtaaaaggag

SEQ ID NO: 437670 - DNA, 15 bp, Homo sapiens
gctgtggtaaaagga

SEQ ID NO: 437671 - DNA, 15 bp, Homo sapiens
tgctgtggtaaaagg

SEQ ID NO: 437672 - DNA, 15 bp, Homo sapiens
ctgctgtggtaaaag

SEQ ID NO: 437673 - DNA, 15 bp, Homo sapiens
actgctgtggtaaaa

SEQ ID NO: 437674 - DNA, 15 bp, Homo sapiens
tactgctgtggtaaa

SEQ ID NO: 437675 - DNA, 15 bp, Homo sapiens
atactgctgtggtaa

SEQ ID NO: 437676 - DNA, 15 bp, Homo sapiens
aatactgctgtggta

SEQ ID NO: 437677 - DNA, 15 bp, Homo sapiens
gaatactgctgtggt

SEQ ID NO: 437678 - DNA, 15 bp, Homo sapiens
tgaatactgctgtgg

SEQ ID NO: 437679 - DNA, 15 bp, Homo sapiens
gtgaatactgctgtg

SEQ ID NO: 437680 - DNA, 15 bp, Homo sapiens
tgtgaatactgctgt

SEQ ID NO: 437681 - DNA, 15 bp, Homo sapiens
ttgtgaatactgctg

SEQ ID NO: 437682 - DNA, 15 bp, Homo sapiens
attgtgaatactgct

SEQ ID NO: 437683 - DNA, 15 bp, Homo sapiens
tattgtgaatactgc

SEQ ID NO: 437684 - DNA, 15 bp, Homo sapiens
ctattgtgaatactg

SEQ ID NO: 437685 - DNA, 15 bp, Homo sapiens
gctattgtgaatact

SEQ ID NO: 437686 - DNA, 15 bp, Homo sapiens
ggctattgtgaatac

SEQ ID NO: 437687 - DNA, 15 bp, Homo sapiens
tggctattgtgaata

SEQ ID NO: 437688 - DNA, 15 bp, Homo sapiens
ttggctattgtgaat

SEQ ID NO: 437689 - DNA, 15 bp, Homo sapiens
cttggctattgtgaa

SEQ ID NO: 437690 - DNA, 15 bp, Homo sapiens
tcttggctattgtga

SEQ ID NO: 437691 - DNA, 15 bp, Homo sapiens
atcttggctattgtg

SEQ ID NO: 437692 - DNA, 15 bp, Homo sapiens
catcttggctattgt

SEQ ID NO: 437693 - DNA, 15 bp, Homo sapiens
acatcttggctattg

SEQ ID NO: 437694 - DNA, 15 bp, Homo sapiens
cacatcttggctatt

SEQ ID NO: 437695 - DNA, 15 bp, Homo sapiens
ccacatcttggctat

SEQ ID NO: 437696 - DNA, 15 bp, Homo sapiens
tccacatcttggcta

SEQ ID NO: 437697 - DNA, 15 bp, Homo sapiens
ttccacatcttggct

SEQ ID NO: 437698 - DNA, 15 bp, Homo sapiens
tttccacatcttggc

SEQ ID NO: 437699 - DNA, 15 bp, Homo sapiens
gtttccacatcttgg

SEQ ID NO: 437700 - DNA, 15 bp, Homo sapiens
tgtttccacatcttg

SEQ ID NO: 437701 - DNA, 15 bp, Homo sapiens
ttgtttccacatctt

SEQ ID NO: 437702 - DNA, 15 bp, Homo sapiens
gttgtttccacatct

SEQ ID NO: 437703 - DNA, 15 bp, Homo sapiens
ggttgtttccacatc

SEQ ID NO: 437704 - DNA, 15 bp, Homo sapiens
aggttgtttccacat

SEQ ID NO: 437705 - DNA, 15 bp, Homo sapiens
taggttgtttccaca

SEQ ID NO: 437706 - DNA, 15 bp, Homo sapiens
ttaggttgtttccac

SEQ ID NO: 437707 - DNA, 15 bp, Homo sapiens
tttaggttgtttcca

SEQ ID NO: 437708 - DNA, 15 bp, Homo sapiens
atttaggttgtttcc

SEQ ID NO: 437709 - DNA, 15 bp, Homo sapiens
catttaggttgtttc

SEQ ID NO: 437710 - DNA, 15 bp, Homo sapiens
acatttaggttgttt

SEQ ID NO: 437711 - DNA, 15 bp, Homo sapiens
gacatttaggttgtt

SEQ ID NO: 437712 - DNA, 15 bp, Homo sapiens
ggacatttaggttgt

SEQ ID NO: 437713 - DNA, 15 bp, Homo sapiens
tggacatttaggttg

SEQ ID NO: 437714 - DNA, 15 bp, Homo sapiens
atggacatttaggtt

SEQ ID NO: 437715 - DNA, 15 bp, Homo sapiens
gatggacatttaggt

SEQ ID NO: 437716 - DNA, 15 bp, Homo sapiens
tgatggacatttagg

SEQ ID NO: 437717 - DNA, 15 bp, Homo sapiens
ctgatggacatttag

SEQ ID NO: 437718 - DNA, 15 bp, Homo sapiens
gctgatggacattta

SEQ ID NO: 437719 - DNA, 15 bp, Homo sapiens
tgctgatggacattt

SEQ ID NO: 437720 - DNA, 15 bp, Homo sapiens
ctgctgatggacatt

SEQ ID NO: 437721 - DNA, 15 bp, Homo sapiens
tctgctgatggacat

SEQ ID NO: 437722 - DNA, 15 bp, Homo sapiens
atctgctgatggaca

SEQ ID NO: 437723 - DNA, 15 bp, Homo sapiens
catctgctgatggac

SEQ ID NO: 437724 - DNA, 15 bp, Homo sapiens
tcatctgctgatgga

SEQ ID NO: 437725 - DNA, 15 bp, Homo sapiens
ttcatctgctgatgg

SEQ ID NO: 437726 - DNA, 15 bp, Homo sapiens
attcatctgctgatg

SEQ ID NO: 437727 - DNA, 15 bp, Homo sapiens
cattcatctgctgat

SEQ ID NO: 437728 - DNA, 15 bp, Homo sapiens
ccattcatctgctga

SEQ ID NO: 437729 - DNA, 15 bp, Homo sapiens
tccattcatctgctg

SEQ ID NO: 437730 - DNA, 15 bp, Homo sapiens
atccattcatctgct

SEQ ID NO: 437731 - DNA, 15 bp, Homo sapiens
tatccattcatctgc

SEQ ID NO: 437732 - DNA, 15 bp, Homo sapiens
ttatccattcatctg

SEQ ID NO: 437733 - DNA, 15 bp, Homo sapiens
tttatccattcatct

SEQ ID NO: 437734 - DNA, 15 bp, Homo sapiens
ctttatccattcatc

SEQ ID NO: 437735 - DNA, 15 bp, Homo sapiens
tctttatccattcat

SEQ ID NO: 437736 - DNA, 15 bp, Homo sapiens
ttctttatccattca

SEQ ID NO: 437737 - DNA, 15 bp, Homo sapiens
attctttatccattc

SEQ ID NO: 437738 - DNA, 15 bp, Homo sapiens
tattctttatccatt

SEQ ID NO: 437739 - DNA, 15 bp, Homo sapiens
atattctttatccat

SEQ ID NO: 437740 - DNA, 15 bp, Homo sapiens
catattctttatcca

SEQ ID NO: 437741 - DNA, 15 bp, Homo sapiens
acatattctttatcc

SEQ ID NO: 437742 - DNA, 15 bp, Homo sapiens
cacatattctttatc

SEQ ID NO: 437743 - DNA, 15 bp, Homo sapiens
tcacatattctttat

SEQ ID NO: 437744 - DNA, 15 bp, Homo sapiens
ttcacatattcttta

SEQ ID NO: 437745 - DNA, 15 bp, Homo sapiens
cttcacatattcttt

SEQ ID NO: 437746 - DNA, 15 bp, Homo sapiens
gcttcacatattctt

SEQ ID NO: 437747 - DNA, 15 bp, Homo sapiens
ggcttcacatattct

SEQ ID NO: 437748 - DNA, 15 bp, Homo sapiens
tggcttcacatattc

SEQ ID NO: 437749 - DNA, 15 bp, Homo sapiens
ctggcttcacatatt

SEQ ID NO: 437750 - DNA, 15 bp, Homo sapiens
cctggcttcacatat

SEQ ID NO: 437751 - DNA, 15 bp, Homo sapiens
gcctggcttcacata

SEQ ID NO: 437752 - DNA, 15 bp, Homo sapiens
cgcctggcttcacat

SEQ ID NO: 437753 - DNA, 15 bp, Homo sapiens
gcgcctggcttcaca

SEQ ID NO: 437754 - DNA, 15 bp, Homo sapiens
tgcgcctggcttcac

SEQ ID NO: 437755 - DNA, 15 bp, Homo sapiens
ttgcgcctggcttca

SEQ ID NO: 437756 - DNA, 15 bp, Homo sapiens
attgcgcctggcttc

SEQ ID NO: 437757 - DNA, 15 bp, Homo sapiens
cattgcgcctggctt

SEQ ID NO: 437758 - DNA, 15 bp, Homo sapiens
ccattgcgcctggct

SEQ ID NO: 437759 - DNA, 15 bp, Homo sapiens
accattgcgcctggc

SEQ ID NO: 437760 - DNA, 15 bp, Homo sapiens
caccattgcgcctgg

SEQ ID NO: 437761 - DNA, 15 bp, Homo sapiens
tcaccattgcgcctg

SEQ ID NO: 437762 - DNA, 15 bp, Homo sapiens
atcaccattgcgcct

SEQ ID NO: 437763 - DNA, 15 bp, Homo sapiens
tatcaccattgcgcc

SEQ ID NO: 437764 - DNA, 15 bp, Homo sapiens
gtatcaccattgcgc

SEQ ID NO: 437765 - DNA, 15 bp, Homo sapiens
ggtatcaccattgcg

SEQ ID NO: 437766 - DNA, 15 bp, Homo sapiens
aggtatcaccattgc

SEQ ID NO: 437767 - DNA, 15 bp, Homo sapiens
caggtatcaccattg

SEQ ID NO: 437768 - DNA, 15 bp, Homo sapiens
ccaggtatcaccatt

SEQ ID NO: 437769 - DNA, 15 bp, Homo sapiens
cccaggtatcaccat

SEQ ID NO: 437770 - DNA, 15 bp, Homo sapiens
ccccaggtatcacca

SEQ ID NO: 437771 - DNA, 15 bp, Homo sapiens
accccaggtatcacc

SEQ ID NO: 437772 - DNA, 15 bp, Homo sapiens
gaccccaggtatcac

SEQ ID NO: 437773 - DNA, 15 bp, Homo sapiens
agaccccaggtatca

SEQ ID NO: 437774 - DNA, 15 bp, Homo sapiens
gagaccccaggtatc

SEQ ID NO: 437775 - DNA, 15 bp, Homo sapiens
tgagaccccaggtat

SEQ ID NO: 437776 - DNA, 15 bp, Homo sapiens
ctgagaccccaggta

SEQ ID NO: 437777 - DNA, 15 bp, Homo sapiens
gctgagaccccaggt

SEQ ID NO: 437778 - DNA, 15 bp, Homo sapiens
agctgagaccccagg

SEQ ID NO: 437779 - DNA, 15 bp, Homo sapiens
tagctgagaccccag

SEQ ID NO: 437780 - DNA, 15 bp, Homo sapiens
ctagctgagacccca

SEQ ID NO: 437781 - DNA, 15 bp, Homo sapiens
cctagctgagacccc

SEQ ID NO: 437782 - DNA, 15 bp, Homo sapiens
ccctagctgagaccc

SEQ ID NO: 437783 - DNA, 15 bp, Homo sapiens
cccctagctgagacc

SEQ ID NO: 437784 - DNA, 15 bp, Homo sapiens
tcccctagctgagac

SEQ ID NO: 437785 - DNA, 15 bp, Homo sapiens
ctcccctagctgaga

SEQ ID NO: 437786 - DNA, 15 bp, Homo sapiens
cctcccctagctgag

SEQ ID NO: 437787 - DNA, 15 bp, Homo sapiens
gcctcccctagctga

SEQ ID NO: 437788 - DNA, 15 bp, Homo sapiens
agcctcccctagctg

SEQ ID NO: 437789 - DNA, 15 bp, Homo sapiens
cagcctcccctagct

SEQ ID NO: 437790 - DNA, 15 bp, Homo sapiens
tcagcctcccctagc

SEQ ID NO: 437791 - DNA, 15 bp, Homo sapiens
ctcagcctcccctag

SEQ ID NO: 437792 - DNA, 15 bp, Homo sapiens
cctcagcctccccta

SEQ ID NO: 437793 - DNA, 15 bp, Homo sapiens
gcctcagcctcccct

SEQ ID NO: 437794 - DNA, 15 bp, Homo sapiens
cgcctcagcctcccc

SEQ ID NO: 437795 - DNA, 15 bp, Homo sapiens
ccgcctcagcctccc

SEQ ID NO: 437796 - DNA, 15 bp, Homo sapiens
cccgcctcagcctcc

SEQ ID NO: 437797 - DNA, 15 bp, Homo sapiens
tcccgcctcagcctc

SEQ ID NO: 437798 - DNA, 15 bp, Homo sapiens
ctcccgcctcagcct

SEQ ID NO: 437799 - DNA, 15 bp, Homo sapiens
cctcccgcctcagcc

SEQ ID NO: 437800 - DNA, 15 bp, Homo sapiens
tcctcccgcctcagc

SEQ ID NO: 437801 - DNA, 15 bp, Homo sapiens
aatcctcccgcctca

SEQ ID NO: 437802 - DNA, 15 bp, Homo sapiens
caatcctcccgcctc

SEQ ID NO: 437803 - DNA, 15 bp, Homo sapiens
gcaatcctcccgcct

SEQ ID NO: 437804 - DNA, 15 bp, Homo sapiens
agcaatcctcccgcc

SEQ ID NO: 437805 - DNA, 15 bp, Homo sapiens
aagcaatcctcccgc

SEQ ID NO: 437806 - DNA, 15 bp, Homo sapiens
caagcaatcctcccg

SEQ ID NO: 437807 - DNA, 15 bp, Homo sapiens
ccaagcaatcctccc

SEQ ID NO: 437808 - DNA, 15 bp, Homo sapiens
cccaagcaatcctcc

SEQ ID NO: 437809 - DNA, 15 bp, Homo sapiens
ccccaagcaatcctc

SEQ ID NO: 437810 - DNA, 15 bp, Homo sapiens
gccccaagcaatcct

SEQ ID NO: 437811 - DNA, 15 bp, Homo sapiens
ggccccaagcaatcc

SEQ ID NO: 437812 - DNA, 15 bp, Homo sapiens
tggccccaagcaatc

SEQ ID NO: 437813 - DNA, 15 bp, Homo sapiens
ctggccccaagcaat

SEQ ID NO: 437814 - DNA, 15 bp, Homo sapiens
cctggccccaagcaa

SEQ ID NO: 437815 - DNA, 15 bp, Homo sapiens
tcctggccccaagca

SEQ ID NO: 437816 - DNA, 15 bp, Homo sapiens
ctcctggccccaagc

SEQ ID NO: 437817 - DNA, 15 bp, Homo sapiens
actcctggccccaag

SEQ ID NO: 437818 - DNA, 15 bp, Homo sapiens
gactcctggccccaa

SEQ ID NO: 437819 - DNA, 15 bp, Homo sapiens
ggactcctggcccca

SEQ ID NO: 437820 - DNA, 15 bp, Homo sapiens
tggactcctggcccc

SEQ ID NO: 437821 - DNA, 15 bp, Homo sapiens
ctggactcctggccc

SEQ ID NO: 437822 - DNA, 15 bp, Homo sapiens
gctggactcctggcc

SEQ ID NO: 437823 - DNA, 15 bp, Homo sapiens
ggctggactcctggc

SEQ ID NO: 437824 - DNA, 15 bp, Homo sapiens
aggctggactcctgg

SEQ ID NO: 437825 - DNA, 15 bp, Homo sapiens
caggctggactcctg

SEQ ID NO: 437826 - DNA, 15 bp, Homo sapiens
ccaggctggactcct

SEQ ID NO: 437827 - DNA, 15 bp, Homo sapiens
cccaggctggactcc

SEQ ID NO: 437828 - DNA, 15 bp, Homo sapiens
gcccaggctggactc

SEQ ID NO: 437829 - DNA, 15 bp, Homo sapiens
ggcccaggctggact

SEQ ID NO: 437830 - DNA, 15 bp, Homo sapiens
tggcccaggctggac

SEQ ID NO: 437831 - DNA, 15 bp, Homo sapiens
gtggcccaggctgga

SEQ ID NO: 437832 - DNA, 15 bp, Homo sapiens
tgtggcccaggctgg

SEQ ID NO: 437833 - DNA, 15 bp, Homo sapiens
atgtggcccaggctg

SEQ ID NO: 437834 - DNA, 15 bp, Homo sapiens
tatgtggcccaggct

SEQ ID NO: 437835 - DNA, 15 bp, Homo sapiens
ctatgtggcccaggc

SEQ ID NO: 437836 - DNA, 15 bp, Homo sapiens
gctatgtggcccagg

SEQ ID NO: 437837 - DNA, 15 bp, Homo sapiens
cgctatgtggcccag

SEQ ID NO: 437838 - DNA, 15 bp, Homo sapiens
tcgctatgtggccca

SEQ ID NO: 437839 - DNA, 15 bp, Homo sapiens
ctcgctatgtggccc

SEQ ID NO: 437840 - DNA, 15 bp, Homo sapiens
tctcgctatgtggcc

SEQ ID NO: 437841 - DNA, 15 bp, Homo sapiens
atctcgctatgtggc

SEQ ID NO: 437842 - DNA, 15 bp, Homo sapiens
gatctcgctatgtgg

SEQ ID NO: 437843 - DNA, 15 bp, Homo sapiens
ggatctcgctatgtg

SEQ ID NO: 437844 - DNA, 15 bp, Homo sapiens
cggatctcgctatgt

SEQ ID NO: 437845 - DNA, 15 bp, Homo sapiens
tcggatctcgctatg

SEQ ID NO: 437846 - DNA, 15 bp, Homo sapiens
atcggatctcgctat

SEQ ID NO: 437847 - DNA, 15 bp, Homo sapiens
gatcggatctcgcta

SEQ ID NO: 437848 - DNA, 15 bp, Homo sapiens
agatcggatctcgct

SEQ ID NO: 437849 - DNA, 15 bp, Homo sapiens
gagatcggatctcgc

SEQ ID NO: 437850 - DNA, 15 bp, Homo sapiens
cgagatcggatctcg

SEQ ID NO: 437851 - DNA, 15 bp, Homo sapiens
tcgagatcggatctc

SEQ ID NO: 437852 - DNA, 15 bp, Homo sapiens
ttcgagatcggatct

SEQ ID NO: 437853 - DNA, 15 bp, Homo sapiens
tttcgagatcggatc

SEQ ID NO: 437854 - DNA, 15 bp, Homo sapiens
ttttcgagatcggat

SEQ ID NO: 437855 - DNA, 15 bp, Homo sapiens
cttttcgagatcgga

SEQ ID NO: 437856 - DNA, 15 bp, Homo sapiens
tcttttcgagatcgg

SEQ ID NO: 437857 - DNA, 15 bp, Homo sapiens
ttcttttcgagatcg

SEQ ID NO: 437858 - DNA, 15 bp, Homo sapiens
tttcttttcgagatc

SEQ ID NO: 437859 - DNA, 15 bp, Homo sapiens
atttcttttcgagat

SEQ ID NO: 437860 - DNA, 15 bp, Homo sapiens
tatttcttttcgaga

SEQ ID NO: 437861 - DNA, 15 bp, Homo sapiens
ctatttcttttcgag

SEQ ID NO: 437862 - DNA, 15 bp, Homo sapiens
tctatttcttttcga

SEQ ID NO: 437863 - DNA, 15 bp, Homo sapiens
ttctatttcttttcg

SEQ ID NO: 437864 - DNA, 15 bp, Homo sapiens
tttctatttcttttc

SEQ ID NO: 437865 - DNA, 15 bp, Homo sapiens
ctttctatttctttt

SEQ ID NO: 437866 - DNA, 15 bp, Homo sapiens
tctttctatttcttt

SEQ ID NO: 437867 - DNA, 15 bp, Homo sapiens
ttctttctatttctt

SEQ ID NO: 437868 - DNA, 15 bp, Homo sapiens
tttctttctatttct

SEQ ID NO: 437869 - DNA, 15 bp, Homo sapiens
ttttctttctatttc

SEQ ID NO: 437870 - DNA, 15 bp, Homo sapiens
attttctttctattt

SEQ ID NO: 437871 - DNA, 15 bp, Homo sapiens
tattttctttctatt

SEQ ID NO: 437872 - DNA, 15 bp, Homo sapiens
atattttctttctat

SEQ ID NO: 437873 - DNA, 15 bp, Homo sapiens
catattttctttcta

SEQ ID NO: 437874 - DNA, 15 bp, Homo sapiens
ccatattttctttct

SEQ ID NO: 437875 - DNA, 15 bp, Homo sapiens
accatattttctttc

SEQ ID NO: 437876 - DNA, 15 bp, Homo sapiens
taccatattttcttt

SEQ ID NO: 437877 - DNA, 15 bp, Homo sapiens
ataccatattttctt

SEQ ID NO: 437878 - DNA, 15 bp, Homo sapiens
cataccatattttct

SEQ ID NO: 437879 - DNA, 15 bp, Homo sapiens
acataccatattttc

SEQ ID NO: 437880 - DNA, 15 bp, Homo sapiens
tacataccatatttt

SEQ ID NO: 437881 - DNA, 15 bp, Homo sapiens
gtacataccatattt

SEQ ID NO: 437882 - DNA, 15 bp, Homo sapiens
tgtacataccatatt

SEQ ID NO: 437883 - DNA, 15 bp, Homo sapiens
atgtacataccatat

SEQ ID NO: 437884 - DNA, 15 bp, Homo sapiens
tatgtacataccata

SEQ ID NO: 437885 - DNA, 15 bp, Homo sapiens
gtatgtacataccat

SEQ ID NO: 437886 - DNA, 15 bp, Homo sapiens
tgtatgtacatacca

SEQ ID NO: 437887 - DNA, 15 bp, Homo sapiens
ttgtatgtacatacc

SEQ ID NO: 437888 - DNA, 15 bp, Homo sapiens
attgtatgtacatac

SEQ ID NO: 437889 - DNA, 15 bp, Homo sapiens
cattgtatgtacata

SEQ ID NO: 437890 - DNA, 15 bp, Homo sapiens
ccattgtatgtacat

SEQ ID NO: 437891 - DNA, 15 bp, Homo sapiens
tccattgtatgtaca

SEQ ID NO: 437892 - DNA, 15 bp, Homo sapiens
ttccattgtatgtac

SEQ ID NO: 437893 - DNA, 15 bp, Homo sapiens
cttccattgtatgta

SEQ ID NO: 437894 - DNA, 15 bp, Homo sapiens
acttccattgtatgt

SEQ ID NO: 437895 - DNA, 15 bp, Homo sapiens
cacttccattgtatg

SEQ ID NO: 437896 - DNA, 15 bp, Homo sapiens
acacttccattgtat

SEQ ID NO: 437897 - DNA, 15 bp, Homo sapiens
aacacttccattgta

SEQ ID NO: 437898 - DNA, 15 bp, Homo sapiens
gaacacttccattgt

SEQ ID NO: 437899 - DNA, 15 bp, Homo sapiens
tgaacacttccattg

SEQ ID NO: 437900 - DNA, 15 bp, Homo sapiens
ctgaacacttccatt

SEQ ID NO: 437901 - DNA, 15 bp, Homo sapiens
gctgaacacttccat

SEQ ID NO: 437902 - DNA, 15 bp, Homo sapiens
ggctgaacacttcca

SEQ ID NO: 437903 - DNA, 15 bp, Homo sapiens
aggctgaacacttcc

SEQ ID NO: 437904 - DNA, 15 bp, Homo sapiens
aaggctgaacacttc

SEQ ID NO: 437905 - DNA, 15 bp, Homo sapiens
aaaggctgaacactt

SEQ ID NO: 437906 - DNA, 15 bp, Homo sapiens
caaaggctgaacact

SEQ ID NO: 437907 - DNA, 15 bp, Homo sapiens
tcaaaggctgaacac

SEQ ID NO: 437908 - DNA, 15 bp, Homo sapiens
ttcaaaggctgaaca

SEQ ID NO: 437909 - DNA, 15 bp, Homo sapiens
tttcaaaggctgaac

SEQ ID NO: 437910 - DNA, 15 bp, Homo sapiens
ttttcaaaggctgaa

SEQ ID NO: 437911 - DNA, 15 bp, Homo sapiens
cttttcaaaggctga

SEQ ID NO: 437912 - DNA, 15 bp, Homo sapiens
tcttttcaaaggctg

SEQ ID NO: 437913 - DNA, 15 bp, Homo sapiens
ttcttttcaaaggct

SEQ ID NO: 437914 - DNA, 15 bp, Homo sapiens
cttcttttcaaaggc

SEQ ID NO: 437915 - DNA, 15 bp, Homo sapiens
ccttcttttcaaagg

SEQ ID NO: 437916 - DNA, 15 bp, Homo sapiens
tccttcttttcaaag

SEQ ID NO: 437917 - DNA, 15 bp, Homo sapiens
ttccttcttttcaaa

SEQ ID NO: 437918 - DNA, 15 bp, Homo sapiens
tttccttcttttcaa

SEQ ID NO: 437919 - DNA, 15 bp, Homo sapiens
gtttccttcttttca

SEQ ID NO: 437920 - DNA, 15 bp, Homo sapiens
agtttccttcttttc

SEQ ID NO: 437921 - DNA, 15 bp, Homo sapiens
gagtttccttctttt

SEQ ID NO: 437922 - DNA, 15 bp, Homo sapiens
agagtttccttcttt

SEQ ID NO: 437923 - DNA, 15 bp, Homo sapiens
cagagtttccttctt

SEQ ID NO: 437924 - DNA, 15 bp, Homo sapiens
gcagagtttccttct

SEQ ID NO: 437925 - DNA, 15 bp, Homo sapiens
tgcagagtttccttc

SEQ ID NO: 437926 - DNA, 15 bp, Homo sapiens
ttgcagagtttcctt

SEQ ID NO: 437927 - DNA, 15 bp, Homo sapiens
gttgcagagtttcct

SEQ ID NO: 437928 - DNA, 15 bp, Homo sapiens
tgttgcagagtttcc

SEQ ID NO: 437929 - DNA, 15 bp, Homo sapiens
atgttgcagagtttc

SEQ ID NO: 437930 - DNA, 15 bp, Homo sapiens
catgttgcagagttt

SEQ ID NO: 437931 - DNA, 15 bp, Homo sapiens
acatgttgcagagtt

SEQ ID NO: 437932 - DNA, 15 bp, Homo sapiens
cacatgttgcagagt

SEQ ID NO: 437933 - DNA, 15 bp, Homo sapiens
tcacatgttgcagag

SEQ ID NO: 437934 - DNA, 15 bp, Homo sapiens
gtcacatgttgcaga

SEQ ID NO: 437935 - DNA, 15 bp, Homo sapiens
cgtcacatgttgcag

SEQ ID NO: 437936 - DNA, 15 bp, Homo sapiens
tcgtcacatgttgca

SEQ ID NO: 437937 - DNA, 15 bp, Homo sapiens
gtcgtcacatgttgc

SEQ ID NO: 437938 - DNA, 15 bp, Homo sapiens
tgtcgtcacatgttg

SEQ ID NO: 437939 - DNA, 15 bp, Homo sapiens
atgtcgtcacatgtt

SEQ ID NO: 437940 - DNA, 15 bp, Homo sapiens
catgtcgtcacatgt

SEQ ID NO: 437941 - DNA, 15 bp, Homo sapiens
ccatgtcgtcacatg

SEQ ID NO: 437942 - DNA, 15 bp, Homo sapiens
tccatgtcgtcacat

SEQ ID NO: 437943 - DNA, 15 bp, Homo sapiens
atccatgtcgtcaca

SEQ ID NO: 437944 - DNA, 15 bp, Homo sapiens
catccatgtcgtcac

SEQ ID NO: 437945 - DNA, 15 bp, Homo sapiens
tcatccatgtcgtca

SEQ ID NO: 437946 - DNA, 15 bp, Homo sapiens
ttcatccatgtcgtc

SEQ ID NO: 437947 - DNA, 15 bp, Homo sapiens
gttcatccatgtcgt

SEQ ID NO: 437948 - DNA, 15 bp, Homo sapiens
ggttcatccatgtcg

SEQ ID NO: 437949 - DNA, 15 bp, Homo sapiens
aggttcatccatgtc

SEQ ID NO: 437950 - DNA, 15 bp, Homo sapiens
caggttcatccatgt

SEQ ID NO: 437951 - DNA, 15 bp, Homo sapiens
ccaggttcatccatg

SEQ ID NO: 437952 - DNA, 15 bp, Homo sapiens
tccaggttcatccat

SEQ ID NO: 437953 - DNA, 15 bp, Homo sapiens
ctccaggttcatcca

SEQ ID NO: 437954 - DNA, 15 bp, Homo sapiens
cctccaggttcatcc

SEQ ID NO: 437955 - DNA, 15 bp, Homo sapiens
tcctccaggttcatc

SEQ ID NO: 437956 - DNA, 15 bp, Homo sapiens
gtcctccaggttcat

SEQ ID NO: 437957 - DNA, 15 bp, Homo sapiens
tgtcctccaggttca

SEQ ID NO: 437958 - DNA, 15 bp, Homo sapiens
atgtcctccaggttc

SEQ ID NO: 437959 - DNA, 15 bp, Homo sapiens
aatgtcctccaggtt

SEQ ID NO: 437960 - DNA, 15 bp, Homo sapiens
taatgtcctccaggt

SEQ ID NO: 437961 - DNA, 15 bp, Homo sapiens
ataatgtcctccagg

SEQ ID NO: 437962 - DNA, 15 bp, Homo sapiens
tataatgtcctccag

SEQ ID NO: 437963 - DNA, 15 bp, Homo sapiens
gtataatgtcctcca

SEQ ID NO: 437964 - DNA, 15 bp, Homo sapiens
ggtataatgtcctcc

SEQ ID NO: 437965 - DNA, 15 bp, Homo sapiens
tggtataatgtcctc

SEQ ID NO: 437966 - DNA, 15 bp, Homo sapiens
ttggtataatgtcct

SEQ ID NO: 437967 - DNA, 15 bp, Homo sapiens
cttggtataatgtcc

SEQ ID NO: 437968 - DNA, 15 bp, Homo sapiens
acttggtataatgtc

SEQ ID NO: 437969 - DNA, 15 bp, Homo sapiens
cacttggtataatgt

SEQ ID NO: 437970 - DNA, 15 bp, Homo sapiens
tcacttggtataatg

SEQ ID NO: 437971 - DNA, 15 bp, Homo sapiens
ttcacttggtataat

SEQ ID NO: 437972 - DNA, 15 bp, Homo sapiens
tttcacttggtataa

SEQ ID NO: 437973 - DNA, 15 bp, Homo sapiens
ctttcacttggtata

SEQ ID NO: 437974 - DNA, 15 bp, Homo sapiens
tctttcacttggtat

SEQ ID NO: 437975 - DNA, 15 bp, Homo sapiens
ttctttcacttggta

SEQ ID NO: 437976 - DNA, 15 bp, Homo sapiens
cttctttcacttggt

SEQ ID NO: 437977 - DNA, 15 bp, Homo sapiens
gcttctttcacttgg

SEQ ID NO: 437978 - DNA, 15 bp, Homo sapiens
ggcttctttcacttg

SEQ ID NO: 437979 - DNA, 15 bp, Homo sapiens
tggcttctttcactt

SEQ ID NO: 437980 - DNA, 15 bp, Homo sapiens
ctggcttctttcact

SEQ ID NO: 437981 - DNA, 15 bp, Homo sapiens
tctggcttctttcac

SEQ ID NO: 437982 - DNA, 15 bp, Homo sapiens
gtctggcttctttca

SEQ ID NO: 437983 - DNA, 15 bp, Homo sapiens
tgtctggcttctttc

SEQ ID NO: 437984 - DNA, 15 bp, Homo sapiens
gtgtctggcttcttt

SEQ ID NO: 437985 - DNA, 15 bp, Homo sapiens
tgtgtctggcttctt

SEQ ID NO: 437986 - DNA, 15 bp, Homo sapiens
ttgtgtctggcttct

SEQ ID NO: 437987 - DNA, 15 bp, Homo sapiens
tttgtgtctggcttc

SEQ ID NO: 437988 - DNA, 15 bp, Homo sapiens
ttttgtgtctggctt

SEQ ID NO: 437989 - DNA, 15 bp, Homo sapiens
tttttgtgtctggct

SEQ ID NO: 437990 - DNA, 15 bp, Homo sapiens
ctttttgtgtctggc

SEQ ID NO: 437991 - DNA, 15 bp, Homo sapiens
cctttttgtgtctgg

SEQ ID NO: 437992 - DNA, 15 bp, Homo sapiens
gcctttttgtgtctg

SEQ ID NO: 437993 - DNA, 15 bp, Homo sapiens
tgcctttttgtgtct

SEQ ID NO: 437994 - DNA, 15 bp, Homo sapiens
ttgcctttttgtgtc

SEQ ID NO: 437995 - DNA, 15 bp, Homo sapiens
tttgcctttttgtgt

SEQ ID NO: 437996 - DNA, 15 bp, Homo sapiens
atttgcctttttgtg

SEQ ID NO: 437997 - DNA, 15 bp, Homo sapiens
tatttgcctttttgt

SEQ ID NO: 437998 - DNA, 15 bp, Homo sapiens
gtatttgcctttttg

SEQ ID NO: 437999 - DNA, 15 bp, Homo sapiens
agtatttgccttttt

SEQ ID NO: 438000 - DNA, 15 bp, Homo sapiens
cagtatttgcctttt

SEQ ID NO: 438001 - DNA, 15 bp, Homo sapiens
acagtatttgccttt

SEQ ID NO: 438002 - DNA, 15 bp, Homo sapiens
tacagtatttgcctt

SEQ ID NO: 438003 - DNA, 15 bp, Homo sapiens
atacagtatttgcct

SEQ ID NO: 438004 - DNA, 15 bp, Homo sapiens
catacagtatttgcc

SEQ ID NO: 438005 - DNA, 15 bp, Homo sapiens
tcatacagtatttgc

SEQ ID NO: 438006 - DNA, 15 bp, Homo sapiens
atcatacagtatttg

SEQ ID NO: 438007 - DNA, 15 bp, Homo sapiens
aatcatacagtattt

SEQ ID NO: 438008 - DNA, 15 bp, Homo sapiens
gaatcatacagtatt

SEQ ID NO: 438009 - DNA, 15 bp, Homo sapiens
ggaatcatacagtat

SEQ ID NO: 438010 - DNA, 15 bp, Homo sapiens
tggaatcatacagta

SEQ ID NO: 438011 - DNA, 15 bp, Homo sapiens
gtggaatcatacagt

SEQ ID NO: 438012 - DNA, 15 bp, Homo sapiens
agtggaatcatacag

SEQ ID NO: 438013 - DNA, 15 bp, Homo sapiens
aagtggaatcataca

SEQ ID NO: 438014 - DNA, 15 bp, Homo sapiens
taagtggaatcatac

SEQ ID NO: 438015 - DNA, 15 bp, Homo sapiens
ataagtggaatcata

SEQ ID NO: 438016 - DNA, 15 bp, Homo sapiens
tataagtggaatcat

SEQ ID NO: 438017 - DNA, 15 bp, Homo sapiens
atataagtggaatca

SEQ ID NO: 438018 - DNA, 15 bp, Homo sapiens
catataagtggaatc

SEQ ID NO: 438019 - DNA, 15 bp, Homo sapiens
tcatataagtggaat

SEQ ID NO: 438020 - DNA, 15 bp, Homo sapiens
ttcatataagtggaa

SEQ ID NO: 438021 - DNA, 15 bp, Homo sapiens
cttcatataagtgga

SEQ ID NO: 438022 - DNA, 15 bp, Homo sapiens
acttcatataagtgg

SEQ ID NO: 438023 - DNA, 15 bp, Homo sapiens
tacttcatataagtg

SEQ ID NO: 438024 - DNA, 15 bp, Homo sapiens
atacttcatataagt

SEQ ID NO: 438025 - DNA, 15 bp, Homo sapiens
gatacttcatataag

SEQ ID NO: 438026 - DNA, 15 bp, Homo sapiens
agatacttcatataa

SEQ ID NO: 438027 - DNA, 15 bp, Homo sapiens
tagatacttcatata

SEQ ID NO: 438028 - DNA, 15 bp, Homo sapiens
ttagatacttcatat

SEQ ID NO: 438029 - DNA, 15 bp, Homo sapiens
tttagatacttcata

SEQ ID NO: 438030 - DNA, 15 bp, Homo sapiens
ttttagatacttcat

SEQ ID NO: 438031 - DNA, 15 bp, Homo sapiens
attttagatacttca

SEQ ID NO: 438032 - DNA, 15 bp, Homo sapiens
tattttagatacttc

SEQ ID NO: 438033 - DNA, 15 bp, Homo sapiens
ctattttagatactt

SEQ ID NO: 438034 - DNA, 15 bp, Homo sapiens
actattttagatact

SEQ ID NO: 438035 - DNA, 15 bp, Homo sapiens
gactattttagatac

SEQ ID NO: 438036 - DNA, 15 bp, Homo sapiens
tgactattttagata

SEQ ID NO: 438037 - DNA, 15 bp, Homo sapiens
ttgactattttagat

SEQ ID NO: 438038 - DNA, 15 bp, Homo sapiens
tttgactattttaga

SEQ ID NO: 438039 - DNA, 15 bp, Homo sapiens
atttgactattttag

SEQ ID NO: 438040 - DNA, 15 bp, Homo sapiens
aatttgactatttta

SEQ ID NO: 438041 - DNA, 15 bp, Homo sapiens
gaatttgactatttt

SEQ ID NO: 438042 - DNA, 15 bp, Homo sapiens
tgaatttgactattt

SEQ ID NO: 438043 - DNA, 15 bp, Homo sapiens
atgaatttgactatt

SEQ ID NO: 438044 - DNA, 15 bp, Homo sapiens
tatgaatttgactat

SEQ ID NO: 438045 - DNA, 15 bp, Homo sapiens
ctatgaatttgacta

SEQ ID NO: 438046 - DNA, 15 bp, Homo sapiens
tctatgaatttgact

SEQ ID NO: 438047 - DNA, 15 bp, Homo sapiens
atctatgaatttgac

SEQ ID NO: 438048 - DNA, 15 bp, Homo sapiens
aatctatgaatttga

SEQ ID NO: 438049 - DNA, 15 bp, Homo sapiens
taatctatgaatttg

SEQ ID NO: 438050 - DNA, 15 bp, Homo sapiens
ttaatctatgaattt

SEQ ID NO: 438051 - DNA, 15 bp, Homo sapiens
tttaatctatgaatt

SEQ ID NO: 438052 - DNA, 15 bp, Homo sapiens
ttttaatctatgaat

SEQ ID NO: 438053 - DNA, 15 bp, Homo sapiens
tttttaatctatgaa

SEQ ID NO: 438054 - DNA, 15 bp, Homo sapiens
ttttttaatctatga

SEQ ID NO: 438055 - DNA, 15 bp, Homo sapiens
cttttttaatctatg

SEQ ID NO: 438056 - DNA, 15 bp, Homo sapiens
acttttttaatctat

SEQ ID NO: 438057 - DNA, 15 bp, Homo sapiens
cacttttttaatcta

SEQ ID NO: 438058 - DNA, 15 bp, Homo sapiens
ccacttttttaatct

SEQ ID NO: 438059 - DNA, 15 bp, Homo sapiens
tccacttttttaatc

SEQ ID NO: 438060 - DNA, 15 bp, Homo sapiens
ttccacttttttaat

SEQ ID NO: 438061 - DNA, 15 bp, Homo sapiens
attccacttttttaa

SEQ ID NO: 438062 - DNA, 15 bp, Homo sapiens
cattccactttttta

SEQ ID NO: 438063 - DNA, 15 bp, Homo sapiens
ccattccactttttt

SEQ ID NO: 438064 - DNA, 15 bp, Homo sapiens
accattccacttttt

SEQ ID NO: 438065 - DNA, 15 bp, Homo sapiens
caccattccactttt

SEQ ID NO: 438066 - DNA, 15 bp, Homo sapiens
ccaccattccacttt

SEQ ID NO: 438067 - DNA, 15 bp, Homo sapiens
accaccattccactt

SEQ ID NO: 438068 - DNA, 15 bp, Homo sapiens
taccaccattccact

SEQ ID NO: 438069 - DNA, 15 bp, Homo sapiens
ctaccaccattccac

SEQ ID NO: 438070 - DNA, 15 bp, Homo sapiens
actaccaccattcca

SEQ ID NO: 438071 - DNA, 15 bp, Homo sapiens
aactaccaccattcc

SEQ ID NO: 438072 - DNA, 15 bp, Homo sapiens
taactaccaccattc

SEQ ID NO: 438073 - DNA, 15 bp, Homo sapiens
ataactaccaccatt

SEQ ID NO: 438074 - DNA, 15 bp, Homo sapiens
gataactaccaccat

SEQ ID NO: 438075 - DNA, 15 bp, Homo sapiens
tgataactaccacca

SEQ ID NO: 438076 - DNA, 15 bp, Homo sapiens
ctgataactaccacc

SEQ ID NO: 438077 - DNA, 15 bp, Homo sapiens
cctgataactaccac

SEQ ID NO: 438078 - DNA, 15 bp, Homo sapiens
ccctgataactacca

SEQ ID NO: 438079 - DNA, 15 bp, Homo sapiens
cccctgataactacc

SEQ ID NO: 438080 - DNA, 15 bp, Homo sapiens
gcccctgataactac

SEQ ID NO: 438081 - DNA, 15 bp, Homo sapiens
agcccctgataacta

SEQ ID NO: 438082 - DNA, 15 bp, Homo sapiens
cagcccctgataact

SEQ ID NO: 438083 - DNA, 15 bp, Homo sapiens
ccagcccctgataac

SEQ ID NO: 438084 - DNA, 15 bp, Homo sapiens
cccagcccctgataa

SEQ ID NO: 438085 - DNA, 15 bp, Homo sapiens
tcccagcccctgata

SEQ ID NO: 438086 - DNA, 15 bp, Homo sapiens
ctcccagcccctgat

SEQ ID NO: 438087 - DNA, 15 bp, Homo sapiens
cctcccagcccctga

SEQ ID NO: 438088 - DNA, 15 bp, Homo sapiens
tcctcccagcccctg

SEQ ID NO: 438089 - DNA, 15 bp, Homo sapiens
ctcctcccagcccct

SEQ ID NO: 438090 - DNA, 15 bp, Homo sapiens
cctcctcccagcccc

SEQ ID NO: 438091 - DNA, 15 bp, Homo sapiens
ccctcctcccagccc

SEQ ID NO: 438092 - DNA, 15 bp, Homo sapiens
cccctcctcccagcc

SEQ ID NO: 438093 - DNA, 15 bp, Homo sapiens
ccccctcctcccagc

SEQ ID NO: 438094 - DNA, 15 bp, Homo sapiens
accccctcctcccag

SEQ ID NO: 438095 - DNA, 15 bp, Homo sapiens
taccccctcctccca

SEQ ID NO: 438096 - DNA, 15 bp, Homo sapiens
ttaccccctcctccc

SEQ ID NO: 438097 - DNA, 15 bp, Homo sapiens
gttaccccctcctcc

SEQ ID NO: 438098 - DNA, 15 bp, Homo sapiens
cgttaccccctcctc

SEQ ID NO: 438099 - DNA, 15 bp, Homo sapiens
ccgttaccccctcct

SEQ ID NO: 438100 - DNA, 15 bp, Homo sapiens
tccgttaccccctcc

SEQ ID NO: 438101 - DNA, 15 bp, Homo sapiens
ttccgttaccccctc

SEQ ID NO: 438102 - DNA, 15 bp, Homo sapiens
cttccgttaccccct

SEQ ID NO: 438103 - DNA, 15 bp, Homo sapiens
acttccgttaccccc

SEQ ID NO: 438104 - DNA, 15 bp, Homo sapiens
aacttccgttacccc

SEQ ID NO: 438105 - DNA, 15 bp, Homo sapiens
taacttccgttaccc

SEQ ID NO: 438106 - DNA, 15 bp, Homo sapiens
gtaacttccgttacc

SEQ ID NO: 438107 - DNA, 15 bp, Homo sapiens
agtaacttccgttac

SEQ ID NO: 438108 - DNA, 15 bp, Homo sapiens
tagtaacttccgtta

SEQ ID NO: 438109 - DNA, 15 bp, Homo sapiens
ttagtaacttccgtt

SEQ ID NO: 438110 - DNA, 15 bp, Homo sapiens
attagtaacttccgt

SEQ ID NO: 438111 - DNA, 15 bp, Homo sapiens
gattagtaacttccg

SEQ ID NO: 438112 - DNA, 15 bp, Homo sapiens
tgattagtaacttcc

SEQ ID NO: 438113 - DNA, 15 bp, Homo sapiens
ttgattagtaacttc

SEQ ID NO: 438114 - DNA, 15 bp, Homo sapiens
attgattagtaactt

SEQ ID NO: 438115 - DNA, 15 bp, Homo sapiens
cattgattagtaact

SEQ ID NO: 438116 - DNA, 15 bp, Homo sapiens
ccattgattagtaac

SEQ ID NO: 438117 - DNA, 15 bp, Homo sapiens
gccattgattagtaa

SEQ ID NO: 438118 - DNA, 15 bp, Homo sapiens
ggccattgattagta

SEQ ID NO: 438119 - DNA, 15 bp, Homo sapiens
tggccattgattagt

SEQ ID NO: 438120 - DNA, 15 bp, Homo sapiens
atggccattgattag

SEQ ID NO: 438121 - DNA, 15 bp, Homo sapiens
tatggccattgatta

SEQ ID NO: 438122 - DNA, 15 bp, Homo sapiens
ttatggccattgatt

SEQ ID NO: 438123 - DNA, 15 bp, Homo sapiens
tttatggccattgat

SEQ ID NO: 438124 - DNA, 15 bp, Homo sapiens
ctttatggccattga

SEQ ID NO: 438125 - DNA, 15 bp, Homo sapiens
actttatggccattg

SEQ ID NO: 438126 - DNA, 15 bp, Homo sapiens
aactttatggccatt

SEQ ID NO: 438127 - DNA, 15 bp, Homo sapiens
aaactttatggccat

SEQ ID NO: 438128 - DNA, 15 bp, Homo sapiens
gaaactttatggcca

SEQ ID NO: 438129 - DNA, 15 bp, Homo sapiens
tgaaactttatggcc

SEQ ID NO: 438130 - DNA, 15 bp, Homo sapiens
ctgaaactttatggc

SEQ ID NO: 438131 - DNA, 15 bp, Homo sapiens
actgaaactttatgg

SEQ ID NO: 438132 - DNA, 15 bp, Homo sapiens
gactgaaactttatg

SEQ ID NO: 438133 - DNA, 15 bp, Homo sapiens
tgactgaaactttat

SEQ ID NO: 438134 - DNA, 15 bp, Homo sapiens
ttgactgaaacttta

SEQ ID NO: 438135 - DNA, 15 bp, Homo sapiens
cttgactgaaacttt

SEQ ID NO: 438136 - DNA, 15 bp, Homo sapiens
acttgactgaaactt

SEQ ID NO: 438137 - DNA, 15 bp, Homo sapiens
tacttgactgaaact

SEQ ID NO: 438138 - DNA, 15 bp, Homo sapiens
ttacttgactgaaac

SEQ ID NO: 438139 - DNA, 15 bp, Homo sapiens
cttacttgactgaaa

SEQ ID NO: 438140 - DNA, 15 bp, Homo sapiens
tcttacttgactgaa

SEQ ID NO: 438141 - DNA, 15 bp, Homo sapiens
atcttacttgactga

SEQ ID NO: 438142 - DNA, 15 bp, Homo sapiens
gatcttacttgactg

SEQ ID NO: 438143 - DNA, 15 bp, Homo sapiens
tgatcttacttgact

SEQ ID NO: 438144 - DNA, 15 bp, Homo sapiens
ttgatcttacttgac

SEQ ID NO: 438145 - DNA, 15 bp, Homo sapiens
attgatcttacttga

SEQ ID NO: 438146 - DNA, 15 bp, Homo sapiens
tattgatcttacttg

SEQ ID NO: 438147 - DNA, 15 bp, Homo sapiens
ctattgatcttactt

SEQ ID NO: 438148 - DNA, 15 bp, Homo sapiens
cctattgatcttact

SEQ ID NO: 438149 - DNA, 15 bp, Homo sapiens
gcctattgatcttac

SEQ ID NO: 438150 - DNA, 15 bp, Homo sapiens
agcctattgatctta

SEQ ID NO: 438151 - DNA, 15 bp, Homo sapiens
gagcctattgatctt

SEQ ID NO: 438152 - DNA, 15 bp, Homo sapiens
agagcctattgatct

SEQ ID NO: 438153 - DNA, 15 bp, Homo sapiens
tagagcctattgatc

SEQ ID NO: 438154 - DNA, 15 bp, Homo sapiens
gtagagcctattgat

SEQ ID NO: 438155 - DNA, 15 bp, Homo sapiens
tgtagagcctattga

SEQ ID NO: 438156 - DNA, 15 bp, Homo sapiens
ctgtagagcctattg

SEQ ID NO: 438157 - DNA, 15 bp, Homo sapiens
tctgtagagcctatt

SEQ ID NO: 438158 - DNA, 15 bp, Homo sapiens
gtctgtagagcctat

SEQ ID NO: 438159 - DNA, 15 bp, Homo sapiens
agtctgtagagccta

SEQ ID NO: 438160 - DNA, 15 bp, Homo sapiens
aagtctgtagagcct

SEQ ID NO: 438161 - DNA, 15 bp, Homo sapiens
caagtctgtagagcc

SEQ ID NO: 438162 - DNA, 15 bp, Homo sapiens
acaagtctgtagagc

SEQ ID NO: 438163 - DNA, 15 bp, Homo sapiens
tacaagtctgtagag

SEQ ID NO: 438164 - DNA, 15 bp, Homo sapiens
gtacaagtctgtaga

SEQ ID NO: 438165 - DNA, 15 bp, Homo sapiens
tgtacaagtctgtag

SEQ ID NO: 438166 - DNA, 15 bp, Homo sapiens
ctgtacaagtctgta

SEQ ID NO: 438167 - DNA, 15 bp, Homo sapiens
actgtacaagtctgt

SEQ ID NO: 438168 - DNA, 15 bp, Homo sapiens
tactgtacaagtctg

SEQ ID NO: 438169 - DNA, 15 bp, Homo sapiens
gtactgtacaagtct

SEQ ID NO: 438170 - DNA, 15 bp, Homo sapiens
tgtactgtacaagtc

SEQ ID NO: 438171 - DNA, 15 bp, Homo sapiens
ttgtactgtacaagt

SEQ ID NO: 438172 - DNA, 15 bp, Homo sapiens
cttgtactgtacaag

SEQ ID NO: 438173 - DNA, 15 bp, Homo sapiens
acttgtactgtacaa

SEQ ID NO: 438174 - DNA, 15 bp, Homo sapiens
gacttgtactgtaca

SEQ ID NO: 438175 - DNA, 15 bp, Homo sapiens
tgacttgtactgtac

SEQ ID NO: 438176 - DNA, 15 bp, Homo sapiens
ttgacttgtactgta

SEQ ID NO: 438177 - DNA, 15 bp, Homo sapiens
gttgacttgtactgt

SEQ ID NO: 438178 - DNA, 15 bp, Homo sapiens
tgttgacttgtactg

SEQ ID NO: 438179 - DNA, 15 bp, Homo sapiens
gtgttgacttgtact

SEQ ID NO: 438180 - DNA, 15 bp, Homo sapiens
agtgttgacttgtac

SEQ ID NO: 438181 - DNA, 15 bp, Homo sapiens
aagtgttgacttgta

SEQ ID NO: 438182 - DNA, 15 bp, Homo sapiens
caagtgttgacttgt

SEQ ID NO: 438183 - DNA, 15 bp, Homo sapiens
acaagtgttgacttg

SEQ ID NO: 438184 - DNA, 15 bp, Homo sapiens
cacaagtgttgactt

SEQ ID NO: 438185 - DNA, 15 bp, Homo sapiens
acacaagtgttgact

SEQ ID NO: 438186 - DNA, 15 bp, Homo sapiens
tacacaagtgttgac

SEQ ID NO: 438187 - DNA, 15 bp, Homo sapiens
gtacacaagtgttga

SEQ ID NO: 438188 - DNA, 15 bp, Homo sapiens
tgtacacaagtgttg

SEQ ID NO: 438189 - DNA, 15 bp, Homo sapiens
ttgtacacaagtgtt

SEQ ID NO: 438190 - DNA, 15 bp, Homo sapiens
gttgtacacaagtgt

SEQ ID NO: 438191 - DNA, 15 bp, Homo sapiens
tgttgtacacaagtg

SEQ ID NO: 438192 - DNA, 15 bp, Homo sapiens
ttgttgtacacaagt

SEQ ID NO: 438193 - DNA, 15 bp, Homo sapiens
attgttgtacacaag

SEQ ID NO: 438194 - DNA, 15 bp, Homo sapiens
tattgttgtacacaa

SEQ ID NO: 438195 - DNA, 15 bp, Homo sapiens
gtattgttgtacaca

SEQ ID NO: 438196 - DNA, 15 bp, Homo sapiens
agtattgttgtacac

SEQ ID NO: 438197 - DNA, 15 bp, Homo sapiens
cagtattgttgtaca

SEQ ID NO: 438198 - DNA, 15 bp, Homo sapiens
acagtattgttgtac

SEQ ID NO: 438199 - DNA, 15 bp, Homo sapiens
tacagtattgttgta

SEQ ID NO: 438200 - DNA, 15 bp, Homo sapiens
gtacagtattgttgt

SEQ ID NO: 438201 - DNA, 15 bp, Homo sapiens
agtacagtattgttg

SEQ ID NO: 438202 - DNA, 15 bp, Homo sapiens
tagtacagtattgtt

SEQ ID NO: 438203 - DNA, 15 bp, Homo sapiens
atagtacagtattgt

SEQ ID NO: 438204 - DNA, 15 bp, Homo sapiens
gatagtacagtattg

SEQ ID NO: 438205 - DNA, 15 bp, Homo sapiens
tgatagtacagtatt

SEQ ID NO: 438206 - DNA, 15 bp, Homo sapiens
gtgatagtacagtat

SEQ ID NO: 438207 - DNA, 15 bp, Homo sapiens
ggtgatagtacagta

SEQ ID NO: 438208 - DNA, 15 bp, Homo sapiens
tggtgatagtacagt

SEQ ID NO: 438209 - DNA, 15 bp, Homo sapiens
ttggtgatagtacag

SEQ ID NO: 438210 - DNA, 15 bp, Homo sapiens
gttggtgatagtaca

SEQ ID NO: 438211 - DNA, 15 bp, Homo sapiens
tgttggtgatagtac

SEQ ID NO: 438212 - DNA, 15 bp, Homo sapiens
ctgttggtgatagta

SEQ ID NO: 438213 - DNA, 15 bp, Homo sapiens
actgttggtgatagt

SEQ ID NO: 438214 - DNA, 15 bp, Homo sapiens
tactgttggtgatag

SEQ ID NO: 438215 - DNA, 15 bp, Homo sapiens
ttactgttggtgata

SEQ ID NO: 438216 - DNA, 15 bp, Homo sapiens
attactgttggtgat

SEQ ID NO: 438217 - DNA, 15 bp, Homo sapiens
cattactgttggtga

SEQ ID NO: 438218 - DNA, 15 bp, Homo sapiens
acattactgttggtg

SEQ ID NO: 438219 - DNA, 15 bp, Homo sapiens
tacattactgttggt

SEQ ID NO: 438220 - DNA, 15 bp, Homo sapiens
atacattactgttgg

SEQ ID NO: 438221 - DNA, 15 bp, Homo sapiens
aatacattactgttg

SEQ ID NO: 438222 - DNA, 15 bp, Homo sapiens
caatacattactgtt

SEQ ID NO: 438223 - DNA, 15 bp, Homo sapiens
acaatacattactgt

SEQ ID NO: 438224 - DNA, 15 bp, Homo sapiens
tacaatacattactg

SEQ ID NO: 438225 - DNA, 15 bp, Homo sapiens
gtacaatacattact

SEQ ID NO: 438226 - DNA, 15 bp, Homo sapiens
tgtacaatacattac

SEQ ID NO: 438227 - DNA, 15 bp, Homo sapiens
gtgtacaatacatta

SEQ ID NO: 438228 - DNA, 15 bp, Homo sapiens
agtgtacaatacatt

SEQ ID NO: 438229 - DNA, 15 bp, Homo sapiens
aagtgtacaatacat

SEQ ID NO: 438230 - DNA, 15 bp, Homo sapiens
taagtgtacaataca

SEQ ID NO: 438231 - DNA, 15 bp, Homo sapiens
ttaagtgtacaatac

SEQ ID NO: 438232 - DNA, 15 bp, Homo sapiens
tttaagtgtacaata

SEQ ID NO: 438233 - DNA, 15 bp, Homo sapiens
ttttaagtgtacaat

SEQ ID NO: 438234 - DNA, 15 bp, Homo sapiens
tttttaagtgtacaa

SEQ ID NO: 438235 - DNA, 15 bp, Homo sapiens
atttttaagtgtaca

SEQ ID NO: 438236 - DNA, 15 bp, Homo sapiens
aatttttaagtgtac

SEQ ID NO: 438237 - DNA, 15 bp, Homo sapiens
caatttttaagtgta

SEQ ID NO: 438238 - DNA, 15 bp, Homo sapiens
tcaatttttaagtgt

SEQ ID NO: 438239 - DNA, 15 bp, Homo sapiens
ttcaatttttaagtg

SEQ ID NO: 438240 - DNA, 15 bp, Homo sapiens
cttcaatttttaagt

SEQ ID NO: 438241 - DNA, 15 bp, Homo sapiens
tcttcaatttttaag

SEQ ID NO: 438242 - DNA, 15 bp, Homo sapiens
ctcttcaatttttaa

SEQ ID NO: 438243 - DNA, 15 bp, Homo sapiens
cctcttcaattttta

SEQ ID NO: 438244 - DNA, 15 bp, Homo sapiens
ccctcttcaattttt

SEQ ID NO: 438245 - DNA, 15 bp, Homo sapiens
accctcttcaatttt

SEQ ID NO: 438246 - DNA, 15 bp, Homo sapiens
taccctcttcaattt

SEQ ID NO: 438247 - DNA, 15 bp, Homo sapiens
ataccctcttcaatt

SEQ ID NO: 438248 - DNA, 15 bp, Homo sapiens
tataccctcttcaat

SEQ ID NO: 438249 - DNA, 15 bp, Homo sapiens
atataccctcttcaa

SEQ ID NO: 438250 - DNA, 15 bp, Homo sapiens
gatataccctcttca

SEQ ID NO: 438251 - DNA, 15 bp, Homo sapiens
agatataccctcttc

SEQ ID NO: 438252 - DNA, 15 bp, Homo sapiens
gagatataccctctt

SEQ ID NO: 438253 - DNA, 15 bp, Homo sapiens
tgagatataccctct

SEQ ID NO: 438254 - DNA, 15 bp, Homo sapiens
atgagatataccctc

SEQ ID NO: 438255 - DNA, 15 bp, Homo sapiens
gatgagatataccct

SEQ ID NO: 438256 - DNA, 15 bp, Homo sapiens
agatgagatataccc

SEQ ID NO: 438257 - DNA, 15 bp, Homo sapiens
aagatgagatatacc

SEQ ID NO: 438258 - DNA, 15 bp, Homo sapiens
taagatgagatatac

SEQ ID NO: 438259 - DNA, 15 bp, Homo sapiens
ttaagatgagatata

SEQ ID NO: 438260 - DNA, 15 bp, Homo sapiens
cttaagatgagatat

SEQ ID NO: 438261 - DNA, 15 bp, Homo sapiens
acttaagatgagata

SEQ ID NO: 438262 - DNA, 15 bp, Homo sapiens
tacttaagatgagat

SEQ ID NO: 438263 - DNA, 15 bp, Homo sapiens
atacttaagatgaga

SEQ ID NO: 438264 - DNA, 15 bp, Homo sapiens
aatacttaagatgag

SEQ ID NO: 438265 - DNA, 15 bp, Homo sapiens
gaatacttaagatga

SEQ ID NO: 438266 - DNA, 15 bp, Homo sapiens
agaatacttaagatg

SEQ ID NO: 438267 - DNA, 15 bp, Homo sapiens
aagaatacttaagat

SEQ ID NO: 438268 - DNA, 15 bp, Homo sapiens
taagaatacttaaga

SEQ ID NO: 438269 - DNA, 15 bp, Homo sapiens
gtaagaatacttaag

SEQ ID NO: 438270 - DNA, 15 bp, Homo sapiens
ggtaagaatacttaa

SEQ ID NO: 438271 - DNA, 15 bp, Homo sapiens
tggtaagaatactta

SEQ ID NO: 438272 - DNA, 15 bp, Homo sapiens
gtggtaagaatactt

SEQ ID NO: 438273 - DNA, 15 bp, Homo sapiens
tgtggtaagaatact

SEQ ID NO: 438274 - DNA, 15 bp, Homo sapiens
ttgtggtaagaatac

SEQ ID NO: 438275 - DNA, 15 bp, Homo sapiens
attgtggtaagaata

SEQ ID NO: 438276 - DNA, 15 bp, Homo sapiens
tattgtggtaagaat

SEQ ID NO: 438277 - DNA, 15 bp, Homo sapiens
ttattgtggtaagaa

SEQ ID NO: 438278 - DNA, 15 bp, Homo sapiens
tttattgtggtaaga

SEQ ID NO: 438279 - DNA, 15 bp, Homo sapiens
ttttattgtggtaag

SEQ ID NO: 438280 - DNA, 15 bp, Homo sapiens
attttattgtggtaa

SEQ ID NO: 438281 - DNA, 15 bp, Homo sapiens
tattttattgtggta

SEQ ID NO: 438282 - DNA, 15 bp, Homo sapiens
ttattttattgtggt

SEQ ID NO: 438283 - DNA, 15 bp, Homo sapiens
tttattttattgtgg

SEQ ID NO: 438284 - DNA, 15 bp, Homo sapiens
ttttattttattgtg

SEQ ID NO: 438285 - DNA, 15 bp, Homo sapiens
attttattttattgt

SEQ ID NO: 438286 - DNA, 15 bp, Homo sapiens
aattttattttattg

SEQ ID NO: 438287 - DNA, 15 bp, Homo sapiens
taattttattttatt

SEQ ID NO: 438288 - DNA, 15 bp, Homo sapiens
ttaattttattttat

SEQ ID NO: 438289 - DNA, 15 bp, Homo sapiens
tttaattttatttta

SEQ ID NO: 438290 - DNA, 15 bp, Homo sapiens
ctttaattttatttt

SEQ ID NO: 438291 - DNA, 15 bp, Homo sapiens
actttaattttattt

SEQ ID NO: 438292 - DNA, 15 bp, Homo sapiens
aactttaattttatt

SEQ ID NO: 438293 - DNA, 15 bp, Homo sapiens
aaactttaattttat

SEQ ID NO: 438294 - DNA, 15 bp, Homo sapiens
gaaactttaatttta

SEQ ID NO: 438295 - DNA, 15 bp, Homo sapiens
ggaaactttaatttt

SEQ ID NO: 438296 - DNA, 15 bp, Homo sapiens
aggaaactttaattt

SEQ ID NO: 438297 - DNA, 15 bp, Homo sapiens
taggaaactttaatt

SEQ ID NO: 438298 - DNA, 15 bp, Homo sapiens
ataggaaactttaat

SEQ ID NO: 438299 - DNA, 15 bp, Homo sapiens
cataggaaactttaa

SEQ ID NO: 438300 - DNA, 15 bp, Homo sapiens
tcataggaaacttta

SEQ ID NO: 438301 - DNA, 15 bp, Homo sapiens
gtcataggaaacttt

SEQ ID NO: 438302 - DNA, 15 bp, Homo sapiens
agtcataggaaactt

SEQ ID NO: 438303 - DNA, 15 bp, Homo sapiens
cagtcataggaaact

SEQ ID NO: 438304 - DNA, 15 bp, Homo sapiens
ccagtcataggaaac

SEQ ID NO: 438305 - DNA, 15 bp, Homo sapiens
tccagtcataggaaa

SEQ ID NO: 438306 - DNA, 15 bp, Homo sapiens
ttccagtcataggaa

SEQ ID NO: 438307 - DNA, 15 bp, Homo sapiens
tttccagtcatagga

SEQ ID NO: 438308 - DNA, 15 bp, Homo sapiens
ttttccagtcatagg

SEQ ID NO: 438309 - DNA, 15 bp, Homo sapiens
tttttccagtcatag

SEQ ID NO: 438310 - DNA, 15 bp, Homo sapiens
ctttttccagtcata

SEQ ID NO: 438311 - DNA, 15 bp, Homo sapiens
cctttttccagtcat

SEQ ID NO: 438312 - DNA, 15 bp, Homo sapiens
gcctttttccagtca

SEQ ID NO: 438313 - DNA, 15 bp, Homo sapiens
agcctttttccagtc

SEQ ID NO: 438314 - DNA, 15 bp, Homo sapiens
aagcctttttccagt

SEQ ID NO: 438315 - DNA, 15 bp, Homo sapiens
caagcctttttccag

SEQ ID NO: 438316 - DNA, 15 bp, Homo sapiens
ccaagcctttttcca

SEQ ID NO: 438317 - DNA, 15 bp, Homo sapiens
cccaagcctttttcc

SEQ ID NO: 438318 - DNA, 15 bp, Homo sapiens
ccccaagcctttttc

SEQ ID NO: 438319 - DNA, 15 bp, Homo sapiens
tccccaagccttttt

SEQ ID NO: 438320 - DNA, 15 bp, Homo sapiens
ctccccaagcctttt

SEQ ID NO: 438321 - DNA, 15 bp, Homo sapiens
cctccccaagccttt

SEQ ID NO: 438322 - DNA, 15 bp, Homo sapiens
tcctccccaagcctt

SEQ ID NO: 438323 - DNA, 15 bp, Homo sapiens
ctcctccccaagcct

SEQ ID NO: 438324 - DNA, 15 bp, Homo sapiens
cctcctccccaagcc

SEQ ID NO: 438325 - DNA, 15 bp, Homo sapiens
acctcctccccaagc

SEQ ID NO: 438326 - DNA, 15 bp, Homo sapiens
cacctcctccccaag

SEQ ID NO: 438327 - DNA, 15 bp, Homo sapiens
tcacctcctccccaa

SEQ ID NO: 438328 - DNA, 15 bp, Homo sapiens
ctcacctcctcccca

SEQ ID NO: 438329 - DNA, 15 bp, Homo sapiens
actcacctcctcccc

SEQ ID NO: 438330 - DNA, 15 bp, Homo sapiens
tactcacctcctccc

SEQ ID NO: 438331 - DNA, 15 bp, Homo sapiens
ttactcacctcctcc

SEQ ID NO: 438332 - DNA, 15 bp, Homo sapiens
gttactcacctcctc

SEQ ID NO: 438333 - DNA, 15 bp, Homo sapiens
agttactcacctcct

SEQ ID NO: 438334 - DNA, 15 bp, Homo sapiens
cagttactcacctcc

SEQ ID NO: 438335 - DNA, 15 bp, Homo sapiens
tcagttactcacctc

SEQ ID NO: 438336 - DNA, 15 bp, Homo sapiens
ctcagttactcacct

SEQ ID NO: 438337 - DNA, 15 bp, Homo sapiens
cctcagttactcacc

SEQ ID NO: 438338 - DNA, 15 bp, Homo sapiens
tcctcagttactcac

SEQ ID NO: 438339 - DNA, 15 bp, Homo sapiens
ctcctcagttactca

SEQ ID NO: 438340 - DNA, 15 bp, Homo sapiens
actcctcagttactc

SEQ ID NO: 438341 - DNA, 15 bp, Homo sapiens
cactcctcagttact

SEQ ID NO: 438342 - DNA, 15 bp, Homo sapiens
ccactcctcagttac

SEQ ID NO: 438343 - DNA, 15 bp, Homo sapiens
tccactcctcagtta

SEQ ID NO: 438344 - DNA, 15 bp, Homo sapiens
atccactcctcagtt

SEQ ID NO: 438345 - DNA, 15 bp, Homo sapiens
tatccactcctcagt

SEQ ID NO: 438346 - DNA, 15 bp, Homo sapiens
atatccactcctcag

SEQ ID NO: 438347 - DNA, 15 bp, Homo sapiens
tatatccactcctca

SEQ ID NO: 438348 - DNA, 15 bp, Homo sapiens
ctatatccactcctc

SEQ ID NO: 438349 - DNA, 15 bp, Homo sapiens
tctatatccactcct

SEQ ID NO: 438350 - DNA, 15 bp, Homo sapiens
ctctatatccactcc

SEQ ID NO: 438351 - DNA, 15 bp, Homo sapiens
tctctatatccactc

SEQ ID NO: 438352 - DNA, 15 bp, Homo sapiens
ttctctatatccact

SEQ ID NO: 438353 - DNA, 15 bp, Homo sapiens
tttctctatatccac

SEQ ID NO: 438354 - DNA, 15 bp, Homo sapiens
atttctctatatcca

SEQ ID NO: 438355 - DNA, 15 bp, Homo sapiens
tatttctctatatcc

SEQ ID NO: 438356 - DNA, 15 bp, Homo sapiens
ttatttctctatatc

SEQ ID NO: 438357 - DNA, 15 bp, Homo sapiens
cttatttctctatat

SEQ ID NO: 438358 - DNA, 15 bp, Homo sapiens
gcttatttctctata

SEQ ID NO: 438359 - DNA, 15 bp, Homo sapiens
ggcttatttctctat

SEQ ID NO: 438360 - DNA, 15 bp, Homo sapiens
aggcttatttctcta

SEQ ID NO: 438361 - DNA, 15 bp, Homo sapiens
gaggcttatttctct

SEQ ID NO: 438362 - DNA, 15 bp, Homo sapiens
ggaggcttatttctc

SEQ ID NO: 438363 - DNA, 15 bp, Homo sapiens
aggaggcttatttct

SEQ ID NO: 438364 - DNA, 15 bp, Homo sapiens
caggaggcttatttc

SEQ ID NO: 438365 - DNA, 15 bp, Homo sapiens
gcaggaggcttattt

SEQ ID NO: 438366 - DNA, 15 bp, Homo sapiens
tgcaggaggcttatt

SEQ ID NO: 438367 - DNA, 15 bp, Homo sapiens
ctgcaggaggcttat

SEQ ID NO: 438368 - DNA, 15 bp, Homo sapiens
tctgcaggaggctta

SEQ ID NO: 438369 - DNA, 15 bp, Homo sapiens
atctgcaggaggctt

SEQ ID NO: 438370 - DNA, 15 bp, Homo sapiens
catctgcaggaggct

SEQ ID NO: 438371 - DNA, 15 bp, Homo sapiens
tcatctgcaggaggc

SEQ ID NO: 438372 - DNA, 15 bp, Homo sapiens
ttcatctgcaggagg

SEQ ID NO: 438373 - DNA, 15 bp, Homo sapiens
tttcatctgcaggag

SEQ ID NO: 438374 - DNA, 15 bp, Homo sapiens
ttttcatctgcagga

SEQ ID NO: 438375 - DNA, 15 bp, Homo sapiens
gttttcatctgcagg

SEQ ID NO: 438376 - DNA, 15 bp, Homo sapiens
agttttcatctgcag

SEQ ID NO: 438377 - DNA, 15 bp, Homo sapiens
cagttttcatctgca

SEQ ID NO: 438378 - DNA, 15 bp, Homo sapiens
acagttttcatctgc

SEQ ID NO: 438379 - DNA, 15 bp, Homo sapiens
aacagttttcatctg

SEQ ID NO: 438380 - DNA, 15 bp, Homo sapiens
caacagttttcatct

SEQ ID NO: 438381 - DNA, 15 bp, Homo sapiens
ccaacagttttcatc

SEQ ID NO: 438382 - DNA, 15 bp, Homo sapiens
tccaacagttttcat

SEQ ID NO: 438383 - DNA, 15 bp, Homo sapiens
ctccaacagttttca

SEQ ID NO: 438384 - DNA, 15 bp, Homo sapiens
cctccaacagttttc

SEQ ID NO: 438385 - DNA, 15 bp, Homo sapiens
ccctccaacagtttt

SEQ ID NO: 438386 - DNA, 15 bp, Homo sapiens
tccctccaacagttt

SEQ ID NO: 438387 - DNA, 15 bp, Homo sapiens
ctccctccaacagtt

SEQ ID NO: 438388 - DNA, 15 bp, Homo sapiens
tctccctccaacagt

SEQ ID NO: 438389 - DNA, 15 bp, Homo sapiens
ctctccctccaacag

SEQ ID NO: 438390 - DNA, 15 bp, Homo sapiens
tctctccctccaaca

SEQ ID NO: 438391 - DNA, 15 bp, Homo sapiens
ctctctccctccaac

SEQ ID NO: 438392 - DNA, 15 bp, Homo sapiens
tctctctccctccaa

SEQ ID NO: 438393 - DNA, 15 bp, Homo sapiens
ttctctctccctcca

SEQ ID NO: 438394 - DNA, 15 bp, Homo sapiens
tttctctctccctcc

SEQ ID NO: 438395 - DNA, 15 bp, Homo sapiens
ttttctctctccctc

SEQ ID NO: 438396 - DNA, 15 bp, Homo sapiens
tttttctctctccct

SEQ ID NO: 438397 - DNA, 15 bp, Homo sapiens
atttttctctctccc

SEQ ID NO: 438398 - DNA, 15 bp, Homo sapiens
catttttctctctcc

SEQ ID NO: 438399 - DNA, 15 bp, Homo sapiens
ccatttttctctctc

SEQ ID NO: 438400 - DNA, 15 bp, Homo sapiens
tccatttttctctct

SEQ ID NO: 438401 - DNA, 15 bp, Homo sapiens
ttccatttttctctc

SEQ ID NO: 438402 - DNA, 15 bp, Homo sapiens
attccatttttctct

SEQ ID NO: 438403 - DNA, 15 bp, Homo sapiens
cattccatttttctc

SEQ ID NO: 438404 - DNA, 15 bp, Homo sapiens
acattccatttttct

SEQ ID NO: 438405 - DNA, 15 bp, Homo sapiens
tacattccatttttc

SEQ ID NO: 438406 - DNA, 15 bp, Homo sapiens
atacattccattttt

SEQ ID NO: 438407 - DNA, 15 bp, Homo sapiens
tatacattccatttt

SEQ ID NO: 438408 - DNA, 15 bp, Homo sapiens
atatacattccattt

SEQ ID NO: 438409 - DNA, 15 bp, Homo sapiens
gatatacattccatt

SEQ ID NO: 438410 - DNA, 15 bp, Homo sapiens
cgatatacattccat

SEQ ID NO: 438411 - DNA, 15 bp, Homo sapiens
acgatatacattcca

SEQ ID NO: 438412 - DNA, 15 bp, Homo sapiens
tacgatatacattcc

SEQ ID NO: 438413 - DNA, 15 bp, Homo sapiens
ttacgatatacattc

SEQ ID NO: 438414 - DNA, 15 bp, Homo sapiens
tttacgatatacatt

SEQ ID NO: 438415 - DNA, 15 bp, Homo sapiens
ctttacgatatacat

SEQ ID NO: 438416 - DNA, 15 bp, Homo sapiens
actttacgatataca

SEQ ID NO: 438417 - DNA, 15 bp, Homo sapiens
tactttacgatatac

SEQ ID NO: 438418 - DNA, 15 bp, Homo sapiens
ttactttacgatata

SEQ ID NO: 438419 - DNA, 15 bp, Homo sapiens
tttactttacgatat

SEQ ID NO: 438420 - DNA, 15 bp, Homo sapiens
ttttactttacgata

SEQ ID NO: 438421 - DNA, 15 bp, Homo sapiens
tttttactttacgat

SEQ ID NO: 438422 - DNA, 15 bp, Homo sapiens
atttttactttacga

SEQ ID NO: 438423 - DNA, 15 bp, Homo sapiens
catttttactttacg

SEQ ID NO: 438424 - DNA, 15 bp, Homo sapiens
ccatttttactttac

SEQ ID NO: 438425 - DNA, 15 bp, Homo sapiens
tccatttttacttta

SEQ ID NO: 438426 - DNA, 15 bp, Homo sapiens
ttccatttttacttt

SEQ ID NO: 438427 - DNA, 15 bp, Homo sapiens
gttccatttttactt

SEQ ID NO: 438428 - DNA, 15 bp, Homo sapiens
cgttccatttttact

SEQ ID NO: 438429 - DNA, 15 bp, Homo sapiens
acgttccatttttac

SEQ ID NO: 438430 - DNA, 15 bp, Homo sapiens
cacgttccattttta

SEQ ID NO: 438431 - DNA, 15 bp, Homo sapiens
gcacgttccattttt

SEQ ID NO: 438432 - DNA, 15 bp, Homo sapiens
ggcacgttccatttt

SEQ ID NO: 438433 - DNA, 15 bp, Homo sapiens
gggcacgttccattt

SEQ ID NO: 438434 - DNA, 15 bp, Homo sapiens
agggcacgttccatt

SEQ ID NO: 438435 - DNA, 15 bp, Homo sapiens
cagggcacgttccat

SEQ ID NO: 438436 - DNA, 15 bp, Homo sapiens
tcagggcacgttcca

SEQ ID NO: 438437 - DNA, 15 bp, Homo sapiens
ttcagggcacgttcc

SEQ ID NO: 438438 - DNA, 15 bp, Homo sapiens
cttcagggcacgttc

SEQ ID NO: 438439 - DNA, 15 bp, Homo sapiens
tcttcagggcacgtt

SEQ ID NO: 438440 - DNA, 15 bp, Homo sapiens
ttcttcagggcacgt

SEQ ID NO: 438441 - DNA, 15 bp, Homo sapiens
tttcttcagggcacg

SEQ ID NO: 438442 - DNA, 15 bp, Homo sapiens
ttttcttcagggcac

SEQ ID NO: 438443 - DNA, 15 bp, Homo sapiens
gttttcttcagggca

SEQ ID NO: 438444 - DNA, 15 bp, Homo sapiens
cgttttcttcagggc

SEQ ID NO: 438445 - DNA, 15 bp, Homo sapiens
tcgttttcttcaggg

SEQ ID NO: 438446 - DNA, 15 bp, Homo sapiens
ctcgttttcttcagg

SEQ ID NO: 438447 - DNA, 15 bp, Homo sapiens
tctcgttttcttcag

SEQ ID NO: 438448 - DNA, 15 bp, Homo sapiens
gtctcgttttcttca

SEQ ID NO: 438449 - DNA, 15 bp, Homo sapiens
tgtctcgttttcttc

SEQ ID NO: 438450 - DNA, 15 bp, Homo sapiens
ctgtctcgttttctt

SEQ ID NO: 438451 - DNA, 15 bp, Homo sapiens
tctgtctcgttttct

SEQ ID NO: 438452 - DNA, 15 bp, Homo sapiens
ttctgtctcgttttc

SEQ ID NO: 438453 - DNA, 15 bp, Homo sapiens
attctgtctcgtttt

SEQ ID NO: 438454 - DNA, 15 bp, Homo sapiens
cattctgtctcgttt

SEQ ID NO: 438455 - DNA, 15 bp, Homo sapiens
tcattctgtctcgtt

SEQ ID NO: 438456 - DNA, 15 bp, Homo sapiens
ttcattctgtctcgt

SEQ ID NO: 438457 - DNA, 15 bp, Homo sapiens
tttcattctgtctcg

SEQ ID NO: 438458 - DNA, 15 bp, Homo sapiens
atttcattctgtctc

SEQ ID NO: 438459 - DNA, 15 bp, Homo sapiens
tatttcattctgtct

SEQ ID NO: 438460 - DNA, 15 bp, Homo sapiens
ttatttcattctgtc

SEQ ID NO: 438461 - DNA, 15 bp, Homo sapiens
tttatttcattctgt

SEQ ID NO: 438462 - DNA, 15 bp, Homo sapiens
ttttatttcattctg

SEQ ID NO: 438463 - DNA, 15 bp, Homo sapiens
attttatttcattct

SEQ ID NO: 438464 - DNA, 15 bp, Homo sapiens
cattttatttcattc

SEQ ID NO: 438465 - DNA, 15 bp, Homo sapiens
gcattttatttcatt

SEQ ID NO: 438466 - DNA, 15 bp, Homo sapiens
agcattttatttcat

SEQ ID NO: 438467 - DNA, 15 bp, Homo sapiens
cagcattttatttca

SEQ ID NO: 438468 - DNA, 15 bp, Homo sapiens
tcagcattttatttc

SEQ ID NO: 438469 - DNA, 15 bp, Homo sapiens
ttcagcattttattt

SEQ ID NO: 438470 - DNA, 15 bp, Homo sapiens
cttcagcattttatt

SEQ ID NO: 438471 - DNA, 15 bp, Homo sapiens
ccttcagcattttat

SEQ ID NO: 438472 - DNA, 15 bp, Homo sapiens
tccttcagcatttta

SEQ ID NO: 438473 - DNA, 15 bp, Homo sapiens
ctccttcagcatttt

SEQ ID NO: 438474 - DNA, 15 bp, Homo sapiens
actccttcagcattt

SEQ ID NO: 438475 - DNA, 15 bp, Homo sapiens
tactccttcagcatt

SEQ ID NO: 438476 - DNA, 15 bp, Homo sapiens
gtactccttcagcat

SEQ ID NO: 438477 - DNA, 15 bp, Homo sapiens
cgtactccttcagca

SEQ ID NO: 438478 - DNA, 15 bp, Homo sapiens
gcgtactccttcagc

SEQ ID NO: 438479 - DNA, 15 bp, Homo sapiens
tgcgtactccttcag

SEQ ID NO: 438480 - DNA, 15 bp, Homo sapiens
ctgcgtactccttca

SEQ ID NO: 438481 - DNA, 15 bp, Homo sapiens
tctgcgtactccttc

SEQ ID NO: 438482 - DNA, 15 bp, Homo sapiens
atctgcgtactcctt

SEQ ID NO: 438483 - DNA, 15 bp, Homo sapiens
aatctgcgtactcct

SEQ ID NO: 438484 - DNA, 15 bp, Homo sapiens
aaatctgcgtactcc

SEQ ID NO: 438485 - DNA, 15 bp, Homo sapiens
gaaatctgcgtactc

SEQ ID NO: 438486 - DNA, 15 bp, Homo sapiens
agaaatctgcgtact

SEQ ID NO: 438487 - DNA, 15 bp, Homo sapiens
aagaaatctgcgtac

SEQ ID NO: 438488 - DNA, 15 bp, Homo sapiens
aaagaaatctgcgta

SEQ ID NO: 438489 - DNA, 15 bp, Homo sapiens
aaaagaaatctgcgt

SEQ ID NO: 438490 - DNA, 15 bp, Homo sapiens
aaaaagaaatctgcg

SEQ ID NO: 438491 - DNA, 15 bp, Homo sapiens
gaaaaagaaatctgc

SEQ ID NO: 438492 - DNA, 15 bp, Homo sapiens
agaaaaagaaatctg

SEQ ID NO: 438493 - DNA, 15 bp, Homo sapiens
cagaaaaagaaatct

SEQ ID NO: 438494 - DNA, 15 bp, Homo sapiens
acagaaaaagaaatc

SEQ ID NO: 438495 - DNA, 15 bp, Homo sapiens
cacagaaaaagaaat

SEQ ID NO: 438496 - DNA, 15 bp, Homo sapiens
tcacagaaaaagaaa

SEQ ID NO: 438497 - DNA, 15 bp, Homo sapiens
ctcacagaaaaagaa

SEQ ID NO: 438498 - DNA, 15 bp, Homo sapiens
cctcacagaaaaaga

SEQ ID NO: 438499 - DNA, 15 bp, Homo sapiens
acctcacagaaaaag

SEQ ID NO: 438500 - DNA, 15 bp, Homo sapiens
cacctcacagaaaaa

SEQ ID NO: 438501 - DNA, 15 bp, Homo sapiens
ccacctcacagaaaa

SEQ ID NO: 438502 - DNA, 15 bp, Homo sapiens
cccacctcacagaaa

SEQ ID NO: 438503 - DNA, 15 bp, Homo sapiens
tcccacctcacagaa

SEQ ID NO: 438504 - DNA, 15 bp, Homo sapiens
gtcccacctcacaga

SEQ ID NO: 438505 - DNA, 15 bp, Homo sapiens
agtcccacctcacag

SEQ ID NO: 438506 - DNA, 15 bp, Homo sapiens
gagtcccacctcaca

SEQ ID NO: 438507 - DNA, 15 bp, Homo sapiens
agagtcccacctcac

SEQ ID NO: 438508 - DNA, 15 bp, Homo sapiens
aagagtcccacctca

SEQ ID NO: 438509 - DNA, 15 bp, Homo sapiens
aaagagtcccacctc

SEQ ID NO: 438510 - DNA, 15 bp, Homo sapiens
caaagagtcccacct

SEQ ID NO: 438511 - DNA, 15 bp, Homo sapiens
tcaaagagtcccacc

SEQ ID NO: 438512 - DNA, 15 bp, Homo sapiens
ctcaaagagtcccac

SEQ ID NO: 438513 - DNA, 15 bp, Homo sapiens
gctcaaagagtccca

SEQ ID NO: 438514 - DNA, 15 bp, Homo sapiens
ggctcaaagagtccc

SEQ ID NO: 438515 - DNA, 15 bp, Homo sapiens
aggctcaaagagtcc

SEQ ID NO: 438516 - DNA, 15 bp, Homo sapiens
caggctcaaagagtc

SEQ ID NO: 438517 - DNA, 15 bp, Homo sapiens
tcaggctcaaagagt

SEQ ID NO: 438518 - DNA, 15 bp, Homo sapiens
ttcaggctcaaagag

SEQ ID NO: 438519 - DNA, 15 bp, Homo sapiens
gttcaggctcaaaga

SEQ ID NO: 438520 - DNA, 15 bp, Homo sapiens
ggttcaggctcaaag

SEQ ID NO: 438521 - DNA, 15 bp, Homo sapiens
gggttcaggctcaaa

SEQ ID NO: 438522 - DNA, 15 bp, Homo sapiens
tgggttcaggctcaa

SEQ ID NO: 438523 - DNA, 15 bp, Homo sapiens
gtgggttcaggctca

SEQ ID NO: 438524 - DNA, 15 bp, Homo sapiens
agtgggttcaggctc

SEQ ID NO: 438525 - DNA, 15 bp, Homo sapiens
cagtgggttcaggct

SEQ ID NO: 438526 - DNA, 15 bp, Homo sapiens
gcagtgggttcaggc

SEQ ID NO: 438527 - DNA, 15 bp, Homo sapiens
agcagtgggttcagg

SEQ ID NO: 438528 - DNA, 15 bp, Homo sapiens
cagcagtgggttcag

SEQ ID NO: 438529 - DNA, 15 bp, Homo sapiens
acagcagtgggttca

SEQ ID NO: 438530 - DNA, 15 bp, Homo sapiens
cacagcagtgggttc

SEQ ID NO: 438531 - DNA, 15 bp, Homo sapiens
acacagcagtgggtt

SEQ ID NO: 438532 - DNA, 15 bp, Homo sapiens
cacacagcagtgggt

SEQ ID NO: 438533 - DNA, 15 bp, Homo sapiens
tcacacagcagtggg

SEQ ID NO: 438534 - DNA, 15 bp, Homo sapiens
ttcacacagcagtgg

SEQ ID NO: 438535 - DNA, 15 bp, Homo sapiens
attcacacagcagtg

SEQ ID NO: 438536 - DNA, 15 bp, Homo sapiens
gattcacacagcagt

SEQ ID NO: 438537 - DNA, 15 bp, Homo sapiens
tgattcacacagcag

SEQ ID NO: 438538 - DNA, 15 bp, Homo sapiens
ctgattcacacagca

SEQ ID NO: 438539 - DNA, 15 bp, Homo sapiens
cctgattcacacagc

SEQ ID NO: 438540 - DNA, 15 bp, Homo sapiens
acctgattcacacag

SEQ ID NO: 438541 - DNA, 15 bp, Homo sapiens
cacctgattcacaca

SEQ ID NO: 438542 - DNA, 15 bp, Homo sapiens
gcacctgattcacac

SEQ ID NO: 438543 - DNA, 15 bp, Homo sapiens
agcacctgattcaca

SEQ ID NO: 438544 - DNA, 15 bp, Homo sapiens
aagcacctgattcac

SEQ ID NO: 438545 - DNA, 15 bp, Homo sapiens
gaagcacctgattca

SEQ ID NO: 438546 - DNA, 15 bp, Homo sapiens
ggaagcacctgattc

SEQ ID NO: 438547 - DNA, 15 bp, Homo sapiens
aggaagcacctgatt

SEQ ID NO: 438548 - DNA, 15 bp, Homo sapiens
aaggaagcacctgat

SEQ ID NO: 438549 - DNA, 15 bp, Homo sapiens
caaggaagcacctga

SEQ ID NO: 438550 - DNA, 15 bp, Homo sapiens
tcaaggaagcacctg

SEQ ID NO: 438551 - DNA, 15 bp, Homo sapiens
ttcaaggaagcacct

SEQ ID NO: 438552 - DNA, 15 bp, Homo sapiens
cttcaaggaagcacc

SEQ ID NO: 438553 - DNA, 15 bp, Homo sapiens
gcttcaaggaagcac

SEQ ID NO: 438554 - DNA, 15 bp, Homo sapiens
agcttcaaggaagca

SEQ ID NO: 438555 - DNA, 15 bp, Homo sapiens
aagcttcaaggaagc

SEQ ID NO: 438556 - DNA, 15 bp, Homo sapiens
gaagcttcaaggaag

SEQ ID NO: 438557 - DNA, 15 bp, Homo sapiens
ggaagcttcaaggaa

SEQ ID NO: 438558 - DNA, 15 bp, Homo sapiens
aggaagcttcaagga

SEQ ID NO: 438559 - DNA, 15 bp, Homo sapiens
caggaagcttcaagg

SEQ ID NO: 438560 - DNA, 15 bp, Homo sapiens
gcaggaagcttcaag

SEQ ID NO: 438561 - DNA, 15 bp, Homo sapiens
ggcaggaagcttcaa

SEQ ID NO: 438562 - DNA, 15 bp, Homo sapiens
gggcaggaagcttca

SEQ ID NO: 438563 - DNA, 15 bp, Homo sapiens
agggcaggaagcttc

SEQ ID NO: 438564 - DNA, 15 bp, Homo sapiens
cagggcaggaagctt

SEQ ID NO: 438565 - DNA, 15 bp, Homo sapiens
ccagggcaggaagct

SEQ ID NO: 438566 - DNA, 15 bp, Homo sapiens
tccagggcaggaagc

SEQ ID NO: 438567 - DNA, 15 bp, Homo sapiens
gtccagggcaggaag

SEQ ID NO: 438568 - DNA, 15 bp, Homo sapiens
agtccagggcaggaa

SEQ ID NO: 438569 - DNA, 15 bp, Homo sapiens
cagtccagggcagga

SEQ ID NO: 438570 - DNA, 15 bp, Homo sapiens
ccagtccagggcagg

SEQ ID NO: 438571 - DNA, 15 bp, Homo sapiens
cccagtccagggcag

SEQ ID NO: 438572 - DNA, 15 bp, Homo sapiens
tcccagtccagggca

SEQ ID NO: 438573 - DNA, 15 bp, Homo sapiens
ttcccagtccagggc

SEQ ID NO: 438574 - DNA, 15 bp, Homo sapiens
gttcccagtccaggg

SEQ ID NO: 438575 - DNA, 15 bp, Homo sapiens
agttcccagtccagg

SEQ ID NO: 438576 - DNA, 15 bp, Homo sapiens
cagttcccagtccag

SEQ ID NO: 438577 - DNA, 15 bp, Homo sapiens
ccagttcccagtcca

SEQ ID NO: 438578 - DNA, 15 bp, Homo sapiens
accagttcccagtcc

SEQ ID NO: 438579 - DNA, 15 bp, Homo sapiens
aaccagttcccagtc

SEQ ID NO: 438580 - DNA, 15 bp, Homo sapiens
aaaccagttcccagt

SEQ ID NO: 438581 - DNA, 15 bp, Homo sapiens
gaaaccagttcccag

SEQ ID NO: 438582 - DNA, 15 bp, Homo sapiens
tgaaaccagttccca

SEQ ID NO: 438583 - DNA, 15 bp, Homo sapiens
ctgaaaccagttccc

SEQ ID NO: 438584 - DNA, 15 bp, Homo sapiens
tctgaaaccagttcc

SEQ ID NO: 438585 - DNA, 15 bp, Homo sapiens
ttctgaaaccagttc

SEQ ID NO: 438586 - DNA, 15 bp, Homo sapiens
gttctgaaaccagtt

SEQ ID NO: 438587 - DNA, 15 bp, Homo sapiens
cgttctgaaaccagt

SEQ ID NO: 438588 - DNA, 15 bp, Homo sapiens
acgttctgaaaccag

SEQ ID NO: 438589 - DNA, 15 bp, Homo sapiens
aacgttctgaaacca

SEQ ID NO: 438590 - DNA, 15 bp, Homo sapiens
gaacgttctgaaacc

SEQ ID NO: 438591 - DNA, 15 bp, Homo sapiens
ggaacgttctgaaac

SEQ ID NO: 438592 - DNA, 15 bp, Homo sapiens
aggaacgttctgaaa

SEQ ID NO: 438593 - DNA, 15 bp, Homo sapiens
caggaacgttctgaa

SEQ ID NO: 438594 - DNA, 15 bp, Homo sapiens
tcaggaacgttctga

SEQ ID NO: 438595 - DNA, 15 bp, Homo sapiens
ctcaggaacgttctg

SEQ ID NO: 438596 - DNA, 15 bp, Homo sapiens
gctcaggaacgttct

SEQ ID NO: 438597 - DNA, 15 bp, Homo sapiens
agctcaggaacgttc

SEQ ID NO: 438598 - DNA, 15 bp, Homo sapiens
aagctcaggaacgtt

SEQ ID NO: 438599 - DNA, 15 bp, Homo sapiens
caagctcaggaacgt

SEQ ID NO: 438600 - DNA, 15 bp, Homo sapiens
tcaagctcaggaacg

SEQ ID NO: 438601 - DNA, 15 bp, Homo sapiens
ctcaagctcaggaac

SEQ ID NO: 438602 - DNA, 15 bp, Homo sapiens
gctcaagctcaggaa

SEQ ID NO: 438603 - DNA, 15 bp, Homo sapiens
agctcaagctcagga

SEQ ID NO: 438604 - DNA, 15 bp, Homo sapiens
aagctcaagctcagg

SEQ ID NO: 438605 - DNA, 15 bp, Homo sapiens
caagctcaagctcag

SEQ ID NO: 438606 - DNA, 15 bp, Homo sapiens
gcaagctcaagctca

SEQ ID NO: 438607 - DNA, 15 bp, Homo sapiens
tgcaagctcaagctc

SEQ ID NO: 438608 - DNA, 15 bp, Homo sapiens
ctgcaagctcaagct

SEQ ID NO: 438609 - DNA, 15 bp, Homo sapiens
actgcaagctcaagc

SEQ ID NO: 438610 - DNA, 15 bp, Homo sapiens
aactgcaagctcaag

SEQ ID NO: 438611 - DNA, 15 bp, Homo sapiens
caactgcaagctcaa

SEQ ID NO: 438612 - DNA, 15 bp, Homo sapiens
ccaactgcaagctca

SEQ ID NO: 438613 - DNA, 15 bp, Homo sapiens
tccaactgcaagctc

SEQ ID NO: 438614 - DNA, 15 bp, Homo sapiens
ctccaactgcaagct

SEQ ID NO: 438615 - DNA, 15 bp, Homo sapiens
cctccaactgcaagc

SEQ ID NO: 438616 - DNA, 15 bp, Homo sapiens
acctccaactgcaag

SEQ ID NO: 438617 - DNA, 15 bp, Homo sapiens
cacctccaactgcaa

SEQ ID NO: 438618 - DNA, 15 bp, Homo sapiens
tcacctccaactgca

SEQ ID NO: 438619 - DNA, 15 bp, Homo sapiens
ttcacctccaactgc

SEQ ID NO: 438620 - DNA, 15 bp, Homo sapiens
gttcacctccaactg

SEQ ID NO: 438621 - DNA, 15 bp, Homo sapiens
tgttcacctccaact

SEQ ID NO: 438622 - DNA, 15 bp, Homo sapiens
ttgttcacctccaac

SEQ ID NO: 438623 - DNA, 15 bp, Homo sapiens
cttgttcacctccaa

SEQ ID NO: 438624 - DNA, 15 bp, Homo sapiens
ccttgttcacctcca

SEQ ID NO: 438625 - DNA, 15 bp, Homo sapiens
gccttgttcacctcc

SEQ ID NO: 438626 - DNA, 15 bp, Homo sapiens
tgccttgttcacctc

SEQ ID NO: 438627 - DNA, 15 bp, Homo sapiens
gtgccttgttcacct

SEQ ID NO: 438628 - DNA, 15 bp, Homo sapiens
ggtgccttgttcacc

SEQ ID NO: 438629 - DNA, 15 bp, Homo sapiens
gggtgccttgttcac

SEQ ID NO: 438630 - DNA, 15 bp, Homo sapiens
ggggtgccttgttca

SEQ ID NO: 438631 - DNA, 15 bp, Homo sapiens
aggggtgccttgttc

SEQ ID NO: 438632 - DNA, 15 bp, Homo sapiens
aaggggtgccttgtt

SEQ ID NO: 438633 - DNA, 15 bp, Homo sapiens
gaaggggtgccttgt

SEQ ID NO: 438634 - DNA, 15 bp, Homo sapiens
ggaaggggtgccttg

SEQ ID NO: 438635 - DNA, 15 bp, Homo sapiens
tggaaggggtgcctt

SEQ ID NO: 438636 - DNA, 15 bp, Homo sapiens
atggaaggggtgcct

SEQ ID NO: 438637 - DNA, 15 bp, Homo sapiens
catggaaggggtgcc

SEQ ID NO: 438638 - DNA, 15 bp, Homo sapiens
acatggaaggggtgc

SEQ ID NO: 438639 - DNA, 15 bp, Homo sapiens
cacatggaaggggtg

SEQ ID NO: 438640 - DNA, 15 bp, Homo sapiens
gcacatggaaggggt

SEQ ID NO: 438641 - DNA, 15 bp, Homo sapiens
agcacatggaagggg

SEQ ID NO: 438642 - DNA, 15 bp, Homo sapiens
cagcacatggaaggg

SEQ ID NO: 438643 - DNA, 15 bp, Homo sapiens
acagcacatggaagg

SEQ ID NO: 438644 - DNA, 15 bp, Homo sapiens
gacagcacatggaag

SEQ ID NO: 438645 - DNA, 15 bp, Homo sapiens
ggacagcacatggaa

SEQ ID NO: 438646 - DNA, 15 bp, Homo sapiens
aggacagcacatgga

SEQ ID NO: 438647 - DNA, 15 bp, Homo sapiens
caggacagcacatgg

SEQ ID NO: 438648 - DNA, 15 bp, Homo sapiens
tcaggacagcacatg

SEQ ID NO: 438649 - DNA, 15 bp, Homo sapiens
gtcaggacagcacat

SEQ ID NO: 438650 - DNA, 15 bp, Homo sapiens
agtcaggacagcaca

SEQ ID NO: 438651 - DNA, 15 bp, Homo sapiens
tagtcaggacagcac

SEQ ID NO: 438652 - DNA, 15 bp, Homo sapiens
ctagtcaggacagca

SEQ ID NO: 438653 - DNA, 15 bp, Homo sapiens
gctagtcaggacagc

SEQ ID NO: 438654 - DNA, 15 bp, Homo sapiens
agctagtcaggacag

SEQ ID NO: 438655 - DNA, 15 bp, Homo sapiens
cagctagtcaggaca

SEQ ID NO: 438656 - DNA, 15 bp, Homo sapiens
ccagctagtcaggac

SEQ ID NO: 438657 - DNA, 15 bp, Homo sapiens
accagctagtcagga

SEQ ID NO: 438658 - DNA, 15 bp, Homo sapiens
caccagctagtcagg

SEQ ID NO: 438659 - DNA, 15 bp, Homo sapiens
tcaccagctagtcag

SEQ ID NO: 438660 - DNA, 15 bp, Homo sapiens
gtcaccagctagtca

SEQ ID NO: 438661 - DNA, 15 bp, Homo sapiens
ggtcaccagctagtc

SEQ ID NO: 438662 - DNA, 15 bp, Homo sapiens
tggtcaccagctagt

SEQ ID NO: 438663 - DNA, 15 bp, Homo sapiens
atggtcaccagctag

SEQ ID NO: 438664 - DNA, 15 bp, Homo sapiens
catggtcaccagcta

SEQ ID NO: 438665 - DNA, 15 bp, Homo sapiens
acatggtcaccagct

SEQ ID NO: 438666 - DNA, 15 bp, Homo sapiens
aacatggtcaccagc

SEQ ID NO: 438667 - DNA, 15 bp, Homo sapiens
caacatggtcaccag

SEQ ID NO: 438668 - DNA, 15 bp, Homo sapiens
tcaacatggtcacca

SEQ ID NO: 438669 - DNA, 15 bp, Homo sapiens
atcaacatggtcacc

SEQ ID NO: 438670 - DNA, 15 bp, Homo sapiens
catcaacatggtcac

SEQ ID NO: 438671 - DNA, 15 bp, Homo sapiens
tcatcaacatggtca

SEQ ID NO: 438672 - DNA, 15 bp, Homo sapiens
ttcatcaacatggtc

SEQ ID NO: 438673 - DNA, 15 bp, Homo sapiens
gttcatcaacatggt

SEQ ID NO: 438674 - DNA, 15 bp, Homo sapiens
cgttcatcaacatgg

SEQ ID NO: 438675 - DNA, 15 bp, Homo sapiens
acgttcatcaacatg

SEQ ID NO: 438676 - DNA, 15 bp, Homo sapiens
gacgttcatcaacat

SEQ ID NO: 438677 - DNA, 15 bp, Homo sapiens
ggacgttcatcaaca

SEQ ID NO: 438678 - DNA, 15 bp, Homo sapiens
aggacgttcatcaac

SEQ ID NO: 438679 - DNA, 15 bp, Homo sapiens
gaggacgttcatcaa

SEQ ID NO: 438680 - DNA, 15 bp, Homo sapiens
agaggacgttcatca

SEQ ID NO: 438681 - DNA, 15 bp, Homo sapiens
gagaggacgttcatc

SEQ ID NO: 438682 - DNA, 15 bp, Homo sapiens
tgagaggacgttcat

SEQ ID NO: 438683 - DNA, 15 bp, Homo sapiens
gtgagaggacgttca

SEQ ID NO: 438684 - DNA, 15 bp, Homo sapiens
agtgagaggacgttc

SEQ ID NO: 438685 - DNA, 15 bp, Homo sapiens
gagtgagaggacgtt

SEQ ID NO: 438686 - DNA, 15 bp, Homo sapiens
ggagtgagaggacgt

SEQ ID NO: 438687 - DNA, 15 bp, Homo sapiens
gggagtgagaggacg

SEQ ID NO: 438688 - DNA, 15 bp, Homo sapiens
ggggagtgagaggac

SEQ ID NO: 438689 - DNA, 15 bp, Homo sapiens
tggggagtgagagga

SEQ ID NO: 438690 - DNA, 15 bp, Homo sapiens
gtggggagtgagagg

SEQ ID NO: 438691 - DNA, 15 bp, Homo sapiens
agtggggagtgagag

SEQ ID NO: 438692 - DNA, 15 bp, Homo sapiens
aagtggggagtgaga

SEQ ID NO: 438693 - DNA, 15 bp, Homo sapiens
caagtggggagtgag

SEQ ID NO: 438694 - DNA, 15 bp, Homo sapiens
ccaagtggggagtga

SEQ ID NO: 438695 - DNA, 15 bp, Homo sapiens
cccaagtggggagtg

SEQ ID NO: 438696 - DNA, 15 bp, Homo sapiens
tcccaagtggggagt

SEQ ID NO: 438697 - DNA, 15 bp, Homo sapiens
ttcccaagtggggag

SEQ ID NO: 438698 - DNA, 15 bp, Homo sapiens
gttcccaagtgggga

SEQ ID NO: 438699 - DNA, 15 bp, Homo sapiens
agttcccaagtgggg

SEQ ID NO: 438700 - DNA, 15 bp, Homo sapiens
cagttcccaagtggg

SEQ ID NO: 438701 - DNA, 15 bp, Homo sapiens
gcagttcccaagtgg

SEQ ID NO: 438702 - DNA, 15 bp, Homo sapiens
cgcagttcccaagtg

SEQ ID NO: 438703 - DNA, 15 bp, Homo sapiens
acgcagttcccaagt

SEQ ID NO: 438704 - DNA, 15 bp, Homo sapiens
cacgcagttcccaag

SEQ ID NO: 438705 - DNA, 15 bp, Homo sapiens
acacgcagttcccaa

SEQ ID NO: 438706 - DNA, 15 bp, Homo sapiens
aacacgcagttccca

SEQ ID NO: 438707 - DNA, 15 bp, Homo sapiens
caacacgcagttccc

SEQ ID NO: 438708 - DNA, 15 bp, Homo sapiens
acaacacgcagttcc

SEQ ID NO: 438709 - DNA, 15 bp, Homo sapiens
tacaacacgcagttc

SEQ ID NO: 438710 - DNA, 15 bp, Homo sapiens
ttacaacacgcagtt

SEQ ID NO: 438711 - DNA, 15 bp, Homo sapiens
cttacaacacgcagt

SEQ ID NO: 438712 - DNA, 15 bp, Homo sapiens
ccttacaacacgcag

SEQ ID NO: 438713 - DNA, 15 bp, Homo sapiens
cccttacaacacgca

SEQ ID NO: 438714 - DNA, 15 bp, Homo sapiens
gcccttacaacacgc

SEQ ID NO: 438715 - DNA, 15 bp, Homo sapiens
agcccttacaacacg

SEQ ID NO: 438716 - DNA, 15 bp, Homo sapiens
cagcccttacaacac

SEQ ID NO: 438717 - DNA, 15 bp, Homo sapiens
gcagcccttacaaca

SEQ ID NO: 438718 - DNA, 15 bp, Homo sapiens
ggcagcccttacaac

SEQ ID NO: 438719 - DNA, 15 bp, Homo sapiens
aggcagcccttacaa

SEQ ID NO: 438720 - DNA, 15 bp, Homo sapiens
gaggcagcccttaca

SEQ ID NO: 438721 - DNA, 15 bp, Homo sapiens
ggaggcagcccttac

SEQ ID NO: 438722 - DNA, 15 bp, Homo sapiens
gggaggcagccctta

SEQ ID NO: 438723 - DNA, 15 bp, Homo sapiens
ggggaggcagccctt

SEQ ID NO: 438724 - DNA, 15 bp, Homo sapiens
gggggaggcagccct

SEQ ID NO: 438725 - DNA, 15 bp, Homo sapiens
agggggaggcagccc

SEQ ID NO: 438726 - DNA, 15 bp, Homo sapiens
cagggggaggcagcc

SEQ ID NO: 438727 - DNA, 15 bp, Homo sapiens
tcagggggaggcagc

SEQ ID NO: 438728 - DNA, 15 bp, Homo sapiens
gtcagggggaggcag

SEQ ID NO: 438729 - DNA, 15 bp, Homo sapiens
tgtcagggggaggca

SEQ ID NO: 438730 - DNA, 15 bp, Homo sapiens
ctgtcagggggaggc

SEQ ID NO: 438731 - DNA, 15 bp, Homo sapiens
cctgtcagggggagg

SEQ ID NO: 438732 - DNA, 15 bp, Homo sapiens
ccctgtcagggggag

SEQ ID NO: 438733 - DNA, 15 bp, Homo sapiens
accctgtcaggggga

SEQ ID NO: 438734 - DNA, 15 bp, Homo sapiens
aaccctgtcaggggg

SEQ ID NO: 438735 - DNA, 15 bp, Homo sapiens
caaccctgtcagggg

SEQ ID NO: 438736 - DNA, 15 bp, Homo sapiens
acaaccctgtcaggg

SEQ ID NO: 438737 - DNA, 15 bp, Homo sapiens
gacaaccctgtcagg

SEQ ID NO: 438738 - DNA, 15 bp, Homo sapiens
agacaaccctgtcag

SEQ ID NO: 438739 - DNA, 15 bp, Homo sapiens
gagacaaccctgtca

SEQ ID NO: 438740 - DNA, 15 bp, Homo sapiens
ggagacaaccctgtc

SEQ ID NO: 438741 - DNA, 15 bp, Homo sapiens
aggagacaaccctgt

SEQ ID NO: 438742 - DNA, 15 bp, Homo sapiens
gaggagacaaccctg

SEQ ID NO: 438743 - DNA, 15 bp, Homo sapiens
ggaggagacaaccct

SEQ ID NO: 438744 - DNA, 15 bp, Homo sapiens
aggaggagacaaccc

SEQ ID NO: 438745 - DNA, 15 bp, Homo sapiens
caggaggagacaacc

SEQ ID NO: 438746 - DNA, 15 bp, Homo sapiens
acaggaggagacaac

SEQ ID NO: 438747 - DNA, 15 bp, Homo sapiens
gacaggaggagacaa

SEQ ID NO: 438748 - DNA, 15 bp, Homo sapiens
tgacaggaggagaca

SEQ ID NO: 438749 - DNA, 15 bp, Homo sapiens
ctgacaggaggagac

SEQ ID NO: 438750 - DNA, 15 bp, Homo sapiens
cctgacaggaggaga

SEQ ID NO: 438751 - DNA, 15 bp, Homo sapiens
ccctgacaggaggag

SEQ ID NO: 438752 - DNA, 15 bp, Homo sapiens
gccctgacaggagga

SEQ ID NO: 438753 - DNA, 15 bp, Homo sapiens
tgccctgacaggagg

SEQ ID NO: 438754 - DNA, 15 bp, Homo sapiens
atgccctgacaggag

SEQ ID NO: 438755 - DNA, 15 bp, Homo sapiens
catgccctgacagga

SEQ ID NO: 438756 - DNA, 15 bp, Homo sapiens
tcatgccctgacagg

SEQ ID NO: 438757 - DNA, 15 bp, Homo sapiens
ttcatgccctgacag

SEQ ID NO: 438758 - DNA, 15 bp, Homo sapiens
attcatgccctgaca

SEQ ID NO: 438759 - DNA, 15 bp, Homo sapiens
aattcatgccctgac

SEQ ID NO: 438760 - DNA, 15 bp, Homo sapiens
aaattcatgccctga

SEQ ID NO: 438761 - DNA, 15 bp, Homo sapiens
aaaattcatgccctg

SEQ ID NO: 438762 - DNA, 15 bp, Homo sapiens
caaaattcatgccct

SEQ ID NO: 438763 - DNA, 15 bp, Homo sapiens
tcaaaattcatgccc

SEQ ID NO: 438764 - DNA, 15 bp, Homo sapiens
ttcaaaattcatgcc

SEQ ID NO: 438765 - DNA, 15 bp, Homo sapiens
attcaaaattcatgc

SEQ ID NO: 438766 - DNA, 15 bp, Homo sapiens
tattcaaaattcatg

SEQ ID NO: 438767 - DNA, 15 bp, Homo sapiens
atattcaaaattcat

SEQ ID NO: 438768 - DNA, 15 bp, Homo sapiens
aatattcaaaattca

SEQ ID NO: 438769 - DNA, 15 bp, Homo sapiens
gaatattcaaaattc

SEQ ID NO: 438770 - DNA, 15 bp, Homo sapiens
agaatattcaaaatt

SEQ ID NO: 438771 - DNA, 15 bp, Homo sapiens
gagaatattcaaaat

SEQ ID NO: 438772 - DNA, 15 bp, Homo sapiens
tgagaatattcaaaa

SEQ ID NO: 438773 - DNA, 15 bp, Homo sapiens
ttgagaatattcaaa

SEQ ID NO: 438774 - DNA, 15 bp, Homo sapiens
attgagaatattcaa

SEQ ID NO: 438775 - DNA, 15 bp, Homo sapiens
tattgagaatattca

SEQ ID NO: 438776 - DNA, 15 bp, Homo sapiens
gtattgagaatattc

SEQ ID NO: 438777 - DNA, 15 bp, Homo sapiens
ggtattgagaatatt

SEQ ID NO: 438778 - DNA, 15 bp, Homo sapiens
gggtattgagaatat

SEQ ID NO: 438779 - DNA, 15 bp, Homo sapiens
tgggtattgagaata

SEQ ID NO: 438780 - DNA, 15 bp, Homo sapiens
ctgggtattgagaat

SEQ ID NO: 438781 - DNA, 15 bp, Homo sapiens
actgggtattgagaa

SEQ ID NO: 438782 - DNA, 15 bp, Homo sapiens
gactgggtattgaga

SEQ ID NO: 438783 - DNA, 15 bp, Homo sapiens
tgactgggtattgag

SEQ ID NO: 438784 - DNA, 15 bp, Homo sapiens
ttgactgggtattga

SEQ ID NO: 438785 - DNA, 15 bp, Homo sapiens
cttgactgggtattg

SEQ ID NO: 438786 - DNA, 15 bp, Homo sapiens
tcttgactgggtatt

SEQ ID NO: 438787 - DNA, 15 bp, Homo sapiens
ttcttgactgggtat

SEQ ID NO: 438788 - DNA, 15 bp, Homo sapiens
cttcttgactgggta

SEQ ID NO: 438789 - DNA, 15 bp, Homo sapiens
ccttcttgactgggt

SEQ ID NO: 438790 - DNA, 15 bp, Homo sapiens
tccttcttgactggg

SEQ ID NO: 438791 - DNA, 15 bp, Homo sapiens
gtccttcttgactgg

SEQ ID NO: 438792 - DNA, 15 bp, Homo sapiens
agtccttcttgactg

SEQ ID NO: 438793 - DNA, 15 bp, Homo sapiens
tagtccttcttgact

SEQ ID NO: 438794 - DNA, 15 bp, Homo sapiens
atagtccttcttgac

SEQ ID NO: 438795 - DNA, 15 bp, Homo sapiens
aatagtccttcttga

SEQ ID NO: 438796 - DNA, 15 bp, Homo sapiens
gaatagtccttcttg

SEQ ID NO: 438797 - DNA, 15 bp, Homo sapiens
ggaatagtccttctt

SEQ ID NO: 438798 - DNA, 15 bp, Homo sapiens
aggaatagtccttct

SEQ ID NO: 438799 - DNA, 15 bp, Homo sapiens
gaggaatagtccttc

SEQ ID NO: 438800 - DNA, 15 bp, Homo sapiens
ggaggaatagtcctt

SEQ ID NO: 438801 - DNA, 15 bp, Homo sapiens
tggaggaatagtcct

SEQ ID NO: 438802 - DNA, 15 bp, Homo sapiens
ctggaggaatagtcc

SEQ ID NO: 438803 - DNA, 15 bp, Homo sapiens
tctggaggaatagtc

SEQ ID NO: 438804 - DNA, 15 bp, Homo sapiens
ttctggaggaatagt

SEQ ID NO: 438805 - DNA, 15 bp, Homo sapiens
cttctggaggaatag

SEQ ID NO: 438806 - DNA, 15 bp, Homo sapiens
acttctggaggaata

SEQ ID NO: 438807 - DNA, 15 bp, Homo sapiens
cacttctggaggaat

SEQ ID NO: 438808 - DNA, 15 bp, Homo sapiens
acacttctggaggaa

SEQ ID NO: 438809 - DNA, 15 bp, Homo sapiens
cacacttctggagga

SEQ ID NO: 438810 - DNA, 15 bp, Homo sapiens
tcacacttctggagg

SEQ ID NO: 438811 - DNA, 15 bp, Homo sapiens
ctcacacttctggag

SEQ ID NO: 438812 - DNA, 15 bp, Homo sapiens
cctcacacttctgga

SEQ ID NO: 438813 - DNA, 15 bp, Homo sapiens
acctcacacttctgg

SEQ ID NO: 438814 - DNA, 15 bp, Homo sapiens
gacctcacacttctg

SEQ ID NO: 438815 - DNA, 15 bp, Homo sapiens
agacctcacacttct

SEQ ID NO: 438816 - DNA, 15 bp, Homo sapiens
tagacctcacacttc

SEQ ID NO: 438817 - DNA, 15 bp, Homo sapiens
gtagacctcacactt

SEQ ID NO: 438818 - DNA, 15 bp, Homo sapiens
ggtagacctcacact

SEQ ID NO: 438819 - DNA, 15 bp, Homo sapiens
aggtagacctcacac

SEQ ID NO: 438820 - DNA, 15 bp, Homo sapiens
taggtagacctcaca

SEQ ID NO: 438821 - DNA, 15 bp, Homo sapiens
ttaggtagacctcac

SEQ ID NO: 438822 - DNA, 15 bp, Homo sapiens
tttaggtagacctca

SEQ ID NO: 438823 - DNA, 15 bp, Homo sapiens
ttttaggtagacctc

SEQ ID NO: 438824 - DNA, 15 bp, Homo sapiens
tttttaggtagacct

SEQ ID NO: 438825 - DNA, 15 bp, Homo sapiens
ctttttaggtagacc

SEQ ID NO: 438826 - DNA, 15 bp, Homo sapiens
tctttttaggtagac

SEQ ID NO: 438827 - DNA, 15 bp, Homo sapiens
ctctttttaggtaga

SEQ ID NO: 438828 - DNA, 15 bp, Homo sapiens
gctctttttaggtag

SEQ ID NO: 438829 - DNA, 15 bp, Homo sapiens
agctctttttaggta

SEQ ID NO: 438830 - DNA, 15 bp, Homo sapiens
tagctctttttaggt

SEQ ID NO: 438831 - DNA, 15 bp, Homo sapiens
ttagctctttttagg

SEQ ID NO: 438832 - DNA, 15 bp, Homo sapiens
tttagctctttttag

SEQ ID NO: 438833 - DNA, 15 bp, Homo sapiens
gtttagctcttttta

SEQ ID NO: 438834 - DNA, 15 bp, Homo sapiens
ggtttagctcttttt

SEQ ID NO: 438835 - DNA, 15 bp, Homo sapiens
tggtttagctctttt

SEQ ID NO: 438836 - DNA, 15 bp, Homo sapiens
ttggtttagctcttt

SEQ ID NO: 438837 - DNA, 15 bp, Homo sapiens
tttggtttagctctt

SEQ ID NO: 438838 - DNA, 15 bp, Homo sapiens
atttggtttagctct

SEQ ID NO: 438839 - DNA, 15 bp, Homo sapiens
aatttggtttagctc

SEQ ID NO: 438840 - DNA, 15 bp, Homo sapiens
ggttgtcagaagaac

SEQ ID NO: 438841 - DNA, 15 bp, Homo sapiens
cggttgtcagaagaa

SEQ ID NO: 438842 - DNA, 15 bp, Homo sapiens
ccggttgtcagaaga

SEQ ID NO: 438843 - DNA, 15 bp, Homo sapiens
accggttgtcagaag

SEQ ID NO: 438844 - DNA, 15 bp, Homo sapiens
gaccggttgtcagaa

SEQ ID NO: 438845 - DNA, 15 bp, Homo sapiens
ggaccggttgtcaga

SEQ ID NO: 438846 - DNA, 15 bp, Homo sapiens
gggaccggttgtcag

SEQ ID NO: 438847 - DNA, 15 bp, Homo sapiens
ggggaccggttgtca

SEQ ID NO: 438848 - DNA, 15 bp, Homo sapiens
tggggaccggttgtc

SEQ ID NO: 438849 - DNA, 15 bp, Homo sapiens
atggggaccggttgt

SEQ ID NO: 438850 - DNA, 15 bp, Homo sapiens
gatggggaccggttg

SEQ ID NO: 438851 - DNA, 15 bp, Homo sapiens
ggatggggaccggtt

SEQ ID NO: 438852 - DNA, 15 bp, Homo sapiens
aggatggggaccggt

SEQ ID NO: 438853 - DNA, 15 bp, Homo sapiens
gaggatggggaccgg

SEQ ID NO: 438854 - DNA, 15 bp, Homo sapiens
ggaggatggggaccg

SEQ ID NO: 438855 - DNA, 15 bp, Homo sapiens
tggaggatggggacc

SEQ ID NO: 438856 - DNA, 15 bp, Homo sapiens
ttggaggatggggac

SEQ ID NO: 438857 - DNA, 15 bp, Homo sapiens
cttggaggatgggga

SEQ ID NO: 438858 - DNA, 15 bp, Homo sapiens
tcttggaggatgggg

SEQ ID NO: 438859 - DNA, 15 bp, Homo sapiens
ctcttggaggatggg

SEQ ID NO: 438860 - DNA, 15 bp, Homo sapiens
actcttggaggatgg

SEQ ID NO: 438861 - DNA, 15 bp, Homo sapiens
gactcttggaggatg

SEQ ID NO: 438862 - DNA, 15 bp, Homo sapiens
tgactcttggaggat

SEQ ID NO: 438863 - DNA, 15 bp, Homo sapiens
gtgactcttggagga

SEQ ID NO: 438864 - DNA, 15 bp, Homo sapiens
ggtgactcttggagg

SEQ ID NO: 438865 - DNA, 15 bp, Homo sapiens
aggtgactcttggag

SEQ ID NO: 438866 - DNA, 15 bp, Homo sapiens
gaggtgactcttgga

SEQ ID NO: 438867 - DNA, 15 bp, Homo sapiens
tgaggtgactcttgg

SEQ ID NO: 438868 - DNA, 15 bp, Homo sapiens
gtgaggtgactcttg

SEQ ID NO: 438869 - DNA, 15 bp, Homo sapiens
agtgaggtgactctt

SEQ ID NO: 438870 - DNA, 15 bp, Homo sapiens
tagtgaggtgactct

SEQ ID NO: 438871 - DNA, 15 bp, Homo sapiens
ctagtgaggtgactc

SEQ ID NO: 438872 - DNA, 15 bp, Homo sapiens
actagtgaggtgact

SEQ ID NO: 438873 - DNA, 15 bp, Homo sapiens
tactagtgaggtgac

SEQ ID NO: 438874 - DNA, 15 bp, Homo sapiens
atactagtgaggtga

SEQ ID NO: 438875 - DNA, 15 bp, Homo sapiens
tatactagtgaggtg

SEQ ID NO: 438876 - DNA, 15 bp, Homo sapiens
ttatactagtgaggt

SEQ ID NO: 438877 - DNA, 15 bp, Homo sapiens
tttatactagtgagg

SEQ ID NO: 438878 - DNA, 15 bp, Homo sapiens
gtttatactagtgag

SEQ ID NO: 438879 - DNA, 15 bp, Homo sapiens
agtttatactagtga

SEQ ID NO: 438880 - DNA, 15 bp, Homo sapiens
aagtttatactagtg

SEQ ID NO: 438881 - DNA, 15 bp, Homo sapiens
caagtttatactagt

SEQ ID NO: 438882 - DNA, 15 bp, Homo sapiens
ccaagtttatactag

SEQ ID NO: 438883 - DNA, 15 bp, Homo sapiens
cccaagtttatacta

SEQ ID NO: 438884 - DNA, 15 bp, Homo sapiens
gcccaagtttatact

SEQ ID NO: 438885 - DNA, 15 bp, Homo sapiens
tgcccaagtttatac

SEQ ID NO: 438886 - DNA, 15 bp, Homo sapiens
atgcccaagtttata

SEQ ID NO: 438887 - DNA, 15 bp, Homo sapiens
catgcccaagtttat

SEQ ID NO: 438888 - DNA, 15 bp, Homo sapiens
ccatgcccaagttta

SEQ ID NO: 438889 - DNA, 15 bp, Homo sapiens
accatgcccaagttt

SEQ ID NO: 438890 - DNA, 15 bp, Homo sapiens
aaccatgcccaagtt

SEQ ID NO: 438891 - DNA, 15 bp, Homo sapiens
caaccatgcccaagt

SEQ ID NO: 438892 - DNA, 15 bp, Homo sapiens
tcaaccatgcccaag

SEQ ID NO: 438893 - DNA, 15 bp, Homo sapiens
ttcaaccatgcccaa

SEQ ID NO: 438894 - DNA, 15 bp, Homo sapiens
tttcaaccatgccca

SEQ ID NO: 438895 - DNA, 15 bp, Homo sapiens
ctttcaaccatgccc

SEQ ID NO: 438896 - DNA, 15 bp, Homo sapiens
cctttcaaccatgcc

SEQ ID NO: 438897 - DNA, 15 bp, Homo sapiens
ccctttcaaccatgc

SEQ ID NO: 438898 - DNA, 15 bp, Homo sapiens
cccctttcaaccatg

SEQ ID NO: 438899 - DNA, 15 bp, Homo sapiens
gcccctttcaaccat

SEQ ID NO: 438900 - DNA, 15 bp, Homo sapiens
agcccctttcaacca

SEQ ID NO: 438901 - DNA, 15 bp, Homo sapiens
aagcccctttcaacc

SEQ ID NO: 438902 - DNA, 15 bp, Homo sapiens
taagcccctttcaac

SEQ ID NO: 438903 - DNA, 15 bp, Homo sapiens
gtaagcccctttcaa

SEQ ID NO: 438904 - DNA, 15 bp, Homo sapiens
agtaagcccctttca

SEQ ID NO: 438905 - DNA, 15 bp, Homo sapiens
tagtaagcccctttc

SEQ ID NO: 438906 - DNA, 15 bp, Homo sapiens
atagtaagccccttt

SEQ ID NO: 438907 - DNA, 15 bp, Homo sapiens
catagtaagcccctt

SEQ ID NO: 438908 - DNA, 15 bp, Homo sapiens
tcatagtaagcccct

SEQ ID NO: 438909 - DNA, 15 bp, Homo sapiens
ttcatagtaagcccc

SEQ ID NO: 438910 - DNA, 15 bp, Homo sapiens
tttcatagtaagccc

SEQ ID NO: 438911 - DNA, 15 bp, Homo sapiens
ttttcatagtaagcc

SEQ ID NO: 438912 - DNA, 15 bp, Homo sapiens
tttttcatagtaagc

SEQ ID NO: 438913 - DNA, 15 bp, Homo sapiens
ttttttcatagtaag

SEQ ID NO: 438914 - DNA, 15 bp, Homo sapiens
gttttttcatagtaa

SEQ ID NO: 438915 - DNA, 15 bp, Homo sapiens
cgttttttcatagta

SEQ ID NO: 438916 - DNA, 15 bp, Homo sapiens
tcgttttttcatagt

SEQ ID NO: 438917 - DNA, 15 bp, Homo sapiens
ttcgttttttcatag

SEQ ID NO: 438918 - DNA, 15 bp, Homo sapiens
cttcgttttttcata

SEQ ID NO: 438919 - DNA, 15 bp, Homo sapiens
tcttcgttttttcat

SEQ ID NO: 438920 - DNA, 15 bp, Homo sapiens
atcttcgttttttca

SEQ ID NO: 438921 - DNA, 15 bp, Homo sapiens
aatcttcgttttttc

SEQ ID NO: 438922 - DNA, 15 bp, Homo sapiens
gaatcttcgtttttt

SEQ ID NO: 438923 - DNA, 15 bp, Homo sapiens
agaatcttcgttttt

SEQ ID NO: 438924 - DNA, 15 bp, Homo sapiens
gagaatcttcgtttt

SEQ ID NO: 438925 - DNA, 15 bp, Homo sapiens
ggagaatcttcgttt

SEQ ID NO: 438926 - DNA, 15 bp, Homo sapiens
aggagaatcttcgtt

SEQ ID NO: 438927 - DNA, 15 bp, Homo sapiens
gaggagaatcttcgt

SEQ ID NO: 438928 - DNA, 15 bp, Homo sapiens
agaggagaatcttcg

SEQ ID NO: 438929 - DNA, 15 bp, Homo sapiens
gagaggagaatcttc

SEQ ID NO: 438930 - DNA, 15 bp, Homo sapiens
tgagaggagaatctt

SEQ ID NO: 438931 - DNA, 15 bp, Homo sapiens
gtgagaggagaatct

SEQ ID NO: 438932 - DNA, 15 bp, Homo sapiens
ggtgagaggagaatc

SEQ ID NO: 438933 - DNA, 15 bp, Homo sapiens
gggtgagaggagaat

SEQ ID NO: 438934 - DNA, 15 bp, Homo sapiens
ggggtgagaggagaa

SEQ ID NO: 438935 - DNA, 15 bp, Homo sapiens
cggggtgagaggaga

SEQ ID NO: 438936 - DNA, 15 bp, Homo sapiens
tcggggtgagaggag

SEQ ID NO: 438937 - DNA, 15 bp, Homo sapiens
gtcggggtgagagga

SEQ ID NO: 438938 - DNA, 15 bp, Homo sapiens
agtcggggtgagagg

SEQ ID NO: 438939 - DNA, 15 bp, Homo sapiens
tagtcggggtgagag

SEQ ID NO: 438940 - DNA, 15 bp, Homo sapiens
gtagtcggggtgaga

SEQ ID NO: 438941 - DNA, 15 bp, Homo sapiens
agtagtcggggtgag

SEQ ID NO: 438942 - DNA, 15 bp, Homo sapiens
gagtagtcggggtga

SEQ ID NO: 438943 - DNA, 15 bp, Homo sapiens
tgagtagtcggggtg

SEQ ID NO: 438944 - DNA, 15 bp, Homo sapiens
ctgagtagtcggggt

SEQ ID NO: 438945 - DNA, 15 bp, Homo sapiens
cctgagtagtcgggg

SEQ ID NO: 438946 - DNA, 15 bp, Homo sapiens
tcctgagtagtcggg

SEQ ID NO: 438947 - DNA, 15 bp, Homo sapiens
ttcctgagtagtcgg

SEQ ID NO: 438948 - DNA, 15 bp, Homo sapiens
tttcctgagtagtcg

SEQ ID NO: 438949 - DNA, 15 bp, Homo sapiens
atttcctgagtagtc

SEQ ID NO: 438950 - DNA, 15 bp, Homo sapiens
aatttcctgagtagt

SEQ ID NO: 438951 - DNA, 15 bp, Homo sapiens
taatttcctgagtag

SEQ ID NO: 438952 - DNA, 15 bp, Homo sapiens
gtaatttcctgagta

SEQ ID NO: 438953 - DNA, 15 bp, Homo sapiens
tgtaatttcctgagt

SEQ ID NO: 438954 - DNA, 15 bp, Homo sapiens
ttgtaatttcctgag

SEQ ID NO: 438955 - DNA, 15 bp, Homo sapiens
cttgtaatttcctga

SEQ ID NO: 438956 - DNA, 15 bp, Homo sapiens
ccttgtaatttcctg

SEQ ID NO: 438957 - DNA, 15 bp, Homo sapiens
cccttgtaatttcct

SEQ ID NO: 438958 - DNA, 15 bp, Homo sapiens
acccttgtaatttcc

SEQ ID NO: 438959 - DNA, 15 bp, Homo sapiens
aacccttgtaatttc

SEQ ID NO: 438960 - DNA, 15 bp, Homo sapiens
aaacccttgtaattt

SEQ ID NO: 438961 - DNA, 15 bp, Homo sapiens
aaaacccttgtaatt

SEQ ID NO: 438962 - DNA, 15 bp, Homo sapiens
taaaacccttgtaat

SEQ ID NO: 438963 - DNA, 15 bp, Homo sapiens
gtaaaacccttgtaa

SEQ ID NO: 438964 - DNA, 15 bp, Homo sapiens
tgtaaaacccttgta

SEQ ID NO: 438965 - DNA, 15 bp, Homo sapiens
ttgtaaaacccttgt

SEQ ID NO: 438966 - DNA, 15 bp, Homo sapiens
cttgtaaaacccttg

SEQ ID NO: 438967 - DNA, 15 bp, Homo sapiens
acttgtaaaaccctt

SEQ ID NO: 438968 - DNA, 15 bp, Homo sapiens
aacttgtaaaaccct

SEQ ID NO: 438969 - DNA, 15 bp, Homo sapiens
gaacttgtaaaaccc

SEQ ID NO: 438970 - DNA, 15 bp, Homo sapiens
agaacttgtaaaacc

SEQ ID NO: 438971 - DNA, 15 bp, Homo sapiens
cagaacttgtaaaac

SEQ ID NO: 438972 - DNA, 15 bp, Homo sapiens
acagaacttgtaaaa

SEQ ID NO: 438973 - DNA, 15 bp, Homo sapiens
cacagaacttgtaaa

SEQ ID NO: 438974 - DNA, 15 bp, Homo sapiens
gcacagaacttgtaa

SEQ ID NO: 438975 - DNA, 15 bp, Homo sapiens
ggcacagaacttgta

SEQ ID NO: 438976 - DNA, 15 bp, Homo sapiens
tggcacagaacttgt

SEQ ID NO: 438977 - DNA, 15 bp, Homo sapiens
ctggcacagaacttg

SEQ ID NO: 438978 - DNA, 15 bp, Homo sapiens
cctggcacagaactt

SEQ ID NO: 438979 - DNA, 15 bp, Homo sapiens
tcctggcacagaact

SEQ ID NO: 438980 - DNA, 15 bp, Homo sapiens
ttcctggcacagaac

SEQ ID NO: 438981 - DNA, 15 bp, Homo sapiens
gttcctggcacagaa

SEQ ID NO: 438982 - DNA, 15 bp, Homo sapiens
ggttcctggcacaga

SEQ ID NO: 438983 - DNA, 15 bp, Homo sapiens
cggttcctggcacag

SEQ ID NO: 438984 - DNA, 15 bp, Homo sapiens
ccggttcctggcaca

SEQ ID NO: 438985 - DNA, 15 bp, Homo sapiens
cccggttcctggcac

SEQ ID NO: 438986 - DNA, 15 bp, Homo sapiens
ccccggttcctggca

SEQ ID NO: 438987 - DNA, 15 bp, Homo sapiens
gccccggttcctggc

SEQ ID NO: 438988 - DNA, 15 bp, Homo sapiens
tgccccggttcctgg

SEQ ID NO: 438989 - DNA, 15 bp, Homo sapiens
ctgccccggttcctg

SEQ ID NO: 438990 - DNA, 15 bp, Homo sapiens
tctgccccggttcct

SEQ ID NO: 438991 - DNA, 15 bp, Homo sapiens
ctctgccccggttcc

SEQ ID NO: 438992 - DNA, 15 bp, Homo sapiens
tctctgccccggttc

SEQ ID NO: 438993 - DNA, 15 bp, Homo sapiens
gtctctgccccggtt

SEQ ID NO: 438994 - DNA, 15 bp, Homo sapiens
ggtctctgccccggt

SEQ ID NO: 438995 - DNA, 15 bp, Homo sapiens
tggtctctgccccgg

SEQ ID NO: 438996 - DNA, 15 bp, Homo sapiens
ttggtctctgccccg

SEQ ID NO: 438997 - DNA, 15 bp, Homo sapiens
tttggtctctgcccc

SEQ ID NO: 438998 - DNA, 15 bp, Homo sapiens
atttggtctctgccc

SEQ ID NO: 438999 - DNA, 15 bp, Homo sapiens
tatttggtctctgcc

SEQ ID NO: 439000 - DNA, 15 bp, Homo sapiens
gtatttggtctctgc

SEQ ID NO: 439001 - DNA, 15 bp, Homo sapiens
tgtatttggtctctg

SEQ ID NO: 439002 - DNA, 15 bp, Homo sapiens
ttgtatttggtctct

SEQ ID NO: 439003 - DNA, 15 bp, Homo sapiens
tttgtatttggtctc

SEQ ID NO: 439004 - DNA, 15 bp, Homo sapiens
atttgtatttggtct

SEQ ID NO: 439005 - DNA, 15 bp, Homo sapiens
aatttgtatttggtc

SEQ ID NO: 439006 - DNA, 15 bp, Homo sapiens
aaatttgtatttggt

SEQ ID NO: 439007 - DNA, 15 bp, Homo sapiens
gaaatttgtatttgg

SEQ ID NO: 439008 - DNA, 15 bp, Homo sapiens
agaaatttgtatttg

SEQ ID NO: 439009 - DNA, 15 bp, Homo sapiens
aagaaatttgtattt

SEQ ID NO: 439010 - DNA, 15 bp, Homo sapiens
taagaaatttgtatt

SEQ ID NO: 439011 - DNA, 15 bp, Homo sapiens
ataagaaatttgtat

SEQ ID NO: 439012 - DNA, 15 bp, Homo sapiens
aataagaaatttgta

SEQ ID NO: 439013 - DNA, 15 bp, Homo sapiens
taataagaaatttgt

SEQ ID NO: 439014 - DNA, 15 bp, Homo sapiens
ataataagaaatttg

SEQ ID NO: 439015 - DNA, 15 bp, Homo sapiens
cataataagaaattt

SEQ ID NO: 439016 - DNA, 15 bp, Homo sapiens
acataataagaaatt

SEQ ID NO: 439017 - DNA, 15 bp, Homo sapiens
gacataataagaaat

SEQ ID NO: 439018 - DNA, 15 bp, Homo sapiens
tgacataataagaaa

SEQ ID NO: 439019 - DNA, 15 bp, Homo sapiens
gtgacataataagaa

SEQ ID NO: 439020 - DNA, 15 bp, Homo sapiens
ggtgacataataaga

SEQ ID NO: 439021 - DNA, 15 bp, Homo sapiens
aggtgacataataag

SEQ ID NO: 439022 - DNA, 15 bp, Homo sapiens
taggtgacataataa

SEQ ID NO: 439023 - DNA, 15 bp, Homo sapiens
ataggtgacataata

SEQ ID NO: 439024 - DNA, 15 bp, Homo sapiens
tataggtgacataat

SEQ ID NO: 439025 - DNA, 15 bp, Homo sapiens
ctataggtgacataa

SEQ ID NO: 439026 - DNA, 15 bp, Homo sapiens
gctataggtgacata

SEQ ID NO: 439027 - DNA, 15 bp, Homo sapiens
tgctataggtgacat

SEQ ID NO: 439028 - DNA, 15 bp, Homo sapiens
ctgctataggtgaca

SEQ ID NO: 439029 - DNA, 15 bp, Homo sapiens
actgctataggtgac

SEQ ID NO: 439030 - DNA, 15 bp, Homo sapiens
aactgctataggtga

SEQ ID NO: 439031 - DNA, 15 bp, Homo sapiens
caactgctataggtg

SEQ ID NO: 439032 - DNA, 15 bp, Homo sapiens
acaactgctataggt

SEQ ID NO: 439033 - DNA, 15 bp, Homo sapiens
cacaactgctatagg

SEQ ID NO: 439034 - DNA, 15 bp, Homo sapiens
acacaactgctatag

SEQ ID NO: 439035 - DNA, 15 bp, Homo sapiens
aacacaactgctata

SEQ ID NO: 439036 - DNA, 15 bp, Homo sapiens
taacacaactgctat

SEQ ID NO: 439037 - DNA, 15 bp, Homo sapiens
ttaacacaactgcta

SEQ ID NO: 439038 - DNA, 15 bp, Homo sapiens
gttaacacaactgct

SEQ ID NO: 439039 - DNA, 15 bp, Homo sapiens
agttaacacaactgc

SEQ ID NO: 439040 - DNA, 15 bp, Homo sapiens
aagttaacacaactg

SEQ ID NO: 439041 - DNA, 15 bp, Homo sapiens
gaagttaacacaact

SEQ ID NO: 439042 - DNA, 15 bp, Homo sapiens
tgaagttaacacaac

SEQ ID NO: 439043 - DNA, 15 bp, Homo sapiens
ctgaagttaacacaa

SEQ ID NO: 439044 - DNA, 15 bp, Homo sapiens
actgaagttaacaca

SEQ ID NO: 439045 - DNA, 15 bp, Homo sapiens
tactgaagttaacac

SEQ ID NO: 439046 - DNA, 15 bp, Homo sapiens
gtactgaagttaaca

SEQ ID NO: 439047 - DNA, 15 bp, Homo sapiens
tgtactgaagttaac

SEQ ID NO: 439048 - DNA, 15 bp, Homo sapiens
ctgtactgaagttaa

SEQ ID NO: 439049 - DNA, 15 bp, Homo sapiens
actgtactgaagtta

SEQ ID NO: 439050 - DNA, 15 bp, Homo sapiens
tactgtactgaagtt

SEQ ID NO: 439051 - DNA, 15 bp, Homo sapiens
ttactgtactgaagt

SEQ ID NO: 439052 - DNA, 15 bp, Homo sapiens
tttactgtactgaag

SEQ ID NO: 439053 - DNA, 15 bp, Homo sapiens
atttactgtactgaa

SEQ ID NO: 439054 - DNA, 15 bp, Homo sapiens
aatttactgtactga

SEQ ID NO: 439055 - DNA, 15 bp, Homo sapiens
aaatttactgtactg

SEQ ID NO: 439056 - DNA, 15 bp, Homo sapiens
taaatttactgtact

SEQ ID NO: 439057 - DNA, 15 bp, Homo sapiens
ttaaatttactgtac

SEQ ID NO: 439058 - DNA, 15 bp, Homo sapiens
cttaaatttactgta

SEQ ID NO: 439059 - DNA, 15 bp, Homo sapiens
gcttaaatttactgt

SEQ ID NO: 439060 - DNA, 15 bp, Homo sapiens
agcttaaatttactg

SEQ ID NO: 439061 - DNA, 15 bp, Homo sapiens
gagcttaaatttact

SEQ ID NO: 439062 - DNA, 15 bp, Homo sapiens
tgagcttaaatttac

SEQ ID NO: 439063 - DNA, 15 bp, Homo sapiens
atgagcttaaattta

SEQ ID NO: 439064 - DNA, 15 bp, Homo sapiens
aatgagcttaaattt

SEQ ID NO: 439065 - DNA, 15 bp, Homo sapiens
taatgagcttaaatt

SEQ ID NO: 439066 - DNA, 15 bp, Homo sapiens
ataatgagcttaaat

SEQ ID NO: 439067 - DNA, 15 bp, Homo sapiens
tataatgagcttaaa

SEQ ID NO: 439068 - DNA, 15 bp, Homo sapiens
gtataatgagcttaa

SEQ ID NO: 439069 - DNA, 15 bp, Homo sapiens
ggtataatgagctta

SEQ ID NO: 439070 - DNA, 15 bp, Homo sapiens
aggtataatgagctt

SEQ ID NO: 439071 - DNA, 15 bp, Homo sapiens
gaggtataatgagct

SEQ ID NO: 439072 - DNA, 15 bp, Homo sapiens
ggaggtataatgagc

SEQ ID NO: 439073 - DNA, 15 bp, Homo sapiens
aggaggtataatgag

SEQ ID NO: 439074 - DNA, 15 bp, Homo sapiens
aaggaggtataatga

SEQ ID NO: 439075 - DNA, 15 bp, Homo sapiens
gaaggaggtataatg

SEQ ID NO: 439076 - DNA, 15 bp, Homo sapiens
tgaaggaggtataat

SEQ ID NO: 439077 - DNA, 15 bp, Homo sapiens
ctgaaggaggtataa

SEQ ID NO: 439078 - DNA, 15 bp, Homo sapiens
tctgaaggaggtata

SEQ ID NO: 439079 - DNA, 15 bp, Homo sapiens
ttctgaaggaggtat

SEQ ID NO: 439080 - DNA, 15 bp, Homo sapiens
gttctgaaggaggta

SEQ ID NO: 439081 - DNA, 15 bp, Homo sapiens
cgttctgaaggaggt

SEQ ID NO: 439082 - DNA, 15 bp, Homo sapiens
ccgttctgaaggagg

SEQ ID NO: 439083 - DNA, 15 bp, Homo sapiens
tccgttctgaaggag

SEQ ID NO: 439084 - DNA, 15 bp, Homo sapiens
atccgttctgaagga

SEQ ID NO: 439085 - DNA, 15 bp, Homo sapiens
tatccgttctgaagg

SEQ ID NO: 439086 - DNA, 15 bp, Homo sapiens
gtatccgttctgaag

SEQ ID NO: 439087 - DNA, 15 bp, Homo sapiens
tgtatccgttctgaa

SEQ ID NO: 439088 - DNA, 15 bp, Homo sapiens
gtgtatccgttctga

SEQ ID NO: 439089 - DNA, 15 bp, Homo sapiens
tgtgtatccgttctg

SEQ ID NO: 439090 - DNA, 15 bp, Homo sapiens
atgtgtatccgttct

SEQ ID NO: 439091 - DNA, 15 bp, Homo sapiens
aatgtgtatccgttc

SEQ ID NO: 439092 - DNA, 15 bp, Homo sapiens
gaatgtgtatccgtt

SEQ ID NO: 439093 - DNA, 15 bp, Homo sapiens
ggaatgtgtatccgt

SEQ ID NO: 439094 - DNA, 15 bp, Homo sapiens
gggaatgtgtatccg

SEQ ID NO: 439095 - DNA, 15 bp, Homo sapiens
agggaatgtgtatcc

SEQ ID NO: 439096 - DNA, 15 bp, Homo sapiens
tagggaatgtgtatc

SEQ ID NO: 439097 - DNA, 15 bp, Homo sapiens
atagggaatgtgtat

SEQ ID NO: 439098 - DNA, 15 bp, Homo sapiens
gatagggaatgtgta

SEQ ID NO: 439099 - DNA, 15 bp, Homo sapiens
ggatagggaatgtgt

SEQ ID NO: 439100 - DNA, 15 bp, Homo sapiens
tggatagggaatgtg

SEQ ID NO: 439101 - DNA, 15 bp, Homo sapiens
atggatagggaatgt

SEQ ID NO: 439102 - DNA, 15 bp, Homo sapiens
gatggatagggaatg

SEQ ID NO: 439103 - DNA, 15 bp, Homo sapiens
tgatggatagggaat

SEQ ID NO: 439104 - DNA, 15 bp, Homo sapiens
atgatggatagggaa

SEQ ID NO: 439105 - DNA, 15 bp, Homo sapiens
gatgatggataggga

SEQ ID NO: 439106 - DNA, 15 bp, Homo sapiens
agatgatggataggg

SEQ ID NO: 439107 - DNA, 15 bp, Homo sapiens
gagatgatggatagg

SEQ ID NO: 439108 - DNA, 15 bp, Homo sapiens
tgagatgatggatag

SEQ ID NO: 439109 - DNA, 15 bp, Homo sapiens
gtgagatgatggata

SEQ ID NO: 439110 - DNA, 15 bp, Homo sapiens
agtgagatgatggat

SEQ ID NO: 439111 - DNA, 15 bp, Homo sapiens
cagtgagatgatgga

SEQ ID NO: 439112 - DNA, 15 bp, Homo sapiens
acagtgagatgatgg

SEQ ID NO: 439113 - DNA, 15 bp, Homo sapiens
gacagtgagatgatg

SEQ ID NO: 439114 - DNA, 15 bp, Homo sapiens
ggacagtgagatgat

SEQ ID NO: 439115 - DNA, 15 bp, Homo sapiens
gggacagtgagatga

SEQ ID NO: 439116 - DNA, 15 bp, Homo sapiens
tgggacagtgagatg

SEQ ID NO: 439117 - DNA, 15 bp, Homo sapiens
atgggacagtgagat

SEQ ID NO: 439118 - DNA, 15 bp, Homo sapiens
aatgggacagtgaga

SEQ ID NO: 439119 - DNA, 15 bp, Homo sapiens
gaatgggacagtgag

SEQ ID NO: 439120 - DNA, 15 bp, Homo sapiens
ggaatgggacagtga

SEQ ID NO: 439121 - DNA, 15 bp, Homo sapiens
gggaatgggacagtg

SEQ ID NO: 439122 - DNA, 15 bp, Homo sapiens
tgggaatgggacagt

SEQ ID NO: 439123 - DNA, 15 bp, Homo sapiens
ttgggaatgggacag

SEQ ID NO: 439124 - DNA, 15 bp, Homo sapiens
tttgggaatgggaca

SEQ ID NO: 439125 - DNA, 15 bp, Homo sapiens
gtttgggaatgggac

SEQ ID NO: 439126 - DNA, 15 bp, Homo sapiens
cgtttgggaatggga

SEQ ID NO: 439127 - DNA, 15 bp, Homo sapiens
ccgtttgggaatggg

SEQ ID NO: 439128 - DNA, 15 bp, Homo sapiens
accgtttgggaatgg

SEQ ID NO: 439129 - DNA, 15 bp, Homo sapiens
caccgtttgggaatg

SEQ ID NO: 439130 - DNA, 15 bp, Homo sapiens
ccaccgtttgggaat

SEQ ID NO: 439131 - DNA, 15 bp, Homo sapiens
cccaccgtttgggaa

SEQ ID NO: 439132 - DNA, 15 bp, Homo sapiens
ccccaccgtttggga

SEQ ID NO: 439133 - DNA, 15 bp, Homo sapiens
cccccaccgtttggg

SEQ ID NO: 439134 - DNA, 15 bp, Homo sapiens
acccccaccgtttgg

SEQ ID NO: 439135 - DNA, 15 bp, Homo sapiens
cacccccaccgtttg

SEQ ID NO: 439136 - DNA, 15 bp, Homo sapiens
acacccccaccgttt

SEQ ID NO: 439137 - DNA, 15 bp, Homo sapiens
tacacccccaccgtt

SEQ ID NO: 439138 - DNA, 15 bp, Homo sapiens
ctacacccccaccgt

SEQ ID NO: 439139 - DNA, 15 bp, Homo sapiens
tctacacccccaccg

SEQ ID NO: 439140 - DNA, 15 bp, Homo sapiens
atctacacccccacc

SEQ ID NO: 439141 - DNA, 15 bp, Homo sapiens
tatctacacccccac

SEQ ID NO: 439142 - DNA, 15 bp, Homo sapiens
ctatctacaccccca

SEQ ID NO: 439143 - DNA, 15 bp, Homo sapiens
tctatctacaccccc

SEQ ID NO: 439144 - DNA, 15 bp, Homo sapiens
ttctatctacacccc

SEQ ID NO: 439145 - DNA, 15 bp, Homo sapiens
cttctatctacaccc

SEQ ID NO: 439146 - DNA, 15 bp, Homo sapiens
gcttctatctacacc

SEQ ID NO: 439147 - DNA, 15 bp, Homo sapiens
cgcttctatctacac

SEQ ID NO: 439148 - DNA, 15 bp, Homo sapiens
ccgcttctatctaca

SEQ ID NO: 439149 - DNA, 15 bp, Homo sapiens
cccgcttctatctac

SEQ ID NO: 439150 - DNA, 15 bp, Homo sapiens
ccccgcttctatcta

SEQ ID NO: 439151 - DNA, 15 bp, Homo sapiens
cccccgcttctatct

SEQ ID NO: 439152 - DNA, 15 bp, Homo sapiens
acccccgcttctatc

SEQ ID NO: 439153 - DNA, 15 bp, Homo sapiens
cacccccgcttctat

SEQ ID NO: 439154 - DNA, 15 bp, Homo sapiens
ccacccccgcttcta

SEQ ID NO: 439155 - DNA, 15 bp, Homo sapiens
accacccccgcttct

SEQ ID NO: 439156 - DNA, 15 bp, Homo sapiens
gaccacccccgcttc

SEQ ID NO: 439157 - DNA, 15 bp, Homo sapiens
agaccacccccgctt

SEQ ID NO: 439158 - DNA, 15 bp, Homo sapiens
tagaccacccccgct

SEQ ID NO: 439159 - DNA, 15 bp, Homo sapiens
atagaccacccccgc

SEQ ID NO: 439160 - DNA, 15 bp, Homo sapiens
gatagaccacccccg

SEQ ID NO: 439161 - DNA, 15 bp, Homo sapiens
tgatagaccaccccc

SEQ ID NO: 439162 - DNA, 15 bp, Homo sapiens
gtgatagaccacccc

SEQ ID NO: 439163 - DNA, 15 bp, Homo sapiens
tgtgatagaccaccc

SEQ ID NO: 439164 - DNA, 15 bp, Homo sapiens
ctgtgatagaccacc

SEQ ID NO: 439165 - DNA, 15 bp, Homo sapiens
gctgtgatagaccac

SEQ ID NO: 439166 - DNA, 15 bp, Homo sapiens
ggctgtgatagacca

SEQ ID NO: 439167 - DNA, 15 bp, Homo sapiens
gggctgtgatagacc

SEQ ID NO: 439168 - DNA, 15 bp, Homo sapiens
tgggctgtgatagac

SEQ ID NO: 439169 - DNA, 15 bp, Homo sapiens
ctgggctgtgataga

SEQ ID NO: 439170 - DNA, 15 bp, Homo sapiens
gctgggctgtgatag

SEQ ID NO: 439171 - DNA, 15 bp, Homo sapiens
tgctgggctgtgata

SEQ ID NO: 439172 - DNA, 15 bp, Homo sapiens
ctgctgggctgtgat

SEQ ID NO: 439173 - DNA, 15 bp, Homo sapiens
gctgctgggctgtga

SEQ ID NO: 439174 - DNA, 15 bp, Homo sapiens
tgctgctgggctgtg

SEQ ID NO: 439175 - DNA, 15 bp, Homo sapiens
gtgctgctgggctgt

SEQ ID NO: 439176 - DNA, 15 bp, Homo sapiens
agtgctgctgggctg

SEQ ID NO: 439177 - DNA, 15 bp, Homo sapiens
gagtgctgctgggct

SEQ ID NO: 439178 - DNA, 15 bp, Homo sapiens
tgagtgctgctgggc

SEQ ID NO: 439179 - DNA, 15 bp, Homo sapiens
ttgagtgctgctggg

SEQ ID NO: 439180 - DNA, 15 bp, Homo sapiens
cttgagtgctgctgg

SEQ ID NO: 439181 - DNA, 15 bp, Homo sapiens
tcttgagtgctgctg

SEQ ID NO: 439182 - DNA, 15 bp, Homo sapiens
gtcttgagtgctgct

SEQ ID NO: 439183 - DNA, 15 bp, Homo sapiens
tgtcttgagtgctgc

SEQ ID NO: 439184 - DNA, 15 bp, Homo sapiens
ctgtcttgagtgctg

SEQ ID NO: 439185 - DNA, 15 bp, Homo sapiens
cctgtcttgagtgct

SEQ ID NO: 439186 - DNA, 15 bp, Homo sapiens
tcctgtcttgagtgc

SEQ ID NO: 439187 - DNA, 15 bp, Homo sapiens
atcctgtcttgagtg

SEQ ID NO: 439188 - DNA, 15 bp, Homo sapiens
aatcctgtcttgagt

SEQ ID NO: 439189 - DNA, 15 bp, Homo sapiens
aaatcctgtcttgag

SEQ ID NO: 439190 - DNA, 15 bp, Homo sapiens
aaaatcctgtcttga

SEQ ID NO: 439191 - DNA, 15 bp, Homo sapiens
aaaaatcctgtcttg

SEQ ID NO: 439192 - DNA, 15 bp, Homo sapiens
gaaaaatcctgtctt

SEQ ID NO: 439193 - DNA, 15 bp, Homo sapiens
tgaaaaatcctgtct

SEQ ID NO: 439194 - DNA, 15 bp, Homo sapiens
ctgaaaaatcctgtc

SEQ ID NO: 439195 - DNA, 15 bp, Homo sapiens
gctgaaaaatcctgt

SEQ ID NO: 439196 - DNA, 15 bp, Homo sapiens
cgctgaaaaatcctg

SEQ ID NO: 439197 - DNA, 15 bp, Homo sapiens
tcgctgaaaaatcct

SEQ ID NO: 439198 - DNA, 15 bp, Homo sapiens
gtcgctgaaaaatcc

SEQ ID NO: 439199 - DNA, 15 bp, Homo sapiens
agtcgctgaaaaatc

SEQ ID NO: 439200 - DNA, 15 bp, Homo sapiens
gagtcgctgaaaaat

SEQ ID NO: 439201 - DNA, 15 bp, Homo sapiens
agagtcgctgaaaaa

SEQ ID NO: 439202 - DNA, 15 bp, Homo sapiens
cagagtcgctgaaaa

SEQ ID NO: 439203 - DNA, 15 bp, Homo sapiens
ccagagtcgctgaaa

SEQ ID NO: 439204 - DNA, 15 bp, Homo sapiens
cccagagtcgctgaa

SEQ ID NO: 439205 - DNA, 15 bp, Homo sapiens
tcccagagtcgctga

SEQ ID NO: 439206 - DNA, 15 bp, Homo sapiens
ttcccagagtcgctg

SEQ ID NO: 439207 - DNA, 15 bp, Homo sapiens
cttcccagagtcgct

SEQ ID NO: 439208 - DNA, 15 bp, Homo sapiens
ccttcccagagtcgc

SEQ ID NO: 439209 - DNA, 15 bp, Homo sapiens
gccttcccagagtcg

SEQ ID NO: 439210 - DNA, 15 bp, Homo sapiens
tgccttcccagagtc

SEQ ID NO: 439211 - DNA, 15 bp, Homo sapiens
ctgccttcccagagt

SEQ ID NO: 439212 - DNA, 15 bp, Homo sapiens
cctgccttcccagag

SEQ ID NO: 439213 - DNA, 15 bp, Homo sapiens
gcctgccttcccaga

SEQ ID NO: 439214 - DNA, 15 bp, Homo sapiens
cgcctgccttcccag

SEQ ID NO: 439215 - DNA, 15 bp, Homo sapiens
acgcctgccttccca

SEQ ID NO: 439216 - DNA, 15 bp, Homo sapiens
aacgcctgccttccc

SEQ ID NO: 439217 - DNA, 15 bp, Homo sapiens
gaacgcctgccttcc

SEQ ID NO: 439218 - DNA, 15 bp, Homo sapiens
cgaacgcctgccttc

SEQ ID NO: 439219 - DNA, 15 bp, Homo sapiens
ccgaacgcctgcctt

SEQ ID NO: 439220 - DNA, 15 bp, Homo sapiens
tccgaacgcctgcct

SEQ ID NO: 439221 - DNA, 15 bp, Homo sapiens
ctccgaacgcctgcc

SEQ ID NO: 439222 - DNA, 15 bp, Homo sapiens
actccgaacgcctgc

SEQ ID NO: 439223 - DNA, 15 bp, Homo sapiens
aactccgaacgcctg

SEQ ID NO: 439224 - DNA, 15 bp, Homo sapiens
aaactccgaacgcct

SEQ ID NO: 439225 - DNA, 15 bp, Homo sapiens
caaactccgaacgcc

SEQ ID NO: 439226 - DNA, 15 bp, Homo sapiens
ccaaactccgaacgc

SEQ ID NO: 439227 - DNA, 15 bp, Homo sapiens
gccaaactccgaacg

SEQ ID NO: 439228 - DNA, 15 bp, Homo sapiens
agccaaactccgaac

SEQ ID NO: 439229 - DNA, 15 bp, Homo sapiens
gagccaaactccgaa

SEQ ID NO: 439230 - DNA, 15 bp, Homo sapiens
agagccaaactccga

SEQ ID NO: 439231 - DNA, 15 bp, Homo sapiens
aagagccaaactccg

SEQ ID NO: 439232 - DNA, 15 bp, Homo sapiens
aaagagccaaactcc

SEQ ID NO: 439233 - DNA, 15 bp, Homo sapiens
aaaagagccaaactc

SEQ ID NO: 439234 - DNA, 15 bp, Homo sapiens
taaaagagccaaact

SEQ ID NO: 439235 - DNA, 15 bp, Homo sapiens
gtaaaagagccaaac

SEQ ID NO: 439236 - DNA, 15 bp, Homo sapiens
ggtaaaagagccaaa

SEQ ID NO: 439237 - DNA, 15 bp, Homo sapiens
tggtaaaagagccaa

SEQ ID NO: 439238 - DNA, 15 bp, Homo sapiens
atggtaaaagagcca

SEQ ID NO: 439239 - DNA, 15 bp, Homo sapiens
catggtaaaagagcc

SEQ ID NO: 439240 - DNA, 15 bp, Homo sapiens
tcatggtaaaagagc

SEQ ID NO: 439241 - DNA, 15 bp, Homo sapiens
gtcatggtaaaagag

SEQ ID NO: 439242 - DNA, 15 bp, Homo sapiens
tgtcatggtaaaaga

SEQ ID NO: 439243 - DNA, 15 bp, Homo sapiens
atgtcatggtaaaag

SEQ ID NO: 439244 - DNA, 15 bp, Homo sapiens
tatgtcatggtaaaa

SEQ ID NO: 439245 - DNA, 15 bp, Homo sapiens
atatgtcatggtaaa

SEQ ID NO: 439246 - DNA, 15 bp, Homo sapiens
catatgtcatggtaa

SEQ ID NO: 439247 - DNA, 15 bp, Homo sapiens
acatatgtcatggta

SEQ ID NO: 439248 - DNA, 15 bp, Homo sapiens
cacatatgtcatggt

SEQ ID NO: 439249 - DNA, 15 bp, Homo sapiens
tcacatatgtcatgg

SEQ ID NO: 439250 - DNA, 15 bp, Homo sapiens
ctcacatatgtcatg

SEQ ID NO: 439251 - DNA, 15 bp, Homo sapiens
tctcacatatgtcat

SEQ ID NO: 439252 - DNA, 15 bp, Homo sapiens
ctctcacatatgtca

SEQ ID NO: 439253 - DNA, 15 bp, Homo sapiens
cctctcacatatgtc

SEQ ID NO: 439254 - DNA, 15 bp, Homo sapiens
tcctctcacatatgt

SEQ ID NO: 439255 - DNA, 15 bp, Homo sapiens
ttcctctcacatatg

SEQ ID NO: 439256 - DNA, 15 bp, Homo sapiens
tttcctctcacatat

SEQ ID NO: 439257 - DNA, 15 bp, Homo sapiens
gtttcctctcacata

SEQ ID NO: 439258 - DNA, 15 bp, Homo sapiens
tgtttcctctcacat

SEQ ID NO: 439259 - DNA, 15 bp, Homo sapiens
ctgtttcctctcaca

SEQ ID NO: 439260 - DNA, 15 bp, Homo sapiens
cctgtttcctctcac

SEQ ID NO: 439261 - DNA, 15 bp, Homo sapiens
tcctgtttcctctca

SEQ ID NO: 439262 - DNA, 15 bp, Homo sapiens
ctcctgtttcctctc

SEQ ID NO: 439263 - DNA, 15 bp, Homo sapiens
actcctgtttcctct

SEQ ID NO: 439264 - DNA, 15 bp, Homo sapiens
cactcctgtttcctc

SEQ ID NO: 439265 - DNA, 15 bp, Homo sapiens
gcactcctgtttcct

SEQ ID NO: 439266 - DNA, 15 bp, Homo sapiens
agcactcctgtttcc

SEQ ID NO: 439267 - DNA, 15 bp, Homo sapiens
cagcactcctgtttc

SEQ ID NO: 439268 - DNA, 15 bp, Homo sapiens
acagcactcctgttt

SEQ ID NO: 439269 - DNA, 15 bp, Homo sapiens
aacagcactcctgtt

SEQ ID NO: 439270 - DNA, 15 bp, Homo sapiens
aaacagcactcctgt

SEQ ID NO: 439271 - DNA, 15 bp, Homo sapiens
caaacagcactcctg

SEQ ID NO: 439272 - DNA, 15 bp, Homo sapiens
ccaaacagcactcct

SEQ ID NO: 439273 - DNA, 15 bp, Homo sapiens
tccaaacagcactcc

SEQ ID NO: 439274 - DNA, 15 bp, Homo sapiens
ctccaaacagcactc

SEQ ID NO: 439275 - DNA, 15 bp, Homo sapiens
cctccaaacagcact

SEQ ID NO: 439276 - DNA, 15 bp, Homo sapiens
acctccaaacagcac

SEQ ID NO: 439277 - DNA, 15 bp, Homo sapiens
cacctccaaacagca

SEQ ID NO: 439278 - DNA, 15 bp, Homo sapiens
acacctccaaacagc

SEQ ID NO: 439279 - DNA, 15 bp, Homo sapiens
cacacctccaaacag

SEQ ID NO: 439280 - DNA, 15 bp, Homo sapiens
tcacacctccaaaca

SEQ ID NO: 439281 - DNA, 15 bp, Homo sapiens
ttcacacctccaaac

SEQ ID NO: 439282 - DNA, 15 bp, Homo sapiens
tttcacacctccaaa

SEQ ID NO: 439283 - DNA, 15 bp, Homo sapiens
ttttcacacctccaa

SEQ ID NO: 439284 - DNA, 15 bp, Homo sapiens
tttttcacacctcca

SEQ ID NO: 439285 - DNA, 15 bp, Homo sapiens
atttttcacacctcc

SEQ ID NO: 439286 - DNA, 15 bp, Homo sapiens
catttttcacacctc

SEQ ID NO: 439287 - DNA, 15 bp, Homo sapiens
ccatttttcacacct

SEQ ID NO: 439288 - DNA, 15 bp, Homo sapiens
gccatttttcacacc

SEQ ID NO: 439289 - DNA, 15 bp, Homo sapiens
tgccatttttcacac

SEQ ID NO: 439290 - DNA, 15 bp, Homo sapiens
ctgccatttttcaca

SEQ ID NO: 439291 - DNA, 15 bp, Homo sapiens
gctgccatttttcac

SEQ ID NO: 439292 - DNA, 15 bp, Homo sapiens
agctgccatttttca

SEQ ID NO: 439293 - DNA, 15 bp, Homo sapiens
gagctgccatttttc

SEQ ID NO: 439294 - DNA, 15 bp, Homo sapiens
ggagctgccattttt

SEQ ID NO: 439295 - DNA, 15 bp, Homo sapiens
gggagctgccatttt

SEQ ID NO: 439296 - DNA, 15 bp, Homo sapiens
agggagctgccattt

SEQ ID NO: 439297 - DNA, 15 bp, Homo sapiens
cagggagctgccatt

SEQ ID NO: 439298 - DNA, 15 bp, Homo sapiens
ccagggagctgccat

SEQ ID NO: 439299 - DNA, 15 bp, Homo sapiens
accagggagctgcca

SEQ ID NO: 439300 - DNA, 15 bp, Homo sapiens
caccagggagctgcc

SEQ ID NO: 439301 - DNA, 15 bp, Homo sapiens
gcaccagggagctgc

SEQ ID NO: 439302 - DNA, 15 bp, Homo sapiens
ggcaccagggagctg

SEQ ID NO: 439303 - DNA, 15 bp, Homo sapiens
tggcaccagggagct

SEQ ID NO: 439304 - DNA, 15 bp, Homo sapiens
atggcaccagggagc

SEQ ID NO: 439305 - DNA, 15 bp, Homo sapiens
gatggcaccagggag

SEQ ID NO: 439306 - DNA, 15 bp, Homo sapiens
agatggcaccaggga

SEQ ID NO: 439307 - DNA, 15 bp, Homo sapiens
tagatggcaccaggg

SEQ ID NO: 439308 - DNA, 15 bp, Homo sapiens
gtagatggcaccagg

SEQ ID NO: 439309 - DNA, 15 bp, Homo sapiens
agtagatggcaccag

SEQ ID NO: 439310 - DNA, 15 bp, Homo sapiens
gagtagatggcacca

SEQ ID NO: 439311 - DNA, 15 bp, Homo sapiens
agagtagatggcacc

SEQ ID NO: 439312 - DNA, 15 bp, Homo sapiens
aagagtagatggcac

SEQ ID NO: 439313 - DNA, 15 bp, Homo sapiens
taagagtagatggca

SEQ ID NO: 439314 - DNA, 15 bp, Homo sapiens
ctaagagtagatggc

SEQ ID NO: 439315 - DNA, 15 bp, Homo sapiens
actaagagtagatgg

SEQ ID NO: 439316 - DNA, 15 bp, Homo sapiens
tactaagagtagatg

SEQ ID NO: 439317 - DNA, 15 bp, Homo sapiens
gtactaagagtagat

SEQ ID NO: 439318 - DNA, 15 bp, Homo sapiens
tgtactaagagtaga

SEQ ID NO: 439319 - DNA, 15 bp, Homo sapiens
gtgtactaagagtag

SEQ ID NO: 439320 - DNA, 15 bp, Homo sapiens
agtgtactaagagta

SEQ ID NO: 439321 - DNA, 15 bp, Homo sapiens
aagtgtactaagagt

SEQ ID NO: 439322 - DNA, 15 bp, Homo sapiens
aaagtgtactaagag

SEQ ID NO: 439323 - DNA, 15 bp, Homo sapiens
aaaagtgtactaaga

SEQ ID NO: 439324 - DNA, 15 bp, Homo sapiens
aaaaagtgtactaag

SEQ ID NO: 439325 - DNA, 15 bp, Homo sapiens
taaaaagtgtactaa

SEQ ID NO: 439326 - DNA, 15 bp, Homo sapiens
gtaaaaagtgtacta

SEQ ID NO: 439327 - DNA, 15 bp, Homo sapiens
agtaaaaagtgtact

SEQ ID NO: 439328 - DNA, 15 bp, Homo sapiens
tagtaaaaagtgtac

SEQ ID NO: 439329 - DNA, 15 bp, Homo sapiens
gtagtaaaaagtgta

SEQ ID NO: 439330 - DNA, 15 bp, Homo sapiens
agtagtaaaaagtgt

SEQ ID NO: 439331 - DNA, 15 bp, Homo sapiens
cagtagtaaaaagtg

SEQ ID NO: 439332 - DNA, 15 bp, Homo sapiens
gcagtagtaaaaagt

SEQ ID NO: 439333 - DNA, 15 bp, Homo sapiens
agcagtagtaaaaag

SEQ ID NO: 439334 - DNA, 15 bp, Homo sapiens
tagcagtagtaaaaa

SEQ ID NO: 439335 - DNA, 15 bp, Homo sapiens
ttagcagtagtaaaa

SEQ ID NO: 439336 - DNA, 15 bp, Homo sapiens
tttagcagtagtaaa

SEQ ID NO: 439337 - DNA, 15 bp, Homo sapiens
atttagcagtagtaa

SEQ ID NO: 439338 - DNA, 15 bp, Homo sapiens
tatttagcagtagta

SEQ ID NO: 439339 - DNA, 15 bp, Homo sapiens
atatttagcagtagt

SEQ ID NO: 439340 - DNA, 15 bp, Homo sapiens
catatttagcagtag

SEQ ID NO: 439341 - DNA, 15 bp, Homo sapiens
tcatatttagcagta

SEQ ID NO: 439342 - DNA, 15 bp, Homo sapiens
ttcatatttagcagt

SEQ ID NO: 439343 - DNA, 15 bp, Homo sapiens
tttcatatttagcag

SEQ ID NO: 439344 - DNA, 15 bp, Homo sapiens
atttcatatttagca

SEQ ID NO: 439345 - DNA, 15 bp, Homo sapiens
aatttcatatttagc

SEQ ID NO: 439346 - DNA, 15 bp, Homo sapiens
taatttcatatttag

SEQ ID NO: 439347 - DNA, 15 bp, Homo sapiens
ttaatttcatattta

SEQ ID NO: 439348 - DNA, 15 bp, Homo sapiens
tttaatttcatattt

SEQ ID NO: 439349 - DNA, 15 bp, Homo sapiens
ttttaatttcatatt

SEQ ID NO: 439350 - DNA, 15 bp, Homo sapiens
attttaatttcatat

SEQ ID NO: 439351 - DNA, 15 bp, Homo sapiens
tattttaatttcata

SEQ ID NO: 439352 - DNA, 15 bp, Homo sapiens
ctattttaatttcat

SEQ ID NO: 439353 - DNA, 15 bp, Homo sapiens
tctattttaatttca

SEQ ID NO: 439354 - DNA, 15 bp, Homo sapiens
gtctattttaatttc

SEQ ID NO: 439355 - DNA, 15 bp, Homo sapiens
agtctattttaattt

SEQ ID NO: 439356 - DNA, 15 bp, Homo sapiens
aagtctattttaatt

SEQ ID NO: 439357 - DNA, 15 bp, Homo sapiens
taagtctattttaat

SEQ ID NO: 439358 - DNA, 15 bp, Homo sapiens
gtaagtctattttaa

SEQ ID NO: 439359 - DNA, 15 bp, Homo sapiens
agtaagtctatttta

SEQ ID NO: 439360 - DNA, 15 bp, Homo sapiens
cagtaagtctatttt

SEQ ID NO: 439361 - DNA, 15 bp, Homo sapiens
acagtaagtctattt

SEQ ID NO: 439362 - DNA, 15 bp, Homo sapiens
tacagtaagtctatt

SEQ ID NO: 439363 - DNA, 15 bp, Homo sapiens
ctacagtaagtctat

SEQ ID NO: 439364 - DNA, 15 bp, Homo sapiens
cctacagtaagtcta

SEQ ID NO: 439365 - DNA, 15 bp, Homo sapiens
ccctacagtaagtct

SEQ ID NO: 439366 - DNA, 15 bp, Homo sapiens
tccctacagtaagtc

SEQ ID NO: 439367 - DNA, 15 bp, Homo sapiens
gtccctacagtaagt

SEQ ID NO: 439368 - DNA, 15 bp, Homo sapiens
agtccctacagtaag

SEQ ID NO: 439369 - DNA, 15 bp, Homo sapiens
gagtccctacagtaa

SEQ ID NO: 439370 - DNA, 15 bp, Homo sapiens
ggagtccctacagta

SEQ ID NO: 439371 - DNA, 15 bp, Homo sapiens
gggagtccctacagt

SEQ ID NO: 439372 - DNA, 15 bp, Homo sapiens
tgggagtccctacag

SEQ ID NO: 439373 - DNA, 15 bp, Homo sapiens
ctgggagtccctaca

SEQ ID NO: 439374 - DNA, 15 bp, Homo sapiens
tctgggagtccctac

SEQ ID NO: 439375 - DNA, 15 bp, Homo sapiens
atctgggagtcccta

SEQ ID NO: 439376 - DNA, 15 bp, Homo sapiens
catctgggagtccct

SEQ ID NO: 439377 - DNA, 15 bp, Homo sapiens
gcatctgggagtccc

SEQ ID NO: 439378 - DNA, 15 bp, Homo sapiens
agcatctgggagtcc

SEQ ID NO: 439379 - DNA, 15 bp, Homo sapiens
gagcatctgggagtc

SEQ ID NO: 439380 - DNA, 15 bp, Homo sapiens
agagcatctgggagt

SEQ ID NO: 439381 - DNA, 15 bp, Homo sapiens
aagagcatctgggag

SEQ ID NO: 439382 - DNA, 15 bp, Homo sapiens
caagagcatctggga

SEQ ID NO: 439383 - DNA, 15 bp, Homo sapiens
tcaagagcatctggg

SEQ ID NO: 439384 - DNA, 15 bp, Homo sapiens
ttcaagagcatctgg

SEQ ID NO: 439385 - DNA, 15 bp, Homo sapiens
tttcaagagcatctg

SEQ ID NO: 439386 - DNA, 15 bp, Homo sapiens
ttttcaagagcatct

SEQ ID NO: 439387 - DNA, 15 bp, Homo sapiens
cttttcaagagcatc

SEQ ID NO: 439388 - DNA, 15 bp, Homo sapiens
tcttttcaagagcat

SEQ ID NO: 439389 - DNA, 15 bp, Homo sapiens
atcttttcaagagca

SEQ ID NO: 439390 - DNA, 15 bp, Homo sapiens
catcttttcaagagc

SEQ ID NO: 439391 - DNA, 15 bp, Homo sapiens
tcatcttttcaagag

SEQ ID NO: 439392 - DNA, 15 bp, Homo sapiens
ttcatcttttcaaga

SEQ ID NO: 439393 - DNA, 15 bp, Homo sapiens
gttcatcttttcaag

SEQ ID NO: 439394 - DNA, 15 bp, Homo sapiens
agttcatcttttcaa

SEQ ID NO: 439395 - DNA, 15 bp, Homo sapiens
aagttcatcttttca

SEQ ID NO: 439396 - DNA, 15 bp, Homo sapiens
aaagttcatcttttc

SEQ ID NO: 439397 - DNA, 15 bp, Homo sapiens
taaagttcatctttt

SEQ ID NO: 439398 - DNA, 15 bp, Homo sapiens
ataaagttcatcttt

SEQ ID NO: 439399 - DNA, 15 bp, Homo sapiens
tataaagttcatctt

SEQ ID NO: 439400 - DNA, 15 bp, Homo sapiens
atataaagttcatct

SEQ ID NO: 439401 - DNA, 15 bp, Homo sapiens
aatataaagttcatc

SEQ ID NO: 439402 - DNA, 15 bp, Homo sapiens
aaatataaagttcat

SEQ ID NO: 439403 - DNA, 15 bp, Homo sapiens
taaatataaagttca

SEQ ID NO: 439404 - DNA, 15 bp, Homo sapiens
ttaaatataaagttc

SEQ ID NO: 439405 - DNA, 15 bp, Homo sapiens
tttaaatataaagtt

SEQ ID NO: 439406 - DNA, 15 bp, Homo sapiens
ctttaaatataaagt

SEQ ID NO: 439407 - DNA, 15 bp, Homo sapiens
tctttaaatataaag

SEQ ID NO: 439408 - DNA, 15 bp, Homo sapiens
ttctttaaatataaa

SEQ ID NO: 439409 - DNA, 15 bp, Homo sapiens
tttctttaaatataa

SEQ ID NO: 439410 - DNA, 15 bp, Homo sapiens
gtttctttaaatata

SEQ ID NO: 439411 - DNA, 15 bp, Homo sapiens
ggtttctttaaatat

SEQ ID NO: 439412 - DNA, 15 bp, Homo sapiens
aggtttctttaaata

SEQ ID NO: 439413 - DNA, 15 bp, Homo sapiens
aaggtttctttaaat

SEQ ID NO: 439414 - DNA, 15 bp, Homo sapiens
aaaggtttctttaaa

SEQ ID NO: 439415 - DNA, 15 bp, Homo sapiens
gaaaggtttctttaa

SEQ ID NO: 439416 - DNA, 15 bp, Homo sapiens
cgaaaggtttcttta

SEQ ID NO: 439417 - DNA, 15 bp, Homo sapiens
tcgaaaggtttcttt

SEQ ID NO: 439418 - DNA, 15 bp, Homo sapiens
atcgaaaggtttctt

SEQ ID NO: 439419 - DNA, 15 bp, Homo sapiens
aatcgaaaggtttct

SEQ ID NO: 439420 - DNA, 15 bp, Homo sapiens
aaatcgaaaggtttc

SEQ ID NO: 439421 - DNA, 15 bp, Homo sapiens
gaaatcgaaaggttt

SEQ ID NO: 439422 - DNA, 15 bp, Homo sapiens
cgaaatcgaaaggtt

SEQ ID NO: 439423 - DNA, 15 bp, Homo sapiens
gcgaaatcgaaaggt

SEQ ID NO: 439424 - DNA, 15 bp, Homo sapiens
agcgaaatcgaaagg

SEQ ID NO: 439425 - DNA, 15 bp, Homo sapiens
gagcgaaatcgaaag

SEQ ID NO: 439426 - DNA, 15 bp, Homo sapiens
tgagcgaaatcgaaa

SEQ ID NO: 439427 - DNA, 15 bp, Homo sapiens
ttgagcgaaatcgaa

SEQ ID NO: 439428 - DNA, 15 bp, Homo sapiens
tttgagcgaaatcga

SEQ ID NO: 439429 - DNA, 15 bp, Homo sapiens
atttgagcgaaatcg

SEQ ID NO: 439430 - DNA, 15 bp, Homo sapiens
catttgagcgaaatc

SEQ ID NO: 439431 - DNA, 15 bp, Homo sapiens
gcatttgagcgaaat

SEQ ID NO: 439432 - DNA, 15 bp, Homo sapiens
tgcatttgagcgaaa

SEQ ID NO: 439433 - DNA, 15 bp, Homo sapiens
ctgcatttgagcgaa

SEQ ID NO: 439434 - DNA, 15 bp, Homo sapiens
cctgcatttgagcga

SEQ ID NO: 439435 - DNA, 15 bp, Homo sapiens
tcctgcatttgagcg

SEQ ID NO: 439436 - DNA, 15 bp, Homo sapiens
ttcctgcatttgagc

SEQ ID NO: 439437 - DNA, 15 bp, Homo sapiens
tttcctgcatttgag

SEQ ID NO: 439438 - DNA, 15 bp, Homo sapiens
atttcctgcatttga

SEQ ID NO: 439439 - DNA, 15 bp, Homo sapiens
aatttcctgcatttg

SEQ ID NO: 439440 - DNA, 15 bp, Homo sapiens
taatttcctgcattt

SEQ ID NO: 439441 - DNA, 15 bp, Homo sapiens
ctaatttcctgcatt

SEQ ID NO: 439442 - DNA, 15 bp, Homo sapiens
cctaatttcctgcat

SEQ ID NO: 439443 - DNA, 15 bp, Homo sapiens
ccctaatttcctgca

SEQ ID NO: 439444 - DNA, 15 bp, Homo sapiens
tccctaatttcctgc

SEQ ID NO: 439445 - DNA, 15 bp, Homo sapiens
ctccctaatttcctg

SEQ ID NO: 439446 - DNA, 15 bp, Homo sapiens
tctccctaatttcct

SEQ ID NO: 439447 - DNA, 15 bp, Homo sapiens
ttctccctaatttcc

SEQ ID NO: 439448 - DNA, 15 bp, Homo sapiens
attctccctaatttc

SEQ ID NO: 439449 - DNA, 15 bp, Homo sapiens
tattctccctaattt

SEQ ID NO: 439450 - DNA, 15 bp, Homo sapiens
ctattctccctaatt

SEQ ID NO: 439451 - DNA, 15 bp, Homo sapiens
actattctccctaat

SEQ ID NO: 439452 - DNA, 15 bp, Homo sapiens
gactattctccctaa

SEQ ID NO: 439453 - DNA, 15 bp, Homo sapiens
ggactattctcccta

SEQ ID NO: 439454 - DNA, 15 bp, Homo sapiens
tggactattctccct

SEQ ID NO: 439455 - DNA, 15 bp, Homo sapiens
ctggactattctccc

SEQ ID NO: 439456 - DNA, 15 bp, Homo sapiens
actggactattctcc

SEQ ID NO: 439457 - DNA, 15 bp, Homo sapiens
aactggactattctc

SEQ ID NO: 439458 - DNA, 15 bp, Homo sapiens
aaactggactattct

SEQ ID NO: 439459 - DNA, 15 bp, Homo sapiens
aaaactggactattc

SEQ ID NO: 439460 - DNA, 15 bp, Homo sapiens
caaaactggactatt

SEQ ID NO: 439461 - DNA, 15 bp, Homo sapiens
tcaaaactggactat

SEQ ID NO: 439462 - DNA, 15 bp, Homo sapiens
gtcaaaactggacta

SEQ ID NO: 439463 - DNA, 15 bp, Homo sapiens
agtcaaaactggact

SEQ ID NO: 439464 - DNA, 15 bp, Homo sapiens
aagtcaaaactggac

SEQ ID NO: 439465 - DNA, 15 bp, Homo sapiens
aaagtcaaaactgga

SEQ ID NO: 439466 - DNA, 15 bp, Homo sapiens
gaaagtcaaaactgg

SEQ ID NO: 439467 - DNA, 15 bp, Homo sapiens
tgaaagtcaaaactg

SEQ ID NO: 439468 - DNA, 15 bp, Homo sapiens
ttgaaagtcaaaact

SEQ ID NO: 439469 - DNA, 15 bp, Homo sapiens
cttgaaagtcaaaac

SEQ ID NO: 439470 - DNA, 15 bp, Homo sapiens
tcttgaaagtcaaaa

SEQ ID NO: 439471 - DNA, 15 bp, Homo sapiens
ttcttgaaagtcaaa

SEQ ID NO: 439472 - DNA, 15 bp, Homo sapiens
tttcttgaaagtcaa

SEQ ID NO: 439473 - DNA, 15 bp, Homo sapiens
ttttcttgaaagtca

SEQ ID NO: 439474 - DNA, 15 bp, Homo sapiens
cttttcttgaaagtc

SEQ ID NO: 439475 - DNA, 15 bp, Homo sapiens
ccttttcttgaaagt

SEQ ID NO: 439476 - DNA, 15 bp, Homo sapiens
cccttttcttgaaag

SEQ ID NO: 439477 - DNA, 15 bp, Homo sapiens
acccttttcttgaaa

SEQ ID NO: 439478 - DNA, 15 bp, Homo sapiens
cacccttttcttgaa

SEQ ID NO: 439479 - DNA, 15 bp, Homo sapiens
acacccttttcttga

SEQ ID NO: 439480 - DNA, 15 bp, Homo sapiens
aacacccttttcttg

SEQ ID NO: 439481 - DNA, 15 bp, Homo sapiens
taacacccttttctt

SEQ ID NO: 439482 - DNA, 15 bp, Homo sapiens
ataacacccttttct

SEQ ID NO: 439483 - DNA, 15 bp, Homo sapiens
aataacacccttttc

SEQ ID NO: 439484 - DNA, 15 bp, Homo sapiens
aaataacaccctttt

SEQ ID NO: 439485 - DNA, 15 bp, Homo sapiens
aaaataacacccttt

SEQ ID NO: 439486 - DNA, 15 bp, Homo sapiens
taaaataacaccctt

SEQ ID NO: 439487 - DNA, 15 bp, Homo sapiens
ttaaaataacaccct

SEQ ID NO: 439488 - DNA, 15 bp, Homo sapiens
tttaaaataacaccc

SEQ ID NO: 439489 - DNA, 15 bp, Homo sapiens
ttttaaaataacacc

SEQ ID NO: 439490 - DNA, 15 bp, Homo sapiens
tttttaaaataacac

SEQ ID NO: 439491 - DNA, 15 bp, Homo sapiens
atttttaaaataaca

SEQ ID NO: 439492 - DNA, 15 bp, Homo sapiens
gatttttaaaataac

SEQ ID NO: 439493 - DNA, 15 bp, Homo sapiens
agatttttaaaataa

SEQ ID NO: 439494 - DNA, 15 bp, Homo sapiens
tagatttttaaaata

SEQ ID NO: 439495 - DNA, 15 bp, Homo sapiens
ttagatttttaaaat

SEQ ID NO: 439496 - DNA, 15 bp, Homo sapiens
cttagatttttaaaa

SEQ ID NO: 439497 - DNA, 15 bp, Homo sapiens
tcttagatttttaaa

SEQ ID NO: 439498 - DNA, 15 bp, Homo sapiens
gtcttagatttttaa

SEQ ID NO: 439499 - DNA, 15 bp, Homo sapiens
tgtcttagattttta

SEQ ID NO: 439500 - DNA, 15 bp, Homo sapiens
ttgtcttagattttt

SEQ ID NO: 439501 - DNA, 15 bp, Homo sapiens
tttgtcttagatttt

SEQ ID NO: 439502 - DNA, 15 bp, Homo sapiens
ctttgtcttagattt

SEQ ID NO: 439503 - DNA, 15 bp, Homo sapiens
tctttgtcttagatt

SEQ ID NO: 439504 - DNA, 15 bp, Homo sapiens
atctttgtcttagat

SEQ ID NO: 439505 - DNA, 15 bp, Homo sapiens
aatctttgtcttaga

SEQ ID NO: 439506 - DNA, 15 bp, Homo sapiens
taatctttgtcttag

SEQ ID NO: 439507 - DNA, 15 bp, Homo sapiens
ctaatctttgtctta

SEQ ID NO: 439508 - DNA, 15 bp, Homo sapiens
tctaatctttgtctt

SEQ ID NO: 439509 - DNA, 15 bp, Homo sapiens
ctctaatctttgtct

SEQ ID NO: 439510 - DNA, 15 bp, Homo sapiens
cctctaatctttgtc

SEQ ID NO: 439511 - DNA, 15 bp, Homo sapiens
tcctctaatctttgt

SEQ ID NO: 439512 - DNA, 15 bp, Homo sapiens
ctcctctaatctttg

SEQ ID NO: 439513 - DNA, 15 bp, Homo sapiens
actcctctaatcttt

SEQ ID NO: 439514 - DNA, 15 bp, Homo sapiens
gactcctctaatctt

SEQ ID NO: 439515 - DNA, 15 bp, Homo sapiens
agactcctctaatct

SEQ ID NO: 439516 - DNA, 15 bp, Homo sapiens
aagactcctctaatc

SEQ ID NO: 439517 - DNA, 15 bp, Homo sapiens
taagactcctctaat

SEQ ID NO: 439518 - DNA, 15 bp, Homo sapiens
ctaagactcctctaa

SEQ ID NO: 439519 - DNA, 15 bp, Homo sapiens
gctaagactcctcta

SEQ ID NO: 439520 - DNA, 15 bp, Homo sapiens
agctaagactcctct

SEQ ID NO: 439521 - DNA, 15 bp, Homo sapiens
aagctaagactcctc

SEQ ID NO: 439522 - DNA, 15 bp, Homo sapiens
aaagctaagactcct

SEQ ID NO: 439523 - DNA, 15 bp, Homo sapiens
gaaagctaagactcc

SEQ ID NO: 439524 - DNA, 15 bp, Homo sapiens
ggaaagctaagactc

SEQ ID NO: 439525 - DNA, 15 bp, Homo sapiens
tggaaagctaagact

SEQ ID NO: 439526 - DNA, 15 bp, Homo sapiens
gtggaaagctaagac

SEQ ID NO: 439527 - DNA, 15 bp, Homo sapiens
agtggaaagctaaga

SEQ ID NO: 439528 - DNA, 15 bp, Homo sapiens
cagtggaaagctaag

SEQ ID NO: 439529 - DNA, 15 bp, Homo sapiens
ccagtggaaagctaa

SEQ ID NO: 439530 - DNA, 15 bp, Homo sapiens
accagtggaaagcta

SEQ ID NO: 439531 - DNA, 15 bp, Homo sapiens
aaccagtggaaagct

SEQ ID NO: 439532 - DNA, 15 bp, Homo sapiens
taaccagtggaaagc

SEQ ID NO: 439533 - DNA, 15 bp, Homo sapiens
ttaaccagtggaaag

SEQ ID NO: 439534 - DNA, 15 bp, Homo sapiens
cttaaccagtggaaa

SEQ ID NO: 439535 - DNA, 15 bp, Homo sapiens
acttaaccagtggaa

SEQ ID NO: 439536 - DNA, 15 bp, Homo sapiens
gacttaaccagtgga

SEQ ID NO: 439537 - DNA, 15 bp, Homo sapiens
ggacttaaccagtgg

SEQ ID NO: 439538 - DNA, 15 bp, Homo sapiens
aggacttaaccagtg

SEQ ID NO: 439539 - DNA, 15 bp, Homo sapiens
caggacttaaccagt

SEQ ID NO: 439540 - DNA, 15 bp, Homo sapiens
acaggacttaaccag

SEQ ID NO: 439541 - DNA, 15 bp, Homo sapiens
aacaggacttaacca

SEQ ID NO: 439542 - DNA, 15 bp, Homo sapiens
caacaggacttaacc

SEQ ID NO: 439543 - DNA, 15 bp, Homo sapiens
tcaacaggacttaac

SEQ ID NO: 439544 - DNA, 15 bp, Homo sapiens
ctcaacaggacttaa

SEQ ID NO: 439545 - DNA, 15 bp, Homo sapiens
cctcaacaggactta

SEQ ID NO: 439546 - DNA, 15 bp, Homo sapiens
gcctcaacaggactt

SEQ ID NO: 439547 - DNA, 15 bp, Homo sapiens
tgcctcaacaggact

SEQ ID NO: 439548 - DNA, 15 bp, Homo sapiens
ttgcctcaacaggac

SEQ ID NO: 439549 - DNA, 15 bp, Homo sapiens
cttgcctcaacagga

SEQ ID NO: 439550 - DNA, 15 bp, Homo sapiens
gcttgcctcaacagg

SEQ ID NO: 439551 - DNA, 15 bp, Homo sapiens
agcttgcctcaacag

SEQ ID NO: 439552 - DNA, 15 bp, Homo sapiens
cagcttgcctcaaca

SEQ ID NO: 439553 - DNA, 15 bp, Homo sapiens
acagcttgcctcaac

SEQ ID NO: 439554 - DNA, 15 bp, Homo sapiens
tacagcttgcctcaa

SEQ ID NO: 439555 - DNA, 15 bp, Homo sapiens
atacagcttgcctca

SEQ ID NO: 439556 - DNA, 15 bp, Homo sapiens
aatacagcttgcctc

SEQ ID NO: 439557 - DNA, 15 bp, Homo sapiens
gaatacagcttgcct

SEQ ID NO: 439558 - DNA, 15 bp, Homo sapiens
ggaatacagcttgcc

SEQ ID NO: 439559 - DNA, 15 bp, Homo sapiens
tggaatacagcttgc

SEQ ID NO: 439560 - DNA, 15 bp, Homo sapiens
ctggaatacagcttg

SEQ ID NO: 439561 - DNA, 15 bp, Homo sapiens
actggaatacagctt

SEQ ID NO: 439562 - DNA, 15 bp, Homo sapiens
cactggaatacagct

SEQ ID NO: 439563 - DNA, 15 bp, Homo sapiens
acactggaatacagc

SEQ ID NO: 439564 - DNA, 15 bp, Homo sapiens
aacactggaatacag

SEQ ID NO: 439565 - DNA, 15 bp, Homo sapiens
caacactggaataca

SEQ ID NO: 439566 - DNA, 15 bp, Homo sapiens
tcaacactggaatac

SEQ ID NO: 439567 - DNA, 15 bp, Homo sapiens
ctcaacactggaata

SEQ ID NO: 439568 - DNA, 15 bp, Homo sapiens
actcaacactggaat

SEQ ID NO: 439569 - DNA, 15 bp, Homo sapiens
gactcaacactggaa

SEQ ID NO: 439570 - DNA, 15 bp, Homo sapiens
agactcaacactgga

SEQ ID NO: 439571 - DNA, 15 bp, Homo sapiens
cagactcaacactgg

SEQ ID NO: 439572 - DNA, 15 bp, Homo sapiens
gcagactcaacactg

SEQ ID NO: 439573 - DNA, 15 bp, Homo sapiens
tgcagactcaacact

SEQ ID NO: 439574 - DNA, 15 bp, Homo sapiens
ctgcagactcaacac

SEQ ID NO: 439575 - DNA, 15 bp, Homo sapiens
gctgcagactcaaca

SEQ ID NO: 439576 - DNA, 15 bp, Homo sapiens
cgctgcagactcaac

SEQ ID NO: 439577 - DNA, 15 bp, Homo sapiens
ccgctgcagactcaa

SEQ ID NO: 439578 - DNA, 15 bp, Homo sapiens
gccgctgcagactca

SEQ ID NO: 439579 - DNA, 15 bp, Homo sapiens
ggccgctgcagactc

SEQ ID NO: 439580 - DNA, 15 bp, Homo sapiens
cggccgctgcagact

SEQ ID NO: 439581 - DNA, 15 bp, Homo sapiens
tcggccgctgcagac

SEQ ID NO: 439582 - DNA, 15 bp, Homo sapiens
ttcggccgctgcaga

SEQ ID NO: 439583 - DNA, 15 bp, Homo sapiens
cttcggccgctgcag

SEQ ID NO: 439584 - DNA, 15 bp, Homo sapiens
gcttcggccgctgca

SEQ ID NO: 439585 - DNA, 15 bp, Homo sapiens
tgcttcggccgctgc

SEQ ID NO: 439586 - DNA, 15 bp, Homo sapiens
ctgcttcggccgctg

SEQ ID NO: 439587 - DNA, 15 bp, Homo sapiens
gctgcttcggccgct

SEQ ID NO: 439588 - DNA, 15 bp, Homo sapiens
ggctgcttcggccgc

SEQ ID NO: 439589 - DNA, 15 bp, Homo sapiens
gggctgcttcggccg

SEQ ID NO: 439590 - DNA, 15 bp, Homo sapiens
ggggctgcttcggcc

SEQ ID NO: 439591 - DNA, 15 bp, Homo sapiens
cggggctgcttcggc

SEQ ID NO: 439592 - DNA, 15 bp, Homo sapiens
tcggggctgcttcgg

SEQ ID NO: 439593 - DNA, 15 bp, Homo sapiens
ttcggggctgcttcg

SEQ ID NO: 439594 - DNA, 15 bp, Homo sapiens
cttcggggctgcttc

SEQ ID NO: 439595 - DNA, 15 bp, Homo sapiens
gcttcggggctgctt

SEQ ID NO: 439596 - DNA, 15 bp, Homo sapiens
tgcttcggggctgct

SEQ ID NO: 439597 - DNA, 15 bp, Homo sapiens
ctgcttcggggctgc

SEQ ID NO: 439598 - DNA, 15 bp, Homo sapiens
gctgcttcggggctg

SEQ ID NO: 439599 - DNA, 15 bp, Homo sapiens
agctgcttcggggct

SEQ ID NO: 439600 - DNA, 15 bp, Homo sapiens
cagctgcttcggggc

SEQ ID NO: 439601 - DNA, 15 bp, Homo sapiens
acagctgcttcgggg

SEQ ID NO: 439602 - DNA, 15 bp, Homo sapiens
cacagctgcttcggg

SEQ ID NO: 439603 - DNA, 15 bp, Homo sapiens
gcacagctgcttcgg

SEQ ID NO: 439604 - DNA, 15 bp, Homo sapiens
ggcacagctgcttcg

SEQ ID NO: 439605 - DNA, 15 bp, Homo sapiens
aggcacagctgcttc

SEQ ID NO: 439606 - DNA, 15 bp, Homo sapiens
caggcacagctgctt

SEQ ID NO: 439607 - DNA, 15 bp, Homo sapiens
gcaggcacagctgct

SEQ ID NO: 439608 - DNA, 15 bp, Homo sapiens
ggcaggcacagctgc

SEQ ID NO: 439609 - DNA, 15 bp, Homo sapiens
cggcaggcacagctg

SEQ ID NO: 439610 - DNA, 15 bp, Homo sapiens
acggcaggcacagct

SEQ ID NO: 439611 - DNA, 15 bp, Homo sapiens
cacggcaggcacagc

SEQ ID NO: 439612 - DNA, 15 bp, Homo sapiens
ccacggcaggcacag

SEQ ID NO: 439613 - DNA, 15 bp, Homo sapiens
cccacggcaggcaca

SEQ ID NO: 439614 - DNA, 15 bp, Homo sapiens
gcccacggcaggcac

SEQ ID NO: 439615 - DNA, 15 bp, Homo sapiens
tgcccacggcaggca

SEQ ID NO: 439616 - DNA, 15 bp, Homo sapiens
ctgcccacggcaggc

SEQ ID NO: 439617 - DNA, 15 bp, Homo sapiens
actgcccacggcagg

SEQ ID NO: 439618 - DNA, 15 bp, Homo sapiens
gactgcccacggcag

SEQ ID NO: 439619 - DNA, 15 bp, Homo sapiens
tgactgcccacggca

SEQ ID NO: 439620 - DNA, 15 bp, Homo sapiens
ctgactgcccacggc

SEQ ID NO: 439621 - DNA, 15 bp, Homo sapiens
actgactgcccacgg

SEQ ID NO: 439622 - DNA, 15 bp, Homo sapiens
gactgactgcccacg

SEQ ID NO: 439623 - DNA, 15 bp, Homo sapiens
agactgactgcccac

SEQ ID NO: 439624 - DNA, 15 bp, Homo sapiens
gagactgactgccca

SEQ ID NO: 439625 - DNA, 15 bp, Homo sapiens
cgagactgactgccc

SEQ ID NO: 439626 - DNA, 15 bp, Homo sapiens
ccgagactgactgcc

SEQ ID NO: 439627 - DNA, 15 bp, Homo sapiens
accgagactgactgc

SEQ ID NO: 439628 - DNA, 15 bp, Homo sapiens
caccgagactgactg

SEQ ID NO: 439629 - DNA, 15 bp, Homo sapiens
gcaccgagactgact

SEQ ID NO: 439630 - DNA, 15 bp, Homo sapiens
cgcaccgagactgac

SEQ ID NO: 439631 - DNA, 15 bp, Homo sapiens
ccgcaccgagactga

SEQ ID NO: 439632 - DNA, 15 bp, Homo sapiens
gccgcaccgagactg

SEQ ID NO: 439633 - DNA, 15 bp, Homo sapiens
ggccgcaccgagact

SEQ ID NO: 439634 - DNA, 15 bp, Homo sapiens
tggccgcaccgagac

SEQ ID NO: 439635 - DNA, 15 bp, Homo sapiens
atggccgcaccgaga

SEQ ID NO: 439636 - DNA, 15 bp, Homo sapiens
gatggccgcaccgag

SEQ ID NO: 439637 - DNA, 15 bp, Homo sapiens
ggatggccgcaccga

SEQ ID NO: 439638 - DNA, 15 bp, Homo sapiens
gggatggccgcaccg

SEQ ID NO: 439639 - DNA, 15 bp, Homo sapiens
agggatggccgcacc

SEQ ID NO: 439640 - DNA, 15 bp, Homo sapiens
gagggatggccgcac

SEQ ID NO: 439641 - DNA, 15 bp, Homo sapiens
agagggatggccgca

SEQ ID NO: 439642 - DNA, 15 bp, Homo sapiens
gagagggatggccgc

SEQ ID NO: 439643 - DNA, 15 bp, Homo sapiens
agagagggatggccg

SEQ ID NO: 439644 - DNA, 15 bp, Homo sapiens
tagagagggatggcc

SEQ ID NO: 439645 - DNA, 15 bp, Homo sapiens
gtagagagggatggc

SEQ ID NO: 439646 - DNA, 15 bp, Homo sapiens
tgtagagagggatgg

SEQ ID NO: 439647 - DNA, 15 bp, Homo sapiens
gtgtagagagggatg

SEQ ID NO: 439648 - DNA, 15 bp, Homo sapiens
ggtgtagagagggat

SEQ ID NO: 439649 - DNA, 15 bp, Homo sapiens
gggtgtagagaggga

SEQ ID NO: 439650 - DNA, 15 bp, Homo sapiens
tgggtgtagagaggg

SEQ ID NO: 439651 - DNA, 15 bp, Homo sapiens
ctgggtgtagagagg

SEQ ID NO: 439652 - DNA, 15 bp, Homo sapiens
cctgggtgtagagag

SEQ ID NO: 439653 - DNA, 15 bp, Homo sapiens
tcctgggtgtagaga

SEQ ID NO: 439654 - DNA, 15 bp, Homo sapiens
ttcctgggtgtagag

SEQ ID NO: 439655 - DNA, 15 bp, Homo sapiens
cttcctgggtgtaga

SEQ ID NO: 439656 - DNA, 15 bp, Homo sapiens
ccttcctgggtgtag

SEQ ID NO: 439657 - DNA, 15 bp, Homo sapiens
tccttcctgggtgta

SEQ ID NO: 439658 - DNA, 15 bp, Homo sapiens
atccttcctgggtgt

SEQ ID NO: 439659 - DNA, 15 bp, Homo sapiens
aatccttcctgggtg

SEQ ID NO: 439660 - DNA, 15 bp, Homo sapiens
gaatccttcctgggt

SEQ ID NO: 439661 - DNA, 15 bp, Homo sapiens
agaatccttcctggg

SEQ ID NO: 439662 - DNA, 15 bp, Homo sapiens
cagaatccttcctgg

SEQ ID NO: 439663 - DNA, 15 bp, Homo sapiens
gcagaatccttcctg

SEQ ID NO: 439664 - DNA, 15 bp, Homo sapiens
tgcagaatccttcct

SEQ ID NO: 439665 - DNA, 15 bp, Homo sapiens
ctgcagaatccttcc

SEQ ID NO: 439666 - DNA, 15 bp, Homo sapiens
tctgcagaatccttc

SEQ ID NO: 439667 - DNA, 15 bp, Homo sapiens
ctctgcagaatcctt

SEQ ID NO: 439668 - DNA, 15 bp, Homo sapiens
cctctgcagaatcct

SEQ ID NO: 439669 - DNA, 15 bp, Homo sapiens
gcctctgcagaatcc

SEQ ID NO: 439670 - DNA, 15 bp, Homo sapiens
cgcctctgcagaatc

SEQ ID NO: 439671 - DNA, 15 bp, Homo sapiens
acgcctctgcagaat

SEQ ID NO: 439672 - DNA, 15 bp, Homo sapiens
gacgcctctgcagaa

SEQ ID NO: 439673 - DNA, 15 bp, Homo sapiens
tgacgcctctgcaga

SEQ ID NO: 439674 - DNA, 15 bp, Homo sapiens
gtgacgcctctgcag

SEQ ID NO: 439675 - DNA, 15 bp, Homo sapiens
agtgacgcctctgca

SEQ ID NO: 439676 - DNA, 15 bp, Homo sapiens
cagtgacgcctctgc

SEQ ID NO: 439677 - DNA, 15 bp, Homo sapiens
ccagtgacgcctctg

SEQ ID NO: 439678 - DNA, 15 bp, Homo sapiens
cccagtgacgcctct

SEQ ID NO: 439679 - DNA, 15 bp, Homo sapiens
ccccagtgacgcctc

SEQ ID NO: 439680 - DNA, 15 bp, Homo sapiens
accccagtgacgcct

SEQ ID NO: 439681 - DNA, 15 bp, Homo sapiens
caccccagtgacgcc

SEQ ID NO: 439682 - DNA, 15 bp, Homo sapiens
tcaccccagtgacgc

SEQ ID NO: 439683 - DNA, 15 bp, Homo sapiens
ttcaccccagtgacg

SEQ ID NO: 439684 - DNA, 15 bp, Homo sapiens
attcaccccagtgac

SEQ ID NO: 439685 - DNA, 15 bp, Homo sapiens
aattcaccccagtga

SEQ ID NO: 439686 - DNA, 15 bp, Homo sapiens
gaattcaccccagtg

SEQ ID NO: 439687 - DNA, 15 bp, Homo sapiens
tgaattcaccccagt

SEQ ID NO: 439688 - DNA, 15 bp, Homo sapiens
atgaattcaccccag

SEQ ID NO: 439689 - DNA, 15 bp, Homo sapiens
catgaattcacccca

SEQ ID NO: 439690 - DNA, 15 bp, Homo sapiens
gcatgaattcacccc

SEQ ID NO: 439691 - DNA, 15 bp, Homo sapiens
ggcatgaattcaccc

SEQ ID NO: 439692 - DNA, 15 bp, Homo sapiens
tggcatgaattcacc

SEQ ID NO: 439693 - DNA, 15 bp, Homo sapiens
ttggcatgaattcac

SEQ ID NO: 439694 - DNA, 15 bp, Homo sapiens
cttggcatgaattca

SEQ ID NO: 439695 - DNA, 15 bp, Homo sapiens
ccttggcatgaattc

SEQ ID NO: 439696 - DNA, 15 bp, Homo sapiens
cccttggcatgaatt

SEQ ID NO: 439697 - DNA, 15 bp, Homo sapiens
acccttggcatgaat

SEQ ID NO: 439698 - DNA, 15 bp, Homo sapiens
aacccttggcatgaa

SEQ ID NO: 439699 - DNA, 15 bp, Homo sapiens
caacccttggcatga

SEQ ID NO: 439700 - DNA, 15 bp, Homo sapiens
tcaacccttggcatg

SEQ ID NO: 439701 - DNA, 15 bp, Homo sapiens
ctcaacccttggcat

SEQ ID NO: 439702 - DNA, 15 bp, Homo sapiens
actcaacccttggca

SEQ ID NO: 439703 - DNA, 15 bp, Homo sapiens
gactcaacccttggc

SEQ ID NO: 439704 - DNA, 15 bp, Homo sapiens
ggactcaacccttgg

SEQ ID NO: 439705 - DNA, 15 bp, Homo sapiens
tggactcaacccttg

SEQ ID NO: 439706 - DNA, 15 bp, Homo sapiens
atggactcaaccctt

SEQ ID NO: 439707 - DNA, 15 bp, Homo sapiens
aatggactcaaccct

SEQ ID NO: 439708 - DNA, 15 bp, Homo sapiens
aaatggactcaaccc

SEQ ID NO: 439709 - DNA, 15 bp, Homo sapiens
caaatggactcaacc

SEQ ID NO: 439710 - DNA, 15 bp, Homo sapiens
acaaatggactcaac

SEQ ID NO: 439711 - DNA, 15 bp, Homo sapiens
cacaaatggactcaa

SEQ ID NO: 439712 - DNA, 15 bp, Homo sapiens
ccacaaatggactca

SEQ ID NO: 439713 - DNA, 15 bp, Homo sapiens
gccacaaatggactc

SEQ ID NO: 439714 - DNA, 15 bp, Homo sapiens
ggccacaaatggact

SEQ ID NO: 439715 - DNA, 15 bp, Homo sapiens
gggccacaaatggac

SEQ ID NO: 439716 - DNA, 15 bp, Homo sapiens
agggccacaaatgga

SEQ ID NO: 439717 - DNA, 15 bp, Homo sapiens
gagggccacaaatgg

SEQ ID NO: 439718 - DNA, 15 bp, Homo sapiens
ggagggccacaaatg

SEQ ID NO: 439719 - DNA, 15 bp, Homo sapiens
gggagggccacaaat

SEQ ID NO: 439720 - DNA, 15 bp, Homo sapiens
tgggagggccacaaa

SEQ ID NO: 439721 - DNA, 15 bp, Homo sapiens
atgggagggccacaa

SEQ ID NO: 439722 - DNA, 15 bp, Homo sapiens
tatgggagggccaca

SEQ ID NO: 439723 - DNA, 15 bp, Homo sapiens
atatgggagggccac

SEQ ID NO: 439724 - DNA, 15 bp, Homo sapiens
tatatgggagggcca

SEQ ID NO: 439725 - DNA, 15 bp, Homo sapiens
ttatatgggagggcc

SEQ ID NO: 439726 - DNA, 15 bp, Homo sapiens
gttatatgggagggc

SEQ ID NO: 439727 - DNA, 15 bp, Homo sapiens
ggttatatgggaggg

SEQ ID NO: 439728 - DNA, 15 bp, Homo sapiens
aggttatatgggagg

SEQ ID NO: 439729 - DNA, 15 bp, Homo sapiens
aaggttatatgggag

SEQ ID NO: 439730 - DNA, 15 bp, Homo sapiens
aaaggttatatggga

SEQ ID NO: 439731 - DNA, 15 bp, Homo sapiens
gaaaggttatatggg

SEQ ID NO: 439732 - DNA, 15 bp, Homo sapiens
ggaaaggttatatgg

SEQ ID NO: 439733 - DNA, 15 bp, Homo sapiens
tggaaaggttatatg

SEQ ID NO: 439734 - DNA, 15 bp, Homo sapiens
gtggaaaggttatat

SEQ ID NO: 439735 - DNA, 15 bp, Homo sapiens
agtggaaaggttata

SEQ ID NO: 439736 - DNA, 15 bp, Homo sapiens
gagtggaaaggttat

SEQ ID NO: 439737 - DNA, 15 bp, Homo sapiens
agagtggaaaggtta

SEQ ID NO: 439738 - DNA, 15 bp, Homo sapiens
aagagtggaaaggtt

SEQ ID NO: 439739 - DNA, 15 bp, Homo sapiens
aaagagtggaaaggt

SEQ ID NO: 439740 - DNA, 15 bp, Homo sapiens
caaagagtggaaagg

SEQ ID NO: 439741 - DNA, 15 bp, Homo sapiens
gcaaagagtggaaag

SEQ ID NO: 439742 - DNA, 15 bp, Homo sapiens
ggcaaagagtggaaa

SEQ ID NO: 439743 - DNA, 15 bp, Homo sapiens
aggcaaagagtggaa

SEQ ID NO: 439744 - DNA, 15 bp, Homo sapiens
gaggcaaagagtgga

SEQ ID NO: 439745 - DNA, 15 bp, Homo sapiens
ggaggcaaagagtgg

SEQ ID NO: 439746 - DNA, 15 bp, Homo sapiens
gggaggcaaagagtg

SEQ ID NO: 439747 - DNA, 15 bp, Homo sapiens
agggaggcaaagagt

SEQ ID NO: 439748 - DNA, 15 bp, Homo sapiens
aagggaggcaaagag

SEQ ID NO: 439749 - DNA, 15 bp, Homo sapiens
taagggaggcaaaga

SEQ ID NO: 439750 - DNA, 15 bp, Homo sapiens
ttaagggaggcaaag

SEQ ID NO: 439751 - DNA, 15 bp, Homo sapiens
gttaagggaggcaaa

SEQ ID NO: 439752 - DNA, 15 bp, Homo sapiens
ggttaagggaggcaa

SEQ ID NO: 439753 - DNA, 15 bp, Homo sapiens
aggttaagggaggca

SEQ ID NO: 439754 - DNA, 15 bp, Homo sapiens
gaggttaagggaggc

SEQ ID NO: 439755 - DNA, 15 bp, Homo sapiens
cgaggttaagggagg

SEQ ID NO: 439756 - DNA, 15 bp, Homo sapiens
tcgaggttaagggag

SEQ ID NO: 439757 - DNA, 15 bp, Homo sapiens
ctcgaggttaaggga

SEQ ID NO: 439758 - DNA, 15 bp, Homo sapiens
cctcgaggttaaggg

SEQ ID NO: 439759 - DNA, 15 bp, Homo sapiens
gcctcgaggttaagg

SEQ ID NO: 439760 - DNA, 15 bp, Homo sapiens
agcctcgaggttaag

SEQ ID NO: 439761 - DNA, 15 bp, Homo sapiens
gagcctcgaggttaa

SEQ ID NO: 439762 - DNA, 15 bp, Homo sapiens
tgagcctcgaggtta

SEQ ID NO: 439763 - DNA, 15 bp, Homo sapiens
ctgagcctcgaggtt

SEQ ID NO: 439764 - DNA, 15 bp, Homo sapiens
actgagcctcgaggt

SEQ ID NO: 439765 - DNA, 15 bp, Homo sapiens
gactgagcctcgagg

SEQ ID NO: 439766 - DNA, 15 bp, Homo sapiens
agactgagcctcgag

SEQ ID NO: 439767 - DNA, 15 bp, Homo sapiens
gagactgagcctcga

SEQ ID NO: 439768 - DNA, 15 bp, Homo sapiens
ggagactgagcctcg

SEQ ID NO: 439769 - DNA, 15 bp, Homo sapiens
aggagactgagcctc

SEQ ID NO: 439770 - DNA, 15 bp, Homo sapiens
aaggagactgagcct

SEQ ID NO: 439771 - DNA, 15 bp, Homo sapiens
gaaggagactgagcc

SEQ ID NO: 439772 - DNA, 15 bp, Homo sapiens
ggaaggagactgagc

SEQ ID NO: 439773 - DNA, 15 bp, Homo sapiens
tggaaggagactgag

SEQ ID NO: 439774 - DNA, 15 bp, Homo sapiens
ttggaaggagactga

SEQ ID NO: 439775 - DNA, 15 bp, Homo sapiens
tttggaaggagactg

SEQ ID NO: 439776 - DNA, 15 bp, Homo sapiens
ttttggaaggagact

SEQ ID NO: 439777 - DNA, 15 bp, Homo sapiens
attttggaaggagac

SEQ ID NO: 439778 - DNA, 15 bp, Homo sapiens
cattttggaaggaga

SEQ ID NO: 439779 - DNA, 15 bp, Homo sapiens
acattttggaaggag

SEQ ID NO: 439780 - DNA, 15 bp, Homo sapiens
cacattttggaagga

SEQ ID NO: 439781 - DNA, 15 bp, Homo sapiens
acacattttggaagg

SEQ ID NO: 439782 - DNA, 15 bp, Homo sapiens
tacacattttggaag

SEQ ID NO: 439783 - DNA, 15 bp, Homo sapiens
ctacacattttggaa

SEQ ID NO: 439784 - DNA, 15 bp, Homo sapiens
tctacacattttgga

SEQ ID NO: 439785 - DNA, 15 bp, Homo sapiens
atctacacattttgg

SEQ ID NO: 439786 - DNA, 15 bp, Homo sapiens
aatctacacattttg

SEQ ID NO: 439787 - DNA, 15 bp, Homo sapiens
aaatctacacatttt

SEQ ID NO: 439788 - DNA, 15 bp, Homo sapiens
aaaatctacacattt

SEQ ID NO: 439789 - DNA, 15 bp, Homo sapiens
caaaatctacacatt

SEQ ID NO: 439790 - DNA, 15 bp, Homo sapiens
acaaaatctacacat

SEQ ID NO: 439791 - DNA, 15 bp, Homo sapiens
aacaaaatctacaca

SEQ ID NO: 439792 - DNA, 15 bp, Homo sapiens
aaacaaaatctacac

SEQ ID NO: 439793 - DNA, 15 bp, Homo sapiens
aaaacaaaatctaca

SEQ ID NO: 439794 - DNA, 15 bp, Homo sapiens
aaaaacaaaatctac

SEQ ID NO: 439795 - DNA, 15 bp, Homo sapiens
taaaaacaaaatcta

SEQ ID NO: 439796 - DNA, 15 bp, Homo sapiens
gtaaaaacaaaatct

SEQ ID NO: 439797 - DNA, 15 bp, Homo sapiens
tgtaaaaacaaaatc

SEQ ID NO: 439798 - DNA, 15 bp, Homo sapiens
gtgtaaaaacaaaat

SEQ ID NO: 439799 - DNA, 15 bp, Homo sapiens
agtgtaaaaacaaaa

SEQ ID NO: 439800 - DNA, 15 bp, Homo sapiens
aagtgtaaaaacaaa

SEQ ID NO: 439801 - DNA, 15 bp, Homo sapiens
aaagtgtaaaaacaa

SEQ ID NO: 439802 - DNA, 15 bp, Homo sapiens
aaaagtgtaaaaaca

SEQ ID NO: 439803 - DNA, 15 bp, Homo sapiens
aaaaagtgtaaaaac

SEQ ID NO: 439804 - DNA, 15 bp, Homo sapiens
aaaaaagtgtaaaaa

SEQ ID NO: 439805 - DNA, 15 bp, Homo sapiens
taaaaaagtgtaaaa

SEQ ID NO: 439806 - DNA, 15 bp, Homo sapiens
ataaaaaagtgtaaa

SEQ ID NO: 439807 - DNA, 15 bp, Homo sapiens
aataaaaaagtgtaa

SEQ ID NO: 439808 - DNA, 15 bp, Homo sapiens
gaataaaaaagtgta

SEQ ID NO: 439809 - DNA, 15 bp, Homo sapiens
tgaataaaaaagtgt

SEQ ID NO: 439810 - DNA, 15 bp, Homo sapiens
ctgaataaaaaagtg

SEQ ID NO: 439811 - DNA, 15 bp, Homo sapiens
cctgaataaaaaagt

SEQ ID NO: 439812 - DNA, 15 bp, Homo sapiens
acctgaataaaaaag

SEQ ID NO: 439813 - DNA, 15 bp, Homo sapiens
tacctgaataaaaaa

SEQ ID NO: 439814 - DNA, 15 bp, Homo sapiens
ttacctgaataaaaa

SEQ ID NO: 439815 - DNA, 15 bp, Homo sapiens
cttacctgaataaaa

SEQ ID NO: 439816 - DNA, 15 bp, Homo sapiens
acttacctgaataaa

SEQ ID NO: 439817 - DNA, 15 bp, Homo sapiens
aacttacctgaataa

SEQ ID NO: 439818 - DNA, 15 bp, Homo sapiens
gaacttacctgaata

SEQ ID NO: 439819 - DNA, 15 bp, Homo sapiens
tgaacttacctgaat

SEQ ID NO: 439820 - DNA, 15 bp, Homo sapiens
gtgaacttacctgaa

SEQ ID NO: 439821 - DNA, 15 bp, Homo sapiens
tgtgaacttacctga

SEQ ID NO: 439822 - DNA, 15 bp, Homo sapiens
ttgtgaacttacctg

SEQ ID NO: 439823 - DNA, 15 bp, Homo sapiens
attgtgaacttacct

SEQ ID NO: 439824 - DNA, 15 bp, Homo sapiens
aattgtgaacttacc

SEQ ID NO: 439825 - DNA, 15 bp, Homo sapiens
gaattgtgaacttac

SEQ ID NO: 439826 - DNA, 15 bp, Homo sapiens
agaattgtgaactta

SEQ ID NO: 439827 - DNA, 15 bp, Homo sapiens
gagaattgtgaactt

SEQ ID NO: 439828 - DNA, 15 bp, Homo sapiens
ggagaattgtgaact

SEQ ID NO: 439829 - DNA, 15 bp, Homo sapiens
gggagaattgtgaac

SEQ ID NO: 439830 - DNA, 15 bp, Homo sapiens
agggagaattgtgaa

SEQ ID NO: 439831 - DNA, 15 bp, Homo sapiens
tagggagaattgtga

SEQ ID NO: 439832 - DNA, 15 bp, Homo sapiens
atagggagaattgtg

SEQ ID NO: 439833 - DNA, 15 bp, Homo sapiens
tatagggagaattgt

SEQ ID NO: 439834 - DNA, 15 bp, Homo sapiens
atatagggagaattg

SEQ ID NO: 439835 - DNA, 15 bp, Homo sapiens
gatatagggagaatt

SEQ ID NO: 439836 - DNA, 15 bp, Homo sapiens
tgatatagggagaat

SEQ ID NO: 439837 - DNA, 15 bp, Homo sapiens
atgatatagggagaa

SEQ ID NO: 439838 - DNA, 15 bp, Homo sapiens
catgatatagggaga

SEQ ID NO: 439839 - DNA, 15 bp, Homo sapiens
acatgatatagggag

SEQ ID NO: 439840 - DNA, 15 bp, Homo sapiens
aacatgatataggga

SEQ ID NO: 439841 - DNA, 15 bp, Homo sapiens
aaacatgatataggg

SEQ ID NO: 439842 - DNA, 15 bp, Homo sapiens
aaaacatgatatagg

SEQ ID NO: 439843 - DNA, 15 bp, Homo sapiens
gaaaacatgatatag

SEQ ID NO: 439844 - DNA, 15 bp, Homo sapiens
tgaaaacatgatata

SEQ ID NO: 439845 - DNA, 15 bp, Homo sapiens
atgaaaacatgatat

SEQ ID NO: 439846 - DNA, 15 bp, Homo sapiens
aatgaaaacatgata

SEQ ID NO: 439847 - DNA, 15 bp, Homo sapiens
aaatgaaaacatgat

SEQ ID NO: 439848 - DNA, 15 bp, Homo sapiens
aaaatgaaaacatga

SEQ ID NO: 439849 - DNA, 15 bp, Homo sapiens
aaaaatgaaaacatg

SEQ ID NO: 439850 - DNA, 15 bp, Homo sapiens
aaaaaatgaaaacat

SEQ ID NO: 439851 - DNA, 15 bp, Homo sapiens
aaaaaaatgaaaaca

SEQ ID NO: 439852 - DNA, 15 bp, Homo sapiens
aaaaaaaatgaaaac

SEQ ID NO: 439853 - DNA, 15 bp, Homo sapiens
gaaaaaaaatgaaaa

SEQ ID NO: 439854 - DNA, 15 bp, Homo sapiens
agaaaaaaaatgaaa

SEQ ID NO: 439855 - DNA, 15 bp, Homo sapiens
gagaaaaaaaatgaa

SEQ ID NO: 439856 - DNA, 15 bp, Homo sapiens
tgagaaaaaaaatga

SEQ ID NO: 439857 - DNA, 15 bp, Homo sapiens
ctgagaaaaaaaatg

SEQ ID NO: 439858 - DNA, 15 bp, Homo sapiens
actgagaaaaaaaat

SEQ ID NO: 439859 - DNA, 15 bp, Homo sapiens
gactgagaaaaaaaa

SEQ ID NO: 439860 - DNA, 15 bp, Homo sapiens
agactgagaaaaaaa

SEQ ID NO: 439861 - DNA, 15 bp, Homo sapiens
aagactgagaaaaaa

SEQ ID NO: 439862 - DNA, 15 bp, Homo sapiens
aaagactgagaaaaa

SEQ ID NO: 439863 - DNA, 15 bp, Homo sapiens
gaaagactgagaaaa

SEQ ID NO: 439864 - DNA, 15 bp, Homo sapiens
ggaaagactgagaaa

SEQ ID NO: 439865 - DNA, 15 bp, Homo sapiens
gggaaagactgagaa

SEQ ID NO: 439866 - DNA, 15 bp, Homo sapiens
agggaaagactgaga

SEQ ID NO: 439867 - DNA, 15 bp, Homo sapiens
cagggaaagactgag

SEQ ID NO: 439868 - DNA, 15 bp, Homo sapiens
ccagggaaagactga

SEQ ID NO: 439869 - DNA, 15 bp, Homo sapiens
gccagggaaagactg

SEQ ID NO: 439870 - DNA, 15 bp, Homo sapiens
agccagggaaagact

SEQ ID NO: 439871 - DNA, 15 bp, Homo sapiens
aagccagggaaagac

SEQ ID NO: 439872 - DNA, 15 bp, Homo sapiens
taagccagggaaaga

SEQ ID NO: 439873 - DNA, 15 bp, Homo sapiens
ataagccagggaaag

SEQ ID NO: 439874 - DNA, 15 bp, Homo sapiens
aataagccagggaaa

SEQ ID NO: 439875 - DNA, 15 bp, Homo sapiens
gaataagccagggaa

SEQ ID NO: 439876 - DNA, 15 bp, Homo sapiens
ggaataagccaggga

SEQ ID NO: 439877 - DNA, 15 bp, Homo sapiens
aggaataagccaggg

SEQ ID NO: 439878 - DNA, 15 bp, Homo sapiens
aaggaataagccagg

SEQ ID NO: 439879 - DNA, 15 bp, Homo sapiens
gaaggaataagccag

SEQ ID NO: 439880 - DNA, 15 bp, Homo sapiens
agaaggaataagcca

SEQ ID NO: 439881 - DNA, 15 bp, Homo sapiens
gagaaggaataagcc

SEQ ID NO: 439882 - DNA, 15 bp, Homo sapiens
tgagaaggaataagc

SEQ ID NO: 439883 - DNA, 15 bp, Homo sapiens
ctgagaaggaataag

SEQ ID NO: 439884 - DNA, 15 bp, Homo sapiens
gctgagaaggaataa

SEQ ID NO: 439885 - DNA, 15 bp, Homo sapiens
tgctgagaaggaata

SEQ ID NO: 439886 - DNA, 15 bp, Homo sapiens
ttgctgagaaggaat

SEQ ID NO: 439887 - DNA, 15 bp, Homo sapiens
tttgctgagaaggaa

SEQ ID NO: 439888 - DNA, 15 bp, Homo sapiens
ttttgctgagaagga

SEQ ID NO: 439889 - DNA, 15 bp, Homo sapiens
gttttgctgagaagg

SEQ ID NO: 439890 - DNA, 15 bp, Homo sapiens
ggttttgctgagaag

SEQ ID NO: 439891 - DNA, 15 bp, Homo sapiens
aggttttgctgagaa

SEQ ID NO: 439892 - DNA, 15 bp, Homo sapiens
taggttttgctgaga

SEQ ID NO: 439893 - DNA, 15 bp, Homo sapiens
ttaggttttgctgag

SEQ ID NO: 439894 - DNA, 15 bp, Homo sapiens
gttaggttttgctga

SEQ ID NO: 439895 - DNA, 15 bp, Homo sapiens
agttaggttttgctg

SEQ ID NO: 439896 - DNA, 15 bp, Homo sapiens
aagttaggttttgct

SEQ ID NO: 439897 - DNA, 15 bp, Homo sapiens
taagttaggttttgc

SEQ ID NO: 439898 - DNA, 15 bp, Homo sapiens
ataagttaggttttg

SEQ ID NO: 439899 - DNA, 15 bp, Homo sapiens
tataagttaggtttt

SEQ ID NO: 439900 - DNA, 15 bp, Homo sapiens
gtataagttaggttt

SEQ ID NO: 439901 - DNA, 15 bp, Homo sapiens
ggtataagttaggtt

SEQ ID NO: 439902 - DNA, 15 bp, Homo sapiens
gggtataagttaggt

SEQ ID NO: 439903 - DNA, 15 bp, Homo sapiens
ggggtataagttagg

SEQ ID NO: 439904 - DNA, 15 bp, Homo sapiens
gggggtataagttag

SEQ ID NO: 439905 - DNA, 15 bp, Homo sapiens
agggggtataagtta

SEQ ID NO: 439906 - DNA, 15 bp, Homo sapiens
aagggggtataagtt

SEQ ID NO: 439907 - DNA, 15 bp, Homo sapiens
taagggggtataagt

SEQ ID NO: 439908 - DNA, 15 bp, Homo sapiens
ttaagggggtataag

SEQ ID NO: 439909 - DNA, 15 bp, Homo sapiens
gttaagggggtataa

SEQ ID NO: 439910 - DNA, 15 bp, Homo sapiens
cgttaagggggtata

SEQ ID NO: 439911 - DNA, 15 bp, Homo sapiens
tcgttaagggggtat

SEQ ID NO: 439912 - DNA, 15 bp, Homo sapiens
ctcgttaagggggta

SEQ ID NO: 439913 - DNA, 15 bp, Homo sapiens
actcgttaagggggt

SEQ ID NO: 439914 - DNA, 15 bp, Homo sapiens
tactcgttaaggggg

SEQ ID NO: 439915 - DNA, 15 bp, Homo sapiens
atactcgttaagggg

SEQ ID NO: 439916 - DNA, 15 bp, Homo sapiens
tatactcgttaaggg

SEQ ID NO: 439917 - DNA, 15 bp, Homo sapiens
gtatactcgttaagg

SEQ ID NO: 439918 - DNA, 15 bp, Homo sapiens
agtatactcgttaag

SEQ ID NO: 439919 - DNA, 15 bp, Homo sapiens
aagtatactcgttaa

SEQ ID NO: 439920 - DNA, 15 bp, Homo sapiens
aaagtatactcgtta

SEQ ID NO: 439921 - DNA, 15 bp, Homo sapiens
caaagtatactcgtt

SEQ ID NO: 439922 - DNA, 15 bp, Homo sapiens
tcaaagtatactcgt

SEQ ID NO: 439923 - DNA, 15 bp, Homo sapiens
ttcaaagtatactcg

SEQ ID NO: 439924 - DNA, 15 bp, Homo sapiens
tttcaaagtatactc

SEQ ID NO: 439925 - DNA, 15 bp, Homo sapiens
gtttcaaagtatact

SEQ ID NO: 439926 - DNA, 15 bp, Homo sapiens
ggtttcaaagtatac

SEQ ID NO: 439927 - DNA, 15 bp, Homo sapiens
gggtttcaaagtata

SEQ ID NO: 439928 - DNA, 15 bp, Homo sapiens
ggggtttcaaagtat

SEQ ID NO: 439929 - DNA, 15 bp, Homo sapiens
gggggtttcaaagta

SEQ ID NO: 439930 - DNA, 15 bp, Homo sapiens
agggggtttcaaagt

SEQ ID NO: 439931 - DNA, 15 bp, Homo sapiens
aagggggtttcaaag

SEQ ID NO: 439932 - DNA, 15 bp, Homo sapiens
aaagggggtttcaaa

SEQ ID NO: 439933 - DNA, 15 bp, Homo sapiens
aaaagggggtttcaa

SEQ ID NO: 439934 - DNA, 15 bp, Homo sapiens
gaaaagggggtttca

SEQ ID NO: 439935 - DNA, 15 bp, Homo sapiens
tgaaaagggggtttc

SEQ ID NO: 439936 - DNA, 15 bp, Homo sapiens
atgaaaagggggttt

SEQ ID NO: 439937 - DNA, 15 bp, Homo sapiens
aatgaaaagggggtt

SEQ ID NO: 439938 - DNA, 15 bp, Homo sapiens
caatgaaaagggggt

SEQ ID NO: 439939 - DNA, 15 bp, Homo sapiens
gcaatgaaaaggggg

SEQ ID NO: 439940 - DNA, 15 bp, Homo sapiens
ggcaatgaaaagggg

SEQ ID NO: 439941 - DNA, 15 bp, Homo sapiens
tggcaatgaaaaggg

SEQ ID NO: 439942 - DNA, 15 bp, Homo sapiens
ctggcaatgaaaagg

SEQ ID NO: 439943 - DNA, 15 bp, Homo sapiens
tctggcaatgaaaag

SEQ ID NO: 439944 - DNA, 15 bp, Homo sapiens
ttctggcaatgaaaa

SEQ ID NO: 439945 - DNA, 15 bp, Homo sapiens
tttctggcaatgaaa

SEQ ID NO: 439946 - DNA, 15 bp, Homo sapiens
ttttctggcaatgaa

SEQ ID NO: 439947 - DNA, 15 bp, Homo sapiens
gttttctggcaatga

SEQ ID NO: 439948 - DNA, 15 bp, Homo sapiens
agttttctggcaatg

SEQ ID NO: 439949 - DNA, 15 bp, Homo sapiens
aagttttctggcaat

SEQ ID NO: 439950 - DNA, 15 bp, Homo sapiens
gaagttttctggcaa

SEQ ID NO: 439951 - DNA, 15 bp, Homo sapiens
agaagttttctggca

SEQ ID NO: 439952 - DNA, 15 bp, Homo sapiens
gagaagttttctggc

SEQ ID NO: 439953 - DNA, 15 bp, Homo sapiens
agagaagttttctgg

SEQ ID NO: 439954 - DNA, 15 bp, Homo sapiens
cagagaagttttctg

SEQ ID NO: 439955 - DNA, 15 bp, Homo sapiens
acagagaagttttct

SEQ ID NO: 439956 - DNA, 15 bp, Homo sapiens
tacagagaagttttc

SEQ ID NO: 439957 - DNA, 15 bp, Homo sapiens
atacagagaagtttt

SEQ ID NO: 439958 - DNA, 15 bp, Homo sapiens
aatacagagaagttt

SEQ ID NO: 439959 - DNA, 15 bp, Homo sapiens
gaatacagagaagtt

SEQ ID NO: 439960 - DNA, 15 bp, Homo sapiens
agaatacagagaagt

SEQ ID NO: 439961 - DNA, 15 bp, Homo sapiens
gagaatacagagaag

SEQ ID NO: 439962 - DNA, 15 bp, Homo sapiens
tgagaatacagagaa

SEQ ID NO: 439963 - DNA, 15 bp, Homo sapiens
ttgagaatacagaga

SEQ ID NO: 439964 - DNA, 15 bp, Homo sapiens
attgagaatacagag

SEQ ID NO: 439965 - DNA, 15 bp, Homo sapiens
gattgagaatacaga

SEQ ID NO: 439966 - DNA, 15 bp, Homo sapiens
agattgagaatacag

SEQ ID NO: 439967 - DNA, 15 bp, Homo sapiens
aagattgagaataca

SEQ ID NO: 439968 - DNA, 15 bp, Homo sapiens
aaagattgagaatac

SEQ ID NO: 439969 - DNA, 15 bp, Homo sapiens
aaaagattgagaata

SEQ ID NO: 439970 - DNA, 15 bp, Homo sapiens
gaaaagattgagaat

SEQ ID NO: 439971 - DNA, 15 bp, Homo sapiens
tgaaaagattgagaa

SEQ ID NO: 439972 - DNA, 15 bp, Homo sapiens
atgaaaagattgaga

SEQ ID NO: 439973 - DNA, 15 bp, Homo sapiens
tatgaaaagattgag

SEQ ID NO: 439974 - DNA, 15 bp, Homo sapiens
gtatgaaaagattga

SEQ ID NO: 439975 - DNA, 15 bp, Homo sapiens
tgtatgaaaagattg

SEQ ID NO: 439976 - DNA, 15 bp, Homo sapiens
ttgtatgaaaagatt

SEQ ID NO: 439977 - DNA, 15 bp, Homo sapiens
attgtatgaaaagat

SEQ ID NO: 439978 - DNA, 15 bp, Homo sapiens
aattgtatgaaaaga

SEQ ID NO: 439979 - DNA, 15 bp, Homo sapiens
aaattgtatgaaaag

SEQ ID NO: 439980 - DNA, 15 bp, Homo sapiens
gaaattgtatgaaaa

SEQ ID NO: 439981 - DNA, 15 bp, Homo sapiens
ggaaattgtatgaaa

SEQ ID NO: 439982 - DNA, 15 bp, Homo sapiens
aggaaattgtatgaa

SEQ ID NO: 439983 - DNA, 15 bp, Homo sapiens
aaggaaattgtatga

SEQ ID NO: 439984 - DNA, 15 bp, Homo sapiens
aaaggaaattgtatg

SEQ ID NO: 439985 - DNA, 15 bp, Homo sapiens
gaaaggaaattgtat

SEQ ID NO: 439986 - DNA, 15 bp, Homo sapiens
agaaaggaaattgta

SEQ ID NO: 439987 - DNA, 15 bp, Homo sapiens
aagaaaggaaattgt

SEQ ID NO: 439988 - DNA, 15 bp, Homo sapiens
gaagaaaggaaattg

SEQ ID NO: 439989 - DNA, 15 bp, Homo sapiens
tgaagaaaggaaatt

SEQ ID NO: 439990 - DNA, 15 bp, Homo sapiens
atgaagaaaggaaat

SEQ ID NO: 439991 - DNA, 15 bp, Homo sapiens
gatgaagaaaggaaa

SEQ ID NO: 439992 - DNA, 15 bp, Homo sapiens
agatgaagaaaggaa

SEQ ID NO: 439993 - DNA, 15 bp, Homo sapiens
aagatgaagaaagga

SEQ ID NO: 439994 - DNA, 15 bp, Homo sapiens
aaagatgaagaaagg

SEQ ID NO: 439995 - DNA, 15 bp, Homo sapiens
caaagatgaagaaag

SEQ ID NO: 439996 - DNA, 15 bp, Homo sapiens
gcaaagatgaagaaa

SEQ ID NO: 439997 - DNA, 15 bp, Homo sapiens
ggcaaagatgaagaa

SEQ ID NO: 439998 - DNA, 15 bp, Homo sapiens
aggcaaagatgaaga

SEQ ID NO: 439999 - DNA, 15 bp, Homo sapiens
aaggcaaagatgaag

SEQ ID NO: 440000 - DNA, 15 bp, Homo sapiens
taaggcaaagatgaa

SEQ ID NO: 440001 - DNA, 15 bp, Homo sapiens
ttaaggcaaagatga

SEQ ID NO: 440002 - DNA, 15 bp, Homo sapiens
gttaaggcaaagatg

SEQ ID NO: 440003 - DNA, 15 bp, Homo sapiens
agttaaggcaaagat

SEQ ID NO: 440004 - DNA, 15 bp, Homo sapiens
cagttaaggcaaaga

SEQ ID NO: 440005 - DNA, 15 bp, Homo sapiens
ccagttaaggcaaag

SEQ ID NO: 440006 - DNA, 15 bp, Homo sapiens
gccagttaaggcaaa

SEQ ID NO: 440007 - DNA, 15 bp, Homo sapiens
agccagttaaggcaa

SEQ ID NO: 440008 - DNA, 15 bp, Homo sapiens
aagccagttaaggca

SEQ ID NO: 440009 - DNA, 15 bp, Homo sapiens
gaagccagttaaggc

SEQ ID NO: 440010 - DNA, 15 bp, Homo sapiens
agaagccagttaagg

SEQ ID NO: 440011 - DNA, 15 bp, Homo sapiens
gagaagccagttaag

SEQ ID NO: 440012 - DNA, 15 bp, Homo sapiens
ggagaagccagttaa

SEQ ID NO: 440013 - DNA, 15 bp, Homo sapiens
aggagaagccagtta

SEQ ID NO: 440014 - DNA, 15 bp, Homo sapiens
aaggagaagccagtt

SEQ ID NO: 440015 - DNA, 15 bp, Homo sapiens
caaggagaagccagt

SEQ ID NO: 440016 - DNA, 15 bp, Homo sapiens
tcaaggagaagccag

SEQ ID NO: 440017 - DNA, 15 bp, Homo sapiens
ttcaaggagaagcca

SEQ ID NO: 440018 - DNA, 15 bp, Homo sapiens
cttcaaggagaagcc

SEQ ID NO: 440019 - DNA, 15 bp, Homo sapiens
tcttcaaggagaagc

SEQ ID NO: 440020 - DNA, 15 bp, Homo sapiens
ctcttcaaggagaag

SEQ ID NO: 440021 - DNA, 15 bp, Homo sapiens
cctcttcaaggagaa

SEQ ID NO: 440022 - DNA, 15 bp, Homo sapiens
ccctcttcaaggaga

SEQ ID NO: 440023 - DNA, 15 bp, Homo sapiens
gccctcttcaaggag

SEQ ID NO: 440024 - DNA, 15 bp, Homo sapiens
agccctcttcaagga

SEQ ID NO: 440025 - DNA, 15 bp, Homo sapiens
aagccctcttcaagg

SEQ ID NO: 440026 - DNA, 15 bp, Homo sapiens
caagccctcttcaag

SEQ ID NO: 440027 - DNA, 15 bp, Homo sapiens
acaagccctcttcaa

SEQ ID NO: 440028 - DNA, 15 bp, Homo sapiens
gacaagccctcttca

SEQ ID NO: 440029 - DNA, 15 bp, Homo sapiens
ggacaagccctcttc

SEQ ID NO: 440030 - DNA, 15 bp, Homo sapiens
gggacaagccctctt

SEQ ID NO: 440031 - DNA, 15 bp, Homo sapiens
agggacaagccctct

SEQ ID NO: 440032 - DNA, 15 bp, Homo sapiens
aagggacaagccctc

SEQ ID NO: 440033 - DNA, 15 bp, Homo sapiens
aaagggacaagccct

SEQ ID NO: 440034 - DNA, 15 bp, Homo sapiens
caaagggacaagccc

SEQ ID NO: 440035 - DNA, 15 bp, Homo sapiens
tcaaagggacaagcc

SEQ ID NO: 440036 - DNA, 15 bp, Homo sapiens
ttcaaagggacaagc

SEQ ID NO: 440037 - DNA, 15 bp, Homo sapiens
tttcaaagggacaag

SEQ ID NO: 440038 - DNA, 15 bp, Homo sapiens
ttttcaaagggacaa

SEQ ID NO: 440039 - DNA, 15 bp, Homo sapiens
attttcaaagggaca

SEQ ID NO: 440040 - DNA, 15 bp, Homo sapiens
tattttcaaagggac

SEQ ID NO: 440041 - DNA, 15 bp, Homo sapiens
ttattttcaaaggga

SEQ ID NO: 440042 - DNA, 15 bp, Homo sapiens
gttattttcaaaggg

SEQ ID NO: 440043 - DNA, 15 bp, Homo sapiens
agttattttcaaagg

SEQ ID NO: 440044 - DNA, 15 bp, Homo sapiens
tagttattttcaaag

SEQ ID NO: 440045 - DNA, 15 bp, Homo sapiens
atagttattttcaaa

SEQ ID NO: 440046 - DNA, 15 bp, Homo sapiens
aatagttattttcaa

SEQ ID NO: 440047 - DNA, 15 bp, Homo sapiens
gaatagttattttca

SEQ ID NO: 440048 - DNA, 15 bp, Homo sapiens
tgaatagttattttc

SEQ ID NO: 440049 - DNA, 15 bp, Homo sapiens
atgaatagttatttt

SEQ ID NO: 440050 - DNA, 15 bp, Homo sapiens
aatgaatagttattt

SEQ ID NO: 440051 - DNA, 15 bp, Homo sapiens
gaatgaatagttatt

SEQ ID NO: 440052 - DNA, 15 bp, Homo sapiens
agaatgaatagttat

SEQ ID NO: 440053 - DNA, 15 bp, Homo sapiens
aagaatgaatagtta

SEQ ID NO: 440054 - DNA, 15 bp, Homo sapiens
gaagaatgaatagtt

SEQ ID NO: 440055 - DNA, 15 bp, Homo sapiens
tgaagaatgaatagt

SEQ ID NO: 440056 - DNA, 15 bp, Homo sapiens
ttgaagaatgaatag

SEQ ID NO: 440057 - DNA, 15 bp, Homo sapiens
attgaagaatgaata

SEQ ID NO: 440058 - DNA, 15 bp, Homo sapiens
aattgaagaatgaat

SEQ ID NO: 440059 - DNA, 15 bp, Homo sapiens
gaattgaagaatgaa

SEQ ID NO: 440060 - DNA, 15 bp, Homo sapiens
ggaattgaagaatga

SEQ ID NO: 440061 - DNA, 15 bp, Homo sapiens
gggaattgaagaatg

SEQ ID NO: 440062 - DNA, 15 bp, Homo sapiens
agggaattgaagaat

SEQ ID NO: 440063 - DNA, 15 bp, Homo sapiens
aagggaattgaagaa

SEQ ID NO: 440064 - DNA, 15 bp, Homo sapiens
aaagggaattgaaga

SEQ ID NO: 440065 - DNA, 15 bp, Homo sapiens
caaagggaattgaag

SEQ ID NO: 440066 - DNA, 15 bp, Homo sapiens
ccaaagggaattgaa

SEQ ID NO: 440067 - DNA, 15 bp, Homo sapiens
tccaaagggaattga

SEQ ID NO: 440068 - DNA, 15 bp, Homo sapiens
atccaaagggaattg

SEQ ID NO: 440069 - DNA, 15 bp, Homo sapiens
gatccaaagggaatt

SEQ ID NO: 440070 - DNA, 15 bp, Homo sapiens
agatccaaagggaat

SEQ ID NO: 440071 - DNA, 15 bp, Homo sapiens
tagatccaaagggaa

SEQ ID NO: 440072 - DNA, 15 bp, Homo sapiens
ttagatccaaaggga

SEQ ID NO: 440073 - DNA, 15 bp, Homo sapiens
tttagatccaaaggg

SEQ ID NO: 440074 - DNA, 15 bp, Homo sapiens
ctttagatccaaagg

SEQ ID NO: 440075 - DNA, 15 bp, Homo sapiens
cctttagatccaaag

SEQ ID NO: 440076 - DNA, 15 bp, Homo sapiens
gcctttagatccaaa

SEQ ID NO: 440077 - DNA, 15 bp, Homo sapiens
ggcctttagatccaa

SEQ ID NO: 440078 - DNA, 15 bp, Homo sapiens
tggcctttagatcca

SEQ ID NO: 440079 - DNA, 15 bp, Homo sapiens
ttggcctttagatcc

SEQ ID NO: 440080 - DNA, 15 bp, Homo sapiens
tttggcctttagatc

SEQ ID NO: 440081 - DNA, 15 bp, Homo sapiens
ttttggcctttagat

SEQ ID NO: 440082 - DNA, 15 bp, Homo sapiens
cttttggcctttaga

SEQ ID NO: 440083 - DNA, 15 bp, Homo sapiens
ccttttggcctttag

SEQ ID NO: 440084 - DNA, 15 bp, Homo sapiens
tccttttggccttta

SEQ ID NO: 440085 - DNA, 15 bp, Homo sapiens
ctccttttggccttt

SEQ ID NO: 440086 - DNA, 15 bp, Homo sapiens
actccttttggcctt

SEQ ID NO: 440087 - DNA, 15 bp, Homo sapiens
cactccttttggcct

SEQ ID NO: 440088 - DNA, 15 bp, Homo sapiens
tcactccttttggcc

SEQ ID NO: 440089 - DNA, 15 bp, Homo sapiens
atcactccttttggc

SEQ ID NO: 440090 - DNA, 15 bp, Homo sapiens
gatcactccttttgg

SEQ ID NO: 440091 - DNA, 15 bp, Homo sapiens
tgatcactccttttg

SEQ ID NO: 440092 - DNA, 15 bp, Homo sapiens
ctgatcactcctttt

SEQ ID NO: 440093 - DNA, 15 bp, Homo sapiens
actgatcactccttt

SEQ ID NO: 440094 - DNA, 15 bp, Homo sapiens
gactgatcactcctt

SEQ ID NO: 440095 - DNA, 15 bp, Homo sapiens
agactgatcactcct

SEQ ID NO: 440096 - DNA, 15 bp, Homo sapiens
aagactgatcactcc

SEQ ID NO: 440097 - DNA, 15 bp, Homo sapiens
aaagactgatcactc

SEQ ID NO: 440098 - DNA, 15 bp, Homo sapiens
aaaagactgatcact

SEQ ID NO: 440099 - DNA, 15 bp, Homo sapiens
aaaaagactgatcac

SEQ ID NO: 440100 - DNA, 15 bp, Homo sapiens
taaaaagactgatca

SEQ ID NO: 440101 - DNA, 15 bp, Homo sapiens
ataaaaagactgatc

SEQ ID NO: 440102 - DNA, 15 bp, Homo sapiens
gataaaaagactgat

SEQ ID NO: 440103 - DNA, 15 bp, Homo sapiens
agataaaaagactga

SEQ ID NO: 440104 - DNA, 15 bp, Homo sapiens
aagataaaaagactg

SEQ ID NO: 440105 - DNA, 15 bp, Homo sapiens
aaagataaaaagact

SEQ ID NO: 440106 - DNA, 15 bp, Homo sapiens
aaaagataaaaagac

SEQ ID NO: 440107 - DNA, 15 bp, Homo sapiens
gaaaagataaaaaga

SEQ ID NO: 440108 - DNA, 15 bp, Homo sapiens
ggaaaagataaaaag

SEQ ID NO: 440109 - DNA, 15 bp, Homo sapiens
aggaaaagataaaaa

SEQ ID NO: 440110 - DNA, 15 bp, Homo sapiens
gaggaaaagataaaa

SEQ ID NO: 440111 - DNA, 15 bp, Homo sapiens
agaggaaaagataaa

SEQ ID NO: 440112 - DNA, 15 bp, Homo sapiens
aagaggaaaagataa

SEQ ID NO: 440113 - DNA, 15 bp, Homo sapiens
caagaggaaaagata

SEQ ID NO: 440114 - DNA, 15 bp, Homo sapiens
acaagaggaaaagat

SEQ ID NO: 440115 - DNA, 15 bp, Homo sapiens
aacaagaggaaaaga

SEQ ID NO: 440116 - DNA, 15 bp, Homo sapiens
caacaagaggaaaag

SEQ ID NO: 440117 - DNA, 15 bp, Homo sapiens
ccaacaagaggaaaa

SEQ ID NO: 440118 - DNA, 15 bp, Homo sapiens
tccaacaagaggaaa

SEQ ID NO: 440119 - DNA, 15 bp, Homo sapiens
ctccaacaagaggaa

SEQ ID NO: 440120 - DNA, 15 bp, Homo sapiens
tctccaacaagagga

SEQ ID NO: 440121 - DNA, 15 bp, Homo sapiens
ctctccaacaagagg

SEQ ID NO: 440122 - DNA, 15 bp, Homo sapiens
gctctccaacaagag

SEQ ID NO: 440123 - DNA, 15 bp, Homo sapiens
tgctctccaacaaga

SEQ ID NO: 440124 - DNA, 15 bp, Homo sapiens
atgctctccaacaag

SEQ ID NO: 440125 - DNA, 15 bp, Homo sapiens
tatgctctccaacaa

SEQ ID NO: 440126 - DNA, 15 bp, Homo sapiens
ctatgctctccaaca

SEQ ID NO: 440127 - DNA, 15 bp, Homo sapiens
tctatgctctccaac

SEQ ID NO: 440128 - DNA, 15 bp, Homo sapiens
ctctatgctctccaa

SEQ ID NO: 440129 - DNA, 15 bp, Homo sapiens
actctatgctctcca

SEQ ID NO: 440130 - DNA, 15 bp, Homo sapiens
aactctatgctctcc

SEQ ID NO: 440131 - DNA, 15 bp, Homo sapiens
aaactctatgctctc

SEQ ID NO: 440132 - DNA, 15 bp, Homo sapiens
aaaactctatgctct

SEQ ID NO: 440133 - DNA, 15 bp, Homo sapiens
aaaaactctatgctc

SEQ ID NO: 440134 - DNA, 15 bp, Homo sapiens
gaaaaactctatgct

SEQ ID NO: 440135 - DNA, 15 bp, Homo sapiens
agaaaaactctatgc

SEQ ID NO: 440136 - DNA, 15 bp, Homo sapiens
tagaaaaactctatg

SEQ ID NO: 440137 - DNA, 15 bp, Homo sapiens
atagaaaaactctat

SEQ ID NO: 440138 - DNA, 15 bp, Homo sapiens
tatagaaaaactcta

SEQ ID NO: 440139 - DNA, 15 bp, Homo sapiens
gtatagaaaaactct

SEQ ID NO: 440140 - DNA, 15 bp, Homo sapiens
tgtatagaaaaactc

SEQ ID NO: 440141 - DNA, 15 bp, Homo sapiens
ctgtatagaaaaact

SEQ ID NO: 440142 - DNA, 15 bp, Homo sapiens
cctgtatagaaaaac

SEQ ID NO: 440143 - DNA, 15 bp, Homo sapiens
acctgtatagaaaaa

SEQ ID NO: 440144 - DNA, 15 bp, Homo sapiens
aacctgtatagaaaa

SEQ ID NO: 440145 - DNA, 15 bp, Homo sapiens
aaacctgtatagaaa

SEQ ID NO: 440146 - DNA, 15 bp, Homo sapiens
taaacctgtatagaa

SEQ ID NO: 440147 - DNA, 15 bp, Homo sapiens
gtaaacctgtataga

SEQ ID NO: 440148 - DNA, 15 bp, Homo sapiens
agtaaacctgtatag

SEQ ID NO: 440149 - DNA, 15 bp, Homo sapiens
aagtaaacctgtata

SEQ ID NO: 440150 - DNA, 15 bp, Homo sapiens
aaagtaaacctgtat

SEQ ID NO: 440151 - DNA, 15 bp, Homo sapiens
aaaagtaaacctgta

SEQ ID NO: 440152 - DNA, 15 bp, Homo sapiens
aaaaagtaaacctgt

SEQ ID NO: 440153 - DNA, 15 bp, Homo sapiens
taaaaagtaaacctg

SEQ ID NO: 440154 - DNA, 15 bp, Homo sapiens
ctaaaaagtaaacct

SEQ ID NO: 440155 - DNA, 15 bp, Homo sapiens
actaaaaagtaaacc

SEQ ID NO: 440156 - DNA, 15 bp, Homo sapiens
tactaaaaagtaaac

SEQ ID NO: 440157 - DNA, 15 bp, Homo sapiens
gtactaaaaagtaaa

SEQ ID NO: 440158 - DNA, 15 bp, Homo sapiens
agtactaaaaagtaa

SEQ ID NO: 440159 - DNA, 15 bp, Homo sapiens
aagtactaaaaagta

SEQ ID NO: 440160 - DNA, 15 bp, Homo sapiens
aaagtactaaaaagt

SEQ ID NO: 440161 - DNA, 15 bp, Homo sapiens
caaagtactaaaaag

SEQ ID NO: 440162 - DNA, 15 bp, Homo sapiens
acaaagtactaaaaa

SEQ ID NO: 440163 - DNA, 15 bp, Homo sapiens
aacaaagtactaaaa

SEQ ID NO: 440164 - DNA, 15 bp, Homo sapiens
aaacaaagtactaaa

SEQ ID NO: 440165 - DNA, 15 bp, Homo sapiens
aaaacaaagtactaa

SEQ ID NO: 440166 - DNA, 15 bp, Homo sapiens
taaaacaaagtacta

SEQ ID NO: 440167 - DNA, 15 bp, Homo sapiens
ataaaacaaagtact

SEQ ID NO: 440168 - DNA, 15 bp, Homo sapiens
tataaaacaaagtac

SEQ ID NO: 440169 - DNA, 15 bp, Homo sapiens
gtataaaacaaagta

SEQ ID NO: 440170 - DNA, 15 bp, Homo sapiens
ggtataaaacaaagt

SEQ ID NO: 440171 - DNA, 15 bp, Homo sapiens
aggtataaaacaaag

SEQ ID NO: 440172 - DNA, 15 bp, Homo sapiens
gaggtataaaacaaa

SEQ ID NO: 440173 - DNA, 15 bp, Homo sapiens
agaggtataaaacaa

SEQ ID NO: 440174 - DNA, 15 bp, Homo sapiens
cagaggtataaaaca

SEQ ID NO: 440175 - DNA, 15 bp, Homo sapiens
ccagaggtataaaac

SEQ ID NO: 440176 - DNA, 15 bp, Homo sapiens
tccagaggtataaaa

SEQ ID NO: 440177 - DNA, 15 bp, Homo sapiens
atccagaggtataaa

SEQ ID NO: 440178 - DNA, 15 bp, Homo sapiens
tatccagaggtataa

SEQ ID NO: 440179 - DNA, 15 bp, Homo sapiens
ctatccagaggtata

SEQ ID NO: 440180 - DNA, 15 bp, Homo sapiens
actatccagaggtat

SEQ ID NO: 440181 - DNA, 15 bp, Homo sapiens
tactatccagaggta

SEQ ID NO: 440182 - DNA, 15 bp, Homo sapiens
ctactatccagaggt

SEQ ID NO: 440183 - DNA, 15 bp, Homo sapiens
cctactatccagagg

SEQ ID NO: 440184 - DNA, 15 bp, Homo sapiens
acctactatccagag

SEQ ID NO: 440185 - DNA, 15 bp, Homo sapiens
gacctactatccaga

SEQ ID NO: 440186 - DNA, 15 bp, Homo sapiens
tgacctactatccag

SEQ ID NO: 440187 - DNA, 15 bp, Homo sapiens
gtgacctactatcca

SEQ ID NO: 440188 - DNA, 15 bp, Homo sapiens
tgtgacctactatcc

SEQ ID NO: 440189 - DNA, 15 bp, Homo sapiens
ctgtgacctactatc

SEQ ID NO: 440190 - DNA, 15 bp, Homo sapiens
tctgtgacctactat

SEQ ID NO: 440191 - DNA, 15 bp, Homo sapiens
ctctgtgacctacta

SEQ ID NO: 440192 - DNA, 15 bp, Homo sapiens
actctgtgacctact

SEQ ID NO: 440193 - DNA, 15 bp, Homo sapiens
tactctgtgacctac

SEQ ID NO: 440194 - DNA, 15 bp, Homo sapiens
gtactctgtgaccta

SEQ ID NO: 440195 - DNA, 15 bp, Homo sapiens
tgtactctgtgacct

SEQ ID NO: 440196 - DNA, 15 bp, Homo sapiens
gtgtactctgtgacc

SEQ ID NO: 440197 - DNA, 15 bp, Homo sapiens
cgtgtactctgtgac

SEQ ID NO: 440198 - DNA, 15 bp, Homo sapiens
ccgtgtactctgtga

SEQ ID NO: 440199 - DNA, 15 bp, Homo sapiens
tccgtgtactctgtg

SEQ ID NO: 440200 - DNA, 15 bp, Homo sapiens
ctccgtgtactctgt

SEQ ID NO: 440201 - DNA, 15 bp, Homo sapiens
gctccgtgtactctg

SEQ ID NO: 440202 - DNA, 15 bp, Homo sapiens
tgctccgtgtactct

SEQ ID NO: 440203 - DNA, 15 bp, Homo sapiens
ctgctccgtgtactc

SEQ ID NO: 440204 - DNA, 15 bp, Homo sapiens
cctgctccgtgtact

SEQ ID NO: 440205 - DNA, 15 bp, Homo sapiens
gcctgctccgtgtac

SEQ ID NO: 440206 - DNA, 15 bp, Homo sapiens
agcctgctccgtgta

SEQ ID NO: 440207 - DNA, 15 bp, Homo sapiens
aagcctgctccgtgt

SEQ ID NO: 440208 - DNA, 15 bp, Homo sapiens
taagcctgctccgtg

SEQ ID NO: 440209 - DNA, 15 bp, Homo sapiens
gtaagcctgctccgt

SEQ ID NO: 440210 - DNA, 15 bp, Homo sapiens
tgtaagcctgctccg

SEQ ID NO: 440211 - DNA, 15 bp, Homo sapiens
gtgtaagcctgctcc

SEQ ID NO: 440212 - DNA, 15 bp, Homo sapiens
tgtgtaagcctgctc

SEQ ID NO: 440213 - DNA, 15 bp, Homo sapiens
ttgtgtaagcctgct

SEQ ID NO: 440214 - DNA, 15 bp, Homo sapiens
tttgtgtaagcctgc

SEQ ID NO: 440215 - DNA, 15 bp, Homo sapiens
gtttgtgtaagcctg

SEQ ID NO: 440216 - DNA, 15 bp, Homo sapiens
tgtttgtgtaagcct

SEQ ID NO: 440217 - DNA, 15 bp, Homo sapiens
gtgtttgtgtaagcc

SEQ ID NO: 440218 - DNA, 15 bp, Homo sapiens
tgtgtttgtgtaagc

SEQ ID NO: 440219 - DNA, 15 bp, Homo sapiens
gtgtgtttgtgtaag

SEQ ID NO: 440220 - DNA, 15 bp, Homo sapiens
tgtgtgtttgtgtaa

SEQ ID NO: 440221 - DNA, 15 bp, Homo sapiens
gtgtgtgtttgtgta

SEQ ID NO: 440222 - DNA, 15 bp, Homo sapiens
cgtgtgtgtttgtgt

SEQ ID NO: 440223 - DNA, 15 bp, Homo sapiens
acgtgtgtgtttgtg

SEQ ID NO: 440224 - DNA, 15 bp, Homo sapiens
gacgtgtgtgtttgt

SEQ ID NO: 440225 - DNA, 15 bp, Homo sapiens
tgacgtgtgtgtttg

SEQ ID NO: 440226 - DNA, 15 bp, Homo sapiens
ttgacgtgtgtgttt

SEQ ID NO: 440227 - DNA, 15 bp, Homo sapiens
tttgacgtgtgtgtt

SEQ ID NO: 440228 - DNA, 15 bp, Homo sapiens
atttgacgtgtgtgt

SEQ ID NO: 440229 - DNA, 15 bp, Homo sapiens
catttgacgtgtgtg

SEQ ID NO: 440230 - DNA, 15 bp, Homo sapiens
tcatttgacgtgtgt

SEQ ID NO: 440231 - DNA, 15 bp, Homo sapiens
ttcatttgacgtgtg

SEQ ID NO: 440232 - DNA, 15 bp, Homo sapiens
gttcatttgacgtgt

SEQ ID NO: 440233 - DNA, 15 bp, Homo sapiens
tgttcatttgacgtg

SEQ ID NO: 440234 - DNA, 15 bp, Homo sapiens
ttgttcatttgacgt

SEQ ID NO: 440235 - DNA, 15 bp, Homo sapiens
tttgttcatttgacg

SEQ ID NO: 440236 - DNA, 15 bp, Homo sapiens
atttgttcatttgac

SEQ ID NO: 440237 - DNA, 15 bp, Homo sapiens
gatttgttcatttga

SEQ ID NO: 440238 - DNA, 15 bp, Homo sapiens
ggatttgttcatttg

SEQ ID NO: 440239 - DNA, 15 bp, Homo sapiens
tggatttgttcattt

SEQ ID NO: 440240 - DNA, 15 bp, Homo sapiens
ctggatttgttcatt

SEQ ID NO: 440241 - DNA, 15 bp, Homo sapiens
gctggatttgttcat

SEQ ID NO: 440242 - DNA, 15 bp, Homo sapiens
ggctggatttgttca

SEQ ID NO: 440243 - DNA, 15 bp, Homo sapiens
tggctggatttgttc

SEQ ID NO: 440244 - DNA, 15 bp, Homo sapiens
gtggctggatttgtt

SEQ ID NO: 440245 - DNA, 15 bp, Homo sapiens
tgtggctggatttgt

SEQ ID NO: 440246 - DNA, 15 bp, Homo sapiens
gtgtggctggatttg

SEQ ID NO: 440247 - DNA, 15 bp, Homo sapiens
ggtgtggctggattt

SEQ ID NO: 440248 - DNA, 15 bp, Homo sapiens
tggtgtggctggatt

SEQ ID NO: 440249 - DNA, 15 bp, Homo sapiens
gtggtgtggctggat

SEQ ID NO: 440250 - DNA, 15 bp, Homo sapiens
ggtggtgtggctgga

SEQ ID NO: 440251 - DNA, 15 bp, Homo sapiens
aggtggtgtggctgg

SEQ ID NO: 440252 - DNA, 15 bp, Homo sapiens
caggtggtgtggctg

SEQ ID NO: 440253 - DNA, 15 bp, Homo sapiens
acaggtggtgtggct

SEQ ID NO: 440254 - DNA, 15 bp, Homo sapiens
cacaggtggtgtggc

SEQ ID NO: 440255 - DNA, 15 bp, Homo sapiens
gcacaggtggtgtgg

SEQ ID NO: 440256 - DNA, 15 bp, Homo sapiens
tgcacaggtggtgtg

SEQ ID NO: 440257 - DNA, 15 bp, Homo sapiens
ctgcacaggtggtgt

SEQ ID NO: 440258 - DNA, 15 bp, Homo sapiens
actgcacaggtggtg

SEQ ID NO: 440259 - DNA, 15 bp, Homo sapiens
gactgcacaggtggt

SEQ ID NO: 440260 - DNA, 15 bp, Homo sapiens
agactgcacaggtgg

SEQ ID NO: 440261 - DNA, 15 bp, Homo sapiens
gagactgcacaggtg

SEQ ID NO: 440262 - DNA, 15 bp, Homo sapiens
agagactgcacaggt

SEQ ID NO: 440263 - DNA, 15 bp, Homo sapiens
aagagactgcacagg

SEQ ID NO: 440264 - DNA, 15 bp, Homo sapiens
caagagactgcacag

SEQ ID NO: 440265 - DNA, 15 bp, Homo sapiens
tcaagagactgcaca

SEQ ID NO: 440266 - DNA, 15 bp, Homo sapiens
ttcaagagactgcac

SEQ ID NO: 440267 - DNA, 15 bp, Homo sapiens
attcaagagactgca

SEQ ID NO: 440268 - DNA, 15 bp, Homo sapiens
aattcaagagactgc

SEQ ID NO: 440269 - DNA, 15 bp, Homo sapiens
gaattcaagagactg

SEQ ID NO: 440270 - DNA, 15 bp, Homo sapiens
tgaattcaagagact

SEQ ID NO: 440271 - DNA, 15 bp, Homo sapiens
gtgaattcaagagac

SEQ ID NO: 440272 - DNA, 15 bp, Homo sapiens
agtgaattcaagaga

SEQ ID NO: 440273 - DNA, 15 bp, Homo sapiens
aagtgaattcaagag

SEQ ID NO: 440274 - DNA, 15 bp, Homo sapiens
gaagtgaattcaaga

SEQ ID NO: 440275 - DNA, 15 bp, Homo sapiens
ggaagtgaattcaag

SEQ ID NO: 440276 - DNA, 15 bp, Homo sapiens
aggaagtgaattcaa

SEQ ID NO: 440277 - DNA, 15 bp, Homo sapiens
gaggaagtgaattca

SEQ ID NO: 440278 - DNA, 15 bp, Homo sapiens
ggaggaagtgaattc

SEQ ID NO: 440279 - DNA, 15 bp, Homo sapiens
tggaggaagtgaatt

SEQ ID NO: 440280 - DNA, 15 bp, Homo sapiens
gtggaggaagtgaat

SEQ ID NO: 440281 - DNA, 15 bp, Homo sapiens
ggtggaggaagtgaa

SEQ ID NO: 440282 - DNA, 15 bp, Homo sapiens
tggtggaggaagtga

SEQ ID NO: 440283 - DNA, 15 bp, Homo sapiens
gtggtggaggaagtg

SEQ ID NO: 440284 - DNA, 15 bp, Homo sapiens
agtggtggaggaagt

SEQ ID NO: 440285 - DNA, 15 bp, Homo sapiens
cagtggtggaggaag

SEQ ID NO: 440286 - DNA, 15 bp, Homo sapiens
gcagtggtggaggaa

SEQ ID NO: 440287 - DNA, 15 bp, Homo sapiens
ggcagtggtggagga

SEQ ID NO: 440288 - DNA, 15 bp, Homo sapiens
aggcagtggtggagg

SEQ ID NO: 440289 - DNA, 15 bp, Homo sapiens
caggcagtggtggag

SEQ ID NO: 440290 - DNA, 15 bp, Homo sapiens
ccaggcagtggtgga

SEQ ID NO: 440291 - DNA, 15 bp, Homo sapiens
tccaggcagtggtgg

SEQ ID NO: 440292 - DNA, 15 bp, Homo sapiens
atccaggcagtggtg

SEQ ID NO: 440293 - DNA, 15 bp, Homo sapiens
aatccaggcagtggt

SEQ ID NO: 440294 - DNA, 15 bp, Homo sapiens
gaatccaggcagtgg

SEQ ID NO: 440295 - DNA, 15 bp, Homo sapiens
tgaatccaggcagtg

SEQ ID NO: 440296 - DNA, 15 bp, Homo sapiens
ctgaatccaggcagt

SEQ ID NO: 440297 - DNA, 15 bp, Homo sapiens
cctgaatccaggcag

SEQ ID NO: 440298 - DNA, 15 bp, Homo sapiens
gcctgaatccaggca

SEQ ID NO: 440299 - DNA, 15 bp, Homo sapiens
agcctgaatccaggc

SEQ ID NO: 440300 - DNA, 15 bp, Homo sapiens
gagcctgaatccagg

SEQ ID NO: 440301 - DNA, 15 bp, Homo sapiens
agagcctgaatccag

SEQ ID NO: 440302 - DNA, 15 bp, Homo sapiens
gagagcctgaatcca

SEQ ID NO: 440303 - DNA, 15 bp, Homo sapiens
tgagagcctgaatcc

SEQ ID NO: 440304 - DNA, 15 bp, Homo sapiens
gtgagagcctgaatc

SEQ ID NO: 440305 - DNA, 15 bp, Homo sapiens
ggtgagagcctgaat

SEQ ID NO: 440306 - DNA, 15 bp, Homo sapiens
aggtgagagcctgaa

SEQ ID NO: 440307 - DNA, 15 bp, Homo sapiens
caggtgagagcctga

SEQ ID NO: 440308 - DNA, 15 bp, Homo sapiens
ccaggtgagagcctg

SEQ ID NO: 440309 - DNA, 15 bp, Homo sapiens
gccaggtgagagcct

SEQ ID NO: 440310 - DNA, 15 bp, Homo sapiens
agccaggtgagagcc

SEQ ID NO: 440311 - DNA, 15 bp, Homo sapiens
aagccaggtgagagc

SEQ ID NO: 440312 - DNA, 15 bp, Homo sapiens
caagccaggtgagag

SEQ ID NO: 440313 - DNA, 15 bp, Homo sapiens
acaagccaggtgaga

SEQ ID NO: 440314 - DNA, 15 bp, Homo sapiens
aacaagccaggtgag

SEQ ID NO: 440315 - DNA, 15 bp, Homo sapiens
caacaagccaggtga

SEQ ID NO: 440316 - DNA, 15 bp, Homo sapiens
tcaacaagccaggtg

SEQ ID NO: 440317 - DNA, 15 bp, Homo sapiens
ttcaacaagccaggt

SEQ ID NO: 440318 - DNA, 15 bp, Homo sapiens
cttcaacaagccagg

SEQ ID NO: 440319 - DNA, 15 bp, Homo sapiens
ccttcaacaagccag

SEQ ID NO: 440320 - DNA, 15 bp, Homo sapiens
gccttcaacaagcca

SEQ ID NO: 440321 - DNA, 15 bp, Homo sapiens
tgccttcaacaagcc

SEQ ID NO: 440322 - DNA, 15 bp, Homo sapiens
atgccttcaacaagc

SEQ ID NO: 440323 - DNA, 15 bp, Homo sapiens
gatgccttcaacaag

SEQ ID NO: 440324 - DNA, 15 bp, Homo sapiens
ggatgccttcaacaa

SEQ ID NO: 440325 - DNA, 15 bp, Homo sapiens
aggatgccttcaaca

SEQ ID NO: 440326 - DNA, 15 bp, Homo sapiens
gaggatgccttcaac

SEQ ID NO: 440327 - DNA, 15 bp, Homo sapiens
tgaggatgccttcaa

SEQ ID NO: 440328 - DNA, 15 bp, Homo sapiens
ttgaggatgccttca

SEQ ID NO: 440329 - DNA, 15 bp, Homo sapiens
gttgaggatgccttc

SEQ ID NO: 440330 - DNA, 15 bp, Homo sapiens
agttgaggatgcctt

SEQ ID NO: 440331 - DNA, 15 bp, Homo sapiens
tagttgaggatgcct

SEQ ID NO: 440332 - DNA, 15 bp, Homo sapiens
ctagttgaggatgcc

SEQ ID NO: 440333 - DNA, 15 bp, Homo sapiens
actagttgaggatgc

SEQ ID NO: 440334 - DNA, 15 bp, Homo sapiens
gactagttgaggatg

SEQ ID NO: 440335 - DNA, 15 bp, Homo sapiens
agactagttgaggat

SEQ ID NO: 440336 - DNA, 15 bp, Homo sapiens
cagactagttgagga

SEQ ID NO: 440337 - DNA, 15 bp, Homo sapiens
acagactagttgagg

SEQ ID NO: 440338 - DNA, 15 bp, Homo sapiens
gacagactagttgag

SEQ ID NO: 440339 - DNA, 15 bp, Homo sapiens
tgacagactagttga

SEQ ID NO: 440340 - DNA, 15 bp, Homo sapiens
ctgacagactagttg

SEQ ID NO: 440341 - DNA, 15 bp, Homo sapiens
gctgacagactagtt

SEQ ID NO: 440342 - DNA, 15 bp, Homo sapiens
ggctgacagactagt

SEQ ID NO: 440343 - DNA, 15 bp, Homo sapiens
aggctgacagactag

SEQ ID NO: 440344 - DNA, 15 bp, Homo sapiens
aaggctgacagacta

SEQ ID NO: 440345 - DNA, 15 bp, Homo sapiens
caaggctgacagact

SEQ ID NO: 440346 - DNA, 15 bp, Homo sapiens
ccaaggctgacagac

SEQ ID NO: 440347 - DNA, 15 bp, Homo sapiens
accaaggctgacaga

SEQ ID NO: 440348 - DNA, 15 bp, Homo sapiens
gaccaaggctgacag

SEQ ID NO: 440349 - DNA, 15 bp, Homo sapiens
agaccaaggctgaca

SEQ ID NO: 440350 - DNA, 15 bp, Homo sapiens
aagaccaaggctgac

SEQ ID NO: 440351 - DNA, 15 bp, Homo sapiens
aaagaccaaggctga

SEQ ID NO: 440352 - DNA, 15 bp, Homo sapiens
gaaagaccaaggctg

SEQ ID NO: 440353 - DNA, 15 bp, Homo sapiens
agaaagaccaaggct

SEQ ID NO: 440354 - DNA, 15 bp, Homo sapiens
gagaaagaccaaggc

SEQ ID NO: 440355 - DNA, 15 bp, Homo sapiens
agagaaagaccaagg

SEQ ID NO: 440356 - DNA, 15 bp, Homo sapiens
aagagaaagaccaag

SEQ ID NO: 440357 - DNA, 15 bp, Homo sapiens
caagagaaagaccaa

SEQ ID NO: 440358 - DNA, 15 bp, Homo sapiens
acaagagaaagacca

SEQ ID NO: 440359 - DNA, 15 bp, Homo sapiens
gacaagagaaagacc

SEQ ID NO: 440360 - DNA, 15 bp, Homo sapiens
agacaagagaaagac

SEQ ID NO: 440361 - DNA, 15 bp, Homo sapiens
cagacaagagaaaga

SEQ ID NO: 440362 - DNA, 15 bp, Homo sapiens
acagacaagagaaag

SEQ ID NO: 440363 - DNA, 15 bp, Homo sapiens
gacagacaagagaaa

SEQ ID NO: 440364 - DNA, 15 bp, Homo sapiens
tgacagacaagagaa

SEQ ID NO: 440365 - DNA, 15 bp, Homo sapiens
atgacagacaagaga

SEQ ID NO: 440366 - DNA, 15 bp, Homo sapiens
gatgacagacaagag

SEQ ID NO: 440367 - DNA, 15 bp, Homo sapiens
ggatgacagacaaga

SEQ ID NO: 440368 - DNA, 15 bp, Homo sapiens
tggatgacagacaag

SEQ ID NO: 440369 - DNA, 15 bp, Homo sapiens
gtggatgacagacaa

SEQ ID NO: 440370 - DNA, 15 bp, Homo sapiens
tgtggatgacagaca

SEQ ID NO: 440371 - DNA, 15 bp, Homo sapiens
gtgtggatgacagac

SEQ ID NO: 440372 - DNA, 15 bp, Homo sapiens
ggtgtggatgacaga

SEQ ID NO: 440373 - DNA, 15 bp, Homo sapiens
tggtgtggatgacag

SEQ ID NO: 440374 - DNA, 15 bp, Homo sapiens
gtggtgtggatgaca

SEQ ID NO: 440375 - DNA, 15 bp, Homo sapiens
cgtggtgtggatgac

SEQ ID NO: 440376 - DNA, 15 bp, Homo sapiens
gcgtggtgtggatga

SEQ ID NO: 440377 - DNA, 15 bp, Homo sapiens
agcgtggtgtggatg

SEQ ID NO: 440378 - DNA, 15 bp, Homo sapiens
tagcgtggtgtggat

SEQ ID NO: 440379 - DNA, 15 bp, Homo sapiens
ctagcgtggtgtgga

SEQ ID NO: 440380 - DNA, 15 bp, Homo sapiens
cctagcgtggtgtgg

SEQ ID NO: 440381 - DNA, 15 bp, Homo sapiens
acctagcgtggtgtg

SEQ ID NO: 440382 - DNA, 15 bp, Homo sapiens
aacctagcgtggtgt

SEQ ID NO: 440383 - DNA, 15 bp, Homo sapiens
aaacctagcgtggtg

SEQ ID NO: 440384 - DNA, 15 bp, Homo sapiens
aaaacctagcgtggt

SEQ ID NO: 440385 - DNA, 15 bp, Homo sapiens
caaaacctagcgtgg

SEQ ID NO: 440386 - DNA, 15 bp, Homo sapiens
acaaaacctagcgtg

SEQ ID NO: 440387 - DNA, 15 bp, Homo sapiens
aacaaaacctagcgt

SEQ ID NO: 440388 - DNA, 15 bp, Homo sapiens
aaacaaaacctagcg

SEQ ID NO: 440389 - DNA, 15 bp, Homo sapiens
aaaacaaaacctagc

SEQ ID NO: 440390 - DNA, 15 bp, Homo sapiens
caaaacaaaacctag

SEQ ID NO: 440391 - DNA, 15 bp, Homo sapiens
gcaaaacaaaaccta

SEQ ID NO: 440392 - DNA, 15 bp, Homo sapiens
agcaaaacaaaacct

SEQ ID NO: 440393 - DNA, 15 bp, Homo sapiens
aagcaaaacaaaacc

SEQ ID NO: 440394 - DNA, 15 bp, Homo sapiens
aaagcaaaacaaaac

SEQ ID NO: 440395 - DNA, 15 bp, Homo sapiens
caaagcaaaacaaaa

SEQ ID NO: 440396 - DNA, 15 bp, Homo sapiens
acaaagcaaaacaaa

SEQ ID NO: 440397 - DNA, 15 bp, Homo sapiens
aacaaagcaaaacaa

SEQ ID NO: 440398 - DNA, 15 bp, Homo sapiens
aaacaaagcaaaaca

SEQ ID NO: 440399 - DNA, 15 bp, Homo sapiens
taaacaaagcaaaac

SEQ ID NO: 440400 - DNA, 15 bp, Homo sapiens
ttaaacaaagcaaaa

SEQ ID NO: 440401 - DNA, 15 bp, Homo sapiens
cttaaacaaagcaaa

SEQ ID NO: 440402 - DNA, 15 bp, Homo sapiens
gcttaaacaaagcaa

SEQ ID NO: 440403 - DNA, 15 bp, Homo sapiens
ggcttaaacaaagca

SEQ ID NO: 440404 - DNA, 15 bp, Homo sapiens
aggcttaaacaaagc

SEQ ID NO: 440405 - DNA, 15 bp, Homo sapiens
gaggcttaaacaaag

SEQ ID NO: 440406 - DNA, 15 bp, Homo sapiens
ggaggcttaaacaaa

SEQ ID NO: 440407 - DNA, 15 bp, Homo sapiens
aggaggcttaaacaa

SEQ ID NO: 440408 - DNA, 15 bp, Homo sapiens
aaggaggcttaaaca

SEQ ID NO: 440409 - DNA, 15 bp, Homo sapiens
aaaggaggcttaaac

SEQ ID NO: 440410 - DNA, 15 bp, Homo sapiens
aaaaggaggcttaaa

SEQ ID NO: 440411 - DNA, 15 bp, Homo sapiens
caaaaggaggcttaa

SEQ ID NO: 440412 - DNA, 15 bp, Homo sapiens
tcaaaaggaggctta

SEQ ID NO: 440413 - DNA, 15 bp, Homo sapiens
atcaaaaggaggctt

SEQ ID NO: 440414 - DNA, 15 bp, Homo sapiens
gatcaaaaggaggct

SEQ ID NO: 440415 - DNA, 15 bp, Homo sapiens
agatcaaaaggaggc

SEQ ID NO: 440416 - DNA, 15 bp, Homo sapiens
aagatcaaaaggagg

SEQ ID NO: 440417 - DNA, 15 bp, Homo sapiens
caagatcaaaaggag

SEQ ID NO: 440418 - DNA, 15 bp, Homo sapiens
acaagatcaaaagga

SEQ ID NO: 440419 - DNA, 15 bp, Homo sapiens
gacaagatcaaaagg

SEQ ID NO: 440420 - DNA, 15 bp, Homo sapiens
tgacaagatcaaaag

SEQ ID NO: 440421 - DNA, 15 bp, Homo sapiens
gtgacaagatcaaaa

SEQ ID NO: 440422 - DNA, 15 bp, Homo sapiens
tgtgacaagatcaaa

SEQ ID NO: 440423 - DNA, 15 bp, Homo sapiens
ctgtgacaagatcaa

SEQ ID NO: 440424 - DNA, 15 bp, Homo sapiens
actgtgacaagatca

SEQ ID NO: 440425 - DNA, 15 bp, Homo sapiens
gactgtgacaagatc

SEQ ID NO: 440426 - DNA, 15 bp, Homo sapiens
ggactgtgacaagat

SEQ ID NO: 440427 - DNA, 15 bp, Homo sapiens
aggactgtgacaaga

SEQ ID NO: 440428 - DNA, 15 bp, Homo sapiens
aaggactgtgacaag

SEQ ID NO: 440429 - DNA, 15 bp, Homo sapiens
caaggactgtgacaa

SEQ ID NO: 440430 - DNA, 15 bp, Homo sapiens
tcaaggactgtgaca

SEQ ID NO: 440431 - DNA, 15 bp, Homo sapiens
atcaaggactgtgac

SEQ ID NO: 440432 - DNA, 15 bp, Homo sapiens
aatcaaggactgtga

SEQ ID NO: 440433 - DNA, 15 bp, Homo sapiens
taatcaaggactgtg

SEQ ID NO: 440434 - DNA, 15 bp, Homo sapiens
ttaatcaaggactgt

SEQ ID NO: 440435 - DNA, 15 bp, Homo sapiens
tttaatcaaggactg

SEQ ID NO: 440436 - DNA, 15 bp, Homo sapiens
atttaatcaaggact

SEQ ID NO: 440437 - DNA, 15 bp, Homo sapiens
aatttaatcaaggac

SEQ ID NO: 440438 - DNA, 15 bp, Homo sapiens
aaatttaatcaagga

SEQ ID NO: 440439 - DNA, 15 bp, Homo sapiens
aaaatttaatcaagg

SEQ ID NO: 440440 - DNA, 15 bp, Homo sapiens
aaaaatttaatcaag

SEQ ID NO: 440441 - DNA, 15 bp, Homo sapiens
gaaaaatttaatcaa

SEQ ID NO: 440442 - DNA, 15 bp, Homo sapiens
agaaaaatttaatca

SEQ ID NO: 440443 - DNA, 15 bp, Homo sapiens
cagaaaaatttaatc

SEQ ID NO: 440444 - DNA, 15 bp, Homo sapiens
gcagaaaaatttaat

SEQ ID NO: 440445 - DNA, 15 bp, Homo sapiens
ggcagaaaaatttaa

SEQ ID NO: 440446 - DNA, 15 bp, Homo sapiens
aggcagaaaaattta

SEQ ID NO: 440447 - DNA, 15 bp, Homo sapiens
aaggcagaaaaattt

SEQ ID NO: 440448 - DNA, 15 bp, Homo sapiens
gaaggcagaaaaatt

SEQ ID NO: 440449 - DNA, 15 bp, Homo sapiens
agaaggcagaaaaat

SEQ ID NO: 440450 - DNA, 15 bp, Homo sapiens
aagaaggcagaaaaa

SEQ ID NO: 440451 - DNA, 15 bp, Homo sapiens
gaagaaggcagaaaa

SEQ ID NO: 440452 - DNA, 15 bp, Homo sapiens
agaagaaggcagaaa

SEQ ID NO: 440453 - DNA, 15 bp, Homo sapiens
aagaagaaggcagaa

SEQ ID NO: 440454 - DNA, 15 bp, Homo sapiens
taagaagaaggcaga

SEQ ID NO: 440455 - DNA, 15 bp, Homo sapiens
ataagaagaaggcag

SEQ ID NO: 440456 - DNA, 15 bp, Homo sapiens
gataagaagaaggca

SEQ ID NO: 440457 - DNA, 15 bp, Homo sapiens
agataagaagaaggc

SEQ ID NO: 440458 - DNA, 15 bp, Homo sapiens
tagataagaagaagg

SEQ ID NO: 440459 - DNA, 15 bp, Homo sapiens
atagataagaagaag

SEQ ID NO: 440460 - DNA, 15 bp, Homo sapiens
tatagataagaagaa

SEQ ID NO: 440461 - DNA, 15 bp, Homo sapiens
ctatagataagaaga

SEQ ID NO: 440462 - DNA, 15 bp, Homo sapiens
cctatagataagaag

SEQ ID NO: 440463 - DNA, 15 bp, Homo sapiens
tcctatagataagaa

SEQ ID NO: 440464 - DNA, 15 bp, Homo sapiens
atcctatagataaga

SEQ ID NO: 440465 - DNA, 15 bp, Homo sapiens
tatcctatagataag

SEQ ID NO: 440466 - DNA, 15 bp, Homo sapiens
ttatcctatagataa

SEQ ID NO: 440467 - DNA, 15 bp, Homo sapiens
tttatcctatagata

SEQ ID NO: 440468 - DNA, 15 bp, Homo sapiens
ctttatcctatagat

SEQ ID NO: 440469 - DNA, 15 bp, Homo sapiens
cctttatcctataga

SEQ ID NO: 440470 - DNA, 15 bp, Homo sapiens
gcctttatcctatag

SEQ ID NO: 440471 - DNA, 15 bp, Homo sapiens
ggcctttatcctata

SEQ ID NO: 440472 - DNA, 15 bp, Homo sapiens
tggcctttatcctat

SEQ ID NO: 440473 - DNA, 15 bp, Homo sapiens
atggcctttatccta

SEQ ID NO: 440474 - DNA, 15 bp, Homo sapiens
catggcctttatcct

SEQ ID NO: 440475 - DNA, 15 bp, Homo sapiens
gcatggcctttatcc

SEQ ID NO: 440476 - DNA, 15 bp, Homo sapiens
agcatggcctttatc

SEQ ID NO: 440477 - DNA, 15 bp, Homo sapiens
gagcatggcctttat

SEQ ID NO: 440478 - DNA, 15 bp, Homo sapiens
agagcatggccttta

SEQ ID NO: 440479 - DNA, 15 bp, Homo sapiens
aagagcatggccttt

SEQ ID NO: 440480 - DNA, 15 bp, Homo sapiens
gaagagcatggcctt

SEQ ID NO: 440481 - DNA, 15 bp, Homo sapiens
ggaagagcatggcct

SEQ ID NO: 440482 - DNA, 15 bp, Homo sapiens
tggaagagcatggcc

SEQ ID NO: 440483 - DNA, 15 bp, Homo sapiens
ttggaagagcatggc

SEQ ID NO: 440484 - DNA, 15 bp, Homo sapiens
attggaagagcatgg

SEQ ID NO: 440485 - DNA, 15 bp, Homo sapiens
aattggaagagcatg

SEQ ID NO: 440486 - DNA, 15 bp, Homo sapiens
gaattggaagagcat

SEQ ID NO: 440487 - DNA, 15 bp, Homo sapiens
ggaattggaagagca

SEQ ID NO: 440488 - DNA, 15 bp, Homo sapiens
tggaattggaagagc

SEQ ID NO: 440489 - DNA, 15 bp, Homo sapiens
ttggaattggaagag

SEQ ID NO: 440490 - DNA, 15 bp, Homo sapiens
gttggaattggaaga

SEQ ID NO: 440491 - DNA, 15 bp, Homo sapiens
agttggaattggaag

SEQ ID NO: 440492 - DNA, 15 bp, Homo sapiens
aagttggaattggaa

SEQ ID NO: 440493 - DNA, 15 bp, Homo sapiens
taagttggaattgga

SEQ ID NO: 440494 - DNA, 15 bp, Homo sapiens
ttaagttggaattgg

SEQ ID NO: 440495 - DNA, 15 bp, Homo sapiens
tttaagttggaattg

SEQ ID NO: 440496 - DNA, 15 bp, Homo sapiens
gtttaagttggaatt

SEQ ID NO: 440497 - DNA, 15 bp, Homo sapiens
agtttaagttggaat

SEQ ID NO: 440498 - DNA, 15 bp, Homo sapiens
aagtttaagttggaa

SEQ ID NO: 440499 - DNA, 15 bp, Homo sapiens
gaagtttaagttgga

SEQ ID NO: 440500 - DNA, 15 bp, Homo sapiens
agaagtttaagttgg

SEQ ID NO: 440501 - DNA, 15 bp, Homo sapiens
cagaagtttaagttg

SEQ ID NO: 440502 - DNA, 15 bp, Homo sapiens
gcagaagtttaagtt

SEQ ID NO: 440503 - DNA, 15 bp, Homo sapiens
ggcagaagtttaagt

SEQ ID NO: 440504 - DNA, 15 bp, Homo sapiens
tggcagaagtttaag

SEQ ID NO: 440505 - DNA, 15 bp, Homo sapiens
atggcagaagtttaa

SEQ ID NO: 440506 - DNA, 15 bp, Homo sapiens
aatggcagaagttta

SEQ ID NO: 440507 - DNA, 15 bp, Homo sapiens
caatggcagaagttt

SEQ ID NO: 440508 - DNA, 15 bp, Homo sapiens
tcaatggcagaagtt

SEQ ID NO: 440509 - DNA, 15 bp, Homo sapiens
ttcaatggcagaagt

SEQ ID NO: 440510 - DNA, 15 bp, Homo sapiens
attcaatggcagaag

SEQ ID NO: 440511 - DNA, 15 bp, Homo sapiens
aattcaatggcagaa

SEQ ID NO: 440512 - DNA, 15 bp, Homo sapiens
taattcaatggcaga

SEQ ID NO: 440513 - DNA, 15 bp, Homo sapiens
ataattcaatggcag

SEQ ID NO: 440514 - DNA, 15 bp, Homo sapiens
cataattcaatggca

SEQ ID NO: 440515 - DNA, 15 bp, Homo sapiens
acataattcaatggc

SEQ ID NO: 440516 - DNA, 15 bp, Homo sapiens
cacataattcaatgg

SEQ ID NO: 440517 - DNA, 15 bp, Homo sapiens
gcacataattcaatg

SEQ ID NO: 440518 - DNA, 15 bp, Homo sapiens
ggcacataattcaat

SEQ ID NO: 440519 - DNA, 15 bp, Homo sapiens
tggcacataattcaa

SEQ ID NO: 440520 - DNA, 15 bp, Homo sapiens
ctggcacataattca

SEQ ID NO: 440521 - DNA, 15 bp, Homo sapiens
actggcacataattc

SEQ ID NO: 440522 - DNA, 15 bp, Homo sapiens
gactggcacataatt

SEQ ID NO: 440523 - DNA, 15 bp, Homo sapiens
tgactggcacataat

SEQ ID NO: 440524 - DNA, 15 bp, Homo sapiens
ttgactggcacataa

SEQ ID NO: 440525 - DNA, 15 bp, Homo sapiens
cttgactggcacata

SEQ ID NO: 440526 - DNA, 15 bp, Homo sapiens
ccttgactggcacat

SEQ ID NO: 440527 - DNA, 15 bp, Homo sapiens
tccttgactggcaca

SEQ ID NO: 440528 - DNA, 15 bp, Homo sapiens
ttccttgactggcac

SEQ ID NO: 440529 - DNA, 15 bp, Homo sapiens
tttccttgactggca

SEQ ID NO: 440530 - DNA, 15 bp, Homo sapiens
ttttccttgactggc

SEQ ID NO: 440531 - DNA, 15 bp, Homo sapiens
gttttccttgactgg

SEQ ID NO: 440532 - DNA, 15 bp, Homo sapiens
ggttttccttgactg

SEQ ID NO: 440533 - DNA, 15 bp, Homo sapiens
tggttttccttgact

SEQ ID NO: 440534 - DNA, 15 bp, Homo sapiens
ttggttttccttgac

SEQ ID NO: 440535 - DNA, 15 bp, Homo sapiens
tttggttttccttga

SEQ ID NO: 440536 - DNA, 15 bp, Homo sapiens
ctttggttttccttg

SEQ ID NO: 440537 - DNA, 15 bp, Homo sapiens
tctttggttttcctt

SEQ ID NO: 440538 - DNA, 15 bp, Homo sapiens
gtctttggttttcct

SEQ ID NO: 440539 - DNA, 15 bp, Homo sapiens
tgtctttggttttcc

SEQ ID NO: 440540 - DNA, 15 bp, Homo sapiens
ttgtctttggttttc

SEQ ID NO: 440541 - DNA, 15 bp, Homo sapiens
tttgtctttggtttt

SEQ ID NO: 440542 - DNA, 15 bp, Homo sapiens
ttttgtctttggttt

SEQ ID NO: 440543 - DNA, 15 bp, Homo sapiens
gttttgtctttggtt

SEQ ID NO: 440544 - DNA, 15 bp, Homo sapiens
tgttttgtctttggt

SEQ ID NO: 440545 - DNA, 15 bp, Homo sapiens
ttgttttgtctttgg

SEQ ID NO: 440546 - DNA, 15 bp, Homo sapiens
gttgttttgtctttg

SEQ ID NO: 440547 - DNA, 15 bp, Homo sapiens
tgttgttttgtcttt

SEQ ID NO: 440548 - DNA, 15 bp, Homo sapiens
ttgttgttttgtctt

SEQ ID NO: 440549 - DNA, 15 bp, Homo sapiens
cttgttgttttgtct

SEQ ID NO: 440550 - DNA, 15 bp, Homo sapiens
tcttgttgttttgtc

SEQ ID NO: 440551 - DNA, 15 bp, Homo sapiens
ttcttgttgttttgt

SEQ ID NO: 440552 - DNA, 15 bp, Homo sapiens
tttcttgttgttttg

SEQ ID NO: 440553 - DNA, 15 bp, Homo sapiens
ttttcttgttgtttt

SEQ ID NO: 440554 - DNA, 15 bp, Homo sapiens
gttttcttgttgttt

SEQ ID NO: 440555 - DNA, 15 bp, Homo sapiens
tgttttcttgttgtt

SEQ ID NO: 440556 - DNA, 15 bp, Homo sapiens
ttgttttcttgttgt

SEQ ID NO: 440557 - DNA, 15 bp, Homo sapiens
gttgttttcttgttg

SEQ ID NO: 440558 - DNA, 15 bp, Homo sapiens
tgttgttttcttgtt

SEQ ID NO: 440559 - DNA, 15 bp, Homo sapiens
ttgttgttttcttgt

SEQ ID NO: 440560 - DNA, 15 bp, Homo sapiens
gttgttgttttcttg

SEQ ID NO: 440561 - DNA, 15 bp, Homo sapiens
tgttgttgttttctt

SEQ ID NO: 440562 - DNA, 15 bp, Homo sapiens
ttgttgttgttttct

SEQ ID NO: 440563 - DNA, 15 bp, Homo sapiens
tttgttgttgttttc

SEQ ID NO: 440564 - DNA, 15 bp, Homo sapiens
ttttgttgttgtttt

SEQ ID NO: 440565 - DNA, 15 bp, Homo sapiens
attttgttgttgttt

SEQ ID NO: 440566 - DNA, 15 bp, Homo sapiens
tattttgttgttgtt

SEQ ID NO: 440567 - DNA, 15 bp, Homo sapiens
ctattttgttgttgt

SEQ ID NO: 440568 - DNA, 15 bp, Homo sapiens
gctattttgttgttg

SEQ ID NO: 440569 - DNA, 15 bp, Homo sapiens
tgctattttgttgtt

SEQ ID NO: 440570 - DNA, 15 bp, Homo sapiens
ctgctattttgttgt

SEQ ID NO: 440571 - DNA, 15 bp, Homo sapiens
tctgctattttgttg

SEQ ID NO: 440572 - DNA, 15 bp, Homo sapiens
gtctgctattttgtt

SEQ ID NO: 440573 - DNA, 15 bp, Homo sapiens
tgtctgctattttgt

SEQ ID NO: 440574 - DNA, 15 bp, Homo sapiens
gtgtctgctattttg

SEQ ID NO: 440575 - DNA, 15 bp, Homo sapiens
cgtgtctgctatttt

SEQ ID NO: 440576 - DNA, 15 bp, Homo sapiens
ccgtgtctgctattt

SEQ ID NO: 440577 - DNA, 15 bp, Homo sapiens
accgtgtctgctatt

SEQ ID NO: 440578 - DNA, 15 bp, Homo sapiens
gaccgtgtctgctat

SEQ ID NO: 440579 - DNA, 15 bp, Homo sapiens
ggaccgtgtctgcta

SEQ ID NO: 440580 - DNA, 15 bp, Homo sapiens
aggaccgtgtctgct

SEQ ID NO: 440581 - DNA, 15 bp, Homo sapiens
aaggaccgtgtctgc

SEQ ID NO: 440582 - DNA, 15 bp, Homo sapiens
caaggaccgtgtctg

SEQ ID NO: 440583 - DNA, 15 bp, Homo sapiens
gcaaggaccgtgtct

SEQ ID NO: 440584 - DNA, 15 bp, Homo sapiens
ggcaaggaccgtgtc

SEQ ID NO: 440585 - DNA, 15 bp, Homo sapiens
aggcaaggaccgtgt

SEQ ID NO: 440586 - DNA, 15 bp, Homo sapiens
aaggcaaggaccgtg

SEQ ID NO: 440587 - DNA, 15 bp, Homo sapiens
gaaggcaaggaccgt

SEQ ID NO: 440588 - DNA, 15 bp, Homo sapiens
tgaaggcaaggaccg

SEQ ID NO: 440589 - DNA, 15 bp, Homo sapiens
atgaaggcaaggacc

SEQ ID NO: 440590 - DNA, 15 bp, Homo sapiens
catgaaggcaaggac

SEQ ID NO: 440591 - DNA, 15 bp, Homo sapiens
ccatgaaggcaagga

SEQ ID NO: 440592 - DNA, 15 bp, Homo sapiens
tccatgaaggcaagg

SEQ ID NO: 440593 - DNA, 15 bp, Homo sapiens
ctccatgaaggcaag

SEQ ID NO: 440594 - DNA, 15 bp, Homo sapiens
gctccatgaaggcaa

SEQ ID NO: 440595 - DNA, 15 bp, Homo sapiens
ggctccatgaaggca

SEQ ID NO: 440596 - DNA, 15 bp, Homo sapiens
aggctccatgaaggc

SEQ ID NO: 440597 - DNA, 15 bp, Homo sapiens
taggctccatgaagg

SEQ ID NO: 440598 - DNA, 15 bp, Homo sapiens
ataggctccatgaag

SEQ ID NO: 440599 - DNA, 15 bp, Homo sapiens
tataggctccatgaa

SEQ ID NO: 440600 - DNA, 15 bp, Homo sapiens
ctataggctccatga

SEQ ID NO: 440601 - DNA, 15 bp, Homo sapiens
actataggctccatg

SEQ ID NO: 440602 - DNA, 15 bp, Homo sapiens
gactataggctccat

SEQ ID NO: 440603 - DNA, 15 bp, Homo sapiens
agactataggctcca

SEQ ID NO: 440604 - DNA, 15 bp, Homo sapiens
cagactataggctcc

SEQ ID NO: 440605 - DNA, 15 bp, Homo sapiens
acagactataggctc

SEQ ID NO: 440606 - DNA, 15 bp, Homo sapiens
tacagactataggct

SEQ ID NO: 440607 - DNA, 15 bp, Homo sapiens
ctacagactataggc

SEQ ID NO: 440608 - DNA, 15 bp, Homo sapiens
actacagactatagg

SEQ ID NO: 440609 - DNA, 15 bp, Homo sapiens
gactacagactatag

SEQ ID NO: 440610 - DNA, 15 bp, Homo sapiens
tgactacagactata

SEQ ID NO: 440611 - DNA, 15 bp, Homo sapiens
gtgactacagactat

SEQ ID NO: 440612 - DNA, 15 bp, Homo sapiens
tgtgactacagacta

SEQ ID NO: 440613 - DNA, 15 bp, Homo sapiens
ttgtgactacagact

SEQ ID NO: 440614 - DNA, 15 bp, Homo sapiens
gttgtgactacagac

SEQ ID NO: 440615 - DNA, 15 bp, Homo sapiens
tgttgtgactacaga

SEQ ID NO: 440616 - DNA, 15 bp, Homo sapiens
ctgttgtgactacag

SEQ ID NO: 440617 - DNA, 15 bp, Homo sapiens
actgttgtgactaca

SEQ ID NO: 440618 - DNA, 15 bp, Homo sapiens
tactgttgtgactac

SEQ ID NO: 440619 - DNA, 15 bp, Homo sapiens
ctactgttgtgacta

SEQ ID NO: 440620 - DNA, 15 bp, Homo sapiens
actactgttgtgact

SEQ ID NO: 440621 - DNA, 15 bp, Homo sapiens
tactactgttgtgac

SEQ ID NO: 440622 - DNA, 15 bp, Homo sapiens
atactactgttgtga

SEQ ID NO: 440623 - DNA, 15 bp, Homo sapiens
tatactactgttgtg

SEQ ID NO: 440624 - DNA, 15 bp, Homo sapiens
ttatactactgttgt

SEQ ID NO: 440625 - DNA, 15 bp, Homo sapiens
attatactactgttg

SEQ ID NO: 440626 - DNA, 15 bp, Homo sapiens
aattatactactgtt

SEQ ID NO: 440627 - DNA, 15 bp, Homo sapiens
taattatactactgt

SEQ ID NO: 440628 - DNA, 15 bp, Homo sapiens
gtaattatactactg

SEQ ID NO: 440629 - DNA, 15 bp, Homo sapiens
tgtaattatactact

SEQ ID NO: 440630 - DNA, 15 bp, Homo sapiens
ttgtaattatactac

SEQ ID NO: 440631 - DNA, 15 bp, Homo sapiens
tttgtaattatacta

SEQ ID NO: 440632 - DNA, 15 bp, Homo sapiens
ctttgtaattatact

SEQ ID NO: 440633 - DNA, 15 bp, Homo sapiens
actttgtaattatac

SEQ ID NO: 440634 - DNA, 15 bp, Homo sapiens
tactttgtaattata

SEQ ID NO: 440635 - DNA, 15 bp, Homo sapiens
ctactttgtaattat

SEQ ID NO: 440636 - DNA, 15 bp, Homo sapiens
cctactttgtaatta

SEQ ID NO: 440637 - DNA, 15 bp, Homo sapiens
ccctactttgtaatt

SEQ ID NO: 440638 - DNA, 15 bp, Homo sapiens
accctactttgtaat

SEQ ID NO: 440639 - DNA, 15 bp, Homo sapiens
taccctactttgtaa

SEQ ID NO: 440640 - DNA, 15 bp, Homo sapiens
ctaccctactttgta

SEQ ID NO: 440641 - DNA, 15 bp, Homo sapiens
actaccctactttgt

SEQ ID NO: 440642 - DNA, 15 bp, Homo sapiens
cactaccctactttg

SEQ ID NO: 440643 - DNA, 15 bp, Homo sapiens
gcactaccctacttt

SEQ ID NO: 440644 - DNA, 15 bp, Homo sapiens
agcactaccctactt

SEQ ID NO: 440645 - DNA, 15 bp, Homo sapiens
tagcactaccctact

SEQ ID NO: 440646 - DNA, 15 bp, Homo sapiens
atagcactaccctac

SEQ ID NO: 440647 - DNA, 15 bp, Homo sapiens
catagcactacccta

SEQ ID NO: 440648 - DNA, 15 bp, Homo sapiens
tcatagcactaccct

SEQ ID NO: 440649 - DNA, 15 bp, Homo sapiens
ttcatagcactaccc

SEQ ID NO: 440650 - DNA, 15 bp, Homo sapiens
cttcatagcactacc

SEQ ID NO: 440651 - DNA, 15 bp, Homo sapiens
ccttcatagcactac

SEQ ID NO: 440652 - DNA, 15 bp, Homo sapiens
cccttcatagcacta

SEQ ID NO: 440653 - DNA, 15 bp, Homo sapiens
ccccttcatagcact

SEQ ID NO: 440654 - DNA, 15 bp, Homo sapiens
tccccttcatagcac

SEQ ID NO: 440655 - DNA, 15 bp, Homo sapiens
ttccccttcatagca

SEQ ID NO: 440656 - DNA, 15 bp, Homo sapiens
cttccccttcatagc

SEQ ID NO: 440657 - DNA, 15 bp, Homo sapiens
gcttccccttcatag

SEQ ID NO: 440658 - DNA, 15 bp, Homo sapiens
agcttccccttcata

SEQ ID NO: 440659 - DNA, 15 bp, Homo sapiens
cagcttccccttcat

SEQ ID NO: 440660 - DNA, 15 bp, Homo sapiens
tcagcttccccttca

SEQ ID NO: 440661 - DNA, 15 bp, Homo sapiens
ctcagcttccccttc

SEQ ID NO: 440662 - DNA, 15 bp, Homo sapiens
cctcagcttcccctt

SEQ ID NO: 440663 - DNA, 15 bp, Homo sapiens
tcctcagcttcccct

SEQ ID NO: 440664 - DNA, 15 bp, Homo sapiens
atcctcagcttcccc

SEQ ID NO: 440665 - DNA, 15 bp, Homo sapiens
catcctcagcttccc

SEQ ID NO: 440666 - DNA, 15 bp, Homo sapiens
gcatcctcagcttcc

SEQ ID NO: 440667 - DNA, 15 bp, Homo sapiens
agcatcctcagcttc

SEQ ID NO: 440668 - DNA, 15 bp, Homo sapiens
cagcatcctcagctt

SEQ ID NO: 440669 - DNA, 15 bp, Homo sapiens
gcagcatcctcagct

SEQ ID NO: 440670 - DNA, 15 bp, Homo sapiens
agcagcatcctcagc

SEQ ID NO: 440671 - DNA, 15 bp, Homo sapiens
tagcagcatcctcag

SEQ ID NO: 440672 - DNA, 15 bp, Homo sapiens
atagcagcatcctca

SEQ ID NO: 440673 - DNA, 15 bp, Homo sapiens
catagcagcatcctc

SEQ ID NO: 440674 - DNA, 15 bp, Homo sapiens
tcatagcagcatcct

SEQ ID NO: 440675 - DNA, 15 bp, Homo sapiens
ctcatagcagcatcc

SEQ ID NO: 440676 - DNA, 15 bp, Homo sapiens
tctcatagcagcatc

SEQ ID NO: 440677 - DNA, 15 bp, Homo sapiens
atctcatagcagcat

SEQ ID NO: 440678 - DNA, 15 bp, Homo sapiens
tatctcatagcagca

SEQ ID NO: 440679 - DNA, 15 bp, Homo sapiens
atatctcatagcagc

SEQ ID NO: 440680 - DNA, 15 bp, Homo sapiens
aatatctcatagcag

SEQ ID NO: 440681 - DNA, 15 bp, Homo sapiens
taatatctcatagca

SEQ ID NO: 440682 - DNA, 15 bp, Homo sapiens
gtaatatctcatagc

SEQ ID NO: 440683 - DNA, 15 bp, Homo sapiens
cgtaatatctcatag

SEQ ID NO: 440684 - DNA, 15 bp, Homo sapiens
ccgtaatatctcata

SEQ ID NO: 440685 - DNA, 15 bp, Homo sapiens
gccgtaatatctcat

SEQ ID NO: 440686 - DNA, 15 bp, Homo sapiens
tgccgtaatatctca

SEQ ID NO: 440687 - DNA, 15 bp, Homo sapiens
atgccgtaatatctc

SEQ ID NO: 440688 - DNA, 15 bp, Homo sapiens
catgccgtaatatct

SEQ ID NO: 440689 - DNA, 15 bp, Homo sapiens
tcatgccgtaatatc

SEQ ID NO: 440690 - DNA, 15 bp, Homo sapiens
atcatgccgtaatat

SEQ ID NO: 440691 - DNA, 15 bp, Homo sapiens
catcatgccgtaata

SEQ ID NO: 440692 - DNA, 15 bp, Homo sapiens
ccatcatgccgtaat

SEQ ID NO: 440693 - DNA, 15 bp, Homo sapiens
cccatcatgccgtaa

SEQ ID NO: 440694 - DNA, 15 bp, Homo sapiens
ccccatcatgccgta

SEQ ID NO: 440695 - DNA, 15 bp, Homo sapiens
tccccatcatgccgt

SEQ ID NO: 440696 - DNA, 15 bp, Homo sapiens
ttccccatcatgccg

SEQ ID NO: 440697 - DNA, 15 bp, Homo sapiens
attccccatcatgcc

SEQ ID NO: 440698 - DNA, 15 bp, Homo sapiens
aattccccatcatgc

SEQ ID NO: 440699 - DNA, 15 bp, Homo sapiens
aaattccccatcatg

SEQ ID NO: 440700 - DNA, 15 bp, Homo sapiens
gaaattccccatcat

SEQ ID NO: 440701 - DNA, 15 bp, Homo sapiens
tgaaattccccatca

SEQ ID NO: 440702 - DNA, 15 bp, Homo sapiens
ttgaaattccccatc

SEQ ID NO: 440703 - DNA, 15 bp, Homo sapiens
tttgaaattccccat

SEQ ID NO: 440704 - DNA, 15 bp, Homo sapiens
ctttgaaattcccca

SEQ ID NO: 440705 - DNA, 15 bp, Homo sapiens
tctttgaaattcccc

SEQ ID NO: 440706 - DNA, 15 bp, Homo sapiens
gtctttgaaattccc

SEQ ID NO: 440707 - DNA, 15 bp, Homo sapiens
ggtctttgaaattcc

SEQ ID NO: 440708 - DNA, 15 bp, Homo sapiens
aggtctttgaaattc

SEQ ID NO: 440709 - DNA, 15 bp, Homo sapiens
aaggtctttgaaatt

SEQ ID NO: 440710 - DNA, 15 bp, Homo sapiens
aaaggtctttgaaat

SEQ ID NO: 440711 - DNA, 15 bp, Homo sapiens
gaaaggtctttgaaa

SEQ ID NO: 440712 - DNA, 15 bp, Homo sapiens
agaaaggtctttgaa

SEQ ID NO: 440713 - DNA, 15 bp, Homo sapiens
cagaaaggtctttga

SEQ ID NO: 440714 - DNA, 15 bp, Homo sapiens
acagaaaggtctttg

SEQ ID NO: 440715 - DNA, 15 bp, Homo sapiens
cacagaaaggtcttt

SEQ ID NO: 440716 - DNA, 15 bp, Homo sapiens
acacagaaaggtctt

SEQ ID NO: 440717 - DNA, 15 bp, Homo sapiens
tacacagaaaggtct

SEQ ID NO: 440718 - DNA, 15 bp, Homo sapiens
ttacacagaaaggtc

SEQ ID NO: 440719 - DNA, 15 bp, Homo sapiens
tttacacagaaaggt

SEQ ID NO: 440720 - DNA, 15 bp, Homo sapiens
atttacacagaaagg

SEQ ID NO: 440721 - DNA, 15 bp, Homo sapiens
aatttacacagaaag

SEQ ID NO: 440722 - DNA, 15 bp, Homo sapiens
taatttacacagaaa

SEQ ID NO: 440723 - DNA, 15 bp, Homo sapiens
ttaatttacacagaa

SEQ ID NO: 440724 - DNA, 15 bp, Homo sapiens
tttaatttacacaga

SEQ ID NO: 440725 - DNA, 15 bp, Homo sapiens
ttttaatttacacag

SEQ ID NO: 440726 - DNA, 15 bp, Homo sapiens
attttaatttacaca

SEQ ID NO: 440727 - DNA, 15 bp, Homo sapiens
aattttaatttacac

SEQ ID NO: 440728 - DNA, 15 bp, Homo sapiens
taattttaatttaca

SEQ ID NO: 440729 - DNA, 15 bp, Homo sapiens
ctaattttaatttac

SEQ ID NO: 440730 - DNA, 15 bp, Homo sapiens
cctaattttaattta

SEQ ID NO: 440731 - DNA, 15 bp, Homo sapiens
acctaattttaattt

SEQ ID NO: 440732 - DNA, 15 bp, Homo sapiens
gacctaattttaatt

SEQ ID NO: 440733 - DNA, 15 bp, Homo sapiens
tgacctaattttaat

SEQ ID NO: 440734 - DNA, 15 bp, Homo sapiens
ttgacctaattttaa

SEQ ID NO: 440735 - DNA, 15 bp, Homo sapiens
cttgacctaatttta

SEQ ID NO: 440736 - DNA, 15 bp, Homo sapiens
tcttgacctaatttt

SEQ ID NO: 440737 - DNA, 15 bp, Homo sapiens
gtcttgacctaattt

SEQ ID NO: 440738 - DNA, 15 bp, Homo sapiens
ggtcttgacctaatt

SEQ ID NO: 440739 - DNA, 15 bp, Homo sapiens
tggtcttgacctaat

SEQ ID NO: 440740 - DNA, 15 bp, Homo sapiens
ctggtcttgacctaa

SEQ ID NO: 440741 - DNA, 15 bp, Homo sapiens
tctggtcttgaccta

SEQ ID NO: 440742 - DNA, 15 bp, Homo sapiens
ctctggtcttgacct

SEQ ID NO: 440743 - DNA, 15 bp, Homo sapiens
cctctggtcttgacc

SEQ ID NO: 440744 - DNA, 15 bp, Homo sapiens
tcctctggtcttgac

SEQ ID NO: 440745 - DNA, 15 bp, Homo sapiens
atcctctggtcttga

SEQ ID NO: 440746 - DNA, 15 bp, Homo sapiens
catcctctggtcttg

SEQ ID NO: 440747 - DNA, 15 bp, Homo sapiens
acatcctctggtctt

SEQ ID NO: 440748 - DNA, 15 bp, Homo sapiens
aacatcctctggtct

SEQ ID NO: 440749 - DNA, 15 bp, Homo sapiens
gaacatcctctggtc

SEQ ID NO: 440750 - DNA, 15 bp, Homo sapiens
tgaacatcctctggt

SEQ ID NO: 440751 - DNA, 15 bp, Homo sapiens
ttgaacatcctctgg

SEQ ID NO: 440752 - DNA, 15 bp, Homo sapiens
cttgaacatcctctg

SEQ ID NO: 440753 - DNA, 15 bp, Homo sapiens
tcttgaacatcctct

SEQ ID NO: 440754 - DNA, 15 bp, Homo sapiens
ttcttgaacatcctc

SEQ ID NO: 440755 - DNA, 15 bp, Homo sapiens
attcttgaacatcct

SEQ ID NO: 440756 - DNA, 15 bp, Homo sapiens
aattcttgaacatcc

SEQ ID NO: 440757 - DNA, 15 bp, Homo sapiens
taattcttgaacatc

SEQ ID NO: 440758 - DNA, 15 bp, Homo sapiens
ctaattcttgaacat

SEQ ID NO: 440759 - DNA, 15 bp, Homo sapiens
gctaattcttgaaca

SEQ ID NO: 440760 - DNA, 15 bp, Homo sapiens
agctaattcttgaac

SEQ ID NO: 440761 - DNA, 15 bp, Homo sapiens
tagctaattcttgaa

SEQ ID NO: 440762 - DNA, 15 bp, Homo sapiens
ctagctaattcttga

SEQ ID NO: 440763 - DNA, 15 bp, Homo sapiens
cctagctaattcttg

SEQ ID NO: 440764 - DNA, 15 bp, Homo sapiens
acctagctaattctt

SEQ ID NO: 440765 - DNA, 15 bp, Homo sapiens
tacctagctaattct

SEQ ID NO: 440766 - DNA, 15 bp, Homo sapiens
ttacctagctaattc

SEQ ID NO: 440767 - DNA, 15 bp, Homo sapiens
tttacctagctaatt

SEQ ID NO: 440768 - DNA, 15 bp, Homo sapiens
ttttacctagctaat

SEQ ID NO: 440769 - DNA, 15 bp, Homo sapiens
tttttacctagctaa

SEQ ID NO: 440770 - DNA, 15 bp, Homo sapiens
ctttttacctagcta

SEQ ID NO: 440771 - DNA, 15 bp, Homo sapiens
gctttttacctagct

SEQ ID NO: 440772 - DNA, 15 bp, Homo sapiens
agctttttacctagc

SEQ ID NO: 440773 - DNA, 15 bp, Homo sapiens
tagctttttacctag

SEQ ID NO: 440774 - DNA, 15 bp, Homo sapiens
ctagctttttaccta

SEQ ID NO: 440775 - DNA, 15 bp, Homo sapiens
cctagctttttacct

SEQ ID NO: 440776 - DNA, 15 bp, Homo sapiens
ccctagctttttacc

SEQ ID NO: 440777 - DNA, 15 bp, Homo sapiens
cccctagctttttac

SEQ ID NO: 440778 - DNA, 15 bp, Homo sapiens
ccccctagcttttta

SEQ ID NO: 440779 - DNA, 15 bp, Homo sapiens
tccccctagcttttt

SEQ ID NO: 440780 - DNA, 15 bp, Homo sapiens
ctccccctagctttt

SEQ ID NO: 440781 - DNA, 15 bp, Homo sapiens
tctccccctagcttt

SEQ ID NO: 440782 - DNA, 15 bp, Homo sapiens
ttctccccctagctt

SEQ ID NO: 440783 - DNA, 15 bp, Homo sapiens
attctccccctagct

SEQ ID NO: 440784 - DNA, 15 bp, Homo sapiens
tattctccccctagc

SEQ ID NO: 440785 - DNA, 15 bp, Homo sapiens
atattctccccctag

SEQ ID NO: 440786 - DNA, 15 bp, Homo sapiens
aatattctcccccta

SEQ ID NO: 440787 - DNA, 15 bp, Homo sapiens
aaatattctccccct

SEQ ID NO: 440788 - DNA, 15 bp, Homo sapiens
gaaatattctccccc

SEQ ID NO: 440789 - DNA, 15 bp, Homo sapiens
tgaaatattctcccc

SEQ ID NO: 440790 - DNA, 15 bp, Homo sapiens
ctgaaatattctccc

SEQ ID NO: 440791 - DNA, 15 bp, Homo sapiens
tctgaaatattctcc

SEQ ID NO: 440792 - DNA, 15 bp, Homo sapiens
ttctgaaatattctc

SEQ ID NO: 440793 - DNA, 15 bp, Homo sapiens
attctgaaatattct

SEQ ID NO: 440794 - DNA, 15 bp, Homo sapiens
cattctgaaatattc

SEQ ID NO: 440795 - DNA, 15 bp, Homo sapiens
tcattctgaaatatt

SEQ ID NO: 440796 - DNA, 15 bp, Homo sapiens
ctcattctgaaatat

SEQ ID NO: 440797 - DNA, 15 bp, Homo sapiens
tctcattctgaaata

SEQ ID NO: 440798 - DNA, 15 bp, Homo sapiens
atctcattctgaaat

SEQ ID NO: 440799 - DNA, 15 bp, Homo sapiens
tatctcattctgaaa

SEQ ID NO: 440800 - DNA, 15 bp, Homo sapiens
gtatctcattctgaa

SEQ ID NO: 440801 - DNA, 15 bp, Homo sapiens
agtatctcattctga

SEQ ID NO: 440802 - DNA, 15 bp, Homo sapiens
tagtatctcattctg

SEQ ID NO: 440803 - DNA, 15 bp, Homo sapiens
gtagtatctcattct

SEQ ID NO: 440804 - DNA, 15 bp, Homo sapiens
ggtagtatctcattc

SEQ ID NO: 440805 - DNA, 15 bp, Homo sapiens
tggtagtatctcatt

SEQ ID NO: 440806 - DNA, 15 bp, Homo sapiens
atggtagtatctcat

SEQ ID NO: 440807 - DNA, 15 bp, Homo sapiens
catggtagtatctca

SEQ ID NO: 440808 - DNA, 15 bp, Homo sapiens
acatggtagtatctc

SEQ ID NO: 440809 - DNA, 15 bp, Homo sapiens
cacatggtagtatct

SEQ ID NO: 440810 - DNA, 15 bp, Homo sapiens
gcacatggtagtatc

SEQ ID NO: 440811 - DNA, 15 bp, Homo sapiens
ggcacatggtagtat

SEQ ID NO: 440812 - DNA, 15 bp, Homo sapiens
tggcacatggtagta

SEQ ID NO: 440813 - DNA, 15 bp, Homo sapiens
ttggcacatggtagt

SEQ ID NO: 440814 - DNA, 15 bp, Homo sapiens
attggcacatggtag

SEQ ID NO: 440815 - DNA, 15 bp, Homo sapiens
cattggcacatggta

SEQ ID NO: 440816 - DNA, 15 bp, Homo sapiens
acattggcacatggt

SEQ ID NO: 440817 - DNA, 15 bp, Homo sapiens
aacattggcacatgg

SEQ ID NO: 440818 - DNA, 15 bp, Homo sapiens
gaacattggcacatg

SEQ ID NO: 440819 - DNA, 15 bp, Homo sapiens
agaacattggcacat

SEQ ID NO: 440820 - DNA, 15 bp, Homo sapiens
cagaacattggcaca

SEQ ID NO: 440821 - DNA, 15 bp, Homo sapiens
gcagaacattggcac

SEQ ID NO: 440822 - DNA, 15 bp, Homo sapiens
tgcagaacattggca

SEQ ID NO: 440823 - DNA, 15 bp, Homo sapiens
ctgcagaacattggc

SEQ ID NO: 440824 - DNA, 15 bp, Homo sapiens
gctgcagaacattgg

SEQ ID NO: 440825 - DNA, 15 bp, Homo sapiens
tgctgcagaacattg

SEQ ID NO: 440826 - DNA, 15 bp, Homo sapiens
ttgctgcagaacatt

SEQ ID NO: 440827 - DNA, 15 bp, Homo sapiens
tttgctgcagaacat

SEQ ID NO: 440828 - DNA, 15 bp, Homo sapiens
ttttgctgcagaaca

SEQ ID NO: 440829 - DNA, 15 bp, Homo sapiens
tttttgctgcagaac

SEQ ID NO: 440830 - DNA, 15 bp, Homo sapiens
ttttttgctgcagaa

SEQ ID NO: 440831 - DNA, 15 bp, Homo sapiens
cttttttgctgcaga

SEQ ID NO: 440832 - DNA, 15 bp, Homo sapiens
tcttttttgctgcag

SEQ ID NO: 440833 - DNA, 15 bp, Homo sapiens
ctcttttttgctgca

SEQ ID NO: 440834 - DNA, 15 bp, Homo sapiens
gctcttttttgctgc

SEQ ID NO: 440835 - DNA, 15 bp, Homo sapiens
agctcttttttgctg

SEQ ID NO: 440836 - DNA, 15 bp, Homo sapiens
aagctcttttttgct

SEQ ID NO: 440837 - DNA, 15 bp, Homo sapiens
caagctcttttttgc

SEQ ID NO: 440838 - DNA, 15 bp, Homo sapiens
ccaagctcttttttg

SEQ ID NO: 440839 - DNA, 15 bp, Homo sapiens
accaagctctttttt

SEQ ID NO: 440840 - DNA, 15 bp, Homo sapiens
caccaagctcttttt

SEQ ID NO: 440841 - DNA, 15 bp, Homo sapiens
ccaccaagctctttt

SEQ ID NO: 440842 - DNA, 15 bp, Homo sapiens
accaccaagctcttt

SEQ ID NO: 440843 - DNA, 15 bp, Homo sapiens
aaccaccaagctctt

SEQ ID NO: 440844 - DNA, 15 bp, Homo sapiens
aaaccaccaagctct

SEQ ID NO: 440845 - DNA, 15 bp, Homo sapiens
aaaaccaccaagctc

SEQ ID NO: 440846 - DNA, 15 bp, Homo sapiens
taaaaccaccaagct

SEQ ID NO: 440847 - DNA, 15 bp, Homo sapiens
ctaaaaccaccaagc

SEQ ID NO: 440848 - DNA, 15 bp, Homo sapiens
cctaaaaccaccaag

SEQ ID NO: 440849 - DNA, 15 bp, Homo sapiens
acctaaaaccaccaa

SEQ ID NO: 440850 - DNA, 15 bp, Homo sapiens
tacctaaaaccacca

SEQ ID NO: 440851 - DNA, 15 bp, Homo sapiens
gtacctaaaaccacc

SEQ ID NO: 440852 - DNA, 15 bp, Homo sapiens
agtacctaaaaccac

SEQ ID NO: 440853 - DNA, 15 bp, Homo sapiens
cagtacctaaaacca

SEQ ID NO: 440854 - DNA, 15 bp, Homo sapiens
ccagtacctaaaacc

SEQ ID NO: 440855 - DNA, 15 bp, Homo sapiens
tccagtacctaaaac

SEQ ID NO: 440856 - DNA, 15 bp, Homo sapiens
ttccagtacctaaaa

SEQ ID NO: 440857 - DNA, 15 bp, Homo sapiens
cttccagtacctaaa

SEQ ID NO: 440858 - DNA, 15 bp, Homo sapiens
ccttccagtacctaa

SEQ ID NO: 440859 - DNA, 15 bp, Homo sapiens
gccttccagtaccta

SEQ ID NO: 440860 - DNA, 15 bp, Homo sapiens
ggccttccagtacct

SEQ ID NO: 440861 - DNA, 15 bp, Homo sapiens
tggccttccagtacc

SEQ ID NO: 440862 - DNA, 15 bp, Homo sapiens
ctggccttccagtac

SEQ ID NO: 440863 - DNA, 15 bp, Homo sapiens
actggccttccagta

SEQ ID NO: 440864 - DNA, 15 bp, Homo sapiens
cactggccttccagt

SEQ ID NO: 440865 - DNA, 15 bp, Homo sapiens
acactggccttccag

SEQ ID NO: 440866 - DNA, 15 bp, Homo sapiens
cacactggccttcca

SEQ ID NO: 440867 - DNA, 15 bp, Homo sapiens
acacactggccttcc

SEQ ID NO: 440868 - DNA, 15 bp, Homo sapiens
gacacactggccttc

SEQ ID NO: 440869 - DNA, 15 bp, Homo sapiens
tgacacactggcctt

SEQ ID NO: 440870 - DNA, 15 bp, Homo sapiens
ctgacacactggcct

SEQ ID NO: 440871 - DNA, 15 bp, Homo sapiens
cctgacacactggcc

SEQ ID NO: 440872 - DNA, 15 bp, Homo sapiens
tcctgacacactggc

SEQ ID NO: 440873 - DNA, 15 bp, Homo sapiens
ctcctgacacactgg

SEQ ID NO: 440874 - DNA, 15 bp, Homo sapiens
tctcctgacacactg

SEQ ID NO: 440875 - DNA, 15 bp, Homo sapiens
ttctcctgacacact

SEQ ID NO: 440876 - DNA, 15 bp, Homo sapiens
gttctcctgacacac

SEQ ID NO: 440877 - DNA, 15 bp, Homo sapiens
agttctcctgacaca

SEQ ID NO: 440878 - DNA, 15 bp, Homo sapiens
cagttctcctgacac

SEQ ID NO: 440879 - DNA, 15 bp, Homo sapiens
acagttctcctgaca

SEQ ID NO: 440880 - DNA, 15 bp, Homo sapiens
cacagttctcctgac

SEQ ID NO: 440881 - DNA, 15 bp, Homo sapiens
tcacagttctcctga

SEQ ID NO: 440882 - DNA, 15 bp, Homo sapiens
ttcacagttctcctg

SEQ ID NO: 440883 - DNA, 15 bp, Homo sapiens
attcacagttctcct

SEQ ID NO: 440884 - DNA, 15 bp, Homo sapiens
cattcacagttctcc

SEQ ID NO: 440885 - DNA, 15 bp, Homo sapiens
tcattcacagttctc

SEQ ID NO: 440886 - DNA, 15 bp, Homo sapiens
ctcattcacagttct

SEQ ID NO: 440887 - DNA, 15 bp, Homo sapiens
actcattcacagttc

SEQ ID NO: 440888 - DNA, 15 bp, Homo sapiens
cactcattcacagtt

SEQ ID NO: 440889 - DNA, 15 bp, Homo sapiens
ccactcattcacagt

SEQ ID NO: 440890 - DNA, 15 bp, Homo sapiens
cccactcattcacag

SEQ ID NO: 440891 - DNA, 15 bp, Homo sapiens
tcccactcattcaca

SEQ ID NO: 440892 - DNA, 15 bp, Homo sapiens
ctcccactcattcac

SEQ ID NO: 440893 - DNA, 15 bp, Homo sapiens
tctcccactcattca

SEQ ID NO: 440894 - DNA, 15 bp, Homo sapiens
ctctcccactcattc

SEQ ID NO: 440895 - DNA, 15 bp, Homo sapiens
actctcccactcatt

SEQ ID NO: 440896 - DNA, 15 bp, Homo sapiens
cactctcccactcat

SEQ ID NO: 440897 - DNA, 15 bp, Homo sapiens
ccactctcccactca

SEQ ID NO: 440898 - DNA, 15 bp, Homo sapiens
tccactctcccactc

SEQ ID NO: 440899 - DNA, 15 bp, Homo sapiens
ctccactctcccact

SEQ ID NO: 440900 - DNA, 15 bp, Homo sapiens
gctccactctcccac

SEQ ID NO: 440901 - DNA, 15 bp, Homo sapiens
tgctccactctccca

SEQ ID NO: 440902 - DNA, 15 bp, Homo sapiens
ttgctccactctccc

SEQ ID NO: 440903 - DNA, 15 bp, Homo sapiens
cttgctccactctcc

SEQ ID NO: 440904 - DNA, 15 bp, Homo sapiens
tcttgctccactctc

SEQ ID NO: 440905 - DNA, 15 bp, Homo sapiens
ttcttgctccactct

SEQ ID NO: 440906 - DNA, 15 bp, Homo sapiens
gttcttgctccactc

SEQ ID NO: 440907 - DNA, 15 bp, Homo sapiens
agttcttgctccact

SEQ ID NO: 440908 - DNA, 15 bp, Homo sapiens
tagttcttgctccac

SEQ ID NO: 440909 - DNA, 15 bp, Homo sapiens
atagttcttgctcca

SEQ ID NO: 440910 - DNA, 15 bp, Homo sapiens
tatagttcttgctcc

SEQ ID NO: 440911 - DNA, 15 bp, Homo sapiens
gtatagttcttgctc

SEQ ID NO: 440912 - DNA, 15 bp, Homo sapiens
tgtatagttcttgct

SEQ ID NO: 440913 - DNA, 15 bp, Homo sapiens
ctgtatagttcttgc

SEQ ID NO: 440914 - DNA, 15 bp, Homo sapiens
cctgtatagttcttg

SEQ ID NO: 440915 - DNA, 15 bp, Homo sapiens
ccctgtatagttctt

SEQ ID NO: 440916 - DNA, 15 bp, Homo sapiens
gccctgtatagttct

SEQ ID NO: 440917 - DNA, 15 bp, Homo sapiens
agccctgtatagttc

SEQ ID NO: 440918 - DNA, 15 bp, Homo sapiens
aagccctgtatagtt

SEQ ID NO: 440919 - DNA, 15 bp, Homo sapiens
taagccctgtatagt

SEQ ID NO: 440920 - DNA, 15 bp, Homo sapiens
ctaagccctgtatag

SEQ ID NO: 440921 - DNA, 15 bp, Homo sapiens
tctaagccctgtata

SEQ ID NO: 440922 - DNA, 15 bp, Homo sapiens
atctaagccctgtat

SEQ ID NO: 440923 - DNA, 15 bp, Homo sapiens
aatctaagccctgta

SEQ ID NO: 440924 - DNA, 15 bp, Homo sapiens
aaatctaagccctgt

SEQ ID NO: 440925 - DNA, 15 bp, Homo sapiens
gaaatctaagccctg

SEQ ID NO: 440926 - DNA, 15 bp, Homo sapiens
agaaatctaagccct

SEQ ID NO: 440927 - DNA, 15 bp, Homo sapiens
gagaaatctaagccc

SEQ ID NO: 440928 - DNA, 15 bp, Homo sapiens
agagaaatctaagcc

SEQ ID NO: 440929 - DNA, 15 bp, Homo sapiens
aagagaaatctaagc

SEQ ID NO: 440930 - DNA, 15 bp, Homo sapiens
taagagaaatctaag

SEQ ID NO: 440931 - DNA, 15 bp, Homo sapiens
ttaagagaaatctaa

SEQ ID NO: 440932 - DNA, 15 bp, Homo sapiens
tttaagagaaatcta

SEQ ID NO: 440933 - DNA, 15 bp, Homo sapiens
ttttaagagaaatct

SEQ ID NO: 440934 - DNA, 15 bp, Homo sapiens
attttaagagaaatc

SEQ ID NO: 440935 - DNA, 15 bp, Homo sapiens
cattttaagagaaat

SEQ ID NO: 440936 - DNA, 15 bp, Homo sapiens
acattttaagagaaa

SEQ ID NO: 440937 - DNA, 15 bp, Homo sapiens
tacattttaagagaa

SEQ ID NO: 440938 - DNA, 15 bp, Homo sapiens
ctacattttaagaga

SEQ ID NO: 440939 - DNA, 15 bp, Homo sapiens
actacattttaagag

SEQ ID NO: 440940 - DNA, 15 bp, Homo sapiens
cactacattttaaga

SEQ ID NO: 440941 - DNA, 15 bp, Homo sapiens
tcactacattttaag

SEQ ID NO: 440942 - DNA, 15 bp, Homo sapiens
ctcactacattttaa

SEQ ID NO: 440943 - DNA, 15 bp, Homo sapiens
gctcactacatttta

SEQ ID NO: 440944 - DNA, 15 bp, Homo sapiens
tgctcactacatttt

SEQ ID NO: 440945 - DNA, 15 bp, Homo sapiens
ctgctcactacattt

SEQ ID NO: 440946 - DNA, 15 bp, Homo sapiens
gctgctcactacatt

SEQ ID NO: 440947 - DNA, 15 bp, Homo sapiens
ggctgctcactacat

SEQ ID NO: 440948 - DNA, 15 bp, Homo sapiens
tggctgctcactaca

SEQ ID NO: 440949 - DNA, 15 bp, Homo sapiens
ctggctgctcactac

SEQ ID NO: 440950 - DNA, 15 bp, Homo sapiens
actggctgctcacta

SEQ ID NO: 440951 - DNA, 15 bp, Homo sapiens
gactggctgctcact

SEQ ID NO: 440952 - DNA, 15 bp, Homo sapiens
cgactggctgctcac

SEQ ID NO: 440953 - DNA, 15 bp, Homo sapiens
acgactggctgctca

SEQ ID NO: 440954 - DNA, 15 bp, Homo sapiens
aacgactggctgctc

SEQ ID NO: 440955 - DNA, 15 bp, Homo sapiens
caacgactggctgct

SEQ ID NO: 440956 - DNA, 15 bp, Homo sapiens
ccaacgactggctgc

SEQ ID NO: 440957 - DNA, 15 bp, Homo sapiens
accaacgactggctg

SEQ ID NO: 440958 - DNA, 15 bp, Homo sapiens
aaccaacgactggct

SEQ ID NO: 440959 - DNA, 15 bp, Homo sapiens
aaaccaacgactggc

SEQ ID NO: 440960 - DNA, 15 bp, Homo sapiens
aaaaccaacgactgg

SEQ ID NO: 440961 - DNA, 15 bp, Homo sapiens
taaaaccaacgactg

SEQ ID NO: 440962 - DNA, 15 bp, Homo sapiens
ttaaaaccaacgact

SEQ ID NO: 440963 - DNA, 15 bp, Homo sapiens
cttaaaaccaacgac

SEQ ID NO: 440964 - DNA, 15 bp, Homo sapiens
gcttaaaaccaacga

SEQ ID NO: 440965 - DNA, 15 bp, Homo sapiens
tgcttaaaaccaacg

SEQ ID NO: 440966 - DNA, 15 bp, Homo sapiens
ctgcttaaaaccaac

SEQ ID NO: 440967 - DNA, 15 bp, Homo sapiens
tctgcttaaaaccaa

SEQ ID NO: 440968 - DNA, 15 bp, Homo sapiens
ctctgcttaaaacca

SEQ ID NO: 440969 - DNA, 15 bp, Homo sapiens
actctgcttaaaacc

SEQ ID NO: 440970 - DNA, 15 bp, Homo sapiens
cactctgcttaaaac

SEQ ID NO: 440971 - DNA, 15 bp, Homo sapiens
ccactctgcttaaaa

SEQ ID NO: 440972 - DNA, 15 bp, Homo sapiens
accactctgcttaaa

SEQ ID NO: 440973 - DNA, 15 bp, Homo sapiens
taccactctgcttaa

SEQ ID NO: 440974 - DNA, 15 bp, Homo sapiens
ttaccactctgctta

SEQ ID NO: 440975 - DNA, 15 bp, Homo sapiens
attaccactctgctt

SEQ ID NO: 440976 - DNA, 15 bp, Homo sapiens
tattaccactctgct

SEQ ID NO: 440977 - DNA, 15 bp, Homo sapiens
atattaccactctgc

SEQ ID NO: 440978 - DNA, 15 bp, Homo sapiens
catattaccactctg

SEQ ID NO: 440979 - DNA, 15 bp, Homo sapiens
ccatattaccactct

SEQ ID NO: 440980 - DNA, 15 bp, Homo sapiens
accatattaccactc

SEQ ID NO: 440981 - DNA, 15 bp, Homo sapiens
gaccatattaccact

SEQ ID NO: 440982 - DNA, 15 bp, Homo sapiens
agaccatattaccac

SEQ ID NO: 440983 - DNA, 15 bp, Homo sapiens
cagaccatattacca

SEQ ID NO: 440984 - DNA, 15 bp, Homo sapiens
gcagaccatattacc

SEQ ID NO: 440985 - DNA, 15 bp, Homo sapiens
agcagaccatattac

SEQ ID NO: 440986 - DNA, 15 bp, Homo sapiens
aagcagaccatatta

SEQ ID NO: 440987 - DNA, 15 bp, Homo sapiens
aaagcagaccatatt

SEQ ID NO: 440988 - DNA, 15 bp, Homo sapiens
taaagcagaccatat

SEQ ID NO: 440989 - DNA, 15 bp, Homo sapiens
gtaaagcagaccata

SEQ ID NO: 440990 - DNA, 15 bp, Homo sapiens
tgtaaagcagaccat

SEQ ID NO: 440991 - DNA, 15 bp, Homo sapiens
atgtaaagcagacca

SEQ ID NO: 440992 - DNA, 15 bp, Homo sapiens
tatgtaaagcagacc

SEQ ID NO: 440993 - DNA, 15 bp, Homo sapiens
atatgtaaagcagac

SEQ ID NO: 440994 - DNA, 15 bp, Homo sapiens
aatatgtaaagcaga

SEQ ID NO: 440995 - DNA, 15 bp, Homo sapiens
aaatatgtaaagcag

SEQ ID NO: 440996 - DNA, 15 bp, Homo sapiens
aaaatatgtaaagca

SEQ ID NO: 440997 - DNA, 15 bp, Homo sapiens
taaaatatgtaaagc

SEQ ID NO: 440998 - DNA, 15 bp, Homo sapiens
ttaaaatatgtaaag

SEQ ID NO: 440999 - DNA, 15 bp, Homo sapiens
gttaaaatatgtaaa

SEQ ID NO: 441000 - DNA, 15 bp, Homo sapiens
agttaaaatatgtaa

SEQ ID NO: 441001 - DNA, 15 bp, Homo sapiens
aagttaaaatatgta

SEQ ID NO: 441002 - DNA, 15 bp, Homo sapiens
aaagttaaaatatgt

SEQ ID NO: 441003 - DNA, 15 bp, Homo sapiens
aaaagttaaaatatg

SEQ ID NO: 441004 - DNA, 15 bp, Homo sapiens
taaaagttaaaatat

SEQ ID NO: 441005 - DNA, 15 bp, Homo sapiens
ataaaagttaaaata

SEQ ID NO: 441006 - DNA, 15 bp, Homo sapiens
aataaaagttaaaat

SEQ ID NO: 441007 - DNA, 15 bp, Homo sapiens
gaataaaagttaaaa

SEQ ID NO: 441008 - DNA, 15 bp, Homo sapiens
ggaataaaagttaaa

SEQ ID NO: 441009 - DNA, 15 bp, Homo sapiens
tggaataaaagttaa

SEQ ID NO: 441010 - DNA, 15 bp, Homo sapiens
ctggaataaaagtta

SEQ ID NO: 441011 - DNA, 15 bp, Homo sapiens
gctggaataaaagtt

SEQ ID NO: 441012 - DNA, 15 bp, Homo sapiens
agctggaataaaagt

SEQ ID NO: 441013 - DNA, 15 bp, Homo sapiens
cagctggaataaaag

SEQ ID NO: 441014 - DNA, 15 bp, Homo sapiens
gcagctggaataaaa

SEQ ID NO: 441015 - DNA, 15 bp, Homo sapiens
tgcagctggaataaa

SEQ ID NO: 441016 - DNA, 15 bp, Homo sapiens
atgcagctggaataa

SEQ ID NO: 441017 - DNA, 15 bp, Homo sapiens
gatgcagctggaata

SEQ ID NO: 441018 - DNA, 15 bp, Homo sapiens
tgatgcagctggaat

SEQ ID NO: 441019 - DNA, 15 bp, Homo sapiens
ctgatgcagctggaa

SEQ ID NO: 441020 - DNA, 15 bp, Homo sapiens
actgatgcagctgga

SEQ ID NO: 441021 - DNA, 15 bp, Homo sapiens
gactgatgcagctgg

SEQ ID NO: 441022 - DNA, 15 bp, Homo sapiens
tgactgatgcagctg

SEQ ID NO: 441023 - DNA, 15 bp, Homo sapiens
gtgactgatgcagct

SEQ ID NO: 441024 - DNA, 15 bp, Homo sapiens
ggtgactgatgcagc

SEQ ID NO: 441025 - DNA, 15 bp, Homo sapiens
aggtgactgatgcag

SEQ ID NO: 441026 - DNA, 15 bp, Homo sapiens
gaggtgactgatgca

SEQ ID NO: 441027 - DNA, 15 bp, Homo sapiens
cgaggtgactgatgc

SEQ ID NO: 441028 - DNA, 15 bp, Homo sapiens
tcgaggtgactgatg

SEQ ID NO: 441029 - DNA, 15 bp, Homo sapiens
ctcgaggtgactgat

SEQ ID NO: 441030 - DNA, 15 bp, Homo sapiens
actcgaggtgactga

SEQ ID NO: 441031 - DNA, 15 bp, Homo sapiens
gactcgaggtgactg

SEQ ID NO: 441032 - DNA, 15 bp, Homo sapiens
tgactcgaggtgact

SEQ ID NO: 441033 - DNA, 15 bp, Homo sapiens
atgactcgaggtgac

SEQ ID NO: 441034 - DNA, 15 bp, Homo sapiens
aatgactcgaggtga

SEQ ID NO: 441035 - DNA, 15 bp, Homo sapiens
gaatgactcgaggtg

SEQ ID NO: 441036 - DNA, 15 bp, Homo sapiens
agaatgactcgaggt

SEQ ID NO: 441037 - DNA, 15 bp, Homo sapiens
cagaatgactcgagg

SEQ ID NO: 441038 - DNA, 15 bp, Homo sapiens
acagaatgactcgag

SEQ ID NO: 441039 - DNA, 15 bp, Homo sapiens
aacagaatgactcga

SEQ ID NO: 441040 - DNA, 15 bp, Homo sapiens
aaacagaatgactcg

SEQ ID NO: 441041 - DNA, 15 bp, Homo sapiens
gaaacagaatgactc

SEQ ID NO: 441042 - DNA, 15 bp, Homo sapiens
ggaaacagaatgact

SEQ ID NO: 441043 - DNA, 15 bp, Homo sapiens
gggaaacagaatgac

SEQ ID NO: 441044 - DNA, 15 bp, Homo sapiens
tgggaaacagaatga

SEQ ID NO: 441045 - DNA, 15 bp, Homo sapiens
atgggaaacagaatg

SEQ ID NO: 441046 - DNA, 15 bp, Homo sapiens
tatgggaaacagaat

SEQ ID NO: 441047 - DNA, 15 bp, Homo sapiens
gtatgggaaacagaa

SEQ ID NO: 441048 - DNA, 15 bp, Homo sapiens
tgtatgggaaacaga

SEQ ID NO: 441049 - DNA, 15 bp, Homo sapiens
gtgtatgggaaacag

SEQ ID NO: 441050 - DNA, 15 bp, Homo sapiens
ggtgtatgggaaaca

SEQ ID NO: 441051 - DNA, 15 bp, Homo sapiens
aggtgtatgggaaac

SEQ ID NO: 441052 - DNA, 15 bp, Homo sapiens
aaggtgtatgggaaa

SEQ ID NO: 441053 - DNA, 15 bp, Homo sapiens
caaggtgtatgggaa

SEQ ID NO: 441054 - DNA, 15 bp, Homo sapiens
tcaaggtgtatggga

SEQ ID NO: 441055 - DNA, 15 bp, Homo sapiens
atcaaggtgtatggg

SEQ ID NO: 441056 - DNA, 15 bp, Homo sapiens
catcaaggtgtatgg

SEQ ID NO: 441057 - DNA, 15 bp, Homo sapiens
gcatcaaggtgtatg

SEQ ID NO: 441058 - DNA, 15 bp, Homo sapiens
ggcatcaaggtgtat

SEQ ID NO: 441059 - DNA, 15 bp, Homo sapiens
aggcatcaaggtgta

SEQ ID NO: 441060 - DNA, 15 bp, Homo sapiens
aaggcatcaaggtgt

SEQ ID NO: 441061 - DNA, 15 bp, Homo sapiens
aaaggcatcaaggtg

SEQ ID NO: 441062 - DNA, 15 bp, Homo sapiens
caaaggcatcaaggt

SEQ ID NO: 441063 - DNA, 15 bp, Homo sapiens
gcaaaggcatcaagg

SEQ ID NO: 441064 - DNA, 15 bp, Homo sapiens
agcaaaggcatcaag

SEQ ID NO: 441065 - DNA, 15 bp, Homo sapiens
gagcaaaggcatcaa

SEQ ID NO: 441066 - DNA, 15 bp, Homo sapiens
ggagcaaaggcatca

SEQ ID NO: 441067 - DNA, 15 bp, Homo sapiens
aggagcaaaggcatc

SEQ ID NO: 441068 - DNA, 15 bp, Homo sapiens
caggagcaaaggcat

SEQ ID NO: 441069 - DNA, 15 bp, Homo sapiens
acaggagcaaaggca

SEQ ID NO: 441070 - DNA, 15 bp, Homo sapiens
gacaggagcaaaggc

SEQ ID NO: 441071 - DNA, 15 bp, Homo sapiens
agacaggagcaaagg

SEQ ID NO: 441072 - DNA, 15 bp, Homo sapiens
gagacaggagcaaag

SEQ ID NO: 441073 - DNA, 15 bp, Homo sapiens
agagacaggagcaaa

SEQ ID NO: 441074 - DNA, 15 bp, Homo sapiens
aagagacaggagcaa

SEQ ID NO: 441075 - DNA, 15 bp, Homo sapiens
aaagagacaggagca

SEQ ID NO: 441076 - DNA, 15 bp, Homo sapiens
gaaagagacaggagc

SEQ ID NO: 441077 - DNA, 15 bp, Homo sapiens
agaaagagacaggag

SEQ ID NO: 441078 - DNA, 15 bp, Homo sapiens
gagaaagagacagga

SEQ ID NO: 441079 - DNA, 15 bp, Homo sapiens
ggagaaagagacagg

SEQ ID NO: 441080 - DNA, 15 bp, Homo sapiens
aggagaaagagacag

SEQ ID NO: 441081 - DNA, 15 bp, Homo sapiens
gaggagaaagagaca

SEQ ID NO: 441082 - DNA, 15 bp, Homo sapiens
tgaggagaaagagac

SEQ ID NO: 441083 - DNA, 15 bp, Homo sapiens
gtgaggagaaagaga

SEQ ID NO: 441084 - DNA, 15 bp, Homo sapiens
ggtgaggagaaagag

SEQ ID NO: 441085 - DNA, 15 bp, Homo sapiens
aggtgaggagaaaga

SEQ ID NO: 441086 - DNA, 15 bp, Homo sapiens
caggtgaggagaaag

SEQ ID NO: 441087 - DNA, 15 bp, Homo sapiens
ccaggtgaggagaaa

SEQ ID NO: 441088 - DNA, 15 bp, Homo sapiens
cccaggtgaggagaa

SEQ ID NO: 441089 - DNA, 15 bp, Homo sapiens
ccccaggtgaggaga

SEQ ID NO: 441090 - DNA, 15 bp, Homo sapiens
tccccaggtgaggag

SEQ ID NO: 441091 - DNA, 15 bp, Homo sapiens
gtccccaggtgagga

SEQ ID NO: 441092 - DNA, 15 bp, Homo sapiens
tgtccccaggtgagg

SEQ ID NO: 441093 - DNA, 15 bp, Homo sapiens
gtgtccccaggtgag

SEQ ID NO: 441094 - DNA, 15 bp, Homo sapiens
ggtgtccccaggtga

SEQ ID NO: 441095 - DNA, 15 bp, Homo sapiens
aggtgtccccaggtg

SEQ ID NO: 441096 - DNA, 15 bp, Homo sapiens
aaggtgtccccaggt

SEQ ID NO: 441097 - DNA, 15 bp, Homo sapiens
gaaggtgtccccagg

SEQ ID NO: 441098 - DNA, 15 bp, Homo sapiens
tgaaggtgtccccag

SEQ ID NO: 441099 - DNA, 15 bp, Homo sapiens
gtgaaggtgtcccca

SEQ ID NO: 441100 - DNA, 15 bp, Homo sapiens
ggtgaaggtgtcccc

SEQ ID NO: 441101 - DNA, 15 bp, Homo sapiens
aggtgaaggtgtccc

SEQ ID NO: 441102 - DNA, 15 bp, Homo sapiens
aaggtgaaggtgtcc

SEQ ID NO: 441103 - DNA, 15 bp, Homo sapiens
aaaggtgaaggtgtc

SEQ ID NO: 441104 - DNA, 15 bp, Homo sapiens
aaaaggtgaaggtgt

SEQ ID NO: 441105 - DNA, 15 bp, Homo sapiens
aaaaaggtgaaggtg

SEQ ID NO: 441106 - DNA, 15 bp, Homo sapiens
aaaaaaggtgaaggt

SEQ ID NO: 441107 - DNA, 15 bp, Homo sapiens
taaaaaaggtgaagg

SEQ ID NO: 441108 - DNA, 15 bp, Homo sapiens
gtaaaaaaggtgaag

SEQ ID NO: 441109 - DNA, 15 bp, Homo sapiens
agtaaaaaaggtgaa

SEQ ID NO: 441110 - DNA, 15 bp, Homo sapiens
aagtaaaaaaggtga

SEQ ID NO: 441111 - DNA, 15 bp, Homo sapiens
gaagtaaaaaaggtg

SEQ ID NO: 441112 - DNA, 15 bp, Homo sapiens
agaagtaaaaaaggt

SEQ ID NO: 441113 - DNA, 15 bp, Homo sapiens
cagaagtaaaaaagg

SEQ ID NO: 441114 - DNA, 15 bp, Homo sapiens
ccagaagtaaaaaag

SEQ ID NO: 441115 - DNA, 15 bp, Homo sapiens
cccagaagtaaaaaa

SEQ ID NO: 441116 - DNA, 15 bp, Homo sapiens
tcccagaagtaaaaa

SEQ ID NO: 441117 - DNA, 15 bp, Homo sapiens
ttcccagaagtaaaa

SEQ ID NO: 441118 - DNA, 15 bp, Homo sapiens
attcccagaagtaaa

SEQ ID NO: 441119 - DNA, 15 bp, Homo sapiens
aattcccagaagtaa

SEQ ID NO: 441120 - DNA, 15 bp, Homo sapiens
taattcccagaagta

SEQ ID NO: 441121 - DNA, 15 bp, Homo sapiens
ctaattcccagaagt

SEQ ID NO: 441122 - DNA, 15 bp, Homo sapiens
gctaattcccagaag

SEQ ID NO: 441123 - DNA, 15 bp, Homo sapiens
tgctaattcccagaa

SEQ ID NO: 441124 - DNA, 15 bp, Homo sapiens
gtgctaattcccaga

SEQ ID NO: 441125 - DNA, 15 bp, Homo sapiens
tgtgctaattcccag

SEQ ID NO: 441126 - DNA, 15 bp, Homo sapiens
ctgtgctaattccca

SEQ ID NO: 441127 - DNA, 15 bp, Homo sapiens
gctgtgctaattccc

SEQ ID NO: 441128 - DNA, 15 bp, Homo sapiens
tgctgtgctaattcc

SEQ ID NO: 441129 - DNA, 15 bp, Homo sapiens
gtgctgtgctaattc

SEQ ID NO: 441130 - DNA, 15 bp, Homo sapiens
tgtgctgtgctaatt

SEQ ID NO: 441131 - DNA, 15 bp, Homo sapiens
ctgtgctgtgctaat

SEQ ID NO: 441132 - DNA, 15 bp, Homo sapiens
actgtgctgtgctaa

SEQ ID NO: 441133 - DNA, 15 bp, Homo sapiens
tactgtgctgtgcta

SEQ ID NO: 441134 - DNA, 15 bp, Homo sapiens
ctactgtgctgtgct

SEQ ID NO: 441135 - DNA, 15 bp, Homo sapiens
actactgtgctgtgc

SEQ ID NO: 441136 - DNA, 15 bp, Homo sapiens
gactactgtgctgtg

SEQ ID NO: 441137 - DNA, 15 bp, Homo sapiens
ggactactgtgctgt

SEQ ID NO: 441138 - DNA, 15 bp, Homo sapiens
aggactactgtgctg

SEQ ID NO: 441139 - DNA, 15 bp, Homo sapiens
taggactactgtgct

SEQ ID NO: 441140 - DNA, 15 bp, Homo sapiens
ctaggactactgtgc

SEQ ID NO: 441141 - DNA, 15 bp, Homo sapiens
tctaggactactgtg

SEQ ID NO: 441142 - DNA, 15 bp, Homo sapiens
ttctaggactactgt

SEQ ID NO: 441143 - DNA, 15 bp, Homo sapiens
attctaggactactg

SEQ ID NO: 441144 - DNA, 15 bp, Homo sapiens
cattctaggactact

SEQ ID NO: 441145 - DNA, 15 bp, Homo sapiens
tcattctaggactac

SEQ ID NO: 441146 - DNA, 15 bp, Homo sapiens
ttcattctaggacta

SEQ ID NO: 441147 - DNA, 15 bp, Homo sapiens
gttcattctaggact

SEQ ID NO: 441148 - DNA, 15 bp, Homo sapiens
agttcattctaggac

SEQ ID NO: 441149 - DNA, 15 bp, Homo sapiens
gagttcattctagga

SEQ ID NO: 441150 - DNA, 15 bp, Homo sapiens
agagttcattctagg

SEQ ID NO: 441151 - DNA, 15 bp, Homo sapiens
tagagttcattctag

SEQ ID NO: 441152 - DNA, 15 bp, Homo sapiens
ctagagttcattcta

SEQ ID NO: 441153 - DNA, 15 bp, Homo sapiens
tctagagttcattct

SEQ ID NO: 441154 - DNA, 15 bp, Homo sapiens
ttctagagttcattc

SEQ ID NO: 441155 - DNA, 15 bp, Homo sapiens
gttctagagttcatt

SEQ ID NO: 441156 - DNA, 15 bp, Homo sapiens
ggttctagagttcat

SEQ ID NO: 441157 - DNA, 15 bp, Homo sapiens
tggttctagagttca

SEQ ID NO: 441158 - DNA, 15 bp, Homo sapiens
ttggttctagagttc

SEQ ID NO: 441159 - DNA, 15 bp, Homo sapiens
tttggttctagagtt

SEQ ID NO: 441160 - DNA, 15 bp, Homo sapiens
gtttggttctagagt

SEQ ID NO: 441161 - DNA, 15 bp, Homo sapiens
cgtttggttctagag

SEQ ID NO: 441162 - DNA, 15 bp, Homo sapiens
gcgtttggttctaga

SEQ ID NO: 441163 - DNA, 15 bp, Homo sapiens
agcgtttggttctag

SEQ ID NO: 441164 - DNA, 15 bp, Homo sapiens
aagcgtttggttcta

SEQ ID NO: 441165 - DNA, 15 bp, Homo sapiens
aaagcgtttggttct

SEQ ID NO: 441166 - DNA, 15 bp, Homo sapiens
gaaagcgtttggttc

SEQ ID NO: 441167 - DNA, 15 bp, Homo sapiens
agaaagcgtttggtt

SEQ ID NO: 441168 - DNA, 15 bp, Homo sapiens
tagaaagcgtttggt

SEQ ID NO: 441169 - DNA, 15 bp, Homo sapiens
ctagaaagcgtttgg

SEQ ID NO: 441170 - DNA, 15 bp, Homo sapiens
actagaaagcgtttg

SEQ ID NO: 441171 - DNA, 15 bp, Homo sapiens
cactagaaagcgttt

SEQ ID NO: 441172 - DNA, 15 bp, Homo sapiens
ccactagaaagcgtt

SEQ ID NO: 441173 - DNA, 15 bp, Homo sapiens
gccactagaaagcgt

SEQ ID NO: 441174 - DNA, 15 bp, Homo sapiens
cgccactagaaagcg

SEQ ID NO: 441175 - DNA, 15 bp, Homo sapiens
acgccactagaaagc

SEQ ID NO: 441176 - DNA, 15 bp, Homo sapiens
cacgccactagaaag

SEQ ID NO: 441177 - DNA, 15 bp, Homo sapiens
ccacgccactagaaa

SEQ ID NO: 441178 - DNA, 15 bp, Homo sapiens
accacgccactagaa

SEQ ID NO: 441179 - DNA, 15 bp, Homo sapiens
gaccacgccactaga

SEQ ID NO: 441180 - DNA, 15 bp, Homo sapiens
agaccacgccactag

SEQ ID NO: 441181 - DNA, 15 bp, Homo sapiens
aagaccacgccacta

SEQ ID NO: 441182 - DNA, 15 bp, Homo sapiens
taagaccacgccact

SEQ ID NO: 441183 - DNA, 15 bp, Homo sapiens
ctaagaccacgccac

SEQ ID NO: 441184 - DNA, 15 bp, Homo sapiens
tctaagaccacgcca

SEQ ID NO: 441185 - DNA, 15 bp, Homo sapiens
atctaagaccacgcc

SEQ ID NO: 441186 - DNA, 15 bp, Homo sapiens
tatctaagaccacgc

SEQ ID NO: 441187 - DNA, 15 bp, Homo sapiens
atatctaagaccacg

SEQ ID NO: 441188 - DNA, 15 bp, Homo sapiens
catatctaagaccac

SEQ ID NO: 441189 - DNA, 15 bp, Homo sapiens
acatatctaagacca

SEQ ID NO: 441190 - DNA, 15 bp, Homo sapiens
aacatatctaagacc

SEQ ID NO: 441191 - DNA, 15 bp, Homo sapiens
taacatatctaagac

SEQ ID NO: 441192 - DNA, 15 bp, Homo sapiens
gtaacatatctaaga

SEQ ID NO: 441193 - DNA, 15 bp, Homo sapiens
agtaacatatctaag

SEQ ID NO: 441194 - DNA, 15 bp, Homo sapiens
aagtaacatatctaa

SEQ ID NO: 441195 - DNA, 15 bp, Homo sapiens
taagtaacatatcta

SEQ ID NO: 441196 - DNA, 15 bp, Homo sapiens
ttaagtaacatatct

SEQ ID NO: 441197 - DNA, 15 bp, Homo sapiens
tttaagtaacatatc

SEQ ID NO: 441198 - DNA, 15 bp, Homo sapiens
atttaagtaacatat

SEQ ID NO: 441199 - DNA, 15 bp, Homo sapiens
gatttaagtaacata

SEQ ID NO: 441200 - DNA, 15 bp, Homo sapiens
agatttaagtaacat

SEQ ID NO: 441201 - DNA, 15 bp, Homo sapiens
tagatttaagtaaca

SEQ ID NO: 441202 - DNA, 15 bp, Homo sapiens
atagatttaagtaac

SEQ ID NO: 441203 - DNA, 15 bp, Homo sapiens
gatagatttaagtaa

SEQ ID NO: 441204 - DNA, 15 bp, Homo sapiens
agatagatttaagta

SEQ ID NO: 441205 - DNA, 15 bp, Homo sapiens
cagatagatttaagt

SEQ ID NO: 441206 - DNA, 15 bp, Homo sapiens
acagatagatttaag

SEQ ID NO: 441207 - DNA, 15 bp, Homo sapiens
cacagatagatttaa

SEQ ID NO: 441208 - DNA, 15 bp, Homo sapiens
gcacagatagattta

SEQ ID NO: 441209 - DNA, 15 bp, Homo sapiens
ggcacagatagattt

SEQ ID NO: 441210 - DNA, 15 bp, Homo sapiens
aggcacagatagatt

SEQ ID NO: 441211 - DNA, 15 bp, Homo sapiens
gaggcacagatagat

SEQ ID NO: 441212 - DNA, 15 bp, Homo sapiens
tgaggcacagataga

SEQ ID NO: 441213 - DNA, 15 bp, Homo sapiens
ctgaggcacagatag

SEQ ID NO: 441214 - DNA, 15 bp, Homo sapiens
actgaggcacagata

SEQ ID NO: 441215 - DNA, 15 bp, Homo sapiens
aactgaggcacagat

SEQ ID NO: 441216 - DNA, 15 bp, Homo sapiens
aaactgaggcacaga

SEQ ID NO: 441217 - DNA, 15 bp, Homo sapiens
gaaactgaggcacag

SEQ ID NO: 441218 - DNA, 15 bp, Homo sapiens
ggaaactgaggcaca

SEQ ID NO: 441219 - DNA, 15 bp, Homo sapiens
aggaaactgaggcac

SEQ ID NO: 441220 - DNA, 15 bp, Homo sapiens
aaggaaactgaggca

SEQ ID NO: 441221 - DNA, 15 bp, Homo sapiens
aaaggaaactgaggc

SEQ ID NO: 441222 - DNA, 15 bp, Homo sapiens
caaaggaaactgagg

SEQ ID NO: 441223 - DNA, 15 bp, Homo sapiens
gcaaaggaaactgag

SEQ ID NO: 441224 - DNA, 15 bp, Homo sapiens
tgcaaaggaaactga

SEQ ID NO: 441225 - DNA, 15 bp, Homo sapiens
ctgcaaaggaaactg

SEQ ID NO: 441226 - DNA, 15 bp, Homo sapiens
tctgcaaaggaaact

SEQ ID NO: 441227 - DNA, 15 bp, Homo sapiens
ttctgcaaaggaaac

SEQ ID NO: 441228 - DNA, 15 bp, Homo sapiens
cttctgcaaaggaaa

SEQ ID NO: 441229 - DNA, 15 bp, Homo sapiens
acttctgcaaaggaa

SEQ ID NO: 441230 - DNA, 15 bp, Homo sapiens
cacttctgcaaagga

SEQ ID NO: 441231 - DNA, 15 bp, Homo sapiens
ccacttctgcaaagg

SEQ ID NO: 441232 - DNA, 15 bp, Homo sapiens
cccacttctgcaaag

SEQ ID NO: 441233 - DNA, 15 bp, Homo sapiens
tcccacttctgcaaa

SEQ ID NO: 441234 - DNA, 15 bp, Homo sapiens
atcccacttctgcaa

SEQ ID NO: 441235 - DNA, 15 bp, Homo sapiens
tatcccacttctgca

SEQ ID NO: 441236 - DNA, 15 bp, Homo sapiens
atatcccacttctgc

SEQ ID NO: 441237 - DNA, 15 bp, Homo sapiens
tatatcccacttctg

SEQ ID NO: 441238 - DNA, 15 bp, Homo sapiens
ttatatcccacttct

SEQ ID NO: 441239 - DNA, 15 bp, Homo sapiens
attatatcccacttc

SEQ ID NO: 441240 - DNA, 15 bp, Homo sapiens
tattatatcccactt

SEQ ID NO: 441241 - DNA, 15 bp, Homo sapiens
atattatatcccact

SEQ ID NO: 441242 - DNA, 15 bp, Homo sapiens
gatattatatcccac

SEQ ID NO: 441243 - DNA, 15 bp, Homo sapiens
tgatattatatccca

SEQ ID NO: 441244 - DNA, 15 bp, Homo sapiens
ttgatattatatccc

SEQ ID NO: 441245 - DNA, 15 bp, Homo sapiens
cttgatattatatcc

SEQ ID NO: 441246 - DNA, 15 bp, Homo sapiens
ccttgatattatatc

SEQ ID NO: 441247 - DNA, 15 bp, Homo sapiens
tccttgatattatat

SEQ ID NO: 441248 - DNA, 15 bp, Homo sapiens
ctccttgatattata

SEQ ID NO: 441249 - DNA, 15 bp, Homo sapiens
tctccttgatattat

SEQ ID NO: 441250 - DNA, 15 bp, Homo sapiens
atctccttgatatta

SEQ ID NO: 441251 - DNA, 15 bp, Homo sapiens
catctccttgatatt

SEQ ID NO: 441252 - DNA, 15 bp, Homo sapiens
ccatctccttgatat

SEQ ID NO: 441253 - DNA, 15 bp, Homo sapiens
gccatctccttgata

SEQ ID NO: 441254 - DNA, 15 bp, Homo sapiens
tgccatctccttgat

SEQ ID NO: 441255 - DNA, 15 bp, Homo sapiens
atgccatctccttga

SEQ ID NO: 441256 - DNA, 15 bp, Homo sapiens
catgccatctccttg

SEQ ID NO: 441257 - DNA, 15 bp, Homo sapiens
acatgccatctcctt

SEQ ID NO: 441258 - DNA, 15 bp, Homo sapiens
cacatgccatctcct

SEQ ID NO: 441259 - DNA, 15 bp, Homo sapiens
gcacatgccatctcc

SEQ ID NO: 441260 - DNA, 15 bp, Homo sapiens
ggcacatgccatctc

SEQ ID NO: 441261 - DNA, 15 bp, Homo sapiens
aggcacatgccatct

SEQ ID NO: 441262 - DNA, 15 bp, Homo sapiens
taggcacatgccatc

SEQ ID NO: 441263 - DNA, 15 bp, Homo sapiens
ttaggcacatgccat

SEQ ID NO: 441264 - DNA, 15 bp, Homo sapiens
gttaggcacatgcca

SEQ ID NO: 441265 - DNA, 15 bp, Homo sapiens
ggttaggcacatgcc

SEQ ID NO: 441266 - DNA, 15 bp, Homo sapiens
gggttaggcacatgc

SEQ ID NO: 441267 - DNA, 15 bp, Homo sapiens
tgggttaggcacatg

SEQ ID NO: 441268 - DNA, 15 bp, Homo sapiens
gtgggttaggcacat

SEQ ID NO: 441269 - DNA, 15 bp, Homo sapiens
tgtgggttaggcaca

SEQ ID NO: 441270 - DNA, 15 bp, Homo sapiens
ttgtgggttaggcac

SEQ ID NO: 441271 - DNA, 15 bp, Homo sapiens
attgtgggttaggca

SEQ ID NO: 441272 - DNA, 15 bp, Homo sapiens
tattgtgggttaggc

SEQ ID NO: 441273 - DNA, 15 bp, Homo sapiens
ttattgtgggttagg

SEQ ID NO: 441274 - DNA, 15 bp, Homo sapiens
attattgtgggttag

SEQ ID NO: 441275 - DNA, 15 bp, Homo sapiens
aattattgtgggtta

SEQ ID NO: 441276 - DNA, 15 bp, Homo sapiens
gaattattgtgggtt

SEQ ID NO: 441277 - DNA, 15 bp, Homo sapiens
ggaattattgtgggt

SEQ ID NO: 441278 - DNA, 15 bp, Homo sapiens
aggaattattgtggg

SEQ ID NO: 441279 - DNA, 15 bp, Homo sapiens
taggaattattgtgg

SEQ ID NO: 441280 - DNA, 15 bp, Homo sapiens
gtaggaattattgtg

SEQ ID NO: 441281 - DNA, 15 bp, Homo sapiens
tgtaggaattattgt

SEQ ID NO: 441282 - DNA, 15 bp, Homo sapiens
ttgtaggaattattg

SEQ ID NO: 441283 - DNA, 15 bp, Homo sapiens
tttgtaggaattatt

SEQ ID NO: 441284 - DNA, 15 bp, Homo sapiens
ttttgtaggaattat

SEQ ID NO: 441285 - DNA, 15 bp, Homo sapiens
cttttgtaggaatta

SEQ ID NO: 441286 - DNA, 15 bp, Homo sapiens
acttttgtaggaatt

SEQ ID NO: 441287 - DNA, 15 bp, Homo sapiens
cacttttgtaggaat

SEQ ID NO: 441288 - DNA, 15 bp, Homo sapiens
acacttttgtaggaa

SEQ ID NO: 441289 - DNA, 15 bp, Homo sapiens
aacacttttgtagga

SEQ ID NO: 441290 - DNA, 15 bp, Homo sapiens
aaacacttttgtagg

SEQ ID NO: 441291 - DNA, 15 bp, Homo sapiens
caaacacttttgtag

SEQ ID NO: 441292 - DNA, 15 bp, Homo sapiens
gcaaacacttttgta

SEQ ID NO: 441293 - DNA, 15 bp, Homo sapiens
agcaaacacttttgt

SEQ ID NO: 441294 - DNA, 15 bp, Homo sapiens
tagcaaacacttttg

SEQ ID NO: 441295 - DNA, 15 bp, Homo sapiens
atagcaaacactttt

SEQ ID NO: 441296 - DNA, 15 bp, Homo sapiens
aatagcaaacacttt

SEQ ID NO: 441297 - DNA, 15 bp, Homo sapiens
taatagcaaacactt

SEQ ID NO: 441298 - DNA, 15 bp, Homo sapiens
ataatagcaaacact

SEQ ID NO: 441299 - DNA, 15 bp, Homo sapiens
aataatagcaaacac

SEQ ID NO: 441300 - DNA, 15 bp, Homo sapiens
caataatagcaaaca

SEQ ID NO: 441301 - DNA, 15 bp, Homo sapiens
acaataatagcaaac

SEQ ID NO: 441302 - DNA, 15 bp, Homo sapiens
aacaataatagcaaa

SEQ ID NO: 441303 - DNA, 15 bp, Homo sapiens
aaacaataatagcaa

SEQ ID NO: 441304 - DNA, 15 bp, Homo sapiens
aaaacaataatagca

SEQ ID NO: 441305 - DNA, 15 bp, Homo sapiens
aaaaacaataatagc

SEQ ID NO: 441306 - DNA, 15 bp, Homo sapiens
taaaaacaataatag

SEQ ID NO: 441307 - DNA, 15 bp, Homo sapiens
ataaaaacaataata

SEQ ID NO: 441308 - DNA, 15 bp, Homo sapiens
aataaaaacaataat

SEQ ID NO: 441309 - DNA, 15 bp, Homo sapiens
taataaaaacaataa

SEQ ID NO: 441310 - DNA, 15 bp, Homo sapiens
gtaataaaaacaata

SEQ ID NO: 441311 - DNA, 15 bp, Homo sapiens
agtaataaaaacaat

SEQ ID NO: 441312 - DNA, 15 bp, Homo sapiens
tagtaataaaaacaa

SEQ ID NO: 441313 - DNA, 15 bp, Homo sapiens
atagtaataaaaaca

SEQ ID NO: 441314 - DNA, 15 bp, Homo sapiens
aatagtaataaaaac

SEQ ID NO: 441315 - DNA, 15 bp, Homo sapiens
taatagtaataaaaa

SEQ ID NO: 441316 - DNA, 15 bp, Homo sapiens
ataatagtaataaaa

SEQ ID NO: 441317 - DNA, 15 bp, Homo sapiens
aataatagtaataaa

SEQ ID NO: 441318 - DNA, 15 bp, Homo sapiens
taataatagtaataa

SEQ ID NO: 441319 - DNA, 15 bp, Homo sapiens
ttaataatagtaata

SEQ ID NO: 441320 - DNA, 15 bp, Homo sapiens
cttaataatagtaat

SEQ ID NO: 441321 - DNA, 15 bp, Homo sapiens
tcttaataatagtaa

SEQ ID NO: 441322 - DNA, 15 bp, Homo sapiens
atcttaataatagta

SEQ ID NO: 441323 - DNA, 15 bp, Homo sapiens
aatcttaataatagt

SEQ ID NO: 441324 - DNA, 15 bp, Homo sapiens
gaatcttaataatag

SEQ ID NO: 441325 - DNA, 15 bp, Homo sapiens
tgaatcttaataata

SEQ ID NO: 441326 - DNA, 15 bp, Homo sapiens
gtgaatcttaataat

SEQ ID NO: 441327 - DNA, 15 bp, Homo sapiens
ggtgaatcttaataa

SEQ ID NO: 441328 - DNA, 15 bp, Homo sapiens
aggtgaatcttaata

SEQ ID NO: 441329 - DNA, 15 bp, Homo sapiens
gaggtgaatcttaat

SEQ ID NO: 441330 - DNA, 15 bp, Homo sapiens
tgaggtgaatcttaa

SEQ ID NO: 441331 - DNA, 15 bp, Homo sapiens
ttgaggtgaatctta

SEQ ID NO: 441332 - DNA, 15 bp, Homo sapiens
tttgaggtgaatctt

SEQ ID NO: 441333 - DNA, 15 bp, Homo sapiens
atttgaggtgaatct

SEQ ID NO: 441334 - DNA, 15 bp, Homo sapiens
catttgaggtgaatc

SEQ ID NO: 441335 - DNA, 15 bp, Homo sapiens
acatttgaggtgaat

SEQ ID NO: 441336 - DNA, 15 bp, Homo sapiens
aacatttgaggtgaa

SEQ ID NO: 441337 - DNA, 15 bp, Homo sapiens
taacatttgaggtga

SEQ ID NO: 441338 - DNA, 15 bp, Homo sapiens
gtaacatttgaggtg

SEQ ID NO: 441339 - DNA, 15 bp, Homo sapiens
agtaacatttgaggt

SEQ ID NO: 441340 - DNA, 15 bp, Homo sapiens
cagtaacatttgagg

SEQ ID NO: 441341 - DNA, 15 bp, Homo sapiens
acagtaacatttgag

SEQ ID NO: 441342 - DNA, 15 bp, Homo sapiens
cacagtaacatttga

SEQ ID NO: 441343 - DNA, 15 bp, Homo sapiens
acacagtaacatttg

SEQ ID NO: 441344 - DNA, 15 bp, Homo sapiens
tacacagtaacattt

SEQ ID NO: 441345 - DNA, 15 bp, Homo sapiens
ttacacagtaacatt

SEQ ID NO: 441346 - DNA, 15 bp, Homo sapiens
gttacacagtaacat

SEQ ID NO: 441347 - DNA, 15 bp, Homo sapiens
ggttacacagtaaca

SEQ ID NO: 441348 - DNA, 15 bp, Homo sapiens
aggttacacagtaac

SEQ ID NO: 441349 - DNA, 15 bp, Homo sapiens
aaggttacacagtaa

SEQ ID NO: 441350 - DNA, 15 bp, Homo sapiens
gaaggttacacagta

SEQ ID NO: 441351 - DNA, 15 bp, Homo sapiens
agaaggttacacagt

SEQ ID NO: 441352 - DNA, 15 bp, Homo sapiens
gagaaggttacacag

SEQ ID NO: 441353 - DNA, 15 bp, Homo sapiens
ggagaaggttacaca

SEQ ID NO: 441354 - DNA, 15 bp, Homo sapiens
gggagaaggttacac

SEQ ID NO: 441355 - DNA, 15 bp, Homo sapiens
tgggagaaggttaca

SEQ ID NO: 441356 - DNA, 15 bp, Homo sapiens
gtgggagaaggttac

SEQ ID NO: 441357 - DNA, 15 bp, Homo sapiens
ggtgggagaaggtta

SEQ ID NO: 441358 - DNA, 15 bp, Homo sapiens
aggtgggagaaggtt

SEQ ID NO: 441359 - DNA, 15 bp, Homo sapiens
aaggtgggagaaggt

SEQ ID NO: 441360 - DNA, 15 bp, Homo sapiens
aaaggtgggagaagg

SEQ ID NO: 441361 - DNA, 15 bp, Homo sapiens
aaaaggtgggagaag

SEQ ID NO: 441362 - DNA, 15 bp, Homo sapiens
gaaaaggtgggagaa

SEQ ID NO: 441363 - DNA, 15 bp, Homo sapiens
tgaaaaggtgggaga

SEQ ID NO: 441364 - DNA, 15 bp, Homo sapiens
ctgaaaaggtgggag

SEQ ID NO: 441365 - DNA, 15 bp, Homo sapiens
cctgaaaaggtggga

SEQ ID NO: 441366 - DNA, 15 bp, Homo sapiens
acctgaaaaggtggg

SEQ ID NO: 441367 - DNA, 15 bp, Homo sapiens
tacctgaaaaggtgg

SEQ ID NO: 441368 - DNA, 15 bp, Homo sapiens
atacctgaaaaggtg

SEQ ID NO: 441369 - DNA, 15 bp, Homo sapiens
tatacctgaaaaggt

SEQ ID NO: 441370 - DNA, 15 bp, Homo sapiens
ttatacctgaaaagg

SEQ ID NO: 441371 - DNA, 15 bp, Homo sapiens
attatacctgaaaag

SEQ ID NO: 441372 - DNA, 15 bp, Homo sapiens
aattatacctgaaaa

SEQ ID NO: 441373 - DNA, 15 bp, Homo sapiens
gaattatacctgaaa

SEQ ID NO: 441374 - DNA, 15 bp, Homo sapiens
tgaattatacctgaa

SEQ ID NO: 441375 - DNA, 15 bp, Homo sapiens
atgaattatacctga

SEQ ID NO: 441376 - DNA, 15 bp, Homo sapiens
aatgaattatacctg

SEQ ID NO: 441377 - DNA, 15 bp, Homo sapiens
taatgaattatacct

SEQ ID NO: 441378 - DNA, 15 bp, Homo sapiens
gtaatgaattatacc

SEQ ID NO: 441379 - DNA, 15 bp, Homo sapiens
agtaatgaattatac

SEQ ID NO: 441380 - DNA, 15 bp, Homo sapiens
aagtaatgaattata

SEQ ID NO: 441381 - DNA, 15 bp, Homo sapiens
gaagtaatgaattat

SEQ ID NO: 441382 - DNA, 15 bp, Homo sapiens
ggaagtaatgaatta

SEQ ID NO: 441383 - DNA, 15 bp, Homo sapiens
aggaagtaatgaatt

SEQ ID NO: 441384 - DNA, 15 bp, Homo sapiens
gaggaagtaatgaat

SEQ ID NO: 441385 - DNA, 15 bp, Homo sapiens
agaggaagtaatgaa

SEQ ID NO: 441386 - DNA, 15 bp, Homo sapiens
aagaggaagtaatga

SEQ ID NO: 441387 - DNA, 15 bp, Homo sapiens
gaagaggaagtaatg

SEQ ID NO: 441388 - DNA, 15 bp, Homo sapiens
agaagaggaagtaat

SEQ ID NO: 441389 - DNA, 15 bp, Homo sapiens
cagaagaggaagtaa

SEQ ID NO: 441390 - DNA, 15 bp, Homo sapiens
gcagaagaggaagta

SEQ ID NO: 441391 - DNA, 15 bp, Homo sapiens
tgcagaagaggaagt

SEQ ID NO: 441392 - DNA, 15 bp, Homo sapiens
ctgcagaagaggaag

SEQ ID NO: 441393 - DNA, 15 bp, Homo sapiens
actgcagaagaggaa

SEQ ID NO: 441394 - DNA, 15 bp, Homo sapiens
gactgcagaagagga

SEQ ID NO: 441395 - DNA, 15 bp, Homo sapiens
ggactgcagaagagg

SEQ ID NO: 441396 - DNA, 15 bp, Homo sapiens
gggactgcagaagag

SEQ ID NO: 441397 - DNA, 15 bp, Homo sapiens
tgggactgcagaaga

SEQ ID NO: 441398 - DNA, 15 bp, Homo sapiens
gtgggactgcagaag

SEQ ID NO: 441399 - DNA, 15 bp, Homo sapiens
tgtgggactgcagaa

SEQ ID NO: 441400 - DNA, 15 bp, Homo sapiens
gtgtgggactgcaga

SEQ ID NO: 441401 - DNA, 15 bp, Homo sapiens
agtgtgggactgcag

SEQ ID NO: 441402 - DNA, 15 bp, Homo sapiens
cagtgtgggactgca

SEQ ID NO: 441403 - DNA, 15 bp, Homo sapiens
gcagtgtgggactgc

SEQ ID NO: 441404 - DNA, 15 bp, Homo sapiens
ggcagtgtgggactg

SEQ ID NO: 441405 - DNA, 15 bp, Homo sapiens
tggcagtgtgggact

SEQ ID NO: 441406 - DNA, 15 bp, Homo sapiens
atggcagtgtgggac

SEQ ID NO: 441407 - DNA, 15 bp, Homo sapiens
catggcagtgtggga

SEQ ID NO: 441408 - DNA, 15 bp, Homo sapiens
ccatggcagtgtggg

SEQ ID NO: 441409 - DNA, 15 bp, Homo sapiens
accatggcagtgtgg

SEQ ID NO: 441410 - DNA, 15 bp, Homo sapiens
aaccatggcagtgtg

SEQ ID NO: 441411 - DNA, 15 bp, Homo sapiens
caaccatggcagtgt

SEQ ID NO: 441412 - DNA, 15 bp, Homo sapiens
gcaaccatggcagtg

SEQ ID NO: 441413 - DNA, 15 bp, Homo sapiens
agcaaccatggcagt

SEQ ID NO: 441414 - DNA, 15 bp, Homo sapiens
aagcaaccatggcag

SEQ ID NO: 441415 - DNA, 15 bp, Homo sapiens
aaagcaaccatggca

SEQ ID NO: 441416 - DNA, 15 bp, Homo sapiens
aaaagcaaccatggc

SEQ ID NO: 441417 - DNA, 15 bp, Homo sapiens
taaaagcaaccatgg

SEQ ID NO: 441418 - DNA, 15 bp, Homo sapiens
ataaaagcaaccatg

SEQ ID NO: 441419 - DNA, 15 bp, Homo sapiens
gataaaagcaaccat

SEQ ID NO: 441420 - DNA, 15 bp, Homo sapiens
tgataaaagcaacca

SEQ ID NO: 441421 - DNA, 15 bp, Homo sapiens
gtgataaaagcaacc

SEQ ID NO: 441422 - DNA, 15 bp, Homo sapiens
tgtgataaaagcaac

SEQ ID NO: 441423 - DNA, 15 bp, Homo sapiens
gtgtgataaaagcaa

SEQ ID NO: 441424 - DNA, 15 bp, Homo sapiens
agtgtgataaaagca

SEQ ID NO: 441425 - DNA, 15 bp, Homo sapiens
cagtgtgataaaagc

SEQ ID NO: 441426 - DNA, 15 bp, Homo sapiens
acagtgtgataaaag

SEQ ID NO: 441427 - DNA, 15 bp, Homo sapiens
aacagtgtgataaaa

SEQ ID NO: 441428 - DNA, 15 bp, Homo sapiens
taacagtgtgataaa

SEQ ID NO: 441429 - DNA, 15 bp, Homo sapiens
ttaacagtgtgataa

SEQ ID NO: 441430 - DNA, 15 bp, Homo sapiens
cttaacagtgtgata

SEQ ID NO: 441431 - DNA, 15 bp, Homo sapiens
tcttaacagtgtgat

SEQ ID NO: 441432 - DNA, 15 bp, Homo sapiens
ctcttaacagtgtga

SEQ ID NO: 441433 - DNA, 15 bp, Homo sapiens
tctcttaacagtgtg

SEQ ID NO: 441434 - DNA, 15 bp, Homo sapiens
ctctcttaacagtgt

SEQ ID NO: 441435 - DNA, 15 bp, Homo sapiens
actctcttaacagtg

SEQ ID NO: 441436 - DNA, 15 bp, Homo sapiens
aactctcttaacagt

SEQ ID NO: 441437 - DNA, 15 bp, Homo sapiens
caactctcttaacag

SEQ ID NO: 441438 - DNA, 15 bp, Homo sapiens
tcaactctcttaaca

SEQ ID NO: 441439 - DNA, 15 bp, Homo sapiens
ttcaactctcttaac

SEQ ID NO: 441440 - DNA, 15 bp, Homo sapiens
attcaactctcttaa

SEQ ID NO: 441441 - DNA, 15 bp, Homo sapiens
tattcaactctctta

SEQ ID NO: 441442 - DNA, 15 bp, Homo sapiens
atattcaactctctt

SEQ ID NO: 441443 - DNA, 15 bp, Homo sapiens
catattcaactctct

SEQ ID NO: 441444 - DNA, 15 bp, Homo sapiens
acatattcaactctc

SEQ ID NO: 441445 - DNA, 15 bp, Homo sapiens
tacatattcaactct

SEQ ID NO: 441446 - DNA, 15 bp, Homo sapiens
gtacatattcaactc

SEQ ID NO: 441447 - DNA, 15 bp, Homo sapiens
agtacatattcaact

SEQ ID NO: 441448 - DNA, 15 bp, Homo sapiens
aagtacatattcaac

SEQ ID NO: 441449 - DNA, 15 bp, Homo sapiens
aaagtacatattcaa

SEQ ID NO: 441450 - DNA, 15 bp, Homo sapiens
aaaagtacatattca

SEQ ID NO: 441451 - DNA, 15 bp, Homo sapiens
aaaaagtacatattc

SEQ ID NO: 441452 - DNA, 15 bp, Homo sapiens
aaaaaagtacatatt

SEQ ID NO: 441453 - DNA, 15 bp, Homo sapiens
caaaaaagtacatat

SEQ ID NO: 441454 - DNA, 15 bp, Homo sapiens
acaaaaaagtacata

SEQ ID NO: 441455 - DNA, 15 bp, Homo sapiens
aacaaaaaagtacat

SEQ ID NO: 441456 - DNA, 15 bp, Homo sapiens
caacaaaaaagtaca

SEQ ID NO: 441457 - DNA, 15 bp, Homo sapiens
acaacaaaaaagtac

SEQ ID NO: 441458 - DNA, 15 bp, Homo sapiens
aacaacaaaaaagta

SEQ ID NO: 441459 - DNA, 15 bp, Homo sapiens
taacaacaaaaaagt

SEQ ID NO: 441460 - DNA, 15 bp, Homo sapiens
ataacaacaaaaaag

SEQ ID NO: 441461 - DNA, 15 bp, Homo sapiens
tataacaacaaaaaa

SEQ ID NO: 441462 - DNA, 15 bp, Homo sapiens
ctataacaacaaaaa

SEQ ID NO: 441463 - DNA, 15 bp, Homo sapiens
tctataacaacaaaa

SEQ ID NO: 441464 - DNA, 15 bp, Homo sapiens
atctataacaacaaa

SEQ ID NO: 441465 - DNA, 15 bp, Homo sapiens
aatctataacaacaa

SEQ ID NO: 441466 - DNA, 15 bp, Homo sapiens
taatctataacaaca

SEQ ID NO: 441467 - DNA, 15 bp, Homo sapiens
ataatctataacaac

SEQ ID NO: 441468 - DNA, 15 bp, Homo sapiens
cataatctataacaa

SEQ ID NO: 441469 - DNA, 15 bp, Homo sapiens
tcataatctataaca

SEQ ID NO: 441470 - DNA, 15 bp, Homo sapiens
ttcataatctataac

SEQ ID NO: 441471 - DNA, 15 bp, Homo sapiens
attcataatctataa

SEQ ID NO: 441472 - DNA, 15 bp, Homo sapiens
aattcataatctata

SEQ ID NO: 441473 - DNA, 15 bp, Homo sapiens
gaattcataatctat

SEQ ID NO: 441474 - DNA, 15 bp, Homo sapiens
ggaattcataatcta

SEQ ID NO: 441475 - DNA, 15 bp, Homo sapiens
aggaattcataatct

SEQ ID NO: 441476 - DNA, 15 bp, Homo sapiens
aaggaattcataatc

SEQ ID NO: 441477 - DNA, 15 bp, Homo sapiens
taaggaattcataat

SEQ ID NO: 441478 - DNA, 15 bp, Homo sapiens
ttaaggaattcataa

SEQ ID NO: 441479 - DNA, 15 bp, Homo sapiens
cttaaggaattcata

SEQ ID NO: 441480 - DNA, 15 bp, Homo sapiens
ccttaaggaattcat

SEQ ID NO: 441481 - DNA, 15 bp, Homo sapiens
cccttaaggaattca

SEQ ID NO: 441482 - DNA, 15 bp, Homo sapiens
gcccttaaggaattc

SEQ ID NO: 441483 - DNA, 15 bp, Homo sapiens
tgcccttaaggaatt

SEQ ID NO: 441484 - DNA, 15 bp, Homo sapiens
ctgcccttaaggaat

SEQ ID NO: 441485 - DNA, 15 bp, Homo sapiens
gctgcccttaaggaa

SEQ ID NO: 441486 - DNA, 15 bp, Homo sapiens
tgctgcccttaagga

SEQ ID NO: 441487 - DNA, 15 bp, Homo sapiens
ctgctgcccttaagg

SEQ ID NO: 441488 - DNA, 15 bp, Homo sapiens
actgctgcccttaag

SEQ ID NO: 441489 - DNA, 15 bp, Homo sapiens
gactgctgcccttaa

SEQ ID NO: 441490 - DNA, 15 bp, Homo sapiens
tgactgctgccctta

SEQ ID NO: 441491 - DNA, 15 bp, Homo sapiens
atgactgctgccctt

SEQ ID NO: 441492 - DNA, 15 bp, Homo sapiens
catgactgctgccct

SEQ ID NO: 441493 - DNA, 15 bp, Homo sapiens
acatgactgctgccc

SEQ ID NO: 441494 - DNA, 15 bp, Homo sapiens
cacatgactgctgcc

SEQ ID NO: 441495 - DNA, 15 bp, Homo sapiens
tcacatgactgctgc

SEQ ID NO: 441496 - DNA, 15 bp, Homo sapiens
gtcacatgactgctg

SEQ ID NO: 441497 - DNA, 15 bp, Homo sapiens
tgtcacatgactgct

SEQ ID NO: 441498 - DNA, 15 bp, Homo sapiens
atgtcacatgactgc

SEQ ID NO: 441499 - DNA, 15 bp, Homo sapiens
gatgtcacatgactg

SEQ ID NO: 441500 - DNA, 15 bp, Homo sapiens
tgatgtcacatgact

SEQ ID NO: 441501 - DNA, 15 bp, Homo sapiens
ttgatgtcacatgac

SEQ ID NO: 441502 - DNA, 15 bp, Homo sapiens
cttgatgtcacatga

SEQ ID NO: 441503 - DNA, 15 bp, Homo sapiens
gcttgatgtcacatg

SEQ ID NO: 441504 - DNA, 15 bp, Homo sapiens
tgcttgatgtcacat

SEQ ID NO: 441505 - DNA, 15 bp, Homo sapiens
atgcttgatgtcaca

SEQ ID NO: 441506 - DNA, 15 bp, Homo sapiens
gatgcttgatgtcac

SEQ ID NO: 441507 - DNA, 15 bp, Homo sapiens
cgatgcttgatgtca

SEQ ID NO: 441508 - DNA, 15 bp, Homo sapiens
ccgatgcttgatgtc

SEQ ID NO: 441509 - DNA, 15 bp, Homo sapiens
cccgatgcttgatgt

SEQ ID NO: 441510 - DNA, 15 bp, Homo sapiens
tcccgatgcttgatg

SEQ ID NO: 441511 - DNA, 15 bp, Homo sapiens
atcccgatgcttgat

SEQ ID NO: 441512 - DNA, 15 bp, Homo sapiens
aatcccgatgcttga

SEQ ID NO: 441513 - DNA, 15 bp, Homo sapiens
aaatcccgatgcttg

SEQ ID NO: 441514 - DNA, 15 bp, Homo sapiens
taaatcccgatgctt

SEQ ID NO: 441515 - DNA, 15 bp, Homo sapiens
gtaaatcccgatgct

SEQ ID NO: 441516 - DNA, 15 bp, Homo sapiens
tgtaaatcccgatgc

SEQ ID NO: 441517 - DNA, 15 bp, Homo sapiens
atgtaaatcccgatg

SEQ ID NO: 441518 - DNA, 15 bp, Homo sapiens
aatgtaaatcccgat

SEQ ID NO: 441519 - DNA, 15 bp, Homo sapiens
aaatgtaaatcccga

SEQ ID NO: 441520 - DNA, 15 bp, Homo sapiens
gaaatgtaaatcccg

SEQ ID NO: 441521 - DNA, 15 bp, Homo sapiens
agaaatgtaaatccc

SEQ ID NO: 441522 - DNA, 15 bp, Homo sapiens
gagaaatgtaaatcc

SEQ ID NO: 441523 - DNA, 15 bp, Homo sapiens
ggagaaatgtaaatc

SEQ ID NO: 441524 - DNA, 15 bp, Homo sapiens
aggagaaatgtaaat

SEQ ID NO: 441525 - DNA, 15 bp, Homo sapiens
gaggagaaatgtaaa

SEQ ID NO: 441526 - DNA, 15 bp, Homo sapiens
agaggagaaatgtaa

SEQ ID NO: 441527 - DNA, 15 bp, Homo sapiens
tagaggagaaatgta

SEQ ID NO: 441528 - DNA, 15 bp, Homo sapiens
atagaggagaaatgt

SEQ ID NO: 441529 - DNA, 15 bp, Homo sapiens
gatagaggagaaatg

SEQ ID NO: 441530 - DNA, 15 bp, Homo sapiens
tgatagaggagaaat

SEQ ID NO: 441531 - DNA, 15 bp, Homo sapiens
gtgatagaggagaaa

SEQ ID NO: 441532 - DNA, 15 bp, Homo sapiens
agtgatagaggagaa

SEQ ID NO: 441533 - DNA, 15 bp, Homo sapiens
cagtgatagaggaga

SEQ ID NO: 441534 - DNA, 15 bp, Homo sapiens
tcagtgatagaggag

SEQ ID NO: 441535 - DNA, 15 bp, Homo sapiens
atcagtgatagagga

SEQ ID NO: 441536 - DNA, 15 bp, Homo sapiens
aatcagtgatagagg

SEQ ID NO: 441537 - DNA, 15 bp, Homo sapiens
taatcagtgatagag

SEQ ID NO: 441538 - DNA, 15 bp, Homo sapiens
ttaatcagtgataga

SEQ ID NO: 441539 - DNA, 15 bp, Homo sapiens
attaatcagtgatag

SEQ ID NO: 441540 - DNA, 15 bp, Homo sapiens
aattaatcagtgata

SEQ ID NO: 441541 - DNA, 15 bp, Homo sapiens
caattaatcagtgat

SEQ ID NO: 441542 - DNA, 15 bp, Homo sapiens
acaattaatcagtga

SEQ ID NO: 441543 - DNA, 15 bp, Homo sapiens
tacaattaatcagtg

SEQ ID NO: 441544 - DNA, 15 bp, Homo sapiens
gtacaattaatcagt

SEQ ID NO: 441545 - DNA, 15 bp, Homo sapiens
cgtacaattaatcag

SEQ ID NO: 441546 - DNA, 15 bp, Homo sapiens
tcgtacaattaatca

SEQ ID NO: 441547 - DNA, 15 bp, Homo sapiens
gtcgtacaattaatc

SEQ ID NO: 441548 - DNA, 15 bp, Homo sapiens
ggtcgtacaattaat

SEQ ID NO: 441549 - DNA, 15 bp, Homo sapiens
aggtcgtacaattaa

SEQ ID NO: 441550 - DNA, 15 bp, Homo sapiens
aaggtcgtacaatta

SEQ ID NO: 441551 - DNA, 15 bp, Homo sapiens
caaggtcgtacaatt

SEQ ID NO: 441552 - DNA, 15 bp, Homo sapiens
ccaaggtcgtacaat

SEQ ID NO: 441553 - DNA, 15 bp, Homo sapiens
tccaaggtcgtacaa

SEQ ID NO: 441554 - DNA, 15 bp, Homo sapiens
atccaaggtcgtaca

SEQ ID NO: 441555 - DNA, 15 bp, Homo sapiens
tatccaaggtcgtac

SEQ ID NO: 441556 - DNA, 15 bp, Homo sapiens
ttatccaaggtcgta

SEQ ID NO: 441557 - DNA, 15 bp, Homo sapiens
tttatccaaggtcgt

SEQ ID NO: 441558 - DNA, 15 bp, Homo sapiens
atttatccaaggtcg

SEQ ID NO: 441559 - DNA, 15 bp, Homo sapiens
aatttatccaaggtc

SEQ ID NO: 441560 - DNA, 15 bp, Homo sapiens
caatttatccaaggt

SEQ ID NO: 441561 - DNA, 15 bp, Homo sapiens
acaatttatccaagg

SEQ ID NO: 441562 - DNA, 15 bp, Homo sapiens
cacaatttatccaag

SEQ ID NO: 441563 - DNA, 15 bp, Homo sapiens
gcacaatttatccaa

SEQ ID NO: 441564 - DNA, 15 bp, Homo sapiens
tgcacaatttatcca

SEQ ID NO: 441565 - DNA, 15 bp, Homo sapiens
ctgcacaatttatcc

SEQ ID NO: 441566 - DNA, 15 bp, Homo sapiens
gctgcacaatttatc

SEQ ID NO: 441567 - DNA, 15 bp, Homo sapiens
agctgcacaatttat

SEQ ID NO: 441568 - DNA, 15 bp, Homo sapiens
aagctgcacaattta

SEQ ID NO: 441569 - DNA, 15 bp, Homo sapiens
gaagctgcacaattt

SEQ ID NO: 441570 - DNA, 15 bp, Homo sapiens
agaagctgcacaatt

SEQ ID NO: 441571 - DNA, 15 bp, Homo sapiens
gagaagctgcacaat

SEQ ID NO: 441572 - DNA, 15 bp, Homo sapiens
ggagaagctgcacaa

SEQ ID NO: 441573 - DNA, 15 bp, Homo sapiens
tggagaagctgcaca

SEQ ID NO: 441574 - DNA, 15 bp, Homo sapiens
atggagaagctgcac

SEQ ID NO: 441575 - DNA, 15 bp, Homo sapiens
gatggagaagctgca

SEQ ID NO: 441576 - DNA, 15 bp, Homo sapiens
agatggagaagctgc

SEQ ID NO: 441577 - DNA, 15 bp, Homo sapiens
aagatggagaagctg

SEQ ID NO: 441578 - DNA, 15 bp, Homo sapiens
caagatggagaagct

SEQ ID NO: 441579 - DNA, 15 bp, Homo sapiens
ccaagatggagaagc

SEQ ID NO: 441580 - DNA, 15 bp, Homo sapiens
accaagatggagaag

SEQ ID NO: 441581 - DNA, 15 bp, Homo sapiens
aaccaagatggagaa

SEQ ID NO: 441582 - DNA, 15 bp, Homo sapiens
aaaccaagatggaga

SEQ ID NO: 441583 - DNA, 15 bp, Homo sapiens
gaaaccaagatggag

SEQ ID NO: 441584 - DNA, 15 bp, Homo sapiens
ggaaaccaagatgga

SEQ ID NO: 441585 - DNA, 15 bp, Homo sapiens
aggaaaccaagatgg

SEQ ID NO: 441586 - DNA, 15 bp, Homo sapiens
gaggaaaccaagatg

SEQ ID NO: 441587 - DNA, 15 bp, Homo sapiens
cgaggaaaccaagat

SEQ ID NO: 441588 - DNA, 15 bp, Homo sapiens
gcgaggaaaccaaga

SEQ ID NO: 441589 - DNA, 15 bp, Homo sapiens
ggcgaggaaaccaag

SEQ ID NO: 441590 - DNA, 15 bp, Homo sapiens
aggcgaggaaaccaa

SEQ ID NO: 441591 - DNA, 15 bp, Homo sapiens
caggcgaggaaacca

SEQ ID NO: 441592 - DNA, 15 bp, Homo sapiens
acaggcgaggaaacc

SEQ ID NO: 441593 - DNA, 15 bp, Homo sapiens
tacaggcgaggaaac

SEQ ID NO: 441594 - DNA, 15 bp, Homo sapiens
ttacaggcgaggaaa

SEQ ID NO: 441595 - DNA, 15 bp, Homo sapiens
tttacaggcgaggaa

SEQ ID NO: 441596 - DNA, 15 bp, Homo sapiens
ttttacaggcgagga

SEQ ID NO: 441597 - DNA, 15 bp, Homo sapiens
attttacaggcgagg

SEQ ID NO: 441598 - DNA, 15 bp, Homo sapiens
cattttacaggcgag

SEQ ID NO: 441599 - DNA, 15 bp, Homo sapiens
tcattttacaggcga

SEQ ID NO: 441600 - DNA, 15 bp, Homo sapiens
ctcattttacaggcg

SEQ ID NO: 441601 - DNA, 15 bp, Homo sapiens
cctcattttacaggc

SEQ ID NO: 441602 - DNA, 15 bp, Homo sapiens
tcctcattttacagg

SEQ ID NO: 441603 - DNA, 15 bp, Homo sapiens
atcctcattttacag

SEQ ID NO: 441604 - DNA, 15 bp, Homo sapiens
tatcctcattttaca

SEQ ID NO: 441605 - DNA, 15 bp, Homo sapiens
ctatcctcattttac

SEQ ID NO: 441606 - DNA, 15 bp, Homo sapiens
gctatcctcatttta

SEQ ID NO: 441607 - DNA, 15 bp, Homo sapiens
tgctatcctcatttt

SEQ ID NO: 441608 - DNA, 15 bp, Homo sapiens
atgctatcctcattt

SEQ ID NO: 441609 - DNA, 15 bp, Homo sapiens
aatgctatcctcatt

SEQ ID NO: 441610 - DNA, 15 bp, Homo sapiens
taatgctatcctcat

SEQ ID NO: 441611 - DNA, 15 bp, Homo sapiens
gtaatgctatcctca

SEQ ID NO: 441612 - DNA, 15 bp, Homo sapiens
ggtaatgctatcctc

SEQ ID NO: 441613 - DNA, 15 bp, Homo sapiens
gggtaatgctatcct

SEQ ID NO: 441614 - DNA, 15 bp, Homo sapiens
tgggtaatgctatcc

SEQ ID NO: 441615 - DNA, 15 bp, Homo sapiens
atgggtaatgctatc

SEQ ID NO: 441616 - DNA, 15 bp, Homo sapiens
gatgggtaatgctat

SEQ ID NO: 441617 - DNA, 15 bp, Homo sapiens
agatgggtaatgcta

SEQ ID NO: 441618 - DNA, 15 bp, Homo sapiens
aagatgggtaatgct

SEQ ID NO: 441619 - DNA, 15 bp, Homo sapiens
taagatgggtaatgc

SEQ ID NO: 441620 - DNA, 15 bp, Homo sapiens
ttaagatgggtaatg

SEQ ID NO: 441621 - DNA, 15 bp, Homo sapiens
cttaagatgggtaat

SEQ ID NO: 441622 - DNA, 15 bp, Homo sapiens
tcttaagatgggtaa

SEQ ID NO: 441623 - DNA, 15 bp, Homo sapiens
ctcttaagatgggta

SEQ ID NO: 441624 - DNA, 15 bp, Homo sapiens
gctcttaagatgggt

SEQ ID NO: 441625 - DNA, 15 bp, Homo sapiens
agctcttaagatggg

SEQ ID NO: 441626 - DNA, 15 bp, Homo sapiens
aagctcttaagatgg

SEQ ID NO: 441627 - DNA, 15 bp, Homo sapiens
gaagctcttaagatg

SEQ ID NO: 441628 - DNA, 15 bp, Homo sapiens
agaagctcttaagat

SEQ ID NO: 441629 - DNA, 15 bp, Homo sapiens
cagaagctcttaaga

SEQ ID NO: 441630 - DNA, 15 bp, Homo sapiens
acagaagctcttaag

SEQ ID NO: 441631 - DNA, 15 bp, Homo sapiens
aacagaagctcttaa

SEQ ID NO: 441632 - DNA, 15 bp, Homo sapiens
aaacagaagctctta

SEQ ID NO: 441633 - DNA, 15 bp, Homo sapiens
aaaacagaagctctt

SEQ ID NO: 441634 - DNA, 15 bp, Homo sapiens
caaaacagaagctct

SEQ ID NO: 441635 - DNA, 15 bp, Homo sapiens
ccaaaacagaagctc

SEQ ID NO: 441636 - DNA, 15 bp, Homo sapiens
accaaaacagaagct

SEQ ID NO: 441637 - DNA, 15 bp, Homo sapiens
aaccaaaacagaagc

SEQ ID NO: 441638 - DNA, 15 bp, Homo sapiens
aaaccaaaacagaag

SEQ ID NO: 441639 - DNA, 15 bp, Homo sapiens
aaaaccaaaacagaa

SEQ ID NO: 441640 - DNA, 15 bp, Homo sapiens
caaaaccaaaacaga

SEQ ID NO: 441641 - DNA, 15 bp, Homo sapiens
acaaaaccaaaacag

SEQ ID NO: 441642 - DNA, 15 bp, Homo sapiens
tacaaaaccaaaaca

SEQ ID NO: 441643 - DNA, 15 bp, Homo sapiens
ttacaaaaccaaaac

SEQ ID NO: 441644 - DNA, 15 bp, Homo sapiens
cttacaaaaccaaaa

SEQ ID NO: 441645 - DNA, 15 bp, Homo sapiens
tcttacaaaaccaaa

SEQ ID NO: 441646 - DNA, 15 bp, Homo sapiens
ttcttacaaaaccaa

SEQ ID NO: 441647 - DNA, 15 bp, Homo sapiens
tttcttacaaaacca

SEQ ID NO: 441648 - DNA, 15 bp, Homo sapiens
gtttcttacaaaacc

SEQ ID NO: 441649 - DNA, 15 bp, Homo sapiens
tgtttcttacaaaac

SEQ ID NO: 441650 - DNA, 15 bp, Homo sapiens
gtgtttcttacaaaa

SEQ ID NO: 441651 - DNA, 15 bp, Homo sapiens
tgtgtttcttacaaa

SEQ ID NO: 441652 - DNA, 15 bp, Homo sapiens
atgtgtttcttacaa

SEQ ID NO: 441653 - DNA, 15 bp, Homo sapiens
aatgtgtttcttaca

SEQ ID NO: 441654 - DNA, 15 bp, Homo sapiens
aaatgtgtttcttac

SEQ ID NO: 441655 - DNA, 15 bp, Homo sapiens
caaatgtgtttctta

SEQ ID NO: 441656 - DNA, 15 bp, Homo sapiens
gcaaatgtgtttctt

SEQ ID NO: 441657 - DNA, 15 bp, Homo sapiens
tgcaaatgtgtttct

SEQ ID NO: 441658 - DNA, 15 bp, Homo sapiens
gtgcaaatgtgtttc

SEQ ID NO: 441659 - DNA, 15 bp, Homo sapiens
ggtgcaaatgtgttt

SEQ ID NO: 441660 - DNA, 15 bp, Homo sapiens
tggtgcaaatgtgtt

SEQ ID NO: 441661 - DNA, 15 bp, Homo sapiens
atggtgcaaatgtgt

SEQ ID NO: 441662 - DNA, 15 bp, Homo sapiens
tatggtgcaaatgtg

SEQ ID NO: 441663 - DNA, 15 bp, Homo sapiens
ctatggtgcaaatgt

SEQ ID NO: 441664 - DNA, 15 bp, Homo sapiens
gctatggtgcaaatg

SEQ ID NO: 441665 - DNA, 15 bp, Homo sapiens
agctatggtgcaaat

SEQ ID NO: 441666 - DNA, 15 bp, Homo sapiens
tagctatggtgcaaa

SEQ ID NO: 441667 - DNA, 15 bp, Homo sapiens
ttagctatggtgcaa

SEQ ID NO: 441668 - DNA, 15 bp, Homo sapiens
attagctatggtgca

SEQ ID NO: 441669 - DNA, 15 bp, Homo sapiens
tattagctatggtgc

SEQ ID NO: 441670 - DNA, 15 bp, Homo sapiens
gtattagctatggtg

SEQ ID NO: 441671 - DNA, 15 bp, Homo sapiens
agtattagctatggt

SEQ ID NO: 441672 - DNA, 15 bp, Homo sapiens
aagtattagctatgg

SEQ ID NO: 441673 - DNA, 15 bp, Homo sapiens
taagtattagctatg

SEQ ID NO: 441674 - DNA, 15 bp, Homo sapiens
ctaagtattagctat

SEQ ID NO: 441675 - DNA, 15 bp, Homo sapiens
actaagtattagcta

SEQ ID NO: 441676 - DNA, 15 bp, Homo sapiens
tactaagtattagct

SEQ ID NO: 441677 - DNA, 15 bp, Homo sapiens
ttactaagtattagc

SEQ ID NO: 441678 - DNA, 15 bp, Homo sapiens
tttactaagtattag

SEQ ID NO: 441679 - DNA, 15 bp, Homo sapiens
gtttactaagtatta

SEQ ID NO: 441680 - DNA, 15 bp, Homo sapiens
tgtttactaagtatt

SEQ ID NO: 441681 - DNA, 15 bp, Homo sapiens
gtgtttactaagtat

SEQ ID NO: 441682 - DNA, 15 bp, Homo sapiens
tgtgtttactaagta

SEQ ID NO: 441683 - DNA, 15 bp, Homo sapiens
atgtgtttactaagt

SEQ ID NO: 441684 - DNA, 15 bp, Homo sapiens
tatgtgtttactaag

SEQ ID NO: 441685 - DNA, 15 bp, Homo sapiens
atatgtgtttactaa

SEQ ID NO: 441686 - DNA, 15 bp, Homo sapiens
catatgtgtttacta

SEQ ID NO: 441687 - DNA, 15 bp, Homo sapiens
gcatatgtgtttact

SEQ ID NO: 441688 - DNA, 15 bp, Homo sapiens
agcatatgtgtttac

SEQ ID NO: 441689 - DNA, 15 bp, Homo sapiens
aagcatatgtgttta

SEQ ID NO: 441690 - DNA, 15 bp, Homo sapiens
aaagcatatgtgttt

SEQ ID NO: 441691 - DNA, 15 bp, Homo sapiens
aaaagcatatgtgtt

SEQ ID NO: 441692 - DNA, 15 bp, Homo sapiens
gaaaagcatatgtgt

SEQ ID NO: 441693 - DNA, 15 bp, Homo sapiens
agaaaagcatatgtg

SEQ ID NO: 441694 - DNA, 15 bp, Homo sapiens
aagaaaagcatatgt

SEQ ID NO: 441695 - DNA, 15 bp, Homo sapiens
gaagaaaagcatatg

SEQ ID NO: 441696 - DNA, 15 bp, Homo sapiens
ggaagaaaagcatat

SEQ ID NO: 441697 - DNA, 15 bp, Homo sapiens
gggaagaaaagcata

SEQ ID NO: 441698 - DNA, 15 bp, Homo sapiens
agggaagaaaagcat

SEQ ID NO: 441699 - DNA, 15 bp, Homo sapiens
cagggaagaaaagca

SEQ ID NO: 441700 - DNA, 15 bp, Homo sapiens
gcagggaagaaaagc

SEQ ID NO: 441701 - DNA, 15 bp, Homo sapiens
ggcagggaagaaaag

SEQ ID NO: 441702 - DNA, 15 bp, Homo sapiens
aggcagggaagaaaa

SEQ ID NO: 441703 - DNA, 15 bp, Homo sapiens
gaggcagggaagaaa

SEQ ID NO: 441704 - DNA, 15 bp, Homo sapiens
agaggcagggaagaa

SEQ ID NO: 441705 - DNA, 15 bp, Homo sapiens
cagaggcagggaaga

SEQ ID NO: 441706 - DNA, 15 bp, Homo sapiens
acagaggcagggaag

SEQ ID NO: 441707 - DNA, 15 bp, Homo sapiens
tacagaggcagggaa

SEQ ID NO: 441708 - DNA, 15 bp, Homo sapiens
ctacagaggcaggga

SEQ ID NO: 441709 - DNA, 15 bp, Homo sapiens
tctacagaggcaggg

SEQ ID NO: 441710 - DNA, 15 bp, Homo sapiens
atctacagaggcagg

SEQ ID NO: 441711 - DNA, 15 bp, Homo sapiens
aatctacagaggcag

SEQ ID NO: 441712 - DNA, 15 bp, Homo sapiens
aaatctacagaggca

SEQ ID NO: 441713 - DNA, 15 bp, Homo sapiens
gaaatctacagaggc

SEQ ID NO: 441714 - DNA, 15 bp, Homo sapiens
agaaatctacagagg

SEQ ID NO: 441715 - DNA, 15 bp, Homo sapiens
tagaaatctacagag

SEQ ID NO: 441716 - DNA, 15 bp, Homo sapiens
ttagaaatctacaga

SEQ ID NO: 441717 - DNA, 15 bp, Homo sapiens
gttagaaatctacag

SEQ ID NO: 441718 - DNA, 15 bp, Homo sapiens
tgttagaaatctaca

SEQ ID NO: 441719 - DNA, 15 bp, Homo sapiens
ttgttagaaatctac

SEQ ID NO: 441720 - DNA, 15 bp, Homo sapiens
gttgttagaaatcta

SEQ ID NO: 441721 - DNA, 15 bp, Homo sapiens
agttgttagaaatct

SEQ ID NO: 441722 - DNA, 15 bp, Homo sapiens
tagttgttagaaatc

SEQ ID NO: 441723 - DNA, 15 bp, Homo sapiens
ttagttgttagaaat

SEQ ID NO: 441724 - DNA, 15 bp, Homo sapiens
cttagttgttagaaa

SEQ ID NO: 441725 - DNA, 15 bp, Homo sapiens
acttagttgttagaa

SEQ ID NO: 441726 - DNA, 15 bp, Homo sapiens
aacttagttgttaga

SEQ ID NO: 441727 - DNA, 15 bp, Homo sapiens
taacttagttgttag

SEQ ID NO: 441728 - DNA, 15 bp, Homo sapiens
ctaacttagttgtta

SEQ ID NO: 441729 - DNA, 15 bp, Homo sapiens
tctaacttagttgtt

SEQ ID NO: 441730 - DNA, 15 bp, Homo sapiens
ttctaacttagttgt

SEQ ID NO: 441731 - DNA, 15 bp, Homo sapiens
tttctaacttagttg

SEQ ID NO: 441732 - DNA, 15 bp, Homo sapiens
gtttctaacttagtt

SEQ ID NO: 441733 - DNA, 15 bp, Homo sapiens
tgtttctaacttagt

SEQ ID NO: 441734 - DNA, 15 bp, Homo sapiens
ttgtttctaacttag

SEQ ID NO: 441735 - DNA, 15 bp, Homo sapiens
tttgtttctaactta

SEQ ID NO: 441736 - DNA, 15 bp, Homo sapiens
ctttgtttctaactt

SEQ ID NO: 441737 - DNA, 15 bp, Homo sapiens
actttgtttctaact

SEQ ID NO: 441738 - DNA, 15 bp, Homo sapiens
aactttgtttctaac

SEQ ID NO: 441739 - DNA, 15 bp, Homo sapiens
caactttgtttctaa

SEQ ID NO: 441740 - DNA, 15 bp, Homo sapiens
ccaactttgtttcta

SEQ ID NO: 441741 - DNA, 15 bp, Homo sapiens
cccaactttgtttct

SEQ ID NO: 441742 - DNA, 15 bp, Homo sapiens
gcccaactttgtttc

SEQ ID NO: 441743 - DNA, 15 bp, Homo sapiens
ggcccaactttgttt

SEQ ID NO: 441744 - DNA, 15 bp, Homo sapiens
aggcccaactttgtt

SEQ ID NO: 441745 - DNA, 15 bp, Homo sapiens
caggcccaactttgt

SEQ ID NO: 441746 - DNA, 15 bp, Homo sapiens
ccaggcccaactttg

SEQ ID NO: 441747 - DNA, 15 bp, Homo sapiens
accaggcccaacttt

SEQ ID NO: 441748 - DNA, 15 bp, Homo sapiens
aaccaggcccaactt

SEQ ID NO: 441749 - DNA, 15 bp, Homo sapiens
taaccaggcccaact

SEQ ID NO: 441750 - DNA, 15 bp, Homo sapiens
ataaccaggcccaac

SEQ ID NO: 441751 - DNA, 15 bp, Homo sapiens
aataaccaggcccaa

SEQ ID NO: 441752 - DNA, 15 bp, Homo sapiens
aaataaccaggccca

SEQ ID NO: 441753 - DNA, 15 bp, Homo sapiens
taaataaccaggccc

SEQ ID NO: 441754 - DNA, 15 bp, Homo sapiens
gtaaataaccaggcc

SEQ ID NO: 441755 - DNA, 15 bp, Homo sapiens
agtaaataaccaggc

SEQ ID NO: 441756 - DNA, 15 bp, Homo sapiens
cagtaaataaccagg

SEQ ID NO: 441757 - DNA, 15 bp, Homo sapiens
tcagtaaataaccag

SEQ ID NO: 441758 - DNA, 15 bp, Homo sapiens
atcagtaaataacca

SEQ ID NO: 441759 - DNA, 15 bp, Homo sapiens
aatcagtaaataacc

SEQ ID NO: 441760 - DNA, 15 bp, Homo sapiens
caatcagtaaataac

SEQ ID NO: 441761 - DNA, 15 bp, Homo sapiens
ccaatcagtaaataa

SEQ ID NO: 441762 - DNA, 15 bp, Homo sapiens
tccaatcagtaaata

SEQ ID NO: 441763 - DNA, 15 bp, Homo sapiens
ctccaatcagtaaat

SEQ ID NO: 441764 - DNA, 15 bp, Homo sapiens
cctccaatcagtaaa

SEQ ID NO: 441765 - DNA, 15 bp, Homo sapiens
gcctccaatcagtaa

SEQ ID NO: 441766 - DNA, 15 bp, Homo sapiens
agcctccaatcagta

SEQ ID NO: 441767 - DNA, 15 bp, Homo sapiens
cagcctccaatcagt

SEQ ID NO: 441768 - DNA, 15 bp, Homo sapiens
tcagcctccaatcag

SEQ ID NO: 441769 - DNA, 15 bp, Homo sapiens
ctcagcctccaatca

SEQ ID NO: 441770 - DNA, 15 bp, Homo sapiens
cctcagcctccaatc

SEQ ID NO: 441771 - DNA, 15 bp, Homo sapiens
acctcagcctccaat

SEQ ID NO: 441772 - DNA, 15 bp, Homo sapiens
cacctcagcctccaa

SEQ ID NO: 441773 - DNA, 15 bp, Homo sapiens
acacctcagcctcca

SEQ ID NO: 441774 - DNA, 15 bp, Homo sapiens
aacacctcagcctcc

SEQ ID NO: 441775 - DNA, 15 bp, Homo sapiens
caacacctcagcctc

SEQ ID NO: 441776 - DNA, 15 bp, Homo sapiens
tcaacacctcagcct

SEQ ID NO: 441777 - DNA, 15 bp, Homo sapiens
ttcaacacctcagcc

SEQ ID NO: 441778 - DNA, 15 bp, Homo sapiens
attcaacacctcagc

SEQ ID NO: 441779 - DNA, 15 bp, Homo sapiens
tattcaacacctcag

SEQ ID NO: 441780 - DNA, 15 bp, Homo sapiens
ttattcaacacctca

SEQ ID NO: 441781 - DNA, 15 bp, Homo sapiens
tttattcaacacctc

SEQ ID NO: 441782 - DNA, 15 bp, Homo sapiens
atttattcaacacct

SEQ ID NO: 441783 - DNA, 15 bp, Homo sapiens
tatttattcaacacc

SEQ ID NO: 441784 - DNA, 15 bp, Homo sapiens
ttatttattcaacac

SEQ ID NO: 441785 - DNA, 15 bp, Homo sapiens
tttatttattcaaca

SEQ ID NO: 441786 - DNA, 15 bp, Homo sapiens
atttatttattcaac

SEQ ID NO: 441787 - DNA, 15 bp, Homo sapiens
tatttatttattcaa

SEQ ID NO: 441788 - DNA, 15 bp, Homo sapiens
ttatttatttattca

SEQ ID NO: 441789 - DNA, 15 bp, Homo sapiens
attatttatttattc

SEQ ID NO: 441790 - DNA, 15 bp, Homo sapiens
cattatttatttatt

SEQ ID NO: 441791 - DNA, 15 bp, Homo sapiens
tcattatttatttat

SEQ ID NO: 441792 - DNA, 15 bp, Homo sapiens
ctcattatttattta

SEQ ID NO: 441793 - DNA, 15 bp, Homo sapiens
cctcattatttattt

SEQ ID NO: 441794 - DNA, 15 bp, Homo sapiens
ccctcattatttatt

SEQ ID NO: 441795 - DNA, 15 bp, Homo sapiens
accctcattatttat

SEQ ID NO: 441796 - DNA, 15 bp, Homo sapiens
aaccctcattattta

SEQ ID NO: 441797 - DNA, 15 bp, Homo sapiens
aaaccctcattattt

SEQ ID NO: 441798 - DNA, 15 bp, Homo sapiens
aaaaccctcattatt

SEQ ID NO: 441799 - DNA, 15 bp, Homo sapiens
taaaaccctcattat

SEQ ID NO: 441800 - DNA, 15 bp, Homo sapiens
ataaaaccctcatta

SEQ ID NO: 441801 - DNA, 15 bp, Homo sapiens
cataaaaccctcatt

SEQ ID NO: 441802 - DNA, 15 bp, Homo sapiens
tcataaaaccctcat

SEQ ID NO: 441803 - DNA, 15 bp, Homo sapiens
ttcataaaaccctca

SEQ ID NO: 441804 - DNA, 15 bp, Homo sapiens
attcataaaaccctc

SEQ ID NO: 441805 - DNA, 15 bp, Homo sapiens
cattcataaaaccct

SEQ ID NO: 441806 - DNA, 15 bp, Homo sapiens
tcattcataaaaccc

SEQ ID NO: 441807 - DNA, 15 bp, Homo sapiens
ctcattcataaaacc

SEQ ID NO: 441808 - DNA, 15 bp, Homo sapiens
actcattcataaaac

SEQ ID NO: 441809 - DNA, 15 bp, Homo sapiens
tactcattcataaaa

SEQ ID NO: 441810 - DNA, 15 bp, Homo sapiens
ttactcattcataaa

SEQ ID NO: 441811 - DNA, 15 bp, Homo sapiens
tttactcattcataa

SEQ ID NO: 441812 - DNA, 15 bp, Homo sapiens
ttttactcattcata

SEQ ID NO: 441813 - DNA, 15 bp, Homo sapiens
gttttactcattcat

SEQ ID NO: 441814 - DNA, 15 bp, Homo sapiens
tgttttactcattca

SEQ ID NO: 441815 - DNA, 15 bp, Homo sapiens
ttgttttactcattc

SEQ ID NO: 441816 - DNA, 15 bp, Homo sapiens
gttgttttactcatt

SEQ ID NO: 441817 - DNA, 15 bp, Homo sapiens
tgttgttttactcat

SEQ ID NO: 441818 - DNA, 15 bp, Homo sapiens
ttgttgttttactca

SEQ ID NO: 441819 - DNA, 15 bp, Homo sapiens
gttgttgttttactc

SEQ ID NO: 441820 - DNA, 15 bp, Homo sapiens
tgttgttgttttact

SEQ ID NO: 441821 - DNA, 15 bp, Homo sapiens
gtgttgttgttttac

SEQ ID NO: 441822 - DNA, 15 bp, Homo sapiens
tgtgttgttgtttta

SEQ ID NO: 441823 - DNA, 15 bp, Homo sapiens
ttgtgttgttgtttt

SEQ ID NO: 441824 - DNA, 15 bp, Homo sapiens
tttgtgttgttgttt

SEQ ID NO: 441825 - DNA, 15 bp, Homo sapiens
ttttgtgttgttgtt

SEQ ID NO: 441826 - DNA, 15 bp, Homo sapiens
tttttgtgttgttgt

SEQ ID NO: 441827 - DNA, 15 bp, Homo sapiens
ttttttgtgttgttg

SEQ ID NO: 441828 - DNA, 15 bp, Homo sapiens
tttttttgtgttgtt

SEQ ID NO: 441829 - DNA, 15 bp, Homo sapiens
ttttttttgtgttgt

SEQ ID NO: 441830 - DNA, 15 bp, Homo sapiens
cttttttttgtgttg

SEQ ID NO: 441831 - DNA, 15 bp, Homo sapiens
ccttttttttgtgtt

SEQ ID NO: 441832 - DNA, 15 bp, Homo sapiens
tccttttttttgtgt

SEQ ID NO: 441833 - DNA, 15 bp, Homo sapiens
ttccttttttttgtg

SEQ ID NO: 441834 - DNA, 15 bp, Homo sapiens
cttccttttttttgt

SEQ ID NO: 441835 - DNA, 15 bp, Homo sapiens
tcttccttttttttg

SEQ ID NO: 441836 - DNA, 15 bp, Homo sapiens
cttctttcttccttt

SEQ ID NO: 441837 - DNA, 15 bp, Homo sapiens
tcttctttcttcctt

SEQ ID NO: 441838 - DNA, 15 bp, Homo sapiens
ttcttctttcttcct

SEQ ID NO: 441839 - DNA, 15 bp, Homo sapiens
tttcttctttcttcc

SEQ ID NO: 441840 - DNA, 15 bp, Homo sapiens
atttcttctttcttc

SEQ ID NO: 441841 - DNA, 15 bp, Homo sapiens
aatttcttctttctt

SEQ ID NO: 441842 - DNA, 15 bp, Homo sapiens
gaatttcttctttct

SEQ ID NO: 441843 - DNA, 15 bp, Homo sapiens
agaatttcttctttc

SEQ ID NO: 441844 - DNA, 15 bp, Homo sapiens
cagaatttcttcttt

SEQ ID NO: 441845 - DNA, 15 bp, Homo sapiens
acagaatttcttctt

SEQ ID NO: 441846 - DNA, 15 bp, Homo sapiens
aacagaatttcttct

SEQ ID NO: 441847 - DNA, 15 bp, Homo sapiens
caacagaatttcttc

SEQ ID NO: 441848 - DNA, 15 bp, Homo sapiens
acaacagaatttctt

SEQ ID NO: 441849 - DNA, 15 bp, Homo sapiens
aacaacagaatttct

SEQ ID NO: 441850 - DNA, 15 bp, Homo sapiens
taacaacagaatttc

SEQ ID NO: 441851 - DNA, 15 bp, Homo sapiens
ttaacaacagaattt

SEQ ID NO: 441852 - DNA, 15 bp, Homo sapiens
tttaacaacagaatt

SEQ ID NO: 441853 - DNA, 15 bp, Homo sapiens
atttaacaacagaat

SEQ ID NO: 441854 - DNA, 15 bp, Homo sapiens
tatttaacaacagaa

SEQ ID NO: 441855 - DNA, 15 bp, Homo sapiens
atatttaacaacaga

SEQ ID NO: 441856 - DNA, 15 bp, Homo sapiens
catatttaacaacag

SEQ ID NO: 441857 - DNA, 15 bp, Homo sapiens
acatatttaacaaca

SEQ ID NO: 441858 - DNA, 15 bp, Homo sapiens
aacatatttaacaac

SEQ ID NO: 441859 - DNA, 15 bp, Homo sapiens
caacatatttaacaa

SEQ ID NO: 441860 - DNA, 15 bp, Homo sapiens
acaacatatttaaca

SEQ ID NO: 441861 - DNA, 15 bp, Homo sapiens
tacaacatatttaac

SEQ ID NO: 441862 - DNA, 15 bp, Homo sapiens
gtacaacatatttaa

SEQ ID NO: 441863 - DNA, 15 bp, Homo sapiens
agtacaacatattta

SEQ ID NO: 441864 - DNA, 15 bp, Homo sapiens
gagtacaacatattt

SEQ ID NO: 441865 - DNA, 15 bp, Homo sapiens
ggagtacaacatatt

SEQ ID NO: 441866 - DNA, 15 bp, Homo sapiens
aggagtacaacatat

SEQ ID NO: 441867 - DNA, 15 bp, Homo sapiens
caggagtacaacata

SEQ ID NO: 441868 - DNA, 15 bp, Homo sapiens
tcaggagtacaacat

SEQ ID NO: 441869 - DNA, 15 bp, Homo sapiens
atcaggagtacaaca

SEQ ID NO: 441870 - DNA, 15 bp, Homo sapiens
catcaggagtacaac

SEQ ID NO: 441871 - DNA, 15 bp, Homo sapiens
gcatcaggagtacaa

SEQ ID NO: 441872 - DNA, 15 bp, Homo sapiens
agcatcaggagtaca

SEQ ID NO: 441873 - DNA, 15 bp, Homo sapiens
tagcatcaggagtac

SEQ ID NO: 441874 - DNA, 15 bp, Homo sapiens
ttagcatcaggagta

SEQ ID NO: 441875 - DNA, 15 bp, Homo sapiens
gttagcatcaggagt

SEQ ID NO: 441876 - DNA, 15 bp, Homo sapiens
tgttagcatcaggag

SEQ ID NO: 441877 - DNA, 15 bp, Homo sapiens
ctgttagcatcagga

SEQ ID NO: 441878 - DNA, 15 bp, Homo sapiens
tctgttagcatcagg

SEQ ID NO: 441879 - DNA, 15 bp, Homo sapiens
atctgttagcatcag

SEQ ID NO: 441880 - DNA, 15 bp, Homo sapiens
tatctgttagcatca

SEQ ID NO: 441881 - DNA, 15 bp, Homo sapiens
atatctgttagcatc

SEQ ID NO: 441882 - DNA, 15 bp, Homo sapiens
tatatctgttagcat

SEQ ID NO: 441883 - DNA, 15 bp, Homo sapiens
atatatctgttagca

SEQ ID NO: 441884 - DNA, 15 bp, Homo sapiens
gatatatctgttagc

SEQ ID NO: 441885 - DNA, 15 bp, Homo sapiens
ggatatatctgttag

SEQ ID NO: 441886 - DNA, 15 bp, Homo sapiens
aggatatatctgtta

SEQ ID NO: 441887 - DNA, 15 bp, Homo sapiens
taggatatatctgtt

SEQ ID NO: 441888 - DNA, 15 bp, Homo sapiens
ttaggatatatctgt

SEQ ID NO: 441889 - DNA, 15 bp, Homo sapiens
attaggatatatctg

SEQ ID NO: 441890 - DNA, 15 bp, Homo sapiens
aattaggatatatct

SEQ ID NO: 441891 - DNA, 15 bp, Homo sapiens
aaattaggatatatc

SEQ ID NO: 441892 - DNA, 15 bp, Homo sapiens
gaaattaggatatat

SEQ ID NO: 441893 - DNA, 15 bp, Homo sapiens
agaaattaggatata

SEQ ID NO: 441894 - DNA, 15 bp, Homo sapiens
tagaaattaggatat

SEQ ID NO: 441895 - DNA, 15 bp, Homo sapiens
ttagaaattaggata

SEQ ID NO: 441896 - DNA, 15 bp, Homo sapiens
cttagaaattaggat

SEQ ID NO: 441897 - DNA, 15 bp, Homo sapiens
acttagaaattagga

SEQ ID NO: 441898 - DNA, 15 bp, Homo sapiens
aacttagaaattagg

SEQ ID NO: 441899 - DNA, 15 bp, Homo sapiens
gaacttagaaattag

SEQ ID NO: 441900 - DNA, 15 bp, Homo sapiens
tgaacttagaaatta

SEQ ID NO: 441901 - DNA, 15 bp, Homo sapiens
gtgaacttagaaatt

SEQ ID NO: 441902 - DNA, 15 bp, Homo sapiens
agtgaacttagaaat

SEQ ID NO: 441903 - DNA, 15 bp, Homo sapiens
gagtgaacttagaaa

SEQ ID NO: 441904 - DNA, 15 bp, Homo sapiens
tgagtgaacttagaa

SEQ ID NO: 441905 - DNA, 15 bp, Homo sapiens
ttgagtgaacttaga

SEQ ID NO: 441906 - DNA, 15 bp, Homo sapiens
tttgagtgaacttag

SEQ ID NO: 441907 - DNA, 15 bp, Homo sapiens
ctttgagtgaactta

SEQ ID NO: 441908 - DNA, 15 bp, Homo sapiens
actttgagtgaactt

SEQ ID NO: 441909 - DNA, 15 bp, Homo sapiens
cactttgagtgaact

SEQ ID NO: 441910 - DNA, 15 bp, Homo sapiens
acactttgagtgaac

SEQ ID NO: 441911 - DNA, 15 bp, Homo sapiens
cacactttgagtgaa

SEQ ID NO: 441912 - DNA, 15 bp, Homo sapiens
acacactttgagtga

SEQ ID NO: 441913 - DNA, 15 bp, Homo sapiens
aacacactttgagtg

SEQ ID NO: 441914 - DNA, 15 bp, Homo sapiens
aaacacactttgagt

SEQ ID NO: 441915 - DNA, 15 bp, Homo sapiens
taaacacactttgag

SEQ ID NO: 441916 - DNA, 15 bp, Homo sapiens
ataaacacactttga

SEQ ID NO: 441917 - DNA, 15 bp, Homo sapiens
gataaacacactttg

SEQ ID NO: 441918 - DNA, 15 bp, Homo sapiens
ggataaacacacttt

SEQ ID NO: 441919 - DNA, 15 bp, Homo sapiens
aggataaacacactt

SEQ ID NO: 441920 - DNA, 15 bp, Homo sapiens
caggataaacacact

SEQ ID NO: 441921 - DNA, 15 bp, Homo sapiens
acaggataaacacac

SEQ ID NO: 441922 - DNA, 15 bp, Homo sapiens
tacaggataaacaca

SEQ ID NO: 441923 - DNA, 15 bp, Homo sapiens
ctacaggataaacac

SEQ ID NO: 441924 - DNA, 15 bp, Homo sapiens
gctacaggataaaca

SEQ ID NO: 441925 - DNA, 15 bp, Homo sapiens
tgctacaggataaac

SEQ ID NO: 441926 - DNA, 15 bp, Homo sapiens
atgctacaggataaa

SEQ ID NO: 441927 - DNA, 15 bp, Homo sapiens
tatgctacaggataa

SEQ ID NO: 441928 - DNA, 15 bp, Homo sapiens
atatgctacaggata

SEQ ID NO: 441929 - DNA, 15 bp, Homo sapiens
catatgctacaggat

SEQ ID NO: 441930 - DNA, 15 bp, Homo sapiens
acatatgctacagga

SEQ ID NO: 441931 - DNA, 15 bp, Homo sapiens
aacatatgctacagg

SEQ ID NO: 441932 - DNA, 15 bp, Homo sapiens
aaacatatgctacag

SEQ ID NO: 441933 - DNA, 15 bp, Homo sapiens
aaaacatatgctaca

SEQ ID NO: 441934 - DNA, 15 bp, Homo sapiens
aaaaacatatgctac

SEQ ID NO: 441935 - DNA, 15 bp, Homo sapiens
taaaaacatatgcta

SEQ ID NO: 441936 - DNA, 15 bp, Homo sapiens
ttaaaaacatatgct

SEQ ID NO: 441937 - DNA, 15 bp, Homo sapiens
tttaaaaacatatgc

SEQ ID NO: 441938 - DNA, 15 bp, Homo sapiens
atttaaaaacatatg

SEQ ID NO: 441939 - DNA, 15 bp, Homo sapiens
gatttaaaaacatat

SEQ ID NO: 441940 - DNA, 15 bp, Homo sapiens
ggatttaaaaacata

SEQ ID NO: 441941 - DNA, 15 bp, Homo sapiens
tggatttaaaaacat

SEQ ID NO: 441942 - DNA, 15 bp, Homo sapiens
ctggatttaaaaaca

SEQ ID NO: 441943 - DNA, 15 bp, Homo sapiens
actggatttaaaaac

SEQ ID NO: 441944 - DNA, 15 bp, Homo sapiens
aactggatttaaaaa

SEQ ID NO: 441945 - DNA, 15 bp, Homo sapiens
aaactggatttaaaa

SEQ ID NO: 441946 - DNA, 15 bp, Homo sapiens
taaactggatttaaa

SEQ ID NO: 441947 - DNA, 15 bp, Homo sapiens
gtaaactggatttaa

SEQ ID NO: 441948 - DNA, 15 bp, Homo sapiens
ggtaaactggattta

SEQ ID NO: 441949 - DNA, 15 bp, Homo sapiens
gggtaaactggattt

SEQ ID NO: 441950 - DNA, 15 bp, Homo sapiens
agggtaaactggatt

SEQ ID NO: 441951 - DNA, 15 bp, Homo sapiens
aagggtaaactggat

SEQ ID NO: 441952 - DNA, 15 bp, Homo sapiens
taagggtaaactgga

SEQ ID NO: 441953 - DNA, 15 bp, Homo sapiens
ctaagggtaaactgg

SEQ ID NO: 441954 - DNA, 15 bp, Homo sapiens
gctaagggtaaactg

SEQ ID NO: 441955 - DNA, 15 bp, Homo sapiens
tgctaagggtaaact

SEQ ID NO: 441956 - DNA, 15 bp, Homo sapiens
atgctaagggtaaac

SEQ ID NO: 441957 - DNA, 15 bp, Homo sapiens
aatgctaagggtaaa

SEQ ID NO: 441958 - DNA, 15 bp, Homo sapiens
aaatgctaagggtaa

SEQ ID NO: 441959 - DNA, 15 bp, Homo sapiens
aaaatgctaagggta

SEQ ID NO: 441960 - DNA, 15 bp, Homo sapiens
taaaatgctaagggt

SEQ ID NO: 441961 - DNA, 15 bp, Homo sapiens
ttaaaatgctaaggg

SEQ ID NO: 441962 - DNA, 15 bp, Homo sapiens
tttaaaatgctaagg

SEQ ID NO: 441963 - DNA, 15 bp, Homo sapiens
ctttaaaatgctaag

SEQ ID NO: 441964 - DNA, 15 bp, Homo sapiens
tctttaaaatgctaa

SEQ ID NO: 441965 - DNA, 15 bp, Homo sapiens
ttctttaaaatgcta

SEQ ID NO: 441966 - DNA, 15 bp, Homo sapiens
tttctttaaaatgct

SEQ ID NO: 441967 - DNA, 15 bp, Homo sapiens
ctttctttaaaatgc

SEQ ID NO: 441968 - DNA, 15 bp, Homo sapiens
tctttctttaaaatg

SEQ ID NO: 441969 - DNA, 15 bp, Homo sapiens
atctttctttaaaat

SEQ ID NO: 441970 - DNA, 15 bp, Homo sapiens
tatctttctttaaaa

SEQ ID NO: 441971 - DNA, 15 bp, Homo sapiens
ttatctttctttaaa

SEQ ID NO: 441972 - DNA, 15 bp, Homo sapiens
tttatctttctttaa

SEQ ID NO: 441973 - DNA, 15 bp, Homo sapiens
gtttatctttcttta

SEQ ID NO: 441974 - DNA, 15 bp, Homo sapiens
tgtttatctttcttt

SEQ ID NO: 441975 - DNA, 15 bp, Homo sapiens
atgtttatctttctt

SEQ ID NO: 441976 - DNA, 15 bp, Homo sapiens
tatgtttatctttct

SEQ ID NO: 441977 - DNA, 15 bp, Homo sapiens
ttatgtttatctttc

SEQ ID NO: 441978 - DNA, 15 bp, Homo sapiens
attatgtttatcttt

SEQ ID NO: 441979 - DNA, 15 bp, Homo sapiens
cattatgtttatctt

SEQ ID NO: 441980 - DNA, 15 bp, Homo sapiens
ccattatgtttatct

SEQ ID NO: 441981 - DNA, 15 bp, Homo sapiens
gccattatgtttatc

SEQ ID NO: 441982 - DNA, 15 bp, Homo sapiens
ggccattatgtttat

SEQ ID NO: 441983 - DNA, 15 bp, Homo sapiens
aggccattatgttta

SEQ ID NO: 441984 - DNA, 15 bp, Homo sapiens
caggccattatgttt

SEQ ID NO: 441985 - DNA, 15 bp, Homo sapiens
tcaggccattatgtt

SEQ ID NO: 441986 - DNA, 15 bp, Homo sapiens
ctcaggccattatgt

SEQ ID NO: 441987 - DNA, 15 bp, Homo sapiens
gctcaggccattatg

SEQ ID NO: 441988 - DNA, 15 bp, Homo sapiens
agctcaggccattat

SEQ ID NO: 441989 - DNA, 15 bp, Homo sapiens
gagctcaggccatta

SEQ ID NO: 441990 - DNA, 15 bp, Homo sapiens
tgagctcaggccatt

SEQ ID NO: 441991 - DNA, 15 bp, Homo sapiens
ttgagctcaggccat

SEQ ID NO: 441992 - DNA, 15 bp, Homo sapiens
tttgagctcaggcca

SEQ ID NO: 441993 - DNA, 15 bp, Homo sapiens
atttgagctcaggcc

SEQ ID NO: 441994 - DNA, 15 bp, Homo sapiens
aatttgagctcaggc

SEQ ID NO: 441995 - DNA, 15 bp, Homo sapiens
caatttgagctcagg

SEQ ID NO: 441996 - DNA, 15 bp, Homo sapiens
tcaatttgagctcag

SEQ ID NO: 441997 - DNA, 15 bp, Homo sapiens
ctcaatttgagctca

SEQ ID NO: 441998 - DNA, 15 bp, Homo sapiens
actcaatttgagctc

SEQ ID NO: 441999 - DNA, 15 bp, Homo sapiens
tactcaatttgagct

SEQ ID NO: 442000 - DNA, 15 bp, Homo sapiens
ctactcaatttgagc

SEQ ID NO: 442001 - DNA, 15 bp, Homo sapiens
actactcaatttgag

SEQ ID NO: 442002 - DNA, 15 bp, Homo sapiens
cactactcaatttga

SEQ ID NO: 442003 - DNA, 15 bp, Homo sapiens
ccactactcaatttg

SEQ ID NO: 442004 - DNA, 15 bp, Homo sapiens
accactactcaattt

SEQ ID NO: 442005 - DNA, 15 bp, Homo sapiens
aaccactactcaatt

SEQ ID NO: 442006 - DNA, 15 bp, Homo sapiens
aaaccactactcaat

SEQ ID NO: 442007 - DNA, 15 bp, Homo sapiens
gaaaccactactcaa

SEQ ID NO: 442008 - DNA, 15 bp, Homo sapiens
agaaaccactactca

SEQ ID NO: 442009 - DNA, 15 bp, Homo sapiens
aagaaaccactactc

SEQ ID NO: 442010 - DNA, 15 bp, Homo sapiens
gaagaaaccactact

SEQ ID NO: 442011 - DNA, 15 bp, Homo sapiens
tgaagaaaccactac

SEQ ID NO: 442012 - DNA, 15 bp, Homo sapiens
ctgaagaaaccacta

SEQ ID NO: 442013 - DNA, 15 bp, Homo sapiens
tctgaagaaaccact

SEQ ID NO: 442014 - DNA, 15 bp, Homo sapiens
ttctgaagaaaccac

SEQ ID NO: 442015 - DNA, 15 bp, Homo sapiens
gttctgaagaaacca

SEQ ID NO: 442016 - DNA, 15 bp, Homo sapiens
tgttctgaagaaacc

SEQ ID NO: 442017 - DNA, 15 bp, Homo sapiens
gtgttctgaagaaac

SEQ ID NO: 442018 - DNA, 15 bp, Homo sapiens
tgtgttctgaagaaa

SEQ ID NO: 442019 - DNA, 15 bp, Homo sapiens
ctgtgttctgaagaa

SEQ ID NO: 442020 - DNA, 15 bp, Homo sapiens
actgtgttctgaaga

SEQ ID NO: 442021 - DNA, 15 bp, Homo sapiens
aactgtgttctgaag

SEQ ID NO: 442022 - DNA, 15 bp, Homo sapiens
aaactgtgttctgaa

SEQ ID NO: 442023 - DNA, 15 bp, Homo sapiens
aaaactgtgttctga

SEQ ID NO: 442024 - DNA, 15 bp, Homo sapiens
taaaactgtgttctg

SEQ ID NO: 442025 - DNA, 15 bp, Homo sapiens
ttaaaactgtgttct

SEQ ID NO: 442026 - DNA, 15 bp, Homo sapiens
tttaaaactgtgttc

SEQ ID NO: 442027 - DNA, 15 bp, Homo sapiens
ctttaaaactgtgtt

SEQ ID NO: 442028 - DNA, 15 bp, Homo sapiens
gctttaaaactgtgt

SEQ ID NO: 442029 - DNA, 15 bp, Homo sapiens
ggctttaaaactgtg

SEQ ID NO: 442030 - DNA, 15 bp, Homo sapiens
tggctttaaaactgt

SEQ ID NO: 442031 - DNA, 15 bp, Homo sapiens
atggctttaaaactg

SEQ ID NO: 442032 - DNA, 15 bp, Homo sapiens
aatggctttaaaact

SEQ ID NO: 442033 - DNA, 15 bp, Homo sapiens
taatggctttaaaac

SEQ ID NO: 442034 - DNA, 15 bp, Homo sapiens
ttaatggctttaaaa

SEQ ID NO: 442035 - DNA, 15 bp, Homo sapiens
tttaatggctttaaa

SEQ ID NO: 442036 - DNA, 15 bp, Homo sapiens
ttttaatggctttaa

SEQ ID NO: 442037 - DNA, 15 bp, Homo sapiens
attttaatggcttta

SEQ ID NO: 442038 - DNA, 15 bp, Homo sapiens
tattttaatggcttt

SEQ ID NO: 442039 - DNA, 15 bp, Homo sapiens
ctattttaatggctt

SEQ ID NO: 442040 - DNA, 15 bp, Homo sapiens
tctattttaatggct

SEQ ID NO: 442041 - DNA, 15 bp, Homo sapiens
ttctattttaatggc

SEQ ID NO: 442042 - DNA, 15 bp, Homo sapiens
cttctattttaatgg

SEQ ID NO: 442043 - DNA, 15 bp, Homo sapiens
tcttctattttaatg

SEQ ID NO: 442044 - DNA, 15 bp, Homo sapiens
atcttctattttaat

SEQ ID NO: 442045 - DNA, 15 bp, Homo sapiens
catcttctattttaa

SEQ ID NO: 442046 - DNA, 15 bp, Homo sapiens
tcatcttctatttta

SEQ ID NO: 442047 - DNA, 15 bp, Homo sapiens
ttcatcttctatttt

SEQ ID NO: 442048 - DNA, 15 bp, Homo sapiens
tttcatcttctattt

SEQ ID NO: 442049 - DNA, 15 bp, Homo sapiens
ttttcatcttctatt

SEQ ID NO: 442050 - DNA, 15 bp, Homo sapiens
cttttcatcttctat

SEQ ID NO: 442051 - DNA, 15 bp, Homo sapiens
gcttttcatcttcta

SEQ ID NO: 442052 - DNA, 15 bp, Homo sapiens
tgcttttcatcttct

SEQ ID NO: 442053 - DNA, 15 bp, Homo sapiens
ttgcttttcatcttc

SEQ ID NO: 442054 - DNA, 15 bp, Homo sapiens
gttgcttttcatctt

SEQ ID NO: 442055 - DNA, 15 bp, Homo sapiens
agttgcttttcatct

SEQ ID NO: 442056 - DNA, 15 bp, Homo sapiens
cagttgcttttcatc

SEQ ID NO: 442057 - DNA, 15 bp, Homo sapiens
tcagttgcttttcat

SEQ ID NO: 442058 - DNA, 15 bp, Homo sapiens
atcagttgcttttca

SEQ ID NO: 442059 - DNA, 15 bp, Homo sapiens
aatcagttgcttttc

SEQ ID NO: 442060 - DNA, 15 bp, Homo sapiens
taatcagttgctttt

SEQ ID NO: 442061 - DNA, 15 bp, Homo sapiens
ctaatcagttgcttt

SEQ ID NO: 442062 - DNA, 15 bp, Homo sapiens
tctaatcagttgctt

SEQ ID NO: 442063 - DNA, 15 bp, Homo sapiens
ttctaatcagttgct

SEQ ID NO: 442064 - DNA, 15 bp, Homo sapiens
tttctaatcagttgc

SEQ ID NO: 442065 - DNA, 15 bp, Homo sapiens
ttttctaatcagttg

SEQ ID NO: 442066 - DNA, 15 bp, Homo sapiens
tttttctaatcagtt

SEQ ID NO: 442067 - DNA, 15 bp, Homo sapiens
ctttttctaatcagt

SEQ ID NO: 442068 - DNA, 15 bp, Homo sapiens
tctttttctaatcag

SEQ ID NO: 442069 - DNA, 15 bp, Homo sapiens
gtctttttctaatca

SEQ ID NO: 442070 - DNA, 15 bp, Homo sapiens
agtctttttctaatc

SEQ ID NO: 442071 - DNA, 15 bp, Homo sapiens
cagtctttttctaat

SEQ ID NO: 442072 - DNA, 15 bp, Homo sapiens
gcagtctttttctaa

SEQ ID NO: 442073 - DNA, 15 bp, Homo sapiens
agcagtctttttcta

SEQ ID NO: 442074 - DNA, 15 bp, Homo sapiens
gagcagtctttttct

SEQ ID NO: 442075 - DNA, 15 bp, Homo sapiens
tgagcagtctttttc

SEQ ID NO: 442076 - DNA, 15 bp, Homo sapiens
gtgagcagtcttttt

SEQ ID NO: 442077 - DNA, 15 bp, Homo sapiens
agtgagcagtctttt

SEQ ID NO: 442078 - DNA, 15 bp, Homo sapiens
aagtgagcagtcttt

SEQ ID NO: 442079 - DNA, 15 bp, Homo sapiens
taagtgagcagtctt

SEQ ID NO: 442080 - DNA, 15 bp, Homo sapiens
gtaagtgagcagtct

SEQ ID NO: 442081 - DNA, 15 bp, Homo sapiens
agtaagtgagcagtc

SEQ ID NO: 442082 - DNA, 15 bp, Homo sapiens
aagtaagtgagcagt

SEQ ID NO: 442083 - DNA, 15 bp, Homo sapiens
taagtaagtgagcag

SEQ ID NO: 442084 - DNA, 15 bp, Homo sapiens
ctaagtaagtgagca

SEQ ID NO: 442085 - DNA, 15 bp, Homo sapiens
cctaagtaagtgagc

SEQ ID NO: 442086 - DNA, 15 bp, Homo sapiens
ccctaagtaagtgag

SEQ ID NO: 442087 - DNA, 15 bp, Homo sapiens
accctaagtaagtga

SEQ ID NO: 442088 - DNA, 15 bp, Homo sapiens
aaccctaagtaagtg

SEQ ID NO: 442089 - DNA, 15 bp, Homo sapiens
aaaccctaagtaagt

SEQ ID NO: 442090 - DNA, 15 bp, Homo sapiens
taaaccctaagtaag

SEQ ID NO: 442091 - DNA, 15 bp, Homo sapiens
ctaaaccctaagtaa

SEQ ID NO: 442092 - DNA, 15 bp, Homo sapiens
actaaaccctaagta

SEQ ID NO: 442093 - DNA, 15 bp, Homo sapiens
aactaaaccctaagt

SEQ ID NO: 442094 - DNA, 15 bp, Homo sapiens
aaactaaaccctaag

SEQ ID NO: 442095 - DNA, 15 bp, Homo sapiens
aaaactaaaccctaa

SEQ ID NO: 442096 - DNA, 15 bp, Homo sapiens
gaaaactaaacccta

SEQ ID NO: 442097 - DNA, 15 bp, Homo sapiens
agaaaactaaaccct

SEQ ID NO: 442098 - DNA, 15 bp, Homo sapiens
aagaaaactaaaccc

SEQ ID NO: 442099 - DNA, 15 bp, Homo sapiens
taagaaaactaaacc

SEQ ID NO: 442100 - DNA, 15 bp, Homo sapiens
ttaagaaaactaaac

SEQ ID NO: 442101 - DNA, 15 bp, Homo sapiens
gttaagaaaactaaa

SEQ ID NO: 442102 - DNA, 15 bp, Homo sapiens
agttaagaaaactaa

SEQ ID NO: 442103 - DNA, 15 bp, Homo sapiens
tagttaagaaaacta

SEQ ID NO: 442104 - DNA, 15 bp, Homo sapiens
atagttaagaaaact

SEQ ID NO: 442105 - DNA, 15 bp, Homo sapiens
tatagttaagaaaac

SEQ ID NO: 442106 - DNA, 15 bp, Homo sapiens
ttatagttaagaaaa

SEQ ID NO: 442107 - DNA, 15 bp, Homo sapiens
tttatagttaagaaa

SEQ ID NO: 442108 - DNA, 15 bp, Homo sapiens
ttttatagttaagaa

SEQ ID NO: 442109 - DNA, 15 bp, Homo sapiens
attttatagttaaga

SEQ ID NO: 442110 - DNA, 15 bp, Homo sapiens
aattttatagttaag

SEQ ID NO: 442111 - DNA, 15 bp, Homo sapiens
aaattttatagttaa

SEQ ID NO: 442112 - DNA, 15 bp, Homo sapiens
caaattttatagtta

SEQ ID NO: 442113 - DNA, 15 bp, Homo sapiens
tcaaattttatagtt

SEQ ID NO: 442114 - DNA, 15 bp, Homo sapiens
atcaaattttatagt

SEQ ID NO: 442115 - DNA, 15 bp, Homo sapiens
tatcaaattttatag

SEQ ID NO: 442116 - DNA, 15 bp, Homo sapiens
ctatcaaattttata

SEQ ID NO: 442117 - DNA, 15 bp, Homo sapiens
tctatcaaattttat

SEQ ID NO: 442118 - DNA, 15 bp, Homo sapiens
gtctatcaaatttta

SEQ ID NO: 442119 - DNA, 15 bp, Homo sapiens
agtctatcaaatttt

SEQ ID NO: 442120 - DNA, 15 bp, Homo sapiens
cagtctatcaaattt

SEQ ID NO: 442121 - DNA, 15 bp, Homo sapiens
tcagtctatcaaatt

SEQ ID NO: 442122 - DNA, 15 bp, Homo sapiens
atcagtctatcaaat

SEQ ID NO: 442123 - DNA, 15 bp, Homo sapiens
catcagtctatcaaa

SEQ ID NO: 442124 - DNA, 15 bp, Homo sapiens
ccatcagtctatcaa

SEQ ID NO: 442125 - DNA, 15 bp, Homo sapiens
tccatcagtctatca

SEQ ID NO: 442126 - DNA, 15 bp, Homo sapiens
atccatcagtctatc

SEQ ID NO: 442127 - DNA, 15 bp, Homo sapiens
catccatcagtctat

SEQ ID NO: 442128 - DNA, 15 bp, Homo sapiens
tcatccatcagtcta

SEQ ID NO: 442129 - DNA, 15 bp, Homo sapiens
ttcatccatcagtct

SEQ ID NO: 442130 - DNA, 15 bp, Homo sapiens
tttcatccatcagtc

SEQ ID NO: 442131 - DNA, 15 bp, Homo sapiens
atttcatccatcagt

SEQ ID NO: 442132 - DNA, 15 bp, Homo sapiens
catttcatccatcag

SEQ ID NO: 442133 - DNA, 15 bp, Homo sapiens
tcatttcatccatca

SEQ ID NO: 442134 - DNA, 15 bp, Homo sapiens
atcatttcatccatc

SEQ ID NO: 442135 - DNA, 15 bp, Homo sapiens
gatcatttcatccat

SEQ ID NO: 442136 - DNA, 15 bp, Homo sapiens
agatcatttcatcca

SEQ ID NO: 442137 - DNA, 15 bp, Homo sapiens
gagatcatttcatcc

SEQ ID NO: 442138 - DNA, 15 bp, Homo sapiens
agagatcatttcatc

SEQ ID NO: 442139 - DNA, 15 bp, Homo sapiens
tagagatcatttcat

SEQ ID NO: 442140 - DNA, 15 bp, Homo sapiens
ttagagatcatttca

SEQ ID NO: 442141 - DNA, 15 bp, Homo sapiens
tttagagatcatttc

SEQ ID NO: 442142 - DNA, 15 bp, Homo sapiens
ttttagagatcattt

SEQ ID NO: 442143 - DNA, 15 bp, Homo sapiens
attttagagatcatt

SEQ ID NO: 442144 - DNA, 15 bp, Homo sapiens
aattttagagatcat

SEQ ID NO: 442145 - DNA, 15 bp, Homo sapiens
gaattttagagatca

SEQ ID NO: 442146 - DNA, 15 bp, Homo sapiens
ggaattttagagatc

SEQ ID NO: 442147 - DNA, 15 bp, Homo sapiens
aggaattttagagat

SEQ ID NO: 442148 - DNA, 15 bp, Homo sapiens
aaggaattttagaga

SEQ ID NO: 442149 - DNA, 15 bp, Homo sapiens
gaaggaattttagag

SEQ ID NO: 442150 - DNA, 15 bp, Homo sapiens
tgaaggaattttaga

SEQ ID NO: 442151 - DNA, 15 bp, Homo sapiens
ttgaaggaattttag

SEQ ID NO: 442152 - DNA, 15 bp, Homo sapiens
tttgaaggaatttta

SEQ ID NO: 442153 - DNA, 15 bp, Homo sapiens
gtttgaaggaatttt

SEQ ID NO: 442154 - DNA, 15 bp, Homo sapiens
agtttgaaggaattt

SEQ ID NO: 442155 - DNA, 15 bp, Homo sapiens
gagtttgaaggaatt

SEQ ID NO: 442156 - DNA, 15 bp, Homo sapiens
agagtttgaaggaat

SEQ ID NO: 442157 - DNA, 15 bp, Homo sapiens
gagagtttgaaggaa

SEQ ID NO: 442158 - DNA, 15 bp, Homo sapiens
tgagagtttgaagga

SEQ ID NO: 442159 - DNA, 15 bp, Homo sapiens
ttgagagtttgaagg

SEQ ID NO: 442160 - DNA, 15 bp, Homo sapiens
tttgagagtttgaag

SEQ ID NO: 442161 - DNA, 15 bp, Homo sapiens
atttgagagtttgaa

SEQ ID NO: 442162 - DNA, 15 bp, Homo sapiens
aatttgagagtttga

SEQ ID NO: 442163 - DNA, 15 bp, Homo sapiens
gaatttgagagtttg

SEQ ID NO: 442164 - DNA, 15 bp, Homo sapiens
agaatttgagagttt

SEQ ID NO: 442165 - DNA, 15 bp, Homo sapiens
tagaatttgagagtt

SEQ ID NO: 442166 - DNA, 15 bp, Homo sapiens
atagaatttgagagt

SEQ ID NO: 442167 - DNA, 15 bp, Homo sapiens
catagaatttgagag

SEQ ID NO: 442168 - DNA, 15 bp, Homo sapiens
ccatagaatttgaga

SEQ ID NO: 442169 - DNA, 15 bp, Homo sapiens
accatagaatttgag

SEQ ID NO: 442170 - DNA, 15 bp, Homo sapiens
aaccatagaatttga

SEQ ID NO: 442171 - DNA, 15 bp, Homo sapiens
aaaccatagaatttg

SEQ ID NO: 442172 - DNA, 15 bp, Homo sapiens
aaaaccatagaattt

SEQ ID NO: 442173 - DNA, 15 bp, Homo sapiens
taaaaccatagaatt

SEQ ID NO: 442174 - DNA, 15 bp, Homo sapiens
ataaaaccatagaat

SEQ ID NO: 442175 - DNA, 15 bp, Homo sapiens
cataaaaccatagaa

SEQ ID NO: 442176 - DNA, 15 bp, Homo sapiens
tcataaaaccataga

SEQ ID NO: 442177 - DNA, 15 bp, Homo sapiens
atcataaaaccatag

SEQ ID NO: 442178 - DNA, 15 bp, Homo sapiens
aatcataaaaccata

SEQ ID NO: 442179 - DNA, 15 bp, Homo sapiens
gaatcataaaaccat

SEQ ID NO: 442180 - DNA, 15 bp, Homo sapiens
ggaatcataaaacca

SEQ ID NO: 442181 - DNA, 15 bp, Homo sapiens
gggaatcataaaacc

SEQ ID NO: 442182 - DNA, 15 bp, Homo sapiens
agggaatcataaaac

SEQ ID NO: 442183 - DNA, 15 bp, Homo sapiens
cagggaatcataaaa

SEQ ID NO: 442184 - DNA, 15 bp, Homo sapiens
ccagggaatcataaa

SEQ ID NO: 442185 - DNA, 15 bp, Homo sapiens
accagggaatcataa

SEQ ID NO: 442186 - DNA, 15 bp, Homo sapiens
aaccagggaatcata

SEQ ID NO: 442187 - DNA, 15 bp, Homo sapiens
gaaccagggaatcat

SEQ ID NO: 442188 - DNA, 15 bp, Homo sapiens
agaaccagggaatca

SEQ ID NO: 442189 - DNA, 15 bp, Homo sapiens
cagaaccagggaatc

SEQ ID NO: 442190 - DNA, 15 bp, Homo sapiens
tcagaaccagggaat

SEQ ID NO: 442191 - DNA, 15 bp, Homo sapiens
ttcagaaccagggaa

SEQ ID NO: 442192 - DNA, 15 bp, Homo sapiens
cttcagaaccaggga

SEQ ID NO: 442193 - DNA, 15 bp, Homo sapiens
tcttcagaaccaggg

SEQ ID NO: 442194 - DNA, 15 bp, Homo sapiens
gtcttcagaaccagg

SEQ ID NO: 442195 - DNA, 15 bp, Homo sapiens
agtcttcagaaccag

SEQ ID NO: 442196 - DNA, 15 bp, Homo sapiens
aagtcttcagaacca

SEQ ID NO: 442197 - DNA, 15 bp, Homo sapiens
caagtcttcagaacc

SEQ ID NO: 442198 - DNA, 15 bp, Homo sapiens
acaagtcttcagaac

SEQ ID NO: 442199 - DNA, 15 bp, Homo sapiens
tacaagtcttcagaa

SEQ ID NO: 442200 - DNA, 15 bp, Homo sapiens
gtacaagtcttcaga

SEQ ID NO: 442201 - DNA, 15 bp, Homo sapiens
tgtacaagtcttcag

SEQ ID NO: 442202 - DNA, 15 bp, Homo sapiens
ttgtacaagtcttca

SEQ ID NO: 442203 - DNA, 15 bp, Homo sapiens
tttgtacaagtcttc

SEQ ID NO: 442204 - DNA, 15 bp, Homo sapiens
ttttgtacaagtctt

SEQ ID NO: 442205 - DNA, 15 bp, Homo sapiens
attttgtacaagtct

SEQ ID NO: 442206 - DNA, 15 bp, Homo sapiens
aattttgtacaagtc

SEQ ID NO: 442207 - DNA, 15 bp, Homo sapiens
taattttgtacaagt

SEQ ID NO: 442208 - DNA, 15 bp, Homo sapiens
gtaattttgtacaag

SEQ ID NO: 442209 - DNA, 15 bp, Homo sapiens
tgtaattttgtacaa

SEQ ID NO: 442210 - DNA, 15 bp, Homo sapiens
ttgtaattttgtaca

SEQ ID NO: 442211 - DNA, 15 bp, Homo sapiens
gttgtaattttgtac

SEQ ID NO: 442212 - DNA, 15 bp, Homo sapiens
tgttgtaattttgta

SEQ ID NO: 442213 - DNA, 15 bp, Homo sapiens
ttgttgtaattttgt

SEQ ID NO: 442214 - DNA, 15 bp, Homo sapiens
gttgttgtaattttg

SEQ ID NO: 442215 - DNA, 15 bp, Homo sapiens
agttgttgtaatttt

SEQ ID NO: 442216 - DNA, 15 bp, Homo sapiens
aagttgttgtaattt

SEQ ID NO: 442217 - DNA, 15 bp, Homo sapiens
taagttgttgtaatt

SEQ ID NO: 442218 - DNA, 15 bp, Homo sapiens
ttaagttgttgtaat

SEQ ID NO: 442219 - DNA, 15 bp, Homo sapiens
cttaagttgttgtaa

SEQ ID NO: 442220 - DNA, 15 bp, Homo sapiens
tcttaagttgttgta

SEQ ID NO: 442221 - DNA, 15 bp, Homo sapiens
atcttaagttgttgt

SEQ ID NO: 442222 - DNA, 15 bp, Homo sapiens
catcttaagttgttg

SEQ ID NO: 442223 - DNA, 15 bp, Homo sapiens
gcatcttaagttgtt

SEQ ID NO: 442224 - DNA, 15 bp, Homo sapiens
agcatcttaagttgt

SEQ ID NO: 442225 - DNA, 15 bp, Homo sapiens
tagcatcttaagttg

SEQ ID NO: 442226 - DNA, 15 bp, Homo sapiens
ctagcatcttaagtt

SEQ ID NO: 442227 - DNA, 15 bp, Homo sapiens
tctagcatcttaagt

SEQ ID NO: 442228 - DNA, 15 bp, Homo sapiens
atctagcatcttaag

SEQ ID NO: 442229 - DNA, 15 bp, Homo sapiens
tatctagcatcttaa

SEQ ID NO: 442230 - DNA, 15 bp, Homo sapiens
ttatctagcatctta

SEQ ID NO: 442231 - DNA, 15 bp, Homo sapiens
tttatctagcatctt

SEQ ID NO: 442232 - DNA, 15 bp, Homo sapiens
ttttatctagcatct

SEQ ID NO: 442233 - DNA, 15 bp, Homo sapiens
attttatctagcatc

SEQ ID NO: 442234 - DNA, 15 bp, Homo sapiens
gattttatctagcat

SEQ ID NO: 442235 - DNA, 15 bp, Homo sapiens
ggattttatctagca

SEQ ID NO: 442236 - DNA, 15 bp, Homo sapiens
aggattttatctagc

SEQ ID NO: 442237 - DNA, 15 bp, Homo sapiens
taggattttatctag

SEQ ID NO: 442238 - DNA, 15 bp, Homo sapiens
ttaggattttatcta

SEQ ID NO: 442239 - DNA, 15 bp, Homo sapiens
attaggattttatct

SEQ ID NO: 442240 - DNA, 15 bp, Homo sapiens
cattaggattttatc

SEQ ID NO: 442241 - DNA, 15 bp, Homo sapiens
ccattaggattttat

SEQ ID NO: 442242 - DNA, 15 bp, Homo sapiens
accattaggatttta

SEQ ID NO: 442243 - DNA, 15 bp, Homo sapiens
caccattaggatttt

SEQ ID NO: 442244 - DNA, 15 bp, Homo sapiens
tcaccattaggattt

SEQ ID NO: 442245 - DNA, 15 bp, Homo sapiens
ttcaccattaggatt

SEQ ID NO: 442246 - DNA, 15 bp, Homo sapiens
tttcaccattaggat

SEQ ID NO: 442247 - DNA, 15 bp, Homo sapiens
ctttcaccattagga

SEQ ID NO: 442248 - DNA, 15 bp, Homo sapiens
cctttcaccattagg

SEQ ID NO: 442249 - DNA, 15 bp, Homo sapiens
ccctttcaccattag

SEQ ID NO: 442250 - DNA, 15 bp, Homo sapiens
tccctttcaccatta

SEQ ID NO: 442251 - DNA, 15 bp, Homo sapiens
ctccctttcaccatt

SEQ ID NO: 442252 - DNA, 15 bp, Homo sapiens
tctccctttcaccat

SEQ ID NO: 442253 - DNA, 15 bp, Homo sapiens
ctctccctttcacca

SEQ ID NO: 442254 - DNA, 15 bp, Homo sapiens
cctctccctttcacc

SEQ ID NO: 442255 - DNA, 15 bp, Homo sapiens
gcctctccctttcac

SEQ ID NO: 442256 - DNA, 15 bp, Homo sapiens
tgcctctccctttca

SEQ ID NO: 442257 - DNA, 15 bp, Homo sapiens
ttgcctctccctttc

SEQ ID NO: 442258 - DNA, 15 bp, Homo sapiens
attgcctctcccttt

SEQ ID NO: 442259 - DNA, 15 bp, Homo sapiens
aattgcctctccctt

SEQ ID NO: 442260 - DNA, 15 bp, Homo sapiens
taattgcctctccct

SEQ ID NO: 442261 - DNA, 15 bp, Homo sapiens
ctaattgcctctccc

SEQ ID NO: 442262 - DNA, 15 bp, Homo sapiens
actaattgcctctcc

SEQ ID NO: 442263 - DNA, 15 bp, Homo sapiens
tactaattgcctctc

SEQ ID NO: 442264 - DNA, 15 bp, Homo sapiens
ttactaattgcctct

SEQ ID NO: 442265 - DNA, 15 bp, Homo sapiens
tttactaattgcctc

SEQ ID NO: 442266 - DNA, 15 bp, Homo sapiens
ctttactaattgcct

SEQ ID NO: 442267 - DNA, 15 bp, Homo sapiens
tctttactaattgcc

SEQ ID NO: 442268 - DNA, 15 bp, Homo sapiens
ttctttactaattgc

SEQ ID NO: 442269 - DNA, 15 bp, Homo sapiens
tttctttactaattg

SEQ ID NO: 442270 - DNA, 15 bp, Homo sapiens
atttctttactaatt

SEQ ID NO: 442271 - DNA, 15 bp, Homo sapiens
tatttctttactaat

SEQ ID NO: 442272 - DNA, 15 bp, Homo sapiens
ttatttctttactaa

SEQ ID NO: 442273 - DNA, 15 bp, Homo sapiens
tttatttctttacta

SEQ ID NO: 442274 - DNA, 15 bp, Homo sapiens
atttatttctttact

SEQ ID NO: 442275 - DNA, 15 bp, Homo sapiens
catttatttctttac

SEQ ID NO: 442276 - DNA, 15 bp, Homo sapiens
ccatttatttcttta

SEQ ID NO: 442277 - DNA, 15 bp, Homo sapiens
accatttatttcttt

SEQ ID NO: 442278 - DNA, 15 bp, Homo sapiens
aaccatttatttctt

SEQ ID NO: 442279 - DNA, 15 bp, Homo sapiens
taaccatttatttct

SEQ ID NO: 442280 - DNA, 15 bp, Homo sapiens
ttaaccatttatttc

SEQ ID NO: 442281 - DNA, 15 bp, Homo sapiens
gttaaccatttattt

SEQ ID NO: 442282 - DNA, 15 bp, Homo sapiens
tgttaaccatttatt

SEQ ID NO: 442283 - DNA, 15 bp, Homo sapiens
ctgttaaccatttat

SEQ ID NO: 442284 - DNA, 15 bp, Homo sapiens
actgttaaccattta

SEQ ID NO: 442285 - DNA, 15 bp, Homo sapiens
gactgttaaccattt

SEQ ID NO: 442286 - DNA, 15 bp, Homo sapiens
agactgttaaccatt

SEQ ID NO: 442287 - DNA, 15 bp, Homo sapiens
tagactgttaaccat

SEQ ID NO: 442288 - DNA, 15 bp, Homo sapiens
ctagactgttaacca

SEQ ID NO: 442289 - DNA, 15 bp, Homo sapiens
tctagactgttaacc

SEQ ID NO: 442290 - DNA, 15 bp, Homo sapiens
ctctagactgttaac

SEQ ID NO: 442291 - DNA, 15 bp, Homo sapiens
gctctagactgttaa

SEQ ID NO: 442292 - DNA, 15 bp, Homo sapiens
ggctctagactgtta

SEQ ID NO: 442293 - DNA, 15 bp, Homo sapiens
tggctctagactgtt

SEQ ID NO: 442294 - DNA, 15 bp, Homo sapiens
atggctctagactgt

SEQ ID NO: 442295 - DNA, 15 bp, Homo sapiens
aatggctctagactg

SEQ ID NO: 442296 - DNA, 15 bp, Homo sapiens
aaatggctctagact

SEQ ID NO: 442297 - DNA, 15 bp, Homo sapiens
taaatggctctagac

SEQ ID NO: 442298 - DNA, 15 bp, Homo sapiens
ttaaatggctctaga

SEQ ID NO: 442299 - DNA, 15 bp, Homo sapiens
attaaatggctctag

SEQ ID NO: 442300 - DNA, 15 bp, Homo sapiens
cattaaatggctcta

SEQ ID NO: 442301 - DNA, 15 bp, Homo sapiens
ccattaaatggctct

SEQ ID NO: 442302 - DNA, 15 bp, Homo sapiens
tccattaaatggctc

SEQ ID NO: 442303 - DNA, 15 bp, Homo sapiens
ctccattaaatggct

SEQ ID NO: 442304 - DNA, 15 bp, Homo sapiens
tctccattaaatggc

SEQ ID NO: 442305 - DNA, 15 bp, Homo sapiens
ctctccattaaatgg

SEQ ID NO: 442306 - DNA, 15 bp, Homo sapiens
cctctccattaaatg

SEQ ID NO: 442307 - DNA, 15 bp, Homo sapiens
ccctctccattaaat

SEQ ID NO: 442308 - DNA, 15 bp, Homo sapiens
tccctctccattaaa

SEQ ID NO: 442309 - DNA, 15 bp, Homo sapiens
ctccctctccattaa

SEQ ID NO: 442310 - DNA, 15 bp, Homo sapiens
tctccctctccatta

SEQ ID NO: 442311 - DNA, 15 bp, Homo sapiens
gtctccctctccatt

SEQ ID NO: 442312 - DNA, 15 bp, Homo sapiens
tgtctccctctccat

SEQ ID NO: 442313 - DNA, 15 bp, Homo sapiens
ctgtctccctctcca

SEQ ID NO: 442314 - DNA, 15 bp, Homo sapiens
gctgtctccctctcc

SEQ ID NO: 442315 - DNA, 15 bp, Homo sapiens
ggctgtctccctctc

SEQ ID NO: 442316 - DNA, 15 bp, Homo sapiens
gggctgtctccctct

SEQ ID NO: 442317 - DNA, 15 bp, Homo sapiens
agggctgtctccctc

SEQ ID NO: 442318 - DNA, 15 bp, Homo sapiens
cagggctgtctccct

SEQ ID NO: 442319 - DNA, 15 bp, Homo sapiens
gcagggctgtctccc

SEQ ID NO: 442320 - DNA, 15 bp, Homo sapiens
agcagggctgtctcc

SEQ ID NO: 442321 - DNA, 15 bp, Homo sapiens
tagcagggctgtctc

SEQ ID NO: 442322 - DNA, 15 bp, Homo sapiens
gtagcagggctgtct

SEQ ID NO: 442323 - DNA, 15 bp, Homo sapiens
ggtagcagggctgtc

SEQ ID NO: 442324 - DNA, 15 bp, Homo sapiens
aggtagcagggctgt

SEQ ID NO: 442325 - DNA, 15 bp, Homo sapiens
gaggtagcagggctg

SEQ ID NO: 442326 - DNA, 15 bp, Homo sapiens
tgaggtagcagggct

SEQ ID NO: 442327 - DNA, 15 bp, Homo sapiens
ttgaggtagcagggc

SEQ ID NO: 442328 - DNA, 15 bp, Homo sapiens
gttgaggtagcaggg

SEQ ID NO: 442329 - DNA, 15 bp, Homo sapiens
cgttgaggtagcagg

SEQ ID NO: 442330 - DNA, 15 bp, Homo sapiens
ccgttgaggtagcag

SEQ ID NO: 442331 - DNA, 15 bp, Homo sapiens
accgttgaggtagca

SEQ ID NO: 442332 - DNA, 15 bp, Homo sapiens
taccgttgaggtagc

SEQ ID NO: 442333 - DNA, 15 bp, Homo sapiens
ttaccgttgaggtag

SEQ ID NO: 442334 - DNA, 15 bp, Homo sapiens
attaccgttgaggta

SEQ ID NO: 442335 - DNA, 15 bp, Homo sapiens
aattaccgttgaggt

SEQ ID NO: 442336 - DNA, 15 bp, Homo sapiens
caattaccgttgagg

SEQ ID NO: 442337 - DNA, 15 bp, Homo sapiens
tcaattaccgttgag

SEQ ID NO: 442338 - DNA, 15 bp, Homo sapiens
ctcaattaccgttga

SEQ ID NO: 442339 - DNA, 15 bp, Homo sapiens
actcaattaccgttg

SEQ ID NO: 442340 - DNA, 15 bp, Homo sapiens
aactcaattaccgtt

SEQ ID NO: 442341 - DNA, 15 bp, Homo sapiens
aaactcaattaccgt

SEQ ID NO: 442342 - DNA, 15 bp, Homo sapiens
gaaactcaattaccg

SEQ ID NO: 442343 - DNA, 15 bp, Homo sapiens
tgaaactcaattacc

SEQ ID NO: 442344 - DNA, 15 bp, Homo sapiens
atgaaactcaattac

SEQ ID NO: 442345 - DNA, 15 bp, Homo sapiens
tatgaaactcaatta

SEQ ID NO: 442346 - DNA, 15 bp, Homo sapiens
ttatgaaactcaatt

SEQ ID NO: 442347 - DNA, 15 bp, Homo sapiens
attatgaaactcaat

SEQ ID NO: 442348 - DNA, 15 bp, Homo sapiens
cattatgaaactcaa

SEQ ID NO: 442349 - DNA, 15 bp, Homo sapiens
tcattatgaaactca

SEQ ID NO: 442350 - DNA, 15 bp, Homo sapiens
atcattatgaaactc

SEQ ID NO: 442351 - DNA, 15 bp, Homo sapiens
catcattatgaaact

SEQ ID NO: 442352 - DNA, 15 bp, Homo sapiens
tcatcattatgaaac

SEQ ID NO: 442353 - DNA, 15 bp, Homo sapiens
gtcatcattatgaaa

SEQ ID NO: 442354 - DNA, 15 bp, Homo sapiens
tgtcatcattatgaa

SEQ ID NO: 442355 - DNA, 15 bp, Homo sapiens
gtgtcatcattatga

SEQ ID NO: 442356 - DNA, 15 bp, Homo sapiens
agtgtcatcattatg

SEQ ID NO: 442357 - DNA, 15 bp, Homo sapiens
cagtgtcatcattat

SEQ ID NO: 442358 - DNA, 15 bp, Homo sapiens
tcagtgtcatcatta

SEQ ID NO: 442359 - DNA, 15 bp, Homo sapiens
ctcagtgtcatcatt

SEQ ID NO: 442360 - DNA, 15 bp, Homo sapiens
actcagtgtcatcat

SEQ ID NO: 442361 - DNA, 15 bp, Homo sapiens
gactcagtgtcatca

SEQ ID NO: 442362 - DNA, 15 bp, Homo sapiens
tgactcagtgtcatc

SEQ ID NO: 442363 - DNA, 15 bp, Homo sapiens
atgactcagtgtcat

SEQ ID NO: 442364 - DNA, 15 bp, Homo sapiens
gatgactcagtgtca

SEQ ID NO: 442365 - DNA, 15 bp, Homo sapiens
tgatgactcagtgtc

SEQ ID NO: 442366 - DNA, 15 bp, Homo sapiens
ttgatgactcagtgt

SEQ ID NO: 442367 - DNA, 15 bp, Homo sapiens
tttgatgactcagtg

SEQ ID NO: 442368 - DNA, 15 bp, Homo sapiens
ttttgatgactcagt

SEQ ID NO: 442369 - DNA, 15 bp, Homo sapiens
tttttgatgactcag

SEQ ID NO: 442370 - DNA, 15 bp, Homo sapiens
ttttttgatgactca

SEQ ID NO: 442371 - DNA, 15 bp, Homo sapiens
cttttttgatgactc

SEQ ID NO: 442372 - DNA, 15 bp, Homo sapiens
ccttttttgatgact

SEQ ID NO: 442373 - DNA, 15 bp, Homo sapiens
accttttttgatgac

SEQ ID NO: 442374 - DNA, 15 bp, Homo sapiens
aaccttttttgatga

SEQ ID NO: 442375 - DNA, 15 bp, Homo sapiens
taaccttttttgatg

SEQ ID NO: 442376 - DNA, 15 bp, Homo sapiens
ttaaccttttttgat

SEQ ID NO: 442377 - DNA, 15 bp, Homo sapiens
tttaaccttttttga

SEQ ID NO: 442378 - DNA, 15 bp, Homo sapiens
atttaaccttttttg

SEQ ID NO: 442379 - DNA, 15 bp, Homo sapiens
aatttaacctttttt

SEQ ID NO: 442380 - DNA, 15 bp, Homo sapiens
aaatttaaccttttt

SEQ ID NO: 442381 - DNA, 15 bp, Homo sapiens
caaatttaacctttt

SEQ ID NO: 442382 - DNA, 15 bp, Homo sapiens
ccaaatttaaccttt

SEQ ID NO: 442383 - DNA, 15 bp, Homo sapiens
accaaatttaacctt

SEQ ID NO: 442384 - DNA, 15 bp, Homo sapiens
aaccaaatttaacct

SEQ ID NO: 442385 - DNA, 15 bp, Homo sapiens
gaaccaaatttaacc

SEQ ID NO: 442386 - DNA, 15 bp, Homo sapiens
tgaaccaaatttaac

SEQ ID NO: 442387 - DNA, 15 bp, Homo sapiens
ttgaaccaaatttaa

SEQ ID NO: 442388 - DNA, 15 bp, Homo sapiens
gttgaaccaaattta

SEQ ID NO: 442389 - DNA, 15 bp, Homo sapiens
ggttgaaccaaattt

SEQ ID NO: 442390 - DNA, 15 bp, Homo sapiens
aggttgaaccaaatt

SEQ ID NO: 442391 - DNA, 15 bp, Homo sapiens
taggttgaaccaaat

SEQ ID NO: 442392 - DNA, 15 bp, Homo sapiens
gtaggttgaaccaaa

SEQ ID NO: 442393 - DNA, 15 bp, Homo sapiens
agtaggttgaaccaa

SEQ ID NO: 442394 - DNA, 15 bp, Homo sapiens
gagtaggttgaacca

SEQ ID NO: 442395 - DNA, 15 bp, Homo sapiens
agagtaggttgaacc

SEQ ID NO: 442396 - DNA, 15 bp, Homo sapiens
gagagtaggttgaac

SEQ ID NO: 442397 - DNA, 15 bp, Homo sapiens
ggagagtaggttgaa

SEQ ID NO: 442398 - DNA, 15 bp, Homo sapiens
aggagagtaggttga

SEQ ID NO: 442399 - DNA, 15 bp, Homo sapiens
aaggagagtaggttg

SEQ ID NO: 442400 - DNA, 15 bp, Homo sapiens
taaggagagtaggtt

SEQ ID NO: 442401 - DNA, 15 bp, Homo sapiens
ttaaggagagtaggt

SEQ ID NO: 442402 - DNA, 15 bp, Homo sapiens
tttaaggagagtagg

SEQ ID NO: 442403 - DNA, 15 bp, Homo sapiens
ttttaaggagagtag

SEQ ID NO: 442404 - DNA, 15 bp, Homo sapiens
cttttaaggagagta

SEQ ID NO: 442405 - DNA, 15 bp, Homo sapiens
ccttttaaggagagt

SEQ ID NO: 442406 - DNA, 15 bp, Homo sapiens
gccttttaaggagag

SEQ ID NO: 442407 - DNA, 15 bp, Homo sapiens
tgccttttaaggaga

SEQ ID NO: 442408 - DNA, 15 bp, Homo sapiens
ttgccttttaaggag

SEQ ID NO: 442409 - DNA, 15 bp, Homo sapiens
tttgccttttaagga

SEQ ID NO: 442410 - DNA, 15 bp, Homo sapiens
ctttgccttttaagg

SEQ ID NO: 442411 - DNA, 15 bp, Homo sapiens
tctttgccttttaag

SEQ ID NO: 442412 - DNA, 15 bp, Homo sapiens
ttctttgccttttaa

SEQ ID NO: 442413 - DNA, 15 bp, Homo sapiens
tttctttgcctttta

SEQ ID NO: 442414 - DNA, 15 bp, Homo sapiens
atttctttgcctttt

SEQ ID NO: 442415 - DNA, 15 bp, Homo sapiens
catttctttgccttt

SEQ ID NO: 442416 - DNA, 15 bp, Homo sapiens
acatttctttgcctt

SEQ ID NO: 442417 - DNA, 15 bp, Homo sapiens
cacatttctttgcct

SEQ ID NO: 442418 - DNA, 15 bp, Homo sapiens
acacatttctttgcc

SEQ ID NO: 442419 - DNA, 15 bp, Homo sapiens
tacacatttctttgc

SEQ ID NO: 442420 - DNA, 15 bp, Homo sapiens
ttacacatttctttg

SEQ ID NO: 442421 - DNA, 15 bp, Homo sapiens
attacacatttcttt

SEQ ID NO: 442422 - DNA, 15 bp, Homo sapiens
cattacacatttctt

SEQ ID NO: 442423 - DNA, 15 bp, Homo sapiens
gcattacacatttct

SEQ ID NO: 442424 - DNA, 15 bp, Homo sapiens
tgcattacacatttc

SEQ ID NO: 442425 - DNA, 15 bp, Homo sapiens
atgcattacacattt

SEQ ID NO: 442426 - DNA, 15 bp, Homo sapiens
aatgcattacacatt

SEQ ID NO: 442427 - DNA, 15 bp, Homo sapiens
aaatgcattacacat

SEQ ID NO: 442428 - DNA, 15 bp, Homo sapiens
aaaatgcattacaca

SEQ ID NO: 442429 - DNA, 15 bp, Homo sapiens
aaaaatgcattacac

SEQ ID NO: 442430 - DNA, 15 bp, Homo sapiens
taaaaatgcattaca

SEQ ID NO: 442431 - DNA, 15 bp, Homo sapiens
ctaaaaatgcattac

SEQ ID NO: 442432 - DNA, 15 bp, Homo sapiens
cctaaaaatgcatta

SEQ ID NO: 442433 - DNA, 15 bp, Homo sapiens
tcctaaaaatgcatt

SEQ ID NO: 442434 - DNA, 15 bp, Homo sapiens
ttcctaaaaatgcat

SEQ ID NO: 442435 - DNA, 15 bp, Homo sapiens
cttcctaaaaatgca

SEQ ID NO: 442436 - DNA, 15 bp, Homo sapiens
tcttcctaaaaatgc

SEQ ID NO: 442437 - DNA, 15 bp, Homo sapiens
atcttcctaaaaatg

SEQ ID NO: 442438 - DNA, 15 bp, Homo sapiens
aatcttcctaaaaat

SEQ ID NO: 442439 - DNA, 15 bp, Homo sapiens
aaatcttcctaaaaa

SEQ ID NO: 442440 - DNA, 15 bp, Homo sapiens
aaaatcttcctaaaa

SEQ ID NO: 442441 - DNA, 15 bp, Homo sapiens
aaaaatcttcctaaa

SEQ ID NO: 442442 - DNA, 15 bp, Homo sapiens
taaaaatcttcctaa

SEQ ID NO: 442443 - DNA, 15 bp, Homo sapiens
gtaaaaatcttccta

SEQ ID NO: 442444 - DNA, 15 bp, Homo sapiens
ggtaaaaatcttcct

SEQ ID NO: 442445 - DNA, 15 bp, Homo sapiens
tggtaaaaatcttcc

SEQ ID NO: 442446 - DNA, 15 bp, Homo sapiens
ttggtaaaaatcttc

SEQ ID NO: 442447 - DNA, 15 bp, Homo sapiens
attggtaaaaatctt

SEQ ID NO: 442448 - DNA, 15 bp, Homo sapiens
tattggtaaaaatct

SEQ ID NO: 442449 - DNA, 15 bp, Homo sapiens
ttattggtaaaaatc

SEQ ID NO: 442450 - DNA, 15 bp, Homo sapiens
attattggtaaaaat

SEQ ID NO: 442451 - DNA, 15 bp, Homo sapiens
tattattggtaaaaa

SEQ ID NO: 442452 - DNA, 15 bp, Homo sapiens
atattattggtaaaa

SEQ ID NO: 442453 - DNA, 15 bp, Homo sapiens
aatattattggtaaa

SEQ ID NO: 442454 - DNA, 15 bp, Homo sapiens
aaatattattggtaa

SEQ ID NO: 442455 - DNA, 15 bp, Homo sapiens
aaaatattattggta

SEQ ID NO: 442456 - DNA, 15 bp, Homo sapiens
taaaatattattggt

SEQ ID NO: 442457 - DNA, 15 bp, Homo sapiens
ttaaaatattattgg

SEQ ID NO: 442458 - DNA, 15 bp, Homo sapiens
attaaaatattattg

SEQ ID NO: 442459 - DNA, 15 bp, Homo sapiens
tattaaaatattatt

SEQ ID NO: 442460 - DNA, 15 bp, Homo sapiens
atattaaaatattat

SEQ ID NO: 442461 - DNA, 15 bp, Homo sapiens
aatattaaaatatta

SEQ ID NO: 442462 - DNA, 15 bp, Homo sapiens
aaatattaaaatatt

SEQ ID NO: 442463 - DNA, 15 bp, Homo sapiens
aaaatattaaaatat

SEQ ID NO: 442464 - DNA, 15 bp, Homo sapiens
taaaatattaaaata

SEQ ID NO: 442465 - DNA, 15 bp, Homo sapiens
ataaaatattaaaat

SEQ ID NO: 442466 - DNA, 15 bp, Homo sapiens
aataaaatattaaaa

SEQ ID NO: 442467 - DNA, 15 bp, Homo sapiens
taataaaatattaaa

SEQ ID NO: 442468 - DNA, 15 bp, Homo sapiens
ctaataaaatattaa

SEQ ID NO: 442469 - DNA, 15 bp, Homo sapiens
actaataaaatatta

SEQ ID NO: 442470 - DNA, 15 bp, Homo sapiens
aactaataaaatatt

SEQ ID NO: 442471 - DNA, 15 bp, Homo sapiens
aaactaataaaatat

SEQ ID NO: 442472 - DNA, 15 bp, Homo sapiens
aaaactaataaaata

SEQ ID NO: 442473 - DNA, 15 bp, Homo sapiens
aaaaactaataaaat

SEQ ID NO: 442474 - DNA, 15 bp, Homo sapiens
taaaaactaataaaa

SEQ ID NO: 442475 - DNA, 15 bp, Homo sapiens
ataaaaactaataaa

SEQ ID NO: 442476 - DNA, 15 bp, Homo sapiens
aataaaaactaataa

SEQ ID NO: 442477 - DNA, 15 bp, Homo sapiens
gaataaaaactaata

SEQ ID NO: 442478 - DNA, 15 bp, Homo sapiens
tgaataaaaactaat

SEQ ID NO: 442479 - DNA, 15 bp, Homo sapiens
ttgaataaaaactaa

SEQ ID NO: 442480 - DNA, 15 bp, Homo sapiens
gttgaataaaaacta

SEQ ID NO: 442481 - DNA, 15 bp, Homo sapiens
agttgaataaaaact

SEQ ID NO: 442482 - DNA, 15 bp, Homo sapiens
aagttgaataaaaac

SEQ ID NO: 442483 - DNA, 15 bp, Homo sapiens
taagttgaataaaaa

SEQ ID NO: 442484 - DNA, 15 bp, Homo sapiens
ttaagttgaataaaa

SEQ ID NO: 442485 - DNA, 15 bp, Homo sapiens
tttaagttgaataaa

SEQ ID NO: 442486 - DNA, 15 bp, Homo sapiens
ttttaagttgaataa

SEQ ID NO: 442487 - DNA, 15 bp, Homo sapiens
attttaagttgaata

SEQ ID NO: 442488 - DNA, 15 bp, Homo sapiens
aattttaagttgaat

SEQ ID NO: 442489 - DNA, 15 bp, Homo sapiens
aaattttaagttgaa

SEQ ID NO: 442490 - DNA, 15 bp, Homo sapiens
taaattttaagttga

SEQ ID NO: 442491 - DNA, 15 bp, Homo sapiens
ttaaattttaagttg

SEQ ID NO: 442492 - DNA, 15 bp, Homo sapiens
cttaaattttaagtt

SEQ ID NO: 442493 - DNA, 15 bp, Homo sapiens
gcttaaattttaagt

SEQ ID NO: 442494 - DNA, 15 bp, Homo sapiens
agcttaaattttaag

SEQ ID NO: 442495 - DNA, 15 bp, Homo sapiens
aagcttaaattttaa

SEQ ID NO: 442496 - DNA, 15 bp, Homo sapiens
aaagcttaaatttta

SEQ ID NO: 442497 - DNA, 15 bp, Homo sapiens
taaagcttaaatttt

SEQ ID NO: 442498 - DNA, 15 bp, Homo sapiens
ttaaagcttaaattt

SEQ ID NO: 442499 - DNA, 15 bp, Homo sapiens
attaaagcttaaatt

SEQ ID NO: 442500 - DNA, 15 bp, Homo sapiens
aattaaagcttaaat

SEQ ID NO: 442501 - DNA, 15 bp, Homo sapiens
taattaaagcttaaa

SEQ ID NO: 442502 - DNA, 15 bp, Homo sapiens
ataattaaagcttaa

SEQ ID NO: 442503 - DNA, 15 bp, Homo sapiens
aataattaaagctta

SEQ ID NO: 442504 - DNA, 15 bp, Homo sapiens
aaataattaaagctt

SEQ ID NO: 442505 - DNA, 15 bp, Homo sapiens
caaataattaaagct

SEQ ID NO: 442506 - DNA, 15 bp, Homo sapiens
ccaaataattaaagc

SEQ ID NO: 442507 - DNA, 15 bp, Homo sapiens
tccaaataattaaag

SEQ ID NO: 442508 - DNA, 15 bp, Homo sapiens
ttccaaataattaaa

SEQ ID NO: 442509 - DNA, 15 bp, Homo sapiens
tttccaaataattaa

SEQ ID NO: 442510 - DNA, 15 bp, Homo sapiens
ttttccaaataatta

SEQ ID NO: 442511 - DNA, 15 bp, Homo sapiens
attttccaaataatt

SEQ ID NO: 442512 - DNA, 15 bp, Homo sapiens
aattttccaaataat

SEQ ID NO: 442513 - DNA, 15 bp, Homo sapiens
gaattttccaaataa

SEQ ID NO: 442514 - DNA, 15 bp, Homo sapiens
tgaattttccaaata

SEQ ID NO: 442515 - DNA, 15 bp, Homo sapiens
gtgaattttccaaat

SEQ ID NO: 442516 - DNA, 15 bp, Homo sapiens
agtgaattttccaaa

SEQ ID NO: 442517 - DNA, 15 bp, Homo sapiens
aagtgaattttccaa

SEQ ID NO: 442518 - DNA, 15 bp, Homo sapiens
aaagtgaattttcca

SEQ ID NO: 442519 - DNA, 15 bp, Homo sapiens
aaaagtgaattttcc

SEQ ID NO: 442520 - DNA, 15 bp, Homo sapiens
caaaagtgaattttc

SEQ ID NO: 442521 - DNA, 15 bp, Homo sapiens
acaaaagtgaatttt

SEQ ID NO: 442522 - DNA, 15 bp, Homo sapiens
tacaaaagtgaattt

SEQ ID NO: 442523 - DNA, 15 bp, Homo sapiens
ttacaaaagtgaatt

SEQ ID NO: 442524 - DNA, 15 bp, Homo sapiens
tttacaaaagtgaat

SEQ ID NO: 442525 - DNA, 15 bp, Homo sapiens
atttacaaaagtgaa

SEQ ID NO: 442526 - DNA, 15 bp, Homo sapiens
catttacaaaagtga

SEQ ID NO: 442527 - DNA, 15 bp, Homo sapiens
acatttacaaaagtg

SEQ ID NO: 442528 - DNA, 15 bp, Homo sapiens
gacatttacaaaagt

SEQ ID NO: 442529 - DNA, 15 bp, Homo sapiens
agacatttacaaaag

SEQ ID NO: 442530 - DNA, 15 bp, Homo sapiens
tagacatttacaaaa

SEQ ID NO: 442531 - DNA, 15 bp, Homo sapiens
atagacatttacaaa

SEQ ID NO: 442532 - DNA, 15 bp, Homo sapiens
aatagacatttacaa

SEQ ID NO: 442533 - DNA, 15 bp, Homo sapiens
aaatagacatttaca

SEQ ID NO: 442534 - DNA, 15 bp, Homo sapiens
gaaatagacatttac

SEQ ID NO: 442535 - DNA, 15 bp, Homo sapiens
ggaaatagacattta

SEQ ID NO: 442536 - DNA, 15 bp, Homo sapiens
aggaaatagacattt

SEQ ID NO: 442537 - DNA, 15 bp, Homo sapiens
gaggaaatagacatt

SEQ ID NO: 442538 - DNA, 15 bp, Homo sapiens
agaggaaatagacat

SEQ ID NO: 442539 - DNA, 15 bp, Homo sapiens
gagaggaaatagaca

SEQ ID NO: 442540 - DNA, 15 bp, Homo sapiens
ggagaggaaatagac

SEQ ID NO: 442541 - DNA, 15 bp, Homo sapiens
cggagaggaaataga

SEQ ID NO: 442542 - DNA, 15 bp, Homo sapiens
acggagaggaaatag

SEQ ID NO: 442543 - DNA, 15 bp, Homo sapiens
cacggagaggaaata

SEQ ID NO: 442544 - DNA, 15 bp, Homo sapiens
tcacggagaggaaat

SEQ ID NO: 442545 - DNA, 15 bp, Homo sapiens
ttcacggagaggaaa

SEQ ID NO: 442546 - DNA, 15 bp, Homo sapiens
cttcacggagaggaa

SEQ ID NO: 442547 - DNA, 15 bp, Homo sapiens
gcttcacggagagga

SEQ ID NO: 442548 - DNA, 15 bp, Homo sapiens
tgcttcacggagagg

SEQ ID NO: 442549 - DNA, 15 bp, Homo sapiens
ttgcttcacggagag

SEQ ID NO: 442550 - DNA, 15 bp, Homo sapiens
cttgcttcacggaga

SEQ ID NO: 442551 - DNA, 15 bp, Homo sapiens
gcttgcttcacggag

SEQ ID NO: 442552 - DNA, 15 bp, Homo sapiens
ggcttgcttcacgga

SEQ ID NO: 442553 - DNA, 15 bp, Homo sapiens
gggcttgcttcacgg

SEQ ID NO: 442554 - DNA, 15 bp, Homo sapiens
tgggcttgcttcacg

SEQ ID NO: 442555 - DNA, 15 bp, Homo sapiens
atgggcttgcttcac

SEQ ID NO: 442556 - DNA, 15 bp, Homo sapiens
aatgggcttgcttca

SEQ ID NO: 442557 - DNA, 15 bp, Homo sapiens
aaatgggcttgcttc

SEQ ID NO: 442558 - DNA, 15 bp, Homo sapiens
gaaatgggcttgctt

SEQ ID NO: 442559 - DNA, 15 bp, Homo sapiens
tgaaatgggcttgct

SEQ ID NO: 442560 - DNA, 15 bp, Homo sapiens
ctgaaatgggcttgc

SEQ ID NO: 442561 - DNA, 15 bp, Homo sapiens
cctgaaatgggcttg

SEQ ID NO: 442562 - DNA, 15 bp, Homo sapiens
ccctgaaatgggctt

SEQ ID NO: 442563 - DNA, 15 bp, Homo sapiens
cccctgaaatgggct

SEQ ID NO: 442564 - DNA, 15 bp, Homo sapiens
gcccctgaaatgggc

SEQ ID NO: 442565 - DNA, 15 bp, Homo sapiens
agcccctgaaatggg

SEQ ID NO: 442566 - DNA, 15 bp, Homo sapiens
tagcccctgaaatgg

SEQ ID NO: 442567 - DNA, 15 bp, Homo sapiens
gtagcccctgaaatg

SEQ ID NO: 442568 - DNA, 15 bp, Homo sapiens
tgtagcccctgaaat

SEQ ID NO: 442569 - DNA, 15 bp, Homo sapiens
ctgtagcccctgaaa

SEQ ID NO: 442570 - DNA, 15 bp, Homo sapiens
tctgtagcccctgaa

SEQ ID NO: 442571 - DNA, 15 bp, Homo sapiens
ctctgtagcccctga

SEQ ID NO: 442572 - DNA, 15 bp, Homo sapiens
tctctgtagcccctg

SEQ ID NO: 442573 - DNA, 15 bp, Homo sapiens
atctctgtagcccct

SEQ ID NO: 442574 - DNA, 15 bp, Homo sapiens
gatctctgtagcccc

SEQ ID NO: 442575 - DNA, 15 bp, Homo sapiens
agatctctgtagccc

SEQ ID NO: 442576 - DNA, 15 bp, Homo sapiens
aagatctctgtagcc

SEQ ID NO: 442577 - DNA, 15 bp, Homo sapiens
gaagatctctgtagc

SEQ ID NO: 442578 - DNA, 15 bp, Homo sapiens
ggaagatctctgtag

SEQ ID NO: 442579 - DNA, 15 bp, Homo sapiens
aggaagatctctgta

SEQ ID NO: 442580 - DNA, 15 bp, Homo sapiens
caggaagatctctgt

SEQ ID NO: 442581 - DNA, 15 bp, Homo sapiens
gcaggaagatctctg

SEQ ID NO: 442582 - DNA, 15 bp, Homo sapiens
ggcaggaagatctct

SEQ ID NO: 442583 - DNA, 15 bp, Homo sapiens
cggcaggaagatctc

SEQ ID NO: 442584 - DNA, 15 bp, Homo sapiens
gcggcaggaagatct

SEQ ID NO: 442585 - DNA, 15 bp, Homo sapiens
ggcggcaggaagatc

SEQ ID NO: 442586 - DNA, 15 bp, Homo sapiens
tggcggcaggaagat

SEQ ID NO: 442587 - DNA, 15 bp, Homo sapiens
gtggcggcaggaaga

SEQ ID NO: 442588 - DNA, 15 bp, Homo sapiens
tgtggcggcaggaag

SEQ ID NO: 442589 - DNA, 15 bp, Homo sapiens
ctgtggcggcaggaa

SEQ ID NO: 442590 - DNA, 15 bp, Homo sapiens
tctgtggcggcagga

SEQ ID NO: 442591 - DNA, 15 bp, Homo sapiens
ttctgtggcggcagg

SEQ ID NO: 442592 - DNA, 15 bp, Homo sapiens
attctgtggcggcag

SEQ ID NO: 442593 - DNA, 15 bp, Homo sapiens
tattctgtggcggca

SEQ ID NO: 442594 - DNA, 15 bp, Homo sapiens
ctattctgtggcggc

SEQ ID NO: 442595 - DNA, 15 bp, Homo sapiens
gctattctgtggcgg

SEQ ID NO: 442596 - DNA, 15 bp, Homo sapiens
agctattctgtggcg

SEQ ID NO: 442597 - DNA, 15 bp, Homo sapiens
aagctattctgtggc

SEQ ID NO: 442598 - DNA, 15 bp, Homo sapiens
taagctattctgtgg

SEQ ID NO: 442599 - DNA, 15 bp, Homo sapiens
ataagctattctgtg

SEQ ID NO: 442600 - DNA, 15 bp, Homo sapiens
gataagctattctgt

SEQ ID NO: 442601 - DNA, 15 bp, Homo sapiens
tgataagctattctg

SEQ ID NO: 442602 - DNA, 15 bp, Homo sapiens
gtgataagctattct

SEQ ID NO: 442603 - DNA, 15 bp, Homo sapiens
agtgataagctattc

SEQ ID NO: 442604 - DNA, 15 bp, Homo sapiens
gagtgataagctatt

SEQ ID NO: 442605 - DNA, 15 bp, Homo sapiens
agagtgataagctat

SEQ ID NO: 442606 - DNA, 15 bp, Homo sapiens
cagagtgataagcta

SEQ ID NO: 442607 - DNA, 15 bp, Homo sapiens
ccagagtgataagct

SEQ ID NO: 442608 - DNA, 15 bp, Homo sapiens
accagagtgataagc

SEQ ID NO: 442609 - DNA, 15 bp, Homo sapiens
taccagagtgataag

SEQ ID NO: 442610 - DNA, 15 bp, Homo sapiens
ataccagagtgataa

SEQ ID NO: 442611 - DNA, 15 bp, Homo sapiens
gataccagagtgata

SEQ ID NO: 442612 - DNA, 15 bp, Homo sapiens
tgataccagagtgat

SEQ ID NO: 442613 - DNA, 15 bp, Homo sapiens
atgataccagagtga

SEQ ID NO: 442614 - DNA, 15 bp, Homo sapiens
catgataccagagtg

SEQ ID NO: 442615 - DNA, 15 bp, Homo sapiens
ccatgataccagagt

SEQ ID NO: 442616 - DNA, 15 bp, Homo sapiens
accatgataccagag

SEQ ID NO: 442617 - DNA, 15 bp, Homo sapiens
aaccatgataccaga

SEQ ID NO: 442618 - DNA, 15 bp, Homo sapiens
caaccatgataccag

SEQ ID NO: 442619 - DNA, 15 bp, Homo sapiens
acaaccatgatacca

SEQ ID NO: 442620 - DNA, 15 bp, Homo sapiens
aacaaccatgatacc

SEQ ID NO: 442621 - DNA, 15 bp, Homo sapiens
taacaaccatgatac

SEQ ID NO: 442622 - DNA, 15 bp, Homo sapiens
gtaacaaccatgata

SEQ ID NO: 442623 - DNA, 15 bp, Homo sapiens
agtaacaaccatgat

SEQ ID NO: 442624 - DNA, 15 bp, Homo sapiens
gagtaacaaccatga

SEQ ID NO: 442625 - DNA, 15 bp, Homo sapiens
agagtaacaaccatg

SEQ ID NO: 442626 - DNA, 15 bp, Homo sapiens
aagagtaacaaccat

SEQ ID NO: 442627 - DNA, 15 bp, Homo sapiens
aaagagtaacaacca

SEQ ID NO: 442628 - DNA, 15 bp, Homo sapiens
aaaagagtaacaacc

SEQ ID NO: 442629 - DNA, 15 bp, Homo sapiens
aaaaagagtaacaac

SEQ ID NO: 442630 - DNA, 15 bp, Homo sapiens
caaaaagagtaacaa

SEQ ID NO: 442631 - DNA, 15 bp, Homo sapiens
acaaaaagagtaaca

SEQ ID NO: 442632 - DNA, 15 bp, Homo sapiens
tacaaaaagagtaac

SEQ ID NO: 442633 - DNA, 15 bp, Homo sapiens
ttacaaaaagagtaa

SEQ ID NO: 442634 - DNA, 15 bp, Homo sapiens
attacaaaaagagta

SEQ ID NO: 442635 - DNA, 15 bp, Homo sapiens
aattacaaaaagagt

SEQ ID NO: 442636 - DNA, 15 bp, Homo sapiens
aaattacaaaaagag

SEQ ID NO: 442637 - DNA, 15 bp, Homo sapiens
taaattacaaaaaga

SEQ ID NO: 442638 - DNA, 15 bp, Homo sapiens
ctaaattacaaaaag

SEQ ID NO: 442639 - DNA, 15 bp, Homo sapiens
actaaattacaaaaa

SEQ ID NO: 442640 - DNA, 15 bp, Homo sapiens
cactaaattacaaaa

SEQ ID NO: 442641 - DNA, 15 bp, Homo sapiens
acactaaattacaaa

SEQ ID NO: 442642 - DNA, 15 bp, Homo sapiens
gacactaaattacaa

SEQ ID NO: 442643 - DNA, 15 bp, Homo sapiens
ggacactaaattaca

SEQ ID NO: 442644 - DNA, 15 bp, Homo sapiens
aggacactaaattac

SEQ ID NO: 442645 - DNA, 15 bp, Homo sapiens
taggacactaaatta

SEQ ID NO: 442646 - DNA, 15 bp, Homo sapiens
ttaggacactaaatt

SEQ ID NO: 442647 - DNA, 15 bp, Homo sapiens
tttaggacactaaat

SEQ ID NO: 442648 - DNA, 15 bp, Homo sapiens
atttaggacactaaa

SEQ ID NO: 442649 - DNA, 15 bp, Homo sapiens
aatttaggacactaa

SEQ ID NO: 442650 - DNA, 15 bp, Homo sapiens
aaatttaggacacta

SEQ ID NO: 442651 - DNA, 15 bp, Homo sapiens
aaaatttaggacact

SEQ ID NO: 442652 - DNA, 15 bp, Homo sapiens
taaaatttaggacac

SEQ ID NO: 442653 - DNA, 15 bp, Homo sapiens
gtaaaatttaggaca

SEQ ID NO: 442654 - DNA, 15 bp, Homo sapiens
tgtaaaatttaggac

SEQ ID NO: 442655 - DNA, 15 bp, Homo sapiens
gtgtaaaatttagga

SEQ ID NO: 442656 - DNA, 15 bp, Homo sapiens
tgtgtaaaatttagg

SEQ ID NO: 442657 - DNA, 15 bp, Homo sapiens
atgtgtaaaatttag

SEQ ID NO: 442658 - DNA, 15 bp, Homo sapiens
tatgtgtaaaattta

SEQ ID NO: 442659 - DNA, 15 bp, Homo sapiens
ttatgtgtaaaattt

SEQ ID NO: 442660 - DNA, 15 bp, Homo sapiens
tttatgtgtaaaatt

SEQ ID NO: 442661 - DNA, 15 bp, Homo sapiens
ttttatgtgtaaaat

SEQ ID NO: 442662 - DNA, 15 bp, Homo sapiens
tttttatgtgtaaaa

SEQ ID NO: 442663 - DNA, 15 bp, Homo sapiens
atttttatgtgtaaa

SEQ ID NO: 442664 - DNA, 15 bp, Homo sapiens
catttttatgtgtaa

SEQ ID NO: 442665 - DNA, 15 bp, Homo sapiens
gcatttttatgtgta

SEQ ID NO: 442666 - DNA, 15 bp, Homo sapiens
agcatttttatgtgt

SEQ ID NO: 442667 - DNA, 15 bp, Homo sapiens
tagcatttttatgtg

SEQ ID NO: 442668 - DNA, 15 bp, Homo sapiens
gtagcatttttatgt

SEQ ID NO: 442669 - DNA, 15 bp, Homo sapiens
ggtagcatttttatg

SEQ ID NO: 442670 - DNA, 15 bp, Homo sapiens
tggtagcatttttat

SEQ ID NO: 442671 - DNA, 15 bp, Homo sapiens
atggtagcattttta

SEQ ID NO: 442672 - DNA, 15 bp, Homo sapiens
gatggtagcattttt

SEQ ID NO: 442673 - DNA, 15 bp, Homo sapiens
agatggtagcatttt

SEQ ID NO: 442674 - DNA, 15 bp, Homo sapiens
gagatggtagcattt

SEQ ID NO: 442675 - DNA, 15 bp, Homo sapiens
tgagatggtagcatt

SEQ ID NO: 442676 - DNA, 15 bp, Homo sapiens
ttgagatggtagcat

SEQ ID NO: 442677 - DNA, 15 bp, Homo sapiens
cttgagatggtagca

SEQ ID NO: 442678 - DNA, 15 bp, Homo sapiens
gcttgagatggtagc

SEQ ID NO: 442679 - DNA, 15 bp, Homo sapiens
agcttgagatggtag

SEQ ID NO: 442680 - DNA, 15 bp, Homo sapiens
cagcttgagatggta

SEQ ID NO: 442681 - DNA, 15 bp, Homo sapiens
ccagcttgagatggt

SEQ ID NO: 442682 - DNA, 15 bp, Homo sapiens
cccagcttgagatgg

SEQ ID NO: 442683 - DNA, 15 bp, Homo sapiens
tcccagcttgagatg

SEQ ID NO: 442684 - DNA, 15 bp, Homo sapiens
ttcccagcttgagat

SEQ ID NO: 442685 - DNA, 15 bp, Homo sapiens
gttcccagcttgaga

SEQ ID NO: 442686 - DNA, 15 bp, Homo sapiens
tgttcccagcttgag

SEQ ID NO: 442687 - DNA, 15 bp, Homo sapiens
ctgttcccagcttga

SEQ ID NO: 442688 - DNA, 15 bp, Homo sapiens
actgttcccagcttg

SEQ ID NO: 442689 - DNA, 15 bp, Homo sapiens
cactgttcccagctt

SEQ ID NO: 442690 - DNA, 15 bp, Homo sapiens
ccactgttcccagct

SEQ ID NO: 442691 - DNA, 15 bp, Homo sapiens
gccactgttcccagc

SEQ ID NO: 442692 - DNA, 15 bp, Homo sapiens
tgccactgttcccag

SEQ ID NO: 442693 - DNA, 15 bp, Homo sapiens
atgccactgttccca

SEQ ID NO: 442694 - DNA, 15 bp, Homo sapiens
tatgccactgttccc

SEQ ID NO: 442695 - DNA, 15 bp, Homo sapiens
atatgccactgttcc

SEQ ID NO: 442696 - DNA, 15 bp, Homo sapiens
tatatgccactgttc

SEQ ID NO: 442697 - DNA, 15 bp, Homo sapiens
gtatatgccactgtt

SEQ ID NO: 442698 - DNA, 15 bp, Homo sapiens
ggtatatgccactgt

SEQ ID NO: 442699 - DNA, 15 bp, Homo sapiens
aggtatatgccactg

SEQ ID NO: 442700 - DNA, 15 bp, Homo sapiens
caggtatatgccact

SEQ ID NO: 442701 - DNA, 15 bp, Homo sapiens
acaggtatatgccac

SEQ ID NO: 442702 - DNA, 15 bp, Homo sapiens
tacaggtatatgcca

SEQ ID NO: 442703 - DNA, 15 bp, Homo sapiens
ctacaggtatatgcc

SEQ ID NO: 442704 - DNA, 15 bp, Homo sapiens
actacaggtatatgc

SEQ ID NO: 442705 - DNA, 15 bp, Homo sapiens
gactacaggtatatg

SEQ ID NO: 442706 - DNA, 15 bp, Homo sapiens
ggactacaggtatat

SEQ ID NO: 442707 - DNA, 15 bp, Homo sapiens
gggactacaggtata

SEQ ID NO: 442708 - DNA, 15 bp, Homo sapiens
ggggactacaggtat

SEQ ID NO: 442709 - DNA, 15 bp, Homo sapiens
tggggactacaggta

SEQ ID NO: 442710 - DNA, 15 bp, Homo sapiens
gtggggactacaggt

SEQ ID NO: 442711 - DNA, 15 bp, Homo sapiens
agtggggactacagg

SEQ ID NO: 442712 - DNA, 15 bp, Homo sapiens
tagtggggactacag

SEQ ID NO: 442713 - DNA, 15 bp, Homo sapiens
gtagtggggactaca

SEQ ID NO: 442714 - DNA, 15 bp, Homo sapiens
agtagtggggactac

SEQ ID NO: 442715 - DNA, 15 bp, Homo sapiens
aagtagtggggacta

SEQ ID NO: 442716 - DNA, 15 bp, Homo sapiens
caagtagtggggact

SEQ ID NO: 442717 - DNA, 15 bp, Homo sapiens
ccaagtagtggggac

SEQ ID NO: 442718 - DNA, 15 bp, Homo sapiens
cccaagtagtgggga

SEQ ID NO: 442719 - DNA, 15 bp, Homo sapiens
tcccaagtagtgggg

SEQ ID NO: 442720 - DNA, 15 bp, Homo sapiens
ctcccaagtagtggg

SEQ ID NO: 442721 - DNA, 15 bp, Homo sapiens
cctcccaagtagtgg

SEQ ID NO: 442722 - DNA, 15 bp, Homo sapiens
gcctcccaagtagtg

SEQ ID NO: 442723 - DNA, 15 bp, Homo sapiens
agcctcccaagtagt

SEQ ID NO: 442724 - DNA, 15 bp, Homo sapiens
tctcagcctcccaag

SEQ ID NO: 442725 - DNA, 15 bp, Homo sapiens
atctcagcctcccaa

SEQ ID NO: 442726 - DNA, 15 bp, Homo sapiens
catctcagcctccca

SEQ ID NO: 442727 - DNA, 15 bp, Homo sapiens
ccatctcagcctccc

SEQ ID NO: 442728 - DNA, 15 bp, Homo sapiens
cccatctcagcctcc

SEQ ID NO: 442729 - DNA, 15 bp, Homo sapiens
tcccatctcagcctc

SEQ ID NO: 442730 - DNA, 15 bp, Homo sapiens
ctcccatctcagcct

SEQ ID NO: 442731 - DNA, 15 bp, Homo sapiens
cctcccatctcagcc

SEQ ID NO: 442732 - DNA, 15 bp, Homo sapiens
tcctcccatctcagc

SEQ ID NO: 442733 - DNA, 15 bp, Homo sapiens
atcctcccatctcag

SEQ ID NO: 442734 - DNA, 15 bp, Homo sapiens
gatcctcccatctca

SEQ ID NO: 442735 - DNA, 15 bp, Homo sapiens
tgatcctcccatctc

SEQ ID NO: 442736 - DNA, 15 bp, Homo sapiens
atgatcctcccatct

SEQ ID NO: 442737 - DNA, 15 bp, Homo sapiens
aatgatcctcccatc

SEQ ID NO: 442738 - DNA, 15 bp, Homo sapiens
aaatgatcctcccat

SEQ ID NO: 442739 - DNA, 15 bp, Homo sapiens
caaatgatcctccca

SEQ ID NO: 442740 - DNA, 15 bp, Homo sapiens
tcaaatgatcctccc

SEQ ID NO: 442741 - DNA, 15 bp, Homo sapiens
ctcaaatgatcctcc

SEQ ID NO: 442742 - DNA, 15 bp, Homo sapiens
actcaaatgatcctc

SEQ ID NO: 442743 - DNA, 15 bp, Homo sapiens
gactcaaatgatcct

SEQ ID NO: 442744 - DNA, 15 bp, Homo sapiens
ggactcaaatgatcc

SEQ ID NO: 442745 - DNA, 15 bp, Homo sapiens
tggactcaaatgatc

SEQ ID NO: 442746 - DNA, 15 bp, Homo sapiens
ctggactcaaatgat

SEQ ID NO: 442747 - DNA, 15 bp, Homo sapiens
cctggactcaaatga

SEQ ID NO: 442748 - DNA, 15 bp, Homo sapiens
tcctggactcaaatg

SEQ ID NO: 442749 - DNA, 15 bp, Homo sapiens
ctcctggactcaaat

SEQ ID NO: 442750 - DNA, 15 bp, Homo sapiens
actcctggactcaaa

SEQ ID NO: 442751 - DNA, 15 bp, Homo sapiens
aactcctggactcaa

SEQ ID NO: 442752 - DNA, 15 bp, Homo sapiens
aaactcctggactca

SEQ ID NO: 442753 - DNA, 15 bp, Homo sapiens
taaactcctggactc

SEQ ID NO: 442754 - DNA, 15 bp, Homo sapiens
ttaaactcctggact

SEQ ID NO: 442755 - DNA, 15 bp, Homo sapiens
cttaaactcctggac

SEQ ID NO: 442756 - DNA, 15 bp, Homo sapiens
ccttaaactcctgga

SEQ ID NO: 442757 - DNA, 15 bp, Homo sapiens
gccttaaactcctgg

SEQ ID NO: 442758 - DNA, 15 bp, Homo sapiens
agccttaaactcctg

SEQ ID NO: 442759 - DNA, 15 bp, Homo sapiens
tagccttaaactcct

SEQ ID NO: 442760 - DNA, 15 bp, Homo sapiens
ctagccttaaactcc

SEQ ID NO: 442761 - DNA, 15 bp, Homo sapiens
gctagccttaaactc

SEQ ID NO: 442762 - DNA, 15 bp, Homo sapiens
ggctagccttaaact

SEQ ID NO: 442763 - DNA, 15 bp, Homo sapiens
aggctagccttaaac

SEQ ID NO: 442764 - DNA, 15 bp, Homo sapiens
caggctagccttaaa

SEQ ID NO: 442765 - DNA, 15 bp, Homo sapiens
ccaggctagccttaa

SEQ ID NO: 442766 - DNA, 15 bp, Homo sapiens
cccaggctagcctta

SEQ ID NO: 442767 - DNA, 15 bp, Homo sapiens
gcccaggctagcctt

SEQ ID NO: 442768 - DNA, 15 bp, Homo sapiens
tgcccaggctagcct

SEQ ID NO: 442769 - DNA, 15 bp, Homo sapiens
ctgcccaggctagcc

SEQ ID NO: 442770 - DNA, 15 bp, Homo sapiens
gctgcccaggctagc

SEQ ID NO: 442771 - DNA, 15 bp, Homo sapiens
tgctgcccaggctag

SEQ ID NO: 442772 - DNA, 15 bp, Homo sapiens
atgctgcccaggcta

SEQ ID NO: 442773 - DNA, 15 bp, Homo sapiens
tatgctgcccaggct

SEQ ID NO: 442774 - DNA, 15 bp, Homo sapiens
ctatgctgcccaggc

SEQ ID NO: 442775 - DNA, 15 bp, Homo sapiens
cctatgctgcccagg

SEQ ID NO: 442776 - DNA, 15 bp, Homo sapiens
ccctatgctgcccag

SEQ ID NO: 442777 - DNA, 15 bp, Homo sapiens
tccctatgctgccca

SEQ ID NO: 442778 - DNA, 15 bp, Homo sapiens
ctccctatgctgccc

SEQ ID NO: 442779 - DNA, 15 bp, Homo sapiens
tctccctatgctgcc

SEQ ID NO: 442780 - DNA, 15 bp, Homo sapiens
gtctccctatgctgc

SEQ ID NO: 442781 - DNA, 15 bp, Homo sapiens
ggtctccctatgctg

SEQ ID NO: 442782 - DNA, 15 bp, Homo sapiens
gggtctccctatgct

SEQ ID NO: 442783 - DNA, 15 bp, Homo sapiens
agggtctccctatgc

SEQ ID NO: 442784 - DNA, 15 bp, Homo sapiens
cagggtctccctatg

SEQ ID NO: 442785 - DNA, 15 bp, Homo sapiens
acagggtctccctat

SEQ ID NO: 442786 - DNA, 15 bp, Homo sapiens
tagacagggtctccc

SEQ ID NO: 442787 - DNA, 15 bp, Homo sapiens
ttagacagggtctcc

SEQ ID NO: 442788 - DNA, 15 bp, Homo sapiens
tttagacagggtctc

SEQ ID NO: 442789 - DNA, 15 bp, Homo sapiens
ttttagacagggtct

SEQ ID NO: 442790 - DNA, 15 bp, Homo sapiens
tttttagacagggtc

SEQ ID NO: 442791 - DNA, 15 bp, Homo sapiens
ttttttagacagggt

SEQ ID NO: 442792 - DNA, 15 bp, Homo sapiens
tttttttagacaggg

SEQ ID NO: 442793 - DNA, 15 bp, Homo sapiens
ctttttttagacagg

SEQ ID NO: 442794 - DNA, 15 bp, Homo sapiens
tctttttttagacag

SEQ ID NO: 442795 - DNA, 15 bp, Homo sapiens
ttctttttttagaca

SEQ ID NO: 442796 - DNA, 15 bp, Homo sapiens
tttctttttttagac

SEQ ID NO: 442797 - DNA, 15 bp, Homo sapiens
ttttctttttttaga

SEQ ID NO: 442798 - DNA, 15 bp, Homo sapiens
tttttctttttttag

SEQ ID NO: 442799 - DNA, 15 bp, Homo sapiens
ttttttcttttttta

SEQ ID NO: 442800 - DNA, 15 bp, Homo sapiens
tttcttttttctttt

SEQ ID NO: 442801 - DNA, 15 bp, Homo sapiens
ctttcttttttcttt

SEQ ID NO: 442802 - DNA, 15 bp, Homo sapiens
actttcttttttctt

SEQ ID NO: 442803 - DNA, 15 bp, Homo sapiens
cactttcttttttct

SEQ ID NO: 442804 - DNA, 15 bp, Homo sapiens
ccactttcttttttc

SEQ ID NO: 442805 - DNA, 15 bp, Homo sapiens
accactttctttttt

SEQ ID NO: 442806 - DNA, 15 bp, Homo sapiens
taccactttcttttt

SEQ ID NO: 442807 - DNA, 15 bp, Homo sapiens
ctaccactttctttt

SEQ ID NO: 442808 - DNA, 15 bp, Homo sapiens
tctaccactttcttt

SEQ ID NO: 442809 - DNA, 15 bp, Homo sapiens
atctaccactttctt

SEQ ID NO: 442810 - DNA, 15 bp, Homo sapiens
catctaccactttct

SEQ ID NO: 442811 - DNA, 15 bp, Homo sapiens
tcatctaccactttc

SEQ ID NO: 442812 - DNA, 15 bp, Homo sapiens
ttcatctaccacttt

SEQ ID NO: 442813 - DNA, 15 bp, Homo sapiens
gttcatctaccactt

SEQ ID NO: 442814 - DNA, 15 bp, Homo sapiens
agttcatctaccact

SEQ ID NO: 442815 - DNA, 15 bp, Homo sapiens
cagttcatctaccac

SEQ ID NO: 442816 - DNA, 15 bp, Homo sapiens
tcagttcatctacca

SEQ ID NO: 442817 - DNA, 15 bp, Homo sapiens
ttcagttcatctacc

SEQ ID NO: 442818 - DNA, 15 bp, Homo sapiens
cttcagttcatctac

SEQ ID NO: 442819 - DNA, 15 bp, Homo sapiens
tcttcagttcatcta

SEQ ID NO: 442820 - DNA, 15 bp, Homo sapiens
ctcttcagttcatct

SEQ ID NO: 442821 - DNA, 15 bp, Homo sapiens
cctcttcagttcatc

SEQ ID NO: 442822 - DNA, 15 bp, Homo sapiens
acctcttcagttcat

SEQ ID NO: 442823 - DNA, 15 bp, Homo sapiens
aacctcttcagttca

SEQ ID NO: 442824 - DNA, 15 bp, Homo sapiens
caacctcttcagttc

SEQ ID NO: 442825 - DNA, 15 bp, Homo sapiens
tcaacctcttcagtt

SEQ ID NO: 442826 - DNA, 15 bp, Homo sapiens
ttcaacctcttcagt

SEQ ID NO: 442827 - DNA, 15 bp, Homo sapiens
tttcaacctcttcag

SEQ ID NO: 442828 - DNA, 15 bp, Homo sapiens
atttcaacctcttca

SEQ ID NO: 442829 - DNA, 15 bp, Homo sapiens
tatttcaacctcttc

SEQ ID NO: 442830 - DNA, 15 bp, Homo sapiens
ctatttcaacctctt

SEQ ID NO: 442831 - DNA, 15 bp, Homo sapiens
tctatttcaacctct

SEQ ID NO: 442832 - DNA, 15 bp, Homo sapiens
atctatttcaacctc

SEQ ID NO: 442833 - DNA, 15 bp, Homo sapiens
tatctatttcaacct

SEQ ID NO: 442834 - DNA, 15 bp, Homo sapiens
ttatctatttcaacc

SEQ ID NO: 442835 - DNA, 15 bp, Homo sapiens
attatctatttcaac

SEQ ID NO: 442836 - DNA, 15 bp, Homo sapiens
tattatctatttcaa

SEQ ID NO: 442837 - DNA, 15 bp, Homo sapiens
gtattatctatttca

SEQ ID NO: 442838 - DNA, 15 bp, Homo sapiens
agtattatctatttc

SEQ ID NO: 442839 - DNA, 15 bp, Homo sapiens
cagtattatctattt

SEQ ID NO: 442840 - DNA, 15 bp, Homo sapiens
acagtattatctatt

SEQ ID NO: 442841 - DNA, 15 bp, Homo sapiens
cacagtattatctat

SEQ ID NO: 442842 - DNA, 15 bp, Homo sapiens
gcacagtattatcta

SEQ ID NO: 442843 - DNA, 15 bp, Homo sapiens
cgcacagtattatct

SEQ ID NO: 442844 - DNA, 15 bp, Homo sapiens
acgcacagtattatc

SEQ ID NO: 442845 - DNA, 15 bp, Homo sapiens
cacgcacagtattat

SEQ ID NO: 442846 - DNA, 15 bp, Homo sapiens
acacgcacagtatta

SEQ ID NO: 442847 - DNA, 15 bp, Homo sapiens
tacacgcacagtatt

SEQ ID NO: 442848 - DNA, 15 bp, Homo sapiens
atacacgcacagtat

SEQ ID NO: 442849 - DNA, 15 bp, Homo sapiens
catacacgcacagta

SEQ ID NO: 442850 - DNA, 15 bp, Homo sapiens
acatacacgcacagt

SEQ ID NO: 442851 - DNA, 15 bp, Homo sapiens
gacatacacgcacag

SEQ ID NO: 442852 - DNA, 15 bp, Homo sapiens
tgacatacacgcaca

SEQ ID NO: 442853 - DNA, 15 bp, Homo sapiens
atgacatacacgcac

SEQ ID NO: 442854 - DNA, 15 bp, Homo sapiens
catgacatacacgca

SEQ ID NO: 442855 - DNA, 15 bp, Homo sapiens
gcatgacatacacgc

SEQ ID NO: 442856 - DNA, 15 bp, Homo sapiens
agcatgacatacacg

SEQ ID NO: 442857 - DNA, 15 bp, Homo sapiens
tagcatgacatacac

SEQ ID NO: 442858 - DNA, 15 bp, Homo sapiens
ttagcatgacataca

SEQ ID NO: 442859 - DNA, 15 bp, Homo sapiens
cttagcatgacatac

SEQ ID NO: 442860 - DNA, 15 bp, Homo sapiens
ccttagcatgacata

SEQ ID NO: 442861 - DNA, 15 bp, Homo sapiens
cccttagcatgacat

SEQ ID NO: 442862 - DNA, 15 bp, Homo sapiens
ccccttagcatgaca

SEQ ID NO: 442863 - DNA, 15 bp, Homo sapiens
accccttagcatgac

SEQ ID NO: 442864 - DNA, 15 bp, Homo sapiens
aaccccttagcatga

SEQ ID NO: 442865 - DNA, 15 bp, Homo sapiens
aaaccccttagcatg

SEQ ID NO: 442866 - DNA, 15 bp, Homo sapiens
taaaccccttagcat

SEQ ID NO: 442867 - DNA, 15 bp, Homo sapiens
ttaaaccccttagca

SEQ ID NO: 442868 - DNA, 15 bp, Homo sapiens
tttaaaccccttagc

SEQ ID NO: 442869 - DNA, 15 bp, Homo sapiens
acaaagaaggtaaga

SEQ ID NO: 442870 - DNA, 15 bp, Homo sapiens
aacaaagaaggtaag

SEQ ID NO: 442871 - DNA, 15 bp, Homo sapiens
aaacaaagaaggtaa

SEQ ID NO: 442872 - DNA, 15 bp, Homo sapiens
taaacaaagaaggta

SEQ ID NO: 442873 - DNA, 15 bp, Homo sapiens
ttaaacaaagaaggt

SEQ ID NO: 442874 - DNA, 15 bp, Homo sapiens
cttaaacaaagaagg

SEQ ID NO: 442875 - DNA, 15 bp, Homo sapiens
ccttaaacaaagaag

SEQ ID NO: 442876 - DNA, 15 bp, Homo sapiens
cccttaaacaaagaa

SEQ ID NO: 442877 - DNA, 15 bp, Homo sapiens
gcccttaaacaaaga

SEQ ID NO: 442878 - DNA, 15 bp, Homo sapiens
agcccttaaacaaag

SEQ ID NO: 442879 - DNA, 15 bp, Homo sapiens
aagcccttaaacaaa

SEQ ID NO: 442880 - DNA, 15 bp, Homo sapiens
acttttcagtctctc

SEQ ID NO: 442881 - DNA, 15 bp, Homo sapiens
aacttttcagtctct

SEQ ID NO: 442882 - DNA, 15 bp, Homo sapiens
aaacttttcagtctc

SEQ ID NO: 442883 - DNA, 15 bp, Homo sapiens
taaacttttcagtct

SEQ ID NO: 442884 - DNA, 15 bp, Homo sapiens
gtaaacttttcagtc

SEQ ID NO: 442885 - DNA, 15 bp, Homo sapiens
cgtaaacttttcagt

SEQ ID NO: 442886 - DNA, 15 bp, Homo sapiens
ccgtaaacttttcag

SEQ ID NO: 442887 - DNA, 15 bp, Homo sapiens
tccgtaaacttttca

SEQ ID NO: 442888 - DNA, 15 bp, Homo sapiens
atccgtaaacttttc

SEQ ID NO: 442889 - DNA, 15 bp, Homo sapiens
aatccgtaaactttt

SEQ ID NO: 442890 - DNA, 15 bp, Homo sapiens
gaatccgtaaacttt

SEQ ID NO: 442891 - DNA, 15 bp, Homo sapiens
agaatccgtaaactt

SEQ ID NO: 442892 - DNA, 15 bp, Homo sapiens
cagaatccgtaaact

SEQ ID NO: 442893 - DNA, 15 bp, Homo sapiens
gcagaatccgtaaac

SEQ ID NO: 442894 - DNA, 15 bp, Homo sapiens
agcagaatccgtaaa

SEQ ID NO: 442895 - DNA, 15 bp, Homo sapiens
tagcagaatccgtaa

SEQ ID NO: 442896 - DNA, 15 bp, Homo sapiens
ctagcagaatccgta

SEQ ID NO: 442897 - DNA, 15 bp, Homo sapiens
gctagcagaatccgt

SEQ ID NO: 442898 - DNA, 15 bp, Homo sapiens
agctagcagaatccg

SEQ ID NO: 442899 - DNA, 15 bp, Homo sapiens
cagctagcagaatcc

SEQ ID NO: 442900 - DNA, 15 bp, Homo sapiens
acagctagcagaatc

SEQ ID NO: 442901 - DNA, 15 bp, Homo sapiens
tacagctagcagaat

SEQ ID NO: 442902 - DNA, 15 bp, Homo sapiens
gtacagctagcagaa

SEQ ID NO: 442903 - DNA, 15 bp, Homo sapiens
agtacagctagcaga

SEQ ID NO: 442904 - DNA, 15 bp, Homo sapiens
cagtacagctagcag

SEQ ID NO: 442905 - DNA, 15 bp, Homo sapiens
ccagtacagctagca

SEQ ID NO: 442906 - DNA, 15 bp, Homo sapiens
cccagtacagctagc

SEQ ID NO: 442907 - DNA, 15 bp, Homo sapiens
gcccagtacagctag

SEQ ID NO: 442908 - DNA, 15 bp, Homo sapiens
ggcccagtacagcta

SEQ ID NO: 442909 - DNA, 15 bp, Homo sapiens
gggcccagtacagct

SEQ ID NO: 442910 - DNA, 15 bp, Homo sapiens
ggggcccagtacagc

SEQ ID NO: 442911 - DNA, 15 bp, Homo sapiens
tggggcccagtacag

SEQ ID NO: 442912 - DNA, 15 bp, Homo sapiens
ctggggcccagtaca

SEQ ID NO: 442913 - DNA, 15 bp, Homo sapiens
cctggggcccagtac

SEQ ID NO: 442914 - DNA, 15 bp, Homo sapiens
acctggggcccagta

SEQ ID NO: 442915 - DNA, 15 bp, Homo sapiens
cacctggggcccagt

SEQ ID NO: 442916 - DNA, 15 bp, Homo sapiens
tcacctggggcccag

SEQ ID NO: 442917 - DNA, 15 bp, Homo sapiens
gtcacctggggccca

SEQ ID NO: 442918 - DNA, 15 bp, Homo sapiens
cgtcacctggggccc

SEQ ID NO: 442919 - DNA, 15 bp, Homo sapiens
tcgtcacctggggcc

SEQ ID NO: 442920 - DNA, 15 bp, Homo sapiens
ctcgtcacctggggc

SEQ ID NO: 442921 - DNA, 15 bp, Homo sapiens
cctcgtcacctgggg

SEQ ID NO: 442922 - DNA, 15 bp, Homo sapiens
gcctcgtcacctggg

SEQ ID NO: 442923 - DNA, 15 bp, Homo sapiens
tgcctcgtcacctgg

SEQ ID NO: 442924 - DNA, 15 bp, Homo sapiens
atgcctcgtcacctg

SEQ ID NO: 442925 - DNA, 15 bp, Homo sapiens
gatgcctcgtcacct

SEQ ID NO: 442926 - DNA, 15 bp, Homo sapiens
tgatgcctcgtcacc

SEQ ID NO: 442927 - DNA, 15 bp, Homo sapiens
atgatgcctcgtcac

SEQ ID NO: 442928 - DNA, 15 bp, Homo sapiens
tatgatgcctcgtca

SEQ ID NO: 442929 - DNA, 15 bp, Homo sapiens
ctatgatgcctcgtc

SEQ ID NO: 442930 - DNA, 15 bp, Homo sapiens
actatgatgcctcgt

SEQ ID NO: 442931 - DNA, 15 bp, Homo sapiens
gactatgatgcctcg

SEQ ID NO: 442932 - DNA, 15 bp, Homo sapiens
agactatgatgcctc

SEQ ID NO: 442933 - DNA, 15 bp, Homo sapiens
gagactatgatgcct

SEQ ID NO: 442934 - DNA, 15 bp, Homo sapiens
tgagactatgatgcc

SEQ ID NO: 442935 - DNA, 15 bp, Homo sapiens
ctgagactatgatgc

SEQ ID NO: 442936 - DNA, 15 bp, Homo sapiens
actgagactatgatg

SEQ ID NO: 442937 - DNA, 15 bp, Homo sapiens
gactgagactatgat

SEQ ID NO: 442938 - DNA, 15 bp, Homo sapiens
tgactgagactatga

SEQ ID NO: 442939 - DNA, 15 bp, Homo sapiens
ctgactgagactatg

SEQ ID NO: 442940 - DNA, 15 bp, Homo sapiens
actgactgagactat

SEQ ID NO: 442941 - DNA, 15 bp, Homo sapiens
gactgactgagacta

SEQ ID NO: 442942 - DNA, 15 bp, Homo sapiens
ggactgactgagact

SEQ ID NO: 442943 - DNA, 15 bp, Homo sapiens
tggactgactgagac

SEQ ID NO: 442944 - DNA, 15 bp, Homo sapiens
ctggactgactgaga

SEQ ID NO: 442945 - DNA, 15 bp, Homo sapiens
cctggactgactgag

SEQ ID NO: 442946 - DNA, 15 bp, Homo sapiens
tcctggactgactga

SEQ ID NO: 442947 - DNA, 15 bp, Homo sapiens
ttcctggactgactg

SEQ ID NO: 442948 - DNA, 15 bp, Homo sapiens
attcctggactgact

SEQ ID NO: 442949 - DNA, 15 bp, Homo sapiens
tattcctggactgac

SEQ ID NO: 442950 - DNA, 15 bp, Homo sapiens
gtattcctggactga

SEQ ID NO: 442951 - DNA, 15 bp, Homo sapiens
ggtattcctggactg

SEQ ID NO: 442952 - DNA, 15 bp, Homo sapiens
gggtattcctggact

SEQ ID NO: 442953 - DNA, 15 bp, Homo sapiens
agggtattcctggac

SEQ ID NO: 442954 - DNA, 15 bp, Homo sapiens
aagggtattcctgga

SEQ ID NO: 442955 - DNA, 15 bp, Homo sapiens
gaagggtattcctgg

SEQ ID NO: 442956 - DNA, 15 bp, Homo sapiens
agaagggtattcctg

SEQ ID NO: 442957 - DNA, 15 bp, Homo sapiens
gagaagggtattcct

SEQ ID NO: 442958 - DNA, 15 bp, Homo sapiens
agagaagggtattcc

SEQ ID NO: 442959 - DNA, 15 bp, Homo sapiens
gagagaagggtattc

SEQ ID NO: 442960 - DNA, 15 bp, Homo sapiens
ggagagaagggtatt

SEQ ID NO: 442961 - DNA, 15 bp, Homo sapiens
aggagagaagggtat

SEQ ID NO: 442962 - DNA, 15 bp, Homo sapiens
aaggagagaagggta

SEQ ID NO: 442963 - DNA, 15 bp, Homo sapiens
aaaggagagaagggt

SEQ ID NO: 442964 - DNA, 15 bp, Homo sapiens
aaaaggagagaaggg

SEQ ID NO: 442965 - DNA, 15 bp, Homo sapiens
aaaaaggagagaagg

SEQ ID NO: 442966 - DNA, 15 bp, Homo sapiens
aaaaaaggagagaag

SEQ ID NO: 442967 - DNA, 15 bp, Homo sapiens
aaaaaaaggagagaa

SEQ ID NO: 442968 - DNA, 15 bp, Homo sapiens
aaaaaaaaggagaga

SEQ ID NO: 442969 - DNA, 15 bp, Homo sapiens
taaaaaaaaggagag

SEQ ID NO: 442970 - DNA, 15 bp, Homo sapiens
gtaaaaaaaaggaga

SEQ ID NO: 442971 - DNA, 15 bp, Homo sapiens
tgtaaaaaaaaggag

SEQ ID NO: 442972 - DNA, 15 bp, Homo sapiens
ttgtaaaaaaaagga

SEQ ID NO: 442973 - DNA, 15 bp, Homo sapiens
attgtaaaaaaaagg

SEQ ID NO: 442974 - DNA, 15 bp, Homo sapiens
tattgtaaaaaaaag

SEQ ID NO: 442975 - DNA, 15 bp, Homo sapiens
acagggtgtcttgac

SEQ ID NO: 442976 - DNA, 15 bp, Homo sapiens
aacagggtgtcttga

SEQ ID NO: 442977 - DNA, 15 bp, Homo sapiens
aaacagggtgtcttg

SEQ ID NO: 442978 - DNA, 15 bp, Homo sapiens
gaaacagggtgtctt

SEQ ID NO: 442979 - DNA, 15 bp, Homo sapiens
tgaaacagggtgtct

SEQ ID NO: 442980 - DNA, 15 bp, Homo sapiens
ttgaaacagggtgtc

SEQ ID NO: 442981 - DNA, 15 bp, Homo sapiens
cttgaaacagggtgt

SEQ ID NO: 442982 - DNA, 15 bp, Homo sapiens
ccttgaaacagggtg

SEQ ID NO: 442983 - DNA, 15 bp, Homo sapiens
cccttgaaacagggt

SEQ ID NO: 442984 - DNA, 15 bp, Homo sapiens
ccccttgaaacaggg

SEQ ID NO: 442985 - DNA, 15 bp, Homo sapiens
tccccttgaaacagg

SEQ ID NO: 442986 - DNA, 15 bp, Homo sapiens
ttccccttgaaacag

SEQ ID NO: 442987 - DNA, 15 bp, Homo sapiens
tttccccttgaaaca

SEQ ID NO: 442988 - DNA, 15 bp, Homo sapiens
gtttccccttgaaac

SEQ ID NO: 442989 - DNA, 15 bp, Homo sapiens
ggtttccccttgaaa

SEQ ID NO: 442990 - DNA, 15 bp, Homo sapiens
aggtttccccttgaa

SEQ ID NO: 442991 - DNA, 15 bp, Homo sapiens
aaggtttccccttga

SEQ ID NO: 442992 - DNA, 15 bp, Homo sapiens
caaggtttccccttg

SEQ ID NO: 442993 - DNA, 15 bp, Homo sapiens
acaaggtttcccctt

SEQ ID NO: 442994 - DNA, 15 bp, Homo sapiens
aacaaggtttcccct

SEQ ID NO: 442995 - DNA, 15 bp, Homo sapiens
aaacaaggtttcccc

SEQ ID NO: 442996 - DNA, 15 bp, Homo sapiens
taaacaaggtttccc

SEQ ID NO: 442997 - DNA, 15 bp, Homo sapiens
ataaacaaggtttcc

SEQ ID NO: 442998 - DNA, 15 bp, Homo sapiens
aataaacaaggtttc

SEQ ID NO: 442999 - DNA, 15 bp, Homo sapiens
caataaacaaggttt

SEQ ID NO: 443000 - DNA, 15 bp, Homo sapiens
acaataaacaaggtt

SEQ ID NO: 443001 - DNA, 15 bp, Homo sapiens
aacaataaacaaggt

SEQ ID NO: 443002 - DNA, 15 bp, Homo sapiens
gaacaataaacaagg

SEQ ID NO: 443003 - DNA, 15 bp, Homo sapiens
ggaacaataaacaag

SEQ ID NO: 443004 - DNA, 15 bp, Homo sapiens
gggaacaataaacaa

SEQ ID NO: 443005 - DNA, 15 bp, Homo sapiens
tgggaacaataaaca

SEQ ID NO: 443006 - DNA, 15 bp, Homo sapiens
gtgggaacaataaac

SEQ ID NO: 443007 - DNA, 15 bp, Homo sapiens
ggtgggaacaataaa

SEQ ID NO: 443008 - DNA, 15 bp, Homo sapiens
tggtgggaacaataa

SEQ ID NO: 443009 - DNA, 15 bp, Homo sapiens
gtggtgggaacaata

SEQ ID NO: 443010 - DNA, 15 bp, Homo sapiens
agtggtgggaacaat

SEQ ID NO: 443011 - DNA, 15 bp, Homo sapiens
cagtggtgggaacaa

SEQ ID NO: 443012 - DNA, 15 bp, Homo sapiens
tcagtggtgggaaca

SEQ ID NO: 443013 - DNA, 15 bp, Homo sapiens
atcagtggtgggaac

SEQ ID NO: 443014 - DNA, 15 bp, Homo sapiens
aatcagtggtgggaa

SEQ ID NO: 443015 - DNA, 15 bp, Homo sapiens
gaatcagtggtggga

SEQ ID NO: 443016 - DNA, 15 bp, Homo sapiens
ggaatcagtggtggg

SEQ ID NO: 443017 - DNA, 15 bp, Homo sapiens
cggaatcagtggtgg

SEQ ID NO: 443018 - DNA, 15 bp, Homo sapiens
tcggaatcagtggtg

SEQ ID NO: 443019 - DNA, 15 bp, Homo sapiens
gtcggaatcagtggt

SEQ ID NO: 443020 - DNA, 15 bp, Homo sapiens
ggtcggaatcagtgg

SEQ ID NO: 443021 - DNA, 15 bp, Homo sapiens
tggtcggaatcagtg

SEQ ID NO: 443022 - DNA, 15 bp, Homo sapiens
gtggtcggaatcagt

SEQ ID NO: 443023 - DNA, 15 bp, Homo sapiens
cgtggtcggaatcag

SEQ ID NO: 443024 - DNA, 15 bp, Homo sapiens
acgtggtcggaatca

SEQ ID NO: 443025 - DNA, 15 bp, Homo sapiens
tacgtggtcggaatc

SEQ ID NO: 443026 - DNA, 15 bp, Homo sapiens
ttacgtggtcggaat

SEQ ID NO: 443027 - DNA, 15 bp, Homo sapiens
gttacgtggtcggaa

SEQ ID NO: 443028 - DNA, 15 bp, Homo sapiens
ggttacgtggtcgga

SEQ ID NO: 443029 - DNA, 15 bp, Homo sapiens
gggttacgtggtcgg

SEQ ID NO: 443030 - DNA, 15 bp, Homo sapiens
agggttacgtggtcg

SEQ ID NO: 443031 - DNA, 15 bp, Homo sapiens
aagggttacgtggtc

SEQ ID NO: 443032 - DNA, 15 bp, Homo sapiens
gaagggttacgtggt

SEQ ID NO: 443033 - DNA, 15 bp, Homo sapiens
agcgaggaacagcgg

SEQ ID NO: 443034 - DNA, 15 bp, Homo sapiens
cagcgaggaacagcg

SEQ ID NO: 443035 - DNA, 15 bp, Homo sapiens
gcagcgaggaacagc

SEQ ID NO: 443036 - DNA, 15 bp, Homo sapiens
ggcagcgaggaacag

SEQ ID NO: 443037 - DNA, 15 bp, Homo sapiens
tggcagcgaggaaca

SEQ ID NO: 443038 - DNA, 15 bp, Homo sapiens
atggcagcgaggaac

SEQ ID NO: 443039 - DNA, 15 bp, Homo sapiens
tatggcagcgaggaa

SEQ ID NO: 443040 - DNA, 15 bp, Homo sapiens
ctatggcagcgagga

SEQ ID NO: 443041 - DNA, 15 bp, Homo sapiens
cctatggcagcgagg

SEQ ID NO: 443042 - DNA, 15 bp, Homo sapiens
gcctatggcagcgag

SEQ ID NO: 443043 - DNA, 15 bp, Homo sapiens
tgcctatggcagcga

SEQ ID NO: 443044 - DNA, 15 bp, Homo sapiens
atgcctatggcagcg

SEQ ID NO: 443045 - DNA, 15 bp, Homo sapiens
tatgcctatggcagc

SEQ ID NO: 443046 - DNA, 15 bp, Homo sapiens
ctatgcctatggcag

SEQ ID NO: 443047 - DNA, 15 bp, Homo sapiens
tctatgcctatggca

SEQ ID NO: 443048 - DNA, 15 bp, Homo sapiens
atctatgcctatggc

SEQ ID NO: 443049 - DNA, 15 bp, Homo sapiens
tatctatgcctatgg

SEQ ID NO: 443050 - DNA, 15 bp, Homo sapiens
ctatctatgcctatg

SEQ ID NO: 443051 - DNA, 15 bp, Homo sapiens
cctatctatgcctat

SEQ ID NO: 443052 - DNA, 15 bp, Homo sapiens
ccctatctatgccta

SEQ ID NO: 443053 - DNA, 15 bp, Homo sapiens
accctatctatgcct

SEQ ID NO: 443054 - DNA, 15 bp, Homo sapiens
caccctatctatgcc

SEQ ID NO: 443055 - DNA, 15 bp, Homo sapiens
gcaccctatctatgc

SEQ ID NO: 443056 - DNA, 15 bp, Homo sapiens
tgcaccctatctatg

SEQ ID NO: 443057 - DNA, 15 bp, Homo sapiens
atgcaccctatctat

SEQ ID NO: 443058 - DNA, 15 bp, Homo sapiens
catgcaccctatcta

SEQ ID NO: 443059 - DNA, 15 bp, Homo sapiens
tcatgcaccctatct

SEQ ID NO: 443060 - DNA, 15 bp, Homo sapiens
gtcatgcaccctatc

SEQ ID NO: 443061 - DNA, 15 bp, Homo sapiens
cgtcatgcaccctat

SEQ ID NO: 443062 - DNA, 15 bp, Homo sapiens
tcgtcatgcacccta

SEQ ID NO: 443063 - DNA, 15 bp, Homo sapiens
ctcgtcatgcaccct

SEQ ID NO: 443064 - DNA, 15 bp, Homo sapiens
cctcgtcatgcaccc

SEQ ID NO: 443065 - DNA, 15 bp, Homo sapiens
ccctcgtcatgcacc

SEQ ID NO: 443066 - DNA, 15 bp, Homo sapiens
tccctcgtcatgcac

SEQ ID NO: 443067 - DNA, 15 bp, Homo sapiens
ctccctcgtcatgca

SEQ ID NO: 443068 - DNA, 15 bp, Homo sapiens
cctccctcgtcatgc

SEQ ID NO: 443069 - DNA, 15 bp, Homo sapiens
tcctccctcgtcatg

SEQ ID NO: 443070 - DNA, 15 bp, Homo sapiens
gtcctccctcgtcat

SEQ ID NO: 443071 - DNA, 15 bp, Homo sapiens
agtcctccctcgtca

SEQ ID NO: 443072 - DNA, 15 bp, Homo sapiens
cagtcctccctcgtc

SEQ ID NO: 443073 - DNA, 15 bp, Homo sapiens
ccagtcctccctcgt

SEQ ID NO: 443074 - DNA, 15 bp, Homo sapiens
tccagtcctccctcg

SEQ ID NO: 443075 - DNA, 15 bp, Homo sapiens
gtccagtcctccctc

SEQ ID NO: 443076 - DNA, 15 bp, Homo sapiens
tgtccagtcctccct

SEQ ID NO: 443077 - DNA, 15 bp, Homo sapiens
gtgtccagtcctccc

SEQ ID NO: 443078 - DNA, 15 bp, Homo sapiens
agtgtccagtcctcc

SEQ ID NO: 443079 - DNA, 15 bp, Homo sapiens
gagtgtccagtcctc

SEQ ID NO: 443080 - DNA, 15 bp, Homo sapiens
tgagtgtccagtcct

SEQ ID NO: 443081 - DNA, 15 bp, Homo sapiens
atgagtgtccagtcc

SEQ ID NO: 443082 - DNA, 15 bp, Homo sapiens
gatgagtgtccagtc

SEQ ID NO: 443083 - DNA, 15 bp, Homo sapiens
cgatgagtgtccagt

SEQ ID NO: 443084 - DNA, 15 bp, Homo sapiens
gcgatgagtgtccag

SEQ ID NO: 443085 - DNA, 15 bp, Homo sapiens
ggcgatgagtgtcca

SEQ ID NO: 443086 - DNA, 15 bp, Homo sapiens
cggcgatgagtgtcc

SEQ ID NO: 443087 - DNA, 15 bp, Homo sapiens
tcggcgatgagtgtc

SEQ ID NO: 443088 - DNA, 15 bp, Homo sapiens
gtcggcgatgagtgt

SEQ ID NO: 443089 - DNA, 15 bp, Homo sapiens
ggtcggcgatgagtg

SEQ ID NO: 443090 - DNA, 15 bp, Homo sapiens
aggtcggcgatgagt

SEQ ID NO: 443091 - DNA, 15 bp, Homo sapiens
caggtcggcgatgag

SEQ ID NO: 443092 - DNA, 15 bp, Homo sapiens
acaggtcggcgatga

SEQ ID NO: 443093 - DNA, 15 bp, Homo sapiens
tacaggtcggcgatg

SEQ ID NO: 443094 - DNA, 15 bp, Homo sapiens
ctacaggtcggcgat

SEQ ID NO: 443095 - DNA, 15 bp, Homo sapiens
gctacaggtcggcga

SEQ ID NO: 443096 - DNA, 15 bp, Homo sapiens
ggctacaggtcggcg

SEQ ID NO: 443097 - DNA, 15 bp, Homo sapiens
gggagaggatgccag

SEQ ID NO: 443098 - DNA, 15 bp, Homo sapiens
ggggagaggatgcca

SEQ ID NO: 443099 - DNA, 15 bp, Homo sapiens
gggggagaggatgcc

SEQ ID NO: 443100 - DNA, 15 bp, Homo sapiens
cgggggagaggatgc

SEQ ID NO: 443101 - DNA, 15 bp, Homo sapiens
acgggggagaggatg

SEQ ID NO: 443102 - DNA, 15 bp, Homo sapiens
gacgggggagaggat

SEQ ID NO: 443103 - DNA, 15 bp, Homo sapiens
ggacgggggagagga

SEQ ID NO: 443104 - DNA, 15 bp, Homo sapiens
gggacgggggagagg

SEQ ID NO: 443105 - DNA, 15 bp, Homo sapiens
ggggacgggggagag

SEQ ID NO: 443106 - DNA, 15 bp, Homo sapiens
aggggacgggggaga

SEQ ID NO: 443107 - DNA, 15 bp, Homo sapiens
caggggacgggggag

SEQ ID NO: 443108 - DNA, 15 bp, Homo sapiens
gcaggggacggggga

SEQ ID NO: 443109 - DNA, 15 bp, Homo sapiens
ggcaggggacggggg

SEQ ID NO: 443110 - DNA, 15 bp, Homo sapiens
tggcaggggacgggg

SEQ ID NO: 443111 - DNA, 15 bp, Homo sapiens
ctggcaggggacggg

SEQ ID NO: 443112 - DNA, 15 bp, Homo sapiens
actggcaggggacgg

SEQ ID NO: 443113 - DNA, 15 bp, Homo sapiens
aactggcaggggacg

SEQ ID NO: 443114 - DNA, 15 bp, Homo sapiens
aaactggcaggggac

SEQ ID NO: 443115 - DNA, 15 bp, Homo sapiens
aaaactggcagggga

SEQ ID NO: 443116 - DNA, 15 bp, Homo sapiens
gaaaactggcagggg

SEQ ID NO: 443117 - DNA, 15 bp, Homo sapiens
ggaaaactggcaggg

SEQ ID NO: 443118 - DNA, 15 bp, Homo sapiens
tggaaaactggcagg

SEQ ID NO: 443119 - DNA, 15 bp, Homo sapiens
atggaaaactggcag

SEQ ID NO: 443120 - DNA, 15 bp, Homo sapiens
gatggaaaactggca

SEQ ID NO: 443121 - DNA, 15 bp, Homo sapiens
agatggaaaactggc

SEQ ID NO: 443122 - DNA, 15 bp, Homo sapiens
gagatggaaaactgg

SEQ ID NO: 443123 - DNA, 15 bp, Homo sapiens
ggagatggaaaactg

SEQ ID NO: 443124 - DNA, 15 bp, Homo sapiens
tggagatggaaaact

SEQ ID NO: 443125 - DNA, 15 bp, Homo sapiens
ctggagatggaaaac

SEQ ID NO: 443126 - DNA, 15 bp, Homo sapiens
gctggagatggaaaa

SEQ ID NO: 443127 - DNA, 15 bp, Homo sapiens
tgctggagatggaaa

SEQ ID NO: 443128 - DNA, 15 bp, Homo sapiens
ctgctggagatggaa

SEQ ID NO: 443129 - DNA, 15 bp, Homo sapiens
gctgctggagatgga

SEQ ID NO: 443130 - DNA, 15 bp, Homo sapiens
agctgctggagatgg

SEQ ID NO: 443131 - DNA, 15 bp, Homo sapiens
gagctgctggagatg

SEQ ID NO: 443132 - DNA, 15 bp, Homo sapiens
agagctgctggagat

SEQ ID NO: 443133 - DNA, 15 bp, Homo sapiens
cagagctgctggaga

SEQ ID NO: 443134 - DNA, 15 bp, Homo sapiens
gcagagctgctggag

SEQ ID NO: 443135 - DNA, 15 bp, Homo sapiens
agcagagctgctgga

SEQ ID NO: 443136 - DNA, 15 bp, Homo sapiens
tagcagagctgctgg

SEQ ID NO: 443137 - DNA, 15 bp, Homo sapiens
gtagcagagctgctg

SEQ ID NO: 443138 - DNA, 15 bp, Homo sapiens
ggtagcagagctgct

SEQ ID NO: 443139 - DNA, 15 bp, Homo sapiens
gggtagcagagctgc

SEQ ID NO: 443140 - DNA, 15 bp, Homo sapiens
ggggtagcagagctg

SEQ ID NO: 443141 - DNA, 15 bp, Homo sapiens
aggggtagcagagct

SEQ ID NO: 443142 - DNA, 15 bp, Homo sapiens
aaggggtagcagagc

SEQ ID NO: 443143 - DNA, 15 bp, Homo sapiens
gaaggggtagcagag

SEQ ID NO: 443144 - DNA, 15 bp, Homo sapiens
ggaaggggtagcaga

SEQ ID NO: 443145 - DNA, 15 bp, Homo sapiens
gggaaggggtagcag

SEQ ID NO: 443146 - DNA, 15 bp, Homo sapiens
ggggaaggggtagca

SEQ ID NO: 443147 - DNA, 15 bp, Homo sapiens
gggggaaggggtagc

SEQ ID NO: 443148 - DNA, 15 bp, Homo sapiens
tgggggaaggggtag

SEQ ID NO: 443149 - DNA, 15 bp, Homo sapiens
atgggggaaggggta

SEQ ID NO: 443150 - DNA, 15 bp, Homo sapiens
gatgggggaaggggt

SEQ ID NO: 443151 - DNA, 15 bp, Homo sapiens
ggatgggggaagggg

SEQ ID NO: 443152 - DNA, 15 bp, Homo sapiens
gggatgggggaaggg

SEQ ID NO: 443153 - DNA, 15 bp, Homo sapiens
ggggatgggggaagg

SEQ ID NO: 443154 - DNA, 15 bp, Homo sapiens
cggggatgggggaag

SEQ ID NO: 443155 - DNA, 15 bp, Homo sapiens
tcggggatgggggaa

SEQ ID NO: 443156 - DNA, 15 bp, Homo sapiens
ctcggggatggggga

SEQ ID NO: 443157 - DNA, 15 bp, Homo sapiens
actcggggatggggg

SEQ ID NO: 443158 - DNA, 15 bp, Homo sapiens
cactcggggatgggg

SEQ ID NO: 443159 - DNA, 15 bp, Homo sapiens
acactcggggatggg

SEQ ID NO: 443160 - DNA, 15 bp, Homo sapiens
cacactcggggatgg

SEQ ID NO: 443161 - DNA, 15 bp, Homo sapiens
ccacactcggggatg

SEQ ID NO: 443162 - DNA, 15 bp, Homo sapiens
accacactcggggat

SEQ ID NO: 443163 - DNA, 15 bp, Homo sapiens
aaccacactcgggga

SEQ ID NO: 443164 - DNA, 15 bp, Homo sapiens
gaaccacactcgggg

SEQ ID NO: 443165 - DNA, 15 bp, Homo sapiens
ggaaccacactcggg

SEQ ID NO: 443166 - DNA, 15 bp, Homo sapiens
tggaaccacactcgg

SEQ ID NO: 443167 - DNA, 15 bp, Homo sapiens
ctggaaccacactcg

SEQ ID NO: 443168 - DNA, 15 bp, Homo sapiens
tctggaaccacactc

SEQ ID NO: 443169 - DNA, 15 bp, Homo sapiens
atctggaaccacact

SEQ ID NO: 443170 - DNA, 15 bp, Homo sapiens
tatctggaaccacac

SEQ ID NO: 443171 - DNA, 15 bp, Homo sapiens
ctatctggaaccaca

SEQ ID NO: 443172 - DNA, 15 bp, Homo sapiens
actatctggaaccac

SEQ ID NO: 443173 - DNA, 15 bp, Homo sapiens
cactatctggaacca

SEQ ID NO: 443174 - DNA, 15 bp, Homo sapiens
ccactatctggaacc

SEQ ID NO: 443175 - DNA, 15 bp, Homo sapiens
tccactatctggaac

SEQ ID NO: 443176 - DNA, 15 bp, Homo sapiens
ttccactatctggaa

SEQ ID NO: 443177 - DNA, 15 bp, Homo sapiens
cttccactatctgga

SEQ ID NO: 443178 - DNA, 15 bp, Homo sapiens
acttccactatctgg

SEQ ID NO: 443179 - DNA, 15 bp, Homo sapiens
gacttccactatctg

SEQ ID NO: 443180 - DNA, 15 bp, Homo sapiens
agacttccactatct

SEQ ID NO: 443181 - DNA, 15 bp, Homo sapiens
aagacttccactatc

SEQ ID NO: 443182 - DNA, 15 bp, Homo sapiens
taagacttccactat

SEQ ID NO: 443183 - DNA, 15 bp, Homo sapiens
ataagacttccacta

SEQ ID NO: 443184 - DNA, 15 bp, Homo sapiens
gataagacttccact

SEQ ID NO: 443185 - DNA, 15 bp, Homo sapiens
agataagacttccac

SEQ ID NO: 443186 - DNA, 15 bp, Homo sapiens
gagataagacttcca

SEQ ID NO: 443187 - DNA, 15 bp, Homo sapiens
ggagataagacttcc

SEQ ID NO: 443188 - DNA, 15 bp, Homo sapiens
aggagataagacttc

SEQ ID NO: 443189 - DNA, 15 bp, Homo sapiens
caggagataagactt

SEQ ID NO: 443190 - DNA, 15 bp, Homo sapiens
acaggagataagact

SEQ ID NO: 443191 - DNA, 15 bp, Homo sapiens
gacaggagataagac

SEQ ID NO: 443192 - DNA, 15 bp, Homo sapiens
agacaggagataaga

SEQ ID NO: 443193 - DNA, 15 bp, Homo sapiens
gagacaggagataag

SEQ ID NO: 443194 - DNA, 15 bp, Homo sapiens
ggagacaggagataa

SEQ ID NO: 443195 - DNA, 15 bp, Homo sapiens
tggagacaggagata

SEQ ID NO: 443196 - DNA, 15 bp, Homo sapiens
ctggagacaggagat

SEQ ID NO: 443197 - DNA, 15 bp, Homo sapiens
gctggagacaggaga

SEQ ID NO: 443198 - DNA, 15 bp, Homo sapiens
ggctggagacaggag

SEQ ID NO: 443199 - DNA, 15 bp, Homo sapiens
tggctggagacagga

SEQ ID NO: 443200 - DNA, 15 bp, Homo sapiens
ctggctggagacagg

SEQ ID NO: 443201 - DNA, 15 bp, Homo sapiens
tctggctggagacag

SEQ ID NO: 443202 - DNA, 15 bp, Homo sapiens
gtctggctggagaca

SEQ ID NO: 443203 - DNA, 15 bp, Homo sapiens
ggtctggctggagac

SEQ ID NO: 443204 - DNA, 15 bp, Homo sapiens
aggtctggctggaga

SEQ ID NO: 443205 - DNA, 15 bp, Homo sapiens
caggtctggctggag

SEQ ID NO: 443206 - DNA, 15 bp, Homo sapiens
tcaggtctggctgga

SEQ ID NO: 443207 - DNA, 15 bp, Homo sapiens
atcaggtctggctgg

SEQ ID NO: 443208 - DNA, 15 bp, Homo sapiens
gatcaggtctggctg

SEQ ID NO: 443209 - DNA, 15 bp, Homo sapiens
cgatcaggtctggct

SEQ ID NO: 443210 - DNA, 15 bp, Homo sapiens
ccgatcaggtctggc

SEQ ID NO: 443211 - DNA, 15 bp, Homo sapiens
accgatcaggtctgg

SEQ ID NO: 443212 - DNA, 15 bp, Homo sapiens
aaccgatcaggtctg

SEQ ID NO: 443213 - DNA, 15 bp, Homo sapiens
aaaccgatcaggtct

SEQ ID NO: 443214 - DNA, 15 bp, Homo sapiens
gaaaccgatcaggtc

SEQ ID NO: 443215 - DNA, 15 bp, Homo sapiens
agaaaccgatcaggt

SEQ ID NO: 443216 - DNA, 15 bp, Homo sapiens
cagaaaccgatcagg

SEQ ID NO: 443217 - DNA, 15 bp, Homo sapiens
acagaaaccgatcag

SEQ ID NO: 443218 - DNA, 15 bp, Homo sapiens
gacagaaaccgatca

SEQ ID NO: 443219 - DNA, 15 bp, Homo sapiens
ggacagaaaccgatc

SEQ ID NO: 443220 - DNA, 15 bp, Homo sapiens
gggacagaaaccgat

SEQ ID NO: 443221 - DNA, 15 bp, Homo sapiens
agggacagaaaccga

SEQ ID NO: 443222 - DNA, 15 bp, Homo sapiens
cagggacagaaaccg

SEQ ID NO: 443223 - DNA, 15 bp, Homo sapiens
ccagggacagaaacc

SEQ ID NO: 443224 - DNA, 15 bp, Homo sapiens
tccagggacagaaac

SEQ ID NO: 443225 - DNA, 15 bp, Homo sapiens
ctccagggacagaaa

SEQ ID NO: 443226 - DNA, 15 bp, Homo sapiens
gctccagggacagaa

SEQ ID NO: 443227 - DNA, 15 bp, Homo sapiens
agctccagggacaga

SEQ ID NO: 443228 - DNA, 15 bp, Homo sapiens
cagctccagggacag

SEQ ID NO: 443229 - DNA, 15 bp, Homo sapiens
ccagctccagggaca

SEQ ID NO: 443230 - DNA, 15 bp, Homo sapiens
cccagctccagggac

SEQ ID NO: 443231 - DNA, 15 bp, Homo sapiens
ccccagctccaggga

SEQ ID NO: 443232 - DNA, 15 bp, Homo sapiens
cccccagctccaggg

SEQ ID NO: 443233 - DNA, 15 bp, Homo sapiens
ccccccagctccagg

SEQ ID NO: 443234 - DNA, 15 bp, Homo sapiens
cccccccagctccag

SEQ ID NO: 443235 - DNA, 15 bp, Homo sapiens
ccccccccagctcca

SEQ ID NO: 443236 - DNA, 15 bp, Homo sapiens
tccccccccagctcc

SEQ ID NO: 443237 - DNA, 15 bp, Homo sapiens
ctccccccccagctc

SEQ ID NO: 443238 - DNA, 15 bp, Homo sapiens
gctccccccccagct

SEQ ID NO: 443239 - DNA, 15 bp, Homo sapiens
cgctccccccccagc

SEQ ID NO: 443240 - DNA, 15 bp, Homo sapiens
ccgctccccccccag

SEQ ID NO: 443241 - DNA, 15 bp, Homo sapiens
cccgctcccccccca

SEQ ID NO: 443242 - DNA, 15 bp, Homo sapiens
ccccgctcccccccc

SEQ ID NO: 443243 - DNA, 15 bp, Homo sapiens
tccccgctccccccc

SEQ ID NO: 443244 - DNA, 15 bp, Homo sapiens
ctccccgctcccccc

SEQ ID NO: 443245 - DNA, 15 bp, Homo sapiens
tctccccgctccccc

SEQ ID NO: 443246 - DNA, 15 bp, Homo sapiens
ctctccccgctcccc

SEQ ID NO: 443247 - DNA, 15 bp, Homo sapiens
cctctccccgctccc

SEQ ID NO: 443248 - DNA, 15 bp, Homo sapiens
ccctctccccgctcc

SEQ ID NO: 443249 - DNA, 15 bp, Homo sapiens
cccctctccccgctc

SEQ ID NO: 443250 - DNA, 15 bp, Homo sapiens
gcccctctccccgct

SEQ ID NO: 443251 - DNA, 15 bp, Homo sapiens
cgcccctctccccgc

SEQ ID NO: 443252 - DNA, 15 bp, Homo sapiens
ccgcccctctccccg

SEQ ID NO: 443253 - DNA, 15 bp, Homo sapiens
accgcccctctcccc

SEQ ID NO: 443254 - DNA, 15 bp, Homo sapiens
aaccgcccctctccc

SEQ ID NO: 443255 - DNA, 15 bp, Homo sapiens
taaccgcccctctcc

SEQ ID NO: 443256 - DNA, 15 bp, Homo sapiens
ctaaccgcccctctc

SEQ ID NO: 443257 - DNA, 15 bp, Homo sapiens
tctaaccgcccctct

SEQ ID NO: 443258 - DNA, 15 bp, Homo sapiens
ctctaaccgcccctc

SEQ ID NO: 443259 - DNA, 15 bp, Homo sapiens
cctctaaccgcccct

SEQ ID NO: 443260 - DNA, 15 bp, Homo sapiens
ccctctaaccgcccc

SEQ ID NO: 443261 - DNA, 15 bp, Homo sapiens
cccctctaaccgccc

SEQ ID NO: 443262 - DNA, 15 bp, Homo sapiens
gcccctctaaccgcc

SEQ ID NO: 443263 - DNA, 15 bp, Homo sapiens
tgcccctctaaccgc

SEQ ID NO: 443264 - DNA, 15 bp, Homo sapiens
ctgcccctctaaccg

SEQ ID NO: 443265 - DNA, 15 bp, Homo sapiens
actgcccctctaacc

SEQ ID NO: 443266 - DNA, 15 bp, Homo sapiens
cactgcccctctaac

SEQ ID NO: 443267 - DNA, 15 bp, Homo sapiens
acactgcccctctaa

SEQ ID NO: 443268 - DNA, 15 bp, Homo sapiens
aacactgcccctcta

SEQ ID NO: 443269 - DNA, 15 bp, Homo sapiens
caacactgcccctct

SEQ ID NO: 443270 - DNA, 15 bp, Homo sapiens
ccaacactgcccctc

SEQ ID NO: 443271 - DNA, 15 bp, Homo sapiens
cccaacactgcccct

SEQ ID NO: 443272 - DNA, 15 bp, Homo sapiens
ccccaacactgcccc

SEQ ID NO: 443273 - DNA, 15 bp, Homo sapiens
tccccaacactgccc

SEQ ID NO: 443274 - DNA, 15 bp, Homo sapiens
ttccccaacactgcc

SEQ ID NO: 443275 - DNA, 15 bp, Homo sapiens
cttccccaacactgc

SEQ ID NO: 443276 - DNA, 15 bp, Homo sapiens
acttccccaacactg

SEQ ID NO: 443277 - DNA, 15 bp, Homo sapiens
cacttccccaacact

SEQ ID NO: 443278 - DNA, 15 bp, Homo sapiens
ccacttccccaacac

SEQ ID NO: 443279 - DNA, 15 bp, Homo sapiens
cccacttccccaaca

SEQ ID NO: 443280 - DNA, 15 bp, Homo sapiens
tcccacttccccaac

SEQ ID NO: 443281 - DNA, 15 bp, Homo sapiens
gtcccacttccccaa

SEQ ID NO: 443282 - DNA, 15 bp, Homo sapiens
tgtcccacttcccca

SEQ ID NO: 443283 - DNA, 15 bp, Homo sapiens
ctgtcccacttcccc

SEQ ID NO: 443284 - DNA, 15 bp, Homo sapiens
tctgtcccacttccc

SEQ ID NO: 443285 - DNA, 15 bp, Homo sapiens
gtctgtcccacttcc

SEQ ID NO: 443286 - DNA, 15 bp, Homo sapiens
tgtctgtcccacttc

SEQ ID NO: 443287 - DNA, 15 bp, Homo sapiens
ctgtctgtcccactt

SEQ ID NO: 443288 - DNA, 15 bp, Homo sapiens
tctgtctgtcccact

SEQ ID NO: 443289 - DNA, 15 bp, Homo sapiens
gtctgtctgtcccac

SEQ ID NO: 443290 - DNA, 15 bp, Homo sapiens
tgtctgtctgtccca

SEQ ID NO: 443291 - DNA, 15 bp, Homo sapiens
ctgtctgtctgtccc

SEQ ID NO: 443292 - DNA, 15 bp, Homo sapiens
cctgtctgtctgtcc

SEQ ID NO: 443293 - DNA, 15 bp, Homo sapiens
gcctgtctgtctgtc

SEQ ID NO: 443294 - DNA, 15 bp, Homo sapiens
tgcctgtctgtctgt

SEQ ID NO: 443295 - DNA, 15 bp, Homo sapiens
ttgcctgtctgtctg

SEQ ID NO: 443296 - DNA, 15 bp, Homo sapiens
tttgcctgtctgtct

SEQ ID NO: 443297 - DNA, 15 bp, Homo sapiens
gtttgcctgtctgtc

SEQ ID NO: 443298 - DNA, 15 bp, Homo sapiens
tgtttgcctgtctgt

SEQ ID NO: 443299 - DNA, 15 bp, Homo sapiens
ttgtttgcctgtctg

SEQ ID NO: 443300 - DNA, 15 bp, Homo sapiens
cttgtttgcctgtct

SEQ ID NO: 443301 - DNA, 15 bp, Homo sapiens
tcttgtttgcctgtc

SEQ ID NO: 443302 - DNA, 15 bp, Homo sapiens
gtcttgtttgcctgt

SEQ ID NO: 443303 - DNA, 15 bp, Homo sapiens
ggtcttgtttgcctg

SEQ ID NO: 443304 - DNA, 15 bp, Homo sapiens
gggtcttgtttgcct

SEQ ID NO: 443305 - DNA, 15 bp, Homo sapiens
ggggtcttgtttgcc

SEQ ID NO: 443306 - DNA, 15 bp, Homo sapiens
aggggtcttgtttgc

SEQ ID NO: 443307 - DNA, 15 bp, Homo sapiens
aaggggtcttgtttg

SEQ ID NO: 443308 - DNA, 15 bp, Homo sapiens
aaaggggtcttgttt

SEQ ID NO: 443309 - DNA, 15 bp, Homo sapiens
gaaaggggtcttgtt

SEQ ID NO: 443310 - DNA, 15 bp, Homo sapiens
ggaaaggggtcttgt

SEQ ID NO: 443311 - DNA, 15 bp, Homo sapiens
tggaaaggggtcttg

SEQ ID NO: 443312 - DNA, 15 bp, Homo sapiens
ttggaaaggggtctt

SEQ ID NO: 443313 - DNA, 15 bp, Homo sapiens
tttggaaaggggtct

SEQ ID NO: 443314 - DNA, 15 bp, Homo sapiens
ctttggaaaggggtc

SEQ ID NO: 443315 - DNA, 15 bp, Homo sapiens
gctttggaaaggggt

SEQ ID NO: 443316 - DNA, 15 bp, Homo sapiens
ggctttggaaagggg

SEQ ID NO: 443317 - DNA, 15 bp, Homo sapiens
aggctttggaaaggg

SEQ ID NO: 443318 - DNA, 15 bp, Homo sapiens
gaggctttggaaagg

SEQ ID NO: 443319 - DNA, 15 bp, Homo sapiens
agaggctttggaaag

SEQ ID NO: 443320 - DNA, 15 bp, Homo sapiens
cagaggctttggaaa

SEQ ID NO: 443321 - DNA, 15 bp, Homo sapiens
gcagaggctttggaa

SEQ ID NO: 443322 - DNA, 15 bp, Homo sapiens
cgcagaggctttgga

SEQ ID NO: 443323 - DNA, 15 bp, Homo sapiens
acgcagaggctttgg

SEQ ID NO: 443324 - DNA, 15 bp, Homo sapiens
gacgcagaggctttg

SEQ ID NO: 443325 - DNA, 15 bp, Homo sapiens
tgacgcagaggcttt

SEQ ID NO: 443326 - DNA, 15 bp, Homo sapiens
ctgacgcagaggctt

SEQ ID NO: 443327 - DNA, 15 bp, Homo sapiens
tctgacgcagaggct

SEQ ID NO: 443328 - DNA, 15 bp, Homo sapiens
ctctgacgcagaggc

SEQ ID NO: 443329 - DNA, 15 bp, Homo sapiens
actctgacgcagagg

SEQ ID NO: 443330 - DNA, 15 bp, Homo sapiens
cactctgacgcagag

SEQ ID NO: 443331 - DNA, 15 bp, Homo sapiens
acactctgacgcaga

SEQ ID NO: 443332 - DNA, 15 bp, Homo sapiens
gacactctgacgcag

SEQ ID NO: 443333 - DNA, 15 bp, Homo sapiens
ggacactctgacgca

SEQ ID NO: 443334 - DNA, 15 bp, Homo sapiens
tggacactctgacgc

SEQ ID NO: 443335 - DNA, 15 bp, Homo sapiens
ctggacactctgacg

SEQ ID NO: 443336 - DNA, 15 bp, Homo sapiens
gctggacactctgac

SEQ ID NO: 443337 - DNA, 15 bp, Homo sapiens
ggctggacactctga

SEQ ID NO: 443338 - DNA, 15 bp, Homo sapiens
gggctggacactctg

SEQ ID NO: 443339 - DNA, 15 bp, Homo sapiens
cgggctggacactct

SEQ ID NO: 443340 - DNA, 15 bp, Homo sapiens
gcgggctggacactc

SEQ ID NO: 443341 - DNA, 15 bp, Homo sapiens
cgcgggctggacact

SEQ ID NO: 443342 - DNA, 15 bp, Homo sapiens
tcgcgggctggacac

SEQ ID NO: 443343 - DNA, 15 bp, Homo sapiens
atcgcgggctggaca

SEQ ID NO: 443344 - DNA, 15 bp, Homo sapiens
catcgcgggctggac

SEQ ID NO: 443345 - DNA, 15 bp, Homo sapiens
acatcgcgggctgga

SEQ ID NO: 443346 - DNA, 15 bp, Homo sapiens
gacatcgcgggctgg

SEQ ID NO: 443347 - DNA, 15 bp, Homo sapiens
ggacatcgcgggctg

SEQ ID NO: 443348 - DNA, 15 bp, Homo sapiens
gggacatcgcgggct

SEQ ID NO: 443349 - DNA, 15 bp, Homo sapiens
agggacatcgcgggc

SEQ ID NO: 443350 - DNA, 15 bp, Homo sapiens
cagggacatcgcggg

SEQ ID NO: 443351 - DNA, 15 bp, Homo sapiens
ccagggacatcgcgg

SEQ ID NO: 443352 - DNA, 15 bp, Homo sapiens
cccagggacatcgcg

SEQ ID NO: 443353 - DNA, 15 bp, Homo sapiens
gcccagggacatcgc

SEQ ID NO: 443354 - DNA, 15 bp, Homo sapiens
tgcccagggacatcg

SEQ ID NO: 443355 - DNA, 15 bp, Homo sapiens
ctgcccagggacatc

SEQ ID NO: 443356 - DNA, 15 bp, Homo sapiens
cctgcccagggacat

SEQ ID NO: 443357 - DNA, 15 bp, Homo sapiens
ccctgcccagggaca

SEQ ID NO: 443358 - DNA, 15 bp, Homo sapiens
gccctgcccagggac

SEQ ID NO: 443359 - DNA, 15 bp, Homo sapiens
tgccctgcccaggga

SEQ ID NO: 443360 - DNA, 15 bp, Homo sapiens
gtgccctgcccaggg

SEQ ID NO: 443361 - DNA, 15 bp, Homo sapiens
ggtgccctgcccagg

SEQ ID NO: 443362 - DNA, 15 bp, Homo sapiens
gggtgccctgcccag

SEQ ID NO: 443363 - DNA, 15 bp, Homo sapiens
ggggtgccctgccca

SEQ ID NO: 443364 - DNA, 15 bp, Homo sapiens
tggggtgccctgccc

SEQ ID NO: 443365 - DNA, 15 bp, Homo sapiens
ctggggtgccctgcc

SEQ ID NO: 443366 - DNA, 15 bp, Homo sapiens
actggggtgccctgc

SEQ ID NO: 443367 - DNA, 15 bp, Homo sapiens
cactggggtgccctg

SEQ ID NO: 443368 - DNA, 15 bp, Homo sapiens
acactggggtgccct

SEQ ID NO: 443369 - DNA, 15 bp, Homo sapiens
gacactggggtgccc

SEQ ID NO: 443370 - DNA, 15 bp, Homo sapiens
ggacactggggtgcc

SEQ ID NO: 443371 - DNA, 15 bp, Homo sapiens
tggacactggggtgc

SEQ ID NO: 443372 - DNA, 15 bp, Homo sapiens
gtggacactggggtg

SEQ ID NO: 443373 - DNA, 15 bp, Homo sapiens
ggtggacactggggt

SEQ ID NO: 443374 - DNA, 15 bp, Homo sapiens
cggtggacactgggg

SEQ ID NO: 443375 - DNA, 15 bp, Homo sapiens
tcggtggacactggg

SEQ ID NO: 443376 - DNA, 15 bp, Homo sapiens
ttcggtggacactgg

SEQ ID NO: 443377 - DNA, 15 bp, Homo sapiens
gttcggtggacactg

SEQ ID NO: 443378 - DNA, 15 bp, Homo sapiens
ggttcggtggacact

SEQ ID NO: 443379 - DNA, 15 bp, Homo sapiens
aggttcggtggacac

SEQ ID NO: 443380 - DNA, 15 bp, Homo sapiens
gaggttcggtggaca

SEQ ID NO: 443381 - DNA, 15 bp, Homo sapiens
cgaggttcggtggac

SEQ ID NO: 443382 - DNA, 15 bp, Homo sapiens
tcgaggttcggtgga

SEQ ID NO: 443383 - DNA, 15 bp, Homo sapiens
ctcgaggttcggtgg

SEQ ID NO: 443384 - DNA, 15 bp, Homo sapiens
gctcgaggttcggtg

SEQ ID NO: 443385 - DNA, 15 bp, Homo sapiens
agctcgaggttcggt

SEQ ID NO: 443386 - DNA, 15 bp, Homo sapiens
cagctcgaggttcgg

SEQ ID NO: 443387 - DNA, 15 bp, Homo sapiens
gcagctcgaggttcg

SEQ ID NO: 443388 - DNA, 15 bp, Homo sapiens
ggcagctcgaggttc

SEQ ID NO: 443389 - DNA, 15 bp, Homo sapiens
aggcagctcgaggtt

SEQ ID NO: 443390 - DNA, 15 bp, Homo sapiens
caggcagctcgaggt

SEQ ID NO: 443391 - DNA, 15 bp, Homo sapiens
gcaggcagctcgagg

SEQ ID NO: 443392 - DNA, 15 bp, Homo sapiens
agcaggcagctcgag

SEQ ID NO: 443393 - DNA, 15 bp, Homo sapiens
gagcaggcagctcga

SEQ ID NO: 443394 - DNA, 15 bp, Homo sapiens
ggagcaggcagctcg

SEQ ID NO: 443395 - DNA, 15 bp, Homo sapiens
gggagcaggcagctc

SEQ ID NO: 443396 - DNA, 15 bp, Homo sapiens
agggagcaggcagct

SEQ ID NO: 443397 - DNA, 15 bp, Homo sapiens
gagggagcaggcagc

SEQ ID NO: 443398 - DNA, 15 bp, Homo sapiens
ggagggagcaggcag

SEQ ID NO: 443399 - DNA, 15 bp, Homo sapiens
gggagggagcaggca

SEQ ID NO: 443400 - DNA, 15 bp, Homo sapiens
cgggagggagcaggc

SEQ ID NO: 443401 - DNA, 15 bp, Homo sapiens
gcgggagggagcagg

SEQ ID NO: 443402 - DNA, 15 bp, Homo sapiens
tgcgggagggagcag

SEQ ID NO: 443403 - DNA, 15 bp, Homo sapiens
ctgcgggagggagca

SEQ ID NO: 443404 - DNA, 15 bp, Homo sapiens
actgcgggagggagc

SEQ ID NO: 443405 - DNA, 15 bp, Homo sapiens
cactgcgggagggag

SEQ ID NO: 443406 - DNA, 15 bp, Homo sapiens
ccactgcgggaggga

SEQ ID NO: 443407 - DNA, 15 bp, Homo sapiens
accactgcgggaggg

SEQ ID NO: 443408 - DNA, 15 bp, Homo sapiens
caccactgcgggagg

SEQ ID NO: 443409 - DNA, 15 bp, Homo sapiens
ccaccactgcgggag

SEQ ID NO: 443410 - DNA, 15 bp, Homo sapiens
gccaccactgcggga

SEQ ID NO: 443411 - DNA, 15 bp, Homo sapiens
cgccaccactgcggg

SEQ ID NO: 443412 - DNA, 15 bp, Homo sapiens
gcgccaccactgcgg

SEQ ID NO: 443413 - DNA, 15 bp, Homo sapiens
agcgccaccactgcg

SEQ ID NO: 443414 - DNA, 15 bp, Homo sapiens
gagcgccaccactgc

SEQ ID NO: 443415 - DNA, 15 bp, Homo sapiens
ggagcgccaccactg

SEQ ID NO: 443416 - DNA, 15 bp, Homo sapiens
cggagcgccaccact

SEQ ID NO: 443417 - DNA, 15 bp, Homo sapiens
tcggagcgccaccac

SEQ ID NO: 443418 - DNA, 15 bp, Homo sapiens
ttcggagcgccacca

SEQ ID NO: 443419 - DNA, 15 bp, Homo sapiens
cttcggagcgccacc

SEQ ID NO: 443420 - DNA, 15 bp, Homo sapiens
tcttcggagcgccac

SEQ ID NO: 443421 - DNA, 15 bp, Homo sapiens
ctcttcggagcgcca

SEQ ID NO: 443422 - DNA, 15 bp, Homo sapiens
cctcttcggagcgcc

SEQ ID NO: 443423 - DNA, 15 bp, Homo sapiens
gcctcttcggagcgc

SEQ ID NO: 443424 - DNA, 15 bp, Homo sapiens
cgcctcttcggagcg

SEQ ID NO: 443425 - DNA, 15 bp, Homo sapiens
gcgcctcttcggagc

SEQ ID NO: 443426 - DNA, 15 bp, Homo sapiens
tgcgcctcttcggag

SEQ ID NO: 443427 - DNA, 15 bp, Homo sapiens
ctgcgcctcttcgga

SEQ ID NO: 443428 - DNA, 15 bp, Homo sapiens
cctgcgcctcttcgg

SEQ ID NO: 443429 - DNA, 15 bp, Homo sapiens
tcctgcgcctcttcg

SEQ ID NO: 443430 - DNA, 15 bp, Homo sapiens
gtcctgcgcctcttc

SEQ ID NO: 443431 - DNA, 15 bp, Homo sapiens
tgtcctgcgcctctt

SEQ ID NO: 443432 - DNA, 15 bp, Homo sapiens
atgtcctgcgcctct

SEQ ID NO: 443433 - DNA, 15 bp, Homo sapiens
catgtcctgcgcctc

SEQ ID NO: 443434 - DNA, 15 bp, Homo sapiens
ccatgtcctgcgcct

SEQ ID NO: 443435 - DNA, 15 bp, Homo sapiens
cccatgtcctgcgcc

SEQ ID NO: 443436 - DNA, 15 bp, Homo sapiens
gcccatgtcctgcgc

SEQ ID NO: 443437 - DNA, 15 bp, Homo sapiens
ggcccatgtcctgcg

SEQ ID NO: 443438 - DNA, 15 bp, Homo sapiens
ctccccggaccctct

SEQ ID NO: 443439 - DNA, 15 bp, Homo sapiens
cctccccggaccctc

SEQ ID NO: 443440 - DNA, 15 bp, Homo sapiens
gcctccccggaccct

SEQ ID NO: 443441 - DNA, 15 bp, Homo sapiens
cgcctccccggaccc

SEQ ID NO: 443442 - DNA, 15 bp, Homo sapiens
ccgcctccccggacc

SEQ ID NO: 443443 - DNA, 15 bp, Homo sapiens
gccgcctccccggac

SEQ ID NO: 443444 - DNA, 15 bp, Homo sapiens
cgccgcctccccgga

SEQ ID NO: 443445 - DNA, 15 bp, Homo sapiens
gcgccgcctccccgg

SEQ ID NO: 443446 - DNA, 15 bp, Homo sapiens
tgcgccgcctccccg

SEQ ID NO: 443447 - DNA, 15 bp, Homo sapiens
ctgcgccgcctcccc

SEQ ID NO: 443448 - DNA, 15 bp, Homo sapiens
tctgcgccgcctccc

SEQ ID NO: 443449 - DNA, 15 bp, Homo sapiens
ctctgcgccgcctcc

SEQ ID NO: 443450 - DNA, 15 bp, Homo sapiens
tctctgcgccgcctc

SEQ ID NO: 443451 - DNA, 15 bp, Homo sapiens
ctctctgcgccgcct

SEQ ID NO: 443452 - DNA, 15 bp, Homo sapiens
cctctctgcgccgcc

SEQ ID NO: 443453 - DNA, 15 bp, Homo sapiens
ccctctctgcgccgc

SEQ ID NO: 443454 - DNA, 15 bp, Homo sapiens
gccctctctgcgccg

SEQ ID NO: 443455 - DNA, 15 bp, Homo sapiens
agccctctctgcgcc

SEQ ID NO: 443456 - DNA, 15 bp, Homo sapiens
cagccctctctgcgc

SEQ ID NO: 443457 - DNA, 15 bp, Homo sapiens
gcagccctctctgcg

SEQ ID NO: 443458 - DNA, 15 bp, Homo sapiens
tgcagccctctctgc

SEQ ID NO: 443459 - DNA, 15 bp, Homo sapiens
ctgcagccctctctg

SEQ ID NO: 443460 - DNA, 15 bp, Homo sapiens
actgcagccctctct

SEQ ID NO: 443461 - DNA, 15 bp, Homo sapiens
tactgcagccctctc

SEQ ID NO: 443462 - DNA, 15 bp, Homo sapiens
gtactgcagccctct

SEQ ID NO: 443463 - DNA, 15 bp, Homo sapiens
tgtactgcagccctc

SEQ ID NO: 443464 - DNA, 15 bp, Homo sapiens
ttgtactgcagccct

SEQ ID NO: 443465 - DNA, 15 bp, Homo sapiens
cttgtactgcagccc

SEQ ID NO: 443466 - DNA, 15 bp, Homo sapiens
acttgtactgcagcc

SEQ ID NO: 443467 - DNA, 15 bp, Homo sapiens
tacttgtactgcagc

SEQ ID NO: 443468 - DNA, 15 bp, Homo sapiens
atacttgtactgcag

SEQ ID NO: 443469 - DNA, 15 bp, Homo sapiens
gatacttgtactgca

SEQ ID NO: 443470 - DNA, 15 bp, Homo sapiens
agatacttgtactgc

SEQ ID NO: 443471 - DNA, 15 bp, Homo sapiens
cagatacttgtactg

SEQ ID NO: 443472 - DNA, 15 bp, Homo sapiens
ccagatacttgtact

SEQ ID NO: 443473 - DNA, 15 bp, Homo sapiens
tccagatacttgtac

SEQ ID NO: 443474 - DNA, 15 bp, Homo sapiens
gtccagatacttgta

SEQ ID NO: 443475 - DNA, 15 bp, Homo sapiens
cgtccagatacttgt

SEQ ID NO: 443476 - DNA, 15 bp, Homo sapiens
tcgtccagatacttg

SEQ ID NO: 443477 - DNA, 15 bp, Homo sapiens
ctcgtccagatactt

SEQ ID NO: 443478 - DNA, 15 bp, Homo sapiens
tctcgtccagatact

SEQ ID NO: 443479 - DNA, 15 bp, Homo sapiens
ctctcgtccagatac

SEQ ID NO: 443480 - DNA, 15 bp, Homo sapiens
gctctcgtccagata

SEQ ID NO: 443481 - DNA, 15 bp, Homo sapiens
agctctcgtccagat

SEQ ID NO: 443482 - DNA, 15 bp, Homo sapiens
gagctctcgtccaga

SEQ ID NO: 443483 - DNA, 15 bp, Homo sapiens
ggagctctcgtccag

SEQ ID NO: 443484 - DNA, 15 bp, Homo sapiens
cggagctctcgtcca

SEQ ID NO: 443485 - DNA, 15 bp, Homo sapiens
ccggagctctcgtcc

SEQ ID NO: 443486 - DNA, 15 bp, Homo sapiens
tccggagctctcgtc

SEQ ID NO: 443487 - DNA, 15 bp, Homo sapiens
ctccggagctctcgt

SEQ ID NO: 443488 - DNA, 15 bp, Homo sapiens
cctccggagctctcg

SEQ ID NO: 443489 - DNA, 15 bp, Homo sapiens
gcctccggagctctc

SEQ ID NO: 443490 - DNA, 15 bp, Homo sapiens
agcctccggagctct

SEQ ID NO: 443491 - DNA, 15 bp, Homo sapiens
cagcctccggagctc

SEQ ID NO: 443492 - DNA, 15 bp, Homo sapiens
ccagcctccggagct

SEQ ID NO: 443493 - DNA, 15 bp, Homo sapiens
gccagcctccggagc

SEQ ID NO: 443494 - DNA, 15 bp, Homo sapiens
cgccagcctccggag

SEQ ID NO: 443495 - DNA, 15 bp, Homo sapiens
ccgccagcctccgga

SEQ ID NO: 443496 - DNA, 15 bp, Homo sapiens
cccgccagcctccgg

SEQ ID NO: 443497 - DNA, 15 bp, Homo sapiens
tcccgccagcctccg

SEQ ID NO: 443498 - DNA, 15 bp, Homo sapiens
gtcccgccagcctcc

SEQ ID NO: 443499 - DNA, 15 bp, Homo sapiens
cgtcccgccagcctc

SEQ ID NO: 443500 - DNA, 15 bp, Homo sapiens
ccgtcccgccagcct

SEQ ID NO: 443501 - DNA, 15 bp, Homo sapiens
gccgtcccgccagcc

SEQ ID NO: 443502 - DNA, 15 bp, Homo sapiens
tgccgtcccgccagc

SEQ ID NO: 443503 - DNA, 15 bp, Homo sapiens
ctgccgtcccgccag

SEQ ID NO: 443504 - DNA, 15 bp, Homo sapiens
cctgccgtcccgcca

SEQ ID NO: 443505 - DNA, 15 bp, Homo sapiens
ccctgccgtcccgcc

SEQ ID NO: 443506 - DNA, 15 bp, Homo sapiens
gccctgccgtcccgc

SEQ ID NO: 443507 - DNA, 15 bp, Homo sapiens
tgccctgccgtcccg

SEQ ID NO: 443508 - DNA, 15 bp, Homo sapiens
gtgccctgccgtccc

SEQ ID NO: 443509 - DNA, 15 bp, Homo sapiens
agtgccctgccgtcc

SEQ ID NO: 443510 - DNA, 15 bp, Homo sapiens
gagtgccctgccgtc

SEQ ID NO: 443511 - DNA, 15 bp, Homo sapiens
tgagtgccctgccgt

SEQ ID NO: 443512 - DNA, 15 bp, Homo sapiens
atgagtgccctgccg

SEQ ID NO: 443513 - DNA, 15 bp, Homo sapiens
gatgagtgccctgcc

SEQ ID NO: 443514 - DNA, 15 bp, Homo sapiens
tgatgagtgccctgc

SEQ ID NO: 443515 - DNA, 15 bp, Homo sapiens
ttgatgagtgccctg

SEQ ID NO: 443516 - DNA, 15 bp, Homo sapiens
gttgatgagtgccct

SEQ ID NO: 443517 - DNA, 15 bp, Homo sapiens
tgttgatgagtgccc

SEQ ID NO: 443518 - DNA, 15 bp, Homo sapiens
ctgttgatgagtgcc

SEQ ID NO: 443519 - DNA, 15 bp, Homo sapiens
gctgttgatgagtgc

SEQ ID NO: 443520 - DNA, 15 bp, Homo sapiens
ggctgttgatgagtg

SEQ ID NO: 443521 - DNA, 15 bp, Homo sapiens
gggctgttgatgagt

SEQ ID NO: 443522 - DNA, 15 bp, Homo sapiens
cgggctgttgatgag

SEQ ID NO: 443523 - DNA, 15 bp, Homo sapiens
ccgggctgttgatga

SEQ ID NO: 443524 - DNA, 15 bp, Homo sapiens
tccgggctgttgatg

SEQ ID NO: 443525 - DNA, 15 bp, Homo sapiens
ctccgggctgttgat

SEQ ID NO: 443526 - DNA, 15 bp, Homo sapiens
cctccgggctgttga

SEQ ID NO: 443527 - DNA, 15 bp, Homo sapiens
ccctccgggctgttg

SEQ ID NO: 443528 - DNA, 15 bp, Homo sapiens
cccctccgggctgtt

SEQ ID NO: 443529 - DNA, 15 bp, Homo sapiens
ccccctccgggctgt

SEQ ID NO: 443530 - DNA, 15 bp, Homo sapiens
gccccctccgggctg

SEQ ID NO: 443531 - DNA, 15 bp, Homo sapiens
ggccccctccgggct

SEQ ID NO: 443532 - DNA, 15 bp, Homo sapiens
cggccccctccgggc

SEQ ID NO: 443533 - DNA, 15 bp, Homo sapiens
acggccccctccggg

SEQ ID NO: 443534 - DNA, 15 bp, Homo sapiens
cacggccccctccgg

SEQ ID NO: 443535 - DNA, 15 bp, Homo sapiens
ccacggccccctccg

SEQ ID NO: 443536 - DNA, 15 bp, Homo sapiens
cccacggccccctcc

SEQ ID NO: 443537 - DNA, 15 bp, Homo sapiens
gcccacggccccctc

SEQ ID NO: 443538 - DNA, 15 bp, Homo sapiens
ggcccacggccccct

SEQ ID NO: 443539 - DNA, 15 bp, Homo sapiens
cggcccacggccccc

SEQ ID NO: 443540 - DNA, 15 bp, Homo sapiens
tcggcccacggcccc

SEQ ID NO: 443541 - DNA, 15 bp, Homo sapiens
ttcggcccacggccc

SEQ ID NO: 443542 - DNA, 15 bp, Homo sapiens
cttcggcccacggcc

SEQ ID NO: 443543 - DNA, 15 bp, Homo sapiens
gcttcggcccacggc

SEQ ID NO: 443544 - DNA, 15 bp, Homo sapiens
ggcttcggcccacgg

SEQ ID NO: 443545 - DNA, 15 bp, Homo sapiens
aggcttcggcccacg

SEQ ID NO: 443546 - DNA, 15 bp, Homo sapiens
caggcttcggcccac

SEQ ID NO: 443547 - DNA, 15 bp, Homo sapiens
gcaggcttcggccca

SEQ ID NO: 443548 - DNA, 15 bp, Homo sapiens
tgcaggcttcggccc

SEQ ID NO: 443549 - DNA, 15 bp, Homo sapiens
ctgcaggcttcggcc

SEQ ID NO: 443550 - DNA, 15 bp, Homo sapiens
gctgcaggcttcggc

SEQ ID NO: 443551 - DNA, 15 bp, Homo sapiens
ggctgcaggcttcgg

SEQ ID NO: 443552 - DNA, 15 bp, Homo sapiens
cggctgcaggcttcg

SEQ ID NO: 443553 - DNA, 15 bp, Homo sapiens
gcggctgcaggcttc

SEQ ID NO: 443554 - DNA, 15 bp, Homo sapiens
agcggctgcaggctt

SEQ ID NO: 443555 - DNA, 15 bp, Homo sapiens
cagcggctgcaggct

SEQ ID NO: 443556 - DNA, 15 bp, Homo sapiens
acagcggctgcaggc

SEQ ID NO: 443557 - DNA, 15 bp, Homo sapiens
tacagcggctgcagg

SEQ ID NO: 443558 - DNA, 15 bp, Homo sapiens
gtacagcggctgcag

SEQ ID NO: 443559 - DNA, 15 bp, Homo sapiens
ggtacagcggctgca

SEQ ID NO: 443560 - DNA, 15 bp, Homo sapiens
cggtacagcggctgc

SEQ ID NO: 443561 - DNA, 15 bp, Homo sapiens
ccggtacagcggctg

SEQ ID NO: 443562 - DNA, 15 bp, Homo sapiens
tccggtacagcggct

SEQ ID NO: 443563 - DNA, 15 bp, Homo sapiens
ctccggtacagcggc

SEQ ID NO: 443564 - DNA, 15 bp, Homo sapiens
gctccggtacagcgg

SEQ ID NO: 443565 - DNA, 15 bp, Homo sapiens
tgctccggtacagcg

SEQ ID NO: 443566 - DNA, 15 bp, Homo sapiens
ttgctccggtacagc

SEQ ID NO: 443567 - DNA, 15 bp, Homo sapiens
gttgctccggtacag

SEQ ID NO: 443568 - DNA, 15 bp, Homo sapiens
tgttgctccggtaca

SEQ ID NO: 443569 - DNA, 15 bp, Homo sapiens
gtgttgctccggtac

SEQ ID NO: 443570 - DNA, 15 bp, Homo sapiens
ggtgttgctccggta

SEQ ID NO: 443571 - DNA, 15 bp, Homo sapiens
tggtgttgctccggt

SEQ ID NO: 443572 - DNA, 15 bp, Homo sapiens
ctggtgttgctccgg

SEQ ID NO: 443573 - DNA, 15 bp, Homo sapiens
gctggtgttgctccg

SEQ ID NO: 443574 - DNA, 15 bp, Homo sapiens
ggctggtgttgctcc

SEQ ID NO: 443575 - DNA, 15 bp, Homo sapiens
tggctggtgttgctc

SEQ ID NO: 443576 - DNA, 15 bp, Homo sapiens
ctggctggtgttgct

SEQ ID NO: 443577 - DNA, 15 bp, Homo sapiens
cctggctggtgttgc

SEQ ID NO: 443578 - DNA, 15 bp, Homo sapiens
acctggctggtgttg

SEQ ID NO: 443579 - DNA, 15 bp, Homo sapiens
cacctggctggtgtt

SEQ ID NO: 443580 - DNA, 15 bp, Homo sapiens
tcacctggctggtgt

SEQ ID NO: 443581 - DNA, 15 bp, Homo sapiens
ttcacctggctggtg

SEQ ID NO: 443582 - DNA, 15 bp, Homo sapiens
cttcacctggctggt

SEQ ID NO: 443583 - DNA, 15 bp, Homo sapiens
ccttcacctggctgg

SEQ ID NO: 443584 - DNA, 15 bp, Homo sapiens
cccttcacctggctg

SEQ ID NO: 443585 - DNA, 15 bp, Homo sapiens
ccccttcacctggct

SEQ ID NO: 443586 - DNA, 15 bp, Homo sapiens
cccccttcacctggc

SEQ ID NO: 443587 - DNA, 15 bp, Homo sapiens
gcccccttcacctgg

SEQ ID NO: 443588 - DNA, 15 bp, Homo sapiens
ggcccccttcacctg

SEQ ID NO: 443589 - DNA, 15 bp, Homo sapiens
gggcccccttcacct

SEQ ID NO: 443590 - DNA, 15 bp, Homo sapiens
ggggcccccttcacc

SEQ ID NO: 443591 - DNA, 15 bp, Homo sapiens
cggggcccccttcac

SEQ ID NO: 443592 - DNA, 15 bp, Homo sapiens
ccggggcccccttca

SEQ ID NO: 443593 - DNA, 15 bp, Homo sapiens
cccggggcccccttc

SEQ ID NO: 443594 - DNA, 15 bp, Homo sapiens
gcccggggccccctt

SEQ ID NO: 443595 - DNA, 15 bp, Homo sapiens
ggcccggggccccct

SEQ ID NO: 443596 - DNA, 15 bp, Homo sapiens
tggcccggggccccc

SEQ ID NO: 443597 - DNA, 15 bp, Homo sapiens
ttggcccggggcccc

SEQ ID NO: 443598 - DNA, 15 bp, Homo sapiens
gttggcccggggccc

SEQ ID NO: 443599 - DNA, 15 bp, Homo sapiens
agttggcccggggcc

SEQ ID NO: 443600 - DNA, 15 bp, Homo sapiens
tagttggcccggggc

SEQ ID NO: 443601 - DNA, 15 bp, Homo sapiens
ctagttggcccgggg

SEQ ID NO: 443602 - DNA, 15 bp, Homo sapiens
cctagttggcccggg

SEQ ID NO: 443603 - DNA, 15 bp, Homo sapiens
ccctagttggcccgg

SEQ ID NO: 443604 - DNA, 15 bp, Homo sapiens
cccctagttggcccg

SEQ ID NO: 443605 - DNA, 15 bp, Homo sapiens
gcccctagttggccc

SEQ ID NO: 443606 - DNA, 15 bp, Homo sapiens
cgcccctagttggcc

SEQ ID NO: 443607 - DNA, 15 bp, Homo sapiens
tcgcccctagttggc

SEQ ID NO: 443608 - DNA, 15 bp, Homo sapiens
ttcgcccctagttgg

SEQ ID NO: 443609 - DNA, 15 bp, Homo sapiens
tttcgcccctagttg

SEQ ID NO: 443610 - DNA, 15 bp, Homo sapiens
gtttcgcccctagtt

SEQ ID NO: 443611 - DNA, 15 bp, Homo sapiens
agtttcgcccctagt

SEQ ID NO: 443612 - DNA, 15 bp, Homo sapiens
gagtttcgcccctag

SEQ ID NO: 443613 - DNA, 15 bp, Homo sapiens
agagtttcgccccta

SEQ ID NO: 443614 - DNA, 15 bp, Homo sapiens
tagagtttcgcccct

SEQ ID NO: 443615 - DNA, 15 bp, Homo sapiens
ctagagtttcgcccc

SEQ ID NO: 443616 - DNA, 15 bp, Homo sapiens
cctagagtttcgccc

SEQ ID NO: 443617 - DNA, 15 bp, Homo sapiens
ccctagagtttcgcc

SEQ ID NO: 443618 - DNA, 15 bp, Homo sapiens
gccctagagtttcgc

SEQ ID NO: 443619 - DNA, 15 bp, Homo sapiens
agccctagagtttcg

SEQ ID NO: 443620 - DNA, 15 bp, Homo sapiens
cagccctagagtttc

SEQ ID NO: 443621 - DNA, 15 bp, Homo sapiens
gcagccctagagttt

SEQ ID NO: 443622 - DNA, 15 bp, Homo sapiens
ggcagccctagagtt

SEQ ID NO: 443623 - DNA, 15 bp, Homo sapiens
gggcagccctagagt

SEQ ID NO: 443624 - DNA, 15 bp, Homo sapiens
agggcagccctagag

SEQ ID NO: 443625 - DNA, 15 bp, Homo sapiens
cagggcagccctaga

SEQ ID NO: 443626 - DNA, 15 bp, Homo sapiens
gcagggcagccctag

SEQ ID NO: 443627 - DNA, 15 bp, Homo sapiens
ggcagggcagcccta

SEQ ID NO: 443628 - DNA, 15 bp, Homo sapiens
aggcagggcagccct

SEQ ID NO: 443629 - DNA, 15 bp, Homo sapiens
caggcagggcagccc

SEQ ID NO: 443630 - DNA, 15 bp, Homo sapiens
ccaggcagggcagcc

SEQ ID NO: 443631 - DNA, 15 bp, Homo sapiens
cccaggcagggcagc

SEQ ID NO: 443632 - DNA, 15 bp, Homo sapiens
tcccaggcagggcag

SEQ ID NO: 443633 - DNA, 15 bp, Homo sapiens
ctcccaggcagggca

SEQ ID NO: 443634 - DNA, 15 bp, Homo sapiens
cctcccaggcagggc

SEQ ID NO: 443635 - DNA, 15 bp, Homo sapiens
tcctcccaggcaggg

SEQ ID NO: 443636 - DNA, 15 bp, Homo sapiens
ttcctcccaggcagg

SEQ ID NO: 443637 - DNA, 15 bp, Homo sapiens
attcctcccaggcag

SEQ ID NO: 443638 - DNA, 15 bp, Homo sapiens
aattcctcccaggca

SEQ ID NO: 443639 - DNA, 15 bp, Homo sapiens
aaattcctcccaggc

SEQ ID NO: 443640 - DNA, 15 bp, Homo sapiens
gaaattcctcccagg

SEQ ID NO: 443641 - DNA, 15 bp, Homo sapiens
tgaaattcctcccag

SEQ ID NO: 443642 - DNA, 15 bp, Homo sapiens
gtgaaattcctccca

SEQ ID NO: 443643 - DNA, 15 bp, Homo sapiens
cgtgaaattcctccc

SEQ ID NO: 443644 - DNA, 15 bp, Homo sapiens
acgtgaaattcctcc

SEQ ID NO: 443645 - DNA, 15 bp, Homo sapiens
aacgtgaaattcctc

SEQ ID NO: 443646 - DNA, 15 bp, Homo sapiens
caacgtgaaattcct

SEQ ID NO: 443647 - DNA, 15 bp, Homo sapiens
gcaacgtgaaattcc

SEQ ID NO: 443648 - DNA, 15 bp, Homo sapiens
ggcaacgtgaaattc

SEQ ID NO: 443649 - DNA, 15 bp, Homo sapiens
aggcaacgtgaaatt

SEQ ID NO: 443650 - DNA, 15 bp, Homo sapiens
gaggcaacgtgaaat

SEQ ID NO: 443651 - DNA, 15 bp, Homo sapiens
ggaggcaacgtgaaa

SEQ ID NO: 443652 - DNA, 15 bp, Homo sapiens
cggaggcaacgtgaa

SEQ ID NO: 443653 - DNA, 15 bp, Homo sapiens
acggaggcaacgtga

SEQ ID NO: 443654 - DNA, 15 bp, Homo sapiens
aacggaggcaacgtg

SEQ ID NO: 443655 - DNA, 15 bp, Homo sapiens
aaacggaggcaacgt

SEQ ID NO: 443656 - DNA, 15 bp, Homo sapiens
taaacggaggcaacg

SEQ ID NO: 443657 - DNA, 15 bp, Homo sapiens
ataaacggaggcaac

SEQ ID NO: 443658 - DNA, 15 bp, Homo sapiens
gataaacggaggcaa

SEQ ID NO: 443659 - DNA, 15 bp, Homo sapiens
ggataaacggaggca

SEQ ID NO: 443660 - DNA, 15 bp, Homo sapiens
cggataaacggaggc

SEQ ID NO: 443661 - DNA, 15 bp, Homo sapiens
gcggataaacggagg

SEQ ID NO: 443662 - DNA, 15 bp, Homo sapiens
ggcggataaacggag

SEQ ID NO: 443663 - DNA, 15 bp, Homo sapiens
gggcggataaacgga

SEQ ID NO: 443664 - DNA, 15 bp, Homo sapiens
cgggcggataaacgg

SEQ ID NO: 443665 - DNA, 15 bp, Homo sapiens
gcgggcggataaacg

SEQ ID NO: 443666 - DNA, 15 bp, Homo sapiens
tgcgggcggataaac

SEQ ID NO: 443667 - DNA, 15 bp, Homo sapiens
ctgcgggcggataaa

SEQ ID NO: 443668 - DNA, 15 bp, Homo sapiens
gctgcgggcggataa

SEQ ID NO: 443669 - DNA, 15 bp, Homo sapiens
agctgcgggcggata

SEQ ID NO: 443670 - DNA, 15 bp, Homo sapiens
gagctgcgggcggat

SEQ ID NO: 443671 - DNA, 15 bp, Homo sapiens
cgagctgcgggcgga

SEQ ID NO: 443672 - DNA, 15 bp, Homo sapiens
gcgagctgcgggcgg

SEQ ID NO: 443673 - DNA, 15 bp, Homo sapiens
ggcgagctgcgggcg

SEQ ID NO: 443674 - DNA, 15 bp, Homo sapiens
aggcgagctgcgggc

SEQ ID NO: 443675 - DNA, 15 bp, Homo sapiens
aaggcgagctgcggg

SEQ ID NO: 443676 - DNA, 15 bp, Homo sapiens
gaaggcgagctgcgg

SEQ ID NO: 443677 - DNA, 15 bp, Homo sapiens
ggaaggcgagctgcg

SEQ ID NO: 443678 - DNA, 15 bp, Homo sapiens
aggaaggcgagctgc

SEQ ID NO: 443679 - DNA, 15 bp, Homo sapiens
caggaaggcgagctg

SEQ ID NO: 443680 - DNA, 15 bp, Homo sapiens
gcaggaaggcgagct

SEQ ID NO: 443681 - DNA, 15 bp, Homo sapiens
agcaggaaggcgagc

SEQ ID NO: 443682 - DNA, 15 bp, Homo sapiens
gagcaggaaggcgag

SEQ ID NO: 443683 - DNA, 15 bp, Homo sapiens
agagcaggaaggcga

SEQ ID NO: 443684 - DNA, 15 bp, Homo sapiens
tagagcaggaaggcg

SEQ ID NO: 443685 - DNA, 15 bp, Homo sapiens
gtagagcaggaaggc

SEQ ID NO: 443686 - DNA, 15 bp, Homo sapiens
tgtagagcaggaagg

SEQ ID NO: 443687 - DNA, 15 bp, Homo sapiens
ttgtagagcaggaag

SEQ ID NO: 443688 - DNA, 15 bp, Homo sapiens
attgtagagcaggaa

SEQ ID NO: 443689 - DNA, 15 bp, Homo sapiens
cattgtagagcagga

SEQ ID NO: 443690 - DNA, 15 bp, Homo sapiens
tcattgtagagcagg

SEQ ID NO: 443691 - DNA, 15 bp, Homo sapiens
gtcattgtagagcag

SEQ ID NO: 443692 - DNA, 15 bp, Homo sapiens
ggtcattgtagagca

SEQ ID NO: 443693 - DNA, 15 bp, Homo sapiens
tggtcattgtagagc

SEQ ID NO: 443694 - DNA, 15 bp, Homo sapiens
ttggtcattgtagag

SEQ ID NO: 443695 - DNA, 15 bp, Homo sapiens
gttggtcattgtaga

SEQ ID NO: 443696 - DNA, 15 bp, Homo sapiens
ggttggtcattgtag

SEQ ID NO: 443697 - DNA, 15 bp, Homo sapiens
cggttggtcattgta

SEQ ID NO: 443698 - DNA, 15 bp, Homo sapiens
gcggttggtcattgt

SEQ ID NO: 443699 - DNA, 15 bp, Homo sapiens
ggcggttggtcattg

SEQ ID NO: 443700 - DNA, 15 bp, Homo sapiens
aggcggttggtcatt

SEQ ID NO: 443701 - DNA, 15 bp, Homo sapiens
gaggcggttggtcat

SEQ ID NO: 443702 - DNA, 15 bp, Homo sapiens
tgaggcggttggtca

SEQ ID NO: 443703 - DNA, 15 bp, Homo sapiens
ttgaggcggttggtc

SEQ ID NO: 443704 - DNA, 15 bp, Homo sapiens
gttgaggcggttggt

SEQ ID NO: 443705 - DNA, 15 bp, Homo sapiens
ggttgaggcggttgg

SEQ ID NO: 443706 - DNA, 15 bp, Homo sapiens
gggttgaggcggttg

SEQ ID NO: 443707 - DNA, 15 bp, Homo sapiens
tgggttgaggcggtt

SEQ ID NO: 443708 - DNA, 15 bp, Homo sapiens
ctgggttgaggcggt

SEQ ID NO: 443709 - DNA, 15 bp, Homo sapiens
gctgggttgaggcgg

SEQ ID NO: 443710 - DNA, 15 bp, Homo sapiens
tgctgggttgaggcg

SEQ ID NO: 443711 - DNA, 15 bp, Homo sapiens
ttgctgggttgaggc

SEQ ID NO: 443712 - DNA, 15 bp, Homo sapiens
cttgctgggttgagg

SEQ ID NO: 443713 - DNA, 15 bp, Homo sapiens
ccttgctgggttgag

SEQ ID NO: 443714 - DNA, 15 bp, Homo sapiens
gccttgctgggttga

SEQ ID NO: 443715 - DNA, 15 bp, Homo sapiens
agccttgctgggttg

SEQ ID NO: 443716 - DNA, 15 bp, Homo sapiens
gagccttgctgggtt

SEQ ID NO: 443717 - DNA, 15 bp, Homo sapiens
tgagccttgctgggt

SEQ ID NO: 443718 - DNA, 15 bp, Homo sapiens
ctgagccttgctggg

SEQ ID NO: 443719 - DNA, 15 bp, Homo sapiens
cctgagccttgctgg

SEQ ID NO: 443720 - DNA, 15 bp, Homo sapiens
tcctgagccttgctg

SEQ ID NO: 443721 - DNA, 15 bp, Homo sapiens
gtcctgagccttgct

SEQ ID NO: 443722 - DNA, 15 bp, Homo sapiens
agtcctgagccttgc

SEQ ID NO: 443723 - DNA, 15 bp, Homo sapiens
gagtcctgagccttg

SEQ ID NO: 443724 - DNA, 15 bp, Homo sapiens
agagtcctgagcctt

SEQ ID NO: 443725 - DNA, 15 bp, Homo sapiens
aagagtcctgagcct

SEQ ID NO: 443726 - DNA, 15 bp, Homo sapiens
gaagagtcctgagcc

SEQ ID NO: 443727 - DNA, 15 bp, Homo sapiens
ggaagagtcctgagc

SEQ ID NO: 443728 - DNA, 15 bp, Homo sapiens
tggaagagtcctgag

SEQ ID NO: 443729 - DNA, 15 bp, Homo sapiens
atggaagagtcctga

SEQ ID NO: 443730 - DNA, 15 bp, Homo sapiens
catggaagagtcctg

SEQ ID NO: 443731 - DNA, 15 bp, Homo sapiens
gcatggaagagtcct

SEQ ID NO: 443732 - DNA, 15 bp, Homo sapiens
cgcatggaagagtcc

SEQ ID NO: 443733 - DNA, 15 bp, Homo sapiens
acgcatggaagagtc

SEQ ID NO: 443734 - DNA, 15 bp, Homo sapiens
cacgcatggaagagt

SEQ ID NO: 443735 - DNA, 15 bp, Homo sapiens
ccacgcatggaagag

SEQ ID NO: 443736 - DNA, 15 bp, Homo sapiens
cccacgcatggaaga

SEQ ID NO: 443737 - DNA, 15 bp, Homo sapiens
gcccacgcatggaag

SEQ ID NO: 443738 - DNA, 15 bp, Homo sapiens
tgcccacgcatggaa

SEQ ID NO: 443739 - DNA, 15 bp, Homo sapiens
gtgcccacgcatgga

SEQ ID NO: 443740 - DNA, 15 bp, Homo sapiens
tgtgcccacgcatgg

SEQ ID NO: 443741 - DNA, 15 bp, Homo sapiens
gtgtgcccacgcatg

SEQ ID NO: 443742 - DNA, 15 bp, Homo sapiens
cgtgtgcccacgcat

SEQ ID NO: 443743 - DNA, 15 bp, Homo sapiens
tcgtgtgcccacgca

SEQ ID NO: 443744 - DNA, 15 bp, Homo sapiens
ttcgtgtgcccacgc

SEQ ID NO: 443745 - DNA, 15 bp, Homo sapiens
cttcgtgtgcccacg

SEQ ID NO: 443746 - DNA, 15 bp, Homo sapiens
ccttcgtgtgcccac

SEQ ID NO: 443747 - DNA, 15 bp, Homo sapiens
cccttcgtgtgccca

SEQ ID NO: 443748 - DNA, 15 bp, Homo sapiens
acccttcgtgtgccc

SEQ ID NO: 443749 - DNA, 15 bp, Homo sapiens
cacccttcgtgtgcc

SEQ ID NO: 443750 - DNA, 15 bp, Homo sapiens
tcacccttcgtgtgc

SEQ ID NO: 443751 - DNA, 15 bp, Homo sapiens
ctcacccttcgtgtg

SEQ ID NO: 443752 - DNA, 15 bp, Homo sapiens
cctcacccttcgtgt

SEQ ID NO: 443753 - DNA, 15 bp, Homo sapiens
gcctcacccttcgtg

SEQ ID NO: 443754 - DNA, 15 bp, Homo sapiens
ggcctcacccttcgt

SEQ ID NO: 443755 - DNA, 15 bp, Homo sapiens
aggcctcacccttcg

SEQ ID NO: 443756 - DNA, 15 bp, Homo sapiens
caggcctcacccttc

SEQ ID NO: 443757 - DNA, 15 bp, Homo sapiens
ccaggcctcaccctt

SEQ ID NO: 443758 - DNA, 15 bp, Homo sapiens
tccaggcctcaccct

SEQ ID NO: 443759 - DNA, 15 bp, Homo sapiens
atccaggcctcaccc

SEQ ID NO: 443760 - DNA, 15 bp, Homo sapiens
aatccaggcctcacc

SEQ ID NO: 443761 - DNA, 15 bp, Homo sapiens
caatccaggcctcac

SEQ ID NO: 443762 - DNA, 15 bp, Homo sapiens
ccaatccaggcctca

SEQ ID NO: 443763 - DNA, 15 bp, Homo sapiens
cccaatccaggcctc

SEQ ID NO: 443764 - DNA, 15 bp, Homo sapiens
ccccaatccaggcct

SEQ ID NO: 443765 - DNA, 15 bp, Homo sapiens
cccccaatccaggcc

SEQ ID NO: 443766 - DNA, 15 bp, Homo sapiens
gcccccaatccaggc

SEQ ID NO: 443767 - DNA, 15 bp, Homo sapiens
agcccccaatccagg

SEQ ID NO: 443768 - DNA, 15 bp, Homo sapiens
cagcccccaatccag

SEQ ID NO: 443769 - DNA, 15 bp, Homo sapiens
ccagcccccaatcca

SEQ ID NO: 443770 - DNA, 15 bp, Homo sapiens
cccagcccccaatcc

SEQ ID NO: 443771 - DNA, 15 bp, Homo sapiens
ccccagcccccaatc

SEQ ID NO: 443772 - DNA, 15 bp, Homo sapiens
tccccagcccccaat

SEQ ID NO: 443773 - DNA, 15 bp, Homo sapiens
ctccccagcccccaa

SEQ ID NO: 443774 - DNA, 15 bp, Homo sapiens
tctccccagccccca

SEQ ID NO: 443775 - DNA, 15 bp, Homo sapiens
ctctccccagccccc

SEQ ID NO: 443776 - DNA, 15 bp, Homo sapiens
tctctccccagcccc

SEQ ID NO: 443777 - DNA, 15 bp, Homo sapiens
gtctctccccagccc

SEQ ID NO: 443778 - DNA, 15 bp, Homo sapiens
agtctctccccagcc

SEQ ID NO: 443779 - DNA, 15 bp, Homo sapiens
gagtctctccccagc

SEQ ID NO: 443780 - DNA, 15 bp, Homo sapiens
cgagtctctccccag

SEQ ID NO: 443781 - DNA, 15 bp, Homo sapiens
ccgagtctctcccca

SEQ ID NO: 443782 - DNA, 15 bp, Homo sapiens
cccgagtctctcccc

SEQ ID NO: 443783 - DNA, 15 bp, Homo sapiens
acccgagtctctccc

SEQ ID NO: 443784 - DNA, 15 bp, Homo sapiens
gacccgagtctctcc

SEQ ID NO: 443785 - DNA, 15 bp, Homo sapiens
ggacccgagtctctc

SEQ ID NO: 443786 - DNA, 15 bp, Homo sapiens
gggacccgagtctct

SEQ ID NO: 443787 - DNA, 15 bp, Homo sapiens
tgggacccgagtctc

SEQ ID NO: 443788 - DNA, 15 bp, Homo sapiens
atgggacccgagtct

SEQ ID NO: 443789 - DNA, 15 bp, Homo sapiens
aatgggacccgagtc

SEQ ID NO: 443790 - DNA, 15 bp, Homo sapiens
aaatgggacccgagt

SEQ ID NO: 443791 - DNA, 15 bp, Homo sapiens
aaaatgggacccgag

SEQ ID NO: 443792 - DNA, 15 bp, Homo sapiens
aaaaatgggacccga

SEQ ID NO: 443793 - DNA, 15 bp, Homo sapiens
gaaaaatgggacccg

SEQ ID NO: 443794 - DNA, 15 bp, Homo sapiens
ggaaaaatgggaccc

SEQ ID NO: 443795 - DNA, 15 bp, Homo sapiens
tggaaaaatgggacc

SEQ ID NO: 443796 - DNA, 15 bp, Homo sapiens
ttggaaaaatgggac

SEQ ID NO: 443797 - DNA, 15 bp, Homo sapiens
cttggaaaaatggga

SEQ ID NO: 443798 - DNA, 15 bp, Homo sapiens
ccttggaaaaatggg

SEQ ID NO: 443799 - DNA, 15 bp, Homo sapiens
accttggaaaaatgg

SEQ ID NO: 443800 - DNA, 15 bp, Homo sapiens
taccttggaaaaatg

SEQ ID NO: 443801 - DNA, 15 bp, Homo sapiens
ttaccttggaaaaat

SEQ ID NO: 443802 - DNA, 15 bp, Homo sapiens
gttaccttggaaaaa

SEQ ID NO: 443803 - DNA, 15 bp, Homo sapiens
ggttaccttggaaaa

SEQ ID NO: 443804 - DNA, 15 bp, Homo sapiens
gggttaccttggaaa

SEQ ID NO: 443805 - DNA, 15 bp, Homo sapiens
ggggttaccttggaa

SEQ ID NO: 443806 - DNA, 15 bp, Homo sapiens
aggggttaccttgga

SEQ ID NO: 443807 - DNA, 15 bp, Homo sapiens
caggggttaccttgg

SEQ ID NO: 443808 - DNA, 15 bp, Homo sapiens
tcaggggttaccttg

SEQ ID NO: 443809 - DNA, 15 bp, Homo sapiens
gtcaggggttacctt

SEQ ID NO: 443810 - DNA, 15 bp, Homo sapiens
cgtcaggggttacct

SEQ ID NO: 443811 - DNA, 15 bp, Homo sapiens
acgtcaggggttacc

SEQ ID NO: 443812 - DNA, 15 bp, Homo sapiens
cacgtcaggggttac

SEQ ID NO: 443813 - DNA, 15 bp, Homo sapiens
gcacgtcaggggtta

SEQ ID NO: 443814 - DNA, 15 bp, Homo sapiens
tgcacgtcaggggtt

SEQ ID NO: 443815 - DNA, 15 bp, Homo sapiens
atgcacgtcaggggt

SEQ ID NO: 443816 - DNA, 15 bp, Homo sapiens
catgcacgtcagggg

SEQ ID NO: 443817 - DNA, 15 bp, Homo sapiens
ccatgcacgtcaggg

SEQ ID NO: 443818 - DNA, 15 bp, Homo sapiens
cccatgcacgtcagg

SEQ ID NO: 443819 - DNA, 15 bp, Homo sapiens
ccccatgcacgtcag

SEQ ID NO: 443820 - DNA, 15 bp, Homo sapiens
accccatgcacgtca

SEQ ID NO: 443821 - DNA, 15 bp, Homo sapiens
caccccatgcacgtc

SEQ ID NO: 443822 - DNA, 15 bp, Homo sapiens
ccaccccatgcacgt

SEQ ID NO: 443823 - DNA, 15 bp, Homo sapiens
accaccccatgcacg

SEQ ID NO: 443824 - DNA, 15 bp, Homo sapiens
gaccaccccatgcac

SEQ ID NO: 443825 - DNA, 15 bp, Homo sapiens
cgaccaccccatgca

SEQ ID NO: 443826 - DNA, 15 bp, Homo sapiens
ccgaccaccccatgc

SEQ ID NO: 443827 - DNA, 15 bp, Homo sapiens
cccgaccaccccatg

SEQ ID NO: 443828 - DNA, 15 bp, Homo sapiens
ccccgaccaccccat

SEQ ID NO: 443829 - DNA, 15 bp, Homo sapiens
tccccgaccacccca

SEQ ID NO: 443830 - DNA, 15 bp, Homo sapiens
ctccccgaccacccc

SEQ ID NO: 443831 - DNA, 15 bp, Homo sapiens
tctccccgaccaccc

SEQ ID NO: 443832 - DNA, 15 bp, Homo sapiens
atctccccgaccacc

SEQ ID NO: 443833 - DNA, 15 bp, Homo sapiens
gatctccccgaccac

SEQ ID NO: 443834 - DNA, 15 bp, Homo sapiens
agatctccccgacca

SEQ ID NO: 443835 - DNA, 15 bp, Homo sapiens
cagatctccccgacc

SEQ ID NO: 443836 - DNA, 15 bp, Homo sapiens
gcagatctccccgac

SEQ ID NO: 443837 - DNA, 15 bp, Homo sapiens
tgcagatctccccga

SEQ ID NO: 443838 - DNA, 15 bp, Homo sapiens
gtgcagatctccccg

SEQ ID NO: 443839 - DNA, 15 bp, Homo sapiens
agtgcagatctcccc

SEQ ID NO: 443840 - DNA, 15 bp, Homo sapiens
cagtgcagatctccc

SEQ ID NO: 443841 - DNA, 15 bp, Homo sapiens
acagtgcagatctcc

SEQ ID NO: 443842 - DNA, 15 bp, Homo sapiens
gacagtgcagatctc

SEQ ID NO: 443843 - DNA, 15 bp, Homo sapiens
tgacagtgcagatct

SEQ ID NO: 443844 - DNA, 15 bp, Homo sapiens
ctgacagtgcagatc

SEQ ID NO: 443845 - DNA, 15 bp, Homo sapiens
tctgacagtgcagat

SEQ ID NO: 443846 - DNA, 15 bp, Homo sapiens
gtctgacagtgcaga

SEQ ID NO: 443847 - DNA, 15 bp, Homo sapiens
ggtctgacagtgcag

SEQ ID NO: 443848 - DNA, 15 bp, Homo sapiens
gggtctgacagtgca

SEQ ID NO: 443849 - DNA, 15 bp, Homo sapiens
agggtctgacagtgc

SEQ ID NO: 443850 - DNA, 15 bp, Homo sapiens
cagggtctgacagtg

SEQ ID NO: 443851 - DNA, 15 bp, Homo sapiens
ccagggtctgacagt

SEQ ID NO: 443852 - DNA, 15 bp, Homo sapiens
cccagggtctgacag

SEQ ID NO: 443853 - DNA, 15 bp, Homo sapiens
gcccagggtctgaca

SEQ ID NO: 443854 - DNA, 15 bp, Homo sapiens
tgcccagggtctgac

SEQ ID NO: 443855 - DNA, 15 bp, Homo sapiens
atgcccagggtctga

SEQ ID NO: 443856 - DNA, 15 bp, Homo sapiens
gatgcccagggtctg

SEQ ID NO: 443857 - DNA, 15 bp, Homo sapiens
agatgcccagggtct

SEQ ID NO: 443858 - DNA, 15 bp, Homo sapiens
tagatgcccagggtc

SEQ ID NO: 443859 - DNA, 15 bp, Homo sapiens
atagatgcccagggt

SEQ ID NO: 443860 - DNA, 15 bp, Homo sapiens
aatagatgcccaggg

SEQ ID NO: 443861 - DNA, 15 bp, Homo sapiens
gaatagatgcccagg

SEQ ID NO: 443862 - DNA, 15 bp, Homo sapiens
ggaatagatgcccag

SEQ ID NO: 443863 - DNA, 15 bp, Homo sapiens
gggaatagatgccca

SEQ ID NO: 443864 - DNA, 15 bp, Homo sapiens
ggggaatagatgccc

SEQ ID NO: 443865 - DNA, 15 bp, Homo sapiens
gggggaatagatgcc

SEQ ID NO: 443866 - DNA, 15 bp, Homo sapiens
ggggggaatagatgc

SEQ ID NO: 443867 - DNA, 15 bp, Homo sapiens
tggggggaatagatg

SEQ ID NO: 443868 - DNA, 15 bp, Homo sapiens
ttggggggaatagat

SEQ ID NO: 443869 - DNA, 15 bp, Homo sapiens
gttggggggaataga

SEQ ID NO: 443870 - DNA, 15 bp, Homo sapiens
agttggggggaatag

SEQ ID NO: 443871 - DNA, 15 bp, Homo sapiens
aagttggggggaata

SEQ ID NO: 443872 - DNA, 15 bp, Homo sapiens
aaagttggggggaat

SEQ ID NO: 443873 - DNA, 15 bp, Homo sapiens
aaaagttggggggaa

SEQ ID NO: 443874 - DNA, 15 bp, Homo sapiens
aaaaagttgggggga

SEQ ID NO: 443875 - DNA, 15 bp, Homo sapiens
aaaaaagttgggggg

SEQ ID NO: 443876 - DNA, 15 bp, Homo sapiens
aaaaaaagttggggg

SEQ ID NO: 443877 - DNA, 15 bp, Homo sapiens
aaaaaaaagttgggg

SEQ ID NO: 443878 - DNA, 15 bp, Homo sapiens
gaaaaaaaaaagttg

SEQ ID NO: 443879 - DNA, 15 bp, Homo sapiens
agaaaaaaaaaagtt

SEQ ID NO: 443880 - DNA, 15 bp, Homo sapiens
aagaaaaaaaaaagt

SEQ ID NO: 443881 - DNA, 15 bp, Homo sapiens
aaagaaaaaaaaaag

SEQ ID NO: 443882 - DNA, 15 bp, Homo sapiens
caaagaaaaaaaaaa

SEQ ID NO: 443883 - DNA, 15 bp, Homo sapiens
acaaagaaaaaaaaa

SEQ ID NO: 443884 - DNA, 15 bp, Homo sapiens
aacaaagaaaaaaaa

SEQ ID NO: 443885 - DNA, 15 bp, Homo sapiens
aaacaaagaaaaaaa

SEQ ID NO: 443886 - DNA, 15 bp, Homo sapiens
aaaacaaagaaaaaa

SEQ ID NO: 443887 - DNA, 15 bp, Homo sapiens
aaaaacaaagaaaaa

SEQ ID NO: 443888 - DNA, 15 bp, Homo sapiens
caaaaacaaagaaaa

SEQ ID NO: 443889 - DNA, 15 bp, Homo sapiens
tcaaaaacaaagaaa

SEQ ID NO: 443890 - DNA, 15 bp, Homo sapiens
ctcaaaaacaaagaa

SEQ ID NO: 443891 - DNA, 15 bp, Homo sapiens
tctcaaaaacaaaga

SEQ ID NO: 443892 - DNA, 15 bp, Homo sapiens
gtctcaaaaacaaag

SEQ ID NO: 443893 - DNA, 15 bp, Homo sapiens
cgtctcaaaaacaaa

SEQ ID NO: 443894 - DNA, 15 bp, Homo sapiens
ccgtctcaaaaacaa

SEQ ID NO: 443895 - DNA, 15 bp, Homo sapiens
accgtctcaaaaaca

SEQ ID NO: 443896 - DNA, 15 bp, Homo sapiens
caccgtctcaaaaac

SEQ ID NO: 443897 - DNA, 15 bp, Homo sapiens
ccaccgtctcaaaaa

SEQ ID NO: 443898 - DNA, 15 bp, Homo sapiens
cccaccgtctcaaaa

SEQ ID NO: 443899 - DNA, 15 bp, Homo sapiens
tcccaccgtctcaaa

SEQ ID NO: 443900 - DNA, 15 bp, Homo sapiens
ctcccaccgtctcaa

SEQ ID NO: 443901 - DNA, 15 bp, Homo sapiens
actcccaccgtctca

SEQ ID NO: 443902 - DNA, 15 bp, Homo sapiens
aactcccaccgtctc

SEQ ID NO: 443903 - DNA, 15 bp, Homo sapiens
gaactcccaccgtct

SEQ ID NO: 443904 - DNA, 15 bp, Homo sapiens
cgaactcccaccgtc

SEQ ID NO: 443905 - DNA, 15 bp, Homo sapiens
gcgaactcccaccgt

SEQ ID NO: 443906 - DNA, 15 bp, Homo sapiens
agcgaactcccaccg

SEQ ID NO: 443907 - DNA, 15 bp, Homo sapiens
gagcgaactcccacc

SEQ ID NO: 443908 - DNA, 15 bp, Homo sapiens
agagcgaactcccac

SEQ ID NO: 443909 - DNA, 15 bp, Homo sapiens
cagagcgaactccca

SEQ ID NO: 443910 - DNA, 15 bp, Homo sapiens
acagagcgaactccc

SEQ ID NO: 443911 - DNA, 15 bp, Homo sapiens
gacagagcgaactcc

SEQ ID NO: 443912 - DNA, 15 bp, Homo sapiens
tgacagagcgaactc

SEQ ID NO: 443913 - DNA, 15 bp, Homo sapiens
gtgacagagcgaact

SEQ ID NO: 443914 - DNA, 15 bp, Homo sapiens
ggtgacagagcgaac

SEQ ID NO: 443915 - DNA, 15 bp, Homo sapiens
gggtgacagagcgaa

SEQ ID NO: 443916 - DNA, 15 bp, Homo sapiens
tgggtgacagagcga

SEQ ID NO: 443917 - DNA, 15 bp, Homo sapiens
ttgggtgacagagcg

SEQ ID NO: 443918 - DNA, 15 bp, Homo sapiens
cttgggtgacagagc

SEQ ID NO: 443919 - DNA, 15 bp, Homo sapiens
gcttgggtgacagag

SEQ ID NO: 443920 - DNA, 15 bp, Homo sapiens
agcttgggtgacaga

SEQ ID NO: 443921 - DNA, 15 bp, Homo sapiens
cagcttgggtgacag

SEQ ID NO: 443922 - DNA, 15 bp, Homo sapiens
ccagcttgggtgaca

SEQ ID NO: 443923 - DNA, 15 bp, Homo sapiens
tccagcttgggtgac

SEQ ID NO: 443924 - DNA, 15 bp, Homo sapiens
ctccagcttgggtga

SEQ ID NO: 443925 - DNA, 15 bp, Homo sapiens
actccagcttgggtg

SEQ ID NO: 443926 - DNA, 15 bp, Homo sapiens
cactccagcttgggt

SEQ ID NO: 443927 - DNA, 15 bp, Homo sapiens
gcactccagcttggg

SEQ ID NO: 443928 - DNA, 15 bp, Homo sapiens
tgcactccagcttgg

SEQ ID NO: 443929 - DNA, 15 bp, Homo sapiens
ctgcactccagcttg

SEQ ID NO: 443930 - DNA, 15 bp, Homo sapiens
actgcactccagctt

SEQ ID NO: 443931 - DNA, 15 bp, Homo sapiens
cactgcactccagct

SEQ ID NO: 443932 - DNA, 15 bp, Homo sapiens
gtgccactgcactcc

SEQ ID NO: 443933 - DNA, 15 bp, Homo sapiens
tgtgccactgcactc

SEQ ID NO: 443934 - DNA, 15 bp, Homo sapiens
ttgtgccactgcact

SEQ ID NO: 443935 - DNA, 15 bp, Homo sapiens
attgtgccactgcac

SEQ ID NO: 443936 - DNA, 15 bp, Homo sapiens
gattgtgccactgca

SEQ ID NO: 443937 - DNA, 15 bp, Homo sapiens
agattgtgccactgc

SEQ ID NO: 443938 - DNA, 15 bp, Homo sapiens
aagattgtgccactg

SEQ ID NO: 443939 - DNA, 15 bp, Homo sapiens
caagattgtgccact

SEQ ID NO: 443940 - DNA, 15 bp, Homo sapiens
ccaagattgtgccac

SEQ ID NO: 443941 - DNA, 15 bp, Homo sapiens
gccaagattgtgcca

SEQ ID NO: 443942 - DNA, 15 bp, Homo sapiens
agccaagattgtgcc

SEQ ID NO: 443943 - DNA, 15 bp, Homo sapiens
gagccaagattgtgc

SEQ ID NO: 443944 - DNA, 15 bp, Homo sapiens
tgagccaagattgtg

SEQ ID NO: 443945 - DNA, 15 bp, Homo sapiens
gtgagccaagattgt

SEQ ID NO: 443946 - DNA, 15 bp, Homo sapiens
attgcagtgagccaa

SEQ ID NO: 443947 - DNA, 15 bp, Homo sapiens
gattgcagtgagcca

SEQ ID NO: 443948 - DNA, 15 bp, Homo sapiens
agattgcagtgagcc

SEQ ID NO: 443949 - DNA, 15 bp, Homo sapiens
gagattgcagtgagc

SEQ ID NO: 443950 - DNA, 15 bp, Homo sapiens
agagattgcagtgag

SEQ ID NO: 443951 - DNA, 15 bp, Homo sapiens
cagagattgcagtga

SEQ ID NO: 443952 - DNA, 15 bp, Homo sapiens
gcagagattgcagtg

SEQ ID NO: 443953 - DNA, 15 bp, Homo sapiens
ggcagagattgcagt

SEQ ID NO: 443954 - DNA, 15 bp, Homo sapiens
aggcagagattgcag

SEQ ID NO: 443955 - DNA, 15 bp, Homo sapiens
gaggcagagattgca

SEQ ID NO: 443956 - DNA, 15 bp, Homo sapiens
agaggcagagattgc

SEQ ID NO: 443957 - DNA, 15 bp, Homo sapiens
cagaggcagagattg

SEQ ID NO: 443958 - DNA, 15 bp, Homo sapiens
ccagaggcagagatt

SEQ ID NO: 443959 - DNA, 15 bp, Homo sapiens
cccagaggcagagat

SEQ ID NO: 443960 - DNA, 15 bp, Homo sapiens
ccccagaggcagaga

SEQ ID NO: 443961 - DNA, 15 bp, Homo sapiens
accccagaggcagag

SEQ ID NO: 443962 - DNA, 15 bp, Homo sapiens
aaccccagaggcaga

SEQ ID NO: 443963 - DNA, 15 bp, Homo sapiens
caaccccagaggcag

SEQ ID NO: 443964 - DNA, 15 bp, Homo sapiens
tcaaccccagaggca

SEQ ID NO: 443965 - DNA, 15 bp, Homo sapiens
ttcaaccccagaggc

SEQ ID NO: 443966 - DNA, 15 bp, Homo sapiens
cttcaaccccagagg

SEQ ID NO: 443967 - DNA, 15 bp, Homo sapiens
gcttcaaccccagag

SEQ ID NO: 443968 - DNA, 15 bp, Homo sapiens
tgcttcaaccccaga

SEQ ID NO: 443969 - DNA, 15 bp, Homo sapiens
ttgcttcaaccccag

SEQ ID NO: 443970 - DNA, 15 bp, Homo sapiens
attgcttcaacccca

SEQ ID NO: 443971 - DNA, 15 bp, Homo sapiens
aattgcttcaacccc

SEQ ID NO: 443972 - DNA, 15 bp, Homo sapiens
gaattgcttcaaccc

SEQ ID NO: 443973 - DNA, 15 bp, Homo sapiens
agaattgcttcaacc

SEQ ID NO: 443974 - DNA, 15 bp, Homo sapiens
gagaattgcttcaac

SEQ ID NO: 443975 - DNA, 15 bp, Homo sapiens
ggagaattgcttcaa

SEQ ID NO: 443976 - DNA, 15 bp, Homo sapiens
aggagaattgcttca

SEQ ID NO: 443977 - DNA, 15 bp, Homo sapiens
caggagaattgcttc

SEQ ID NO: 443978 - DNA, 15 bp, Homo sapiens
acaggagaattgctt

SEQ ID NO: 443979 - DNA, 15 bp, Homo sapiens
gacaggagaattgct

SEQ ID NO: 443980 - DNA, 15 bp, Homo sapiens
agacaggagaattgc

SEQ ID NO: 443981 - DNA, 15 bp, Homo sapiens
gagacaggagaattg

SEQ ID NO: 443982 - DNA, 15 bp, Homo sapiens
tgagacaggagaatt

SEQ ID NO: 443983 - DNA, 15 bp, Homo sapiens
ctgagacaggagaat

SEQ ID NO: 443984 - DNA, 15 bp, Homo sapiens
gctgagacaggagaa

SEQ ID NO: 443985 - DNA, 15 bp, Homo sapiens
ggctgagacaggaga

SEQ ID NO: 443986 - DNA, 15 bp, Homo sapiens
aggctgagacaggag

SEQ ID NO: 443987 - DNA, 15 bp, Homo sapiens
gaggctgagacagga

SEQ ID NO: 443988 - DNA, 15 bp, Homo sapiens
ggaggctgagacagg

SEQ ID NO: 443989 - DNA, 15 bp, Homo sapiens
gggaggctgagacag

SEQ ID NO: 443990 - DNA, 15 bp, Homo sapiens
tgggaggctgagaca

SEQ ID NO: 443991 - DNA, 15 bp, Homo sapiens
ttgggaggctgagac

SEQ ID NO: 443992 - DNA, 15 bp, Homo sapiens
cttgggaggctgaga

SEQ ID NO: 443993 - DNA, 15 bp, Homo sapiens
acttgggaggctgag

SEQ ID NO: 443994 - DNA, 15 bp, Homo sapiens
tacttgggaggctga

SEQ ID NO: 443995 - DNA, 15 bp, Homo sapiens
ctacttgggaggctg

SEQ ID NO: 443996 - DNA, 15 bp, Homo sapiens
gctacttgggaggct

SEQ ID NO: 443997 - DNA, 15 bp, Homo sapiens
agctacttgggaggc

SEQ ID NO: 443998 - DNA, 15 bp, Homo sapiens
cagctacttgggagg

SEQ ID NO: 443999 - DNA, 15 bp, Homo sapiens
ccagctacttgggag

SEQ ID NO: 444000 - DNA, 15 bp, Homo sapiens
accagctacttggga

SEQ ID NO: 444001 - DNA, 15 bp, Homo sapiens
taccagctacttggg

SEQ ID NO: 444002 - DNA, 15 bp, Homo sapiens
ataccagctacttgg

SEQ ID NO: 444003 - DNA, 15 bp, Homo sapiens
aataccagctacttg

SEQ ID NO: 444004 - DNA, 15 bp, Homo sapiens
taataccagctactt

SEQ ID NO: 444005 - DNA, 15 bp, Homo sapiens
ttaataccagctact

SEQ ID NO: 444006 - DNA, 15 bp, Homo sapiens
tttaataccagctac

SEQ ID NO: 444007 - DNA, 15 bp, Homo sapiens
ctttaataccagcta

SEQ ID NO: 444008 - DNA, 15 bp, Homo sapiens
cctttaataccagct

SEQ ID NO: 444009 - DNA, 15 bp, Homo sapiens
gcctttaataccagc

SEQ ID NO: 444010 - DNA, 15 bp, Homo sapiens
cgcctttaataccag

SEQ ID NO: 444011 - DNA, 15 bp, Homo sapiens
gcgcctttaatacca

SEQ ID NO: 444012 - DNA, 15 bp, Homo sapiens
tgcgcctttaatacc

SEQ ID NO: 444013 - DNA, 15 bp, Homo sapiens
gtgcgcctttaatac

SEQ ID NO: 444014 - DNA, 15 bp, Homo sapiens
ggtgcgcctttaata

SEQ ID NO: 444015 - DNA, 15 bp, Homo sapiens
tggtgcgcctttaat

SEQ ID NO: 444016 - DNA, 15 bp, Homo sapiens
atggtgcgcctttaa

SEQ ID NO: 444017 - DNA, 15 bp, Homo sapiens
gatggtgcgccttta

SEQ ID NO: 444018 - DNA, 15 bp, Homo sapiens
tgatggtgcgccttt

SEQ ID NO: 444019 - DNA, 15 bp, Homo sapiens
gtgatggtgcgcctt

SEQ ID NO: 444020 - DNA, 15 bp, Homo sapiens
tgtgatggtgcgcct

SEQ ID NO: 444021 - DNA, 15 bp, Homo sapiens
gtgtgatggtgcgcc

SEQ ID NO: 444022 - DNA, 15 bp, Homo sapiens
ggtgtgatggtgcgc

SEQ ID NO: 444023 - DNA, 15 bp, Homo sapiens
tggtgtgatggtgcg

SEQ ID NO: 444024 - DNA, 15 bp, Homo sapiens
ctggtgtgatggtgc

SEQ ID NO: 444025 - DNA, 15 bp, Homo sapiens
cctggtgtgatggtg

SEQ ID NO: 444026 - DNA, 15 bp, Homo sapiens
gcctggtgtgatggt

SEQ ID NO: 444027 - DNA, 15 bp, Homo sapiens
agcctggtgtgatgg

SEQ ID NO: 444028 - DNA, 15 bp, Homo sapiens
tagcctggtgtgatg

SEQ ID NO: 444029 - DNA, 15 bp, Homo sapiens
ttagcctggtgtgat

SEQ ID NO: 444030 - DNA, 15 bp, Homo sapiens
attagcctggtgtga

SEQ ID NO: 444031 - DNA, 15 bp, Homo sapiens
aattagcctggtgtg

SEQ ID NO: 444032 - DNA, 15 bp, Homo sapiens
aaattagcctggtgt

SEQ ID NO: 444033 - DNA, 15 bp, Homo sapiens
aaaattagcctggtg

SEQ ID NO: 444034 - DNA, 15 bp, Homo sapiens
gaaaattagcctggt

SEQ ID NO: 444035 - DNA, 15 bp, Homo sapiens
tgaaaattagcctgg

SEQ ID NO: 444036 - DNA, 15 bp, Homo sapiens
atgaaaattagcctg

SEQ ID NO: 444037 - DNA, 15 bp, Homo sapiens
tatgaaaattagcct

SEQ ID NO: 444038 - DNA, 15 bp, Homo sapiens
atatgaaaattagcc

SEQ ID NO: 444039 - DNA, 15 bp, Homo sapiens
aatatgaaaattagc

SEQ ID NO: 444040 - DNA, 15 bp, Homo sapiens
aaatatgaaaattag

SEQ ID NO: 444041 - DNA, 15 bp, Homo sapiens
aaaatatgaaaatta

SEQ ID NO: 444042 - DNA, 15 bp, Homo sapiens
aaaaatatgaaaatt

SEQ ID NO: 444043 - DNA, 15 bp, Homo sapiens
taaaaatatgaaaat

SEQ ID NO: 444044 - DNA, 15 bp, Homo sapiens
ctaaaaatatgaaaa

SEQ ID NO: 444045 - DNA, 15 bp, Homo sapiens
actaaaaatatgaaa

SEQ ID NO: 444046 - DNA, 15 bp, Homo sapiens
tactaaaaatatgaa

SEQ ID NO: 444047 - DNA, 15 bp, Homo sapiens
gtactaaaaatatga

SEQ ID NO: 444048 - DNA, 15 bp, Homo sapiens
tgtactaaaaatatg

SEQ ID NO: 444049 - DNA, 15 bp, Homo sapiens
ctgtactaaaaatat

SEQ ID NO: 444050 - DNA, 15 bp, Homo sapiens
tctgtactaaaaata

SEQ ID NO: 444051 - DNA, 15 bp, Homo sapiens
gtctgtactaaaaat

SEQ ID NO: 444052 - DNA, 15 bp, Homo sapiens
cgtctgtactaaaaa

SEQ ID NO: 444053 - DNA, 15 bp, Homo sapiens
tcgtctgtactaaaa

SEQ ID NO: 444054 - DNA, 15 bp, Homo sapiens
ctcgtctgtactaaa

SEQ ID NO: 444055 - DNA, 15 bp, Homo sapiens
cctcgtctgtactaa

SEQ ID NO: 444056 - DNA, 15 bp, Homo sapiens
acctcgtctgtacta

SEQ ID NO: 444057 - DNA, 15 bp, Homo sapiens
aacctcgtctgtact

SEQ ID NO: 444058 - DNA, 15 bp, Homo sapiens
aaacctcgtctgtac

SEQ ID NO: 444059 - DNA, 15 bp, Homo sapiens
gaaacctcgtctgta

SEQ ID NO: 444060 - DNA, 15 bp, Homo sapiens
tgaaacctcgtctgt

SEQ ID NO: 444061 - DNA, 15 bp, Homo sapiens
gtgaaacctcgtctg

SEQ ID NO: 444062 - DNA, 15 bp, Homo sapiens
ggtgaaacctcgtct

SEQ ID NO: 444063 - DNA, 15 bp, Homo sapiens
tggtgaaacctcgtc

SEQ ID NO: 444064 - DNA, 15 bp, Homo sapiens
atggtgaaacctcgt

SEQ ID NO: 444065 - DNA, 15 bp, Homo sapiens
catggtgaaacctcg

SEQ ID NO: 444066 - DNA, 15 bp, Homo sapiens
acatggtgaaacctc

SEQ ID NO: 444067 - DNA, 15 bp, Homo sapiens
aacatggtgaaacct

SEQ ID NO: 444068 - DNA, 15 bp, Homo sapiens
accagcctggccaac

SEQ ID NO: 444069 - DNA, 15 bp, Homo sapiens
gaccagcctggccaa

SEQ ID NO: 444070 - DNA, 15 bp, Homo sapiens
agaccagcctggcca

SEQ ID NO: 444071 - DNA, 15 bp, Homo sapiens
gagaccagcctggcc

SEQ ID NO: 444072 - DNA, 15 bp, Homo sapiens
cgagaccagcctggc

SEQ ID NO: 444073 - DNA, 15 bp, Homo sapiens
tcgagaccagcctgg

SEQ ID NO: 444074 - DNA, 15 bp, Homo sapiens
ttcgagaccagcctg

SEQ ID NO: 444075 - DNA, 15 bp, Homo sapiens
gttcgagaccagcct

SEQ ID NO: 444076 - DNA, 15 bp, Homo sapiens
agttcgagaccagcc

SEQ ID NO: 444077 - DNA, 15 bp, Homo sapiens
gagttcgagaccagc

SEQ ID NO: 444078 - DNA, 15 bp, Homo sapiens
accaggagttcgaga

SEQ ID NO: 444079 - DNA, 15 bp, Homo sapiens
aaccaggagttcgag

SEQ ID NO: 444080 - DNA, 15 bp, Homo sapiens
aaaccaggagttcga

SEQ ID NO: 444081 - DNA, 15 bp, Homo sapiens
gaaaccaggagttcg

SEQ ID NO: 444082 - DNA, 15 bp, Homo sapiens
agaaaccaggagttc

SEQ ID NO: 444083 - DNA, 15 bp, Homo sapiens
tagaaaccaggagtt

SEQ ID NO: 444084 - DNA, 15 bp, Homo sapiens
gtagaaaccaggagt

SEQ ID NO: 444085 - DNA, 15 bp, Homo sapiens
ggtagaaaccaggag

SEQ ID NO: 444086 - DNA, 15 bp, Homo sapiens
aggtagaaaccagga

SEQ ID NO: 444087 - DNA, 15 bp, Homo sapiens
gaggtagaaaccagg

SEQ ID NO: 444088 - DNA, 15 bp, Homo sapiens
tgaggtagaaaccag

SEQ ID NO: 444089 - DNA, 15 bp, Homo sapiens
ttgaggtagaaacca

SEQ ID NO: 444090 - DNA, 15 bp, Homo sapiens
cttgaggtagaaacc

SEQ ID NO: 444091 - DNA, 15 bp, Homo sapiens
acttgaggtagaaac

SEQ ID NO: 444092 - DNA, 15 bp, Homo sapiens
cacttgaggtagaaa

SEQ ID NO: 444093 - DNA, 15 bp, Homo sapiens
tcacttgaggtagaa

SEQ ID NO: 444094 - DNA, 15 bp, Homo sapiens
atcacttgaggtaga

SEQ ID NO: 444095 - DNA, 15 bp, Homo sapiens
gatcacttgaggtag

SEQ ID NO: 444096 - DNA, 15 bp, Homo sapiens
agatcacttgaggta

SEQ ID NO: 444097 - DNA, 15 bp, Homo sapiens
tagatcacttgaggt

SEQ ID NO: 444098 - DNA, 15 bp, Homo sapiens
gtagatcacttgagg

SEQ ID NO: 444099 - DNA, 15 bp, Homo sapiens
ggtagatcacttgag

SEQ ID NO: 444100 - DNA, 15 bp, Homo sapiens
gggtagatcacttga

SEQ ID NO: 444101 - DNA, 15 bp, Homo sapiens
cgggtagatcacttg

SEQ ID NO: 444102 - DNA, 15 bp, Homo sapiens
gcgggtagatcactt

SEQ ID NO: 444103 - DNA, 15 bp, Homo sapiens
ggcgggtagatcact

SEQ ID NO: 444104 - DNA, 15 bp, Homo sapiens
aggcgggtagatcac

SEQ ID NO: 444105 - DNA, 15 bp, Homo sapiens
aaggcgggtagatca

SEQ ID NO: 444106 - DNA, 15 bp, Homo sapiens
caaggcgggtagatc

SEQ ID NO: 444107 - DNA, 15 bp, Homo sapiens
ccaaggcgggtagat

SEQ ID NO: 444108 - DNA, 15 bp, Homo sapiens
gccaaggcgggtaga

SEQ ID NO: 444109 - DNA, 15 bp, Homo sapiens
ggccaaggcgggtag

SEQ ID NO: 444110 - DNA, 15 bp, Homo sapiens
aggccaaggcgggta

SEQ ID NO: 444111 - DNA, 15 bp, Homo sapiens
gaggccaaggcgggt

SEQ ID NO: 444112 - DNA, 15 bp, Homo sapiens
ggaggccaaggcggg

SEQ ID NO: 444113 - DNA, 15 bp, Homo sapiens
gggaggccaaggcgg

SEQ ID NO: 444114 - DNA, 15 bp, Homo sapiens
tgggaggccaaggcg

SEQ ID NO: 444115 - DNA, 15 bp, Homo sapiens
ttgggaggccaaggc

SEQ ID NO: 444116 - DNA, 15 bp, Homo sapiens
tcctgtaatcccagc

SEQ ID NO: 444117 - DNA, 15 bp, Homo sapiens
ttcctgtaatcccag

SEQ ID NO: 444118 - DNA, 15 bp, Homo sapiens
attcctgtaatccca

SEQ ID NO: 444119 - DNA, 15 bp, Homo sapiens
cattcctgtaatccc

SEQ ID NO: 444120 - DNA, 15 bp, Homo sapiens
tcattcctgtaatcc

SEQ ID NO: 444121 - DNA, 15 bp, Homo sapiens
ctcattcctgtaatc

SEQ ID NO: 444122 - DNA, 15 bp, Homo sapiens
gctcattcctgtaat

SEQ ID NO: 444123 - DNA, 15 bp, Homo sapiens
ggctcattcctgtaa

SEQ ID NO: 444124 - DNA, 15 bp, Homo sapiens
tggctcattcctgta

SEQ ID NO: 444125 - DNA, 15 bp, Homo sapiens
gtggctcattcctgt

SEQ ID NO: 444126 - DNA, 15 bp, Homo sapiens
ggtggctcattcctg

SEQ ID NO: 444127 - DNA, 15 bp, Homo sapiens
gggtggctcattcct

SEQ ID NO: 444128 - DNA, 15 bp, Homo sapiens
agggtggctcattcc

SEQ ID NO: 444129 - DNA, 15 bp, Homo sapiens
cagggtggctcattc

SEQ ID NO: 444130 - DNA, 15 bp, Homo sapiens
gcagggtggctcatt

SEQ ID NO: 444131 - DNA, 15 bp, Homo sapiens
ggcagggtggctcat

SEQ ID NO: 444132 - DNA, 15 bp, Homo sapiens
gggcagggtggctca

SEQ ID NO: 444133 - DNA, 15 bp, Homo sapiens
tgggcagggtggctc

SEQ ID NO: 444134 - DNA, 15 bp, Homo sapiens
ctgggcagggtggct

SEQ ID NO: 444135 - DNA, 15 bp, Homo sapiens
gctgggcagggtggc

SEQ ID NO: 444136 - DNA, 15 bp, Homo sapiens
ggctgggcagggtgg

SEQ ID NO: 444137 - DNA, 15 bp, Homo sapiens
cggctgggcagggtg

SEQ ID NO: 444138 - DNA, 15 bp, Homo sapiens
tcggctgggcagggt

SEQ ID NO: 444139 - DNA, 15 bp, Homo sapiens
ctcggctgggcaggg

SEQ ID NO: 444140 - DNA, 15 bp, Homo sapiens
actcggctgggcagg

SEQ ID NO: 444141 - DNA, 15 bp, Homo sapiens
aactcggctgggcag

SEQ ID NO: 444142 - DNA, 15 bp, Homo sapiens
gaactcggctgggca

SEQ ID NO: 444143 - DNA, 15 bp, Homo sapiens
ggaactcggctgggc

SEQ ID NO: 444144 - DNA, 15 bp, Homo sapiens
aggaactcggctggg

SEQ ID NO: 444145 - DNA, 15 bp, Homo sapiens
taggaactcggctgg

SEQ ID NO: 444146 - DNA, 15 bp, Homo sapiens
ataggaactcggctg

SEQ ID NO: 444147 - DNA, 15 bp, Homo sapiens
cataggaactcggct

SEQ ID NO: 444148 - DNA, 15 bp, Homo sapiens
gcataggaactcggc

SEQ ID NO: 444149 - DNA, 15 bp, Homo sapiens
tgcataggaactcgg

SEQ ID NO: 444150 - DNA, 15 bp, Homo sapiens
atgcataggaactcg

SEQ ID NO: 444151 - DNA, 15 bp, Homo sapiens
aatgcataggaactc

SEQ ID NO: 444152 - DNA, 15 bp, Homo sapiens
aaatgcataggaact

SEQ ID NO: 444153 - DNA, 15 bp, Homo sapiens
aaaatgcataggaac

SEQ ID NO: 444154 - DNA, 15 bp, Homo sapiens
aaaaatgcataggaa

SEQ ID NO: 444155 - DNA, 15 bp, Homo sapiens
gaaaaatgcatagga

SEQ ID NO: 444156 - DNA, 15 bp, Homo sapiens
ggaaaaatgcatagg

SEQ ID NO: 444157 - DNA, 15 bp, Homo sapiens
tggaaaaatgcatag

SEQ ID NO: 444158 - DNA, 15 bp, Homo sapiens
ttggaaaaatgcata

SEQ ID NO: 444159 - DNA, 15 bp, Homo sapiens
cttggaaaaatgcat

SEQ ID NO: 444160 - DNA, 15 bp, Homo sapiens
gcttggaaaaatgca

SEQ ID NO: 444161 - DNA, 15 bp, Homo sapiens
agcttggaaaaatgc

SEQ ID NO: 444162 - DNA, 15 bp, Homo sapiens
tagcttggaaaaatg

SEQ ID NO: 444163 - DNA, 15 bp, Homo sapiens
ttagcttggaaaaat

SEQ ID NO: 444164 - DNA, 15 bp, Homo sapiens
gttagcttggaaaaa

SEQ ID NO: 444165 - DNA, 15 bp, Homo sapiens
ggttagcttggaaaa

SEQ ID NO: 444166 - DNA, 15 bp, Homo sapiens
gggttagcttggaaa

SEQ ID NO: 444167 - DNA, 15 bp, Homo sapiens
ggggttagcttggaa

SEQ ID NO: 444168 - DNA, 15 bp, Homo sapiens
aggggttagcttgga

SEQ ID NO: 444169 - DNA, 15 bp, Homo sapiens
caggggttagcttgg

SEQ ID NO: 444170 - DNA, 15 bp, Homo sapiens
tcaggggttagcttg

SEQ ID NO: 444171 - DNA, 15 bp, Homo sapiens
gtcaggggttagctt

SEQ ID NO: 444172 - DNA, 15 bp, Homo sapiens
ggtcaggggttagct

SEQ ID NO: 444173 - DNA, 15 bp, Homo sapiens
aggtcaggggttagc

SEQ ID NO: 444174 - DNA, 15 bp, Homo sapiens
gaggtcaggggttag

SEQ ID NO: 444175 - DNA, 15 bp, Homo sapiens
ggaggtcaggggtta

SEQ ID NO: 444176 - DNA, 15 bp, Homo sapiens
tggaggtcaggggtt

SEQ ID NO: 444177 - DNA, 15 bp, Homo sapiens
atggaggtcaggggt

SEQ ID NO: 444178 - DNA, 15 bp, Homo sapiens
tatggaggtcagggg

SEQ ID NO: 444179 - DNA, 15 bp, Homo sapiens
ctatggaggtcaggg

SEQ ID NO: 444180 - DNA, 15 bp, Homo sapiens
actatggaggtcagg

SEQ ID NO: 444181 - DNA, 15 bp, Homo sapiens
cactatggaggtcag

SEQ ID NO: 444182 - DNA, 15 bp, Homo sapiens
ccactatggaggtca

SEQ ID NO: 444183 - DNA, 15 bp, Homo sapiens
cccactatggaggtc

SEQ ID NO: 444184 - DNA, 15 bp, Homo sapiens
ccccactatggaggt

SEQ ID NO: 444185 - DNA, 15 bp, Homo sapiens
accccactatggagg

SEQ ID NO: 444186 - DNA, 15 bp, Homo sapiens
caccccactatggag

SEQ ID NO: 444187 - DNA, 15 bp, Homo sapiens
ccaccccactatgga

SEQ ID NO: 444188 - DNA, 15 bp, Homo sapiens
cccaccccactatgg

SEQ ID NO: 444189 - DNA, 15 bp, Homo sapiens
tcccaccccactatg

SEQ ID NO: 444190 - DNA, 15 bp, Homo sapiens
ctcccaccccactat

SEQ ID NO: 444191 - DNA, 15 bp, Homo sapiens
tctcccaccccacta

SEQ ID NO: 444192 - DNA, 15 bp, Homo sapiens
atctcccaccccact

SEQ ID NO: 444193 - DNA, 15 bp, Homo sapiens
gatctcccaccccac

SEQ ID NO: 444194 - DNA, 15 bp, Homo sapiens
agatctcccacccca

SEQ ID NO: 444195 - DNA, 15 bp, Homo sapiens
gagatctcccacccc

SEQ ID NO: 444196 - DNA, 15 bp, Homo sapiens
ggagatctcccaccc

SEQ ID NO: 444197 - DNA, 15 bp, Homo sapiens
gggagatctcccacc

SEQ ID NO: 444198 - DNA, 15 bp, Homo sapiens
ggggagatctcccac

SEQ ID NO: 444199 - DNA, 15 bp, Homo sapiens
aggggagatctccca

SEQ ID NO: 444200 - DNA, 15 bp, Homo sapiens
caggggagatctccc

SEQ ID NO: 444201 - DNA, 15 bp, Homo sapiens
acaggggagatctcc

SEQ ID NO: 444202 - DNA, 15 bp, Homo sapiens
gacaggggagatctc

SEQ ID NO: 444203 - DNA, 15 bp, Homo sapiens
tgacaggggagatct

SEQ ID NO: 444204 - DNA, 15 bp, Homo sapiens
ctgacaggggagatc

SEQ ID NO: 444205 - DNA, 15 bp, Homo sapiens
tctgacaggggagat

SEQ ID NO: 444206 - DNA, 15 bp, Homo sapiens
gtctgacaggggaga

SEQ ID NO: 444207 - DNA, 15 bp, Homo sapiens
ggtctgacaggggag

SEQ ID NO: 444208 - DNA, 15 bp, Homo sapiens
aggtctgacagggga

SEQ ID NO: 444209 - DNA, 15 bp, Homo sapiens
aaggtctgacagggg

SEQ ID NO: 444210 - DNA, 15 bp, Homo sapiens
caaggtctgacaggg

SEQ ID NO: 444211 - DNA, 15 bp, Homo sapiens
ccaaggtctgacagg

SEQ ID NO: 444212 - DNA, 15 bp, Homo sapiens
cccaaggtctgacag

SEQ ID NO: 444213 - DNA, 15 bp, Homo sapiens
gcccaaggtctgaca

SEQ ID NO: 444214 - DNA, 15 bp, Homo sapiens
tgcccaaggtctgac

SEQ ID NO: 444215 - DNA, 15 bp, Homo sapiens
atgcccaaggtctga

SEQ ID NO: 444216 - DNA, 15 bp, Homo sapiens
gatgcccaaggtctg

SEQ ID NO: 444217 - DNA, 15 bp, Homo sapiens
agatgcccaaggtct

SEQ ID NO: 444218 - DNA, 15 bp, Homo sapiens
tagatgcccaaggtc

SEQ ID NO: 444219 - DNA, 15 bp, Homo sapiens
atagatgcccaaggt

SEQ ID NO: 444220 - DNA, 15 bp, Homo sapiens
aatagatgcccaagg

SEQ ID NO: 444221 - DNA, 15 bp, Homo sapiens
aaatagatgcccaag

SEQ ID NO: 444222 - DNA, 15 bp, Homo sapiens
gaaatagatgcccaa

SEQ ID NO: 444223 - DNA, 15 bp, Homo sapiens
ggaaatagatgccca

SEQ ID NO: 444224 - DNA, 15 bp, Homo sapiens
gggaaatagatgccc

SEQ ID NO: 444225 - DNA, 15 bp, Homo sapiens
ggggaaatagatgcc

SEQ ID NO: 444226 - DNA, 15 bp, Homo sapiens
aggggaaatagatgc

SEQ ID NO: 444227 - DNA, 15 bp, Homo sapiens
taggggaaatagatg

SEQ ID NO: 444228 - DNA, 15 bp, Homo sapiens
ataggggaaatagat

SEQ ID NO: 444229 - DNA, 15 bp, Homo sapiens
aataggggaaataga

SEQ ID NO: 444230 - DNA, 15 bp, Homo sapiens
aaataggggaaatag

SEQ ID NO: 444231 - DNA, 15 bp, Homo sapiens
aaaataggggaaata

SEQ ID NO: 444232 - DNA, 15 bp, Homo sapiens
taaaataggggaaat

SEQ ID NO: 444233 - DNA, 15 bp, Homo sapiens
ataaaataggggaaa

SEQ ID NO: 444234 - DNA, 15 bp, Homo sapiens
aataaaataggggaa

SEQ ID NO: 444235 - DNA, 15 bp, Homo sapiens
aaataaaatagggga

SEQ ID NO: 444236 - DNA, 15 bp, Homo sapiens
aaaataaaatagggg

SEQ ID NO: 444237 - DNA, 15 bp, Homo sapiens
gaaaataaaataggg

SEQ ID NO: 444238 - DNA, 15 bp, Homo sapiens
agaaaataaaatagg

SEQ ID NO: 444239 - DNA, 15 bp, Homo sapiens
aagaaaataaaatag

SEQ ID NO: 444240 - DNA, 15 bp, Homo sapiens
aaagaaaataaaata

SEQ ID NO: 444241 - DNA, 15 bp, Homo sapiens
aaaagaaaataaaat

SEQ ID NO: 444242 - DNA, 15 bp, Homo sapiens
taaaagaaaataaaa

SEQ ID NO: 444243 - DNA, 15 bp, Homo sapiens
ctaaaagaaaataaa

SEQ ID NO: 444244 - DNA, 15 bp, Homo sapiens
tctaaaagaaaataa

SEQ ID NO: 444245 - DNA, 15 bp, Homo sapiens
gtctaaaagaaaata

SEQ ID NO: 444246 - DNA, 15 bp, Homo sapiens
tgtctaaaagaaaat

SEQ ID NO: 444247 - DNA, 15 bp, Homo sapiens
ttgtctaaaagaaaa

SEQ ID NO: 444248 - DNA, 15 bp, Homo sapiens
cttgtctaaaagaaa

SEQ ID NO: 444249 - DNA, 15 bp, Homo sapiens
ccttgtctaaaagaa

SEQ ID NO: 444250 - DNA, 15 bp, Homo sapiens
accttgtctaaaaga

SEQ ID NO: 444251 - DNA, 15 bp, Homo sapiens
gaccttgtctaaaag

SEQ ID NO: 444252 - DNA, 15 bp, Homo sapiens
agaccttgtctaaaa

SEQ ID NO: 444253 - DNA, 15 bp, Homo sapiens
gagaccttgtctaaa

SEQ ID NO: 444254 - DNA, 15 bp, Homo sapiens
tgagaccttgtctaa

SEQ ID NO: 444255 - DNA, 15 bp, Homo sapiens
gtgagaccttgtcta

SEQ ID NO: 444256 - DNA, 15 bp, Homo sapiens
ggtgagaccttgtct

SEQ ID NO: 444257 - DNA, 15 bp, Homo sapiens
gggtgagaccttgtc

SEQ ID NO: 444258 - DNA, 15 bp, Homo sapiens
tgggtgagaccttgt

SEQ ID NO: 444259 - DNA, 15 bp, Homo sapiens
ctgggtgagaccttg

SEQ ID NO: 444260 - DNA, 15 bp, Homo sapiens
actgggtgagacctt

SEQ ID NO: 444261 - DNA, 15 bp, Homo sapiens
gactgggtgagacct

SEQ ID NO: 444262 - DNA, 15 bp, Homo sapiens
tgactgggtgagacc

SEQ ID NO: 444263 - DNA, 15 bp, Homo sapiens
gtgactgggtgagac

SEQ ID NO: 444264 - DNA, 15 bp, Homo sapiens
ggtgactgggtgaga

SEQ ID NO: 444265 - DNA, 15 bp, Homo sapiens
aggtgactgggtgag

SEQ ID NO: 444266 - DNA, 15 bp, Homo sapiens
taggtgactgggtga

SEQ ID NO: 444267 - DNA, 15 bp, Homo sapiens
ctaggtgactgggtg

SEQ ID NO: 444268 - DNA, 15 bp, Homo sapiens
cctaggtgactgggt

SEQ ID NO: 444269 - DNA, 15 bp, Homo sapiens
gcctaggtgactggg

SEQ ID NO: 444270 - DNA, 15 bp, Homo sapiens
agcctaggtgactgg

SEQ ID NO: 444271 - DNA, 15 bp, Homo sapiens
cagcctaggtgactg

SEQ ID NO: 444272 - DNA, 15 bp, Homo sapiens
ccagcctaggtgact

SEQ ID NO: 444273 - DNA, 15 bp, Homo sapiens
tccagcctaggtgac

SEQ ID NO: 444274 - DNA, 15 bp, Homo sapiens
ctccagcctaggtga

SEQ ID NO: 444275 - DNA, 15 bp, Homo sapiens
actccagcctaggtg

SEQ ID NO: 444276 - DNA, 15 bp, Homo sapiens
cactccagcctaggt

SEQ ID NO: 444277 - DNA, 15 bp, Homo sapiens
gcactccagcctagg

SEQ ID NO: 444278 - DNA, 15 bp, Homo sapiens
tgcactccagcctag

SEQ ID NO: 444279 - DNA, 15 bp, Homo sapiens
ctgcactccagccta

SEQ ID NO: 444280 - DNA, 15 bp, Homo sapiens
atactgcactccagc

SEQ ID NO: 444281 - DNA, 15 bp, Homo sapiens
gatactgcactccag

SEQ ID NO: 444282 - DNA, 15 bp, Homo sapiens
tgatactgcactcca

SEQ ID NO: 444283 - DNA, 15 bp, Homo sapiens
gtgatactgcactcc

SEQ ID NO: 444284 - DNA, 15 bp, Homo sapiens
tgtgatactgcactc

SEQ ID NO: 444285 - DNA, 15 bp, Homo sapiens
ctgtgatactgcact

SEQ ID NO: 444286 - DNA, 15 bp, Homo sapiens
gctgtgatactgcac

SEQ ID NO: 444287 - DNA, 15 bp, Homo sapiens
agctgtgatactgca

SEQ ID NO: 444288 - DNA, 15 bp, Homo sapiens
gagctgtgatactgc

SEQ ID NO: 444289 - DNA, 15 bp, Homo sapiens
tgagctgtgatactg

SEQ ID NO: 444290 - DNA, 15 bp, Homo sapiens
gtgagctgtgatact

SEQ ID NO: 444291 - DNA, 15 bp, Homo sapiens
agtgagctgtgatac

SEQ ID NO: 444292 - DNA, 15 bp, Homo sapiens
cagtgagctgtgata

SEQ ID NO: 444293 - DNA, 15 bp, Homo sapiens
gcagtgagctgtgat

SEQ ID NO: 444294 - DNA, 15 bp, Homo sapiens
tgcagtgagctgtga

SEQ ID NO: 444295 - DNA, 15 bp, Homo sapiens
ctgcagtgagctgtg

SEQ ID NO: 444296 - DNA, 15 bp, Homo sapiens
gctgcagtgagctgt

SEQ ID NO: 444297 - DNA, 15 bp, Homo sapiens
ggctgcagtgagctg

SEQ ID NO: 444298 - DNA, 15 bp, Homo sapiens
aggctgcagtgagct

SEQ ID NO: 444299 - DNA, 15 bp, Homo sapiens
aaggctgcagtgagc

SEQ ID NO: 444300 - DNA, 15 bp, Homo sapiens
caaggctgcagtgag

SEQ ID NO: 444301 - DNA, 15 bp, Homo sapiens
tcaaggctgcagtga

SEQ ID NO: 444302 - DNA, 15 bp, Homo sapiens
gtcaaggctgcagtg

SEQ ID NO: 444303 - DNA, 15 bp, Homo sapiens
ggtcaaggctgcagt

SEQ ID NO: 444304 - DNA, 15 bp, Homo sapiens
aggtcaaggctgcag

SEQ ID NO: 444305 - DNA, 15 bp, Homo sapiens
gaggtcaaggctgca

SEQ ID NO: 444306 - DNA, 15 bp, Homo sapiens
ggaggtcaaggctgc

SEQ ID NO: 444307 - DNA, 15 bp, Homo sapiens
gggaggtcaaggctg

SEQ ID NO: 444308 - DNA, 15 bp, Homo sapiens
tgggaggtcaaggct

SEQ ID NO: 444309 - DNA, 15 bp, Homo sapiens
ctgggaggtcaaggc

SEQ ID NO: 444310 - DNA, 15 bp, Homo sapiens
cctgggaggtcaagg

SEQ ID NO: 444311 - DNA, 15 bp, Homo sapiens
ccctgggaggtcaag

SEQ ID NO: 444312 - DNA, 15 bp, Homo sapiens
gccctgggaggtcaa

SEQ ID NO: 444313 - DNA, 15 bp, Homo sapiens
agccctgggaggtca

SEQ ID NO: 444314 - DNA, 15 bp, Homo sapiens
gagccctgggaggtc

SEQ ID NO: 444315 - DNA, 15 bp, Homo sapiens
tgagccctgggaggt

SEQ ID NO: 444316 - DNA, 15 bp, Homo sapiens
ctgagccctgggagg

SEQ ID NO: 444317 - DNA, 15 bp, Homo sapiens
cctgagccctgggag

SEQ ID NO: 444318 - DNA, 15 bp, Homo sapiens
acctgagccctggga

SEQ ID NO: 444319 - DNA, 15 bp, Homo sapiens
cacctgagccctggg

SEQ ID NO: 444320 - DNA, 15 bp, Homo sapiens
tcacctgagccctgg

SEQ ID NO: 444321 - DNA, 15 bp, Homo sapiens
atcacctgagccctg

SEQ ID NO: 444322 - DNA, 15 bp, Homo sapiens
gatcacctgagccct

SEQ ID NO: 444323 - DNA, 15 bp, Homo sapiens
ggatcacctgagccc

SEQ ID NO: 444324 - DNA, 15 bp, Homo sapiens
aggatcacctgagcc

SEQ ID NO: 444325 - DNA, 15 bp, Homo sapiens
gaggatcacctgagc

SEQ ID NO: 444326 - DNA, 15 bp, Homo sapiens
ggaggatcacctgag

SEQ ID NO: 444327 - DNA, 15 bp, Homo sapiens
aggaggatcacctga

SEQ ID NO: 444328 - DNA, 15 bp, Homo sapiens
taggaggatcacctg

SEQ ID NO: 444329 - DNA, 15 bp, Homo sapiens
gtaggaggatcacct

SEQ ID NO: 444330 - DNA, 15 bp, Homo sapiens
ggtaggaggatcacc

SEQ ID NO: 444331 - DNA, 15 bp, Homo sapiens
aggtaggaggatcac

SEQ ID NO: 444332 - DNA, 15 bp, Homo sapiens
gaggtaggaggatca

SEQ ID NO: 444333 - DNA, 15 bp, Homo sapiens
tgaggtaggaggatc

SEQ ID NO: 444334 - DNA, 15 bp, Homo sapiens
ctgaggtaggaggat

SEQ ID NO: 444335 - DNA, 15 bp, Homo sapiens
gctgaggtaggagga

SEQ ID NO: 444336 - DNA, 15 bp, Homo sapiens
ggctgaggtaggagg

SEQ ID NO: 444337 - DNA, 15 bp, Homo sapiens
aggctgaggtaggag

SEQ ID NO: 444338 - DNA, 15 bp, Homo sapiens
gaggctgaggtagga

SEQ ID NO: 444339 - DNA, 15 bp, Homo sapiens
ggaggctgaggtagg

SEQ ID NO: 444340 - DNA, 15 bp, Homo sapiens
gggaggctgaggtag

SEQ ID NO: 444341 - DNA, 15 bp, Homo sapiens
tgggaggctgaggta

SEQ ID NO: 444342 - DNA, 15 bp, Homo sapiens
ttgggaggctgaggt

SEQ ID NO: 444343 - DNA, 15 bp, Homo sapiens
cttgggaggctgagg

SEQ ID NO: 444344 - DNA, 15 bp, Homo sapiens
gtacttgggaggctg

SEQ ID NO: 444345 - DNA, 15 bp, Homo sapiens
agtacttgggaggct

SEQ ID NO: 444346 - DNA, 15 bp, Homo sapiens
cagtacttgggaggc

SEQ ID NO: 444347 - DNA, 15 bp, Homo sapiens
ccagtacttgggagg

SEQ ID NO: 444348 - DNA, 15 bp, Homo sapiens
cccagtacttgggag

SEQ ID NO: 444349 - DNA, 15 bp, Homo sapiens
gcccagtacttggga

SEQ ID NO: 444350 - DNA, 15 bp, Homo sapiens
ggcccagtacttggg

SEQ ID NO: 444351 - DNA, 15 bp, Homo sapiens
aggcccagtacttgg

SEQ ID NO: 444352 - DNA, 15 bp, Homo sapiens
caggcccagtacttg

SEQ ID NO: 444353 - DNA, 15 bp, Homo sapiens
gcaggcccagtactt

SEQ ID NO: 444354 - DNA, 15 bp, Homo sapiens
ggcaggcccagtact

SEQ ID NO: 444355 - DNA, 15 bp, Homo sapiens
cggcaggcccagtac

SEQ ID NO: 444356 - DNA, 15 bp, Homo sapiens
ccggcaggcccagta

SEQ ID NO: 444357 - DNA, 15 bp, Homo sapiens
accggcaggcccagt

SEQ ID NO: 444358 - DNA, 15 bp, Homo sapiens
taccggcaggcccag

SEQ ID NO: 444359 - DNA, 15 bp, Homo sapiens
gtaccggcaggccca

SEQ ID NO: 444360 - DNA, 15 bp, Homo sapiens
ggtaccggcaggccc

SEQ ID NO: 444361 - DNA, 15 bp, Homo sapiens
gggtaccggcaggcc

SEQ ID NO: 444362 - DNA, 15 bp, Homo sapiens
ggggtaccggcaggc

SEQ ID NO: 444363 - DNA, 15 bp, Homo sapiens
gggggtaccggcagg

SEQ ID NO: 444364 - DNA, 15 bp, Homo sapiens
ggggggtaccggcag

SEQ ID NO: 444365 - DNA, 15 bp, Homo sapiens
tggggggtaccggca

SEQ ID NO: 444366 - DNA, 15 bp, Homo sapiens
gtggggggtaccggc

SEQ ID NO: 444367 - DNA, 15 bp, Homo sapiens
ggtggggggtaccgg

SEQ ID NO: 444368 - DNA, 15 bp, Homo sapiens
tggtggggggtaccg

SEQ ID NO: 444369 - DNA, 15 bp, Homo sapiens
gtggtggggggtacc

SEQ ID NO: 444370 - DNA, 15 bp, Homo sapiens
cgtggtggggggtac

SEQ ID NO: 444371 - DNA, 15 bp, Homo sapiens
gcgtggtggggggta

SEQ ID NO: 444372 - DNA, 15 bp, Homo sapiens
ggcgtggtggggggt

SEQ ID NO: 444373 - DNA, 15 bp, Homo sapiens
aggcgtggtgggggg

SEQ ID NO: 444374 - DNA, 15 bp, Homo sapiens
caggcgtggtggggg

SEQ ID NO: 444375 - DNA, 15 bp, Homo sapiens
ccaggcgtggtgggg

SEQ ID NO: 444376 - DNA, 15 bp, Homo sapiens
gccaggcgtggtggg

SEQ ID NO: 444377 - DNA, 15 bp, Homo sapiens
agccaggcgtggtgg

SEQ ID NO: 444378 - DNA, 15 bp, Homo sapiens
aagccaggcgtggtg

SEQ ID NO: 444379 - DNA, 15 bp, Homo sapiens
aaagccaggcgtggt

SEQ ID NO: 444380 - DNA, 15 bp, Homo sapiens
aaaagccaggcgtgg

SEQ ID NO: 444381 - DNA, 15 bp, Homo sapiens
aaaaagccaggcgtg

SEQ ID NO: 444382 - DNA, 15 bp, Homo sapiens
aaaaaagccaggcgt

SEQ ID NO: 444383 - DNA, 15 bp, Homo sapiens
aaaaaaagccaggcg

SEQ ID NO: 444384 - DNA, 15 bp, Homo sapiens
aaaaaaaagccaggc

SEQ ID NO: 444385 - DNA, 15 bp, Homo sapiens
aaaaaaaaagccagg

SEQ ID NO: 444386 - DNA, 15 bp, Homo sapiens
aaaaaaaaaagccag

SEQ ID NO: 444387 - DNA, 15 bp, Homo sapiens
aaaaaaaaaaagcca

SEQ ID NO: 444388 - DNA, 15 bp, Homo sapiens
aaaaaaaaaaaagcc

SEQ ID NO: 444389 - DNA, 15 bp, Homo sapiens
aaaaaaaaaaaaagc

SEQ ID NO: 444390 - DNA, 15 bp, Homo sapiens
ccgcaaaaaaaaaaa

SEQ ID NO: 444391 - DNA, 15 bp, Homo sapiens
gccgcaaaaaaaaaa

SEQ ID NO: 444392 - DNA, 15 bp, Homo sapiens
tgccgcaaaaaaaaa

SEQ ID NO: 444393 - DNA, 15 bp, Homo sapiens
gtgccgcaaaaaaaa

SEQ ID NO: 444394 - DNA, 15 bp, Homo sapiens
agtgccgcaaaaaaa

SEQ ID NO: 444395 - DNA, 15 bp, Homo sapiens
gagtgccgcaaaaaa

SEQ ID NO: 444396 - DNA, 15 bp, Homo sapiens
agagtgccgcaaaaa

SEQ ID NO: 444397 - DNA, 15 bp, Homo sapiens
gagagtgccgcaaaa

SEQ ID NO: 444398 - DNA, 15 bp, Homo sapiens
agagagtgccgcaaa

SEQ ID NO: 444399 - DNA, 15 bp, Homo sapiens
gagagagtgccgcaa

SEQ ID NO: 444400 - DNA, 15 bp, Homo sapiens
agagagagtgccgca

SEQ ID NO: 444401 - DNA, 15 bp, Homo sapiens
gagagagagtgccgc

SEQ ID NO: 444402 - DNA, 15 bp, Homo sapiens
ggagagagagtgccg

SEQ ID NO: 444403 - DNA, 15 bp, Homo sapiens
tggagagagagtgcc

SEQ ID NO: 444404 - DNA, 15 bp, Homo sapiens
atggagagagagtgc

SEQ ID NO: 444405 - DNA, 15 bp, Homo sapiens
gatggagagagagtg

SEQ ID NO: 444406 - DNA, 15 bp, Homo sapiens
tgatggagagagagt

SEQ ID NO: 444407 - DNA, 15 bp, Homo sapiens
gtgatggagagagag

SEQ ID NO: 444408 - DNA, 15 bp, Homo sapiens
ggtgatggagagaga

SEQ ID NO: 444409 - DNA, 15 bp, Homo sapiens
gggtgatggagagag

SEQ ID NO: 444410 - DNA, 15 bp, Homo sapiens
tgggtgatggagaga

SEQ ID NO: 444411 - DNA, 15 bp, Homo sapiens
ctgggtgatggagag

SEQ ID NO: 444412 - DNA, 15 bp, Homo sapiens
cctgggtgatggaga

SEQ ID NO: 444413 - DNA, 15 bp, Homo sapiens
gcctgggtgatggag

SEQ ID NO: 444414 - DNA, 15 bp, Homo sapiens
agcctgggtgatgga

SEQ ID NO: 444415 - DNA, 15 bp, Homo sapiens
cagcctgggtgatgg

SEQ ID NO: 444416 - DNA, 15 bp, Homo sapiens
ccagcctgggtgatg

SEQ ID NO: 444417 - DNA, 15 bp, Homo sapiens
tccagcctgggtgat

SEQ ID NO: 444418 - DNA, 15 bp, Homo sapiens
aactccagcctgggt

SEQ ID NO: 444419 - DNA, 15 bp, Homo sapiens
gaactccagcctggg

SEQ ID NO: 444420 - DNA, 15 bp, Homo sapiens
cgaactccagcctgg

SEQ ID NO: 444421 - DNA, 15 bp, Homo sapiens
ccgaactccagcctg

SEQ ID NO: 444422 - DNA, 15 bp, Homo sapiens
accgaactccagcct

SEQ ID NO: 444423 - DNA, 15 bp, Homo sapiens
caccgaactccagcc

SEQ ID NO: 444424 - DNA, 15 bp, Homo sapiens
ccaccgaactccagc

SEQ ID NO: 444425 - DNA, 15 bp, Homo sapiens
accaccgaactccag

SEQ ID NO: 444426 - DNA, 15 bp, Homo sapiens
caccaccgaactcca

SEQ ID NO: 444427 - DNA, 15 bp, Homo sapiens
gcaccaccgaactcc

SEQ ID NO: 444428 - DNA, 15 bp, Homo sapiens
tgcaccaccgaactc

SEQ ID NO: 444429 - DNA, 15 bp, Homo sapiens
ttgcaccaccgaact

SEQ ID NO: 444430 - DNA, 15 bp, Homo sapiens
attgcaccaccgaac

SEQ ID NO: 444431 - DNA, 15 bp, Homo sapiens
gattgcaccaccgaa

SEQ ID NO: 444432 - DNA, 15 bp, Homo sapiens
agattgcaccaccga

SEQ ID NO: 444433 - DNA, 15 bp, Homo sapiens
gagattgcaccaccg

SEQ ID NO: 444434 - DNA, 15 bp, Homo sapiens
tgagattgcaccacc

SEQ ID NO: 444435 - DNA, 15 bp, Homo sapiens
ctgagattgcaccac

SEQ ID NO: 444436 - DNA, 15 bp, Homo sapiens
gctgagattgcacca

SEQ ID NO: 444437 - DNA, 15 bp, Homo sapiens
agctgagattgcacc

SEQ ID NO: 444438 - DNA, 15 bp, Homo sapiens
gagctgagattgcac

SEQ ID NO: 444439 - DNA, 15 bp, Homo sapiens
tgagctgagattgca

SEQ ID NO: 444440 - DNA, 15 bp, Homo sapiens
gtgagctgagattgc

SEQ ID NO: 444441 - DNA, 15 bp, Homo sapiens
agtgagctgagattg

SEQ ID NO: 444442 - DNA, 15 bp, Homo sapiens
cagtgagctgagatt

SEQ ID NO: 444443 - DNA, 15 bp, Homo sapiens
gcagtgagctgagat

SEQ ID NO: 444444 - DNA, 15 bp, Homo sapiens
tgcagtgagctgaga

SEQ ID NO: 444445 - DNA, 15 bp, Homo sapiens
ttgcagtgagctgag

SEQ ID NO: 444446 - DNA, 15 bp, Homo sapiens
attgcagtgagctga

SEQ ID NO: 444447 - DNA, 15 bp, Homo sapiens
gattgcagtgagctg

SEQ ID NO: 444448 - DNA, 15 bp, Homo sapiens
agattgcagtgagct

SEQ ID NO: 444449 - DNA, 15 bp, Homo sapiens
ggagattgcagtgag

SEQ ID NO: 444450 - DNA, 15 bp, Homo sapiens
tggagattgcagtga

SEQ ID NO: 444451 - DNA, 15 bp, Homo sapiens
atggagattgcagtg

SEQ ID NO: 444452 - DNA, 15 bp, Homo sapiens
gatggagattgcagt

SEQ ID NO: 444453 - DNA, 15 bp, Homo sapiens
agatggagattgcag

SEQ ID NO: 444454 - DNA, 15 bp, Homo sapiens
gagatggagattgca

SEQ ID NO: 444455 - DNA, 15 bp, Homo sapiens
ggagatggagattgc

SEQ ID NO: 444456 - DNA, 15 bp, Homo sapiens
gggagatggagattg

SEQ ID NO: 444457 - DNA, 15 bp, Homo sapiens
ggggagatggagatt

SEQ ID NO: 444458 - DNA, 15 bp, Homo sapiens
tggggagatggagat

SEQ ID NO: 444459 - DNA, 15 bp, Homo sapiens
ctggggagatggaga

SEQ ID NO: 444460 - DNA, 15 bp, Homo sapiens
actggggagatggag

SEQ ID NO: 444461 - DNA, 15 bp, Homo sapiens
aactggggagatgga

SEQ ID NO: 444462 - DNA, 15 bp, Homo sapiens
gaactggggagatgg

SEQ ID NO: 444463 - DNA, 15 bp, Homo sapiens
tgaactggggagatg

SEQ ID NO: 444464 - DNA, 15 bp, Homo sapiens
ttgaactggggagat

SEQ ID NO: 444465 - DNA, 15 bp, Homo sapiens
cttgaactggggaga

SEQ ID NO: 444466 - DNA, 15 bp, Homo sapiens
gcttgaactggggag

SEQ ID NO: 444467 - DNA, 15 bp, Homo sapiens
cgcttgaactgggga

SEQ ID NO: 444468 - DNA, 15 bp, Homo sapiens
tcgcttgaactgggg

SEQ ID NO: 444469 - DNA, 15 bp, Homo sapiens
atcgcttgaactggg

SEQ ID NO: 444470 - DNA, 15 bp, Homo sapiens
aatcgcttgaactgg

SEQ ID NO: 444471 - DNA, 15 bp, Homo sapiens
gaatcgcttgaactg

SEQ ID NO: 444472 - DNA, 15 bp, Homo sapiens
agaatcgcttgaact

SEQ ID NO: 444473 - DNA, 15 bp, Homo sapiens
aagaatcgcttgaac

SEQ ID NO: 444474 - DNA, 15 bp, Homo sapiens
gaagaatcgcttgaa

SEQ ID NO: 444475 - DNA, 15 bp, Homo sapiens
agaagaatcgcttga

SEQ ID NO: 444476 - DNA, 15 bp, Homo sapiens
cagaagaatcgcttg

SEQ ID NO: 444477 - DNA, 15 bp, Homo sapiens
gcagaagaatcgctt

SEQ ID NO: 444478 - DNA, 15 bp, Homo sapiens
ggcagaagaatcgct

SEQ ID NO: 444479 - DNA, 15 bp, Homo sapiens
aggcagaagaatcgc

SEQ ID NO: 444480 - DNA, 15 bp, Homo sapiens
gaggcagaagaatcg

SEQ ID NO: 444481 - DNA, 15 bp, Homo sapiens
tgaggcagaagaatc

SEQ ID NO: 444482 - DNA, 15 bp, Homo sapiens
ctgaggcagaagaat

SEQ ID NO: 444483 - DNA, 15 bp, Homo sapiens
gctgaggcagaagaa

SEQ ID NO: 444484 - DNA, 15 bp, Homo sapiens
ggctgaggcagaaga

SEQ ID NO: 444485 - DNA, 15 bp, Homo sapiens
aggctgaggcagaag

SEQ ID NO: 444486 - DNA, 15 bp, Homo sapiens
gaggctgaggcagaa

SEQ ID NO: 444487 - DNA, 15 bp, Homo sapiens
agaggctgaggcaga

SEQ ID NO: 444488 - DNA, 15 bp, Homo sapiens
cagaggctgaggcag

SEQ ID NO: 444489 - DNA, 15 bp, Homo sapiens
ccagaggctgaggca

SEQ ID NO: 444490 - DNA, 15 bp, Homo sapiens
tccagaggctgaggc

SEQ ID NO: 444491 - DNA, 15 bp, Homo sapiens
ctccagaggctgagg

SEQ ID NO: 444492 - DNA, 15 bp, Homo sapiens
actccagaggctgag

SEQ ID NO: 444493 - DNA, 15 bp, Homo sapiens
tactccagaggctga

SEQ ID NO: 444494 - DNA, 15 bp, Homo sapiens
ctactccagaggctg

SEQ ID NO: 444495 - DNA, 15 bp, Homo sapiens
gctactccagaggct

SEQ ID NO: 444496 - DNA, 15 bp, Homo sapiens
agctactccagaggc

SEQ ID NO: 444497 - DNA, 15 bp, Homo sapiens
cagctactccagagg

SEQ ID NO: 444498 - DNA, 15 bp, Homo sapiens
ccagctactccagag

SEQ ID NO: 444499 - DNA, 15 bp, Homo sapiens
cccagctactccaga

SEQ ID NO: 444500 - DNA, 15 bp, Homo sapiens
tcccagctactccag

SEQ ID NO: 444501 - DNA, 15 bp, Homo sapiens
atcccagctactcca

SEQ ID NO: 444502 - DNA, 15 bp, Homo sapiens
aatcccagctactcc

SEQ ID NO: 444503 - DNA, 15 bp, Homo sapiens
gcacacctgtaatcc

SEQ ID NO: 444504 - DNA, 15 bp, Homo sapiens
cgcacacctgtaatc

SEQ ID NO: 444505 - DNA, 15 bp, Homo sapiens
gcgcacacctgtaat

SEQ ID NO: 444506 - DNA, 15 bp, Homo sapiens
ggcgcacacctgtaa

SEQ ID NO: 444507 - DNA, 15 bp, Homo sapiens
tggcgcacacctgta

SEQ ID NO: 444508 - DNA, 15 bp, Homo sapiens
gtggcgcacacctgt

SEQ ID NO: 444509 - DNA, 15 bp, Homo sapiens
ggtggcgcacacctg

SEQ ID NO: 444510 - DNA, 15 bp, Homo sapiens
tggtggcgcacacct

SEQ ID NO: 444511 - DNA, 15 bp, Homo sapiens
atggtggcgcacacc

SEQ ID NO: 444512 - DNA, 15 bp, Homo sapiens
catggtggcgcacac

SEQ ID NO: 444513 - DNA, 15 bp, Homo sapiens
gcatggtggcgcaca

SEQ ID NO: 444514 - DNA, 15 bp, Homo sapiens
ggcatggtggcgcac

SEQ ID NO: 444515 - DNA, 15 bp, Homo sapiens
gggcatggtggcgca

SEQ ID NO: 444516 - DNA, 15 bp, Homo sapiens
tgggcatggtggcgc

SEQ ID NO: 444517 - DNA, 15 bp, Homo sapiens
ctgggcatggtggcg

SEQ ID NO: 444518 - DNA, 15 bp, Homo sapiens
gctgggcatggtggc

SEQ ID NO: 444519 - DNA, 15 bp, Homo sapiens
agctgggcatggtgg

SEQ ID NO: 444520 - DNA, 15 bp, Homo sapiens
tagctgggcatggtg

SEQ ID NO: 444521 - DNA, 15 bp, Homo sapiens
ttagctgggcatggt

SEQ ID NO: 444522 - DNA, 15 bp, Homo sapiens
tttagctgggcatgg

SEQ ID NO: 444523 - DNA, 15 bp, Homo sapiens
atttagctgggcatg

SEQ ID NO: 444524 - DNA, 15 bp, Homo sapiens
catttagctgggcat

SEQ ID NO: 444525 - DNA, 15 bp, Homo sapiens
acatttagctgggca

SEQ ID NO: 444526 - DNA, 15 bp, Homo sapiens
aacatttagctgggc

SEQ ID NO: 444527 - DNA, 15 bp, Homo sapiens
caacatttagctggg

SEQ ID NO: 444528 - DNA, 15 bp, Homo sapiens
acaacatttagctgg

SEQ ID NO: 444529 - DNA, 15 bp, Homo sapiens
tacaacatttagctg

SEQ ID NO: 444530 - DNA, 15 bp, Homo sapiens
atacaacatttagct

SEQ ID NO: 444531 - DNA, 15 bp, Homo sapiens
catacaacatttagc

SEQ ID NO: 444532 - DNA, 15 bp, Homo sapiens
acatacaacatttag

SEQ ID NO: 444533 - DNA, 15 bp, Homo sapiens
aacatacaacattta

SEQ ID NO: 444534 - DNA, 15 bp, Homo sapiens
aaacatacaacattt

SEQ ID NO: 444535 - DNA, 15 bp, Homo sapiens
aaaacatacaacatt

SEQ ID NO: 444536 - DNA, 15 bp, Homo sapiens
taaaacatacaacat

SEQ ID NO: 444537 - DNA, 15 bp, Homo sapiens
ctaaaacatacaaca

SEQ ID NO: 444538 - DNA, 15 bp, Homo sapiens
actaaaacatacaac

SEQ ID NO: 444539 - DNA, 15 bp, Homo sapiens
tactaaaacatacaa

SEQ ID NO: 444540 - DNA, 15 bp, Homo sapiens
ctactaaaacataca

SEQ ID NO: 444541 - DNA, 15 bp, Homo sapiens
tctactaaaacatac

SEQ ID NO: 444542 - DNA, 15 bp, Homo sapiens
ctctactaaaacata

SEQ ID NO: 444543 - DNA, 15 bp, Homo sapiens
tctctactaaaacat

SEQ ID NO: 444544 - DNA, 15 bp, Homo sapiens
atctctactaaaaca

SEQ ID NO: 444545 - DNA, 15 bp, Homo sapiens
catctctactaaaac

SEQ ID NO: 444546 - DNA, 15 bp, Homo sapiens
ccatctctactaaaa

SEQ ID NO: 444547 - DNA, 15 bp, Homo sapiens
cccatctctactaaa

SEQ ID NO: 444548 - DNA, 15 bp, Homo sapiens
ccccatctctactaa

SEQ ID NO: 444549 - DNA, 15 bp, Homo sapiens
accccatctctacta

SEQ ID NO: 444550 - DNA, 15 bp, Homo sapiens
aaccccatctctact

SEQ ID NO: 444551 - DNA, 15 bp, Homo sapiens
aaaccccatctctac

SEQ ID NO: 444552 - DNA, 15 bp, Homo sapiens
aaaaccccatctcta

SEQ ID NO: 444553 - DNA, 15 bp, Homo sapiens
taaaaccccatctct

SEQ ID NO: 444554 - DNA, 15 bp, Homo sapiens
gtaaaaccccatctc

SEQ ID NO: 444555 - DNA, 15 bp, Homo sapiens
ggtaaaaccccatct

SEQ ID NO: 444556 - DNA, 15 bp, Homo sapiens
tggtaaaaccccatc

SEQ ID NO: 444557 - DNA, 15 bp, Homo sapiens
ctggtaaaaccccat

SEQ ID NO: 444558 - DNA, 15 bp, Homo sapiens
cctggtaaaacccca

SEQ ID NO: 444559 - DNA, 15 bp, Homo sapiens
acctggtaaaacccc

SEQ ID NO: 444560 - DNA, 15 bp, Homo sapiens
aacctggtaaaaccc

SEQ ID NO: 444561 - DNA, 15 bp, Homo sapiens
caacctggtaaaacc

SEQ ID NO: 444562 - DNA, 15 bp, Homo sapiens
ccaacctggtaaaac

SEQ ID NO: 444563 - DNA, 15 bp, Homo sapiens
tccaacctggtaaaa

SEQ ID NO: 444564 - DNA, 15 bp, Homo sapiens
gtccaacctggtaaa

SEQ ID NO: 444565 - DNA, 15 bp, Homo sapiens
tgtccaacctggtaa

SEQ ID NO: 444566 - DNA, 15 bp, Homo sapiens
ctgtccaacctggta

SEQ ID NO: 444567 - DNA, 15 bp, Homo sapiens
cctgtccaacctggt

SEQ ID NO: 444568 - DNA, 15 bp, Homo sapiens
gcctgtccaacctgg

SEQ ID NO: 444569 - DNA, 15 bp, Homo sapiens
agcctgtccaacctg

SEQ ID NO: 444570 - DNA, 15 bp, Homo sapiens
cagcctgtccaacct

SEQ ID NO: 444571 - DNA, 15 bp, Homo sapiens
tcagcctgtccaacc

SEQ ID NO: 444572 - DNA, 15 bp, Homo sapiens
atcagcctgtccaac

SEQ ID NO: 444573 - DNA, 15 bp, Homo sapiens
tatcagcctgtccaa

SEQ ID NO: 444574 - DNA, 15 bp, Homo sapiens
atatcagcctgtcca

SEQ ID NO: 444575 - DNA, 15 bp, Homo sapiens
aatatcagcctgtcc

SEQ ID NO: 444576 - DNA, 15 bp, Homo sapiens
caatatcagcctgtc

SEQ ID NO: 444577 - DNA, 15 bp, Homo sapiens
tcaatatcagcctgt

SEQ ID NO: 444578 - DNA, 15 bp, Homo sapiens
ttcaatatcagcctg

SEQ ID NO: 444579 - DNA, 15 bp, Homo sapiens
gttcaatatcagcct

SEQ ID NO: 444580 - DNA, 15 bp, Homo sapiens
agttcaatatcagcc

SEQ ID NO: 444581 - DNA, 15 bp, Homo sapiens
gagttcaatatcagc

SEQ ID NO: 444582 - DNA, 15 bp, Homo sapiens
ggagttcaatatcag

SEQ ID NO: 444583 - DNA, 15 bp, Homo sapiens
aggagttcaatatca

SEQ ID NO: 444584 - DNA, 15 bp, Homo sapiens
caggagttcaatatc

SEQ ID NO: 444585 - DNA, 15 bp, Homo sapiens
tcaggagttcaatat

SEQ ID NO: 444586 - DNA, 15 bp, Homo sapiens
gtcaggagttcaata

SEQ ID NO: 444587 - DNA, 15 bp, Homo sapiens
ggtcaggagttcaat

SEQ ID NO: 444588 - DNA, 15 bp, Homo sapiens
aggtcaggagttcaa

SEQ ID NO: 444589 - DNA, 15 bp, Homo sapiens
gaggtcaggagttca

SEQ ID NO: 444590 - DNA, 15 bp, Homo sapiens
ctgaggtcaggagtt

SEQ ID NO: 444591 - DNA, 15 bp, Homo sapiens
cctgaggtcaggagt

SEQ ID NO: 444592 - DNA, 15 bp, Homo sapiens
acctgaggtcaggag

SEQ ID NO: 444593 - DNA, 15 bp, Homo sapiens
cacctgaggtcagga

SEQ ID NO: 444594 - DNA, 15 bp, Homo sapiens
tcacctgaggtcagg

SEQ ID NO: 444595 - DNA, 15 bp, Homo sapiens
atcacctgaggtcag

SEQ ID NO: 444596 - DNA, 15 bp, Homo sapiens
gatcacctgaggtca

SEQ ID NO: 444597 - DNA, 15 bp, Homo sapiens
ggatcacctgaggtc

SEQ ID NO: 444598 - DNA, 15 bp, Homo sapiens
tggatcacctgaggt

SEQ ID NO: 444599 - DNA, 15 bp, Homo sapiens
gtggatcacctgagg

SEQ ID NO: 444600 - DNA, 15 bp, Homo sapiens
ggtggatcacctgag

SEQ ID NO: 444601 - DNA, 15 bp, Homo sapiens
aggtggatcacctga

SEQ ID NO: 444602 - DNA, 15 bp, Homo sapiens
caggtggatcacctg

SEQ ID NO: 444603 - DNA, 15 bp, Homo sapiens
gcaggtggatcacct

SEQ ID NO: 444604 - DNA, 15 bp, Homo sapiens
ggcaggtggatcacc

SEQ ID NO: 444605 - DNA, 15 bp, Homo sapiens
aggcaggtggatcac

SEQ ID NO: 444606 - DNA, 15 bp, Homo sapiens
aaggcaggtggatca

SEQ ID NO: 444607 - DNA, 15 bp, Homo sapiens
caaggcaggtggatc

SEQ ID NO: 444608 - DNA, 15 bp, Homo sapiens
ccaaggcaggtggat

SEQ ID NO: 444609 - DNA, 15 bp, Homo sapiens
gccaaggcaggtgga

SEQ ID NO: 444610 - DNA, 15 bp, Homo sapiens
ggccaaggcaggtgg

SEQ ID NO: 444611 - DNA, 15 bp, Homo sapiens
aggccaaggcaggtg

SEQ ID NO: 444612 - DNA, 15 bp, Homo sapiens
gaggccaaggcaggt

SEQ ID NO: 444613 - DNA, 15 bp, Homo sapiens
ggaggccaaggcagg

SEQ ID NO: 444614 - DNA, 15 bp, Homo sapiens
gggaggccaaggcag

SEQ ID NO: 444615 - DNA, 15 bp, Homo sapiens
tgggaggccaaggca

SEQ ID NO: 444616 - DNA, 15 bp, Homo sapiens
tggtggctcacgcct

SEQ ID NO: 444617 - DNA, 15 bp, Homo sapiens
gtggtggctcacgcc

SEQ ID NO: 444618 - DNA, 15 bp, Homo sapiens
tgtggtggctcacgc

SEQ ID NO: 444619 - DNA, 15 bp, Homo sapiens
gtgtggtggctcacg

SEQ ID NO: 444620 - DNA, 15 bp, Homo sapiens
ggtgtggtggctcac

SEQ ID NO: 444621 - DNA, 15 bp, Homo sapiens
aggtgtggtggctca

SEQ ID NO: 444622 - DNA, 15 bp, Homo sapiens
caggtgtggtggctc

SEQ ID NO: 444623 - DNA, 15 bp, Homo sapiens
ccaggtgtggtggct

SEQ ID NO: 444624 - DNA, 15 bp, Homo sapiens
gccaggtgtggtggc

SEQ ID NO: 444625 - DNA, 15 bp, Homo sapiens
ggccaggtgtggtgg

SEQ ID NO: 444626 - DNA, 15 bp, Homo sapiens
aggccaggtgtggtg

SEQ ID NO: 444627 - DNA, 15 bp, Homo sapiens
taggccaggtgtggt

SEQ ID NO: 444628 - DNA, 15 bp, Homo sapiens
gtaggccaggtgtgg

SEQ ID NO: 444629 - DNA, 15 bp, Homo sapiens
agtaggccaggtgtg

SEQ ID NO: 444630 - DNA, 15 bp, Homo sapiens
aagtaggccaggtgt

SEQ ID NO: 444631 - DNA, 15 bp, Homo sapiens
aaagtaggccaggtg

SEQ ID NO: 444632 - DNA, 15 bp, Homo sapiens
aaaagtaggccaggt

SEQ ID NO: 444633 - DNA, 15 bp, Homo sapiens
aaaaagtaggccagg

SEQ ID NO: 444634 - DNA, 15 bp, Homo sapiens
caaaaagtaggccag

SEQ ID NO: 444635 - DNA, 15 bp, Homo sapiens
acaaaaagtaggcca

SEQ ID NO: 444636 - DNA, 15 bp, Homo sapiens
tacaaaaagtaggcc

SEQ ID NO: 444637 - DNA, 15 bp, Homo sapiens
atacaaaaagtaggc

SEQ ID NO: 444638 - DNA, 15 bp, Homo sapiens
aatacaaaaagtagg

SEQ ID NO: 444639 - DNA, 15 bp, Homo sapiens
aaatacaaaaagtag

SEQ ID NO: 444640 - DNA, 15 bp, Homo sapiens
aaaatacaaaaagta

SEQ ID NO: 444641 - DNA, 15 bp, Homo sapiens
aaaaatacaaaaagt

SEQ ID NO: 444642 - DNA, 15 bp, Homo sapiens
caaaaatacaaaaag

SEQ ID NO: 444643 - DNA, 15 bp, Homo sapiens
acaaaaatacaaaaa

SEQ ID NO: 444644 - DNA, 15 bp, Homo sapiens
tacaaaaatacaaaa

SEQ ID NO: 444645 - DNA, 15 bp, Homo sapiens
ctacaaaaatacaaa

SEQ ID NO: 444646 - DNA, 15 bp, Homo sapiens
tctacaaaaatacaa

SEQ ID NO: 444647 - DNA, 15 bp, Homo sapiens
ctctacaaaaataca

SEQ ID NO: 444648 - DNA, 15 bp, Homo sapiens
actctacaaaaatac

SEQ ID NO: 444649 - DNA, 15 bp, Homo sapiens
cactctacaaaaata

SEQ ID NO: 444650 - DNA, 15 bp, Homo sapiens
ccactctacaaaaat

SEQ ID NO: 444651 - DNA, 15 bp, Homo sapiens
cccactctacaaaaa

SEQ ID NO: 444652 - DNA, 15 bp, Homo sapiens
gcccactctacaaaa

SEQ ID NO: 444653 - DNA, 15 bp, Homo sapiens
agcccactctacaaa

SEQ ID NO: 444654 - DNA, 15 bp, Homo sapiens
aagcccactctacaa

SEQ ID NO: 444655 - DNA, 15 bp, Homo sapiens
aaagcccactctaca

SEQ ID NO: 444656 - DNA, 15 bp, Homo sapiens
aaaagcccactctac

SEQ ID NO: 444657 - DNA, 15 bp, Homo sapiens
caaaagcccactcta

SEQ ID NO: 444658 - DNA, 15 bp, Homo sapiens
gcaaaagcccactct

SEQ ID NO: 444659 - DNA, 15 bp, Homo sapiens
ggcaaaagcccactc

SEQ ID NO: 444660 - DNA, 15 bp, Homo sapiens
tggcaaaagcccact

SEQ ID NO: 444661 - DNA, 15 bp, Homo sapiens
atggcaaaagcccac

SEQ ID NO: 444662 - DNA, 15 bp, Homo sapiens
catggcaaaagccca

SEQ ID NO: 444663 - DNA, 15 bp, Homo sapiens
acatggcaaaagccc

SEQ ID NO: 444664 - DNA, 15 bp, Homo sapiens
aacatggcaaaagcc

SEQ ID NO: 444665 - DNA, 15 bp, Homo sapiens
caacatggcaaaagc

SEQ ID NO: 444666 - DNA, 15 bp, Homo sapiens
gcaacatggcaaaag

SEQ ID NO: 444667 - DNA, 15 bp, Homo sapiens
ggcaacatggcaaaa

SEQ ID NO: 444668 - DNA, 15 bp, Homo sapiens
aggcaacatggcaaa

SEQ ID NO: 444669 - DNA, 15 bp, Homo sapiens
taggcaacatggcaa

SEQ ID NO: 444670 - DNA, 15 bp, Homo sapiens
ctaggcaacatggca

SEQ ID NO: 444671 - DNA, 15 bp, Homo sapiens
cctaggcaacatggc

SEQ ID NO: 444672 - DNA, 15 bp, Homo sapiens
gcctaggcaacatgg

SEQ ID NO: 444673 - DNA, 15 bp, Homo sapiens
agcctaggcaacatg

SEQ ID NO: 444674 - DNA, 15 bp, Homo sapiens
cagcctaggcaacat

SEQ ID NO: 444675 - DNA, 15 bp, Homo sapiens
ccagcctaggcaaca

SEQ ID NO: 444676 - DNA, 15 bp, Homo sapiens
accagcctaggcaac

SEQ ID NO: 444677 - DNA, 15 bp, Homo sapiens
gaccagcctaggcaa

SEQ ID NO: 444678 - DNA, 15 bp, Homo sapiens
agaccagcctaggca

SEQ ID NO: 444679 - DNA, 15 bp, Homo sapiens
gagaccagcctaggc

SEQ ID NO: 444680 - DNA, 15 bp, Homo sapiens
agagaccagcctagg

SEQ ID NO: 444681 - DNA, 15 bp, Homo sapiens
tagagaccagcctag

SEQ ID NO: 444682 - DNA, 15 bp, Homo sapiens
ttagagaccagccta

SEQ ID NO: 444683 - DNA, 15 bp, Homo sapiens
cttagagaccagcct

SEQ ID NO: 444684 - DNA, 15 bp, Homo sapiens
acttagagaccagcc

SEQ ID NO: 444685 - DNA, 15 bp, Homo sapiens
gacttagagaccagc

SEQ ID NO: 444686 - DNA, 15 bp, Homo sapiens
ggacttagagaccag

SEQ ID NO: 444687 - DNA, 15 bp, Homo sapiens
aggacttagagacca

SEQ ID NO: 444688 - DNA, 15 bp, Homo sapiens
caggacttagagacc

SEQ ID NO: 444689 - DNA, 15 bp, Homo sapiens
ccaggacttagagac

SEQ ID NO: 444690 - DNA, 15 bp, Homo sapiens
accaggacttagaga

SEQ ID NO: 444691 - DNA, 15 bp, Homo sapiens
aaccaggacttagag

SEQ ID NO: 444692 - DNA, 15 bp, Homo sapiens
gaaccaggacttaga

SEQ ID NO: 444693 - DNA, 15 bp, Homo sapiens
tgaaccaggacttag

SEQ ID NO: 444694 - DNA, 15 bp, Homo sapiens
ttgaaccaggactta

SEQ ID NO: 444695 - DNA, 15 bp, Homo sapiens
cttgaaccaggactt

SEQ ID NO: 444696 - DNA, 15 bp, Homo sapiens
gcttgaaccaggact

SEQ ID NO: 444697 - DNA, 15 bp, Homo sapiens
tgcttgaaccaggac

SEQ ID NO: 444698 - DNA, 15 bp, Homo sapiens
ttgcttgaaccagga

SEQ ID NO: 444699 - DNA, 15 bp, Homo sapiens
attgcttgaaccagg

SEQ ID NO: 444700 - DNA, 15 bp, Homo sapiens
gattgcttgaaccag

SEQ ID NO: 444701 - DNA, 15 bp, Homo sapiens
ggattgcttgaacca

SEQ ID NO: 444702 - DNA, 15 bp, Homo sapiens
tggattgcttgaacc

SEQ ID NO: 444703 - DNA, 15 bp, Homo sapiens
gtggattgcttgaac

SEQ ID NO: 444704 - DNA, 15 bp, Homo sapiens
ggtggattgcttgaa

SEQ ID NO: 444705 - DNA, 15 bp, Homo sapiens
gggtggattgcttga

SEQ ID NO: 444706 - DNA, 15 bp, Homo sapiens
tgggtggattgcttg

SEQ ID NO: 444707 - DNA, 15 bp, Homo sapiens
gtgggtggattgctt

SEQ ID NO: 444708 - DNA, 15 bp, Homo sapiens
ggtgggtggattgct

SEQ ID NO: 444709 - DNA, 15 bp, Homo sapiens
aggtgggtggattgc

SEQ ID NO: 444710 - DNA, 15 bp, Homo sapiens
aaggtgggtggattg

SEQ ID NO: 444711 - DNA, 15 bp, Homo sapiens
caaggtgggtggatt

SEQ ID NO: 444712 - DNA, 15 bp, Homo sapiens
ccaaggtgggtggat

SEQ ID NO: 444713 - DNA, 15 bp, Homo sapiens
gccaaggtgggtgga

SEQ ID NO: 444714 - DNA, 15 bp, Homo sapiens
ggccaaggtgggtgg

SEQ ID NO: 444715 - DNA, 15 bp, Homo sapiens
aggccaaggtgggtg

SEQ ID NO: 444716 - DNA, 15 bp, Homo sapiens
gaggccaaggtgggt

SEQ ID NO: 444717 - DNA, 15 bp, Homo sapiens
agaggccaaggtggg

SEQ ID NO: 444718 - DNA, 15 bp, Homo sapiens
aagaggccaaggtgg

SEQ ID NO: 444719 - DNA, 15 bp, Homo sapiens
taagaggccaaggtg

SEQ ID NO: 444720 - DNA, 15 bp, Homo sapiens
ttaagaggccaaggt

SEQ ID NO: 444721 - DNA, 15 bp, Homo sapiens
attaagaggccaagg

SEQ ID NO: 444722 - DNA, 15 bp, Homo sapiens
cattaagaggccaag

SEQ ID NO: 444723 - DNA, 15 bp, Homo sapiens
acattaagaggccaa

SEQ ID NO: 444724 - DNA, 15 bp, Homo sapiens
cacattaagaggcca

SEQ ID NO: 444725 - DNA, 15 bp, Homo sapiens
gcacattaagaggcc

SEQ ID NO: 444726 - DNA, 15 bp, Homo sapiens
agcacattaagaggc

SEQ ID NO: 444727 - DNA, 15 bp, Homo sapiens
cagcacattaagagg

SEQ ID NO: 444728 - DNA, 15 bp, Homo sapiens
gcagcacattaagag

SEQ ID NO: 444729 - DNA, 15 bp, Homo sapiens
cgcagcacattaaga

SEQ ID NO: 444730 - DNA, 15 bp, Homo sapiens
tcgcagcacattaag

SEQ ID NO: 444731 - DNA, 15 bp, Homo sapiens
atcgcagcacattaa

SEQ ID NO: 444732 - DNA, 15 bp, Homo sapiens
aatcgcagcacatta

SEQ ID NO: 444733 - DNA, 15 bp, Homo sapiens
taatcgcagcacatt

SEQ ID NO: 444734 - DNA, 15 bp, Homo sapiens
gtaatcgcagcacat

SEQ ID NO: 444735 - DNA, 15 bp, Homo sapiens
ggtaatcgcagcaca

SEQ ID NO: 444736 - DNA, 15 bp, Homo sapiens
cggtaatcgcagcac

SEQ ID NO: 444737 - DNA, 15 bp, Homo sapiens
ccggtaatcgcagca

SEQ ID NO: 444738 - DNA, 15 bp, Homo sapiens
gccggtaatcgcagc

SEQ ID NO: 444739 - DNA, 15 bp, Homo sapiens
tgccggtaatcgcag

SEQ ID NO: 444740 - DNA, 15 bp, Homo sapiens
atgccggtaatcgca

SEQ ID NO: 444741 - DNA, 15 bp, Homo sapiens
catgccggtaatcgc

SEQ ID NO: 444742 - DNA, 15 bp, Homo sapiens
tcatgccggtaatcg

SEQ ID NO: 444743 - DNA, 15 bp, Homo sapiens
ctcatgccggtaatc

SEQ ID NO: 444744 - DNA, 15 bp, Homo sapiens
gctcatgccggtaat

SEQ ID NO: 444745 - DNA, 15 bp, Homo sapiens
ggctcatgccggtaa

SEQ ID NO: 444746 - DNA, 15 bp, Homo sapiens
cggctcatgccggta

SEQ ID NO: 444747 - DNA, 15 bp, Homo sapiens
gcggctcatgccggt

SEQ ID NO: 444748 - DNA, 15 bp, Homo sapiens
ggcggctcatgccgg

SEQ ID NO: 444749 - DNA, 15 bp, Homo sapiens
tggcggctcatgccg

SEQ ID NO: 444750 - DNA, 15 bp, Homo sapiens
gtggcggctcatgcc

SEQ ID NO: 444751 - DNA, 15 bp, Homo sapiens
tgtggcggctcatgc

SEQ ID NO: 444752 - DNA, 15 bp, Homo sapiens
gtgtggcggctcatg

SEQ ID NO: 444753 - DNA, 15 bp, Homo sapiens
ggtgtggcggctcat

SEQ ID NO: 444754 - DNA, 15 bp, Homo sapiens
aggtgtggcggctca

SEQ ID NO: 444755 - DNA, 15 bp, Homo sapiens
caggtgtggcggctc

SEQ ID NO: 444756 - DNA, 15 bp, Homo sapiens
ccaggtgtggcggct

SEQ ID NO: 444757 - DNA, 15 bp, Homo sapiens
gccaggtgtggcggc

SEQ ID NO: 444758 - DNA, 15 bp, Homo sapiens
ggccaggtgtggcgg

SEQ ID NO: 444759 - DNA, 15 bp, Homo sapiens
aggccaggtgtggcg

SEQ ID NO: 444760 - DNA, 15 bp, Homo sapiens
caggccaggtgtggc

SEQ ID NO: 444761 - DNA, 15 bp, Homo sapiens
acaggccaggtgtgg

SEQ ID NO: 444762 - DNA, 15 bp, Homo sapiens
aacaggccaggtgtg

SEQ ID NO: 444763 - DNA, 15 bp, Homo sapiens
aaacaggccaggtgt

SEQ ID NO: 444764 - DNA, 15 bp, Homo sapiens
gaaacaggccaggtg

SEQ ID NO: 444765 - DNA, 15 bp, Homo sapiens
ggaaacaggccaggt

SEQ ID NO: 444766 - DNA, 15 bp, Homo sapiens
gggaaacaggccagg

SEQ ID NO: 444767 - DNA, 15 bp, Homo sapiens
agggaaacaggccag

SEQ ID NO: 444768 - DNA, 15 bp, Homo sapiens
tagggaaacaggcca

SEQ ID NO: 444769 - DNA, 15 bp, Homo sapiens
gtagggaaacaggcc

SEQ ID NO: 444770 - DNA, 15 bp, Homo sapiens
ggtagggaaacaggc

SEQ ID NO: 444771 - DNA, 15 bp, Homo sapiens
aggtagggaaacagg

SEQ ID NO: 444772 - DNA, 15 bp, Homo sapiens
aaggtagggaaacag

SEQ ID NO: 444773 - DNA, 15 bp, Homo sapiens
taaggtagggaaaca

SEQ ID NO: 444774 - DNA, 15 bp, Homo sapiens
gtaaggtagggaaac

SEQ ID NO: 444775 - DNA, 15 bp, Homo sapiens
tgtaaggtagggaaa

SEQ ID NO: 444776 - DNA, 15 bp, Homo sapiens
atgtaaggtagggaa

SEQ ID NO: 444777 - DNA, 15 bp, Homo sapiens
aatgtaaggtaggga

SEQ ID NO: 444778 - DNA, 15 bp, Homo sapiens
taatgtaaggtaggg

SEQ ID NO: 444779 - DNA, 15 bp, Homo sapiens
gtaatgtaaggtagg

SEQ ID NO: 444780 - DNA, 15 bp, Homo sapiens
agtaatgtaaggtag

SEQ ID NO: 444781 - DNA, 15 bp, Homo sapiens
gagtaatgtaaggta

SEQ ID NO: 444782 - DNA, 15 bp, Homo sapiens
agagtaatgtaaggt

SEQ ID NO: 444783 - DNA, 15 bp, Homo sapiens
aagagtaatgtaagg

SEQ ID NO: 444784 - DNA, 15 bp, Homo sapiens
caagagtaatgtaag

SEQ ID NO: 444785 - DNA, 15 bp, Homo sapiens
ccaagagtaatgtaa

SEQ ID NO: 444786 - DNA, 15 bp, Homo sapiens
gccaagagtaatgta

SEQ ID NO: 444787 - DNA, 15 bp, Homo sapiens
cgccaagagtaatgt

SEQ ID NO: 444788 - DNA, 15 bp, Homo sapiens
acgccaagagtaatg

SEQ ID NO: 444789 - DNA, 15 bp, Homo sapiens
aacgccaagagtaat

SEQ ID NO: 444790 - DNA, 15 bp, Homo sapiens
taacgccaagagtaa

SEQ ID NO: 444791 - DNA, 15 bp, Homo sapiens
ataacgccaagagta

SEQ ID NO: 444792 - DNA, 15 bp, Homo sapiens
aataacgccaagagt

SEQ ID NO: 444793 - DNA, 15 bp, Homo sapiens
gaataacgccaagag

SEQ ID NO: 444794 - DNA, 15 bp, Homo sapiens
agaataacgccaaga

SEQ ID NO: 444795 - DNA, 15 bp, Homo sapiens
cagaataacgccaag

SEQ ID NO: 444796 - DNA, 15 bp, Homo sapiens
ccagaataacgccaa

SEQ ID NO: 444797 - DNA, 15 bp, Homo sapiens
tccagaataacgcca

SEQ ID NO: 444798 - DNA, 15 bp, Homo sapiens
gtccagaataacgcc

SEQ ID NO: 444799 - DNA, 15 bp, Homo sapiens
agtccagaataacgc

SEQ ID NO: 444800 - DNA, 15 bp, Homo sapiens
tagtccagaataacg

SEQ ID NO: 444801 - DNA, 15 bp, Homo sapiens
atagtccagaataac

SEQ ID NO: 444802 - DNA, 15 bp, Homo sapiens
tatagtccagaataa

SEQ ID NO: 444803 - DNA, 15 bp, Homo sapiens
ttatagtccagaata

SEQ ID NO: 444804 - DNA, 15 bp, Homo sapiens
cttatagtccagaat

SEQ ID NO: 444805 - DNA, 15 bp, Homo sapiens
tcttatagtccagaa

SEQ ID NO: 444806 - DNA, 15 bp, Homo sapiens
ttcttatagtccaga

SEQ ID NO: 444807 - DNA, 15 bp, Homo sapiens
attcttatagtccag

SEQ ID NO: 444808 - DNA, 15 bp, Homo sapiens
aattcttatagtcca

SEQ ID NO: 444809 - DNA, 15 bp, Homo sapiens
aaattcttatagtcc

SEQ ID NO: 444810 - DNA, 15 bp, Homo sapiens
taaattcttatagtc

SEQ ID NO: 444811 - DNA, 15 bp, Homo sapiens
ataaattcttatagt

SEQ ID NO: 444812 - DNA, 15 bp, Homo sapiens
cataaattcttatag

SEQ ID NO: 444813 - DNA, 15 bp, Homo sapiens
gcataaattcttata

SEQ ID NO: 444814 - DNA, 15 bp, Homo sapiens
ggcataaattcttat

SEQ ID NO: 444815 - DNA, 15 bp, Homo sapiens
aggcataaattctta

SEQ ID NO: 444816 - DNA, 15 bp, Homo sapiens
caggcataaattctt

SEQ ID NO: 444817 - DNA, 15 bp, Homo sapiens
gcaggcataaattct

SEQ ID NO: 444818 - DNA, 15 bp, Homo sapiens
tgcaggcataaattc

SEQ ID NO: 444819 - DNA, 15 bp, Homo sapiens
ttgcaggcataaatt

SEQ ID NO: 444820 - DNA, 15 bp, Homo sapiens
tttgcaggcataaat

SEQ ID NO: 444821 - DNA, 15 bp, Homo sapiens
ttttgcaggcataaa

SEQ ID NO: 444822 - DNA, 15 bp, Homo sapiens
tttttgcaggcataa

SEQ ID NO: 444823 - DNA, 15 bp, Homo sapiens
gtttttgcaggcata

SEQ ID NO: 444824 - DNA, 15 bp, Homo sapiens
agtttttgcaggcat

SEQ ID NO: 444825 - DNA, 15 bp, Homo sapiens
cagtttttgcaggca

SEQ ID NO: 444826 - DNA, 15 bp, Homo sapiens
tcagtttttgcaggc

SEQ ID NO: 444827 - DNA, 15 bp, Homo sapiens
ctcagtttttgcagg

SEQ ID NO: 444828 - DNA, 15 bp, Homo sapiens
gctcagtttttgcag

SEQ ID NO: 444829 - DNA, 15 bp, Homo sapiens
agctcagtttttgca

SEQ ID NO: 444830 - DNA, 15 bp, Homo sapiens
gagctcagtttttgc

SEQ ID NO: 444831 - DNA, 15 bp, Homo sapiens
tgagctcagtttttg

SEQ ID NO: 444832 - DNA, 15 bp, Homo sapiens
ctgagctcagttttt

SEQ ID NO: 444833 - DNA, 15 bp, Homo sapiens
gctgagctcagtttt

SEQ ID NO: 444834 - DNA, 15 bp, Homo sapiens
agctgagctcagttt

SEQ ID NO: 444835 - DNA, 15 bp, Homo sapiens
cagctgagctcagtt

SEQ ID NO: 444836 - DNA, 15 bp, Homo sapiens
acagctgagctcagt

SEQ ID NO: 444837 - DNA, 15 bp, Homo sapiens
cacagctgagctcag

SEQ ID NO: 444838 - DNA, 15 bp, Homo sapiens
ccacagctgagctca

SEQ ID NO: 444839 - DNA, 15 bp, Homo sapiens
accacagctgagctc

SEQ ID NO: 444840 - DNA, 15 bp, Homo sapiens
aaccacagctgagct

SEQ ID NO: 444841 - DNA, 15 bp, Homo sapiens
gaaccacagctgagc

SEQ ID NO: 444842 - DNA, 15 bp, Homo sapiens
agaaccacagctgag

SEQ ID NO: 444843 - DNA, 15 bp, Homo sapiens
tagaaccacagctga

SEQ ID NO: 444844 - DNA, 15 bp, Homo sapiens
ttagaaccacagctg

SEQ ID NO: 444845 - DNA, 15 bp, Homo sapiens
gttagaaccacagct

SEQ ID NO: 444846 - DNA, 15 bp, Homo sapiens
tgttagaaccacagc

SEQ ID NO: 444847 - DNA, 15 bp, Homo sapiens
gtgttagaaccacag

SEQ ID NO: 444848 - DNA, 15 bp, Homo sapiens
agtgttagaaccaca

SEQ ID NO: 444849 - DNA, 15 bp, Homo sapiens
cagtgttagaaccac

SEQ ID NO: 444850 - DNA, 15 bp, Homo sapiens
gcagtgttagaacca

SEQ ID NO: 444851 - DNA, 15 bp, Homo sapiens
agcagtgttagaacc

SEQ ID NO: 444852 - DNA, 15 bp, Homo sapiens
cagcagtgttagaac

SEQ ID NO: 444853 - DNA, 15 bp, Homo sapiens
ccagcagtgttagaa

SEQ ID NO: 444854 - DNA, 15 bp, Homo sapiens
gccagcagtgttaga

SEQ ID NO: 444855 - DNA, 15 bp, Homo sapiens
tgccagcagtgttag

SEQ ID NO: 444856 - DNA, 15 bp, Homo sapiens
gtgccagcagtgtta

SEQ ID NO: 444857 - DNA, 15 bp, Homo sapiens
ggtgccagcagtgtt

SEQ ID NO: 444858 - DNA, 15 bp, Homo sapiens
gggtgccagcagtgt

SEQ ID NO: 444859 - DNA, 15 bp, Homo sapiens
agggtgccagcagtg

SEQ ID NO: 444860 - DNA, 15 bp, Homo sapiens
gagggtgccagcagt

SEQ ID NO: 444861 - DNA, 15 bp, Homo sapiens
agagggtgccagcag

SEQ ID NO: 444862 - DNA, 15 bp, Homo sapiens
gagagggtgccagca

SEQ ID NO: 444863 - DNA, 15 bp, Homo sapiens
agagagggtgccagc

SEQ ID NO: 444864 - DNA, 15 bp, Homo sapiens
tagagagggtgccag

SEQ ID NO: 444865 - DNA, 15 bp, Homo sapiens
ttagagagggtgcca

SEQ ID NO: 444866 - DNA, 15 bp, Homo sapiens
cttagagagggtgcc

SEQ ID NO: 444867 - DNA, 15 bp, Homo sapiens
gcttagagagggtgc

SEQ ID NO: 444868 - DNA, 15 bp, Homo sapiens
ggcttagagagggtg

SEQ ID NO: 444869 - DNA, 15 bp, Homo sapiens
gggcttagagagggt

SEQ ID NO: 444870 - DNA, 15 bp, Homo sapiens
ggggcttagagaggg

SEQ ID NO: 444871 - DNA, 15 bp, Homo sapiens
cggggcttagagagg

SEQ ID NO: 444872 - DNA, 15 bp, Homo sapiens
gcggggcttagagag

SEQ ID NO: 444873 - DNA, 15 bp, Homo sapiens
agcggggcttagaga

SEQ ID NO: 444874 - DNA, 15 bp, Homo sapiens
cagcggggcttagag

SEQ ID NO: 444875 - DNA, 15 bp, Homo sapiens
gcagcggggcttaga

SEQ ID NO: 444876 - DNA, 15 bp, Homo sapiens
tgcagcggggcttag

SEQ ID NO: 444877 - DNA, 15 bp, Homo sapiens
ttgcagcggggctta

SEQ ID NO: 444878 - DNA, 15 bp, Homo sapiens
tttgcagcggggctt

SEQ ID NO: 444879 - DNA, 15 bp, Homo sapiens
gtttgcagcggggct

SEQ ID NO: 444880 - DNA, 15 bp, Homo sapiens
agtttgcagcggggc

SEQ ID NO: 444881 - DNA, 15 bp, Homo sapiens
cagtttgcagcgggg

SEQ ID NO: 444882 - DNA, 15 bp, Homo sapiens
tcagtttgcagcggg

SEQ ID NO: 444883 - DNA, 15 bp, Homo sapiens
ctcagtttgcagcgg

SEQ ID NO: 444884 - DNA, 15 bp, Homo sapiens
cctcagtttgcagcg

SEQ ID NO: 444885 - DNA, 15 bp, Homo sapiens
ccctcagtttgcagc

SEQ ID NO: 444886 - DNA, 15 bp, Homo sapiens
accctcagtttgcag

SEQ ID NO: 444887 - DNA, 15 bp, Homo sapiens
caccctcagtttgca

SEQ ID NO: 444888 - DNA, 15 bp, Homo sapiens
acaccctcagtttgc

SEQ ID NO: 444889 - DNA, 15 bp, Homo sapiens
aacaccctcagtttg

SEQ ID NO: 444890 - DNA, 15 bp, Homo sapiens
gaacaccctcagttt

SEQ ID NO: 444891 - DNA, 15 bp, Homo sapiens
ggaacaccctcagtt

SEQ ID NO: 444892 - DNA, 15 bp, Homo sapiens
aggaacaccctcagt

SEQ ID NO: 444893 - DNA, 15 bp, Homo sapiens
caggaacaccctcag

SEQ ID NO: 444894 - DNA, 15 bp, Homo sapiens
tcaggaacaccctca

SEQ ID NO: 444895 - DNA, 15 bp, Homo sapiens
atcaggaacaccctc

SEQ ID NO: 444896 - DNA, 15 bp, Homo sapiens
aatcaggaacaccct

SEQ ID NO: 444897 - DNA, 15 bp, Homo sapiens
caatcaggaacaccc

SEQ ID NO: 444898 - DNA, 15 bp, Homo sapiens
gcaatcaggaacacc

SEQ ID NO: 444899 - DNA, 15 bp, Homo sapiens
tgcaatcaggaacac

SEQ ID NO: 444900 - DNA, 15 bp, Homo sapiens
ctgcaatcaggaaca

SEQ ID NO: 444901 - DNA, 15 bp, Homo sapiens
tctgcaatcaggaac

SEQ ID NO: 444902 - DNA, 15 bp, Homo sapiens
atctgcaatcaggaa

SEQ ID NO: 444903 - DNA, 15 bp, Homo sapiens
catctgcaatcagga

SEQ ID NO: 444904 - DNA, 15 bp, Homo sapiens
tcatctgcaatcagg

SEQ ID NO: 444905 - DNA, 15 bp, Homo sapiens
ctcatctgcaatcag

SEQ ID NO: 444906 - DNA, 15 bp, Homo sapiens
gctcatctgcaatca

SEQ ID NO: 444907 - DNA, 15 bp, Homo sapiens
agctcatctgcaatc

SEQ ID NO: 444908 - DNA, 15 bp, Homo sapiens
aagctcatctgcaat

SEQ ID NO: 444909 - DNA, 15 bp, Homo sapiens
caagctcatctgcaa

SEQ ID NO: 444910 - DNA, 15 bp, Homo sapiens
gcaagctcatctgca

SEQ ID NO: 444911 - DNA, 15 bp, Homo sapiens
agcaagctcatctgc

SEQ ID NO: 444912 - DNA, 15 bp, Homo sapiens
cagcaagctcatctg

SEQ ID NO: 444913 - DNA, 15 bp, Homo sapiens
ccagcaagctcatct

SEQ ID NO: 444914 - DNA, 15 bp, Homo sapiens
cccagcaagctcatc

SEQ ID NO: 444915 - DNA, 15 bp, Homo sapiens
tcccagcaagctcat

SEQ ID NO: 444916 - DNA, 15 bp, Homo sapiens
ctcccagcaagctca

SEQ ID NO: 444917 - DNA, 15 bp, Homo sapiens
cctcccagcaagctc

SEQ ID NO: 444918 - DNA, 15 bp, Homo sapiens
gcctcccagcaagct

SEQ ID NO: 444919 - DNA, 15 bp, Homo sapiens
ggcctcccagcaagc

SEQ ID NO: 444920 - DNA, 15 bp, Homo sapiens
aggcctcccagcaag

SEQ ID NO: 444921 - DNA, 15 bp, Homo sapiens
caggcctcccagcaa

SEQ ID NO: 444922 - DNA, 15 bp, Homo sapiens
ccaggcctcccagca

SEQ ID NO: 444923 - DNA, 15 bp, Homo sapiens
tccaggcctcccagc

SEQ ID NO: 444924 - DNA, 15 bp, Homo sapiens
ctccaggcctcccag

SEQ ID NO: 444925 - DNA, 15 bp, Homo sapiens
gctccaggcctccca

SEQ ID NO: 444926 - DNA, 15 bp, Homo sapiens
tgctccaggcctccc

SEQ ID NO: 444927 - DNA, 15 bp, Homo sapiens
ttgctccaggcctcc

SEQ ID NO: 444928 - DNA, 15 bp, Homo sapiens
attgctccaggcctc

SEQ ID NO: 444929 - DNA, 15 bp, Homo sapiens
tattgctccaggcct

SEQ ID NO: 444930 - DNA, 15 bp, Homo sapiens
gtattgctccaggcc

SEQ ID NO: 444931 - DNA, 15 bp, Homo sapiens
ggtattgctccaggc

SEQ ID NO: 444932 - DNA, 15 bp, Homo sapiens
gggtattgctccagg

SEQ ID NO: 444933 - DNA, 15 bp, Homo sapiens
agggtattgctccag

SEQ ID NO: 444934 - DNA, 15 bp, Homo sapiens
gagggtattgctcca

SEQ ID NO: 444935 - DNA, 15 bp, Homo sapiens
agagggtattgctcc

SEQ ID NO: 444936 - DNA, 15 bp, Homo sapiens
tagagggtattgctc

SEQ ID NO: 444937 - DNA, 15 bp, Homo sapiens
ttagagggtattgct

SEQ ID NO: 444938 - DNA, 15 bp, Homo sapiens
attagagggtattgc

SEQ ID NO: 444939 - DNA, 15 bp, Homo sapiens
aattagagggtattg

SEQ ID NO: 444940 - DNA, 15 bp, Homo sapiens
caattagagggtatt

SEQ ID NO: 444941 - DNA, 15 bp, Homo sapiens
gcaattagagggtat

SEQ ID NO: 444942 - DNA, 15 bp, Homo sapiens
ggcaattagagggta

SEQ ID NO: 444943 - DNA, 15 bp, Homo sapiens
aggcaattagagggt

SEQ ID NO: 444944 - DNA, 15 bp, Homo sapiens
aaggcaattagaggg

SEQ ID NO: 444945 - DNA, 15 bp, Homo sapiens
aaaggcaattagagg

SEQ ID NO: 444946 - DNA, 15 bp, Homo sapiens
aaaaggcaattagag

SEQ ID NO: 444947 - DNA, 15 bp, Homo sapiens
aaaaaggcaattaga

SEQ ID NO: 444948 - DNA, 15 bp, Homo sapiens
aaaaaaggcaattag

SEQ ID NO: 444949 - DNA, 15 bp, Homo sapiens
aaaaaaaggcaatta

SEQ ID NO: 444950 - DNA, 15 bp, Homo sapiens
aaaaaaaaggcaatt

SEQ ID NO: 444951 - DNA, 15 bp, Homo sapiens
aaaaaaaaaggcaat

SEQ ID NO: 444952 - DNA, 15 bp, Homo sapiens
aaaaaaaaaaggcaa

SEQ ID NO: 444953 - DNA, 15 bp, Homo sapiens
aaaaaaaaaaaggca

SEQ ID NO: 444954 - DNA, 15 bp, Homo sapiens
aaaaaaaaaaaaggc

SEQ ID NO: 444955 - DNA, 15 bp, Homo sapiens
aaaaaaaaaaaaagg

SEQ ID NO: 444956 - DNA, 15 bp, Homo sapiens
ttctcaaaaaaaaaa

SEQ ID NO: 444957 - DNA, 15 bp, Homo sapiens
cttctcaaaaaaaaa

SEQ ID NO: 444958 - DNA, 15 bp, Homo sapiens
ccttctcaaaaaaaa

SEQ ID NO: 444959 - DNA, 15 bp, Homo sapiens
tccttctcaaaaaaa

SEQ ID NO: 444960 - DNA, 15 bp, Homo sapiens
ctccttctcaaaaaa

SEQ ID NO: 444961 - DNA, 15 bp, Homo sapiens
actccttctcaaaaa

SEQ ID NO: 444962 - DNA, 15 bp, Homo sapiens
aactccttctcaaaa

SEQ ID NO: 444963 - DNA, 15 bp, Homo sapiens
aaactccttctcaaa

SEQ ID NO: 444964 - DNA, 15 bp, Homo sapiens
aaaactccttctcaa

SEQ ID NO: 444965 - DNA, 15 bp, Homo sapiens
caaaactccttctca

SEQ ID NO: 444966 - DNA, 15 bp, Homo sapiens
gcaaaactccttctc

SEQ ID NO: 444967 - DNA, 15 bp, Homo sapiens
agcaaaactccttct

SEQ ID NO: 444968 - DNA, 15 bp, Homo sapiens
gagcaaaactccttc

SEQ ID NO: 444969 - DNA, 15 bp, Homo sapiens
agagcaaaactcctt

SEQ ID NO: 444970 - DNA, 15 bp, Homo sapiens
aagagcaaaactcct

SEQ ID NO: 444971 - DNA, 15 bp, Homo sapiens
caagagcaaaactcc

SEQ ID NO: 444972 - DNA, 15 bp, Homo sapiens
gcaagagcaaaactc

SEQ ID NO: 444973 - DNA, 15 bp, Homo sapiens
agcaagagcaaaact

SEQ ID NO: 444974 - DNA, 15 bp, Homo sapiens
tagcaagagcaaaac

SEQ ID NO: 444975 - DNA, 15 bp, Homo sapiens
gtagcaagagcaaaa

SEQ ID NO: 444976 - DNA, 15 bp, Homo sapiens
ggtagcaagagcaaa

SEQ ID NO: 444977 - DNA, 15 bp, Homo sapiens
gggtagcaagagcaa

SEQ ID NO: 444978 - DNA, 15 bp, Homo sapiens
tgggtagcaagagca

SEQ ID NO: 444979 - DNA, 15 bp, Homo sapiens
ctgggtagcaagagc

SEQ ID NO: 444980 - DNA, 15 bp, Homo sapiens
cctgggtagcaagag

SEQ ID NO: 444981 - DNA, 15 bp, Homo sapiens
gcctgggtagcaaga

SEQ ID NO: 444982 - DNA, 15 bp, Homo sapiens
agcctgggtagcaag

SEQ ID NO: 444983 - DNA, 15 bp, Homo sapiens
cagcctgggtagcaa

SEQ ID NO: 444984 - DNA, 15 bp, Homo sapiens
ccagcctgggtagca

SEQ ID NO: 444985 - DNA, 15 bp, Homo sapiens
tccagcctgggtagc

SEQ ID NO: 444986 - DNA, 15 bp, Homo sapiens
ctccagcctgggtag

SEQ ID NO: 444987 - DNA, 15 bp, Homo sapiens
actccagcctgggta

SEQ ID NO: 444988 - DNA, 15 bp, Homo sapiens
ttgcactccagcctg

SEQ ID NO: 444989 - DNA, 15 bp, Homo sapiens
attgcactccagcct

SEQ ID NO: 444990 - DNA, 15 bp, Homo sapiens
cattgcactccagcc

SEQ ID NO: 444991 - DNA, 15 bp, Homo sapiens
ccattgcactccagc

SEQ ID NO: 444992 - DNA, 15 bp, Homo sapiens
accattgcactccag

SEQ ID NO: 444993 - DNA, 15 bp, Homo sapiens
caccattgcactcca

SEQ ID NO: 444994 - DNA, 15 bp, Homo sapiens
gcaccattgcactcc

SEQ ID NO: 444995 - DNA, 15 bp, Homo sapiens
tgcaccattgcactc

SEQ ID NO: 444996 - DNA, 15 bp, Homo sapiens
ttgcaccattgcact

SEQ ID NO: 444997 - DNA, 15 bp, Homo sapiens
attgcaccattgcac

SEQ ID NO: 444998 - DNA, 15 bp, Homo sapiens
gattgcaccattgca

SEQ ID NO: 444999 - DNA, 15 bp, Homo sapiens
agattgcaccattgc

SEQ ID NO: 445000 - DNA, 15 bp, Homo sapiens
gagattgcaccattg

SEQ ID NO: 445001 - DNA, 15 bp, Homo sapiens
cgagattgcaccatt

SEQ ID NO: 445002 - DNA, 15 bp, Homo sapiens
ccgagattgcaccat

SEQ ID NO: 445003 - DNA, 15 bp, Homo sapiens
gccgagattgcacca

SEQ ID NO: 445004 - DNA, 15 bp, Homo sapiens
agccgagattgcacc

SEQ ID NO: 445005 - DNA, 15 bp, Homo sapiens
gagccgagattgcac

SEQ ID NO: 445006 - DNA, 15 bp, Homo sapiens
tgagccgagattgca

SEQ ID NO: 445007 - DNA, 15 bp, Homo sapiens
gtgagccgagattgc

SEQ ID NO: 445008 - DNA, 15 bp, Homo sapiens
agtgagccgagattg

SEQ ID NO: 445009 - DNA, 15 bp, Homo sapiens
cagtgagccgagatt

SEQ ID NO: 445010 - DNA, 15 bp, Homo sapiens
gcagtgagccgagat

SEQ ID NO: 445011 - DNA, 15 bp, Homo sapiens
tgcagtgagccgaga

SEQ ID NO: 445012 - DNA, 15 bp, Homo sapiens
ttgcagtgagccgag

SEQ ID NO: 445013 - DNA, 15 bp, Homo sapiens
gttgcagtgagccga

SEQ ID NO: 445014 - DNA, 15 bp, Homo sapiens
ggttgcagtgagccg

SEQ ID NO: 445015 - DNA, 15 bp, Homo sapiens
ggaggttgcagtgag

SEQ ID NO: 445016 - DNA, 15 bp, Homo sapiens
cggaggttgcagtga

SEQ ID NO: 445017 - DNA, 15 bp, Homo sapiens
gcggaggttgcagtg

SEQ ID NO: 445018 - DNA, 15 bp, Homo sapiens
ggcggaggttgcagt

SEQ ID NO: 445019 - DNA, 15 bp, Homo sapiens
aggcggaggttgcag

SEQ ID NO: 445020 - DNA, 15 bp, Homo sapiens
gaggcggaggttgca

SEQ ID NO: 445021 - DNA, 15 bp, Homo sapiens
ggaggcggaggttgc

SEQ ID NO: 445022 - DNA, 15 bp, Homo sapiens
aggaggcggaggttg

SEQ ID NO: 445023 - DNA, 15 bp, Homo sapiens
caggaggcggaggtt

SEQ ID NO: 445024 - DNA, 15 bp, Homo sapiens
ccaggaggcggaggt

SEQ ID NO: 445025 - DNA, 15 bp, Homo sapiens
cccaggaggcggagg

SEQ ID NO: 445026 - DNA, 15 bp, Homo sapiens
acccaggaggcggag

SEQ ID NO: 445027 - DNA, 15 bp, Homo sapiens
aacccaggaggcgga

SEQ ID NO: 445028 - DNA, 15 bp, Homo sapiens
gaacccaggaggcgg

SEQ ID NO: 445029 - DNA, 15 bp, Homo sapiens
tgaacccaggaggcg

SEQ ID NO: 445030 - DNA, 15 bp, Homo sapiens
gcaggagaatcactt

SEQ ID NO: 445031 - DNA, 15 bp, Homo sapiens
tgcaggagaatcact

SEQ ID NO: 445032 - DNA, 15 bp, Homo sapiens
atgcaggagaatcac

SEQ ID NO: 445033 - DNA, 15 bp, Homo sapiens
gatgcaggagaatca

SEQ ID NO: 445034 - DNA, 15 bp, Homo sapiens
tgatgcaggagaatc

SEQ ID NO: 445035 - DNA, 15 bp, Homo sapiens
ctgatgcaggagaat

SEQ ID NO: 445036 - DNA, 15 bp, Homo sapiens
gctgatgcaggagaa

SEQ ID NO: 445037 - DNA, 15 bp, Homo sapiens
ggctgatgcaggaga

SEQ ID NO: 445038 - DNA, 15 bp, Homo sapiens
aggctgatgcaggag

SEQ ID NO: 445039 - DNA, 15 bp, Homo sapiens
gaggctgatgcagga

SEQ ID NO: 445040 - DNA, 15 bp, Homo sapiens
ggaggctgatgcagg

SEQ ID NO: 445041 - DNA, 15 bp, Homo sapiens
gggaggctgatgcag

SEQ ID NO: 445042 - DNA, 15 bp, Homo sapiens
cgggaggctgatgca

SEQ ID NO: 445043 - DNA, 15 bp, Homo sapiens
tcgggaggctgatgc

SEQ ID NO: 445044 - DNA, 15 bp, Homo sapiens
ctcgggaggctgatg

SEQ ID NO: 445045 - DNA, 15 bp, Homo sapiens
actcgggaggctgat

SEQ ID NO: 445046 - DNA, 15 bp, Homo sapiens
tactcgggaggctga

SEQ ID NO: 445047 - DNA, 15 bp, Homo sapiens
ctactcgggaggctg

SEQ ID NO: 445048 - DNA, 15 bp, Homo sapiens
gctactcgggaggct

SEQ ID NO: 445049 - DNA, 15 bp, Homo sapiens
agctactcgggaggc

SEQ ID NO: 445050 - DNA, 15 bp, Homo sapiens
cagctactcgggagg

SEQ ID NO: 445051 - DNA, 15 bp, Homo sapiens
ccagctactcgggag

SEQ ID NO: 445052 - DNA, 15 bp, Homo sapiens
cccagctactcggga

SEQ ID NO: 445053 - DNA, 15 bp, Homo sapiens
tcccagctactcggg

SEQ ID NO: 445054 - DNA, 15 bp, Homo sapiens
atcccagctactcgg

SEQ ID NO: 445055 - DNA, 15 bp, Homo sapiens
aatcccagctactcg

SEQ ID NO: 445056 - DNA, 15 bp, Homo sapiens
tgcctgtaatcccag

SEQ ID NO: 445057 - DNA, 15 bp, Homo sapiens
atgcctgtaatccca

SEQ ID NO: 445058 - DNA, 15 bp, Homo sapiens
catgcctgtaatccc

SEQ ID NO: 445059 - DNA, 15 bp, Homo sapiens
gcatgcctgtaatcc

SEQ ID NO: 445060 - DNA, 15 bp, Homo sapiens
tgcatgcctgtaatc

SEQ ID NO: 445061 - DNA, 15 bp, Homo sapiens
gtgcatgcctgtaat

SEQ ID NO: 445062 - DNA, 15 bp, Homo sapiens
ggtgcatgcctgtaa

SEQ ID NO: 445063 - DNA, 15 bp, Homo sapiens
tggtgcatgcctgta

SEQ ID NO: 445064 - DNA, 15 bp, Homo sapiens
gtggtgcatgcctgt

SEQ ID NO: 445065 - DNA, 15 bp, Homo sapiens
ggtggtgcatgcctg

SEQ ID NO: 445066 - DNA, 15 bp, Homo sapiens
tggtggtgcatgcct

SEQ ID NO: 445067 - DNA, 15 bp, Homo sapiens
atggtggtgcatgcc

SEQ ID NO: 445068 - DNA, 15 bp, Homo sapiens
catggtggtgcatgc

SEQ ID NO: 445069 - DNA, 15 bp, Homo sapiens
gcatggtggtgcatg

SEQ ID NO: 445070 - DNA, 15 bp, Homo sapiens
ggcatggtggtgcat

SEQ ID NO: 445071 - DNA, 15 bp, Homo sapiens
gggcatggtggtgca

SEQ ID NO: 445072 - DNA, 15 bp, Homo sapiens
cgggcatggtggtgc

SEQ ID NO: 445073 - DNA, 15 bp, Homo sapiens
ccgggcatggtggtg

SEQ ID NO: 445074 - DNA, 15 bp, Homo sapiens
gccgggcatggtggt

SEQ ID NO: 445075 - DNA, 15 bp, Homo sapiens
agccgggcatggtgg

SEQ ID NO: 445076 - DNA, 15 bp, Homo sapiens
tagccgggcatggtg

SEQ ID NO: 445077 - DNA, 15 bp, Homo sapiens
ttagccgggcatggt

SEQ ID NO: 445078 - DNA, 15 bp, Homo sapiens
attagccgggcatgg

SEQ ID NO: 445079 - DNA, 15 bp, Homo sapiens
cattagccgggcatg

SEQ ID NO: 445080 - DNA, 15 bp, Homo sapiens
acattagccgggcat

SEQ ID NO: 445081 - DNA, 15 bp, Homo sapiens
aacattagccgggca

SEQ ID NO: 445082 - DNA, 15 bp, Homo sapiens
caacattagccgggc

SEQ ID NO: 445083 - DNA, 15 bp, Homo sapiens
acaacattagccggg

SEQ ID NO: 445084 - DNA, 15 bp, Homo sapiens
tacaacattagccgg

SEQ ID NO: 445085 - DNA, 15 bp, Homo sapiens
atacaacattagccg

SEQ ID NO: 445086 - DNA, 15 bp, Homo sapiens
aatacaacattagcc

SEQ ID NO: 445087 - DNA, 15 bp, Homo sapiens
aaatacaacattagc

SEQ ID NO: 445088 - DNA, 15 bp, Homo sapiens
aaaatacaacattag

SEQ ID NO: 445089 - DNA, 15 bp, Homo sapiens
aaaaatacaacatta

SEQ ID NO: 445090 - DNA, 15 bp, Homo sapiens
taaaaatacaacatt

SEQ ID NO: 445091 - DNA, 15 bp, Homo sapiens
ctaaaaatacaacat

SEQ ID NO: 445092 - DNA, 15 bp, Homo sapiens
actaaaaatacaaca

SEQ ID NO: 445093 - DNA, 15 bp, Homo sapiens
tactaaaaatacaac

SEQ ID NO: 445094 - DNA, 15 bp, Homo sapiens
ctactaaaaatacaa

SEQ ID NO: 445095 - DNA, 15 bp, Homo sapiens
actactaaaaataca

SEQ ID NO: 445096 - DNA, 15 bp, Homo sapiens
cactactaaaaatac

SEQ ID NO: 445097 - DNA, 15 bp, Homo sapiens
tcactactaaaaata

SEQ ID NO: 445098 - DNA, 15 bp, Homo sapiens
atcactactaaaaat

SEQ ID NO: 445099 - DNA, 15 bp, Homo sapiens
catcactactaaaaa

SEQ ID NO: 445100 - DNA, 15 bp, Homo sapiens
tcatcactactaaaa

SEQ ID NO: 445101 - DNA, 15 bp, Homo sapiens
ctcatcactactaaa

SEQ ID NO: 445102 - DNA, 15 bp, Homo sapiens
cctcatcactactaa

SEQ ID NO: 445103 - DNA, 15 bp, Homo sapiens
acctcatcactacta

SEQ ID NO: 445104 - DNA, 15 bp, Homo sapiens
aacctcatcactact

SEQ ID NO: 445105 - DNA, 15 bp, Homo sapiens
aaacctcatcactac

SEQ ID NO: 445106 - DNA, 15 bp, Homo sapiens
gaaacctcatcacta

SEQ ID NO: 445107 - DNA, 15 bp, Homo sapiens
agaaacctcatcact

SEQ ID NO: 445108 - DNA, 15 bp, Homo sapiens
gagaaacctcatcac

SEQ ID NO: 445109 - DNA, 15 bp, Homo sapiens
ggagaaacctcatca

SEQ ID NO: 445110 - DNA, 15 bp, Homo sapiens
tggagaaacctcatc

SEQ ID NO: 445111 - DNA, 15 bp, Homo sapiens
atggagaaacctcat

SEQ ID NO: 445112 - DNA, 15 bp, Homo sapiens
catggagaaacctca

SEQ ID NO: 445113 - DNA, 15 bp, Homo sapiens
acatggagaaacctc

SEQ ID NO: 445114 - DNA, 15 bp, Homo sapiens
aacatggagaaacct

SEQ ID NO: 445115 - DNA, 15 bp, Homo sapiens
caacatggagaaacc

SEQ ID NO: 445116 - DNA, 15 bp, Homo sapiens
ccaacatggagaaac

SEQ ID NO: 445117 - DNA, 15 bp, Homo sapiens
gccaacatggagaaa

SEQ ID NO: 445118 - DNA, 15 bp, Homo sapiens
ggccaacatggagaa

SEQ ID NO: 445119 - DNA, 15 bp, Homo sapiens
tggccaacatggaga

SEQ ID NO: 445120 - DNA, 15 bp, Homo sapiens
ctggccaacatggag

SEQ ID NO: 445121 - DNA, 15 bp, Homo sapiens
cctggccaacatgga

SEQ ID NO: 445122 - DNA, 15 bp, Homo sapiens
aagaccagcctggcc

SEQ ID NO: 445123 - DNA, 15 bp, Homo sapiens
caagaccagcctggc

SEQ ID NO: 445124 - DNA, 15 bp, Homo sapiens
gttcaagaccagcct

SEQ ID NO: 445125 - DNA, 15 bp, Homo sapiens
agttcaagaccagcc

SEQ ID NO: 445126 - DNA, 15 bp, Homo sapiens
gggagttcaagacca

SEQ ID NO: 445127 - DNA, 15 bp, Homo sapiens
cgggagttcaagacc

SEQ ID NO: 445128 - DNA, 15 bp, Homo sapiens
tcgggagttcaagac

SEQ ID NO: 445129 - DNA, 15 bp, Homo sapiens
gtcgggagttcaaga

SEQ ID NO: 445130 - DNA, 15 bp, Homo sapiens
ggtcgggagttcaag

SEQ ID NO: 445131 - DNA, 15 bp, Homo sapiens
aggtcgggagttcaa

SEQ ID NO: 445132 - DNA, 15 bp, Homo sapiens
gaggtcgggagttca

SEQ ID NO: 445133 - DNA, 15 bp, Homo sapiens
tgaggtcgggagttc

SEQ ID NO: 445134 - DNA, 15 bp, Homo sapiens
ctgaggtcgggagtt

SEQ ID NO: 445135 - DNA, 15 bp, Homo sapiens
cctgaggtcgggagt

SEQ ID NO: 445136 - DNA, 15 bp, Homo sapiens
acctgaggtcgggag

SEQ ID NO: 445137 - DNA, 15 bp, Homo sapiens
cacctgaggtcggga

SEQ ID NO: 445138 - DNA, 15 bp, Homo sapiens
tcacctgaggtcggg

SEQ ID NO: 445139 - DNA, 15 bp, Homo sapiens
atcacctgaggtcgg

SEQ ID NO: 445140 - DNA, 15 bp, Homo sapiens
gatcacctgaggtcg

SEQ ID NO: 445141 - DNA, 15 bp, Homo sapiens
cggatcacctgaggt

SEQ ID NO: 445142 - DNA, 15 bp, Homo sapiens
gcggatcacctgagg

SEQ ID NO: 445143 - DNA, 15 bp, Homo sapiens
ggcggatcacctgag

SEQ ID NO: 445144 - DNA, 15 bp, Homo sapiens
gggcggatcacctga

SEQ ID NO: 445145 - DNA, 15 bp, Homo sapiens
agggcggatcacctg

SEQ ID NO: 445146 - DNA, 15 bp, Homo sapiens
gagggcggatcacct

SEQ ID NO: 445147 - DNA, 15 bp, Homo sapiens
ggagggcggatcacc

SEQ ID NO: 445148 - DNA, 15 bp, Homo sapiens
aggagggcggatcac

SEQ ID NO: 445149 - DNA, 15 bp, Homo sapiens
gaggagggcggatca

SEQ ID NO: 445150 - DNA, 15 bp, Homo sapiens
cgaggagggcggatc

SEQ ID NO: 445151 - DNA, 15 bp, Homo sapiens
ccgaggagggcggat

SEQ ID NO: 445152 - DNA, 15 bp, Homo sapiens
gccgaggagggcgga

SEQ ID NO: 445153 - DNA, 15 bp, Homo sapiens
agccgaggagggcgg

SEQ ID NO: 445154 - DNA, 15 bp, Homo sapiens
aagccgaggagggcg

SEQ ID NO: 445155 - DNA, 15 bp, Homo sapiens
gaagccgaggagggc

SEQ ID NO: 445156 - DNA, 15 bp, Homo sapiens
ggaagccgaggaggg

SEQ ID NO: 445157 - DNA, 15 bp, Homo sapiens
gggaagccgaggagg

SEQ ID NO: 445158 - DNA, 15 bp, Homo sapiens
tgggaagccgaggag

SEQ ID NO: 445159 - DNA, 15 bp, Homo sapiens
ttgggaagccgagga

SEQ ID NO: 445160 - DNA, 15 bp, Homo sapiens
tttgggaagccgagg

SEQ ID NO: 445161 - DNA, 15 bp, Homo sapiens
ctttgggaagccgag

SEQ ID NO: 445162 - DNA, 15 bp, Homo sapiens
actttgggaagccga

SEQ ID NO: 445163 - DNA, 15 bp, Homo sapiens
cactttgggaagccg

SEQ ID NO: 445164 - DNA, 15 bp, Homo sapiens
gtgtaatcccagcac

SEQ ID NO: 445165 - DNA, 15 bp, Homo sapiens
agtgtaatcccagca

SEQ ID NO: 445166 - DNA, 15 bp, Homo sapiens
cagtgtaatcccagc

SEQ ID NO: 445167 - DNA, 15 bp, Homo sapiens
gcagtgtaatcccag

SEQ ID NO: 445168 - DNA, 15 bp, Homo sapiens
cgcagtgtaatccca

SEQ ID NO: 445169 - DNA, 15 bp, Homo sapiens
acgcagtgtaatccc

SEQ ID NO: 445170 - DNA, 15 bp, Homo sapiens
cacgcagtgtaatcc

SEQ ID NO: 445171 - DNA, 15 bp, Homo sapiens
ccacgcagtgtaatc

SEQ ID NO: 445172 - DNA, 15 bp, Homo sapiens
cccacgcagtgtaat

SEQ ID NO: 445173 - DNA, 15 bp, Homo sapiens
ccccacgcagtgtaa

SEQ ID NO: 445174 - DNA, 15 bp, Homo sapiens
gccccacgcagtgta

SEQ ID NO: 445175 - DNA, 15 bp, Homo sapiens
ggccccacgcagtgt

SEQ ID NO: 445176 - DNA, 15 bp, Homo sapiens
aggccccacgcagtg

SEQ ID NO: 445177 - DNA, 15 bp, Homo sapiens
caggccccacgcagt

SEQ ID NO: 445178 - DNA, 15 bp, Homo sapiens
gcaggccccacgcag

SEQ ID NO: 445179 - DNA, 15 bp, Homo sapiens
ggcaggccccacgca

SEQ ID NO: 445180 - DNA, 15 bp, Homo sapiens
aggcaggccccacgc

SEQ ID NO: 445181 - DNA, 15 bp, Homo sapiens
aaggcaggccccacg

SEQ ID NO: 445182 - DNA, 15 bp, Homo sapiens
gaaggcaggccccac

SEQ ID NO: 445183 - DNA, 15 bp, Homo sapiens
agaaggcaggcccca

SEQ ID NO: 445184 - DNA, 15 bp, Homo sapiens
aagaaggcaggcccc

SEQ ID NO: 445185 - DNA, 15 bp, Homo sapiens
aaagaaggcaggccc

SEQ ID NO: 445186 - DNA, 15 bp, Homo sapiens
aaaagaaggcaggcc

SEQ ID NO: 445187 - DNA, 15 bp, Homo sapiens
aaaaagaaggcaggc

SEQ ID NO: 445188 - DNA, 15 bp, Homo sapiens
aaaaaagaaggcagg

SEQ ID NO: 445189 - DNA, 15 bp, Homo sapiens
aaaaaaagaaggcag

SEQ ID NO: 445190 - DNA, 15 bp, Homo sapiens
taaaaaaagaaggca

SEQ ID NO: 445191 - DNA, 15 bp, Homo sapiens
ttaaaaaaagaaggc

SEQ ID NO: 445192 - DNA, 15 bp, Homo sapiens
tttaaaaaaagaagg

SEQ ID NO: 445193 - DNA, 15 bp, Homo sapiens
atttaaaaaaagaag

SEQ ID NO: 445194 - DNA, 15 bp, Homo sapiens
aatttaaaaaaagaa

SEQ ID NO: 445195 - DNA, 15 bp, Homo sapiens
aaatttaaaaaaaga

SEQ ID NO: 445196 - DNA, 15 bp, Homo sapiens
aaaatttaaaaaaag

SEQ ID NO: 445197 - DNA, 15 bp, Homo sapiens
aaaaatttaaaaaaa

SEQ ID NO: 445198 - DNA, 15 bp, Homo sapiens
taaaaatttaaaaaa

SEQ ID NO: 445199 - DNA, 15 bp, Homo sapiens
ataaaaatttaaaaa

SEQ ID NO: 445200 - DNA, 15 bp, Homo sapiens
aataaaaatttaaaa

SEQ ID NO: 445201 - DNA, 15 bp, Homo sapiens
aaataaaaatttaaa

SEQ ID NO: 445202 - DNA, 15 bp, Homo sapiens
taaataaaaatttaa

SEQ ID NO: 445203 - DNA, 15 bp, Homo sapiens
ataaataaaaattta

SEQ ID NO: 445204 - DNA, 15 bp, Homo sapiens
aataaataaaaattt

SEQ ID NO: 445205 - DNA, 15 bp, Homo sapiens
aaataaataaaaatt

SEQ ID NO: 445206 - DNA, 15 bp, Homo sapiens
taaataaataaaaat

SEQ ID NO: 445207 - DNA, 15 bp, Homo sapiens
ataaataaataaaaa

SEQ ID NO: 445208 - DNA, 15 bp, Homo sapiens
aataaataaataaaa

SEQ ID NO: 445209 - DNA, 15 bp, Homo sapiens
aaataaataaataaa

SEQ ID NO: 445210 - DNA, 15 bp, Homo sapiens
taaataaataaataa

SEQ ID NO: 445211 - DNA, 15 bp, Homo sapiens
ataaataaataaata

SEQ ID NO: 445212 - DNA, 15 bp, Homo sapiens
aataaataaataaat

SEQ ID NO: 445213 - DNA, 15 bp, Homo sapiens
gtaaataaataaata

SEQ ID NO: 445214 - DNA, 15 bp, Homo sapiens
agtaaataaataaat

SEQ ID NO: 445215 - DNA, 15 bp, Homo sapiens
aagtaaataaataaa

SEQ ID NO: 445216 - DNA, 15 bp, Homo sapiens
taagtaaataaataa

SEQ ID NO: 445217 - DNA, 15 bp, Homo sapiens
gtaagtaaataaata

SEQ ID NO: 445218 - DNA, 15 bp, Homo sapiens
agtaagtaaataaat

SEQ ID NO: 445219 - DNA, 15 bp, Homo sapiens
aagtaagtaaataaa

SEQ ID NO: 445220 - DNA, 15 bp, Homo sapiens
taagtaagtaaataa

SEQ ID NO: 445221 - DNA, 15 bp, Homo sapiens
gtaagtaagtaaata

SEQ ID NO: 445222 - DNA, 15 bp, Homo sapiens
agtaagtaagtaaat

SEQ ID NO: 445223 - DNA, 15 bp, Homo sapiens
aagtaagtaagtaaa

SEQ ID NO: 445224 - DNA, 15 bp, Homo sapiens
taagtaagtaagtaa

SEQ ID NO: 445225 - DNA, 15 bp, Homo sapiens
gtaagtaagtaagta

SEQ ID NO: 445226 - DNA, 15 bp, Homo sapiens
agtaagtaagtaagt

SEQ ID NO: 445227 - DNA, 15 bp, Homo sapiens
aagtaagtaagtaag

SEQ ID NO: 445228 - DNA, 15 bp, Homo sapiens
ataagtaagtaagta

SEQ ID NO: 445229 - DNA, 15 bp, Homo sapiens
cataagtaagtaagt

SEQ ID NO: 445230 - DNA, 15 bp, Homo sapiens
acataagtaagtaag

SEQ ID NO: 445231 - DNA, 15 bp, Homo sapiens
aacataagtaagtaa

SEQ ID NO: 445232 - DNA, 15 bp, Homo sapiens
aaacataagtaagta

SEQ ID NO: 445233 - DNA, 15 bp, Homo sapiens
caaacataagtaagt

SEQ ID NO: 445234 - DNA, 15 bp, Homo sapiens
tcaaacataagtaag

SEQ ID NO: 445235 - DNA, 15 bp, Homo sapiens
ctcaaacataagtaa

SEQ ID NO: 445236 - DNA, 15 bp, Homo sapiens
tctcaaacataagta

SEQ ID NO: 445237 - DNA, 15 bp, Homo sapiens
atctcaaacataagt

SEQ ID NO: 445238 - DNA, 15 bp, Homo sapiens
catctcaaacataag

SEQ ID NO: 445239 - DNA, 15 bp, Homo sapiens
tcatctcaaacataa

SEQ ID NO: 445240 - DNA, 15 bp, Homo sapiens
ttcatctcaaacata

SEQ ID NO: 445241 - DNA, 15 bp, Homo sapiens
tttcatctcaaacat

SEQ ID NO: 445242 - DNA, 15 bp, Homo sapiens
atttcatctcaaaca

SEQ ID NO: 445243 - DNA, 15 bp, Homo sapiens
aatttcatctcaaac

SEQ ID NO: 445244 - DNA, 15 bp, Homo sapiens
aaatttcatctcaaa

SEQ ID NO: 445245 - DNA, 15 bp, Homo sapiens
aaaatttcatctcaa

SEQ ID NO: 445246 - DNA, 15 bp, Homo sapiens
caaaatttcatctca

SEQ ID NO: 445247 - DNA, 15 bp, Homo sapiens
gcaaaatttcatctc

SEQ ID NO: 445248 - DNA, 15 bp, Homo sapiens
agcaaaatttcatct

SEQ ID NO: 445249 - DNA, 15 bp, Homo sapiens
gagcaaaatttcatc

SEQ ID NO: 445250 - DNA, 15 bp, Homo sapiens
agagcaaaatttcat

SEQ ID NO: 445251 - DNA, 15 bp, Homo sapiens
cagagcaaaatttca

SEQ ID NO: 445252 - DNA, 15 bp, Homo sapiens
acagagcaaaatttc

SEQ ID NO: 445253 - DNA, 15 bp, Homo sapiens
cacagagcaaaattt

SEQ ID NO: 445254 - DNA, 15 bp, Homo sapiens
ccacagagcaaaatt

SEQ ID NO: 445255 - DNA, 15 bp, Homo sapiens
gccacagagcaaaat

SEQ ID NO: 445256 - DNA, 15 bp, Homo sapiens
ggccacagagcaaaa

SEQ ID NO: 445257 - DNA, 15 bp, Homo sapiens
gggccacagagcaaa

SEQ ID NO: 445258 - DNA, 15 bp, Homo sapiens
tgggccacagagcaa

SEQ ID NO: 445259 - DNA, 15 bp, Homo sapiens
ctgggccacagagca

SEQ ID NO: 445260 - DNA, 15 bp, Homo sapiens
cctgggccacagagc

SEQ ID NO: 445261 - DNA, 15 bp, Homo sapiens
gcctgggccacagag

SEQ ID NO: 445262 - DNA, 15 bp, Homo sapiens
agcctgggccacaga

SEQ ID NO: 445263 - DNA, 15 bp, Homo sapiens
cagcctgggccacag

SEQ ID NO: 445264 - DNA, 15 bp, Homo sapiens
ccagcctgggccaca

SEQ ID NO: 445265 - DNA, 15 bp, Homo sapiens
tccagcctgggccac

SEQ ID NO: 445266 - DNA, 15 bp, Homo sapiens
ctccagcctgggcca

SEQ ID NO: 445267 - DNA, 15 bp, Homo sapiens
actccagcctgggcc

SEQ ID NO: 445268 - DNA, 15 bp, Homo sapiens
accactgcactccag

SEQ ID NO: 445269 - DNA, 15 bp, Homo sapiens
caccactgcactcca

SEQ ID NO: 445270 - DNA, 15 bp, Homo sapiens
ccaccactgcactcc

SEQ ID NO: 445271 - DNA, 15 bp, Homo sapiens
tccaccactgcactc

SEQ ID NO: 445272 - DNA, 15 bp, Homo sapiens
atccaccactgcact

SEQ ID NO: 445273 - DNA, 15 bp, Homo sapiens
gatccaccactgcac

SEQ ID NO: 445274 - DNA, 15 bp, Homo sapiens
agatccaccactgca

SEQ ID NO: 445275 - DNA, 15 bp, Homo sapiens
gagatccaccactgc

SEQ ID NO: 445276 - DNA, 15 bp, Homo sapiens
tgagatccaccactg

SEQ ID NO: 445277 - DNA, 15 bp, Homo sapiens
ctgagatccaccact

SEQ ID NO: 445278 - DNA, 15 bp, Homo sapiens
gctgagatccaccac

SEQ ID NO: 445279 - DNA, 15 bp, Homo sapiens
agctgagatccacca

SEQ ID NO: 445280 - DNA, 15 bp, Homo sapiens
gagctgagatccacc

SEQ ID NO: 445281 - DNA, 15 bp, Homo sapiens
tgagctgagatccac

SEQ ID NO: 445282 - DNA, 15 bp, Homo sapiens
gtgagctgagatcca

SEQ ID NO: 445283 - DNA, 15 bp, Homo sapiens
agtgagctgagatcc

SEQ ID NO: 445284 - DNA, 15 bp, Homo sapiens
cagtgagctgagatc

SEQ ID NO: 445285 - DNA, 15 bp, Homo sapiens
gttgcagtgagctga

SEQ ID NO: 445286 - DNA, 15 bp, Homo sapiens
ggttgcagtgagctg

SEQ ID NO: 445287 - DNA, 15 bp, Homo sapiens
aggttgcagtgagct

SEQ ID NO: 445288 - DNA, 15 bp, Homo sapiens
tggaggttgcagtga

SEQ ID NO: 445289 - DNA, 15 bp, Homo sapiens
gtggaggttgcagtg

SEQ ID NO: 445290 - DNA, 15 bp, Homo sapiens
ggtggaggttgcagt

SEQ ID NO: 445291 - DNA, 15 bp, Homo sapiens
aggtggaggttgcag

SEQ ID NO: 445292 - DNA, 15 bp, Homo sapiens
gaggtggaggttgca

SEQ ID NO: 445293 - DNA, 15 bp, Homo sapiens
ggaggtggaggttgc

SEQ ID NO: 445294 - DNA, 15 bp, Homo sapiens
aggaggtggaggttg

SEQ ID NO: 445295 - DNA, 15 bp, Homo sapiens
caggaggtggaggtt

SEQ ID NO: 445296 - DNA, 15 bp, Homo sapiens
ccaggaggtggaggt

SEQ ID NO: 445297 - DNA, 15 bp, Homo sapiens
cccaggaggtggagg

SEQ ID NO: 445298 - DNA, 15 bp, Homo sapiens
acccaggaggtggag

SEQ ID NO: 445299 - DNA, 15 bp, Homo sapiens
aacccaggaggtgga

SEQ ID NO: 445300 - DNA, 15 bp, Homo sapiens
gaacccaggaggtgg

SEQ ID NO: 445301 - DNA, 15 bp, Homo sapiens
tgaacccaggaggtg

SEQ ID NO: 445302 - DNA, 15 bp, Homo sapiens
ttgaacccaggaggt

SEQ ID NO: 445303 - DNA, 15 bp, Homo sapiens
gcttgaacccaggag

SEQ ID NO: 445304 - DNA, 15 bp, Homo sapiens
cgcttgaacccagga

SEQ ID NO: 445305 - DNA, 15 bp, Homo sapiens
tcgcttgaacccagg

SEQ ID NO: 445306 - DNA, 15 bp, Homo sapiens
atcgcttgaacccag

SEQ ID NO: 445307 - DNA, 15 bp, Homo sapiens
aatcgcttgaaccca

SEQ ID NO: 445308 - DNA, 15 bp, Homo sapiens
gaatcgcttgaaccc

SEQ ID NO: 445309 - DNA, 15 bp, Homo sapiens
agaatcgcttgaacc

SEQ ID NO: 445310 - DNA, 15 bp, Homo sapiens
gagaatcgcttgaac

SEQ ID NO: 445311 - DNA, 15 bp, Homo sapiens
ggagaatcgcttgaa

SEQ ID NO: 445312 - DNA, 15 bp, Homo sapiens
aggagaatcgcttga

SEQ ID NO: 445313 - DNA, 15 bp, Homo sapiens
caggagaatcgcttg

SEQ ID NO: 445314 - DNA, 15 bp, Homo sapiens
gcaggagaatcgctt

SEQ ID NO: 445315 - DNA, 15 bp, Homo sapiens
ggcaggagaatcgct

SEQ ID NO: 445316 - DNA, 15 bp, Homo sapiens
aggcaggagaatcgc

SEQ ID NO: 445317 - DNA, 15 bp, Homo sapiens
gaggcaggagaatcg

SEQ ID NO: 445318 - DNA, 15 bp, Homo sapiens
tgaggcaggagaatc

SEQ ID NO: 445319 - DNA, 15 bp, Homo sapiens
gacgcctgtaatccc

SEQ ID NO: 445320 - DNA, 15 bp, Homo sapiens
ggacgcctgtaatcc

SEQ ID NO: 445321 - DNA, 15 bp, Homo sapiens
tggacgcctgtaatc

SEQ ID NO: 445322 - DNA, 15 bp, Homo sapiens
gtggacgcctgtaat

SEQ ID NO: 445323 - DNA, 15 bp, Homo sapiens
ggtggacgcctgtaa

SEQ ID NO: 445324 - DNA, 15 bp, Homo sapiens
tggtggacgcctgta

SEQ ID NO: 445325 - DNA, 15 bp, Homo sapiens
gtggtggacgcctgt

SEQ ID NO: 445326 - DNA, 15 bp, Homo sapiens
ggtggtggacgcctg

SEQ ID NO: 445327 - DNA, 15 bp, Homo sapiens
tggtggtggacgcct

SEQ ID NO: 445328 - DNA, 15 bp, Homo sapiens
gtggtggtggacgcc

SEQ ID NO: 445329 - DNA, 15 bp, Homo sapiens
cgtggtggtggacgc

SEQ ID NO: 445330 - DNA, 15 bp, Homo sapiens
gcgtggtggtggacg

SEQ ID NO: 445331 - DNA, 15 bp, Homo sapiens
agcgtggtggtggac

SEQ ID NO: 445332 - DNA, 15 bp, Homo sapiens
gagcgtggtggtgga

SEQ ID NO: 445333 - DNA, 15 bp, Homo sapiens
tgagcgtggtggtgg

SEQ ID NO: 445334 - DNA, 15 bp, Homo sapiens
ctgagcgtggtggtg

SEQ ID NO: 445335 - DNA, 15 bp, Homo sapiens
gctgagcgtggtggt

SEQ ID NO: 445336 - DNA, 15 bp, Homo sapiens
agctgagcgtggtgg

SEQ ID NO: 445337 - DNA, 15 bp, Homo sapiens
tagctgagcgtggtg

SEQ ID NO: 445338 - DNA, 15 bp, Homo sapiens
ttagctgagcgtggt

SEQ ID NO: 445339 - DNA, 15 bp, Homo sapiens
attagctgagcgtgg

SEQ ID NO: 445340 - DNA, 15 bp, Homo sapiens
aattagctgagcgtg

SEQ ID NO: 445341 - DNA, 15 bp, Homo sapiens
aaattagctgagcgt

SEQ ID NO: 445342 - DNA, 15 bp, Homo sapiens
aaaattagctgagcg

SEQ ID NO: 445343 - DNA, 15 bp, Homo sapiens
aaaaattagctgagc

SEQ ID NO: 445344 - DNA, 15 bp, Homo sapiens
caaaaattagctgag

SEQ ID NO: 445345 - DNA, 15 bp, Homo sapiens
acaaaaattagctga

SEQ ID NO: 445346 - DNA, 15 bp, Homo sapiens
actaaaaatacaaaa

SEQ ID NO: 445347 - DNA, 15 bp, Homo sapiens
tactaaaaatacaaa

SEQ ID NO: 445348 - DNA, 15 bp, Homo sapiens
tctactaaaaataca

SEQ ID NO: 445349 - DNA, 15 bp, Homo sapiens
ctctactaaaaatac

SEQ ID NO: 445350 - DNA, 15 bp, Homo sapiens
tctctactaaaaata

SEQ ID NO: 445351 - DNA, 15 bp, Homo sapiens
atctctactaaaaat

SEQ ID NO: 445352 - DNA, 15 bp, Homo sapiens
catctctactaaaaa

SEQ ID NO: 445353 - DNA, 15 bp, Homo sapiens
gaaaccccatctcta

SEQ ID NO: 445354 - DNA, 15 bp, Homo sapiens
gcgaaaccccatctc

SEQ ID NO: 445355 - DNA, 15 bp, Homo sapiens
ggcgaaaccccatct

SEQ ID NO: 445356 - DNA, 15 bp, Homo sapiens
tggcgaaaccccatc

SEQ ID NO: 445357 - DNA, 15 bp, Homo sapiens
atggcgaaaccccat

SEQ ID NO: 445358 - DNA, 15 bp, Homo sapiens
catggcgaaacccca

SEQ ID NO: 445359 - DNA, 15 bp, Homo sapiens
acatggcgaaacccc

SEQ ID NO: 445360 - DNA, 15 bp, Homo sapiens
aacatggcgaaaccc

SEQ ID NO: 445361 - DNA, 15 bp, Homo sapiens
caacatggcgaaacc

SEQ ID NO: 445362 - DNA, 15 bp, Homo sapiens
ccaacatggcgaaac

SEQ ID NO: 445363 - DNA, 15 bp, Homo sapiens
gccaacatggcgaaa

SEQ ID NO: 445364 - DNA, 15 bp, Homo sapiens
ggccaacatggcgaa

SEQ ID NO: 445365 - DNA, 15 bp, Homo sapiens
tggccaacatggcga

SEQ ID NO: 445366 - DNA, 15 bp, Homo sapiens
ctggccaacatggcg

SEQ ID NO: 445367 - DNA, 15 bp, Homo sapiens
cctggccaacatggc

SEQ ID NO: 445368 - DNA, 15 bp, Homo sapiens
tcagcctggccaaca

SEQ ID NO: 445369 - DNA, 15 bp, Homo sapiens
atcagcctggccaac

SEQ ID NO: 445370 - DNA, 15 bp, Homo sapiens
aatcagcctggccaa

SEQ ID NO: 445371 - DNA, 15 bp, Homo sapiens
aaatcagcctggcca

SEQ ID NO: 445372 - DNA, 15 bp, Homo sapiens
gaaatcagcctggcc

SEQ ID NO: 445373 - DNA, 15 bp, Homo sapiens
agaaatcagcctggc

SEQ ID NO: 445374 - DNA, 15 bp, Homo sapiens
tagaaatcagcctgg

SEQ ID NO: 445375 - DNA, 15 bp, Homo sapiens
ttagaaatcagcctg

SEQ ID NO: 445376 - DNA, 15 bp, Homo sapiens
gttagaaatcagcct

SEQ ID NO: 445377 - DNA, 15 bp, Homo sapiens
agttagaaatcagcc

SEQ ID NO: 445378 - DNA, 15 bp, Homo sapiens
gagttagaaatcagc

SEQ ID NO: 445379 - DNA, 15 bp, Homo sapiens
ggagttagaaatcag

SEQ ID NO: 445380 - DNA, 15 bp, Homo sapiens
aggagttagaaatca

SEQ ID NO: 445381 - DNA, 15 bp, Homo sapiens
caggagttagaaatc

SEQ ID NO: 445382 - DNA, 15 bp, Homo sapiens
tcaggagttagaaat

SEQ ID NO: 445383 - DNA, 15 bp, Homo sapiens
gtcaggagttagaaa

SEQ ID NO: 445384 - DNA, 15 bp, Homo sapiens
ggtcaggagttagaa

SEQ ID NO: 445385 - DNA, 15 bp, Homo sapiens
aggtcaggagttaga

SEQ ID NO: 445386 - DNA, 15 bp, Homo sapiens
gaggtcaggagttag

SEQ ID NO: 445387 - DNA, 15 bp, Homo sapiens
tgaggtcaggagtta

SEQ ID NO: 445388 - DNA, 15 bp, Homo sapiens
agatcacctgaggtc

SEQ ID NO: 445389 - DNA, 15 bp, Homo sapiens
cagatcacctgaggt

SEQ ID NO: 445390 - DNA, 15 bp, Homo sapiens
acagatcacctgagg

SEQ ID NO: 445391 - DNA, 15 bp, Homo sapiens
cacagatcacctgag

SEQ ID NO: 445392 - DNA, 15 bp, Homo sapiens
acacagatcacctga

SEQ ID NO: 445393 - DNA, 15 bp, Homo sapiens
cacacagatcacctg

SEQ ID NO: 445394 - DNA, 15 bp, Homo sapiens
acacacagatcacct

SEQ ID NO: 445395 - DNA, 15 bp, Homo sapiens
gacacacagatcacc

SEQ ID NO: 445396 - DNA, 15 bp, Homo sapiens
agacacacagatcac

SEQ ID NO: 445397 - DNA, 15 bp, Homo sapiens
gagacacacagatca

SEQ ID NO: 445398 - DNA, 15 bp, Homo sapiens
cgagacacacagatc

SEQ ID NO: 445399 - DNA, 15 bp, Homo sapiens
ccgagacacacagat

SEQ ID NO: 445400 - DNA, 15 bp, Homo sapiens
accgagacacacaga

SEQ ID NO: 445401 - DNA, 15 bp, Homo sapiens
gaccgagacacacag

SEQ ID NO: 445402 - DNA, 15 bp, Homo sapiens
agaccgagacacaca

SEQ ID NO: 445403 - DNA, 15 bp, Homo sapiens
gagaccgagacacac

SEQ ID NO: 445404 - DNA, 15 bp, Homo sapiens
ggagaccgagacaca

SEQ ID NO: 445405 - DNA, 15 bp, Homo sapiens
gggagaccgagacac

SEQ ID NO: 445406 - DNA, 15 bp, Homo sapiens
tgggagaccgagaca

SEQ ID NO: 445407 - DNA, 15 bp, Homo sapiens
ttgggagaccgagac

SEQ ID NO: 445408 - DNA, 15 bp, Homo sapiens
tttgggagaccgaga

SEQ ID NO: 445409 - DNA, 15 bp, Homo sapiens
ctttgggagaccgag

SEQ ID NO: 445410 - DNA, 15 bp, Homo sapiens
actttgggagaccga

SEQ ID NO: 445411 - DNA, 15 bp, Homo sapiens
cactttgggagaccg

SEQ ID NO: 445412 - DNA, 15 bp, Homo sapiens
gcactttgggagacc

SEQ ID NO: 445413 - DNA, 15 bp, Homo sapiens
agcactttgggagac

SEQ ID NO: 445414 - DNA, 15 bp, Homo sapiens
cagcactttgggaga

SEQ ID NO: 445415 - DNA, 15 bp, Homo sapiens
agtggctcacgcctg

SEQ ID NO: 445416 - DNA, 15 bp, Homo sapiens
cagtggctcacgcct

SEQ ID NO: 445417 - DNA, 15 bp, Homo sapiens
gcagtggctcacgcc

SEQ ID NO: 445418 - DNA, 15 bp, Homo sapiens
cgcagtggctcacgc

SEQ ID NO: 445419 - DNA, 15 bp, Homo sapiens
gcgcagtggctcacg

SEQ ID NO: 445420 - DNA, 15 bp, Homo sapiens
gggcgcagtggctca

SEQ ID NO: 445421 - DNA, 15 bp, Homo sapiens
cgggcgcagtggctc

SEQ ID NO: 445422 - DNA, 15 bp, Homo sapiens
tcgggcgcagtggct

SEQ ID NO: 445423 - DNA, 15 bp, Homo sapiens
gtcgggcgcagtggc

SEQ ID NO: 445424 - DNA, 15 bp, Homo sapiens
ggtcgggcgcagtgg

SEQ ID NO: 445425 - DNA, 15 bp, Homo sapiens
aggtcgggcgcagtg

SEQ ID NO: 445426 - DNA, 15 bp, Homo sapiens
gaggtcgggcgcagt

SEQ ID NO: 445427 - DNA, 15 bp, Homo sapiens
ggaggtcgggcgcag

SEQ ID NO: 445428 - DNA, 15 bp, Homo sapiens
gggaggtcgggcgca

SEQ ID NO: 445429 - DNA, 15 bp, Homo sapiens
ggggaggtcgggcgc

SEQ ID NO: 445430 - DNA, 15 bp, Homo sapiens
aggggaggtcgggcg

SEQ ID NO: 445431 - DNA, 15 bp, Homo sapiens
taggggaggtcgggc

SEQ ID NO: 445432 - DNA, 15 bp, Homo sapiens
ttaggggaggtcggg

SEQ ID NO: 445433 - DNA, 15 bp, Homo sapiens
attaggggaggtcgg

SEQ ID NO: 445434 - DNA, 15 bp, Homo sapiens
cattaggggaggtcg

SEQ ID NO: 445435 - DNA, 15 bp, Homo sapiens
gcattaggggaggtc

SEQ ID NO: 445436 - DNA, 15 bp, Homo sapiens
ggcattaggggaggt

SEQ ID NO: 445437 - DNA, 15 bp, Homo sapiens
aggcattaggggagg

SEQ ID NO: 445438 - DNA, 15 bp, Homo sapiens
aaggcattaggggag

SEQ ID NO: 445439 - DNA, 15 bp, Homo sapiens
gaaggcattagggga

SEQ ID NO: 445440 - DNA, 15 bp, Homo sapiens
agaaggcattagggg

SEQ ID NO: 445441 - DNA, 15 bp, Homo sapiens
aagaaggcattaggg

SEQ ID NO: 445442 - DNA, 15 bp, Homo sapiens
aaagaaggcattagg

SEQ ID NO: 445443 - DNA, 15 bp, Homo sapiens
aaaagaaggcattag

SEQ ID NO: 445444 - DNA, 15 bp, Homo sapiens
caaaagaaggcatta

SEQ ID NO: 445445 - DNA, 15 bp, Homo sapiens
ccaaaagaaggcatt

SEQ ID NO: 445446 - DNA, 15 bp, Homo sapiens
accaaaagaaggcat

SEQ ID NO: 445447 - DNA, 15 bp, Homo sapiens
gaccaaaagaaggca

SEQ ID NO: 445448 - DNA, 15 bp, Homo sapiens
ggaccaaaagaaggc

SEQ ID NO: 445449 - DNA, 15 bp, Homo sapiens
tggaccaaaagaagg

SEQ ID NO: 445450 - DNA, 15 bp, Homo sapiens
ctggaccaaaagaag

SEQ ID NO: 445451 - DNA, 15 bp, Homo sapiens
cctggaccaaaagaa

SEQ ID NO: 445452 - DNA, 15 bp, Homo sapiens
acctggaccaaaaga

SEQ ID NO: 445453 - DNA, 15 bp, Homo sapiens
cacctggaccaaaag

SEQ ID NO: 445454 - DNA, 15 bp, Homo sapiens
acacctggaccaaaa

SEQ ID NO: 445455 - DNA, 15 bp, Homo sapiens
gacacctggaccaaa

SEQ ID NO: 445456 - DNA, 15 bp, Homo sapiens
ggacacctggaccaa

SEQ ID NO: 445457 - DNA, 15 bp, Homo sapiens
aggacacctggacca

SEQ ID NO: 445458 - DNA, 15 bp, Homo sapiens
caggacacctggacc

SEQ ID NO: 445459 - DNA, 15 bp, Homo sapiens
gcaggacacctggac

SEQ ID NO: 445460 - DNA, 15 bp, Homo sapiens
agcaggacacctgga

SEQ ID NO: 445461 - DNA, 15 bp, Homo sapiens
gagcaggacacctgg

SEQ ID NO: 445462 - DNA, 15 bp, Homo sapiens
ggagcaggacacctg

SEQ ID NO: 445463 - DNA, 15 bp, Homo sapiens
aggagcaggacacct

SEQ ID NO: 445464 - DNA, 15 bp, Homo sapiens
aaggagcaggacacc

SEQ ID NO: 445465 - DNA, 15 bp, Homo sapiens
caaggagcaggacac

SEQ ID NO: 445466 - DNA, 15 bp, Homo sapiens
tcaaggagcaggaca

SEQ ID NO: 445467 - DNA, 15 bp, Homo sapiens
gtcaaggagcaggac

SEQ ID NO: 445468 - DNA, 15 bp, Homo sapiens
ggtcaaggagcagga

SEQ ID NO: 445469 - DNA, 15 bp, Homo sapiens
tggtcaaggagcagg

SEQ ID NO: 445470 - DNA, 15 bp, Homo sapiens
gtggtcaaggagcag

SEQ ID NO: 445471 - DNA, 15 bp, Homo sapiens
cgtggtcaaggagca

SEQ ID NO: 445472 - DNA, 15 bp, Homo sapiens
tcgtggtcaaggagc

SEQ ID NO: 445473 - DNA, 15 bp, Homo sapiens
atcgtggtcaaggag

SEQ ID NO: 445474 - DNA, 15 bp, Homo sapiens
catcgtggtcaagga

SEQ ID NO: 445475 - DNA, 15 bp, Homo sapiens
ccatcgtggtcaagg

SEQ ID NO: 445476 - DNA, 15 bp, Homo sapiens
cccatcgtggtcaag

SEQ ID NO: 445477 - DNA, 15 bp, Homo sapiens
ccccatcgtggtcaa

SEQ ID NO: 445478 - DNA, 15 bp, Homo sapiens
cccccatcgtggtca

SEQ ID NO: 445479 - DNA, 15 bp, Homo sapiens
gcccccatcgtggtc

SEQ ID NO: 445480 - DNA, 15 bp, Homo sapiens
agcccccatcgtggt

SEQ ID NO: 445481 - DNA, 15 bp, Homo sapiens
aagcccccatcgtgg

SEQ ID NO: 445482 - DNA, 15 bp, Homo sapiens
gaagcccccatcgtg

SEQ ID NO: 445483 - DNA, 15 bp, Homo sapiens
agaagcccccatcgt

SEQ ID NO: 445484 - DNA, 15 bp, Homo sapiens
cagaagcccccatcg

SEQ ID NO: 445485 - DNA, 15 bp, Homo sapiens
ccagaagcccccatc

SEQ ID NO: 445486 - DNA, 15 bp, Homo sapiens
gccagaagcccccat

SEQ ID NO: 445487 - DNA, 15 bp, Homo sapiens
agccagaagccccca

SEQ ID NO: 445488 - DNA, 15 bp, Homo sapiens
cagccagaagccccc

SEQ ID NO: 445489 - DNA, 15 bp, Homo sapiens
ccagccagaagcccc

SEQ ID NO: 445490 - DNA, 15 bp, Homo sapiens
accagccagaagccc

SEQ ID NO: 445491 - DNA, 15 bp, Homo sapiens
gaccagccagaagcc

SEQ ID NO: 445492 - DNA, 15 bp, Homo sapiens
ggaccagccagaagc

SEQ ID NO: 445493 - DNA, 15 bp, Homo sapiens
tggaccagccagaag

SEQ ID NO: 445494 - DNA, 15 bp, Homo sapiens
gtggaccagccagaa

SEQ ID NO: 445495 - DNA, 15 bp, Homo sapiens
tgtggaccagccaga

SEQ ID NO: 445496 - DNA, 15 bp, Homo sapiens
ctgtggaccagccag

SEQ ID NO: 445497 - DNA, 15 bp, Homo sapiens
actgtggaccagcca

SEQ ID NO: 445498 - DNA, 15 bp, Homo sapiens
cactgtggaccagcc

SEQ ID NO: 445499 - DNA, 15 bp, Homo sapiens
acactgtggaccagc

SEQ ID NO: 445500 - DNA, 15 bp, Homo sapiens
tacactgtggaccag

SEQ ID NO: 445501 - DNA, 15 bp, Homo sapiens
gtacactgtggacca

SEQ ID NO: 445502 - DNA, 15 bp, Homo sapiens
ggtacactgtggacc

SEQ ID NO: 445503 - DNA, 15 bp, Homo sapiens
aggtacactgtggac

SEQ ID NO: 445504 - DNA, 15 bp, Homo sapiens
taggtacactgtgga

SEQ ID NO: 445505 - DNA, 15 bp, Homo sapiens
ttaggtacactgtgg

SEQ ID NO: 445506 - DNA, 15 bp, Homo sapiens
gttaggtacactgtg

SEQ ID NO: 445507 - DNA, 15 bp, Homo sapiens
agttaggtacactgt

SEQ ID NO: 445508 - DNA, 15 bp, Homo sapiens
aagttaggtacactg

SEQ ID NO: 445509 - DNA, 15 bp, Homo sapiens
gaagttaggtacact

SEQ ID NO: 445510 - DNA, 15 bp, Homo sapiens
ggaagttaggtacac

SEQ ID NO: 445511 - DNA, 15 bp, Homo sapiens
gggaagttaggtaca

SEQ ID NO: 445512 - DNA, 15 bp, Homo sapiens
agggaagttaggtac

SEQ ID NO: 445513 - DNA, 15 bp, Homo sapiens
gagggaagttaggta

SEQ ID NO: 445514 - DNA, 15 bp, Homo sapiens
ggagggaagttaggt

SEQ ID NO: 445515 - DNA, 15 bp, Homo sapiens
tggagggaagttagg

SEQ ID NO: 445516 - DNA, 15 bp, Homo sapiens
gtggagggaagttag

SEQ ID NO: 445517 - DNA, 15 bp, Homo sapiens
ggtggagggaagtta

SEQ ID NO: 445518 - DNA, 15 bp, Homo sapiens
cggtggagggaagtt

SEQ ID NO: 445519 - DNA, 15 bp, Homo sapiens
ccggtggagggaagt

SEQ ID NO: 445520 - DNA, 15 bp, Homo sapiens
gccggtggagggaag

SEQ ID NO: 445521 - DNA, 15 bp, Homo sapiens
ggccggtggagggaa

SEQ ID NO: 445522 - DNA, 15 bp, Homo sapiens
aggccggtggaggga

SEQ ID NO: 445523 - DNA, 15 bp, Homo sapiens
gaggccggtggaggg

SEQ ID NO: 445524 - DNA, 15 bp, Homo sapiens
ggaggccggtggagg

SEQ ID NO: 445525 - DNA, 15 bp, Homo sapiens
aggaggccggtggag

SEQ ID NO: 445526 - DNA, 15 bp, Homo sapiens
gaggaggccggtgga

SEQ ID NO: 445527 - DNA, 15 bp, Homo sapiens
agaggaggccggtgg

SEQ ID NO: 445528 - DNA, 15 bp, Homo sapiens
cagaggaggccggtg

SEQ ID NO: 445529 - DNA, 15 bp, Homo sapiens
gcagaggaggccggt

SEQ ID NO: 445530 - DNA, 15 bp, Homo sapiens
agcagaggaggccgg

SEQ ID NO: 445531 - DNA, 15 bp, Homo sapiens
cagcagaggaggccg

SEQ ID NO: 445532 - DNA, 15 bp, Homo sapiens
gcagcagaggaggcc

SEQ ID NO: 445533 - DNA, 15 bp, Homo sapiens
tgcagcagaggaggc

SEQ ID NO: 445534 - DNA, 15 bp, Homo sapiens
atgcagcagaggagg

SEQ ID NO: 445535 - DNA, 15 bp, Homo sapiens
tatgcagcagaggag

SEQ ID NO: 445536 - DNA, 15 bp, Homo sapiens
gtatgcagcagagga

SEQ ID NO: 445537 - DNA, 15 bp, Homo sapiens
tgtatgcagcagagg

SEQ ID NO: 445538 - DNA, 15 bp, Homo sapiens
ctgtatgcagcagag

SEQ ID NO: 445539 - DNA, 15 bp, Homo sapiens
gctgtatgcagcaga

SEQ ID NO: 445540 - DNA, 15 bp, Homo sapiens
agctgtatgcagcag

SEQ ID NO: 445541 - DNA, 15 bp, Homo sapiens
cagctgtatgcagca

SEQ ID NO: 445542 - DNA, 15 bp, Homo sapiens
ccagctgtatgcagc

SEQ ID NO: 445543 - DNA, 15 bp, Homo sapiens
gccagctgtatgcag

SEQ ID NO: 445544 - DNA, 15 bp, Homo sapiens
ggccagctgtatgca

SEQ ID NO: 445545 - DNA, 15 bp, Homo sapiens
aggccagctgtatgc

SEQ ID NO: 445546 - DNA, 15 bp, Homo sapiens
gaggccagctgtatg

SEQ ID NO: 445547 - DNA, 15 bp, Homo sapiens
tgaggccagctgtat

SEQ ID NO: 445548 - DNA, 15 bp, Homo sapiens
atgaggccagctgta

SEQ ID NO: 445549 - DNA, 15 bp, Homo sapiens
tatgaggccagctgt

SEQ ID NO: 445550 - DNA, 15 bp, Homo sapiens
ctatgaggccagctg

SEQ ID NO: 445551 - DNA, 15 bp, Homo sapiens
gctatgaggccagct

SEQ ID NO: 445552 - DNA, 15 bp, Homo sapiens
cgctatgaggccagc

SEQ ID NO: 445553 - DNA, 15 bp, Homo sapiens
gcgctatgaggccag

SEQ ID NO: 445554 - DNA, 15 bp, Homo sapiens
ggcgctatgaggcca

SEQ ID NO: 445555 - DNA, 15 bp, Homo sapiens
aggcgctatgaggcc

SEQ ID NO: 445556 - DNA, 15 bp, Homo sapiens
caggcgctatgaggc

SEQ ID NO: 445557 - DNA, 15 bp, Homo sapiens
acaggcgctatgagg

SEQ ID NO: 445558 - DNA, 15 bp, Homo sapiens
tacaggcgctatgag

SEQ ID NO: 445559 - DNA, 15 bp, Homo sapiens
gtacaggcgctatga

SEQ ID NO: 445560 - DNA, 15 bp, Homo sapiens
ggtacaggcgctatg

SEQ ID NO: 445561 - DNA, 15 bp, Homo sapiens
aggtacaggcgctat

SEQ ID NO: 445562 - DNA, 15 bp, Homo sapiens
taggtacaggcgcta

SEQ ID NO: 445563 - DNA, 15 bp, Homo sapiens
gtaggtacaggcgct

SEQ ID NO: 445564 - DNA, 15 bp, Homo sapiens
cgtaggtacaggcgc

SEQ ID NO: 445565 - DNA, 15 bp, Homo sapiens
ccgtaggtacaggcg

SEQ ID NO: 445566 - DNA, 15 bp, Homo sapiens
cccgtaggtacaggc

SEQ ID NO: 445567 - DNA, 15 bp, Homo sapiens
gcccgtaggtacagg

SEQ ID NO: 445568 - DNA, 15 bp, Homo sapiens
tgcccgtaggtacag

SEQ ID NO: 445569 - DNA, 15 bp, Homo sapiens
ctgcccgtaggtaca

SEQ ID NO: 445570 - DNA, 15 bp, Homo sapiens
tctgcccgtaggtac

SEQ ID NO: 445571 - DNA, 15 bp, Homo sapiens
gtctgcccgtaggta

SEQ ID NO: 445572 - DNA, 15 bp, Homo sapiens
ggtctgcccgtaggt

SEQ ID NO: 445573 - DNA, 15 bp, Homo sapiens
gggtctgcccgtagg

SEQ ID NO: 445574 - DNA, 15 bp, Homo sapiens
agggtctgcccgtag

SEQ ID NO: 445575 - DNA, 15 bp, Homo sapiens
cagggtctgcccgta

SEQ ID NO: 445576 - DNA, 15 bp, Homo sapiens
gcagggtctgcccgt

SEQ ID NO: 445577 - DNA, 15 bp, Homo sapiens
agcagggtctgcccg

SEQ ID NO: 445578 - DNA, 15 bp, Homo sapiens
gagcagggtctgccc

SEQ ID NO: 445579 - DNA, 15 bp, Homo sapiens
agagcagggtctgcc

SEQ ID NO: 445580 - DNA, 15 bp, Homo sapiens
cagagcagggtctgc

SEQ ID NO: 445581 - DNA, 15 bp, Homo sapiens
acagagcagggtctg

SEQ ID NO: 445582 - DNA, 15 bp, Homo sapiens
cacagagcagggtct

SEQ ID NO: 445583 - DNA, 15 bp, Homo sapiens
acacagagcagggtc

SEQ ID NO: 445584 - DNA, 15 bp, Homo sapiens
cacacagagcagggt

SEQ ID NO: 445585 - DNA, 15 bp, Homo sapiens
acacacagagcaggg

SEQ ID NO: 445586 - DNA, 15 bp, Homo sapiens
gacacacagagcagg

SEQ ID NO: 445587 - DNA, 15 bp, Homo sapiens
agacacacagagcag

SEQ ID NO: 445588 - DNA, 15 bp, Homo sapiens
aagacacacagagca

SEQ ID NO: 445589 - DNA, 15 bp, Homo sapiens
aaagacacacagagc

SEQ ID NO: 445590 - DNA, 15 bp, Homo sapiens
aaaagacacacagag

SEQ ID NO: 445591 - DNA, 15 bp, Homo sapiens
gaaaagacacacaga

SEQ ID NO: 445592 - DNA, 15 bp, Homo sapiens
ggaaaagacacacag

SEQ ID NO: 445593 - DNA, 15 bp, Homo sapiens
gggaaaagacacaca

SEQ ID NO: 445594 - DNA, 15 bp, Homo sapiens
agggaaaagacacac

SEQ ID NO: 445595 - DNA, 15 bp, Homo sapiens
aagggaaaagacaca

SEQ ID NO: 445596 - DNA, 15 bp, Homo sapiens
gaagggaaaagacac

SEQ ID NO: 445597 - DNA, 15 bp, Homo sapiens
cgaagggaaaagaca

SEQ ID NO: 445598 - DNA, 15 bp, Homo sapiens
gcgaagggaaaagac

SEQ ID NO: 445599 - DNA, 15 bp, Homo sapiens
agcgaagggaaaaga

SEQ ID NO: 445600 - DNA, 15 bp, Homo sapiens
gagcgaagggaaaag

SEQ ID NO: 445601 - DNA, 15 bp, Homo sapiens
tgagcgaagggaaaa

SEQ ID NO: 445602 - DNA, 15 bp, Homo sapiens
ctgagcgaagggaaa

SEQ ID NO: 445603 - DNA, 15 bp, Homo sapiens
actgagcgaagggaa

SEQ ID NO: 445604 - DNA, 15 bp, Homo sapiens
aactgagcgaaggga

SEQ ID NO: 445605 - DNA, 15 bp, Homo sapiens
gaactgagcgaaggg

SEQ ID NO: 445606 - DNA, 15 bp, Homo sapiens
agaactgagcgaagg

SEQ ID NO: 445607 - DNA, 15 bp, Homo sapiens
gagaactgagcgaag

SEQ ID NO: 445608 - DNA, 15 bp, Homo sapiens
cgagaactgagcgaa

SEQ ID NO: 445609 - DNA, 15 bp, Homo sapiens
tcgagaactgagcga

SEQ ID NO: 445610 - DNA, 15 bp, Homo sapiens
ttcgagaactgagcg

SEQ ID NO: 445611 - DNA, 15 bp, Homo sapiens
cttcgagaactgagc

SEQ ID NO: 445612 - DNA, 15 bp, Homo sapiens
tcttcgagaactgag

SEQ ID NO: 445613 - DNA, 15 bp, Homo sapiens
atcttcgagaactga

SEQ ID NO: 445614 - DNA, 15 bp, Homo sapiens
catcttcgagaactg

SEQ ID NO: 445615 - DNA, 15 bp, Homo sapiens
ccatcttcgagaact

SEQ ID NO: 445616 - DNA, 15 bp, Homo sapiens
cccatcttcgagaac

SEQ ID NO: 445617 - DNA, 15 bp, Homo sapiens
acccatcttcgagaa

SEQ ID NO: 445618 - DNA, 15 bp, Homo sapiens
tacccatcttcgaga

SEQ ID NO: 445619 - DNA, 15 bp, Homo sapiens
ttacccatcttcgag

SEQ ID NO: 445620 - DNA, 15 bp, Homo sapiens
cttacccatcttcga

SEQ ID NO: 445621 - DNA, 15 bp, Homo sapiens
acttacccatcttcg

SEQ ID NO: 445622 - DNA, 15 bp, Homo sapiens
gacttacccatcttc

SEQ ID NO: 445623 - DNA, 15 bp, Homo sapiens
cgacttacccatctt

SEQ ID NO: 445624 - DNA, 15 bp, Homo sapiens
tcgacttacccatct

SEQ ID NO: 445625 - DNA, 15 bp, Homo sapiens
ctcgacttacccatc

SEQ ID NO: 445626 - DNA, 15 bp, Homo sapiens
actcgacttacccat

SEQ ID NO: 445627 - DNA, 15 bp, Homo sapiens
gactcgacttaccca

SEQ ID NO: 445628 - DNA, 15 bp, Homo sapiens
tgactcgacttaccc

SEQ ID NO: 445629 - DNA, 15 bp, Homo sapiens
ctgactcgacttacc

SEQ ID NO: 445630 - DNA, 15 bp, Homo sapiens
cctgactcgacttac

SEQ ID NO: 445631 - DNA, 15 bp, Homo sapiens
ccctgactcgactta

SEQ ID NO: 445632 - DNA, 15 bp, Homo sapiens
tccctgactcgactt

SEQ ID NO: 445633 - DNA, 15 bp, Homo sapiens
gtccctgactcgact

SEQ ID NO: 445634 - DNA, 15 bp, Homo sapiens
tgtccctgactcgac

SEQ ID NO: 445635 - DNA, 15 bp, Homo sapiens
gtgtccctgactcga

SEQ ID NO: 445636 - DNA, 15 bp, Homo sapiens
tgtgtccctgactcg

SEQ ID NO: 445637 - DNA, 15 bp, Homo sapiens
ctgtgtccctgactc

SEQ ID NO: 445638 - DNA, 15 bp, Homo sapiens
cctgtgtccctgact

SEQ ID NO: 445639 - DNA, 15 bp, Homo sapiens
tcctgtgtccctgac

SEQ ID NO: 445640 - DNA, 15 bp, Homo sapiens
atcctgtgtccctga

SEQ ID NO: 445641 - DNA, 15 bp, Homo sapiens
catcctgtgtccctg

SEQ ID NO: 445642 - DNA, 15 bp, Homo sapiens
tcatcctgtgtccct

SEQ ID NO: 445643 - DNA, 15 bp, Homo sapiens
ctcatcctgtgtccc

SEQ ID NO: 445644 - DNA, 15 bp, Homo sapiens
actcatcctgtgtcc

SEQ ID NO: 445645 - DNA, 15 bp, Homo sapiens
gactcatcctgtgtc

SEQ ID NO: 445646 - DNA, 15 bp, Homo sapiens
ggactcatcctgtgt

SEQ ID NO: 445647 - DNA, 15 bp, Homo sapiens
aggactcatcctgtg

SEQ ID NO: 445648 - DNA, 15 bp, Homo sapiens
caggactcatcctgt

SEQ ID NO: 445649 - DNA, 15 bp, Homo sapiens
ccaggactcatcctg

SEQ ID NO: 445650 - DNA, 15 bp, Homo sapiens
cccaggactcatcct

SEQ ID NO: 445651 - DNA, 15 bp, Homo sapiens
acccaggactcatcc

SEQ ID NO: 445652 - DNA, 15 bp, Homo sapiens
aacccaggactcatc

SEQ ID NO: 445653 - DNA, 15 bp, Homo sapiens
aaacccaggactcat

SEQ ID NO: 445654 - DNA, 15 bp, Homo sapiens
taaacccaggactca

SEQ ID NO: 445655 - DNA, 15 bp, Homo sapiens
gtaaacccaggactc

SEQ ID NO: 445656 - DNA, 15 bp, Homo sapiens
agtaaacccaggact

SEQ ID NO: 445657 - DNA, 15 bp, Homo sapiens
cagtaaacccaggac

SEQ ID NO: 445658 - DNA, 15 bp, Homo sapiens
tcagtaaacccagga

SEQ ID NO: 445659 - DNA, 15 bp, Homo sapiens
gtcagtaaacccagg

SEQ ID NO: 445660 - DNA, 15 bp, Homo sapiens
ggtcagtaaacccag

SEQ ID NO: 445661 - DNA, 15 bp, Homo sapiens
tggtcagtaaaccca

SEQ ID NO: 445662 - DNA, 15 bp, Homo sapiens
ctggtcagtaaaccc

SEQ ID NO: 445663 - DNA, 15 bp, Homo sapiens
tctggtcagtaaacc

SEQ ID NO: 445664 - DNA, 15 bp, Homo sapiens
ttctggtcagtaaac

SEQ ID NO: 445665 - DNA, 15 bp, Homo sapiens
gttctggtcagtaaa

SEQ ID NO: 445666 - DNA, 15 bp, Homo sapiens
ggttctggtcagtaa

SEQ ID NO: 445667 - DNA, 15 bp, Homo sapiens
aggttctggtcagta

SEQ ID NO: 445668 - DNA, 15 bp, Homo sapiens
caggttctggtcagt

SEQ ID NO: 445669 - DNA, 15 bp, Homo sapiens
ccaggttctggtcag

SEQ ID NO: 445670 - DNA, 15 bp, Homo sapiens
tccaggttctggtca

SEQ ID NO: 445671 - DNA, 15 bp, Homo sapiens
ttccaggttctggtc

SEQ ID NO: 445672 - DNA, 15 bp, Homo sapiens
gttccaggttctggt

SEQ ID NO: 445673 - DNA, 15 bp, Homo sapiens
cgttccaggttctgg

SEQ ID NO: 445674 - DNA, 15 bp, Homo sapiens
tcgttccaggttctg

SEQ ID NO: 445675 - DNA, 15 bp, Homo sapiens
atcgttccaggttct

SEQ ID NO: 445676 - DNA, 15 bp, Homo sapiens
gatcgttccaggttc

SEQ ID NO: 445677 - DNA, 15 bp, Homo sapiens
agatcgttccaggtt

SEQ ID NO: 445678 - DNA, 15 bp, Homo sapiens
aagatcgttccaggt

SEQ ID NO: 445679 - DNA, 15 bp, Homo sapiens
caagatcgttccagg

SEQ ID NO: 445680 - DNA, 15 bp, Homo sapiens
gcaagatcgttccag

SEQ ID NO: 445681 - DNA, 15 bp, Homo sapiens
tgcaagatcgttcca

SEQ ID NO: 445682 - DNA, 15 bp, Homo sapiens
atgcaagatcgttcc

SEQ ID NO: 445683 - DNA, 15 bp, Homo sapiens
aatgcaagatcgttc

SEQ ID NO: 445684 - DNA, 15 bp, Homo sapiens
aaatgcaagatcgtt

SEQ ID NO: 445685 - DNA, 15 bp, Homo sapiens
gaaatgcaagatcgt

SEQ ID NO: 445686 - DNA, 15 bp, Homo sapiens
ggaaatgcaagatcg

SEQ ID NO: 445687 - DNA, 15 bp, Homo sapiens
aggaaatgcaagatc

SEQ ID NO: 445688 - DNA, 15 bp, Homo sapiens
gaggaaatgcaagat

SEQ ID NO: 445689 - DNA, 15 bp, Homo sapiens
ggaggaaatgcaaga

SEQ ID NO: 445690 - DNA, 15 bp, Homo sapiens
aggaggaaatgcaag

SEQ ID NO: 445691 - DNA, 15 bp, Homo sapiens
gaggaggaaatgcaa

SEQ ID NO: 445692 - DNA, 15 bp, Homo sapiens
ggaggaggaaatgca

SEQ ID NO: 445693 - DNA, 15 bp, Homo sapiens
gggaggaggaaatgc

SEQ ID NO: 445694 - DNA, 15 bp, Homo sapiens
ggggaggaggaaatg

SEQ ID NO: 445695 - DNA, 15 bp, Homo sapiens
aggggaggaggaaat

SEQ ID NO: 445696 - DNA, 15 bp, Homo sapiens
aaggggaggaggaaa

SEQ ID NO: 445697 - DNA, 15 bp, Homo sapiens
caaggggaggaggaa

SEQ ID NO: 445698 - DNA, 15 bp, Homo sapiens
acaaggggaggagga

SEQ ID NO: 445699 - DNA, 15 bp, Homo sapiens
gacaaggggaggagg

SEQ ID NO: 445700 - DNA, 15 bp, Homo sapiens
ggacaaggggaggag

SEQ ID NO: 445701 - DNA, 15 bp, Homo sapiens
aggacaaggggagga

SEQ ID NO: 445702 - DNA, 15 bp, Homo sapiens
gaggacaaggggagg

SEQ ID NO: 445703 - DNA, 15 bp, Homo sapiens
ggaggacaaggggag

SEQ ID NO: 445704 - DNA, 15 bp, Homo sapiens
tggaggacaagggga

SEQ ID NO: 445705 - DNA, 15 bp, Homo sapiens
ctggaggacaagggg

SEQ ID NO: 445706 - DNA, 15 bp, Homo sapiens
cctggaggacaaggg

SEQ ID NO: 445707 - DNA, 15 bp, Homo sapiens
gcctggaggacaagg

SEQ ID NO: 445708 - DNA, 15 bp, Homo sapiens
tgcctggaggacaag

SEQ ID NO: 445709 - DNA, 15 bp, Homo sapiens
ttgcctggaggacaa

SEQ ID NO: 445710 - DNA, 15 bp, Homo sapiens
cttgcctggaggaca

SEQ ID NO: 445711 - DNA, 15 bp, Homo sapiens
gcttgcctggaggac

SEQ ID NO: 445712 - DNA, 15 bp, Homo sapiens
tgcttgcctggagga

SEQ ID NO: 445713 - DNA, 15 bp, Homo sapiens
ctgcttgcctggagg

SEQ ID NO: 445714 - DNA, 15 bp, Homo sapiens
gctgcttgcctggag

SEQ ID NO: 445715 - DNA, 15 bp, Homo sapiens
agctgcttgcctgga

SEQ ID NO: 445716 - DNA, 15 bp, Homo sapiens
cagctgcttgcctgg

SEQ ID NO: 445717 - DNA, 15 bp, Homo sapiens
tcagctgcttgcctg

SEQ ID NO: 445718 - DNA, 15 bp, Homo sapiens
gtcagctgcttgcct

SEQ ID NO: 445719 - DNA, 15 bp, Homo sapiens
ggtcagctgcttgcc

SEQ ID NO: 445720 - DNA, 15 bp, Homo sapiens
aggtcagctgcttgc

SEQ ID NO: 445721 - DNA, 15 bp, Homo sapiens
taggtcagctgcttg

SEQ ID NO: 445722 - DNA, 15 bp, Homo sapiens
gtaggtcagctgctt

SEQ ID NO: 445723 - DNA, 15 bp, Homo sapiens
tgtaggtcagctgct

SEQ ID NO: 445724 - DNA, 15 bp, Homo sapiens
gtgtaggtcagctgc

SEQ ID NO: 445725 - DNA, 15 bp, Homo sapiens
ggtgtaggtcagctg

SEQ ID NO: 445726 - DNA, 15 bp, Homo sapiens
aggtgtaggtcagct

SEQ ID NO: 445727 - DNA, 15 bp, Homo sapiens
taggtgtaggtcagc

SEQ ID NO: 445728 - DNA, 15 bp, Homo sapiens
gtaggtgtaggtcag

SEQ ID NO: 445729 - DNA, 15 bp, Homo sapiens
ggtaggtgtaggtca

SEQ ID NO: 445730 - DNA, 15 bp, Homo sapiens
gggtaggtgtaggtc

SEQ ID NO: 445731 - DNA, 15 bp, Homo sapiens
ggggtaggtgtaggt

SEQ ID NO: 445732 - DNA, 15 bp, Homo sapiens
aggggtaggtgtagg

SEQ ID NO: 445733 - DNA, 15 bp, Homo sapiens
caggggtaggtgtag

SEQ ID NO: 445734 - DNA, 15 bp, Homo sapiens
ccaggggtaggtgta

SEQ ID NO: 445735 - DNA, 15 bp, Homo sapiens
cccaggggtaggtgt

SEQ ID NO: 445736 - DNA, 15 bp, Homo sapiens
acccaggggtaggtg

SEQ ID NO: 445737 - DNA, 15 bp, Homo sapiens
gacccaggggtaggt

SEQ ID NO: 445738 - DNA, 15 bp, Homo sapiens
agacccaggggtagg

SEQ ID NO: 445739 - DNA, 15 bp, Homo sapiens
tagacccaggggtag

SEQ ID NO: 445740 - DNA, 15 bp, Homo sapiens
atagacccaggggta

SEQ ID NO: 445741 - DNA, 15 bp, Homo sapiens
tatagacccaggggt

SEQ ID NO: 445742 - DNA, 15 bp, Homo sapiens
ttatagacccagggg

SEQ ID NO: 445743 - DNA, 15 bp, Homo sapiens
gttatagacccaggg

SEQ ID NO: 445744 - DNA, 15 bp, Homo sapiens
agttatagacccagg

SEQ ID NO: 445745 - DNA, 15 bp, Homo sapiens
tagttatagacccag

SEQ ID NO: 445746 - DNA, 15 bp, Homo sapiens
gtagttatagaccca

SEQ ID NO: 445747 - DNA, 15 bp, Homo sapiens
ggtagttatagaccc

SEQ ID NO: 445748 - DNA, 15 bp, Homo sapiens
tggtagttatagacc

SEQ ID NO: 445749 - DNA, 15 bp, Homo sapiens
ctggtagttatagac

SEQ ID NO: 445750 - DNA, 15 bp, Homo sapiens
gctggtagttataga

SEQ ID NO: 445751 - DNA, 15 bp, Homo sapiens
agctggtagttatag

SEQ ID NO: 445752 - DNA, 15 bp, Homo sapiens
cagctggtagttata

SEQ ID NO: 445753 - DNA, 15 bp, Homo sapiens
ccagctggtagttat

SEQ ID NO: 445754 - DNA, 15 bp, Homo sapiens
tccagctggtagtta

SEQ ID NO: 445755 - DNA, 15 bp, Homo sapiens
ttccagctggtagtt

SEQ ID NO: 445756 - DNA, 15 bp, Homo sapiens
cttccagctggtagt

SEQ ID NO: 445757 - DNA, 15 bp, Homo sapiens
ccttccagctggtag

SEQ ID NO: 445758 - DNA, 15 bp, Homo sapiens
cccttccagctggta

SEQ ID NO: 445759 - DNA, 15 bp, Homo sapiens
tcccttccagctggt

SEQ ID NO: 445760 - DNA, 15 bp, Homo sapiens
atcccttccagctgg

SEQ ID NO: 445761 - DNA, 15 bp, Homo sapiens
gatcccttccagctg

SEQ ID NO: 445762 - DNA, 15 bp, Homo sapiens
agatcccttccagct

SEQ ID NO: 445763 - DNA, 15 bp, Homo sapiens
aagatcccttccagc

SEQ ID NO: 445764 - DNA, 15 bp, Homo sapiens
aaagatcccttccag

SEQ ID NO: 445765 - DNA, 15 bp, Homo sapiens
caaagatcccttcca

SEQ ID NO: 445766 - DNA, 15 bp, Homo sapiens
gcaaagatcccttcc

SEQ ID NO: 445767 - DNA, 15 bp, Homo sapiens
ggcaaagatcccttc

SEQ ID NO: 445768 - DNA, 15 bp, Homo sapiens
gggcaaagatccctt

SEQ ID NO: 445769 - DNA, 15 bp, Homo sapiens
tgggcaaagatccct

SEQ ID NO: 445770 - DNA, 15 bp, Homo sapiens
ctgggcaaagatccc

SEQ ID NO: 445771 - DNA, 15 bp, Homo sapiens
cctgggcaaagatcc

SEQ ID NO: 445772 - DNA, 15 bp, Homo sapiens
tcctgggcaaagatc

SEQ ID NO: 445773 - DNA, 15 bp, Homo sapiens
ttcctgggcaaagat

SEQ ID NO: 445774 - DNA, 15 bp, Homo sapiens
attcctgggcaaaga

SEQ ID NO: 445775 - DNA, 15 bp, Homo sapiens
aattcctgggcaaag

SEQ ID NO: 445776 - DNA, 15 bp, Homo sapiens
gaattcctgggcaaa

SEQ ID NO: 445777 - DNA, 15 bp, Homo sapiens
ggaattcctgggcaa

SEQ ID NO: 445778 - DNA, 15 bp, Homo sapiens
gggaattcctgggca

SEQ ID NO: 445779 - DNA, 15 bp, Homo sapiens
ggggaattcctgggc

SEQ ID NO: 445780 - DNA, 15 bp, Homo sapiens
cggggaattcctggg

SEQ ID NO: 445781 - DNA, 15 bp, Homo sapiens
tcggggaattcctgg

SEQ ID NO: 445782 - DNA, 15 bp, Homo sapiens
gtcggggaattcctg

SEQ ID NO: 445783 - DNA, 15 bp, Homo sapiens
agtcggggaattcct

SEQ ID NO: 445784 - DNA, 15 bp, Homo sapiens
aagtcggggaattcc

SEQ ID NO: 445785 - DNA, 15 bp, Homo sapiens
caagtcggggaattc

SEQ ID NO: 445786 - DNA, 15 bp, Homo sapiens
ccaagtcggggaatt

SEQ ID NO: 445787 - DNA, 15 bp, Homo sapiens
tccaagtcggggaat

SEQ ID NO: 445788 - DNA, 15 bp, Homo sapiens
ctccaagtcggggaa

SEQ ID NO: 445789 - DNA, 15 bp, Homo sapiens
tctccaagtcgggga

SEQ ID NO: 445790 - DNA, 15 bp, Homo sapiens
ttctccaagtcgggg

SEQ ID NO: 445791 - DNA, 15 bp, Homo sapiens
attctccaagtcggg

SEQ ID NO: 445792 - DNA, 15 bp, Homo sapiens
cattctccaagtcgg

SEQ ID NO: 445793 - DNA, 15 bp, Homo sapiens
acattctccaagtcg

SEQ ID NO: 445794 - DNA, 15 bp, Homo sapiens
cacattctccaagtc

SEQ ID NO: 445795 - DNA, 15 bp, Homo sapiens
ccacattctccaagt

SEQ ID NO: 445796 - DNA, 15 bp, Homo sapiens
accacattctccaag

SEQ ID NO: 445797 - DNA, 15 bp, Homo sapiens
gaccacattctccaa

SEQ ID NO: 445798 - DNA, 15 bp, Homo sapiens
tgaccacattctcca

SEQ ID NO: 445799 - DNA, 15 bp, Homo sapiens
ttgaccacattctcc

SEQ ID NO: 445800 - DNA, 15 bp, Homo sapiens
cttgaccacattctc

SEQ ID NO: 445801 - DNA, 15 bp, Homo sapiens
ccttgaccacattct

SEQ ID NO: 445802 - DNA, 15 bp, Homo sapiens
cccttgaccacattc

SEQ ID NO: 445803 - DNA, 15 bp, Homo sapiens
gcccttgaccacatt

SEQ ID NO: 445804 - DNA, 15 bp, Homo sapiens
ggcccttgaccacat

SEQ ID NO: 445805 - DNA, 15 bp, Homo sapiens
tggcccttgaccaca

SEQ ID NO: 445806 - DNA, 15 bp, Homo sapiens
gtggcccttgaccac

SEQ ID NO: 445807 - DNA, 15 bp, Homo sapiens
ggtggcccttgacca

SEQ ID NO: 445808 - DNA, 15 bp, Homo sapiens
tggtggcccttgacc

SEQ ID NO: 445809 - DNA, 15 bp, Homo sapiens
gtggtggcccttgac

SEQ ID NO: 445810 - DNA, 15 bp, Homo sapiens
cgtggtggcccttga

SEQ ID NO: 445811 - DNA, 15 bp, Homo sapiens
acgtggtggcccttg

SEQ ID NO: 445812 - DNA, 15 bp, Homo sapiens
aacgtggtggccctt

SEQ ID NO: 445813 - DNA, 15 bp, Homo sapiens
taacgtggtggccct

SEQ ID NO: 445814 - DNA, 15 bp, Homo sapiens
ctaacgtggtggccc

SEQ ID NO: 445815 - DNA, 15 bp, Homo sapiens
gctaacgtggtggcc

SEQ ID NO: 445816 - DNA, 15 bp, Homo sapiens
ggctaacgtggtggc

SEQ ID NO: 445817 - DNA, 15 bp, Homo sapiens
tggctaacgtggtgg

SEQ ID NO: 445818 - DNA, 15 bp, Homo sapiens
ttggctaacgtggtg

SEQ ID NO: 445819 - DNA, 15 bp, Homo sapiens
cttggctaacgtggt

SEQ ID NO: 445820 - DNA, 15 bp, Homo sapiens
tcttggctaacgtgg

SEQ ID NO: 445821 - DNA, 15 bp, Homo sapiens
ttcttggctaacgtg

SEQ ID NO: 445822 - DNA, 15 bp, Homo sapiens
gttcttggctaacgt

SEQ ID NO: 445823 - DNA, 15 bp, Homo sapiens
ggttcttggctaacg

SEQ ID NO: 445824 - DNA, 15 bp, Homo sapiens
gggttcttggctaac

SEQ ID NO: 445825 - DNA, 15 bp, Homo sapiens
agggttcttggctaa

SEQ ID NO: 445826 - DNA, 15 bp, Homo sapiens
cagggttcttggcta

SEQ ID NO: 445827 - DNA, 15 bp, Homo sapiens
ccagggttcttggct

SEQ ID NO: 445828 - DNA, 15 bp, Homo sapiens
tccagggttcttggc

SEQ ID NO: 445829 - DNA, 15 bp, Homo sapiens
ttccagggttcttgg

SEQ ID NO: 445830 - DNA, 15 bp, Homo sapiens
gttccagggttcttg

SEQ ID NO: 445831 - DNA, 15 bp, Homo sapiens
tgttccagggttctt

SEQ ID NO: 445832 - DNA, 15 bp, Homo sapiens
ctgttccagggttct

SEQ ID NO: 445833 - DNA, 15 bp, Homo sapiens
gctgttccagggttc

SEQ ID NO: 445834 - DNA, 15 bp, Homo sapiens
tgctgttccagggtt

SEQ ID NO: 445835 - DNA, 15 bp, Homo sapiens
ctgctgttccagggt

SEQ ID NO: 445836 - DNA, 15 bp, Homo sapiens
gctgctgttccaggg

SEQ ID NO: 445837 - DNA, 15 bp, Homo sapiens
tgctgctgttccagg

SEQ ID NO: 445838 - DNA, 15 bp, Homo sapiens
atgctgctgttccag

SEQ ID NO: 445839 - DNA, 15 bp, Homo sapiens
gatgctgctgttcca

SEQ ID NO: 445840 - DNA, 15 bp, Homo sapiens
tgatgctgctgttcc

SEQ ID NO: 445841 - DNA, 15 bp, Homo sapiens
gtgatgctgctgttc

SEQ ID NO: 445842 - DNA, 15 bp, Homo sapiens
tgtgatgctgctgtt

SEQ ID NO: 445843 - DNA, 15 bp, Homo sapiens
gtgtgatgctgctgt

SEQ ID NO: 445844 - DNA, 15 bp, Homo sapiens
agtgtgatgctgctg

SEQ ID NO: 445845 - DNA, 15 bp, Homo sapiens
gagtgtgatgctgct

SEQ ID NO: 445846 - DNA, 15 bp, Homo sapiens
tgagtgtgatgctgc

SEQ ID NO: 445847 - DNA, 15 bp, Homo sapiens
gtgagtgtgatgctg

SEQ ID NO: 445848 - DNA, 15 bp, Homo sapiens
tgtgagtgtgatgct

SEQ ID NO: 445849 - DNA, 15 bp, Homo sapiens
atgtgagtgtgatgc

SEQ ID NO: 445850 - DNA, 15 bp, Homo sapiens
gatgtgagtgtgatg

SEQ ID NO: 445851 - DNA, 15 bp, Homo sapiens
ggatgtgagtgtgat

SEQ ID NO: 445852 - DNA, 15 bp, Homo sapiens
gggatgtgagtgtga

SEQ ID NO: 445853 - DNA, 15 bp, Homo sapiens
tgggatgtgagtgtg

SEQ ID NO: 445854 - DNA, 15 bp, Homo sapiens
ctgggatgtgagtgt

SEQ ID NO: 445855 - DNA, 15 bp, Homo sapiens
cctgggatgtgagtg

SEQ ID NO: 445856 - DNA, 15 bp, Homo sapiens
gcctgggatgtgagt

SEQ ID NO: 445857 - DNA, 15 bp, Homo sapiens
ggcctgggatgtgag

SEQ ID NO: 445858 - DNA, 15 bp, Homo sapiens
cggcctgggatgtga

SEQ ID NO: 445859 - DNA, 15 bp, Homo sapiens
ccggcctgggatgtg

SEQ ID NO: 445860 - DNA, 15 bp, Homo sapiens
cccggcctgggatgt

SEQ ID NO: 445861 - DNA, 15 bp, Homo sapiens
ccccggcctgggatg

SEQ ID NO: 445862 - DNA, 15 bp, Homo sapiens
gccccggcctgggat

SEQ ID NO: 445863 - DNA, 15 bp, Homo sapiens
agccccggcctggga

SEQ ID NO: 445864 - DNA, 15 bp, Homo sapiens
cagccccggcctggg

SEQ ID NO: 445865 - DNA, 15 bp, Homo sapiens
acagccccggcctgg

SEQ ID NO: 445866 - DNA, 15 bp, Homo sapiens
aacagccccggcctg

SEQ ID NO: 445867 - DNA, 15 bp, Homo sapiens
aaacagccccggcct

SEQ ID NO: 445868 - DNA, 15 bp, Homo sapiens
aaaacagccccggcc

SEQ ID NO: 445869 - DNA, 15 bp, Homo sapiens
gaaaacagccccggc

SEQ ID NO: 445870 - DNA, 15 bp, Homo sapiens
ggaaaacagccccgg

SEQ ID NO: 445871 - DNA, 15 bp, Homo sapiens
tggaaaacagccccg

SEQ ID NO: 445872 - DNA, 15 bp, Homo sapiens
ctggaaaacagcccc

SEQ ID NO: 445873 - DNA, 15 bp, Homo sapiens
tctggaaaacagccc

SEQ ID NO: 445874 - DNA, 15 bp, Homo sapiens
ctctggaaaacagcc

SEQ ID NO: 445875 - DNA, 15 bp, Homo sapiens
gctctggaaaacagc

SEQ ID NO: 445876 - DNA, 15 bp, Homo sapiens
agctctggaaaacag

SEQ ID NO: 445877 - DNA, 15 bp, Homo sapiens
aagctctggaaaaca

SEQ ID NO: 445878 - DNA, 15 bp, Homo sapiens
aaagctctggaaaac

SEQ ID NO: 445879 - DNA, 15 bp, Homo sapiens
caaagctctggaaaa

SEQ ID NO: 445880 - DNA, 15 bp, Homo sapiens
gcaaagctctggaaa

SEQ ID NO: 445881 - DNA, 15 bp, Homo sapiens
ggcaaagctctggaa

SEQ ID NO: 445882 - DNA, 15 bp, Homo sapiens
tggcaaagctctgga

SEQ ID NO: 445883 - DNA, 15 bp, Homo sapiens
ttggcaaagctctgg

SEQ ID NO: 445884 - DNA, 15 bp, Homo sapiens
cttggcaaagctctg

SEQ ID NO: 445885 - DNA, 15 bp, Homo sapiens
acttggcaaagctct

SEQ ID NO: 445886 - DNA, 15 bp, Homo sapiens
aacttggcaaagctc

SEQ ID NO: 445887 - DNA, 15 bp, Homo sapiens
gaacttggcaaagct

SEQ ID NO: 445888 - DNA, 15 bp, Homo sapiens
tgaacttggcaaagc

SEQ ID NO: 445889 - DNA, 15 bp, Homo sapiens
ctgaacttggcaaag

SEQ ID NO: 445890 - DNA, 15 bp, Homo sapiens
gctgaacttggcaaa

SEQ ID NO: 445891 - DNA, 15 bp, Homo sapiens
tgctgaacttggcaa

SEQ ID NO: 445892 - DNA, 15 bp, Homo sapiens
ttgctgaacttggca

SEQ ID NO: 445893 - DNA, 15 bp, Homo sapiens
tttgctgaacttggc

SEQ ID NO: 445894 - DNA, 15 bp, Homo sapiens
atttgctgaacttgg

SEQ ID NO: 445895 - DNA, 15 bp, Homo sapiens
aatttgctgaacttg

SEQ ID NO: 445896 - DNA, 15 bp, Homo sapiens
aaatttgctgaactt

SEQ ID NO: 445897 - DNA, 15 bp, Homo sapiens
caaatttgctgaact

SEQ ID NO: 445898 - DNA, 15 bp, Homo sapiens
ccaaatttgctgaac

SEQ ID NO: 445899 - DNA, 15 bp, Homo sapiens
tccaaatttgctgaa

SEQ ID NO: 445900 - DNA, 15 bp, Homo sapiens
ctccaaatttgctga

SEQ ID NO: 445901 - DNA, 15 bp, Homo sapiens
tctccaaatttgctg

SEQ ID NO: 445902 - DNA, 15 bp, Homo sapiens
atctccaaatttgct

SEQ ID NO: 445903 - DNA, 15 bp, Homo sapiens
catctccaaatttgc

SEQ ID NO: 445904 - DNA, 15 bp, Homo sapiens
ccatctccaaatttg

SEQ ID NO: 445905 - DNA, 15 bp, Homo sapiens
accatctccaaattt

SEQ ID NO: 445906 - DNA, 15 bp, Homo sapiens
caccatctccaaatt

SEQ ID NO: 445907 - DNA, 15 bp, Homo sapiens
tcaccatctccaaat

SEQ ID NO: 445908 - DNA, 15 bp, Homo sapiens
ctcaccatctccaaa

SEQ ID NO: 445909 - DNA, 15 bp, Homo sapiens
actcaccatctccaa

SEQ ID NO: 445910 - DNA, 15 bp, Homo sapiens
gactcaccatctcca

SEQ ID NO: 445911 - DNA, 15 bp, Homo sapiens
agactcaccatctcc

SEQ ID NO: 445912 - DNA, 15 bp, Homo sapiens
gagactcaccatctc

SEQ ID NO: 445913 - DNA, 15 bp, Homo sapiens
tgagactcaccatct

SEQ ID NO: 445914 - DNA, 15 bp, Homo sapiens
ttgagactcaccatc

SEQ ID NO: 445915 - DNA, 15 bp, Homo sapiens
cttgagactcaccat

SEQ ID NO: 445916 - DNA, 15 bp, Homo sapiens
ccttgagactcacca

SEQ ID NO: 445917 - DNA, 15 bp, Homo sapiens
accttgagactcacc

SEQ ID NO: 445918 - DNA, 15 bp, Homo sapiens
aaccttgagactcac

SEQ ID NO: 445919 - DNA, 15 bp, Homo sapiens
caaccttgagactca

SEQ ID NO: 445920 - DNA, 15 bp, Homo sapiens
tcaaccttgagactc

SEQ ID NO: 445921 - DNA, 15 bp, Homo sapiens
ctcaaccttgagact

SEQ ID NO: 445922 - DNA, 15 bp, Homo sapiens
cctcaaccttgagac

SEQ ID NO: 445923 - DNA, 15 bp, Homo sapiens
ccctcaaccttgaga

SEQ ID NO: 445924 - DNA, 15 bp, Homo sapiens
accctcaaccttgag

SEQ ID NO: 445925 - DNA, 15 bp, Homo sapiens
aaccctcaaccttga

SEQ ID NO: 445926 - DNA, 15 bp, Homo sapiens
caaccctcaaccttg

SEQ ID NO: 445927 - DNA, 15 bp, Homo sapiens
ccaaccctcaacctt

SEQ ID NO: 445928 - DNA, 15 bp, Homo sapiens
tccaaccctcaacct

SEQ ID NO: 445929 - DNA, 15 bp, Homo sapiens
ctccaaccctcaacc

SEQ ID NO: 445930 - DNA, 15 bp, Homo sapiens
tctccaaccctcaac

SEQ ID NO: 445931 - DNA, 15 bp, Homo sapiens
ctctccaaccctcaa

SEQ ID NO: 445932 - DNA, 15 bp, Homo sapiens
gctctccaaccctca

SEQ ID NO: 445933 - DNA, 15 bp, Homo sapiens
agctctccaaccctc

SEQ ID NO: 445934 - DNA, 15 bp, Homo sapiens
gagctctccaaccct

SEQ ID NO: 445935 - DNA, 15 bp, Homo sapiens
ggagctctccaaccc

SEQ ID NO: 445936 - DNA, 15 bp, Homo sapiens
aggagctctccaacc

SEQ ID NO: 445937 - DNA, 15 bp, Homo sapiens
aaggagctctccaac

SEQ ID NO: 445938 - DNA, 15 bp, Homo sapiens
gaaggagctctccaa

SEQ ID NO: 445939 - DNA, 15 bp, Homo sapiens
agaaggagctctcca

SEQ ID NO: 445940 - DNA, 15 bp, Homo sapiens
gagaaggagctctcc

SEQ ID NO: 445941 - DNA, 15 bp, Homo sapiens
agagaaggagctctc

SEQ ID NO: 445942 - DNA, 15 bp, Homo sapiens
cagagaaggagctct

SEQ ID NO: 445943 - DNA, 15 bp, Homo sapiens
gcagagaaggagctc

SEQ ID NO: 445944 - DNA, 15 bp, Homo sapiens
tgcagagaaggagct

SEQ ID NO: 445945 - DNA, 15 bp, Homo sapiens
ctgcagagaaggagc

SEQ ID NO: 445946 - DNA, 15 bp, Homo sapiens
tctgcagagaaggag

SEQ ID NO: 445947 - DNA, 15 bp, Homo sapiens
gtctgcagagaagga

SEQ ID NO: 445948 - DNA, 15 bp, Homo sapiens
tgtctgcagagaagg

SEQ ID NO: 445949 - DNA, 15 bp, Homo sapiens
ctgtctgcagagaag

SEQ ID NO: 445950 - DNA, 15 bp, Homo sapiens
cctgtctgcagagaa

SEQ ID NO: 445951 - DNA, 15 bp, Homo sapiens
ccctgtctgcagaga

SEQ ID NO: 445952 - DNA, 15 bp, Homo sapiens
accctgtctgcagag

SEQ ID NO: 445953 - DNA, 15 bp, Homo sapiens
caccctgtctgcaga

SEQ ID NO: 445954 - DNA, 15 bp, Homo sapiens
tcaccctgtctgcag

SEQ ID NO: 445955 - DNA, 15 bp, Homo sapiens
gtcaccctgtctgca

SEQ ID NO: 445956 - DNA, 15 bp, Homo sapiens
agtcaccctgtctgc

SEQ ID NO: 445957 - DNA, 15 bp, Homo sapiens
cagtcaccctgtctg

SEQ ID NO: 445958 - DNA, 15 bp, Homo sapiens
ccagtcaccctgtct

SEQ ID NO: 445959 - DNA, 15 bp, Homo sapiens
accagtcaccctgtc

SEQ ID NO: 445960 - DNA, 15 bp, Homo sapiens
caccagtcaccctgt

SEQ ID NO: 445961 - DNA, 15 bp, Homo sapiens
acaccagtcaccctg

SEQ ID NO: 445962 - DNA, 15 bp, Homo sapiens
cacaccagtcaccct

SEQ ID NO: 445963 - DNA, 15 bp, Homo sapiens
ccacaccagtcaccc

SEQ ID NO: 445964 - DNA, 15 bp, Homo sapiens
gccacaccagtcacc

SEQ ID NO: 445965 - DNA, 15 bp, Homo sapiens
ggccacaccagtcac

SEQ ID NO: 445966 - DNA, 15 bp, Homo sapiens
tggccacaccagtca

SEQ ID NO: 445967 - DNA, 15 bp, Homo sapiens
atggccacaccagtc

SEQ ID NO: 445968 - DNA, 15 bp, Homo sapiens
catggccacaccagt

SEQ ID NO: 445969 - DNA, 15 bp, Homo sapiens
ccatggccacaccag

SEQ ID NO: 445970 - DNA, 15 bp, Homo sapiens
gccatggccacacca

SEQ ID NO: 445971 - DNA, 15 bp, Homo sapiens
agccatggccacacc

SEQ ID NO: 445972 - DNA, 15 bp, Homo sapiens
cagccatggccacac

SEQ ID NO: 445973 - DNA, 15 bp, Homo sapiens
tcagccatggccaca

SEQ ID NO: 445974 - DNA, 15 bp, Homo sapiens
ctcagccatggccac

SEQ ID NO: 445975 - DNA, 15 bp, Homo sapiens
actcagccatggcca

SEQ ID NO: 445976 - DNA, 15 bp, Homo sapiens
aactcagccatggcc

SEQ ID NO: 445977 - DNA, 15 bp, Homo sapiens
gaactcagccatggc

SEQ ID NO: 445978 - DNA, 15 bp, Homo sapiens
tgaactcagccatgg

SEQ ID NO: 445979 - DNA, 15 bp, Homo sapiens
ttgaactcagccatg

SEQ ID NO: 445980 - DNA, 15 bp, Homo sapiens
cttgaactcagccat

SEQ ID NO: 445981 - DNA, 15 bp, Homo sapiens
acttgaactcagcca

SEQ ID NO: 445982 - DNA, 15 bp, Homo sapiens
gacttgaactcagcc

SEQ ID NO: 445983 - DNA, 15 bp, Homo sapiens
tgacttgaactcagc

SEQ ID NO: 445984 - DNA, 15 bp, Homo sapiens
ctgacttgaactcag

SEQ ID NO: 445985 - DNA, 15 bp, Homo sapiens
gctgacttgaactca

SEQ ID NO: 445986 - DNA, 15 bp, Homo sapiens
cgctgacttgaactc

SEQ ID NO: 445987 - DNA, 15 bp, Homo sapiens
ccgctgacttgaact

SEQ ID NO: 445988 - DNA, 15 bp, Homo sapiens
accgctgacttgaac

SEQ ID NO: 445989 - DNA, 15 bp, Homo sapiens
taccgctgacttgaa

SEQ ID NO: 445990 - DNA, 15 bp, Homo sapiens
ctaccgctgacttga

SEQ ID NO: 445991 - DNA, 15 bp, Homo sapiens
tctaccgctgacttg

SEQ ID NO: 445992 - DNA, 15 bp, Homo sapiens
ctctaccgctgactt

SEQ ID NO: 445993 - DNA, 15 bp, Homo sapiens
tctctaccgctgact

SEQ ID NO: 445994 - DNA, 15 bp, Homo sapiens
gtctctaccgctgac

SEQ ID NO: 445995 - DNA, 15 bp, Homo sapiens
ggtctctaccgctga

SEQ ID NO: 445996 - DNA, 15 bp, Homo sapiens
tggtctctaccgctg

SEQ ID NO: 445997 - DNA, 15 bp, Homo sapiens
ctggtctctaccgct

SEQ ID NO: 445998 - DNA, 15 bp, Homo sapiens
cctggtctctaccgc

SEQ ID NO: 445999 - DNA, 15 bp, Homo sapiens
acctggtctctaccg

SEQ ID NO: 446000 - DNA, 15 bp, Homo sapiens
gacctggtctctacc

SEQ ID NO: 446001 - DNA, 15 bp, Homo sapiens
agacctggtctctac

SEQ ID NO: 446002 - DNA, 15 bp, Homo sapiens
cagacctggtctcta

SEQ ID NO: 446003 - DNA, 15 bp, Homo sapiens
acagacctggtctct

SEQ ID NO: 446004 - DNA, 15 bp, Homo sapiens
aacagacctggtctc

SEQ ID NO: 446005 - DNA, 15 bp, Homo sapiens
aaacagacctggtct

SEQ ID NO: 446006 - DNA, 15 bp, Homo sapiens
caaacagacctggtc

SEQ ID NO: 446007 - DNA, 15 bp, Homo sapiens
ccaaacagacctggt

SEQ ID NO: 446008 - DNA, 15 bp, Homo sapiens
cccaaacagacctgg

SEQ ID NO: 446009 - DNA, 15 bp, Homo sapiens
tcccaaacagacctg

SEQ ID NO: 446010 - DNA, 15 bp, Homo sapiens
ctcccaaacagacct

SEQ ID NO: 446011 - DNA, 15 bp, Homo sapiens
gctcccaaacagacc

SEQ ID NO: 446012 - DNA, 15 bp, Homo sapiens
agctcccaaacagac

SEQ ID NO: 446013 - DNA, 15 bp, Homo sapiens
tagctcccaaacaga

SEQ ID NO: 446014 - DNA, 15 bp, Homo sapiens
atagctcccaaacag

SEQ ID NO: 446015 - DNA, 15 bp, Homo sapiens
tatagctcccaaaca

SEQ ID NO: 446016 - DNA, 15 bp, Homo sapiens
ttatagctcccaaac

SEQ ID NO: 446017 - DNA, 15 bp, Homo sapiens
attatagctcccaaa

SEQ ID NO: 446018 - DNA, 15 bp, Homo sapiens
gattatagctcccaa

SEQ ID NO: 446019 - DNA, 15 bp, Homo sapiens
tgattatagctccca

SEQ ID NO: 446020 - DNA, 15 bp, Homo sapiens
gtgattatagctccc

SEQ ID NO: 446021 - DNA, 15 bp, Homo sapiens
tgtgattatagctcc

SEQ ID NO: 446022 - DNA, 15 bp, Homo sapiens
atgtgattatagctc

SEQ ID NO: 446023 - DNA, 15 bp, Homo sapiens
catgtgattatagct

SEQ ID NO: 446024 - DNA, 15 bp, Homo sapiens
tcatgtgattatagc

SEQ ID NO: 446025 - DNA, 15 bp, Homo sapiens
atcatgtgattatag

SEQ ID NO: 446026 - DNA, 15 bp, Homo sapiens
gatcatgtgattata

SEQ ID NO: 446027 - DNA, 15 bp, Homo sapiens
tgatcatgtgattat

SEQ ID NO: 446028 - DNA, 15 bp, Homo sapiens
ctgatcatgtgatta

SEQ ID NO: 446029 - DNA, 15 bp, Homo sapiens
actgatcatgtgatt

SEQ ID NO: 446030 - DNA, 15 bp, Homo sapiens
cactgatcatgtgat

SEQ ID NO: 446031 - DNA, 15 bp, Homo sapiens
tcactgatcatgtga

SEQ ID NO: 446032 - DNA, 15 bp, Homo sapiens
ttcactgatcatgtg

SEQ ID NO: 446033 - DNA, 15 bp, Homo sapiens
gttcactgatcatgt

SEQ ID NO: 446034 - DNA, 15 bp, Homo sapiens
tgttcactgatcatg

SEQ ID NO: 446035 - DNA, 15 bp, Homo sapiens
ctgttcactgatcat

SEQ ID NO: 446036 - DNA, 15 bp, Homo sapiens
tctgttcactgatca

SEQ ID NO: 446037 - DNA, 15 bp, Homo sapiens
gtctgttcactgatc

SEQ ID NO: 446038 - DNA, 15 bp, Homo sapiens
ggtctgttcactgat

SEQ ID NO: 446039 - DNA, 15 bp, Homo sapiens
aggtctgttcactga

SEQ ID NO: 446040 - DNA, 15 bp, Homo sapiens
caggtctgttcactg

SEQ ID NO: 446041 - DNA, 15 bp, Homo sapiens
ccaggtctgttcact

SEQ ID NO: 446042 - DNA, 15 bp, Homo sapiens
cccaggtctgttcac

SEQ ID NO: 446043 - DNA, 15 bp, Homo sapiens
acccaggtctgttca

SEQ ID NO: 446044 - DNA, 15 bp, Homo sapiens
aacccaggtctgttc

SEQ ID NO: 446045 - DNA, 15 bp, Homo sapiens
gaacccaggtctgtt

SEQ ID NO: 446046 - DNA, 15 bp, Homo sapiens
tgaacccaggtctgt

SEQ ID NO: 446047 - DNA, 15 bp, Homo sapiens
ttgaacccaggtctg

SEQ ID NO: 446048 - DNA, 15 bp, Homo sapiens
tttgaacccaggtct

SEQ ID NO: 446049 - DNA, 15 bp, Homo sapiens
gtttgaacccaggtc

SEQ ID NO: 446050 - DNA, 15 bp, Homo sapiens
ggtttgaacccaggt

SEQ ID NO: 446051 - DNA, 15 bp, Homo sapiens
gggtttgaacccagg

SEQ ID NO: 446052 - DNA, 15 bp, Homo sapiens
agggtttgaacccag

SEQ ID NO: 446053 - DNA, 15 bp, Homo sapiens
cagggtttgaaccca

SEQ ID NO: 446054 - DNA, 15 bp, Homo sapiens
ccagggtttgaaccc

SEQ ID NO: 446055 - DNA, 15 bp, Homo sapiens
cccagggtttgaacc

SEQ ID NO: 446056 - DNA, 15 bp, Homo sapiens
acccagggtttgaac

SEQ ID NO: 446057 - DNA, 15 bp, Homo sapiens
aacccagggtttgaa

SEQ ID NO: 446058 - DNA, 15 bp, Homo sapiens
aaacccagggtttga

SEQ ID NO: 446059 - DNA, 15 bp, Homo sapiens
aaaacccagggtttg

SEQ ID NO: 446060 - DNA, 15 bp, Homo sapiens
caaaacccagggttt

SEQ ID NO: 446061 - DNA, 15 bp, Homo sapiens
gcaaaacccagggtt

SEQ ID NO: 446062 - DNA, 15 bp, Homo sapiens
agcaaaacccagggt

SEQ ID NO: 446063 - DNA, 15 bp, Homo sapiens
cagcaaaacccaggg

SEQ ID NO: 446064 - DNA, 15 bp, Homo sapiens
acagcaaaacccagg

SEQ ID NO: 446065 - DNA, 15 bp, Homo sapiens
cacagcaaaacccag

SEQ ID NO: 446066 - DNA, 15 bp, Homo sapiens
acacagcaaaaccca

SEQ ID NO: 446067 - DNA, 15 bp, Homo sapiens
cacacagcaaaaccc

SEQ ID NO: 446068 - DNA, 15 bp, Homo sapiens
tcacacagcaaaacc

SEQ ID NO: 446069 - DNA, 15 bp, Homo sapiens
atcacacagcaaaac

SEQ ID NO: 446070 - DNA, 15 bp, Homo sapiens
catcacacagcaaaa

SEQ ID NO: 446071 - DNA, 15 bp, Homo sapiens
acatcacacagcaaa

SEQ ID NO: 446072 - DNA, 15 bp, Homo sapiens
tacatcacacagcaa

SEQ ID NO: 446073 - DNA, 15 bp, Homo sapiens
atacatcacacagca

SEQ ID NO: 446074 - DNA, 15 bp, Homo sapiens
tatacatcacacagc

SEQ ID NO: 446075 - DNA, 15 bp, Homo sapiens
ttatacatcacacag

SEQ ID NO: 446076 - DNA, 15 bp, Homo sapiens
gttatacatcacaca

SEQ ID NO: 446077 - DNA, 15 bp, Homo sapiens
agttatacatcacac

SEQ ID NO: 446078 - DNA, 15 bp, Homo sapiens
aagttatacatcaca

SEQ ID NO: 446079 - DNA, 15 bp, Homo sapiens
gaagttatacatcac

SEQ ID NO: 446080 - DNA, 15 bp, Homo sapiens
tgaagttatacatca

SEQ ID NO: 446081 - DNA, 15 bp, Homo sapiens
gtgaagttatacatc

SEQ ID NO: 446082 - DNA, 15 bp, Homo sapiens
ggtgaagttatacat

SEQ ID NO: 446083 - DNA, 15 bp, Homo sapiens
aggtgaagttataca

SEQ ID NO: 446084 - DNA, 15 bp, Homo sapiens
caggtgaagttatac

SEQ ID NO: 446085 - DNA, 15 bp, Homo sapiens
tcaggtgaagttata

SEQ ID NO: 446086 - DNA, 15 bp, Homo sapiens
ctcaggtgaagttat

SEQ ID NO: 446087 - DNA, 15 bp, Homo sapiens
gctcaggtgaagtta

SEQ ID NO: 446088 - DNA, 15 bp, Homo sapiens
ggctcaggtgaagtt

SEQ ID NO: 446089 - DNA, 15 bp, Homo sapiens
aggctcaggtgaagt

SEQ ID NO: 446090 - DNA, 15 bp, Homo sapiens
aaggctcaggtgaag

SEQ ID NO: 446091 - DNA, 15 bp, Homo sapiens
caaggctcaggtgaa

SEQ ID NO: 446092 - DNA, 15 bp, Homo sapiens
ccaaggctcaggtga

SEQ ID NO: 446093 - DNA, 15 bp, Homo sapiens
accaaggctcaggtg

SEQ ID NO: 446094 - DNA, 15 bp, Homo sapiens
gaccaaggctcaggt

SEQ ID NO: 446095 - DNA, 15 bp, Homo sapiens
agaccaaggctcagg

SEQ ID NO: 446096 - DNA, 15 bp, Homo sapiens
tagaccaaggctcag

SEQ ID NO: 446097 - DNA, 15 bp, Homo sapiens
gtagaccaaggctca

SEQ ID NO: 446098 - DNA, 15 bp, Homo sapiens
agtagaccaaggctc

SEQ ID NO: 446099 - DNA, 15 bp, Homo sapiens
gagtagaccaaggct

SEQ ID NO: 446100 - DNA, 15 bp, Homo sapiens
tgagtagaccaaggc

SEQ ID NO: 446101 - DNA, 15 bp, Homo sapiens
atgagtagaccaagg

SEQ ID NO: 446102 - DNA, 15 bp, Homo sapiens
gatgagtagaccaag

SEQ ID NO: 446103 - DNA, 15 bp, Homo sapiens
agatgagtagaccaa

SEQ ID NO: 446104 - DNA, 15 bp, Homo sapiens
cagatgagtagacca

SEQ ID NO: 446105 - DNA, 15 bp, Homo sapiens
tcagatgagtagacc

SEQ ID NO: 446106 - DNA, 15 bp, Homo sapiens
ttcagatgagtagac

SEQ ID NO: 446107 - DNA, 15 bp, Homo sapiens
tttcagatgagtaga

SEQ ID NO: 446108 - DNA, 15 bp, Homo sapiens
ttttcagatgagtag

SEQ ID NO: 446109 - DNA, 15 bp, Homo sapiens
tttttcagatgagta

SEQ ID NO: 446110 - DNA, 15 bp, Homo sapiens
atttttcagatgagt

SEQ ID NO: 446111 - DNA, 15 bp, Homo sapiens
catttttcagatgag

SEQ ID NO: 446112 - DNA, 15 bp, Homo sapiens
ccatttttcagatga

SEQ ID NO: 446113 - DNA, 15 bp, Homo sapiens
cccatttttcagatg

SEQ ID NO: 446114 - DNA, 15 bp, Homo sapiens
ccccatttttcagat

SEQ ID NO: 446115 - DNA, 15 bp, Homo sapiens
tccccatttttcaga

SEQ ID NO: 446116 - DNA, 15 bp, Homo sapiens
atccccatttttcag

SEQ ID NO: 446117 - DNA, 15 bp, Homo sapiens
tatccccatttttca

SEQ ID NO: 446118 - DNA, 15 bp, Homo sapiens
gtatccccatttttc

SEQ ID NO: 446119 - DNA, 15 bp, Homo sapiens
agtatccccattttt

SEQ ID NO: 446120 - DNA, 15 bp, Homo sapiens
cagtatccccatttt

SEQ ID NO: 446121 - DNA, 15 bp, Homo sapiens
tcagtatccccattt

SEQ ID NO: 446122 - DNA, 15 bp, Homo sapiens
gtcagtatccccatt

SEQ ID NO: 446123 - DNA, 15 bp, Homo sapiens
tgtcagtatccccat

SEQ ID NO: 446124 - DNA, 15 bp, Homo sapiens
atgtcagtatcccca

SEQ ID NO: 446125 - DNA, 15 bp, Homo sapiens
gatgtcagtatcccc

SEQ ID NO: 446126 - DNA, 15 bp, Homo sapiens
agatgtcagtatccc

SEQ ID NO: 446127 - DNA, 15 bp, Homo sapiens
tagatgtcagtatcc

SEQ ID NO: 446128 - DNA, 15 bp, Homo sapiens
gtagatgtcagtatc

SEQ ID NO: 446129 - DNA, 15 bp, Homo sapiens
agtagatgtcagtat

SEQ ID NO: 446130 - DNA, 15 bp, Homo sapiens
aagtagatgtcagta

SEQ ID NO: 446131 - DNA, 15 bp, Homo sapiens
taagtagatgtcagt

SEQ ID NO: 446132 - DNA, 15 bp, Homo sapiens
ttaagtagatgtcag

SEQ ID NO: 446133 - DNA, 15 bp, Homo sapiens
tttaagtagatgtca

SEQ ID NO: 446134 - DNA, 15 bp, Homo sapiens
ttttaagtagatgtc

SEQ ID NO: 446135 - DNA, 15 bp, Homo sapiens
tttttaagtagatgt

SEQ ID NO: 446136 - DNA, 15 bp, Homo sapiens
ttttttaagtagatg

SEQ ID NO: 446137 - DNA, 15 bp, Homo sapiens
attttttaagtagat

SEQ ID NO: 446138 - DNA, 15 bp, Homo sapiens
aattttttaagtaga

SEQ ID NO: 446139 - DNA, 15 bp, Homo sapiens
caattttttaagtag

SEQ ID NO: 446140 - DNA, 15 bp, Homo sapiens
acaattttttaagta

SEQ ID NO: 446141 - DNA, 15 bp, Homo sapiens
cacaattttttaagt

SEQ ID NO: 446142 - DNA, 15 bp, Homo sapiens
tcacaattttttaag

SEQ ID NO: 446143 - DNA, 15 bp, Homo sapiens
ttcacaattttttaa

SEQ ID NO: 446144 - DNA, 15 bp, Homo sapiens
attcacaatttttta

SEQ ID NO: 446145 - DNA, 15 bp, Homo sapiens
cattcacaatttttt

SEQ ID NO: 446146 - DNA, 15 bp, Homo sapiens
tcattcacaattttt

SEQ ID NO: 446147 - DNA, 15 bp, Homo sapiens
ttcattcacaatttt

SEQ ID NO: 446148 - DNA, 15 bp, Homo sapiens
cttcattcacaattt

SEQ ID NO: 446149 - DNA, 15 bp, Homo sapiens
acttcattcacaatt

SEQ ID NO: 446150 - DNA, 15 bp, Homo sapiens
cacttcattcacaat

SEQ ID NO: 446151 - DNA, 15 bp, Homo sapiens
ccacttcattcacaa

SEQ ID NO: 446152 - DNA, 15 bp, Homo sapiens
accacttcattcaca

SEQ ID NO: 446153 - DNA, 15 bp, Homo sapiens
taccacttcattcac

SEQ ID NO: 446154 - DNA, 15 bp, Homo sapiens
gtaccacttcattca

SEQ ID NO: 446155 - DNA, 15 bp, Homo sapiens
ggtaccacttcattc

SEQ ID NO: 446156 - DNA, 15 bp, Homo sapiens
aggtaccacttcatt

SEQ ID NO: 446157 - DNA, 15 bp, Homo sapiens
caggtaccacttcat

SEQ ID NO: 446158 - DNA, 15 bp, Homo sapiens
acaggtaccacttca

SEQ ID NO: 446159 - DNA, 15 bp, Homo sapiens
tacaggtaccacttc

SEQ ID NO: 446160 - DNA, 15 bp, Homo sapiens
ttacaggtaccactt

SEQ ID NO: 446161 - DNA, 15 bp, Homo sapiens
cttacaggtaccact

SEQ ID NO: 446162 - DNA, 15 bp, Homo sapiens
acttacaggtaccac

SEQ ID NO: 446163 - DNA, 15 bp, Homo sapiens
gacttacaggtacca

SEQ ID NO: 446164 - DNA, 15 bp, Homo sapiens
tgacttacaggtacc

SEQ ID NO: 446165 - DNA, 15 bp, Homo sapiens
atgacttacaggtac

SEQ ID NO: 446166 - DNA, 15 bp, Homo sapiens
aatgacttacaggta

SEQ ID NO: 446167 - DNA, 15 bp, Homo sapiens
aaatgacttacaggt

SEQ ID NO: 446168 - DNA, 15 bp, Homo sapiens
caaatgacttacagg

SEQ ID NO: 446169 - DNA, 15 bp, Homo sapiens
ccaaatgacttacag

SEQ ID NO: 446170 - DNA, 15 bp, Homo sapiens
cccaaatgacttaca

SEQ ID NO: 446171 - DNA, 15 bp, Homo sapiens
acccaaatgacttac

SEQ ID NO: 446172 - DNA, 15 bp, Homo sapiens
cacccaaatgactta

SEQ ID NO: 446173 - DNA, 15 bp, Homo sapiens
gcacccaaatgactt

SEQ ID NO: 446174 - DNA, 15 bp, Homo sapiens
ggcacccaaatgact

SEQ ID NO: 446175 - DNA, 15 bp, Homo sapiens
tggcacccaaatgac

SEQ ID NO: 446176 - DNA, 15 bp, Homo sapiens
ctggcacccaaatga

SEQ ID NO: 446177 - DNA, 15 bp, Homo sapiens
tctggcacccaaatg

SEQ ID NO: 446178 - DNA, 15 bp, Homo sapiens
ctctggcacccaaat

SEQ ID NO: 446179 - DNA, 15 bp, Homo sapiens
cctctggcacccaaa

SEQ ID NO: 446180 - DNA, 15 bp, Homo sapiens
acctctggcacccaa

SEQ ID NO: 446181 - DNA, 15 bp, Homo sapiens
cacctctggcaccca

SEQ ID NO: 446182 - DNA, 15 bp, Homo sapiens
ccacctctggcaccc

SEQ ID NO: 446183 - DNA, 15 bp, Homo sapiens
accacctctggcacc

SEQ ID NO: 446184 - DNA, 15 bp, Homo sapiens
caccacctctggcac

SEQ ID NO: 446185 - DNA, 15 bp, Homo sapiens
gcaccacctctggca

SEQ ID NO: 446186 - DNA, 15 bp, Homo sapiens
ggcaccacctctggc

SEQ ID NO: 446187 - DNA, 15 bp, Homo sapiens
aggcaccacctctgg

SEQ ID NO: 446188 - DNA, 15 bp, Homo sapiens
gaggcaccacctctg

SEQ ID NO: 446189 - DNA, 15 bp, Homo sapiens
tgaggcaccacctct

SEQ ID NO: 446190 - DNA, 15 bp, Homo sapiens
gtgaggcaccacctc

SEQ ID NO: 446191 - DNA, 15 bp, Homo sapiens
agtgaggcaccacct

SEQ ID NO: 446192 - DNA, 15 bp, Homo sapiens
gagtgaggcaccacc

SEQ ID NO: 446193 - DNA, 15 bp, Homo sapiens
ggagtgaggcaccac

SEQ ID NO: 446194 - DNA, 15 bp, Homo sapiens
aggagtgaggcacca

SEQ ID NO: 446195 - DNA, 15 bp, Homo sapiens
caggagtgaggcacc

SEQ ID NO: 446196 - DNA, 15 bp, Homo sapiens
acaggagtgaggcac

SEQ ID NO: 446197 - DNA, 15 bp, Homo sapiens
tacaggagtgaggca

SEQ ID NO: 446198 - DNA, 15 bp, Homo sapiens
ttacaggagtgaggc

SEQ ID NO: 446199 - DNA, 15 bp, Homo sapiens
attacaggagtgagg

SEQ ID NO: 446200 - DNA, 15 bp, Homo sapiens
gattacaggagtgag

SEQ ID NO: 446201 - DNA, 15 bp, Homo sapiens
ggattacaggagtga

SEQ ID NO: 446202 - DNA, 15 bp, Homo sapiens
gggattacaggagtg

SEQ ID NO: 446203 - DNA, 15 bp, Homo sapiens
tgggattacaggagt

SEQ ID NO: 446204 - DNA, 15 bp, Homo sapiens
ctgggattacaggag

SEQ ID NO: 446205 - DNA, 15 bp, Homo sapiens
actgggattacagga

SEQ ID NO: 446206 - DNA, 15 bp, Homo sapiens
aactgggattacagg

SEQ ID NO: 446207 - DNA, 15 bp, Homo sapiens
taactgggattacag

SEQ ID NO: 446208 - DNA, 15 bp, Homo sapiens
gtaactgggattaca

SEQ ID NO: 446209 - DNA, 15 bp, Homo sapiens
agtaactgggattac

SEQ ID NO: 446210 - DNA, 15 bp, Homo sapiens
aagtaactgggatta

SEQ ID NO: 446211 - DNA, 15 bp, Homo sapiens
taagtaactgggatt

SEQ ID NO: 446212 - DNA, 15 bp, Homo sapiens
ctaagtaactgggat

SEQ ID NO: 446213 - DNA, 15 bp, Homo sapiens
cctaagtaactggga

SEQ ID NO: 446214 - DNA, 15 bp, Homo sapiens
tcctaagtaactggg

SEQ ID NO: 446215 - DNA, 15 bp, Homo sapiens
ctcctaagtaactgg

SEQ ID NO: 446216 - DNA, 15 bp, Homo sapiens
cctcctaagtaactg

SEQ ID NO: 446217 - DNA, 15 bp, Homo sapiens
gcctcctaagtaact

SEQ ID NO: 446218 - DNA, 15 bp, Homo sapiens
agcctcctaagtaac

SEQ ID NO: 446219 - DNA, 15 bp, Homo sapiens
cagcctcctaagtaa

SEQ ID NO: 446220 - DNA, 15 bp, Homo sapiens
tcagcctcctaagta

SEQ ID NO: 446221 - DNA, 15 bp, Homo sapiens
ctcagcctcctaagt

SEQ ID NO: 446222 - DNA, 15 bp, Homo sapiens
cctcagcctcctaag

SEQ ID NO: 446223 - DNA, 15 bp, Homo sapiens
gcctcagcctcctaa

SEQ ID NO: 446224 - DNA, 15 bp, Homo sapiens
tgcctcagcctccta

SEQ ID NO: 446225 - DNA, 15 bp, Homo sapiens
ctgcctcagcctcct

SEQ ID NO: 446226 - DNA, 15 bp, Homo sapiens
cctcctgcctcagcc

SEQ ID NO: 446227 - DNA, 15 bp, Homo sapiens
gatcctcctgcctca

SEQ ID NO: 446228 - DNA, 15 bp, Homo sapiens
tgatcctcctgcctc

SEQ ID NO: 446229 - DNA, 15 bp, Homo sapiens
atgatcctcctgcct

SEQ ID NO: 446230 - DNA, 15 bp, Homo sapiens
aatgatcctcctgcc

SEQ ID NO: 446231 - DNA, 15 bp, Homo sapiens
aaatgatcctcctgc

SEQ ID NO: 446232 - DNA, 15 bp, Homo sapiens
caaatgatcctcctg

SEQ ID NO: 446233 - DNA, 15 bp, Homo sapiens
tcaaatgatcctcct

SEQ ID NO: 446234 - DNA, 15 bp, Homo sapiens
ttcaaatgatcctcc

SEQ ID NO: 446235 - DNA, 15 bp, Homo sapiens
cttcaaatgatcctc

SEQ ID NO: 446236 - DNA, 15 bp, Homo sapiens
tcttcaaatgatcct

SEQ ID NO: 446237 - DNA, 15 bp, Homo sapiens
gtcttcaaatgatcc

SEQ ID NO: 446238 - DNA, 15 bp, Homo sapiens
tgtcttcaaatgatc

SEQ ID NO: 446239 - DNA, 15 bp, Homo sapiens
ctgtcttcaaatgat

SEQ ID NO: 446240 - DNA, 15 bp, Homo sapiens
cctgtcttcaaatga

SEQ ID NO: 446241 - DNA, 15 bp, Homo sapiens
gcctgtcttcaaatg

SEQ ID NO: 446242 - DNA, 15 bp, Homo sapiens
tgcctgtcttcaaat

SEQ ID NO: 446243 - DNA, 15 bp, Homo sapiens
atgcctgtcttcaaa

SEQ ID NO: 446244 - DNA, 15 bp, Homo sapiens
gatgcctgtcttcaa

SEQ ID NO: 446245 - DNA, 15 bp, Homo sapiens
ggatgcctgtcttca

SEQ ID NO: 446246 - DNA, 15 bp, Homo sapiens
tggatgcctgtcttc

SEQ ID NO: 446247 - DNA, 15 bp, Homo sapiens
ttggatgcctgtctt

SEQ ID NO: 446248 - DNA, 15 bp, Homo sapiens
cttggatgcctgtct

SEQ ID NO: 446249 - DNA, 15 bp, Homo sapiens
tcttggatgcctgtc

SEQ ID NO: 446250 - DNA, 15 bp, Homo sapiens
gtcttggatgcctgt

SEQ ID NO: 446251 - DNA, 15 bp, Homo sapiens
tgtcttggatgcctg

SEQ ID NO: 446252 - DNA, 15 bp, Homo sapiens
ttgtcttggatgcct

SEQ ID NO: 446253 - DNA, 15 bp, Homo sapiens
cttgtcttggatgcc

SEQ ID NO: 446254 - DNA, 15 bp, Homo sapiens
gcttgtcttggatgc

SEQ ID NO: 446255 - DNA, 15 bp, Homo sapiens
ggcttgtcttggatg

SEQ ID NO: 446256 - DNA, 15 bp, Homo sapiens
aggcttgtcttggat

SEQ ID NO: 446257 - DNA, 15 bp, Homo sapiens
caggcttgtcttgga

SEQ ID NO: 446258 - DNA, 15 bp, Homo sapiens
ccaggcttgtcttgg

SEQ ID NO: 446259 - DNA, 15 bp, Homo sapiens
cccaggcttgtcttg

SEQ ID NO: 446260 - DNA, 15 bp, Homo sapiens
tcccaggcttgtctt

SEQ ID NO: 446261 - DNA, 15 bp, Homo sapiens
ttcccaggcttgtct

SEQ ID NO: 446262 - DNA, 15 bp, Homo sapiens
tttcccaggcttgtc

SEQ ID NO: 446263 - DNA, 15 bp, Homo sapiens
gtttcccaggcttgt

SEQ ID NO: 446264 - DNA, 15 bp, Homo sapiens
tgtttcccaggcttg

SEQ ID NO: 446265 - DNA, 15 bp, Homo sapiens
atgtttcccaggctt

SEQ ID NO: 446266 - DNA, 15 bp, Homo sapiens
tatgtttcccaggct

SEQ ID NO: 446267 - DNA, 15 bp, Homo sapiens
ctatgtttcccaggc

SEQ ID NO: 446268 - DNA, 15 bp, Homo sapiens
gctatgtttcccagg

SEQ ID NO: 446269 - DNA, 15 bp, Homo sapiens
tgctatgtttcccag

SEQ ID NO: 446270 - DNA, 15 bp, Homo sapiens
ttgctatgtttccca

SEQ ID NO: 446271 - DNA, 15 bp, Homo sapiens
cttgctatgtttccc

SEQ ID NO: 446272 - DNA, 15 bp, Homo sapiens
tcttgctatgtttcc

SEQ ID NO: 446273 - DNA, 15 bp, Homo sapiens
gtcttgctatgtttc

SEQ ID NO: 446274 - DNA, 15 bp, Homo sapiens
ggtcttgctatgttt

SEQ ID NO: 446275 - DNA, 15 bp, Homo sapiens
aggtcttgctatgtt

SEQ ID NO: 446276 - DNA, 15 bp, Homo sapiens
gaggtcttgctatgt

SEQ ID NO: 446277 - DNA, 15 bp, Homo sapiens
tgaggtcttgctatg

SEQ ID NO: 446278 - DNA, 15 bp, Homo sapiens
atgaggtcttgctat

SEQ ID NO: 446279 - DNA, 15 bp, Homo sapiens
gatgaggtcttgcta

SEQ ID NO: 446280 - DNA, 15 bp, Homo sapiens
agatgaggtcttgct

SEQ ID NO: 446281 - DNA, 15 bp, Homo sapiens
gagatgaggtcttgc

SEQ ID NO: 446282 - DNA, 15 bp, Homo sapiens
agagatgaggtcttg

SEQ ID NO: 446283 - DNA, 15 bp, Homo sapiens
tagagatgaggtctt

SEQ ID NO: 446284 - DNA, 15 bp, Homo sapiens
gtagagatgaggtct

SEQ ID NO: 446285 - DNA, 15 bp, Homo sapiens
tgtagagatgaggtc

SEQ ID NO: 446286 - DNA, 15 bp, Homo sapiens
ttgtagagatgaggt

SEQ ID NO: 446287 - DNA, 15 bp, Homo sapiens
tttgtagagatgagg

SEQ ID NO: 446288 - DNA, 15 bp, Homo sapiens
ttttgtagagatgag

SEQ ID NO: 446289 - DNA, 15 bp, Homo sapiens
attttgtagagatga

SEQ ID NO: 446290 - DNA, 15 bp, Homo sapiens
aattttgtagagatg

SEQ ID NO: 446291 - DNA, 15 bp, Homo sapiens
taattttgtagagat

SEQ ID NO: 446292 - DNA, 15 bp, Homo sapiens
ttaattttgtagaga

SEQ ID NO: 446293 - DNA, 15 bp, Homo sapiens
tttaattttgtagag

SEQ ID NO: 446294 - DNA, 15 bp, Homo sapiens
ttttaattttgtaga

SEQ ID NO: 446295 - DNA, 15 bp, Homo sapiens
tttttaattttgtag

SEQ ID NO: 446296 - DNA, 15 bp, Homo sapiens
atttttaattttgta

SEQ ID NO: 446297 - DNA, 15 bp, Homo sapiens
aatttttaattttgt

SEQ ID NO: 446298 - DNA, 15 bp, Homo sapiens
taatttttaattttg

SEQ ID NO: 446299 - DNA, 15 bp, Homo sapiens
ctaatttttaatttt

SEQ ID NO: 446300 - DNA, 15 bp, Homo sapiens
gctaatttttaattt

SEQ ID NO: 446301 - DNA, 15 bp, Homo sapiens
ggctaatttttaatt

SEQ ID NO: 446302 - DNA, 15 bp, Homo sapiens
tggctaatttttaat

SEQ ID NO: 446303 - DNA, 15 bp, Homo sapiens
ttggctaatttttaa

SEQ ID NO: 446304 - DNA, 15 bp, Homo sapiens
cttggctaattttta

SEQ ID NO: 446305 - DNA, 15 bp, Homo sapiens
gcttggctaattttt

SEQ ID NO: 446306 - DNA, 15 bp, Homo sapiens
tgcttggctaatttt

SEQ ID NO: 446307 - DNA, 15 bp, Homo sapiens
ttgcttggctaattt

SEQ ID NO: 446308 - DNA, 15 bp, Homo sapiens
gttgcttggctaatt

SEQ ID NO: 446309 - DNA, 15 bp, Homo sapiens
agttgcttggctaat

SEQ ID NO: 446310 - DNA, 15 bp, Homo sapiens
aagttgcttggctaa

SEQ ID NO: 446311 - DNA, 15 bp, Homo sapiens
caagttgcttggcta

SEQ ID NO: 446312 - DNA, 15 bp, Homo sapiens
ccaagttgcttggct

SEQ ID NO: 446313 - DNA, 15 bp, Homo sapiens
cccaagttgcttggc

SEQ ID NO: 446314 - DNA, 15 bp, Homo sapiens
tcccaagttgcttgg

SEQ ID NO: 446315 - DNA, 15 bp, Homo sapiens
ctcccaagttgcttg

SEQ ID NO: 446316 - DNA, 15 bp, Homo sapiens
cctcccaagttgctt

SEQ ID NO: 446317 - DNA, 15 bp, Homo sapiens
gcctcccaagttgct

SEQ ID NO: 446318 - DNA, 15 bp, Homo sapiens
agcctcccaagttgc

SEQ ID NO: 446319 - DNA, 15 bp, Homo sapiens
cagcctcccaagttg

SEQ ID NO: 446320 - DNA, 15 bp, Homo sapiens
tcagcctcccaagtt

SEQ ID NO: 446321 - DNA, 15 bp, Homo sapiens
tatcctcctgcctca

SEQ ID NO: 446322 - DNA, 15 bp, Homo sapiens
ttatcctcctgcctc

SEQ ID NO: 446323 - DNA, 15 bp, Homo sapiens
tttatcctcctgcct

SEQ ID NO: 446324 - DNA, 15 bp, Homo sapiens
atttatcctcctgcc

SEQ ID NO: 446325 - DNA, 15 bp, Homo sapiens
aatttatcctcctgc

SEQ ID NO: 446326 - DNA, 15 bp, Homo sapiens
caatttatcctcctg

SEQ ID NO: 446327 - DNA, 15 bp, Homo sapiens
tcaatttatcctcct

SEQ ID NO: 446328 - DNA, 15 bp, Homo sapiens
ctcaatttatcctcc

SEQ ID NO: 446329 - DNA, 15 bp, Homo sapiens
gctcaatttatcctc

SEQ ID NO: 446330 - DNA, 15 bp, Homo sapiens
ggctcaatttatcct

SEQ ID NO: 446331 - DNA, 15 bp, Homo sapiens
gggctcaatttatcc

SEQ ID NO: 446332 - DNA, 15 bp, Homo sapiens
tgggctcaatttatc

SEQ ID NO: 446333 - DNA, 15 bp, Homo sapiens
ctgggctcaatttat

SEQ ID NO: 446334 - DNA, 15 bp, Homo sapiens
tctgggctcaattta

SEQ ID NO: 446335 - DNA, 15 bp, Homo sapiens
ctctgggctcaattt

SEQ ID NO: 446336 - DNA, 15 bp, Homo sapiens
actctgggctcaatt

SEQ ID NO: 446337 - DNA, 15 bp, Homo sapiens
aactctgggctcaat

SEQ ID NO: 446338 - DNA, 15 bp, Homo sapiens
aaactctgggctcaa

SEQ ID NO: 446339 - DNA, 15 bp, Homo sapiens
gaaactctgggctca

SEQ ID NO: 446340 - DNA, 15 bp, Homo sapiens
tgaaactctgggctc

SEQ ID NO: 446341 - DNA, 15 bp, Homo sapiens
ctgaaactctgggct

SEQ ID NO: 446342 - DNA, 15 bp, Homo sapiens
tctgaaactctgggc

SEQ ID NO: 446343 - DNA, 15 bp, Homo sapiens
gtctgaaactctggg

SEQ ID NO: 446344 - DNA, 15 bp, Homo sapiens
agtctgaaactctgg

SEQ ID NO: 446345 - DNA, 15 bp, Homo sapiens
cagtctgaaactctg

SEQ ID NO: 446346 - DNA, 15 bp, Homo sapiens
gcagtctgaaactct

SEQ ID NO: 446347 - DNA, 15 bp, Homo sapiens
tgcagtctgaaactc

SEQ ID NO: 446348 - DNA, 15 bp, Homo sapiens
ctgcagtctgaaact

SEQ ID NO: 446349 - DNA, 15 bp, Homo sapiens
actgcagtctgaaac

SEQ ID NO: 446350 - DNA, 15 bp, Homo sapiens
cactgcagtctgaaa

SEQ ID NO: 446351 - DNA, 15 bp, Homo sapiens
tcactgcagtctgaa

SEQ ID NO: 446352 - DNA, 15 bp, Homo sapiens
ctcactgcagtctga

SEQ ID NO: 446353 - DNA, 15 bp, Homo sapiens
gctcactgcagtctg

SEQ ID NO: 446354 - DNA, 15 bp, Homo sapiens
agctcactgcagtct

SEQ ID NO: 446355 - DNA, 15 bp, Homo sapiens
tagctcactgcagtc

SEQ ID NO: 446356 - DNA, 15 bp, Homo sapiens
atagctcactgcagt

SEQ ID NO: 446357 - DNA, 15 bp, Homo sapiens
tatagctcactgcag

SEQ ID NO: 446358 - DNA, 15 bp, Homo sapiens
ttatagctcactgca

SEQ ID NO: 446359 - DNA, 15 bp, Homo sapiens
attatagctcactgc

SEQ ID NO: 446360 - DNA, 15 bp, Homo sapiens
cattatagctcactg

SEQ ID NO: 446361 - DNA, 15 bp, Homo sapiens
tcattatagctcact

SEQ ID NO: 446362 - DNA, 15 bp, Homo sapiens
gtcattatagctcac

SEQ ID NO: 446363 - DNA, 15 bp, Homo sapiens
agtcattatagctca

SEQ ID NO: 446364 - DNA, 15 bp, Homo sapiens
gagtcattatagctc

SEQ ID NO: 446365 - DNA, 15 bp, Homo sapiens
ggagtcattatagct

SEQ ID NO: 446366 - DNA, 15 bp, Homo sapiens
tggagtcattatagc

SEQ ID NO: 446367 - DNA, 15 bp, Homo sapiens
gtggagtcattatag

SEQ ID NO: 446368 - DNA, 15 bp, Homo sapiens
agtggagtcattata

SEQ ID NO: 446369 - DNA, 15 bp, Homo sapiens
cagtggagtcattat

SEQ ID NO: 446370 - DNA, 15 bp, Homo sapiens
gcagtggagtcatta

SEQ ID NO: 446371 - DNA, 15 bp, Homo sapiens
tgcagtggagtcatt

SEQ ID NO: 446372 - DNA, 15 bp, Homo sapiens
gtgcagtggagtcat

SEQ ID NO: 446373 - DNA, 15 bp, Homo sapiens
agtgcagtggagtca

SEQ ID NO: 446374 - DNA, 15 bp, Homo sapiens
gagtgcagtggagtc

SEQ ID NO: 446375 - DNA, 15 bp, Homo sapiens
ggagtgcagtggagt

SEQ ID NO: 446376 - DNA, 15 bp, Homo sapiens
tggagtgcagtggag

SEQ ID NO: 446377 - DNA, 15 bp, Homo sapiens
ctggagtgcagtgga

SEQ ID NO: 446378 - DNA, 15 bp, Homo sapiens
gctctgtcacccagg

SEQ ID NO: 446379 - DNA, 15 bp, Homo sapiens
tgctctgtcacccag

SEQ ID NO: 446380 - DNA, 15 bp, Homo sapiens
ttgctctgtcaccca

SEQ ID NO: 446381 - DNA, 15 bp, Homo sapiens
cttgctctgtcaccc

SEQ ID NO: 446382 - DNA, 15 bp, Homo sapiens
tcttgctctgtcacc

SEQ ID NO: 446383 - DNA, 15 bp, Homo sapiens
gtcttgctctgtcac

SEQ ID NO: 446384 - DNA, 15 bp, Homo sapiens
ggtcttgctctgtca

SEQ ID NO: 446385 - DNA, 15 bp, Homo sapiens
gggtcttgctctgtc

SEQ ID NO: 446386 - DNA, 15 bp, Homo sapiens
agggtcttgctctgt

SEQ ID NO: 446387 - DNA, 15 bp, Homo sapiens
cagggtcttgctctg

SEQ ID NO: 446388 - DNA, 15 bp, Homo sapiens
acagggtcttgctct

SEQ ID NO: 446389 - DNA, 15 bp, Homo sapiens
gacagggtcttgctc

SEQ ID NO: 446390 - DNA, 15 bp, Homo sapiens
agacagggtcttgct

SEQ ID NO: 446391 - DNA, 15 bp, Homo sapiens
aagacagggtcttgc

SEQ ID NO: 446392 - DNA, 15 bp, Homo sapiens
aaagacagggtcttg

SEQ ID NO: 446393 - DNA, 15 bp, Homo sapiens
taaagacagggtctt

SEQ ID NO: 446394 - DNA, 15 bp, Homo sapiens
ataaagacagggtct

SEQ ID NO: 446395 - DNA, 15 bp, Homo sapiens
aataaagacagggtc

SEQ ID NO: 446396 - DNA, 15 bp, Homo sapiens
aaataaagacagggt

SEQ ID NO: 446397 - DNA, 15 bp, Homo sapiens
taaataaagacaggg

SEQ ID NO: 446398 - DNA, 15 bp, Homo sapiens
ttaaataaagacagg

SEQ ID NO: 446399 - DNA, 15 bp, Homo sapiens
tttaaataaagacag

SEQ ID NO: 446400 - DNA, 15 bp, Homo sapiens
ttttaaataaagaca

SEQ ID NO: 446401 - DNA, 15 bp, Homo sapiens
tttttaaataaagac

SEQ ID NO: 446402 - DNA, 15 bp, Homo sapiens
atttttaaataaaga

SEQ ID NO: 446403 - DNA, 15 bp, Homo sapiens
tatttttaaataaag

SEQ ID NO: 446404 - DNA, 15 bp, Homo sapiens
ttatttttaaataaa

SEQ ID NO: 446405 - DNA, 15 bp, Homo sapiens
tttatttttaaataa

SEQ ID NO: 446406 - DNA, 15 bp, Homo sapiens
atttatttttaaata

SEQ ID NO: 446407 - DNA, 15 bp, Homo sapiens
tatttatttttaaat

SEQ ID NO: 446408 - DNA, 15 bp, Homo sapiens
ttatttatttttaaa

SEQ ID NO: 446409 - DNA, 15 bp, Homo sapiens
tttatttatttttaa

SEQ ID NO: 446410 - DNA, 15 bp, Homo sapiens
atttatttattttta

SEQ ID NO: 446411 - DNA, 15 bp, Homo sapiens
tatttatttattttt

SEQ ID NO: 446412 - DNA, 15 bp, Homo sapiens
ctatttatttatttt

SEQ ID NO: 446413 - DNA, 15 bp, Homo sapiens
cctatttatttattt

SEQ ID NO: 446414 - DNA, 15 bp, Homo sapiens
gcctatttatttatt

SEQ ID NO: 446415 - DNA, 15 bp, Homo sapiens
agcctatttatttat

SEQ ID NO: 446416 - DNA, 15 bp, Homo sapiens
cagcctatttattta

SEQ ID NO: 446417 - DNA, 15 bp, Homo sapiens
ccagcctatttattt

SEQ ID NO: 446418 - DNA, 15 bp, Homo sapiens
cccagcctatttatt

SEQ ID NO: 446419 - DNA, 15 bp, Homo sapiens
gcccagcctatttat

SEQ ID NO: 446420 - DNA, 15 bp, Homo sapiens
tgcccagcctattta

SEQ ID NO: 446421 - DNA, 15 bp, Homo sapiens
gtgcccagcctattt

SEQ ID NO: 446422 - DNA, 15 bp, Homo sapiens
tgtgcccagcctatt

SEQ ID NO: 446423 - DNA, 15 bp, Homo sapiens
ctgtgcccagcctat

SEQ ID NO: 446424 - DNA, 15 bp, Homo sapiens
actgtgcccagccta

SEQ ID NO: 446425 - DNA, 15 bp, Homo sapiens
cactgtgcccagcct

SEQ ID NO: 446426 - DNA, 15 bp, Homo sapiens
ccactgtgcccagcc

SEQ ID NO: 446427 - DNA, 15 bp, Homo sapiens
gccactgtgcccagc

SEQ ID NO: 446428 - DNA, 15 bp, Homo sapiens
agccactgtgcccag

SEQ ID NO: 446429 - DNA, 15 bp, Homo sapiens
gagccactgtgccca

SEQ ID NO: 446430 - DNA, 15 bp, Homo sapiens
tgagccactgtgccc

SEQ ID NO: 446431 - DNA, 15 bp, Homo sapiens
atgagccactgtgcc

SEQ ID NO: 446432 - DNA, 15 bp, Homo sapiens
catgagccactgtgc

SEQ ID NO: 446433 - DNA, 15 bp, Homo sapiens
gcatgagccactgtg

SEQ ID NO: 446434 - DNA, 15 bp, Homo sapiens
ggcatgagccactgt

SEQ ID NO: 446435 - DNA, 15 bp, Homo sapiens
aggcatgagccactg

SEQ ID NO: 446436 - DNA, 15 bp, Homo sapiens
caggcatgagccact

SEQ ID NO: 446437 - DNA, 15 bp, Homo sapiens
agcctcccaaagtgc

SEQ ID NO: 446438 - DNA, 15 bp, Homo sapiens
cagcctcccaaagtg

SEQ ID NO: 446439 - DNA, 15 bp, Homo sapiens
tcagcctcccaaagt

SEQ ID NO: 446440 - DNA, 15 bp, Homo sapiens
ctcagcctcccaaag

SEQ ID NO: 446441 - DNA, 15 bp, Homo sapiens
cctcagcctcccaaa

SEQ ID NO: 446442 - DNA, 15 bp, Homo sapiens
acctcagcctcccaa

SEQ ID NO: 446443 - DNA, 15 bp, Homo sapiens
cacctcagcctccca

SEQ ID NO: 446444 - DNA, 15 bp, Homo sapiens
ccacctcagcctccc

SEQ ID NO: 446445 - DNA, 15 bp, Homo sapiens
tgcccacctcagcct

SEQ ID NO: 446446 - DNA, 15 bp, Homo sapiens
ctgcccacctcagcc

SEQ ID NO: 446447 - DNA, 15 bp, Homo sapiens
tctgcccacctcagc

SEQ ID NO: 446448 - DNA, 15 bp, Homo sapiens
atctgcccacctcag

SEQ ID NO: 446449 - DNA, 15 bp, Homo sapiens
gatctgcccacctca

SEQ ID NO: 446450 - DNA, 15 bp, Homo sapiens
tgatctgcccacctc

SEQ ID NO: 446451 - DNA, 15 bp, Homo sapiens
gtgatctgcccacct

SEQ ID NO: 446452 - DNA, 15 bp, Homo sapiens
cgtgatctgcccacc

SEQ ID NO: 446453 - DNA, 15 bp, Homo sapiens
tcgtgatctgcccac

SEQ ID NO: 446454 - DNA, 15 bp, Homo sapiens
ctcgtgatctgccca

SEQ ID NO: 446455 - DNA, 15 bp, Homo sapiens
gctcgtgatctgccc

SEQ ID NO: 446456 - DNA, 15 bp, Homo sapiens
agctcgtgatctgcc

SEQ ID NO: 446457 - DNA, 15 bp, Homo sapiens
gagctcgtgatctgc

SEQ ID NO: 446458 - DNA, 15 bp, Homo sapiens
tgagctcgtgatctg

SEQ ID NO: 446459 - DNA, 15 bp, Homo sapiens
ctgagctcgtgatct

SEQ ID NO: 446460 - DNA, 15 bp, Homo sapiens
cctgagctcgtgatc

SEQ ID NO: 446461 - DNA, 15 bp, Homo sapiens
tcctgagctcgtgat

SEQ ID NO: 446462 - DNA, 15 bp, Homo sapiens
ctcctgagctcgtga

SEQ ID NO: 446463 - DNA, 15 bp, Homo sapiens
tctcctgagctcgtg

SEQ ID NO: 446464 - DNA, 15 bp, Homo sapiens
atctcctgagctcgt

SEQ ID NO: 446465 - DNA, 15 bp, Homo sapiens
gatctcctgagctcg

SEQ ID NO: 446466 - DNA, 15 bp, Homo sapiens
cgatctcctgagctc

SEQ ID NO: 446467 - DNA, 15 bp, Homo sapiens
tcgatctcctgagct

SEQ ID NO: 446468 - DNA, 15 bp, Homo sapiens
ctcgatctcctgagc

SEQ ID NO: 446469 - DNA, 15 bp, Homo sapiens
tctcgatctcctgag

SEQ ID NO: 446470 - DNA, 15 bp, Homo sapiens
gtctcgatctcctga

SEQ ID NO: 446471 - DNA, 15 bp, Homo sapiens
ggtctcgatctcctg

SEQ ID NO: 446472 - DNA, 15 bp, Homo sapiens
tggtctcgatctcct

SEQ ID NO: 446473 - DNA, 15 bp, Homo sapiens
atggtctcgatctcc

SEQ ID NO: 446474 - DNA, 15 bp, Homo sapiens
gatggtctcgatctc

SEQ ID NO: 446475 - DNA, 15 bp, Homo sapiens
ggatggtctcgatct

SEQ ID NO: 446476 - DNA, 15 bp, Homo sapiens
aggatggtctcgatc

SEQ ID NO: 446477 - DNA, 15 bp, Homo sapiens
caggatggtctcgat

SEQ ID NO: 446478 - DNA, 15 bp, Homo sapiens
ccaggatggtctcga

SEQ ID NO: 446479 - DNA, 15 bp, Homo sapiens
gccaggatggtctcg

SEQ ID NO: 446480 - DNA, 15 bp, Homo sapiens
agccaggatggtctc

SEQ ID NO: 446481 - DNA, 15 bp, Homo sapiens
tagccaggatggtct

SEQ ID NO: 446482 - DNA, 15 bp, Homo sapiens
ttagccaggatggtc

SEQ ID NO: 446483 - DNA, 15 bp, Homo sapiens
gttagccaggatggt

SEQ ID NO: 446484 - DNA, 15 bp, Homo sapiens
tgttagccaggatgg

SEQ ID NO: 446485 - DNA, 15 bp, Homo sapiens
gtgttagccaggatg

SEQ ID NO: 446486 - DNA, 15 bp, Homo sapiens
cgtgttagccaggat

SEQ ID NO: 446487 - DNA, 15 bp, Homo sapiens
ccgtgttagccagga

SEQ ID NO: 446488 - DNA, 15 bp, Homo sapiens
accgtgttagccagg

SEQ ID NO: 446489 - DNA, 15 bp, Homo sapiens
caccgtgttagccag

SEQ ID NO: 446490 - DNA, 15 bp, Homo sapiens
tcaccgtgttagcca

SEQ ID NO: 446491 - DNA, 15 bp, Homo sapiens
ttcaccgtgttagcc

SEQ ID NO: 446492 - DNA, 15 bp, Homo sapiens
tttcaccgtgttagc

SEQ ID NO: 446493 - DNA, 15 bp, Homo sapiens
gtttcaccgtgttag

SEQ ID NO: 446494 - DNA, 15 bp, Homo sapiens
ggtttcaccgtgtta

SEQ ID NO: 446495 - DNA, 15 bp, Homo sapiens
agggtttcaccgtgt

SEQ ID NO: 446496 - DNA, 15 bp, Homo sapiens
cagggtttcaccgtg

SEQ ID NO: 446497 - DNA, 15 bp, Homo sapiens
acagggtttcaccgt

SEQ ID NO: 446498 - DNA, 15 bp, Homo sapiens
gacagggtttcaccg

SEQ ID NO: 446499 - DNA, 15 bp, Homo sapiens
agacagggtttcacc

SEQ ID NO: 446500 - DNA, 15 bp, Homo sapiens
cttttagtagagaca

SEQ ID NO: 446501 - DNA, 15 bp, Homo sapiens
acttttagtagagac

SEQ ID NO: 446502 - DNA, 15 bp, Homo sapiens
cacttttagtagaga

SEQ ID NO: 446503 - DNA, 15 bp, Homo sapiens
gcacttttagtagag

SEQ ID NO: 446504 - DNA, 15 bp, Homo sapiens
tgcacttttagtaga

SEQ ID NO: 446505 - DNA, 15 bp, Homo sapiens
ttgcacttttagtag

SEQ ID NO: 446506 - DNA, 15 bp, Homo sapiens
tttgcacttttagta

SEQ ID NO: 446507 - DNA, 15 bp, Homo sapiens
ttttgcacttttagt

SEQ ID NO: 446508 - DNA, 15 bp, Homo sapiens
tttttgcacttttag

SEQ ID NO: 446509 - DNA, 15 bp, Homo sapiens
atttttgcactttta

SEQ ID NO: 446510 - DNA, 15 bp, Homo sapiens
aatttttgcactttt

SEQ ID NO: 446511 - DNA, 15 bp, Homo sapiens
taatttttgcacttt

SEQ ID NO: 446512 - DNA, 15 bp, Homo sapiens
ctaatttttgcactt

SEQ ID NO: 446513 - DNA, 15 bp, Homo sapiens
gctaatttttgcact

SEQ ID NO: 446514 - DNA, 15 bp, Homo sapiens
ggctaatttttgcac

SEQ ID NO: 446515 - DNA, 15 bp, Homo sapiens
tggctaatttttgca

SEQ ID NO: 446516 - DNA, 15 bp, Homo sapiens
ctggctaatttttgc

SEQ ID NO: 446517 - DNA, 15 bp, Homo sapiens
cgccaccatgcctgg

SEQ ID NO: 446518 - DNA, 15 bp, Homo sapiens
ccgccaccatgcctg

SEQ ID NO: 446519 - DNA, 15 bp, Homo sapiens
cccgccaccatgcct

SEQ ID NO: 446520 - DNA, 15 bp, Homo sapiens
gcccgccaccatgcc

SEQ ID NO: 446521 - DNA, 15 bp, Homo sapiens
tgcccgccaccatgc

SEQ ID NO: 446522 - DNA, 15 bp, Homo sapiens
gtgcccgccaccatg

SEQ ID NO: 446523 - DNA, 15 bp, Homo sapiens
ggtgcccgccaccat

SEQ ID NO: 446524 - DNA, 15 bp, Homo sapiens
aggtgcccgccacca

SEQ ID NO: 446525 - DNA, 15 bp, Homo sapiens
caggtgcccgccacc

SEQ ID NO: 446526 - DNA, 15 bp, Homo sapiens
acaggtgcccgccac

SEQ ID NO: 446527 - DNA, 15 bp, Homo sapiens
tacaggtgcccgcca

SEQ ID NO: 446528 - DNA, 15 bp, Homo sapiens
ctacaggtgcccgcc

SEQ ID NO: 446529 - DNA, 15 bp, Homo sapiens
actacaggtgcccgc

SEQ ID NO: 446530 - DNA, 15 bp, Homo sapiens
gactacaggtgcccg

SEQ ID NO: 446531 - DNA, 15 bp, Homo sapiens
ggactacaggtgccc

SEQ ID NO: 446532 - DNA, 15 bp, Homo sapiens
gggactacaggtgcc

SEQ ID NO: 446533 - DNA, 15 bp, Homo sapiens
tgggactacaggtgc

SEQ ID NO: 446534 - DNA, 15 bp, Homo sapiens
ctgggactacaggtg

SEQ ID NO: 446535 - DNA, 15 bp, Homo sapiens
actgggactacaggt

SEQ ID NO: 446536 - DNA, 15 bp, Homo sapiens
aactgggactacagg

SEQ ID NO: 446537 - DNA, 15 bp, Homo sapiens
taactgggactacag

SEQ ID NO: 446538 - DNA, 15 bp, Homo sapiens
gtaactgggactaca

SEQ ID NO: 446539 - DNA, 15 bp, Homo sapiens
agtaactgggactac

SEQ ID NO: 446540 - DNA, 15 bp, Homo sapiens
gagtaactgggacta

SEQ ID NO: 446541 - DNA, 15 bp, Homo sapiens
cgagtaactgggact

SEQ ID NO: 446542 - DNA, 15 bp, Homo sapiens
ccgagtaactgggac

SEQ ID NO: 446543 - DNA, 15 bp, Homo sapiens
cccgagtaactggga

SEQ ID NO: 446544 - DNA, 15 bp, Homo sapiens
tcccgagtaactggg

SEQ ID NO: 446545 - DNA, 15 bp, Homo sapiens
ctcccgagtaactgg

SEQ ID NO: 446546 - DNA, 15 bp, Homo sapiens
cctcccgagtaactg

SEQ ID NO: 446547 - DNA, 15 bp, Homo sapiens
gcctcccgagtaact

SEQ ID NO: 446548 - DNA, 15 bp, Homo sapiens
agcctcccgagtaac

SEQ ID NO: 446549 - DNA, 15 bp, Homo sapiens
cagcctcccgagtaa

SEQ ID NO: 446550 - DNA, 15 bp, Homo sapiens
cattctcctgcctca

SEQ ID NO: 446551 - DNA, 15 bp, Homo sapiens
ccattctcctgcctc

SEQ ID NO: 446552 - DNA, 15 bp, Homo sapiens
gccattctcctgcct

SEQ ID NO: 446553 - DNA, 15 bp, Homo sapiens
cgccattctcctgcc

SEQ ID NO: 446554 - DNA, 15 bp, Homo sapiens
acgccattctcctgc

SEQ ID NO: 446555 - DNA, 15 bp, Homo sapiens
cacgccattctcctg

SEQ ID NO: 446556 - DNA, 15 bp, Homo sapiens
tcacgccattctcct

SEQ ID NO: 446557 - DNA, 15 bp, Homo sapiens
ttcacgccattctcc

SEQ ID NO: 446558 - DNA, 15 bp, Homo sapiens
gttcacgccattctc

SEQ ID NO: 446559 - DNA, 15 bp, Homo sapiens
ggttcacgccattct

SEQ ID NO: 446560 - DNA, 15 bp, Homo sapiens
gggttcacgccattc

SEQ ID NO: 446561 - DNA, 15 bp, Homo sapiens
cgggttcacgccatt

SEQ ID NO: 446562 - DNA, 15 bp, Homo sapiens
ccgggttcacgccat

SEQ ID NO: 446563 - DNA, 15 bp, Homo sapiens
tccgggttcacgcca

SEQ ID NO: 446564 - DNA, 15 bp, Homo sapiens
ttccgggttcacgcc

SEQ ID NO: 446565 - DNA, 15 bp, Homo sapiens
cttccgggttcacgc

SEQ ID NO: 446566 - DNA, 15 bp, Homo sapiens
ccttccgggttcacg

SEQ ID NO: 446567 - DNA, 15 bp, Homo sapiens
accttccgggttcac

SEQ ID NO: 446568 - DNA, 15 bp, Homo sapiens
caccttccgggttca

SEQ ID NO: 446569 - DNA, 15 bp, Homo sapiens
ccaccttccgggttc

SEQ ID NO: 446570 - DNA, 15 bp, Homo sapiens
tccaccttccgggtt

SEQ ID NO: 446571 - DNA, 15 bp, Homo sapiens
ctccaccttccgggt

SEQ ID NO: 446572 - DNA, 15 bp, Homo sapiens
gctccaccttccggg

SEQ ID NO: 446573 - DNA, 15 bp, Homo sapiens
agctccaccttccgg

SEQ ID NO: 446574 - DNA, 15 bp, Homo sapiens
aagctccaccttccg

SEQ ID NO: 446575 - DNA, 15 bp, Homo sapiens
caagctccaccttcc

SEQ ID NO: 446576 - DNA, 15 bp, Homo sapiens
gcaagctccaccttc

SEQ ID NO: 446577 - DNA, 15 bp, Homo sapiens
tgcaagctccacctt

SEQ ID NO: 446578 - DNA, 15 bp, Homo sapiens
ctgcaagctccacct

SEQ ID NO: 446579 - DNA, 15 bp, Homo sapiens
actgcaagctccacc

SEQ ID NO: 446580 - DNA, 15 bp, Homo sapiens
cactgcaagctccac

SEQ ID NO: 446581 - DNA, 15 bp, Homo sapiens
tcactgcaagctcca

SEQ ID NO: 446582 - DNA, 15 bp, Homo sapiens
ctcactgcaagctcc

SEQ ID NO: 446583 - DNA, 15 bp, Homo sapiens
actcactgcaagctc

SEQ ID NO: 446584 - DNA, 15 bp, Homo sapiens
gactcactgcaagct

SEQ ID NO: 446585 - DNA, 15 bp, Homo sapiens
tgactcactgcaagc

SEQ ID NO: 446586 - DNA, 15 bp, Homo sapiens
ttgactcactgcaag

SEQ ID NO: 446587 - DNA, 15 bp, Homo sapiens
cttgactcactgcaa

SEQ ID NO: 446588 - DNA, 15 bp, Homo sapiens
tcttgactcactgca

SEQ ID NO: 446589 - DNA, 15 bp, Homo sapiens
atcttgactcactgc

SEQ ID NO: 446590 - DNA, 15 bp, Homo sapiens
tatcttgactcactg

SEQ ID NO: 446591 - DNA, 15 bp, Homo sapiens
ctatcttgactcact

SEQ ID NO: 446592 - DNA, 15 bp, Homo sapiens
actatcttgactcac

SEQ ID NO: 446593 - DNA, 15 bp, Homo sapiens
cactatcttgactca

SEQ ID NO: 446594 - DNA, 15 bp, Homo sapiens
gcactatcttgactc

SEQ ID NO: 446595 - DNA, 15 bp, Homo sapiens
ggcactatcttgact

SEQ ID NO: 446596 - DNA, 15 bp, Homo sapiens
tggcactatcttgac

SEQ ID NO: 446597 - DNA, 15 bp, Homo sapiens
gtggcactatcttga

SEQ ID NO: 446598 - DNA, 15 bp, Homo sapiens
agtggcactatcttg

SEQ ID NO: 446599 - DNA, 15 bp, Homo sapiens
cagtggcactatctt

SEQ ID NO: 446600 - DNA, 15 bp, Homo sapiens
gcagtggcactatct

SEQ ID NO: 446601 - DNA, 15 bp, Homo sapiens
tgcagtggcactatc

SEQ ID NO: 446602 - DNA, 15 bp, Homo sapiens
gtgcagtggcactat

SEQ ID NO: 446603 - DNA, 15 bp, Homo sapiens
agtgcagtggcacta

SEQ ID NO: 446604 - DNA, 15 bp, Homo sapiens
gagtgcagtggcact

SEQ ID NO: 446605 - DNA, 15 bp, Homo sapiens
actctgtcacccagg

SEQ ID NO: 446606 - DNA, 15 bp, Homo sapiens
cactctgtcacccag

SEQ ID NO: 446607 - DNA, 15 bp, Homo sapiens
tcactctgtcaccca

SEQ ID NO: 446608 - DNA, 15 bp, Homo sapiens
ctcactctgtcaccc

SEQ ID NO: 446609 - DNA, 15 bp, Homo sapiens
tctcactctgtcacc

SEQ ID NO: 446610 - DNA, 15 bp, Homo sapiens
gtctcactctgtcac

SEQ ID NO: 446611 - DNA, 15 bp, Homo sapiens
agtctcactctgtca

SEQ ID NO: 446612 - DNA, 15 bp, Homo sapiens
cagtctcactctgtc

SEQ ID NO: 446613 - DNA, 15 bp, Homo sapiens
acagtctcactctgt

SEQ ID NO: 446614 - DNA, 15 bp, Homo sapiens
cacagtctcactctg

SEQ ID NO: 446615 - DNA, 15 bp, Homo sapiens
acacagtctcactct

SEQ ID NO: 446616 - DNA, 15 bp, Homo sapiens
gacacagtctcactc

SEQ ID NO: 446617 - DNA, 15 bp, Homo sapiens
agacacagtctcact

SEQ ID NO: 446618 - DNA, 15 bp, Homo sapiens
gagacacagtctcac

SEQ ID NO: 446619 - DNA, 15 bp, Homo sapiens
tgagacacagtctca

SEQ ID NO: 446620 - DNA, 15 bp, Homo sapiens
ttgagacacagtctc

SEQ ID NO: 446621 - DNA, 15 bp, Homo sapiens
tttgagacacagtct

SEQ ID NO: 446622 - DNA, 15 bp, Homo sapiens
ttttgagacacagtc

SEQ ID NO: 446623 - DNA, 15 bp, Homo sapiens
attttgagacacagt

SEQ ID NO: 446624 - DNA, 15 bp, Homo sapiens
tattttgagacacag

SEQ ID NO: 446625 - DNA, 15 bp, Homo sapiens
ttattttgagacaca

SEQ ID NO: 446626 - DNA, 15 bp, Homo sapiens
tttattttgagacac

SEQ ID NO: 446627 - DNA, 15 bp, Homo sapiens
atttattttgagaca

SEQ ID NO: 446628 - DNA, 15 bp, Homo sapiens
tatttattttgagac

SEQ ID NO: 446629 - DNA, 15 bp, Homo sapiens
ttatttattttgaga

SEQ ID NO: 446630 - DNA, 15 bp, Homo sapiens
tttatttattttgag

SEQ ID NO: 446631 - DNA, 15 bp, Homo sapiens
atttatttattttga

SEQ ID NO: 446632 - DNA, 15 bp, Homo sapiens
tatttatttattttg

SEQ ID NO: 446633 - DNA, 15 bp, Homo sapiens
ttatttatttatttt

SEQ ID NO: 446634 - DNA, 15 bp, Homo sapiens
tttatttatttattt

SEQ ID NO: 446635 - DNA, 15 bp, Homo sapiens
atttatttatttatt

SEQ ID NO: 446636 - DNA, 15 bp, Homo sapiens
tatttatttatttat

SEQ ID NO: 446637 - DNA, 15 bp, Homo sapiens
ttatttatttattta

SEQ ID NO: 446638 - DNA, 15 bp, Homo sapiens
gtatttatttattta

SEQ ID NO: 446639 - DNA, 15 bp, Homo sapiens
tgtatttatttattt

SEQ ID NO: 446640 - DNA, 15 bp, Homo sapiens
ttgtatttatttatt

SEQ ID NO: 446641 - DNA, 15 bp, Homo sapiens
tttgtatttatttat

SEQ ID NO: 446642 - DNA, 15 bp, Homo sapiens
atttgtatttattta

SEQ ID NO: 446643 - DNA, 15 bp, Homo sapiens
tatttgtatttattt

SEQ ID NO: 446644 - DNA, 15 bp, Homo sapiens
ttatttgtatttatt

SEQ ID NO: 446645 - DNA, 15 bp, Homo sapiens
tttatttgtatttat

SEQ ID NO: 446646 - DNA, 15 bp, Homo sapiens
atttatttgtattta

SEQ ID NO: 446647 - DNA, 15 bp, Homo sapiens
tatttatttgtattt

SEQ ID NO: 446648 - DNA, 15 bp, Homo sapiens
ctatttatttgtatt

SEQ ID NO: 446649 - DNA, 15 bp, Homo sapiens
cctatttatttgtat

SEQ ID NO: 446650 - DNA, 15 bp, Homo sapiens
gcctatttatttgta

SEQ ID NO: 446651 - DNA, 15 bp, Homo sapiens
ggcctatttatttgt

SEQ ID NO: 446652 - DNA, 15 bp, Homo sapiens
tggcctatttatttg

SEQ ID NO: 446653 - DNA, 15 bp, Homo sapiens
ctggcctatttattt

SEQ ID NO: 446654 - DNA, 15 bp, Homo sapiens
cctggcctatttatt

SEQ ID NO: 446655 - DNA, 15 bp, Homo sapiens
gcctggcctatttat

SEQ ID NO: 446656 - DNA, 15 bp, Homo sapiens
tgcctggcctattta

SEQ ID NO: 446657 - DNA, 15 bp, Homo sapiens
gtgcctggcctattt

SEQ ID NO: 446658 - DNA, 15 bp, Homo sapiens
tgtgcctggcctatt

SEQ ID NO: 446659 - DNA, 15 bp, Homo sapiens
ctgtgcctggcctat

SEQ ID NO: 446660 - DNA, 15 bp, Homo sapiens
actgtgcctggccta

SEQ ID NO: 446661 - DNA, 15 bp, Homo sapiens
cactgtgcctggcct

SEQ ID NO: 446662 - DNA, 15 bp, Homo sapiens
ccactgtgcctggcc

SEQ ID NO: 446663 - DNA, 15 bp, Homo sapiens
gccactgtgcctggc

SEQ ID NO: 446664 - DNA, 15 bp, Homo sapiens
agccactgtgcctgg

SEQ ID NO: 446665 - DNA, 15 bp, Homo sapiens
gagccactgtgcctg

SEQ ID NO: 446666 - DNA, 15 bp, Homo sapiens
tgagccactgtgcct

SEQ ID NO: 446667 - DNA, 15 bp, Homo sapiens
gtgagccactgtgcc

SEQ ID NO: 446668 - DNA, 15 bp, Homo sapiens
tgtgagccactgtgc

SEQ ID NO: 446669 - DNA, 15 bp, Homo sapiens
gtgtgagccactgtg

SEQ ID NO: 446670 - DNA, 15 bp, Homo sapiens
ggtgtgagccactgt

SEQ ID NO: 446671 - DNA, 15 bp, Homo sapiens
aggtgtgagccactg

SEQ ID NO: 446672 - DNA, 15 bp, Homo sapiens
caggtgtgagccact

SEQ ID NO: 446673 - DNA, 15 bp, Homo sapiens
ggattacaggtgtga

SEQ ID NO: 446674 - DNA, 15 bp, Homo sapiens
gggattacaggtgtg

SEQ ID NO: 446675 - DNA, 15 bp, Homo sapiens
tgggattacaggtgt

SEQ ID NO: 446676 - DNA, 15 bp, Homo sapiens
actgggattacaggt

SEQ ID NO: 446677 - DNA, 15 bp, Homo sapiens
gactgggattacagg

SEQ ID NO: 446678 - DNA, 15 bp, Homo sapiens
cgactgggattacag

SEQ ID NO: 446679 - DNA, 15 bp, Homo sapiens
tcgactgggattaca

SEQ ID NO: 446680 - DNA, 15 bp, Homo sapiens
ctcgactgggattac

SEQ ID NO: 446681 - DNA, 15 bp, Homo sapiens
cctcgactgggatta

SEQ ID NO: 446682 - DNA, 15 bp, Homo sapiens
gcctcgactgggatt

SEQ ID NO: 446683 - DNA, 15 bp, Homo sapiens
tgcctcgactgggat

SEQ ID NO: 446684 - DNA, 15 bp, Homo sapiens
ctgcctcgactggga

SEQ ID NO: 446685 - DNA, 15 bp, Homo sapiens
cctgcctcgactggg

SEQ ID NO: 446686 - DNA, 15 bp, Homo sapiens
tcctgcctcgactgg

SEQ ID NO: 446687 - DNA, 15 bp, Homo sapiens
ctcctgcctcgactg

SEQ ID NO: 446688 - DNA, 15 bp, Homo sapiens
cctcctgcctcgact

SEQ ID NO: 446689 - DNA, 15 bp, Homo sapiens
tcctcctgcctcgac

SEQ ID NO: 446690 - DNA, 15 bp, Homo sapiens
atcctcctgcctcga

SEQ ID NO: 446691 - DNA, 15 bp, Homo sapiens
aatcctcctgcctcg

SEQ ID NO: 446692 - DNA, 15 bp, Homo sapiens
ctcaagcaatcctcc

SEQ ID NO: 446693 - DNA, 15 bp, Homo sapiens
gctcaagcaatcctc

SEQ ID NO: 446694 - DNA, 15 bp, Homo sapiens
ggctcaagcaatcct

SEQ ID NO: 446695 - DNA, 15 bp, Homo sapiens
gggctcaagcaatcc

SEQ ID NO: 446696 - DNA, 15 bp, Homo sapiens
tgggctcaagcaatc

SEQ ID NO: 446697 - DNA, 15 bp, Homo sapiens
ctgggctcaagcaat

SEQ ID NO: 446698 - DNA, 15 bp, Homo sapiens
cctgggctcaagcaa

SEQ ID NO: 446699 - DNA, 15 bp, Homo sapiens
tcctgggctcaagca

SEQ ID NO: 446700 - DNA, 15 bp, Homo sapiens
ctcctgggctcaagc

SEQ ID NO: 446701 - DNA, 15 bp, Homo sapiens
aaactcctgggctca

SEQ ID NO: 446702 - DNA, 15 bp, Homo sapiens
caaactcctgggctc

SEQ ID NO: 446703 - DNA, 15 bp, Homo sapiens
tcaaactcctgggct

SEQ ID NO: 446704 - DNA, 15 bp, Homo sapiens
ctcaaactcctgggc

SEQ ID NO: 446705 - DNA, 15 bp, Homo sapiens
tctcaaactcctggg

SEQ ID NO: 446706 - DNA, 15 bp, Homo sapiens
gtctcaaactcctgg

SEQ ID NO: 446707 - DNA, 15 bp, Homo sapiens
cccaggctggtctca

SEQ ID NO: 446708 - DNA, 15 bp, Homo sapiens
gcccaggctggtctc

SEQ ID NO: 446709 - DNA, 15 bp, Homo sapiens
tgcccaggctggtct

SEQ ID NO: 446710 - DNA, 15 bp, Homo sapiens
ttgcccaggctggtc

SEQ ID NO: 446711 - DNA, 15 bp, Homo sapiens
gttgcccaggctggt

SEQ ID NO: 446712 - DNA, 15 bp, Homo sapiens
gctgtgttgcccagg

SEQ ID NO: 446713 - DNA, 15 bp, Homo sapiens
cgctgtgttgcccag

SEQ ID NO: 446714 - DNA, 15 bp, Homo sapiens
ccgctgtgttgccca

SEQ ID NO: 446715 - DNA, 15 bp, Homo sapiens
cccgctgtgttgccc

SEQ ID NO: 446716 - DNA, 15 bp, Homo sapiens
tcccgctgtgttgcc

SEQ ID NO: 446717 - DNA, 15 bp, Homo sapiens
gtcccgctgtgttgc

SEQ ID NO: 446718 - DNA, 15 bp, Homo sapiens
ggtcccgctgtgttg

SEQ ID NO: 446719 - DNA, 15 bp, Homo sapiens
gggtcccgctgtgtt

SEQ ID NO: 446720 - DNA, 15 bp, Homo sapiens
ggggtcccgctgtgt

SEQ ID NO: 446721 - DNA, 15 bp, Homo sapiens
tggggtcccgctgtg

SEQ ID NO: 446722 - DNA, 15 bp, Homo sapiens
atggggtcccgctgt

SEQ ID NO: 446723 - DNA, 15 bp, Homo sapiens
gatggggtcccgctg

SEQ ID NO: 446724 - DNA, 15 bp, Homo sapiens
agatggggtcccgct

SEQ ID NO: 446725 - DNA, 15 bp, Homo sapiens
gagatggggtcccgc

SEQ ID NO: 446726 - DNA, 15 bp, Homo sapiens
agagatggggtcccg

SEQ ID NO: 446727 - DNA, 15 bp, Homo sapiens
tagagatggggtccc

SEQ ID NO: 446728 - DNA, 15 bp, Homo sapiens
gtagagatggggtcc

SEQ ID NO: 446729 - DNA, 15 bp, Homo sapiens
tgtagagatggggtc

SEQ ID NO: 446730 - DNA, 15 bp, Homo sapiens
ttgtagagatggggt

SEQ ID NO: 446731 - DNA, 15 bp, Homo sapiens
tttgtagagatgggg

SEQ ID NO: 446732 - DNA, 15 bp, Homo sapiens
ttttgtagagatggg

SEQ ID NO: 446733 - DNA, 15 bp, Homo sapiens
tttttgtagagatgg

SEQ ID NO: 446734 - DNA, 15 bp, Homo sapiens
ttttttgtagagatg

SEQ ID NO: 446735 - DNA, 15 bp, Homo sapiens
tttttttgtagagat

SEQ ID NO: 446736 - DNA, 15 bp, Homo sapiens
ttttttttgtagaga

SEQ ID NO: 446737 - DNA, 15 bp, Homo sapiens
attttttttgtagag

SEQ ID NO: 446738 - DNA, 15 bp, Homo sapiens
aattttttttgtaga

SEQ ID NO: 446739 - DNA, 15 bp, Homo sapiens
aaattttttttgtag

SEQ ID NO: 446740 - DNA, 15 bp, Homo sapiens
aaaattttttttgta

SEQ ID NO: 446741 - DNA, 15 bp, Homo sapiens
taaaattttttttgt

SEQ ID NO: 446742 - DNA, 15 bp, Homo sapiens
ttaaaattttttttg

SEQ ID NO: 446743 - DNA, 15 bp, Homo sapiens
attaaaatttttttt

SEQ ID NO: 446744 - DNA, 15 bp, Homo sapiens
aattaaaattttttt

SEQ ID NO: 446745 - DNA, 15 bp, Homo sapiens
taattaaaatttttt

SEQ ID NO: 446746 - DNA, 15 bp, Homo sapiens
ctaattaaaattttt

SEQ ID NO: 446747 - DNA, 15 bp, Homo sapiens
actaattaaaatttt

SEQ ID NO: 446748 - DNA, 15 bp, Homo sapiens
cactaattaaaattt

SEQ ID NO: 446749 - DNA, 15 bp, Homo sapiens
ccactaattaaaatt

SEQ ID NO: 446750 - DNA, 15 bp, Homo sapiens
cccactaattaaaat

SEQ ID NO: 446751 - DNA, 15 bp, Homo sapiens
ccccactaattaaaa

SEQ ID NO: 446752 - DNA, 15 bp, Homo sapiens
gccccactaattaaa

SEQ ID NO: 446753 - DNA, 15 bp, Homo sapiens
tgccccactaattaa

SEQ ID NO: 446754 - DNA, 15 bp, Homo sapiens
atgccccactaatta

SEQ ID NO: 446755 - DNA, 15 bp, Homo sapiens
tatgccccactaatt

SEQ ID NO: 446756 - DNA, 15 bp, Homo sapiens
ctatgccccactaat

SEQ ID NO: 446757 - DNA, 15 bp, Homo sapiens
actatgccccactaa

SEQ ID NO: 446758 - DNA, 15 bp, Homo sapiens
cactatgccccacta

SEQ ID NO: 446759 - DNA, 15 bp, Homo sapiens
ccactatgccccact

SEQ ID NO: 446760 - DNA, 15 bp, Homo sapiens
gccactatgccccac

SEQ ID NO: 446761 - DNA, 15 bp, Homo sapiens
tgccactatgcccca

SEQ ID NO: 446762 - DNA, 15 bp, Homo sapiens
gtgccactatgcccc

SEQ ID NO: 446763 - DNA, 15 bp, Homo sapiens
tgtgccactatgccc

SEQ ID NO: 446764 - DNA, 15 bp, Homo sapiens
gtgtgccactatgcc

SEQ ID NO: 446765 - DNA, 15 bp, Homo sapiens
tgtgtgccactatgc

SEQ ID NO: 446766 - DNA, 15 bp, Homo sapiens
gtgtgtgccactatg

SEQ ID NO: 446767 - DNA, 15 bp, Homo sapiens
cgtgtgtgccactat

SEQ ID NO: 446768 - DNA, 15 bp, Homo sapiens
acgtgtgtgccacta

SEQ ID NO: 446769 - DNA, 15 bp, Homo sapiens
cacgtgtgtgccact

SEQ ID NO: 446770 - DNA, 15 bp, Homo sapiens
acacgtgtgtgccac

SEQ ID NO: 446771 - DNA, 15 bp, Homo sapiens
tacacgtgtgtgcca

SEQ ID NO: 446772 - DNA, 15 bp, Homo sapiens
ctacacgtgtgtgcc

SEQ ID NO: 446773 - DNA, 15 bp, Homo sapiens
actacacgtgtgtgc

SEQ ID NO: 446774 - DNA, 15 bp, Homo sapiens
gactacacgtgtgtg

SEQ ID NO: 446775 - DNA, 15 bp, Homo sapiens
ggactacacgtgtgt

SEQ ID NO: 446776 - DNA, 15 bp, Homo sapiens
gggactacacgtgtg

SEQ ID NO: 446777 - DNA, 15 bp, Homo sapiens
ggggactacacgtgt

SEQ ID NO: 446778 - DNA, 15 bp, Homo sapiens
tggggactacacgtg

SEQ ID NO: 446779 - DNA, 15 bp, Homo sapiens
gtggggactacacgt

SEQ ID NO: 446780 - DNA, 15 bp, Homo sapiens
agtggggactacacg

SEQ ID NO: 446781 - DNA, 15 bp, Homo sapiens
tagtggggactacac

SEQ ID NO: 446782 - DNA, 15 bp, Homo sapiens
gtagtggggactaca

SEQ ID NO: 446783 - DNA, 15 bp, Homo sapiens
agtagtggggactac

SEQ ID NO: 446784 - DNA, 15 bp, Homo sapiens
gagtagtggggacta

SEQ ID NO: 446785 - DNA, 15 bp, Homo sapiens
tgagtagtggggact

SEQ ID NO: 446786 - DNA, 15 bp, Homo sapiens
ctgagtagtggggac

SEQ ID NO: 446787 - DNA, 15 bp, Homo sapiens
cctgagtagtgggga

SEQ ID NO: 446788 - DNA, 15 bp, Homo sapiens
tcctgagtagtgggg

SEQ ID NO: 446789 - DNA, 15 bp, Homo sapiens
ctcctgagtagtggg

SEQ ID NO: 446790 - DNA, 15 bp, Homo sapiens
cctcctgagtagtgg

SEQ ID NO: 446791 - DNA, 15 bp, Homo sapiens
gcctcctgagtagtg

SEQ ID NO: 446792 - DNA, 15 bp, Homo sapiens
agcctcctgagtagt

SEQ ID NO: 446793 - DNA, 15 bp, Homo sapiens
cagcctcctgagtag

SEQ ID NO: 446794 - DNA, 15 bp, Homo sapiens
tcagcctcctgagta

SEQ ID NO: 446795 - DNA, 15 bp, Homo sapiens
ctcagcctcctgagt

SEQ ID NO: 446796 - DNA, 15 bp, Homo sapiens
cctcagcctcctgag

SEQ ID NO: 446797 - DNA, 15 bp, Homo sapiens
acctcagcctcctga

SEQ ID NO: 446798 - DNA, 15 bp, Homo sapiens
cacctcagcctcctg

SEQ ID NO: 446799 - DNA, 15 bp, Homo sapiens
gttctcccacctcag

SEQ ID NO: 446800 - DNA, 15 bp, Homo sapiens
tgttctcccacctca

SEQ ID NO: 446801 - DNA, 15 bp, Homo sapiens
ctgttctcccacctc

SEQ ID NO: 446802 - DNA, 15 bp, Homo sapiens
gctgttctcccacct

SEQ ID NO: 446803 - DNA, 15 bp, Homo sapiens
agctgttctcccacc

SEQ ID NO: 446804 - DNA, 15 bp, Homo sapiens
aagctgttctcccac

SEQ ID NO: 446805 - DNA, 15 bp, Homo sapiens
caagctgttctccca

SEQ ID NO: 446806 - DNA, 15 bp, Homo sapiens
tcaagctgttctccc

SEQ ID NO: 446807 - DNA, 15 bp, Homo sapiens
ctcaagctgttctcc

SEQ ID NO: 446808 - DNA, 15 bp, Homo sapiens
gctcaagctgttctc

SEQ ID NO: 446809 - DNA, 15 bp, Homo sapiens
ggctcaagctgttct

SEQ ID NO: 446810 - DNA, 15 bp, Homo sapiens
gggctcaagctgttc

SEQ ID NO: 446811 - DNA, 15 bp, Homo sapiens
tgggctcaagctgtt

SEQ ID NO: 446812 - DNA, 15 bp, Homo sapiens
ctgggctcaagctgt

SEQ ID NO: 446813 - DNA, 15 bp, Homo sapiens
cctgggctcaagctg

SEQ ID NO: 446814 - DNA, 15 bp, Homo sapiens
tcctgggctcaagct

SEQ ID NO: 446815 - DNA, 15 bp, Homo sapiens
cctcctgggctcaag

SEQ ID NO: 446816 - DNA, 15 bp, Homo sapiens
acctcctgggctcaa

SEQ ID NO: 446817 - DNA, 15 bp, Homo sapiens
gacctcctgggctca

SEQ ID NO: 446818 - DNA, 15 bp, Homo sapiens
cgacctcctgggctc

SEQ ID NO: 446819 - DNA, 15 bp, Homo sapiens
tcgacctcctgggct

SEQ ID NO: 446820 - DNA, 15 bp, Homo sapiens
ctcgacctcctgggc

SEQ ID NO: 446821 - DNA, 15 bp, Homo sapiens
cctcgacctcctggg

SEQ ID NO: 446822 - DNA, 15 bp, Homo sapiens
gcctcgacctcctgg

SEQ ID NO: 446823 - DNA, 15 bp, Homo sapiens
agcctcgacctcctg

SEQ ID NO: 446824 - DNA, 15 bp, Homo sapiens
cagcctcgacctcct

SEQ ID NO: 446825 - DNA, 15 bp, Homo sapiens
gcagcctcgacctcc

SEQ ID NO: 446826 - DNA, 15 bp, Homo sapiens
tgcagcctcgacctc

SEQ ID NO: 446827 - DNA, 15 bp, Homo sapiens
ttgcagcctcgacct

SEQ ID NO: 446828 - DNA, 15 bp, Homo sapiens
cttgcagcctcgacc

SEQ ID NO: 446829 - DNA, 15 bp, Homo sapiens
acttgcagcctcgac

SEQ ID NO: 446830 - DNA, 15 bp, Homo sapiens
cacttgcagcctcga

SEQ ID NO: 446831 - DNA, 15 bp, Homo sapiens
tcacttgcagcctcg

SEQ ID NO: 446832 - DNA, 15 bp, Homo sapiens
ctcacttgcagcctc

SEQ ID NO: 446833 - DNA, 15 bp, Homo sapiens
actcacttgcagcct

SEQ ID NO: 446834 - DNA, 15 bp, Homo sapiens
gactcacttgcagcc

SEQ ID NO: 446835 - DNA, 15 bp, Homo sapiens
tgactcacttgcagc

SEQ ID NO: 446836 - DNA, 15 bp, Homo sapiens
atgactcacttgcag

SEQ ID NO: 446837 - DNA, 15 bp, Homo sapiens
catgactcacttgca

SEQ ID NO: 446838 - DNA, 15 bp, Homo sapiens
tcatgactcacttgc

SEQ ID NO: 446839 - DNA, 15 bp, Homo sapiens
atcatgactcacttg

SEQ ID NO: 446840 - DNA, 15 bp, Homo sapiens
gatcatgactcactt

SEQ ID NO: 446841 - DNA, 15 bp, Homo sapiens
ggatcatgactcact

SEQ ID NO: 446842 - DNA, 15 bp, Homo sapiens
aggatcatgactcac

SEQ ID NO: 446843 - DNA, 15 bp, Homo sapiens
caggatcatgactca

SEQ ID NO: 446844 - DNA, 15 bp, Homo sapiens
gcaggatcatgactc

SEQ ID NO: 446845 - DNA, 15 bp, Homo sapiens
ggcaggatcatgact

SEQ ID NO: 446846 - DNA, 15 bp, Homo sapiens
tggcaggatcatgac

SEQ ID NO: 446847 - DNA, 15 bp, Homo sapiens
gtggcaggatcatga

SEQ ID NO: 446848 - DNA, 15 bp, Homo sapiens
agtggcaggatcatg

SEQ ID NO: 446849 - DNA, 15 bp, Homo sapiens
cagtggcaggatcat

SEQ ID NO: 446850 - DNA, 15 bp, Homo sapiens
gcagtggcaggatca

SEQ ID NO: 446851 - DNA, 15 bp, Homo sapiens
tgcagtggcaggatc

SEQ ID NO: 446852 - DNA, 15 bp, Homo sapiens
gtgcagtggcaggat

SEQ ID NO: 446853 - DNA, 15 bp, Homo sapiens
agtgcagtggcagga

SEQ ID NO: 446854 - DNA, 15 bp, Homo sapiens
gagtgcagtggcagg

SEQ ID NO: 446855 - DNA, 15 bp, Homo sapiens
ggagtgcagtggcag

SEQ ID NO: 446856 - DNA, 15 bp, Homo sapiens
agctggagtgcagtg

SEQ ID NO: 446857 - DNA, 15 bp, Homo sapiens
cagctggagtgcagt

SEQ ID NO: 446858 - DNA, 15 bp, Homo sapiens
ccagctggagtgcag

SEQ ID NO: 446859 - DNA, 15 bp, Homo sapiens
cccagctggagtgca

SEQ ID NO: 446860 - DNA, 15 bp, Homo sapiens
ccccagctggagtgc

SEQ ID NO: 446861 - DNA, 15 bp, Homo sapiens
accccagctggagtg

SEQ ID NO: 446862 - DNA, 15 bp, Homo sapiens
caccccagctggagt

SEQ ID NO: 446863 - DNA, 15 bp, Homo sapiens
acaccccagctggag

SEQ ID NO: 446864 - DNA, 15 bp, Homo sapiens
gacaccccagctgga

SEQ ID NO: 446865 - DNA, 15 bp, Homo sapiens
tgacaccccagctgg

SEQ ID NO: 446866 - DNA, 15 bp, Homo sapiens
ttgacaccccagctg

SEQ ID NO: 446867 - DNA, 15 bp, Homo sapiens
tttgacaccccagct

SEQ ID NO: 446868 - DNA, 15 bp, Homo sapiens
ttttgacaccccagc

SEQ ID NO: 446869 - DNA, 15 bp, Homo sapiens
attttgacaccccag

SEQ ID NO: 446870 - DNA, 15 bp, Homo sapiens
cattttgacacccca

SEQ ID NO: 446871 - DNA, 15 bp, Homo sapiens
tcattttgacacccc

SEQ ID NO: 446872 - DNA, 15 bp, Homo sapiens
ctcattttgacaccc

SEQ ID NO: 446873 - DNA, 15 bp, Homo sapiens
tctcattttgacacc

SEQ ID NO: 446874 - DNA, 15 bp, Homo sapiens
gtctcattttgacac

SEQ ID NO: 446875 - DNA, 15 bp, Homo sapiens
ggtctcattttgaca

SEQ ID NO: 446876 - DNA, 15 bp, Homo sapiens
gggtctcattttgac

SEQ ID NO: 446877 - DNA, 15 bp, Homo sapiens
tgggtctcattttga

SEQ ID NO: 446878 - DNA, 15 bp, Homo sapiens
ctgggtctcattttg

SEQ ID NO: 446879 - DNA, 15 bp, Homo sapiens
actgggtctcatttt

SEQ ID NO: 446880 - DNA, 15 bp, Homo sapiens
gactgggtctcattt

SEQ ID NO: 446881 - DNA, 15 bp, Homo sapiens
agactgggtctcatt

SEQ ID NO: 446882 - DNA, 15 bp, Homo sapiens
gagactgggtctcat

SEQ ID NO: 446883 - DNA, 15 bp, Homo sapiens
tgagactgggtctca

SEQ ID NO: 446884 - DNA, 15 bp, Homo sapiens
ttgagactgggtctc

SEQ ID NO: 446885 - DNA, 15 bp, Homo sapiens
tttgagactgggtct

SEQ ID NO: 446886 - DNA, 15 bp, Homo sapiens
ttttgagactgggtc

SEQ ID NO: 446887 - DNA, 15 bp, Homo sapiens
attttgagactgggt

SEQ ID NO: 446888 - DNA, 15 bp, Homo sapiens
tattttgagactggg

SEQ ID NO: 446889 - DNA, 15 bp, Homo sapiens
ttattttgagactgg

SEQ ID NO: 446890 - DNA, 15 bp, Homo sapiens
tttattttgagactg

SEQ ID NO: 446891 - DNA, 15 bp, Homo sapiens
atttattttgagact

SEQ ID NO: 446892 - DNA, 15 bp, Homo sapiens
cttatttattttgag

SEQ ID NO: 446893 - DNA, 15 bp, Homo sapiens
acttatttattttga

SEQ ID NO: 446894 - DNA, 15 bp, Homo sapiens
aacttatttattttg

SEQ ID NO: 446895 - DNA, 15 bp, Homo sapiens
taacttatttatttt

SEQ ID NO: 446896 - DNA, 15 bp, Homo sapiens
ttaacttatttattt

SEQ ID NO: 446897 - DNA, 15 bp, Homo sapiens
attaacttatttatt

SEQ ID NO: 446898 - DNA, 15 bp, Homo sapiens
aattaacttatttat

SEQ ID NO: 446899 - DNA, 15 bp, Homo sapiens
taattaacttattta

SEQ ID NO: 446900 - DNA, 15 bp, Homo sapiens
ttaattaacttattt

SEQ ID NO: 446901 - DNA, 15 bp, Homo sapiens
attaattaacttatt

SEQ ID NO: 446902 - DNA, 15 bp, Homo sapiens
aattaattaacttat

SEQ ID NO: 446903 - DNA, 15 bp, Homo sapiens
taattaattaactta

SEQ ID NO: 446904 - DNA, 15 bp, Homo sapiens
ttaattaattaactt

SEQ ID NO: 446905 - DNA, 15 bp, Homo sapiens
tttaattaattaact

SEQ ID NO: 446906 - DNA, 15 bp, Homo sapiens
ttttaattaattaac

SEQ ID NO: 446907 - DNA, 15 bp, Homo sapiens
tttttaattaattaa

SEQ ID NO: 446908 - DNA, 15 bp, Homo sapiens
gtttttaattaatta

SEQ ID NO: 446909 - DNA, 15 bp, Homo sapiens
tgtttttaattaatt

SEQ ID NO: 446910 - DNA, 15 bp, Homo sapiens
gtgtttttaattaat

SEQ ID NO: 446911 - DNA, 15 bp, Homo sapiens
agtgtttttaattaa

SEQ ID NO: 446912 - DNA, 15 bp, Homo sapiens
gagtgtttttaatta

SEQ ID NO: 446913 - DNA, 15 bp, Homo sapiens
tgagtgtttttaatt

SEQ ID NO: 446914 - DNA, 15 bp, Homo sapiens
ctgagtgtttttaat

SEQ ID NO: 446915 - DNA, 15 bp, Homo sapiens
cctgagtgtttttaa

SEQ ID NO: 446916 - DNA, 15 bp, Homo sapiens
ccctgagtgttttta

SEQ ID NO: 446917 - DNA, 15 bp, Homo sapiens
gccctgagtgttttt

SEQ ID NO: 446918 - DNA, 15 bp, Homo sapiens
ggccctgagtgtttt

SEQ ID NO: 446919 - DNA, 15 bp, Homo sapiens
cggccctgagtgttt

SEQ ID NO: 446920 - DNA, 15 bp, Homo sapiens
ccggccctgagtgtt

SEQ ID NO: 446921 - DNA, 15 bp, Homo sapiens
tccggccctgagtgt

SEQ ID NO: 446922 - DNA, 15 bp, Homo sapiens
gtccggccctgagtg

SEQ ID NO: 446923 - DNA, 15 bp, Homo sapiens
cgtccggccctgagt

SEQ ID NO: 446924 - DNA, 15 bp, Homo sapiens
gcgtccggccctgag

SEQ ID NO: 446925 - DNA, 15 bp, Homo sapiens
cgcgtccggccctga

SEQ ID NO: 446926 - DNA, 15 bp, Homo sapiens
ccgcgtccggccctg

SEQ ID NO: 446927 - DNA, 15 bp, Homo sapiens
accgcgtccggccct

SEQ ID NO: 446928 - DNA, 15 bp, Homo sapiens
caccgcgtccggccc

SEQ ID NO: 446929 - DNA, 15 bp, Homo sapiens
ccaccgcgtccggcc

SEQ ID NO: 446930 - DNA, 15 bp, Homo sapiens
gccaccgcgtccggc

SEQ ID NO: 446931 - DNA, 15 bp, Homo sapiens
agccaccgcgtccgg

SEQ ID NO: 446932 - DNA, 15 bp, Homo sapiens
gagccaccgcgtccg

SEQ ID NO: 446933 - DNA, 15 bp, Homo sapiens
tgagccaccgcgtcc

SEQ ID NO: 446934 - DNA, 15 bp, Homo sapiens
gtgagccaccgcgtc

SEQ ID NO: 446935 - DNA, 15 bp, Homo sapiens
ggtgagccaccgcgt

SEQ ID NO: 446936 - DNA, 15 bp, Homo sapiens
aggtgagccaccgcg

SEQ ID NO: 446937 - DNA, 15 bp, Homo sapiens
caggtgagccaccgc

SEQ ID NO: 446938 - DNA, 15 bp, Homo sapiens
acaggtgagccaccg

SEQ ID NO: 446939 - DNA, 15 bp, Homo sapiens
tacaggtgagccacc

SEQ ID NO: 446940 - DNA, 15 bp, Homo sapiens
ttacaggtgagccac

SEQ ID NO: 446941 - DNA, 15 bp, Homo sapiens
attacaggtgagcca

SEQ ID NO: 446942 - DNA, 15 bp, Homo sapiens
gattacaggtgagcc

SEQ ID NO: 446943 - DNA, 15 bp, Homo sapiens
ggattacaggtgagc

SEQ ID NO: 446944 - DNA, 15 bp, Homo sapiens
gggattacaggtgag

SEQ ID NO: 446945 - DNA, 15 bp, Homo sapiens
ggggattacaggtga

SEQ ID NO: 446946 - DNA, 15 bp, Homo sapiens
tggggattacaggtg

SEQ ID NO: 446947 - DNA, 15 bp, Homo sapiens
gtggggattacaggt

SEQ ID NO: 446948 - DNA, 15 bp, Homo sapiens
tgtggggattacagg

SEQ ID NO: 446949 - DNA, 15 bp, Homo sapiens
atgtggggattacag

SEQ ID NO: 446950 - DNA, 15 bp, Homo sapiens
aatgtggggattaca

SEQ ID NO: 446951 - DNA, 15 bp, Homo sapiens
aaatgtggggattac

SEQ ID NO: 446952 - DNA, 15 bp, Homo sapiens
aaaatgtggggatta

SEQ ID NO: 446953 - DNA, 15 bp, Homo sapiens
caaaatgtggggatt

SEQ ID NO: 446954 - DNA, 15 bp, Homo sapiens
ccaaaatgtggggat

SEQ ID NO: 446955 - DNA, 15 bp, Homo sapiens
cccaaaatgtgggga

SEQ ID NO: 446956 - DNA, 15 bp, Homo sapiens
tcccaaaatgtgggg

SEQ ID NO: 446957 - DNA, 15 bp, Homo sapiens
ctcccaaaatgtggg

SEQ ID NO: 446958 - DNA, 15 bp, Homo sapiens
tctcccaaaatgtgg

SEQ ID NO: 446959 - DNA, 15 bp, Homo sapiens
gtctcccaaaatgtg

SEQ ID NO: 446960 - DNA, 15 bp, Homo sapiens
ggtctcccaaaatgt

SEQ ID NO: 446961 - DNA, 15 bp, Homo sapiens
tggtctcccaaaatg

SEQ ID NO: 446962 - DNA, 15 bp, Homo sapiens
ttggtctcccaaaat

SEQ ID NO: 446963 - DNA, 15 bp, Homo sapiens
cttggtctcccaaaa

SEQ ID NO: 446964 - DNA, 15 bp, Homo sapiens
ccttggtctcccaaa

SEQ ID NO: 446965 - DNA, 15 bp, Homo sapiens
gccttggtctcccaa

SEQ ID NO: 446966 - DNA, 15 bp, Homo sapiens
cgccttggtctccca

SEQ ID NO: 446967 - DNA, 15 bp, Homo sapiens
ccgccttggtctccc

SEQ ID NO: 446968 - DNA, 15 bp, Homo sapiens
cccgccttggtctcc

SEQ ID NO: 446969 - DNA, 15 bp, Homo sapiens
acccgccttggtctc

SEQ ID NO: 446970 - DNA, 15 bp, Homo sapiens
cacccgccttggtct

SEQ ID NO: 446971 - DNA, 15 bp, Homo sapiens
ccacccgccttggtc

SEQ ID NO: 446972 - DNA, 15 bp, Homo sapiens
cccacccgccttggt

SEQ ID NO: 446973 - DNA, 15 bp, Homo sapiens
acccacccgccttgg

SEQ ID NO: 446974 - DNA, 15 bp, Homo sapiens
gacccacccgccttg

SEQ ID NO: 446975 - DNA, 15 bp, Homo sapiens
tgacccacccgcctt

SEQ ID NO: 446976 - DNA, 15 bp, Homo sapiens
gtgacccacccgcct

SEQ ID NO: 446977 - DNA, 15 bp, Homo sapiens
agtgacccacccgcc

SEQ ID NO: 446978 - DNA, 15 bp, Homo sapiens
aagtgacccacccgc

SEQ ID NO: 446979 - DNA, 15 bp, Homo sapiens
caagtgacccacccg

SEQ ID NO: 446980 - DNA, 15 bp, Homo sapiens
tcaagtgacccaccc

SEQ ID NO: 446981 - DNA, 15 bp, Homo sapiens
ctcaagtgacccacc

SEQ ID NO: 446982 - DNA, 15 bp, Homo sapiens
gctcaagtgacccac

SEQ ID NO: 446983 - DNA, 15 bp, Homo sapiens
ggctcaagtgaccca

SEQ ID NO: 446984 - DNA, 15 bp, Homo sapiens
gggctcaagtgaccc

SEQ ID NO: 446985 - DNA, 15 bp, Homo sapiens
tgggctcaagtgacc

SEQ ID NO: 446986 - DNA, 15 bp, Homo sapiens
ctgggctcaagtgac

SEQ ID NO: 446987 - DNA, 15 bp, Homo sapiens
tgaactcctgggctc

SEQ ID NO: 446988 - DNA, 15 bp, Homo sapiens
ttgaactcctgggct

SEQ ID NO: 446989 - DNA, 15 bp, Homo sapiens
cttgaactcctgggc

SEQ ID NO: 446990 - DNA, 15 bp, Homo sapiens
tcttgaactcctggg

SEQ ID NO: 446991 - DNA, 15 bp, Homo sapiens
gtcttgaactcctgg

SEQ ID NO: 446992 - DNA, 15 bp, Homo sapiens
actggtcttgaactc

SEQ ID NO: 446993 - DNA, 15 bp, Homo sapiens
gactggtcttgaact

SEQ ID NO: 446994 - DNA, 15 bp, Homo sapiens
agactggtcttgaac

SEQ ID NO: 446995 - DNA, 15 bp, Homo sapiens
cagactggtcttgaa

SEQ ID NO: 446996 - DNA, 15 bp, Homo sapiens
ccagactggtcttga

SEQ ID NO: 446997 - DNA, 15 bp, Homo sapiens
gccagactggtcttg

SEQ ID NO: 446998 - DNA, 15 bp, Homo sapiens
ggccagactggtctt

SEQ ID NO: 446999 - DNA, 15 bp, Homo sapiens
tggccagactggtct

SEQ ID NO: 447000 - DNA, 15 bp, Homo sapiens
ttggccagactggtc

SEQ ID NO: 447001 - DNA, 15 bp, Homo sapiens
gttggccagactggt

SEQ ID NO: 447002 - DNA, 15 bp, Homo sapiens
tgttggccagactgg

SEQ ID NO: 447003 - DNA, 15 bp, Homo sapiens
atgttggccagactg

SEQ ID NO: 447004 - DNA, 15 bp, Homo sapiens
catgttggccagact

SEQ ID NO: 447005 - DNA, 15 bp, Homo sapiens
ccatgttggccagac

SEQ ID NO: 447006 - DNA, 15 bp, Homo sapiens
accatgttggccaga

SEQ ID NO: 447007 - DNA, 15 bp, Homo sapiens
agtttcaccatgttg

SEQ ID NO: 447008 - DNA, 15 bp, Homo sapiens
gagtttcaccatgtt

SEQ ID NO: 447009 - DNA, 15 bp, Homo sapiens
ggagtttcaccatgt

SEQ ID NO: 447010 - DNA, 15 bp, Homo sapiens
tggagtttcaccatg

SEQ ID NO: 447011 - DNA, 15 bp, Homo sapiens
atggagtttcaccat

SEQ ID NO: 447012 - DNA, 15 bp, Homo sapiens
gatggagtttcacca

SEQ ID NO: 447013 - DNA, 15 bp, Homo sapiens
agatggagtttcacc

SEQ ID NO: 447014 - DNA, 15 bp, Homo sapiens
gagatggagtttcac

SEQ ID NO: 447015 - DNA, 15 bp, Homo sapiens
agagatggagtttca

SEQ ID NO: 447016 - DNA, 15 bp, Homo sapiens
tagagatggagtttc

SEQ ID NO: 447017 - DNA, 15 bp, Homo sapiens
gtagagatggagttt

SEQ ID NO: 447018 - DNA, 15 bp, Homo sapiens
agtagagatggagtt

SEQ ID NO: 447019 - DNA, 15 bp, Homo sapiens
tagtagagatggagt

SEQ ID NO: 447020 - DNA, 15 bp, Homo sapiens
ttagtagagatggag

SEQ ID NO: 447021 - DNA, 15 bp, Homo sapiens
tttagtagagatgga

SEQ ID NO: 447022 - DNA, 15 bp, Homo sapiens
cttttagtagagatg

SEQ ID NO: 447023 - DNA, 15 bp, Homo sapiens
acttttagtagagat

SEQ ID NO: 447024 - DNA, 15 bp, Homo sapiens
tacttttagtagaga

SEQ ID NO: 447025 - DNA, 15 bp, Homo sapiens
gtacttttagtagag

SEQ ID NO: 447026 - DNA, 15 bp, Homo sapiens
tgtacttttagtaga

SEQ ID NO: 447027 - DNA, 15 bp, Homo sapiens
ttgtacttttagtag

SEQ ID NO: 447028 - DNA, 15 bp, Homo sapiens
tttgtacttttagta

SEQ ID NO: 447029 - DNA, 15 bp, Homo sapiens
ttttgtacttttagt

SEQ ID NO: 447030 - DNA, 15 bp, Homo sapiens
tttttgtacttttag

SEQ ID NO: 447031 - DNA, 15 bp, Homo sapiens
atttttgtactttta

SEQ ID NO: 447032 - DNA, 15 bp, Homo sapiens
aatttttgtactttt

SEQ ID NO: 447033 - DNA, 15 bp, Homo sapiens
taatttttgtacttt

SEQ ID NO: 447034 - DNA, 15 bp, Homo sapiens
ataatttttgtactt

SEQ ID NO: 447035 - DNA, 15 bp, Homo sapiens
gataatttttgtact

SEQ ID NO: 447036 - DNA, 15 bp, Homo sapiens
agataatttttgtac

SEQ ID NO: 447037 - DNA, 15 bp, Homo sapiens
cagataatttttgta

SEQ ID NO: 447038 - DNA, 15 bp, Homo sapiens
ccagataatttttgt

SEQ ID NO: 447039 - DNA, 15 bp, Homo sapiens
cccagataatttttg

SEQ ID NO: 447040 - DNA, 15 bp, Homo sapiens
gcccagataattttt

SEQ ID NO: 447041 - DNA, 15 bp, Homo sapiens
tgcccagataatttt

SEQ ID NO: 447042 - DNA, 15 bp, Homo sapiens
atgcccagataattt

SEQ ID NO: 447043 - DNA, 15 bp, Homo sapiens
catgcccagataatt

SEQ ID NO: 447044 - DNA, 15 bp, Homo sapiens
ccatgcccagataat

SEQ ID NO: 447045 - DNA, 15 bp, Homo sapiens
accatgcccagataa

SEQ ID NO: 447046 - DNA, 15 bp, Homo sapiens
caccatgcccagata

SEQ ID NO: 447047 - DNA, 15 bp, Homo sapiens
ccaccatgcccagat

SEQ ID NO: 447048 - DNA, 15 bp, Homo sapiens
tccaccatgcccaga

SEQ ID NO: 447049 - DNA, 15 bp, Homo sapiens
ctccaccatgcccag

SEQ ID NO: 447050 - DNA, 15 bp, Homo sapiens
cctccaccatgccca

SEQ ID NO: 447051 - DNA, 15 bp, Homo sapiens
ccctccaccatgccc

SEQ ID NO: 447052 - DNA, 15 bp, Homo sapiens
gccctccaccatgcc

SEQ ID NO: 447053 - DNA, 15 bp, Homo sapiens
cgccctccaccatgc

SEQ ID NO: 447054 - DNA, 15 bp, Homo sapiens
gcgccctccaccatg

SEQ ID NO: 447055 - DNA, 15 bp, Homo sapiens
agcgccctccaccat

SEQ ID NO: 447056 - DNA, 15 bp, Homo sapiens
cagcgccctccacca

SEQ ID NO: 447057 - DNA, 15 bp, Homo sapiens
ccagcgccctccacc

SEQ ID NO: 447058 - DNA, 15 bp, Homo sapiens
gccagcgccctccac

SEQ ID NO: 447059 - DNA, 15 bp, Homo sapiens
agccagcgccctcca

SEQ ID NO: 447060 - DNA, 15 bp, Homo sapiens
cagccagcgccctcc

SEQ ID NO: 447061 - DNA, 15 bp, Homo sapiens
tcagccagcgccctc

SEQ ID NO: 447062 - DNA, 15 bp, Homo sapiens
atcagccagcgccct

SEQ ID NO: 447063 - DNA, 15 bp, Homo sapiens
aatcagccagcgccc

SEQ ID NO: 447064 - DNA, 15 bp, Homo sapiens
taatcagccagcgcc

SEQ ID NO: 447065 - DNA, 15 bp, Homo sapiens
gtaatcagccagcgc

SEQ ID NO: 447066 - DNA, 15 bp, Homo sapiens
tgtaatcagccagcg

SEQ ID NO: 447067 - DNA, 15 bp, Homo sapiens
gtgtaatcagccagc

SEQ ID NO: 447068 - DNA, 15 bp, Homo sapiens
cgtgtaatcagccag

SEQ ID NO: 447069 - DNA, 15 bp, Homo sapiens
ccgtgtaatcagcca

SEQ ID NO: 447070 - DNA, 15 bp, Homo sapiens
accgtgtaatcagcc

SEQ ID NO: 447071 - DNA, 15 bp, Homo sapiens
gaccgtgtaatcagc

SEQ ID NO: 447072 - DNA, 15 bp, Homo sapiens
tgaccgtgtaatcag

SEQ ID NO: 447073 - DNA, 15 bp, Homo sapiens
ctgaccgtgtaatca

SEQ ID NO: 447074 - DNA, 15 bp, Homo sapiens
cctgaccgtgtaatc

SEQ ID NO: 447075 - DNA, 15 bp, Homo sapiens
tcctgaccgtgtaat

SEQ ID NO: 447076 - DNA, 15 bp, Homo sapiens
ctcctgaccgtgtaa

SEQ ID NO: 447077 - DNA, 15 bp, Homo sapiens
actcctgaccgtgta

SEQ ID NO: 447078 - DNA, 15 bp, Homo sapiens
aactcctgaccgtgt

SEQ ID NO: 447079 - DNA, 15 bp, Homo sapiens
aaactcctgaccgtg

SEQ ID NO: 447080 - DNA, 15 bp, Homo sapiens
caaactcctgaccgt

SEQ ID NO: 447081 - DNA, 15 bp, Homo sapiens
tcaaactcctgaccg

SEQ ID NO: 447082 - DNA, 15 bp, Homo sapiens
ttctcaaactcctga

SEQ ID NO: 447083 - DNA, 15 bp, Homo sapiens
gttctcaaactcctg

SEQ ID NO: 447084 - DNA, 15 bp, Homo sapiens
tgttctcaaactcct

SEQ ID NO: 447085 - DNA, 15 bp, Homo sapiens
ctgttctcaaactcc

SEQ ID NO: 447086 - DNA, 15 bp, Homo sapiens
gctgttctcaaactc

SEQ ID NO: 447087 - DNA, 15 bp, Homo sapiens
ggctgttctcaaact

SEQ ID NO: 447088 - DNA, 15 bp, Homo sapiens
aggctgttctcaaac

SEQ ID NO: 447089 - DNA, 15 bp, Homo sapiens
caggctgttctcaaa

SEQ ID NO: 447090 - DNA, 15 bp, Homo sapiens
gccaggctgttctca

SEQ ID NO: 447091 - DNA, 15 bp, Homo sapiens
ggccaggctgttctc

SEQ ID NO: 447092 - DNA, 15 bp, Homo sapiens
tggccaggctgttct

SEQ ID NO: 447093 - DNA, 15 bp, Homo sapiens
ttggccaggctgttc

SEQ ID NO: 447094 - DNA, 15 bp, Homo sapiens
gttggccaggctgtt

SEQ ID NO: 447095 - DNA, 15 bp, Homo sapiens
tgttggccaggctgt

SEQ ID NO: 447096 - DNA, 15 bp, Homo sapiens
ccaccatgttggcca

SEQ ID NO: 447097 - DNA, 15 bp, Homo sapiens
tccaccatgttggcc

SEQ ID NO: 447098 - DNA, 15 bp, Homo sapiens
ttccaccatgttggc

SEQ ID NO: 447099 - DNA, 15 bp, Homo sapiens
gttccaccatgttgg

SEQ ID NO: 447100 - DNA, 15 bp, Homo sapiens
ggttccaccatgttg

SEQ ID NO: 447101 - DNA, 15 bp, Homo sapiens
gggttccaccatgtt

SEQ ID NO: 447102 - DNA, 15 bp, Homo sapiens
ggggttccaccatgt

SEQ ID NO: 447103 - DNA, 15 bp, Homo sapiens
tggggttccaccatg

SEQ ID NO: 447104 - DNA, 15 bp, Homo sapiens
atggggttccaccat

SEQ ID NO: 447105 - DNA, 15 bp, Homo sapiens
gatggggttccacca

SEQ ID NO: 447106 - DNA, 15 bp, Homo sapiens
agatggggttccacc

SEQ ID NO: 447107 - DNA, 15 bp, Homo sapiens
gagatggggttccac

SEQ ID NO: 447108 - DNA, 15 bp, Homo sapiens
agagatggggttcca

SEQ ID NO: 447109 - DNA, 15 bp, Homo sapiens
tagagatggggttcc

SEQ ID NO: 447110 - DNA, 15 bp, Homo sapiens
gtagagatggggttc

SEQ ID NO: 447111 - DNA, 15 bp, Homo sapiens
ctaatttttgtactt

SEQ ID NO: 447112 - DNA, 15 bp, Homo sapiens
gctaatttttgtact

SEQ ID NO: 447113 - DNA, 15 bp, Homo sapiens
ggctaatttttgtac

SEQ ID NO: 447114 - DNA, 15 bp, Homo sapiens
acccggctaattttt

SEQ ID NO: 447115 - DNA, 15 bp, Homo sapiens
cacccggctaatttt

SEQ ID NO: 447116 - DNA, 15 bp, Homo sapiens
acacccggctaattt

SEQ ID NO: 447117 - DNA, 15 bp, Homo sapiens
cacacccggctaatt

SEQ ID NO: 447118 - DNA, 15 bp, Homo sapiens
ccacacccggctaat

SEQ ID NO: 447119 - DNA, 15 bp, Homo sapiens
accacacccggctaa

SEQ ID NO: 447120 - DNA, 15 bp, Homo sapiens
caccacacccggcta

SEQ ID NO: 447121 - DNA, 15 bp, Homo sapiens
ccaccacacccggct

SEQ ID NO: 447122 - DNA, 15 bp, Homo sapiens
gccaccacacccggc

SEQ ID NO: 447123 - DNA, 15 bp, Homo sapiens
cgccaccacacccgg

SEQ ID NO: 447124 - DNA, 15 bp, Homo sapiens
ccgccaccacacccg

SEQ ID NO: 447125 - DNA, 15 bp, Homo sapiens
cccgccaccacaccc

SEQ ID NO: 447126 - DNA, 15 bp, Homo sapiens
gcccgccaccacacc

SEQ ID NO: 447127 - DNA, 15 bp, Homo sapiens
tgcccgccaccacac

SEQ ID NO: 447128 - DNA, 15 bp, Homo sapiens
gtgcccgccaccaca

SEQ ID NO: 447129 - DNA, 15 bp, Homo sapiens
ggtgcccgccaccac

SEQ ID NO: 447130 - DNA, 15 bp, Homo sapiens
ttacaggtgcccgcc

SEQ ID NO: 447131 - DNA, 15 bp, Homo sapiens
attacaggtgcccgc

SEQ ID NO: 447132 - DNA, 15 bp, Homo sapiens
gattacaggtgcccg

SEQ ID NO: 447133 - DNA, 15 bp, Homo sapiens
ggattacaggtgccc

SEQ ID NO: 447134 - DNA, 15 bp, Homo sapiens
cctcctgagtagctg

SEQ ID NO: 447135 - DNA, 15 bp, Homo sapiens
gcctcctgagtagct

SEQ ID NO: 447136 - DNA, 15 bp, Homo sapiens
agcctcctgagtagc

SEQ ID NO: 447137 - DNA, 15 bp, Homo sapiens
tgcctcagcctcctg

SEQ ID NO: 447138 - DNA, 15 bp, Homo sapiens
atgcctcagcctcct

SEQ ID NO: 447139 - DNA, 15 bp, Homo sapiens
catgcctcagcctcc

SEQ ID NO: 447140 - DNA, 15 bp, Homo sapiens
tcatgcctcagcctc

SEQ ID NO: 447141 - DNA, 15 bp, Homo sapiens
ctcatgcctcagcct

SEQ ID NO: 447142 - DNA, 15 bp, Homo sapiens
tctcatgcctcagcc

SEQ ID NO: 447143 - DNA, 15 bp, Homo sapiens
ttctcatgcctcagc

SEQ ID NO: 447144 - DNA, 15 bp, Homo sapiens
attctcatgcctcag

SEQ ID NO: 447145 - DNA, 15 bp, Homo sapiens
gattctcatgcctca

SEQ ID NO: 447146 - DNA, 15 bp, Homo sapiens
cgattctcatgcctc

SEQ ID NO: 447147 - DNA, 15 bp, Homo sapiens
gcgattctcatgcct

SEQ ID NO: 447148 - DNA, 15 bp, Homo sapiens
agcgattctcatgcc

SEQ ID NO: 447149 - DNA, 15 bp, Homo sapiens
aagcgattctcatgc

SEQ ID NO: 447150 - DNA, 15 bp, Homo sapiens
caagcgattctcatg

SEQ ID NO: 447151 - DNA, 15 bp, Homo sapiens
tcaagcgattctcat

SEQ ID NO: 447152 - DNA, 15 bp, Homo sapiens
ttcaagcgattctca

SEQ ID NO: 447153 - DNA, 15 bp, Homo sapiens
tttcaagcgattctc

SEQ ID NO: 447154 - DNA, 15 bp, Homo sapiens
gtttcaagcgattct

SEQ ID NO: 447155 - DNA, 15 bp, Homo sapiens
ggtttcaagcgattc

SEQ ID NO: 447156 - DNA, 15 bp, Homo sapiens
tggtttcaagcgatt

SEQ ID NO: 447157 - DNA, 15 bp, Homo sapiens
ctggtttcaagcgat

SEQ ID NO: 447158 - DNA, 15 bp, Homo sapiens
cctggtttcaagcga

SEQ ID NO: 447159 - DNA, 15 bp, Homo sapiens
tcctggtttcaagcg

SEQ ID NO: 447160 - DNA, 15 bp, Homo sapiens
ctcctggtttcaagc

SEQ ID NO: 447161 - DNA, 15 bp, Homo sapiens
cctcctggtttcaag

SEQ ID NO: 447162 - DNA, 15 bp, Homo sapiens
gcctcctggtttcaa

SEQ ID NO: 447163 - DNA, 15 bp, Homo sapiens
tgcctcctggtttca

SEQ ID NO: 447164 - DNA, 15 bp, Homo sapiens
ctgcctcctggtttc

SEQ ID NO: 447165 - DNA, 15 bp, Homo sapiens
tctgcctcctggttt

SEQ ID NO: 447166 - DNA, 15 bp, Homo sapiens
ctctgcctcctggtt

SEQ ID NO: 447167 - DNA, 15 bp, Homo sapiens
cctctgcctcctggt

SEQ ID NO: 447168 - DNA, 15 bp, Homo sapiens
acactgcaacctctg

SEQ ID NO: 447169 - DNA, 15 bp, Homo sapiens
cacactgcaacctct

SEQ ID NO: 447170 - DNA, 15 bp, Homo sapiens
gcacactgcaacctc

SEQ ID NO: 447171 - DNA, 15 bp, Homo sapiens
ggcacactgcaacct

SEQ ID NO: 447172 - DNA, 15 bp, Homo sapiens
cggcacactgcaacc

SEQ ID NO: 447173 - DNA, 15 bp, Homo sapiens
tcggcacactgcaac

SEQ ID NO: 447174 - DNA, 15 bp, Homo sapiens
ctcggcacactgcaa

SEQ ID NO: 447175 - DNA, 15 bp, Homo sapiens
tctcggcacactgca

SEQ ID NO: 447176 - DNA, 15 bp, Homo sapiens
atctcggcacactgc

SEQ ID NO: 447177 - DNA, 15 bp, Homo sapiens
aatctcggcacactg

SEQ ID NO: 447178 - DNA, 15 bp, Homo sapiens
taatctcggcacact

SEQ ID NO: 447179 - DNA, 15 bp, Homo sapiens
gtaatctcggcacac

SEQ ID NO: 447180 - DNA, 15 bp, Homo sapiens
tgtaatctcggcaca

SEQ ID NO: 447181 - DNA, 15 bp, Homo sapiens
gtgtaatctcggcac

SEQ ID NO: 447182 - DNA, 15 bp, Homo sapiens
ggtgtaatctcggca

SEQ ID NO: 447183 - DNA, 15 bp, Homo sapiens
tggtgtaatctcggc

SEQ ID NO: 447184 - DNA, 15 bp, Homo sapiens
gtggtgtaatctcgg

SEQ ID NO: 447185 - DNA, 15 bp, Homo sapiens
agtggtgtaatctcg

SEQ ID NO: 447186 - DNA, 15 bp, Homo sapiens
cagtggtgtaatctc

SEQ ID NO: 447187 - DNA, 15 bp, Homo sapiens
gcagtggtgtaatct

SEQ ID NO: 447188 - DNA, 15 bp, Homo sapiens
tgcagtggtgtaatc

SEQ ID NO: 447189 - DNA, 15 bp, Homo sapiens
gtgcagtggtgtaat

SEQ ID NO: 447190 - DNA, 15 bp, Homo sapiens
agtgcagtggtgtaa

SEQ ID NO: 447191 - DNA, 15 bp, Homo sapiens
gagtgcagtggtgta

SEQ ID NO: 447192 - DNA, 15 bp, Homo sapiens
ggagtgcagtggtgt

SEQ ID NO: 447193 - DNA, 15 bp, Homo sapiens
agtctcactctgtcg

SEQ ID NO: 447194 - DNA, 15 bp, Homo sapiens
gagtctcactctgtc

SEQ ID NO: 447195 - DNA, 15 bp, Homo sapiens
agagtctcactctgt

SEQ ID NO: 447196 - DNA, 15 bp, Homo sapiens
cagagtctcactctg

SEQ ID NO: 447197 - DNA, 15 bp, Homo sapiens
acagagtctcactct

SEQ ID NO: 447198 - DNA, 15 bp, Homo sapiens
gacagagtctcactc

SEQ ID NO: 447199 - DNA, 15 bp, Homo sapiens
agacagagtctcact

SEQ ID NO: 447200 - DNA, 15 bp, Homo sapiens
gagacagagtctcac

SEQ ID NO: 447201 - DNA, 15 bp, Homo sapiens
tgagacagagtctca

SEQ ID NO: 447202 - DNA, 15 bp, Homo sapiens
ttgagacagagtctc

SEQ ID NO: 447203 - DNA, 15 bp, Homo sapiens
tttgagacagagtct

SEQ ID NO: 447204 - DNA, 15 bp, Homo sapiens
ttttgagacagagtc

SEQ ID NO: 447205 - DNA, 15 bp, Homo sapiens
gtttttgagacagag

SEQ ID NO: 447206 - DNA, 15 bp, Homo sapiens
tgtttttgagacaga

SEQ ID NO: 447207 - DNA, 15 bp, Homo sapiens
ttgtttttgagacag

SEQ ID NO: 447208 - DNA, 15 bp, Homo sapiens
tttgtttttgagaca

SEQ ID NO: 447209 - DNA, 15 bp, Homo sapiens
atttgtttttgagac

SEQ ID NO: 447210 - DNA, 15 bp, Homo sapiens
aatttgtttttgaga

SEQ ID NO: 447211 - DNA, 15 bp, Homo sapiens
aaatttgtttttgag

SEQ ID NO: 447212 - DNA, 15 bp, Homo sapiens
caaatttgtttttga

SEQ ID NO: 447213 - DNA, 15 bp, Homo sapiens
ccaaatttgtttttg

SEQ ID NO: 447214 - DNA, 15 bp, Homo sapiens
cccaaatttgttttt

SEQ ID NO: 447215 - DNA, 15 bp, Homo sapiens
tcccaaatttgtttt

SEQ ID NO: 447216 - DNA, 15 bp, Homo sapiens
ttcccaaatttgttt

SEQ ID NO: 447217 - DNA, 15 bp, Homo sapiens
cttcccaaatttgtt

SEQ ID NO: 447218 - DNA, 15 bp, Homo sapiens
ccttcccaaatttgt

SEQ ID NO: 447219 - DNA, 15 bp, Homo sapiens
cccttcccaaatttg

SEQ ID NO: 447220 - DNA, 15 bp, Homo sapiens
gcccttcccaaattt

SEQ ID NO: 447221 - DNA, 15 bp, Homo sapiens
tgcccttcccaaatt

SEQ ID NO: 447222 - DNA, 15 bp, Homo sapiens
ttgcccttcccaaat

SEQ ID NO: 447223 - DNA, 15 bp, Homo sapiens
attgcccttcccaaa

SEQ ID NO: 447224 - DNA, 15 bp, Homo sapiens
aattgcccttcccaa

SEQ ID NO: 447225 - DNA, 15 bp, Homo sapiens
taattgcccttccca

SEQ ID NO: 447226 - DNA, 15 bp, Homo sapiens
ttaattgcccttccc

SEQ ID NO: 447227 - DNA, 15 bp, Homo sapiens
attaattgcccttcc

SEQ ID NO: 447228 - DNA, 15 bp, Homo sapiens
tattaattgcccttc

SEQ ID NO: 447229 - DNA, 15 bp, Homo sapiens
atattaattgccctt

SEQ ID NO: 447230 - DNA, 15 bp, Homo sapiens
aatattaattgccct

SEQ ID NO: 447231 - DNA, 15 bp, Homo sapiens
taatattaattgccc

SEQ ID NO: 447232 - DNA, 15 bp, Homo sapiens
ttaatattaattgcc

SEQ ID NO: 447233 - DNA, 15 bp, Homo sapiens
attaatattaattgc

SEQ ID NO: 447234 - DNA, 15 bp, Homo sapiens
cattaatattaattg

SEQ ID NO: 447235 - DNA, 15 bp, Homo sapiens
acattaatattaatt

SEQ ID NO: 447236 - DNA, 15 bp, Homo sapiens
gacattaatattaat

SEQ ID NO: 447237 - DNA, 15 bp, Homo sapiens
tgacattaatattaa

SEQ ID NO: 447238 - DNA, 15 bp, Homo sapiens
atgacattaatatta

SEQ ID NO: 447239 - DNA, 15 bp, Homo sapiens
gatgacattaatatt

SEQ ID NO: 447240 - DNA, 15 bp, Homo sapiens
tgatgacattaatat

SEQ ID NO: 447241 - DNA, 15 bp, Homo sapiens
atgatgacattaata

SEQ ID NO: 447242 - DNA, 15 bp, Homo sapiens
aatgatgacattaat

SEQ ID NO: 447243 - DNA, 15 bp, Homo sapiens
gaatgatgacattaa

SEQ ID NO: 447244 - DNA, 15 bp, Homo sapiens
ggaatgatgacatta

SEQ ID NO: 447245 - DNA, 15 bp, Homo sapiens
gggaatgatgacatt

SEQ ID NO: 447246 - DNA, 15 bp, Homo sapiens
tgggaatgatgacat

SEQ ID NO: 447247 - DNA, 15 bp, Homo sapiens
ctgggaatgatgaca

SEQ ID NO: 447248 - DNA, 15 bp, Homo sapiens
cctgggaatgatgac

SEQ ID NO: 447249 - DNA, 15 bp, Homo sapiens
tcctgggaatgatga

SEQ ID NO: 447250 - DNA, 15 bp, Homo sapiens
gtcctgggaatgatg

SEQ ID NO: 447251 - DNA, 15 bp, Homo sapiens
agtcctgggaatgat

SEQ ID NO: 447252 - DNA, 15 bp, Homo sapiens
cagtcctgggaatga

SEQ ID NO: 447253 - DNA, 15 bp, Homo sapiens
ccagtcctgggaatg

SEQ ID NO: 447254 - DNA, 15 bp, Homo sapiens
cccagtcctgggaat

SEQ ID NO: 447255 - DNA, 15 bp, Homo sapiens
tcccagtcctgggaa

SEQ ID NO: 447256 - DNA, 15 bp, Homo sapiens
ttcccagtcctggga

SEQ ID NO: 447257 - DNA, 15 bp, Homo sapiens
attcccagtcctggg

SEQ ID NO: 447258 - DNA, 15 bp, Homo sapiens
aattcccagtcctgg

SEQ ID NO: 447259 - DNA, 15 bp, Homo sapiens
caattcccagtcctg

SEQ ID NO: 447260 - DNA, 15 bp, Homo sapiens
tcaattcccagtcct

SEQ ID NO: 447261 - DNA, 15 bp, Homo sapiens
gtcaattcccagtcc

SEQ ID NO: 447262 - DNA, 15 bp, Homo sapiens
tgtcaattcccagtc

SEQ ID NO: 447263 - DNA, 15 bp, Homo sapiens
ttgtcaattcccagt

SEQ ID NO: 447264 - DNA, 15 bp, Homo sapiens
gttgtcaattcccag

SEQ ID NO: 447265 - DNA, 15 bp, Homo sapiens
agttgtcaattccca

SEQ ID NO: 447266 - DNA, 15 bp, Homo sapiens
cagttgtcaattccc

SEQ ID NO: 447267 - DNA, 15 bp, Homo sapiens
tcagttgtcaattcc

SEQ ID NO: 447268 - DNA, 15 bp, Homo sapiens
ctcagttgtcaattc

SEQ ID NO: 447269 - DNA, 15 bp, Homo sapiens
gctcagttgtcaatt

SEQ ID NO: 447270 - DNA, 15 bp, Homo sapiens
agctcagttgtcaat

SEQ ID NO: 447271 - DNA, 15 bp, Homo sapiens
gagctcagttgtcaa

SEQ ID NO: 447272 - DNA, 15 bp, Homo sapiens
tgagctcagttgtca

SEQ ID NO: 447273 - DNA, 15 bp, Homo sapiens
ctgagctcagttgtc

SEQ ID NO: 447274 - DNA, 15 bp, Homo sapiens
tctgagctcagttgt

SEQ ID NO: 447275 - DNA, 15 bp, Homo sapiens
ttctgagctcagttg

SEQ ID NO: 447276 - DNA, 15 bp, Homo sapiens
tttctgagctcagtt

SEQ ID NO: 447277 - DNA, 15 bp, Homo sapiens
atttctgagctcagt

SEQ ID NO: 447278 - DNA, 15 bp, Homo sapiens
tatttctgagctcag

SEQ ID NO: 447279 - DNA, 15 bp, Homo sapiens
atatttctgagctca

SEQ ID NO: 447280 - DNA, 15 bp, Homo sapiens
catatttctgagctc

SEQ ID NO: 447281 - DNA, 15 bp, Homo sapiens
ccatatttctgagct

SEQ ID NO: 447282 - DNA, 15 bp, Homo sapiens
tccatatttctgagc

SEQ ID NO: 447283 - DNA, 15 bp, Homo sapiens
ttccatatttctgag

SEQ ID NO: 447284 - DNA, 15 bp, Homo sapiens
tttccatatttctga

SEQ ID NO: 447285 - DNA, 15 bp, Homo sapiens
gtttccatatttctg

SEQ ID NO: 447286 - DNA, 15 bp, Homo sapiens
agtttccatatttct

SEQ ID NO: 447287 - DNA, 15 bp, Homo sapiens
cagtttccatatttc

SEQ ID NO: 447288 - DNA, 15 bp, Homo sapiens
acagtttccatattt

SEQ ID NO: 447289 - DNA, 15 bp, Homo sapiens
cacagtttccatatt

SEQ ID NO: 447290 - DNA, 15 bp, Homo sapiens
ccacagtttccatat

SEQ ID NO: 447291 - DNA, 15 bp, Homo sapiens
gccacagtttccata

SEQ ID NO: 447292 - DNA, 15 bp, Homo sapiens
tgccacagtttccat

SEQ ID NO: 447293 - DNA, 15 bp, Homo sapiens
ctgccacagtttcca

SEQ ID NO: 447294 - DNA, 15 bp, Homo sapiens
cctgccacagtttcc

SEQ ID NO: 447295 - DNA, 15 bp, Homo sapiens
ccctgccacagtttc

SEQ ID NO: 447296 - DNA, 15 bp, Homo sapiens
gccctgccacagttt

SEQ ID NO: 447297 - DNA, 15 bp, Homo sapiens
cgccctgccacagtt

SEQ ID NO: 447298 - DNA, 15 bp, Homo sapiens
gcgccctgccacagt

SEQ ID NO: 447299 - DNA, 15 bp, Homo sapiens
cgcgccctgccacag

SEQ ID NO: 447300 - DNA, 15 bp, Homo sapiens
ccgcgccctgccaca

SEQ ID NO: 447301 - DNA, 15 bp, Homo sapiens
accgcgccctgccac

SEQ ID NO: 447302 - DNA, 15 bp, Homo sapiens
caccgcgccctgcca

SEQ ID NO: 447303 - DNA, 15 bp, Homo sapiens
tcaccgcgccctgcc

SEQ ID NO: 447304 - DNA, 15 bp, Homo sapiens
gtcaccgcgccctgc

SEQ ID NO: 447305 - DNA, 15 bp, Homo sapiens
tgtcaccgcgccctg

SEQ ID NO: 447306 - DNA, 15 bp, Homo sapiens
gtgtcaccgcgccct

SEQ ID NO: 447307 - DNA, 15 bp, Homo sapiens
tgtgtcaccgcgccc

SEQ ID NO: 447308 - DNA, 15 bp, Homo sapiens
gtgtgtcaccgcgcc

SEQ ID NO: 447309 - DNA, 15 bp, Homo sapiens
tgtgtgtcaccgcgc

SEQ ID NO: 447310 - DNA, 15 bp, Homo sapiens
gtgtgtgtcaccgcg

SEQ ID NO: 447311 - DNA, 15 bp, Homo sapiens
ggtgtgtgtcaccgc

SEQ ID NO: 447312 - DNA, 15 bp, Homo sapiens
aggtgtgtgtcaccg

SEQ ID NO: 447313 - DNA, 15 bp, Homo sapiens
caggtgtgtgtcacc

SEQ ID NO: 447314 - DNA, 15 bp, Homo sapiens
acaggtgtgtgtcac

SEQ ID NO: 447315 - DNA, 15 bp, Homo sapiens
tacaggtgtgtgtca

SEQ ID NO: 447316 - DNA, 15 bp, Homo sapiens
ctacaggtgtgtgtc

SEQ ID NO: 447317 - DNA, 15 bp, Homo sapiens
actacaggtgtgtgt

SEQ ID NO: 447318 - DNA, 15 bp, Homo sapiens
gactacaggtgtgtg

SEQ ID NO: 447319 - DNA, 15 bp, Homo sapiens
ggactacaggtgtgt

SEQ ID NO: 447320 - DNA, 15 bp, Homo sapiens
gggactacaggtgtg

SEQ ID NO: 447321 - DNA, 15 bp, Homo sapiens
tgggactacaggtgt

SEQ ID NO: 447322 - DNA, 15 bp, Homo sapiens
gctgggactacaggt

SEQ ID NO: 447323 - DNA, 15 bp, Homo sapiens
tgctgggactacagg

SEQ ID NO: 447324 - DNA, 15 bp, Homo sapiens
atgctgggactacag

SEQ ID NO: 447325 - DNA, 15 bp, Homo sapiens
aatgctgggactaca

SEQ ID NO: 447326 - DNA, 15 bp, Homo sapiens
aaatgctgggactac

SEQ ID NO: 447327 - DNA, 15 bp, Homo sapiens
aaaatgctgggacta

SEQ ID NO: 447328 - DNA, 15 bp, Homo sapiens
caaaatgctgggact

SEQ ID NO: 447329 - DNA, 15 bp, Homo sapiens
ccaaaatgctgggac

SEQ ID NO: 447330 - DNA, 15 bp, Homo sapiens
tccaaaatgctggga

SEQ ID NO: 447331 - DNA, 15 bp, Homo sapiens
ttccaaaatgctggg

SEQ ID NO: 447332 - DNA, 15 bp, Homo sapiens
cttccaaaatgctgg

SEQ ID NO: 447333 - DNA, 15 bp, Homo sapiens
tcttccaaaatgctg

SEQ ID NO: 447334 - DNA, 15 bp, Homo sapiens
gtcttccaaaatgct

SEQ ID NO: 447335 - DNA, 15 bp, Homo sapiens
ggtcttccaaaatgc

SEQ ID NO: 447336 - DNA, 15 bp, Homo sapiens
cggtcttccaaaatg

SEQ ID NO: 447337 - DNA, 15 bp, Homo sapiens
tcggtcttccaaaat

SEQ ID NO: 447338 - DNA, 15 bp, Homo sapiens
ctcggtcttccaaaa

SEQ ID NO: 447339 - DNA, 15 bp, Homo sapiens
cctcggtcttccaaa

SEQ ID NO: 447340 - DNA, 15 bp, Homo sapiens
acctcggtcttccaa

SEQ ID NO: 447341 - DNA, 15 bp, Homo sapiens
cacctcggtcttcca

SEQ ID NO: 447342 - DNA, 15 bp, Homo sapiens
ccacctcggtcttcc

SEQ ID NO: 447343 - DNA, 15 bp, Homo sapiens
cccacctcggtcttc

SEQ ID NO: 447344 - DNA, 15 bp, Homo sapiens
gcccacctcggtctt

SEQ ID NO: 447345 - DNA, 15 bp, Homo sapiens
cgcccacctcggtct

SEQ ID NO: 447346 - DNA, 15 bp, Homo sapiens
ccgcccacctcggtc

SEQ ID NO: 447347 - DNA, 15 bp, Homo sapiens
tccgcccacctcggt

SEQ ID NO: 447348 - DNA, 15 bp, Homo sapiens
atccgcccacctcgg

SEQ ID NO: 447349 - DNA, 15 bp, Homo sapiens
aatccgcccacctcg

SEQ ID NO: 447350 - DNA, 15 bp, Homo sapiens
caatccgcccacctc

SEQ ID NO: 447351 - DNA, 15 bp, Homo sapiens
gcaatccgcccacct

SEQ ID NO: 447352 - DNA, 15 bp, Homo sapiens
agcaatccgcccacc

SEQ ID NO: 447353 - DNA, 15 bp, Homo sapiens
aagcaatccgcccac

SEQ ID NO: 447354 - DNA, 15 bp, Homo sapiens
caagcaatccgccca

SEQ ID NO: 447355 - DNA, 15 bp, Homo sapiens
tcaagcaatccgccc

SEQ ID NO: 447356 - DNA, 15 bp, Homo sapiens
ctcaagcaatccgcc

SEQ ID NO: 447357 - DNA, 15 bp, Homo sapiens
tctcaagcaatccgc

SEQ ID NO: 447358 - DNA, 15 bp, Homo sapiens
atctcaagcaatccg

SEQ ID NO: 447359 - DNA, 15 bp, Homo sapiens
gatctcaagcaatcc

SEQ ID NO: 447360 - DNA, 15 bp, Homo sapiens
tgatctcaagcaatc

SEQ ID NO: 447361 - DNA, 15 bp, Homo sapiens
ctgatctcaagcaat

SEQ ID NO: 447362 - DNA, 15 bp, Homo sapiens
cctgatctcaagcaa

SEQ ID NO: 447363 - DNA, 15 bp, Homo sapiens
tcctgatctcaagca

SEQ ID NO: 447364 - DNA, 15 bp, Homo sapiens
ctcctgatctcaagc

SEQ ID NO: 447365 - DNA, 15 bp, Homo sapiens
actcctgatctcaag

SEQ ID NO: 447366 - DNA, 15 bp, Homo sapiens
aactcctgatctcaa

SEQ ID NO: 447367 - DNA, 15 bp, Homo sapiens
aaactcctgatctca

SEQ ID NO: 447368 - DNA, 15 bp, Homo sapiens
caaactcctgatctc

SEQ ID NO: 447369 - DNA, 15 bp, Homo sapiens
tcaaactcctgatct

SEQ ID NO: 447370 - DNA, 15 bp, Homo sapiens
ctcaaactcctgatc

SEQ ID NO: 447371 - DNA, 15 bp, Homo sapiens
tctcaaactcctgat

SEQ ID NO: 447372 - DNA, 15 bp, Homo sapiens
accaggctggtctca

SEQ ID NO: 447373 - DNA, 15 bp, Homo sapiens
gaccaggctggtctc

SEQ ID NO: 447374 - DNA, 15 bp, Homo sapiens
tgaccaggctggtct

SEQ ID NO: 447375 - DNA, 15 bp, Homo sapiens
ttgaccaggctggtc

SEQ ID NO: 447376 - DNA, 15 bp, Homo sapiens
attgaccaggctggt

SEQ ID NO: 447377 - DNA, 15 bp, Homo sapiens
tattgaccaggctgg

SEQ ID NO: 447378 - DNA, 15 bp, Homo sapiens
atattgaccaggctg

SEQ ID NO: 447379 - DNA, 15 bp, Homo sapiens
catattgaccaggct

SEQ ID NO: 447380 - DNA, 15 bp, Homo sapiens
ccatattgaccaggc

SEQ ID NO: 447381 - DNA, 15 bp, Homo sapiens
accatattgaccagg

SEQ ID NO: 447382 - DNA, 15 bp, Homo sapiens
caccatattgaccag

SEQ ID NO: 447383 - DNA, 15 bp, Homo sapiens
tcaccatattgacca

SEQ ID NO: 447384 - DNA, 15 bp, Homo sapiens
ttcaccatattgacc

SEQ ID NO: 447385 - DNA, 15 bp, Homo sapiens
tttcaccatattgac

SEQ ID NO: 447386 - DNA, 15 bp, Homo sapiens
gtttcaccatattga

SEQ ID NO: 447387 - DNA, 15 bp, Homo sapiens
aggggtttcaccata

SEQ ID NO: 447388 - DNA, 15 bp, Homo sapiens
gaggggtttcaccat

SEQ ID NO: 447389 - DNA, 15 bp, Homo sapiens
agaggggtttcacca

SEQ ID NO: 447390 - DNA, 15 bp, Homo sapiens
aagaggggtttcacc

SEQ ID NO: 447391 - DNA, 15 bp, Homo sapiens
aaagaggggtttcac

SEQ ID NO: 447392 - DNA, 15 bp, Homo sapiens
taaagaggggtttca

SEQ ID NO: 447393 - DNA, 15 bp, Homo sapiens
ataaagaggggtttc

SEQ ID NO: 447394 - DNA, 15 bp, Homo sapiens
aataaagaggggttt

SEQ ID NO: 447395 - DNA, 15 bp, Homo sapiens
taataaagaggggtt

SEQ ID NO: 447396 - DNA, 15 bp, Homo sapiens
ttaataaagaggggt

SEQ ID NO: 447397 - DNA, 15 bp, Homo sapiens
tttaataaagagggg

SEQ ID NO: 447398 - DNA, 15 bp, Homo sapiens
ttttaataaagaggg

SEQ ID NO: 447399 - DNA, 15 bp, Homo sapiens
tttttaataaagagg

SEQ ID NO: 447400 - DNA, 15 bp, Homo sapiens
ttttttaataaagag

SEQ ID NO: 447401 - DNA, 15 bp, Homo sapiens
attttttaataaaga

SEQ ID NO: 447402 - DNA, 15 bp, Homo sapiens
aattttttaataaag

SEQ ID NO: 447403 - DNA, 15 bp, Homo sapiens
taattttttaataaa

SEQ ID NO: 447404 - DNA, 15 bp, Homo sapiens
ctaattttttaataa

SEQ ID NO: 447405 - DNA, 15 bp, Homo sapiens
gctaattttttaata

SEQ ID NO: 447406 - DNA, 15 bp, Homo sapiens
ggctaattttttaat

SEQ ID NO: 447407 - DNA, 15 bp, Homo sapiens
cggctaattttttaa

SEQ ID NO: 447408 - DNA, 15 bp, Homo sapiens
ccggctaatttttta

SEQ ID NO: 447409 - DNA, 15 bp, Homo sapiens
cccggctaatttttt

SEQ ID NO: 447410 - DNA, 15 bp, Homo sapiens
tacccggctaatttt

SEQ ID NO: 447411 - DNA, 15 bp, Homo sapiens
atacccggctaattt

SEQ ID NO: 447412 - DNA, 15 bp, Homo sapiens
catacccggctaatt

SEQ ID NO: 447413 - DNA, 15 bp, Homo sapiens
ccatacccggctaat

SEQ ID NO: 447414 - DNA, 15 bp, Homo sapiens
accatacccggctaa

SEQ ID NO: 447415 - DNA, 15 bp, Homo sapiens
aaccatacccggcta

SEQ ID NO: 447416 - DNA, 15 bp, Homo sapiens
caaccatacccggct

SEQ ID NO: 447417 - DNA, 15 bp, Homo sapiens
acaaccatacccggc

SEQ ID NO: 447418 - DNA, 15 bp, Homo sapiens
cacaaccatacccgg

SEQ ID NO: 447419 - DNA, 15 bp, Homo sapiens
gcacaaccatacccg

SEQ ID NO: 447420 - DNA, 15 bp, Homo sapiens
tgcacaaccataccc

SEQ ID NO: 447421 - DNA, 15 bp, Homo sapiens
atgcacaaccatacc

SEQ ID NO: 447422 - DNA, 15 bp, Homo sapiens
catgcacaaccatac

SEQ ID NO: 447423 - DNA, 15 bp, Homo sapiens
gcatgcacaaccata

SEQ ID NO: 447424 - DNA, 15 bp, Homo sapiens
ggcatgcacaaccat

SEQ ID NO: 447425 - DNA, 15 bp, Homo sapiens
aggcatgcacaacca

SEQ ID NO: 447426 - DNA, 15 bp, Homo sapiens
caggcatgcacaacc

SEQ ID NO: 447427 - DNA, 15 bp, Homo sapiens
acaggcatgcacaac

SEQ ID NO: 447428 - DNA, 15 bp, Homo sapiens
tacaggcatgcacaa

SEQ ID NO: 447429 - DNA, 15 bp, Homo sapiens
ctacaggcatgcaca

SEQ ID NO: 447430 - DNA, 15 bp, Homo sapiens
actacaggcatgcac

SEQ ID NO: 447431 - DNA, 15 bp, Homo sapiens
gactacaggcatgca

SEQ ID NO: 447432 - DNA, 15 bp, Homo sapiens
ggactacaggcatgc

SEQ ID NO: 447433 - DNA, 15 bp, Homo sapiens
gggactacaggcatg

SEQ ID NO: 447434 - DNA, 15 bp, Homo sapiens
tgggactacaggcat

SEQ ID NO: 447435 - DNA, 15 bp, Homo sapiens
gctgggactacaggc

SEQ ID NO: 447436 - DNA, 15 bp, Homo sapiens
agctgggactacagg

SEQ ID NO: 447437 - DNA, 15 bp, Homo sapiens
tagctgggactacag

SEQ ID NO: 447438 - DNA, 15 bp, Homo sapiens
gtagctgggactaca

SEQ ID NO: 447439 - DNA, 15 bp, Homo sapiens
agtagctgggactac

SEQ ID NO: 447440 - DNA, 15 bp, Homo sapiens
gagtagctgggacta

SEQ ID NO: 447441 - DNA, 15 bp, Homo sapiens
tgagtagctgggact

SEQ ID NO: 447442 - DNA, 15 bp, Homo sapiens
ctgagtagctgggac

SEQ ID NO: 447443 - DNA, 15 bp, Homo sapiens
gcctcagccttctga

SEQ ID NO: 447444 - DNA, 15 bp, Homo sapiens
tgcctcagccttctg

SEQ ID NO: 447445 - DNA, 15 bp, Homo sapiens
ctgcctcagccttct

SEQ ID NO: 447446 - DNA, 15 bp, Homo sapiens
cctgcctcagccttc

SEQ ID NO: 447447 - DNA, 15 bp, Homo sapiens
tcctgcctcagcctt

SEQ ID NO: 447448 - DNA, 15 bp, Homo sapiens
aggttcaagtgattc

SEQ ID NO: 447449 - DNA, 15 bp, Homo sapiens
gaggttcaagtgatt

SEQ ID NO: 447450 - DNA, 15 bp, Homo sapiens
cgaggttcaagtgat

SEQ ID NO: 447451 - DNA, 15 bp, Homo sapiens
ccgaggttcaagtga

SEQ ID NO: 447452 - DNA, 15 bp, Homo sapiens
tccgaggttcaagtg

SEQ ID NO: 447453 - DNA, 15 bp, Homo sapiens
ctccgaggttcaagt

SEQ ID NO: 447454 - DNA, 15 bp, Homo sapiens
cctccgaggttcaag

SEQ ID NO: 447455 - DNA, 15 bp, Homo sapiens
gcctccgaggttcaa

SEQ ID NO: 447456 - DNA, 15 bp, Homo sapiens
tgcctccgaggttca

SEQ ID NO: 447457 - DNA, 15 bp, Homo sapiens
ctgcctccgaggttc

SEQ ID NO: 447458 - DNA, 15 bp, Homo sapiens
tctgcctccgaggtt

SEQ ID NO: 447459 - DNA, 15 bp, Homo sapiens
ctctgcctccgaggt

SEQ ID NO: 447460 - DNA, 15 bp, Homo sapiens
cctctgcctccgagg

SEQ ID NO: 447461 - DNA, 15 bp, Homo sapiens
acctctgcctccgag

SEQ ID NO: 447462 - DNA, 15 bp, Homo sapiens
aacctctgcctccga

SEQ ID NO: 447463 - DNA, 15 bp, Homo sapiens
caacctctgcctccg

SEQ ID NO: 447464 - DNA, 15 bp, Homo sapiens
ttgcaacctctgcct

SEQ ID NO: 447465 - DNA, 15 bp, Homo sapiens
attgcaacctctgcc

SEQ ID NO: 447466 - DNA, 15 bp, Homo sapiens
cattgcaacctctgc

SEQ ID NO: 447467 - DNA, 15 bp, Homo sapiens
tcattgcaacctctg

SEQ ID NO: 447468 - DNA, 15 bp, Homo sapiens
ctcattgcaacctct

SEQ ID NO: 447469 - DNA, 15 bp, Homo sapiens
gctcattgcaacctc

SEQ ID NO: 447470 - DNA, 15 bp, Homo sapiens
ggctcattgcaacct

SEQ ID NO: 447471 - DNA, 15 bp, Homo sapiens
aggctcattgcaacc

SEQ ID NO: 447472 - DNA, 15 bp, Homo sapiens
taggctcattgcaac

SEQ ID NO: 447473 - DNA, 15 bp, Homo sapiens
ctaggctcattgcaa

SEQ ID NO: 447474 - DNA, 15 bp, Homo sapiens
tctaggctcattgca

SEQ ID NO: 447475 - DNA, 15 bp, Homo sapiens
atctaggctcattgc

SEQ ID NO: 447476 - DNA, 15 bp, Homo sapiens
aatctaggctcattg

SEQ ID NO: 447477 - DNA, 15 bp, Homo sapiens
caatctaggctcatt

SEQ ID NO: 447478 - DNA, 15 bp, Homo sapiens
gcaatctaggctcat

SEQ ID NO: 447479 - DNA, 15 bp, Homo sapiens
tgcaatctaggctca

SEQ ID NO: 447480 - DNA, 15 bp, Homo sapiens
gtgcaatctaggctc

SEQ ID NO: 447481 - DNA, 15 bp, Homo sapiens
ggtgcaatctaggct

SEQ ID NO: 447482 - DNA, 15 bp, Homo sapiens
tggtgcaatctaggc

SEQ ID NO: 447483 - DNA, 15 bp, Homo sapiens
ttggtgcaatctagg

SEQ ID NO: 447484 - DNA, 15 bp, Homo sapiens
attggtgcaatctag

SEQ ID NO: 447485 - DNA, 15 bp, Homo sapiens
cattggtgcaatcta

SEQ ID NO: 447486 - DNA, 15 bp, Homo sapiens
gcattggtgcaatct

SEQ ID NO: 447487 - DNA, 15 bp, Homo sapiens
tgcattggtgcaatc

SEQ ID NO: 447488 - DNA, 15 bp, Homo sapiens
gtgcattggtgcaat

SEQ ID NO: 447489 - DNA, 15 bp, Homo sapiens
agtgcattggtgcaa

SEQ ID NO: 447490 - DNA, 15 bp, Homo sapiens
gagtgcattggtgca

SEQ ID NO: 447491 - DNA, 15 bp, Homo sapiens
agagtgcattggtgc

SEQ ID NO: 447492 - DNA, 15 bp, Homo sapiens
tagagtgcattggtg

SEQ ID NO: 447493 - DNA, 15 bp, Homo sapiens
ctagagtgcattggt

SEQ ID NO: 447494 - DNA, 15 bp, Homo sapiens
gctagagtgcattgg

SEQ ID NO: 447495 - DNA, 15 bp, Homo sapiens
ggctagagtgcattg

SEQ ID NO: 447496 - DNA, 15 bp, Homo sapiens
aggctagagtgcatt

SEQ ID NO: 447497 - DNA, 15 bp, Homo sapiens
caggctagagtgcat

SEQ ID NO: 447498 - DNA, 15 bp, Homo sapiens
ccaggctagagtgca

SEQ ID NO: 447499 - DNA, 15 bp, Homo sapiens
cccaggctagagtgc

SEQ ID NO: 447500 - DNA, 15 bp, Homo sapiens
gcccaggctagagtg

SEQ ID NO: 447501 - DNA, 15 bp, Homo sapiens
cgcccaggctagagt

SEQ ID NO: 447502 - DNA, 15 bp, Homo sapiens
tcgcccaggctagag

SEQ ID NO: 447503 - DNA, 15 bp, Homo sapiens
gtcgcccaggctaga

SEQ ID NO: 447504 - DNA, 15 bp, Homo sapiens
tgtcgcccaggctag

SEQ ID NO: 447505 - DNA, 15 bp, Homo sapiens
ctgtcgcccaggcta

SEQ ID NO: 447506 - DNA, 15 bp, Homo sapiens
gctctgtcgcccagg

SEQ ID NO: 447507 - DNA, 15 bp, Homo sapiens
tgctctgtcgcccag

SEQ ID NO: 447508 - DNA, 15 bp, Homo sapiens
ttgctctgtcgccca

SEQ ID NO: 447509 - DNA, 15 bp, Homo sapiens
cttgctctgtcgccc

SEQ ID NO: 447510 - DNA, 15 bp, Homo sapiens
tcttgctctgtcgcc

SEQ ID NO: 447511 - DNA, 15 bp, Homo sapiens
gtcttgctctgtcgc

SEQ ID NO: 447512 - DNA, 15 bp, Homo sapiens
agtcttgctctgtcg

SEQ ID NO: 447513 - DNA, 15 bp, Homo sapiens
gagtcttgctctgtc

SEQ ID NO: 447514 - DNA, 15 bp, Homo sapiens
catggagtcttgctc

SEQ ID NO: 447515 - DNA, 15 bp, Homo sapiens
acatggagtcttgct

SEQ ID NO: 447516 - DNA, 15 bp, Homo sapiens
gacatggagtcttgc

SEQ ID NO: 447517 - DNA, 15 bp, Homo sapiens
tgacatggagtcttg

SEQ ID NO: 447518 - DNA, 15 bp, Homo sapiens
ttgacatggagtctt

SEQ ID NO: 447519 - DNA, 15 bp, Homo sapiens
tttgacatggagtct

SEQ ID NO: 447520 - DNA, 15 bp, Homo sapiens
ttttgacatggagtc

SEQ ID NO: 447521 - DNA, 15 bp, Homo sapiens
tttttgacatggagt

SEQ ID NO: 447522 - DNA, 15 bp, Homo sapiens
ttttttgacatggag

SEQ ID NO: 447523 - DNA, 15 bp, Homo sapiens
tttttttgacatgga

SEQ ID NO: 447524 - DNA, 15 bp, Homo sapiens
ttttttttgacatgg

SEQ ID NO: 447525 - DNA, 15 bp, Homo sapiens
tttttttttgacatg

SEQ ID NO: 447526 - DNA, 15 bp, Homo sapiens
ttttttttttgacat

SEQ ID NO: 447527 - DNA, 15 bp, Homo sapiens
tttcctttttttttt

SEQ ID NO: 447528 - DNA, 15 bp, Homo sapiens
atttccttttttttt

SEQ ID NO: 447529 - DNA, 15 bp, Homo sapiens
tatttcctttttttt

SEQ ID NO: 447530 - DNA, 15 bp, Homo sapiens
atatttccttttttt

SEQ ID NO: 447531 - DNA, 15 bp, Homo sapiens
catatttcctttttt

SEQ ID NO: 447532 - DNA, 15 bp, Homo sapiens
ccatatttccttttt

SEQ ID NO: 447533 - DNA, 15 bp, Homo sapiens
tccatatttcctttt

SEQ ID NO: 447534 - DNA, 15 bp, Homo sapiens
ttccatatttccttt

SEQ ID NO: 447535 - DNA, 15 bp, Homo sapiens
tttccatatttcctt

SEQ ID NO: 447536 - DNA, 15 bp, Homo sapiens
gtttccatatttcct

SEQ ID NO: 447537 - DNA, 15 bp, Homo sapiens
agtttccatatttcc

SEQ ID NO: 447538 - DNA, 15 bp, Homo sapiens
tcagtttccatattt

SEQ ID NO: 447539 - DNA, 15 bp, Homo sapiens
ctcagtttccatatt

SEQ ID NO: 447540 - DNA, 15 bp, Homo sapiens
gctcagtttccatat

SEQ ID NO: 447541 - DNA, 15 bp, Homo sapiens
agctcagtttccata

SEQ ID NO: 447542 - DNA, 15 bp, Homo sapiens
cagctcagtttccat

SEQ ID NO: 447543 - DNA, 15 bp, Homo sapiens
tcagctcagtttcca

SEQ ID NO: 447544 - DNA, 15 bp, Homo sapiens
ctcagctcagtttcc

SEQ ID NO: 447545 - DNA, 15 bp, Homo sapiens
tctcagctcagtttc

SEQ ID NO: 447546 - DNA, 15 bp, Homo sapiens
ctctcagctcagttt

SEQ ID NO: 447547 - DNA, 15 bp, Homo sapiens
tctctcagctcagtt

SEQ ID NO: 447548 - DNA, 15 bp, Homo sapiens
ctctctcagctcagt

SEQ ID NO: 447549 - DNA, 15 bp, Homo sapiens
cctctctcagctcag

SEQ ID NO: 447550 - DNA, 15 bp, Homo sapiens
ccctctctcagctca

SEQ ID NO: 447551 - DNA, 15 bp, Homo sapiens
cccctctctcagctc

SEQ ID NO: 447552 - DNA, 15 bp, Homo sapiens
tcccctctctcagct

SEQ ID NO: 447553 - DNA, 15 bp, Homo sapiens
ttcccctctctcagc

SEQ ID NO: 447554 - DNA, 15 bp, Homo sapiens
cttcccctctctcag

SEQ ID NO: 447555 - DNA, 15 bp, Homo sapiens
acttcccctctctca

SEQ ID NO: 447556 - DNA, 15 bp, Homo sapiens
cacttcccctctctc

SEQ ID NO: 447557 - DNA, 15 bp, Homo sapiens
ccacttcccctctct

SEQ ID NO: 447558 - DNA, 15 bp, Homo sapiens
tccacttcccctctc

SEQ ID NO: 447559 - DNA, 15 bp, Homo sapiens
gtccacttcccctct

SEQ ID NO: 447560 - DNA, 15 bp, Homo sapiens
agtccacttcccctc

SEQ ID NO: 447561 - DNA, 15 bp, Homo sapiens
tagtccacttcccct

SEQ ID NO: 447562 - DNA, 15 bp, Homo sapiens
ctagtccacttcccc

SEQ ID NO: 447563 - DNA, 15 bp, Homo sapiens
cctagtccacttccc

SEQ ID NO: 447564 - DNA, 15 bp, Homo sapiens
ccctagtccacttcc

SEQ ID NO: 447565 - DNA, 15 bp, Homo sapiens
tccctagtccacttc

SEQ ID NO: 447566 - DNA, 15 bp, Homo sapiens
gtccctagtccactt

SEQ ID NO: 447567 - DNA, 15 bp, Homo sapiens
agtccctagtccact

SEQ ID NO: 447568 - DNA, 15 bp, Homo sapiens
gagtccctagtccac

SEQ ID NO: 447569 - DNA, 15 bp, Homo sapiens
ggagtccctagtcca

SEQ ID NO: 447570 - DNA, 15 bp, Homo sapiens
gggagtccctagtcc

SEQ ID NO: 447571 - DNA, 15 bp, Homo sapiens
agggagtccctagtc

SEQ ID NO: 447572 - DNA, 15 bp, Homo sapiens
gagggagtccctagt

SEQ ID NO: 447573 - DNA, 15 bp, Homo sapiens
cgagggagtccctag

SEQ ID NO: 447574 - DNA, 15 bp, Homo sapiens
gcgagggagtcccta

SEQ ID NO: 447575 - DNA, 15 bp, Homo sapiens
tgcgagggagtccct

SEQ ID NO: 447576 - DNA, 15 bp, Homo sapiens
ctgcgagggagtccc

SEQ ID NO: 447577 - DNA, 15 bp, Homo sapiens
actgcgagggagtcc

SEQ ID NO: 447578 - DNA, 15 bp, Homo sapiens
cactgcgagggagtc

SEQ ID NO: 447579 - DNA, 15 bp, Homo sapiens
ccactgcgagggagt

SEQ ID NO: 447580 - DNA, 15 bp, Homo sapiens
gccactgcgagggag

SEQ ID NO: 447581 - DNA, 15 bp, Homo sapiens
ggccactgcgaggga

SEQ ID NO: 447582 - DNA, 15 bp, Homo sapiens
gggccactgcgaggg

SEQ ID NO: 447583 - DNA, 15 bp, Homo sapiens
agggccactgcgagg

SEQ ID NO: 447584 - DNA, 15 bp, Homo sapiens
cagggccactgcgag

SEQ ID NO: 447585 - DNA, 15 bp, Homo sapiens
tcagggccactgcga

SEQ ID NO: 447586 - DNA, 15 bp, Homo sapiens
gtcagggccactgcg

SEQ ID NO: 447587 - DNA, 15 bp, Homo sapiens
ggtcagggccactgc

SEQ ID NO: 447588 - DNA, 15 bp, Homo sapiens
gggtcagggccactg

SEQ ID NO: 447589 - DNA, 15 bp, Homo sapiens
agggtcagggccact

SEQ ID NO: 447590 - DNA, 15 bp, Homo sapiens
tagggtcagggccac

SEQ ID NO: 447591 - DNA, 15 bp, Homo sapiens
gtagggtcagggcca

SEQ ID NO: 447592 - DNA, 15 bp, Homo sapiens
ggtagggtcagggcc

SEQ ID NO: 447593 - DNA, 15 bp, Homo sapiens
aggtagggtcagggc

SEQ ID NO: 447594 - DNA, 15 bp, Homo sapiens
caggtagggtcaggg

SEQ ID NO: 447595 - DNA, 15 bp, Homo sapiens
acaggtagggtcagg

SEQ ID NO: 447596 - DNA, 15 bp, Homo sapiens
cacaggtagggtcag

SEQ ID NO: 447597 - DNA, 15 bp, Homo sapiens
gcacaggtagggtca

SEQ ID NO: 447598 - DNA, 15 bp, Homo sapiens
ggcacaggtagggtc

SEQ ID NO: 447599 - DNA, 15 bp, Homo sapiens
gggcacaggtagggt

SEQ ID NO: 447600 - DNA, 15 bp, Homo sapiens
agggcacaggtaggg

SEQ ID NO: 447601 - DNA, 15 bp, Homo sapiens
gagggcacaggtagg

SEQ ID NO: 447602 - DNA, 15 bp, Homo sapiens
agagggcacaggtag

SEQ ID NO: 447603 - DNA, 15 bp, Homo sapiens
gagagggcacaggta

SEQ ID NO: 447604 - DNA, 15 bp, Homo sapiens
agagagggcacaggt

SEQ ID NO: 447605 - DNA, 15 bp, Homo sapiens
gagagagggcacagg

SEQ ID NO: 447606 - DNA, 15 bp, Homo sapiens
ggagagagggcacag

SEQ ID NO: 447607 - DNA, 15 bp, Homo sapiens
tggagagagggcaca

SEQ ID NO: 447608 - DNA, 15 bp, Homo sapiens
atggagagagggcac

SEQ ID NO: 447609 - DNA, 15 bp, Homo sapiens
gatggagagagggca

SEQ ID NO: 447610 - DNA, 15 bp, Homo sapiens
ggatggagagagggc

SEQ ID NO: 447611 - DNA, 15 bp, Homo sapiens
aggatggagagaggg

SEQ ID NO: 447612 - DNA, 15 bp, Homo sapiens
aaggatggagagagg

SEQ ID NO: 447613 - DNA, 15 bp, Homo sapiens
aaaggatggagagag

SEQ ID NO: 447614 - DNA, 15 bp, Homo sapiens
caaaggatggagaga

SEQ ID NO: 447615 - DNA, 15 bp, Homo sapiens
gcaaaggatggagag

SEQ ID NO: 447616 - DNA, 15 bp, Homo sapiens
tgcaaaggatggaga

SEQ ID NO: 447617 - DNA, 15 bp, Homo sapiens
ctgcaaaggatggag

SEQ ID NO: 447618 - DNA, 15 bp, Homo sapiens
tctgcaaaggatgga

SEQ ID NO: 447619 - DNA, 15 bp, Homo sapiens
gtctgcaaaggatgg

SEQ ID NO: 447620 - DNA, 15 bp, Homo sapiens
ggtctgcaaaggatg

SEQ ID NO: 447621 - DNA, 15 bp, Homo sapiens
aggtctgcaaaggat

SEQ ID NO: 447622 - DNA, 15 bp, Homo sapiens
caggtctgcaaagga

SEQ ID NO: 447623 - DNA, 15 bp, Homo sapiens
acaggtctgcaaagg

SEQ ID NO: 447624 - DNA, 15 bp, Homo sapiens
tacaggtctgcaaag

SEQ ID NO: 447625 - DNA, 15 bp, Homo sapiens
gtacaggtctgcaaa

SEQ ID NO: 447626 - DNA, 15 bp, Homo sapiens
agtacaggtctgcaa

SEQ ID NO: 447627 - DNA, 15 bp, Homo sapiens
gagtacaggtctgca

SEQ ID NO: 447628 - DNA, 15 bp, Homo sapiens
ggagtacaggtctgc

SEQ ID NO: 447629 - DNA, 15 bp, Homo sapiens
cggagtacaggtctg

SEQ ID NO: 447630 - DNA, 15 bp, Homo sapiens
ccggagtacaggtct

SEQ ID NO: 447631 - DNA, 15 bp, Homo sapiens
gccggagtacaggtc

SEQ ID NO: 447632 - DNA, 15 bp, Homo sapiens
agccggagtacaggt

SEQ ID NO: 447633 - DNA, 15 bp, Homo sapiens
cagccggagtacagg

SEQ ID NO: 447634 - DNA, 15 bp, Homo sapiens
ccagccggagtacag

SEQ ID NO: 447635 - DNA, 15 bp, Homo sapiens
accagccggagtaca

SEQ ID NO: 447636 - DNA, 15 bp, Homo sapiens
aaccagccggagtac

SEQ ID NO: 447637 - DNA, 15 bp, Homo sapiens
caaccagccggagta

SEQ ID NO: 447638 - DNA, 15 bp, Homo sapiens
ccaaccagccggagt

SEQ ID NO: 447639 - DNA, 15 bp, Homo sapiens
gccaaccagccggag

SEQ ID NO: 447640 - DNA, 15 bp, Homo sapiens
tgccaaccagccgga

SEQ ID NO: 447641 - DNA, 15 bp, Homo sapiens
ctgccaaccagccgg

SEQ ID NO: 447642 - DNA, 15 bp, Homo sapiens
gctgccaaccagccg

SEQ ID NO: 447643 - DNA, 15 bp, Homo sapiens
tgctgccaaccagcc

SEQ ID NO: 447644 - DNA, 15 bp, Homo sapiens
ctgctgccaaccagc

SEQ ID NO: 447645 - DNA, 15 bp, Homo sapiens
gctgctgccaaccag

SEQ ID NO: 447646 - DNA, 15 bp, Homo sapiens
ggctgctgccaacca

SEQ ID NO: 447647 - DNA, 15 bp, Homo sapiens
gggctgctgccaacc

SEQ ID NO: 447648 - DNA, 15 bp, Homo sapiens
agggctgctgccaac

SEQ ID NO: 447649 - DNA, 15 bp, Homo sapiens
aagggctgctgccaa

SEQ ID NO: 447650 - DNA, 15 bp, Homo sapiens
caagggctgctgcca

SEQ ID NO: 447651 - DNA, 15 bp, Homo sapiens
ccaagggctgctgcc

SEQ ID NO: 447652 - DNA, 15 bp, Homo sapiens
accaagggctgctgc

SEQ ID NO: 447653 - DNA, 15 bp, Homo sapiens
taccaagggctgctg

SEQ ID NO: 447654 - DNA, 15 bp, Homo sapiens
gtaccaagggctgct

SEQ ID NO: 447655 - DNA, 15 bp, Homo sapiens
ggtaccaagggctgc

SEQ ID NO: 447656 - DNA, 15 bp, Homo sapiens
tggtaccaagggctg

SEQ ID NO: 447657 - DNA, 15 bp, Homo sapiens
ttggtaccaagggct

SEQ ID NO: 447658 - DNA, 15 bp, Homo sapiens
gttggtaccaagggc

SEQ ID NO: 447659 - DNA, 15 bp, Homo sapiens
ggttggtaccaaggg

SEQ ID NO: 447660 - DNA, 15 bp, Homo sapiens
aggttggtaccaagg

SEQ ID NO: 447661 - DNA, 15 bp, Homo sapiens
caggttggtaccaag

SEQ ID NO: 447662 - DNA, 15 bp, Homo sapiens
gcaggttggtaccaa

SEQ ID NO: 447663 - DNA, 15 bp, Homo sapiens
tgcaggttggtacca

SEQ ID NO: 447664 - DNA, 15 bp, Homo sapiens
ctgcaggttggtacc

SEQ ID NO: 447665 - DNA, 15 bp, Homo sapiens
cctgcaggttggtac

SEQ ID NO: 447666 - DNA, 15 bp, Homo sapiens
acctgcaggttggta

SEQ ID NO: 447667 - DNA, 15 bp, Homo sapiens
gacctgcaggttggt

SEQ ID NO: 447668 - DNA, 15 bp, Homo sapiens
ggacctgcaggttgg

SEQ ID NO: 447669 - DNA, 15 bp, Homo sapiens
tggacctgcaggttg

SEQ ID NO: 447670 - DNA, 15 bp, Homo sapiens
ctggacctgcaggtt

SEQ ID NO: 447671 - DNA, 15 bp, Homo sapiens
actggacctgcaggt

SEQ ID NO: 447672 - DNA, 15 bp, Homo sapiens
aactggacctgcagg

SEQ ID NO: 447673 - DNA, 15 bp, Homo sapiens
gaactggacctgcag

SEQ ID NO: 447674 - DNA, 15 bp, Homo sapiens
agaactggacctgca

SEQ ID NO: 447675 - DNA, 15 bp, Homo sapiens
cagaactggacctgc

SEQ ID NO: 447676 - DNA, 15 bp, Homo sapiens
ccagaactggacctg

SEQ ID NO: 447677 - DNA, 15 bp, Homo sapiens
gccagaactggacct

SEQ ID NO: 447678 - DNA, 15 bp, Homo sapiens
tgccagaactggacc

SEQ ID NO: 447679 - DNA, 15 bp, Homo sapiens
gtgccagaactggac

SEQ ID NO: 447680 - DNA, 15 bp, Homo sapiens
tgtgccagaactgga

SEQ ID NO: 447681 - DNA, 15 bp, Homo sapiens
ttgtgccagaactgg

SEQ ID NO: 447682 - DNA, 15 bp, Homo sapiens
tttgtgccagaactg

SEQ ID NO: 447683 - DNA, 15 bp, Homo sapiens
ttttgtgccagaact

SEQ ID NO: 447684 - DNA, 15 bp, Homo sapiens
gttttgtgccagaac

SEQ ID NO: 447685 - DNA, 15 bp, Homo sapiens
agttttgtgccagaa

SEQ ID NO: 447686 - DNA, 15 bp, Homo sapiens
cagttttgtgccaga

SEQ ID NO: 447687 - DNA, 15 bp, Homo sapiens
acagttttgtgccag

SEQ ID NO: 447688 - DNA, 15 bp, Homo sapiens
tacagttttgtgcca

SEQ ID NO: 447689 - DNA, 15 bp, Homo sapiens
ctacagttttgtgcc

SEQ ID NO: 447690 - DNA, 15 bp, Homo sapiens
cctacagttttgtgc

SEQ ID NO: 447691 - DNA, 15 bp, Homo sapiens
gcctacagttttgtg

SEQ ID NO: 447692 - DNA, 15 bp, Homo sapiens
tgcctacagttttgt

SEQ ID NO: 447693 - DNA, 15 bp, Homo sapiens
atgcctacagttttg

SEQ ID NO: 447694 - DNA, 15 bp, Homo sapiens
gatgcctacagtttt

SEQ ID NO: 447695 - DNA, 15 bp, Homo sapiens
ggatgcctacagttt

SEQ ID NO: 447696 - DNA, 15 bp, Homo sapiens
aggatgcctacagtt

SEQ ID NO: 447697 - DNA, 15 bp, Homo sapiens
caggatgcctacagt

SEQ ID NO: 447698 - DNA, 15 bp, Homo sapiens
gcaggatgcctacag

SEQ ID NO: 447699 - DNA, 15 bp, Homo sapiens
ggcaggatgcctaca

SEQ ID NO: 447700 - DNA, 15 bp, Homo sapiens
gggcaggatgcctac

SEQ ID NO: 447701 - DNA, 15 bp, Homo sapiens
agggcaggatgccta

SEQ ID NO: 447702 - DNA, 15 bp, Homo sapiens
gagggcaggatgcct

SEQ ID NO: 447703 - DNA, 15 bp, Homo sapiens
agagggcaggatgcc

SEQ ID NO: 447704 - DNA, 15 bp, Homo sapiens
tagagggcaggatgc

SEQ ID NO: 447705 - DNA, 15 bp, Homo sapiens
ttagagggcaggatg

SEQ ID NO: 447706 - DNA, 15 bp, Homo sapiens
gttagagggcaggat

SEQ ID NO: 447707 - DNA, 15 bp, Homo sapiens
agttagagggcagga

SEQ ID NO: 447708 - DNA, 15 bp, Homo sapiens
cagttagagggcagg

SEQ ID NO: 447709 - DNA, 15 bp, Homo sapiens
gcagttagagggcag

SEQ ID NO: 447710 - DNA, 15 bp, Homo sapiens
agcagttagagggca

SEQ ID NO: 447711 - DNA, 15 bp, Homo sapiens
gagcagttagagggc

SEQ ID NO: 447712 - DNA, 15 bp, Homo sapiens
cgagcagttagaggg

SEQ ID NO: 447713 - DNA, 15 bp, Homo sapiens
ccgagcagttagagg

SEQ ID NO: 447714 - DNA, 15 bp, Homo sapiens
tccgagcagttagag

SEQ ID NO: 447715 - DNA, 15 bp, Homo sapiens
atccgagcagttaga

SEQ ID NO: 447716 - DNA, 15 bp, Homo sapiens
tatccgagcagttag

SEQ ID NO: 447717 - DNA, 15 bp, Homo sapiens
atatccgagcagtta

SEQ ID NO: 447718 - DNA, 15 bp, Homo sapiens
gatatccgagcagtt

SEQ ID NO: 447719 - DNA, 15 bp, Homo sapiens
agatatccgagcagt

SEQ ID NO: 447720 - DNA, 15 bp, Homo sapiens
cagatatccgagcag

SEQ ID NO: 447721 - DNA, 15 bp, Homo sapiens
ccagatatccgagca

SEQ ID NO: 447722 - DNA, 15 bp, Homo sapiens
gccagatatccgagc

SEQ ID NO: 447723 - DNA, 15 bp, Homo sapiens
tgccagatatccgag

SEQ ID NO: 447724 - DNA, 15 bp, Homo sapiens
ctgccagatatccga

SEQ ID NO: 447725 - DNA, 15 bp, Homo sapiens
cctgccagatatccg

SEQ ID NO: 447726 - DNA, 15 bp, Homo sapiens
acctgccagatatcc

SEQ ID NO: 447727 - DNA, 15 bp, Homo sapiens
aacctgccagatatc

SEQ ID NO: 447728 - DNA, 15 bp, Homo sapiens
gaacctgccagatat

SEQ ID NO: 447729 - DNA, 15 bp, Homo sapiens
agaacctgccagata

SEQ ID NO: 447730 - DNA, 15 bp, Homo sapiens
cagaacctgccagat

SEQ ID NO: 447731 - DNA, 15 bp, Homo sapiens
tcagaacctgccaga

SEQ ID NO: 447732 - DNA, 15 bp, Homo sapiens
ttcagaacctgccag

SEQ ID NO: 447733 - DNA, 15 bp, Homo sapiens
attcagaacctgcca

SEQ ID NO: 447734 - DNA, 15 bp, Homo sapiens
cattcagaacctgcc

SEQ ID NO: 447735 - DNA, 15 bp, Homo sapiens
acattcagaacctgc

SEQ ID NO: 447736 - DNA, 15 bp, Homo sapiens
cacattcagaacctg

SEQ ID NO: 447737 - DNA, 15 bp, Homo sapiens
tcacattcagaacct

SEQ ID NO: 447738 - DNA, 15 bp, Homo sapiens
ttcacattcagaacc

SEQ ID NO: 447739 - DNA, 15 bp, Homo sapiens
gttcacattcagaac

SEQ ID NO: 447740 - DNA, 15 bp, Homo sapiens
ggttcacattcagaa

SEQ ID NO: 447741 - DNA, 15 bp, Homo sapiens
tggttcacattcaga

SEQ ID NO: 447742 - DNA, 15 bp, Homo sapiens
ctggttcacattcag

SEQ ID NO: 447743 - DNA, 15 bp, Homo sapiens
tctggttcacattca

SEQ ID NO: 447744 - DNA, 15 bp, Homo sapiens
atctggttcacattc

SEQ ID NO: 447745 - DNA, 15 bp, Homo sapiens
tatctggttcacatt

SEQ ID NO: 447746 - DNA, 15 bp, Homo sapiens
ctatctggttcacat

SEQ ID NO: 447747 - DNA, 15 bp, Homo sapiens
gctatctggttcaca

SEQ ID NO: 447748 - DNA, 15 bp, Homo sapiens
agctatctggttcac

SEQ ID NO: 447749 - DNA, 15 bp, Homo sapiens
aagctatctggttca

SEQ ID NO: 447750 - DNA, 15 bp, Homo sapiens
aaagctatctggttc

SEQ ID NO: 447751 - DNA, 15 bp, Homo sapiens
gaaagctatctggtt

SEQ ID NO: 447752 - DNA, 15 bp, Homo sapiens
ggaaagctatctggt

SEQ ID NO: 447753 - DNA, 15 bp, Homo sapiens
gggaaagctatctgg

SEQ ID NO: 447754 - DNA, 15 bp, Homo sapiens
agggaaagctatctg

SEQ ID NO: 447755 - DNA, 15 bp, Homo sapiens
cagggaaagctatct

SEQ ID NO: 447756 - DNA, 15 bp, Homo sapiens
ccagggaaagctatc

SEQ ID NO: 447757 - DNA, 15 bp, Homo sapiens
tccagggaaagctat

SEQ ID NO: 447758 - DNA, 15 bp, Homo sapiens
gtccagggaaagcta

SEQ ID NO: 447759 - DNA, 15 bp, Homo sapiens
ggtccagggaaagct

SEQ ID NO: 447760 - DNA, 15 bp, Homo sapiens
tggtccagggaaagc

SEQ ID NO: 447761 - DNA, 15 bp, Homo sapiens
ctggtccagggaaag

SEQ ID NO: 447762 - DNA, 15 bp, Homo sapiens
gctggtccagggaaa

SEQ ID NO: 447763 - DNA, 15 bp, Homo sapiens
ggctggtccagggaa

SEQ ID NO: 447764 - DNA, 15 bp, Homo sapiens
cggctggtccaggga

SEQ ID NO: 447765 - DNA, 15 bp, Homo sapiens
ccggctggtccaggg

SEQ ID NO: 447766 - DNA, 15 bp, Homo sapiens
gccggctggtccagg

SEQ ID NO: 447767 - DNA, 15 bp, Homo sapiens
ggccggctggtccag

SEQ ID NO: 447768 - DNA, 15 bp, Homo sapiens
gggccggctggtcca

SEQ ID NO: 447769 - DNA, 15 bp, Homo sapiens
tgggccggctggtcc

SEQ ID NO: 447770 - DNA, 15 bp, Homo sapiens
ttgggccggctggtc

SEQ ID NO: 447771 - DNA, 15 bp, Homo sapiens
cttgggccggctggt

SEQ ID NO: 447772 - DNA, 15 bp, Homo sapiens
gcttgggccggctgg

SEQ ID NO: 447773 - DNA, 15 bp, Homo sapiens
agcttgggccggctg

SEQ ID NO: 447774 - DNA, 15 bp, Homo sapiens
aagcttgggccggct

SEQ ID NO: 447775 - DNA, 15 bp, Homo sapiens
gaagcttgggccggc

SEQ ID NO: 447776 - DNA, 15 bp, Homo sapiens
tgaagcttgggccgg

SEQ ID NO: 447777 - DNA, 15 bp, Homo sapiens
ttgaagcttgggccg

SEQ ID NO: 447778 - DNA, 15 bp, Homo sapiens
gttgaagcttgggcc

SEQ ID NO: 447779 - DNA, 15 bp, Homo sapiens
tgttgaagcttgggc

SEQ ID NO: 447780 - DNA, 15 bp, Homo sapiens
ctgttgaagcttggg

SEQ ID NO: 447781 - DNA, 15 bp, Homo sapiens
gctgttgaagcttgg

SEQ ID NO: 447782 - DNA, 15 bp, Homo sapiens
tgctgttgaagcttg

SEQ ID NO: 447783 - DNA, 15 bp, Homo sapiens
gtgctgttgaagctt

SEQ ID NO: 447784 - DNA, 15 bp, Homo sapiens
tgtgctgttgaagct

SEQ ID NO: 447785 - DNA, 15 bp, Homo sapiens
ctgtgctgttgaagc

SEQ ID NO: 447786 - DNA, 15 bp, Homo sapiens
tctgtgctgttgaag

SEQ ID NO: 447787 - DNA, 15 bp, Homo sapiens
ctctgtgctgttgaa

SEQ ID NO: 447788 - DNA, 15 bp, Homo sapiens
cctctgtgctgttga

SEQ ID NO: 447789 - DNA, 15 bp, Homo sapiens
tcctctgtgctgttg

SEQ ID NO: 447790 - DNA, 15 bp, Homo sapiens
gtcctctgtgctgtt

SEQ ID NO: 447791 - DNA, 15 bp, Homo sapiens
ggtcctctgtgctgt

SEQ ID NO: 447792 - DNA, 15 bp, Homo sapiens
tggtcctctgtgctg

SEQ ID NO: 447793 - DNA, 15 bp, Homo sapiens
gtggtcctctgtgct

SEQ ID NO: 447794 - DNA, 15 bp, Homo sapiens
agtggtcctctgtgc

SEQ ID NO: 447795 - DNA, 15 bp, Homo sapiens
gagtggtcctctgtg

SEQ ID NO: 447796 - DNA, 15 bp, Homo sapiens
ggagtggtcctctgt

SEQ ID NO: 447797 - DNA, 15 bp, Homo sapiens
tggagtggtcctctg

SEQ ID NO: 447798 - DNA, 15 bp, Homo sapiens
ttggagtggtcctct

SEQ ID NO: 447799 - DNA, 15 bp, Homo sapiens
tttggagtggtcctc

SEQ ID NO: 447800 - DNA, 15 bp, Homo sapiens
atttggagtggtcct

SEQ ID NO: 447801 - DNA, 15 bp, Homo sapiens
catttggagtggtcc

SEQ ID NO: 447802 - DNA, 15 bp, Homo sapiens
ccatttggagtggtc

SEQ ID NO: 447803 - DNA, 15 bp, Homo sapiens
accatttggagtggt

SEQ ID NO: 447804 - DNA, 15 bp, Homo sapiens
caccatttggagtgg

SEQ ID NO: 447805 - DNA, 15 bp, Homo sapiens
gcaccatttggagtg

SEQ ID NO: 447806 - DNA, 15 bp, Homo sapiens
cgcaccatttggagt

SEQ ID NO: 447807 - DNA, 15 bp, Homo sapiens
acgcaccatttggag

SEQ ID NO: 447808 - DNA, 15 bp, Homo sapiens
cacgcaccatttgga

SEQ ID NO: 447809 - DNA, 15 bp, Homo sapiens
acacgcaccatttgg

SEQ ID NO: 447810 - DNA, 15 bp, Homo sapiens
gacacgcaccatttg

SEQ ID NO: 447811 - DNA, 15 bp, Homo sapiens
ggacacgcaccattt

SEQ ID NO: 447812 - DNA, 15 bp, Homo sapiens
gggacacgcaccatt

SEQ ID NO: 447813 - DNA, 15 bp, Homo sapiens
ggggacacgcaccat

SEQ ID NO: 447814 - DNA, 15 bp, Homo sapiens
tggggacacgcacca

SEQ ID NO: 447815 - DNA, 15 bp, Homo sapiens
ttggggacacgcacc

SEQ ID NO: 447816 - DNA, 15 bp, Homo sapiens
tttggggacacgcac

SEQ ID NO: 447817 - DNA, 15 bp, Homo sapiens
ttttggggacacgca

SEQ ID NO: 447818 - DNA, 15 bp, Homo sapiens
cttttggggacacgc

SEQ ID NO: 447819 - DNA, 15 bp, Homo sapiens
ccttttggggacacg

SEQ ID NO: 447820 - DNA, 15 bp, Homo sapiens
cccttttggggacac

SEQ ID NO: 447821 - DNA, 15 bp, Homo sapiens
gcccttttggggaca

SEQ ID NO: 447822 - DNA, 15 bp, Homo sapiens
ggcccttttggggac

SEQ ID NO: 447823 - DNA, 15 bp, Homo sapiens
gggcccttttgggga

SEQ ID NO: 447824 - DNA, 15 bp, Homo sapiens
agggcccttttgggg

SEQ ID NO: 447825 - DNA, 15 bp, Homo sapiens
cagggcccttttggg

SEQ ID NO: 447826 - DNA, 15 bp, Homo sapiens
ccagggcccttttgg

SEQ ID NO: 447827 - DNA, 15 bp, Homo sapiens
tccagggcccttttg

SEQ ID NO: 447828 - DNA, 15 bp, Homo sapiens
gtccagggccctttt

SEQ ID NO: 447829 - DNA, 15 bp, Homo sapiens
ggtccagggcccttt

SEQ ID NO: 447830 - DNA, 15 bp, Homo sapiens
aggtccagggccctt

SEQ ID NO: 447831 - DNA, 15 bp, Homo sapiens
caggtccagggccct

SEQ ID NO: 447832 - DNA, 15 bp, Homo sapiens
gcaggtccagggccc

SEQ ID NO: 447833 - DNA, 15 bp, Homo sapiens
cgcaggtccagggcc

SEQ ID NO: 447834 - DNA, 15 bp, Homo sapiens
acgcaggtccagggc

SEQ ID NO: 447835 - DNA, 15 bp, Homo sapiens
cacgcaggtccaggg

SEQ ID NO: 447836 - DNA, 15 bp, Homo sapiens
ccacgcaggtccagg

SEQ ID NO: 447837 - DNA, 15 bp, Homo sapiens
cccacgcaggtccag

SEQ ID NO: 447838 - DNA, 15 bp, Homo sapiens
acccacgcaggtcca

SEQ ID NO: 447839 - DNA, 15 bp, Homo sapiens
cacccacgcaggtcc

SEQ ID NO: 447840 - DNA, 15 bp, Homo sapiens
tcacccacgcaggtc

SEQ ID NO: 447841 - DNA, 15 bp, Homo sapiens
gtcacccacgcaggt

SEQ ID NO: 447842 - DNA, 15 bp, Homo sapiens
tgtcacccacgcagg

SEQ ID NO: 447843 - DNA, 15 bp, Homo sapiens
atgtcacccacgcag

SEQ ID NO: 447844 - DNA, 15 bp, Homo sapiens
catgtcacccacgca

SEQ ID NO: 447845 - DNA, 15 bp, Homo sapiens
tcatgtcacccacgc

SEQ ID NO: 447846 - DNA, 15 bp, Homo sapiens
ttcatgtcacccacg

SEQ ID NO: 447847 - DNA, 15 bp, Homo sapiens
attcatgtcacccac

SEQ ID NO: 447848 - DNA, 15 bp, Homo sapiens
gattcatgtcaccca

SEQ ID NO: 447849 - DNA, 15 bp, Homo sapiens
cgattcatgtcaccc

SEQ ID NO: 447850 - DNA, 15 bp, Homo sapiens
ccgattcatgtcacc

SEQ ID NO: 447851 - DNA, 15 bp, Homo sapiens
tccgattcatgtcac

SEQ ID NO: 447852 - DNA, 15 bp, Homo sapiens
ttccgattcatgtca

SEQ ID NO: 447853 - DNA, 15 bp, Homo sapiens
gttccgattcatgtc

SEQ ID NO: 447854 - DNA, 15 bp, Homo sapiens
ggttccgattcatgt

SEQ ID NO: 447855 - DNA, 15 bp, Homo sapiens
tggttccgattcatg

SEQ ID NO: 447856 - DNA, 15 bp, Homo sapiens
ctggttccgattcat

SEQ ID NO: 447857 - DNA, 15 bp, Homo sapiens
cctggttccgattca

SEQ ID NO: 447858 - DNA, 15 bp, Homo sapiens
ccctggttccgattc

SEQ ID NO: 447859 - DNA, 15 bp, Homo sapiens
tccctggttccgatt

SEQ ID NO: 447860 - DNA, 15 bp, Homo sapiens
ctccctggttccgat

SEQ ID NO: 447861 - DNA, 15 bp, Homo sapiens
tctccctggttccga

SEQ ID NO: 447862 - DNA, 15 bp, Homo sapiens
ctctccctggttccg

SEQ ID NO: 447863 - DNA, 15 bp, Homo sapiens
cctctccctggttcc

SEQ ID NO: 447864 - DNA, 15 bp, Homo sapiens
tcctctccctggttc

SEQ ID NO: 447865 - DNA, 15 bp, Homo sapiens
ctcctctccctggtt

SEQ ID NO: 447866 - DNA, 15 bp, Homo sapiens
gctcctctccctggt

SEQ ID NO: 447867 - DNA, 15 bp, Homo sapiens
tgctcctctccctgg

SEQ ID NO: 447868 - DNA, 15 bp, Homo sapiens
ttgctcctctccctg

SEQ ID NO: 447869 - DNA, 15 bp, Homo sapiens
gttgctcctctccct

SEQ ID NO: 447870 - DNA, 15 bp, Homo sapiens
cgttgctcctctccc

SEQ ID NO: 447871 - DNA, 15 bp, Homo sapiens
ccgttgctcctctcc

SEQ ID NO: 447872 - DNA, 15 bp, Homo sapiens
cccgttgctcctctc

SEQ ID NO: 447873 - DNA, 15 bp, Homo sapiens
ccccgttgctcctct

SEQ ID NO: 447874 - DNA, 15 bp, Homo sapiens
accccgttgctcctc

SEQ ID NO: 447875 - DNA, 15 bp, Homo sapiens
caccccgttgctcct

SEQ ID NO: 447876 - DNA, 15 bp, Homo sapiens
ccaccccgttgctcc

SEQ ID NO: 447877 - DNA, 15 bp, Homo sapiens
cccaccccgttgctc

SEQ ID NO: 447878 - DNA, 15 bp, Homo sapiens
ccccaccccgttgct

SEQ ID NO: 447879 - DNA, 15 bp, Homo sapiens
cccccaccccgttgc

SEQ ID NO: 447880 - DNA, 15 bp, Homo sapiens
gcccccaccccgttg

SEQ ID NO: 447881 - DNA, 15 bp, Homo sapiens
tgcccccaccccgtt

SEQ ID NO: 447882 - DNA, 15 bp, Homo sapiens
gtgcccccaccccgt

SEQ ID NO: 447883 - DNA, 15 bp, Homo sapiens
tgtgcccccaccccg

SEQ ID NO: 447884 - DNA, 15 bp, Homo sapiens
gtgtgcccccacccc

SEQ ID NO: 447885 - DNA, 15 bp, Homo sapiens
agtgtgcccccaccc

SEQ ID NO: 447886 - DNA, 15 bp, Homo sapiens
cagtgtgcccccacc

SEQ ID NO: 447887 - DNA, 15 bp, Homo sapiens
acagtgtgcccccac

SEQ ID NO: 447888 - DNA, 15 bp, Homo sapiens
cacagtgtgccccca

SEQ ID NO: 447889 - DNA, 15 bp, Homo sapiens
acacagtgtgccccc

SEQ ID NO: 447890 - DNA, 15 bp, Homo sapiens
cacacagtgtgcccc

SEQ ID NO: 447891 - DNA, 15 bp, Homo sapiens
gcacacagtgtgccc

SEQ ID NO: 447892 - DNA, 15 bp, Homo sapiens
ggcacacagtgtgcc

SEQ ID NO: 447893 - DNA, 15 bp, Homo sapiens
gggcacacagtgtgc

SEQ ID NO: 447894 - DNA, 15 bp, Homo sapiens
tgggcacacagtgtg

SEQ ID NO: 447895 - DNA, 15 bp, Homo sapiens
ctgggcacacagtgt

SEQ ID NO: 447896 - DNA, 15 bp, Homo sapiens
gctgggcacacagtg

SEQ ID NO: 447897 - DNA, 15 bp, Homo sapiens
agctgggcacacagt

SEQ ID NO: 447898 - DNA, 15 bp, Homo sapiens
cagctgggcacacag

SEQ ID NO: 447899 - DNA, 15 bp, Homo sapiens
gcagctgggcacaca

SEQ ID NO: 447900 - DNA, 15 bp, Homo sapiens
ggcagctgggcacac

SEQ ID NO: 447901 - DNA, 15 bp, Homo sapiens
tggcagctgggcaca

SEQ ID NO: 447902 - DNA, 15 bp, Homo sapiens
ctggcagctgggcac

SEQ ID NO: 447903 - DNA, 15 bp, Homo sapiens
gctggcagctgggca

SEQ ID NO: 447904 - DNA, 15 bp, Homo sapiens
ggctggcagctgggc

SEQ ID NO: 447905 - DNA, 15 bp, Homo sapiens
gggctggcagctggg

SEQ ID NO: 447906 - DNA, 15 bp, Homo sapiens
agggctggcagctgg

SEQ ID NO: 447907 - DNA, 15 bp, Homo sapiens
gagggctggcagctg

SEQ ID NO: 447908 - DNA, 15 bp, Homo sapiens
agagggctggcagct

SEQ ID NO: 447909 - DNA, 15 bp, Homo sapiens
cagagggctggcagc

SEQ ID NO: 447910 - DNA, 15 bp, Homo sapiens
ccagagggctggcag

SEQ ID NO: 447911 - DNA, 15 bp, Homo sapiens
tccagagggctggca

SEQ ID NO: 447912 - DNA, 15 bp, Homo sapiens
ttccagagggctggc

SEQ ID NO: 447913 - DNA, 15 bp, Homo sapiens
tttccagagggctgg

SEQ ID NO: 447914 - DNA, 15 bp, Homo sapiens
ctttccagagggctg

SEQ ID NO: 447915 - DNA, 15 bp, Homo sapiens
gctttccagagggct

SEQ ID NO: 447916 - DNA, 15 bp, Homo sapiens
ggctttccagagggc

SEQ ID NO: 447917 - DNA, 15 bp, Homo sapiens
aggctttccagaggg

SEQ ID NO: 447918 - DNA, 15 bp, Homo sapiens
aaggctttccagagg

SEQ ID NO: 447919 - DNA, 15 bp, Homo sapiens
gaaggctttccagag

SEQ ID NO: 447920 - DNA, 15 bp, Homo sapiens
ggaaggctttccaga

SEQ ID NO: 447921 - DNA, 15 bp, Homo sapiens
tggaaggctttccag

SEQ ID NO: 447922 - DNA, 15 bp, Homo sapiens
ctggaaggctttcca

SEQ ID NO: 447923 - DNA, 15 bp, Homo sapiens
gctggaaggctttcc

SEQ ID NO: 447924 - DNA, 15 bp, Homo sapiens
ggctggaaggctttc

SEQ ID NO: 447925 - DNA, 15 bp, Homo sapiens
cggctggaaggcttt

SEQ ID NO: 447926 - DNA, 15 bp, Homo sapiens
gcggctggaaggctt

SEQ ID NO: 447927 - DNA, 15 bp, Homo sapiens
agcggctggaaggct

SEQ ID NO: 447928 - DNA, 15 bp, Homo sapiens
cagcggctggaaggc

SEQ ID NO: 447929 - DNA, 15 bp, Homo sapiens
ccagcggctggaagg

SEQ ID NO: 447930 - DNA, 15 bp, Homo sapiens
accagcggctggaag

SEQ ID NO: 447931 - DNA, 15 bp, Homo sapiens
caccagcggctggaa

SEQ ID NO: 447932 - DNA, 15 bp, Homo sapiens
tcaccagcggctgga

SEQ ID NO: 447933 - DNA, 15 bp, Homo sapiens
ttcaccagcggctgg

SEQ ID NO: 447934 - DNA, 15 bp, Homo sapiens
cttcaccagcggctg

SEQ ID NO: 447935 - DNA, 15 bp, Homo sapiens
tcttcaccagcggct

SEQ ID NO: 447936 - DNA, 15 bp, Homo sapiens
ttcttcaccagcggc

SEQ ID NO: 447937 - DNA, 15 bp, Homo sapiens
gttcttcaccagcgg

SEQ ID NO: 447938 - DNA, 15 bp, Homo sapiens
agttcttcaccagcg

SEQ ID NO: 447939 - DNA, 15 bp, Homo sapiens
tagttcttcaccagc

SEQ ID NO: 447940 - DNA, 15 bp, Homo sapiens
gtagttcttcaccag

SEQ ID NO: 447941 - DNA, 15 bp, Homo sapiens
ggtagttcttcacca

SEQ ID NO: 447942 - DNA, 15 bp, Homo sapiens
tggtagttcttcacc

SEQ ID NO: 447943 - DNA, 15 bp, Homo sapiens
ctggtagttcttcac

SEQ ID NO: 447944 - DNA, 15 bp, Homo sapiens
gctggtagttcttca

SEQ ID NO: 447945 - DNA, 15 bp, Homo sapiens
ggctggtagttcttc

SEQ ID NO: 447946 - DNA, 15 bp, Homo sapiens
gggctggtagttctt

SEQ ID NO: 447947 - DNA, 15 bp, Homo sapiens
agggctggtagttct

SEQ ID NO: 447948 - DNA, 15 bp, Homo sapiens
cagggctggtagttc

SEQ ID NO: 447949 - DNA, 15 bp, Homo sapiens
acagggctggtagtt

SEQ ID NO: 447950 - DNA, 15 bp, Homo sapiens
tacagggctggtagt

SEQ ID NO: 447951 - DNA, 15 bp, Homo sapiens
ttacagggctggtag

SEQ ID NO: 447952 - DNA, 15 bp, Homo sapiens
attacagggctggta

SEQ ID NO: 447953 - DNA, 15 bp, Homo sapiens
cattacagggctggt

SEQ ID NO: 447954 - DNA, 15 bp, Homo sapiens
ccattacagggctgg

SEQ ID NO: 447955 - DNA, 15 bp, Homo sapiens
gccattacagggctg

SEQ ID NO: 447956 - DNA, 15 bp, Homo sapiens
tgccattacagggct

SEQ ID NO: 447957 - DNA, 15 bp, Homo sapiens
atgccattacagggc

SEQ ID NO: 447958 - DNA, 15 bp, Homo sapiens
catgccattacaggg

SEQ ID NO: 447959 - DNA, 15 bp, Homo sapiens
ccatgccattacagg

SEQ ID NO: 447960 - DNA, 15 bp, Homo sapiens
gccatgccattacag

SEQ ID NO: 447961 - DNA, 15 bp, Homo sapiens
ggccatgccattaca

SEQ ID NO: 447962 - DNA, 15 bp, Homo sapiens
tggccatgccattac

SEQ ID NO: 447963 - DNA, 15 bp, Homo sapiens
ctggccatgccatta

SEQ ID NO: 447964 - DNA, 15 bp, Homo sapiens
cctggccatgccatt

SEQ ID NO: 447965 - DNA, 15 bp, Homo sapiens
tcctggccatgccat

SEQ ID NO: 447966 - DNA, 15 bp, Homo sapiens
ttcctggccatgcca

SEQ ID NO: 447967 - DNA, 15 bp, Homo sapiens
cttcctggccatgcc

SEQ ID NO: 447968 - DNA, 15 bp, Homo sapiens
gcttcctggccatgc

SEQ ID NO: 447969 - DNA, 15 bp, Homo sapiens
ggcttcctggccatg

SEQ ID NO: 447970 - DNA, 15 bp, Homo sapiens
gggcttcctggccat

SEQ ID NO: 447971 - DNA, 15 bp, Homo sapiens
tgggcttcctggcca

SEQ ID NO: 447972 - DNA, 15 bp, Homo sapiens
ctgggcttcctggcc

SEQ ID NO: 447973 - DNA, 15 bp, Homo sapiens
gctgggcttcctggc

SEQ ID NO: 447974 - DNA, 15 bp, Homo sapiens
tgctgggcttcctgg

SEQ ID NO: 447975 - DNA, 15 bp, Homo sapiens
ctgctgggcttcctg

SEQ ID NO: 447976 - DNA, 15 bp, Homo sapiens
tctgctgggcttcct

SEQ ID NO: 447977 - DNA, 15 bp, Homo sapiens
ctctgctgggcttcc

SEQ ID NO: 447978 - DNA, 15 bp, Homo sapiens
gctctgctgggcttc

SEQ ID NO: 447979 - DNA, 15 bp, Homo sapiens
agctctgctgggctt

SEQ ID NO: 447980 - DNA, 15 bp, Homo sapiens
aagctctgctgggct

SEQ ID NO: 447981 - DNA, 15 bp, Homo sapiens
taagctctgctgggc

SEQ ID NO: 447982 - DNA, 15 bp, Homo sapiens
ataagctctgctggg

SEQ ID NO: 447983 - DNA, 15 bp, Homo sapiens
tataagctctgctgg

SEQ ID NO: 447984 - DNA, 15 bp, Homo sapiens
ttataagctctgctg

SEQ ID NO: 447985 - DNA, 15 bp, Homo sapiens
cttataagctctgct

SEQ ID NO: 447986 - DNA, 15 bp, Homo sapiens
tcttataagctctgc

SEQ ID NO: 447987 - DNA, 15 bp, Homo sapiens
atcttataagctctg

SEQ ID NO: 447988 - DNA, 15 bp, Homo sapiens
gatcttataagctct

SEQ ID NO: 447989 - DNA, 15 bp, Homo sapiens
agatcttataagctc

SEQ ID NO: 447990 - DNA, 15 bp, Homo sapiens
tagatcttataagct

SEQ ID NO: 447991 - DNA, 15 bp, Homo sapiens
ttagatcttataagc

SEQ ID NO: 447992 - DNA, 15 bp, Homo sapiens
gttagatcttataag

SEQ ID NO: 447993 - DNA, 15 bp, Homo sapiens
ggttagatcttataa

SEQ ID NO: 447994 - DNA, 15 bp, Homo sapiens
gggttagatcttata

SEQ ID NO: 447995 - DNA, 15 bp, Homo sapiens
agggttagatcttat

SEQ ID NO: 447996 - DNA, 15 bp, Homo sapiens
aagggttagatctta

SEQ ID NO: 447997 - DNA, 15 bp, Homo sapiens
taagggttagatctt

SEQ ID NO: 447998 - DNA, 15 bp, Homo sapiens
ataagggttagatct

SEQ ID NO: 447999 - DNA, 15 bp, Homo sapiens
cataagggttagatc

SEQ ID NO: 448000 - DNA, 15 bp, Homo sapiens
ccataagggttagat

SEQ ID NO: 448001 - DNA, 15 bp, Homo sapiens
gccataagggttaga

SEQ ID NO: 448002 - DNA, 15 bp, Homo sapiens
ggccataagggttag

SEQ ID NO: 448003 - DNA, 15 bp, Homo sapiens
tggccataagggtta

SEQ ID NO: 448004 - DNA, 15 bp, Homo sapiens
ctggccataagggtt

SEQ ID NO: 448005 - DNA, 15 bp, Homo sapiens
cctggccataagggt

SEQ ID NO: 448006 - DNA, 15 bp, Homo sapiens
acctggccataaggg

SEQ ID NO: 448007 - DNA, 15 bp, Homo sapiens
cacctggccataagg

SEQ ID NO: 448008 - DNA, 15 bp, Homo sapiens
gcacctggccataag

SEQ ID NO: 448009 - DNA, 15 bp, Homo sapiens
tgcacctggccataa

SEQ ID NO: 448010 - DNA, 15 bp, Homo sapiens
ctgcacctggccata

SEQ ID NO: 448011 - DNA, 15 bp, Homo sapiens
actgcacctggccat

SEQ ID NO: 448012 - DNA, 15 bp, Homo sapiens
cactgcacctggcca

SEQ ID NO: 448013 - DNA, 15 bp, Homo sapiens
ccactgcacctggcc

SEQ ID NO: 448014 - DNA, 15 bp, Homo sapiens
gccactgcacctggc

SEQ ID NO: 448015 - DNA, 15 bp, Homo sapiens
agccactgcacctgg

SEQ ID NO: 448016 - DNA, 15 bp, Homo sapiens
gagccactgcacctg

SEQ ID NO: 448017 - DNA, 15 bp, Homo sapiens
tgagccactgcacct

SEQ ID NO: 448018 - DNA, 15 bp, Homo sapiens
acgtgagccactgca

SEQ ID NO: 448019 - DNA, 15 bp, Homo sapiens
tacgtgagccactgc

SEQ ID NO: 448020 - DNA, 15 bp, Homo sapiens
atacgtgagccactg

SEQ ID NO: 448021 - DNA, 15 bp, Homo sapiens
catacgtgagccact

SEQ ID NO: 448022 - DNA, 15 bp, Homo sapiens
acatacgtgagccac

SEQ ID NO: 448023 - DNA, 15 bp, Homo sapiens
tacatacgtgagcca

SEQ ID NO: 448024 - DNA, 15 bp, Homo sapiens
ttacatacgtgagcc

SEQ ID NO: 448025 - DNA, 15 bp, Homo sapiens
attacatacgtgagc

SEQ ID NO: 448026 - DNA, 15 bp, Homo sapiens
gattacatacgtgag

SEQ ID NO: 448027 - DNA, 15 bp, Homo sapiens
ggattacatacgtga

SEQ ID NO: 448028 - DNA, 15 bp, Homo sapiens
gggattacatacgtg

SEQ ID NO: 448029 - DNA, 15 bp, Homo sapiens
tgggattacatacgt

SEQ ID NO: 448030 - DNA, 15 bp, Homo sapiens
ctgggattacatacg

SEQ ID NO: 448031 - DNA, 15 bp, Homo sapiens
gctgggattacatac

SEQ ID NO: 448032 - DNA, 15 bp, Homo sapiens
tgctgggattacata

SEQ ID NO: 448033 - DNA, 15 bp, Homo sapiens
gtgctgggattacat

SEQ ID NO: 448034 - DNA, 15 bp, Homo sapiens
ttcccaaagtgctgg

SEQ ID NO: 448035 - DNA, 15 bp, Homo sapiens
cttcccaaagtgctg

SEQ ID NO: 448036 - DNA, 15 bp, Homo sapiens
gcttcccaaagtgct

SEQ ID NO: 448037 - DNA, 15 bp, Homo sapiens
ggcttcccaaagtgc

SEQ ID NO: 448038 - DNA, 15 bp, Homo sapiens
tggcttcccaaagtg

SEQ ID NO: 448039 - DNA, 15 bp, Homo sapiens
ttggcttcccaaagt

SEQ ID NO: 448040 - DNA, 15 bp, Homo sapiens
cttggcttcccaaag

SEQ ID NO: 448041 - DNA, 15 bp, Homo sapiens
ccttggcttcccaaa

SEQ ID NO: 448042 - DNA, 15 bp, Homo sapiens
tccttggcttcccaa

SEQ ID NO: 448043 - DNA, 15 bp, Homo sapiens
ctccttggcttccca

SEQ ID NO: 448044 - DNA, 15 bp, Homo sapiens
cctccttggcttccc

SEQ ID NO: 448045 - DNA, 15 bp, Homo sapiens
ccctccttggcttcc

SEQ ID NO: 448046 - DNA, 15 bp, Homo sapiens
tccctccttggcttc

SEQ ID NO: 448047 - DNA, 15 bp, Homo sapiens
ctccctccttggctt

SEQ ID NO: 448048 - DNA, 15 bp, Homo sapiens
cctccctccttggct

SEQ ID NO: 448049 - DNA, 15 bp, Homo sapiens
tcctccctccttggc

SEQ ID NO: 448050 - DNA, 15 bp, Homo sapiens
atcctccctccttgg

SEQ ID NO: 448051 - DNA, 15 bp, Homo sapiens
gatcctccctccttg

SEQ ID NO: 448052 - DNA, 15 bp, Homo sapiens
tgatcctccctcctt

SEQ ID NO: 448053 - DNA, 15 bp, Homo sapiens
gtgatcctccctcct

SEQ ID NO: 448054 - DNA, 15 bp, Homo sapiens
agtgatcctccctcc

SEQ ID NO: 448055 - DNA, 15 bp, Homo sapiens
aagtgatcctccctc

SEQ ID NO: 448056 - DNA, 15 bp, Homo sapiens
caagtgatcctccct

SEQ ID NO: 448057 - DNA, 15 bp, Homo sapiens
tcaagtgatcctccc

SEQ ID NO: 448058 - DNA, 15 bp, Homo sapiens
ttcaagtgatcctcc

SEQ ID NO: 448059 - DNA, 15 bp, Homo sapiens
gttcaagtgatcctc

SEQ ID NO: 448060 - DNA, 15 bp, Homo sapiens
agttcaagtgatcct

SEQ ID NO: 448061 - DNA, 15 bp, Homo sapiens
gagttcaagtgatcc

SEQ ID NO: 448062 - DNA, 15 bp, Homo sapiens
tgagttcaagtgatc

SEQ ID NO: 448063 - DNA, 15 bp, Homo sapiens
ctgagttcaagtgat

SEQ ID NO: 448064 - DNA, 15 bp, Homo sapiens
cctgagttcaagtga

SEQ ID NO: 448065 - DNA, 15 bp, Homo sapiens
tcctgagttcaagtg

SEQ ID NO: 448066 - DNA, 15 bp, Homo sapiens
ttcctgagttcaagt

SEQ ID NO: 448067 - DNA, 15 bp, Homo sapiens
attcctgagttcaag

SEQ ID NO: 448068 - DNA, 15 bp, Homo sapiens
aattcctgagttcaa

SEQ ID NO: 448069 - DNA, 15 bp, Homo sapiens
gaattcctgagttca

SEQ ID NO: 448070 - DNA, 15 bp, Homo sapiens
cgaattcctgagttc

SEQ ID NO: 448071 - DNA, 15 bp, Homo sapiens
tcgaattcctgagtt

SEQ ID NO: 448072 - DNA, 15 bp, Homo sapiens
ctcgaattcctgagt

SEQ ID NO: 448073 - DNA, 15 bp, Homo sapiens
tctcgaattcctgag

SEQ ID NO: 448074 - DNA, 15 bp, Homo sapiens
gtctcgaattcctga

SEQ ID NO: 448075 - DNA, 15 bp, Homo sapiens
ggtctcgaattcctg

SEQ ID NO: 448076 - DNA, 15 bp, Homo sapiens
tggtctcgaattcct

SEQ ID NO: 448077 - DNA, 15 bp, Homo sapiens
ctggtctcgaattcc

SEQ ID NO: 448078 - DNA, 15 bp, Homo sapiens
gctggtctcgaattc

SEQ ID NO: 448079 - DNA, 15 bp, Homo sapiens
ggctggtctcgaatt

SEQ ID NO: 448080 - DNA, 15 bp, Homo sapiens
aggctggtctcgaat

SEQ ID NO: 448081 - DNA, 15 bp, Homo sapiens
cccaggctggtctcg

SEQ ID NO: 448082 - DNA, 15 bp, Homo sapiens
agcccaggctggtct

SEQ ID NO: 448083 - DNA, 15 bp, Homo sapiens
tagcccaggctggtc

SEQ ID NO: 448084 - DNA, 15 bp, Homo sapiens
gtagcccaggctggt

SEQ ID NO: 448085 - DNA, 15 bp, Homo sapiens
tgtagcccaggctgg

SEQ ID NO: 448086 - DNA, 15 bp, Homo sapiens
atgtagcccaggctg

SEQ ID NO: 448087 - DNA, 15 bp, Homo sapiens
tatgtagcccaggct

SEQ ID NO: 448088 - DNA, 15 bp, Homo sapiens
ctatgtagcccaggc

SEQ ID NO: 448089 - DNA, 15 bp, Homo sapiens
actatgtagcccagg

SEQ ID NO: 448090 - DNA, 15 bp, Homo sapiens
cactatgtagcccag

SEQ ID NO: 448091 - DNA, 15 bp, Homo sapiens
tcactatgtagccca

SEQ ID NO: 448092 - DNA, 15 bp, Homo sapiens
ctcactatgtagccc

SEQ ID NO: 448093 - DNA, 15 bp, Homo sapiens
tctcactatgtagcc

SEQ ID NO: 448094 - DNA, 15 bp, Homo sapiens
gtctcactatgtagc

SEQ ID NO: 448095 - DNA, 15 bp, Homo sapiens
ggtctcactatgtag

SEQ ID NO: 448096 - DNA, 15 bp, Homo sapiens
tggtctcactatgta

SEQ ID NO: 448097 - DNA, 15 bp, Homo sapiens
gtggtctcactatgt

SEQ ID NO: 448098 - DNA, 15 bp, Homo sapiens
tgtggtctcactatg

SEQ ID NO: 448099 - DNA, 15 bp, Homo sapiens
atgtggtctcactat

SEQ ID NO: 448100 - DNA, 15 bp, Homo sapiens
gatgtggtctcacta

SEQ ID NO: 448101 - DNA, 15 bp, Homo sapiens
agatgtggtctcact

SEQ ID NO: 448102 - DNA, 15 bp, Homo sapiens
gagatgtggtctcac

SEQ ID NO: 448103 - DNA, 15 bp, Homo sapiens
agagatgtggtctca

SEQ ID NO: 448104 - DNA, 15 bp, Homo sapiens
tagagatgtggtctc

SEQ ID NO: 448105 - DNA, 15 bp, Homo sapiens
gtagagatgtggtct

SEQ ID NO: 448106 - DNA, 15 bp, Homo sapiens
agtagagatgtggtc

SEQ ID NO: 448107 - DNA, 15 bp, Homo sapiens
tagtagagatgtggt

SEQ ID NO: 448108 - DNA, 15 bp, Homo sapiens
ctagtagagatgtgg

SEQ ID NO: 448109 - DNA, 15 bp, Homo sapiens
tctagtagagatgtg

SEQ ID NO: 448110 - DNA, 15 bp, Homo sapiens
ttctagtagagatgt

SEQ ID NO: 448111 - DNA, 15 bp, Homo sapiens
gttctagtagagatg

SEQ ID NO: 448112 - DNA, 15 bp, Homo sapiens
agttctagtagagat

SEQ ID NO: 448113 - DNA, 15 bp, Homo sapiens
aagttctagtagaga

SEQ ID NO: 448114 - DNA, 15 bp, Homo sapiens
taagttctagtagag

SEQ ID NO: 448115 - DNA, 15 bp, Homo sapiens
ttaagttctagtaga

SEQ ID NO: 448116 - DNA, 15 bp, Homo sapiens
tttaagttctagtag

SEQ ID NO: 448117 - DNA, 15 bp, Homo sapiens
ttttaagttctagta

SEQ ID NO: 448118 - DNA, 15 bp, Homo sapiens
tttttaagttctagt

SEQ ID NO: 448119 - DNA, 15 bp, Homo sapiens
ttttttaagttctag

SEQ ID NO: 448120 - DNA, 15 bp, Homo sapiens
tttttttaagttcta

SEQ ID NO: 448121 - DNA, 15 bp, Homo sapiens
ctttttttaagttct

SEQ ID NO: 448122 - DNA, 15 bp, Homo sapiens
actttttttaagttc

SEQ ID NO: 448123 - DNA, 15 bp, Homo sapiens
aactttttttaagtt

SEQ ID NO: 448124 - DNA, 15 bp, Homo sapiens
taactttttttaagt

SEQ ID NO: 448125 - DNA, 15 bp, Homo sapiens
ctaactttttttaag

SEQ ID NO: 448126 - DNA, 15 bp, Homo sapiens
gctaactttttttaa

SEQ ID NO: 448127 - DNA, 15 bp, Homo sapiens
ggctaacttttttta

SEQ ID NO: 448128 - DNA, 15 bp, Homo sapiens
tggctaacttttttt

SEQ ID NO: 448129 - DNA, 15 bp, Homo sapiens
ctggctaactttttt

SEQ ID NO: 448130 - DNA, 15 bp, Homo sapiens
cctggctaacttttt

SEQ ID NO: 448131 - DNA, 15 bp, Homo sapiens
gcctggctaactttt

SEQ ID NO: 448132 - DNA, 15 bp, Homo sapiens
tgcctggctaacttt

SEQ ID NO: 448133 - DNA, 15 bp, Homo sapiens
gtgcctggctaactt

SEQ ID NO: 448134 - DNA, 15 bp, Homo sapiens
cgtgcctggctaact

SEQ ID NO: 448135 - DNA, 15 bp, Homo sapiens
ccgtgcctggctaac

SEQ ID NO: 448136 - DNA, 15 bp, Homo sapiens
accgtgcctggctaa

SEQ ID NO: 448137 - DNA, 15 bp, Homo sapiens
caccgtgcctggcta

SEQ ID NO: 448138 - DNA, 15 bp, Homo sapiens
tcaccgtgcctggct

SEQ ID NO: 448139 - DNA, 15 bp, Homo sapiens
atcaccgtgcctggc

SEQ ID NO: 448140 - DNA, 15 bp, Homo sapiens
tatcaccgtgcctgg

SEQ ID NO: 448141 - DNA, 15 bp, Homo sapiens
ttatcaccgtgcctg

SEQ ID NO: 448142 - DNA, 15 bp, Homo sapiens
tttatcaccgtgcct

SEQ ID NO: 448143 - DNA, 15 bp, Homo sapiens
atttatcaccgtgcc

SEQ ID NO: 448144 - DNA, 15 bp, Homo sapiens
catttatcaccgtgc

SEQ ID NO: 448145 - DNA, 15 bp, Homo sapiens
gcatttatcaccgtg

SEQ ID NO: 448146 - DNA, 15 bp, Homo sapiens
ggcatttatcaccgt

SEQ ID NO: 448147 - DNA, 15 bp, Homo sapiens
aggcatttatcaccg

SEQ ID NO: 448148 - DNA, 15 bp, Homo sapiens
caggcatttatcacc

SEQ ID NO: 448149 - DNA, 15 bp, Homo sapiens
acaggcatttatcac

SEQ ID NO: 448150 - DNA, 15 bp, Homo sapiens
tacaggcatttatca

SEQ ID NO: 448151 - DNA, 15 bp, Homo sapiens
ctacaggcatttatc

SEQ ID NO: 448152 - DNA, 15 bp, Homo sapiens
actacaggcatttat

SEQ ID NO: 448153 - DNA, 15 bp, Homo sapiens
gactacaggcattta

SEQ ID NO: 448154 - DNA, 15 bp, Homo sapiens
ggactacaggcattt

SEQ ID NO: 448155 - DNA, 15 bp, Homo sapiens
gggactacaggcatt

SEQ ID NO: 448156 - DNA, 15 bp, Homo sapiens
ggctgggactacagg

SEQ ID NO: 448157 - DNA, 15 bp, Homo sapiens
tggctgggactacag

SEQ ID NO: 448158 - DNA, 15 bp, Homo sapiens
gtggctgggactaca

SEQ ID NO: 448159 - DNA, 15 bp, Homo sapiens
agtggctgggactac

SEQ ID NO: 448160 - DNA, 15 bp, Homo sapiens
cagtggctgggacta

SEQ ID NO: 448161 - DNA, 15 bp, Homo sapiens
tcagtggctgggact

SEQ ID NO: 448162 - DNA, 15 bp, Homo sapiens
ttcagtggctgggac

SEQ ID NO: 448163 - DNA, 15 bp, Homo sapiens
cttcagtggctggga

SEQ ID NO: 448164 - DNA, 15 bp, Homo sapiens
gcttcagtggctggg

SEQ ID NO: 448165 - DNA, 15 bp, Homo sapiens
ggcttcagtggctgg

SEQ ID NO: 448166 - DNA, 15 bp, Homo sapiens
tggcttcagtggctg

SEQ ID NO: 448167 - DNA, 15 bp, Homo sapiens
ctggcttcagtggct

SEQ ID NO: 448168 - DNA, 15 bp, Homo sapiens
tctggcttcagtggc

SEQ ID NO: 448169 - DNA, 15 bp, Homo sapiens
ctctggcttcagtgg

SEQ ID NO: 448170 - DNA, 15 bp, Homo sapiens
cctctggcttcagtg

SEQ ID NO: 448171 - DNA, 15 bp, Homo sapiens
tcctctggcttcagt

SEQ ID NO: 448172 - DNA, 15 bp, Homo sapiens
atcctctggcttcag

SEQ ID NO: 448173 - DNA, 15 bp, Homo sapiens
gatcctctggcttca

SEQ ID NO: 448174 - DNA, 15 bp, Homo sapiens
cgatcctctggcttc

SEQ ID NO: 448175 - DNA, 15 bp, Homo sapiens
tcgatcctctggctt

SEQ ID NO: 448176 - DNA, 15 bp, Homo sapiens
atcgatcctctggct

SEQ ID NO: 448177 - DNA, 15 bp, Homo sapiens
aatcgatcctctggc

SEQ ID NO: 448178 - DNA, 15 bp, Homo sapiens
caatcgatcctctgg

SEQ ID NO: 448179 - DNA, 15 bp, Homo sapiens
tcaatcgatcctctg

SEQ ID NO: 448180 - DNA, 15 bp, Homo sapiens
ttcaatcgatcctct

SEQ ID NO: 448181 - DNA, 15 bp, Homo sapiens
gttcaatcgatcctc

SEQ ID NO: 448182 - DNA, 15 bp, Homo sapiens
ggttcaatcgatcct

SEQ ID NO: 448183 - DNA, 15 bp, Homo sapiens
tggttcaatcgatcc

SEQ ID NO: 448184 - DNA, 15 bp, Homo sapiens
ctggttcaatcgatc

SEQ ID NO: 448185 - DNA, 15 bp, Homo sapiens
cctggttcaatcgat

SEQ ID NO: 448186 - DNA, 15 bp, Homo sapiens
ccctggttcaatcga

SEQ ID NO: 448187 - DNA, 15 bp, Homo sapiens
tccctggttcaatcg

SEQ ID NO: 448188 - DNA, 15 bp, Homo sapiens
ctccctggttcaatc

SEQ ID NO: 448189 - DNA, 15 bp, Homo sapiens
tctccctggttcaat

SEQ ID NO: 448190 - DNA, 15 bp, Homo sapiens
atctccctggttcaa

SEQ ID NO: 448191 - DNA, 15 bp, Homo sapiens
gatctccctggttca

SEQ ID NO: 448192 - DNA, 15 bp, Homo sapiens
tgatctccctggttc

SEQ ID NO: 448193 - DNA, 15 bp, Homo sapiens
atgatctccctggtt

SEQ ID NO: 448194 - DNA, 15 bp, Homo sapiens
catgatctccctggt

SEQ ID NO: 448195 - DNA, 15 bp, Homo sapiens
ccatgatctccctgg

SEQ ID NO: 448196 - DNA, 15 bp, Homo sapiens
accatgatctccctg

SEQ ID NO: 448197 - DNA, 15 bp, Homo sapiens
gaccatgatctccct

SEQ ID NO: 448198 - DNA, 15 bp, Homo sapiens
tgaccatgatctccc

SEQ ID NO: 448199 - DNA, 15 bp, Homo sapiens
gtgaccatgatctcc

SEQ ID NO: 448200 - DNA, 15 bp, Homo sapiens
tgtgaccatgatctc

SEQ ID NO: 448201 - DNA, 15 bp, Homo sapiens
ctgtgaccatgatct

SEQ ID NO: 448202 - DNA, 15 bp, Homo sapiens
actgtgaccatgatc

SEQ ID NO: 448203 - DNA, 15 bp, Homo sapiens
cactgtgaccatgat

SEQ ID NO: 448204 - DNA, 15 bp, Homo sapiens
tcactgtgaccatga

SEQ ID NO: 448205 - DNA, 15 bp, Homo sapiens
ttcactgtgaccatg

SEQ ID NO: 448206 - DNA, 15 bp, Homo sapiens
gttcactgtgaccat

SEQ ID NO: 448207 - DNA, 15 bp, Homo sapiens
agttcactgtgacca

SEQ ID NO: 448208 - DNA, 15 bp, Homo sapiens
tagttcactgtgacc

SEQ ID NO: 448209 - DNA, 15 bp, Homo sapiens
atagttcactgtgac

SEQ ID NO: 448210 - DNA, 15 bp, Homo sapiens
catagttcactgtga

SEQ ID NO: 448211 - DNA, 15 bp, Homo sapiens
tcatagttcactgtg

SEQ ID NO: 448212 - DNA, 15 bp, Homo sapiens
atcatagttcactgt

SEQ ID NO: 448213 - DNA, 15 bp, Homo sapiens
aatcatagttcactg

SEQ ID NO: 448214 - DNA, 15 bp, Homo sapiens
taatcatagttcact

SEQ ID NO: 448215 - DNA, 15 bp, Homo sapiens
gtaatcatagttcac

SEQ ID NO: 448216 - DNA, 15 bp, Homo sapiens
cgtaatcatagttca

SEQ ID NO: 448217 - DNA, 15 bp, Homo sapiens
gcgtaatcatagttc

SEQ ID NO: 448218 - DNA, 15 bp, Homo sapiens
ggcgtaatcatagtt

SEQ ID NO: 448219 - DNA, 15 bp, Homo sapiens
tggcgtaatcatagt

SEQ ID NO: 448220 - DNA, 15 bp, Homo sapiens
ttggcgtaatcatag

SEQ ID NO: 448221 - DNA, 15 bp, Homo sapiens
gttggcgtaatcata

SEQ ID NO: 448222 - DNA, 15 bp, Homo sapiens
ggttggcgtaatcat

SEQ ID NO: 448223 - DNA, 15 bp, Homo sapiens
aggttggcgtaatca

SEQ ID NO: 448224 - DNA, 15 bp, Homo sapiens
caggttggcgtaatc

SEQ ID NO: 448225 - DNA, 15 bp, Homo sapiens
ccaggttggcgtaat

SEQ ID NO: 448226 - DNA, 15 bp, Homo sapiens
cccaggttggcgtaa

SEQ ID NO: 448227 - DNA, 15 bp, Homo sapiens
acccaggttggcgta

SEQ ID NO: 448228 - DNA, 15 bp, Homo sapiens
gacccaggttggcgt

SEQ ID NO: 448229 - DNA, 15 bp, Homo sapiens
tgacccaggttggcg

SEQ ID NO: 448230 - DNA, 15 bp, Homo sapiens
gtgacccaggttggc

SEQ ID NO: 448231 - DNA, 15 bp, Homo sapiens
tgtgacccaggttgg

SEQ ID NO: 448232 - DNA, 15 bp, Homo sapiens
atgtgacccaggttg

SEQ ID NO: 448233 - DNA, 15 bp, Homo sapiens
tatgtgacccaggtt

SEQ ID NO: 448234 - DNA, 15 bp, Homo sapiens
ctatgtgacccaggt

SEQ ID NO: 448235 - DNA, 15 bp, Homo sapiens
gctatgtgacccagg

SEQ ID NO: 448236 - DNA, 15 bp, Homo sapiens
tgctatgtgacccag

SEQ ID NO: 448237 - DNA, 15 bp, Homo sapiens
ttgctatgtgaccca

SEQ ID NO: 448238 - DNA, 15 bp, Homo sapiens
cttgctatgtgaccc

SEQ ID NO: 448239 - DNA, 15 bp, Homo sapiens
tcttgctatgtgacc

SEQ ID NO: 448240 - DNA, 15 bp, Homo sapiens
gtcttgctatgtgac

SEQ ID NO: 448241 - DNA, 15 bp, Homo sapiens
agtcttgctatgtga

SEQ ID NO: 448242 - DNA, 15 bp, Homo sapiens
gagtcttgctatgtg

SEQ ID NO: 448243 - DNA, 15 bp, Homo sapiens
agagtcttgctatgt

SEQ ID NO: 448244 - DNA, 15 bp, Homo sapiens
cagagtcttgctatg

SEQ ID NO: 448245 - DNA, 15 bp, Homo sapiens
acagagtcttgctat

SEQ ID NO: 448246 - DNA, 15 bp, Homo sapiens
aacagagtcttgcta

SEQ ID NO: 448247 - DNA, 15 bp, Homo sapiens
aaacagagtcttgct

SEQ ID NO: 448248 - DNA, 15 bp, Homo sapiens
gaaacagagtcttgc

SEQ ID NO: 448249 - DNA, 15 bp, Homo sapiens
tgaaacagagtcttg

SEQ ID NO: 448250 - DNA, 15 bp, Homo sapiens
ttgaaacagagtctt

SEQ ID NO: 448251 - DNA, 15 bp, Homo sapiens
tttgaaacagagtct

SEQ ID NO: 448252 - DNA, 15 bp, Homo sapiens
ttttgaaacagagtc

SEQ ID NO: 448253 - DNA, 15 bp, Homo sapiens
tttttgaaacagagt

SEQ ID NO: 448254 - DNA, 15 bp, Homo sapiens
ttttttgaaacagag

SEQ ID NO: 448255 - DNA, 15 bp, Homo sapiens
tttttttgaaacaga

SEQ ID NO: 448256 - DNA, 15 bp, Homo sapiens
ttttttttgaaacag

SEQ ID NO: 448257 - DNA, 15 bp, Homo sapiens
ctttttttttgaaac

SEQ ID NO: 448258 - DNA, 15 bp, Homo sapiens
cctttttttttgaaa

SEQ ID NO: 448259 - DNA, 15 bp, Homo sapiens
ccctttttttttgaa

SEQ ID NO: 448260 - DNA, 15 bp, Homo sapiens
cccctttttttttga

SEQ ID NO: 448261 - DNA, 15 bp, Homo sapiens
ccccctttttttttg

SEQ ID NO: 448262 - DNA, 15 bp, Homo sapiens
ccccccttttttttt

SEQ ID NO: 448263 - DNA, 15 bp, Homo sapiens
ccccccctttttttt

SEQ ID NO: 448264 - DNA, 15 bp, Homo sapiens
gcccccccttttttt

SEQ ID NO: 448265 - DNA, 15 bp, Homo sapiens
cgccccccctttttt

SEQ ID NO: 448266 - DNA, 15 bp, Homo sapiens
ccgcccccccttttt

SEQ ID NO: 448267 - DNA, 15 bp, Homo sapiens
cccgccccccctttt

SEQ ID NO: 448268 - DNA, 15 bp, Homo sapiens
ccccgcccccccttt

SEQ ID NO: 448269 - DNA, 15 bp, Homo sapiens
cccccgccccccctt

SEQ ID NO: 448270 - DNA, 15 bp, Homo sapiens
tcccccgccccccct

SEQ ID NO: 448271 - DNA, 15 bp, Homo sapiens
gtcccccgccccccc

SEQ ID NO: 448272 - DNA, 15 bp, Homo sapiens
cgtcccccgcccccc

SEQ ID NO: 448273 - DNA, 15 bp, Homo sapiens
ccgtcccccgccccc

SEQ ID NO: 448274 - DNA, 15 bp, Homo sapiens
cccgtcccccgcccc

SEQ ID NO: 448275 - DNA, 15 bp, Homo sapiens
acccgtcccccgccc

SEQ ID NO: 448276 - DNA, 15 bp, Homo sapiens
cacccgtcccccgcc

SEQ ID NO: 448277 - DNA, 15 bp, Homo sapiens
ccacccgtcccccgc

SEQ ID NO: 448278 - DNA, 15 bp, Homo sapiens
cccacccgtcccccg

SEQ ID NO: 448279 - DNA, 15 bp, Homo sapiens
acccacccgtccccc

SEQ ID NO: 448280 - DNA, 15 bp, Homo sapiens
cacccacccgtcccc

SEQ ID NO: 448281 - DNA, 15 bp, Homo sapiens
gcacccacccgtccc

SEQ ID NO: 448282 - DNA, 15 bp, Homo sapiens
tgcacccacccgtcc

SEQ ID NO: 448283 - DNA, 15 bp, Homo sapiens
ctgcacccacccgtc

SEQ ID NO: 448284 - DNA, 15 bp, Homo sapiens
actgcacccacccgt

SEQ ID NO: 448285 - DNA, 15 bp, Homo sapiens
cactgcacccacccg

SEQ ID NO: 448286 - DNA, 15 bp, Homo sapiens
ccactgcacccaccc

SEQ ID NO: 448287 - DNA, 15 bp, Homo sapiens
gccactgcacccacc

SEQ ID NO: 448288 - DNA, 15 bp, Homo sapiens
agccactgcacccac

SEQ ID NO: 448289 - DNA, 15 bp, Homo sapiens
gagccactgcaccca

SEQ ID NO: 448290 - DNA, 15 bp, Homo sapiens
tgtgagccactgcac

SEQ ID NO: 448291 - DNA, 15 bp, Homo sapiens
acatcacacgacccc

SEQ ID NO: 448292 - DNA, 15 bp, Homo sapiens
gacatcacacgaccc

SEQ ID NO: 448293 - DNA, 15 bp, Homo sapiens
agacatcacacgacc

SEQ ID NO: 448294 - DNA, 15 bp, Homo sapiens
gagacatcacacgac

SEQ ID NO: 448295 - DNA, 15 bp, Homo sapiens
cgagacatcacacga

SEQ ID NO: 448296 - DNA, 15 bp, Homo sapiens
gcgagacatcacacg

SEQ ID NO: 448297 - DNA, 15 bp, Homo sapiens
ggcgagacatcacac

SEQ ID NO: 448298 - DNA, 15 bp, Homo sapiens
aggcgagacatcaca

SEQ ID NO: 448299 - DNA, 15 bp, Homo sapiens
aaggcgagacatcac

SEQ ID NO: 448300 - DNA, 15 bp, Homo sapiens
caaggcgagacatca

SEQ ID NO: 448301 - DNA, 15 bp, Homo sapiens
gcaaggcgagacatc

SEQ ID NO: 448302 - DNA, 15 bp, Homo sapiens
ggcaaggcgagacat

SEQ ID NO: 448303 - DNA, 15 bp, Homo sapiens
aggcaaggcgagaca

SEQ ID NO: 448304 - DNA, 15 bp, Homo sapiens
caggcaaggcgagac

SEQ ID NO: 448305 - DNA, 15 bp, Homo sapiens
ccaggcaaggcgaga

SEQ ID NO: 448306 - DNA, 15 bp, Homo sapiens
tccaggcaaggcgag

SEQ ID NO: 448307 - DNA, 15 bp, Homo sapiens
ctccaggcaaggcga

SEQ ID NO: 448308 - DNA, 15 bp, Homo sapiens
tctccaggcaaggcg

SEQ ID NO: 448309 - DNA, 15 bp, Homo sapiens
ctctccaggcaaggc

SEQ ID NO: 448310 - DNA, 15 bp, Homo sapiens
cctctccaggcaagg

SEQ ID NO: 448311 - DNA, 15 bp, Homo sapiens
tcctctccaggcaag

SEQ ID NO: 448312 - DNA, 15 bp, Homo sapiens
ctcctctccaggcaa

SEQ ID NO: 448313 - DNA, 15 bp, Homo sapiens
actcctctccaggca

SEQ ID NO: 448314 - DNA, 15 bp, Homo sapiens
cactcctctccaggc

SEQ ID NO: 448315 - DNA, 15 bp, Homo sapiens
tcactcctctccagg

SEQ ID NO: 448316 - DNA, 15 bp, Homo sapiens
ctcactcctctccag

SEQ ID NO: 448317 - DNA, 15 bp, Homo sapiens
gctcactcctctcca

SEQ ID NO: 448318 - DNA, 15 bp, Homo sapiens
ggctcactcctctcc

SEQ ID NO: 448319 - DNA, 15 bp, Homo sapiens
gggctcactcctctc

SEQ ID NO: 448320 - DNA, 15 bp, Homo sapiens
ggggctcactcctct

SEQ ID NO: 448321 - DNA, 15 bp, Homo sapiens
tggggctcactcctc

SEQ ID NO: 448322 - DNA, 15 bp, Homo sapiens
ctggggctcactcct

SEQ ID NO: 448323 - DNA, 15 bp, Homo sapiens
tctggggctcactcc

SEQ ID NO: 448324 - DNA, 15 bp, Homo sapiens
ttctggggctcactc

SEQ ID NO: 448325 - DNA, 15 bp, Homo sapiens
tttctggggctcact

SEQ ID NO: 448326 - DNA, 15 bp, Homo sapiens
ttttctggggctcac

SEQ ID NO: 448327 - DNA, 15 bp, Homo sapiens
gttttctggggctca

SEQ ID NO: 448328 - DNA, 15 bp, Homo sapiens
agttttctggggctc

SEQ ID NO: 448329 - DNA, 15 bp, Homo sapiens
gagttttctggggct

SEQ ID NO: 448330 - DNA, 15 bp, Homo sapiens
tgagttttctggggc

SEQ ID NO: 448331 - DNA, 15 bp, Homo sapiens
gtgagttttctgggg

SEQ ID NO: 448332 - DNA, 15 bp, Homo sapiens
cgtgagttttctggg

SEQ ID NO: 448333 - DNA, 15 bp, Homo sapiens
gcgtgagttttctgg

SEQ ID NO: 448334 - DNA, 15 bp, Homo sapiens
tgcgtgagttttctg

SEQ ID NO: 448335 - DNA, 15 bp, Homo sapiens
ctgcgtgagttttct

SEQ ID NO: 448336 - DNA, 15 bp, Homo sapiens
gctgcgtgagttttc

SEQ ID NO: 448337 - DNA, 15 bp, Homo sapiens
tgctgcgtgagtttt

SEQ ID NO: 448338 - DNA, 15 bp, Homo sapiens
gtgctgcgtgagttt

SEQ ID NO: 448339 - DNA, 15 bp, Homo sapiens
cgtgctgcgtgagtt

SEQ ID NO: 448340 - DNA, 15 bp, Homo sapiens
ccgtgctgcgtgagt

SEQ ID NO: 448341 - DNA, 15 bp, Homo sapiens
tccgtgctgcgtgag

SEQ ID NO: 448342 - DNA, 15 bp, Homo sapiens
gtccgtgctgcgtga

SEQ ID NO: 448343 - DNA, 15 bp, Homo sapiens
cgtccgtgctgcgtg

SEQ ID NO: 448344 - DNA, 15 bp, Homo sapiens
gcgtccgtgctgcgt

SEQ ID NO: 448345 - DNA, 15 bp, Homo sapiens
tgcgtccgtgctgcg

SEQ ID NO: 448346 - DNA, 15 bp, Homo sapiens
gtgcgtccgtgctgc

SEQ ID NO: 448347 - DNA, 15 bp, Homo sapiens
agtgcgtccgtgctg

SEQ ID NO: 448348 - DNA, 15 bp, Homo sapiens
aagtgcgtccgtgct

SEQ ID NO: 448349 - DNA, 15 bp, Homo sapiens
aaagtgcgtccgtgc

SEQ ID NO: 448350 - DNA, 15 bp, Homo sapiens
taaagtgcgtccgtg

SEQ ID NO: 448351 - DNA, 15 bp, Homo sapiens
ataaagtgcgtccgt

SEQ ID NO: 448352 - DNA, 15 bp, Homo sapiens
aataaagtgcgtccg

SEQ ID NO: 448353 - DNA, 15 bp, Homo sapiens
aaataaagtgcgtcc

SEQ ID NO: 448354 - DNA, 15 bp, Homo sapiens
taaataaagtgcgtc

SEQ ID NO: 448355 - DNA, 15 bp, Homo sapiens
ataaataaagtgcgt

SEQ ID NO: 448356 - DNA, 15 bp, Homo sapiens
tataaataaagtgcg

SEQ ID NO: 448357 - DNA, 15 bp, Homo sapiens
atataaataaagtgc

SEQ ID NO: 448358 - DNA, 15 bp, Homo sapiens
catataaataaagtg

SEQ ID NO: 448359 - DNA, 15 bp, Homo sapiens
acatataaataaagt

SEQ ID NO: 448360 - DNA, 15 bp, Homo sapiens
cacatataaataaag

SEQ ID NO: 448361 - DNA, 15 bp, Homo sapiens
acacatataaataaa

SEQ ID NO: 448362 - DNA, 15 bp, Homo sapiens
tacacatataaataa

SEQ ID NO: 448363 - DNA, 15 bp, Homo sapiens
gtacacatataaata

SEQ ID NO: 448364 - DNA, 15 bp, Homo sapiens
tgtacacatataaat

SEQ ID NO: 448365 - DNA, 15 bp, Homo sapiens
atgtacacatataaa

SEQ ID NO: 448366 - DNA, 15 bp, Homo sapiens
tatgtacacatataa

SEQ ID NO: 448367 - DNA, 15 bp, Homo sapiens
atatgtacacatata

SEQ ID NO: 448368 - DNA, 15 bp, Homo sapiens
catatgtacacatat

SEQ ID NO: 448369 - DNA, 15 bp, Homo sapiens
acatatgtacacata

SEQ ID NO: 448370 - DNA, 15 bp, Homo sapiens
tacatatgtacacat

SEQ ID NO: 448371 - DNA, 15 bp, Homo sapiens
atacatatgtacaca

SEQ ID NO: 448372 - DNA, 15 bp, Homo sapiens
tatacatatgtacac

SEQ ID NO: 448373 - DNA, 15 bp, Homo sapiens
gtatacatatgtaca

SEQ ID NO: 448374 - DNA, 15 bp, Homo sapiens
cgtatacatatgtac

SEQ ID NO: 448375 - DNA, 15 bp, Homo sapiens
ccgtatacatatgta

SEQ ID NO: 448376 - DNA, 15 bp, Homo sapiens
tccgtatacatatgt

SEQ ID NO: 448377 - DNA, 15 bp, Homo sapiens
ctccgtatacatatg

SEQ ID NO: 448378 - DNA, 15 bp, Homo sapiens
cctccgtatacatat

SEQ ID NO: 448379 - DNA, 15 bp, Homo sapiens
gcctccgtatacata

SEQ ID NO: 448380 - DNA, 15 bp, Homo sapiens
agcctccgtatacat

SEQ ID NO: 448381 - DNA, 15 bp, Homo sapiens
cagcctccgtataca

SEQ ID NO: 448382 - DNA, 15 bp, Homo sapiens
acagcctccgtatac

SEQ ID NO: 448383 - DNA, 15 bp, Homo sapiens
tacagcctccgtata

SEQ ID NO: 448384 - DNA, 15 bp, Homo sapiens
gtacagcctccgtat

SEQ ID NO: 448385 - DNA, 15 bp, Homo sapiens
tgtacagcctccgta

SEQ ID NO: 448386 - DNA, 15 bp, Homo sapiens
ctgtacagcctccgt

SEQ ID NO: 448387 - DNA, 15 bp, Homo sapiens
gctgtacagcctccg

SEQ ID NO: 448388 - DNA, 15 bp, Homo sapiens
cgctgtacagcctcc

SEQ ID NO: 448389 - DNA, 15 bp, Homo sapiens
gcgctgtacagcctc

SEQ ID NO: 448390 - DNA, 15 bp, Homo sapiens
cgcgctgtacagcct

SEQ ID NO: 448391 - DNA, 15 bp, Homo sapiens
ccgcgctgtacagcc

SEQ ID NO: 448392 - DNA, 15 bp, Homo sapiens
cccgcgctgtacagc

SEQ ID NO: 448393 - DNA, 15 bp, Homo sapiens
ccccgcgctgtacag

SEQ ID NO: 448394 - DNA, 15 bp, Homo sapiens
gccccgcgctgtaca

SEQ ID NO: 448395 - DNA, 15 bp, Homo sapiens
ggccccgcgctgtac

SEQ ID NO: 448396 - DNA, 15 bp, Homo sapiens
cggccccgcgctgta

SEQ ID NO: 448397 - DNA, 15 bp, Homo sapiens
tcggccccgcgctgt

SEQ ID NO: 448398 - DNA, 15 bp, Homo sapiens
atcggccccgcgctg

SEQ ID NO: 448399 - DNA, 15 bp, Homo sapiens
catcggccccgcgct

SEQ ID NO: 448400 - DNA, 15 bp, Homo sapiens
tcatcggccccgcgc

SEQ ID NO: 448401 - DNA, 15 bp, Homo sapiens
gtcatcggccccgcg

SEQ ID NO: 448402 - DNA, 15 bp, Homo sapiens
ggtcatcggccccgc

SEQ ID NO: 448403 - DNA, 15 bp, Homo sapiens
gggtcatcggccccg

SEQ ID NO: 448404 - DNA, 15 bp, Homo sapiens
ggggtcatcggcccc

SEQ ID NO: 448405 - DNA, 15 bp, Homo sapiens
gggggtcatcggccc

SEQ ID NO: 448406 - DNA, 15 bp, Homo sapiens
agggggtcatcggcc

SEQ ID NO: 448407 - DNA, 15 bp, Homo sapiens
aagggggtcatcggc

SEQ ID NO: 448408 - DNA, 15 bp, Homo sapiens
caagggggtcatcgg

SEQ ID NO: 448409 - DNA, 15 bp, Homo sapiens
ccaagggggtcatcg

SEQ ID NO: 448410 - DNA, 15 bp, Homo sapiens
gccaagggggtcatc

SEQ ID NO: 448411 - DNA, 15 bp, Homo sapiens
agccaagggggtcat

SEQ ID NO: 448412 - DNA, 15 bp, Homo sapiens
tagccaagggggtca

SEQ ID NO: 448413 - DNA, 15 bp, Homo sapiens
atagccaagggggtc

SEQ ID NO: 448414 - DNA, 15 bp, Homo sapiens
catagccaagggggt

SEQ ID NO: 448415 - DNA, 15 bp, Homo sapiens
ccatagccaaggggg

SEQ ID NO: 448416 - DNA, 15 bp, Homo sapiens
accatagccaagggg

SEQ ID NO: 448417 - DNA, 15 bp, Homo sapiens
gaccatagccaaggg

SEQ ID NO: 448418 - DNA, 15 bp, Homo sapiens
ggaccatagccaagg

SEQ ID NO: 448419 - DNA, 15 bp, Homo sapiens
gggaccatagccaag

SEQ ID NO: 448420 - DNA, 15 bp, Homo sapiens
cgggaccatagccaa

SEQ ID NO: 448421 - DNA, 15 bp, Homo sapiens
ccgggaccatagcca

SEQ ID NO: 448422 - DNA, 15 bp, Homo sapiens
cccgggaccatagcc

SEQ ID NO: 448423 - DNA, 15 bp, Homo sapiens
ccccgggaccatagc

SEQ ID NO: 448424 - DNA, 15 bp, Homo sapiens
cccccgggaccatag

SEQ ID NO: 448425 - DNA, 15 bp, Homo sapiens
acccccgggaccata

SEQ ID NO: 448426 - DNA, 15 bp, Homo sapiens
cacccccgggaccat

SEQ ID NO: 448427 - DNA, 15 bp, Homo sapiens
gcacccccgggacca

SEQ ID NO: 448428 - DNA, 15 bp, Homo sapiens
cgcacccccgggacc

SEQ ID NO: 448429 - DNA, 15 bp, Homo sapiens
ccgcacccccgggac

SEQ ID NO: 448430 - DNA, 15 bp, Homo sapiens
cccgcacccccggga

SEQ ID NO: 448431 - DNA, 15 bp, Homo sapiens
tcccgcacccccggg

SEQ ID NO: 448432 - DNA, 15 bp, Homo sapiens
gtcccgcacccccgg

SEQ ID NO: 448433 - DNA, 15 bp, Homo sapiens
agtcccgcacccccg

SEQ ID NO: 448434 - DNA, 15 bp, Homo sapiens
cagtcccgcaccccc

SEQ ID NO: 448435 - DNA, 15 bp, Homo sapiens
ccagtcccgcacccc

SEQ ID NO: 448436 - DNA, 15 bp, Homo sapiens
tccagtcccgcaccc

SEQ ID NO: 448437 - DNA, 15 bp, Homo sapiens
gtccagtcccgcacc

SEQ ID NO: 448438 - DNA, 15 bp, Homo sapiens
tgtccagtcccgcac

SEQ ID NO: 448439 - DNA, 15 bp, Homo sapiens
gtgtccagtcccgca

SEQ ID NO: 448440 - DNA, 15 bp, Homo sapiens
agtgtccagtcccgc

SEQ ID NO: 448441 - DNA, 15 bp, Homo sapiens
gagtgtccagtcccg

SEQ ID NO: 448442 - DNA, 15 bp, Homo sapiens
ggagtgtccagtccc

SEQ ID NO: 448443 - DNA, 15 bp, Homo sapiens
aggagtgtccagtcc

SEQ ID NO: 448444 - DNA, 15 bp, Homo sapiens
aaggagtgtccagtc

SEQ ID NO: 448445 - DNA, 15 bp, Homo sapiens
aaaggagtgtccagt

SEQ ID NO: 448446 - DNA, 15 bp, Homo sapiens
aaaaggagtgtccag

SEQ ID NO: 448447 - DNA, 15 bp, Homo sapiens
aaaaaggagtgtcca

SEQ ID NO: 448448 - DNA, 15 bp, Homo sapiens
aaaaaaggagtgtcc

SEQ ID NO: 448449 - DNA, 15 bp, Homo sapiens
caaaaaaggagtgtc

SEQ ID NO: 448450 - DNA, 15 bp, Homo sapiens
ccaaaaaaggagtgt

SEQ ID NO: 448451 - DNA, 15 bp, Homo sapiens
accaaaaaaggagtg

SEQ ID NO: 448452 - DNA, 15 bp, Homo sapiens
gaccaaaaaaggagt

SEQ ID NO: 448453 - DNA, 15 bp, Homo sapiens
tgaccaaaaaaggag

SEQ ID NO: 448454 - DNA, 15 bp, Homo sapiens
ctgaccaaaaaagga

SEQ ID NO: 448455 - DNA, 15 bp, Homo sapiens
cctgaccaaaaaagg

SEQ ID NO: 448456 - DNA, 15 bp, Homo sapiens
gcctgaccaaaaaag

SEQ ID NO: 448457 - DNA, 15 bp, Homo sapiens
ggcctgaccaaaaaa

SEQ ID NO: 448458 - DNA, 15 bp, Homo sapiens
aggcctgaccaaaaa

SEQ ID NO: 448459 - DNA, 15 bp, Homo sapiens
caggcctgaccaaaa

SEQ ID NO: 448460 - DNA, 15 bp, Homo sapiens
gcaggcctgaccaaa

SEQ ID NO: 448461 - DNA, 15 bp, Homo sapiens
agcaggcctgaccaa

SEQ ID NO: 448462 - DNA, 15 bp, Homo sapiens
cagcaggcctgacca

SEQ ID NO: 448463 - DNA, 15 bp, Homo sapiens
ccagcaggcctgacc

SEQ ID NO: 448464 - DNA, 15 bp, Homo sapiens
cccagcaggcctgac

SEQ ID NO: 448465 - DNA, 15 bp, Homo sapiens
ccccagcaggcctga

SEQ ID NO: 448466 - DNA, 15 bp, Homo sapiens
cccccagcaggcctg

SEQ ID NO: 448467 - DNA, 15 bp, Homo sapiens
gcccccagcaggcct

SEQ ID NO: 448468 - DNA, 15 bp, Homo sapiens
tgcccccagcaggcc

SEQ ID NO: 448469 - DNA, 15 bp, Homo sapiens
gtgcccccagcaggc

SEQ ID NO: 448470 - DNA, 15 bp, Homo sapiens
tgtgcccccagcagg

SEQ ID NO: 448471 - DNA, 15 bp, Homo sapiens
ctgtgcccccagcag

SEQ ID NO: 448472 - DNA, 15 bp, Homo sapiens
gctgtgcccccagca

SEQ ID NO: 448473 - DNA, 15 bp, Homo sapiens
agctgtgcccccagc

SEQ ID NO: 448474 - DNA, 15 bp, Homo sapiens
aagctgtgcccccag

SEQ ID NO: 448475 - DNA, 15 bp, Homo sapiens
gaagctgtgccccca

SEQ ID NO: 448476 - DNA, 15 bp, Homo sapiens
tgaagctgtgccccc

SEQ ID NO: 448477 - DNA, 15 bp, Homo sapiens
ctgaagctgtgcccc

SEQ ID NO: 448478 - DNA, 15 bp, Homo sapiens
gctgaagctgtgccc

SEQ ID NO: 448479 - DNA, 15 bp, Homo sapiens
tgctgaagctgtgcc

SEQ ID NO: 448480 - DNA, 15 bp, Homo sapiens
ctgctgaagctgtgc

SEQ ID NO: 448481 - DNA, 15 bp, Homo sapiens
cctgctgaagctgtg

SEQ ID NO: 448482 - DNA, 15 bp, Homo sapiens
ccctgctgaagctgt

SEQ ID NO: 448483 - DNA, 15 bp, Homo sapiens
gccctgctgaagctg

SEQ ID NO: 448484 - DNA, 15 bp, Homo sapiens
tgccctgctgaagct

SEQ ID NO: 448485 - DNA, 15 bp, Homo sapiens
gtgccctgctgaagc

SEQ ID NO: 448486 - DNA, 15 bp, Homo sapiens
ggtgccctgctgaag

SEQ ID NO: 448487 - DNA, 15 bp, Homo sapiens
cggtgccctgctgaa

SEQ ID NO: 448488 - DNA, 15 bp, Homo sapiens
ccggtgccctgctga

SEQ ID NO: 448489 - DNA, 15 bp, Homo sapiens
cccggtgccctgctg

SEQ ID NO: 448490 - DNA, 15 bp, Homo sapiens
tcccggtgccctgct

SEQ ID NO: 448491 - DNA, 15 bp, Homo sapiens
ctcccggtgccctgc

SEQ ID NO: 448492 - DNA, 15 bp, Homo sapiens
cctcccggtgccctg

SEQ ID NO: 448493 - DNA, 15 bp, Homo sapiens
acctcccggtgccct

SEQ ID NO: 448494 - DNA, 15 bp, Homo sapiens
gacctcccggtgccc

SEQ ID NO: 448495 - DNA, 15 bp, Homo sapiens
tgacctcccggtgcc

SEQ ID NO: 448496 - DNA, 15 bp, Homo sapiens
ctgacctcccggtgc

SEQ ID NO: 448497 - DNA, 15 bp, Homo sapiens
gctgacctcccggtg

SEQ ID NO: 448498 - DNA, 15 bp, Homo sapiens
ggctgacctcccggt

SEQ ID NO: 448499 - DNA, 15 bp, Homo sapiens
gggctgacctcccgg

SEQ ID NO: 448500 - DNA, 15 bp, Homo sapiens
ggggctgacctcccg

SEQ ID NO: 448501 - DNA, 15 bp, Homo sapiens
tggggctgacctccc

SEQ ID NO: 448502 - DNA, 15 bp, Homo sapiens
gtggggctgacctcc

SEQ ID NO: 448503 - DNA, 15 bp, Homo sapiens
agtggggctgacctc

SEQ ID NO: 448504 - DNA, 15 bp, Homo sapiens
aagtggggctgacct

SEQ ID NO: 448505 - DNA, 15 bp, Homo sapiens
caagtggggctgacc

SEQ ID NO: 448506 - DNA, 15 bp, Homo sapiens
tcaagtggggctgac

SEQ ID NO: 448507 - DNA, 15 bp, Homo sapiens
ctcaagtggggctga

SEQ ID NO: 448508 - DNA, 15 bp, Homo sapiens
cctcaagtggggctg

SEQ ID NO: 448509 - DNA, 15 bp, Homo sapiens
gcctcaagtggggct

SEQ ID NO: 448510 - DNA, 15 bp, Homo sapiens
agcctcaagtggggc

SEQ ID NO: 448511 - DNA, 15 bp, Homo sapiens
aagcctcaagtgggg

SEQ ID NO: 448512 - DNA, 15 bp, Homo sapiens
caagcctcaagtggg

SEQ ID NO: 448513 - DNA, 15 bp, Homo sapiens
ccaagcctcaagtgg

SEQ ID NO: 448514 - DNA, 15 bp, Homo sapiens
accaagcctcaagtg

SEQ ID NO: 448515 - DNA, 15 bp, Homo sapiens
caccaagcctcaagt

SEQ ID NO: 448516 - DNA, 15 bp, Homo sapiens
gcaccaagcctcaag

SEQ ID NO: 448517 - DNA, 15 bp, Homo sapiens
ggcaccaagcctcaa

SEQ ID NO: 448518 - DNA, 15 bp, Homo sapiens
aggcaccaagcctca

SEQ ID NO: 448519 - DNA, 15 bp, Homo sapiens
caggcaccaagcctc

SEQ ID NO: 448520 - DNA, 15 bp, Homo sapiens
tcaggcaccaagcct

SEQ ID NO: 448521 - DNA, 15 bp, Homo sapiens
ctcaggcaccaagcc

SEQ ID NO: 448522 - DNA, 15 bp, Homo sapiens
gctcaggcaccaagc

SEQ ID NO: 448523 - DNA, 15 bp, Homo sapiens
ggctcaggcaccaag

SEQ ID NO: 448524 - DNA, 15 bp, Homo sapiens
gggctcaggcaccaa

SEQ ID NO: 448525 - DNA, 15 bp, Homo sapiens
tgggctcaggcacca

SEQ ID NO: 448526 - DNA, 15 bp, Homo sapiens
ttgggctcaggcacc

SEQ ID NO: 448527 - DNA, 15 bp, Homo sapiens
cttgggctcaggcac

SEQ ID NO: 448528 - DNA, 15 bp, Homo sapiens
tcttgggctcaggca

SEQ ID NO: 448529 - DNA, 15 bp, Homo sapiens
ctcttgggctcaggc

SEQ ID NO: 448530 - DNA, 15 bp, Homo sapiens
cctcttgggctcagg

SEQ ID NO: 448531 - DNA, 15 bp, Homo sapiens
ccctcttgggctcag

SEQ ID NO: 448532 - DNA, 15 bp, Homo sapiens
tccctcttgggctca

SEQ ID NO: 448533 - DNA, 15 bp, Homo sapiens
atccctcttgggctc

SEQ ID NO: 448534 - DNA, 15 bp, Homo sapiens
catccctcttgggct

SEQ ID NO: 448535 - DNA, 15 bp, Homo sapiens
gcatccctcttgggc

SEQ ID NO: 448536 - DNA, 15 bp, Homo sapiens
cgcatccctcttggg

SEQ ID NO: 448537 - DNA, 15 bp, Homo sapiens
ccgcatccctcttgg

SEQ ID NO: 448538 - DNA, 15 bp, Homo sapiens
cccgcatccctcttg

SEQ ID NO: 448539 - DNA, 15 bp, Homo sapiens
acccgcatccctctt

SEQ ID NO: 448540 - DNA, 15 bp, Homo sapiens
cacccgcatccctct

SEQ ID NO: 448541 - DNA, 15 bp, Homo sapiens
ccacccgcatccctc

SEQ ID NO: 448542 - DNA, 15 bp, Homo sapiens
cccacccgcatccct

SEQ ID NO: 448543 - DNA, 15 bp, Homo sapiens
tcccacccgcatccc

SEQ ID NO: 448544 - DNA, 15 bp, Homo sapiens
gtcccacccgcatcc

SEQ ID NO: 448545 - DNA, 15 bp, Homo sapiens
agtcccacccgcatc

SEQ ID NO: 448546 - DNA, 15 bp, Homo sapiens
cagtcccacccgcat

SEQ ID NO: 448547 - DNA, 15 bp, Homo sapiens
ccagtcccacccgca

SEQ ID NO: 448548 - DNA, 15 bp, Homo sapiens
cccagtcccacccgc

SEQ ID NO: 448549 - DNA, 15 bp, Homo sapiens
ccccagtcccacccg

SEQ ID NO: 448550 - DNA, 15 bp, Homo sapiens
accccagtcccaccc

SEQ ID NO: 448551 - DNA, 15 bp, Homo sapiens
gaccccagtcccacc

SEQ ID NO: 448552 - DNA, 15 bp, Homo sapiens
tgaccccagtcccac

SEQ ID NO: 448553 - DNA, 15 bp, Homo sapiens
gtgaccccagtccca

SEQ ID NO: 448554 - DNA, 15 bp, Homo sapiens
agtgaccccagtccc

SEQ ID NO: 448555 - DNA, 15 bp, Homo sapiens
cagtgaccccagtcc

SEQ ID NO: 448556 - DNA, 15 bp, Homo sapiens
gcagtgaccccagtc

SEQ ID NO: 448557 - DNA, 15 bp, Homo sapiens
tgcagtgaccccagt

SEQ ID NO: 448558 - DNA, 15 bp, Homo sapiens
gtgcagtgaccccag

SEQ ID NO: 448559 - DNA, 15 bp, Homo sapiens
agtgcagtgacccca

SEQ ID NO: 448560 - DNA, 15 bp, Homo sapiens
cagtgcagtgacccc

SEQ ID NO: 448561 - DNA, 15 bp, Homo sapiens
gcagtgcagtgaccc

SEQ ID NO: 448562 - DNA, 15 bp, Homo sapiens
agcagtgcagtgacc

SEQ ID NO: 448563 - DNA, 15 bp, Homo sapiens
cagcagtgcagtgac

SEQ ID NO: 448564 - DNA, 15 bp, Homo sapiens
ccagcagtgcagtga

SEQ ID NO: 448565 - DNA, 15 bp, Homo sapiens
cccagcagtgcagtg

SEQ ID NO: 448566 - DNA, 15 bp, Homo sapiens
acccagcagtgcagt

SEQ ID NO: 448567 - DNA, 15 bp, Homo sapiens
cacccagcagtgcag

SEQ ID NO: 448568 - DNA, 15 bp, Homo sapiens
gcacccagcagtgca

SEQ ID NO: 448569 - DNA, 15 bp, Homo sapiens
tgcacccagcagtgc

SEQ ID NO: 448570 - DNA, 15 bp, Homo sapiens
gtgcacccagcagtg

SEQ ID NO: 448571 - DNA, 15 bp, Homo sapiens
agtgcacccagcagt

SEQ ID NO: 448572 - DNA, 15 bp, Homo sapiens
cagtgcacccagcag

SEQ ID NO: 448573 - DNA, 15 bp, Homo sapiens
gcagtgcacccagca

SEQ ID NO: 448574 - DNA, 15 bp, Homo sapiens
tgcagtgcacccagc

SEQ ID NO: 448575 - DNA, 15 bp, Homo sapiens
gtgcagtgcacccag

SEQ ID NO: 448576 - DNA, 15 bp, Homo sapiens
agtgcagtgcaccca

SEQ ID NO: 448577 - DNA, 15 bp, Homo sapiens
aagtgcagtgcaccc

SEQ ID NO: 448578 - DNA, 15 bp, Homo sapiens
gaagtgcagtgcacc

SEQ ID NO: 448579 - DNA, 15 bp, Homo sapiens
cgaagtgcagtgcac

SEQ ID NO: 448580 - DNA, 15 bp, Homo sapiens
gcgaagtgcagtgca

SEQ ID NO: 448581 - DNA, 15 bp, Homo sapiens
agcgaagtgcagtgc

SEQ ID NO: 448582 - DNA, 15 bp, Homo sapiens
cagcgaagtgcagtg

SEQ ID NO: 448583 - DNA, 15 bp, Homo sapiens
ccagcgaagtgcagt

SEQ ID NO: 448584 - DNA, 15 bp, Homo sapiens
cccagcgaagtgcag

SEQ ID NO: 448585 - DNA, 15 bp, Homo sapiens
ccccagcgaagtgca

SEQ ID NO: 448586 - DNA, 15 bp, Homo sapiens
gccccagcgaagtgc

SEQ ID NO: 448587 - DNA, 15 bp, Homo sapiens
agccccagcgaagtg

SEQ ID NO: 448588 - DNA, 15 bp, Homo sapiens
tagccccagcgaagt

SEQ ID NO: 448589 - DNA, 15 bp, Homo sapiens
ctagccccagcgaag

SEQ ID NO: 448590 - DNA, 15 bp, Homo sapiens
cctagccccagcgaa

SEQ ID NO: 448591 - DNA, 15 bp, Homo sapiens
ccctagccccagcga

SEQ ID NO: 448592 - DNA, 15 bp, Homo sapiens
tccctagccccagcg

SEQ ID NO: 448593 - DNA, 15 bp, Homo sapiens
ctccctagccccagc

SEQ ID NO: 448594 - DNA, 15 bp, Homo sapiens
cctccctagccccag

SEQ ID NO: 448595 - DNA, 15 bp, Homo sapiens
ccctccctagcccca

SEQ ID NO: 448596 - DNA, 15 bp, Homo sapiens
accctccctagcccc

SEQ ID NO: 448597 - DNA, 15 bp, Homo sapiens
caccctccctagccc

SEQ ID NO: 448598 - DNA, 15 bp, Homo sapiens
acaccctccctagcc

SEQ ID NO: 448599 - DNA, 15 bp, Homo sapiens
gacaccctccctagc

SEQ ID NO: 448600 - DNA, 15 bp, Homo sapiens
agacaccctccctag

SEQ ID NO: 448601 - DNA, 15 bp, Homo sapiens
cagacaccctcccta

SEQ ID NO: 448602 - DNA, 15 bp, Homo sapiens
ccagacaccctccct

SEQ ID NO: 448603 - DNA, 15 bp, Homo sapiens
cccagacaccctccc

SEQ ID NO: 448604 - DNA, 15 bp, Homo sapiens
ccccagacaccctcc

SEQ ID NO: 448605 - DNA, 15 bp, Homo sapiens
gccccagacaccctc

SEQ ID NO: 448606 - DNA, 15 bp, Homo sapiens
agccccagacaccct

SEQ ID NO: 448607 - DNA, 15 bp, Homo sapiens
gagccccagacaccc

SEQ ID NO: 448608 - DNA, 15 bp, Homo sapiens
ggagccccagacacc

SEQ ID NO: 448609 - DNA, 15 bp, Homo sapiens
cggagccccagacac

SEQ ID NO: 448610 - DNA, 15 bp, Homo sapiens
ccggagccccagaca

SEQ ID NO: 448611 - DNA, 15 bp, Homo sapiens
cccggagccccagac

SEQ ID NO: 448612 - DNA, 15 bp, Homo sapiens
ccccggagccccaga

SEQ ID NO: 448613 - DNA, 15 bp, Homo sapiens
tccccggagccccag

SEQ ID NO: 448614 - DNA, 15 bp, Homo sapiens
ctccccggagcccca

SEQ ID NO: 448615 - DNA, 15 bp, Homo sapiens
tctccccggagcccc

SEQ ID NO: 448616 - DNA, 15 bp, Homo sapiens
ctctccccggagccc

SEQ ID NO: 448617 - DNA, 15 bp, Homo sapiens
gctctccccggagcc

SEQ ID NO: 448618 - DNA, 15 bp, Homo sapiens
agctctccccggagc

SEQ ID NO: 448619 - DNA, 15 bp, Homo sapiens
aagctctccccggag

SEQ ID NO: 448620 - DNA, 15 bp, Homo sapiens
aaagctctccccgga

SEQ ID NO: 448621 - DNA, 15 bp, Homo sapiens
caaagctctccccgg

SEQ ID NO: 448622 - DNA, 15 bp, Homo sapiens
ccaaagctctccccg

SEQ ID NO: 448623 - DNA, 15 bp, Homo sapiens
cccaaagctctcccc

SEQ ID NO: 448624 - DNA, 15 bp, Homo sapiens
ccccaaagctctccc

SEQ ID NO: 448625 - DNA, 15 bp, Homo sapiens
tccccaaagctctcc

SEQ ID NO: 448626 - DNA, 15 bp, Homo sapiens
ctccccaaagctctc

SEQ ID NO: 448627 - DNA, 15 bp, Homo sapiens
cctccccaaagctct

SEQ ID NO: 448628 - DNA, 15 bp, Homo sapiens
gcctccccaaagctc

SEQ ID NO: 448629 - DNA, 15 bp, Homo sapiens
cgcctccccaaagct

SEQ ID NO: 448630 - DNA, 15 bp, Homo sapiens
ccgcctccccaaagc

SEQ ID NO: 448631 - DNA, 15 bp, Homo sapiens
cccgcctccccaaag

SEQ ID NO: 448632 - DNA, 15 bp, Homo sapiens
gcccgcctccccaaa

SEQ ID NO: 448633 - DNA, 15 bp, Homo sapiens
agcccgcctccccaa

SEQ ID NO: 448634 - DNA, 15 bp, Homo sapiens
aagcccgcctcccca

SEQ ID NO: 448635 - DNA, 15 bp, Homo sapiens
caagcccgcctcccc

SEQ ID NO: 448636 - DNA, 15 bp, Homo sapiens
ccaagcccgcctccc

SEQ ID NO: 448637 - DNA, 15 bp, Homo sapiens
tccaagcccgcctcc

SEQ ID NO: 448638 - DNA, 15 bp, Homo sapiens
ctccaagcccgcctc

SEQ ID NO: 448639 - DNA, 15 bp, Homo sapiens
gctccaagcccgcct

SEQ ID NO: 448640 - DNA, 15 bp, Homo sapiens
cgctccaagcccgcc

SEQ ID NO: 448641 - DNA, 15 bp, Homo sapiens
tcgctccaagcccgc

SEQ ID NO: 448642 - DNA, 15 bp, Homo sapiens
ctcgctccaagcccg

SEQ ID NO: 448643 - DNA, 15 bp, Homo sapiens
cctcgctccaagccc

SEQ ID NO: 448644 - DNA, 15 bp, Homo sapiens
tcctcgctccaagcc

SEQ ID NO: 448645 - DNA, 15 bp, Homo sapiens
gtcctcgctccaagc

SEQ ID NO: 448646 - DNA, 15 bp, Homo sapiens
ggtcctcgctccaag

SEQ ID NO: 448647 - DNA, 15 bp, Homo sapiens
cggtcctcgctccaa

SEQ ID NO: 448648 - DNA, 15 bp, Homo sapiens
gcggtcctcgctcca

SEQ ID NO: 448649 - DNA, 15 bp, Homo sapiens
agcggtcctcgctcc

SEQ ID NO: 448650 - DNA, 15 bp, Homo sapiens
gagcggtcctcgctc

SEQ ID NO: 448651 - DNA, 15 bp, Homo sapiens
agccaaaacccaaaa

SEQ ID NO: 448652 - DNA, 15 bp, Homo sapiens
aagccaaaacccaaa

SEQ ID NO: 448653 - DNA, 15 bp, Homo sapiens
gaagccaaaacccaa

SEQ ID NO: 448654 - DNA, 15 bp, Homo sapiens
cgaagccaaaaccca

SEQ ID NO: 448655 - DNA, 15 bp, Homo sapiens
acgaagccaaaaccc

SEQ ID NO: 448656 - DNA, 15 bp, Homo sapiens
aacgaagccaaaacc

SEQ ID NO: 448657 - DNA, 15 bp, Homo sapiens
aaacgaagccaaaac

SEQ ID NO: 448658 - DNA, 15 bp, Homo sapiens
gaaacgaagccaaaa

SEQ ID NO: 448659 - DNA, 15 bp, Homo sapiens
agaaacgaagccaaa

SEQ ID NO: 448660 - DNA, 15 bp, Homo sapiens
aagaaacgaagccaa

SEQ ID NO: 448661 - DNA, 15 bp, Homo sapiens
gaagaaacgaagcca

SEQ ID NO: 448662 - DNA, 15 bp, Homo sapiens
agaagaaacgaagcc

SEQ ID NO: 448663 - DNA, 15 bp, Homo sapiens
gagaagaaacgaagc

SEQ ID NO: 448664 - DNA, 15 bp, Homo sapiens
agagaagaaacgaag

SEQ ID NO: 448665 - DNA, 15 bp, Homo sapiens
aagagaagaaacgaa

SEQ ID NO: 448666 - DNA, 15 bp, Homo sapiens
gaagagaagaaacga

SEQ ID NO: 448667 - DNA, 15 bp, Homo sapiens
cgaagagaagaaacg

SEQ ID NO: 448668 - DNA, 15 bp, Homo sapiens
acgaagagaagaaac

SEQ ID NO: 448669 - DNA, 15 bp, Homo sapiens
aacgaagagaagaaa

SEQ ID NO: 448670 - DNA, 15 bp, Homo sapiens
caacgaagagaagaa

SEQ ID NO: 448671 - DNA, 15 bp, Homo sapiens
tcaacgaagagaaga

SEQ ID NO: 448672 - DNA, 15 bp, Homo sapiens
gtcaacgaagagaag

SEQ ID NO: 448673 - DNA, 15 bp, Homo sapiens
agtcaacgaagagaa

SEQ ID NO: 448674 - DNA, 15 bp, Homo sapiens
aagtcaacgaagaga

SEQ ID NO: 448675 - DNA, 15 bp, Homo sapiens
aaagtcaacgaagag

SEQ ID NO: 448676 - DNA, 15 bp, Homo sapiens
caaagtcaacgaaga

SEQ ID NO: 448677 - DNA, 15 bp, Homo sapiens
ccaaagtcaacgaag

SEQ ID NO: 448678 - DNA, 15 bp, Homo sapiens
cccaaagtcaacgaa

SEQ ID NO: 448679 - DNA, 15 bp, Homo sapiens
ccccaaagtcaacga

SEQ ID NO: 448680 - DNA, 15 bp, Homo sapiens
accccaaagtcaacg

SEQ ID NO: 448681 - DNA, 15 bp, Homo sapiens
aaccccaaagtcaac

SEQ ID NO: 448682 - DNA, 15 bp, Homo sapiens
gaaccccaaagtcaa

SEQ ID NO: 448683 - DNA, 15 bp, Homo sapiens
tgaaccccaaagtca

SEQ ID NO: 448684 - DNA, 15 bp, Homo sapiens
ctgaaccccaaagtc

SEQ ID NO: 448685 - DNA, 15 bp, Homo sapiens
cctgaaccccaaagt

SEQ ID NO: 448686 - DNA, 15 bp, Homo sapiens
acctgaaccccaaag

SEQ ID NO: 448687 - DNA, 15 bp, Homo sapiens
cacctgaaccccaaa

SEQ ID NO: 448688 - DNA, 15 bp, Homo sapiens
gcacctgaaccccaa

SEQ ID NO: 448689 - DNA, 15 bp, Homo sapiens
ggcacctgaacccca

SEQ ID NO: 448690 - DNA, 15 bp, Homo sapiens
gggcacctgaacccc

SEQ ID NO: 448691 - DNA, 15 bp, Homo sapiens
ggggcacctgaaccc

SEQ ID NO: 448692 - DNA, 15 bp, Homo sapiens
tggggcacctgaacc

SEQ ID NO: 448693 - DNA, 15 bp, Homo sapiens
ctggggcacctgaac

SEQ ID NO: 448694 - DNA, 15 bp, Homo sapiens
gctggggcacctgaa

SEQ ID NO: 448695 - DNA, 15 bp, Homo sapiens
agctggggcacctga

SEQ ID NO: 448696 - DNA, 15 bp, Homo sapiens
cagctggggcacctg

SEQ ID NO: 448697 - DNA, 15 bp, Homo sapiens
gcagctggggcacct

SEQ ID NO: 448698 - DNA, 15 bp, Homo sapiens
agcagctggggcacc

SEQ ID NO: 448699 - DNA, 15 bp, Homo sapiens
aagcagctggggcac

SEQ ID NO: 448700 - DNA, 15 bp, Homo sapiens
gaagcagctggggca

SEQ ID NO: 448701 - DNA, 15 bp, Homo sapiens
cgaagcagctggggc

SEQ ID NO: 448702 - DNA, 15 bp, Homo sapiens
ccgaagcagctgggg

SEQ ID NO: 448703 - DNA, 15 bp, Homo sapiens
cccgaagcagctggg

SEQ ID NO: 448704 - DNA, 15 bp, Homo sapiens
gcccgaagcagctgg

SEQ ID NO: 448705 - DNA, 15 bp, Homo sapiens
agcccgaagcagctg

SEQ ID NO: 448706 - DNA, 15 bp, Homo sapiens
cagcccgaagcagct

SEQ ID NO: 448707 - DNA, 15 bp, Homo sapiens
gcagcccgaagcagc

SEQ ID NO: 448708 - DNA, 15 bp, Homo sapiens
ggcagcccgaagcag

SEQ ID NO: 448709 - DNA, 15 bp, Homo sapiens
cggcagcccgaagca

SEQ ID NO: 448710 - DNA, 15 bp, Homo sapiens
tcggcagcccgaagc

SEQ ID NO: 448711 - DNA, 15 bp, Homo sapiens
ctcggcagcccgaag

SEQ ID NO: 448712 - DNA, 15 bp, Homo sapiens
cctcggcagcccgaa

SEQ ID NO: 448713 - DNA, 15 bp, Homo sapiens
tcctcggcagcccga

SEQ ID NO: 448714 - DNA, 15 bp, Homo sapiens
gtcctcggcagcccg

SEQ ID NO: 448715 - DNA, 15 bp, Homo sapiens
ggtcctcggcagccc

SEQ ID NO: 448716 - DNA, 15 bp, Homo sapiens
aggtcctcggcagcc

SEQ ID NO: 448717 - DNA, 15 bp, Homo sapiens
aaggtcctcggcagc

SEQ ID NO: 448718 - DNA, 15 bp, Homo sapiens
gaaggtcctcggcag

SEQ ID NO: 448719 - DNA, 15 bp, Homo sapiens
agaaggtcctcggca

SEQ ID NO: 448720 - DNA, 15 bp, Homo sapiens
cagaaggtcctcggc

SEQ ID NO: 448721 - DNA, 15 bp, Homo sapiens
ccagaaggtcctcgg

SEQ ID NO: 448722 - DNA, 15 bp, Homo sapiens
cccagaaggtcctcg

SEQ ID NO: 448723 - DNA, 15 bp, Homo sapiens
gcccagaaggtcctc

SEQ ID NO: 448724 - DNA, 15 bp, Homo sapiens
ggcccagaaggtcct

SEQ ID NO: 448725 - DNA, 15 bp, Homo sapiens
gggcccagaaggtcc

SEQ ID NO: 448726 - DNA, 15 bp, Homo sapiens
ggggcccagaaggtc

SEQ ID NO: 448727 - DNA, 15 bp, Homo sapiens
gggggcccagaaggt

SEQ ID NO: 448728 - DNA, 15 bp, Homo sapiens
tgggggcccagaagg

SEQ ID NO: 448729 - DNA, 15 bp, Homo sapiens
gtgggggcccagaag

SEQ ID NO: 448730 - DNA, 15 bp, Homo sapiens
tgtgggggcccagaa

SEQ ID NO: 448731 - DNA, 15 bp, Homo sapiens
atgtgggggcccaga

SEQ ID NO: 448732 - DNA, 15 bp, Homo sapiens
aatgtgggggcccag

SEQ ID NO: 448733 - DNA, 15 bp, Homo sapiens
taatgtgggggccca

SEQ ID NO: 448734 - DNA, 15 bp, Homo sapiens
ttaatgtgggggccc

SEQ ID NO: 448735 - DNA, 15 bp, Homo sapiens
attaatgtgggggcc

SEQ ID NO: 448736 - DNA, 15 bp, Homo sapiens
cattaatgtgggggc

SEQ ID NO: 448737 - DNA, 15 bp, Homo sapiens
tcattaatgtggggg

SEQ ID NO: 448738 - DNA, 15 bp, Homo sapiens
ctcattaatgtgggg

SEQ ID NO: 448739 - DNA, 15 bp, Homo sapiens
cctcattaatgtggg

SEQ ID NO: 448740 - DNA, 15 bp, Homo sapiens
acctcattaatgtgg

SEQ ID NO: 448741 - DNA, 15 bp, Homo sapiens
tacctcattaatgtg

SEQ ID NO: 448742 - DNA, 15 bp, Homo sapiens
ctacctcattaatgt

SEQ ID NO: 448743 - DNA, 15 bp, Homo sapiens
cctacctcattaatg

SEQ ID NO: 448744 - DNA, 15 bp, Homo sapiens
acctacctcattaat

SEQ ID NO: 448745 - DNA, 15 bp, Homo sapiens
cacctacctcattaa

SEQ ID NO: 448746 - DNA, 15 bp, Homo sapiens
tcacctacctcatta

SEQ ID NO: 448747 - DNA, 15 bp, Homo sapiens
ctcacctacctcatt

SEQ ID NO: 448748 - DNA, 15 bp, Homo sapiens
cctcacctacctcat

SEQ ID NO: 448749 - DNA, 15 bp, Homo sapiens
gcctcacctacctca

SEQ ID NO: 448750 - DNA, 15 bp, Homo sapiens
cgcctcacctacctc

SEQ ID NO: 448751 - DNA, 15 bp, Homo sapiens
gcgcctcacctacct

SEQ ID NO: 448752 - DNA, 15 bp, Homo sapiens
cgcgcctcacctacc

SEQ ID NO: 448753 - DNA, 15 bp, Homo sapiens
gcgcgcctcacctac

SEQ ID NO: 448754 - DNA, 15 bp, Homo sapiens
cgcgcgcctcaccta

SEQ ID NO: 448755 - DNA, 15 bp, Homo sapiens
ccgcgcgcctcacct

SEQ ID NO: 448756 - DNA, 15 bp, Homo sapiens
gccgcgcgcctcacc

SEQ ID NO: 448757 - DNA, 15 bp, Homo sapiens
cgccgcgcgcctcac

SEQ ID NO: 448758 - DNA, 15 bp, Homo sapiens
gcgccgcgcgcctca

SEQ ID NO: 448759 - DNA, 15 bp, Homo sapiens
agcgccgcgcgcctc

SEQ ID NO: 448760 - DNA, 15 bp, Homo sapiens
cagcgccgcgcgcct

SEQ ID NO: 448761 - DNA, 15 bp, Homo sapiens
ccagcgccgcgcgcc

SEQ ID NO: 448762 - DNA, 15 bp, Homo sapiens
cccagcgccgcgcgc

SEQ ID NO: 448763 - DNA, 15 bp, Homo sapiens
tcccagcgccgcgcg

SEQ ID NO: 448764 - DNA, 15 bp, Homo sapiens
ctcccagcgccgcgc

SEQ ID NO: 448765 - DNA, 15 bp, Homo sapiens
gctcccagcgccgcg

SEQ ID NO: 448766 - DNA, 15 bp, Homo sapiens
tgctcccagcgccgc

SEQ ID NO: 448767 - DNA, 15 bp, Homo sapiens
ctgctcccagcgccg

SEQ ID NO: 448768 - DNA, 15 bp, Homo sapiens
cctgctcccagcgcc

SEQ ID NO: 448769 - DNA, 15 bp, Homo sapiens
ccctgctcccagcgc

SEQ ID NO: 448770 - DNA, 15 bp, Homo sapiens
tccctgctcccagcg

SEQ ID NO: 448771 - DNA, 15 bp, Homo sapiens
ctccctgctcccagc

SEQ ID NO: 448772 - DNA, 15 bp, Homo sapiens
cctccctgctcccag

SEQ ID NO: 448773 - DNA, 15 bp, Homo sapiens
ccctccctgctccca

SEQ ID NO: 448774 - DNA, 15 bp, Homo sapiens
cccctccctgctccc

SEQ ID NO: 448775 - DNA, 15 bp, Homo sapiens
acccctccctgctcc

SEQ ID NO: 448776 - DNA, 15 bp, Homo sapiens
cacccctccctgctc

SEQ ID NO: 448777 - DNA, 15 bp, Homo sapiens
tcacccctccctgct

SEQ ID NO: 448778 - DNA, 15 bp, Homo sapiens
ctcacccctccctgc

SEQ ID NO: 448779 - DNA, 15 bp, Homo sapiens
cctcacccctccctg

SEQ ID NO: 448780 - DNA, 15 bp, Homo sapiens
tcctcacccctccct

SEQ ID NO: 448781 - DNA, 15 bp, Homo sapiens
gtcctcacccctccc

SEQ ID NO: 448782 - DNA, 15 bp, Homo sapiens
ggtcctcacccctcc

SEQ ID NO: 448783 - DNA, 15 bp, Homo sapiens
cggtcctcacccctc

SEQ ID NO: 448784 - DNA, 15 bp, Homo sapiens
ccggtcctcacccct

SEQ ID NO: 448785 - DNA, 15 bp, Homo sapiens
accggtcctcacccc

SEQ ID NO: 448786 - DNA, 15 bp, Homo sapiens
caccggtcctcaccc

SEQ ID NO: 448787 - DNA, 15 bp, Homo sapiens
ccaccggtcctcacc

SEQ ID NO: 448788 - DNA, 15 bp, Homo sapiens
cccaccggtcctcac

SEQ ID NO: 448789 - DNA, 15 bp, Homo sapiens
tcccaccggtcctca

SEQ ID NO: 448790 - DNA, 15 bp, Homo sapiens
gtcccaccggtcctc

SEQ ID NO: 448791 - DNA, 15 bp, Homo sapiens
cgtcccaccggtcct

SEQ ID NO: 448792 - DNA, 15 bp, Homo sapiens
gcgtcccaccggtcc

SEQ ID NO: 448793 - DNA, 15 bp, Homo sapiens
cgcgtcccaccggtc

SEQ ID NO: 448794 - DNA, 15 bp, Homo sapiens
gcgcgtcccaccggt

SEQ ID NO: 448795 - DNA, 15 bp, Homo sapiens
ggcgcgtcccaccgg

SEQ ID NO: 448796 - DNA, 15 bp, Homo sapiens
cggcgcgtcccaccg

SEQ ID NO: 448797 - DNA, 15 bp, Homo sapiens
ccggcgcgtcccacc

SEQ ID NO: 448798 - DNA, 15 bp, Homo sapiens
tccggcgcgtcccac

SEQ ID NO: 448799 - DNA, 15 bp, Homo sapiens
ttccggcgcgtccca

SEQ ID NO: 448800 - DNA, 15 bp, Homo sapiens
gttccggcgcgtccc

SEQ ID NO: 448801 - DNA, 15 bp, Homo sapiens
cgttccggcgcgtcc

SEQ ID NO: 448802 - DNA, 15 bp, Homo sapiens
tcgttccggcgcgtc

SEQ ID NO: 448803 - DNA, 15 bp, Homo sapiens
gtcgttccggcgcgt

SEQ ID NO: 448804 - DNA, 15 bp, Homo sapiens
cgtcgttccggcgcg

SEQ ID NO: 448805 - DNA, 15 bp, Homo sapiens
ccgtcgttccggcgc

SEQ ID NO: 448806 - DNA, 15 bp, Homo sapiens
gccgtcgttccggcg

SEQ ID NO: 448807 - DNA, 15 bp, Homo sapiens
ggccgtcgttccggc

SEQ ID NO: 448808 - DNA, 15 bp, Homo sapiens
cggccgtcgttccgg

SEQ ID NO: 448809 - DNA, 15 bp, Homo sapiens
tcggccgtcgttccg

SEQ ID NO: 448810 - DNA, 15 bp, Homo sapiens
ttcggccgtcgttcc

SEQ ID NO: 448811 - DNA, 15 bp, Homo sapiens
tttcggccgtcgttc

SEQ ID NO: 448812 - DNA, 15 bp, Homo sapiens
ctttcggccgtcgtt

SEQ ID NO: 448813 - DNA, 15 bp, Homo sapiens
gctttcggccgtcgt

SEQ ID NO: 448814 - DNA, 15 bp, Homo sapiens
ggctttcggccgtcg

SEQ ID NO: 448815 - DNA, 15 bp, Homo sapiens
cggctttcggccgtc

SEQ ID NO: 448816 - DNA, 15 bp, Homo sapiens
gcggctttcggccgt

SEQ ID NO: 448817 - DNA, 15 bp, Homo sapiens
ggcggctttcggccg

SEQ ID NO: 448818 - DNA, 15 bp, Homo sapiens
gggcggctttcggcc

SEQ ID NO: 448819 - DNA, 15 bp, Homo sapiens
ggggcggctttcggc

SEQ ID NO: 448820 - DNA, 15 bp, Homo sapiens
aggggcggctttcgg

SEQ ID NO: 448821 - DNA, 15 bp, Homo sapiens
caggggcggctttcg

SEQ ID NO: 448822 - DNA, 15 bp, Homo sapiens
tcaggggcggctttc

SEQ ID NO: 448823 - DNA, 15 bp, Homo sapiens
gtcaggggcggcttt

SEQ ID NO: 448824 - DNA, 15 bp, Homo sapiens
agtcaggggcggctt

SEQ ID NO: 448825 - DNA, 15 bp, Homo sapiens
gagtcaggggcggct

SEQ ID NO: 448826 - DNA, 15 bp, Homo sapiens
agagtcaggggcggc

SEQ ID NO: 448827 - DNA, 15 bp, Homo sapiens
gagagtcaggggcgg

SEQ ID NO: 448828 - DNA, 15 bp, Homo sapiens
ggagagtcaggggcg

SEQ ID NO: 448829 - DNA, 15 bp, Homo sapiens
aggagagtcaggggc

SEQ ID NO: 448830 - DNA, 15 bp, Homo sapiens
caggagagtcagggg

SEQ ID NO: 448831 - DNA, 15 bp, Homo sapiens
acaggagagtcaggg

SEQ ID NO: 448832 - DNA, 15 bp, Homo sapiens
gacaggagagtcagg

SEQ ID NO: 448833 - DNA, 15 bp, Homo sapiens
agacaggagagtcag

SEQ ID NO: 448834 - DNA, 15 bp, Homo sapiens
gagacaggagagtca

SEQ ID NO: 448835 - DNA, 15 bp, Homo sapiens
ggagacaggagagtc

SEQ ID NO: 448836 - DNA, 15 bp, Homo sapiens
cggagacaggagagt

SEQ ID NO: 448837 - DNA, 15 bp, Homo sapiens
gcggagacaggagag

SEQ ID NO: 448838 - DNA, 15 bp, Homo sapiens
agcggagacaggaga

SEQ ID NO: 448839 - DNA, 15 bp, Homo sapiens
gagcggagacaggag

SEQ ID NO: 448840 - DNA, 15 bp, Homo sapiens
ggagcggagacagga

SEQ ID NO: 448841 - DNA, 15 bp, Homo sapiens
gggagcggagacagg

SEQ ID NO: 448842 - DNA, 15 bp, Homo sapiens
agggagcggagacag

SEQ ID NO: 448843 - DNA, 15 bp, Homo sapiens
cagggagcggagaca

SEQ ID NO: 448844 - DNA, 15 bp, Homo sapiens
gcagggagcggagac

SEQ ID NO: 448845 - DNA, 15 bp, Homo sapiens
ggcagggagcggaga

SEQ ID NO: 448846 - DNA, 15 bp, Homo sapiens
aggcagggagcggag

SEQ ID NO: 448847 - DNA, 15 bp, Homo sapiens
aaggcagggagcgga

SEQ ID NO: 448848 - DNA, 15 bp, Homo sapiens
caaggcagggagcgg

SEQ ID NO: 448849 - DNA, 15 bp, Homo sapiens
gcaaggcagggagcg

SEQ ID NO: 448850 - DNA, 15 bp, Homo sapiens
agcaaggcagggagc

SEQ ID NO: 448851 - DNA, 15 bp, Homo sapiens
gagcaaggcagggag

SEQ ID NO: 448852 - DNA, 15 bp, Homo sapiens
cgagcaaggcaggga

SEQ ID NO: 448853 - DNA, 15 bp, Homo sapiens
gcgagcaaggcaggg

SEQ ID NO: 448854 - DNA, 15 bp, Homo sapiens
tgcgagcaaggcagg

SEQ ID NO: 448855 - DNA, 15 bp, Homo sapiens
ctgcgagcaaggcag

SEQ ID NO: 448856 - DNA, 15 bp, Homo sapiens
cctgcgagcaaggca

SEQ ID NO: 448857 - DNA, 15 bp, Homo sapiens
gcctgcgagcaaggc

SEQ ID NO: 448858 - DNA, 15 bp, Homo sapiens
tgcctgcgagcaagg

SEQ ID NO: 448859 - DNA, 15 bp, Homo sapiens
ctgcctgcgagcaag

SEQ ID NO: 448860 - DNA, 15 bp, Homo sapiens
gctgcctgcgagcaa

SEQ ID NO: 448861 - DNA, 15 bp, Homo sapiens
ggctgcctgcgagca

SEQ ID NO: 448862 - DNA, 15 bp, Homo sapiens
tggctgcctgcgagc

SEQ ID NO: 448863 - DNA, 15 bp, Homo sapiens
gtggctgcctgcgag

SEQ ID NO: 448864 - DNA, 15 bp, Homo sapiens
ggtggctgcctgcga

SEQ ID NO: 448865 - DNA, 15 bp, Homo sapiens
aggtggctgcctgcg

SEQ ID NO: 448866 - DNA, 15 bp, Homo sapiens
caggtggctgcctgc

SEQ ID NO: 448867 - DNA, 15 bp, Homo sapiens
ccaggtggctgcctg

SEQ ID NO: 448868 - DNA, 15 bp, Homo sapiens
gccaggtggctgcct

SEQ ID NO: 448869 - DNA, 15 bp, Homo sapiens
cgccaggtggctgcc

SEQ ID NO: 448870 - DNA, 15 bp, Homo sapiens
tcgccaggtggctgc

SEQ ID NO: 448871 - DNA, 15 bp, Homo sapiens
ctcgccaggtggctg

SEQ ID NO: 448872 - DNA, 15 bp, Homo sapiens
actcgccaggtggct

SEQ ID NO: 448873 - DNA, 15 bp, Homo sapiens
gactcgccaggtggc

SEQ ID NO: 448874 - DNA, 15 bp, Homo sapiens
agactcgccaggtgg

SEQ ID NO: 448875 - DNA, 15 bp, Homo sapiens
cagactcgccaggtg

SEQ ID NO: 448876 - DNA, 15 bp, Homo sapiens
tcagactcgccaggt

SEQ ID NO: 448877 - DNA, 15 bp, Homo sapiens
gtcagactcgccagg

SEQ ID NO: 448878 - DNA, 15 bp, Homo sapiens
tgtcagactcgccag

SEQ ID NO: 448879 - DNA, 15 bp, Homo sapiens
atgtcagactcgcca

SEQ ID NO: 448880 - DNA, 15 bp, Homo sapiens
catgtcagactcgcc

SEQ ID NO: 448881 - DNA, 15 bp, Homo sapiens
ccatgtcagactcgc

SEQ ID NO: 448882 - DNA, 15 bp, Homo sapiens
gccatgtcagactcg

SEQ ID NO: 448883 - DNA, 15 bp, Homo sapiens
agccatgtcagactc

SEQ ID NO: 448884 - DNA, 15 bp, Homo sapiens
cagccatgtcagact

SEQ ID NO: 448885 - DNA, 15 bp, Homo sapiens
acagccatgtcagac

SEQ ID NO: 448886 - DNA, 15 bp, Homo sapiens
gacagccatgtcaga

SEQ ID NO: 448887 - DNA, 15 bp, Homo sapiens
tgacagccatgtcag

SEQ ID NO: 448888 - DNA, 15 bp, Homo sapiens
ctgacagccatgtca

SEQ ID NO: 448889 - DNA, 15 bp, Homo sapiens
gctgacagccatgtc

SEQ ID NO: 448890 - DNA, 15 bp, Homo sapiens
cgctgacagccatgt

SEQ ID NO: 448891 - DNA, 15 bp, Homo sapiens
tcgctgacagccatg

SEQ ID NO: 448892 - DNA, 15 bp, Homo sapiens
gtcgctgacagccat

SEQ ID NO: 448893 - DNA, 15 bp, Homo sapiens
cgtcgctgacagcca

SEQ ID NO: 448894 - DNA, 15 bp, Homo sapiens
gcgtcgctgacagcc

SEQ ID NO: 448895 - DNA, 15 bp, Homo sapiens
cgcgtcgctgacagc

SEQ ID NO: 448896 - DNA, 15 bp, Homo sapiens
gcgcgtcgctgacag

SEQ ID NO: 448897 - DNA, 15 bp, Homo sapiens
agcgcgtcgctgaca

SEQ ID NO: 448898 - DNA, 15 bp, Homo sapiens
cagcgcgtcgctgac

SEQ ID NO: 448899 - DNA, 15 bp, Homo sapiens
gcagcgcgtcgctga

SEQ ID NO: 448900 - DNA, 15 bp, Homo sapiens
agcagcgcgtcgctg

SEQ ID NO: 448901 - DNA, 15 bp, Homo sapiens
gagcagcgcgtcgct

SEQ ID NO: 448902 - DNA, 15 bp, Homo sapiens
ggagcagcgcgtcgc

SEQ ID NO: 448903 - DNA, 15 bp, Homo sapiens
gggagcagcgcgtcg

SEQ ID NO: 448904 - DNA, 15 bp, Homo sapiens
tgggagcagcgcgtc

SEQ ID NO: 448905 - DNA, 15 bp, Homo sapiens
atgggagcagcgcgt

SEQ ID NO: 448906 - DNA, 15 bp, Homo sapiens
gatgggagcagcgcg

SEQ ID NO: 448907 - DNA, 15 bp, Homo sapiens
agatgggagcagcgc

SEQ ID NO: 448908 - DNA, 15 bp, Homo sapiens
aagatgggagcagcg

SEQ ID NO: 448909 - DNA, 15 bp, Homo sapiens
aaagatgggagcagc

SEQ ID NO: 448910 - DNA, 15 bp, Homo sapiens
gaaagatgggagcag

SEQ ID NO: 448911 - DNA, 15 bp, Homo sapiens
agaaagatgggagca

SEQ ID NO: 448912 - DNA, 15 bp, Homo sapiens
gagaaagatgggagc

SEQ ID NO: 448913 - DNA, 15 bp, Homo sapiens
ggagaaagatgggag

SEQ ID NO: 448914 - DNA, 15 bp, Homo sapiens
tggagaaagatggga

SEQ ID NO: 448915 - DNA, 15 bp, Homo sapiens
gtggagaaagatggg

SEQ ID NO: 448916 - DNA, 15 bp, Homo sapiens
cgtggagaaagatgg

SEQ ID NO: 448917 - DNA, 15 bp, Homo sapiens
acgtggagaaagatg

SEQ ID NO: 448918 - DNA, 15 bp, Homo sapiens
aacgtggagaaagat

SEQ ID NO: 448919 - DNA, 15 bp, Homo sapiens
gaacgtggagaaaga

SEQ ID NO: 448920 - DNA, 15 bp, Homo sapiens
cgaacgtggagaaag

SEQ ID NO: 448921 - DNA, 15 bp, Homo sapiens
gcgaacgtggagaaa

SEQ ID NO: 448922 - DNA, 15 bp, Homo sapiens
cgcgaacgtggagaa

SEQ ID NO: 448923 - DNA, 15 bp, Homo sapiens
acgcgaacgtggaga

SEQ ID NO: 448924 - DNA, 15 bp, Homo sapiens
gacgcgaacgtggag

SEQ ID NO: 448925 - DNA, 15 bp, Homo sapiens
agacgcgaacgtgga

SEQ ID NO: 448926 - DNA, 15 bp, Homo sapiens
cagacgcgaacgtgg

SEQ ID NO: 448927 - DNA, 15 bp, Homo sapiens
ccagacgcgaacgtg

SEQ ID NO: 448928 - DNA, 15 bp, Homo sapiens
gccagacgcgaacgt

SEQ ID NO: 448929 - DNA, 15 bp, Homo sapiens
ggccagacgcgaacg

SEQ ID NO: 448930 - DNA, 15 bp, Homo sapiens
gggccagacgcgaac

SEQ ID NO: 448931 - DNA, 15 bp, Homo sapiens
cgggccagacgcgaa

SEQ ID NO: 448932 - DNA, 15 bp, Homo sapiens
ccgggccagacgcga

SEQ ID NO: 448933 - DNA, 15 bp, Homo sapiens
gccgggccagacgcg

SEQ ID NO: 448934 - DNA, 15 bp, Homo sapiens
cgccgggccagacgc

SEQ ID NO: 448935 - DNA, 15 bp, Homo sapiens
ccgccgggccagacg

SEQ ID NO: 448936 - DNA, 15 bp, Homo sapiens
cccgccgggccagac

SEQ ID NO: 448937 - DNA, 15 bp, Homo sapiens
tcccgccgggccaga

SEQ ID NO: 448938 - DNA, 15 bp, Homo sapiens
ttcccgccgggccag

SEQ ID NO: 448939 - DNA, 15 bp, Homo sapiens
cttcccgccgggcca

SEQ ID NO: 448940 - DNA, 15 bp, Homo sapiens
ccttcccgccgggcc

SEQ ID NO: 448941 - DNA, 15 bp, Homo sapiens
cccttcccgccgggc

SEQ ID NO: 448942 - DNA, 15 bp, Homo sapiens
tcccttcccgccggg

SEQ ID NO: 448943 - DNA, 15 bp, Homo sapiens
ctcccttcccgccgg

SEQ ID NO: 448944 - DNA, 15 bp, Homo sapiens
tctcccttcccgccg

SEQ ID NO: 448945 - DNA, 15 bp, Homo sapiens
ttctcccttcccgcc

SEQ ID NO: 448946 - DNA, 15 bp, Homo sapiens
cttctcccttcccgc

SEQ ID NO: 448947 - DNA, 15 bp, Homo sapiens
tcttctcccttcccg

SEQ ID NO: 448948 - DNA, 15 bp, Homo sapiens
gtcttctcccttccc

SEQ ID NO: 448949 - DNA, 15 bp, Homo sapiens
tgtcttctcccttcc

SEQ ID NO: 448950 - DNA, 15 bp, Homo sapiens
gtgtcttctcccttc

SEQ ID NO: 448951 - DNA, 15 bp, Homo sapiens
agtgtcttctccctt

SEQ ID NO: 448952 - DNA, 15 bp, Homo sapiens
cagtgtcttctccct

SEQ ID NO: 448953 - DNA, 15 bp, Homo sapiens
gcagtgtcttctccc

SEQ ID NO: 448954 - DNA, 15 bp, Homo sapiens
cgcagtgtcttctcc

SEQ ID NO: 448955 - DNA, 15 bp, Homo sapiens
acgcagtgtcttctc

SEQ ID NO: 448956 - DNA, 15 bp, Homo sapiens
gacgcagtgtcttct

SEQ ID NO: 448957 - DNA, 15 bp, Homo sapiens
tgacgcagtgtcttc

SEQ ID NO: 448958 - DNA, 15 bp, Homo sapiens
ttgacgcagtgtctt

SEQ ID NO: 448959 - DNA, 15 bp, Homo sapiens
cttgacgcagtgtct

SEQ ID NO: 448960 - DNA, 15 bp, Homo sapiens
gcttgacgcagtgtc

SEQ ID NO: 448961 - DNA, 15 bp, Homo sapiens
tgcttgacgcagtgt

SEQ ID NO: 448962 - DNA, 15 bp, Homo sapiens
ctgcttgacgcagtg

SEQ ID NO: 448963 - DNA, 15 bp, Homo sapiens
cctgcttgacgcagt

SEQ ID NO: 448964 - DNA, 15 bp, Homo sapiens
acctgcttgacgcag

SEQ ID NO: 448965 - DNA, 15 bp, Homo sapiens
cacctgcttgacgca

SEQ ID NO: 448966 - DNA, 15 bp, Homo sapiens
gcacctgcttgacgc

SEQ ID NO: 448967 - DNA, 15 bp, Homo sapiens
ggcacctgcttgacg

SEQ ID NO: 448968 - DNA, 15 bp, Homo sapiens
gggcacctgcttgac

SEQ ID NO: 448969 - DNA, 15 bp, Homo sapiens
ggggcacctgcttga

SEQ ID NO: 448970 - DNA, 15 bp, Homo sapiens
cggggcacctgcttg

SEQ ID NO: 448971 - DNA, 15 bp, Homo sapiens
tcggggcacctgctt

SEQ ID NO: 448972 - DNA, 15 bp, Homo sapiens
ttcggggcacctgct

SEQ ID NO: 448973 - DNA, 15 bp, Homo sapiens
attcggggcacctgc

SEQ ID NO: 448974 - DNA, 15 bp, Homo sapiens
tattcggggcacctg

SEQ ID NO: 448975 - DNA, 15 bp, Homo sapiens
ttattcggggcacct

SEQ ID NO: 448976 - DNA, 15 bp, Homo sapiens
gttattcggggcacc

SEQ ID NO: 448977 - DNA, 15 bp, Homo sapiens
cgttattcggggcac

SEQ ID NO: 448978 - DNA, 15 bp, Homo sapiens
acgttattcggggca

SEQ ID NO: 448979 - DNA, 15 bp, Homo sapiens
cacgttattcggggc

SEQ ID NO: 448980 - DNA, 15 bp, Homo sapiens
tcacgttattcgggg

SEQ ID NO: 448981 - DNA, 15 bp, Homo sapiens
ctcacgttattcggg

SEQ ID NO: 448982 - DNA, 15 bp, Homo sapiens
actcacgttattcgg

SEQ ID NO: 448983 - DNA, 15 bp, Homo sapiens
tactcacgttattcg

SEQ ID NO: 448984 - DNA, 15 bp, Homo sapiens
atactcacgttattc

SEQ ID NO: 448985 - DNA, 15 bp, Homo sapiens
gatactcacgttatt

SEQ ID NO: 448986 - DNA, 15 bp, Homo sapiens
cgatactcacgttat

SEQ ID NO: 448987 - DNA, 15 bp, Homo sapiens
gcgatactcacgtta

SEQ ID NO: 448988 - DNA, 15 bp, Homo sapiens
agcgatactcacgtt

SEQ ID NO: 448989 - DNA, 15 bp, Homo sapiens
gagcgatactcacgt

SEQ ID NO: 448990 - DNA, 15 bp, Homo sapiens
ggagcgatactcacg

SEQ ID NO: 448991 - DNA, 15 bp, Homo sapiens
cggagcgatactcac

SEQ ID NO: 448992 - DNA, 15 bp, Homo sapiens
ccggagcgatactca

SEQ ID NO: 448993 - DNA, 15 bp, Homo sapiens
cccggagcgatactc

SEQ ID NO: 448994 - DNA, 15 bp, Homo sapiens
gcccggagcgatact

SEQ ID NO: 448995 - DNA, 15 bp, Homo sapiens
ggcccggagcgatac

SEQ ID NO: 448996 - DNA, 15 bp, Homo sapiens
cggcccggagcgata

SEQ ID NO: 448997 - DNA, 15 bp, Homo sapiens
gcggcccggagcgat

SEQ ID NO: 448998 - DNA, 15 bp, Homo sapiens
ggcggcccggagcga

SEQ ID NO: 448999 - DNA, 15 bp, Homo sapiens
cggcggcccggagcg

SEQ ID NO: 449000 - DNA, 15 bp, Homo sapiens
ccggcggcccggagc

SEQ ID NO: 449001 - DNA, 15 bp, Homo sapiens
cccggcggcccggag

SEQ ID NO: 449002 - DNA, 15 bp, Homo sapiens
tcccggcggcccgga

SEQ ID NO: 449003 - DNA, 15 bp, Homo sapiens
ttcccggcggcccgg

SEQ ID NO: 449004 - DNA, 15 bp, Homo sapiens
gttcccggcggcccg

SEQ ID NO: 449005 - DNA, 15 bp, Homo sapiens
cgttcccggcggccc

SEQ ID NO: 449006 - DNA, 15 bp, Homo sapiens
gcgttcccggcggcc

SEQ ID NO: 449007 - DNA, 15 bp, Homo sapiens
ggcgttcccggcggc

SEQ ID NO: 449008 - DNA, 15 bp, Homo sapiens
gggcgttcccggcgg

SEQ ID NO: 449009 - DNA, 15 bp, Homo sapiens
cgggcgttcccggcg

SEQ ID NO: 449010 - DNA, 15 bp, Homo sapiens
ccgggcgttcccggc

SEQ ID NO: 449011 - DNA, 15 bp, Homo sapiens
accgggcgttcccgg

SEQ ID NO: 449012 - DNA, 15 bp, Homo sapiens
caccgggcgttcccg

SEQ ID NO: 449013 - DNA, 15 bp, Homo sapiens
ccaccgggcgttccc

SEQ ID NO: 449014 - DNA, 15 bp, Homo sapiens
cccaccgggcgttcc

SEQ ID NO: 449015 - DNA, 15 bp, Homo sapiens
acccaccgggcgttc

SEQ ID NO: 449016 - DNA, 15 bp, Homo sapiens
aacccaccgggcgtt

SEQ ID NO: 449017 - DNA, 15 bp, Homo sapiens
aaacccaccgggcgt

SEQ ID NO: 449018 - DNA, 15 bp, Homo sapiens
aaaacccaccgggcg

SEQ ID NO: 449019 - DNA, 15 bp, Homo sapiens
gaaaacccaccgggc

SEQ ID NO: 449020 - DNA, 15 bp, Homo sapiens
cgaaaacccaccggg

SEQ ID NO: 449021 - DNA, 15 bp, Homo sapiens
acgaaaacccaccgg

SEQ ID NO: 449022 - DNA, 15 bp, Homo sapiens
cacgaaaacccaccg

SEQ ID NO: 449023 - DNA, 15 bp, Homo sapiens
ccacgaaaacccacc

SEQ ID NO: 449024 - DNA, 15 bp, Homo sapiens
cccacgaaaacccac

SEQ ID NO: 449025 - DNA, 15 bp, Homo sapiens
acccacgaaaaccca

SEQ ID NO: 449026 - DNA, 15 bp, Homo sapiens
cacccacgaaaaccc

SEQ ID NO: 449027 - DNA, 15 bp, Homo sapiens
acacccacgaaaacc

SEQ ID NO: 449028 - DNA, 15 bp, Homo sapiens
cacacccacgaaaac

SEQ ID NO: 449029 - DNA, 15 bp, Homo sapiens
ccacacccacgaaaa

SEQ ID NO: 449030 - DNA, 15 bp, Homo sapiens
accacacccacgaaa

SEQ ID NO: 449031 - DNA, 15 bp, Homo sapiens
caccacacccacgaa

SEQ ID NO: 449032 - DNA, 15 bp, Homo sapiens
ccaccacacccacga

SEQ ID NO: 449033 - DNA, 15 bp, Homo sapiens
cccaccacacccacg

SEQ ID NO: 449034 - DNA, 15 bp, Homo sapiens
ccccaccacacccac

SEQ ID NO: 449035 - DNA, 15 bp, Homo sapiens
cccccaccacaccca

SEQ ID NO: 449036 - DNA, 15 bp, Homo sapiens
gcccccaccacaccc

SEQ ID NO: 449037 - DNA, 15 bp, Homo sapiens
cgcccccaccacacc

SEQ ID NO: 449038 - DNA, 15 bp, Homo sapiens
ccgcccccaccacac

SEQ ID NO: 449039 - DNA, 15 bp, Homo sapiens
cccgcccccaccaca

SEQ ID NO: 449040 - DNA, 15 bp, Homo sapiens
gcccgcccccaccac

SEQ ID NO: 449041 - DNA, 15 bp, Homo sapiens
cgcccgcccccacca

SEQ ID NO: 449042 - DNA, 15 bp, Homo sapiens
ccgcccgcccccacc

SEQ ID NO: 449043 - DNA, 15 bp, Homo sapiens
tccgcccgcccccac

SEQ ID NO: 449044 - DNA, 15 bp, Homo sapiens
ctccgcccgccccca

SEQ ID NO: 449045 - DNA, 15 bp, Homo sapiens
gctccgcccgccccc

SEQ ID NO: 449046 - DNA, 15 bp, Homo sapiens
ggctccgcccgcccc

SEQ ID NO: 449047 - DNA, 15 bp, Homo sapiens
aggctccgcccgccc

SEQ ID NO: 449048 - DNA, 15 bp, Homo sapiens
aaggctccgcccgcc

SEQ ID NO: 449049 - DNA, 15 bp, Homo sapiens
caaggctccgcccgc

SEQ ID NO: 449050 - DNA, 15 bp, Homo sapiens
ccaaggctccgcccg

SEQ ID NO: 449051 - DNA, 15 bp, Homo sapiens
cccaaggctccgccc

SEQ ID NO: 449052 - DNA, 15 bp, Homo sapiens
ccccaaggctccgcc

SEQ ID NO: 449053 - DNA, 15 bp, Homo sapiens
accccaaggctccgc

SEQ ID NO: 449054 - DNA, 15 bp, Homo sapiens
gaccccaaggctccg

SEQ ID NO: 449055 - DNA, 15 bp, Homo sapiens
tgaccccaaggctcc

SEQ ID NO: 449056 - DNA, 15 bp, Homo sapiens
gtgaccccaaggctc

SEQ ID NO: 449057 - DNA, 15 bp, Homo sapiens
ggtgaccccaaggct

SEQ ID NO: 449058 - DNA, 15 bp, Homo sapiens
tggtgaccccaaggc

SEQ ID NO: 449059 - DNA, 15 bp, Homo sapiens
ttggtgaccccaagg

SEQ ID NO: 449060 - DNA, 15 bp, Homo sapiens
cttggtgaccccaag

SEQ ID NO: 449061 - DNA, 15 bp, Homo sapiens
tcttggtgaccccaa

SEQ ID NO: 449062 - DNA, 15 bp, Homo sapiens
ctcttggtgacccca

SEQ ID NO: 449063 - DNA, 15 bp, Homo sapiens
gctcttggtgacccc

SEQ ID NO: 449064 - DNA, 15 bp, Homo sapiens
ggctcttggtgaccc

SEQ ID NO: 449065 - DNA, 15 bp, Homo sapiens
tggctcttggtgacc

SEQ ID NO: 449066 - DNA, 15 bp, Homo sapiens
gtggctcttggtgac

SEQ ID NO: 449067 - DNA, 15 bp, Homo sapiens
agtggctcttggtga

SEQ ID NO: 449068 - DNA, 15 bp, Homo sapiens
cagtggctcttggtg

SEQ ID NO: 449069 - DNA, 15 bp, Homo sapiens
tcagtggctcttggt

SEQ ID NO: 449070 - DNA, 15 bp, Homo sapiens
ttcagtggctcttgg

SEQ ID NO: 449071 - DNA, 15 bp, Homo sapiens
gttcagtggctcttg

SEQ ID NO: 449072 - DNA, 15 bp, Homo sapiens
cgttcagtggctctt

SEQ ID NO: 449073 - DNA, 15 bp, Homo sapiens
tcgttcagtggctct

SEQ ID NO: 449074 - DNA, 15 bp, Homo sapiens
ctcgttcagtggctc

SEQ ID NO: 449075 - DNA, 15 bp, Homo sapiens
cctcgttcagtggct

SEQ ID NO: 449076 - DNA, 15 bp, Homo sapiens
ccctcgttcagtggc

SEQ ID NO: 449077 - DNA, 15 bp, Homo sapiens
accctcgttcagtgg

SEQ ID NO: 449078 - DNA, 15 bp, Homo sapiens
taccctcgttcagtg

SEQ ID NO: 449079 - DNA, 15 bp, Homo sapiens
ttaccctcgttcagt

SEQ ID NO: 449080 - DNA, 15 bp, Homo sapiens
cttaccctcgttcag

SEQ ID NO: 449081 - DNA, 15 bp, Homo sapiens
ccttaccctcgttca

SEQ ID NO: 449082 - DNA, 15 bp, Homo sapiens
tccttaccctcgttc

SEQ ID NO: 449083 - DNA, 15 bp, Homo sapiens
ctccttaccctcgtt

SEQ ID NO: 449084 - DNA, 15 bp, Homo sapiens
gctccttaccctcgt

SEQ ID NO: 449085 - DNA, 15 bp, Homo sapiens
cgctccttaccctcg

SEQ ID NO: 449086 - DNA, 15 bp, Homo sapiens
ccgctccttaccctc

SEQ ID NO: 449087 - DNA, 15 bp, Homo sapiens
gccgctccttaccct

SEQ ID NO: 449088 - DNA, 15 bp, Homo sapiens
ggccgctccttaccc

SEQ ID NO: 449089 - DNA, 15 bp, Homo sapiens
tggccgctccttacc

SEQ ID NO: 449090 - DNA, 15 bp, Homo sapiens
gtggccgctccttac

SEQ ID NO: 449091 - DNA, 15 bp, Homo sapiens
ggtggccgctcctta

SEQ ID NO: 449092 - DNA, 15 bp, Homo sapiens
cggtggccgctcctt

SEQ ID NO: 449093 - DNA, 15 bp, Homo sapiens
gcggtggccgctcct

SEQ ID NO: 449094 - DNA, 15 bp, Homo sapiens
cgcggtggccgctcc

SEQ ID NO: 449095 - DNA, 15 bp, Homo sapiens
gcgcggtggccgctc

SEQ ID NO: 449096 - DNA, 15 bp, Homo sapiens
cgcgcggtggccgct

SEQ ID NO: 449097 - DNA, 15 bp, Homo sapiens
ccgcgcggtggccgc

SEQ ID NO: 449098 - DNA, 15 bp, Homo sapiens
tccgcgcggtggccg

SEQ ID NO: 449099 - DNA, 15 bp, Homo sapiens
gtccgcgcggtggcc

SEQ ID NO: 449100 - DNA, 15 bp, Homo sapiens
agtccgcgcggtggc

SEQ ID NO: 449101 - DNA, 15 bp, Homo sapiens
gagtccgcgcggtgg

SEQ ID NO: 449102 - DNA, 15 bp, Homo sapiens
ggagtccgcgcggtg

SEQ ID NO: 449103 - DNA, 15 bp, Homo sapiens
cggagtccgcgcggt

SEQ ID NO: 449104 - DNA, 15 bp, Homo sapiens
gcggagtccgcgcgg

SEQ ID NO: 449105 - DNA, 15 bp, Homo sapiens
tgcggagtccgcgcg

SEQ ID NO: 449106 - DNA, 15 bp, Homo sapiens
ttgcggagtccgcgc

SEQ ID NO: 449107 - DNA, 15 bp, Homo sapiens
gttgcggagtccgcg

SEQ ID NO: 449108 - DNA, 15 bp, Homo sapiens
ggttgcggagtccgc

SEQ ID NO: 449109 - DNA, 15 bp, Homo sapiens
aggttgcggagtccg

SEQ ID NO: 449110 - DNA, 15 bp, Homo sapiens
aaggttgcggagtcc

SEQ ID NO: 449111 - DNA, 15 bp, Homo sapiens
gaaggttgcggagtc

SEQ ID NO: 449112 - DNA, 15 bp, Homo sapiens
ggaaggttgcggagt

SEQ ID NO: 449113 - DNA, 15 bp, Homo sapiens
gggaaggttgcggag

SEQ ID NO: 449114 - DNA, 15 bp, Homo sapiens
cgggaaggttgcgga

SEQ ID NO: 449115 - DNA, 15 bp, Homo sapiens
ccgggaaggttgcgg

SEQ ID NO: 449116 - DNA, 15 bp, Homo sapiens
cccgggaaggttgcg

SEQ ID NO: 449117 - DNA, 15 bp, Homo sapiens
tcccgggaaggttgc

SEQ ID NO: 449118 - DNA, 15 bp, Homo sapiens
atcccgggaaggttg

SEQ ID NO: 449119 - DNA, 15 bp, Homo sapiens
tatcccgggaaggtt

SEQ ID NO: 449120 - DNA, 15 bp, Homo sapiens
ctatcccgggaaggt

SEQ ID NO: 449121 - DNA, 15 bp, Homo sapiens
gctatcccgggaagg

SEQ ID NO: 449122 - DNA, 15 bp, Homo sapiens
agctatcccgggaag

SEQ ID NO: 449123 - DNA, 15 bp, Homo sapiens
aagctatcccgggaa

SEQ ID NO: 449124 - DNA, 15 bp, Homo sapiens
gaagctatcccggga

SEQ ID NO: 449125 - DNA, 15 bp, Homo sapiens
ggaagctatcccggg

SEQ ID NO: 449126 - DNA, 15 bp, Homo sapiens
cggaagctatcccgg

SEQ ID NO: 449127 - DNA, 15 bp, Homo sapiens
acggaagctatcccg

SEQ ID NO: 449128 - DNA, 15 bp, Homo sapiens
cacggaagctatccc

SEQ ID NO: 449129 - DNA, 15 bp, Homo sapiens
acacggaagctatcc

SEQ ID NO: 449130 - DNA, 15 bp, Homo sapiens
gacacggaagctatc

SEQ ID NO: 449131 - DNA, 15 bp, Homo sapiens
ggacacggaagctat

SEQ ID NO: 449132 - DNA, 15 bp, Homo sapiens
aggacacggaagcta

SEQ ID NO: 449133 - DNA, 15 bp, Homo sapiens
aaggacacggaagct

SEQ ID NO: 449134 - DNA, 15 bp, Homo sapiens
caaggacacggaagc

SEQ ID NO: 449135 - DNA, 15 bp, Homo sapiens
ccaaggacacggaag

SEQ ID NO: 449136 - DNA, 15 bp, Homo sapiens
gccaaggacacggaa

SEQ ID NO: 449137 - DNA, 15 bp, Homo sapiens
agccaaggacacgga

SEQ ID NO: 449138 - DNA, 15 bp, Homo sapiens
gagccaaggacacgg

SEQ ID NO: 449139 - DNA, 15 bp, Homo sapiens
tgagccaaggacacg

SEQ ID NO: 449140 - DNA, 15 bp, Homo sapiens
ctgagccaaggacac

SEQ ID NO: 449141 - DNA, 15 bp, Homo sapiens
gctgagccaaggaca

SEQ ID NO: 449142 - DNA, 15 bp, Homo sapiens
agctgagccaaggac

SEQ ID NO: 449143 - DNA, 15 bp, Homo sapiens
cagctgagccaagga

SEQ ID NO: 449144 - DNA, 15 bp, Homo sapiens
acagctgagccaagg

SEQ ID NO: 449145 - DNA, 15 bp, Homo sapiens
cacagctgagccaag

SEQ ID NO: 449146 - DNA, 15 bp, Homo sapiens
acacagctgagccaa

SEQ ID NO: 449147 - DNA, 15 bp, Homo sapiens
tacacagctgagcca

SEQ ID NO: 449148 - DNA, 15 bp, Homo sapiens
atacacagctgagcc

SEQ ID NO: 449149 - DNA, 15 bp, Homo sapiens
catacacagctgagc

SEQ ID NO: 449150 - DNA, 15 bp, Homo sapiens
gcatacacagctgag

SEQ ID NO: 449151 - DNA, 15 bp, Homo sapiens
ggcatacacagctga

SEQ ID NO: 449152 - DNA, 15 bp, Homo sapiens
gggcatacacagctg

SEQ ID NO: 449153 - DNA, 15 bp, Homo sapiens
cgggcatacacagct

SEQ ID NO: 449154 - DNA, 15 bp, Homo sapiens
acgggcatacacagc

SEQ ID NO: 449155 - DNA, 15 bp, Homo sapiens
cacgggcatacacag

SEQ ID NO: 449156 - DNA, 15 bp, Homo sapiens
ccacgggcatacaca

SEQ ID NO: 449157 - DNA, 15 bp, Homo sapiens
accacgggcatacac

SEQ ID NO: 449158 - DNA, 15 bp, Homo sapiens
caccacgggcataca

SEQ ID NO: 449159 - DNA, 15 bp, Homo sapiens
gcaccacgggcatac

SEQ ID NO: 449160 - DNA, 15 bp, Homo sapiens
cgcaccacgggcata

SEQ ID NO: 449161 - DNA, 15 bp, Homo sapiens
tcgcaccacgggcat

SEQ ID NO: 449162 - DNA, 15 bp, Homo sapiens
ctcgcaccacgggca

SEQ ID NO: 449163 - DNA, 15 bp, Homo sapiens
gctcgcaccacgggc

SEQ ID NO: 449164 - DNA, 15 bp, Homo sapiens
tgctcgcaccacggg

SEQ ID NO: 449165 - DNA, 15 bp, Homo sapiens
gtgctcgcaccacgg

SEQ ID NO: 449166 - DNA, 15 bp, Homo sapiens
agtgctcgcaccacg

SEQ ID NO: 449167 - DNA, 15 bp, Homo sapiens
cagtgctcgcaccac

SEQ ID NO: 449168 - DNA, 15 bp, Homo sapiens
gcagtgctcgcacca

SEQ ID NO: 449169 - DNA, 15 bp, Homo sapiens
cgcagtgctcgcacc

SEQ ID NO: 449170 - DNA, 15 bp, Homo sapiens
ccgcagtgctcgcac

SEQ ID NO: 449171 - DNA, 15 bp, Homo sapiens
tccgcagtgctcgca

SEQ ID NO: 449172 - DNA, 15 bp, Homo sapiens
ctccgcagtgctcgc

SEQ ID NO: 449173 - DNA, 15 bp, Homo sapiens
gctccgcagtgctcg

SEQ ID NO: 449174 - DNA, 15 bp, Homo sapiens
ggctccgcagtgctc

SEQ ID NO: 449175 - DNA, 15 bp, Homo sapiens
cggctccgcagtgct

SEQ ID NO: 449176 - DNA, 15 bp, Homo sapiens
gcggctccgcagtgc

SEQ ID NO: 449177 - DNA, 15 bp, Homo sapiens
ggcggctccgcagtg

SEQ ID NO: 449178 - DNA, 15 bp, Homo sapiens
aggcggctccgcagt

SEQ ID NO: 449179 - DNA, 15 bp, Homo sapiens
caggcggctccgcag

SEQ ID NO: 449180 - DNA, 15 bp, Homo sapiens
ccaggcggctccgca

SEQ ID NO: 449181 - DNA, 15 bp, Homo sapiens
cccaggcggctccgc

SEQ ID NO: 449182 - DNA, 15 bp, Homo sapiens
ccccaggcggctccg

SEQ ID NO: 449183 - DNA, 15 bp, Homo sapiens
gccccaggcggctcc

SEQ ID NO: 449184 - DNA, 15 bp, Homo sapiens
cgccccaggcggctc

SEQ ID NO: 449185 - DNA, 15 bp, Homo sapiens
gcgccccaggcggct

SEQ ID NO: 449186 - DNA, 15 bp, Homo sapiens
tgcgccccaggcggc

SEQ ID NO: 449187 - DNA, 15 bp, Homo sapiens
ttgcgccccaggcgg

SEQ ID NO: 449188 - DNA, 15 bp, Homo sapiens
cttgcgccccaggcg

SEQ ID NO: 449189 - DNA, 15 bp, Homo sapiens
gcttgcgccccaggc

SEQ ID NO: 449190 - DNA, 15 bp, Homo sapiens
ggcttgcgccccagg

SEQ ID NO: 449191 - DNA, 15 bp, Homo sapiens
cggcttgcgccccag

SEQ ID NO: 449192 - DNA, 15 bp, Homo sapiens
ccggcttgcgcccca

SEQ ID NO: 449193 - DNA, 15 bp, Homo sapiens
cccggcttgcgcccc

SEQ ID NO: 449194 - DNA, 15 bp, Homo sapiens
acccggcttgcgccc

SEQ ID NO: 449195 - DNA, 15 bp, Homo sapiens
gacccggcttgcgcc

SEQ ID NO: 449196 - DNA, 15 bp, Homo sapiens
agacccggcttgcgc

SEQ ID NO: 449197 - DNA, 15 bp, Homo sapiens
aagacccggcttgcg

SEQ ID NO: 449198 - DNA, 15 bp, Homo sapiens
gaagacccggcttgc

SEQ ID NO: 449199 - DNA, 15 bp, Homo sapiens
tgaagacccggcttg

SEQ ID NO: 449200 - DNA, 15 bp, Homo sapiens
gtgaagacccggctt

SEQ ID NO: 449201 - DNA, 15 bp, Homo sapiens
ggtgaagacccggct

SEQ ID NO: 449202 - DNA, 15 bp, Homo sapiens
tggtgaagacccggc

SEQ ID NO: 449203 - DNA, 15 bp, Homo sapiens
ctggtgaagacccgg

SEQ ID NO: 449204 - DNA, 15 bp, Homo sapiens
actggtgaagacccg

SEQ ID NO: 449205 - DNA, 15 bp, Homo sapiens
gactggtgaagaccc

SEQ ID NO: 449206 - DNA, 15 bp, Homo sapiens
ggactggtgaagacc

SEQ ID NO: 449207 - DNA, 15 bp, Homo sapiens
gggactggtgaagac

SEQ ID NO: 449208 - DNA, 15 bp, Homo sapiens
ggggactggtgaaga

SEQ ID NO: 449209 - DNA, 15 bp, Homo sapiens
cggggactggtgaag

SEQ ID NO: 449210 - DNA, 15 bp, Homo sapiens
ccggggactggtgaa

SEQ ID NO: 449211 - DNA, 15 bp, Homo sapiens
cccggggactggtga

SEQ ID NO: 449212 - DNA, 15 bp, Homo sapiens
gcccggggactggtg

SEQ ID NO: 449213 - DNA, 15 bp, Homo sapiens
cgcccggggactggt

SEQ ID NO: 449214 - DNA, 15 bp, Homo sapiens
gcgcccggggactgg

SEQ ID NO: 449215 - DNA, 15 bp, Homo sapiens
cgcgcccggggactg

SEQ ID NO: 449216 - DNA, 15 bp, Homo sapiens
gcgcgcccggggact

SEQ ID NO: 449217 - DNA, 15 bp, Homo sapiens
agcgcgcccggggac

SEQ ID NO: 449218 - DNA, 15 bp, Homo sapiens
cagcgcgcccgggga

SEQ ID NO: 449219 - DNA, 15 bp, Homo sapiens
acagcgcgcccgggg

SEQ ID NO: 449220 - DNA, 15 bp, Homo sapiens
gacagcgcgcccggg

SEQ ID NO: 449221 - DNA, 15 bp, Homo sapiens
cgacagcgcgcccgg

SEQ ID NO: 449222 - DNA, 15 bp, Homo sapiens
ccgacagcgcgcccg

SEQ ID NO: 449223 - DNA, 15 bp, Homo sapiens
accgacagcgcgccc

SEQ ID NO: 449224 - DNA, 15 bp, Homo sapiens
taccgacagcgcgcc

SEQ ID NO: 449225 - DNA, 15 bp, Homo sapiens
ctaccgacagcgcgc

SEQ ID NO: 449226 - DNA, 15 bp, Homo sapiens
cctaccgacagcgcg

SEQ ID NO: 449227 - DNA, 15 bp, Homo sapiens
ccctaccgacagcgc

SEQ ID NO: 449228 - DNA, 15 bp, Homo sapiens
gccctaccgacagcg

SEQ ID NO: 449229 - DNA, 15 bp, Homo sapiens
cgccctaccgacagc

SEQ ID NO: 449230 - DNA, 15 bp, Homo sapiens
ccgccctaccgacag

SEQ ID NO: 449231 - DNA, 15 bp, Homo sapiens
cccgccctaccgaca

SEQ ID NO: 449232 - DNA, 15 bp, Homo sapiens
gcccgccctaccgac

SEQ ID NO: 449233 - DNA, 15 bp, Homo sapiens
cgcccgccctaccga

SEQ ID NO: 449234 - DNA, 15 bp, Homo sapiens
gcgcccgccctaccg

SEQ ID NO: 449235 - DNA, 15 bp, Homo sapiens
agcgcccgccctacc

SEQ ID NO: 449236 - DNA, 15 bp, Homo sapiens
gagcgcccgccctac

SEQ ID NO: 449237 - DNA, 15 bp, Homo sapiens
agagcgcccgcccta

SEQ ID NO: 449238 - DNA, 15 bp, Homo sapiens
gagagcgcccgccct

SEQ ID NO: 449239 - DNA, 15 bp, Homo sapiens
cgagagcgcccgccc

SEQ ID NO: 449240 - DNA, 15 bp, Homo sapiens
ccgagagcgcccgcc

SEQ ID NO: 449241 - DNA, 15 bp, Homo sapiens
cccgagagcgcccgc

SEQ ID NO: 449242 - DNA, 15 bp, Homo sapiens
gcccgagagcgcccg

SEQ ID NO: 449243 - DNA, 15 bp, Homo sapiens
ggcccgagagcgccc

SEQ ID NO: 449244 - DNA, 15 bp, Homo sapiens
tggcccgagagcgcc

SEQ ID NO: 449245 - DNA, 15 bp, Homo sapiens
gtggcccgagagcgc

SEQ ID NO: 449246 - DNA, 15 bp, Homo sapiens
ggtggcccgagagcg

SEQ ID NO: 449247 - DNA, 15 bp, Homo sapiens
cggtggcccgagagc

SEQ ID NO: 449248 - DNA, 15 bp, Homo sapiens
ccggtggcccgagag

SEQ ID NO: 449249 - DNA, 15 bp, Homo sapiens
cccggtggcccgaga

SEQ ID NO: 449250 - DNA, 15 bp, Homo sapiens
gcccggtggcccgag

SEQ ID NO: 449251 - DNA, 15 bp, Homo sapiens
cgcccggtggcccga

SEQ ID NO: 449252 - DNA, 15 bp, Homo sapiens
ccgcccggtggcccg

SEQ ID NO: 449253 - DNA, 15 bp, Homo sapiens
cccgcccggtggccc

SEQ ID NO: 449254 - DNA, 15 bp, Homo sapiens
tcccgcccggtggcc

SEQ ID NO: 449255 - DNA, 15 bp, Homo sapiens
ctcccgcccggtggc

SEQ ID NO: 449256 - DNA, 15 bp, Homo sapiens
cctcccgcccggtgg

SEQ ID NO: 449257 - DNA, 15 bp, Homo sapiens
acctcccgcccggtg

SEQ ID NO: 449258 - DNA, 15 bp, Homo sapiens
cacctcccgcccggt

SEQ ID NO: 449259 - DNA, 15 bp, Homo sapiens
ccacctcccgcccgg

SEQ ID NO: 449260 - DNA, 15 bp, Homo sapiens
gccacctcccgcccg

SEQ ID NO: 449261 - DNA, 15 bp, Homo sapiens
ggccacctcccgccc

SEQ ID NO: 449262 - DNA, 15 bp, Homo sapiens
cggccacctcccgcc

SEQ ID NO: 449263 - DNA, 15 bp, Homo sapiens
gcggccacctcccgc

SEQ ID NO: 449264 - DNA, 15 bp, Homo sapiens
cgcggccacctcccg

SEQ ID NO: 449265 - DNA, 15 bp, Homo sapiens
acgcggccacctccc

SEQ ID NO: 449266 - DNA, 15 bp, Homo sapiens
gacgcggccacctcc

SEQ ID NO: 449267 - DNA, 15 bp, Homo sapiens
ggacgcggccacctc

SEQ ID NO: 449268 - DNA, 15 bp, Homo sapiens
gggacgcggccacct

SEQ ID NO: 449269 - DNA, 15 bp, Homo sapiens
ggggacgcggccacc

SEQ ID NO: 449270 - DNA, 15 bp, Homo sapiens
tggggacgcggccac

SEQ ID NO: 449271 - DNA, 15 bp, Homo sapiens
ctggggacgcggcca

SEQ ID NO: 449272 - DNA, 15 bp, Homo sapiens
tctggggacgcggcc

SEQ ID NO: 449273 - DNA, 15 bp, Homo sapiens
gtctggggacgcggc

SEQ ID NO: 449274 - DNA, 15 bp, Homo sapiens
tgtctggggacgcgg

SEQ ID NO: 449275 - DNA, 15 bp, Homo sapiens
gtgtctggggacgcg

SEQ ID NO: 449276 - DNA, 15 bp, Homo sapiens
agtgtctggggacgc

SEQ ID NO: 449277 - DNA, 15 bp, Homo sapiens
cagtgtctggggacg

SEQ ID NO: 449278 - DNA, 15 bp, Homo sapiens
ccagtgtctggggac

SEQ ID NO: 449279 - DNA, 15 bp, Homo sapiens
gccagtgtctgggga

SEQ ID NO: 449280 - DNA, 15 bp, Homo sapiens
agccagtgtctgggg

SEQ ID NO: 449281 - DNA, 15 bp, Homo sapiens
cagccagtgtctggg

SEQ ID NO: 449282 - DNA, 15 bp, Homo sapiens
ccagccagtgtctgg

SEQ ID NO: 449283 - DNA, 15 bp, Homo sapiens
cccagccagtgtctg

SEQ ID NO: 449284 - DNA, 15 bp, Homo sapiens
gcccagccagtgtct

SEQ ID NO: 449285 - DNA, 15 bp, Homo sapiens
ggcccagccagtgtc

SEQ ID NO: 449286 - DNA, 15 bp, Homo sapiens
tggcccagccagtgt

SEQ ID NO: 449287 - DNA, 15 bp, Homo sapiens
ctggcccagccagtg

SEQ ID NO: 449288 - DNA, 15 bp, Homo sapiens
tctggcccagccagt

SEQ ID NO: 449289 - DNA, 15 bp, Homo sapiens
ctctggcccagccag

SEQ ID NO: 449290 - DNA, 15 bp, Homo sapiens
actctggcccagcca

SEQ ID NO: 449291 - DNA, 15 bp, Homo sapiens
cactctggcccagcc

SEQ ID NO: 449292 - DNA, 15 bp, Homo sapiens
tcactctggcccagc

SEQ ID NO: 449293 - DNA, 15 bp, Homo sapiens
ctcactctggcccag

SEQ ID NO: 449294 - DNA, 15 bp, Homo sapiens
actcactctggccca

SEQ ID NO: 449295 - DNA, 15 bp, Homo sapiens
aactcactctggccc

SEQ ID NO: 449296 - DNA, 15 bp, Homo sapiens
aaactcactctggcc

SEQ ID NO: 449297 - DNA, 15 bp, Homo sapiens
taaactcactctggc

SEQ ID NO: 449298 - DNA, 15 bp, Homo sapiens
ctaaactcactctgg

SEQ ID NO: 449299 - DNA, 15 bp, Homo sapiens
gctaaactcactctg

SEQ ID NO: 449300 - DNA, 15 bp, Homo sapiens
cgctaaactcactct

SEQ ID NO: 449301 - DNA, 15 bp, Homo sapiens
gcgctaaactcactc

SEQ ID NO: 449302 - DNA, 15 bp, Homo sapiens
cgcgctaaactcact

SEQ ID NO: 449303 - DNA, 15 bp, Homo sapiens
acgcgctaaactcac

SEQ ID NO: 449304 - DNA, 15 bp, Homo sapiens
tacgcgctaaactca

SEQ ID NO: 449305 - DNA, 15 bp, Homo sapiens
ctacgcgctaaactc

SEQ ID NO: 449306 - DNA, 15 bp, Homo sapiens
cctacgcgctaaact

SEQ ID NO: 449307 - DNA, 15 bp, Homo sapiens
gcctacgcgctaaac

SEQ ID NO: 449308 - DNA, 15 bp, Homo sapiens
cgcctacgcgctaaa

SEQ ID NO: 449309 - DNA, 15 bp, Homo sapiens
ccgcctacgcgctaa

SEQ ID NO: 449310 - DNA, 15 bp, Homo sapiens
gccgcctacgcgcta

SEQ ID NO: 449311 - DNA, 15 bp, Homo sapiens
ggccgcctacgcgct

SEQ ID NO: 449312 - DNA, 15 bp, Homo sapiens
gggccgcctacgcgc

SEQ ID NO: 449313 - DNA, 15 bp, Homo sapiens
ggggccgcctacgcg

SEQ ID NO: 449314 - DNA, 15 bp, Homo sapiens
cggggccgcctacgc

SEQ ID NO: 449315 - DNA, 15 bp, Homo sapiens
acggggccgcctacg

SEQ ID NO: 449316 - DNA, 15 bp, Homo sapiens
cacggggccgcctac

SEQ ID NO: 449317 - DNA, 15 bp, Homo sapiens
ccacggggccgccta

SEQ ID NO: 449318 - DNA, 15 bp, Homo sapiens
gccacggggccgcct

SEQ ID NO: 449319 - DNA, 15 bp, Homo sapiens
cgccacggggccgcc

SEQ ID NO: 449320 - DNA, 15 bp, Homo sapiens
tcgccacggggccgc

SEQ ID NO: 449321 - DNA, 15 bp, Homo sapiens
ctcgccacggggccg

SEQ ID NO: 449322 - DNA, 15 bp, Homo sapiens
tctcgccacggggcc

SEQ ID NO: 449323 - DNA, 15 bp, Homo sapiens
ctctcgccacggggc

SEQ ID NO: 449324 - DNA, 15 bp, Homo sapiens
gctctcgccacgggg

SEQ ID NO: 449325 - DNA, 15 bp, Homo sapiens
cgctctcgccacggg

SEQ ID NO: 449326 - DNA, 15 bp, Homo sapiens
gcgctctcgccacgg

SEQ ID NO: 449327 - DNA, 15 bp, Homo sapiens
tgcgctctcgccacg

SEQ ID NO: 449328 - DNA, 15 bp, Homo sapiens
gtgcgctctcgccac

SEQ ID NO: 449329 - DNA, 15 bp, Homo sapiens
ggtgcgctctcgcca

SEQ ID NO: 449330 - DNA, 15 bp, Homo sapiens
cggtgcgctctcgcc

SEQ ID NO: 449331 - DNA, 15 bp, Homo sapiens
tcggtgcgctctcgc

SEQ ID NO: 449332 - DNA, 15 bp, Homo sapiens
ctcggtgcgctctcg

SEQ ID NO: 449333 - DNA, 15 bp, Homo sapiens
tctcggtgcgctctc

SEQ ID NO: 449334 - DNA, 15 bp, Homo sapiens
ctctcggtgcgctct

SEQ ID NO: 449335 - DNA, 15 bp, Homo sapiens
tctctcggtgcgctc

SEQ ID NO: 449336 - DNA, 15 bp, Homo sapiens
ctctctcggtgcgct

SEQ ID NO: 449337 - DNA, 15 bp, Homo sapiens
gctctctcggtgcgc

SEQ ID NO: 449338 - DNA, 15 bp, Homo sapiens
ggctctctcggtgcg

SEQ ID NO: 449339 - DNA, 15 bp, Homo sapiens
aggctctctcggtgc

SEQ ID NO: 449340 - DNA, 15 bp, Homo sapiens
gaggctctctcggtg

SEQ ID NO: 449341 - DNA, 15 bp, Homo sapiens
cgaggctctctcggt

SEQ ID NO: 449342 - DNA, 15 bp, Homo sapiens
ccgaggctctctcgg

SEQ ID NO: 449343 - DNA, 15 bp, Homo sapiens
accgaggctctctcg

SEQ ID NO: 449344 - DNA, 15 bp, Homo sapiens
caccgaggctctctc

SEQ ID NO: 449345 - DNA, 15 bp, Homo sapiens
acaccgaggctctct

SEQ ID NO: 449346 - DNA, 15 bp, Homo sapiens
cacaccgaggctctc

SEQ ID NO: 449347 - DNA, 15 bp, Homo sapiens
gcacaccgaggctct

SEQ ID NO: 449348 - DNA, 15 bp, Homo sapiens
ggcacaccgaggctc

SEQ ID NO: 449349 - DNA, 15 bp, Homo sapiens
tggcacaccgaggct

SEQ ID NO: 449350 - DNA, 15 bp, Homo sapiens
ttggcacaccgaggc

SEQ ID NO: 449351 - DNA, 15 bp, Homo sapiens
attggcacaccgagg

SEQ ID NO: 449352 - DNA, 15 bp, Homo sapiens
aattggcacaccgag

SEQ ID NO: 449353 - DNA, 15 bp, Homo sapiens
gaattggcacaccga

SEQ ID NO: 449354 - DNA, 15 bp, Homo sapiens
ggaattggcacaccg

SEQ ID NO: 449355 - DNA, 15 bp, Homo sapiens
cggaattggcacacc

SEQ ID NO: 449356 - DNA, 15 bp, Homo sapiens
ccggaattggcacac

SEQ ID NO: 449357 - DNA, 15 bp, Homo sapiens
cccggaattggcaca

SEQ ID NO: 449358 - DNA, 15 bp, Homo sapiens
ccccggaattggcac

SEQ ID NO: 449359 - DNA, 15 bp, Homo sapiens
tccccggaattggca

SEQ ID NO: 449360 - DNA, 15 bp, Homo sapiens
gtccccggaattggc

SEQ ID NO: 449361 - DNA, 15 bp, Homo sapiens
cgtccccggaattgg

SEQ ID NO: 449362 - DNA, 15 bp, Homo sapiens
acgtccccggaattg

SEQ ID NO: 449363 - DNA, 15 bp, Homo sapiens
gacgtccccggaatt

SEQ ID NO: 449364 - DNA, 15 bp, Homo sapiens
ggacgtccccggaat

SEQ ID NO: 449365 - DNA, 15 bp, Homo sapiens
tggacgtccccggaa

SEQ ID NO: 449366 - DNA, 15 bp, Homo sapiens
gtggacgtccccgga

SEQ ID NO: 449367 - DNA, 15 bp, Homo sapiens
cgtggacgtccccgg

SEQ ID NO: 449368 - DNA, 15 bp, Homo sapiens
ccgtggacgtccccg

SEQ ID NO: 449369 - DNA, 15 bp, Homo sapiens
cccgtggacgtcccc

SEQ ID NO: 449370 - DNA, 15 bp, Homo sapiens
tcccgtggacgtccc

SEQ ID NO: 449371 - DNA, 15 bp, Homo sapiens
gtcccgtggacgtcc

SEQ ID NO: 449372 - DNA, 15 bp, Homo sapiens
ggtcccgtggacgtc

SEQ ID NO: 449373 - DNA, 15 bp, Homo sapiens
aggtcccgtggacgt

SEQ ID NO: 449374 - DNA, 15 bp, Homo sapiens
caggtcccgtggacg

SEQ ID NO: 449375 - DNA, 15 bp, Homo sapiens
ccaggtcccgtggac

SEQ ID NO: 449376 - DNA, 15 bp, Homo sapiens
tccaggtcccgtgga

SEQ ID NO: 449377 - DNA, 15 bp, Homo sapiens
ctccaggtcccgtgg

SEQ ID NO: 449378 - DNA, 15 bp, Homo sapiens
cctccaggtcccgtg

SEQ ID NO: 449379 - DNA, 15 bp, Homo sapiens
ccctccaggtcccgt

SEQ ID NO: 449380 - DNA, 15 bp, Homo sapiens
cccctccaggtcccg

SEQ ID NO: 449381 - DNA, 15 bp, Homo sapiens
ccccctccaggtccc

SEQ ID NO: 449382 - DNA, 15 bp, Homo sapiens
tccccctccaggtcc

SEQ ID NO: 449383 - DNA, 15 bp, Homo sapiens
ctccccctccaggtc

SEQ ID NO: 449384 - DNA, 15 bp, Homo sapiens
cctccccctccaggt

SEQ ID NO: 449385 - DNA, 15 bp, Homo sapiens
ccctccccctccagg

SEQ ID NO: 449386 - DNA, 15 bp, Homo sapiens
tccctccccctccag

SEQ ID NO: 449387 - DNA, 15 bp, Homo sapiens
gtccctccccctcca

SEQ ID NO: 449388 - DNA, 15 bp, Homo sapiens
ggtccctccccctcc

SEQ ID NO: 449389 - DNA, 15 bp, Homo sapiens
tggtccctccccctc

SEQ ID NO: 449390 - DNA, 15 bp, Homo sapiens
ctggtccctccccct

SEQ ID NO: 449391 - DNA, 15 bp, Homo sapiens
gctggtccctccccc

SEQ ID NO: 449392 - DNA, 15 bp, Homo sapiens
ggctggtccctcccc

SEQ ID NO: 449393 - DNA, 15 bp, Homo sapiens
cggctggtccctccc

SEQ ID NO: 449394 - DNA, 15 bp, Homo sapiens
gcggctggtccctcc

SEQ ID NO: 449395 - DNA, 15 bp, Homo sapiens
cgcggctggtccctc

SEQ ID NO: 449396 - DNA, 15 bp, Homo sapiens
ccgcggctggtccct

SEQ ID NO: 449397 - DNA, 15 bp, Homo sapiens
gccgcggctggtccc

SEQ ID NO: 449398 - DNA, 15 bp, Homo sapiens
cgccgcggctggtcc

SEQ ID NO: 449399 - DNA, 15 bp, Homo sapiens
gcgccgcggctggtc

SEQ ID NO: 449400 - DNA, 15 bp, Homo sapiens
agcgccgcggctggt

SEQ ID NO: 449401 - DNA, 15 bp, Homo sapiens
gagcgccgcggctgg

SEQ ID NO: 449402 - DNA, 15 bp, Homo sapiens
cgagcgccgcggctg

SEQ ID NO: 449403 - DNA, 15 bp, Homo sapiens
gcgagcgccgcggct

SEQ ID NO: 449404 - DNA, 15 bp, Homo sapiens
agcgagcgccgcggc

SEQ ID NO: 449405 - DNA, 15 bp, Homo sapiens
gagcgagcgccgcgg

SEQ ID NO: 449406 - DNA, 15 bp, Homo sapiens
tgagcgagcgccgcg

SEQ ID NO: 449407 - DNA, 15 bp, Homo sapiens
gtgagcgagcgccgc

SEQ ID NO: 449408 - DNA, 15 bp, Homo sapiens
tgtgagcgagcgccg

SEQ ID NO: 449409 - DNA, 15 bp, Homo sapiens
gtgtgagcgagcgcc

SEQ ID NO: 449410 - DNA, 15 bp, Homo sapiens
cgtgtgagcgagcgc

SEQ ID NO: 449411 - DNA, 15 bp, Homo sapiens
gcgtgtgagcgagcg

SEQ ID NO: 449412 - DNA, 15 bp, Homo sapiens
tgcgtgtgagcgagc

SEQ ID NO: 449413 - DNA, 15 bp, Homo sapiens
ttgcgtgtgagcgag

SEQ ID NO: 449414 - DNA, 15 bp, Homo sapiens
attgcgtgtgagcga

SEQ ID NO: 449415 - DNA, 15 bp, Homo sapiens
aattgcgtgtgagcg

SEQ ID NO: 449416 - DNA, 15 bp, Homo sapiens
caattgcgtgtgagc

SEQ ID NO: 449417 - DNA, 15 bp, Homo sapiens
ccaattgcgtgtgag

SEQ ID NO: 449418 - DNA, 15 bp, Homo sapiens
cccaattgcgtgtga

SEQ ID NO: 449419 - DNA, 15 bp, Homo sapiens
gcccaattgcgtgtg

SEQ ID NO: 449420 - DNA, 15 bp, Homo sapiens
tgcccaattgcgtgt

SEQ ID NO: 449421 - DNA, 15 bp, Homo sapiens
ctgcccaattgcgtg

SEQ ID NO: 449422 - DNA, 15 bp, Homo sapiens
tctgcccaattgcgt

SEQ ID NO: 449423 - DNA, 15 bp, Homo sapiens
gtctgcccaattgcg

SEQ ID NO: 449424 - DNA, 15 bp, Homo sapiens
tgtctgcccaattgc

SEQ ID NO: 449425 - DNA, 15 bp, Homo sapiens
ctgtctgcccaattg

SEQ ID NO: 449426 - DNA, 15 bp, Homo sapiens
cctgtctgcccaatt

SEQ ID NO: 449427 - DNA, 15 bp, Homo sapiens
tcctgtctgcccaat

SEQ ID NO: 449428 - DNA, 15 bp, Homo sapiens
gtcctgtctgcccaa

SEQ ID NO: 449429 - DNA, 15 bp, Homo sapiens
tgtcctgtctgccca

SEQ ID NO: 449430 - DNA, 15 bp, Homo sapiens
atgtcctgtctgccc

SEQ ID NO: 449431 - DNA, 15 bp, Homo sapiens
tatgtcctgtctgcc

SEQ ID NO: 449432 - DNA, 15 bp, Homo sapiens
ttatgtcctgtctgc

SEQ ID NO: 449433 - DNA, 15 bp, Homo sapiens
gttatgtcctgtctg

SEQ ID NO: 449434 - DNA, 15 bp, Homo sapiens
tgttatgtcctgtct

SEQ ID NO: 449435 - DNA, 15 bp, Homo sapiens
gtgttatgtcctgtc

SEQ ID NO: 449436 - DNA, 15 bp, Homo sapiens
ggtgttatgtcctgt

SEQ ID NO: 449437 - DNA, 15 bp, Homo sapiens
gggtgttatgtcctg

SEQ ID NO: 449438 - DNA, 15 bp, Homo sapiens
cgggtgttatgtcct

SEQ ID NO: 449439 - DNA, 15 bp, Homo sapiens
gcgggtgttatgtcc

SEQ ID NO: 449440 - DNA, 15 bp, Homo sapiens
tgcgggtgttatgtc

SEQ ID NO: 449441 - DNA, 15 bp, Homo sapiens
ttgcgggtgttatgt

SEQ ID NO: 449442 - DNA, 15 bp, Homo sapiens
attgcgggtgttatg

SEQ ID NO: 449443 - DNA, 15 bp, Homo sapiens
tattgcgggtgttat

SEQ ID NO: 449444 - DNA, 15 bp, Homo sapiens
gtattgcgggtgtta

SEQ ID NO: 449445 - DNA, 15 bp, Homo sapiens
tgtattgcgggtgtt

SEQ ID NO: 449446 - DNA, 15 bp, Homo sapiens
ctgtattgcgggtgt

SEQ ID NO: 449447 - DNA, 15 bp, Homo sapiens
tctgtattgcgggtg

SEQ ID NO: 449448 - DNA, 15 bp, Homo sapiens
gtctgtattgcgggt

SEQ ID NO: 449449 - DNA, 15 bp, Homo sapiens
cgtctgtattgcggg

SEQ ID NO: 449450 - DNA, 15 bp, Homo sapiens
gcgtctgtattgcgg

SEQ ID NO: 449451 - DNA, 15 bp, Homo sapiens
tgcgtctgtattgcg

SEQ ID NO: 449452 - DNA, 15 bp, Homo sapiens
atgcgtctgtattgc

SEQ ID NO: 449453 - DNA, 15 bp, Homo sapiens
gatgcgtctgtattg

SEQ ID NO: 449454 - DNA, 15 bp, Homo sapiens
tgatgcgtctgtatt

SEQ ID NO: 449455 - DNA, 15 bp, Homo sapiens
gtgatgcgtctgtat

SEQ ID NO: 449456 - DNA, 15 bp, Homo sapiens
ggtgatgcgtctgta

SEQ ID NO: 449457 - DNA, 15 bp, Homo sapiens
aggtgatgcgtctgt

SEQ ID NO: 449458 - DNA, 15 bp, Homo sapiens
gaggtgatgcgtctg

SEQ ID NO: 449459 - DNA, 15 bp, Homo sapiens
agaggtgatgcgtct

SEQ ID NO: 449460 - DNA, 15 bp, Homo sapiens
aagaggtgatgcgtc

SEQ ID NO: 449461 - DNA, 15 bp, Homo sapiens
gaagaggtgatgcgt

SEQ ID NO: 449462 - DNA, 15 bp, Homo sapiens
agaagaggtgatgcg

SEQ ID NO: 449463 - DNA, 15 bp, Homo sapiens
aagaagaggtgatgc

SEQ ID NO: 449464 - DNA, 15 bp, Homo sapiens
gaagaagaggtgatg

SEQ ID NO: 449465 - DNA, 15 bp, Homo sapiens
cgaagaagaggtgat

SEQ ID NO: 449466 - DNA, 15 bp, Homo sapiens
tcgaagaagaggtga

SEQ ID NO: 449467 - DNA, 15 bp, Homo sapiens
gtcgaagaagaggtg

SEQ ID NO: 449468 - DNA, 15 bp, Homo sapiens
ggtcgaagaagaggt

SEQ ID NO: 449469 - DNA, 15 bp, Homo sapiens
gggtcgaagaagagg

SEQ ID NO: 449470 - DNA, 15 bp, Homo sapiens
cgggtcgaagaagag

SEQ ID NO: 449471 - DNA, 15 bp, Homo sapiens
ccgggtcgaagaaga

SEQ ID NO: 449472 - DNA, 15 bp, Homo sapiens
cccgggtcgaagaag

SEQ ID NO: 449473 - DNA, 15 bp, Homo sapiens
tcccgggtcgaagaa

SEQ ID NO: 449474 - DNA, 15 bp, Homo sapiens
ctcccgggtcgaaga

SEQ ID NO: 449475 - DNA, 15 bp, Homo sapiens
actcccgggtcgaag

SEQ ID NO: 449476 - DNA, 15 bp, Homo sapiens
cactcccgggtcgaa

SEQ ID NO: 449477 - DNA, 15 bp, Homo sapiens
ccactcccgggtcga

SEQ ID NO: 449478 - DNA, 15 bp, Homo sapiens
cccactcccgggtcg

SEQ ID NO: 449479 - DNA, 15 bp, Homo sapiens
gcccactcccgggtc

SEQ ID NO: 449480 - DNA, 15 bp, Homo sapiens
ggcccactcccgggt

SEQ ID NO: 449481 - DNA, 15 bp, Homo sapiens
cggcccactcccggg

SEQ ID NO: 449482 - DNA, 15 bp, Homo sapiens
tcggcccactcccgg

SEQ ID NO: 449483 - DNA, 15 bp, Homo sapiens
ctcggcccactcccg

SEQ ID NO: 449484 - DNA, 15 bp, Homo sapiens
tctcggcccactccc

SEQ ID NO: 449485 - DNA, 15 bp, Homo sapiens
atctcggcccactcc

SEQ ID NO: 449486 - DNA, 15 bp, Homo sapiens
aatctcggcccactc

SEQ ID NO: 449487 - DNA, 15 bp, Homo sapiens
caatctcggcccact

SEQ ID NO: 449488 - DNA, 15 bp, Homo sapiens
gcaatctcggcccac

SEQ ID NO: 449489 - DNA, 15 bp, Homo sapiens
tgcaatctcggccca

SEQ ID NO: 449490 - DNA, 15 bp, Homo sapiens
ctgcaatctcggccc

SEQ ID NO: 449491 - DNA, 15 bp, Homo sapiens
gctgcaatctcggcc

SEQ ID NO: 449492 - DNA, 15 bp, Homo sapiens
cgctgcaatctcggc

SEQ ID NO: 449493 - DNA, 15 bp, Homo sapiens
gcgctgcaatctcgg

SEQ ID NO: 449494 - DNA, 15 bp, Homo sapiens
agcgctgcaatctcg

SEQ ID NO: 449495 - DNA, 15 bp, Homo sapiens
cagcgctgcaatctc

SEQ ID NO: 449496 - DNA, 15 bp, Homo sapiens
ccagcgctgcaatct

SEQ ID NO: 449497 - DNA, 15 bp, Homo sapiens
gccagcgctgcaatc

SEQ ID NO: 449498 - DNA, 15 bp, Homo sapiens
cgccagcgctgcaat

SEQ ID NO: 449499 - DNA, 15 bp, Homo sapiens
gcgccagcgctgcaa

SEQ ID NO: 449500 - DNA, 15 bp, Homo sapiens
ggcgccagcgctgca

SEQ ID NO: 449501 - DNA, 15 bp, Homo sapiens
gggcgccagcgctgc

SEQ ID NO: 449502 - DNA, 15 bp, Homo sapiens
agggcgccagcgctg

SEQ ID NO: 449503 - DNA, 15 bp, Homo sapiens
cagggcgccagcgct

SEQ ID NO: 449504 - DNA, 15 bp, Homo sapiens
ccagggcgccagcgc

SEQ ID NO: 449505 - DNA, 15 bp, Homo sapiens
cccagggcgccagcg

SEQ ID NO: 449506 - DNA, 15 bp, Homo sapiens
acccagggcgccagc

SEQ ID NO: 449507 - DNA, 15 bp, Homo sapiens
aacccagggcgccag

SEQ ID NO: 449508 - DNA, 15 bp, Homo sapiens
gaacccagggcgcca

SEQ ID NO: 449509 - DNA, 15 bp, Homo sapiens
ggaacccagggcgcc

SEQ ID NO: 449510 - DNA, 15 bp, Homo sapiens
gggaacccagggcgc

SEQ ID NO: 449511 - DNA, 15 bp, Homo sapiens
cgggaacccagggcg

SEQ ID NO: 449512 - DNA, 15 bp, Homo sapiens
ccgggaacccagggc

SEQ ID NO: 449513 - DNA, 15 bp, Homo sapiens
cccgggaacccaggg

SEQ ID NO: 449514 - DNA, 15 bp, Homo sapiens
acccgggaacccagg

SEQ ID NO: 449515 - DNA, 15 bp, Homo sapiens
cacccgggaacccag

SEQ ID NO: 449516 - DNA, 15 bp, Homo sapiens
gcacccgggaaccca

SEQ ID NO: 449517 - DNA, 15 bp, Homo sapiens
agcacccgggaaccc

SEQ ID NO: 449518 - DNA, 15 bp, Homo sapiens
aagcacccgggaacc

SEQ ID NO: 449519 - DNA, 15 bp, Homo sapiens
gaagcacccgggaac

SEQ ID NO: 449520 - DNA, 15 bp, Homo sapiens
ggaagcacccgggaa

SEQ ID NO: 449521 - DNA, 15 bp, Homo sapiens
aggaagcacccggga

SEQ ID NO: 449522 - DNA, 15 bp, Homo sapiens
caggaagcacccggg

SEQ ID NO: 449523 - DNA, 15 bp, Homo sapiens
gcaggaagcacccgg

SEQ ID NO: 449524 - DNA, 15 bp, Homo sapiens
ggcaggaagcacccg

SEQ ID NO: 449525 - DNA, 15 bp, Homo sapiens
aggcaggaagcaccc

SEQ ID NO: 449526 - DNA, 15 bp, Homo sapiens
caggcaggaagcacc

SEQ ID NO: 449527 - DNA, 15 bp, Homo sapiens
tcaggcaggaagcac

SEQ ID NO: 449528 - DNA, 15 bp, Homo sapiens
gtcaggcaggaagca

SEQ ID NO: 449529 - DNA, 15 bp, Homo sapiens
ggtcaggcaggaagc

SEQ ID NO: 449530 - DNA, 15 bp, Homo sapiens
tggtcaggcaggaag

SEQ ID NO: 449531 - DNA, 15 bp, Homo sapiens
ctggtcaggcaggaa

SEQ ID NO: 449532 - DNA, 15 bp, Homo sapiens
actggtcaggcagga

SEQ ID NO: 449533 - DNA, 15 bp, Homo sapiens
gactggtcaggcagg

SEQ ID NO: 449534 - DNA, 15 bp, Homo sapiens
ggactggtcaggcag

SEQ ID NO: 449535 - DNA, 15 bp, Homo sapiens
gggactggtcaggca

SEQ ID NO: 449536 - DNA, 15 bp, Homo sapiens
ggggactggtcaggc

SEQ ID NO: 449537 - DNA, 15 bp, Homo sapiens
tggggactggtcagg

SEQ ID NO: 449538 - DNA, 15 bp, Homo sapiens
atggggactggtcag

SEQ ID NO: 449539 - DNA, 15 bp, Homo sapiens
catggggactggtca

SEQ ID NO: 449540 - DNA, 15 bp, Homo sapiens
acatggggactggtc

SEQ ID NO: 449541 - DNA, 15 bp, Homo sapiens
gacatggggactggt

SEQ ID NO: 449542 - DNA, 15 bp, Homo sapiens
agacatggggactgg

SEQ ID NO: 449543 - DNA, 15 bp, Homo sapiens
cagacatggggactg

SEQ ID NO: 449544 - DNA, 15 bp, Homo sapiens
ccagacatggggact

SEQ ID NO: 449545 - DNA, 15 bp, Homo sapiens
cccagacatggggac

SEQ ID NO: 449546 - DNA, 15 bp, Homo sapiens
gcccagacatgggga

SEQ ID NO: 449547 - DNA, 15 bp, Homo sapiens
cgcccagacatgggg

SEQ ID NO: 449548 - DNA, 15 bp, Homo sapiens
ccgcccagacatggg

SEQ ID NO: 449549 - DNA, 15 bp, Homo sapiens
accgcccagacatgg

SEQ ID NO: 449550 - DNA, 15 bp, Homo sapiens
caccgcccagacatg

SEQ ID NO: 449551 - DNA, 15 bp, Homo sapiens
gcaccgcccagacat

SEQ ID NO: 449552 - DNA, 15 bp, Homo sapiens
tgcaccgcccagaca

SEQ ID NO: 449553 - DNA, 15 bp, Homo sapiens
ctgcaccgcccagac

SEQ ID NO: 449554 - DNA, 15 bp, Homo sapiens
actgcaccgcccaga

SEQ ID NO: 449555 - DNA, 15 bp, Homo sapiens
gactgcaccgcccag

SEQ ID NO: 449556 - DNA, 15 bp, Homo sapiens
cgactgcaccgccca

SEQ ID NO: 449557 - DNA, 15 bp, Homo sapiens
gcgactgcaccgccc

SEQ ID NO: 449558 - DNA, 15 bp, Homo sapiens
cgcgactgcaccgcc

SEQ ID NO: 449559 - DNA, 15 bp, Homo sapiens
gcgcgactgcaccgc

SEQ ID NO: 449560 - DNA, 15 bp, Homo sapiens
cgcgcgactgcaccg

SEQ ID NO: 449561 - DNA, 15 bp, Homo sapiens
acgcgcgactgcacc

SEQ ID NO: 449562 - DNA, 15 bp, Homo sapiens
cacgcgcgactgcac

SEQ ID NO: 449563 - DNA, 15 bp, Homo sapiens
ccacgcgcgactgca

SEQ ID NO: 449564 - DNA, 15 bp, Homo sapiens
gccacgcgcgactgc

SEQ ID NO: 449565 - DNA, 15 bp, Homo sapiens
ggccacgcgcgactg

SEQ ID NO: 449566 - DNA, 15 bp, Homo sapiens
gggccacgcgcgact

SEQ ID NO: 449567 - DNA, 15 bp, Homo sapiens
cgggccacgcgcgac

SEQ ID NO: 449568 - DNA, 15 bp, Homo sapiens
gcgggccacgcgcga

SEQ ID NO: 449569 - DNA, 15 bp, Homo sapiens
ggcgggccacgcgcg

SEQ ID NO: 449570 - DNA, 15 bp, Homo sapiens
tggcgggccacgcgc

SEQ ID NO: 449571 - DNA, 15 bp, Homo sapiens
ctggcgggccacgcg

SEQ ID NO: 449572 - DNA, 15 bp, Homo sapiens
gctggcgggccacgc

SEQ ID NO: 449573 - DNA, 15 bp, Homo sapiens
tgctggcgggccacg

SEQ ID NO: 449574 - DNA, 15 bp, Homo sapiens
gtgctggcgggccac

SEQ ID NO: 449575 - DNA, 15 bp, Homo sapiens
cgtgctggcgggcca

SEQ ID NO: 449576 - DNA, 15 bp, Homo sapiens
acgtgctggcgggcc

SEQ ID NO: 449577 - DNA, 15 bp, Homo sapiens
gacgtgctggcgggc

SEQ ID NO: 449578 - DNA, 15 bp, Homo sapiens
tgacgtgctggcggg

SEQ ID NO: 449579 - DNA, 15 bp, Homo sapiens
ctgacgtgctggcgg

SEQ ID NO: 449580 - DNA, 15 bp, Homo sapiens
actgacgtgctggcg

SEQ ID NO: 449581 - DNA, 15 bp, Homo sapiens
tactgacgtgctggc

SEQ ID NO: 449582 - DNA, 15 bp, Homo sapiens
atactgacgtgctgg

SEQ ID NO: 449583 - DNA, 15 bp, Homo sapiens
catactgacgtgctg

SEQ ID NO: 449584 - DNA, 15 bp, Homo sapiens
acatactgacgtgct

SEQ ID NO: 449585 - DNA, 15 bp, Homo sapiens
gacatactgacgtgc

SEQ ID NO: 449586 - DNA, 15 bp, Homo sapiens
cgacatactgacgtg

SEQ ID NO: 449587 - DNA, 15 bp, Homo sapiens
ccgacatactgacgt

SEQ ID NO: 449588 - DNA, 15 bp, Homo sapiens
cccgacatactgacg

SEQ ID NO: 449589 - DNA, 15 bp, Homo sapiens
acccgacatactgac

SEQ ID NO: 449590 - DNA, 15 bp, Homo sapiens
cacccgacatactga

SEQ ID NO: 449591 - DNA, 15 bp, Homo sapiens
ccacccgacatactg

SEQ ID NO: 449592 - DNA, 15 bp, Homo sapiens
gccacccgacatact

SEQ ID NO: 449593 - DNA, 15 bp, Homo sapiens
tgccacccgacatac

SEQ ID NO: 449594 - DNA, 15 bp, Homo sapiens
ttgccacccgacata

SEQ ID NO: 449595 - DNA, 15 bp, Homo sapiens
gttgccacccgacat

SEQ ID NO: 449596 - DNA, 15 bp, Homo sapiens
tgttgccacccgaca

SEQ ID NO: 449597 - DNA, 15 bp, Homo sapiens
ctgttgccacccgac

SEQ ID NO: 449598 - DNA, 15 bp, Homo sapiens
cctgttgccacccga

SEQ ID NO: 449599 - DNA, 15 bp, Homo sapiens
ccctgttgccacccg

SEQ ID NO: 449600 - DNA, 15 bp, Homo sapiens
cccctgttgccaccc

SEQ ID NO: 449601 - DNA, 15 bp, Homo sapiens
tcccctgttgccacc

SEQ ID NO: 449602 - DNA, 15 bp, Homo sapiens
gtcccctgttgccac

SEQ ID NO: 449603 - DNA, 15 bp, Homo sapiens
ggtcccctgttgcca

SEQ ID NO: 449604 - DNA, 15 bp, Homo sapiens
tggtcccctgttgcc

SEQ ID NO: 449605 - DNA, 15 bp, Homo sapiens
gtggtcccctgttgc

SEQ ID NO: 449606 - DNA, 15 bp, Homo sapiens
ggtggtcccctgttg

SEQ ID NO: 449607 - DNA, 15 bp, Homo sapiens
tggtggtcccctgtt

SEQ ID NO: 449608 - DNA, 15 bp, Homo sapiens
gtggtggtcccctgt

SEQ ID NO: 449609 - DNA, 15 bp, Homo sapiens
agtggtggtcccctg

SEQ ID NO: 449610 - DNA, 15 bp, Homo sapiens
cagtggtggtcccct

SEQ ID NO: 449611 - DNA, 15 bp, Homo sapiens
tcagtggtggtcccc

SEQ ID NO: 449612 - DNA, 15 bp, Homo sapiens
gtcagtggtggtccc

SEQ ID NO: 449613 - DNA, 15 bp, Homo sapiens
tgtcagtggtggtcc

SEQ ID NO: 449614 - DNA, 15 bp, Homo sapiens
ctgtcagtggtggtc

SEQ ID NO: 449615 - DNA, 15 bp, Homo sapiens
cctgtcagtggtggt

SEQ ID NO: 449616 - DNA, 15 bp, Homo sapiens
acctgtcagtggtgg

SEQ ID NO: 449617 - DNA, 15 bp, Homo sapiens
gacctgtcagtggtg

SEQ ID NO: 449618 - DNA, 15 bp, Homo sapiens
agacctgtcagtggt

SEQ ID NO: 449619 - DNA, 15 bp, Homo sapiens
gagacctgtcagtgg

SEQ ID NO: 449620 - DNA, 15 bp, Homo sapiens
agagacctgtcagtg

SEQ ID NO: 449621 - DNA, 15 bp, Homo sapiens
gagagacctgtcagt

SEQ ID NO: 449622 - DNA, 15 bp, Homo sapiens
ggagagacctgtcag

SEQ ID NO: 449623 - DNA, 15 bp, Homo sapiens
gggagagacctgtca

SEQ ID NO: 449624 - DNA, 15 bp, Homo sapiens
cgggagagacctgtc

SEQ ID NO: 449625 - DNA, 15 bp, Homo sapiens
gcgggagagacctgt

SEQ ID NO: 449626 - DNA, 15 bp, Homo sapiens
ggcgggagagacctg

SEQ ID NO: 449627 - DNA, 15 bp, Homo sapiens
gggcgggagagacct

SEQ ID NO: 449628 - DNA, 15 bp, Homo sapiens
agggcgggagagacc

SEQ ID NO: 449629 - DNA, 15 bp, Homo sapiens
cagggcgggagagac

SEQ ID NO: 449630 - DNA, 15 bp, Homo sapiens
acagggcgggagaga

SEQ ID NO: 449631 - DNA, 15 bp, Homo sapiens
gacagggcgggagag

SEQ ID NO: 449632 - DNA, 15 bp, Homo sapiens
ggacagggcgggaga

SEQ ID NO: 449633 - DNA, 15 bp, Homo sapiens
gggacagggcgggag

SEQ ID NO: 449634 - DNA, 15 bp, Homo sapiens
ggggacagggcggga

SEQ ID NO: 449635 - DNA, 15 bp, Homo sapiens
cggggacagggcggg

SEQ ID NO: 449636 - DNA, 15 bp, Homo sapiens
gcggggacagggcgg

SEQ ID NO: 449637 - DNA, 15 bp, Homo sapiens
tgcggggacagggcg

SEQ ID NO: 449638 - DNA, 15 bp, Homo sapiens
ctgcggggacagggc

SEQ ID NO: 449639 - DNA, 15 bp, Homo sapiens
gctgcggggacaggg

SEQ ID NO: 449640 - DNA, 15 bp, Homo sapiens
cgctgcggggacagg

SEQ ID NO: 449641 - DNA, 15 bp, Homo sapiens
gcgctgcggggacag

SEQ ID NO: 449642 - DNA, 15 bp, Homo sapiens
agcgctgcggggaca

SEQ ID NO: 449643 - DNA, 15 bp, Homo sapiens
cagcgctgcggggac

SEQ ID NO: 449644 - DNA, 15 bp, Homo sapiens
ccagcgctgcgggga

SEQ ID NO: 449645 - DNA, 15 bp, Homo sapiens
gccagcgctgcgggg

SEQ ID NO: 449646 - DNA, 15 bp, Homo sapiens
cgccagcgctgcggg

SEQ ID NO: 449647 - DNA, 15 bp, Homo sapiens
ccgccagcgctgcgg

SEQ ID NO: 449648 - DNA, 15 bp, Homo sapiens
cccgccagcgctgcg

SEQ ID NO: 449649 - DNA, 15 bp, Homo sapiens
tcccgccagcgctgc

SEQ ID NO: 449650 - DNA, 15 bp, Homo sapiens
ctcccgccagcgctg

SEQ ID NO: 449651 - DNA, 15 bp, Homo sapiens
cctcccgccagcgct

SEQ ID NO: 449652 - DNA, 15 bp, Homo sapiens
tcctcccgccagcgc

SEQ ID NO: 449653 - DNA, 15 bp, Homo sapiens
ctcctcccgccagcg

SEQ ID NO: 449654 - DNA, 15 bp, Homo sapiens
gctcctcccgccagc

SEQ ID NO: 449655 - DNA, 15 bp, Homo sapiens
agctcctcccgccag

SEQ ID NO: 449656 - DNA, 15 bp, Homo sapiens
gagctcctcccgcca

SEQ ID NO: 449657 - DNA, 15 bp, Homo sapiens
agagctcctcccgcc

SEQ ID NO: 449658 - DNA, 15 bp, Homo sapiens
gagagctcctcccgc

SEQ ID NO: 449659 - DNA, 15 bp, Homo sapiens
ggagagctcctcccg

SEQ ID NO: 449660 - DNA, 15 bp, Homo sapiens
gggagagctcctccc

SEQ ID NO: 449661 - DNA, 15 bp, Homo sapiens
tgggagagctcctcc

SEQ ID NO: 449662 - DNA, 15 bp, Homo sapiens
gtgggagagctcctc

SEQ ID NO: 449663 - DNA, 15 bp, Homo sapiens
tgtgggagagctcct

SEQ ID NO: 449664 - DNA, 15 bp, Homo sapiens
atgtgggagagctcc

SEQ ID NO: 449665 - DNA, 15 bp, Homo sapiens
catgtgggagagctc

SEQ ID NO: 449666 - DNA, 15 bp, Homo sapiens
tcatgtgggagagct

SEQ ID NO: 449667 - DNA, 15 bp, Homo sapiens
ttcatgtgggagagc

SEQ ID NO: 449668 - DNA, 15 bp, Homo sapiens
cttcatgtgggagag

SEQ ID NO: 449669 - DNA, 15 bp, Homo sapiens
gcttcatgtgggaga

SEQ ID NO: 449670 - DNA, 15 bp, Homo sapiens
cgcttcatgtgggag

SEQ ID NO: 449671 - DNA, 15 bp, Homo sapiens
tcgcttcatgtggga

SEQ ID NO: 449672 - DNA, 15 bp, Homo sapiens
gtcgcttcatgtggg

SEQ ID NO: 449673 - DNA, 15 bp, Homo sapiens
agtcgcttcatgtgg

SEQ ID NO: 449674 - DNA, 15 bp, Homo sapiens
aagtcgcttcatgtg

SEQ ID NO: 449675 - DNA, 15 bp, Homo sapiens
gaagtcgcttcatgt

SEQ ID NO: 449676 - DNA, 15 bp, Homo sapiens
ggaagtcgcttcatg

SEQ ID NO: 449677 - DNA, 15 bp, Homo sapiens
gggaagtcgcttcat

SEQ ID NO: 449678 - DNA, 15 bp, Homo sapiens
ggggaagtcgcttca

SEQ ID NO: 449679 - DNA, 15 bp, Homo sapiens
gggggaagtcgcttc

SEQ ID NO: 449680 - DNA, 15 bp, Homo sapiens
tgggggaagtcgctt

SEQ ID NO: 449681 - DNA, 15 bp, Homo sapiens
ctgggggaagtcgct

SEQ ID NO: 449682 - DNA, 15 bp, Homo sapiens
actgggggaagtcgc

SEQ ID NO: 449683 - DNA, 15 bp, Homo sapiens
cactgggggaagtcg

SEQ ID NO: 449684 - DNA, 15 bp, Homo sapiens
gcactgggggaagtc

SEQ ID NO: 449685 - DNA, 15 bp, Homo sapiens
agcactgggggaagt

SEQ ID NO: 449686 - DNA, 15 bp, Homo sapiens
aagcactgggggaag

SEQ ID NO: 449687 - DNA, 15 bp, Homo sapiens
gaagcactgggggaa

SEQ ID NO: 449688 - DNA, 15 bp, Homo sapiens
ggaagcactggggga

SEQ ID NO: 449689 - DNA, 15 bp, Homo sapiens
gggaagcactggggg

SEQ ID NO: 449690 - DNA, 15 bp, Homo sapiens
cgggaagcactgggg

SEQ ID NO: 449691 - DNA, 15 bp, Homo sapiens
ccgggaagcactggg

SEQ ID NO: 449692 - DNA, 15 bp, Homo sapiens
gccgggaagcactgg

SEQ ID NO: 449693 - DNA, 15 bp, Homo sapiens
ggccgggaagcactg

SEQ ID NO: 449694 - DNA, 15 bp, Homo sapiens
cggccgggaagcact

SEQ ID NO: 449695 - DNA, 15 bp, Homo sapiens
gcggccgggaagcac

SEQ ID NO: 449696 - DNA, 15 bp, Homo sapiens
ggcggccgggaagca

SEQ ID NO: 449697 - DNA, 15 bp, Homo sapiens
gggcggccgggaagc

SEQ ID NO: 449698 - DNA, 15 bp, Homo sapiens
ggggcggccgggaag

SEQ ID NO: 449699 - DNA, 15 bp, Homo sapiens
aggggcggccgggaa

SEQ ID NO: 449700 - DNA, 15 bp, Homo sapiens
taggggcggccggga

SEQ ID NO: 449701 - DNA, 15 bp, Homo sapiens
ataggggcggccggg

SEQ ID NO: 449702 - DNA, 15 bp, Homo sapiens
cataggggcggccgg

SEQ ID NO: 449703 - DNA, 15 bp, Homo sapiens
tcataggggcggccg

SEQ ID NO: 449704 - DNA, 15 bp, Homo sapiens
gtcataggggcggcc

SEQ ID NO: 449705 - DNA, 15 bp, Homo sapiens
ggtcataggggcggc

SEQ ID NO: 449706 - DNA, 15 bp, Homo sapiens
aggtcataggggcgg

SEQ ID NO: 449707 - DNA, 15 bp, Homo sapiens
caggtcataggggcg

SEQ ID NO: 449708 - DNA, 15 bp, Homo sapiens
ccaggtcataggggc

SEQ ID NO: 449709 - DNA, 15 bp, Homo sapiens
gccaggtcatagggg

SEQ ID NO: 449710 - DNA, 15 bp, Homo sapiens
cgccaggtcataggg

SEQ ID NO: 449711 - DNA, 15 bp, Homo sapiens
ccgccaggtcatagg

SEQ ID NO: 449712 - DNA, 15 bp, Homo sapiens
gccgccaggtcatag

SEQ ID NO: 449713 - DNA, 15 bp, Homo sapiens
cgccgccaggtcata

SEQ ID NO: 449714 - DNA, 15 bp, Homo sapiens
ccgccgccaggtcat

SEQ ID NO: 449715 - DNA, 15 bp, Homo sapiens
gccgccgccaggtca

SEQ ID NO: 449716 - DNA, 15 bp, Homo sapiens
cgccgccgccaggtc

SEQ ID NO: 449717 - DNA, 15 bp, Homo sapiens
tcgccgccgccaggt

SEQ ID NO: 449718 - DNA, 15 bp, Homo sapiens
gtcgccgccgccagg

SEQ ID NO: 449719 - DNA, 15 bp, Homo sapiens
ggtcgccgccgccag

SEQ ID NO: 449720 - DNA, 15 bp, Homo sapiens
cggtcgccgccgcca

SEQ ID NO: 449721 - DNA, 15 bp, Homo sapiens
acggtcgccgccgcc

SEQ ID NO: 449722 - DNA, 15 bp, Homo sapiens
cacggtcgccgccgc

SEQ ID NO: 449723 - DNA, 15 bp, Homo sapiens
ccacggtcgccgccg

SEQ ID NO: 449724 - DNA, 15 bp, Homo sapiens
gccacggtcgccgcc

SEQ ID NO: 449725 - DNA, 15 bp, Homo sapiens
ggccacggtcgccgc

SEQ ID NO: 449726 - DNA, 15 bp, Homo sapiens
tggccacggtcgccg

SEQ ID NO: 449727 - DNA, 15 bp, Homo sapiens
gtggccacggtcgcc

SEQ ID NO: 449728 - DNA, 15 bp, Homo sapiens
tgtggccacggtcgc

SEQ ID NO: 449729 - DNA, 15 bp, Homo sapiens
ctgtggccacggtcg

SEQ ID NO: 449730 - DNA, 15 bp, Homo sapiens
tctgtggccacggtc

SEQ ID NO: 449731 - DNA, 15 bp, Homo sapiens
gtctgtggccacggt

SEQ ID NO: 449732 - DNA, 15 bp, Homo sapiens
ggtctgtggccacgg

SEQ ID NO: 449733 - DNA, 15 bp, Homo sapiens
aggtctgtggccacg

SEQ ID NO: 449734 - DNA, 15 bp, Homo sapiens
caggtctgtggccac

SEQ ID NO: 449735 - DNA, 15 bp, Homo sapiens
ccaggtctgtggcca

SEQ ID NO: 449736 - DNA, 15 bp, Homo sapiens
tccaggtctgtggcc

SEQ ID NO: 449737 - DNA, 15 bp, Homo sapiens
ctccaggtctgtggc

SEQ ID NO: 449738 - DNA, 15 bp, Homo sapiens
tctccaggtctgtgg

SEQ ID NO: 449739 - DNA, 15 bp, Homo sapiens
ctctccaggtctgtg

SEQ ID NO: 449740 - DNA, 15 bp, Homo sapiens
gctctccaggtctgt

SEQ ID NO: 449741 - DNA, 15 bp, Homo sapiens
cgctctccaggtctg

SEQ ID NO: 449742 - DNA, 15 bp, Homo sapiens
ccgctctccaggtct

SEQ ID NO: 449743 - DNA, 15 bp, Homo sapiens
gccgctctccaggtc

SEQ ID NO: 449744 - DNA, 15 bp, Homo sapiens
cgccgctctccaggt

SEQ ID NO: 449745 - DNA, 15 bp, Homo sapiens
ccgccgctctccagg

SEQ ID NO: 449746 - DNA, 15 bp, Homo sapiens
tccgccgctctccag

SEQ ID NO: 449747 - DNA, 15 bp, Homo sapiens
ctccgccgctctcca

SEQ ID NO: 449748 - DNA, 15 bp, Homo sapiens
gctccgccgctctcc

SEQ ID NO: 449749 - DNA, 15 bp, Homo sapiens
ggctccgccgctctc

SEQ ID NO: 449750 - DNA, 15 bp, Homo sapiens
cggctccgccgctct

SEQ ID NO: 449751 - DNA, 15 bp, Homo sapiens
ccggctccgccgctc

SEQ ID NO: 449752 - DNA, 15 bp, Homo sapiens
accggctccgccgct

SEQ ID NO: 449753 - DNA, 15 bp, Homo sapiens
caccggctccgccgc

SEQ ID NO: 449754 - DNA, 15 bp, Homo sapiens
gcaccggctccgccg

SEQ ID NO: 449755 - DNA, 15 bp, Homo sapiens
cgcaccggctccgcc

SEQ ID NO: 449756 - DNA, 15 bp, Homo sapiens
ccgcaccggctccgc

SEQ ID NO: 449757 - DNA, 15 bp, Homo sapiens
gccgcaccggctccg

SEQ ID NO: 449758 - DNA, 15 bp, Homo sapiens
agccgcaccggctcc

SEQ ID NO: 449759 - DNA, 15 bp, Homo sapiens
aagccgcaccggctc

SEQ ID NO: 449760 - DNA, 15 bp, Homo sapiens
caagccgcaccggct

SEQ ID NO: 449761 - DNA, 15 bp, Homo sapiens
gcaagccgcaccggc

SEQ ID NO: 449762 - DNA, 15 bp, Homo sapiens
cgcaagccgcaccgg

SEQ ID NO: 449763 - DNA, 15 bp, Homo sapiens
ccgcaagccgcaccg

SEQ ID NO: 449764 - DNA, 15 bp, Homo sapiens
gccgcaagccgcacc

SEQ ID NO: 449765 - DNA, 15 bp, Homo sapiens
cgccgcaagccgcac

SEQ ID NO: 449766 - DNA, 15 bp, Homo sapiens
ccgccgcaagccgca

SEQ ID NO: 449767 - DNA, 15 bp, Homo sapiens
accgccgcaagccgc

SEQ ID NO: 449768 - DNA, 15 bp, Homo sapiens
taccgccgcaagccg

SEQ ID NO: 449769 - DNA, 15 bp, Homo sapiens
ctaccgccgcaagcc

SEQ ID NO: 449770 - DNA, 15 bp, Homo sapiens
gctaccgccgcaagc

SEQ ID NO: 449771 - DNA, 15 bp, Homo sapiens
tgctaccgccgcaag

SEQ ID NO: 449772 - DNA, 15 bp, Homo sapiens
ttgctaccgccgcaa

SEQ ID NO: 449773 - DNA, 15 bp, Homo sapiens
gttgctaccgccgca

SEQ ID NO: 449774 - DNA, 15 bp, Homo sapiens
ggttgctaccgccgc

SEQ ID NO: 449775 - DNA, 15 bp, Homo sapiens
aggttgctaccgccg

SEQ ID NO: 449776 - DNA, 15 bp, Homo sapiens
caggttgctaccgcc

SEQ ID NO: 449777 - DNA, 15 bp, Homo sapiens
ccaggttgctaccgc

SEQ ID NO: 449778 - DNA, 15 bp, Homo sapiens
gccaggttgctaccg

SEQ ID NO: 449779 - DNA, 15 bp, Homo sapiens
cgccaggttgctacc

SEQ ID NO: 449780 - DNA, 15 bp, Homo sapiens
gcgccaggttgctac

SEQ ID NO: 449781 - DNA, 15 bp, Homo sapiens
ggcgccaggttgcta

SEQ ID NO: 449782 - DNA, 15 bp, Homo sapiens
gggcgccaggttgct

SEQ ID NO: 449783 - DNA, 15 bp, Homo sapiens
ggggcgccaggttgc

SEQ ID NO: 449784 - DNA, 15 bp, Homo sapiens
aggggcgccaggttg

SEQ ID NO: 449785 - DNA, 15 bp, Homo sapiens
taggggcgccaggtt

SEQ ID NO: 449786 - DNA, 15 bp, Homo sapiens
gtaggggcgccaggt

SEQ ID NO: 449787 - DNA, 15 bp, Homo sapiens
ggtaggggcgccagg

SEQ ID NO: 449788 - DNA, 15 bp, Homo sapiens
aggtaggggcgccag

SEQ ID NO: 449789 - DNA, 15 bp, Homo sapiens
gaggtaggggcgcca

SEQ ID NO: 449790 - DNA, 15 bp, Homo sapiens
cgaggtaggggcgcc

SEQ ID NO: 449791 - DNA, 15 bp, Homo sapiens
ccgaggtaggggcgc

SEQ ID NO: 449792 - DNA, 15 bp, Homo sapiens
tccgaggtaggggcg

SEQ ID NO: 449793 - DNA, 15 bp, Homo sapiens
ctccgaggtaggggc

SEQ ID NO: 449794 - DNA, 15 bp, Homo sapiens
tctccgaggtagggg

SEQ ID NO: 449795 - DNA, 15 bp, Homo sapiens
ctctccgaggtaggg

SEQ ID NO: 449796 - DNA, 15 bp, Homo sapiens
tctctccgaggtagg

SEQ ID NO: 449797 - DNA, 15 bp, Homo sapiens
ctctctccgaggtag

SEQ ID NO: 449798 - DNA, 15 bp, Homo sapiens
tctctctccgaggta

SEQ ID NO: 449799 - DNA, 15 bp, Homo sapiens
gtctctctccgaggt

SEQ ID NO: 449800 - DNA, 15 bp, Homo sapiens
ggtctctctccgagg

SEQ ID NO: 449801 - DNA, 15 bp, Homo sapiens
cggtctctctccgag

SEQ ID NO: 449802 - DNA, 15 bp, Homo sapiens
tcggtctctctccga

SEQ ID NO: 449803 - DNA, 15 bp, Homo sapiens
ctcggtctctctccg

SEQ ID NO: 449804 - DNA, 15 bp, Homo sapiens
cctcggtctctctcc

SEQ ID NO: 449805 - DNA, 15 bp, Homo sapiens
tcctcggtctctctc

SEQ ID NO: 449806 - DNA, 15 bp, Homo sapiens
ctcctcggtctctct

SEQ ID NO: 449807 - DNA, 15 bp, Homo sapiens
actcctcggtctctc

SEQ ID NO: 449808 - DNA, 15 bp, Homo sapiens
aactcctcggtctct

SEQ ID NO: 449809 - DNA, 15 bp, Homo sapiens
gaactcctcggtctc

SEQ ID NO: 449810 - DNA, 15 bp, Homo sapiens
tgaactcctcggtct

SEQ ID NO: 449811 - DNA, 15 bp, Homo sapiens
ttgaactcctcggtc

SEQ ID NO: 449812 - DNA, 15 bp, Homo sapiens
gttgaactcctcggt

SEQ ID NO: 449813 - DNA, 15 bp, Homo sapiens
cgttgaactcctcgg

SEQ ID NO: 449814 - DNA, 15 bp, Homo sapiens
tcgttgaactcctcg

SEQ ID NO: 449815 - DNA, 15 bp, Homo sapiens
atcgttgaactcctc

SEQ ID NO: 449816 - DNA, 15 bp, Homo sapiens
gatcgttgaactcct

SEQ ID NO: 449817 - DNA, 15 bp, Homo sapiens
agatcgttgaactcc

SEQ ID NO: 449818 - DNA, 15 bp, Homo sapiens
gagatcgttgaactc

SEQ ID NO: 449819 - DNA, 15 bp, Homo sapiens
ggagatcgttgaact

SEQ ID NO: 449820 - DNA, 15 bp, Homo sapiens
aggagatcgttgaac

SEQ ID NO: 449821 - DNA, 15 bp, Homo sapiens
caggagatcgttgaa

SEQ ID NO: 449822 - DNA, 15 bp, Homo sapiens
ccaggagatcgttga

SEQ ID NO: 449823 - DNA, 15 bp, Homo sapiens
tccaggagatcgttg

SEQ ID NO: 449824 - DNA, 15 bp, Homo sapiens
gtccaggagatcgtt

SEQ ID NO: 449825 - DNA, 15 bp, Homo sapiens
ggtccaggagatcgt

SEQ ID NO: 449826 - DNA, 15 bp, Homo sapiens
aggtccaggagatcg

SEQ ID NO: 449827 - DNA, 15 bp, Homo sapiens
caggtccaggagatc

SEQ ID NO: 449828 - DNA, 15 bp, Homo sapiens
ccaggtccaggagat

SEQ ID NO: 449829 - DNA, 15 bp, Homo sapiens
tccaggtccaggaga

SEQ ID NO: 449830 - DNA, 15 bp, Homo sapiens
gtccaggtccaggag

SEQ ID NO: 449831 - DNA, 15 bp, Homo sapiens
agtccaggtccagga

SEQ ID NO: 449832 - DNA, 15 bp, Homo sapiens
aagtccaggtccagg

SEQ ID NO: 449833 - DNA, 15 bp, Homo sapiens
aaagtccaggtccag

SEQ ID NO: 449834 - DNA, 15 bp, Homo sapiens
taaagtccaggtcca

SEQ ID NO: 449835 - DNA, 15 bp, Homo sapiens
ataaagtccaggtcc

SEQ ID NO: 449836 - DNA, 15 bp, Homo sapiens
aataaagtccaggtc

SEQ ID NO: 449837 - DNA, 15 bp, Homo sapiens
gaataaagtccaggt

SEQ ID NO: 449838 - DNA, 15 bp, Homo sapiens
agaataaagtccagg

SEQ ID NO: 449839 - DNA, 15 bp, Homo sapiens
gagaataaagtccag

SEQ ID NO: 449840 - DNA, 15 bp, Homo sapiens
agagaataaagtcca

SEQ ID NO: 449841 - DNA, 15 bp, Homo sapiens
gagagaataaagtcc

SEQ ID NO: 449842 - DNA, 15 bp, Homo sapiens
ggagagaataaagtc

SEQ ID NO: 449843 - DNA, 15 bp, Homo sapiens
tggagagaataaagt

SEQ ID NO: 449844 - DNA, 15 bp, Homo sapiens
ttggagagaataaag

SEQ ID NO: 449845 - DNA, 15 bp, Homo sapiens
attggagagaataaa

SEQ ID NO: 449846 - DNA, 15 bp, Homo sapiens
aattggagagaataa

SEQ ID NO: 449847 - DNA, 15 bp, Homo sapiens
gaattggagagaata

SEQ ID NO: 449848 - DNA, 15 bp, Homo sapiens
cgaattggagagaat

SEQ ID NO: 449849 - DNA, 15 bp, Homo sapiens
gcgaattggagagaa

SEQ ID NO: 449850 - DNA, 15 bp, Homo sapiens
agcgaattggagaga

SEQ ID NO: 449851 - DNA, 15 bp, Homo sapiens
cagcgaattggagag

SEQ ID NO: 449852 - DNA, 15 bp, Homo sapiens
tcagcgaattggaga

SEQ ID NO: 449853 - DNA, 15 bp, Homo sapiens
gtcagcgaattggag

SEQ ID NO: 449854 - DNA, 15 bp, Homo sapiens
ggtcagcgaattgga

SEQ ID NO: 449855 - DNA, 15 bp, Homo sapiens
gggtcagcgaattgg

SEQ ID NO: 449856 - DNA, 15 bp, Homo sapiens
tgggtcagcgaattg

SEQ ID NO: 449857 - DNA, 15 bp, Homo sapiens
atgggtcagcgaatt

SEQ ID NO: 449858 - DNA, 15 bp, Homo sapiens
gatgggtcagcgaat

SEQ ID NO: 449859 - DNA, 15 bp, Homo sapiens
ggatgggtcagcgaa

SEQ ID NO: 449860 - DNA, 15 bp, Homo sapiens
aggatgggtcagcga

SEQ ID NO: 449861 - DNA, 15 bp, Homo sapiens
gaggatgggtcagcg

SEQ ID NO: 449862 - DNA, 15 bp, Homo sapiens
ggaggatgggtcagc

SEQ ID NO: 449863 - DNA, 15 bp, Homo sapiens
cggaggatgggtcag

SEQ ID NO: 449864 - DNA, 15 bp, Homo sapiens
ccggaggatgggtca

SEQ ID NO: 449865 - DNA, 15 bp, Homo sapiens
tccggaggatgggtc

SEQ ID NO: 449866 - DNA, 15 bp, Homo sapiens
ctccggaggatgggt

SEQ ID NO: 449867 - DNA, 15 bp, Homo sapiens
cgtcggagggggagc

SEQ ID NO: 449868 - DNA, 15 bp, Homo sapiens
ccgtcggagggggag

SEQ ID NO: 449869 - DNA, 15 bp, Homo sapiens
gccgtcggaggggga

SEQ ID NO: 449870 - DNA, 15 bp, Homo sapiens
agccgtcggaggggg

SEQ ID NO: 449871 - DNA, 15 bp, Homo sapiens
gagccgtcggagggg

SEQ ID NO: 449872 - DNA, 15 bp, Homo sapiens
ggagccgtcggaggg

SEQ ID NO: 449873 - DNA, 15 bp, Homo sapiens
gggagccgtcggagg

SEQ ID NO: 449874 - DNA, 15 bp, Homo sapiens
agggagccgtcggag

SEQ ID NO: 449875 - DNA, 15 bp, Homo sapiens
aagggagccgtcgga

SEQ ID NO: 449876 - DNA, 15 bp, Homo sapiens
gaagggagccgtcgg

SEQ ID NO: 449877 - DNA, 15 bp, Homo sapiens
tgaagggagccgtcg

SEQ ID NO: 449878 - DNA, 15 bp, Homo sapiens
ttgaagggagccgtc

SEQ ID NO: 449879 - DNA, 15 bp, Homo sapiens
gttgaagggagccgt

SEQ ID NO: 449880 - DNA, 15 bp, Homo sapiens
ggttgaagggagccg

SEQ ID NO: 449881 - DNA, 15 bp, Homo sapiens
aggttgaagggagcc

SEQ ID NO: 449882 - DNA, 15 bp, Homo sapiens
caggttgaagggagc

SEQ ID NO: 449883 - DNA, 15 bp, Homo sapiens
ccaggttgaagggag

SEQ ID NO: 449884 - DNA, 15 bp, Homo sapiens
gccaggttgaaggga

SEQ ID NO: 449885 - DNA, 15 bp, Homo sapiens
cgccaggttgaaggg

SEQ ID NO: 449886 - DNA, 15 bp, Homo sapiens
ccgccaggttgaagg

SEQ ID NO: 449887 - DNA, 15 bp, Homo sapiens
tccgccaggttgaag

SEQ ID NO: 449888 - DNA, 15 bp, Homo sapiens
gtccgccaggttgaa

SEQ ID NO: 449889 - DNA, 15 bp, Homo sapiens
tgtccgccaggttga

SEQ ID NO: 449890 - DNA, 15 bp, Homo sapiens
atgtccgccaggttg

SEQ ID NO: 449891 - DNA, 15 bp, Homo sapiens
gatgtccgccaggtt

SEQ ID NO: 449892 - DNA, 15 bp, Homo sapiens
tgatgtccgccaggt

SEQ ID NO: 449893 - DNA, 15 bp, Homo sapiens
ttgatgtccgccagg

SEQ ID NO: 449894 - DNA, 15 bp, Homo sapiens
gttgatgtccgccag

SEQ ID NO: 449895 - DNA, 15 bp, Homo sapiens
cgttgatgtccgcca

SEQ ID NO: 449896 - DNA, 15 bp, Homo sapiens
tcgttgatgtccgcc

SEQ ID NO: 449897 - DNA, 15 bp, Homo sapiens
gtcgttgatgtccgc

SEQ ID NO: 449898 - DNA, 15 bp, Homo sapiens
cgtcgttgatgtccg

SEQ ID NO: 449899 - DNA, 15 bp, Homo sapiens
acgtcgttgatgtcc

SEQ ID NO: 449900 - DNA, 15 bp, Homo sapiens
cacgtcgttgatgtc

SEQ ID NO: 449901 - DNA, 15 bp, Homo sapiens
tcacgtcgttgatgt

SEQ ID NO: 449902 - DNA, 15 bp, Homo sapiens
ctcacgtcgttgatg

SEQ ID NO: 449903 - DNA, 15 bp, Homo sapiens
gctcacgtcgttgat

SEQ ID NO: 449904 - DNA, 15 bp, Homo sapiens
ggctcacgtcgttga

SEQ ID NO: 449905 - DNA, 15 bp, Homo sapiens
gggctcacgtcgttg

SEQ ID NO: 449906 - DNA, 15 bp, Homo sapiens
ggggctcacgtcgtt

SEQ ID NO: 449907 - DNA, 15 bp, Homo sapiens
aggggctcacgtcgt

SEQ ID NO: 449908 - DNA, 15 bp, Homo sapiens
gaggggctcacgtcg

SEQ ID NO: 449909 - DNA, 15 bp, Homo sapiens
cgaggggctcacgtc

SEQ ID NO: 449910 - DNA, 15 bp, Homo sapiens
ccgaggggctcacgt

SEQ ID NO: 449911 - DNA, 15 bp, Homo sapiens
cccgaggggctcacg

SEQ ID NO: 449912 - DNA, 15 bp, Homo sapiens
gcccgaggggctcac

SEQ ID NO: 449913 - DNA, 15 bp, Homo sapiens
cgcccgaggggctca

SEQ ID NO: 449914 - DNA, 15 bp, Homo sapiens
ccgcccgaggggctc

SEQ ID NO: 449915 - DNA, 15 bp, Homo sapiens
gccgcccgaggggct

SEQ ID NO: 449916 - DNA, 15 bp, Homo sapiens
agccgcccgaggggc

SEQ ID NO: 449917 - DNA, 15 bp, Homo sapiens
aagccgcccgagggg

SEQ ID NO: 449918 - DNA, 15 bp, Homo sapiens
gaagccgcccgaggg

SEQ ID NO: 449919 - DNA, 15 bp, Homo sapiens
cgaagccgcccgagg

SEQ ID NO: 449920 - DNA, 15 bp, Homo sapiens
acgaagccgcccgag

SEQ ID NO: 449921 - DNA, 15 bp, Homo sapiens
cacgaagccgcccga

SEQ ID NO: 449922 - DNA, 15 bp, Homo sapiens
ccacgaagccgcccg

SEQ ID NO: 449923 - DNA, 15 bp, Homo sapiens
gccacgaagccgccc

SEQ ID NO: 449924 - DNA, 15 bp, Homo sapiens
ggccacgaagccgcc

SEQ ID NO: 449925 - DNA, 15 bp, Homo sapiens
cggccacgaagccgc

SEQ ID NO: 449926 - DNA, 15 bp, Homo sapiens
tcggccacgaagccg

SEQ ID NO: 449927 - DNA, 15 bp, Homo sapiens
ctcggccacgaagcc

SEQ ID NO: 449928 - DNA, 15 bp, Homo sapiens
gctcggccacgaagc

SEQ ID NO: 449929 - DNA, 15 bp, Homo sapiens
agctcggccacgaag

SEQ ID NO: 449930 - DNA, 15 bp, Homo sapiens
gagctcggccacgaa

SEQ ID NO: 449931 - DNA, 15 bp, Homo sapiens
ggagctcggccacga

SEQ ID NO: 449932 - DNA, 15 bp, Homo sapiens
aggagctcggccacg

SEQ ID NO: 449933 - DNA, 15 bp, Homo sapiens
caggagctcggccac

SEQ ID NO: 449934 - DNA, 15 bp, Homo sapiens
gcaggagctcggcca

SEQ ID NO: 449935 - DNA, 15 bp, Homo sapiens
cgcaggagctcggcc

SEQ ID NO: 449936 - DNA, 15 bp, Homo sapiens
ccgcaggagctcggc

SEQ ID NO: 449937 - DNA, 15 bp, Homo sapiens
gccgcaggagctcgg

SEQ ID NO: 449938 - DNA, 15 bp, Homo sapiens
ggccgcaggagctcg

SEQ ID NO: 449939 - DNA, 15 bp, Homo sapiens
tggccgcaggagctc

SEQ ID NO: 449940 - DNA, 15 bp, Homo sapiens
ctggccgcaggagct

SEQ ID NO: 449941 - DNA, 15 bp, Homo sapiens
tctggccgcaggagc

SEQ ID NO: 449942 - DNA, 15 bp, Homo sapiens
ttctggccgcaggag

SEQ ID NO: 449943 - DNA, 15 bp, Homo sapiens
attctggccgcagga

SEQ ID NO: 449944 - DNA, 15 bp, Homo sapiens
aattctggccgcagg

SEQ ID NO: 449945 - DNA, 15 bp, Homo sapiens
caattctggccgcag

SEQ ID NO: 449946 - DNA, 15 bp, Homo sapiens
ccaattctggccgca

SEQ ID NO: 449947 - DNA, 15 bp, Homo sapiens
tccaattctggccgc

SEQ ID NO: 449948 - DNA, 15 bp, Homo sapiens
gtccaattctggccg

SEQ ID NO: 449949 - DNA, 15 bp, Homo sapiens
ggtccaattctggcc

SEQ ID NO: 449950 - DNA, 15 bp, Homo sapiens
gggtccaattctggc

SEQ ID NO: 449951 - DNA, 15 bp, Homo sapiens
cgggtccaattctgg

SEQ ID NO: 449952 - DNA, 15 bp, Homo sapiens
ccgggtccaattctg

SEQ ID NO: 449953 - DNA, 15 bp, Homo sapiens
accgggtccaattct

SEQ ID NO: 449954 - DNA, 15 bp, Homo sapiens
caccgggtccaattc

SEQ ID NO: 449955 - DNA, 15 bp, Homo sapiens
acaccgggtccaatt

SEQ ID NO: 449956 - DNA, 15 bp, Homo sapiens
tacaccgggtccaat

SEQ ID NO: 449957 - DNA, 15 bp, Homo sapiens
gtacaccgggtccaa

SEQ ID NO: 449958 - DNA, 15 bp, Homo sapiens
tgtacaccgggtcca

SEQ ID NO: 449959 - DNA, 15 bp, Homo sapiens
atgtacaccgggtcc

SEQ ID NO: 449960 - DNA, 15 bp, Homo sapiens
aatgtacaccgggtc

SEQ ID NO: 449961 - DNA, 15 bp, Homo sapiens
gaatgtacaccgggt

SEQ ID NO: 449962 - DNA, 15 bp, Homo sapiens
ggaatgtacaccggg

SEQ ID NO: 449963 - DNA, 15 bp, Homo sapiens
cggaatgtacaccgg

SEQ ID NO: 449964 - DNA, 15 bp, Homo sapiens
gcggaatgtacaccg

SEQ ID NO: 449965 - DNA, 15 bp, Homo sapiens
ggcggaatgtacacc

SEQ ID NO: 449966 - DNA, 15 bp, Homo sapiens
cggcggaatgtacac

SEQ ID NO: 449967 - DNA, 15 bp, Homo sapiens
gcggcggaatgtaca

SEQ ID NO: 449968 - DNA, 15 bp, Homo sapiens
tgcggcggaatgtac

SEQ ID NO: 449969 - DNA, 15 bp, Homo sapiens
ctgcggcggaatgta

SEQ ID NO: 449970 - DNA, 15 bp, Homo sapiens
gctgcggcggaatgt

SEQ ID NO: 449971 - DNA, 15 bp, Homo sapiens
tgctgcggcggaatg

SEQ ID NO: 449972 - DNA, 15 bp, Homo sapiens
ctgctgcggcggaat

SEQ ID NO: 449973 - DNA, 15 bp, Homo sapiens
gctgctgcggcggaa

SEQ ID NO: 449974 - DNA, 15 bp, Homo sapiens
ggctgctgcggcgga

SEQ ID NO: 449975 - DNA, 15 bp, Homo sapiens
cggctgctgcggcgg

SEQ ID NO: 449976 - DNA, 15 bp, Homo sapiens
gcggctgctgcggcg

SEQ ID NO: 449977 - DNA, 15 bp, Homo sapiens
tgcggctgctgcggc

SEQ ID NO: 449978 - DNA, 15 bp, Homo sapiens
ctgcggctgctgcgg

SEQ ID NO: 449979 - DNA, 15 bp, Homo sapiens
gctgcggctgctgcg

SEQ ID NO: 449980 - DNA, 15 bp, Homo sapiens
ggctgcggctgctgc

SEQ ID NO: 449981 - DNA, 15 bp, Homo sapiens
cggctgcggctgctg

SEQ ID NO: 449982 - DNA, 15 bp, Homo sapiens
gcggctgcggctgct

SEQ ID NO: 449983 - DNA, 15 bp, Homo sapiens
ggcggctgcggctgc

SEQ ID NO: 449984 - DNA, 15 bp, Homo sapiens
tggcggctgcggctg

SEQ ID NO: 449985 - DNA, 15 bp, Homo sapiens
ctggcggctgcggct

SEQ ID NO: 449986 - DNA, 15 bp, Homo sapiens
cctggcggctgcggc

SEQ ID NO: 449987 - DNA, 15 bp, Homo sapiens
acctggcggctgcgg

SEQ ID NO: 449988 - DNA, 15 bp, Homo sapiens
cacctggcggctgcg

SEQ ID NO: 449989 - DNA, 15 bp, Homo sapiens
ccacctggcggctgc

SEQ ID NO: 449990 - DNA, 15 bp, Homo sapiens
gccacctggcggctg

SEQ ID NO: 449991 - DNA, 15 bp, Homo sapiens
cgccacctggcggct

SEQ ID NO: 449992 - DNA, 15 bp, Homo sapiens
ccgccacctggcggc

SEQ ID NO: 449993 - DNA, 15 bp, Homo sapiens
cccgccacctggcgg

SEQ ID NO: 449994 - DNA, 15 bp, Homo sapiens
gcccgccacctggcg

SEQ ID NO: 449995 - DNA, 15 bp, Homo sapiens
agcccgccacctggc

SEQ ID NO: 449996 - DNA, 15 bp, Homo sapiens
cagcccgccacctgg

SEQ ID NO: 449997 - DNA, 15 bp, Homo sapiens
tcagcccgccacctg

SEQ ID NO: 449998 - DNA, 15 bp, Homo sapiens
atcagcccgccacct

SEQ ID NO: 449999 - DNA, 15 bp, Homo sapiens
catcagcccgccacc

SEQ ID NO: 450000 - DNA, 15 bp, Homo sapiens
ccatcagcccgccac

SEQ ID NO: 450001 - DNA, 15 bp, Homo sapiens
cccatcagcccgcca

SEQ ID NO: 450002 - DNA, 15 bp, Homo sapiens
gcccatcagcccgcc

SEQ ID NO: 450003 - DNA, 15 bp, Homo sapiens
tgcccatcagcccgc

SEQ ID NO: 450004 - DNA, 15 bp, Homo sapiens
ttgcccatcagcccg

SEQ ID NO: 450005 - DNA, 15 bp, Homo sapiens
cttgcccatcagccc

SEQ ID NO: 450006 - DNA, 15 bp, Homo sapiens
acttgcccatcagcc

SEQ ID NO: 450007 - DNA, 15 bp, Homo sapiens
aacttgcccatcagc

SEQ ID NO: 450008 - DNA, 15 bp, Homo sapiens
gaacttgcccatcag

SEQ ID NO: 450009 - DNA, 15 bp, Homo sapiens
cgaacttgcccatca

SEQ ID NO: 450010 - DNA, 15 bp, Homo sapiens
acgaacttgcccatc

SEQ ID NO: 450011 - DNA, 15 bp, Homo sapiens
cacgaacttgcccat

SEQ ID NO: 450012 - DNA, 15 bp, Homo sapiens
gcacgaacttgccca

SEQ ID NO: 450013 - DNA, 15 bp, Homo sapiens
agcacgaacttgccc

SEQ ID NO: 450014 - DNA, 15 bp, Homo sapiens
cagcacgaacttgcc

SEQ ID NO: 450015 - DNA, 15 bp, Homo sapiens
tcagcacgaacttgc

SEQ ID NO: 450016 - DNA, 15 bp, Homo sapiens
ttcagcacgaacttg

SEQ ID NO: 450017 - DNA, 15 bp, Homo sapiens
cttcagcacgaactt

SEQ ID NO: 450018 - DNA, 15 bp, Homo sapiens
ccttcagcacgaact

SEQ ID NO: 450019 - DNA, 15 bp, Homo sapiens
gccttcagcacgaac

SEQ ID NO: 450020 - DNA, 15 bp, Homo sapiens
cgccttcagcacgaa

SEQ ID NO: 450021 - DNA, 15 bp, Homo sapiens
acgccttcagcacga

SEQ ID NO: 450022 - DNA, 15 bp, Homo sapiens
gacgccttcagcacg

SEQ ID NO: 450023 - DNA, 15 bp, Homo sapiens
cgacgccttcagcac

SEQ ID NO: 450024 - DNA, 15 bp, Homo sapiens
gcgacgccttcagca

SEQ ID NO: 450025 - DNA, 15 bp, Homo sapiens
agcgacgccttcagc

SEQ ID NO: 450026 - DNA, 15 bp, Homo sapiens
cagcgacgccttcag

SEQ ID NO: 450027 - DNA, 15 bp, Homo sapiens
tcagcgacgccttca

SEQ ID NO: 450028 - DNA, 15 bp, Homo sapiens
ctcagcgacgccttc

SEQ ID NO: 450029 - DNA, 15 bp, Homo sapiens
gctcagcgacgcctt

SEQ ID NO: 450030 - DNA, 15 bp, Homo sapiens
cgctcagcgacgcct

SEQ ID NO: 450031 - DNA, 15 bp, Homo sapiens
gcgctcagcgacgcc

SEQ ID NO: 450032 - DNA, 15 bp, Homo sapiens
ggcgctcagcgacgc

SEQ ID NO: 450033 - DNA, 15 bp, Homo sapiens
gggcgctcagcgacg

SEQ ID NO: 450034 - DNA, 15 bp, Homo sapiens
ggggcgctcagcgac

SEQ ID NO: 450035 - DNA, 15 bp, Homo sapiens
aggggcgctcagcga

SEQ ID NO: 450036 - DNA, 15 bp, Homo sapiens
caggggcgctcagcg

SEQ ID NO: 450037 - DNA, 15 bp, Homo sapiens
ccaggggcgctcagc

SEQ ID NO: 450038 - DNA, 15 bp, Homo sapiens
gccaggggcgctcag

SEQ ID NO: 450039 - DNA, 15 bp, Homo sapiens
tgccaggggcgctca

SEQ ID NO: 450040 - DNA, 15 bp, Homo sapiens
ctgccaggggcgctc

SEQ ID NO: 450041 - DNA, 15 bp, Homo sapiens
gctgccaggggcgct

SEQ ID NO: 450042 - DNA, 15 bp, Homo sapiens
cgctgccaggggcgc

SEQ ID NO: 450043 - DNA, 15 bp, Homo sapiens
tcgctgccaggggcg

SEQ ID NO: 450044 - DNA, 15 bp, Homo sapiens
ctcgctgccaggggc

SEQ ID NO: 450045 - DNA, 15 bp, Homo sapiens
actcgctgccagggg

SEQ ID NO: 450046 - DNA, 15 bp, Homo sapiens
tactcgctgccaggg

SEQ ID NO: 450047 - DNA, 15 bp, Homo sapiens
cgggtggctgccgtc

SEQ ID NO: 450048 - DNA, 15 bp, Homo sapiens
ccgggtggctgccgt

SEQ ID NO: 450049 - DNA, 15 bp, Homo sapiens
accgggtggctgccg

SEQ ID NO: 450050 - DNA, 15 bp, Homo sapiens
caccgggtggctgcc

SEQ ID NO: 450051 - DNA, 15 bp, Homo sapiens
ccaccgggtggctgc

SEQ ID NO: 450052 - DNA, 15 bp, Homo sapiens
accaccgggtggctg

SEQ ID NO: 450053 - DNA, 15 bp, Homo sapiens
caccaccgggtggct

SEQ ID NO: 450054 - DNA, 15 bp, Homo sapiens
ccaccaccgggtggc

SEQ ID NO: 450055 - DNA, 15 bp, Homo sapiens
accaccaccgggtgg

SEQ ID NO: 450056 - DNA, 15 bp, Homo sapiens
caccaccaccgggtg

SEQ ID NO: 450057 - DNA, 15 bp, Homo sapiens
ccaccaccaccgggt

SEQ ID NO: 450058 - DNA, 15 bp, Homo sapiens
gccaccaccaccggg

SEQ ID NO: 450059 - DNA, 15 bp, Homo sapiens
cgccaccaccaccgg

SEQ ID NO: 450060 - DNA, 15 bp, Homo sapiens
gcgccaccaccaccg

SEQ ID NO: 450061 - DNA, 15 bp, Homo sapiens
ggcgccaccaccacc

SEQ ID NO: 450062 - DNA, 15 bp, Homo sapiens
gggcgccaccaccac

SEQ ID NO: 450063 - DNA, 15 bp, Homo sapiens
agggcgccaccacca

SEQ ID NO: 450064 - DNA, 15 bp, Homo sapiens
tagggcgccaccacc

SEQ ID NO: 450065 - DNA, 15 bp, Homo sapiens
gtagggcgccaccac

SEQ ID NO: 450066 - DNA, 15 bp, Homo sapiens
tgtagggcgccacca

SEQ ID NO: 450067 - DNA, 15 bp, Homo sapiens
ttgtagggcgccacc

SEQ ID NO: 450068 - DNA, 15 bp, Homo sapiens
gttgtagggcgccac

SEQ ID NO: 450069 - DNA, 15 bp, Homo sapiens
cgttgtagggcgcca

SEQ ID NO: 450070 - DNA, 15 bp, Homo sapiens
ccgttgtagggcgcc

SEQ ID NO: 450071 - DNA, 15 bp, Homo sapiens
gccgttgtagggcgc

SEQ ID NO: 450072 - DNA, 15 bp, Homo sapiens
cgccgttgtagggcg

SEQ ID NO: 450073 - DNA, 15 bp, Homo sapiens
ccgccgttgtagggc

SEQ ID NO: 450074 - DNA, 15 bp, Homo sapiens
cccgccgttgtaggg

SEQ ID NO: 450075 - DNA, 15 bp, Homo sapiens
gcccgccgttgtagg

SEQ ID NO: 450076 - DNA, 15 bp, Homo sapiens
ggcccgccgttgtag

SEQ ID NO: 450077 - DNA, 15 bp, Homo sapiens
cggcccgccgttgta

SEQ ID NO: 450078 - DNA, 15 bp, Homo sapiens
gcggcccgccgttgt

SEQ ID NO: 450079 - DNA, 15 bp, Homo sapiens
ggcggcccgccgttg

SEQ ID NO: 450080 - DNA, 15 bp, Homo sapiens
cggcggcccgccgtt

SEQ ID NO: 450081 - DNA, 15 bp, Homo sapiens
gcggcggcccgccgt

SEQ ID NO: 450082 - DNA, 15 bp, Homo sapiens
cgcggcggcccgccg

SEQ ID NO: 450083 - DNA, 15 bp, Homo sapiens
gcgcggcggcccgcc

SEQ ID NO: 450084 - DNA, 15 bp, Homo sapiens
tgcgcggcggcccgc

SEQ ID NO: 450085 - DNA, 15 bp, Homo sapiens
gtgcgcggcggcccg

SEQ ID NO: 450086 - DNA, 15 bp, Homo sapiens
cgtgcgcggcggccc

SEQ ID NO: 450087 - DNA, 15 bp, Homo sapiens
acgtgcgcggcggcc

SEQ ID NO: 450088 - DNA, 15 bp, Homo sapiens
cacgtgcgcggcggc

SEQ ID NO: 450089 - DNA, 15 bp, Homo sapiens
gcacgtgcgcggcgg

SEQ ID NO: 450090 - DNA, 15 bp, Homo sapiens
ggcacgtgcgcggcg

SEQ ID NO: 450091 - DNA, 15 bp, Homo sapiens
gggcacgtgcgcggc

SEQ ID NO: 450092 - DNA, 15 bp, Homo sapiens
ggggcacgtgcgcgg

SEQ ID NO: 450093 - DNA, 15 bp, Homo sapiens
tggggcacgtgcgcg

SEQ ID NO: 450094 - DNA, 15 bp, Homo sapiens
ttggggcacgtgcgc

SEQ ID NO: 450095 - DNA, 15 bp, Homo sapiens
cttggggcacgtgcg

SEQ ID NO: 450096 - DNA, 15 bp, Homo sapiens
tcttggggcacgtgc

SEQ ID NO: 450097 - DNA, 15 bp, Homo sapiens
atcttggggcacgtg

SEQ ID NO: 450098 - DNA, 15 bp, Homo sapiens
gatcttggggcacgt

SEQ ID NO: 450099 - DNA, 15 bp, Homo sapiens
tgatcttggggcacg

SEQ ID NO: 450100 - DNA, 15 bp, Homo sapiens
ttgatcttggggcac

SEQ ID NO: 450101 - DNA, 15 bp, Homo sapiens
cttgatcttggggca

SEQ ID NO: 450102 - DNA, 15 bp, Homo sapiens
gcttgatcttggggc

SEQ ID NO: 450103 - DNA, 15 bp, Homo sapiens
tgcttgatcttgggg

SEQ ID NO: 450104 - DNA, 15 bp, Homo sapiens
ctgcttgatcttggg

SEQ ID NO: 450105 - DNA, 15 bp, Homo sapiens
cctgcttgatcttgg

SEQ ID NO: 450106 - DNA, 15 bp, Homo sapiens
tcctgcttgatcttg

SEQ ID NO: 450107 - DNA, 15 bp, Homo sapiens
ctcctgcttgatctt

SEQ ID NO: 450108 - DNA, 15 bp, Homo sapiens
cctcctgcttgatct

SEQ ID NO: 450109 - DNA, 15 bp, Homo sapiens
gcctcctgcttgatc

SEQ ID NO: 450110 - DNA, 15 bp, Homo sapiens
cgcctcctgcttgat

SEQ ID NO: 450111 - DNA, 15 bp, Homo sapiens
ccgcctcctgcttga

SEQ ID NO: 450112 - DNA, 15 bp, Homo sapiens
accgcctcctgcttg

SEQ ID NO: 450113 - DNA, 15 bp, Homo sapiens
gaccgcctcctgctt

SEQ ID NO: 450114 - DNA, 15 bp, Homo sapiens
agaccgcctcctgct

SEQ ID NO: 450115 - DNA, 15 bp, Homo sapiens
gagaccgcctcctgc

SEQ ID NO: 450116 - DNA, 15 bp, Homo sapiens
agagaccgcctcctg

SEQ ID NO: 450117 - DNA, 15 bp, Homo sapiens
aagagaccgcctcct

SEQ ID NO: 450118 - DNA, 15 bp, Homo sapiens
gaagagaccgcctcc

SEQ ID NO: 450119 - DNA, 15 bp, Homo sapiens
cgaagagaccgcctc

SEQ ID NO: 450120 - DNA, 15 bp, Homo sapiens
acgaagagaccgcct

SEQ ID NO: 450121 - DNA, 15 bp, Homo sapiens
cacgaagagaccgcc

SEQ ID NO: 450122 - DNA, 15 bp, Homo sapiens
gcacgaagagaccgc

SEQ ID NO: 450123 - DNA, 15 bp, Homo sapiens
tgcacgaagagaccg

SEQ ID NO: 450124 - DNA, 15 bp, Homo sapiens
gtgcacgaagagacc

SEQ ID NO: 450125 - DNA, 15 bp, Homo sapiens
ggtgcacgaagagac

SEQ ID NO: 450126 - DNA, 15 bp, Homo sapiens
gggtgcacgaagaga

SEQ ID NO: 450127 - DNA, 15 bp, Homo sapiens
tgggtgcacgaagag

SEQ ID NO: 450128 - DNA, 15 bp, Homo sapiens
gtgggtgcacgaaga

SEQ ID NO: 450129 - DNA, 15 bp, Homo sapiens
agtgggtgcacgaag

SEQ ID NO: 450130 - DNA, 15 bp, Homo sapiens
aagtgggtgcacgaa

SEQ ID NO: 450131 - DNA, 15 bp, Homo sapiens
caagtgggtgcacga

SEQ ID NO: 450132 - DNA, 15 bp, Homo sapiens
ccaagtgggtgcacg

SEQ ID NO: 450133 - DNA, 15 bp, Homo sapiens
cccaagtgggtgcac

SEQ ID NO: 450134 - DNA, 15 bp, Homo sapiens
gcccaagtgggtgca

SEQ ID NO: 450135 - DNA, 15 bp, Homo sapiens
cgcccaagtgggtgc

SEQ ID NO: 450136 - DNA, 15 bp, Homo sapiens
gcgcccaagtgggtg

SEQ ID NO: 450137 - DNA, 15 bp, Homo sapiens
agcgcccaagtgggt

SEQ ID NO: 450138 - DNA, 15 bp, Homo sapiens
cagcgcccaagtggg

SEQ ID NO: 450139 - DNA, 15 bp, Homo sapiens
ccagcgcccaagtgg

SEQ ID NO: 450140 - DNA, 15 bp, Homo sapiens
tccagcgcccaagtg

SEQ ID NO: 450141 - DNA, 15 bp, Homo sapiens
gtccagcgcccaagt

SEQ ID NO: 450142 - DNA, 15 bp, Homo sapiens
ggtccagcgcccaag

SEQ ID NO: 450143 - DNA, 15 bp, Homo sapiens
gggtccagcgcccaa

SEQ ID NO: 450144 - DNA, 15 bp, Homo sapiens
ggggtccagcgccca

SEQ ID NO: 450145 - DNA, 15 bp, Homo sapiens
gggggtccagcgccc

SEQ ID NO: 450146 - DNA, 15 bp, Homo sapiens
agggggtccagcgcc

SEQ ID NO: 450147 - DNA, 15 bp, Homo sapiens
gagggggtccagcgc

SEQ ID NO: 450148 - DNA, 15 bp, Homo sapiens
agagggggtccagcg

SEQ ID NO: 450149 - DNA, 15 bp, Homo sapiens
gagagggggtccagc

SEQ ID NO: 450150 - DNA, 15 bp, Homo sapiens
tgagagggggtccag

SEQ ID NO: 450151 - DNA, 15 bp, Homo sapiens
ctgagagggggtcca

SEQ ID NO: 450152 - DNA, 15 bp, Homo sapiens
gctgagagggggtcc

SEQ ID NO: 450153 - DNA, 15 bp, Homo sapiens
tgctgagagggggtc

SEQ ID NO: 450154 - DNA, 15 bp, Homo sapiens
ttgctgagagggggt

SEQ ID NO: 450155 - DNA, 15 bp, Homo sapiens
attgctgagaggggg

SEQ ID NO: 450156 - DNA, 15 bp, Homo sapiens
cattgctgagagggg

SEQ ID NO: 450157 - DNA, 15 bp, Homo sapiens
ccattgctgagaggg

SEQ ID NO: 450158 - DNA, 15 bp, Homo sapiens
gccattgctgagagg

SEQ ID NO: 450159 - DNA, 15 bp, Homo sapiens
ggccattgctgagag

SEQ ID NO: 450160 - DNA, 15 bp, Homo sapiens
tggccattgctgaga

SEQ ID NO: 450161 - DNA, 15 bp, Homo sapiens
gtggccattgctgag

SEQ ID NO: 450162 - DNA, 15 bp, Homo sapiens
ggtggccattgctga

SEQ ID NO: 450163 - DNA, 15 bp, Homo sapiens
cggtggccattgctg

SEQ ID NO: 450164 - DNA, 15 bp, Homo sapiens
ccggtggccattgct

SEQ ID NO: 450165 - DNA, 15 bp, Homo sapiens
gccggtggccattgc

SEQ ID NO: 450166 - DNA, 15 bp, Homo sapiens
ggccggtggccattg

SEQ ID NO: 450167 - DNA, 15 bp, Homo sapiens
cggccggtggccatt

SEQ ID NO: 450168 - DNA, 15 bp, Homo sapiens
ccggccggtggccat

SEQ ID NO: 450169 - DNA, 15 bp, Homo sapiens
gccggccggtggcca

SEQ ID NO: 450170 - DNA, 15 bp, Homo sapiens
agccggccggtggcc

SEQ ID NO: 450171 - DNA, 15 bp, Homo sapiens
cagccggccggtggc

SEQ ID NO: 450172 - DNA, 15 bp, Homo sapiens
gcagccggccggtgg

SEQ ID NO: 450173 - DNA, 15 bp, Homo sapiens
tgcagccggccggtg

SEQ ID NO: 450174 - DNA, 15 bp, Homo sapiens
gtgcagccggccggt

SEQ ID NO: 450175 - DNA, 15 bp, Homo sapiens
tgtgcagccggccgg

SEQ ID NO: 450176 - DNA, 15 bp, Homo sapiens
gtgtgcagccggccg

SEQ ID NO: 450177 - DNA, 15 bp, Homo sapiens
cgtgtgcagccggcc

SEQ ID NO: 450178 - DNA, 15 bp, Homo sapiens
tcgtgtgcagccggc

SEQ ID NO: 450179 - DNA, 15 bp, Homo sapiens
gtcgtgtgcagccgg

SEQ ID NO: 450180 - DNA, 15 bp, Homo sapiens
agtcgtgtgcagccg

SEQ ID NO: 450181 - DNA, 15 bp, Homo sapiens
aagtcgtgtgcagcc

SEQ ID NO: 450182 - DNA, 15 bp, Homo sapiens
gaagtcgtgtgcagc

SEQ ID NO: 450183 - DNA, 15 bp, Homo sapiens
ggaagtcgtgtgcag

SEQ ID NO: 450184 - DNA, 15 bp, Homo sapiens
gggaagtcgtgtgca

SEQ ID NO: 450185 - DNA, 15 bp, Homo sapiens
ggggaagtcgtgtgc

SEQ ID NO: 450186 - DNA, 15 bp, Homo sapiens
gggggaagtcgtgtg

SEQ ID NO: 450187 - DNA, 15 bp, Homo sapiens
agggggaagtcgtgt

SEQ ID NO: 450188 - DNA, 15 bp, Homo sapiens
cagggggaagtcgtg

SEQ ID NO: 450189 - DNA, 15 bp, Homo sapiens
ccagggggaagtcgt

SEQ ID NO: 450190 - DNA, 15 bp, Homo sapiens
cccagggggaagtcg

SEQ ID NO: 450191 - DNA, 15 bp, Homo sapiens
ccccagggggaagtc

SEQ ID NO: 450192 - DNA, 15 bp, Homo sapiens
gccccagggggaagt

SEQ ID NO: 450193 - DNA, 15 bp, Homo sapiens
cgccccagggggaag

SEQ ID NO: 450194 - DNA, 15 bp, Homo sapiens
ccgccccagggggaa

SEQ ID NO: 450195 - DNA, 15 bp, Homo sapiens
gccgccccaggggga

SEQ ID NO: 450196 - DNA, 15 bp, Homo sapiens
tgccgccccaggggg

SEQ ID NO: 450197 - DNA, 15 bp, Homo sapiens
ctgccgccccagggg

SEQ ID NO: 450198 - DNA, 15 bp, Homo sapiens
gctgccgccccaggg

SEQ ID NO: 450199 - DNA, 15 bp, Homo sapiens
agctgccgccccagg

SEQ ID NO: 450200 - DNA, 15 bp, Homo sapiens
gagctgccgccccag

SEQ ID NO: 450201 - DNA, 15 bp, Homo sapiens
ggagctgccgcccca

SEQ ID NO: 450202 - DNA, 15 bp, Homo sapiens
gggagctgccgcccc

SEQ ID NO: 450203 - DNA, 15 bp, Homo sapiens
ggggagctgccgccc

SEQ ID NO: 450204 - DNA, 15 bp, Homo sapiens
tggggagctgccgcc

SEQ ID NO: 450205 - DNA, 15 bp, Homo sapiens
ctggggagctgccgc

SEQ ID NO: 450206 - DNA, 15 bp, Homo sapiens
gctggggagctgccg

SEQ ID NO: 450207 - DNA, 15 bp, Homo sapiens
tgctggggagctgcc

SEQ ID NO: 450208 - DNA, 15 bp, Homo sapiens
ctgctggggagctgc

SEQ ID NO: 450209 - DNA, 15 bp, Homo sapiens
cctgctggggagctg

SEQ ID NO: 450210 - DNA, 15 bp, Homo sapiens
tcctgctggggagct

SEQ ID NO: 450211 - DNA, 15 bp, Homo sapiens
gtcctgctggggagc

SEQ ID NO: 450212 - DNA, 15 bp, Homo sapiens
agtcctgctggggag

SEQ ID NO: 450213 - DNA, 15 bp, Homo sapiens
tagtcctgctgggga

SEQ ID NO: 450214 - DNA, 15 bp, Homo sapiens
gtagtcctgctgggg

SEQ ID NO: 450215 - DNA, 15 bp, Homo sapiens
ggtagtcctgctggg

SEQ ID NO: 450216 - DNA, 15 bp, Homo sapiens
gggtagtcctgctgg

SEQ ID NO: 450217 - DNA, 15 bp, Homo sapiens
ggggtagtcctgctg

SEQ ID NO: 450218 - DNA, 15 bp, Homo sapiens
cggggtagtcctgct

SEQ ID NO: 450219 - DNA, 15 bp, Homo sapiens
tcggggtagtcctgc

SEQ ID NO: 450220 - DNA, 15 bp, Homo sapiens
gtcggggtagtcctg

SEQ ID NO: 450221 - DNA, 15 bp, Homo sapiens
ggtcggggtagtcct

SEQ ID NO: 450222 - DNA, 15 bp, Homo sapiens
gggtcggggtagtcc

SEQ ID NO: 450223 - DNA, 15 bp, Homo sapiens
agggtcggggtagtc

SEQ ID NO: 450224 - DNA, 15 bp, Homo sapiens
cagggtcggggtagt

SEQ ID NO: 450225 - DNA, 15 bp, Homo sapiens
ccagggtcggggtag

SEQ ID NO: 450226 - DNA, 15 bp, Homo sapiens
cccagggtcggggta

SEQ ID NO: 450227 - DNA, 15 bp, Homo sapiens
acccagggtcggggt

SEQ ID NO: 450228 - DNA, 15 bp, Homo sapiens
gacccagggtcgggg

SEQ ID NO: 450229 - DNA, 15 bp, Homo sapiens
agacccagggtcggg

SEQ ID NO: 450230 - DNA, 15 bp, Homo sapiens
aagacccagggtcgg

SEQ ID NO: 450231 - DNA, 15 bp, Homo sapiens
caagacccagggtcg

SEQ ID NO: 450232 - DNA, 15 bp, Homo sapiens
tcaagacccagggtc

SEQ ID NO: 450233 - DNA, 15 bp, Homo sapiens
ctcaagacccagggt

SEQ ID NO: 450234 - DNA, 15 bp, Homo sapiens
cctcaagacccaggg

SEQ ID NO: 450235 - DNA, 15 bp, Homo sapiens
tcctcaagacccagg

SEQ ID NO: 450236 - DNA, 15 bp, Homo sapiens
ttcctcaagacccag

SEQ ID NO: 450237 - DNA, 15 bp, Homo sapiens
cttcctcaagaccca

SEQ ID NO: 450238 - DNA, 15 bp, Homo sapiens
acttcctcaagaccc

SEQ ID NO: 450239 - DNA, 15 bp, Homo sapiens
cacttcctcaagacc

SEQ ID NO: 450240 - DNA, 15 bp, Homo sapiens
gcacttcctcaagac

SEQ ID NO: 450241 - DNA, 15 bp, Homo sapiens
agcacttcctcaaga

SEQ ID NO: 450242 - DNA, 15 bp, Homo sapiens
cagcacttcctcaag

SEQ ID NO: 450243 - DNA, 15 bp, Homo sapiens
tcagcacttcctcaa

SEQ ID NO: 450244 - DNA, 15 bp, Homo sapiens
ctcagcacttcctca

SEQ ID NO: 450245 - DNA, 15 bp, Homo sapiens
gctcagcacttcctc

SEQ ID NO: 450246 - DNA, 15 bp, Homo sapiens
tgctcagcacttcct

SEQ ID NO: 450247 - DNA, 15 bp, Homo sapiens
ctgctcagcacttcc

SEQ ID NO: 450248 - DNA, 15 bp, Homo sapiens
gctgctcagcacttc

SEQ ID NO: 450249 - DNA, 15 bp, Homo sapiens
tgctgctcagcactt

SEQ ID NO: 450250 - DNA, 15 bp, Homo sapiens
ctgctgctcagcact

SEQ ID NO: 450251 - DNA, 15 bp, Homo sapiens
cctgctgctcagcac

SEQ ID NO: 450252 - DNA, 15 bp, Homo sapiens
ccctgctgctcagca

SEQ ID NO: 450253 - DNA, 15 bp, Homo sapiens
tccctgctgctcagc

SEQ ID NO: 450254 - DNA, 15 bp, Homo sapiens
gtccctgctgctcag

SEQ ID NO: 450255 - DNA, 15 bp, Homo sapiens
agtccctgctgctca

SEQ ID NO: 450256 - DNA, 15 bp, Homo sapiens
cagtccctgctgctc

SEQ ID NO: 450257 - DNA, 15 bp, Homo sapiens
acagtccctgctgct

SEQ ID NO: 450258 - DNA, 15 bp, Homo sapiens
gacagtccctgctgc

SEQ ID NO: 450259 - DNA, 15 bp, Homo sapiens
tgacagtccctgctg

SEQ ID NO: 450260 - DNA, 15 bp, Homo sapiens
gtgacagtccctgct

SEQ ID NO: 450261 - DNA, 15 bp, Homo sapiens
ggtgacagtccctgc

SEQ ID NO: 450262 - DNA, 15 bp, Homo sapiens
gggtgacagtccctg

SEQ ID NO: 450263 - DNA, 15 bp, Homo sapiens
agggtgacagtccct

SEQ ID NO: 450264 - DNA, 15 bp, Homo sapiens
cagggtgacagtccc

SEQ ID NO: 450265 - DNA, 15 bp, Homo sapiens
gcagggtgacagtcc

SEQ ID NO: 450266 - DNA, 15 bp, Homo sapiens
ggcagggtgacagtc

SEQ ID NO: 450267 - DNA, 15 bp, Homo sapiens
gggcagggtgacagt

SEQ ID NO: 450268 - DNA, 15 bp, Homo sapiens
agggcagggtgacag

SEQ ID NO: 450269 - DNA, 15 bp, Homo sapiens
cagggcagggtgaca

SEQ ID NO: 450270 - DNA, 15 bp, Homo sapiens
gcagggcagggtgac

SEQ ID NO: 450271 - DNA, 15 bp, Homo sapiens
ggcagggcagggtga

SEQ ID NO: 450272 - DNA, 15 bp, Homo sapiens
cggcagggcagggtg

SEQ ID NO: 450273 - DNA, 15 bp, Homo sapiens
gcggcagggcagggt

SEQ ID NO: 450274 - DNA, 15 bp, Homo sapiens
agcggcagggcaggg

SEQ ID NO: 450275 - DNA, 15 bp, Homo sapiens
aagcggcagggcagg

SEQ ID NO: 450276 - DNA, 15 bp, Homo sapiens
gaagcggcagggcag

SEQ ID NO: 450277 - DNA, 15 bp, Homo sapiens
ggaagcggcagggca

SEQ ID NO: 450278 - DNA, 15 bp, Homo sapiens
aggaagcggcagggc

SEQ ID NO: 450279 - DNA, 15 bp, Homo sapiens
gaggaagcggcaggg

SEQ ID NO: 450280 - DNA, 15 bp, Homo sapiens
ggaggaagcggcagg

SEQ ID NO: 450281 - DNA, 15 bp, Homo sapiens
gggaggaagcggcag

SEQ ID NO: 450282 - DNA, 15 bp, Homo sapiens
cgggaggaagcggca

SEQ ID NO: 450283 - DNA, 15 bp, Homo sapiens
ccgggaggaagcggc

SEQ ID NO: 450284 - DNA, 15 bp, Homo sapiens
gccgggaggaagcgg

SEQ ID NO: 450285 - DNA, 15 bp, Homo sapiens
agccgggaggaagcg

SEQ ID NO: 450286 - DNA, 15 bp, Homo sapiens
aagccgggaggaagc

SEQ ID NO: 450287 - DNA, 15 bp, Homo sapiens
gaagccgggaggaag

SEQ ID NO: 450288 - DNA, 15 bp, Homo sapiens
ggaagccgggaggaa

SEQ ID NO: 450289 - DNA, 15 bp, Homo sapiens
tggaagccgggagga

SEQ ID NO: 450290 - DNA, 15 bp, Homo sapiens
atggaagccgggagg

SEQ ID NO: 450291 - DNA, 15 bp, Homo sapiens
gatggaagccgggag

SEQ ID NO: 450292 - DNA, 15 bp, Homo sapiens
ggatggaagccggga

SEQ ID NO: 450293 - DNA, 15 bp, Homo sapiens
gggatggaagccggg

SEQ ID NO: 450294 - DNA, 15 bp, Homo sapiens
ggggatggaagccgg

SEQ ID NO: 450295 - DNA, 15 bp, Homo sapiens
tggggatggaagccg

SEQ ID NO: 450296 - DNA, 15 bp, Homo sapiens
gtggggatggaagcc

SEQ ID NO: 450297 - DNA, 15 bp, Homo sapiens
ggtggggatggaagc

SEQ ID NO: 450298 - DNA, 15 bp, Homo sapiens
gggtggggatggaag

SEQ ID NO: 450299 - DNA, 15 bp, Homo sapiens
cgggtggggatggaa

SEQ ID NO: 450300 - DNA, 15 bp, Homo sapiens
ccgggtggggatgga

SEQ ID NO: 450301 - DNA, 15 bp, Homo sapiens
cccgggtggggatgg

SEQ ID NO: 450302 - DNA, 15 bp, Homo sapiens
ccccgggtggggatg

SEQ ID NO: 450303 - DNA, 15 bp, Homo sapiens
gccccgggtggggat

SEQ ID NO: 450304 - DNA, 15 bp, Homo sapiens
ggccccgggtgggga

SEQ ID NO: 450305 - DNA, 15 bp, Homo sapiens
gggccccgggtgggg

SEQ ID NO: 450306 - DNA, 15 bp, Homo sapiens
tgggccccgggtggg

SEQ ID NO: 450307 - DNA, 15 bp, Homo sapiens
ttgggccccgggtgg

SEQ ID NO: 450308 - DNA, 15 bp, Homo sapiens
attgggccccgggtg

SEQ ID NO: 450309 - DNA, 15 bp, Homo sapiens
aattgggccccgggt

SEQ ID NO: 450310 - DNA, 15 bp, Homo sapiens
taattgggccccggg

SEQ ID NO: 450311 - DNA, 15 bp, Homo sapiens
ccagcacacacaggg

SEQ ID NO: 450312 - DNA, 15 bp, Homo sapiens
gccagcacacacagg

SEQ ID NO: 450313 - DNA, 15 bp, Homo sapiens
ggccagcacacacag

SEQ ID NO: 450314 - DNA, 15 bp, Homo sapiens
gggccagcacacaca

SEQ ID NO: 450315 - DNA, 15 bp, Homo sapiens
ggggccagcacacac

SEQ ID NO: 450316 - DNA, 15 bp, Homo sapiens
tggggccagcacaca

SEQ ID NO: 450317 - DNA, 15 bp, Homo sapiens
gtggggccagcacac

SEQ ID NO: 450318 - DNA, 15 bp, Homo sapiens
agtggggccagcaca

SEQ ID NO: 450319 - DNA, 15 bp, Homo sapiens
aagtggggccagcac

SEQ ID NO: 450320 - DNA, 15 bp, Homo sapiens
gaagtggggccagca

SEQ ID NO: 450321 - DNA, 15 bp, Homo sapiens
cgaagtggggccagc

SEQ ID NO: 450322 - DNA, 15 bp, Homo sapiens
ccgaagtggggccag

SEQ ID NO: 450323 - DNA, 15 bp, Homo sapiens
cccgaagtggggcca

SEQ ID NO: 450324 - DNA, 15 bp, Homo sapiens
tcccgaagtggggcc

SEQ ID NO: 450325 - DNA, 15 bp, Homo sapiens
gtcccgaagtggggc

SEQ ID NO: 450326 - DNA, 15 bp, Homo sapiens
tgtcccgaagtgggg

SEQ ID NO: 450327 - DNA, 15 bp, Homo sapiens
gtgtcccgaagtggg

SEQ ID NO: 450328 - DNA, 15 bp, Homo sapiens
tgtgtcccgaagtgg

SEQ ID NO: 450329 - DNA, 15 bp, Homo sapiens
gtgtgtcccgaagtg

SEQ ID NO: 450330 - DNA, 15 bp, Homo sapiens
cgtgtgtcccgaagt

SEQ ID NO: 450331 - DNA, 15 bp, Homo sapiens
ccgtgtgtcccgaag

SEQ ID NO: 450332 - DNA, 15 bp, Homo sapiens
cccgtgtgtcccgaa

SEQ ID NO: 450333 - DNA, 15 bp, Homo sapiens
tcccgtgtgtcccga

SEQ ID NO: 450334 - DNA, 15 bp, Homo sapiens
atcccgtgtgtcccg

SEQ ID NO: 450335 - DNA, 15 bp, Homo sapiens
catcccgtgtgtccc

SEQ ID NO: 450336 - DNA, 15 bp, Homo sapiens
tcatcccgtgtgtcc

SEQ ID NO: 450337 - DNA, 15 bp, Homo sapiens
atcatcccgtgtgtc

SEQ ID NO: 450338 - DNA, 15 bp, Homo sapiens
catcatcccgtgtgt

SEQ ID NO: 450339 - DNA, 15 bp, Homo sapiens
gcatcatcccgtgtg

SEQ ID NO: 450340 - DNA, 15 bp, Homo sapiens
agcatcatcccgtgt

SEQ ID NO: 450341 - DNA, 15 bp, Homo sapiens
gagcatcatcccgtg

SEQ ID NO: 450342 - DNA, 15 bp, Homo sapiens
tgagcatcatcccgt

SEQ ID NO: 450343 - DNA, 15 bp, Homo sapiens
gtgagcatcatcccg

SEQ ID NO: 450344 - DNA, 15 bp, Homo sapiens
ggtgagcatcatccc

SEQ ID NO: 450345 - DNA, 15 bp, Homo sapiens
gggtgagcatcatcc

SEQ ID NO: 450346 - DNA, 15 bp, Homo sapiens
ggggtgagcatcatc

SEQ ID NO: 450347 - DNA, 15 bp, Homo sapiens
tggggtgagcatcat

SEQ ID NO: 450348 - DNA, 15 bp, Homo sapiens
gtggggtgagcatca

SEQ ID NO: 450349 - DNA, 15 bp, Homo sapiens
ggtggggtgagcatc

SEQ ID NO: 450350 - DNA, 15 bp, Homo sapiens
aggtggggtgagcat

SEQ ID NO: 450351 - DNA, 15 bp, Homo sapiens
aaggtggggtgagca

SEQ ID NO: 450352 - DNA, 15 bp, Homo sapiens
gaaggtggggtgagc

SEQ ID NO: 450353 - DNA, 15 bp, Homo sapiens
agaaggtggggtgag

SEQ ID NO: 450354 - DNA, 15 bp, Homo sapiens
aagaaggtggggtga

SEQ ID NO: 450355 - DNA, 15 bp, Homo sapiens
gaagaaggtggggtg

SEQ ID NO: 450356 - DNA, 15 bp, Homo sapiens
tgaagaaggtggggt

SEQ ID NO: 450357 - DNA, 15 bp, Homo sapiens
gtgaagaaggtgggg

SEQ ID NO: 450358 - DNA, 15 bp, Homo sapiens
ggtgaagaaggtggg

SEQ ID NO: 450359 - DNA, 15 bp, Homo sapiens
gggtgaagaaggtgg

SEQ ID NO: 450360 - DNA, 15 bp, Homo sapiens
ggggtgaagaaggtg

SEQ ID NO: 450361 - DNA, 15 bp, Homo sapiens
aggggtgaagaaggt

SEQ ID NO: 450362 - DNA, 15 bp, Homo sapiens
taggggtgaagaagg

SEQ ID NO: 450363 - DNA, 15 bp, Homo sapiens
ctaggggtgaagaag

SEQ ID NO: 450364 - DNA, 15 bp, Homo sapiens
tctaggggtgaagaa

SEQ ID NO: 450365 - DNA, 15 bp, Homo sapiens
ctctaggggtgaaga

SEQ ID NO: 450366 - DNA, 15 bp, Homo sapiens
gctctaggggtgaag

SEQ ID NO: 450367 - DNA, 15 bp, Homo sapiens
agctctaggggtgaa

SEQ ID NO: 450368 - DNA, 15 bp, Homo sapiens
gagctctaggggtga

SEQ ID NO: 450369 - DNA, 15 bp, Homo sapiens
tgagctctaggggtg

SEQ ID NO: 450370 - DNA, 15 bp, Homo sapiens
atgagctctaggggt

SEQ ID NO: 450371 - DNA, 15 bp, Homo sapiens
catgagctctagggg

SEQ ID NO: 450372 - DNA, 15 bp, Homo sapiens
gcatgagctctaggg

SEQ ID NO: 450373 - DNA, 15 bp, Homo sapiens
ggcatgagctctagg

SEQ ID NO: 450374 - DNA, 15 bp, Homo sapiens
tggcatgagctctag

SEQ ID NO: 450375 - DNA, 15 bp, Homo sapiens
gtggcatgagctcta

SEQ ID NO: 450376 - DNA, 15 bp, Homo sapiens
ggtggcatgagctct

SEQ ID NO: 450377 - DNA, 15 bp, Homo sapiens
gggtggcatgagctc

SEQ ID NO: 450378 - DNA, 15 bp, Homo sapiens
cgggtggcatgagct

SEQ ID NO: 450379 - DNA, 15 bp, Homo sapiens
ccgggtggcatgagc

SEQ ID NO: 450380 - DNA, 15 bp, Homo sapiens
accgggtggcatgag

SEQ ID NO: 450381 - DNA, 15 bp, Homo sapiens
aaccgggtggcatga

SEQ ID NO: 450382 - DNA, 15 bp, Homo sapiens
gaaccgggtggcatg

SEQ ID NO: 450383 - DNA, 15 bp, Homo sapiens
ggaaccgggtggcat

SEQ ID NO: 450384 - DNA, 15 bp, Homo sapiens
aggaaccgggtggca

SEQ ID NO: 450385 - DNA, 15 bp, Homo sapiens
caggaaccgggtggc

SEQ ID NO: 450386 - DNA, 15 bp, Homo sapiens
gcaggaaccgggtgg

SEQ ID NO: 450387 - DNA, 15 bp, Homo sapiens
tgcaggaaccgggtg

SEQ ID NO: 450388 - DNA, 15 bp, Homo sapiens
atgcaggaaccgggt

SEQ ID NO: 450389 - DNA, 15 bp, Homo sapiens
catgcaggaaccggg

SEQ ID NO: 450390 - DNA, 15 bp, Homo sapiens
gcatgcaggaaccgg

SEQ ID NO: 450391 - DNA, 15 bp, Homo sapiens
ggcatgcaggaaccg

SEQ ID NO: 450392 - DNA, 15 bp, Homo sapiens
tggcatgcaggaacc

SEQ ID NO: 450393 - DNA, 15 bp, Homo sapiens
ctggcatgcaggaac

SEQ ID NO: 450394 - DNA, 15 bp, Homo sapiens
tctggcatgcaggaa

SEQ ID NO: 450395 - DNA, 15 bp, Homo sapiens
ctctggcatgcagga

SEQ ID NO: 450396 - DNA, 15 bp, Homo sapiens
cctctggcatgcagg

SEQ ID NO: 450397 - DNA, 15 bp, Homo sapiens
tcctctggcatgcag

SEQ ID NO: 450398 - DNA, 15 bp, Homo sapiens
ctcctctggcatgca

SEQ ID NO: 450399 - DNA, 15 bp, Homo sapiens
gctcctctggcatgc

SEQ ID NO: 450400 - DNA, 15 bp, Homo sapiens
ggctcctctggcatg

SEQ ID NO: 450401 - DNA, 15 bp, Homo sapiens
gggctcctctggcat

SEQ ID NO: 450402 - DNA, 15 bp, Homo sapiens
tgggctcctctggca

SEQ ID NO: 450403 - DNA, 15 bp, Homo sapiens
ttgggctcctctggc

SEQ ID NO: 450404 - DNA, 15 bp, Homo sapiens
cttgggctcctctgg

SEQ ID NO: 450405 - DNA, 15 bp, Homo sapiens
gcttgggctcctctg

SEQ ID NO: 450406 - DNA, 15 bp, Homo sapiens
ggcttgggctcctct

SEQ ID NO: 450407 - DNA, 15 bp, Homo sapiens
tggcttgggctcctc

SEQ ID NO: 450408 - DNA, 15 bp, Homo sapiens
ttggcttgggctcct

SEQ ID NO: 450409 - DNA, 15 bp, Homo sapiens
tttggcttgggctcc

SEQ ID NO: 450410 - DNA, 15 bp, Homo sapiens
ctttggcttgggctc

SEQ ID NO: 450411 - DNA, 15 bp, Homo sapiens
tctttggcttgggct

SEQ ID NO: 450412 - DNA, 15 bp, Homo sapiens
ctctttggcttgggc

SEQ ID NO: 450413 - DNA, 15 bp, Homo sapiens
cctctttggcttggg

SEQ ID NO: 450414 - DNA, 15 bp, Homo sapiens
ccctctttggcttgg

SEQ ID NO: 450415 - DNA, 15 bp, Homo sapiens
cccctctttggcttg

SEQ ID NO: 450416 - DNA, 15 bp, Homo sapiens
tcccctctttggctt

SEQ ID NO: 450417 - DNA, 15 bp, Homo sapiens
ttcccctctttggct

SEQ ID NO: 450418 - DNA, 15 bp, Homo sapiens
cttcccctctttggc

SEQ ID NO: 450419 - DNA, 15 bp, Homo sapiens
tcttcccctctttgg

SEQ ID NO: 450420 - DNA, 15 bp, Homo sapiens
gtcttcccctctttg

SEQ ID NO: 450421 - DNA, 15 bp, Homo sapiens
cgtcttcccctcttt

SEQ ID NO: 450422 - DNA, 15 bp, Homo sapiens
tcgtcttcccctctt

SEQ ID NO: 450423 - DNA, 15 bp, Homo sapiens
atcgtcttcccctct

SEQ ID NO: 450424 - DNA, 15 bp, Homo sapiens
gatcgtcttcccctc

SEQ ID NO: 450425 - DNA, 15 bp, Homo sapiens
cgatcgtcttcccct

SEQ ID NO: 450426 - DNA, 15 bp, Homo sapiens
acgatcgtcttcccc

SEQ ID NO: 450427 - DNA, 15 bp, Homo sapiens
cacgatcgtcttccc

SEQ ID NO: 450428 - DNA, 15 bp, Homo sapiens
ccacgatcgtcttcc

SEQ ID NO: 450429 - DNA, 15 bp, Homo sapiens
gccacgatcgtcttc

SEQ ID NO: 450430 - DNA, 15 bp, Homo sapiens
ggccacgatcgtctt

SEQ ID NO: 450431 - DNA, 15 bp, Homo sapiens
gggccacgatcgtct

SEQ ID NO: 450432 - DNA, 15 bp, Homo sapiens
ggggccacgatcgtc

SEQ ID NO: 450433 - DNA, 15 bp, Homo sapiens
cggggccacgatcgt

SEQ ID NO: 450434 - DNA, 15 bp, Homo sapiens
ccggggccacgatcg

SEQ ID NO: 450435 - DNA, 15 bp, Homo sapiens
tccggggccacgatc

SEQ ID NO: 450436 - DNA, 15 bp, Homo sapiens
ttccggggccacgat

SEQ ID NO: 450437 - DNA, 15 bp, Homo sapiens
tttccggggccacga

SEQ ID NO: 450438 - DNA, 15 bp, Homo sapiens
gtaatcacaagtgtg

SEQ ID NO: 450439 - DNA, 15 bp, Homo sapiens
cgtaatcacaagtgt

SEQ ID NO: 450440 - DNA, 15 bp, Homo sapiens
gcgtaatcacaagtg

SEQ ID NO: 450441 - DNA, 15 bp, Homo sapiens
cgcgtaatcacaagt

SEQ ID NO: 450442 - DNA, 15 bp, Homo sapiens
ccgcgtaatcacaag

SEQ ID NO: 450443 - DNA, 15 bp, Homo sapiens
cccgcgtaatcacaa

SEQ ID NO: 450444 - DNA, 15 bp, Homo sapiens
gcccgcgtaatcaca

SEQ ID NO: 450445 - DNA, 15 bp, Homo sapiens
agcccgcgtaatcac

SEQ ID NO: 450446 - DNA, 15 bp, Homo sapiens
cagcccgcgtaatca

SEQ ID NO: 450447 - DNA, 15 bp, Homo sapiens
gcagcccgcgtaatc

SEQ ID NO: 450448 - DNA, 15 bp, Homo sapiens
cgcagcccgcgtaat

SEQ ID NO: 450449 - DNA, 15 bp, Homo sapiens
ccgcagcccgcgtaa

SEQ ID NO: 450450 - DNA, 15 bp, Homo sapiens
gccgcagcccgcgta

SEQ ID NO: 450451 - DNA, 15 bp, Homo sapiens
tgccgcagcccgcgt

SEQ ID NO: 450452 - DNA, 15 bp, Homo sapiens
ttgccgcagcccgcg

SEQ ID NO: 450453 - DNA, 15 bp, Homo sapiens
tttgccgcagcccgc

SEQ ID NO: 450454 - DNA, 15 bp, Homo sapiens
ttttgccgcagcccg

SEQ ID NO: 450455 - DNA, 15 bp, Homo sapiens
gttttgccgcagccc

SEQ ID NO: 450456 - DNA, 15 bp, Homo sapiens
ggttttgccgcagcc

SEQ ID NO: 450457 - DNA, 15 bp, Homo sapiens
aggttttgccgcagc

SEQ ID NO: 450458 - DNA, 15 bp, Homo sapiens
taggttttgccgcag

SEQ ID NO: 450459 - DNA, 15 bp, Homo sapiens
gtaggttttgccgca

SEQ ID NO: 450460 - DNA, 15 bp, Homo sapiens
tgtaggttttgccgc

SEQ ID NO: 450461 - DNA, 15 bp, Homo sapiens
gtgtaggttttgccg

SEQ ID NO: 450462 - DNA, 15 bp, Homo sapiens
tgtgtaggttttgcc

SEQ ID NO: 450463 - DNA, 15 bp, Homo sapiens
ttgtgtaggttttgc

SEQ ID NO: 450464 - DNA, 15 bp, Homo sapiens
tttgtgtaggttttg

SEQ ID NO: 450465 - DNA, 15 bp, Homo sapiens
ctttgtgtaggtttt

SEQ ID NO: 450466 - DNA, 15 bp, Homo sapiens
tctttgtgtaggttt

SEQ ID NO: 450467 - DNA, 15 bp, Homo sapiens
ctctttgtgtaggtt

SEQ ID NO: 450468 - DNA, 15 bp, Homo sapiens
actctttgtgtaggt

SEQ ID NO: 450469 - DNA, 15 bp, Homo sapiens
aactctttgtgtagg

SEQ ID NO: 450470 - DNA, 15 bp, Homo sapiens
gaactctttgtgtag

SEQ ID NO: 450471 - DNA, 15 bp, Homo sapiens
ggaactctttgtgta

SEQ ID NO: 450472 - DNA, 15 bp, Homo sapiens
gggaactctttgtgt

SEQ ID NO: 450473 - DNA, 15 bp, Homo sapiens
tgggaactctttgtg

SEQ ID NO: 450474 - DNA, 15 bp, Homo sapiens
atgggaactctttgt

SEQ ID NO: 450475 - DNA, 15 bp, Homo sapiens
gatgggaactctttg

SEQ ID NO: 450476 - DNA, 15 bp, Homo sapiens
agatgggaactcttt

SEQ ID NO: 450477 - DNA, 15 bp, Homo sapiens
gagatgggaactctt

SEQ ID NO: 450478 - DNA, 15 bp, Homo sapiens
tgagatgggaactct

SEQ ID NO: 450479 - DNA, 15 bp, Homo sapiens
ttgagatgggaactc

SEQ ID NO: 450480 - DNA, 15 bp, Homo sapiens
cttgagatgggaact

SEQ ID NO: 450481 - DNA, 15 bp, Homo sapiens
ccttgagatgggaac

SEQ ID NO: 450482 - DNA, 15 bp, Homo sapiens
gccttgagatgggaa

SEQ ID NO: 450483 - DNA, 15 bp, Homo sapiens
tgccttgagatggga

SEQ ID NO: 450484 - DNA, 15 bp, Homo sapiens
gtgccttgagatggg

SEQ ID NO: 450485 - DNA, 15 bp, Homo sapiens
tgtgccttgagatgg

SEQ ID NO: 450486 - DNA, 15 bp, Homo sapiens
gtgtgccttgagatg

SEQ ID NO: 450487 - DNA, 15 bp, Homo sapiens
ggtgtgccttgagat

SEQ ID NO: 450488 - DNA, 15 bp, Homo sapiens
aggtgtgccttgaga

SEQ ID NO: 450489 - DNA, 15 bp, Homo sapiens
caggtgtgccttgag

SEQ ID NO: 450490 - DNA, 15 bp, Homo sapiens
gcaggtgtgccttga

SEQ ID NO: 450491 - DNA, 15 bp, Homo sapiens
cgcaggtgtgccttg

SEQ ID NO: 450492 - DNA, 15 bp, Homo sapiens
tcgcaggtgtgcctt

SEQ ID NO: 450493 - DNA, 15 bp, Homo sapiens
ttcgcaggtgtgcct

SEQ ID NO: 450494 - DNA, 15 bp, Homo sapiens
gttcgcaggtgtgcc

SEQ ID NO: 450495 - DNA, 15 bp, Homo sapiens
ggttcgcaggtgtgc

SEQ ID NO: 450496 - DNA, 15 bp, Homo sapiens
gggttcgcaggtgtg

SEQ ID NO: 450497 - DNA, 15 bp, Homo sapiens
tgggttcgcaggtgt

SEQ ID NO: 450498 - DNA, 15 bp, Homo sapiens
gtgggttcgcaggtg

SEQ ID NO: 450499 - DNA, 15 bp, Homo sapiens
tgtgggttcgcaggt

SEQ ID NO: 450500 - DNA, 15 bp, Homo sapiens
gtgtgggttcgcagg

SEQ ID NO: 450501 - DNA, 15 bp, Homo sapiens
tgtgtgggttcgcag

SEQ ID NO: 450502 - DNA, 15 bp, Homo sapiens
ctgtgtgggttcgca

SEQ ID NO: 450503 - DNA, 15 bp, Homo sapiens
cctgtgtgggttcgc

SEQ ID NO: 450504 - DNA, 15 bp, Homo sapiens
acctgtgtgggttcg

SEQ ID NO: 450505 - DNA, 15 bp, Homo sapiens
tacctgtgtgggttc

SEQ ID NO: 450506 - DNA, 15 bp, Homo sapiens
ctacctgtgtgggtt

SEQ ID NO: 450507 - DNA, 15 bp, Homo sapiens
cctacctgtgtgggt

SEQ ID NO: 450508 - DNA, 15 bp, Homo sapiens
ccctacctgtgtggg

SEQ ID NO: 450509 - DNA, 15 bp, Homo sapiens
cccctacctgtgtgg

SEQ ID NO: 450510 - DNA, 15 bp, Homo sapiens
ccccctacctgtgtg

SEQ ID NO: 450511 - DNA, 15 bp, Homo sapiens
tccccctacctgtgt

SEQ ID NO: 450512 - DNA, 15 bp, Homo sapiens
gtccccctacctgtg

SEQ ID NO: 450513 - DNA, 15 bp, Homo sapiens
tgtccccctacctgt

SEQ ID NO: 450514 - DNA, 15 bp, Homo sapiens
ttgtccccctacctg

SEQ ID NO: 450515 - DNA, 15 bp, Homo sapiens
tttgtccccctacct

SEQ ID NO: 450516 - DNA, 15 bp, Homo sapiens
gtttgtccccctacc

SEQ ID NO: 450517 - DNA, 15 bp, Homo sapiens
agtttgtccccctac

SEQ ID NO: 450518 - DNA, 15 bp, Homo sapiens
cagtttgtcccccta

SEQ ID NO: 450519 - DNA, 15 bp, Homo sapiens
gcagtttgtccccct

SEQ ID NO: 450520 - DNA, 15 bp, Homo sapiens
tgcagtttgtccccc

SEQ ID NO: 450521 - DNA, 15 bp, Homo sapiens
ctgcagtttgtcccc

SEQ ID NO: 450522 - DNA, 15 bp, Homo sapiens
tctgcagtttgtccc

SEQ ID NO: 450523 - DNA, 15 bp, Homo sapiens
ttctgcagtttgtcc

SEQ ID NO: 450524 - DNA, 15 bp, Homo sapiens
cttctgcagtttgtc

SEQ ID NO: 450525 - DNA, 15 bp, Homo sapiens
ccttctgcagtttgt

SEQ ID NO: 450526 - DNA, 15 bp, Homo sapiens
cccttctgcagtttg

SEQ ID NO: 450527 - DNA, 15 bp, Homo sapiens
tcccttctgcagttt

SEQ ID NO: 450528 - DNA, 15 bp, Homo sapiens
ctcccttctgcagtt

SEQ ID NO: 450529 - DNA, 15 bp, Homo sapiens
cctcccttctgcagt

SEQ ID NO: 450530 - DNA, 15 bp, Homo sapiens
ccctcccttctgcag

SEQ ID NO: 450531 - DNA, 15 bp, Homo sapiens
cccctcccttctgca

SEQ ID NO: 450532 - DNA, 15 bp, Homo sapiens
ccccctcccttctgc

SEQ ID NO: 450533 - DNA, 15 bp, Homo sapiens
cccccctcccttctg

SEQ ID NO: 450534 - DNA, 15 bp, Homo sapiens
acccccctcccttct

SEQ ID NO: 450535 - DNA, 15 bp, Homo sapiens
aacccccctcccttc

SEQ ID NO: 450536 - DNA, 15 bp, Homo sapiens
taacccccctccctt

SEQ ID NO: 450537 - DNA, 15 bp, Homo sapiens
ctaacccccctccct

SEQ ID NO: 450538 - DNA, 15 bp, Homo sapiens
gctaacccccctccc

SEQ ID NO: 450539 - DNA, 15 bp, Homo sapiens
agctaacccccctcc

SEQ ID NO: 450540 - DNA, 15 bp, Homo sapiens
aagctaacccccctc

SEQ ID NO: 450541 - DNA, 15 bp, Homo sapiens
gaagctaacccccct

SEQ ID NO: 450542 - DNA, 15 bp, Homo sapiens
ggaagctaacccccc

SEQ ID NO: 450543 - DNA, 15 bp, Homo sapiens
tggaagctaaccccc

SEQ ID NO: 450544 - DNA, 15 bp, Homo sapiens
ctggaagctaacccc

SEQ ID NO: 450545 - DNA, 15 bp, Homo sapiens
gctggaagctaaccc

SEQ ID NO: 450546 - DNA, 15 bp, Homo sapiens
ggctggaagctaacc

SEQ ID NO: 450547 - DNA, 15 bp, Homo sapiens
gggctggaagctaac

SEQ ID NO: 450548 - DNA, 15 bp, Homo sapiens
ggggctggaagctaa

SEQ ID NO: 450549 - DNA, 15 bp, Homo sapiens
tggggctggaagcta

SEQ ID NO: 450550 - DNA, 15 bp, Homo sapiens
atggggctggaagct

SEQ ID NO: 450551 - DNA, 15 bp, Homo sapiens
tatggggctggaagc

SEQ ID NO: 450552 - DNA, 15 bp, Homo sapiens
ctatggggctggaag

SEQ ID NO: 450553 - DNA, 15 bp, Homo sapiens
cctatggggctggaa

SEQ ID NO: 450554 - DNA, 15 bp, Homo sapiens
gcctatggggctgga

SEQ ID NO: 450555 - DNA, 15 bp, Homo sapiens
agcctatggggctgg

SEQ ID NO: 450556 - DNA, 15 bp, Homo sapiens
tagcctatggggctg

SEQ ID NO: 450557 - DNA, 15 bp, Homo sapiens
gtagcctatggggct

SEQ ID NO: 450558 - DNA, 15 bp, Homo sapiens
ggtagcctatggggc

SEQ ID NO: 450559 - DNA, 15 bp, Homo sapiens
tggtagcctatgggg

SEQ ID NO: 450560 - DNA, 15 bp, Homo sapiens
ctggtagcctatggg

SEQ ID NO: 450561 - DNA, 15 bp, Homo sapiens
actggtagcctatgg

SEQ ID NO: 450562 - DNA, 15 bp, Homo sapiens
cactggtagcctatg

SEQ ID NO: 450563 - DNA, 15 bp, Homo sapiens
ccactggtagcctat

SEQ ID NO: 450564 - DNA, 15 bp, Homo sapiens
tccactggtagccta

SEQ ID NO: 450565 - DNA, 15 bp, Homo sapiens
gtccactggtagcct

SEQ ID NO: 450566 - DNA, 15 bp, Homo sapiens
tgtccactggtagcc

SEQ ID NO: 450567 - DNA, 15 bp, Homo sapiens
gtgtccactggtagc

SEQ ID NO: 450568 - DNA, 15 bp, Homo sapiens
agtgtccactggtag

SEQ ID NO: 450569 - DNA, 15 bp, Homo sapiens
gagtgtccactggta

SEQ ID NO: 450570 - DNA, 15 bp, Homo sapiens
ggagtgtccactggt

SEQ ID NO: 450571 - DNA, 15 bp, Homo sapiens
aggagtgtccactgg

SEQ ID NO: 450572 - DNA, 15 bp, Homo sapiens
gaggagtgtccactg

SEQ ID NO: 450573 - DNA, 15 bp, Homo sapiens
tgaggagtgtccact

SEQ ID NO: 450574 - DNA, 15 bp, Homo sapiens
ctgaggagtgtccac

SEQ ID NO: 450575 - DNA, 15 bp, Homo sapiens
actgaggagtgtcca

SEQ ID NO: 450576 - DNA, 15 bp, Homo sapiens
cactgaggagtgtcc

SEQ ID NO: 450577 - DNA, 15 bp, Homo sapiens
gcactgaggagtgtc

SEQ ID NO: 450578 - DNA, 15 bp, Homo sapiens
ggcactgaggagtgt

SEQ ID NO: 450579 - DNA, 15 bp, Homo sapiens
actggggataaaaag

SEQ ID NO: 450580 - DNA, 15 bp, Homo sapiens
gactggggataaaaa

SEQ ID NO: 450581 - DNA, 15 bp, Homo sapiens
cgactggggataaaa

SEQ ID NO: 450582 - DNA, 15 bp, Homo sapiens
acgactggggataaa

SEQ ID NO: 450583 - DNA, 15 bp, Homo sapiens
tacgactggggataa

SEQ ID NO: 450584 - DNA, 15 bp, Homo sapiens
ctacgactggggata

SEQ ID NO: 450585 - DNA, 15 bp, Homo sapiens
actacgactggggat

SEQ ID NO: 450586 - DNA, 15 bp, Homo sapiens
tactacgactgggga

SEQ ID NO: 450587 - DNA, 15 bp, Homo sapiens
ctactacgactgggg

SEQ ID NO: 450588 - DNA, 15 bp, Homo sapiens
cctactacgactggg

SEQ ID NO: 450589 - DNA, 15 bp, Homo sapiens
tcctactacgactgg

SEQ ID NO: 450590 - DNA, 15 bp, Homo sapiens
ttcctactacgactg

SEQ ID NO: 450591 - DNA, 15 bp, Homo sapiens
attcctactacgact

SEQ ID NO: 450592 - DNA, 15 bp, Homo sapiens
tattcctactacgac

SEQ ID NO: 450593 - DNA, 15 bp, Homo sapiens
ttattcctactacga

SEQ ID NO: 450594 - DNA, 15 bp, Homo sapiens
cttattcctactacg

SEQ ID NO: 450595 - DNA, 15 bp, Homo sapiens
tcttattcctactac

SEQ ID NO: 450596 - DNA, 15 bp, Homo sapiens
atcttattcctacta

SEQ ID NO: 450597 - DNA, 15 bp, Homo sapiens
aatcttattcctact

SEQ ID NO: 450598 - DNA, 15 bp, Homo sapiens
caatcttattcctac

SEQ ID NO: 450599 - DNA, 15 bp, Homo sapiens
gcaatcttattccta

SEQ ID NO: 450600 - DNA, 15 bp, Homo sapiens
tgcaatcttattcct

SEQ ID NO: 450601 - DNA, 15 bp, Homo sapiens
atgcaatcttattcc

SEQ ID NO: 450602 - DNA, 15 bp, Homo sapiens
catgcaatcttattc

SEQ ID NO: 450603 - DNA, 15 bp, Homo sapiens
ccatgcaatcttatt

SEQ ID NO: 450604 - DNA, 15 bp, Homo sapiens
accatgcaatcttat

SEQ ID NO: 450605 - DNA, 15 bp, Homo sapiens
aaccatgcaatctta

SEQ ID NO: 450606 - DNA, 15 bp, Homo sapiens
aaaccatgcaatctt

SEQ ID NO: 450607 - DNA, 15 bp, Homo sapiens
caaaccatgcaatct

SEQ ID NO: 450608 - DNA, 15 bp, Homo sapiens
ccaaaccatgcaatc

SEQ ID NO: 450609 - DNA, 15 bp, Homo sapiens
cccaaaccatgcaat

SEQ ID NO: 450610 - DNA, 15 bp, Homo sapiens
gcccaaaccatgcaa

SEQ ID NO: 450611 - DNA, 15 bp, Homo sapiens
tgcccaaaccatgca

SEQ ID NO: 450612 - DNA, 15 bp, Homo sapiens
gtgcccaaaccatgc

SEQ ID NO: 450613 - DNA, 15 bp, Homo sapiens
tgtgcccaaaccatg

SEQ ID NO: 450614 - DNA, 15 bp, Homo sapiens
gtgtgcccaaaccat

SEQ ID NO: 450615 - DNA, 15 bp, Homo sapiens
agtgtgcccaaacca

SEQ ID NO: 450616 - DNA, 15 bp, Homo sapiens
tagtgtgcccaaacc

SEQ ID NO: 450617 - DNA, 15 bp, Homo sapiens
gtagtgtgcccaaac

SEQ ID NO: 450618 - DNA, 15 bp, Homo sapiens
ggtagtgtgcccaaa

SEQ ID NO: 450619 - DNA, 15 bp, Homo sapiens
tggtagtgtgcccaa

SEQ ID NO: 450620 - DNA, 15 bp, Homo sapiens
ttggtagtgtgccca

SEQ ID NO: 450621 - DNA, 15 bp, Homo sapiens
attggtagtgtgccc

SEQ ID NO: 450622 - DNA, 15 bp, Homo sapiens
gattggtagtgtgcc

SEQ ID NO: 450623 - DNA, 15 bp, Homo sapiens
tgattggtagtgtgc

SEQ ID NO: 450624 - DNA, 15 bp, Homo sapiens
gtgattggtagtgtg

SEQ ID NO: 450625 - DNA, 15 bp, Homo sapiens
tgtgattggtagtgt

SEQ ID NO: 450626 - DNA, 15 bp, Homo sapiens
ttgtgattggtagtg

SEQ ID NO: 450627 - DNA, 15 bp, Homo sapiens
attgtgattggtagt

SEQ ID NO: 450628 - DNA, 15 bp, Homo sapiens
aattgtgattggtag

SEQ ID NO: 450629 - DNA, 15 bp, Homo sapiens
aaattgtgattggta

SEQ ID NO: 450630 - DNA, 15 bp, Homo sapiens
gaaattgtgattggt

SEQ ID NO: 450631 - DNA, 15 bp, Homo sapiens
ggaaattgtgattgg

SEQ ID NO: 450632 - DNA, 15 bp, Homo sapiens
tggaaattgtgattg

SEQ ID NO: 450633 - DNA, 15 bp, Homo sapiens
ttggaaattgtgatt

SEQ ID NO: 450634 - DNA, 15 bp, Homo sapiens
tttggaaattgtgat

SEQ ID NO: 450635 - DNA, 15 bp, Homo sapiens
atttggaaattgtga

SEQ ID NO: 450636 - DNA, 15 bp, Homo sapiens
aatttggaaattgtg

SEQ ID NO: 450637 - DNA, 15 bp, Homo sapiens
aaatttggaaattgt

SEQ ID NO: 450638 - DNA, 15 bp, Homo sapiens
gaaatttggaaattg

SEQ ID NO: 450639 - DNA, 15 bp, Homo sapiens
tgaaatttggaaatt

SEQ ID NO: 450640 - DNA, 15 bp, Homo sapiens
atgaaatttggaaat

SEQ ID NO: 450641 - DNA, 15 bp, Homo sapiens
aatgaaatttggaaa

SEQ ID NO: 450642 - DNA, 15 bp, Homo sapiens
aaatgaaatttggaa

SEQ ID NO: 450643 - DNA, 15 bp, Homo sapiens
gaaatgaaatttgga

SEQ ID NO: 450644 - DNA, 15 bp, Homo sapiens
ggaaatgaaatttgg

SEQ ID NO: 450645 - DNA, 15 bp, Homo sapiens
tggaaatgaaatttg

SEQ ID NO: 450646 - DNA, 15 bp, Homo sapiens
gtggaaatgaaattt

SEQ ID NO: 450647 - DNA, 15 bp, Homo sapiens
ggtggaaatgaaatt

SEQ ID NO: 450648 - DNA, 15 bp, Homo sapiens
tggtggaaatgaaat

SEQ ID NO: 450649 - DNA, 15 bp, Homo sapiens
gtggtggaaatgaaa

SEQ ID NO: 450650 - DNA, 15 bp, Homo sapiens
agtggtggaaatgaa

SEQ ID NO: 450651 - DNA, 15 bp, Homo sapiens
cagtggtggaaatga

SEQ ID NO: 450652 - DNA, 15 bp, Homo sapiens
tcagtggtggaaatg

SEQ ID NO: 450653 - DNA, 15 bp, Homo sapiens
ctcagtggtggaaat

SEQ ID NO: 450654 - DNA, 15 bp, Homo sapiens
tctcagtggtggaaa

SEQ ID NO: 450655 - DNA, 15 bp, Homo sapiens
atctcagtggtggaa

SEQ ID NO: 450656 - DNA, 15 bp, Homo sapiens
catctcagtggtgga

SEQ ID NO: 450657 - DNA, 15 bp, Homo sapiens
gcatctcagtggtgg

SEQ ID NO: 450658 - DNA, 15 bp, Homo sapiens
ggcatctcagtggtg

SEQ ID NO: 450659 - DNA, 15 bp, Homo sapiens
aggcatctcagtggt

SEQ ID NO: 450660 - DNA, 15 bp, Homo sapiens
aaggcatctcagtgg

SEQ ID NO: 450661 - DNA, 15 bp, Homo sapiens
caaggcatctcagtg

SEQ ID NO: 450662 - DNA, 15 bp, Homo sapiens
tcaaggcatctcagt

SEQ ID NO: 450663 - DNA, 15 bp, Homo sapiens
gtcaaggcatctcag

SEQ ID NO: 450664 - DNA, 15 bp, Homo sapiens
agtcaaggcatctca

SEQ ID NO: 450665 - DNA, 15 bp, Homo sapiens
gagtcaaggcatctc

SEQ ID NO: 450666 - DNA, 15 bp, Homo sapiens
tgagtcaaggcatct

SEQ ID NO: 450667 - DNA, 15 bp, Homo sapiens
ttgagtcaaggcatc

SEQ ID NO: 450668 - DNA, 15 bp, Homo sapiens
tttgagtcaaggcat

SEQ ID NO: 450669 - DNA, 15 bp, Homo sapiens
atttgagtcaaggca

SEQ ID NO: 450670 - DNA, 15 bp, Homo sapiens
catttgagtcaaggc

SEQ ID NO: 450671 - DNA, 15 bp, Homo sapiens
tcatttgagtcaagg

SEQ ID NO: 450672 - DNA, 15 bp, Homo sapiens
ttcatttgagtcaag

SEQ ID NO: 450673 - DNA, 15 bp, Homo sapiens
tttcatttgagtcaa

SEQ ID NO: 450674 - DNA, 15 bp, Homo sapiens
gtttcatttgagtca

SEQ ID NO: 450675 - DNA, 15 bp, Homo sapiens
tgtttcatttgagtc

SEQ ID NO: 450676 - DNA, 15 bp, Homo sapiens
atgtttcatttgagt

SEQ ID NO: 450677 - DNA, 15 bp, Homo sapiens
aatgtttcatttgag

SEQ ID NO: 450678 - DNA, 15 bp, Homo sapiens
taatgtttcatttga

SEQ ID NO: 450679 - DNA, 15 bp, Homo sapiens
ctaatgtttcatttg

SEQ ID NO: 450680 - DNA, 15 bp, Homo sapiens
actaatgtttcattt

SEQ ID NO: 450681 - DNA, 15 bp, Homo sapiens
tactaatgtttcatt

SEQ ID NO: 450682 - DNA, 15 bp, Homo sapiens
atactaatgtttcat

SEQ ID NO: 450683 - DNA, 15 bp, Homo sapiens
tatactaatgtttca

SEQ ID NO: 450684 - DNA, 15 bp, Homo sapiens
ctatactaatgtttc

SEQ ID NO: 450685 - DNA, 15 bp, Homo sapiens
cctatactaatgttt

SEQ ID NO: 450686 - DNA, 15 bp, Homo sapiens
acctatactaatgtt

SEQ ID NO: 450687 - DNA, 15 bp, Homo sapiens
aacctatactaatgt

SEQ ID NO: 450688 - DNA, 15 bp, Homo sapiens
aaacctatactaatg

SEQ ID NO: 450689 - DNA, 15 bp, Homo sapiens
taaacctatactaat

SEQ ID NO: 450690 - DNA, 15 bp, Homo sapiens
ctaaacctatactaa

SEQ ID NO: 450691 - DNA, 15 bp, Homo sapiens
cctaaacctatacta

SEQ ID NO: 450692 - DNA, 15 bp, Homo sapiens
acctaaacctatact

SEQ ID NO: 450693 - DNA, 15 bp, Homo sapiens
cacctaaacctatac

SEQ ID NO: 450694 - DNA, 15 bp, Homo sapiens
ccacctaaacctata

SEQ ID NO: 450695 - DNA, 15 bp, Homo sapiens
accacctaaacctat

SEQ ID NO: 450696 - DNA, 15 bp, Homo sapiens
caccacctaaaccta

SEQ ID NO: 450697 - DNA, 15 bp, Homo sapiens
acaccacctaaacct

SEQ ID NO: 450698 - DNA, 15 bp, Homo sapiens
aacaccacctaaacc

SEQ ID NO: 450699 - DNA, 15 bp, Homo sapiens
aaacaccacctaaac

SEQ ID NO: 450700 - DNA, 15 bp, Homo sapiens
caaacaccacctaaa

SEQ ID NO: 450701 - DNA, 15 bp, Homo sapiens
acaaacaccacctaa

SEQ ID NO: 450702 - DNA, 15 bp, Homo sapiens
cacaaacaccaccta

SEQ ID NO: 450703 - DNA, 15 bp, Homo sapiens
acacaaacaccacct

SEQ ID NO: 450704 - DNA, 15 bp, Homo sapiens
cacacaaacaccacc

SEQ ID NO: 450705 - DNA, 15 bp, Homo sapiens
acacacaaacaccac

SEQ ID NO: 450706 - DNA, 15 bp, Homo sapiens
aacacacaaacacca

SEQ ID NO: 450707 - DNA, 15 bp, Homo sapiens
aaacacacaaacacc

SEQ ID NO: 450708 - DNA, 15 bp, Homo sapiens
aaaacacacaaacac

SEQ ID NO: 450709 - DNA, 15 bp, Homo sapiens
aaaaacacacaaaca

SEQ ID NO: 450710 - DNA, 15 bp, Homo sapiens
caaaaacacacaaac

SEQ ID NO: 450711 - DNA, 15 bp, Homo sapiens
ccaaaaacacacaaa

SEQ ID NO: 450712 - DNA, 15 bp, Homo sapiens
accaaaaacacacaa

SEQ ID NO: 450713 - DNA, 15 bp, Homo sapiens
caccaaaaacacaca

SEQ ID NO: 450714 - DNA, 15 bp, Homo sapiens
tcaccaaaaacacac

SEQ ID NO: 450715 - DNA, 15 bp, Homo sapiens
ttcaccaaaaacaca

SEQ ID NO: 450716 - DNA, 15 bp, Homo sapiens
tttcaccaaaaacac

SEQ ID NO: 450717 - DNA, 15 bp, Homo sapiens
gtttcaccaaaaaca

SEQ ID NO: 450718 - DNA, 15 bp, Homo sapiens
tgtttcaccaaaaac

SEQ ID NO: 450719 - DNA, 15 bp, Homo sapiens
atgtttcaccaaaaa

SEQ ID NO: 450720 - DNA, 15 bp, Homo sapiens
aatgtttcaccaaaa

SEQ ID NO: 450721 - DNA, 15 bp, Homo sapiens
taatgtttcaccaaa

SEQ ID NO: 450722 - DNA, 15 bp, Homo sapiens
ctaatgtttcaccaa

SEQ ID NO: 450723 - DNA, 15 bp, Homo sapiens
actaatgtttcacca

SEQ ID NO: 450724 - DNA, 15 bp, Homo sapiens
tactaatgtttcacc

SEQ ID NO: 450725 - DNA, 15 bp, Homo sapiens
atactaatgtttcac

SEQ ID NO: 450726 - DNA, 15 bp, Homo sapiens
cacctatactaatgt

SEQ ID NO: 450727 - DNA, 15 bp, Homo sapiens
acacctatactaatg

SEQ ID NO: 450728 - DNA, 15 bp, Homo sapiens
tacacctatactaat

SEQ ID NO: 450729 - DNA, 15 bp, Homo sapiens
ctacacctatactaa

SEQ ID NO: 450730 - DNA, 15 bp, Homo sapiens
cctacacctatacta

SEQ ID NO: 450731 - DNA, 15 bp, Homo sapiens
acctacacctatact

SEQ ID NO: 450732 - DNA, 15 bp, Homo sapiens
cacctacacctatac

SEQ ID NO: 450733 - DNA, 15 bp, Homo sapiens
ccacctacacctata

SEQ ID NO: 450734 - DNA, 15 bp, Homo sapiens
accacctacacctat

SEQ ID NO: 450735 - DNA, 15 bp, Homo sapiens
caccacctacaccta

SEQ ID NO: 450736 - DNA, 15 bp, Homo sapiens
ccaccacctacacct

SEQ ID NO: 450737 - DNA, 15 bp, Homo sapiens
accaccacctacacc

SEQ ID NO: 450738 - DNA, 15 bp, Homo sapiens
aaccaccacctacac

SEQ ID NO: 450739 - DNA, 15 bp, Homo sapiens
caaccaccacctaca

SEQ ID NO: 450740 - DNA, 15 bp, Homo sapiens
acaaccaccacctac

SEQ ID NO: 450741 - DNA, 15 bp, Homo sapiens
cacaaccaccaccta

SEQ ID NO: 450742 - DNA, 15 bp, Homo sapiens
acacaaccaccacct

SEQ ID NO: 450743 - DNA, 15 bp, Homo sapiens
cacacaaccaccacc

SEQ ID NO: 450744 - DNA, 15 bp, Homo sapiens
gcacacaaccaccac

SEQ ID NO: 450745 - DNA, 15 bp, Homo sapiens
agcacacaaccacca

SEQ ID NO: 450746 - DNA, 15 bp, Homo sapiens
aagcacacaaccacc

SEQ ID NO: 450747 - DNA, 15 bp, Homo sapiens
taagcacacaaccac

SEQ ID NO: 450748 - DNA, 15 bp, Homo sapiens
ttaagcacacaacca

SEQ ID NO: 450749 - DNA, 15 bp, Homo sapiens
gttaagcacacaacc

SEQ ID NO: 450750 - DNA, 15 bp, Homo sapiens
agttaagcacacaac

SEQ ID NO: 450751 - DNA, 15 bp, Homo sapiens
cagttaagcacacaa

SEQ ID NO: 450752 - DNA, 15 bp, Homo sapiens
tcagttaagcacaca

SEQ ID NO: 450753 - DNA, 15 bp, Homo sapiens
gtcagttaagcacac

SEQ ID NO: 450754 - DNA, 15 bp, Homo sapiens
ggtcagttaagcaca

SEQ ID NO: 450755 - DNA, 15 bp, Homo sapiens
gggtcagttaagcac

SEQ ID NO: 450756 - DNA, 15 bp, Homo sapiens
ggggtcagttaagca

SEQ ID NO: 450757 - DNA, 15 bp, Homo sapiens
gggggtcagttaagc

SEQ ID NO: 450758 - DNA, 15 bp, Homo sapiens
agggggtcagttaag

SEQ ID NO: 450759 - DNA, 15 bp, Homo sapiens
tagggggtcagttaa

SEQ ID NO: 450760 - DNA, 15 bp, Homo sapiens
ttagggggtcagtta

SEQ ID NO: 450761 - DNA, 15 bp, Homo sapiens
tttagggggtcagtt

SEQ ID NO: 450762 - DNA, 15 bp, Homo sapiens
ttttagggggtcagt

SEQ ID NO: 450763 - DNA, 15 bp, Homo sapiens
tttttagggggtcag

SEQ ID NO: 450764 - DNA, 15 bp, Homo sapiens
gtttttagggggtca

SEQ ID NO: 450765 - DNA, 15 bp, Homo sapiens
tgtttttagggggtc

SEQ ID NO: 450766 - DNA, 15 bp, Homo sapiens
ttgtttttagggggt

SEQ ID NO: 450767 - DNA, 15 bp, Homo sapiens
cttgtttttaggggg

SEQ ID NO: 450768 - DNA, 15 bp, Homo sapiens
tcttgtttttagggg

SEQ ID NO: 450769 - DNA, 15 bp, Homo sapiens
gtcttgtttttaggg

SEQ ID NO: 450770 - DNA, 15 bp, Homo sapiens
ggtcttgtttttagg

SEQ ID NO: 450771 - DNA, 15 bp, Homo sapiens
tggtcttgtttttag

SEQ ID NO: 450772 - DNA, 15 bp, Homo sapiens
ttggtcttgttttta

SEQ ID NO: 450773 - DNA, 15 bp, Homo sapiens
tttggtcttgttttt

SEQ ID NO: 450774 - DNA, 15 bp, Homo sapiens
atttggtcttgtttt

SEQ ID NO: 450775 - DNA, 15 bp, Homo sapiens
tatttggtcttgttt

SEQ ID NO: 450776 - DNA, 15 bp, Homo sapiens
gtatttggtcttgtt

SEQ ID NO: 450777 - DNA, 15 bp, Homo sapiens
agtatttggtcttgt

SEQ ID NO: 450778 - DNA, 15 bp, Homo sapiens
aagtatttggtcttg

SEQ ID NO: 450779 - DNA, 15 bp, Homo sapiens
taagtatttggtctt

SEQ ID NO: 450780 - DNA, 15 bp, Homo sapiens
ttaagtatttggtct

SEQ ID NO: 450781 - DNA, 15 bp, Homo sapiens
cttaagtatttggtc

SEQ ID NO: 450782 - DNA, 15 bp, Homo sapiens
gcttaagtatttggt

SEQ ID NO: 450783 - DNA, 15 bp, Homo sapiens
tgcttaagtatttgg

SEQ ID NO: 450784 - DNA, 15 bp, Homo sapiens
gtgcttaagtatttg

SEQ ID NO: 450785 - DNA, 15 bp, Homo sapiens
cgtgcttaagtattt

SEQ ID NO: 450786 - DNA, 15 bp, Homo sapiens
ccgtgcttaagtatt

SEQ ID NO: 450787 - DNA, 15 bp, Homo sapiens
tccgtgcttaagtat

SEQ ID NO: 450788 - DNA, 15 bp, Homo sapiens
ttccgtgcttaagta

SEQ ID NO: 450789 - DNA, 15 bp, Homo sapiens
attccgtgcttaagt

SEQ ID NO: 450790 - DNA, 15 bp, Homo sapiens
cattccgtgcttaag

SEQ ID NO: 450791 - DNA, 15 bp, Homo sapiens
acattccgtgcttaa

SEQ ID NO: 450792 - DNA, 15 bp, Homo sapiens
tacattccgtgctta

SEQ ID NO: 450793 - DNA, 15 bp, Homo sapiens
atacattccgtgctt

SEQ ID NO: 450794 - DNA, 15 bp, Homo sapiens
aatacattccgtgct

SEQ ID NO: 450795 - DNA, 15 bp, Homo sapiens
aaatacattccgtgc

SEQ ID NO: 450796 - DNA, 15 bp, Homo sapiens
gaaatacattccgtg

SEQ ID NO: 450797 - DNA, 15 bp, Homo sapiens
agaaatacattccgt

SEQ ID NO: 450798 - DNA, 15 bp, Homo sapiens
cagaaatacattccg

SEQ ID NO: 450799 - DNA, 15 bp, Homo sapiens
acagaaatacattcc

SEQ ID NO: 450800 - DNA, 15 bp, Homo sapiens
aacagaaatacattc

SEQ ID NO: 450801 - DNA, 15 bp, Homo sapiens
aaacagaaatacatt

SEQ ID NO: 450802 - DNA, 15 bp, Homo sapiens
taaacagaaatacat

SEQ ID NO: 450803 - DNA, 15 bp, Homo sapiens
ataaacagaaataca

SEQ ID NO: 450804 - DNA, 15 bp, Homo sapiens
cataaacagaaatac

SEQ ID NO: 450805 - DNA, 15 bp, Homo sapiens
tcataaacagaaata

SEQ ID NO: 450806 - DNA, 15 bp, Homo sapiens
atcataaacagaaat

SEQ ID NO: 450807 - DNA, 15 bp, Homo sapiens
tatcataaacagaaa

SEQ ID NO: 450808 - DNA, 15 bp, Homo sapiens
atatcataaacagaa

SEQ ID NO: 450809 - DNA, 15 bp, Homo sapiens
catatcataaacaga

SEQ ID NO: 450810 - DNA, 15 bp, Homo sapiens
ccatatcataaacag

SEQ ID NO: 450811 - DNA, 15 bp, Homo sapiens
tccatatcataaaca

SEQ ID NO: 450812 - DNA, 15 bp, Homo sapiens
ttccatatcataaac

SEQ ID NO: 450813 - DNA, 15 bp, Homo sapiens
attccatatcataaa

SEQ ID NO: 450814 - DNA, 15 bp, Homo sapiens
aattccatatcataa

SEQ ID NO: 450815 - DNA, 15 bp, Homo sapiens
gaattccatatcata

SEQ ID NO: 450816 - DNA, 15 bp, Homo sapiens
tgaattccatatcat

SEQ ID NO: 450817 - DNA, 15 bp, Homo sapiens
ttgaattccatatca

SEQ ID NO: 450818 - DNA, 15 bp, Homo sapiens
attgaattccatatc

SEQ ID NO: 450819 - DNA, 15 bp, Homo sapiens
tattgaattccatat

SEQ ID NO: 450820 - DNA, 15 bp, Homo sapiens
gtattgaattccata

SEQ ID NO: 450821 - DNA, 15 bp, Homo sapiens
tgtattgaattccat

SEQ ID NO: 450822 - DNA, 15 bp, Homo sapiens
gtgtattgaattcca

SEQ ID NO: 450823 - DNA, 15 bp, Homo sapiens
ggtgtattgaattcc

SEQ ID NO: 450824 - DNA, 15 bp, Homo sapiens
gggtgtattgaattc

SEQ ID NO: 450825 - DNA, 15 bp, Homo sapiens
ggggtgtattgaatt

SEQ ID NO: 450826 - DNA, 15 bp, Homo sapiens
aggggtgtattgaat

SEQ ID NO: 450827 - DNA, 15 bp, Homo sapiens
aaggggtgtattgaa

SEQ ID NO: 450828 - DNA, 15 bp, Homo sapiens
gaaggggtgtattga

SEQ ID NO: 450829 - DNA, 15 bp, Homo sapiens
tgaaggggtgtattg

SEQ ID NO: 450830 - DNA, 15 bp, Homo sapiens
ctgaaggggtgtatt

SEQ ID NO: 450831 - DNA, 15 bp, Homo sapiens
actgaaggggtgtat

SEQ ID NO: 450832 - DNA, 15 bp, Homo sapiens
cactgaaggggtgta

SEQ ID NO: 450833 - DNA, 15 bp, Homo sapiens
ccactgaaggggtgt

SEQ ID NO: 450834 - DNA, 15 bp, Homo sapiens
accactgaaggggtg

SEQ ID NO: 450835 - DNA, 15 bp, Homo sapiens
taccactgaaggggt

SEQ ID NO: 450836 - DNA, 15 bp, Homo sapiens
ataccactgaagggg

SEQ ID NO: 450837 - DNA, 15 bp, Homo sapiens
tataccactgaaggg

SEQ ID NO: 450838 - DNA, 15 bp, Homo sapiens
ttataccactgaagg

SEQ ID NO: 450839 - DNA, 15 bp, Homo sapiens
tttataccactgaag

SEQ ID NO: 450840 - DNA, 15 bp, Homo sapiens
ctttataccactgaa

SEQ ID NO: 450841 - DNA, 15 bp, Homo sapiens
tctttataccactga

SEQ ID NO: 450842 - DNA, 15 bp, Homo sapiens
gtctttataccactg

SEQ ID NO: 450843 - DNA, 15 bp, Homo sapiens
tgtctttataccact

SEQ ID NO: 450844 - DNA, 15 bp, Homo sapiens
atgtctttataccac

SEQ ID NO: 450845 - DNA, 15 bp, Homo sapiens
aatgtctttatacca

SEQ ID NO: 450846 - DNA, 15 bp, Homo sapiens
gaatgtctttatacc

SEQ ID NO: 450847 - DNA, 15 bp, Homo sapiens
ggaatgtctttatac

SEQ ID NO: 450848 - DNA, 15 bp, Homo sapiens
aggaatgtctttata

SEQ ID NO: 450849 - DNA, 15 bp, Homo sapiens
caggaatgtctttat

SEQ ID NO: 450850 - DNA, 15 bp, Homo sapiens
ccaggaatgtcttta

SEQ ID NO: 450851 - DNA, 15 bp, Homo sapiens
tccaggaatgtcttt

SEQ ID NO: 450852 - DNA, 15 bp, Homo sapiens
atccaggaatgtctt

SEQ ID NO: 450853 - DNA, 15 bp, Homo sapiens
aatccaggaatgtct

SEQ ID NO: 450854 - DNA, 15 bp, Homo sapiens
aaatccaggaatgtc

SEQ ID NO: 450855 - DNA, 15 bp, Homo sapiens
gaaatccaggaatgt

SEQ ID NO: 450856 - DNA, 15 bp, Homo sapiens
agaaatccaggaatg

SEQ ID NO: 450857 - DNA, 15 bp, Homo sapiens
aagaaatccaggaat

SEQ ID NO: 450858 - DNA, 15 bp, Homo sapiens
aaagaaatccaggaa

SEQ ID NO: 450859 - DNA, 15 bp, Homo sapiens
taaagaaatccagga

SEQ ID NO: 450860 - DNA, 15 bp, Homo sapiens
ctaaagaaatccagg

SEQ ID NO: 450861 - DNA, 15 bp, Homo sapiens
cctaaagaaatccag

SEQ ID NO: 450862 - DNA, 15 bp, Homo sapiens
tcctaaagaaatcca

SEQ ID NO: 450863 - DNA, 15 bp, Homo sapiens
atcctaaagaaatcc

SEQ ID NO: 450864 - DNA, 15 bp, Homo sapiens
tatcctaaagaaatc

SEQ ID NO: 450865 - DNA, 15 bp, Homo sapiens
ctatcctaaagaaat

SEQ ID NO: 450866 - DNA, 15 bp, Homo sapiens
cctatcctaaagaaa

SEQ ID NO: 450867 - DNA, 15 bp, Homo sapiens
ccctatcctaaagaa

SEQ ID NO: 450868 - DNA, 15 bp, Homo sapiens
accctatcctaaaga

SEQ ID NO: 450869 - DNA, 15 bp, Homo sapiens
gaccctatcctaaag

SEQ ID NO: 450870 - DNA, 15 bp, Homo sapiens
tgaccctatcctaaa

SEQ ID NO: 450871 - DNA, 15 bp, Homo sapiens
ctgaccctatcctaa

SEQ ID NO: 450872 - DNA, 15 bp, Homo sapiens
tctgaccctatccta

SEQ ID NO: 450873 - DNA, 15 bp, Homo sapiens
ctctgaccctatcct

SEQ ID NO: 450874 - DNA, 15 bp, Homo sapiens
actctgaccctatcc

SEQ ID NO: 450875 - DNA, 15 bp, Homo sapiens
aactctgaccctatc

SEQ ID NO: 450876 - DNA, 15 bp, Homo sapiens
caactctgaccctat

SEQ ID NO: 450877 - DNA, 15 bp, Homo sapiens
ccaactctgacccta

SEQ ID NO: 450878 - DNA, 15 bp, Homo sapiens
accaactctgaccct

SEQ ID NO: 450879 - DNA, 15 bp, Homo sapiens
aaccaactctgaccc

SEQ ID NO: 450880 - DNA, 15 bp, Homo sapiens
aaaccaactctgacc

SEQ ID NO: 450881 - DNA, 15 bp, Homo sapiens
taaaccaactctgac

SEQ ID NO: 450882 - DNA, 15 bp, Homo sapiens
gtaaaccaactctga

SEQ ID NO: 450883 - DNA, 15 bp, Homo sapiens
agtaaaccaactctg

SEQ ID NO: 450884 - DNA, 15 bp, Homo sapiens
tagtaaaccaactct

SEQ ID NO: 450885 - DNA, 15 bp, Homo sapiens
atagtaaaccaactc

SEQ ID NO: 450886 - DNA, 15 bp, Homo sapiens
gatagtaaaccaact

SEQ ID NO: 450887 - DNA, 15 bp, Homo sapiens
agatagtaaaccaac

SEQ ID NO: 450888 - DNA, 15 bp, Homo sapiens
cagatagtaaaccaa

SEQ ID NO: 450889 - DNA, 15 bp, Homo sapiens
ccagatagtaaacca

SEQ ID NO: 450890 - DNA, 15 bp, Homo sapiens
gccagatagtaaacc

SEQ ID NO: 450891 - DNA, 15 bp, Homo sapiens
ggccagatagtaaac

SEQ ID NO: 450892 - DNA, 15 bp, Homo sapiens
aggccagatagtaaa

SEQ ID NO: 450893 - DNA, 15 bp, Homo sapiens
aaggccagatagtaa

SEQ ID NO: 450894 - DNA, 15 bp, Homo sapiens
gaaggccagatagta

SEQ ID NO: 450895 - DNA, 15 bp, Homo sapiens
tgaaggccagatagt

SEQ ID NO: 450896 - DNA, 15 bp, Homo sapiens
ctgaaggccagatag

SEQ ID NO: 450897 - DNA, 15 bp, Homo sapiens
actgaaggccagata

SEQ ID NO: 450898 - DNA, 15 bp, Homo sapiens
aactgaaggccagat

SEQ ID NO: 450899 - DNA, 15 bp, Homo sapiens
aaactgaaggccaga

SEQ ID NO: 450900 - DNA, 15 bp, Homo sapiens
aaaactgaaggccag

SEQ ID NO: 450901 - DNA, 15 bp, Homo sapiens
aaaaactgaaggcca

SEQ ID NO: 450902 - DNA, 15 bp, Homo sapiens
taaaaactgaaggcc

SEQ ID NO: 450903 - DNA, 15 bp, Homo sapiens
ttaaaaactgaaggc

SEQ ID NO: 450904 - DNA, 15 bp, Homo sapiens
tttaaaaactgaagg

SEQ ID NO: 450905 - DNA, 15 bp, Homo sapiens
ttttaaaaactgaag

SEQ ID NO: 450906 - DNA, 15 bp, Homo sapiens
cttttaaaaactgaa

SEQ ID NO: 450907 - DNA, 15 bp, Homo sapiens
ccttttaaaaactga

SEQ ID NO: 450908 - DNA, 15 bp, Homo sapiens
cccttttaaaaactg

SEQ ID NO: 450909 - DNA, 15 bp, Homo sapiens
ccccttttaaaaact

SEQ ID NO: 450910 - DNA, 15 bp, Homo sapiens
gccccttttaaaaac

SEQ ID NO: 450911 - DNA, 15 bp, Homo sapiens
cgccccttttaaaaa

SEQ ID NO: 450912 - DNA, 15 bp, Homo sapiens
tcgccccttttaaaa

SEQ ID NO: 450913 - DNA, 15 bp, Homo sapiens
atcgccccttttaaa

SEQ ID NO: 450914 - DNA, 15 bp, Homo sapiens
aatcgccccttttaa

SEQ ID NO: 450915 - DNA, 15 bp, Homo sapiens
gaatcgcccctttta

SEQ ID NO: 450916 - DNA, 15 bp, Homo sapiens
agaatcgcccctttt

SEQ ID NO: 450917 - DNA, 15 bp, Homo sapiens
aagaatcgccccttt

SEQ ID NO: 450918 - DNA, 15 bp, Homo sapiens
aaagaatcgcccctt

SEQ ID NO: 450919 - DNA, 15 bp, Homo sapiens
caaagaatcgcccct

SEQ ID NO: 450920 - DNA, 15 bp, Homo sapiens
tcaaagaatcgcccc

SEQ ID NO: 450921 - DNA, 15 bp, Homo sapiens
atcaaagaatcgccc

SEQ ID NO: 450922 - DNA, 15 bp, Homo sapiens
tatcaaagaatcgcc

SEQ ID NO: 450923 - DNA, 15 bp, Homo sapiens
atatcaaagaatcgc

SEQ ID NO: 450924 - DNA, 15 bp, Homo sapiens
tatatcaaagaatcg

SEQ ID NO: 450925 - DNA, 15 bp, Homo sapiens
ctatatcaaagaatc

SEQ ID NO: 450926 - DNA, 15 bp, Homo sapiens
gctatatcaaagaat

SEQ ID NO: 450927 - DNA, 15 bp, Homo sapiens
tgctatatcaaagaa

SEQ ID NO: 450928 - DNA, 15 bp, Homo sapiens
ttgctatatcaaaga

SEQ ID NO: 450929 - DNA, 15 bp, Homo sapiens
attgctatatcaaag

SEQ ID NO: 450930 - DNA, 15 bp, Homo sapiens
tattgctatatcaaa

SEQ ID NO: 450931 - DNA, 15 bp, Homo sapiens
ctattgctatatcaa

SEQ ID NO: 450932 - DNA, 15 bp, Homo sapiens
gctattgctatatca

SEQ ID NO: 450933 - DNA, 15 bp, Homo sapiens
cgctattgctatatc

SEQ ID NO: 450934 - DNA, 15 bp, Homo sapiens
acgctattgctatat

SEQ ID NO: 450935 - DNA, 15 bp, Homo sapiens
gacgctattgctata

SEQ ID NO: 450936 - DNA, 15 bp, Homo sapiens
tgacgctattgctat

SEQ ID NO: 450937 - DNA, 15 bp, Homo sapiens
ttgacgctattgcta

SEQ ID NO: 450938 - DNA, 15 bp, Homo sapiens
attgacgctattgct

SEQ ID NO: 450939 - DNA, 15 bp, Homo sapiens
aattgacgctattgc

SEQ ID NO: 450940 - DNA, 15 bp, Homo sapiens
aaattgacgctattg

SEQ ID NO: 450941 - DNA, 15 bp, Homo sapiens
aaaattgacgctatt

SEQ ID NO: 450942 - DNA, 15 bp, Homo sapiens
aaaaattgacgctat

SEQ ID NO: 450943 - DNA, 15 bp, Homo sapiens
aaaaaattgacgcta

SEQ ID NO: 450944 - DNA, 15 bp, Homo sapiens
aaaaaaattgacgct

SEQ ID NO: 450945 - DNA, 15 bp, Homo sapiens
aaaaaaaattgacgc

SEQ ID NO: 450946 - DNA, 15 bp, Homo sapiens
aaaaaaaaattgacg

SEQ ID NO: 450947 - DNA, 15 bp, Homo sapiens
aaaaaaaaaattgac

SEQ ID NO: 450948 - DNA, 15 bp, Homo sapiens
gaaaaaaaaaattga

SEQ ID NO: 450949 - DNA, 15 bp, Homo sapiens
agaaaaaaaaaattg

SEQ ID NO: 450950 - DNA, 15 bp, Homo sapiens
aagaaaaaaaaaatt

SEQ ID NO: 450951 - DNA, 15 bp, Homo sapiens
aaagaaaaaaaaaat

SEQ ID NO: 450952 - DNA, 15 bp, Homo sapiens
aaaagaaaaaaaaaa

SEQ ID NO: 450953 - DNA, 15 bp, Homo sapiens
taaaagaaaaaaaaa

SEQ ID NO: 450954 - DNA, 15 bp, Homo sapiens
gtaaaagaaaaaaaa

SEQ ID NO: 450955 - DNA, 15 bp, Homo sapiens
ggtaaaagaaaaaaa

SEQ ID NO: 450956 - DNA, 15 bp, Homo sapiens
aggtaaaagaaaaaa

SEQ ID NO: 450957 - DNA, 15 bp, Homo sapiens
aaggtaaaagaaaaa

SEQ ID NO: 450958 - DNA, 15 bp, Homo sapiens
aaaggtaaaagaaaa

SEQ ID NO: 450959 - DNA, 15 bp, Homo sapiens
taaaggtaaaagaaa

SEQ ID NO: 450960 - DNA, 15 bp, Homo sapiens
gtaaaggtaaaagaa

SEQ ID NO: 450961 - DNA, 15 bp, Homo sapiens
tgtaaaggtaaaaga

SEQ ID NO: 450962 - DNA, 15 bp, Homo sapiens
ctgtaaaggtaaaag

SEQ ID NO: 450963 - DNA, 15 bp, Homo sapiens
cctgtaaaggtaaaa

SEQ ID NO: 450964 - DNA, 15 bp, Homo sapiens
acctgtaaaggtaaa

SEQ ID NO: 450965 - DNA, 15 bp, Homo sapiens
cacctgtaaaggtaa

SEQ ID NO: 450966 - DNA, 15 bp, Homo sapiens
tcacctgtaaaggta

SEQ ID NO: 450967 - DNA, 15 bp, Homo sapiens
ctcacctgtaaaggt

SEQ ID NO: 450968 - DNA, 15 bp, Homo sapiens
tctcacctgtaaagg

SEQ ID NO: 450969 - DNA, 15 bp, Homo sapiens
ttctcacctgtaaag

SEQ ID NO: 450970 - DNA, 15 bp, Homo sapiens
tttctcacctgtaaa

SEQ ID NO: 450971 - DNA, 15 bp, Homo sapiens
gtttctcacctgtaa

SEQ ID NO: 450972 - DNA, 15 bp, Homo sapiens
ggtttctcacctgta

SEQ ID NO: 450973 - DNA, 15 bp, Homo sapiens
aggtttctcacctgt

SEQ ID NO: 450974 - DNA, 15 bp, Homo sapiens
aaggtttctcacctg

SEQ ID NO: 450975 - DNA, 15 bp, Homo sapiens
taaggtttctcacct

SEQ ID NO: 450976 - DNA, 15 bp, Homo sapiens
gtaaggtttctcacc

SEQ ID NO: 450977 - DNA, 15 bp, Homo sapiens
ggtaaggtttctcac

SEQ ID NO: 450978 - DNA, 15 bp, Homo sapiens
tggtaaggtttctca

SEQ ID NO: 450979 - DNA, 15 bp, Homo sapiens
gtggtaaggtttctc

SEQ ID NO: 450980 - DNA, 15 bp, Homo sapiens
agtggtaaggtttct

SEQ ID NO: 450981 - DNA, 15 bp, Homo sapiens
cagtggtaaggtttc

SEQ ID NO: 450982 - DNA, 15 bp, Homo sapiens
acagtggtaaggttt

SEQ ID NO: 450983 - DNA, 15 bp, Homo sapiens
cacagtggtaaggtt

SEQ ID NO: 450984 - DNA, 15 bp, Homo sapiens
tcacagtggtaaggt

SEQ ID NO: 450985 - DNA, 15 bp, Homo sapiens
gtcacagtggtaagg

SEQ ID NO: 450986 - DNA, 15 bp, Homo sapiens
agtcacagtggtaag

SEQ ID NO: 450987 - DNA, 15 bp, Homo sapiens
cagtcacagtggtaa

SEQ ID NO: 450988 - DNA, 15 bp, Homo sapiens
ccagtcacagtggta

SEQ ID NO: 450989 - DNA, 15 bp, Homo sapiens
cccagtcacagtggt

SEQ ID NO: 450990 - DNA, 15 bp, Homo sapiens
tcccagtcacagtgg

SEQ ID NO: 450991 - DNA, 15 bp, Homo sapiens
gtcccagtcacagtg

SEQ ID NO: 450992 - DNA, 15 bp, Homo sapiens
cgtcccagtcacagt

SEQ ID NO: 450993 - DNA, 15 bp, Homo sapiens
ccgtcccagtcacag

SEQ ID NO: 450994 - DNA, 15 bp, Homo sapiens
gccgtcccagtcaca

SEQ ID NO: 450995 - DNA, 15 bp, Homo sapiens
agccgtcccagtcac

SEQ ID NO: 450996 - DNA, 15 bp, Homo sapiens
cagccgtcccagtca

SEQ ID NO: 450997 - DNA, 15 bp, Homo sapiens
acagccgtcccagtc

SEQ ID NO: 450998 - DNA, 15 bp, Homo sapiens
cacagccgtcccagt

SEQ ID NO: 450999 - DNA, 15 bp, Homo sapiens
ccacagccgtcccag

SEQ ID NO: 451000 - DNA, 15 bp, Homo sapiens
tccacagccgtccca

SEQ ID NO: 451001 - DNA, 15 bp, Homo sapiens
atccacagccgtccc

SEQ ID NO: 451002 - DNA, 15 bp, Homo sapiens
catccacagccgtcc

SEQ ID NO: 451003 - DNA, 15 bp, Homo sapiens
ccatccacagccgtc

SEQ ID NO: 451004 - DNA, 15 bp, Homo sapiens
tccatccacagccgt

SEQ ID NO: 451005 - DNA, 15 bp, Homo sapiens
ttccatccacagccg

SEQ ID NO: 451006 - DNA, 15 bp, Homo sapiens
tttccatccacagcc

SEQ ID NO: 451007 - DNA, 15 bp, Homo sapiens
atttccatccacagc

SEQ ID NO: 451008 - DNA, 15 bp, Homo sapiens
aatttccatccacag

SEQ ID NO: 451009 - DNA, 15 bp, Homo sapiens
gaatttccatccaca

SEQ ID NO: 451010 - DNA, 15 bp, Homo sapiens
cgaatttccatccac

SEQ ID NO: 451011 - DNA, 15 bp, Homo sapiens
gcgaatttccatcca

SEQ ID NO: 451012 - DNA, 15 bp, Homo sapiens
ggcgaatttccatcc

SEQ ID NO: 451013 - DNA, 15 bp, Homo sapiens
gggcgaatttccatc

SEQ ID NO: 451014 - DNA, 15 bp, Homo sapiens
cgggcgaatttccat

SEQ ID NO: 451015 - DNA, 15 bp, Homo sapiens
gcgggcgaatttcca

SEQ ID NO: 451016 - DNA, 15 bp, Homo sapiens
agcgggcgaatttcc

SEQ ID NO: 451017 - DNA, 15 bp, Homo sapiens
gagcgggcgaatttc

SEQ ID NO: 451018 - DNA, 15 bp, Homo sapiens
tgagcgggcgaattt

SEQ ID NO: 451019 - DNA, 15 bp, Homo sapiens
ctgagcgggcgaatt

SEQ ID NO: 451020 - DNA, 15 bp, Homo sapiens
tctgagcgggcgaat

SEQ ID NO: 451021 - DNA, 15 bp, Homo sapiens
atctgagcgggcgaa

SEQ ID NO: 451022 - DNA, 15 bp, Homo sapiens
catctgagcgggcga

SEQ ID NO: 451023 - DNA, 15 bp, Homo sapiens
tcatctgagcgggcg

SEQ ID NO: 451024 - DNA, 15 bp, Homo sapiens
ttcatctgagcgggc

SEQ ID NO: 451025 - DNA, 15 bp, Homo sapiens
gttcatctgagcggg

SEQ ID NO: 451026 - DNA, 15 bp, Homo sapiens
agttcatctgagcgg

SEQ ID NO: 451027 - DNA, 15 bp, Homo sapiens
cagttcatctgagcg

SEQ ID NO: 451028 - DNA, 15 bp, Homo sapiens
tcagttcatctgagc

SEQ ID NO: 451029 - DNA, 15 bp, Homo sapiens
gtcagttcatctgag

SEQ ID NO: 451030 - DNA, 15 bp, Homo sapiens
ggtcagttcatctga

SEQ ID NO: 451031 - DNA, 15 bp, Homo sapiens
tggtcagttcatctg

SEQ ID NO: 451032 - DNA, 15 bp, Homo sapiens
ctggtcagttcatct

SEQ ID NO: 451033 - DNA, 15 bp, Homo sapiens
cctggtcagttcatc

SEQ ID NO: 451034 - DNA, 15 bp, Homo sapiens
gcctggtcagttcat

SEQ ID NO: 451035 - DNA, 15 bp, Homo sapiens
tgcctggtcagttca

SEQ ID NO: 451036 - DNA, 15 bp, Homo sapiens
gtgcctggtcagttc

SEQ ID NO: 451037 - DNA, 15 bp, Homo sapiens
agtgcctggtcagtt

SEQ ID NO: 451038 - DNA, 15 bp, Homo sapiens
tagtgcctggtcagt

SEQ ID NO: 451039 - DNA, 15 bp, Homo sapiens
gtagtgcctggtcag

SEQ ID NO: 451040 - DNA, 15 bp, Homo sapiens
ggtagtgcctggtca

SEQ ID NO: 451041 - DNA, 15 bp, Homo sapiens
cggtagtgcctggtc

SEQ ID NO: 451042 - DNA, 15 bp, Homo sapiens
acggtagtgcctggt

SEQ ID NO: 451043 - DNA, 15 bp, Homo sapiens
tacggtagtgcctgg

SEQ ID NO: 451044 - DNA, 15 bp, Homo sapiens
ttacggtagtgcctg

SEQ ID NO: 451045 - DNA, 15 bp, Homo sapiens
tttacggtagtgcct

SEQ ID NO: 451046 - DNA, 15 bp, Homo sapiens
gtttacggtagtgcc

SEQ ID NO: 451047 - DNA, 15 bp, Homo sapiens
tgtttacggtagtgc

SEQ ID NO: 451048 - DNA, 15 bp, Homo sapiens
gtgtttacggtagtg

SEQ ID NO: 451049 - DNA, 15 bp, Homo sapiens
tgtgtttacggtagt

SEQ ID NO: 451050 - DNA, 15 bp, Homo sapiens
gtgtgtttacggtag

SEQ ID NO: 451051 - DNA, 15 bp, Homo sapiens
cgtgtgtttacggta

SEQ ID NO: 451052 - DNA, 15 bp, Homo sapiens
ccgtgtgtttacggt

SEQ ID NO: 451053 - DNA, 15 bp, Homo sapiens
cccgtgtgtttacgg

SEQ ID NO: 451054 - DNA, 15 bp, Homo sapiens
ccccgtgtgtttacg

SEQ ID NO: 451055 - DNA, 15 bp, Homo sapiens
gccccgtgtgtttac

SEQ ID NO: 451056 - DNA, 15 bp, Homo sapiens
tgccccgtgtgttta

SEQ ID NO: 451057 - DNA, 15 bp, Homo sapiens
gtgccccgtgtgttt

SEQ ID NO: 451058 - DNA, 15 bp, Homo sapiens
ggtgccccgtgtgtt

SEQ ID NO: 451059 - DNA, 15 bp, Homo sapiens
cggtgccccgtgtgt

SEQ ID NO: 451060 - DNA, 15 bp, Homo sapiens
gcggtgccccgtgtg

SEQ ID NO: 451061 - DNA, 15 bp, Homo sapiens
ggcggtgccccgtgt

SEQ ID NO: 451062 - DNA, 15 bp, Homo sapiens
gggcggtgccccgtg

SEQ ID NO: 451063 - DNA, 15 bp, Homo sapiens
cgggcggtgccccgt

SEQ ID NO: 451064 - DNA, 15 bp, Homo sapiens
acgggcggtgccccg

SEQ ID NO: 451065 - DNA, 15 bp, Homo sapiens
aacgggcggtgcccc

SEQ ID NO: 451066 - DNA, 15 bp, Homo sapiens
gaacgggcggtgccc

SEQ ID NO: 451067 - DNA, 15 bp, Homo sapiens
ggaacgggcggtgcc

SEQ ID NO: 451068 - DNA, 15 bp, Homo sapiens
tggaacgggcggtgc

SEQ ID NO: 451069 - DNA, 15 bp, Homo sapiens
ctggaacgggcggtg

SEQ ID NO: 451070 - DNA, 15 bp, Homo sapiens
actggaacgggcggt

SEQ ID NO: 451071 - DNA, 15 bp, Homo sapiens
cactggaacgggcgg

SEQ ID NO: 451072 - DNA, 15 bp, Homo sapiens
gcactggaacgggcg

SEQ ID NO: 451073 - DNA, 15 bp, Homo sapiens
ggcactggaacgggc

SEQ ID NO: 451074 - DNA, 15 bp, Homo sapiens
tggcactggaacggg

SEQ ID NO: 451075 - DNA, 15 bp, Homo sapiens
ttggcactggaacgg

SEQ ID NO: 451076 - DNA, 15 bp, Homo sapiens
tttggcactggaacg

SEQ ID NO: 451077 - DNA, 15 bp, Homo sapiens
ttttggcactggaac

SEQ ID NO: 451078 - DNA, 15 bp, Homo sapiens
tttttggcactggaa

SEQ ID NO: 451079 - DNA, 15 bp, Homo sapiens
atttttggcactgga

SEQ ID NO: 451080 - DNA, 15 bp, Homo sapiens
catttttggcactgg

SEQ ID NO: 451081 - DNA, 15 bp, Homo sapiens
gcatttttggcactg

SEQ ID NO: 451082 - DNA, 15 bp, Homo sapiens
cgcatttttggcact

SEQ ID NO: 451083 - DNA, 15 bp, Homo sapiens
tcgcatttttggcac

SEQ ID NO: 451084 - DNA, 15 bp, Homo sapiens
gtcgcatttttggca

SEQ ID NO: 451085 - DNA, 15 bp, Homo sapiens
ggtcgcatttttggc

SEQ ID NO: 451086 - DNA, 15 bp, Homo sapiens
cggtcgcatttttgg

SEQ ID NO: 451087 - DNA, 15 bp, Homo sapiens
tcggtcgcatttttg

SEQ ID NO: 451088 - DNA, 15 bp, Homo sapiens
ctcggtcgcattttt

SEQ ID NO: 451089 - DNA, 15 bp, Homo sapiens
gctcggtcgcatttt

SEQ ID NO: 451090 - DNA, 15 bp, Homo sapiens
tgctcggtcgcattt

SEQ ID NO: 451091 - DNA, 15 bp, Homo sapiens
atgctcggtcgcatt

SEQ ID NO: 451092 - DNA, 15 bp, Homo sapiens
aatgctcggtcgcat

SEQ ID NO: 451093 - DNA, 15 bp, Homo sapiens
aaatgctcggtcgca

SEQ ID NO: 451094 - DNA, 15 bp, Homo sapiens
aaaatgctcggtcgc

SEQ ID NO: 451095 - DNA, 15 bp, Homo sapiens
gaaaatgctcggtcg

SEQ ID NO: 451096 - DNA, 15 bp, Homo sapiens
ggaaaatgctcggtc

SEQ ID NO: 451097 - DNA, 15 bp, Homo sapiens
tggaaaatgctcggt

SEQ ID NO: 451098 - DNA, 15 bp, Homo sapiens
ctggaaaatgctcgg

SEQ ID NO: 451099 - DNA, 15 bp, Homo sapiens
cctggaaaatgctcg

SEQ ID NO: 451100 - DNA, 15 bp, Homo sapiens
acctggaaaatgctc

SEQ ID NO: 451101 - DNA, 15 bp, Homo sapiens
gacctggaaaatgct

SEQ ID NO: 451102 - DNA, 15 bp, Homo sapiens
cgacctggaaaatgc

SEQ ID NO: 451103 - DNA, 15 bp, Homo sapiens
ccgacctggaaaatg

SEQ ID NO: 451104 - DNA, 15 bp, Homo sapiens
tccgacctggaaaat

SEQ ID NO: 451105 - DNA, 15 bp, Homo sapiens
gtccgacctggaaaa

SEQ ID NO: 451106 - DNA, 15 bp, Homo sapiens
ggtccgacctggaaa

SEQ ID NO: 451107 - DNA, 15 bp, Homo sapiens
tggtccgacctggaa

SEQ ID NO: 451108 - DNA, 15 bp, Homo sapiens
gtggtccgacctgga

SEQ ID NO: 451109 - DNA, 15 bp, Homo sapiens
ggtggtccgacctgg

SEQ ID NO: 451110 - DNA, 15 bp, Homo sapiens
aggtggtccgacctg

SEQ ID NO: 451111 - DNA, 15 bp, Homo sapiens
gaggtggtccgacct

SEQ ID NO: 451112 - DNA, 15 bp, Homo sapiens
cgaggtggtccgacc

SEQ ID NO: 451113 - DNA, 15 bp, Homo sapiens
gcgaggtggtccgac

SEQ ID NO: 451114 - DNA, 15 bp, Homo sapiens
ggcgaggtggtccga

SEQ ID NO: 451115 - DNA, 15 bp, Homo sapiens
aggcgaggtggtccg

SEQ ID NO: 451116 - DNA, 15 bp, Homo sapiens
aaggcgaggtggtcc

SEQ ID NO: 451117 - DNA, 15 bp, Homo sapiens
taaggcgaggtggtc

SEQ ID NO: 451118 - DNA, 15 bp, Homo sapiens
gtaaggcgaggtggt

SEQ ID NO: 451119 - DNA, 15 bp, Homo sapiens
tgtaaggcgaggtgg

SEQ ID NO: 451120 - DNA, 15 bp, Homo sapiens
gtgtaaggcgaggtg

SEQ ID NO: 451121 - DNA, 15 bp, Homo sapiens
tgtgtaaggcgaggt

SEQ ID NO: 451122 - DNA, 15 bp, Homo sapiens
atgtgtaaggcgagg

SEQ ID NO: 451123 - DNA, 15 bp, Homo sapiens
catgtgtaaggcgag

SEQ ID NO: 451124 - DNA, 15 bp, Homo sapiens
tcatgtgtaaggcga

SEQ ID NO: 451125 - DNA, 15 bp, Homo sapiens
ttcatgtgtaaggcg

SEQ ID NO: 451126 - DNA, 15 bp, Homo sapiens
cttcatgtgtaaggc

SEQ ID NO: 451127 - DNA, 15 bp, Homo sapiens
tcttcatgtgtaagg

SEQ ID NO: 451128 - DNA, 15 bp, Homo sapiens
ctcttcatgtgtaag

SEQ ID NO: 451129 - DNA, 15 bp, Homo sapiens
cctcttcatgtgtaa

SEQ ID NO: 451130 - DNA, 15 bp, Homo sapiens
gcctcttcatgtgta

SEQ ID NO: 451131 - DNA, 15 bp, Homo sapiens
tgcctcttcatgtgt

SEQ ID NO: 451132 - DNA, 15 bp, Homo sapiens
atgcctcttcatgtg

SEQ ID NO: 451133 - DNA, 15 bp, Homo sapiens
aatgcctcttcatgt

SEQ ID NO: 451134 - DNA, 15 bp, Homo sapiens
aaatgcctcttcatg

SEQ ID NO: 451135 - DNA, 15 bp, Homo sapiens
aaaatgcctcttcat

SEQ ID NO: 451136 - DNA, 15 bp, Homo sapiens
aaaaatgcctcttca

SEQ ID NO: 451137 - DNA, 15 bp, Homo sapiens
taaaaatgcctcttc

SEQ ID NO: 451138 - DNA, 15 bp, Homo sapiens
ttaaaaatgcctctt

SEQ ID NO: 451139 - DNA, 15 bp, Homo sapiens
tttaaaaatgcctct

SEQ ID NO: 451140 - DNA, 15 bp, Homo sapiens
atttaaaaatgcctc

SEQ ID NO: 451141 - DNA, 15 bp, Homo sapiens
gatttaaaaatgcct

SEQ ID NO: 451142 - DNA, 15 bp, Homo sapiens
ggatttaaaaatgcc

SEQ ID NO: 451143 - DNA, 15 bp, Homo sapiens
gggatttaaaaatgc

SEQ ID NO: 451144 - DNA, 15 bp, Homo sapiens
tgggatttaaaaatg

SEQ ID NO: 451145 - DNA, 15 bp, Homo sapiens
ctgggatttaaaaat

SEQ ID NO: 451146 - DNA, 15 bp, Homo sapiens
tctgggatttaaaaa

SEQ ID NO: 451147 - DNA, 15 bp, Homo sapiens
gtctgggatttaaaa

SEQ ID NO: 451148 - DNA, 15 bp, Homo sapiens
tgtctgggatttaaa

SEQ ID NO: 451149 - DNA, 15 bp, Homo sapiens
ctgtctgggatttaa

SEQ ID NO: 451150 - DNA, 15 bp, Homo sapiens
actgtctgggattta

SEQ ID NO: 451151 - DNA, 15 bp, Homo sapiens
cactgtctgggattt

SEQ ID NO: 451152 - DNA, 15 bp, Homo sapiens
ccactgtctgggatt

SEQ ID NO: 451153 - DNA, 15 bp, Homo sapiens
tccactgtctgggat

SEQ ID NO: 451154 - DNA, 15 bp, Homo sapiens
atccactgtctggga

SEQ ID NO: 451155 - DNA, 15 bp, Homo sapiens
tatccactgtctggg

SEQ ID NO: 451156 - DNA, 15 bp, Homo sapiens
atatccactgtctgg

SEQ ID NO: 451157 - DNA, 15 bp, Homo sapiens
catatccactgtctg

SEQ ID NO: 451158 - DNA, 15 bp, Homo sapiens
tcatatccactgtct

SEQ ID NO: 451159 - DNA, 15 bp, Homo sapiens
gtcatatccactgtc

SEQ ID NO: 451160 - DNA, 15 bp, Homo sapiens
ggtcatatccactgt

SEQ ID NO: 451161 - DNA, 15 bp, Homo sapiens
gggtcatatccactg

SEQ ID NO: 451162 - DNA, 15 bp, Homo sapiens
tgggtcatatccact

SEQ ID NO: 451163 - DNA, 15 bp, Homo sapiens
gtgggtcatatccac

SEQ ID NO: 451164 - DNA, 15 bp, Homo sapiens
tgtgggtcatatcca

SEQ ID NO: 451165 - DNA, 15 bp, Homo sapiens
gtgtgggtcatatcc

SEQ ID NO: 451166 - DNA, 15 bp, Homo sapiens
agtgtgggtcatatc

SEQ ID NO: 451167 - DNA, 15 bp, Homo sapiens
cagtgtgggtcatat

SEQ ID NO: 451168 - DNA, 15 bp, Homo sapiens
gcagtgtgggtcata

SEQ ID NO: 451169 - DNA, 15 bp, Homo sapiens
ggcagtgtgggtcat

SEQ ID NO: 451170 - DNA, 15 bp, Homo sapiens
tggcagtgtgggtca

SEQ ID NO: 451171 - DNA, 15 bp, Homo sapiens
ctggcagtgtgggtc

SEQ ID NO: 451172 - DNA, 15 bp, Homo sapiens
tctggcagtgtgggt

SEQ ID NO: 451173 - DNA, 15 bp, Homo sapiens
ttctggcagtgtggg

SEQ ID NO: 451174 - DNA, 15 bp, Homo sapiens
cttctggcagtgtgg

SEQ ID NO: 451175 - DNA, 15 bp, Homo sapiens
tcttctggcagtgtg

SEQ ID NO: 451176 - DNA, 15 bp, Homo sapiens
ctcttctggcagtgt

SEQ ID NO: 451177 - DNA, 15 bp, Homo sapiens
tctcttctggcagtg

SEQ ID NO: 451178 - DNA, 15 bp, Homo sapiens
ttctcttctggcagt

SEQ ID NO: 451179 - DNA, 15 bp, Homo sapiens
attctcttctggcag

SEQ ID NO: 451180 - DNA, 15 bp, Homo sapiens
aattctcttctggca

SEQ ID NO: 451181 - DNA, 15 bp, Homo sapiens
gaattctcttctggc

SEQ ID NO: 451182 - DNA, 15 bp, Homo sapiens
tgaattctcttctgg

SEQ ID NO: 451183 - DNA, 15 bp, Homo sapiens
ctgaattctcttctg

SEQ ID NO: 451184 - DNA, 15 bp, Homo sapiens
actgaattctcttct

SEQ ID NO: 451185 - DNA, 15 bp, Homo sapiens
tactgaattctcttc

SEQ ID NO: 451186 - DNA, 15 bp, Homo sapiens
atactgaattctctt

SEQ ID NO: 451187 - DNA, 15 bp, Homo sapiens
aatactgaattctct

SEQ ID NO: 451188 - DNA, 15 bp, Homo sapiens
aaatactgaattctc

SEQ ID NO: 451189 - DNA, 15 bp, Homo sapiens
aaaatactgaattct

SEQ ID NO: 451190 - DNA, 15 bp, Homo sapiens
aaaaatactgaattc

SEQ ID NO: 451191 - DNA, 15 bp, Homo sapiens
aaaaaatactgaatt

SEQ ID NO: 451192 - DNA, 15 bp, Homo sapiens
taaaaaatactgaat

SEQ ID NO: 451193 - DNA, 15 bp, Homo sapiens
gtaaaaaatactgaa

SEQ ID NO: 451194 - DNA, 15 bp, Homo sapiens
agtaaaaaatactga

SEQ ID NO: 451195 - DNA, 15 bp, Homo sapiens
aagtaaaaaatactg

SEQ ID NO: 451196 - DNA, 15 bp, Homo sapiens
aaagtaaaaaatact

SEQ ID NO: 451197 - DNA, 15 bp, Homo sapiens
aaaagtaaaaaatac

SEQ ID NO: 451198 - DNA, 15 bp, Homo sapiens
gaaaagtaaaaaata

SEQ ID NO: 451199 - DNA, 15 bp, Homo sapiens
tgaaaagtaaaaaat

SEQ ID NO: 451200 - DNA, 15 bp, Homo sapiens
gtgaaaagtaaaaaa

SEQ ID NO: 451201 - DNA, 15 bp, Homo sapiens
tgtgaaaagtaaaaa

SEQ ID NO: 451202 - DNA, 15 bp, Homo sapiens
gtgtgaaaagtaaaa

SEQ ID NO: 451203 - DNA, 15 bp, Homo sapiens
agtgtgaaaagtaaa

SEQ ID NO: 451204 - DNA, 15 bp, Homo sapiens
cagtgtgaaaagtaa

SEQ ID NO: 451205 - DNA, 15 bp, Homo sapiens
acagtgtgaaaagta

SEQ ID NO: 451206 - DNA, 15 bp, Homo sapiens
gacagtgtgaaaagt

SEQ ID NO: 451207 - DNA, 15 bp, Homo sapiens
agacagtgtgaaaag

SEQ ID NO: 451208 - DNA, 15 bp, Homo sapiens
aagacagtgtgaaaa

SEQ ID NO: 451209 - DNA, 15 bp, Homo sapiens
gaagacagtgtgaaa

SEQ ID NO: 451210 - DNA, 15 bp, Homo sapiens
ggaagacagtgtgaa

SEQ ID NO: 451211 - DNA, 15 bp, Homo sapiens
gggaagacagtgtga

SEQ ID NO: 451212 - DNA, 15 bp, Homo sapiens
cgggaagacagtgtg

SEQ ID NO: 451213 - DNA, 15 bp, Homo sapiens
tcgggaagacagtgt

SEQ ID NO: 451214 - DNA, 15 bp, Homo sapiens
atcgggaagacagtg

SEQ ID NO: 451215 - DNA, 15 bp, Homo sapiens
catcgggaagacagt

SEQ ID NO: 451216 - DNA, 15 bp, Homo sapiens
tcatcgggaagacag

SEQ ID NO: 451217 - DNA, 15 bp, Homo sapiens
ctcatcgggaagaca

SEQ ID NO: 451218 - DNA, 15 bp, Homo sapiens
cctcatcgggaagac

SEQ ID NO: 451219 - DNA, 15 bp, Homo sapiens
ccctcatcgggaaga

SEQ ID NO: 451220 - DNA, 15 bp, Homo sapiens
tccctcatcgggaag

SEQ ID NO: 451221 - DNA, 15 bp, Homo sapiens
ttccctcatcgggaa

SEQ ID NO: 451222 - DNA, 15 bp, Homo sapiens
cttccctcatcggga

SEQ ID NO: 451223 - DNA, 15 bp, Homo sapiens
ccttccctcatcggg

SEQ ID NO: 451224 - DNA, 15 bp, Homo sapiens
tccttccctcatcgg

SEQ ID NO: 451225 - DNA, 15 bp, Homo sapiens
ctccttccctcatcg

SEQ ID NO: 451226 - DNA, 15 bp, Homo sapiens
gctccttccctcatc

SEQ ID NO: 451227 - DNA, 15 bp, Homo sapiens
ggctccttccctcat

SEQ ID NO: 451228 - DNA, 15 bp, Homo sapiens
gggctccttccctca

SEQ ID NO: 451229 - DNA, 15 bp, Homo sapiens
tgggctccttccctc

SEQ ID NO: 451230 - DNA, 15 bp, Homo sapiens
ctgggctccttccct

SEQ ID NO: 451231 - DNA, 15 bp, Homo sapiens
gctgggctccttccc

SEQ ID NO: 451232 - DNA, 15 bp, Homo sapiens
ggctgggctccttcc

SEQ ID NO: 451233 - DNA, 15 bp, Homo sapiens
tggctgggctccttc

SEQ ID NO: 451234 - DNA, 15 bp, Homo sapiens
ctggctgggctcctt

SEQ ID NO: 451235 - DNA, 15 bp, Homo sapiens
tctggctgggctcct

SEQ ID NO: 451236 - DNA, 15 bp, Homo sapiens
ttctggctgggctcc

SEQ ID NO: 451237 - DNA, 15 bp, Homo sapiens
tttctggctgggctc

SEQ ID NO: 451238 - DNA, 15 bp, Homo sapiens
ctttctggctgggct

SEQ ID NO: 451239 - DNA, 15 bp, Homo sapiens
gctttctggctgggc

SEQ ID NO: 451240 - DNA, 15 bp, Homo sapiens
tgctttctggctggg

SEQ ID NO: 451241 - DNA, 15 bp, Homo sapiens
gtgctttctggctgg

SEQ ID NO: 451242 - DNA, 15 bp, Homo sapiens
agtgctttctggctg

SEQ ID NO: 451243 - DNA, 15 bp, Homo sapiens
tagtgctttctggct

SEQ ID NO: 451244 - DNA, 15 bp, Homo sapiens
gtagtgctttctggc

SEQ ID NO: 451245 - DNA, 15 bp, Homo sapiens
tgtagtgctttctgg

SEQ ID NO: 451246 - DNA, 15 bp, Homo sapiens
ttgtagtgctttctg

SEQ ID NO: 451247 - DNA, 15 bp, Homo sapiens
attgtagtgctttct

SEQ ID NO: 451248 - DNA, 15 bp, Homo sapiens
gattgtagtgctttc

SEQ ID NO: 451249 - DNA, 15 bp, Homo sapiens
tgattgtagtgcttt

SEQ ID NO: 451250 - DNA, 15 bp, Homo sapiens
atgattgtagtgctt

SEQ ID NO: 451251 - DNA, 15 bp, Homo sapiens
catgattgtagtgct

SEQ ID NO: 451252 - DNA, 15 bp, Homo sapiens
ccatgattgtagtgc

SEQ ID NO: 451253 - DNA, 15 bp, Homo sapiens
accatgattgtagtg

SEQ ID NO: 451254 - DNA, 15 bp, Homo sapiens
gaccatgattgtagt

SEQ ID NO: 451255 - DNA, 15 bp, Homo sapiens
tgaccatgattgtag

SEQ ID NO: 451256 - DNA, 15 bp, Homo sapiens
ttgaccatgattgta

SEQ ID NO: 451257 - DNA, 15 bp, Homo sapiens
cttgaccatgattgt

SEQ ID NO: 451258 - DNA, 15 bp, Homo sapiens
acttgaccatgattg

SEQ ID NO: 451259 - DNA, 15 bp, Homo sapiens
aacttgaccatgatt

SEQ ID NO: 451260 - DNA, 15 bp, Homo sapiens
gaacttgaccatgat

SEQ ID NO: 451261 - DNA, 15 bp, Homo sapiens
ggaacttgaccatga

SEQ ID NO: 451262 - DNA, 15 bp, Homo sapiens
gggaacttgaccatg

SEQ ID NO: 451263 - DNA, 15 bp, Homo sapiens
tgggaacttgaccat

SEQ ID NO: 451264 - DNA, 15 bp, Homo sapiens
ttgggaacttgacca

SEQ ID NO: 451265 - DNA, 15 bp, Homo sapiens
gttgggaacttgacc

SEQ ID NO: 451266 - DNA, 15 bp, Homo sapiens
agttgggaacttgac

SEQ ID NO: 451267 - DNA, 15 bp, Homo sapiens
cagttgggaacttga

SEQ ID NO: 451268 - DNA, 15 bp, Homo sapiens
tcagttgggaacttg

SEQ ID NO: 451269 - DNA, 15 bp, Homo sapiens
ctcagttgggaactt

SEQ ID NO: 451270 - DNA, 15 bp, Homo sapiens
actcagttgggaact

SEQ ID NO: 451271 - DNA, 15 bp, Homo sapiens
gactcagttgggaac

SEQ ID NO: 451272 - DNA, 15 bp, Homo sapiens
tgactcagttgggaa

SEQ ID NO: 451273 - DNA, 15 bp, Homo sapiens
atgactcagttggga

SEQ ID NO: 451274 - DNA, 15 bp, Homo sapiens
gatgactcagttggg

SEQ ID NO: 451275 - DNA, 15 bp, Homo sapiens
agatgactcagttgg

SEQ ID NO: 451276 - DNA, 15 bp, Homo sapiens
aagatgactcagttg

SEQ ID NO: 451277 - DNA, 15 bp, Homo sapiens
caagatgactcagtt

SEQ ID NO: 451278 - DNA, 15 bp, Homo sapiens
acaagatgactcagt

SEQ ID NO: 451279 - DNA, 15 bp, Homo sapiens
cacaagatgactcag

SEQ ID NO: 451280 - DNA, 15 bp, Homo sapiens
tcacaagatgactca

SEQ ID NO: 451281 - DNA, 15 bp, Homo sapiens
ctcacaagatgactc

SEQ ID NO: 451282 - DNA, 15 bp, Homo sapiens
actcacaagatgact

SEQ ID NO: 451283 - DNA, 15 bp, Homo sapiens
cactcacaagatgac

SEQ ID NO: 451284 - DNA, 15 bp, Homo sapiens
ccactcacaagatga

SEQ ID NO: 451285 - DNA, 15 bp, Homo sapiens
tccactcacaagatg

SEQ ID NO: 451286 - DNA, 15 bp, Homo sapiens
atccactcacaagat

SEQ ID NO: 451287 - DNA, 15 bp, Homo sapiens
tatccactcacaaga

SEQ ID NO: 451288 - DNA, 15 bp, Homo sapiens
ttatccactcacaag

SEQ ID NO: 451289 - DNA, 15 bp, Homo sapiens
attatccactcacaa

SEQ ID NO: 451290 - DNA, 15 bp, Homo sapiens
gattatccactcaca

SEQ ID NO: 451291 - DNA, 15 bp, Homo sapiens
tgattatccactcac

SEQ ID NO: 451292 - DNA, 15 bp, Homo sapiens
ctgattatccactca

SEQ ID NO: 451293 - DNA, 15 bp, Homo sapiens
cctgattatccactc

SEQ ID NO: 451294 - DNA, 15 bp, Homo sapiens
tcctgattatccact

SEQ ID NO: 451295 - DNA, 15 bp, Homo sapiens
ttcctgattatccac

SEQ ID NO: 451296 - DNA, 15 bp, Homo sapiens
tttcctgattatcca

SEQ ID NO: 451297 - DNA, 15 bp, Homo sapiens
ttttcctgattatcc

SEQ ID NO: 451298 - DNA, 15 bp, Homo sapiens
tttttcctgattatc

SEQ ID NO: 451299 - DNA, 15 bp, Homo sapiens
atttttcctgattat

SEQ ID NO: 451300 - DNA, 15 bp, Homo sapiens
catttttcctgatta

SEQ ID NO: 451301 - DNA, 15 bp, Homo sapiens
tcatttttcctgatt

SEQ ID NO: 451302 - DNA, 15 bp, Homo sapiens
ctcatttttcctgat

SEQ ID NO: 451303 - DNA, 15 bp, Homo sapiens
cctcatttttcctga

SEQ ID NO: 451304 - DNA, 15 bp, Homo sapiens
tcctcatttttcctg

SEQ ID NO: 451305 - DNA, 15 bp, Homo sapiens
ttcctcatttttcct

SEQ ID NO: 451306 - DNA, 15 bp, Homo sapiens
attcctcatttttcc

SEQ ID NO: 451307 - DNA, 15 bp, Homo sapiens
gattcctcatttttc

SEQ ID NO: 451308 - DNA, 15 bp, Homo sapiens
ggattcctcattttt

SEQ ID NO: 451309 - DNA, 15 bp, Homo sapiens
tggattcctcatttt

SEQ ID NO: 451310 - DNA, 15 bp, Homo sapiens
ttggattcctcattt

SEQ ID NO: 451311 - DNA, 15 bp, Homo sapiens
tttggattcctcatt

SEQ ID NO: 451312 - DNA, 15 bp, Homo sapiens
ttttggattcctcat

SEQ ID NO: 451313 - DNA, 15 bp, Homo sapiens
cttttggattcctca

SEQ ID NO: 451314 - DNA, 15 bp, Homo sapiens
tcttttggattcctc

SEQ ID NO: 451315 - DNA, 15 bp, Homo sapiens
gtcttttggattcct

SEQ ID NO: 451316 - DNA, 15 bp, Homo sapiens
tgtcttttggattcc

SEQ ID NO: 451317 - DNA, 15 bp, Homo sapiens
ttgtcttttggattc

SEQ ID NO: 451318 - DNA, 15 bp, Homo sapiens
tttgtcttttggatt

SEQ ID NO: 451319 - DNA, 15 bp, Homo sapiens
ttttgtcttttggat

SEQ ID NO: 451320 - DNA, 15 bp, Homo sapiens
tttttgtcttttgga

SEQ ID NO: 451321 - DNA, 15 bp, Homo sapiens
atttttgtcttttgg

SEQ ID NO: 451322 - DNA, 15 bp, Homo sapiens
gatttttgtcttttg

SEQ ID NO: 451323 - DNA, 15 bp, Homo sapiens
tgatttttgtctttt

SEQ ID NO: 451324 - DNA, 15 bp, Homo sapiens
ttgatttttgtcttt

SEQ ID NO: 451325 - DNA, 15 bp, Homo sapiens
tttgatttttgtctt

SEQ ID NO: 451326 - DNA, 15 bp, Homo sapiens
ctttgatttttgtct

SEQ ID NO: 451327 - DNA, 15 bp, Homo sapiens
tctttgatttttgtc

SEQ ID NO: 451328 - DNA, 15 bp, Homo sapiens
ttctttgatttttgt

SEQ ID NO: 451329 - DNA, 15 bp, Homo sapiens
gttctttgatttttg

SEQ ID NO: 451330 - DNA, 15 bp, Homo sapiens
tgttctttgattttt

SEQ ID NO: 451331 - DNA, 15 bp, Homo sapiens
ctgttctttgatttt

SEQ ID NO: 451332 - DNA, 15 bp, Homo sapiens
tctgttctttgattt

SEQ ID NO: 451333 - DNA, 15 bp, Homo sapiens
atctgttctttgatt

SEQ ID NO: 451334 - DNA, 15 bp, Homo sapiens
catctgttctttgat

SEQ ID NO: 451335 - DNA, 15 bp, Homo sapiens
ccatctgttctttga

SEQ ID NO: 451336 - DNA, 15 bp, Homo sapiens
cccatctgttctttg

SEQ ID NO: 451337 - DNA, 15 bp, Homo sapiens
ccccatctgttcttt

SEQ ID NO: 451338 - DNA, 15 bp, Homo sapiens
accccatctgttctt

SEQ ID NO: 451339 - DNA, 15 bp, Homo sapiens
gaccccatctgttct

SEQ ID NO: 451340 - DNA, 15 bp, Homo sapiens
agaccccatctgttc

SEQ ID NO: 451341 - DNA, 15 bp, Homo sapiens
cagaccccatctgtt

SEQ ID NO: 451342 - DNA, 15 bp, Homo sapiens
acagaccccatctgt

SEQ ID NO: 451343 - DNA, 15 bp, Homo sapiens
cacagaccccatctg

SEQ ID NO: 451344 - DNA, 15 bp, Homo sapiens
tcacagaccccatct

SEQ ID NO: 451345 - DNA, 15 bp, Homo sapiens
gtcacagaccccatc

SEQ ID NO: 451346 - DNA, 15 bp, Homo sapiens
agtcacagaccccat

SEQ ID NO: 451347 - DNA, 15 bp, Homo sapiens
cagtcacagacccca

SEQ ID NO: 451348 - DNA, 15 bp, Homo sapiens
ccagtcacagacccc

SEQ ID NO: 451349 - DNA, 15 bp, Homo sapiens
tccagtcacagaccc

SEQ ID NO: 451350 - DNA, 15 bp, Homo sapiens
atccagtcacagacc

SEQ ID NO: 451351 - DNA, 15 bp, Homo sapiens
gatccagtcacagac

SEQ ID NO: 451352 - DNA, 15 bp, Homo sapiens
agatccagtcacaga

SEQ ID NO: 451353 - DNA, 15 bp, Homo sapiens
aagatccagtcacag

SEQ ID NO: 451354 - DNA, 15 bp, Homo sapiens
gaagatccagtcaca

SEQ ID NO: 451355 - DNA, 15 bp, Homo sapiens
agaagatccagtcac

SEQ ID NO: 451356 - DNA, 15 bp, Homo sapiens
tagaagatccagtca

SEQ ID NO: 451357 - DNA, 15 bp, Homo sapiens
atagaagatccagtc

SEQ ID NO: 451358 - DNA, 15 bp, Homo sapiens
gatagaagatccagt

SEQ ID NO: 451359 - DNA, 15 bp, Homo sapiens
tgatagaagatccag

SEQ ID NO: 451360 - DNA, 15 bp, Homo sapiens
atgatagaagatcca

SEQ ID NO: 451361 - DNA, 15 bp, Homo sapiens
aatgatagaagatcc

SEQ ID NO: 451362 - DNA, 15 bp, Homo sapiens
gaatgatagaagatc

SEQ ID NO: 451363 - DNA, 15 bp, Homo sapiens
ggaatgatagaagat

SEQ ID NO: 451364 - DNA, 15 bp, Homo sapiens
tggaatgatagaaga

SEQ ID NO: 451365 - DNA, 15 bp, Homo sapiens
ttggaatgatagaag

SEQ ID NO: 451366 - DNA, 15 bp, Homo sapiens
attggaatgatagaa

SEQ ID NO: 451367 - DNA, 15 bp, Homo sapiens
aattggaatgataga

SEQ ID NO: 451368 - DNA, 15 bp, Homo sapiens
gaattggaatgatag

SEQ ID NO: 451369 - DNA, 15 bp, Homo sapiens
agaattggaatgata

SEQ ID NO: 451370 - DNA, 15 bp, Homo sapiens
tagaattggaatgat

SEQ ID NO: 451371 - DNA, 15 bp, Homo sapiens
ttagaattggaatga

SEQ ID NO: 451372 - DNA, 15 bp, Homo sapiens
tttagaattggaatg

SEQ ID NO: 451373 - DNA, 15 bp, Homo sapiens
atttagaattggaat

SEQ ID NO: 451374 - DNA, 15 bp, Homo sapiens
gatttagaattggaa

SEQ ID NO: 451375 - DNA, 15 bp, Homo sapiens
ggatttagaattgga

SEQ ID NO: 451376 - DNA, 15 bp, Homo sapiens
cggatttagaattgg

SEQ ID NO: 451377 - DNA, 15 bp, Homo sapiens
tcggatttagaattg

SEQ ID NO: 451378 - DNA, 15 bp, Homo sapiens
gtcggatttagaatt

SEQ ID NO: 451379 - DNA, 15 bp, Homo sapiens
agtcggatttagaat

SEQ ID NO: 451380 - DNA, 15 bp, Homo sapiens
aagtcggatttagaa

SEQ ID NO: 451381 - DNA, 15 bp, Homo sapiens
caagtcggatttaga

SEQ ID NO: 451382 - DNA, 15 bp, Homo sapiens
tcaagtcggatttag

SEQ ID NO: 451383 - DNA, 15 bp, Homo sapiens
ttcaagtcggattta

SEQ ID NO: 451384 - DNA, 15 bp, Homo sapiens
attcaagtcggattt

SEQ ID NO: 451385 - DNA, 15 bp, Homo sapiens
tattcaagtcggatt

SEQ ID NO: 451386 - DNA, 15 bp, Homo sapiens
atattcaagtcggat

SEQ ID NO: 451387 - DNA, 15 bp, Homo sapiens
aatattcaagtcgga

SEQ ID NO: 451388 - DNA, 15 bp, Homo sapiens
gaatattcaagtcgg

SEQ ID NO: 451389 - DNA, 15 bp, Homo sapiens
ggaatattcaagtcg

SEQ ID NO: 451390 - DNA, 15 bp, Homo sapiens
aggaatattcaagtc

SEQ ID NO: 451391 - DNA, 15 bp, Homo sapiens
caggaatattcaagt

SEQ ID NO: 451392 - DNA, 15 bp, Homo sapiens
ccaggaatattcaag

SEQ ID NO: 451393 - DNA, 15 bp, Homo sapiens
tccaggaatattcaa

SEQ ID NO: 451394 - DNA, 15 bp, Homo sapiens
gtccaggaatattca

SEQ ID NO: 451395 - DNA, 15 bp, Homo sapiens
agtccaggaatattc

SEQ ID NO: 451396 - DNA, 15 bp, Homo sapiens
aagtccaggaatatt

SEQ ID NO: 451397 - DNA, 15 bp, Homo sapiens
taagtccaggaatat

SEQ ID NO: 451398 - DNA, 15 bp, Homo sapiens
gtaagtccaggaata

SEQ ID NO: 451399 - DNA, 15 bp, Homo sapiens
tgtaagtccaggaat

SEQ ID NO: 451400 - DNA, 15 bp, Homo sapiens
ttgtaagtccaggaa

SEQ ID NO: 451401 - DNA, 15 bp, Homo sapiens
tttgtaagtccagga

SEQ ID NO: 451402 - DNA, 15 bp, Homo sapiens
ttttgtaagtccagg

SEQ ID NO: 451403 - DNA, 15 bp, Homo sapiens
attttgtaagtccag

SEQ ID NO: 451404 - DNA, 15 bp, Homo sapiens
cattttgtaagtcca

SEQ ID NO: 451405 - DNA, 15 bp, Homo sapiens
gcattttgtaagtcc

SEQ ID NO: 451406 - DNA, 15 bp, Homo sapiens
ggcattttgtaagtc

SEQ ID NO: 451407 - DNA, 15 bp, Homo sapiens
tggcattttgtaagt

SEQ ID NO: 451408 - DNA, 15 bp, Homo sapiens
ttggcattttgtaag

SEQ ID NO: 451409 - DNA, 15 bp, Homo sapiens
cttggcattttgtaa

SEQ ID NO: 451410 - DNA, 15 bp, Homo sapiens
ccttggcattttgta

SEQ ID NO: 451411 - DNA, 15 bp, Homo sapiens
cccttggcattttgt

SEQ ID NO: 451412 - DNA, 15 bp, Homo sapiens
ccccttggcattttg

SEQ ID NO: 451413 - DNA, 15 bp, Homo sapiens
cccccttggcatttt

SEQ ID NO: 451414 - DNA, 15 bp, Homo sapiens
acccccttggcattt

SEQ ID NO: 451415 - DNA, 15 bp, Homo sapiens
cacccccttggcatt

SEQ ID NO: 451416 - DNA, 15 bp, Homo sapiens
tcacccccttggcat

SEQ ID NO: 451417 - DNA, 15 bp, Homo sapiens
gtcacccccttggca

SEQ ID NO: 451418 - DNA, 15 bp, Homo sapiens
agtcacccccttggc

SEQ ID NO: 451419 - DNA, 15 bp, Homo sapiens
cagtcacccccttgg

SEQ ID NO: 451420 - DNA, 15 bp, Homo sapiens
ccagtcacccccttg

SEQ ID NO: 451421 - DNA, 15 bp, Homo sapiens
tccagtcaccccctt

SEQ ID NO: 451422 - DNA, 15 bp, Homo sapiens
ttccagtcaccccct

SEQ ID NO: 451423 - DNA, 15 bp, Homo sapiens
cttccagtcaccccc

SEQ ID NO: 451424 - DNA, 15 bp, Homo sapiens
acttccagtcacccc

SEQ ID NO: 451425 - DNA, 15 bp, Homo sapiens
aacttccagtcaccc

SEQ ID NO: 451426 - DNA, 15 bp, Homo sapiens
caacttccagtcacc

SEQ ID NO: 451427 - DNA, 15 bp, Homo sapiens
acaacttccagtcac

SEQ ID NO: 451428 - DNA, 15 bp, Homo sapiens
cacaacttccagtca

SEQ ID NO: 451429 - DNA, 15 bp, Homo sapiens
ccacaacttccagtc

SEQ ID NO: 451430 - DNA, 15 bp, Homo sapiens
tccacaacttccagt

SEQ ID NO: 451431 - DNA, 15 bp, Homo sapiens
atccacaacttccag

SEQ ID NO: 451432 - DNA, 15 bp, Homo sapiens
tatccacaacttcca

SEQ ID NO: 451433 - DNA, 15 bp, Homo sapiens
atatccacaacttcc

SEQ ID NO: 451434 - DNA, 15 bp, Homo sapiens
gatatccacaacttc

SEQ ID NO: 451435 - DNA, 15 bp, Homo sapiens
tgatatccacaactt

SEQ ID NO: 451436 - DNA, 15 bp, Homo sapiens
ctgatatccacaact

SEQ ID NO: 451437 - DNA, 15 bp, Homo sapiens
cctgatatccacaac

SEQ ID NO: 451438 - DNA, 15 bp, Homo sapiens
ccctgatatccacaa

SEQ ID NO: 451439 - DNA, 15 bp, Homo sapiens
accctgatatccaca

SEQ ID NO: 451440 - DNA, 15 bp, Homo sapiens
taccctgatatccac

SEQ ID NO: 451441 - DNA, 15 bp, Homo sapiens
ataccctgatatcca

SEQ ID NO: 451442 - DNA, 15 bp, Homo sapiens
tataccctgatatcc

SEQ ID NO: 451443 - DNA, 15 bp, Homo sapiens
ttataccctgatatc

SEQ ID NO: 451444 - DNA, 15 bp, Homo sapiens
tttataccctgatat

SEQ ID NO: 451445 - DNA, 15 bp, Homo sapiens
atttataccctgata

SEQ ID NO: 451446 - DNA, 15 bp, Homo sapiens
aatttataccctgat

SEQ ID NO: 451447 - DNA, 15 bp, Homo sapiens
taatttataccctga

SEQ ID NO: 451448 - DNA, 15 bp, Homo sapiens
ataatttataccctg

SEQ ID NO: 451449 - DNA, 15 bp, Homo sapiens
tataatttataccct

SEQ ID NO: 451450 - DNA, 15 bp, Homo sapiens
atataatttataccc

SEQ ID NO: 451451 - DNA, 15 bp, Homo sapiens
gatataatttatacc

SEQ ID NO: 451452 - DNA, 15 bp, Homo sapiens
ggatataatttatac

SEQ ID NO: 451453 - DNA, 15 bp, Homo sapiens
cggatataatttata

SEQ ID NO: 451454 - DNA, 15 bp, Homo sapiens
acggatataatttat

SEQ ID NO: 451455 - DNA, 15 bp, Homo sapiens
cacggatataattta

SEQ ID NO: 451456 - DNA, 15 bp, Homo sapiens
tcacggatataattt

SEQ ID NO: 451457 - DNA, 15 bp, Homo sapiens
ctcacggatataatt

SEQ ID NO: 451458 - DNA, 15 bp, Homo sapiens
actcacggatataat

SEQ ID NO: 451459 - DNA, 15 bp, Homo sapiens
aactcacggatataa

SEQ ID NO: 451460 - DNA, 15 bp, Homo sapiens
caactcacggatata

SEQ ID NO: 451461 - DNA, 15 bp, Homo sapiens
ccaactcacggatat

SEQ ID NO: 451462 - DNA, 15 bp, Homo sapiens
cccaactcacggata

SEQ ID NO: 451463 - DNA, 15 bp, Homo sapiens
ccccaactcacggat

SEQ ID NO: 451464 - DNA, 15 bp, Homo sapiens
cccccaactcacgga

SEQ ID NO: 451465 - DNA, 15 bp, Homo sapiens
tcccccaactcacgg

SEQ ID NO: 451466 - DNA, 15 bp, Homo sapiens
ctcccccaactcacg

SEQ ID NO: 451467 - DNA, 15 bp, Homo sapiens
cctcccccaactcac

SEQ ID NO: 451468 - DNA, 15 bp, Homo sapiens
ccctcccccaactca

SEQ ID NO: 451469 - DNA, 15 bp, Homo sapiens
tccctcccccaactc

SEQ ID NO: 451470 - DNA, 15 bp, Homo sapiens
ttccctcccccaact

SEQ ID NO: 451471 - DNA, 15 bp, Homo sapiens
cttccctcccccaac

SEQ ID NO: 451472 - DNA, 15 bp, Homo sapiens
tcttccctcccccaa

SEQ ID NO: 451473 - DNA, 15 bp, Homo sapiens
gtcttccctccccca

SEQ ID NO: 451474 - DNA, 15 bp, Homo sapiens
ggtcttccctccccc

SEQ ID NO: 451475 - DNA, 15 bp, Homo sapiens
tggtcttccctcccc

SEQ ID NO: 451476 - DNA, 15 bp, Homo sapiens
ctggtcttccctccc

SEQ ID NO: 451477 - DNA, 15 bp, Homo sapiens
tctggtcttccctcc

SEQ ID NO: 451478 - DNA, 15 bp, Homo sapiens
ttctggtcttccctc

SEQ ID NO: 451479 - DNA, 15 bp, Homo sapiens
attctggtcttccct

SEQ ID NO: 451480 - DNA, 15 bp, Homo sapiens
aattctggtcttccc

SEQ ID NO: 451481 - DNA, 15 bp, Homo sapiens
gaattctggtcttcc

SEQ ID NO: 451482 - DNA, 15 bp, Homo sapiens
ggaattctggtcttc

SEQ ID NO: 451483 - DNA, 15 bp, Homo sapiens
gggaattctggtctt

SEQ ID NO: 451484 - DNA, 15 bp, Homo sapiens
agggaattctggtct

SEQ ID NO: 451485 - DNA, 15 bp, Homo sapiens
aagggaattctggtc

SEQ ID NO: 451486 - DNA, 15 bp, Homo sapiens
caagggaattctggt

SEQ ID NO: 451487 - DNA, 15 bp, Homo sapiens
tcaagggaattctgg

SEQ ID NO: 451488 - DNA, 15 bp, Homo sapiens
ttcaagggaattctg

SEQ ID NO: 451489 - DNA, 15 bp, Homo sapiens
attcaagggaattct

SEQ ID NO: 451490 - DNA, 15 bp, Homo sapiens
aattcaagggaattc

SEQ ID NO: 451491 - DNA, 15 bp, Homo sapiens
caattcaagggaatt

SEQ ID NO: 451492 - DNA, 15 bp, Homo sapiens
acaattcaagggaat

SEQ ID NO: 451493 - DNA, 15 bp, Homo sapiens
cacaattcaagggaa

SEQ ID NO: 451494 - DNA, 15 bp, Homo sapiens
acacaattcaaggga

SEQ ID NO: 451495 - DNA, 15 bp, Homo sapiens
tacacaattcaaggg

SEQ ID NO: 451496 - DNA, 15 bp, Homo sapiens
atacacaattcaagg

SEQ ID NO: 451497 - DNA, 15 bp, Homo sapiens
aatacacaattcaag

SEQ ID NO: 451498 - DNA, 15 bp, Homo sapiens
caatacacaattcaa

SEQ ID NO: 451499 - DNA, 15 bp, Homo sapiens
tcaatacacaattca

SEQ ID NO: 451500 - DNA, 15 bp, Homo sapiens
atcaatacacaattc

SEQ ID NO: 451501 - DNA, 15 bp, Homo sapiens
catcaatacacaatt

SEQ ID NO: 451502 - DNA, 15 bp, Homo sapiens
gcatcaatacacaat

SEQ ID NO: 451503 - DNA, 15 bp, Homo sapiens
tgcatcaatacacaa

SEQ ID NO: 451504 - DNA, 15 bp, Homo sapiens
ttgcatcaatacaca

SEQ ID NO: 451505 - DNA, 15 bp, Homo sapiens
attgcatcaatacac

SEQ ID NO: 451506 - DNA, 15 bp, Homo sapiens
tattgcatcaataca

SEQ ID NO: 451507 - DNA, 15 bp, Homo sapiens
atattgcatcaatac

SEQ ID NO: 451508 - DNA, 15 bp, Homo sapiens
tatattgcatcaata

SEQ ID NO: 451509 - DNA, 15 bp, Homo sapiens
ttatattgcatcaat

SEQ ID NO: 451510 - DNA, 15 bp, Homo sapiens
cttatattgcatcaa

SEQ ID NO: 451511 - DNA, 15 bp, Homo sapiens
gcttatattgcatca

SEQ ID NO: 451512 - DNA, 15 bp, Homo sapiens
tgcttatattgcatc

SEQ ID NO: 451513 - DNA, 15 bp, Homo sapiens
atgcttatattgcat

SEQ ID NO: 451514 - DNA, 15 bp, Homo sapiens
tatgcttatattgca

SEQ ID NO: 451515 - DNA, 15 bp, Homo sapiens
ttatgcttatattgc

SEQ ID NO: 451516 - DNA, 15 bp, Homo sapiens
tttatgcttatattg

SEQ ID NO: 451517 - DNA, 15 bp, Homo sapiens
ttttatgcttatatt

SEQ ID NO: 451518 - DNA, 15 bp, Homo sapiens
cttttatgcttatat

SEQ ID NO: 451519 - DNA, 15 bp, Homo sapiens
tcttttatgcttata

SEQ ID NO: 451520 - DNA, 15 bp, Homo sapiens
atcttttatgcttat

SEQ ID NO: 451521 - DNA, 15 bp, Homo sapiens
gatcttttatgctta

SEQ ID NO: 451522 - DNA, 15 bp, Homo sapiens
tgatcttttatgctt

SEQ ID NO: 451523 - DNA, 15 bp, Homo sapiens
gtgatcttttatgct

SEQ ID NO: 451524 - DNA, 15 bp, Homo sapiens
ggtgatcttttatgc

SEQ ID NO: 451525 - DNA, 15 bp, Homo sapiens
aggtgatcttttatg

SEQ ID NO: 451526 - DNA, 15 bp, Homo sapiens
aaggtgatcttttat

SEQ ID NO: 451527 - DNA, 15 bp, Homo sapiens
caaggtgatctttta

SEQ ID NO: 451528 - DNA, 15 bp, Homo sapiens
acaaggtgatctttt

SEQ ID NO: 451529 - DNA, 15 bp, Homo sapiens
tacaaggtgatcttt

SEQ ID NO: 451530 - DNA, 15 bp, Homo sapiens
atacaaggtgatctt

SEQ ID NO: 451531 - DNA, 15 bp, Homo sapiens
aatacaaggtgatct

SEQ ID NO: 451532 - DNA, 15 bp, Homo sapiens
gaatacaaggtgatc

SEQ ID NO: 451533 - DNA, 15 bp, Homo sapiens
agaatacaaggtgat

SEQ ID NO: 451534 - DNA, 15 bp, Homo sapiens
gagaatacaaggtga

SEQ ID NO: 451535 - DNA, 15 bp, Homo sapiens
agagaatacaaggtg

SEQ ID NO: 451536 - DNA, 15 bp, Homo sapiens
aagagaatacaaggt

SEQ ID NO: 451537 - DNA, 15 bp, Homo sapiens
aaagagaatacaagg

SEQ ID NO: 451538 - DNA, 15 bp, Homo sapiens
taaagagaatacaag

SEQ ID NO: 451539 - DNA, 15 bp, Homo sapiens
gtaaagagaatacaa

SEQ ID NO: 451540 - DNA, 15 bp, Homo sapiens
ggtaaagagaataca

SEQ ID NO: 451541 - DNA, 15 bp, Homo sapiens
aggtaaagagaatac

SEQ ID NO: 451542 - DNA, 15 bp, Homo sapiens
aaggtaaagagaata

SEQ ID NO: 451543 - DNA, 15 bp, Homo sapiens
gaaggtaaagagaat

SEQ ID NO: 451544 - DNA, 15 bp, Homo sapiens
agaaggtaaagagaa

SEQ ID NO: 451545 - DNA, 15 bp, Homo sapiens
tagaaggtaaagaga

SEQ ID NO: 451546 - DNA, 15 bp, Homo sapiens
ttagaaggtaaagag

SEQ ID NO: 451547 - DNA, 15 bp, Homo sapiens
tttagaaggtaaaga

SEQ ID NO: 451548 - DNA, 15 bp, Homo sapiens
ttttagaaggtaaag

SEQ ID NO: 451549 - DNA, 15 bp, Homo sapiens
cttttagaaggtaaa

SEQ ID NO: 451550 - DNA, 15 bp, Homo sapiens
gcttttagaaggtaa

SEQ ID NO: 451551 - DNA, 15 bp, Homo sapiens
ggcttttagaaggta

SEQ ID NO: 451552 - DNA, 15 bp, Homo sapiens
tggcttttagaaggt

SEQ ID NO: 451553 - DNA, 15 bp, Homo sapiens
atggcttttagaagg

SEQ ID NO: 451554 - DNA, 15 bp, Homo sapiens
aatggcttttagaag

SEQ ID NO: 451555 - DNA, 15 bp, Homo sapiens
taatggcttttagaa

SEQ ID NO: 451556 - DNA, 15 bp, Homo sapiens
ataatggcttttaga

SEQ ID NO: 451557 - DNA, 15 bp, Homo sapiens
aataatggcttttag

SEQ ID NO: 451558 - DNA, 15 bp, Homo sapiens
taataatggctttta

SEQ ID NO: 451559 - DNA, 15 bp, Homo sapiens
ataataatggctttt

SEQ ID NO: 451560 - DNA, 15 bp, Homo sapiens
cataataatggcttt

SEQ ID NO: 451561 - DNA, 15 bp, Homo sapiens
tcataataatggctt

SEQ ID NO: 451562 - DNA, 15 bp, Homo sapiens
atcataataatggct

SEQ ID NO: 451563 - DNA, 15 bp, Homo sapiens
catcataataatggc

SEQ ID NO: 451564 - DNA, 15 bp, Homo sapiens
acatcataataatgg

SEQ ID NO: 451565 - DNA, 15 bp, Homo sapiens
aacatcataataatg

SEQ ID NO: 451566 - DNA, 15 bp, Homo sapiens
taacatcataataat

SEQ ID NO: 451567 - DNA, 15 bp, Homo sapiens
ctaacatcataataa

SEQ ID NO: 451568 - DNA, 15 bp, Homo sapiens
tctaacatcataata

SEQ ID NO: 451569 - DNA, 15 bp, Homo sapiens
ttctaacatcataat

SEQ ID NO: 451570 - DNA, 15 bp, Homo sapiens
cttctaacatcataa

SEQ ID NO: 451571 - DNA, 15 bp, Homo sapiens
tcttctaacatcata

SEQ ID NO: 451572 - DNA, 15 bp, Homo sapiens
ttcttctaacatcat

SEQ ID NO: 451573 - DNA, 15 bp, Homo sapiens
cttcttctaacatca

SEQ ID NO: 451574 - DNA, 15 bp, Homo sapiens
tcttcttctaacatc

SEQ ID NO: 451575 - DNA, 15 bp, Homo sapiens
ctcttcttctaacat

SEQ ID NO: 451576 - DNA, 15 bp, Homo sapiens
cctcttcttctaaca

SEQ ID NO: 451577 - DNA, 15 bp, Homo sapiens
tcctcttcttctaac

SEQ ID NO: 451578 - DNA, 15 bp, Homo sapiens
ttcctcttcttctaa

SEQ ID NO: 451579 - DNA, 15 bp, Homo sapiens
cttcctcttcttcta

SEQ ID NO: 451580 - DNA, 15 bp, Homo sapiens
tcttcctcttcttct

SEQ ID NO: 451581 - DNA, 15 bp, Homo sapiens
ttcttcctcttcttc

SEQ ID NO: 451582 - DNA, 15 bp, Homo sapiens
tttcttcctcttctt

SEQ ID NO: 451583 - DNA, 15 bp, Homo sapiens
atttcttcctcttct

SEQ ID NO: 451584 - DNA, 15 bp, Homo sapiens
aatttcttcctcttc

SEQ ID NO: 451585 - DNA, 15 bp, Homo sapiens
gaatttcttcctctt

SEQ ID NO: 451586 - DNA, 15 bp, Homo sapiens
tgaatttcttcctct

SEQ ID NO: 451587 - DNA, 15 bp, Homo sapiens
ctgaatttcttcctc

SEQ ID NO: 451588 - DNA, 15 bp, Homo sapiens
cctgaatttcttcct

SEQ ID NO: 451589 - DNA, 15 bp, Homo sapiens
acctgaatttcttcc

SEQ ID NO: 451590 - DNA, 15 bp, Homo sapiens
tacctgaatttcttc

SEQ ID NO: 451591 - DNA, 15 bp, Homo sapiens
gtacctgaatttctt

SEQ ID NO: 451592 - DNA, 15 bp, Homo sapiens
tgtacctgaatttct

SEQ ID NO: 451593 - DNA, 15 bp, Homo sapiens
ctgtacctgaatttc

SEQ ID NO: 451594 - DNA, 15 bp, Homo sapiens
tctgtacctgaattt

SEQ ID NO: 451595 - DNA, 15 bp, Homo sapiens
ttctgtacctgaatt

SEQ ID NO: 451596 - DNA, 15 bp, Homo sapiens
tttctgtacctgaat

SEQ ID NO: 451597 - DNA, 15 bp, Homo sapiens
ttttctgtacctgaa

SEQ ID NO: 451598 - DNA, 15 bp, Homo sapiens
gttttctgtacctga

SEQ ID NO: 451599 - DNA, 15 bp, Homo sapiens
tgttttctgtacctg

SEQ ID NO: 451600 - DNA, 15 bp, Homo sapiens
atgttttctgtacct

SEQ ID NO: 451601 - DNA, 15 bp, Homo sapiens
catgttttctgtacc

SEQ ID NO: 451602 - DNA, 15 bp, Homo sapiens
acatgttttctgtac

SEQ ID NO: 451603 - DNA, 15 bp, Homo sapiens
aacatgttttctgta

SEQ ID NO: 451604 - DNA, 15 bp, Homo sapiens
aaacatgttttctgt

SEQ ID NO: 451605 - DNA, 15 bp, Homo sapiens
taaacatgttttctg

SEQ ID NO: 451606 - DNA, 15 bp, Homo sapiens
ttaaacatgttttct

SEQ ID NO: 451607 - DNA, 15 bp, Homo sapiens
tttaaacatgttttc

SEQ ID NO: 451608 - DNA, 15 bp, Homo sapiens
atttaaacatgtttt

SEQ ID NO: 451609 - DNA, 15 bp, Homo sapiens
tatttaaacatgttt

SEQ ID NO: 451610 - DNA, 15 bp, Homo sapiens
ctatttaaacatgtt

SEQ ID NO: 451611 - DNA, 15 bp, Homo sapiens
gctatttaaacatgt

SEQ ID NO: 451612 - DNA, 15 bp, Homo sapiens
ggctatttaaacatg

SEQ ID NO: 451613 - DNA, 15 bp, Homo sapiens
aggctatttaaacat

SEQ ID NO: 451614 - DNA, 15 bp, Homo sapiens
taggctatttaaaca

SEQ ID NO: 451615 - DNA, 15 bp, Homo sapiens
ttaggctatttaaac

SEQ ID NO: 451616 - DNA, 15 bp, Homo sapiens
tttaggctatttaaa

SEQ ID NO: 451617 - DNA, 15 bp, Homo sapiens
atttaggctatttaa

SEQ ID NO: 451618 - DNA, 15 bp, Homo sapiens
catttaggctattta

SEQ ID NO: 451619 - DNA, 15 bp, Homo sapiens
tcatttaggctattt

SEQ ID NO: 451620 - DNA, 15 bp, Homo sapiens
atcatttaggctatt

SEQ ID NO: 451621 - DNA, 15 bp, Homo sapiens
catcatttaggctat

SEQ ID NO: 451622 - DNA, 15 bp, Homo sapiens
ccatcatttaggcta

SEQ ID NO: 451623 - DNA, 15 bp, Homo sapiens
accatcatttaggct

SEQ ID NO: 451624 - DNA, 15 bp, Homo sapiens
caccatcatttaggc

SEQ ID NO: 451625 - DNA, 15 bp, Homo sapiens
gcaccatcatttagg

SEQ ID NO: 451626 - DNA, 15 bp, Homo sapiens
agcaccatcatttag

SEQ ID NO: 451627 - DNA, 15 bp, Homo sapiens
aagcaccatcattta

SEQ ID NO: 451628 - DNA, 15 bp, Homo sapiens
caagcaccatcattt

SEQ ID NO: 451629 - DNA, 15 bp, Homo sapiens
ccaagcaccatcatt

SEQ ID NO: 451630 - DNA, 15 bp, Homo sapiens
accaagcaccatcat

SEQ ID NO: 451631 - DNA, 15 bp, Homo sapiens
caccaagcaccatca

SEQ ID NO: 451632 - DNA, 15 bp, Homo sapiens
tcaccaagcaccatc

SEQ ID NO: 451633 - DNA, 15 bp, Homo sapiens
ctcaccaagcaccat

SEQ ID NO: 451634 - DNA, 15 bp, Homo sapiens
actcaccaagcacca

SEQ ID NO: 451635 - DNA, 15 bp, Homo sapiens
gactcaccaagcacc

SEQ ID NO: 451636 - DNA, 15 bp, Homo sapiens
agactcaccaagcac

SEQ ID NO: 451637 - DNA, 15 bp, Homo sapiens
aagactcaccaagca

SEQ ID NO: 451638 - DNA, 15 bp, Homo sapiens
caagactcaccaagc

SEQ ID NO: 451639 - DNA, 15 bp, Homo sapiens
ccaagactcaccaag

SEQ ID NO: 451640 - DNA, 15 bp, Homo sapiens
accaagactcaccaa

SEQ ID NO: 451641 - DNA, 15 bp, Homo sapiens
aaccaagactcacca

SEQ ID NO: 451642 - DNA, 15 bp, Homo sapiens
gaaccaagactcacc

SEQ ID NO: 451643 - DNA, 15 bp, Homo sapiens
agaaccaagactcac

SEQ ID NO: 451644 - DNA, 15 bp, Homo sapiens
tagaaccaagactca

SEQ ID NO: 451645 - DNA, 15 bp, Homo sapiens
ttagaaccaagactc

SEQ ID NO: 451646 - DNA, 15 bp, Homo sapiens
tttagaaccaagact

SEQ ID NO: 451647 - DNA, 15 bp, Homo sapiens
ctttagaaccaagac

SEQ ID NO: 451648 - DNA, 15 bp, Homo sapiens
cctttagaaccaaga

SEQ ID NO: 451649 - DNA, 15 bp, Homo sapiens
acctttagaaccaag

SEQ ID NO: 451650 - DNA, 15 bp, Homo sapiens
tacctttagaaccaa

SEQ ID NO: 451651 - DNA, 15 bp, Homo sapiens
gtacctttagaacca

SEQ ID NO: 451652 - DNA, 15 bp, Homo sapiens
ggtacctttagaacc

SEQ ID NO: 451653 - DNA, 15 bp, Homo sapiens
tggtacctttagaac

SEQ ID NO: 451654 - DNA, 15 bp, Homo sapiens
ttggtacctttagaa

SEQ ID NO: 451655 - DNA, 15 bp, Homo sapiens
tttggtacctttaga

SEQ ID NO: 451656 - DNA, 15 bp, Homo sapiens
gtttggtacctttag

SEQ ID NO: 451657 - DNA, 15 bp, Homo sapiens
tgtttggtaccttta

SEQ ID NO: 451658 - DNA, 15 bp, Homo sapiens
ttgtttggtaccttt

SEQ ID NO: 451659 - DNA, 15 bp, Homo sapiens
cttgtttggtacctt

SEQ ID NO: 451660 - DNA, 15 bp, Homo sapiens
ccttgtttggtacct

SEQ ID NO: 451661 - DNA, 15 bp, Homo sapiens
tccttgtttggtacc

SEQ ID NO: 451662 - DNA, 15 bp, Homo sapiens
ttccttgtttggtac

SEQ ID NO: 451663 - DNA, 15 bp, Homo sapiens
cttccttgtttggta

SEQ ID NO: 451664 - DNA, 15 bp, Homo sapiens
gcttccttgtttggt

SEQ ID NO: 451665 - DNA, 15 bp, Homo sapiens
ggcttccttgtttgg

SEQ ID NO: 451666 - DNA, 15 bp, Homo sapiens
tggcttccttgtttg

SEQ ID NO: 451667 - DNA, 15 bp, Homo sapiens
ttggcttccttgttt

SEQ ID NO: 451668 - DNA, 15 bp, Homo sapiens
tttggcttccttgtt

SEQ ID NO: 451669 - DNA, 15 bp, Homo sapiens
ctttggcttccttgt

SEQ ID NO: 451670 - DNA, 15 bp, Homo sapiens
actttggcttccttg

SEQ ID NO: 451671 - DNA, 15 bp, Homo sapiens
aactttggcttcctt

SEQ ID NO: 451672 - DNA, 15 bp, Homo sapiens
aaactttggcttcct

SEQ ID NO: 451673 - DNA, 15 bp, Homo sapiens
aaaactttggcttcc

SEQ ID NO: 451674 - DNA, 15 bp, Homo sapiens
gaaaactttggcttc

SEQ ID NO: 451675 - DNA, 15 bp, Homo sapiens
tgaaaactttggctt

SEQ ID NO: 451676 - DNA, 15 bp, Homo sapiens
ttgaaaactttggct

SEQ ID NO: 451677 - DNA, 15 bp, Homo sapiens
tttgaaaactttggc

SEQ ID NO: 451678 - DNA, 15 bp, Homo sapiens
gtttgaaaactttgg

SEQ ID NO: 451679 - DNA, 15 bp, Homo sapiens
agtttgaaaactttg

SEQ ID NO: 451680 - DNA, 15 bp, Homo sapiens
cagtttgaaaacttt

SEQ ID NO: 451681 - DNA, 15 bp, Homo sapiens
gcagtttgaaaactt

SEQ ID NO: 451682 - DNA, 15 bp, Homo sapiens
agcagtttgaaaact

SEQ ID NO: 451683 - DNA, 15 bp, Homo sapiens
cagcagtttgaaaac

SEQ ID NO: 451684 - DNA, 15 bp, Homo sapiens
gcagcagtttgaaaa

SEQ ID NO: 451685 - DNA, 15 bp, Homo sapiens
tgcagcagtttgaaa

SEQ ID NO: 451686 - DNA, 15 bp, Homo sapiens
atgcagcagtttgaa

SEQ ID NO: 451687 - DNA, 15 bp, Homo sapiens
tatgcagcagtttga

SEQ ID NO: 451688 - DNA, 15 bp, Homo sapiens
gtatgcagcagtttg

SEQ ID NO: 451689 - DNA, 15 bp, Homo sapiens
agtatgcagcagttt

SEQ ID NO: 451690 - DNA, 15 bp, Homo sapiens
aagtatgcagcagtt

SEQ ID NO: 451691 - DNA, 15 bp, Homo sapiens
aaagtatgcagcagt

SEQ ID NO: 451692 - DNA, 15 bp, Homo sapiens
caaagtatgcagcag

SEQ ID NO: 451693 - DNA, 15 bp, Homo sapiens
tcaaagtatgcagca

SEQ ID NO: 451694 - DNA, 15 bp, Homo sapiens
gtcaaagtatgcagc

SEQ ID NO: 451695 - DNA, 15 bp, Homo sapiens
tgtcaaagtatgcag

SEQ ID NO: 451696 - DNA, 15 bp, Homo sapiens
ttgtcaaagtatgca

SEQ ID NO: 451697 - DNA, 15 bp, Homo sapiens
cttgtcaaagtatgc

SEQ ID NO: 451698 - DNA, 15 bp, Homo sapiens
ccttgtcaaagtatg

SEQ ID NO: 451699 - DNA, 15 bp, Homo sapiens
tccttgtcaaagtat

SEQ ID NO: 451700 - DNA, 15 bp, Homo sapiens
ttccttgtcaaagta

SEQ ID NO: 451701 - DNA, 15 bp, Homo sapiens
tttccttgtcaaagt

SEQ ID NO: 451702 - DNA, 15 bp, Homo sapiens
ttttccttgtcaaag

SEQ ID NO: 451703 - DNA, 15 bp, Homo sapiens
attttccttgtcaaa

SEQ ID NO: 451704 - DNA, 15 bp, Homo sapiens
gattttccttgtcaa

SEQ ID NO: 451705 - DNA, 15 bp, Homo sapiens
agattttccttgtca

SEQ ID NO: 451706 - DNA, 15 bp, Homo sapiens
tagattttccttgtc

SEQ ID NO: 451707 - DNA, 15 bp, Homo sapiens
atagattttccttgt

SEQ ID NO: 451708 - DNA, 15 bp, Homo sapiens
tatagattttccttg

SEQ ID NO: 451709 - DNA, 15 bp, Homo sapiens
atatagattttcctt

SEQ ID NO: 451710 - DNA, 15 bp, Homo sapiens
aatatagattttcct

SEQ ID NO: 451711 - DNA, 15 bp, Homo sapiens
aaatatagattttcc

SEQ ID NO: 451712 - DNA, 15 bp, Homo sapiens
caaatatagattttc

SEQ ID NO: 451713 - DNA, 15 bp, Homo sapiens
acaaatatagatttt

SEQ ID NO: 451714 - DNA, 15 bp, Homo sapiens
gacaaatatagattt

SEQ ID NO: 451715 - DNA, 15 bp, Homo sapiens
agacaaatatagatt

SEQ ID NO: 451716 - DNA, 15 bp, Homo sapiens
aagacaaatatagat

SEQ ID NO: 451717 - DNA, 15 bp, Homo sapiens
gaagacaaatataga

SEQ ID NO: 451718 - DNA, 15 bp, Homo sapiens
ttattgcacatctga

SEQ ID NO: 451719 - DNA, 15 bp, Homo sapiens
attattgcacatctg

SEQ ID NO: 451720 - DNA, 15 bp, Homo sapiens
aattattgcacatct

SEQ ID NO: 451721 - DNA, 15 bp, Homo sapiens
aaattattgcacatc

SEQ ID NO: 451722 - DNA, 15 bp, Homo sapiens
caaattattgcacat

SEQ ID NO: 451723 - DNA, 15 bp, Homo sapiens
acaaattattgcaca

SEQ ID NO: 451724 - DNA, 15 bp, Homo sapiens
tacaaattattgcac

SEQ ID NO: 451725 - DNA, 15 bp, Homo sapiens
gtacaaattattgca

SEQ ID NO: 451726 - DNA, 15 bp, Homo sapiens
tgtacaaattattgc

SEQ ID NO: 451727 - DNA, 15 bp, Homo sapiens
ttgtacaaattattg

SEQ ID NO: 451728 - DNA, 15 bp, Homo sapiens
attgtacaaattatt

SEQ ID NO: 451729 - DNA, 15 bp, Homo sapiens
cattgtacaaattat

SEQ ID NO: 451730 - DNA, 15 bp, Homo sapiens
ccattgtacaaatta

SEQ ID NO: 451731 - DNA, 15 bp, Homo sapiens
accattgtacaaatt

SEQ ID NO: 451732 - DNA, 15 bp, Homo sapiens
aaccattgtacaaat

SEQ ID NO: 451733 - DNA, 15 bp, Homo sapiens
aaaccattgtacaaa

SEQ ID NO: 451734 - DNA, 15 bp, Homo sapiens
taaaccattgtacaa

SEQ ID NO: 451735 - DNA, 15 bp, Homo sapiens
ataaaccattgtaca

SEQ ID NO: 451736 - DNA, 15 bp, Homo sapiens
aataaaccattgtac

SEQ ID NO: 451737 - DNA, 15 bp, Homo sapiens
gaataaaccattgta

SEQ ID NO: 451738 - DNA, 15 bp, Homo sapiens
ggaataaaccattgt

SEQ ID NO: 451739 - DNA, 15 bp, Homo sapiens
gggaataaaccattg

SEQ ID NO: 451740 - DNA, 15 bp, Homo sapiens
tgggaataaaccatt

SEQ ID NO: 451741 - DNA, 15 bp, Homo sapiens
ttgggaataaaccat

SEQ ID NO: 451742 - DNA, 15 bp, Homo sapiens
cttgggaataaacca

SEQ ID NO: 451743 - DNA, 15 bp, Homo sapiens
acttgggaataaacc

SEQ ID NO: 451744 - DNA, 15 bp, Homo sapiens
tacttgggaataaac

SEQ ID NO: 451745 - DNA, 15 bp, Homo sapiens
atacttgggaataaa

SEQ ID NO: 451746 - DNA, 15 bp, Homo sapiens
catacttgggaataa

SEQ ID NO: 451747 - DNA, 15 bp, Homo sapiens
gcatacttgggaata

SEQ ID NO: 451748 - DNA, 15 bp, Homo sapiens
ggcatacttgggaat

SEQ ID NO: 451749 - DNA, 15 bp, Homo sapiens
aggcatacttgggaa

SEQ ID NO: 451750 - DNA, 15 bp, Homo sapiens
aaggcatacttggga

SEQ ID NO: 451751 - DNA, 15 bp, Homo sapiens
taaggcatacttggg

SEQ ID NO: 451752 - DNA, 15 bp, Homo sapiens
ttaaggcatacttgg

SEQ ID NO: 451753 - DNA, 15 bp, Homo sapiens
cttaaggcatacttg

SEQ ID NO: 451754 - DNA, 15 bp, Homo sapiens
gcttaaggcatactt

SEQ ID NO: 451755 - DNA, 15 bp, Homo sapiens
tgcttaaggcatact

SEQ ID NO: 451756 - DNA, 15 bp, Homo sapiens
ctgcttaaggcatac

SEQ ID NO: 451757 - DNA, 15 bp, Homo sapiens
tctgcttaaggcata

SEQ ID NO: 451758 - DNA, 15 bp, Homo sapiens
ttctgcttaaggcat

SEQ ID NO: 451759 - DNA, 15 bp, Homo sapiens
gttctgcttaaggca

SEQ ID NO: 451760 - DNA, 15 bp, Homo sapiens
tgttctgcttaaggc

SEQ ID NO: 451761 - DNA, 15 bp, Homo sapiens
ttgttctgcttaagg

SEQ ID NO: 451762 - DNA, 15 bp, Homo sapiens
tttgttctgcttaag

SEQ ID NO: 451763 - DNA, 15 bp, Homo sapiens
atttgttctgcttaa

SEQ ID NO: 451764 - DNA, 15 bp, Homo sapiens
catttgttctgctta

SEQ ID NO: 451765 - DNA, 15 bp, Homo sapiens
acatttgttctgctt

SEQ ID NO: 451766 - DNA, 15 bp, Homo sapiens
cacatttgttctgct

SEQ ID NO: 451767 - DNA, 15 bp, Homo sapiens
acacatttgttctgc

SEQ ID NO: 451768 - DNA, 15 bp, Homo sapiens
aacacatttgttctg

SEQ ID NO: 451769 - DNA, 15 bp, Homo sapiens
aaacacatttgttct

SEQ ID NO: 451770 - DNA, 15 bp, Homo sapiens
aaaacacatttgttc

SEQ ID NO: 451771 - DNA, 15 bp, Homo sapiens
aaaaacacatttgtt

SEQ ID NO: 451772 - DNA, 15 bp, Homo sapiens
gaaaaacacatttgt

SEQ ID NO: 451773 - DNA, 15 bp, Homo sapiens
agaaaaacacatttg

SEQ ID NO: 451774 - DNA, 15 bp, Homo sapiens
tagaaaaacacattt

SEQ ID NO: 451775 - DNA, 15 bp, Homo sapiens
atagaaaaacacatt

SEQ ID NO: 451776 - DNA, 15 bp, Homo sapiens
tatagaaaaacacat

SEQ ID NO: 451777 - DNA, 15 bp, Homo sapiens
atatagaaaaacaca

SEQ ID NO: 451778 - DNA, 15 bp, Homo sapiens
tatatagaaaaacac

SEQ ID NO: 451779 - DNA, 15 bp, Homo sapiens
ctatatagaaaaaca

SEQ ID NO: 451780 - DNA, 15 bp, Homo sapiens
actatatagaaaaac

SEQ ID NO: 451781 - DNA, 15 bp, Homo sapiens
aactatatagaaaaa

SEQ ID NO: 451782 - DNA, 15 bp, Homo sapiens
gaactatatagaaaa

SEQ ID NO: 451783 - DNA, 15 bp, Homo sapiens
ggaactatatagaaa

SEQ ID NO: 451784 - DNA, 15 bp, Homo sapiens
aggaactatatagaa

SEQ ID NO: 451785 - DNA, 15 bp, Homo sapiens
aaggaactatataga

SEQ ID NO: 451786 - DNA, 15 bp, Homo sapiens
caaggaactatatag

SEQ ID NO: 451787 - DNA, 15 bp, Homo sapiens
gcaaggaactatata

SEQ ID NO: 451788 - DNA, 15 bp, Homo sapiens
ggcaaggaactatat

SEQ ID NO: 451789 - DNA, 15 bp, Homo sapiens
aggcaaggaactata

SEQ ID NO: 451790 - DNA, 15 bp, Homo sapiens
aaggcaaggaactat

SEQ ID NO: 451791 - DNA, 15 bp, Homo sapiens
taaggcaaggaacta

SEQ ID NO: 451792 - DNA, 15 bp, Homo sapiens
ttaaggcaaggaact

SEQ ID NO: 451793 - DNA, 15 bp, Homo sapiens
attaaggcaaggaac

SEQ ID NO: 451794 - DNA, 15 bp, Homo sapiens
tattaaggcaaggaa

SEQ ID NO: 451795 - DNA, 15 bp, Homo sapiens
ttattaaggcaagga

SEQ ID NO: 451796 - DNA, 15 bp, Homo sapiens
tttattaaggcaagg

SEQ ID NO: 451797 - DNA, 15 bp, Homo sapiens
atttattaaggcaag

SEQ ID NO: 451798 - DNA, 15 bp, Homo sapiens
tatttattaaggcaa

SEQ ID NO: 451799 - DNA, 15 bp, Homo sapiens
atatttattaaggca

SEQ ID NO: 451800 - DNA, 15 bp, Homo sapiens
catatttattaaggc

SEQ ID NO: 451801 - DNA, 15 bp, Homo sapiens
acatatttattaagg

SEQ ID NO: 451802 - DNA, 15 bp, Homo sapiens
tacatatttattaag

SEQ ID NO: 451803 - DNA, 15 bp, Homo sapiens
ttacatatttattaa

SEQ ID NO: 451804 - DNA, 15 bp, Homo sapiens
attacatatttatta

SEQ ID NO: 451805 - DNA, 15 bp, Homo sapiens
tattacatatttatt

SEQ ID NO: 451806 - DNA, 15 bp, Homo sapiens
atattacatatttat

SEQ ID NO: 451807 - DNA, 15 bp, Homo sapiens
tatattacatattta

SEQ ID NO: 451808 - DNA, 15 bp, Homo sapiens
ttatattacatattt

SEQ ID NO: 451809 - DNA, 15 bp, Homo sapiens
tttatattacatatt

SEQ ID NO: 451810 - DNA, 15 bp, Homo sapiens
atttatattacatat

SEQ ID NO: 451811 - DNA, 15 bp, Homo sapiens
aatttatattacata

SEQ ID NO: 451812 - DNA, 15 bp, Homo sapiens
aaatttatattacat

SEQ ID NO: 451813 - DNA, 15 bp, Homo sapiens
taaatttatattaca

SEQ ID NO: 451814 - DNA, 15 bp, Homo sapiens
ttaaatttatattac

SEQ ID NO: 451815 - DNA, 15 bp, Homo sapiens
cttaaatttatatta

SEQ ID NO: 451816 - DNA, 15 bp, Homo sapiens
gcttaaatttatatt

SEQ ID NO: 451817 - DNA, 15 bp, Homo sapiens
tgcttaaatttatat

SEQ ID NO: 451818 - DNA, 15 bp, Homo sapiens
ttgcttaaatttata

SEQ ID NO: 451819 - DNA, 15 bp, Homo sapiens
tttgcttaaatttat

SEQ ID NO: 451820 - DNA, 15 bp, Homo sapiens
gtttgcttaaattta

SEQ ID NO: 451821 - DNA, 15 bp, Homo sapiens
cgtttgcttaaattt

SEQ ID NO: 451822 - DNA, 15 bp, Homo sapiens
acgtttgcttaaatt

SEQ ID NO: 451823 - DNA, 15 bp, Homo sapiens
gacgtttgcttaaat

SEQ ID NO: 451824 - DNA, 15 bp, Homo sapiens
agacgtttgcttaaa

SEQ ID NO: 451825 - DNA, 15 bp, Homo sapiens
tagacgtttgcttaa

SEQ ID NO: 451826 - DNA, 15 bp, Homo sapiens
atagacgtttgctta

SEQ ID NO: 451827 - DNA, 15 bp, Homo sapiens
aatagacgtttgctt

SEQ ID NO: 451828 - DNA, 15 bp, Homo sapiens
aaatagacgtttgct

SEQ ID NO: 451829 - DNA, 15 bp, Homo sapiens
aaaatagacgtttgc

SEQ ID NO: 451830 - DNA, 15 bp, Homo sapiens
caaaatagacgtttg

SEQ ID NO: 451831 - DNA, 15 bp, Homo sapiens
acaaaatagacgttt

SEQ ID NO: 451832 - DNA, 15 bp, Homo sapiens
tacaaaatagacgtt

SEQ ID NO: 451833 - DNA, 15 bp, Homo sapiens
atacaaaatagacgt

SEQ ID NO: 451834 - DNA, 15 bp, Homo sapiens
tatacaaaatagacg

SEQ ID NO: 451835 - DNA, 15 bp, Homo sapiens
atatacaaaatagac

SEQ ID NO: 451836 - DNA, 15 bp, Homo sapiens
aatatacaaaataga

SEQ ID NO: 451837 - DNA, 15 bp, Homo sapiens
aaatatacaaaatag

SEQ ID NO: 451838 - DNA, 15 bp, Homo sapiens
caaatatacaaaata

SEQ ID NO: 451839 - DNA, 15 bp, Homo sapiens
acaaatatacaaaat

SEQ ID NO: 451840 - DNA, 15 bp, Homo sapiens
tacaaatatacaaaa

SEQ ID NO: 451841 - DNA, 15 bp, Homo sapiens
ttacaaatatacaaa

SEQ ID NO: 451842 - DNA, 15 bp, Homo sapiens
tttacaaatatacaa

SEQ ID NO: 451843 - DNA, 15 bp, Homo sapiens
gtttacaaatataca

SEQ ID NO: 451844 - DNA, 15 bp, Homo sapiens
agtttacaaatatac

SEQ ID NO: 451845 - DNA, 15 bp, Homo sapiens
tagtttacaaatata

SEQ ID NO: 451846 - DNA, 15 bp, Homo sapiens
gtagtttacaaatat

SEQ ID NO: 451847 - DNA, 15 bp, Homo sapiens
tgtagtttacaaata

SEQ ID NO: 451848 - DNA, 15 bp, Homo sapiens
ttgtagtttacaaat

SEQ ID NO: 451849 - DNA, 15 bp, Homo sapiens
tttgtagtttacaaa

SEQ ID NO: 451850 - DNA, 15 bp, Homo sapiens
ctttgtagtttacaa

SEQ ID NO: 451851 - DNA, 15 bp, Homo sapiens
actttgtagtttaca

SEQ ID NO: 451852 - DNA, 15 bp, Homo sapiens
tactttgtagtttac

SEQ ID NO: 451853 - DNA, 15 bp, Homo sapiens
ttactttgtagttta

SEQ ID NO: 451854 - DNA, 15 bp, Homo sapiens
tttactttgtagttt

SEQ ID NO: 451855 - DNA, 15 bp, Homo sapiens
ttttactttgtagtt

SEQ ID NO: 451856 - DNA, 15 bp, Homo sapiens
attttactttgtagt

SEQ ID NO: 451857 - DNA, 15 bp, Homo sapiens
cattttactttgtag

SEQ ID NO: 451858 - DNA, 15 bp, Homo sapiens
tcattttactttgta

SEQ ID NO: 451859 - DNA, 15 bp, Homo sapiens
ttcattttactttgt

SEQ ID NO: 451860 - DNA, 15 bp, Homo sapiens
gttcattttactttg

SEQ ID NO: 451861 - DNA, 15 bp, Homo sapiens
tgttcattttacttt

SEQ ID NO: 451862 - DNA, 15 bp, Homo sapiens
atgttcattttactt

SEQ ID NO: 451863 - DNA, 15 bp, Homo sapiens
aatgttcattttact

SEQ ID NO: 451864 - DNA, 15 bp, Homo sapiens
aaatgttcattttac

SEQ ID NO: 451865 - DNA, 15 bp, Homo sapiens
aaaatgttcatttta

SEQ ID NO: 451866 - DNA, 15 bp, Homo sapiens
caaaatgttcatttt

SEQ ID NO: 451867 - DNA, 15 bp, Homo sapiens
acaaaatgttcattt

SEQ ID NO: 451868 - DNA, 15 bp, Homo sapiens
cacaaaatgttcatt

SEQ ID NO: 451869 - DNA, 15 bp, Homo sapiens
ccacaaaatgttcat

SEQ ID NO: 451870 - DNA, 15 bp, Homo sapiens
tccacaaaatgttca

SEQ ID NO: 451871 - DNA, 15 bp, Homo sapiens
ctccacaaaatgttc

SEQ ID NO: 451872 - DNA, 15 bp, Homo sapiens
actccacaaaatgtt

SEQ ID NO: 451873 - DNA, 15 bp, Homo sapiens
aactccacaaaatgt

SEQ ID NO: 451874 - DNA, 15 bp, Homo sapiens
aaactccacaaaatg

SEQ ID NO: 451875 - DNA, 15 bp, Homo sapiens
caaactccacaaaat

SEQ ID NO: 451876 - DNA, 15 bp, Homo sapiens
acaaactccacaaaa

SEQ ID NO: 451877 - DNA, 15 bp, Homo sapiens
tacaaactccacaaa

SEQ ID NO: 451878 - DNA, 15 bp, Homo sapiens
atacaaactccacaa

SEQ ID NO: 451879 - DNA, 15 bp, Homo sapiens
aatacaaactccaca

SEQ ID NO: 451880 - DNA, 15 bp, Homo sapiens
aaatacaaactccac

SEQ ID NO: 451881 - DNA, 15 bp, Homo sapiens
aaaatacaaactcca

SEQ ID NO: 451882 - DNA, 15 bp, Homo sapiens
caaaatacaaactcc

SEQ ID NO: 451883 - DNA, 15 bp, Homo sapiens
gcaaaatacaaactc

SEQ ID NO: 451884 - DNA, 15 bp, Homo sapiens
tgcaaaatacaaact

SEQ ID NO: 451885 - DNA, 15 bp, Homo sapiens
atgcaaaatacaaac

SEQ ID NO: 451886 - DNA, 15 bp, Homo sapiens
tatgcaaaatacaaa

SEQ ID NO: 451887 - DNA, 15 bp, Homo sapiens
gtatgcaaaatacaa

SEQ ID NO: 451888 - DNA, 15 bp, Homo sapiens
agtatgcaaaataca

SEQ ID NO: 451889 - DNA, 15 bp, Homo sapiens
gagtatgcaaaatac

SEQ ID NO: 451890 - DNA, 15 bp, Homo sapiens
tgagtatgcaaaata

SEQ ID NO: 451891 - DNA, 15 bp, Homo sapiens
ttgagtatgcaaaat

SEQ ID NO: 451892 - DNA, 15 bp, Homo sapiens
cttgagtatgcaaaa

SEQ ID NO: 451893 - DNA, 15 bp, Homo sapiens
ccttgagtatgcaaa

SEQ ID NO: 451894 - DNA, 15 bp, Homo sapiens
accttgagtatgcaa

SEQ ID NO: 451895 - DNA, 15 bp, Homo sapiens
caccttgagtatgca

SEQ ID NO: 451896 - DNA, 15 bp, Homo sapiens
tcaccttgagtatgc

SEQ ID NO: 451897 - DNA, 15 bp, Homo sapiens
ctcaccttgagtatg

SEQ ID NO: 451898 - DNA, 15 bp, Homo sapiens
tctcaccttgagtat

SEQ ID NO: 451899 - DNA, 15 bp, Homo sapiens
ttctcaccttgagta

SEQ ID NO: 451900 - DNA, 15 bp, Homo sapiens
attctcaccttgagt

SEQ ID NO: 451901 - DNA, 15 bp, Homo sapiens
aattctcaccttgag

SEQ ID NO: 451902 - DNA, 15 bp, Homo sapiens
taattctcaccttga

SEQ ID NO: 451903 - DNA, 15 bp, Homo sapiens
ttaattctcaccttg

SEQ ID NO: 451904 - DNA, 15 bp, Homo sapiens
cttaattctcacctt

SEQ ID NO: 451905 - DNA, 15 bp, Homo sapiens
acttaattctcacct

SEQ ID NO: 451906 - DNA, 15 bp, Homo sapiens
aacttaattctcacc

SEQ ID NO: 451907 - DNA, 15 bp, Homo sapiens
aaacttaattctcac

SEQ ID NO: 451908 - DNA, 15 bp, Homo sapiens
aaaacttaattctca

SEQ ID NO: 451909 - DNA, 15 bp, Homo sapiens
taaaacttaattctc

SEQ ID NO: 451910 - DNA, 15 bp, Homo sapiens
ttaaaacttaattct

SEQ ID NO: 451911 - DNA, 15 bp, Homo sapiens
tttaaaacttaattc

SEQ ID NO: 451912 - DNA, 15 bp, Homo sapiens
atttaaaacttaatt

SEQ ID NO: 451913 - DNA, 15 bp, Homo sapiens
tatttaaaacttaat

SEQ ID NO: 451914 - DNA, 15 bp, Homo sapiens
ttatttaaaacttaa

SEQ ID NO: 451915 - DNA, 15 bp, Homo sapiens
tttatttaaaactta

SEQ ID NO: 451916 - DNA, 15 bp, Homo sapiens
gtttatttaaaactt

SEQ ID NO: 451917 - DNA, 15 bp, Homo sapiens
ggtttatttaaaact

SEQ ID NO: 451918 - DNA, 15 bp, Homo sapiens
aggtttatttaaaac

SEQ ID NO: 451919 - DNA, 15 bp, Homo sapiens
taggtttatttaaaa

SEQ ID NO: 451920 - DNA, 15 bp, Homo sapiens
ataggtttatttaaa

SEQ ID NO: 451921 - DNA, 15 bp, Homo sapiens
tataggtttatttaa

SEQ ID NO: 451922 - DNA, 15 bp, Homo sapiens
ttataggtttattta

SEQ ID NO: 451923 - DNA, 15 bp, Homo sapiens
attataggtttattt

SEQ ID NO: 451924 - DNA, 15 bp, Homo sapiens
tattataggtttatt

SEQ ID NO: 451925 - DNA, 15 bp, Homo sapiens
atattataggtttat

SEQ ID NO: 451926 - DNA, 15 bp, Homo sapiens
aatattataggttta

SEQ ID NO: 451927 - DNA, 15 bp, Homo sapiens
aaatattataggttt

SEQ ID NO: 451928 - DNA, 15 bp, Homo sapiens
aaaatattataggtt

SEQ ID NO: 451929 - DNA, 15 bp, Homo sapiens
taaaatattataggt

SEQ ID NO: 451930 - DNA, 15 bp, Homo sapiens
ataaaatattatagg

SEQ ID NO: 451931 - DNA, 15 bp, Homo sapiens
gataaaatattatag

SEQ ID NO: 451932 - DNA, 15 bp, Homo sapiens
agataaaatattata

SEQ ID NO: 451933 - DNA, 15 bp, Homo sapiens
cagataaaatattat

SEQ ID NO: 451934 - DNA, 15 bp, Homo sapiens
tcagataaaatatta

SEQ ID NO: 451935 - DNA, 15 bp, Homo sapiens
ttcagataaaatatt

SEQ ID NO: 451936 - DNA, 15 bp, Homo sapiens
attcagataaaatat

SEQ ID NO: 451937 - DNA, 15 bp, Homo sapiens
tattcagataaaata

SEQ ID NO: 451938 - DNA, 15 bp, Homo sapiens
ttattcagataaaat

SEQ ID NO: 451939 - DNA, 15 bp, Homo sapiens
attattcagataaaa

SEQ ID NO: 451940 - DNA, 15 bp, Homo sapiens
cattattcagataaa

SEQ ID NO: 451941 - DNA, 15 bp, Homo sapiens
acattattcagataa

SEQ ID NO: 451942 - DNA, 15 bp, Homo sapiens
aacattattcagata

SEQ ID NO: 451943 - DNA, 15 bp, Homo sapiens
aaacattattcagat

SEQ ID NO: 451944 - DNA, 15 bp, Homo sapiens
aaaacattattcaga

SEQ ID NO: 451945 - DNA, 15 bp, Homo sapiens
aaaaacattattcag

SEQ ID NO: 451946 - DNA, 15 bp, Homo sapiens
aaaaaacattattca

SEQ ID NO: 451947 - DNA, 15 bp, Homo sapiens
taaaaaacattattc

SEQ ID NO: 451948 - DNA, 15 bp, Homo sapiens
ataaaaaacattatt

SEQ ID NO: 451949 - DNA, 15 bp, Homo sapiens
aataaaaaacattat

SEQ ID NO: 451950 - DNA, 15 bp, Homo sapiens
caataaaaaacatta

SEQ ID NO: 451951 - DNA, 15 bp, Homo sapiens
acaataaaaaacatt

SEQ ID NO: 451952 - DNA, 15 bp, Homo sapiens
aacaataaaaaacat

SEQ ID NO: 451953 - DNA, 15 bp, Homo sapiens
aaacaataaaaaaca

SEQ ID NO: 451954 - DNA, 15 bp, Homo sapiens
aaaacaataaaaaac

SEQ ID NO: 451955 - DNA, 15 bp, Homo sapiens
caaaacaataaaaaa

SEQ ID NO: 451956 - DNA, 15 bp, Homo sapiens
acaaaacaataaaaa

SEQ ID NO: 451957 - DNA, 15 bp, Homo sapiens
aacaaaacaataaaa

SEQ ID NO: 451958 - DNA, 15 bp, Homo sapiens
aaacaaaacaataaa

SEQ ID NO: 451959 - DNA, 15 bp, Homo sapiens
aaaacaaaacaataa

SEQ ID NO: 451960 - DNA, 15 bp, Homo sapiens
gaaaacaaaacaata

SEQ ID NO: 451961 - DNA, 15 bp, Homo sapiens
ggaaaacaaaacaat

SEQ ID NO: 451962 - DNA, 15 bp, Homo sapiens
aggaaaacaaaacaa

SEQ ID NO: 451963 - DNA, 15 bp, Homo sapiens
gaggaaaacaaaaca

SEQ ID NO: 451964 - DNA, 15 bp, Homo sapiens
ggaggaaaacaaaac

SEQ ID NO: 451965 - DNA, 15 bp, Homo sapiens
aggaggaaaacaaaa

SEQ ID NO: 451966 - DNA, 15 bp, Homo sapiens
caggaggaaaacaaa

SEQ ID NO: 451967 - DNA, 15 bp, Homo sapiens
ccaggaggaaaacaa

SEQ ID NO: 451968 - DNA, 15 bp, Homo sapiens
tccaggaggaaaaca

SEQ ID NO: 451969 - DNA, 15 bp, Homo sapiens
ttccaggaggaaaac

SEQ ID NO: 451970 - DNA, 15 bp, Homo sapiens
tttccaggaggaaaa

SEQ ID NO: 451971 - DNA, 15 bp, Homo sapiens
ttttccaggaggaaa

SEQ ID NO: 451972 - DNA, 15 bp, Homo sapiens
tttttccaggaggaa

SEQ ID NO: 451973 - DNA, 15 bp, Homo sapiens
atttttccaggagga

SEQ ID NO: 451974 - DNA, 15 bp, Homo sapiens
tatttttccaggagg

SEQ ID NO: 451975 - DNA, 15 bp, Homo sapiens
atatttttccaggag

SEQ ID NO: 451976 - DNA, 15 bp, Homo sapiens
catatttttccagga

SEQ ID NO: 451977 - DNA, 15 bp, Homo sapiens
tcatatttttccagg

SEQ ID NO: 451978 - DNA, 15 bp, Homo sapiens
ttcatatttttccag

SEQ ID NO: 451979 - DNA, 15 bp, Homo sapiens
gttcatatttttcca

SEQ ID NO: 451980 - DNA, 15 bp, Homo sapiens
tgttcatatttttcc

SEQ ID NO: 451981 - DNA, 15 bp, Homo sapiens
ctgttcatatttttc

SEQ ID NO: 451982 - DNA, 15 bp, Homo sapiens
actgttcatattttt

SEQ ID NO: 451983 - DNA, 15 bp, Homo sapiens
cactgttcatatttt

SEQ ID NO: 451984 - DNA, 15 bp, Homo sapiens
acactgttcatattt

SEQ ID NO: 451985 - DNA, 15 bp, Homo sapiens
aacactgttcatatt

SEQ ID NO: 451986 - DNA, 15 bp, Homo sapiens
aaacactgttcatat

SEQ ID NO: 451987 - DNA, 15 bp, Homo sapiens
caaacactgttcata

SEQ ID NO: 451988 - DNA, 15 bp, Homo sapiens
ccaaacactgttcat

SEQ ID NO: 451989 - DNA, 15 bp, Homo sapiens
accaaacactgttca

SEQ ID NO: 451990 - DNA, 15 bp, Homo sapiens
aaccaaacactgttc

SEQ ID NO: 451991 - DNA, 15 bp, Homo sapiens
aaaccaaacactgtt

SEQ ID NO: 451992 - DNA, 15 bp, Homo sapiens
taaaccaaacactgt

SEQ ID NO: 451993 - DNA, 15 bp, Homo sapiens
ttaaaccaaacactg

SEQ ID NO: 451994 - DNA, 15 bp, Homo sapiens
tttaaaccaaacact

SEQ ID NO: 451995 - DNA, 15 bp, Homo sapiens
gtttaaaccaaacac

SEQ ID NO: 451996 - DNA, 15 bp, Homo sapiens
tgtttaaaccaaaca

SEQ ID NO: 451997 - DNA, 15 bp, Homo sapiens
gtgtttaaaccaaac

SEQ ID NO: 451998 - DNA, 15 bp, Homo sapiens
tgtgtttaaaccaaa

SEQ ID NO: 451999 - DNA, 15 bp, Homo sapiens
gtgtgtttaaaccaa

SEQ ID NO: 452000 - DNA, 15 bp, Homo sapiens
ggtgtgtttaaacca

SEQ ID NO: 452001 - DNA, 15 bp, Homo sapiens
cggtgtgtttaaacc

SEQ ID NO: 452002 - DNA, 15 bp, Homo sapiens
ccggtgtgtttaaac

SEQ ID NO: 452003 - DNA, 15 bp, Homo sapiens
cccggtgtgtttaaa

SEQ ID NO: 452004 - DNA, 15 bp, Homo sapiens
acccggtgtgtttaa

SEQ ID NO: 452005 - DNA, 15 bp, Homo sapiens
aacccggtgtgttta

SEQ ID NO: 452006 - DNA, 15 bp, Homo sapiens
taacccggtgtgttt

SEQ ID NO: 452007 - DNA, 15 bp, Homo sapiens
ttaacccggtgtgtt

SEQ ID NO: 452008 - DNA, 15 bp, Homo sapiens
attaacccggtgtgt

SEQ ID NO: 452009 - DNA, 15 bp, Homo sapiens
tattaacccggtgtg

SEQ ID NO: 452010 - DNA, 15 bp, Homo sapiens
ttattaacccggtgt

SEQ ID NO: 452011 - DNA, 15 bp, Homo sapiens
cttattaacccggtg

SEQ ID NO: 452012 - DNA, 15 bp, Homo sapiens
ccttattaacccggt

SEQ ID NO: 452013 - DNA, 15 bp, Homo sapiens
gccttattaacccgg

SEQ ID NO: 452014 - DNA, 15 bp, Homo sapiens
tgccttattaacccg

SEQ ID NO: 452015 - DNA, 15 bp, Homo sapiens
atgccttattaaccc

SEQ ID NO: 452016 - DNA, 15 bp, Homo sapiens
catgccttattaacc

SEQ ID NO: 452017 - DNA, 15 bp, Homo sapiens
acatgccttattaac

SEQ ID NO: 452018 - DNA, 15 bp, Homo sapiens
tacatgccttattaa

SEQ ID NO: 452019 - DNA, 15 bp, Homo sapiens
ttacatgccttatta

SEQ ID NO: 452020 - DNA, 15 bp, Homo sapiens
cttacatgccttatt

SEQ ID NO: 452021 - DNA, 15 bp, Homo sapiens
tcttacatgccttat

SEQ ID NO: 452022 - DNA, 15 bp, Homo sapiens
ttcttacatgcctta

SEQ ID NO: 452023 - DNA, 15 bp, Homo sapiens
cttcttacatgcctt

SEQ ID NO: 452024 - DNA, 15 bp, Homo sapiens
gcttcttacatgcct

SEQ ID NO: 452025 - DNA, 15 bp, Homo sapiens
tgcttcttacatgcc

SEQ ID NO: 452026 - DNA, 15 bp, Homo sapiens
gtgcttcttacatgc

SEQ ID NO: 452027 - DNA, 15 bp, Homo sapiens
cgtgcttcttacatg

SEQ ID NO: 452028 - DNA, 15 bp, Homo sapiens
gcgtgcttcttacat

SEQ ID NO: 452029 - DNA, 15 bp, Homo sapiens
tgcgtgcttcttaca

SEQ ID NO: 452030 - DNA, 15 bp, Homo sapiens
gtgcgtgcttcttac

SEQ ID NO: 452031 - DNA, 15 bp, Homo sapiens
tgtgcgtgcttctta

SEQ ID NO: 452032 - DNA, 15 bp, Homo sapiens
ttgtgcgtgcttctt

SEQ ID NO: 452033 - DNA, 15 bp, Homo sapiens
tttgtgcgtgcttct

SEQ ID NO: 452034 - DNA, 15 bp, Homo sapiens
ttttgtgcgtgcttc

SEQ ID NO: 452035 - DNA, 15 bp, Homo sapiens
tttttgtgcgtgctt

SEQ ID NO: 452036 - DNA, 15 bp, Homo sapiens
ttttttgtgcgtgct

SEQ ID NO: 452037 - DNA, 15 bp, Homo sapiens
cttttttgtgcgtgc

SEQ ID NO: 452038 - DNA, 15 bp, Homo sapiens
gcttttttgtgcgtg

SEQ ID NO: 452039 - DNA, 15 bp, Homo sapiens
ggcttttttgtgcgt

SEQ ID NO: 452040 - DNA, 15 bp, Homo sapiens
tggcttttttgtgcg

SEQ ID NO: 452041 - DNA, 15 bp, Homo sapiens
ttggcttttttgtgc

SEQ ID NO: 452042 - DNA, 15 bp, Homo sapiens
gttggcttttttgtg

SEQ ID NO: 452043 - DNA, 15 bp, Homo sapiens
agttggcttttttgt

SEQ ID NO: 452044 - DNA, 15 bp, Homo sapiens
aagttggcttttttg

SEQ ID NO: 452045 - DNA, 15 bp, Homo sapiens
aaagttggctttttt

SEQ ID NO: 452046 - DNA, 15 bp, Homo sapiens
taaagttggcttttt

SEQ ID NO: 452047 - DNA, 15 bp, Homo sapiens
ataaagttggctttt

SEQ ID NO: 452048 - DNA, 15 bp, Homo sapiens
cataaagttggcttt

SEQ ID NO: 452049 - DNA, 15 bp, Homo sapiens
acataaagttggctt

SEQ ID NO: 452050 - DNA, 15 bp, Homo sapiens
gacataaagttggct

SEQ ID NO: 452051 - DNA, 15 bp, Homo sapiens
tgacataaagttggc

SEQ ID NO: 452052 - DNA, 15 bp, Homo sapiens
ttgacataaagttgg

SEQ ID NO: 452053 - DNA, 15 bp, Homo sapiens
gttgacataaagttg

SEQ ID NO: 452054 - DNA, 15 bp, Homo sapiens
tgttgacataaagtt

SEQ ID NO: 452055 - DNA, 15 bp, Homo sapiens
ttgttgacataaagt

SEQ ID NO: 452056 - DNA, 15 bp, Homo sapiens
tttgttgacataaag

SEQ ID NO: 452057 - DNA, 15 bp, Homo sapiens
atttgttgacataaa

SEQ ID NO: 452058 - DNA, 15 bp, Homo sapiens
aatttgttgacataa

SEQ ID NO: 452059 - DNA, 15 bp, Homo sapiens
taatttgttgacata

SEQ ID NO: 452060 - DNA, 15 bp, Homo sapiens
ttaatttgttgacat

SEQ ID NO: 452061 - DNA, 15 bp, Homo sapiens
tttaatttgttgaca

SEQ ID NO: 452062 - DNA, 15 bp, Homo sapiens
ttttaatttgttgac

SEQ ID NO: 452063 - DNA, 15 bp, Homo sapiens
attttaatttgttga

SEQ ID NO: 452064 - DNA, 15 bp, Homo sapiens
tattttaatttgttg

SEQ ID NO: 452065 - DNA, 15 bp, Homo sapiens
gtattttaatttgtt

SEQ ID NO: 452066 - DNA, 15 bp, Homo sapiens
ggtattttaatttgt

SEQ ID NO: 452067 - DNA, 15 bp, Homo sapiens
aggtattttaatttg

SEQ ID NO: 452068 - DNA, 15 bp, Homo sapiens
aaggtattttaattt

SEQ ID NO: 452069 - DNA, 15 bp, Homo sapiens
aaaggtattttaatt

SEQ ID NO: 452070 - DNA, 15 bp, Homo sapiens
aaaaggtattttaat

SEQ ID NO: 452071 - DNA, 15 bp, Homo sapiens
aaaaaggtattttaa

SEQ ID NO: 452072 - DNA, 15 bp, Homo sapiens
aaaaaaggtatttta

SEQ ID NO: 452073 - DNA, 15 bp, Homo sapiens
aaaaaaaggtatttt

SEQ ID NO: 452074 - DNA, 15 bp, Homo sapiens
taaaaaaaggtattt

SEQ ID NO: 452075 - DNA, 15 bp, Homo sapiens
ataaaaaaaggtatt

SEQ ID NO: 452076 - DNA, 15 bp, Homo sapiens
aataaaaaaaggtat

SEQ ID NO: 452077 - DNA, 15 bp, Homo sapiens
taataaaaaaaggta

SEQ ID NO: 452078 - DNA, 15 bp, Homo sapiens
ttaataaaaaaaggt

SEQ ID NO: 452079 - DNA, 15 bp, Homo sapiens
tttaataaaaaaagg

SEQ ID NO: 452080 - DNA, 15 bp, Homo sapiens
ttttaataaaaaaag

SEQ ID NO: 452081 - DNA, 15 bp, Homo sapiens
tttttaataaaaaaa

SEQ ID NO: 452082 - DNA, 15 bp, Homo sapiens
ttttttaataaaaaa

SEQ ID NO: 452083 - DNA, 15 bp, Homo sapiens
tttttttaataaaaa

SEQ ID NO: 452084 - DNA, 15 bp, Homo sapiens
ttttttttaataaaa

SEQ ID NO: 452085 - DNA, 15 bp, Homo sapiens
tttttttttaataaa

SEQ ID NO: 452086 - DNA, 15 bp, Homo sapiens
gtttttttttaataa

SEQ ID NO: 452087 - DNA, 15 bp, Homo sapiens
agtttttttttaata

SEQ ID NO: 452088 - DNA, 15 bp, Homo sapiens
tagtttttttttaat

SEQ ID NO: 452089 - DNA, 15 bp, Homo sapiens
atagtttttttttaa

SEQ ID NO: 452090 - DNA, 15 bp, Homo sapiens
aatagttttttttta

SEQ ID NO: 452091 - DNA, 15 bp, Homo sapiens
aaatagttttttttt

SEQ ID NO: 452092 - DNA, 15 bp, Homo sapiens
taaatagtttttttt

SEQ ID NO: 452093 - DNA, 15 bp, Homo sapiens
ctaaatagttttttt

SEQ ID NO: 452094 - DNA, 15 bp, Homo sapiens
actaaatagtttttt

SEQ ID NO: 452095 - DNA, 15 bp, Homo sapiens
aactaaatagttttt

SEQ ID NO: 452096 - DNA, 15 bp, Homo sapiens
aaactaaatagtttt

SEQ ID NO: 452097 - DNA, 15 bp, Homo sapiens
aaaactaaatagttt

SEQ ID NO: 452098 - DNA, 15 bp, Homo sapiens
taaaactaaatagtt

SEQ ID NO: 452099 - DNA, 15 bp, Homo sapiens
gtaaaactaaatagt

SEQ ID NO: 452100 - DNA, 15 bp, Homo sapiens
ggtaaaactaaatag

SEQ ID NO: 452101 - DNA, 15 bp, Homo sapiens
tggtaaaactaaata

SEQ ID NO: 452102 - DNA, 15 bp, Homo sapiens
atggtaaaactaaat

SEQ ID NO: 452103 - DNA, 15 bp, Homo sapiens
tatggtaaaactaaa

SEQ ID NO: 452104 - DNA, 15 bp, Homo sapiens
ttatggtaaaactaa

SEQ ID NO: 452105 - DNA, 15 bp, Homo sapiens
tttatggtaaaacta

SEQ ID NO: 452106 - DNA, 15 bp, Homo sapiens
atttatggtaaaact

SEQ ID NO: 452107 - DNA, 15 bp, Homo sapiens
tatttatggtaaaac

SEQ ID NO: 452108 - DNA, 15 bp, Homo sapiens
gtatttatggtaaaa

SEQ ID NO: 452109 - DNA, 15 bp, Homo sapiens
agtatttatggtaaa

SEQ ID NO: 452110 - DNA, 15 bp, Homo sapiens
tagtatttatggtaa

SEQ ID NO: 452111 - DNA, 15 bp, Homo sapiens
atagtatttatggta

SEQ ID NO: 452112 - DNA, 15 bp, Homo sapiens
gatagtatttatggt

SEQ ID NO: 452113 - DNA, 15 bp, Homo sapiens
tgatagtatttatgg

SEQ ID NO: 452114 - DNA, 15 bp, Homo sapiens
ttgatagtatttatg

SEQ ID NO: 452115 - DNA, 15 bp, Homo sapiens
attgatagtatttat

SEQ ID NO: 452116 - DNA, 15 bp, Homo sapiens
tattgatagtattta

SEQ ID NO: 452117 - DNA, 15 bp, Homo sapiens
atattgatagtattt

SEQ ID NO: 452118 - DNA, 15 bp, Homo sapiens
tatattgatagtatt

SEQ ID NO: 452119 - DNA, 15 bp, Homo sapiens
ctatattgatagtat

SEQ ID NO: 452120 - DNA, 15 bp, Homo sapiens
cctatattgatagta

SEQ ID NO: 452121 - DNA, 15 bp, Homo sapiens
ccctatattgatagt

SEQ ID NO: 452122 - DNA, 15 bp, Homo sapiens
gccctatattgatag

SEQ ID NO: 452123 - DNA, 15 bp, Homo sapiens
agccctatattgata

SEQ ID NO: 452124 - DNA, 15 bp, Homo sapiens
cagccctatattgat

SEQ ID NO: 452125 - DNA, 15 bp, Homo sapiens
tcagccctatattga

SEQ ID NO: 452126 - DNA, 15 bp, Homo sapiens
ctcagccctatattg

SEQ ID NO: 452127 - DNA, 15 bp, Homo sapiens
tctcagccctatatt

SEQ ID NO: 452128 - DNA, 15 bp, Homo sapiens
ttctcagccctatat

SEQ ID NO: 452129 - DNA, 15 bp, Homo sapiens
gttctcagccctata

SEQ ID NO: 452130 - DNA, 15 bp, Homo sapiens
agttctcagccctat

SEQ ID NO: 452131 - DNA, 15 bp, Homo sapiens
gagttctcagcccta

SEQ ID NO: 452132 - DNA, 15 bp, Homo sapiens
agagttctcagccct

SEQ ID NO: 452133 - DNA, 15 bp, Homo sapiens
aagagttctcagccc

SEQ ID NO: 452134 - DNA, 15 bp, Homo sapiens
caagagttctcagcc

SEQ ID NO: 452135 - DNA, 15 bp, Homo sapiens
tcaagagttctcagc

SEQ ID NO: 452136 - DNA, 15 bp, Homo sapiens
atcaagagttctcag

SEQ ID NO: 452137 - DNA, 15 bp, Homo sapiens
aatcaagagttctca

SEQ ID NO: 452138 - DNA, 15 bp, Homo sapiens
taatcaagagttctc

SEQ ID NO: 452139 - DNA, 15 bp, Homo sapiens
ataatcaagagttct

SEQ ID NO: 452140 - DNA, 15 bp, Homo sapiens
aataatcaagagttc

SEQ ID NO: 452141 - DNA, 15 bp, Homo sapiens
caataatcaagagtt

SEQ ID NO: 452142 - DNA, 15 bp, Homo sapiens
acaataatcaagagt

SEQ ID NO: 452143 - DNA, 15 bp, Homo sapiens
tacaataatcaagag

SEQ ID NO: 452144 - DNA, 15 bp, Homo sapiens
gtacaataatcaaga

SEQ ID NO: 452145 - DNA, 15 bp, Homo sapiens
cgtacaataatcaag

SEQ ID NO: 452146 - DNA, 15 bp, Homo sapiens
acgtacaataatcaa

SEQ ID NO: 452147 - DNA, 15 bp, Homo sapiens
aacgtacaataatca

SEQ ID NO: 452148 - DNA, 15 bp, Homo sapiens
aaacgtacaataatc

SEQ ID NO: 452149 - DNA, 15 bp, Homo sapiens
taaacgtacaataat

SEQ ID NO: 452150 - DNA, 15 bp, Homo sapiens
ttaaacgtacaataa

SEQ ID NO: 452151 - DNA, 15 bp, Homo sapiens
tttaaacgtacaata

SEQ ID NO: 452152 - DNA, 15 bp, Homo sapiens
ttttaaacgtacaat

SEQ ID NO: 452153 - DNA, 15 bp, Homo sapiens
tttttaaacgtacaa

SEQ ID NO: 452154 - DNA, 15 bp, Homo sapiens
atttttaaacgtaca

SEQ ID NO: 452155 - DNA, 15 bp, Homo sapiens
aatttttaaacgtac

SEQ ID NO: 452156 - DNA, 15 bp, Homo sapiens
taatttttaaacgta

SEQ ID NO: 452157 - DNA, 15 bp, Homo sapiens
gtaatttttaaacgt

SEQ ID NO: 452158 - DNA, 15 bp, Homo sapiens
tgtaatttttaaacg

SEQ ID NO: 452159 - DNA, 15 bp, Homo sapiens
ttgtaatttttaaac

SEQ ID NO: 452160 - DNA, 15 bp, Homo sapiens
cttgtaatttttaaa

SEQ ID NO: 452161 - DNA, 15 bp, Homo sapiens
tcttgtaatttttaa

SEQ ID NO: 452162 - DNA, 15 bp, Homo sapiens
atcttgtaattttta

SEQ ID NO: 452163 - DNA, 15 bp, Homo sapiens
aatcttgtaattttt

SEQ ID NO: 452164 - DNA, 15 bp, Homo sapiens
taatcttgtaatttt

SEQ ID NO: 452165 - DNA, 15 bp, Homo sapiens
ttaatcttgtaattt

SEQ ID NO: 452166 - DNA, 15 bp, Homo sapiens
tttaatcttgtaatt

SEQ ID NO: 452167 - DNA, 15 bp, Homo sapiens
ttttaatcttgtaat

SEQ ID NO: 452168 - DNA, 15 bp, Homo sapiens
tttttaatcttgtaa

SEQ ID NO: 452169 - DNA, 15 bp, Homo sapiens
gtttttaatcttgta

SEQ ID NO: 452170 - DNA, 15 bp, Homo sapiens
ggtttttaatcttgt

SEQ ID NO: 452171 - DNA, 15 bp, Homo sapiens
gggtttttaatcttg

SEQ ID NO: 452172 - DNA, 15 bp, Homo sapiens
tgggtttttaatctt

SEQ ID NO: 452173 - DNA, 15 bp, Homo sapiens
ctgggtttttaatct

SEQ ID NO: 452174 - DNA, 15 bp, Homo sapiens
actgggtttttaatc

SEQ ID NO: 452175 - DNA, 15 bp, Homo sapiens
aactgggtttttaat

SEQ ID NO: 452176 - DNA, 15 bp, Homo sapiens
gaactgggtttttaa

SEQ ID NO: 452177 - DNA, 15 bp, Homo sapiens
tgaactgggttttta

SEQ ID NO: 452178 - DNA, 15 bp, Homo sapiens
ctgaactgggttttt

SEQ ID NO: 452179 - DNA, 15 bp, Homo sapiens
cctgaactgggtttt

SEQ ID NO: 452180 - DNA, 15 bp, Homo sapiens
acctgaactgggttt

SEQ ID NO: 452181 - DNA, 15 bp, Homo sapiens
aacctgaactgggtt

SEQ ID NO: 452182 - DNA, 15 bp, Homo sapiens
aaacctgaactgggt

SEQ ID NO: 452183 - DNA, 15 bp, Homo sapiens
caaacctgaactggg

SEQ ID NO: 452184 - DNA, 15 bp, Homo sapiens
gcaaacctgaactgg

SEQ ID NO: 452185 - DNA, 15 bp, Homo sapiens
agcaaacctgaactg

SEQ ID NO: 452186 - DNA, 15 bp, Homo sapiens
gagcaaacctgaact

SEQ ID NO: 452187 - DNA, 15 bp, Homo sapiens
agagcaaacctgaac

SEQ ID NO: 452188 - DNA, 15 bp, Homo sapiens
aagagcaaacctgaa

SEQ ID NO: 452189 - DNA, 15 bp, Homo sapiens
aaagagcaaacctga

SEQ ID NO: 452190 - DNA, 15 bp, Homo sapiens
gaaagagcaaacctg

SEQ ID NO: 452191 - DNA, 15 bp, Homo sapiens
ggaaagagcaaacct

SEQ ID NO: 452192 - DNA, 15 bp, Homo sapiens
tggaaagagcaaacc

SEQ ID NO: 452193 - DNA, 15 bp, Homo sapiens
ttggaaagagcaaac

SEQ ID NO: 452194 - DNA, 15 bp, Homo sapiens
tttggaaagagcaaa

SEQ ID NO: 452195 - DNA, 15 bp, Homo sapiens
atttggaaagagcaa

SEQ ID NO: 452196 - DNA, 15 bp, Homo sapiens
catttggaaagagca

SEQ ID NO: 452197 - DNA, 15 bp, Homo sapiens
acatttggaaagagc

SEQ ID NO: 452198 - DNA, 15 bp, Homo sapiens
tacatttggaaagag

SEQ ID NO: 452199 - DNA, 15 bp, Homo sapiens
gtacatttggaaaga

SEQ ID NO: 452200 - DNA, 15 bp, Homo sapiens
cgtacatttggaaag

SEQ ID NO: 452201 - DNA, 15 bp, Homo sapiens
acgtacatttggaaa

SEQ ID NO: 452202 - DNA, 15 bp, Homo sapiens
tacgtacatttggaa

SEQ ID NO: 452203 - DNA, 15 bp, Homo sapiens
ttacgtacatttgga

SEQ ID NO: 452204 - DNA, 15 bp, Homo sapiens
tttacgtacatttgg

SEQ ID NO: 452205 - DNA, 15 bp, Homo sapiens
ctttacgtacatttg

SEQ ID NO: 452206 - DNA, 15 bp, Homo sapiens
gctttacgtacattt

SEQ ID NO: 452207 - DNA, 15 bp, Homo sapiens
agctttacgtacatt

SEQ ID NO: 452208 - DNA, 15 bp, Homo sapiens
tagctttacgtacat

SEQ ID NO: 452209 - DNA, 15 bp, Homo sapiens
gtagctttacgtaca

SEQ ID NO: 452210 - DNA, 15 bp, Homo sapiens
cgtagctttacgtac

SEQ ID NO: 452211 - DNA, 15 bp, Homo sapiens
acgtagctttacgta

SEQ ID NO: 452212 - DNA, 15 bp, Homo sapiens
cacgtagctttacgt

SEQ ID NO: 452213 - DNA, 15 bp, Homo sapiens
tcacgtagctttacg

SEQ ID NO: 452214 - DNA, 15 bp, Homo sapiens
ttcacgtagctttac

SEQ ID NO: 452215 - DNA, 15 bp, Homo sapiens
tttcacgtagcttta

SEQ ID NO: 452216 - DNA, 15 bp, Homo sapiens
ctttcacgtagcttt

SEQ ID NO: 452217 - DNA, 15 bp, Homo sapiens
gctttcacgtagctt

SEQ ID NO: 452218 - DNA, 15 bp, Homo sapiens
tgctttcacgtagct

SEQ ID NO: 452219 - DNA, 15 bp, Homo sapiens
ctgctttcacgtagc

SEQ ID NO: 452220 - DNA, 15 bp, Homo sapiens
actgctttcacgtag

SEQ ID NO: 452221 - DNA, 15 bp, Homo sapiens
aactgctttcacgta

SEQ ID NO: 452222 - DNA, 15 bp, Homo sapiens
aaactgctttcacgt

SEQ ID NO: 452223 - DNA, 15 bp, Homo sapiens
gaaactgctttcacg

SEQ ID NO: 452224 - DNA, 15 bp, Homo sapiens
ggaaactgctttcac

SEQ ID NO: 452225 - DNA, 15 bp, Homo sapiens
aggaaactgctttca

SEQ ID NO: 452226 - DNA, 15 bp, Homo sapiens
aaggaaactgctttc

SEQ ID NO: 452227 - DNA, 15 bp, Homo sapiens
taaggaaactgcttt

SEQ ID NO: 452228 - DNA, 15 bp, Homo sapiens
gtaaggaaactgctt

SEQ ID NO: 452229 - DNA, 15 bp, Homo sapiens
ggtaaggaaactgct

SEQ ID NO: 452230 - DNA, 15 bp, Homo sapiens
aggtaaggaaactgc

SEQ ID NO: 452231 - DNA, 15 bp, Homo sapiens
taggtaaggaaactg

SEQ ID NO: 452232 - DNA, 15 bp, Homo sapiens
ataggtaaggaaact

SEQ ID NO: 452233 - DNA, 15 bp, Homo sapiens
cataggtaaggaaac

SEQ ID NO: 452234 - DNA, 15 bp, Homo sapiens
tcataggtaaggaaa

SEQ ID NO: 452235 - DNA, 15 bp, Homo sapiens
atcataggtaaggaa

SEQ ID NO: 452236 - DNA, 15 bp, Homo sapiens
aatcataggtaagga

SEQ ID NO: 452237 - DNA, 15 bp, Homo sapiens
aaatcataggtaagg

SEQ ID NO: 452238 - DNA, 15 bp, Homo sapiens
aaaatcataggtaag

SEQ ID NO: 452239 - DNA, 15 bp, Homo sapiens
gaaaatcataggtaa

SEQ ID NO: 452240 - DNA, 15 bp, Homo sapiens
ggaaaatcataggta

SEQ ID NO: 452241 - DNA, 15 bp, Homo sapiens
gggaaaatcataggt

SEQ ID NO: 452242 - DNA, 15 bp, Homo sapiens
tgggaaaatcatagg

SEQ ID NO: 452243 - DNA, 15 bp, Homo sapiens
ctgggaaaatcatag

SEQ ID NO: 452244 - DNA, 15 bp, Homo sapiens
actgggaaaatcata

SEQ ID NO: 452245 - DNA, 15 bp, Homo sapiens
tactgggaaaatcat

SEQ ID NO: 452246 - DNA, 15 bp, Homo sapiens
ctactgggaaaatca

SEQ ID NO: 452247 - DNA, 15 bp, Homo sapiens
tctactgggaaaatc

SEQ ID NO: 452248 - DNA, 15 bp, Homo sapiens
ttctactgggaaaat

SEQ ID NO: 452249 - DNA, 15 bp, Homo sapiens
tttctactgggaaaa

SEQ ID NO: 452250 - DNA, 15 bp, Homo sapiens
gtttctactgggaaa

SEQ ID NO: 452251 - DNA, 15 bp, Homo sapiens
tgtttctactgggaa

SEQ ID NO: 452252 - DNA, 15 bp, Homo sapiens
ctgtttctactggga

SEQ ID NO: 452253 - DNA, 15 bp, Homo sapiens
gctgtttctactggg

SEQ ID NO: 452254 - DNA, 15 bp, Homo sapiens
agctgtttctactgg

SEQ ID NO: 452255 - DNA, 15 bp, Homo sapiens
aagctgtttctactg

SEQ ID NO: 452256 - DNA, 15 bp, Homo sapiens
taagctgtttctact

SEQ ID NO: 452257 - DNA, 15 bp, Homo sapiens
ttaagctgtttctac

SEQ ID NO: 452258 - DNA, 15 bp, Homo sapiens
attaagctgtttcta

SEQ ID NO: 452259 - DNA, 15 bp, Homo sapiens
gattaagctgtttct

SEQ ID NO: 452260 - DNA, 15 bp, Homo sapiens
tgattaagctgtttc

SEQ ID NO: 452261 - DNA, 15 bp, Homo sapiens
atgattaagctgttt

SEQ ID NO: 452262 - DNA, 15 bp, Homo sapiens
gatgattaagctgtt

SEQ ID NO: 452263 - DNA, 15 bp, Homo sapiens
ggatgattaagctgt

SEQ ID NO: 452264 - DNA, 15 bp, Homo sapiens
aggatgattaagctg

SEQ ID NO: 452265 - DNA, 15 bp, Homo sapiens
aaggatgattaagct

SEQ ID NO: 452266 - DNA, 15 bp, Homo sapiens
taaggatgattaagc

SEQ ID NO: 452267 - DNA, 15 bp, Homo sapiens
ttaaggatgattaag

SEQ ID NO: 452268 - DNA, 15 bp, Homo sapiens
tttaaggatgattaa

SEQ ID NO: 452269 - DNA, 15 bp, Homo sapiens
atttaaggatgatta

SEQ ID NO: 452270 - DNA, 15 bp, Homo sapiens
aatttaaggatgatt

SEQ ID NO: 452271 - DNA, 15 bp, Homo sapiens
aaatttaaggatgat

SEQ ID NO: 452272 - DNA, 15 bp, Homo sapiens
caaatttaaggatga

SEQ ID NO: 452273 - DNA, 15 bp, Homo sapiens
gcaaatttaaggatg

SEQ ID NO: 452274 - DNA, 15 bp, Homo sapiens
agcaaatttaaggat

SEQ ID NO: 452275 - DNA, 15 bp, Homo sapiens
gagcaaatttaagga

SEQ ID NO: 452276 - DNA, 15 bp, Homo sapiens
tgagcaaatttaagg

SEQ ID NO: 452277 - DNA, 15 bp, Homo sapiens
ctgagcaaatttaag

SEQ ID NO: 452278 - DNA, 15 bp, Homo sapiens
actgagcaaatttaa

SEQ ID NO: 452279 - DNA, 15 bp, Homo sapiens
aactgagcaaattta

SEQ ID NO: 452280 - DNA, 15 bp, Homo sapiens
aaactgagcaaattt

SEQ ID NO: 452281 - DNA, 15 bp, Homo sapiens
taaactgagcaaatt

SEQ ID NO: 452282 - DNA, 15 bp, Homo sapiens
ctaaactgagcaaat

SEQ ID NO: 452283 - DNA, 15 bp, Homo sapiens
actaaactgagcaaa

SEQ ID NO: 452284 - DNA, 15 bp, Homo sapiens
tactaaactgagcaa

SEQ ID NO: 452285 - DNA, 15 bp, Homo sapiens
atactaaactgagca

SEQ ID NO: 452286 - DNA, 15 bp, Homo sapiens
catactaaactgagc

SEQ ID NO: 452287 - DNA, 15 bp, Homo sapiens
tcatactaaactgag

SEQ ID NO: 452288 - DNA, 15 bp, Homo sapiens
ttcatactaaactga

SEQ ID NO: 452289 - DNA, 15 bp, Homo sapiens
tttcatactaaactg

SEQ ID NO: 452290 - DNA, 15 bp, Homo sapiens
ttttcatactaaact

SEQ ID NO: 452291 - DNA, 15 bp, Homo sapiens
attttcatactaaac

SEQ ID NO: 452292 - DNA, 15 bp, Homo sapiens
tattttcatactaaa

SEQ ID NO: 452293 - DNA, 15 bp, Homo sapiens
atattttcatactaa

SEQ ID NO: 452294 - DNA, 15 bp, Homo sapiens
aatattttcatacta

SEQ ID NO: 452295 - DNA, 15 bp, Homo sapiens
aaatattttcatact

SEQ ID NO: 452296 - DNA, 15 bp, Homo sapiens
taaatattttcatac

SEQ ID NO: 452297 - DNA, 15 bp, Homo sapiens
ataaatattttcata

SEQ ID NO: 452298 - DNA, 15 bp, Homo sapiens
cataaatattttcat

SEQ ID NO: 452299 - DNA, 15 bp, Homo sapiens
tcataaatattttca

SEQ ID NO: 452300 - DNA, 15 bp, Homo sapiens
ttcataaatattttc

SEQ ID NO: 452301 - DNA, 15 bp, Homo sapiens
tttcataaatatttt

SEQ ID NO: 452302 - DNA, 15 bp, Homo sapiens
atttcataaatattt

SEQ ID NO: 452303 - DNA, 15 bp, Homo sapiens
tatttcataaatatt

SEQ ID NO: 452304 - DNA, 15 bp, Homo sapiens
atatttcataaatat

SEQ ID NO: 452305 - DNA, 15 bp, Homo sapiens
tatatttcataaata

SEQ ID NO: 452306 - DNA, 15 bp, Homo sapiens
atatatttcataaat

SEQ ID NO: 452307 - DNA, 15 bp, Homo sapiens
tatatatttcataaa

SEQ ID NO: 452308 - DNA, 15 bp, Homo sapiens
gtatatatttcataa

SEQ ID NO: 452309 - DNA, 15 bp, Homo sapiens
tgtatatatttcata

SEQ ID NO: 452310 - DNA, 15 bp, Homo sapiens
atgtatatatttcat

SEQ ID NO: 452311 - DNA, 15 bp, Homo sapiens
aatgtatatatttca

SEQ ID NO: 452312 - DNA, 15 bp, Homo sapiens
aaatgtatatatttc

SEQ ID NO: 452313 - DNA, 15 bp, Homo sapiens
gaaatgtatatattt

SEQ ID NO: 452314 - DNA, 15 bp, Homo sapiens
tgaaatgtatatatt

SEQ ID NO: 452315 - DNA, 15 bp, Homo sapiens
ctgaaatgtatatat

SEQ ID NO: 452316 - DNA, 15 bp, Homo sapiens
actgaaatgtatata

SEQ ID NO: 452317 - DNA, 15 bp, Homo sapiens
aactgaaatgtatat

SEQ ID NO: 452318 - DNA, 15 bp, Homo sapiens
aaactgaaatgtata

SEQ ID NO: 452319 - DNA, 15 bp, Homo sapiens
gaaactgaaatgtat

SEQ ID NO: 452320 - DNA, 15 bp, Homo sapiens
tgaaactgaaatgta

SEQ ID NO: 452321 - DNA, 15 bp, Homo sapiens
atgaaactgaaatgt

SEQ ID NO: 452322 - DNA, 15 bp, Homo sapiens
tatgaaactgaaatg

SEQ ID NO: 452323 - DNA, 15 bp, Homo sapiens
atatgaaactgaaat

SEQ ID NO: 452324 - DNA, 15 bp, Homo sapiens
aatatgaaactgaaa

SEQ ID NO: 452325 - DNA, 15 bp, Homo sapiens
aaatatgaaactgaa

SEQ ID NO: 452326 - DNA, 15 bp, Homo sapiens
caaatatgaaactga

SEQ ID NO: 452327 - DNA, 15 bp, Homo sapiens
tcaaatatgaaactg

SEQ ID NO: 452328 - DNA, 15 bp, Homo sapiens
ttcaaatatgaaact

SEQ ID NO: 452329 - DNA, 15 bp, Homo sapiens
tttcaaatatgaaac

SEQ ID NO: 452330 - DNA, 15 bp, Homo sapiens
ttttcaaatatgaaa

SEQ ID NO: 452331 - DNA, 15 bp, Homo sapiens
tttttcaaatatgaa

SEQ ID NO: 452332 - DNA, 15 bp, Homo sapiens
ttttttcaaatatga

SEQ ID NO: 452333 - DNA, 15 bp, Homo sapiens
tttttttcaaatatg

SEQ ID NO: 452334 - DNA, 15 bp, Homo sapiens
atttttttcaaatat

SEQ ID NO: 452335 - DNA, 15 bp, Homo sapiens
gatttttttcaaata

SEQ ID NO: 452336 - DNA, 15 bp, Homo sapiens
agatttttttcaaat

SEQ ID NO: 452337 - DNA, 15 bp, Homo sapiens
aagatttttttcaaa

SEQ ID NO: 452338 - DNA, 15 bp, Homo sapiens
aaagatttttttcaa

SEQ ID NO: 452339 - DNA, 15 bp, Homo sapiens
taaagatttttttca

SEQ ID NO: 452340 - DNA, 15 bp, Homo sapiens
ataaagatttttttc

SEQ ID NO: 452341 - DNA, 15 bp, Homo sapiens
cataaagattttttt

SEQ ID NO: 452342 - DNA, 15 bp, Homo sapiens
ccataaagatttttt

SEQ ID NO: 452343 - DNA, 15 bp, Homo sapiens
accataaagattttt

SEQ ID NO: 452344 - DNA, 15 bp, Homo sapiens
aaccataaagatttt

SEQ ID NO: 452345 - DNA, 15 bp, Homo sapiens
aaaccataaagattt

SEQ ID NO: 452346 - DNA, 15 bp, Homo sapiens
caaaccataaagatt

SEQ ID NO: 452347 - DNA, 15 bp, Homo sapiens
acaaaccataaagat

SEQ ID NO: 452348 - DNA, 15 bp, Homo sapiens
gacaaaccataaaga

SEQ ID NO: 452349 - DNA, 15 bp, Homo sapiens
agacaaaccataaag

SEQ ID NO: 452350 - DNA, 15 bp, Homo sapiens
aagacaaaccataaa

SEQ ID NO: 452351 - DNA, 15 bp, Homo sapiens
aaagacaaaccataa

SEQ ID NO: 452352 - DNA, 15 bp, Homo sapiens
aaaagacaaaccata

SEQ ID NO: 452353 - DNA, 15 bp, Homo sapiens
taaaagacaaaccat

SEQ ID NO: 452354 - DNA, 15 bp, Homo sapiens
ttaaaagacaaacca

SEQ ID NO: 452355 - DNA, 15 bp, Homo sapiens
tttaaaagacaaacc

SEQ ID NO: 452356 - DNA, 15 bp, Homo sapiens
ctttaaaagacaaac

SEQ ID NO: 452357 - DNA, 15 bp, Homo sapiens
actttaaaagacaaa

SEQ ID NO: 452358 - DNA, 15 bp, Homo sapiens
tactttaaaagacaa

SEQ ID NO: 452359 - DNA, 15 bp, Homo sapiens
ttactttaaaagaca

SEQ ID NO: 452360 - DNA, 15 bp, Homo sapiens
tttactttaaaagac

SEQ ID NO: 452361 - DNA, 15 bp, Homo sapiens
atttactttaaaaga

SEQ ID NO: 452362 - DNA, 15 bp, Homo sapiens
tatttactttaaaag

SEQ ID NO: 452363 - DNA, 15 bp, Homo sapiens
ttatttactttaaaa

SEQ ID NO: 452364 - DNA, 15 bp, Homo sapiens
tttatttactttaaa

SEQ ID NO: 452365 - DNA, 15 bp, Homo sapiens
ttttatttactttaa

SEQ ID NO: 452366 - DNA, 15 bp, Homo sapiens
tttttatttacttta

SEQ ID NO: 452367 - DNA, 15 bp, Homo sapiens
atttttatttacttt

SEQ ID NO: 452368 - DNA, 15 bp, Homo sapiens
tatttttatttactt

SEQ ID NO: 452369 - DNA, 15 bp, Homo sapiens
ttatttttatttact

SEQ ID NO: 452370 - DNA, 15 bp, Homo sapiens
tttatttttatttac

SEQ ID NO: 452371 - DNA, 15 bp, Homo sapiens
ttttatttttattta

SEQ ID NO: 452372 - DNA, 15 bp, Homo sapiens
tttttatttttattt

SEQ ID NO: 452373 - DNA, 15 bp, Homo sapiens
ttttttatttttatt

SEQ ID NO: 452374 - DNA, 15 bp, Homo sapiens
cttttttatttttat

SEQ ID NO: 452375 - DNA, 15 bp, Homo sapiens
acttttttattttta

SEQ ID NO: 452376 - DNA, 15 bp, Homo sapiens
aacttttttattttt

SEQ ID NO: 452377 - DNA, 15 bp, Homo sapiens
aaacttttttatttt

SEQ ID NO: 452378 - DNA, 15 bp, Homo sapiens
aaaacttttttattt

SEQ ID NO: 452379 - DNA, 15 bp, Homo sapiens
gaaaacttttttatt

SEQ ID NO: 452380 - DNA, 15 bp, Homo sapiens
agaaaacttttttat

SEQ ID NO: 452381 - DNA, 15 bp, Homo sapiens
cagaaaactttttta

SEQ ID NO: 452382 - DNA, 15 bp, Homo sapiens
acagaaaactttttt

SEQ ID NO: 452383 - DNA, 15 bp, Homo sapiens
cacagaaaacttttt

SEQ ID NO: 452384 - DNA, 15 bp, Homo sapiens
ccacagaaaactttt

SEQ ID NO: 452385 - DNA, 15 bp, Homo sapiens
tccacagaaaacttt

SEQ ID NO: 452386 - DNA, 15 bp, Homo sapiens
ctccacagaaaactt

SEQ ID NO: 452387 - DNA, 15 bp, Homo sapiens
cctccacagaaaact

SEQ ID NO: 452388 - DNA, 15 bp, Homo sapiens
gcctccacagaaaac

SEQ ID NO: 452389 - DNA, 15 bp, Homo sapiens
ggcctccacagaaaa

SEQ ID NO: 452390 - DNA, 15 bp, Homo sapiens
aggcctccacagaaa

SEQ ID NO: 452391 - DNA, 15 bp, Homo sapiens
caggcctccacagaa

SEQ ID NO: 452392 - DNA, 15 bp, Homo sapiens
acaggcctccacaga

SEQ ID NO: 452393 - DNA, 15 bp, Homo sapiens
gacaggcctccacag

SEQ ID NO: 452394 - DNA, 15 bp, Homo sapiens
ggacaggcctccaca

SEQ ID NO: 452395 - DNA, 15 bp, Homo sapiens
gggacaggcctccac

SEQ ID NO: 452396 - DNA, 15 bp, Homo sapiens
tgggacaggcctcca

SEQ ID NO: 452397 - DNA, 15 bp, Homo sapiens
ctgggacaggcctcc

SEQ ID NO: 452398 - DNA, 15 bp, Homo sapiens
gctgggacaggcctc

SEQ ID NO: 452399 - DNA, 15 bp, Homo sapiens
tgctgggacaggcct

SEQ ID NO: 452400 - DNA, 15 bp, Homo sapiens
gtgctgggacaggcc

SEQ ID NO: 452401 - DNA, 15 bp, Homo sapiens
ggtgctgggacaggc

SEQ ID NO: 452402 - DNA, 15 bp, Homo sapiens
gggtgctgggacagg

SEQ ID NO: 452403 - DNA, 15 bp, Homo sapiens
ggggtgctgggacag

SEQ ID NO: 452404 - DNA, 15 bp, Homo sapiens
aggggtgctgggaca

SEQ ID NO: 452405 - DNA, 15 bp, Homo sapiens
gaggggtgctgggac

SEQ ID NO: 452406 - DNA, 15 bp, Homo sapiens
tgaggggtgctggga

SEQ ID NO: 452407 - DNA, 15 bp, Homo sapiens
gtgaggggtgctggg

SEQ ID NO: 452408 - DNA, 15 bp, Homo sapiens
tgtgaggggtgctgg

SEQ ID NO: 452409 - DNA, 15 bp, Homo sapiens
atgtgaggggtgctg

SEQ ID NO: 452410 - DNA, 15 bp, Homo sapiens
gatgtgaggggtgct

SEQ ID NO: 452411 - DNA, 15 bp, Homo sapiens
agatgtgaggggtgc

SEQ ID NO: 452412 - DNA, 15 bp, Homo sapiens
cagatgtgaggggtg

SEQ ID NO: 452413 - DNA, 15 bp, Homo sapiens
tcagatgtgaggggt

SEQ ID NO: 452414 - DNA, 15 bp, Homo sapiens
ctcagatgtgagggg

SEQ ID NO: 452415 - DNA, 15 bp, Homo sapiens
actcagatgtgaggg

SEQ ID NO: 452416 - DNA, 15 bp, Homo sapiens
tactcagatgtgagg

SEQ ID NO: 452417 - DNA, 15 bp, Homo sapiens
ttactcagatgtgag

SEQ ID NO: 452418 - DNA, 15 bp, Homo sapiens
gttactcagatgtga

SEQ ID NO: 452419 - DNA, 15 bp, Homo sapiens
tgttactcagatgtg

SEQ ID NO: 452420 - DNA, 15 bp, Homo sapiens
ttgttactcagatgt

SEQ ID NO: 452421 - DNA, 15 bp, Homo sapiens
tttgttactcagatg

SEQ ID NO: 452422 - DNA, 15 bp, Homo sapiens
ttttgttactcagat

SEQ ID NO: 452423 - DNA, 15 bp, Homo sapiens
cttttgttactcaga

SEQ ID NO: 452424 - DNA, 15 bp, Homo sapiens
tcttttgttactcag

SEQ ID NO: 452425 - DNA, 15 bp, Homo sapiens
ttcttttgttactca

SEQ ID NO: 452426 - DNA, 15 bp, Homo sapiens
gttcttttgttactc

SEQ ID NO: 452427 - DNA, 15 bp, Homo sapiens
ggttcttttgttact

SEQ ID NO: 452428 - DNA, 15 bp, Homo sapiens
aggttcttttgttac

SEQ ID NO: 452429 - DNA, 15 bp, Homo sapiens
aaggttcttttgtta

SEQ ID NO: 452430 - DNA, 15 bp, Homo sapiens
gaaggttcttttgtt

SEQ ID NO: 452431 - DNA, 15 bp, Homo sapiens
ggaaggttcttttgt

SEQ ID NO: 452432 - DNA, 15 bp, Homo sapiens
aggaaggttcttttg

SEQ ID NO: 452433 - DNA, 15 bp, Homo sapiens
taggaaggttctttt

SEQ ID NO: 452434 - DNA, 15 bp, Homo sapiens
gtaggaaggttcttt

SEQ ID NO: 452435 - DNA, 15 bp, Homo sapiens
tgtaggaaggttctt

SEQ ID NO: 452436 - DNA, 15 bp, Homo sapiens
ctgtaggaaggttct

SEQ ID NO: 452437 - DNA, 15 bp, Homo sapiens
gctgtaggaaggttc

SEQ ID NO: 452438 - DNA, 15 bp, Homo sapiens
tgctgtaggaaggtt

SEQ ID NO: 452439 - DNA, 15 bp, Homo sapiens
ctgctgtaggaaggt

SEQ ID NO: 452440 - DNA, 15 bp, Homo sapiens
tctgctgtaggaagg

SEQ ID NO: 452441 - DNA, 15 bp, Homo sapiens
gtctgctgtaggaag

SEQ ID NO: 452442 - DNA, 15 bp, Homo sapiens
tgtctgctgtaggaa

SEQ ID NO: 452443 - DNA, 15 bp, Homo sapiens
ttgtctgctgtagga

SEQ ID NO: 452444 - DNA, 15 bp, Homo sapiens
gttgtctgctgtagg

SEQ ID NO: 452445 - DNA, 15 bp, Homo sapiens
ggttgtctgctgtag

SEQ ID NO: 452446 - DNA, 15 bp, Homo sapiens
gggttgtctgctgta

SEQ ID NO: 452447 - DNA, 15 bp, Homo sapiens
agggttgtctgctgt

SEQ ID NO: 452448 - DNA, 15 bp, Homo sapiens
tagggttgtctgctg

SEQ ID NO: 452449 - DNA, 15 bp, Homo sapiens
ttagggttgtctgct

SEQ ID NO: 452450 - DNA, 15 bp, Homo sapiens
cttagggttgtctgc

SEQ ID NO: 452451 - DNA, 15 bp, Homo sapiens
tcttagggttgtctg

SEQ ID NO: 452452 - DNA, 15 bp, Homo sapiens
ttcttagggttgtct

SEQ ID NO: 452453 - DNA, 15 bp, Homo sapiens
gttcttagggttgtc

SEQ ID NO: 452454 - DNA, 15 bp, Homo sapiens
cgttcttagggttgt

SEQ ID NO: 452455 - DNA, 15 bp, Homo sapiens
acgttcttagggttg

SEQ ID NO: 452456 - DNA, 15 bp, Homo sapiens
tacgttcttagggtt

SEQ ID NO: 452457 - DNA, 15 bp, Homo sapiens
ctacgttcttagggt

SEQ ID NO: 452458 - DNA, 15 bp, Homo sapiens
actacgttcttaggg

SEQ ID NO: 452459 - DNA, 15 bp, Homo sapiens
aactacgttcttagg

SEQ ID NO: 452460 - DNA, 15 bp, Homo sapiens
gaactacgttcttag

SEQ ID NO: 452461 - DNA, 15 bp, Homo sapiens
ggaactacgttctta

SEQ ID NO: 452462 - DNA, 15 bp, Homo sapiens
tggaactacgttctt

SEQ ID NO: 452463 - DNA, 15 bp, Homo sapiens
gtggaactacgttct

SEQ ID NO: 452464 - DNA, 15 bp, Homo sapiens
tgtggaactacgttc

SEQ ID NO: 452465 - DNA, 15 bp, Homo sapiens
ctgtggaactacgtt

SEQ ID NO: 452466 - DNA, 15 bp, Homo sapiens
actgtggaactacgt

SEQ ID NO: 452467 - DNA, 15 bp, Homo sapiens
cactgtggaactacg

SEQ ID NO: 452468 - DNA, 15 bp, Homo sapiens
gcactgtggaactac

SEQ ID NO: 452469 - DNA, 15 bp, Homo sapiens
ggcactgtggaacta

SEQ ID NO: 452470 - DNA, 15 bp, Homo sapiens
gggcactgtggaact

SEQ ID NO: 452471 - DNA, 15 bp, Homo sapiens
agggcactgtggaac

SEQ ID NO: 452472 - DNA, 15 bp, Homo sapiens
gagggcactgtggaa

SEQ ID NO: 452473 - DNA, 15 bp, Homo sapiens
ggagggcactgtgga

SEQ ID NO: 452474 - DNA, 15 bp, Homo sapiens
aggagggcactgtgg

SEQ ID NO: 452475 - DNA, 15 bp, Homo sapiens
caggagggcactgtg

SEQ ID NO: 452476 - DNA, 15 bp, Homo sapiens
tcaggagggcactgt

SEQ ID NO: 452477 - DNA, 15 bp, Homo sapiens
ctcaggagggcactg

SEQ ID NO: 452478 - DNA, 15 bp, Homo sapiens
cctcaggagggcact

SEQ ID NO: 452479 - DNA, 15 bp, Homo sapiens
tcctcaggagggcac

SEQ ID NO: 452480 - DNA, 15 bp, Homo sapiens
atcctcaggagggca

SEQ ID NO: 452481 - DNA, 15 bp, Homo sapiens
aatcctcaggagggc

SEQ ID NO: 452482 - DNA, 15 bp, Homo sapiens
taatcctcaggaggg

SEQ ID NO: 452483 - DNA, 15 bp, Homo sapiens
ttaatcctcaggagg

SEQ ID NO: 452484 - DNA, 15 bp, Homo sapiens
tttaatcctcaggag

SEQ ID NO: 452485 - DNA, 15 bp, Homo sapiens
ctttaatcctcagga

SEQ ID NO: 452486 - DNA, 15 bp, Homo sapiens
cctttaatcctcagg

SEQ ID NO: 452487 - DNA, 15 bp, Homo sapiens
ccctttaatcctcag

SEQ ID NO: 452488 - DNA, 15 bp, Homo sapiens
accctttaatcctca

SEQ ID NO: 452489 - DNA, 15 bp, Homo sapiens
aaccctttaatcctc

SEQ ID NO: 452490 - DNA, 15 bp, Homo sapiens
gaaccctttaatcct

SEQ ID NO: 452491 - DNA, 15 bp, Homo sapiens
tgaaccctttaatcc

SEQ ID NO: 452492 - DNA, 15 bp, Homo sapiens
atgaaccctttaatc

SEQ ID NO: 452493 - DNA, 15 bp, Homo sapiens
aatgaaccctttaat

SEQ ID NO: 452494 - DNA, 15 bp, Homo sapiens
aaatgaaccctttaa

SEQ ID NO: 452495 - DNA, 15 bp, Homo sapiens
taaatgaacccttta

SEQ ID NO: 452496 - DNA, 15 bp, Homo sapiens
ataaatgaacccttt

SEQ ID NO: 452497 - DNA, 15 bp, Homo sapiens
cataaatgaaccctt

SEQ ID NO: 452498 - DNA, 15 bp, Homo sapiens
gcataaatgaaccct

SEQ ID NO: 452499 - DNA, 15 bp, Homo sapiens
agcataaatgaaccc

SEQ ID NO: 452500 - DNA, 15 bp, Homo sapiens
aagcataaatgaacc

SEQ ID NO: 452501 - DNA, 15 bp, Homo sapiens
caagcataaatgaac

SEQ ID NO: 452502 - DNA, 15 bp, Homo sapiens
ccaagcataaatgaa

SEQ ID NO: 452503 - DNA, 15 bp, Homo sapiens
accaagcataaatga

SEQ ID NO: 452504 - DNA, 15 bp, Homo sapiens
caccaagcataaatg

SEQ ID NO: 452505 - DNA, 15 bp, Homo sapiens
acaccaagcataaat

SEQ ID NO: 452506 - DNA, 15 bp, Homo sapiens
cacaccaagcataaa

SEQ ID NO: 452507 - DNA, 15 bp, Homo sapiens
acacaccaagcataa

SEQ ID NO: 452508 - DNA, 15 bp, Homo sapiens
cacacaccaagcata

SEQ ID NO: 452509 - DNA, 15 bp, Homo sapiens
acacacaccaagcat

SEQ ID NO: 452510 - DNA, 15 bp, Homo sapiens
aacacacaccaagca

SEQ ID NO: 452511 - DNA, 15 bp, Homo sapiens
taacacacaccaagc

SEQ ID NO: 452512 - DNA, 15 bp, Homo sapiens
ttaacacacaccaag

SEQ ID NO: 452513 - DNA, 15 bp, Homo sapiens
tttaacacacaccaa

SEQ ID NO: 452514 - DNA, 15 bp, Homo sapiens
ctttaacacacacca

SEQ ID NO: 452515 - DNA, 15 bp, Homo sapiens
tctttaacacacacc

SEQ ID NO: 452516 - DNA, 15 bp, Homo sapiens
atctttaacacacac

SEQ ID NO: 452517 - DNA, 15 bp, Homo sapiens
tatctttaacacaca

SEQ ID NO: 452518 - DNA, 15 bp, Homo sapiens
gtatctttaacacac

SEQ ID NO: 452519 - DNA, 15 bp, Homo sapiens
tgtatctttaacaca

SEQ ID NO: 452520 - DNA, 15 bp, Homo sapiens
atgtatctttaacac

SEQ ID NO: 452521 - DNA, 15 bp, Homo sapiens
gatgtatctttaaca

SEQ ID NO: 452522 - DNA, 15 bp, Homo sapiens
tgatgtatctttaac

SEQ ID NO: 452523 - DNA, 15 bp, Homo sapiens
gtgatgtatctttaa

SEQ ID NO: 452524 - DNA, 15 bp, Homo sapiens
agtgatgtatcttta

SEQ ID NO: 452525 - DNA, 15 bp, Homo sapiens
aagtgatgtatcttt

SEQ ID NO: 452526 - DNA, 15 bp, Homo sapiens
gaagtgatgtatctt

SEQ ID NO: 452527 - DNA, 15 bp, Homo sapiens
agaagtgatgtatct

SEQ ID NO: 452528 - DNA, 15 bp, Homo sapiens
tagaagtgatgtatc

SEQ ID NO: 452529 - DNA, 15 bp, Homo sapiens
gtagaagtgatgtat

SEQ ID NO: 452530 - DNA, 15 bp, Homo sapiens
agtagaagtgatgta

SEQ ID NO: 452531 - DNA, 15 bp, Homo sapiens
tagtagaagtgatgt

SEQ ID NO: 452532 - DNA, 15 bp, Homo sapiens
ctagtagaagtgatg

SEQ ID NO: 452533 - DNA, 15 bp, Homo sapiens
actagtagaagtgat

SEQ ID NO: 452534 - DNA, 15 bp, Homo sapiens
aactagtagaagtga

SEQ ID NO: 452535 - DNA, 15 bp, Homo sapiens
taactagtagaagtg

SEQ ID NO: 452536 - DNA, 15 bp, Homo sapiens
gtaactagtagaagt

SEQ ID NO: 452537 - DNA, 15 bp, Homo sapiens
tgtaactagtagaag

SEQ ID NO: 452538 - DNA, 15 bp, Homo sapiens
ctgtaactagtagaa

SEQ ID NO: 452539 - DNA, 15 bp, Homo sapiens
gctgtaactagtaga

SEQ ID NO: 452540 - DNA, 15 bp, Homo sapiens
ggctgtaactagtag

SEQ ID NO: 452541 - DNA, 15 bp, Homo sapiens
aggctgtaactagta

SEQ ID NO: 452542 - DNA, 15 bp, Homo sapiens
aaggctgtaactagt

SEQ ID NO: 452543 - DNA, 15 bp, Homo sapiens
taaggctgtaactag

SEQ ID NO: 452544 - DNA, 15 bp, Homo sapiens
ttaaggctgtaacta

SEQ ID NO: 452545 - DNA, 15 bp, Homo sapiens
tttaaggctgtaact

SEQ ID NO: 452546 - DNA, 15 bp, Homo sapiens
ctttaaggctgtaac

SEQ ID NO: 452547 - DNA, 15 bp, Homo sapiens
tctttaaggctgtaa

SEQ ID NO: 452548 - DNA, 15 bp, Homo sapiens
ctctttaaggctgta

SEQ ID NO: 452549 - DNA, 15 bp, Homo sapiens
cctctttaaggctgt

SEQ ID NO: 452550 - DNA, 15 bp, Homo sapiens
acctctttaaggctg

SEQ ID NO: 452551 - DNA, 15 bp, Homo sapiens
gacctctttaaggct

SEQ ID NO: 452552 - DNA, 15 bp, Homo sapiens
tgacctctttaaggc

SEQ ID NO: 452553 - DNA, 15 bp, Homo sapiens
ctgacctctttaagg

SEQ ID NO: 452554 - DNA, 15 bp, Homo sapiens
tctgacctctttaag

SEQ ID NO: 452555 - DNA, 15 bp, Homo sapiens
ttctgacctctttaa

SEQ ID NO: 452556 - DNA, 15 bp, Homo sapiens
gttctgacctcttta

SEQ ID NO: 452557 - DNA, 15 bp, Homo sapiens
ggttctgacctcttt

SEQ ID NO: 452558 - DNA, 15 bp, Homo sapiens
tggttctgacctctt

SEQ ID NO: 452559 - DNA, 15 bp, Homo sapiens
ttggttctgacctct

SEQ ID NO: 452560 - DNA, 15 bp, Homo sapiens
tttggttctgacctc

SEQ ID NO: 452561 - DNA, 15 bp, Homo sapiens
ctttggttctgacct

SEQ ID NO: 452562 - DNA, 15 bp, Homo sapiens
actttggttctgacc

SEQ ID NO: 452563 - DNA, 15 bp, Homo sapiens
aactttggttctgac

SEQ ID NO: 452564 - DNA, 15 bp, Homo sapiens
aaactttggttctga

SEQ ID NO: 452565 - DNA, 15 bp, Homo sapiens
gaaactttggttctg

SEQ ID NO: 452566 - DNA, 15 bp, Homo sapiens
agaaactttggttct

SEQ ID NO: 452567 - DNA, 15 bp, Homo sapiens
cagaaactttggttc

SEQ ID NO: 452568 - DNA, 15 bp, Homo sapiens
ccagaaactttggtt

SEQ ID NO: 452569 - DNA, 15 bp, Homo sapiens
gccagaaactttggt

SEQ ID NO: 452570 - DNA, 15 bp, Homo sapiens
tgccagaaactttgg

SEQ ID NO: 452571 - DNA, 15 bp, Homo sapiens
ctgccagaaactttg

SEQ ID NO: 452572 - DNA, 15 bp, Homo sapiens
tctgccagaaacttt

SEQ ID NO: 452573 - DNA, 15 bp, Homo sapiens
atctgccagaaactt

SEQ ID NO: 452574 - DNA, 15 bp, Homo sapiens
aatctgccagaaact

SEQ ID NO: 452575 - DNA, 15 bp, Homo sapiens
caatctgccagaaac

SEQ ID NO: 452576 - DNA, 15 bp, Homo sapiens
acaatctgccagaaa

SEQ ID NO: 452577 - DNA, 15 bp, Homo sapiens
aacaatctgccagaa

SEQ ID NO: 452578 - DNA, 15 bp, Homo sapiens
aaacaatctgccaga

SEQ ID NO: 452579 - DNA, 15 bp, Homo sapiens
aaaacaatctgccag

SEQ ID NO: 452580 - DNA, 15 bp, Homo sapiens
taaaacaatctgcca

SEQ ID NO: 452581 - DNA, 15 bp, Homo sapiens
ttaaaacaatctgcc

SEQ ID NO: 452582 - DNA, 15 bp, Homo sapiens
tttaaaacaatctgc

SEQ ID NO: 452583 - DNA, 15 bp, Homo sapiens
ctttaaaacaatctg

SEQ ID NO: 452584 - DNA, 15 bp, Homo sapiens
gctttaaaacaatct

SEQ ID NO: 452585 - DNA, 15 bp, Homo sapiens
agctttaaaacaatc

SEQ ID NO: 452586 - DNA, 15 bp, Homo sapiens
tagctttaaaacaat

SEQ ID NO: 452587 - DNA, 15 bp, Homo sapiens
ttagctttaaaacaa

SEQ ID NO: 452588 - DNA, 15 bp, Homo sapiens
tttagctttaaaaca

SEQ ID NO: 452589 - DNA, 15 bp, Homo sapiens
atttagctttaaaac

SEQ ID NO: 452590 - DNA, 15 bp, Homo sapiens
gatttagctttaaaa

SEQ ID NO: 452591 - DNA, 15 bp, Homo sapiens
tgatttagctttaaa

SEQ ID NO: 452592 - DNA, 15 bp, Homo sapiens
ctgatttagctttaa

SEQ ID NO: 452593 - DNA, 15 bp, Homo sapiens
actgatttagcttta

SEQ ID NO: 452594 - DNA, 15 bp, Homo sapiens
aactgatttagcttt

SEQ ID NO: 452595 - DNA, 15 bp, Homo sapiens
gaactgatttagctt

SEQ ID NO: 452596 - DNA, 15 bp, Homo sapiens
ggaactgatttagct

SEQ ID NO: 452597 - DNA, 15 bp, Homo sapiens
gggaactgatttagc

SEQ ID NO: 452598 - DNA, 15 bp, Homo sapiens
ggggaactgatttag

SEQ ID NO: 452599 - DNA, 15 bp, Homo sapiens
aggggaactgattta

SEQ ID NO: 452600 - DNA, 15 bp, Homo sapiens
caggggaactgattt

SEQ ID NO: 452601 - DNA, 15 bp, Homo sapiens
tcaggggaactgatt

SEQ ID NO: 452602 - DNA, 15 bp, Homo sapiens
gtcaggggaactgat

SEQ ID NO: 452603 - DNA, 15 bp, Homo sapiens
agtcaggggaactga

SEQ ID NO: 452604 - DNA, 15 bp, Homo sapiens
cagtcaggggaactg

SEQ ID NO: 452605 - DNA, 15 bp, Homo sapiens
tcagtcaggggaact

SEQ ID NO: 452606 - DNA, 15 bp, Homo sapiens
ttcagtcaggggaac

SEQ ID NO: 452607 - DNA, 15 bp, Homo sapiens
cttcagtcaggggaa

SEQ ID NO: 452608 - DNA, 15 bp, Homo sapiens
ccttcagtcagggga

SEQ ID NO: 452609 - DNA, 15 bp, Homo sapiens
accttcagtcagggg

SEQ ID NO: 452610 - DNA, 15 bp, Homo sapiens
caccttcagtcaggg

SEQ ID NO: 452611 - DNA, 15 bp, Homo sapiens
ccaccttcagtcagg

SEQ ID NO: 452612 - DNA, 15 bp, Homo sapiens
cccaccttcagtcag

SEQ ID NO: 452613 - DNA, 15 bp, Homo sapiens
tcccaccttcagtca

SEQ ID NO: 452614 - DNA, 15 bp, Homo sapiens
ttcccaccttcagtc

SEQ ID NO: 452615 - DNA, 15 bp, Homo sapiens
tttcccaccttcagt

SEQ ID NO: 452616 - DNA, 15 bp, Homo sapiens
ttttcccaccttcag

SEQ ID NO: 452617 - DNA, 15 bp, Homo sapiens
gttttcccaccttca

SEQ ID NO: 452618 - DNA, 15 bp, Homo sapiens
tgttttcccaccttc

SEQ ID NO: 452619 - DNA, 15 bp, Homo sapiens
ttgttttcccacctt

SEQ ID NO: 452620 - DNA, 15 bp, Homo sapiens
tttgttttcccacct

SEQ ID NO: 452621 - DNA, 15 bp, Homo sapiens
gtttgttttcccacc

SEQ ID NO: 452622 - DNA, 15 bp, Homo sapiens
agtttgttttcccac

SEQ ID NO: 452623 - DNA, 15 bp, Homo sapiens
cagtttgttttccca

SEQ ID NO: 452624 - DNA, 15 bp, Homo sapiens
tcagtttgttttccc

SEQ ID NO: 452625 - DNA, 15 bp, Homo sapiens
ttcagtttgttttcc

SEQ ID NO: 452626 - DNA, 15 bp, Homo sapiens
tttcagtttgttttc

SEQ ID NO: 452627 - DNA, 15 bp, Homo sapiens
atttcagtttgtttt

SEQ ID NO: 452628 - DNA, 15 bp, Homo sapiens
tatttcagtttgttt

SEQ ID NO: 452629 - DNA, 15 bp, Homo sapiens
ttatttcagtttgtt

SEQ ID NO: 452630 - DNA, 15 bp, Homo sapiens
tttatttcagtttgt

SEQ ID NO: 452631 - DNA, 15 bp, Homo sapiens
ttttatttcagtttg

SEQ ID NO: 452632 - DNA, 15 bp, Homo sapiens
attttatttcagttt

SEQ ID NO: 452633 - DNA, 15 bp, Homo sapiens
tattttatttcagtt

SEQ ID NO: 452634 - DNA, 15 bp, Homo sapiens
ttattttatttcagt

SEQ ID NO: 452635 - DNA, 15 bp, Homo sapiens
attattttatttcag

SEQ ID NO: 452636 - DNA, 15 bp, Homo sapiens
aattattttatttca

SEQ ID NO: 452637 - DNA, 15 bp, Homo sapiens
aaattattttatttc

SEQ ID NO: 452638 - DNA, 15 bp, Homo sapiens
taaattattttattt

SEQ ID NO: 452639 - DNA, 15 bp, Homo sapiens
ttaaattattttatt

SEQ ID NO: 452640 - DNA, 15 bp, Homo sapiens
tttaaattattttat

SEQ ID NO: 452641 - DNA, 15 bp, Homo sapiens
ttttaaattatttta

SEQ ID NO: 452642 - DNA, 15 bp, Homo sapiens
tttttaaattatttt

SEQ ID NO: 452643 - DNA, 15 bp, Homo sapiens
atttttaaattattt

SEQ ID NO: 452644 - DNA, 15 bp, Homo sapiens
aatttttaaattatt

SEQ ID NO: 452645 - DNA, 15 bp, Homo sapiens
taatttttaaattat

SEQ ID NO: 452646 - DNA, 15 bp, Homo sapiens
ataatttttaaatta

SEQ ID NO: 452647 - DNA, 15 bp, Homo sapiens
aataatttttaaatt

SEQ ID NO: 452648 - DNA, 15 bp, Homo sapiens
gaataatttttaaat

SEQ ID NO: 452649 - DNA, 15 bp, Homo sapiens
tgaataatttttaaa

SEQ ID NO: 452650 - DNA, 15 bp, Homo sapiens
ttgaataatttttaa

SEQ ID NO: 452651 - DNA, 15 bp, Homo sapiens
tttgaataattttta

SEQ ID NO: 452652 - DNA, 15 bp, Homo sapiens
atttgaataattttt

SEQ ID NO: 452653 - DNA, 15 bp, Homo sapiens
aatttgaataatttt

SEQ ID NO: 452654 - DNA, 15 bp, Homo sapiens
gaatttgaataattt

SEQ ID NO: 452655 - DNA, 15 bp, Homo sapiens
tgaatttgaataatt

SEQ ID NO: 452656 - DNA, 15 bp, Homo sapiens
atgaatttgaataat

SEQ ID NO: 452657 - DNA, 15 bp, Homo sapiens
tatgaatttgaataa

SEQ ID NO: 452658 - DNA, 15 bp, Homo sapiens
ttatgaatttgaata

SEQ ID NO: 452659 - DNA, 15 bp, Homo sapiens
tttatgaatttgaat

SEQ ID NO: 452660 - DNA, 15 bp, Homo sapiens
ttttatgaatttgaa

SEQ ID NO: 452661 - DNA, 15 bp, Homo sapiens
gttttatgaatttga

SEQ ID NO: 452662 - DNA, 15 bp, Homo sapiens
agttttatgaatttg

SEQ ID NO: 452663 - DNA, 15 bp, Homo sapiens
tagttttatgaattt

SEQ ID NO: 452664 - DNA, 15 bp, Homo sapiens
ttagttttatgaatt

SEQ ID NO: 452665 - DNA, 15 bp, Homo sapiens
cttagttttatgaat

SEQ ID NO: 452666 - DNA, 15 bp, Homo sapiens
acttagttttatgaa

SEQ ID NO: 452667 - DNA, 15 bp, Homo sapiens
cacttagttttatga

SEQ ID NO: 452668 - DNA, 15 bp, Homo sapiens
acacttagttttatg

SEQ ID NO: 452669 - DNA, 15 bp, Homo sapiens
tacacttagttttat

SEQ ID NO: 452670 - DNA, 15 bp, Homo sapiens
ttacacttagtttta

SEQ ID NO: 452671 - DNA, 15 bp, Homo sapiens
tttacacttagtttt

SEQ ID NO: 452672 - DNA, 15 bp, Homo sapiens
ctttacacttagttt

SEQ ID NO: 452673 - DNA, 15 bp, Homo sapiens
actttacacttagtt

SEQ ID NO: 452674 - DNA, 15 bp, Homo sapiens
tactttacacttagt

SEQ ID NO: 452675 - DNA, 15 bp, Homo sapiens
ttactttacacttag

SEQ ID NO: 452676 - DNA, 15 bp, Homo sapiens
cttactttacactta

SEQ ID NO: 452677 - DNA, 15 bp, Homo sapiens
tcttactttacactt

SEQ ID NO: 452678 - DNA, 15 bp, Homo sapiens
atcttactttacact

SEQ ID NO: 452679 - DNA, 15 bp, Homo sapiens
catcttactttacac

SEQ ID NO: 452680 - DNA, 15 bp, Homo sapiens
ccatcttactttaca

SEQ ID NO: 452681 - DNA, 15 bp, Homo sapiens
accatcttactttac

SEQ ID NO: 452682 - DNA, 15 bp, Homo sapiens
caccatcttacttta

SEQ ID NO: 452683 - DNA, 15 bp, Homo sapiens
acaccatcttacttt

SEQ ID NO: 452684 - DNA, 15 bp, Homo sapiens
aacaccatcttactt

SEQ ID NO: 452685 - DNA, 15 bp, Homo sapiens
taacaccatcttact

SEQ ID NO: 452686 - DNA, 15 bp, Homo sapiens
ataacaccatcttac

SEQ ID NO: 452687 - DNA, 15 bp, Homo sapiens
cataacaccatctta

SEQ ID NO: 452688 - DNA, 15 bp, Homo sapiens
ccataacaccatctt

SEQ ID NO: 452689 - DNA, 15 bp, Homo sapiens
accataacaccatct

SEQ ID NO: 452690 - DNA, 15 bp, Homo sapiens
taccataacaccatc

SEQ ID NO: 452691 - DNA, 15 bp, Homo sapiens
ttaccataacaccat

SEQ ID NO: 452692 - DNA, 15 bp, Homo sapiens
cttaccataacacca

SEQ ID NO: 452693 - DNA, 15 bp, Homo sapiens
acttaccataacacc

SEQ ID NO: 452694 - DNA, 15 bp, Homo sapiens
aacttaccataacac

SEQ ID NO: 452695 - DNA, 15 bp, Homo sapiens
aaacttaccataaca

SEQ ID NO: 452696 - DNA, 15 bp, Homo sapiens
caaacttaccataac

SEQ ID NO: 452697 - DNA, 15 bp, Homo sapiens
acaaacttaccataa

SEQ ID NO: 452698 - DNA, 15 bp, Homo sapiens
tacaaacttaccata

SEQ ID NO: 452699 - DNA, 15 bp, Homo sapiens
ctacaaacttaccat

SEQ ID NO: 452700 - DNA, 15 bp, Homo sapiens
gctacaaacttacca

SEQ ID NO: 452701 - DNA, 15 bp, Homo sapiens
cgctacaaacttacc

SEQ ID NO: 452702 - DNA, 15 bp, Homo sapiens
acgctacaaacttac

SEQ ID NO: 452703 - DNA, 15 bp, Homo sapiens
aacgctacaaactta

SEQ ID NO: 452704 - DNA, 15 bp, Homo sapiens
aaacgctacaaactt

SEQ ID NO: 452705 - DNA, 15 bp, Homo sapiens
taaacgctacaaact

SEQ ID NO: 452706 - DNA, 15 bp, Homo sapiens
ataaacgctacaaac

SEQ ID NO: 452707 - DNA, 15 bp, Homo sapiens
tataaacgctacaaa

SEQ ID NO: 452708 - DNA, 15 bp, Homo sapiens
atataaacgctacaa

SEQ ID NO: 452709 - DNA, 15 bp, Homo sapiens
aatataaacgctaca

SEQ ID NO: 452710 - DNA, 15 bp, Homo sapiens
taatataaacgctac

SEQ ID NO: 452711 - DNA, 15 bp, Homo sapiens
ctaatataaacgcta

SEQ ID NO: 452712 - DNA, 15 bp, Homo sapiens
tctaatataaacgct

SEQ ID NO: 452713 - DNA, 15 bp, Homo sapiens
ttctaatataaacgc

SEQ ID NO: 452714 - DNA, 15 bp, Homo sapiens
cttctaatataaacg

SEQ ID NO: 452715 - DNA, 15 bp, Homo sapiens
acttctaatataaac

SEQ ID NO: 452716 - DNA, 15 bp, Homo sapiens
aacttctaatataaa

SEQ ID NO: 452717 - DNA, 15 bp, Homo sapiens
aaacttctaatataa

SEQ ID NO: 452718 - DNA, 15 bp, Homo sapiens
aaaacttctaatata

SEQ ID NO: 452719 - DNA, 15 bp, Homo sapiens
taaaacttctaatat

SEQ ID NO: 452720 - DNA, 15 bp, Homo sapiens
ttaaaacttctaata

SEQ ID NO: 452721 - DNA, 15 bp, Homo sapiens
attaaaacttctaat

SEQ ID NO: 452722 - DNA, 15 bp, Homo sapiens
tattaaaacttctaa

SEQ ID NO: 452723 - DNA, 15 bp, Homo sapiens
atattaaaacttcta

SEQ ID NO: 452724 - DNA, 15 bp, Homo sapiens
aatattaaaacttct

SEQ ID NO: 452725 - DNA, 15 bp, Homo sapiens
taatattaaaacttc

SEQ ID NO: 452726 - DNA, 15 bp, Homo sapiens
ttaatattaaaactt

SEQ ID NO: 452727 - DNA, 15 bp, Homo sapiens
tttaatattaaaact

SEQ ID NO: 452728 - DNA, 15 bp, Homo sapiens
ttttaatattaaaac

SEQ ID NO: 452729 - DNA, 15 bp, Homo sapiens
gttttaatattaaaa

SEQ ID NO: 452730 - DNA, 15 bp, Homo sapiens
agttttaatattaaa

SEQ ID NO: 452731 - DNA, 15 bp, Homo sapiens
gagttttaatattaa

SEQ ID NO: 452732 - DNA, 15 bp, Homo sapiens
tgagttttaatatta

SEQ ID NO: 452733 - DNA, 15 bp, Homo sapiens
ttgagttttaatatt

SEQ ID NO: 452734 - DNA, 15 bp, Homo sapiens
tttgagttttaatat

SEQ ID NO: 452735 - DNA, 15 bp, Homo sapiens
ttttgagttttaata

SEQ ID NO: 452736 - DNA, 15 bp, Homo sapiens
gttttgagttttaat

SEQ ID NO: 452737 - DNA, 15 bp, Homo sapiens
agttttgagttttaa

SEQ ID NO: 452738 - DNA, 15 bp, Homo sapiens
cagttttgagtttta

SEQ ID NO: 452739 - DNA, 15 bp, Homo sapiens
gcagttttgagtttt

SEQ ID NO: 452740 - DNA, 15 bp, Homo sapiens
ggcagttttgagttt

SEQ ID NO: 452741 - DNA, 15 bp, Homo sapiens
gggcagttttgagtt

SEQ ID NO: 452742 - DNA, 15 bp, Homo sapiens
agggcagttttgagt

SEQ ID NO: 452743 - DNA, 15 bp, Homo sapiens
cagggcagttttgag

SEQ ID NO: 452744 - DNA, 15 bp, Homo sapiens
acagggcagttttga

SEQ ID NO: 452745 - DNA, 15 bp, Homo sapiens
aacagggcagttttg

SEQ ID NO: 452746 - DNA, 15 bp, Homo sapiens
taacagggcagtttt

SEQ ID NO: 452747 - DNA, 15 bp, Homo sapiens
ctaacagggcagttt

SEQ ID NO: 452748 - DNA, 15 bp, Homo sapiens
tctaacagggcagtt

SEQ ID NO: 452749 - DNA, 15 bp, Homo sapiens
ttctaacagggcagt

SEQ ID NO: 452750 - DNA, 15 bp, Homo sapiens
attctaacagggcag

SEQ ID NO: 452751 - DNA, 15 bp, Homo sapiens
gattctaacagggca

SEQ ID NO: 452752 - DNA, 15 bp, Homo sapiens
agattctaacagggc

SEQ ID NO: 452753 - DNA, 15 bp, Homo sapiens
cagattctaacaggg

SEQ ID NO: 452754 - DNA, 15 bp, Homo sapiens
tcagattctaacagg

SEQ ID NO: 452755 - DNA, 15 bp, Homo sapiens
ttcagattctaacag

SEQ ID NO: 452756 - DNA, 15 bp, Homo sapiens
cttcagattctaaca

SEQ ID NO: 452757 - DNA, 15 bp, Homo sapiens
acttcagattctaac

SEQ ID NO: 452758 - DNA, 15 bp, Homo sapiens
aacttcagattctaa

SEQ ID NO: 452759 - DNA, 15 bp, Homo sapiens
gaacttcagattcta

SEQ ID NO: 452760 - DNA, 15 bp, Homo sapiens
agaacttcagattct

SEQ ID NO: 452761 - DNA, 15 bp, Homo sapiens
aagaacttcagattc

SEQ ID NO: 452762 - DNA, 15 bp, Homo sapiens
caagaacttcagatt

SEQ ID NO: 452763 - DNA, 15 bp, Homo sapiens
tcaagaacttcagat

SEQ ID NO: 452764 - DNA, 15 bp, Homo sapiens
ctcaagaacttcaga

SEQ ID NO: 452765 - DNA, 15 bp, Homo sapiens
tctcaagaacttcag

SEQ ID NO: 452766 - DNA, 15 bp, Homo sapiens
atctcaagaacttca

SEQ ID NO: 452767 - DNA, 15 bp, Homo sapiens
catctcaagaacttc

SEQ ID NO: 452768 - DNA, 15 bp, Homo sapiens
ccatctcaagaactt

SEQ ID NO: 452769 - DNA, 15 bp, Homo sapiens
cccatctcaagaact

SEQ ID NO: 452770 - DNA, 15 bp, Homo sapiens
acccatctcaagaac

SEQ ID NO: 452771 - DNA, 15 bp, Homo sapiens
cacccatctcaagaa

SEQ ID NO: 452772 - DNA, 15 bp, Homo sapiens
gcacccatctcaaga

SEQ ID NO: 452773 - DNA, 15 bp, Homo sapiens
ggcacccatctcaag

SEQ ID NO: 452774 - DNA, 15 bp, Homo sapiens
aggcacccatctcaa

SEQ ID NO: 452775 - DNA, 15 bp, Homo sapiens
caggcacccatctca

SEQ ID NO: 452776 - DNA, 15 bp, Homo sapiens
tcaggcacccatctc

SEQ ID NO: 452777 - DNA, 15 bp, Homo sapiens
ttcaggcacccatct

SEQ ID NO: 452778 - DNA, 15 bp, Homo sapiens
tttcaggcacccatc

SEQ ID NO: 452779 - DNA, 15 bp, Homo sapiens
ctttcaggcacccat

SEQ ID NO: 452780 - DNA, 15 bp, Homo sapiens
tctttcaggcaccca

SEQ ID NO: 452781 - DNA, 15 bp, Homo sapiens
atctttcaggcaccc

SEQ ID NO: 452782 - DNA, 15 bp, Homo sapiens
aatctttcaggcacc

SEQ ID NO: 452783 - DNA, 15 bp, Homo sapiens
caatctttcaggcac

SEQ ID NO: 452784 - DNA, 15 bp, Homo sapiens
tcaatctttcaggca

SEQ ID NO: 452785 - DNA, 15 bp, Homo sapiens
ttcaatctttcaggc

SEQ ID NO: 452786 - DNA, 15 bp, Homo sapiens
tttcaatctttcagg

SEQ ID NO: 452787 - DNA, 15 bp, Homo sapiens
atttcaatctttcag

SEQ ID NO: 452788 - DNA, 15 bp, Homo sapiens
aatttcaatctttca

SEQ ID NO: 452789 - DNA, 15 bp, Homo sapiens
gaatttcaatctttc

SEQ ID NO: 452790 - DNA, 15 bp, Homo sapiens
tgaatttcaatcttt

SEQ ID NO: 452791 - DNA, 15 bp, Homo sapiens
atgaatttcaatctt

SEQ ID NO: 452792 - DNA, 15 bp, Homo sapiens
aatgaatttcaatct

SEQ ID NO: 452793 - DNA, 15 bp, Homo sapiens
aaatgaatttcaatc

SEQ ID NO: 452794 - DNA, 15 bp, Homo sapiens
caaatgaatttcaat

SEQ ID NO: 452795 - DNA, 15 bp, Homo sapiens
ccaaatgaatttcaa

SEQ ID NO: 452796 - DNA, 15 bp, Homo sapiens
cccaaatgaatttca

SEQ ID NO: 452797 - DNA, 15 bp, Homo sapiens
ccccaaatgaatttc

SEQ ID NO: 452798 - DNA, 15 bp, Homo sapiens
gccccaaatgaattt

SEQ ID NO: 452799 - DNA, 15 bp, Homo sapiens
agccccaaatgaatt

SEQ ID NO: 452800 - DNA, 15 bp, Homo sapiens
tagccccaaatgaat

SEQ ID NO: 452801 - DNA, 15 bp, Homo sapiens
atagccccaaatgaa

SEQ ID NO: 452802 - DNA, 15 bp, Homo sapiens
gatagccccaaatga

SEQ ID NO: 452803 - DNA, 15 bp, Homo sapiens
cgatagccccaaatg

SEQ ID NO: 452804 - DNA, 15 bp, Homo sapiens
gcgatagccccaaat

SEQ ID NO: 452805 - DNA, 15 bp, Homo sapiens
tgcgatagccccaaa

SEQ ID NO: 452806 - DNA, 15 bp, Homo sapiens
ttgcgatagccccaa

SEQ ID NO: 452807 - DNA, 15 bp, Homo sapiens
tttgcgatagcccca

SEQ ID NO: 452808 - DNA, 15 bp, Homo sapiens
ttttgcgatagcccc

SEQ ID NO: 452809 - DNA, 15 bp, Homo sapiens
attttgcgatagccc

SEQ ID NO: 452810 - DNA, 15 bp, Homo sapiens
cattttgcgatagcc

SEQ ID NO: 452811 - DNA, 15 bp, Homo sapiens
ccattttgcgatagc

SEQ ID NO: 452812 - DNA, 15 bp, Homo sapiens
tccattttgcgatag

SEQ ID NO: 452813 - DNA, 15 bp, Homo sapiens
ttccattttgcgata

SEQ ID NO: 452814 - DNA, 15 bp, Homo sapiens
tttccattttgcgat

SEQ ID NO: 452815 - DNA, 15 bp, Homo sapiens
ttttccattttgcga

SEQ ID NO: 452816 - DNA, 15 bp, Homo sapiens
tttttccattttgcg

SEQ ID NO: 452817 - DNA, 15 bp, Homo sapiens
ctttttccattttgc

SEQ ID NO: 452818 - DNA, 15 bp, Homo sapiens
gctttttccattttg

SEQ ID NO: 452819 - DNA, 15 bp, Homo sapiens
tgctttttccatttt

SEQ ID NO: 452820 - DNA, 15 bp, Homo sapiens
atgctttttccattt

SEQ ID NO: 452821 - DNA, 15 bp, Homo sapiens
aatgctttttccatt

SEQ ID NO: 452822 - DNA, 15 bp, Homo sapiens
aaatgctttttccat

SEQ ID NO: 452823 - DNA, 15 bp, Homo sapiens
caaatgctttttcca

SEQ ID NO: 452824 - DNA, 15 bp, Homo sapiens
acaaatgctttttcc

SEQ ID NO: 452825 - DNA, 15 bp, Homo sapiens
cacaaatgctttttc

SEQ ID NO: 452826 - DNA, 15 bp, Homo sapiens
tcacaaatgcttttt

SEQ ID NO: 452827 - DNA, 15 bp, Homo sapiens
gtcacaaatgctttt

SEQ ID NO: 452828 - DNA, 15 bp, Homo sapiens
tgtcacaaatgcttt

SEQ ID NO: 452829 - DNA, 15 bp, Homo sapiens
gtgtcacaaatgctt

SEQ ID NO: 452830 - DNA, 15 bp, Homo sapiens
agtgtcacaaatgct

SEQ ID NO: 452831 - DNA, 15 bp, Homo sapiens
aagtgtcacaaatgc

SEQ ID NO: 452832 - DNA, 15 bp, Homo sapiens
caagtgtcacaaatg

SEQ ID NO: 452833 - DNA, 15 bp, Homo sapiens
acaagtgtcacaaat

SEQ ID NO: 452834 - DNA, 15 bp, Homo sapiens
aacaagtgtcacaaa

SEQ ID NO: 452835 - DNA, 15 bp, Homo sapiens
caacaagtgtcacaa

SEQ ID NO: 452836 - DNA, 15 bp, Homo sapiens
tcaacaagtgtcaca

SEQ ID NO: 452837 - DNA, 15 bp, Homo sapiens
gtcaacaagtgtcac

SEQ ID NO: 452838 - DNA, 15 bp, Homo sapiens
tgtcaacaagtgtca

SEQ ID NO: 452839 - DNA, 15 bp, Homo sapiens
gtgtcaacaagtgtc

SEQ ID NO: 452840 - DNA, 15 bp, Homo sapiens
ggtgtcaacaagtgt

SEQ ID NO: 452841 - DNA, 15 bp, Homo sapiens
aggtgtcaacaagtg

SEQ ID NO: 452842 - DNA, 15 bp, Homo sapiens
aaggtgtcaacaagt

SEQ ID NO: 452843 - DNA, 15 bp, Homo sapiens
taaggtgtcaacaag

SEQ ID NO: 452844 - DNA, 15 bp, Homo sapiens
ataaggtgtcaacaa

SEQ ID NO: 452845 - DNA, 15 bp, Homo sapiens
tataaggtgtcaaca

SEQ ID NO: 452846 - DNA, 15 bp, Homo sapiens
atataaggtgtcaac

SEQ ID NO: 452847 - DNA, 15 bp, Homo sapiens
tatataaggtgtcaa

SEQ ID NO: 452848 - DNA, 15 bp, Homo sapiens
gtatataaggtgtca

SEQ ID NO: 452849 - DNA, 15 bp, Homo sapiens
agtatataaggtgtc

SEQ ID NO: 452850 - DNA, 15 bp, Homo sapiens
aagtatataaggtgt

SEQ ID NO: 452851 - DNA, 15 bp, Homo sapiens
caagtatataaggtg

SEQ ID NO: 452852 - DNA, 15 bp, Homo sapiens
acaagtatataaggt

SEQ ID NO: 452853 - DNA, 15 bp, Homo sapiens
tacaagtatataagg

SEQ ID NO: 452854 - DNA, 15 bp, Homo sapiens
ttacaagtatataag

SEQ ID NO: 452855 - DNA, 15 bp, Homo sapiens
attacaagtatataa

SEQ ID NO: 452856 - DNA, 15 bp, Homo sapiens
tattacaagtatata

SEQ ID NO: 452857 - DNA, 15 bp, Homo sapiens
ctattacaagtatat

SEQ ID NO: 452858 - DNA, 15 bp, Homo sapiens
actattacaagtata

SEQ ID NO: 452859 - DNA, 15 bp, Homo sapiens
cactattacaagtat

SEQ ID NO: 452860 - DNA, 15 bp, Homo sapiens
tcactattacaagta

SEQ ID NO: 452861 - DNA, 15 bp, Homo sapiens
atcactattacaagt

SEQ ID NO: 452862 - DNA, 15 bp, Homo sapiens
catcactattacaag

SEQ ID NO: 452863 - DNA, 15 bp, Homo sapiens
acatcactattacaa

SEQ ID NO: 452864 - DNA, 15 bp, Homo sapiens
cacatcactattaca

SEQ ID NO: 452865 - DNA, 15 bp, Homo sapiens
ccacatcactattac

SEQ ID NO: 452866 - DNA, 15 bp, Homo sapiens
cccacatcactatta

SEQ ID NO: 452867 - DNA, 15 bp, Homo sapiens
acccacatcactatt

SEQ ID NO: 452868 - DNA, 15 bp, Homo sapiens
cacccacatcactat

SEQ ID NO: 452869 - DNA, 15 bp, Homo sapiens
tcacccacatcacta

SEQ ID NO: 452870 - DNA, 15 bp, Homo sapiens
gtcacccacatcact

SEQ ID NO: 452871 - DNA, 15 bp, Homo sapiens
agtcacccacatcac

SEQ ID NO: 452872 - DNA, 15 bp, Homo sapiens
tagtcacccacatca

SEQ ID NO: 452873 - DNA, 15 bp, Homo sapiens
ttagtcacccacatc

SEQ ID NO: 452874 - DNA, 15 bp, Homo sapiens
tttagtcacccacat

SEQ ID NO: 452875 - DNA, 15 bp, Homo sapiens
gtttagtcacccaca

SEQ ID NO: 452876 - DNA, 15 bp, Homo sapiens
tgtttagtcacccac

SEQ ID NO: 452877 - DNA, 15 bp, Homo sapiens
atgtttagtcaccca

SEQ ID NO: 452878 - DNA, 15 bp, Homo sapiens
gatgtttagtcaccc

SEQ ID NO: 452879 - DNA, 15 bp, Homo sapiens
tgatgtttagtcacc

SEQ ID NO: 452880 - DNA, 15 bp, Homo sapiens
atgatgtttagtcac

SEQ ID NO: 452881 - DNA, 15 bp, Homo sapiens
gatgatgtttagtca

SEQ ID NO: 452882 - DNA, 15 bp, Homo sapiens
tgatgatgtttagtc

SEQ ID NO: 452883 - DNA, 15 bp, Homo sapiens
ttgatgatgtttagt

SEQ ID NO: 452884 - DNA, 15 bp, Homo sapiens
cttgatgatgtttag

SEQ ID NO: 452885 - DNA, 15 bp, Homo sapiens
ccttgatgatgttta

SEQ ID NO: 452886 - DNA, 15 bp, Homo sapiens
cccttgatgatgttt

SEQ ID NO: 452887 - DNA, 15 bp, Homo sapiens
ccccttgatgatgtt

SEQ ID NO: 452888 - DNA, 15 bp, Homo sapiens
tccccttgatgatgt

SEQ ID NO: 452889 - DNA, 15 bp, Homo sapiens
gtccccttgatgatg

SEQ ID NO: 452890 - DNA, 15 bp, Homo sapiens
tgtccccttgatgat

SEQ ID NO: 452891 - DNA, 15 bp, Homo sapiens
ctgtccccttgatga

SEQ ID NO: 452892 - DNA, 15 bp, Homo sapiens
tctgtccccttgatg

SEQ ID NO: 452893 - DNA, 15 bp, Homo sapiens
ctctgtccccttgat

SEQ ID NO: 452894 - DNA, 15 bp, Homo sapiens
gctctgtccccttga

SEQ ID NO: 452895 - DNA, 15 bp, Homo sapiens
agctctgtccccttg

SEQ ID NO: 452896 - DNA, 15 bp, Homo sapiens
gagctctgtcccctt

SEQ ID NO: 452897 - DNA, 15 bp, Homo sapiens
tgagctctgtcccct

SEQ ID NO: 452898 - DNA, 15 bp, Homo sapiens
gtgagctctgtcccc

SEQ ID NO: 452899 - DNA, 15 bp, Homo sapiens
agtgagctctgtccc

SEQ ID NO: 452900 - DNA, 15 bp, Homo sapiens
cagtgagctctgtcc

SEQ ID NO: 452901 - DNA, 15 bp, Homo sapiens
gcagtgagctctgtc

SEQ ID NO: 452902 - DNA, 15 bp, Homo sapiens
agcagtgagctctgt

SEQ ID NO: 452903 - DNA, 15 bp, Homo sapiens
gagcagtgagctctg

SEQ ID NO: 452904 - DNA, 15 bp, Homo sapiens
tgagcagtgagctct

SEQ ID NO: 452905 - DNA, 15 bp, Homo sapiens
gtgagcagtgagctc

SEQ ID NO: 452906 - DNA, 15 bp, Homo sapiens
agtgagcagtgagct

SEQ ID NO: 452907 - DNA, 15 bp, Homo sapiens
cagtgagcagtgagc

SEQ ID NO: 452908 - DNA, 15 bp, Homo sapiens
ccagtgagcagtgag

SEQ ID NO: 452909 - DNA, 15 bp, Homo sapiens
gccagtgagcagtga

SEQ ID NO: 452910 - DNA, 15 bp, Homo sapiens
tgccagtgagcagtg

SEQ ID NO: 452911 - DNA, 15 bp, Homo sapiens
atgccagtgagcagt

SEQ ID NO: 452912 - DNA, 15 bp, Homo sapiens
aatgccagtgagcag

SEQ ID NO: 452913 - DNA, 15 bp, Homo sapiens
aaatgccagtgagca

SEQ ID NO: 452914 - DNA, 15 bp, Homo sapiens
aaaatgccagtgagc

SEQ ID NO: 452915 - DNA, 15 bp, Homo sapiens
aaaaatgccagtgag

SEQ ID NO: 452916 - DNA, 15 bp, Homo sapiens
aaaaaatgccagtga

SEQ ID NO: 452917 - DNA, 15 bp, Homo sapiens
aaaaaaatgccagtg

SEQ ID NO: 452918 - DNA, 15 bp, Homo sapiens
aaaaaaaatgccagt

SEQ ID NO: 452919 - DNA, 15 bp, Homo sapiens
taaaaaaaatgccag

SEQ ID NO: 452920 - DNA, 15 bp, Homo sapiens
ctaaaaaaaatgcca

SEQ ID NO: 452921 - DNA, 15 bp, Homo sapiens
tctaaaaaaaatgcc

SEQ ID NO: 452922 - DNA, 15 bp, Homo sapiens
ctctaaaaaaaatgc

SEQ ID NO: 452923 - DNA, 15 bp, Homo sapiens
actctaaaaaaaatg

SEQ ID NO: 452924 - DNA, 15 bp, Homo sapiens
cactctaaaaaaaat

SEQ ID NO: 452925 - DNA, 15 bp, Homo sapiens
gcactctaaaaaaaa

SEQ ID NO: 452926 - DNA, 15 bp, Homo sapiens
agcactctaaaaaaa

SEQ ID NO: 452927 - DNA, 15 bp, Homo sapiens
aagcactctaaaaaa

SEQ ID NO: 452928 - DNA, 15 bp, Homo sapiens
taagcactctaaaaa

SEQ ID NO: 452929 - DNA, 15 bp, Homo sapiens
ataagcactctaaaa

SEQ ID NO: 452930 - DNA, 15 bp, Homo sapiens
aataagcactctaaa

SEQ ID NO: 452931 - DNA, 15 bp, Homo sapiens
taataagcactctaa

SEQ ID NO: 452932 - DNA, 15 bp, Homo sapiens
ttaataagcactcta

SEQ ID NO: 452933 - DNA, 15 bp, Homo sapiens
gttaataagcactct

SEQ ID NO: 452934 - DNA, 15 bp, Homo sapiens
agttaataagcactc

SEQ ID NO: 452935 - DNA, 15 bp, Homo sapiens
tagttaataagcact

SEQ ID NO: 452936 - DNA, 15 bp, Homo sapiens
atagttaataagcac

SEQ ID NO: 452937 - DNA, 15 bp, Homo sapiens
aatagttaataagca

SEQ ID NO: 452938 - DNA, 15 bp, Homo sapiens
caatagttaataagc

SEQ ID NO: 452939 - DNA, 15 bp, Homo sapiens
tcaatagttaataag

SEQ ID NO: 452940 - DNA, 15 bp, Homo sapiens
atcaatagttaataa

SEQ ID NO: 452941 - DNA, 15 bp, Homo sapiens
aatcaatagttaata

SEQ ID NO: 452942 - DNA, 15 bp, Homo sapiens
caatcaatagttaat

SEQ ID NO: 452943 - DNA, 15 bp, Homo sapiens
acaatcaatagttaa

SEQ ID NO: 452944 - DNA, 15 bp, Homo sapiens
tacaatcaatagtta

SEQ ID NO: 452945 - DNA, 15 bp, Homo sapiens
atacaatcaatagtt

SEQ ID NO: 452946 - DNA, 15 bp, Homo sapiens
gatacaatcaatagt

SEQ ID NO: 452947 - DNA, 15 bp, Homo sapiens
agatacaatcaatag

SEQ ID NO: 452948 - DNA, 15 bp, Homo sapiens
tagatacaatcaata

SEQ ID NO: 452949 - DNA, 15 bp, Homo sapiens
ctagatacaatcaat

SEQ ID NO: 452950 - DNA, 15 bp, Homo sapiens
actagatacaatcaa

SEQ ID NO: 452951 - DNA, 15 bp, Homo sapiens
cactagatacaatca

SEQ ID NO: 452952 - DNA, 15 bp, Homo sapiens
acactagatacaatc

SEQ ID NO: 452953 - DNA, 15 bp, Homo sapiens
gacactagatacaat

SEQ ID NO: 452954 - DNA, 15 bp, Homo sapiens
ggacactagatacaa

SEQ ID NO: 452955 - DNA, 15 bp, Homo sapiens
tggacactagataca

SEQ ID NO: 452956 - DNA, 15 bp, Homo sapiens
ctggacactagatac

SEQ ID NO: 452957 - DNA, 15 bp, Homo sapiens
tctggacactagata

SEQ ID NO: 452958 - DNA, 15 bp, Homo sapiens
ctctggacactagat

SEQ ID NO: 452959 - DNA, 15 bp, Homo sapiens
cctctggacactaga

SEQ ID NO: 452960 - DNA, 15 bp, Homo sapiens
acctctggacactag

SEQ ID NO: 452961 - DNA, 15 bp, Homo sapiens
cacctctggacacta

SEQ ID NO: 452962 - DNA, 15 bp, Homo sapiens
gcacctctggacact

SEQ ID NO: 452963 - DNA, 15 bp, Homo sapiens
cgcacctctggacac

SEQ ID NO: 452964 - DNA, 15 bp, Homo sapiens
acgcacctctggaca

SEQ ID NO: 452965 - DNA, 15 bp, Homo sapiens
aacgcacctctggac

SEQ ID NO: 452966 - DNA, 15 bp, Homo sapiens
aaacgcacctctgga

SEQ ID NO: 452967 - DNA, 15 bp, Homo sapiens
caaacgcacctctgg

SEQ ID NO: 452968 - DNA, 15 bp, Homo sapiens
acaaacgcacctctg

SEQ ID NO: 452969 - DNA, 15 bp, Homo sapiens
tacaaacgcacctct

SEQ ID NO: 452970 - DNA, 15 bp, Homo sapiens
gtacaaacgcacctc

SEQ ID NO: 452971 - DNA, 15 bp, Homo sapiens
ggtacaaacgcacct

SEQ ID NO: 452972 - DNA, 15 bp, Homo sapiens
tggtacaaacgcacc

SEQ ID NO: 452973 - DNA, 15 bp, Homo sapiens
atggtacaaacgcac

SEQ ID NO: 452974 - DNA, 15 bp, Homo sapiens
catggtacaaacgca

SEQ ID NO: 452975 - DNA, 15 bp, Homo sapiens
ccatggtacaaacgc

SEQ ID NO: 452976 - DNA, 15 bp, Homo sapiens
cccatggtacaaacg

SEQ ID NO: 452977 - DNA, 15 bp, Homo sapiens
acccatggtacaaac

SEQ ID NO: 452978 - DNA, 15 bp, Homo sapiens
tacccatggtacaaa

SEQ ID NO: 452979 - DNA, 15 bp, Homo sapiens
gtacccatggtacaa

SEQ ID NO: 452980 - DNA, 15 bp, Homo sapiens
tgtacccatggtaca

SEQ ID NO: 452981 - DNA, 15 bp, Homo sapiens
atgtacccatggtac

SEQ ID NO: 452982 - DNA, 15 bp, Homo sapiens
catgtacccatggta

SEQ ID NO: 452983 - DNA, 15 bp, Homo sapiens
acatgtacccatggt

SEQ ID NO: 452984 - DNA, 15 bp, Homo sapiens
tacatgtacccatgg

SEQ ID NO: 452985 - DNA, 15 bp, Homo sapiens
ttacatgtacccatg

SEQ ID NO: 452986 - DNA, 15 bp, Homo sapiens
attacatgtacccat

SEQ ID NO: 452987 - DNA, 15 bp, Homo sapiens
tattacatgtaccca

SEQ ID NO: 452988 - DNA, 15 bp, Homo sapiens
ttattacatgtaccc

SEQ ID NO: 452989 - DNA, 15 bp, Homo sapiens
tttattacatgtacc

SEQ ID NO: 452990 - DNA, 15 bp, Homo sapiens
atttattacatgtac

SEQ ID NO: 452991 - DNA, 15 bp, Homo sapiens
catttattacatgta

SEQ ID NO: 452992 - DNA, 15 bp, Homo sapiens
tcatttattacatgt

SEQ ID NO: 452993 - DNA, 15 bp, Homo sapiens
ttcatttattacatg

SEQ ID NO: 452994 - DNA, 15 bp, Homo sapiens
tttcatttattacat

SEQ ID NO: 452995 - DNA, 15 bp, Homo sapiens
atttcatttattaca

SEQ ID NO: 452996 - DNA, 15 bp, Homo sapiens
tatttcatttattac

SEQ ID NO: 452997 - DNA, 15 bp, Homo sapiens
ttatttcatttatta

SEQ ID NO: 452998 - DNA, 15 bp, Homo sapiens
tttatttcatttatt

SEQ ID NO: 452999 - DNA, 15 bp, Homo sapiens
ttttatttcatttat

SEQ ID NO: 453000 - DNA, 15 bp, Homo sapiens
tttttatttcattta

SEQ ID NO: 453001 - DNA, 15 bp, Homo sapiens
ttttttatttcattt

SEQ ID NO: 453002 - DNA, 15 bp, Homo sapiens
attttttatttcatt

SEQ ID NO: 453003 - DNA, 15 bp, Homo sapiens
cattttttatttcat

SEQ ID NO: 453004 - DNA, 15 bp, Homo sapiens
ccattttttatttca

SEQ ID NO: 453005 - DNA, 15 bp, Homo sapiens
tccattttttatttc

SEQ ID NO: 453006 - DNA, 15 bp, Homo sapiens
atccattttttattt

SEQ ID NO: 453007 - DNA, 15 bp, Homo sapiens
catccattttttatt

SEQ ID NO: 453008 - DNA, 15 bp, Homo sapiens
acatccattttttat

SEQ ID NO: 453009 - DNA, 15 bp, Homo sapiens
aacatccatttttta

SEQ ID NO: 453010 - DNA, 15 bp, Homo sapiens
aaacatccatttttt

SEQ ID NO: 453011 - DNA, 15 bp, Homo sapiens
taaacatccattttt

SEQ ID NO: 453012 - DNA, 15 bp, Homo sapiens
ataaacatccatttt

SEQ ID NO: 453013 - DNA, 15 bp, Homo sapiens
tataaacatccattt

SEQ ID NO: 453014 - DNA, 15 bp, Homo sapiens
ttataaacatccatt

SEQ ID NO: 453015 - DNA, 15 bp, Homo sapiens
cttataaacatccat

SEQ ID NO: 453016 - DNA, 15 bp, Homo sapiens
tcttataaacatcca

SEQ ID NO: 453017 - DNA, 15 bp, Homo sapiens
ctcttataaacatcc

SEQ ID NO: 453018 - DNA, 15 bp, Homo sapiens
cctcttataaacatc

SEQ ID NO: 453019 - DNA, 15 bp, Homo sapiens
gcctcttataaacat

SEQ ID NO: 453020 - DNA, 15 bp, Homo sapiens
agcctcttataaaca

SEQ ID NO: 453021 - DNA, 15 bp, Homo sapiens
aagcctcttataaac

SEQ ID NO: 453022 - DNA, 15 bp, Homo sapiens
taagcctcttataaa

SEQ ID NO: 453023 - DNA, 15 bp, Homo sapiens
ataagcctcttataa

SEQ ID NO: 453024 - DNA, 15 bp, Homo sapiens
cataagcctcttata

SEQ ID NO: 453025 - DNA, 15 bp, Homo sapiens
ccataagcctcttat

SEQ ID NO: 453026 - DNA, 15 bp, Homo sapiens
accataagcctctta

SEQ ID NO: 453027 - DNA, 15 bp, Homo sapiens
taccataagcctctt

SEQ ID NO: 453028 - DNA, 15 bp, Homo sapiens
ctaccataagcctct

SEQ ID NO: 453029 - DNA, 15 bp, Homo sapiens
tctaccataagcctc

SEQ ID NO: 453030 - DNA, 15 bp, Homo sapiens
atctaccataagcct

SEQ ID NO: 453031 - DNA, 15 bp, Homo sapiens
gatctaccataagcc

SEQ ID NO: 453032 - DNA, 15 bp, Homo sapiens
tgatctaccataagc

SEQ ID NO: 453033 - DNA, 15 bp, Homo sapiens
ctgatctaccataag

SEQ ID NO: 453034 - DNA, 15 bp, Homo sapiens
gctgatctaccataa

SEQ ID NO: 453035 - DNA, 15 bp, Homo sapiens
tgctgatctaccata

SEQ ID NO: 453036 - DNA, 15 bp, Homo sapiens
gtgctgatctaccat

SEQ ID NO: 453037 - DNA, 15 bp, Homo sapiens
tgtgctgatctacca

SEQ ID NO: 453038 - DNA, 15 bp, Homo sapiens
ttgtgctgatctacc

SEQ ID NO: 453039 - DNA, 15 bp, Homo sapiens
cttgtgctgatctac

SEQ ID NO: 453040 - DNA, 15 bp, Homo sapiens
ccttgtgctgatcta

SEQ ID NO: 453041 - DNA, 15 bp, Homo sapiens
accttgtgctgatct

SEQ ID NO: 453042 - DNA, 15 bp, Homo sapiens
taccttgtgctgatc

SEQ ID NO: 453043 - DNA, 15 bp, Homo sapiens
ataccttgtgctgat

SEQ ID NO: 453044 - DNA, 15 bp, Homo sapiens
aataccttgtgctga

SEQ ID NO: 453045 - DNA, 15 bp, Homo sapiens
aaataccttgtgctg

SEQ ID NO: 453046 - DNA, 15 bp, Homo sapiens
aaaataccttgtgct

SEQ ID NO: 453047 - DNA, 15 bp, Homo sapiens
gaaaataccttgtgc

SEQ ID NO: 453048 - DNA, 15 bp, Homo sapiens
agaaaataccttgtg

SEQ ID NO: 453049 - DNA, 15 bp, Homo sapiens
aagaaaataccttgt

SEQ ID NO: 453050 - DNA, 15 bp, Homo sapiens
aaagaaaataccttg

SEQ ID NO: 453051 - DNA, 15 bp, Homo sapiens
caaagaaaatacctt

SEQ ID NO: 453052 - DNA, 15 bp, Homo sapiens
ccaaagaaaatacct

SEQ ID NO: 453053 - DNA, 15 bp, Homo sapiens
gccaaagaaaatacc

SEQ ID NO: 453054 - DNA, 15 bp, Homo sapiens
agccaaagaaaatac

SEQ ID NO: 453055 - DNA, 15 bp, Homo sapiens
aagccaaagaaaata

SEQ ID NO: 453056 - DNA, 15 bp, Homo sapiens
aaagccaaagaaaat

SEQ ID NO: 453057 - DNA, 15 bp, Homo sapiens
aaaagccaaagaaaa

SEQ ID NO: 453058 - DNA, 15 bp, Homo sapiens
caaaagccaaagaaa

SEQ ID NO: 453059 - DNA, 15 bp, Homo sapiens
tcaaaagccaaagaa

SEQ ID NO: 453060 - DNA, 15 bp, Homo sapiens
ctcaaaagccaaaga

SEQ ID NO: 453061 - DNA, 15 bp, Homo sapiens
tctcaaaagccaaag

SEQ ID NO: 453062 - DNA, 15 bp, Homo sapiens
ctctcaaaagccaaa

SEQ ID NO: 453063 - DNA, 15 bp, Homo sapiens
actctcaaaagccaa

SEQ ID NO: 453064 - DNA, 15 bp, Homo sapiens
gactctcaaaagcca

SEQ ID NO: 453065 - DNA, 15 bp, Homo sapiens
ggactctcaaaagcc

SEQ ID NO: 453066 - DNA, 15 bp, Homo sapiens
tggactctcaaaagc

SEQ ID NO: 453067 - DNA, 15 bp, Homo sapiens
gtggactctcaaaag

SEQ ID NO: 453068 - DNA, 15 bp, Homo sapiens
ggtggactctcaaaa

SEQ ID NO: 453069 - DNA, 15 bp, Homo sapiens
tggtggactctcaaa

SEQ ID NO: 453070 - DNA, 15 bp, Homo sapiens
atggtggactctcaa

SEQ ID NO: 453071 - DNA, 15 bp, Homo sapiens
catggtggactctca

SEQ ID NO: 453072 - DNA, 15 bp, Homo sapiens
tcatggtggactctc

SEQ ID NO: 453073 - DNA, 15 bp, Homo sapiens
gtcatggtggactct

SEQ ID NO: 453074 - DNA, 15 bp, Homo sapiens
agtcatggtggactc

SEQ ID NO: 453075 - DNA, 15 bp, Homo sapiens
cagtcatggtggact

SEQ ID NO: 453076 - DNA, 15 bp, Homo sapiens
ccagtcatggtggac

SEQ ID NO: 453077 - DNA, 15 bp, Homo sapiens
tccagtcatggtgga

SEQ ID NO: 453078 - DNA, 15 bp, Homo sapiens
ttccagtcatggtgg

SEQ ID NO: 453079 - DNA, 15 bp, Homo sapiens
tttccagtcatggtg

SEQ ID NO: 453080 - DNA, 15 bp, Homo sapiens
ctttccagtcatggt

SEQ ID NO: 453081 - DNA, 15 bp, Homo sapiens
gctttccagtcatgg

SEQ ID NO: 453082 - DNA, 15 bp, Homo sapiens
tgctttccagtcatg

SEQ ID NO: 453083 - DNA, 15 bp, Homo sapiens
atgctttccagtcat

SEQ ID NO: 453084 - DNA, 15 bp, Homo sapiens
tatgctttccagtca

SEQ ID NO: 453085 - DNA, 15 bp, Homo sapiens
ctatgctttccagtc

SEQ ID NO: 453086 - DNA, 15 bp, Homo sapiens
gctatgctttccagt

SEQ ID NO: 453087 - DNA, 15 bp, Homo sapiens
tgctatgctttccag

SEQ ID NO: 453088 - DNA, 15 bp, Homo sapiens
atgctatgctttcca

SEQ ID NO: 453089 - DNA, 15 bp, Homo sapiens
catgctatgctttcc

SEQ ID NO: 453090 - DNA, 15 bp, Homo sapiens
acatgctatgctttc

SEQ ID NO: 453091 - DNA, 15 bp, Homo sapiens
cacatgctatgcttt

SEQ ID NO: 453092 - DNA, 15 bp, Homo sapiens
acacatgctatgctt

SEQ ID NO: 453093 - DNA, 15 bp, Homo sapiens
gacacatgctatgct

SEQ ID NO: 453094 - DNA, 15 bp, Homo sapiens
agacacatgctatgc

SEQ ID NO: 453095 - DNA, 15 bp, Homo sapiens
gagacacatgctatg

SEQ ID NO: 453096 - DNA, 15 bp, Homo sapiens
agagacacatgctat

SEQ ID NO: 453097 - DNA, 15 bp, Homo sapiens
cagagacacatgcta

SEQ ID NO: 453098 - DNA, 15 bp, Homo sapiens
gcagagacacatgct

SEQ ID NO: 453099 - DNA, 15 bp, Homo sapiens
agcagagacacatgc

SEQ ID NO: 453100 - DNA, 15 bp, Homo sapiens
aagcagagacacatg

SEQ ID NO: 453101 - DNA, 15 bp, Homo sapiens
taagcagagacacat

SEQ ID NO: 453102 - DNA, 15 bp, Homo sapiens
ttaagcagagacaca

SEQ ID NO: 453103 - DNA, 15 bp, Homo sapiens
tttaagcagagacac

SEQ ID NO: 453104 - DNA, 15 bp, Homo sapiens
ttttaagcagagaca

SEQ ID NO: 453105 - DNA, 15 bp, Homo sapiens
cttttaagcagagac

SEQ ID NO: 453106 - DNA, 15 bp, Homo sapiens
tcttttaagcagaga

SEQ ID NO: 453107 - DNA, 15 bp, Homo sapiens
ttcttttaagcagag

SEQ ID NO: 453108 - DNA, 15 bp, Homo sapiens
tttcttttaagcaga

SEQ ID NO: 453109 - DNA, 15 bp, Homo sapiens
ttttcttttaagcag

SEQ ID NO: 453110 - DNA, 15 bp, Homo sapiens
gttttcttttaagca

SEQ ID NO: 453111 - DNA, 15 bp, Homo sapiens
tgttttcttttaagc

SEQ ID NO: 453112 - DNA, 15 bp, Homo sapiens
ctgttttcttttaag

SEQ ID NO: 453113 - DNA, 15 bp, Homo sapiens
cctgttttcttttaa

SEQ ID NO: 453114 - DNA, 15 bp, Homo sapiens
acctgttttctttta

SEQ ID NO: 453115 - DNA, 15 bp, Homo sapiens
cacctgttttctttt

SEQ ID NO: 453116 - DNA, 15 bp, Homo sapiens
gcacctgttttcttt

SEQ ID NO: 453117 - DNA, 15 bp, Homo sapiens
tgcacctgttttctt

SEQ ID NO: 453118 - DNA, 15 bp, Homo sapiens
atgcacctgttttct

SEQ ID NO: 453119 - DNA, 15 bp, Homo sapiens
gatgcacctgttttc

SEQ ID NO: 453120 - DNA, 15 bp, Homo sapiens
tgatgcacctgtttt

SEQ ID NO: 453121 - DNA, 15 bp, Homo sapiens
ttgatgcacctgttt

SEQ ID NO: 453122 - DNA, 15 bp, Homo sapiens
attgatgcacctgtt

SEQ ID NO: 453123 - DNA, 15 bp, Homo sapiens
tattgatgcacctgt

SEQ ID NO: 453124 - DNA, 15 bp, Homo sapiens
ctattgatgcacctg

SEQ ID NO: 453125 - DNA, 15 bp, Homo sapiens
cctattgatgcacct

SEQ ID NO: 453126 - DNA, 15 bp, Homo sapiens
tcctattgatgcacc

SEQ ID NO: 453127 - DNA, 15 bp, Homo sapiens
atcctattgatgcac

SEQ ID NO: 453128 - DNA, 15 bp, Homo sapiens
catcctattgatgca

SEQ ID NO: 453129 - DNA, 15 bp, Homo sapiens
ccatcctattgatgc

SEQ ID NO: 453130 - DNA, 15 bp, Homo sapiens
tccatcctattgatg

SEQ ID NO: 453131 - DNA, 15 bp, Homo sapiens
ttccatcctattgat

SEQ ID NO: 453132 - DNA, 15 bp, Homo sapiens
attccatcctattga

SEQ ID NO: 453133 - DNA, 15 bp, Homo sapiens
aattccatcctattg

SEQ ID NO: 453134 - DNA, 15 bp, Homo sapiens
aaattccatcctatt

SEQ ID NO: 453135 - DNA, 15 bp, Homo sapiens
aaaattccatcctat

SEQ ID NO: 453136 - DNA, 15 bp, Homo sapiens
taaaattccatccta

SEQ ID NO: 453137 - DNA, 15 bp, Homo sapiens
ataaaattccatcct

SEQ ID NO: 453138 - DNA, 15 bp, Homo sapiens
cataaaattccatcc

SEQ ID NO: 453139 - DNA, 15 bp, Homo sapiens
acataaaattccatc

SEQ ID NO: 453140 - DNA, 15 bp, Homo sapiens
cacataaaattccat

SEQ ID NO: 453141 - DNA, 15 bp, Homo sapiens
ccacataaaattcca

SEQ ID NO: 453142 - DNA, 15 bp, Homo sapiens
gccacataaaattcc

SEQ ID NO: 453143 - DNA, 15 bp, Homo sapiens
ggccacataaaattc

SEQ ID NO: 453144 - DNA, 15 bp, Homo sapiens
tggccacataaaatt

SEQ ID NO: 453145 - DNA, 15 bp, Homo sapiens
ttggccacataaaat

SEQ ID NO: 453146 - DNA, 15 bp, Homo sapiens
cttggccacataaaa

SEQ ID NO: 453147 - DNA, 15 bp, Homo sapiens
tcttggccacataaa

SEQ ID NO: 453148 - DNA, 15 bp, Homo sapiens
ttcttggccacataa

SEQ ID NO: 453149 - DNA, 15 bp, Homo sapiens
gttcttggccacata

SEQ ID NO: 453150 - DNA, 15 bp, Homo sapiens
tgttcttggccacat

SEQ ID NO: 453151 - DNA, 15 bp, Homo sapiens
atgttcttggccaca

SEQ ID NO: 453152 - DNA, 15 bp, Homo sapiens
tatgttcttggccac

SEQ ID NO: 453153 - DNA, 15 bp, Homo sapiens
atatgttcttggcca

SEQ ID NO: 453154 - DNA, 15 bp, Homo sapiens
aatatgttcttggcc

SEQ ID NO: 453155 - DNA, 15 bp, Homo sapiens
gaatatgttcttggc

SEQ ID NO: 453156 - DNA, 15 bp, Homo sapiens
tgaatatgttcttgg

SEQ ID NO: 453157 - DNA, 15 bp, Homo sapiens
ttgaatatgttcttg

SEQ ID NO: 453158 - DNA, 15 bp, Homo sapiens
tttgaatatgttctt

SEQ ID NO: 453159 - DNA, 15 bp, Homo sapiens
ctttgaatatgttct

SEQ ID NO: 453160 - DNA, 15 bp, Homo sapiens
gctttgaatatgttc

SEQ ID NO: 453161 - DNA, 15 bp, Homo sapiens
tgctttgaatatgtt

SEQ ID NO: 453162 - DNA, 15 bp, Homo sapiens
atgctttgaatatgt

SEQ ID NO: 453163 - DNA, 15 bp, Homo sapiens
tatgctttgaatatg

SEQ ID NO: 453164 - DNA, 15 bp, Homo sapiens
atatgctttgaatat

SEQ ID NO: 453165 - DNA, 15 bp, Homo sapiens
aatatgctttgaata

SEQ ID NO: 453166 - DNA, 15 bp, Homo sapiens
aaatatgctttgaat

SEQ ID NO: 453167 - DNA, 15 bp, Homo sapiens
taaatatgctttgaa

SEQ ID NO: 453168 - DNA, 15 bp, Homo sapiens
ttaaatatgctttga

SEQ ID NO: 453169 - DNA, 15 bp, Homo sapiens
attaaatatgctttg

SEQ ID NO: 453170 - DNA, 15 bp, Homo sapiens
cattaaatatgcttt

SEQ ID NO: 453171 - DNA, 15 bp, Homo sapiens
tcattaaatatgctt

SEQ ID NO: 453172 - DNA, 15 bp, Homo sapiens
gtcattaaatatgct

SEQ ID NO: 453173 - DNA, 15 bp, Homo sapiens
tgtcattaaatatgc

SEQ ID NO: 453174 - DNA, 15 bp, Homo sapiens
atgtcattaaatatg

SEQ ID NO: 453175 - DNA, 15 bp, Homo sapiens
catgtcattaaatat

SEQ ID NO: 453176 - DNA, 15 bp, Homo sapiens
ccatgtcattaaata

SEQ ID NO: 453177 - DNA, 15 bp, Homo sapiens
tccatgtcattaaat

SEQ ID NO: 453178 - DNA, 15 bp, Homo sapiens
ttccatgtcattaaa

SEQ ID NO: 453179 - DNA, 15 bp, Homo sapiens
tttccatgtcattaa

SEQ ID NO: 453180 - DNA, 15 bp, Homo sapiens
ttttccatgtcatta

SEQ ID NO: 453181 - DNA, 15 bp, Homo sapiens
tttttccatgtcatt

SEQ ID NO: 453182 - DNA, 15 bp, Homo sapiens
atttttccatgtcat

SEQ ID NO: 453183 - DNA, 15 bp, Homo sapiens
catttttccatgtca

SEQ ID NO: 453184 - DNA, 15 bp, Homo sapiens
gcatttttccatgtc

SEQ ID NO: 453185 - DNA, 15 bp, Homo sapiens
agcatttttccatgt

SEQ ID NO: 453186 - DNA, 15 bp, Homo sapiens
gagcatttttccatg

SEQ ID NO: 453187 - DNA, 15 bp, Homo sapiens
tgagcatttttccat

SEQ ID NO: 453188 - DNA, 15 bp, Homo sapiens
atgagcatttttcca

SEQ ID NO: 453189 - DNA, 15 bp, Homo sapiens
tatgagcatttttcc

SEQ ID NO: 453190 - DNA, 15 bp, Homo sapiens
ctatgagcatttttc

SEQ ID NO: 453191 - DNA, 15 bp, Homo sapiens
actatgagcattttt

SEQ ID NO: 453192 - DNA, 15 bp, Homo sapiens
tactatgagcatttt

SEQ ID NO: 453193 - DNA, 15 bp, Homo sapiens
ttactatgagcattt

SEQ ID NO: 453194 - DNA, 15 bp, Homo sapiens
attactatgagcatt

SEQ ID NO: 453195 - DNA, 15 bp, Homo sapiens
cattactatgagcat

SEQ ID NO: 453196 - DNA, 15 bp, Homo sapiens
acattactatgagca

SEQ ID NO: 453197 - DNA, 15 bp, Homo sapiens
aacattactatgagc

SEQ ID NO: 453198 - DNA, 15 bp, Homo sapiens
taacattactatgag

SEQ ID NO: 453199 - DNA, 15 bp, Homo sapiens
ttaacattactatga

SEQ ID NO: 453200 - DNA, 15 bp, Homo sapiens
cttaacattactatg

SEQ ID NO: 453201 - DNA, 15 bp, Homo sapiens
acttaacattactat

SEQ ID NO: 453202 - DNA, 15 bp, Homo sapiens
cacttaacattacta

SEQ ID NO: 453203 - DNA, 15 bp, Homo sapiens
ccacttaacattact

SEQ ID NO: 453204 - DNA, 15 bp, Homo sapiens
tccacttaacattac

SEQ ID NO: 453205 - DNA, 15 bp, Homo sapiens
ttccacttaacatta

SEQ ID NO: 453206 - DNA, 15 bp, Homo sapiens
tttccacttaacatt

SEQ ID NO: 453207 - DNA, 15 bp, Homo sapiens
ttttccacttaacat

SEQ ID NO: 453208 - DNA, 15 bp, Homo sapiens
tttttccacttaaca

SEQ ID NO: 453209 - DNA, 15 bp, Homo sapiens
ctttttccacttaac

SEQ ID NO: 453210 - DNA, 15 bp, Homo sapiens
gctttttccacttaa

SEQ ID NO: 453211 - DNA, 15 bp, Homo sapiens
tgctttttccactta

SEQ ID NO: 453212 - DNA, 15 bp, Homo sapiens
ctgctttttccactt

SEQ ID NO: 453213 - DNA, 15 bp, Homo sapiens
cctgctttttccact

SEQ ID NO: 453214 - DNA, 15 bp, Homo sapiens
tcctgctttttccac

SEQ ID NO: 453215 - DNA, 15 bp, Homo sapiens
atcctgctttttcca

SEQ ID NO: 453216 - DNA, 15 bp, Homo sapiens
tatcctgctttttcc

SEQ ID NO: 453217 - DNA, 15 bp, Homo sapiens
atatcctgctttttc

SEQ ID NO: 453218 - DNA, 15 bp, Homo sapiens
tatatcctgcttttt

SEQ ID NO: 453219 - DNA, 15 bp, Homo sapiens
ttatatcctgctttt

SEQ ID NO: 453220 - DNA, 15 bp, Homo sapiens
cttatatcctgcttt

SEQ ID NO: 453221 - DNA, 15 bp, Homo sapiens
tcttatatcctgctt

SEQ ID NO: 453222 - DNA, 15 bp, Homo sapiens
gtcttatatcctgct

SEQ ID NO: 453223 - DNA, 15 bp, Homo sapiens
agtcttatatcctgc

SEQ ID NO: 453224 - DNA, 15 bp, Homo sapiens
tagtcttatatcctg

SEQ ID NO: 453225 - DNA, 15 bp, Homo sapiens
atagtcttatatcct

SEQ ID NO: 453226 - DNA, 15 bp, Homo sapiens
gatagtcttatatcc

SEQ ID NO: 453227 - DNA, 15 bp, Homo sapiens
tgatagtcttatatc

SEQ ID NO: 453228 - DNA, 15 bp, Homo sapiens
ttgatagtcttatat

SEQ ID NO: 453229 - DNA, 15 bp, Homo sapiens
gttgatagtcttata

SEQ ID NO: 453230 - DNA, 15 bp, Homo sapiens
tgttgatagtcttat

SEQ ID NO: 453231 - DNA, 15 bp, Homo sapiens
ctgttgatagtctta

SEQ ID NO: 453232 - DNA, 15 bp, Homo sapiens
actgttgatagtctt

SEQ ID NO: 453233 - DNA, 15 bp, Homo sapiens
tactgttgatagtct

SEQ ID NO: 453234 - DNA, 15 bp, Homo sapiens
gtactgttgatagtc

SEQ ID NO: 453235 - DNA, 15 bp, Homo sapiens
ggtactgttgatagt

SEQ ID NO: 453236 - DNA, 15 bp, Homo sapiens
tggtactgttgatag

SEQ ID NO: 453237 - DNA, 15 bp, Homo sapiens
ttggtactgttgata

SEQ ID NO: 453238 - DNA, 15 bp, Homo sapiens
attggtactgttgat

SEQ ID NO: 453239 - DNA, 15 bp, Homo sapiens
aattggtactgttga

SEQ ID NO: 453240 - DNA, 15 bp, Homo sapiens
gaattggtactgttg

SEQ ID NO: 453241 - DNA, 15 bp, Homo sapiens
tgaattggtactgtt

SEQ ID NO: 453242 - DNA, 15 bp, Homo sapiens
ttgaattggtactgt

SEQ ID NO: 453243 - DNA, 15 bp, Homo sapiens
gttgaattggtactg

SEQ ID NO: 453244 - DNA, 15 bp, Homo sapiens
agttgaattggtact

SEQ ID NO: 453245 - DNA, 15 bp, Homo sapiens
cagttgaattggtac

SEQ ID NO: 453246 - DNA, 15 bp, Homo sapiens
acagttgaattggta

SEQ ID NO: 453247 - DNA, 15 bp, Homo sapiens
cacagttgaattggt

SEQ ID NO: 453248 - DNA, 15 bp, Homo sapiens
acacagttgaattgg

SEQ ID NO: 453249 - DNA, 15 bp, Homo sapiens
tacacagttgaattg

SEQ ID NO: 453250 - DNA, 15 bp, Homo sapiens
gtacacagttgaatt

SEQ ID NO: 453251 - DNA, 15 bp, Homo sapiens
tgtacacagttgaat

SEQ ID NO: 453252 - DNA, 15 bp, Homo sapiens
atgtacacagttgaa

SEQ ID NO: 453253 - DNA, 15 bp, Homo sapiens
aatgtacacagttga

SEQ ID NO: 453254 - DNA, 15 bp, Homo sapiens
aaatgtacacagttg

SEQ ID NO: 453255 - DNA, 15 bp, Homo sapiens
taaatgtacacagtt

SEQ ID NO: 453256 - DNA, 15 bp, Homo sapiens
ttaaatgtacacagt

SEQ ID NO: 453257 - DNA, 15 bp, Homo sapiens
cttaaatgtacacag

SEQ ID NO: 453258 - DNA, 15 bp, Homo sapiens
acttaaatgtacaca

SEQ ID NO: 453259 - DNA, 15 bp, Homo sapiens
cacttaaatgtacac

SEQ ID NO: 453260 - DNA, 15 bp, Homo sapiens
acacttaaatgtaca

SEQ ID NO: 453261 - DNA, 15 bp, Homo sapiens
tacacttaaatgtac

SEQ ID NO: 453262 - DNA, 15 bp, Homo sapiens
atacacttaaatgta

SEQ ID NO: 453263 - DNA, 15 bp, Homo sapiens
catacacttaaatgt

SEQ ID NO: 453264 - DNA, 15 bp, Homo sapiens
acatacacttaaatg

SEQ ID NO: 453265 - DNA, 15 bp, Homo sapiens
cacatacacttaaat

SEQ ID NO: 453266 - DNA, 15 bp, Homo sapiens
acacatacacttaaa

SEQ ID NO: 453267 - DNA, 15 bp, Homo sapiens
cacacatacacttaa

SEQ ID NO: 453268 - DNA, 15 bp, Homo sapiens
gcacacatacactta

SEQ ID NO: 453269 - DNA, 15 bp, Homo sapiens
agcacacatacactt

SEQ ID NO: 453270 - DNA, 15 bp, Homo sapiens
aagcacacatacact

SEQ ID NO: 453271 - DNA, 15 bp, Homo sapiens
aaagcacacatacac

SEQ ID NO: 453272 - DNA, 15 bp, Homo sapiens
caaagcacacataca

SEQ ID NO: 453273 - DNA, 15 bp, Homo sapiens
tcaaagcacacatac

SEQ ID NO: 453274 - DNA, 15 bp, Homo sapiens
ttcaaagcacacata

SEQ ID NO: 453275 - DNA, 15 bp, Homo sapiens
cttcaaagcacacat

SEQ ID NO: 453276 - DNA, 15 bp, Homo sapiens
ccttcaaagcacaca

SEQ ID NO: 453277 - DNA, 15 bp, Homo sapiens
tccttcaaagcacac

SEQ ID NO: 453278 - DNA, 15 bp, Homo sapiens
ctccttcaaagcaca

SEQ ID NO: 453279 - DNA, 15 bp, Homo sapiens
tctccttcaaagcac

SEQ ID NO: 453280 - DNA, 15 bp, Homo sapiens
ctctccttcaaagca

SEQ ID NO: 453281 - DNA, 15 bp, Homo sapiens
tctctccttcaaagc

SEQ ID NO: 453282 - DNA, 15 bp, Homo sapiens
ctctctccttcaaag

SEQ ID NO: 453283 - DNA, 15 bp, Homo sapiens
tctctctccttcaaa

SEQ ID NO: 453284 - DNA, 15 bp, Homo sapiens
ctctctctccttcaa

SEQ ID NO: 453285 - DNA, 15 bp, Homo sapiens
tctctctctccttca

SEQ ID NO: 453286 - DNA, 15 bp, Homo sapiens
ctctctctctccttc

SEQ ID NO: 453287 - DNA, 15 bp, Homo sapiens
tctctctctctcctt

SEQ ID NO: 453288 - DNA, 15 bp, Homo sapiens
ttctctctctctcct

SEQ ID NO: 453289 - DNA, 15 bp, Homo sapiens
tttctctctctctcc

SEQ ID NO: 453290 - DNA, 15 bp, Homo sapiens
gtttctctctctctc

SEQ ID NO: 453291 - DNA, 15 bp, Homo sapiens
tgtttctctctctct

SEQ ID NO: 453292 - DNA, 15 bp, Homo sapiens
ttgtttctctctctc

SEQ ID NO: 453293 - DNA, 15 bp, Homo sapiens
tttgtttctctctct

SEQ ID NO: 453294 - DNA, 15 bp, Homo sapiens
ttttgtttctctctc

SEQ ID NO: 453295 - DNA, 15 bp, Homo sapiens
cttttgtttctctct

SEQ ID NO: 453296 - DNA, 15 bp, Homo sapiens
ccttttgtttctctc

SEQ ID NO: 453297 - DNA, 15 bp, Homo sapiens
tccttttgtttctct

SEQ ID NO: 453298 - DNA, 15 bp, Homo sapiens
ttccttttgtttctc

SEQ ID NO: 453299 - DNA, 15 bp, Homo sapiens
tttccttttgtttct

SEQ ID NO: 453300 - DNA, 15 bp, Homo sapiens
atttccttttgtttc

SEQ ID NO: 453301 - DNA, 15 bp, Homo sapiens
aatttccttttgttt

SEQ ID NO: 453302 - DNA, 15 bp, Homo sapiens
taatttccttttgtt

SEQ ID NO: 453303 - DNA, 15 bp, Homo sapiens
ttaatttccttttgt

SEQ ID NO: 453304 - DNA, 15 bp, Homo sapiens
cttaatttccttttg

SEQ ID NO: 453305 - DNA, 15 bp, Homo sapiens
tcttaatttcctttt

SEQ ID NO: 453306 - DNA, 15 bp, Homo sapiens
ctcttaatttccttt

SEQ ID NO: 453307 - DNA, 15 bp, Homo sapiens
tctcttaatttcctt

SEQ ID NO: 453308 - DNA, 15 bp, Homo sapiens
ttctcttaatttcct

SEQ ID NO: 453309 - DNA, 15 bp, Homo sapiens
tttctcttaatttcc

SEQ ID NO: 453310 - DNA, 15 bp, Homo sapiens
ttttctcttaatttc

SEQ ID NO: 453311 - DNA, 15 bp, Homo sapiens
gttttctcttaattt

SEQ ID NO: 453312 - DNA, 15 bp, Homo sapiens
ggttttctcttaatt

SEQ ID NO: 453313 - DNA, 15 bp, Homo sapiens
gggttttctcttaat

SEQ ID NO: 453314 - DNA, 15 bp, Homo sapiens
agggttttctcttaa

SEQ ID NO: 453315 - DNA, 15 bp, Homo sapiens
tagggttttctctta

SEQ ID NO: 453316 - DNA, 15 bp, Homo sapiens
ctagggttttctctt

SEQ ID NO: 453317 - DNA, 15 bp, Homo sapiens
tctagggttttctct

SEQ ID NO: 453318 - DNA, 15 bp, Homo sapiens
ttctagggttttctc

SEQ ID NO: 453319 - DNA, 15 bp, Homo sapiens
cttctagggttttct

SEQ ID NO: 453320 - DNA, 15 bp, Homo sapiens
ccttctagggttttc

SEQ ID NO: 453321 - DNA, 15 bp, Homo sapiens
tccttctagggtttt

SEQ ID NO: 453322 - DNA, 15 bp, Homo sapiens
ttccttctagggttt

SEQ ID NO: 453323 - DNA, 15 bp, Homo sapiens
gttccttctagggtt

SEQ ID NO: 453324 - DNA, 15 bp, Homo sapiens
agttccttctagggt

SEQ ID NO: 453325 - DNA, 15 bp, Homo sapiens
cagttccttctaggg

SEQ ID NO: 453326 - DNA, 15 bp, Homo sapiens
gcagttccttctagg

SEQ ID NO: 453327 - DNA, 15 bp, Homo sapiens
ggcagttccttctag

SEQ ID NO: 453328 - DNA, 15 bp, Homo sapiens
tggcagttccttcta

SEQ ID NO: 453329 - DNA, 15 bp, Homo sapiens
ttggcagttccttct

SEQ ID NO: 453330 - DNA, 15 bp, Homo sapiens
tttggcagttccttc

SEQ ID NO: 453331 - DNA, 15 bp, Homo sapiens
ttttggcagttcctt

SEQ ID NO: 453332 - DNA, 15 bp, Homo sapiens
attttggcagttcct

SEQ ID NO: 453333 - DNA, 15 bp, Homo sapiens
tattttggcagttcc

SEQ ID NO: 453334 - DNA, 15 bp, Homo sapiens
atattttggcagttc

SEQ ID NO: 453335 - DNA, 15 bp, Homo sapiens
aatattttggcagtt

SEQ ID NO: 453336 - DNA, 15 bp, Homo sapiens
gaatattttggcagt

SEQ ID NO: 453337 - DNA, 15 bp, Homo sapiens
tgaatattttggcag

SEQ ID NO: 453338 - DNA, 15 bp, Homo sapiens
atgaatattttggca

SEQ ID NO: 453339 - DNA, 15 bp, Homo sapiens
tatgaatattttggc

SEQ ID NO: 453340 - DNA, 15 bp, Homo sapiens
gtatgaatattttgg

SEQ ID NO: 453341 - DNA, 15 bp, Homo sapiens
agtatgaatattttg

SEQ ID NO: 453342 - DNA, 15 bp, Homo sapiens
cagtatgaatatttt

SEQ ID NO: 453343 - DNA, 15 bp, Homo sapiens
ccagtatgaatattt

SEQ ID NO: 453344 - DNA, 15 bp, Homo sapiens
accagtatgaatatt

SEQ ID NO: 453345 - DNA, 15 bp, Homo sapiens
aaccagtatgaatat

SEQ ID NO: 453346 - DNA, 15 bp, Homo sapiens
aaaccagtatgaata

SEQ ID NO: 453347 - DNA, 15 bp, Homo sapiens
aaaaccagtatgaat

SEQ ID NO: 453348 - DNA, 15 bp, Homo sapiens
gaaaaccagtatgaa

SEQ ID NO: 453349 - DNA, 15 bp, Homo sapiens
agaaaaccagtatga

SEQ ID NO: 453350 - DNA, 15 bp, Homo sapiens
gagaaaaccagtatg

SEQ ID NO: 453351 - DNA, 15 bp, Homo sapiens
tgagaaaaccagtat

SEQ ID NO: 453352 - DNA, 15 bp, Homo sapiens
ctgagaaaaccagta

SEQ ID NO: 453353 - DNA, 15 bp, Homo sapiens
actgagaaaaccagt

SEQ ID NO: 453354 - DNA, 15 bp, Homo sapiens
aactgagaaaaccag

SEQ ID NO: 453355 - DNA, 15 bp, Homo sapiens
aaactgagaaaacca

SEQ ID NO: 453356 - DNA, 15 bp, Homo sapiens
aaaactgagaaaacc

SEQ ID NO: 453357 - DNA, 15 bp, Homo sapiens
taaaactgagaaaac

SEQ ID NO: 453358 - DNA, 15 bp, Homo sapiens
ttaaaactgagaaaa

SEQ ID NO: 453359 - DNA, 15 bp, Homo sapiens
attaaaactgagaaa

SEQ ID NO: 453360 - DNA, 15 bp, Homo sapiens
aattaaaactgagaa

SEQ ID NO: 453361 - DNA, 15 bp, Homo sapiens
aaattaaaactgaga

SEQ ID NO: 453362 - DNA, 15 bp, Homo sapiens
aaaattaaaactgag

SEQ ID NO: 453363 - DNA, 15 bp, Homo sapiens
gaaaattaaaactga

SEQ ID NO: 453364 - DNA, 15 bp, Homo sapiens
agaaaattaaaactg

SEQ ID NO: 453365 - DNA, 15 bp, Homo sapiens
aagaaaattaaaact

SEQ ID NO: 453366 - DNA, 15 bp, Homo sapiens
aaagaaaattaaaac

SEQ ID NO: 453367 - DNA, 15 bp, Homo sapiens
aaaagaaaattaaaa

SEQ ID NO: 453368 - DNA, 15 bp, Homo sapiens
gaaaagaaaattaaa

SEQ ID NO: 453369 - DNA, 15 bp, Homo sapiens
agaaaagaaaattaa

SEQ ID NO: 453370 - DNA, 15 bp, Homo sapiens
aagaaaagaaaatta

SEQ ID NO: 453371 - DNA, 15 bp, Homo sapiens
aaagaaaagaaaatt

SEQ ID NO: 453372 - DNA, 15 bp, Homo sapiens
aaaagaaaagaaaat

SEQ ID NO: 453373 - DNA, 15 bp, Homo sapiens
aaaaagaaaagaaaa

SEQ ID NO: 453374 - DNA, 15 bp, Homo sapiens
aaaaaagaaaagaaa

SEQ ID NO: 453375 - DNA, 15 bp, Homo sapiens
aaaaaaagaaaagaa

SEQ ID NO: 453376 - DNA, 15 bp, Homo sapiens
aaaaaaaagaaaaga

SEQ ID NO: 453377 - DNA, 15 bp, Homo sapiens
aaaaaaaaagaaaag

SEQ ID NO: 453378 - DNA, 15 bp, Homo sapiens
caaaaaaaaagaaaa

SEQ ID NO: 453379 - DNA, 15 bp, Homo sapiens
tcaaaaaaaaagaaa

SEQ ID NO: 453380 - DNA, 15 bp, Homo sapiens
ctcaaaaaaaaagaa

SEQ ID NO: 453381 - DNA, 15 bp, Homo sapiens
tctcaaaaaaaaaga

SEQ ID NO: 453382 - DNA, 15 bp, Homo sapiens
atctcaaaaaaaaag

SEQ ID NO: 453383 - DNA, 15 bp, Homo sapiens
catctcaaaaaaaaa

SEQ ID NO: 453384 - DNA, 15 bp, Homo sapiens
ccatctcaaaaaaaa

SEQ ID NO: 453385 - DNA, 15 bp, Homo sapiens
atccatctcaaaaaa

SEQ ID NO: 453386 - DNA, 15 bp, Homo sapiens
aatccatctcaaaaa

SEQ ID NO: 453387 - DNA, 15 bp, Homo sapiens
gaatccatctcaaaa

SEQ ID NO: 453388 - DNA, 15 bp, Homo sapiens
agaatccatctcaaa

SEQ ID NO: 453389 - DNA, 15 bp, Homo sapiens
aagaatccatctcaa

SEQ ID NO: 453390 - DNA, 15 bp, Homo sapiens
caagaatccatctca

SEQ ID NO: 453391 - DNA, 15 bp, Homo sapiens
gcaagaatccatctc

SEQ ID NO: 453392 - DNA, 15 bp, Homo sapiens
agcaagaatccatct

SEQ ID NO: 453393 - DNA, 15 bp, Homo sapiens
aagcaagaatccatc

SEQ ID NO: 453394 - DNA, 15 bp, Homo sapiens
caagcaagaatccat

SEQ ID NO: 453395 - DNA, 15 bp, Homo sapiens
acaagcaagaatcca

SEQ ID NO: 453396 - DNA, 15 bp, Homo sapiens
gacaagcaagaatcc

SEQ ID NO: 453397 - DNA, 15 bp, Homo sapiens
tgacaagcaagaatc

SEQ ID NO: 453398 - DNA, 15 bp, Homo sapiens
gtgacaagcaagaat

SEQ ID NO: 453399 - DNA, 15 bp, Homo sapiens
ggtgacaagcaagaa

SEQ ID NO: 453400 - DNA, 15 bp, Homo sapiens
tggtgacaagcaaga

SEQ ID NO: 453401 - DNA, 15 bp, Homo sapiens
ttggtgacaagcaag

SEQ ID NO: 453402 - DNA, 15 bp, Homo sapiens
cttggtgacaagcaa

SEQ ID NO: 453403 - DNA, 15 bp, Homo sapiens
ccttggtgacaagca

SEQ ID NO: 453404 - DNA, 15 bp, Homo sapiens
gccttggtgacaagc

SEQ ID NO: 453405 - DNA, 15 bp, Homo sapiens
agccttggtgacaag

SEQ ID NO: 453406 - DNA, 15 bp, Homo sapiens
cagccttggtgacaa

SEQ ID NO: 453407 - DNA, 15 bp, Homo sapiens
ccagccttggtgaca

SEQ ID NO: 453408 - DNA, 15 bp, Homo sapiens
tccagccttggtgac

SEQ ID NO: 453409 - DNA, 15 bp, Homo sapiens
ctccagccttggtga

SEQ ID NO: 453410 - DNA, 15 bp, Homo sapiens
actccagccttggtg

SEQ ID NO: 453411 - DNA, 15 bp, Homo sapiens
cactccagccttggt

SEQ ID NO: 453412 - DNA, 15 bp, Homo sapiens
gcactccagccttgg

SEQ ID NO: 453413 - DNA, 15 bp, Homo sapiens
tgcactccagccttg

SEQ ID NO: 453414 - DNA, 15 bp, Homo sapiens
ctgcactccagcctt

SEQ ID NO: 453415 - DNA, 15 bp, Homo sapiens
acaccactgcactcc

SEQ ID NO: 453416 - DNA, 15 bp, Homo sapiens
cacaccactgcactc

SEQ ID NO: 453417 - DNA, 15 bp, Homo sapiens
tcacaccactgcact

SEQ ID NO: 453418 - DNA, 15 bp, Homo sapiens
atcacaccactgcac

SEQ ID NO: 453419 - DNA, 15 bp, Homo sapiens
gatcacaccactgca

SEQ ID NO: 453420 - DNA, 15 bp, Homo sapiens
agatcacaccactgc

SEQ ID NO: 453421 - DNA, 15 bp, Homo sapiens
gagatcacaccactg

SEQ ID NO: 453422 - DNA, 15 bp, Homo sapiens
cgagatcacaccact

SEQ ID NO: 453423 - DNA, 15 bp, Homo sapiens
ccgagatcacaccac

SEQ ID NO: 453424 - DNA, 15 bp, Homo sapiens
gccgagatcacacca

SEQ ID NO: 453425 - DNA, 15 bp, Homo sapiens
agccgagatcacacc

SEQ ID NO: 453426 - DNA, 15 bp, Homo sapiens
gagccgagatcacac

SEQ ID NO: 453427 - DNA, 15 bp, Homo sapiens
tgagccgagatcaca

SEQ ID NO: 453428 - DNA, 15 bp, Homo sapiens
gtgagccgagatcac

SEQ ID NO: 453429 - DNA, 15 bp, Homo sapiens
agtgagccgagatca

SEQ ID NO: 453430 - DNA, 15 bp, Homo sapiens
cagtgagccgagatc

SEQ ID NO: 453431 - DNA, 15 bp, Homo sapiens
gcagtgagccgagat

SEQ ID NO: 453432 - DNA, 15 bp, Homo sapiens
tgcagtgagccgaga

SEQ ID NO: 453433 - DNA, 15 bp, Homo sapiens
ttgcagtgagccgag

SEQ ID NO: 453434 - DNA, 15 bp, Homo sapiens
attgcagtgagccga

SEQ ID NO: 453435 - DNA, 15 bp, Homo sapiens
gattgcagtgagccg

SEQ ID NO: 453436 - DNA, 15 bp, Homo sapiens
agattgcagtgagcc

SEQ ID NO: 453437 - DNA, 15 bp, Homo sapiens
gagattgcagtgagc

SEQ ID NO: 453438 - DNA, 15 bp, Homo sapiens
ggagattgcagtgag

SEQ ID NO: 453439 - DNA, 15 bp, Homo sapiens
tggagattgcagtga

SEQ ID NO: 453440 - DNA, 15 bp, Homo sapiens
gtggagattgcagtg

SEQ ID NO: 453441 - DNA, 15 bp, Homo sapiens
agtggagattgcagt

SEQ ID NO: 453442 - DNA, 15 bp, Homo sapiens
aagtggagattgcag

SEQ ID NO: 453443 - DNA, 15 bp, Homo sapiens
gaagtggagattgca

SEQ ID NO: 453444 - DNA, 15 bp, Homo sapiens
tgaagtggagattgc

SEQ ID NO: 453445 - DNA, 15 bp, Homo sapiens
gtgaagtggagattg

SEQ ID NO: 453446 - DNA, 15 bp, Homo sapiens
tgtgaagtggagatt

SEQ ID NO: 453447 - DNA, 15 bp, Homo sapiens
ctgtgaagtggagat

SEQ ID NO: 453448 - DNA, 15 bp, Homo sapiens
cctgtgaagtggaga

SEQ ID NO: 453449 - DNA, 15 bp, Homo sapiens
acctgtgaagtggag

SEQ ID NO: 453450 - DNA, 15 bp, Homo sapiens
aacctgtgaagtgga

SEQ ID NO: 453451 - DNA, 15 bp, Homo sapiens
gaacctgtgaagtgg

SEQ ID NO: 453452 - DNA, 15 bp, Homo sapiens
tgaacctgtgaagtg

SEQ ID NO: 453453 - DNA, 15 bp, Homo sapiens
ttgaacctgtgaagt

SEQ ID NO: 453454 - DNA, 15 bp, Homo sapiens
tttgaacctgtgaag

SEQ ID NO: 453455 - DNA, 15 bp, Homo sapiens
gtttgaacctgtgaa

SEQ ID NO: 453456 - DNA, 15 bp, Homo sapiens
cgtttgaacctgtga

SEQ ID NO: 453457 - DNA, 15 bp, Homo sapiens
tcgtttgaacctgtg

SEQ ID NO: 453458 - DNA, 15 bp, Homo sapiens
atcgtttgaacctgt

SEQ ID NO: 453459 - DNA, 15 bp, Homo sapiens
aatcgtttgaacctg

SEQ ID NO: 453460 - DNA, 15 bp, Homo sapiens
gaatcgtttgaacct

SEQ ID NO: 453461 - DNA, 15 bp, Homo sapiens
agaatcgtttgaacc

SEQ ID NO: 453462 - DNA, 15 bp, Homo sapiens
gagaatcgtttgaac

SEQ ID NO: 453463 - DNA, 15 bp, Homo sapiens
ggagaatcgtttgaa

SEQ ID NO: 453464 - DNA, 15 bp, Homo sapiens
aggagaatcgtttga

SEQ ID NO: 453465 - DNA, 15 bp, Homo sapiens
caggagaatcgtttg

SEQ ID NO: 453466 - DNA, 15 bp, Homo sapiens
gcaggagaatcgttt

SEQ ID NO: 453467 - DNA, 15 bp, Homo sapiens
ggcaggagaatcgtt

SEQ ID NO: 453468 - DNA, 15 bp, Homo sapiens
aggcaggagaatcgt

SEQ ID NO: 453469 - DNA, 15 bp, Homo sapiens
gaggcaggagaatcg

SEQ ID NO: 453470 - DNA, 15 bp, Homo sapiens
tgaggcaggagaatc

SEQ ID NO: 453471 - DNA, 15 bp, Homo sapiens
ctgaggcaggagaat

SEQ ID NO: 453472 - DNA, 15 bp, Homo sapiens
gctgaggcaggagaa

SEQ ID NO: 453473 - DNA, 15 bp, Homo sapiens
ggctgaggcaggaga

SEQ ID NO: 453474 - DNA, 15 bp, Homo sapiens
aggctgaggcaggag

SEQ ID NO: 453475 - DNA, 15 bp, Homo sapiens
gaggctgaggcagga

SEQ ID NO: 453476 - DNA, 15 bp, Homo sapiens
ggaggctgaggcagg

SEQ ID NO: 453477 - DNA, 15 bp, Homo sapiens
tactcaggaggctga

SEQ ID NO: 453478 - DNA, 15 bp, Homo sapiens
ctactcaggaggctg

SEQ ID NO: 453479 - DNA, 15 bp, Homo sapiens
gctactcaggaggct

SEQ ID NO: 453480 - DNA, 15 bp, Homo sapiens
agctactcaggaggc

SEQ ID NO: 453481 - DNA, 15 bp, Homo sapiens
cagctactcaggagg

SEQ ID NO: 453482 - DNA, 15 bp, Homo sapiens
ccagctactcaggag

SEQ ID NO: 453483 - DNA, 15 bp, Homo sapiens
cccagctactcagga

SEQ ID NO: 453484 - DNA, 15 bp, Homo sapiens
tcccagctactcagg

SEQ ID NO: 453485 - DNA, 15 bp, Homo sapiens
atcccagctactcag

SEQ ID NO: 453486 - DNA, 15 bp, Homo sapiens
aatcccagctactca

SEQ ID NO: 453487 - DNA, 15 bp, Homo sapiens
taatcccagctactc

SEQ ID NO: 453488 - DNA, 15 bp, Homo sapiens
gtaatcccagctact

SEQ ID NO: 453489 - DNA, 15 bp, Homo sapiens
tgtaatcccagctac

SEQ ID NO: 453490 - DNA, 15 bp, Homo sapiens
ctgtaatcccagcta

SEQ ID NO: 453491 - DNA, 15 bp, Homo sapiens
cctgtaatcccagct

SEQ ID NO: 453492 - DNA, 15 bp, Homo sapiens
cgcctgtaatcccag

SEQ ID NO: 453493 - DNA, 15 bp, Homo sapiens
gcgcctgtaatccca

SEQ ID NO: 453494 - DNA, 15 bp, Homo sapiens
ggcgcctgtaatccc

SEQ ID NO: 453495 - DNA, 15 bp, Homo sapiens
gggcgcctgtaatcc

SEQ ID NO: 453496 - DNA, 15 bp, Homo sapiens
tgggcgcctgtaatc

SEQ ID NO: 453497 - DNA, 15 bp, Homo sapiens
gtgggcgcctgtaat

SEQ ID NO: 453498 - DNA, 15 bp, Homo sapiens
ggtgggcgcctgtaa

SEQ ID NO: 453499 - DNA, 15 bp, Homo sapiens
tggtgggcgcctgta

SEQ ID NO: 453500 - DNA, 15 bp, Homo sapiens
gtggtgggcgcctgt

SEQ ID NO: 453501 - DNA, 15 bp, Homo sapiens
ggtggtgggcgcctg

SEQ ID NO: 453502 - DNA, 15 bp, Homo sapiens
tggtggtgggcgcct

SEQ ID NO: 453503 - DNA, 15 bp, Homo sapiens
gtggtggtgggcgcc

SEQ ID NO: 453504 - DNA, 15 bp, Homo sapiens
tgtggtggtgggcgc

SEQ ID NO: 453505 - DNA, 15 bp, Homo sapiens
gtgtggtggtgggcg

SEQ ID NO: 453506 - DNA, 15 bp, Homo sapiens
ggtgtggtggtgggc

SEQ ID NO: 453507 - DNA, 15 bp, Homo sapiens
gggtgtggtggtggg

SEQ ID NO: 453508 - DNA, 15 bp, Homo sapiens
cgggtgtggtggtgg

SEQ ID NO: 453509 - DNA, 15 bp, Homo sapiens
tcgggtgtggtggtg

SEQ ID NO: 453510 - DNA, 15 bp, Homo sapiens
gtcgggtgtggtggt

SEQ ID NO: 453511 - DNA, 15 bp, Homo sapiens
cgtcgggtgtggtgg

SEQ ID NO: 453512 - DNA, 15 bp, Homo sapiens
tcgtcgggtgtggtg

SEQ ID NO: 453513 - DNA, 15 bp, Homo sapiens
ttcgtcgggtgtggt

SEQ ID NO: 453514 - DNA, 15 bp, Homo sapiens
attcgtcgggtgtgg

SEQ ID NO: 453515 - DNA, 15 bp, Homo sapiens
aattcgtcgggtgtg

SEQ ID NO: 453516 - DNA, 15 bp, Homo sapiens
aaattcgtcgggtgt

SEQ ID NO: 453517 - DNA, 15 bp, Homo sapiens
aaaattcgtcgggtg

SEQ ID NO: 453518 - DNA, 15 bp, Homo sapiens
aaaaattcgtcgggt

SEQ ID NO: 453519 - DNA, 15 bp, Homo sapiens
caaaaattcgtcggg

SEQ ID NO: 453520 - DNA, 15 bp, Homo sapiens
acaaaaattcgtcgg

SEQ ID NO: 453521 - DNA, 15 bp, Homo sapiens
tacaaaaattcgtcg

SEQ ID NO: 453522 - DNA, 15 bp, Homo sapiens
atacaaaaattcgtc

SEQ ID NO: 453523 - DNA, 15 bp, Homo sapiens
tatacaaaaattcgt

SEQ ID NO: 453524 - DNA, 15 bp, Homo sapiens
atatacaaaaattcg

SEQ ID NO: 453525 - DNA, 15 bp, Homo sapiens
aatatacaaaaattc

SEQ ID NO: 453526 - DNA, 15 bp, Homo sapiens
gaatatacaaaaatt

SEQ ID NO: 453527 - DNA, 15 bp, Homo sapiens
tgaatatacaaaaat

SEQ ID NO: 453528 - DNA, 15 bp, Homo sapiens
ctgaatatacaaaaa

SEQ ID NO: 453529 - DNA, 15 bp, Homo sapiens
actgaatatacaaaa

SEQ ID NO: 453530 - DNA, 15 bp, Homo sapiens
tactgaatatacaaa

SEQ ID NO: 453531 - DNA, 15 bp, Homo sapiens
ctactgaatatacaa

SEQ ID NO: 453532 - DNA, 15 bp, Homo sapiens
tctactgaatataca

SEQ ID NO: 453533 - DNA, 15 bp, Homo sapiens
ctctactgaatatac

SEQ ID NO: 453534 - DNA, 15 bp, Homo sapiens
tctctactgaatata

SEQ ID NO: 453535 - DNA, 15 bp, Homo sapiens
gtctctactgaatat

SEQ ID NO: 453536 - DNA, 15 bp, Homo sapiens
tgtctctactgaata

SEQ ID NO: 453537 - DNA, 15 bp, Homo sapiens
ctgtctctactgaat

SEQ ID NO: 453538 - DNA, 15 bp, Homo sapiens
cctgtctctactgaa

SEQ ID NO: 453539 - DNA, 15 bp, Homo sapiens
ccctgtctctactga

SEQ ID NO: 453540 - DNA, 15 bp, Homo sapiens
accctgtctctactg

SEQ ID NO: 453541 - DNA, 15 bp, Homo sapiens
gaccctgtctctact

SEQ ID NO: 453542 - DNA, 15 bp, Homo sapiens
agaccctgtctctac

SEQ ID NO: 453543 - DNA, 15 bp, Homo sapiens
gagaccctgtctcta

SEQ ID NO: 453544 - DNA, 15 bp, Homo sapiens
tgagaccctgtctct

SEQ ID NO: 453545 - DNA, 15 bp, Homo sapiens
gtgagaccctgtctc

SEQ ID NO: 453546 - DNA, 15 bp, Homo sapiens
ggtgagaccctgtct

SEQ ID NO: 453547 - DNA, 15 bp, Homo sapiens
tggtgagaccctgtc

SEQ ID NO: 453548 - DNA, 15 bp, Homo sapiens
atggtgagaccctgt

SEQ ID NO: 453549 - DNA, 15 bp, Homo sapiens
catggtgagaccctg

SEQ ID NO: 453550 - DNA, 15 bp, Homo sapiens
acatggtgagaccct

SEQ ID NO: 453551 - DNA, 15 bp, Homo sapiens
aacatggtgagaccc

SEQ ID NO: 453552 - DNA, 15 bp, Homo sapiens
caacatggtgagacc

SEQ ID NO: 453553 - DNA, 15 bp, Homo sapiens
ccaacatggtgagac

SEQ ID NO: 453554 - DNA, 15 bp, Homo sapiens
gccaacatggtgaga

SEQ ID NO: 453555 - DNA, 15 bp, Homo sapiens
ggccaacatggtgag

SEQ ID NO: 453556 - DNA, 15 bp, Homo sapiens
tggccaacatggtga

SEQ ID NO: 453557 - DNA, 15 bp, Homo sapiens
ctggccaacatggtg

SEQ ID NO: 453558 - DNA, 15 bp, Homo sapiens
cctggccaacatggt

SEQ ID NO: 453559 - DNA, 15 bp, Homo sapiens
gcctggccaacatgg

SEQ ID NO: 453560 - DNA, 15 bp, Homo sapiens
agcctggccaacatg

SEQ ID NO: 453561 - DNA, 15 bp, Homo sapiens
cagcctggccaacat

SEQ ID NO: 453562 - DNA, 15 bp, Homo sapiens
ccagcctggccaaca

SEQ ID NO: 453563 - DNA, 15 bp, Homo sapiens
accagcctggccaac

SEQ ID NO: 453564 - DNA, 15 bp, Homo sapiens
aaccagcctggccaa

SEQ ID NO: 453565 - DNA, 15 bp, Homo sapiens
aaaccagcctggcca

SEQ ID NO: 453566 - DNA, 15 bp, Homo sapiens
gaaaccagcctggcc

SEQ ID NO: 453567 - DNA, 15 bp, Homo sapiens
cgaaaccagcctggc

SEQ ID NO: 453568 - DNA, 15 bp, Homo sapiens
tcgaaaccagcctgg

SEQ ID NO: 453569 - DNA, 15 bp, Homo sapiens
ttcgaaaccagcctg

SEQ ID NO: 453570 - DNA, 15 bp, Homo sapiens
gttcgaaaccagcct

SEQ ID NO: 453571 - DNA, 15 bp, Homo sapiens
agttcgaaaccagcc

SEQ ID NO: 453572 - DNA, 15 bp, Homo sapiens
cagttcgaaaccagc

SEQ ID NO: 453573 - DNA, 15 bp, Homo sapiens
gcagttcgaaaccag

SEQ ID NO: 453574 - DNA, 15 bp, Homo sapiens
agcagttcgaaacca

SEQ ID NO: 453575 - DNA, 15 bp, Homo sapiens
cagcagttcgaaacc

SEQ ID NO: 453576 - DNA, 15 bp, Homo sapiens
tcagcagttcgaaac

SEQ ID NO: 453577 - DNA, 15 bp, Homo sapiens
gtcagcagttcgaaa

SEQ ID NO: 453578 - DNA, 15 bp, Homo sapiens
ggtcagcagttcgaa

SEQ ID NO: 453579 - DNA, 15 bp, Homo sapiens
aggtcagcagttcga

SEQ ID NO: 453580 - DNA, 15 bp, Homo sapiens
gaggtcagcagttcg

SEQ ID NO: 453581 - DNA, 15 bp, Homo sapiens
tgaggtcagcagttc

SEQ ID NO: 453582 - DNA, 15 bp, Homo sapiens
ttgaggtcagcagtt

SEQ ID NO: 453583 - DNA, 15 bp, Homo sapiens
cttgaggtcagcagt

SEQ ID NO: 453584 - DNA, 15 bp, Homo sapiens
acttgaggtcagcag

SEQ ID NO: 453585 - DNA, 15 bp, Homo sapiens
cacttgaggtcagca

SEQ ID NO: 453586 - DNA, 15 bp, Homo sapiens
tcacttgaggtcagc

SEQ ID NO: 453587 - DNA, 15 bp, Homo sapiens
atcacttgaggtcag

SEQ ID NO: 453588 - DNA, 15 bp, Homo sapiens
gatcacttgaggtca

SEQ ID NO: 453589 - DNA, 15 bp, Homo sapiens
ggatcacttgaggtc

SEQ ID NO: 453590 - DNA, 15 bp, Homo sapiens
cggatcacttgaggt

SEQ ID NO: 453591 - DNA, 15 bp, Homo sapiens
acggatcacttgagg

SEQ ID NO: 453592 - DNA, 15 bp, Homo sapiens
gacggatcacttgag

SEQ ID NO: 453593 - DNA, 15 bp, Homo sapiens
ggacggatcacttga

SEQ ID NO: 453594 - DNA, 15 bp, Homo sapiens
tggacggatcacttg

SEQ ID NO: 453595 - DNA, 15 bp, Homo sapiens
gtggacggatcactt

SEQ ID NO: 453596 - DNA, 15 bp, Homo sapiens
ggtggacggatcact

SEQ ID NO: 453597 - DNA, 15 bp, Homo sapiens
aggtggacggatcac

SEQ ID NO: 453598 - DNA, 15 bp, Homo sapiens
taggtggacggatca

SEQ ID NO: 453599 - DNA, 15 bp, Homo sapiens
ctaggtggacggatc

SEQ ID NO: 453600 - DNA, 15 bp, Homo sapiens
cctaggtggacggat

SEQ ID NO: 453601 - DNA, 15 bp, Homo sapiens
gcctaggtggacgga

SEQ ID NO: 453602 - DNA, 15 bp, Homo sapiens
ggcctaggtggacgg

SEQ ID NO: 453603 - DNA, 15 bp, Homo sapiens
aggcctaggtggacg

SEQ ID NO: 453604 - DNA, 15 bp, Homo sapiens
gaggcctaggtggac

SEQ ID NO: 453605 - DNA, 15 bp, Homo sapiens
ggaggcctaggtgga

SEQ ID NO: 453606 - DNA, 15 bp, Homo sapiens
gggaggcctaggtgg

SEQ ID NO: 453607 - DNA, 15 bp, Homo sapiens
tgggaggcctaggtg

SEQ ID NO: 453608 - DNA, 15 bp, Homo sapiens
ttgggaggcctaggt

SEQ ID NO: 453609 - DNA, 15 bp, Homo sapiens
tttgggaggcctagg

SEQ ID NO: 453610 - DNA, 15 bp, Homo sapiens
ctttgggaggcctag

SEQ ID NO: 453611 - DNA, 15 bp, Homo sapiens
actttgggaggccta

SEQ ID NO: 453612 - DNA, 15 bp, Homo sapiens
cactttgggaggcct

SEQ ID NO: 453613 - DNA, 15 bp, Homo sapiens
gcactttgggaggcc

SEQ ID NO: 453614 - DNA, 15 bp, Homo sapiens
agcactttgggaggc

SEQ ID NO: 453615 - DNA, 15 bp, Homo sapiens
cagcactttgggagg

SEQ ID NO: 453616 - DNA, 15 bp, Homo sapiens
ccagcactttgggag

SEQ ID NO: 453617 - DNA, 15 bp, Homo sapiens
cccagcactttggga

SEQ ID NO: 453618 - DNA, 15 bp, Homo sapiens
tcccagcactttggg

SEQ ID NO: 453619 - DNA, 15 bp, Homo sapiens
tatgcctgtaatccc

SEQ ID NO: 453620 - DNA, 15 bp, Homo sapiens
ttatgcctgtaatcc

SEQ ID NO: 453621 - DNA, 15 bp, Homo sapiens
cttatgcctgtaatc

SEQ ID NO: 453622 - DNA, 15 bp, Homo sapiens
gcttatgcctgtaat

SEQ ID NO: 453623 - DNA, 15 bp, Homo sapiens
ggcttatgcctgtaa

SEQ ID NO: 453624 - DNA, 15 bp, Homo sapiens
tggcttatgcctgta

SEQ ID NO: 453625 - DNA, 15 bp, Homo sapiens
gtggcttatgcctgt

SEQ ID NO: 453626 - DNA, 15 bp, Homo sapiens
ggtggcttatgcctg

SEQ ID NO: 453627 - DNA, 15 bp, Homo sapiens
cggtggcttatgcct

SEQ ID NO: 453628 - DNA, 15 bp, Homo sapiens
acggtggcttatgcc

SEQ ID NO: 453629 - DNA, 15 bp, Homo sapiens
cacggtggcttatgc

SEQ ID NO: 453630 - DNA, 15 bp, Homo sapiens
gcacggtggcttatg

SEQ ID NO: 453631 - DNA, 15 bp, Homo sapiens
ggcacggtggcttat

SEQ ID NO: 453632 - DNA, 15 bp, Homo sapiens
gggcacggtggctta

SEQ ID NO: 453633 - DNA, 15 bp, Homo sapiens
tgggcacggtggctt

SEQ ID NO: 453634 - DNA, 15 bp, Homo sapiens
ctgggcacggtggct

SEQ ID NO: 453635 - DNA, 15 bp, Homo sapiens
gctgggcacggtggc

SEQ ID NO: 453636 - DNA, 15 bp, Homo sapiens
ggctgggcacggtgg

SEQ ID NO: 453637 - DNA, 15 bp, Homo sapiens
aggctgggcacggtg

SEQ ID NO: 453638 - DNA, 15 bp, Homo sapiens
taggctgggcacggt

SEQ ID NO: 453639 - DNA, 15 bp, Homo sapiens
ttaggctgggcacgg

SEQ ID NO: 453640 - DNA, 15 bp, Homo sapiens
tttaggctgggcacg

SEQ ID NO: 453641 - DNA, 15 bp, Homo sapiens
atttaggctgggcac

SEQ ID NO: 453642 - DNA, 15 bp, Homo sapiens
aatttaggctgggca

SEQ ID NO: 453643 - DNA, 15 bp, Homo sapiens
aaatttaggctgggc

SEQ ID NO: 453644 - DNA, 15 bp, Homo sapiens
aaaatttaggctggg

SEQ ID NO: 453645 - DNA, 15 bp, Homo sapiens
gaaaatttaggctgg

SEQ ID NO: 453646 - DNA, 15 bp, Homo sapiens
agaaaatttaggctg

SEQ ID NO: 453647 - DNA, 15 bp, Homo sapiens
aagaaaatttaggct

SEQ ID NO: 453648 - DNA, 15 bp, Homo sapiens
aaagaaaatttaggc

SEQ ID NO: 453649 - DNA, 15 bp, Homo sapiens
aaaagaaaatttagg

SEQ ID NO: 453650 - DNA, 15 bp, Homo sapiens
aaaaagaaaatttag

SEQ ID NO: 453651 - DNA, 15 bp, Homo sapiens
aaaaaagaaaattta

SEQ ID NO: 453652 - DNA, 15 bp, Homo sapiens
caaaaaagaaaattt

SEQ ID NO: 453653 - DNA, 15 bp, Homo sapiens
tcaaaaaagaaaatt

SEQ ID NO: 453654 - DNA, 15 bp, Homo sapiens
ttcaaaaaagaaaat

SEQ ID NO: 453655 - DNA, 15 bp, Homo sapiens
cttcaaaaaagaaaa

SEQ ID NO: 453656 - DNA, 15 bp, Homo sapiens
acttcaaaaaagaaa

SEQ ID NO: 453657 - DNA, 15 bp, Homo sapiens
aacttcaaaaaagaa

SEQ ID NO: 453658 - DNA, 15 bp, Homo sapiens
aaacttcaaaaaaga

SEQ ID NO: 453659 - DNA, 15 bp, Homo sapiens
aaaacttcaaaaaag

SEQ ID NO: 453660 - DNA, 15 bp, Homo sapiens
gaaaacttcaaaaaa

SEQ ID NO: 453661 - DNA, 15 bp, Homo sapiens
tgaaaacttcaaaaa

SEQ ID NO: 453662 - DNA, 15 bp, Homo sapiens
ttgaaaacttcaaaa

SEQ ID NO: 453663 - DNA, 15 bp, Homo sapiens
tttgaaaacttcaaa

SEQ ID NO: 453664 - DNA, 15 bp, Homo sapiens
atttgaaaacttcaa

SEQ ID NO: 453665 - DNA, 15 bp, Homo sapiens
tatttgaaaacttca

SEQ ID NO: 453666 - DNA, 15 bp, Homo sapiens
atatttgaaaacttc

SEQ ID NO: 453667 - DNA, 15 bp, Homo sapiens
aatatttgaaaactt

SEQ ID NO: 453668 - DNA, 15 bp, Homo sapiens
gaatatttgaaaact

SEQ ID NO: 453669 - DNA, 15 bp, Homo sapiens
agaatatttgaaaac

SEQ ID NO: 453670 - DNA, 15 bp, Homo sapiens
tagaatatttgaaaa

SEQ ID NO: 453671 - DNA, 15 bp, Homo sapiens
ttagaatatttgaaa

SEQ ID NO: 453672 - DNA, 15 bp, Homo sapiens
tttagaatatttgaa

SEQ ID NO: 453673 - DNA, 15 bp, Homo sapiens
ttttagaatatttga

SEQ ID NO: 453674 - DNA, 15 bp, Homo sapiens
gttttagaatatttg

SEQ ID NO: 453675 - DNA, 15 bp, Homo sapiens
tgttttagaatattt

SEQ ID NO: 453676 - DNA, 15 bp, Homo sapiens
ctgttttagaatatt

SEQ ID NO: 453677 - DNA, 15 bp, Homo sapiens
gctgttttagaatat

SEQ ID NO: 453678 - DNA, 15 bp, Homo sapiens
agctgttttagaata

SEQ ID NO: 453679 - DNA, 15 bp, Homo sapiens
tagctgttttagaat

SEQ ID NO: 453680 - DNA, 15 bp, Homo sapiens
atagctgttttagaa

SEQ ID NO: 453681 - DNA, 15 bp, Homo sapiens
tatagctgttttaga

SEQ ID NO: 453682 - DNA, 15 bp, Homo sapiens
ctatagctgttttag

SEQ ID NO: 453683 - DNA, 15 bp, Homo sapiens
actatagctgtttta

SEQ ID NO: 453684 - DNA, 15 bp, Homo sapiens
tactatagctgtttt

SEQ ID NO: 453685 - DNA, 15 bp, Homo sapiens
ttactatagctgttt

SEQ ID NO: 453686 - DNA, 15 bp, Homo sapiens
cttactatagctgtt

SEQ ID NO: 453687 - DNA, 15 bp, Homo sapiens
acttactatagctgt

SEQ ID NO: 453688 - DNA, 15 bp, Homo sapiens
aacttactatagctg

SEQ ID NO: 453689 - DNA, 15 bp, Homo sapiens
aaacttactatagct

SEQ ID NO: 453690 - DNA, 15 bp, Homo sapiens
caaacttactatagc

SEQ ID NO: 453691 - DNA, 15 bp, Homo sapiens
tcaaacttactatag

SEQ ID NO: 453692 - DNA, 15 bp, Homo sapiens
ttcaaacttactata

SEQ ID NO: 453693 - DNA, 15 bp, Homo sapiens
tttcaaacttactat

SEQ ID NO: 453694 - DNA, 15 bp, Homo sapiens
ttttcaaacttacta

SEQ ID NO: 453695 - DNA, 15 bp, Homo sapiens
tttttcaaacttact

SEQ ID NO: 453696 - DNA, 15 bp, Homo sapiens
gtttttcaaacttac

SEQ ID NO: 453697 - DNA, 15 bp, Homo sapiens
agtttttcaaactta

SEQ ID NO: 453698 - DNA, 15 bp, Homo sapiens
aagtttttcaaactt

SEQ ID NO: 453699 - DNA, 15 bp, Homo sapiens
aaagtttttcaaact

SEQ ID NO: 453700 - DNA, 15 bp, Homo sapiens
aaaagtttttcaaac

SEQ ID NO: 453701 - DNA, 15 bp, Homo sapiens
aaaaagtttttcaaa

SEQ ID NO: 453702 - DNA, 15 bp, Homo sapiens
gaaaaagtttttcaa

SEQ ID NO: 453703 - DNA, 15 bp, Homo sapiens
tgaaaaagtttttca

SEQ ID NO: 453704 - DNA, 15 bp, Homo sapiens
atgaaaaagtttttc

SEQ ID NO: 453705 - DNA, 15 bp, Homo sapiens
tatgaaaaagttttt

SEQ ID NO: 453706 - DNA, 15 bp, Homo sapiens
ttatgaaaaagtttt

SEQ ID NO: 453707 - DNA, 15 bp, Homo sapiens
cttatgaaaaagttt

SEQ ID NO: 453708 - DNA, 15 bp, Homo sapiens
tcttatgaaaaagtt

SEQ ID NO: 453709 - DNA, 15 bp, Homo sapiens
ttcttatgaaaaagt

SEQ ID NO: 453710 - DNA, 15 bp, Homo sapiens
attcttatgaaaaag

SEQ ID NO: 453711 - DNA, 15 bp, Homo sapiens
cattcttatgaaaaa

SEQ ID NO: 453712 - DNA, 15 bp, Homo sapiens
tcattcttatgaaaa

SEQ ID NO: 453713 - DNA, 15 bp, Homo sapiens
ttcattcttatgaaa

SEQ ID NO: 453714 - DNA, 15 bp, Homo sapiens
cttcattcttatgaa

SEQ ID NO: 453715 - DNA, 15 bp, Homo sapiens
tcttcattcttatga

SEQ ID NO: 453716 - DNA, 15 bp, Homo sapiens
atcttcattcttatg

SEQ ID NO: 453717 - DNA, 15 bp, Homo sapiens
tatcttcattcttat

SEQ ID NO: 453718 - DNA, 15 bp, Homo sapiens
atatcttcattctta

SEQ ID NO: 453719 - DNA, 15 bp, Homo sapiens
tatatcttcattctt

SEQ ID NO: 453720 - DNA, 15 bp, Homo sapiens
ttatatcttcattct

SEQ ID NO: 453721 - DNA, 15 bp, Homo sapiens
tttatatcttcattc

SEQ ID NO: 453722 - DNA, 15 bp, Homo sapiens
ctttatatcttcatt

SEQ ID NO: 453723 - DNA, 15 bp, Homo sapiens
tctttatatcttcat

SEQ ID NO: 453724 - DNA, 15 bp, Homo sapiens
ttctttatatcttca

SEQ ID NO: 453725 - DNA, 15 bp, Homo sapiens
gttctttatatcttc

SEQ ID NO: 453726 - DNA, 15 bp, Homo sapiens
tgttctttatatctt

SEQ ID NO: 453727 - DNA, 15 bp, Homo sapiens
ttgttctttatatct

SEQ ID NO: 453728 - DNA, 15 bp, Homo sapiens
attgttctttatatc

SEQ ID NO: 453729 - DNA, 15 bp, Homo sapiens
aattgttctttatat

SEQ ID NO: 453730 - DNA, 15 bp, Homo sapiens
taattgttctttata

SEQ ID NO: 453731 - DNA, 15 bp, Homo sapiens
ttaattgttctttat

SEQ ID NO: 453732 - DNA, 15 bp, Homo sapiens
tttaattgttcttta

SEQ ID NO: 453733 - DNA, 15 bp, Homo sapiens
ttttaattgttcttt

SEQ ID NO: 453734 - DNA, 15 bp, Homo sapiens
attttaattgttctt

SEQ ID NO: 453735 - DNA, 15 bp, Homo sapiens
aattttaattgttct

SEQ ID NO: 453736 - DNA, 15 bp, Homo sapiens
taattttaattgttc

SEQ ID NO: 453737 - DNA, 15 bp, Homo sapiens
ataattttaattgtt

SEQ ID NO: 453738 - DNA, 15 bp, Homo sapiens
aataattttaattgt

SEQ ID NO: 453739 - DNA, 15 bp, Homo sapiens
aaataattttaattg

SEQ ID NO: 453740 - DNA, 15 bp, Homo sapiens
taaataattttaatt

SEQ ID NO: 453741 - DNA, 15 bp, Homo sapiens
ttaaataattttaat

SEQ ID NO: 453742 - DNA, 15 bp, Homo sapiens
tttaaataattttaa

SEQ ID NO: 453743 - DNA, 15 bp, Homo sapiens
gtttaaataatttta

SEQ ID NO: 453744 - DNA, 15 bp, Homo sapiens
tgtttaaataatttt

SEQ ID NO: 453745 - DNA, 15 bp, Homo sapiens
ttgtttaaataattt

SEQ ID NO: 453746 - DNA, 15 bp, Homo sapiens
tttgtttaaataatt

SEQ ID NO: 453747 - DNA, 15 bp, Homo sapiens
ttttgtttaaataat

SEQ ID NO: 453748 - DNA, 15 bp, Homo sapiens
tttttgtttaaataa

SEQ ID NO: 453749 - DNA, 15 bp, Homo sapiens
ctttttgtttaaata

SEQ ID NO: 453750 - DNA, 15 bp, Homo sapiens
gctttttgtttaaat

SEQ ID NO: 453751 - DNA, 15 bp, Homo sapiens
ggctttttgtttaaa

SEQ ID NO: 453752 - DNA, 15 bp, Homo sapiens
gggctttttgtttaa

SEQ ID NO: 453753 - DNA, 15 bp, Homo sapiens
agggctttttgttta

SEQ ID NO: 453754 - DNA, 15 bp, Homo sapiens
gagggctttttgttt

SEQ ID NO: 453755 - DNA, 15 bp, Homo sapiens
tgagggctttttgtt

SEQ ID NO: 453756 - DNA, 15 bp, Homo sapiens
atgagggctttttgt

SEQ ID NO: 453757 - DNA, 15 bp, Homo sapiens
aatgagggctttttg

SEQ ID NO: 453758 - DNA, 15 bp, Homo sapiens
taatgagggcttttt

SEQ ID NO: 453759 - DNA, 15 bp, Homo sapiens
ctaatgagggctttt

SEQ ID NO: 453760 - DNA, 15 bp, Homo sapiens
tctaatgagggcttt

SEQ ID NO: 453761 - DNA, 15 bp, Homo sapiens
ttctaatgagggctt

SEQ ID NO: 453762 - DNA, 15 bp, Homo sapiens
gttctaatgagggct

SEQ ID NO: 453763 - DNA, 15 bp, Homo sapiens
tgttctaatgagggc

SEQ ID NO: 453764 - DNA, 15 bp, Homo sapiens
gtgttctaatgaggg

SEQ ID NO: 453765 - DNA, 15 bp, Homo sapiens
tgtgttctaatgagg

SEQ ID NO: 453766 - DNA, 15 bp, Homo sapiens
atgtgttctaatgag

SEQ ID NO: 453767 - DNA, 15 bp, Homo sapiens
aatgtgttctaatga

SEQ ID NO: 453768 - DNA, 15 bp, Homo sapiens
taatgtgttctaatg

SEQ ID NO: 453769 - DNA, 15 bp, Homo sapiens
ataatgtgttctaat

SEQ ID NO: 453770 - DNA, 15 bp, Homo sapiens
aataatgtgttctaa

SEQ ID NO: 453771 - DNA, 15 bp, Homo sapiens
gaataatgtgttcta

SEQ ID NO: 453772 - DNA, 15 bp, Homo sapiens
agaataatgtgttct

SEQ ID NO: 453773 - DNA, 15 bp, Homo sapiens
cagaataatgtgttc

SEQ ID NO: 453774 - DNA, 15 bp, Homo sapiens
acagaataatgtgtt

SEQ ID NO: 453775 - DNA, 15 bp, Homo sapiens
tacagaataatgtgt

SEQ ID NO: 453776 - DNA, 15 bp, Homo sapiens
ttacagaataatgtg

SEQ ID NO: 453777 - DNA, 15 bp, Homo sapiens
tttacagaataatgt

SEQ ID NO: 453778 - DNA, 15 bp, Homo sapiens
atttacagaataatg

SEQ ID NO: 453779 - DNA, 15 bp, Homo sapiens
aatttacagaataat

SEQ ID NO: 453780 - DNA, 15 bp, Homo sapiens
taatttacagaataa

SEQ ID NO: 453781 - DNA, 15 bp, Homo sapiens
ataatttacagaata

SEQ ID NO: 453782 - DNA, 15 bp, Homo sapiens
cataatttacagaat

SEQ ID NO: 453783 - DNA, 15 bp, Homo sapiens
acataatttacagaa

SEQ ID NO: 453784 - DNA, 15 bp, Homo sapiens
aacataatttacaga

SEQ ID NO: 453785 - DNA, 15 bp, Homo sapiens
aaacataatttacag

SEQ ID NO: 453786 - DNA, 15 bp, Homo sapiens
ggagagaactggaaa

SEQ ID NO: 453787 - DNA, 15 bp, Homo sapiens
cggagagaactggaa

SEQ ID NO: 453788 - DNA, 15 bp, Homo sapiens
ccggagagaactgga

SEQ ID NO: 453789 - DNA, 15 bp, Homo sapiens
gccggagagaactgg

SEQ ID NO: 453790 - DNA, 15 bp, Homo sapiens
ggccggagagaactg

SEQ ID NO: 453791 - DNA, 15 bp, Homo sapiens
tggccggagagaact

SEQ ID NO: 453792 - DNA, 15 bp, Homo sapiens
ctggccggagagaac

SEQ ID NO: 453793 - DNA, 15 bp, Homo sapiens
gctggccggagagaa

SEQ ID NO: 453794 - DNA, 15 bp, Homo sapiens
tgctggccggagaga

SEQ ID NO: 453795 - DNA, 15 bp, Homo sapiens
gtgctggccggagag

SEQ ID NO: 453796 - DNA, 15 bp, Homo sapiens
tgtgctggccggaga

SEQ ID NO: 453797 - DNA, 15 bp, Homo sapiens
ctgtgctggccggag

SEQ ID NO: 453798 - DNA, 15 bp, Homo sapiens
actgtgctggccgga

SEQ ID NO: 453799 - DNA, 15 bp, Homo sapiens
aactgtgctggccgg

SEQ ID NO: 453800 - DNA, 15 bp, Homo sapiens
aaactgtgctggccg

SEQ ID NO: 453801 - DNA, 15 bp, Homo sapiens
gaaactgtgctggcc

SEQ ID NO: 453802 - DNA, 15 bp, Homo sapiens
tgaaactgtgctggc

SEQ ID NO: 453803 - DNA, 15 bp, Homo sapiens
gtgaaactgtgctgg

SEQ ID NO: 453804 - DNA, 15 bp, Homo sapiens
agtgaaactgtgctg

SEQ ID NO: 453805 - DNA, 15 bp, Homo sapiens
aagtgaaactgtgct

SEQ ID NO: 453806 - DNA, 15 bp, Homo sapiens
gaagtgaaactgtgc

SEQ ID NO: 453807 - DNA, 15 bp, Homo sapiens
tgaagtgaaactgtg

SEQ ID NO: 453808 - DNA, 15 bp, Homo sapiens
ctgaagtgaaactgt

SEQ ID NO: 453809 - DNA, 15 bp, Homo sapiens
cctgaagtgaaactg

SEQ ID NO: 453810 - DNA, 15 bp, Homo sapiens
ccctgaagtgaaact

SEQ ID NO: 453811 - DNA, 15 bp, Homo sapiens
tccctgaagtgaaac

SEQ ID NO: 453812 - DNA, 15 bp, Homo sapiens
ttccctgaagtgaaa

SEQ ID NO: 453813 - DNA, 15 bp, Homo sapiens
tttccctgaagtgaa

SEQ ID NO: 453814 - DNA, 15 bp, Homo sapiens
ctttccctgaagtga

SEQ ID NO: 453815 - DNA, 15 bp, Homo sapiens
cctttccctgaagtg

SEQ ID NO: 453816 - DNA, 15 bp, Homo sapiens
acctttccctgaagt

SEQ ID NO: 453817 - DNA, 15 bp, Homo sapiens
aacctttccctgaag

SEQ ID NO: 453818 - DNA, 15 bp, Homo sapiens
aaacctttccctgaa

SEQ ID NO: 453819 - DNA, 15 bp, Homo sapiens
caaacctttccctga

SEQ ID NO: 453820 - DNA, 15 bp, Homo sapiens
ccaaacctttccctg

SEQ ID NO: 453821 - DNA, 15 bp, Homo sapiens
cccaaacctttccct

SEQ ID NO: 453822 - DNA, 15 bp, Homo sapiens
ccccaaacctttccc

SEQ ID NO: 453823 - DNA, 15 bp, Homo sapiens
accccaaacctttcc

SEQ ID NO: 453824 - DNA, 15 bp, Homo sapiens
caccccaaacctttc

SEQ ID NO: 453825 - DNA, 15 bp, Homo sapiens
tcaccccaaaccttt

SEQ ID NO: 453826 - DNA, 15 bp, Homo sapiens
ttcaccccaaacctt

SEQ ID NO: 453827 - DNA, 15 bp, Homo sapiens
cttcaccccaaacct

SEQ ID NO: 453828 - DNA, 15 bp, Homo sapiens
gcttcaccccaaacc

SEQ ID NO: 453829 - DNA, 15 bp, Homo sapiens
tgcttcaccccaaac

SEQ ID NO: 453830 - DNA, 15 bp, Homo sapiens
ttgcttcaccccaaa

SEQ ID NO: 453831 - DNA, 15 bp, Homo sapiens
tttgcttcaccccaa

SEQ ID NO: 453832 - DNA, 15 bp, Homo sapiens
gtttgcttcacccca

SEQ ID NO: 453833 - DNA, 15 bp, Homo sapiens
tgtttgcttcacccc

SEQ ID NO: 453834 - DNA, 15 bp, Homo sapiens
ctgtttgcttcaccc

SEQ ID NO: 453835 - DNA, 15 bp, Homo sapiens
actgtttgcttcacc

SEQ ID NO: 453836 - DNA, 15 bp, Homo sapiens
cactgtttgcttcac

SEQ ID NO: 453837 - DNA, 15 bp, Homo sapiens
gcactgtttgcttca

SEQ ID NO: 453838 - DNA, 15 bp, Homo sapiens
ggcactgtttgcttc

SEQ ID NO: 453839 - DNA, 15 bp, Homo sapiens
aggcactgtttgctt

SEQ ID NO: 453840 - DNA, 15 bp, Homo sapiens
gaggcactgtttgct

SEQ ID NO: 453841 - DNA, 15 bp, Homo sapiens
tgaggcactgtttgc

SEQ ID NO: 453842 - DNA, 15 bp, Homo sapiens
ctgaggcactgtttg

SEQ ID NO: 453843 - DNA, 15 bp, Homo sapiens
tctgaggcactgttt

SEQ ID NO: 453844 - DNA, 15 bp, Homo sapiens
ctctgaggcactgtt

SEQ ID NO: 453845 - DNA, 15 bp, Homo sapiens
tctctgaggcactgt

SEQ ID NO: 453846 - DNA, 15 bp, Homo sapiens
ctctctgaggcactg

SEQ ID NO: 453847 - DNA, 15 bp, Homo sapiens
cctctctgaggcact

SEQ ID NO: 453848 - DNA, 15 bp, Homo sapiens
acctctctgaggcac

SEQ ID NO: 453849 - DNA, 15 bp, Homo sapiens
tacctctctgaggca

SEQ ID NO: 453850 - DNA, 15 bp, Homo sapiens
gtacctctctgaggc

SEQ ID NO: 453851 - DNA, 15 bp, Homo sapiens
tgtacctctctgagg

SEQ ID NO: 453852 - DNA, 15 bp, Homo sapiens
atgtacctctctgag

SEQ ID NO: 453853 - DNA, 15 bp, Homo sapiens
aatgtacctctctga

SEQ ID NO: 453854 - DNA, 15 bp, Homo sapiens
caatgtacctctctg

SEQ ID NO: 453855 - DNA, 15 bp, Homo sapiens
ccaatgtacctctct

SEQ ID NO: 453856 - DNA, 15 bp, Homo sapiens
cccaatgtacctctc

SEQ ID NO: 453857 - DNA, 15 bp, Homo sapiens
tcccaatgtacctct

SEQ ID NO: 453858 - DNA, 15 bp, Homo sapiens
ttcccaatgtacctc

SEQ ID NO: 453859 - DNA, 15 bp, Homo sapiens
cttcccaatgtacct

SEQ ID NO: 453860 - DNA, 15 bp, Homo sapiens
ccttcccaatgtacc

SEQ ID NO: 453861 - DNA, 15 bp, Homo sapiens
cccttcccaatgtac

SEQ ID NO: 453862 - DNA, 15 bp, Homo sapiens
acccttcccaatgta

SEQ ID NO: 453863 - DNA, 15 bp, Homo sapiens
tacccttcccaatgt

SEQ ID NO: 453864 - DNA, 15 bp, Homo sapiens
gtacccttcccaatg

SEQ ID NO: 453865 - DNA, 15 bp, Homo sapiens
tgtacccttcccaat

SEQ ID NO: 453866 - DNA, 15 bp, Homo sapiens
atgtacccttcccaa

SEQ ID NO: 453867 - DNA, 15 bp, Homo sapiens
tatgtacccttccca

SEQ ID NO: 453868 - DNA, 15 bp, Homo sapiens
ttatgtacccttccc

SEQ ID NO: 453869 - DNA, 15 bp, Homo sapiens
cttatgtacccttcc

SEQ ID NO: 453870 - DNA, 15 bp, Homo sapiens
ccttatgtacccttc

SEQ ID NO: 453871 - DNA, 15 bp, Homo sapiens
cccttatgtaccctt

SEQ ID NO: 453872 - DNA, 15 bp, Homo sapiens
acccttatgtaccct

SEQ ID NO: 453873 - DNA, 15 bp, Homo sapiens
gacccttatgtaccc

SEQ ID NO: 453874 - DNA, 15 bp, Homo sapiens
agacccttatgtacc

SEQ ID NO: 453875 - DNA, 15 bp, Homo sapiens
cagacccttatgtac

SEQ ID NO: 453876 - DNA, 15 bp, Homo sapiens
acagacccttatgta

SEQ ID NO: 453877 - DNA, 15 bp, Homo sapiens
tacagacccttatgt

SEQ ID NO: 453878 - DNA, 15 bp, Homo sapiens
ctacagacccttatg

SEQ ID NO: 453879 - DNA, 15 bp, Homo sapiens
cctacagacccttat

SEQ ID NO: 453880 - DNA, 15 bp, Homo sapiens
acctacagaccctta

SEQ ID NO: 453881 - DNA, 15 bp, Homo sapiens
gacctacagaccctt

SEQ ID NO: 453882 - DNA, 15 bp, Homo sapiens
agacctacagaccct

SEQ ID NO: 453883 - DNA, 15 bp, Homo sapiens
tagacctacagaccc

SEQ ID NO: 453884 - DNA, 15 bp, Homo sapiens
ctagacctacagacc

SEQ ID NO: 453885 - DNA, 15 bp, Homo sapiens
cctagacctacagac

SEQ ID NO: 453886 - DNA, 15 bp, Homo sapiens
ccctagacctacaga

SEQ ID NO: 453887 - DNA, 15 bp, Homo sapiens
cccctagacctacag

SEQ ID NO: 453888 - DNA, 15 bp, Homo sapiens
acccctagacctaca

SEQ ID NO: 453889 - DNA, 15 bp, Homo sapiens
gacccctagacctac

SEQ ID NO: 453890 - DNA, 15 bp, Homo sapiens
tgacccctagaccta

SEQ ID NO: 453891 - DNA, 15 bp, Homo sapiens
ttgacccctagacct

SEQ ID NO: 453892 - DNA, 15 bp, Homo sapiens
cttgacccctagacc

SEQ ID NO: 453893 - DNA, 15 bp, Homo sapiens
acttgacccctagac

SEQ ID NO: 453894 - DNA, 15 bp, Homo sapiens
aacttgacccctaga

SEQ ID NO: 453895 - DNA, 15 bp, Homo sapiens
aaacttgacccctag

SEQ ID NO: 453896 - DNA, 15 bp, Homo sapiens
gaaacttgaccccta

SEQ ID NO: 453897 - DNA, 15 bp, Homo sapiens
agaaacttgacccct

SEQ ID NO: 453898 - DNA, 15 bp, Homo sapiens
tagaaacttgacccc

SEQ ID NO: 453899 - DNA, 15 bp, Homo sapiens
ttagaaacttgaccc

SEQ ID NO: 453900 - DNA, 15 bp, Homo sapiens
attagaaacttgacc

SEQ ID NO: 453901 - DNA, 15 bp, Homo sapiens
tattagaaacttgac

SEQ ID NO: 453902 - DNA, 15 bp, Homo sapiens
gtattagaaacttga

SEQ ID NO: 453903 - DNA, 15 bp, Homo sapiens
agtattagaaacttg

SEQ ID NO: 453904 - DNA, 15 bp, Homo sapiens
gagtattagaaactt

SEQ ID NO: 453905 - DNA, 15 bp, Homo sapiens
ggagtattagaaact

SEQ ID NO: 453906 - DNA, 15 bp, Homo sapiens
aggagtattagaaac

SEQ ID NO: 453907 - DNA, 15 bp, Homo sapiens
caggagtattagaaa

SEQ ID NO: 453908 - DNA, 15 bp, Homo sapiens
tcaggagtattagaa

SEQ ID NO: 453909 - DNA, 15 bp, Homo sapiens
ttcaggagtattaga

SEQ ID NO: 453910 - DNA, 15 bp, Homo sapiens
gttcaggagtattag

SEQ ID NO: 453911 - DNA, 15 bp, Homo sapiens
agttcaggagtatta

SEQ ID NO: 453912 - DNA, 15 bp, Homo sapiens
cagttcaggagtatt

SEQ ID NO: 453913 - DNA, 15 bp, Homo sapiens
ccagttcaggagtat

SEQ ID NO: 453914 - DNA, 15 bp, Homo sapiens
cccagttcaggagta

SEQ ID NO: 453915 - DNA, 15 bp, Homo sapiens
tcccagttcaggagt

SEQ ID NO: 453916 - DNA, 15 bp, Homo sapiens
ctcccagttcaggag

SEQ ID NO: 453917 - DNA, 15 bp, Homo sapiens
cctcccagttcagga

SEQ ID NO: 453918 - DNA, 15 bp, Homo sapiens
acctcccagttcagg

SEQ ID NO: 453919 - DNA, 15 bp, Homo sapiens
tacctcccagttcag

SEQ ID NO: 453920 - DNA, 15 bp, Homo sapiens
ctacctcccagttca

SEQ ID NO: 453921 - DNA, 15 bp, Homo sapiens
gctacctcccagttc

SEQ ID NO: 453922 - DNA, 15 bp, Homo sapiens
ggctacctcccagtt

SEQ ID NO: 453923 - DNA, 15 bp, Homo sapiens
aggctacctcccagt

SEQ ID NO: 453924 - DNA, 15 bp, Homo sapiens
gaggctacctcccag

SEQ ID NO: 453925 - DNA, 15 bp, Homo sapiens
ggaggctacctccca

SEQ ID NO: 453926 - DNA, 15 bp, Homo sapiens
tggaggctacctccc

SEQ ID NO: 453927 - DNA, 15 bp, Homo sapiens
ttggaggctacctcc

SEQ ID NO: 453928 - DNA, 15 bp, Homo sapiens
cttggaggctacctc

SEQ ID NO: 453929 - DNA, 15 bp, Homo sapiens
gcttggaggctacct

SEQ ID NO: 453930 - DNA, 15 bp, Homo sapiens
ggcttggaggctacc

SEQ ID NO: 453931 - DNA, 15 bp, Homo sapiens
aggcttggaggctac

SEQ ID NO: 453932 - DNA, 15 bp, Homo sapiens
aaggcttggaggcta

SEQ ID NO: 453933 - DNA, 15 bp, Homo sapiens
caaggcttggaggct

SEQ ID NO: 453934 - DNA, 15 bp, Homo sapiens
ccaaggcttggaggc

SEQ ID NO: 453935 - DNA, 15 bp, Homo sapiens
accaaggcttggagg

SEQ ID NO: 453936 - DNA, 15 bp, Homo sapiens
gaccaaggcttggag

SEQ ID NO: 453937 - DNA, 15 bp, Homo sapiens
tgaccaaggcttgga

SEQ ID NO: 453938 - DNA, 15 bp, Homo sapiens
atgaccaaggcttgg

SEQ ID NO: 453939 - DNA, 15 bp, Homo sapiens
aatgaccaaggcttg

SEQ ID NO: 453940 - DNA, 15 bp, Homo sapiens
aaatgaccaaggctt

SEQ ID NO: 453941 - DNA, 15 bp, Homo sapiens
taaatgaccaaggct

SEQ ID NO: 453942 - DNA, 15 bp, Homo sapiens
ttaaatgaccaaggc

SEQ ID NO: 453943 - DNA, 15 bp, Homo sapiens
tttaaatgaccaagg

SEQ ID NO: 453944 - DNA, 15 bp, Homo sapiens
atttaaatgaccaag

SEQ ID NO: 453945 - DNA, 15 bp, Homo sapiens
tatttaaatgaccaa

SEQ ID NO: 453946 - DNA, 15 bp, Homo sapiens
ttatttaaatgacca

SEQ ID NO: 453947 - DNA, 15 bp, Homo sapiens
attatttaaatgacc

SEQ ID NO: 453948 - DNA, 15 bp, Homo sapiens
aattatttaaatgac

SEQ ID NO: 453949 - DNA, 15 bp, Homo sapiens
taattatttaaatga

SEQ ID NO: 453950 - DNA, 15 bp, Homo sapiens
ttaattatttaaatg

SEQ ID NO: 453951 - DNA, 15 bp, Homo sapiens
tttaattatttaaat

SEQ ID NO: 453952 - DNA, 15 bp, Homo sapiens
ttttaattatttaaa

SEQ ID NO: 453953 - DNA, 15 bp, Homo sapiens
tttttaattatttaa

SEQ ID NO: 453954 - DNA, 15 bp, Homo sapiens
gtttttaattattta

SEQ ID NO: 453955 - DNA, 15 bp, Homo sapiens
tgtttttaattattt

SEQ ID NO: 453956 - DNA, 15 bp, Homo sapiens
ttgtttttaattatt

SEQ ID NO: 453957 - DNA, 15 bp, Homo sapiens
attgtttttaattat

SEQ ID NO: 453958 - DNA, 15 bp, Homo sapiens
cattgtttttaatta

SEQ ID NO: 453959 - DNA, 15 bp, Homo sapiens
acattgtttttaatt

SEQ ID NO: 453960 - DNA, 15 bp, Homo sapiens
gacattgtttttaat

SEQ ID NO: 453961 - DNA, 15 bp, Homo sapiens
agacattgtttttaa

SEQ ID NO: 453962 - DNA, 15 bp, Homo sapiens
gagacattgttttta

SEQ ID NO: 453963 - DNA, 15 bp, Homo sapiens
agagacattgttttt

SEQ ID NO: 453964 - DNA, 15 bp, Homo sapiens
gagagacattgtttt

SEQ ID NO: 453965 - DNA, 15 bp, Homo sapiens
ggagagacattgttt

SEQ ID NO: 453966 - DNA, 15 bp, Homo sapiens
gggagagacattgtt

SEQ ID NO: 453967 - DNA, 15 bp, Homo sapiens
agggagagacattgt

SEQ ID NO: 453968 - DNA, 15 bp, Homo sapiens
aagggagagacattg

SEQ ID NO: 453969 - DNA, 15 bp, Homo sapiens
gaagggagagacatt

SEQ ID NO: 453970 - DNA, 15 bp, Homo sapiens
ggaagggagagacat

SEQ ID NO: 453971 - DNA, 15 bp, Homo sapiens
tggaagggagagaca

SEQ ID NO: 453972 - DNA, 15 bp, Homo sapiens
ttggaagggagagac

SEQ ID NO: 453973 - DNA, 15 bp, Homo sapiens
attggaagggagaga

SEQ ID NO: 453974 - DNA, 15 bp, Homo sapiens
cattggaagggagag

SEQ ID NO: 453975 - DNA, 15 bp, Homo sapiens
gcattggaagggaga

SEQ ID NO: 453976 - DNA, 15 bp, Homo sapiens
agcattggaagggag

SEQ ID NO: 453977 - DNA, 15 bp, Homo sapiens
gagcattggaaggga

SEQ ID NO: 453978 - DNA, 15 bp, Homo sapiens
agagcattggaaggg

SEQ ID NO: 453979 - DNA, 15 bp, Homo sapiens
tagagcattggaagg

SEQ ID NO: 453980 - DNA, 15 bp, Homo sapiens
ctagagcattggaag

SEQ ID NO: 453981 - DNA, 15 bp, Homo sapiens
cctagagcattggaa

SEQ ID NO: 453982 - DNA, 15 bp, Homo sapiens
ccctagagcattgga

SEQ ID NO: 453983 - DNA, 15 bp, Homo sapiens
tccctagagcattgg

SEQ ID NO: 453984 - DNA, 15 bp, Homo sapiens
ttccctagagcattg

SEQ ID NO: 453985 - DNA, 15 bp, Homo sapiens
attccctagagcatt

SEQ ID NO: 453986 - DNA, 15 bp, Homo sapiens
cattccctagagcat

SEQ ID NO: 453987 - DNA, 15 bp, Homo sapiens
acattccctagagca

SEQ ID NO: 453988 - DNA, 15 bp, Homo sapiens
aacattccctagagc

SEQ ID NO: 453989 - DNA, 15 bp, Homo sapiens
aaacattccctagag

SEQ ID NO: 453990 - DNA, 15 bp, Homo sapiens
taaacattccctaga

SEQ ID NO: 453991 - DNA, 15 bp, Homo sapiens
ctaaacattccctag

SEQ ID NO: 453992 - DNA, 15 bp, Homo sapiens
gctaaacattcccta

SEQ ID NO: 453993 - DNA, 15 bp, Homo sapiens
tgctaaacattccct

SEQ ID NO: 453994 - DNA, 15 bp, Homo sapiens
ttgctaaacattccc

SEQ ID NO: 453995 - DNA, 15 bp, Homo sapiens
cttgctaaacattcc

SEQ ID NO: 453996 - DNA, 15 bp, Homo sapiens
gcttgctaaacattc

SEQ ID NO: 453997 - DNA, 15 bp, Homo sapiens
tgcttgctaaacatt

SEQ ID NO: 453998 - DNA, 15 bp, Homo sapiens
atgcttgctaaacat

SEQ ID NO: 453999 - DNA, 15 bp, Homo sapiens
gatgcttgctaaaca

SEQ ID NO: 454000 - DNA, 15 bp, Homo sapiens
agatgcttgctaaac

SEQ ID NO: 454001 - DNA, 15 bp, Homo sapiens
cagatgcttgctaaa

SEQ ID NO: 454002 - DNA, 15 bp, Homo sapiens
gcagatgcttgctaa

SEQ ID NO: 454003 - DNA, 15 bp, Homo sapiens
agcagatgcttgcta

SEQ ID NO: 454004 - DNA, 15 bp, Homo sapiens
cagcagatgcttgct

SEQ ID NO: 454005 - DNA, 15 bp, Homo sapiens
acagcagatgcttgc

SEQ ID NO: 454006 - DNA, 15 bp, Homo sapiens
tacagcagatgcttg

SEQ ID NO: 454007 - DNA, 15 bp, Homo sapiens
ctacagcagatgctt

SEQ ID NO: 454008 - DNA, 15 bp, Homo sapiens
cctacagcagatgct

SEQ ID NO: 454009 - DNA, 15 bp, Homo sapiens
gcctacagcagatgc

SEQ ID NO: 454010 - DNA, 15 bp, Homo sapiens
cgcctacagcagatg

SEQ ID NO: 454011 - DNA, 15 bp, Homo sapiens
tcgcctacagcagat

SEQ ID NO: 454012 - DNA, 15 bp, Homo sapiens
ctcgcctacagcaga

SEQ ID NO: 454013 - DNA, 15 bp, Homo sapiens
cctcgcctacagcag

SEQ ID NO: 454014 - DNA, 15 bp, Homo sapiens
acctcgcctacagca

SEQ ID NO: 454015 - DNA, 15 bp, Homo sapiens
gacctcgcctacagc

SEQ ID NO: 454016 - DNA, 15 bp, Homo sapiens
ggacctcgcctacag

SEQ ID NO: 454017 - DNA, 15 bp, Homo sapiens
aggacctcgcctaca

SEQ ID NO: 454018 - DNA, 15 bp, Homo sapiens
caggacctcgcctac

SEQ ID NO: 454019 - DNA, 15 bp, Homo sapiens
tcaggacctcgccta

SEQ ID NO: 454020 - DNA, 15 bp, Homo sapiens
ttcaggacctcgcct

SEQ ID NO: 454021 - DNA, 15 bp, Homo sapiens
gttcaggacctcgcc

SEQ ID NO: 454022 - DNA, 15 bp, Homo sapiens
agttcaggacctcgc

SEQ ID NO: 454023 - DNA, 15 bp, Homo sapiens
cagttcaggacctcg

SEQ ID NO: 454024 - DNA, 15 bp, Homo sapiens
ccagttcaggacctc

SEQ ID NO: 454025 - DNA, 15 bp, Homo sapiens
cccagttcaggacct

SEQ ID NO: 454026 - DNA, 15 bp, Homo sapiens
acccagttcaggacc

SEQ ID NO: 454027 - DNA, 15 bp, Homo sapiens
cacccagttcaggac

SEQ ID NO: 454028 - DNA, 15 bp, Homo sapiens
tcacccagttcagga

SEQ ID NO: 454029 - DNA, 15 bp, Homo sapiens
gtcacccagttcagg

SEQ ID NO: 454030 - DNA, 15 bp, Homo sapiens
agtcacccagttcag

SEQ ID NO: 454031 - DNA, 15 bp, Homo sapiens
aagtcacccagttca

SEQ ID NO: 454032 - DNA, 15 bp, Homo sapiens
gaagtcacccagttc

SEQ ID NO: 454033 - DNA, 15 bp, Homo sapiens
ggaagtcacccagtt

SEQ ID NO: 454034 - DNA, 15 bp, Homo sapiens
aggaagtcacccagt

SEQ ID NO: 454035 - DNA, 15 bp, Homo sapiens
taggaagtcacccag

SEQ ID NO: 454036 - DNA, 15 bp, Homo sapiens
ataggaagtcaccca

SEQ ID NO: 454037 - DNA, 15 bp, Homo sapiens
aataggaagtcaccc

SEQ ID NO: 454038 - DNA, 15 bp, Homo sapiens
aaataggaagtcacc

SEQ ID NO: 454039 - DNA, 15 bp, Homo sapiens
taaataggaagtcac

SEQ ID NO: 454040 - DNA, 15 bp, Homo sapiens
gtaaataggaagtca

SEQ ID NO: 454041 - DNA, 15 bp, Homo sapiens
ggtaaataggaagtc

SEQ ID NO: 454042 - DNA, 15 bp, Homo sapiens
aggtaaataggaagt

SEQ ID NO: 454043 - DNA, 15 bp, Homo sapiens
gaggtaaataggaag

SEQ ID NO: 454044 - DNA, 15 bp, Homo sapiens
cgaggtaaataggaa

SEQ ID NO: 454045 - DNA, 15 bp, Homo sapiens
acgaggtaaatagga

SEQ ID NO: 454046 - DNA, 15 bp, Homo sapiens
gacgaggtaaatagg

SEQ ID NO: 454047 - DNA, 15 bp, Homo sapiens
tgacgaggtaaatag

SEQ ID NO: 454048 - DNA, 15 bp, Homo sapiens
ctgacgaggtaaata

SEQ ID NO: 454049 - DNA, 15 bp, Homo sapiens
actgacgaggtaaat

SEQ ID NO: 454050 - DNA, 15 bp, Homo sapiens
gactgacgaggtaaa

SEQ ID NO: 454051 - DNA, 15 bp, Homo sapiens
cgactgacgaggtaa

SEQ ID NO: 454052 - DNA, 15 bp, Homo sapiens
gcgactgacgaggta

SEQ ID NO: 454053 - DNA, 15 bp, Homo sapiens
tgcgactgacgaggt

SEQ ID NO: 454054 - DNA, 15 bp, Homo sapiens
ctgcgactgacgagg

SEQ ID NO: 454055 - DNA, 15 bp, Homo sapiens
cctgcgactgacgag

SEQ ID NO: 454056 - DNA, 15 bp, Homo sapiens
tcctgcgactgacga

SEQ ID NO: 454057 - DNA, 15 bp, Homo sapiens
atcctgcgactgacg

SEQ ID NO: 454058 - DNA, 15 bp, Homo sapiens
tatcctgcgactgac

SEQ ID NO: 454059 - DNA, 15 bp, Homo sapiens
ttatcctgcgactga

SEQ ID NO: 454060 - DNA, 15 bp, Homo sapiens
attatcctgcgactg

SEQ ID NO: 454061 - DNA, 15 bp, Homo sapiens
gattatcctgcgact

SEQ ID NO: 454062 - DNA, 15 bp, Homo sapiens
cgattatcctgcgac

SEQ ID NO: 454063 - DNA, 15 bp, Homo sapiens
acgattatcctgcga

SEQ ID NO: 454064 - DNA, 15 bp, Homo sapiens
aacgattatcctgcg

SEQ ID NO: 454065 - DNA, 15 bp, Homo sapiens
gaacgattatcctgc

SEQ ID NO: 454066 - DNA, 15 bp, Homo sapiens
tgaacgattatcctg

SEQ ID NO: 454067 - DNA, 15 bp, Homo sapiens
ctgaacgattatcct

SEQ ID NO: 454068 - DNA, 15 bp, Homo sapiens
tctgaacgattatcc

SEQ ID NO: 454069 - DNA, 15 bp, Homo sapiens
atctgaacgattatc

SEQ ID NO: 454070 - DNA, 15 bp, Homo sapiens
tatctgaacgattat

SEQ ID NO: 454071 - DNA, 15 bp, Homo sapiens
atatctgaacgatta

SEQ ID NO: 454072 - DNA, 15 bp, Homo sapiens
tatatctgaacgatt

SEQ ID NO: 454073 - DNA, 15 bp, Homo sapiens
ctatatctgaacgat

SEQ ID NO: 454074 - DNA, 15 bp, Homo sapiens
cctatatctgaacga

SEQ ID NO: 454075 - DNA, 15 bp, Homo sapiens
tcctatatctgaacg

SEQ ID NO: 454076 - DNA, 15 bp, Homo sapiens
ttcctatatctgaac

SEQ ID NO: 454077 - DNA, 15 bp, Homo sapiens
tttcctatatctgaa

SEQ ID NO: 454078 - DNA, 15 bp, Homo sapiens
ttttcctatatctga

SEQ ID NO: 454079 - DNA, 15 bp, Homo sapiens
cttttcctatatctg

SEQ ID NO: 454080 - DNA, 15 bp, Homo sapiens
tcttttcctatatct

SEQ ID NO: 454081 - DNA, 15 bp, Homo sapiens
gtcttttcctatatc

SEQ ID NO: 454082 - DNA, 15 bp, Homo sapiens
tgtcttttcctatat

SEQ ID NO: 454083 - DNA, 15 bp, Homo sapiens
ctgtcttttcctata

SEQ ID NO: 454084 - DNA, 15 bp, Homo sapiens
gctgtcttttcctat

SEQ ID NO: 454085 - DNA, 15 bp, Homo sapiens
ggctgtcttttccta

SEQ ID NO: 454086 - DNA, 15 bp, Homo sapiens
cggctgtcttttcct

SEQ ID NO: 454087 - DNA, 15 bp, Homo sapiens
gcggctgtcttttcc

SEQ ID NO: 454088 - DNA, 15 bp, Homo sapiens
tgcggctgtcttttc

SEQ ID NO: 454089 - DNA, 15 bp, Homo sapiens
ctgcggctgtctttt

SEQ ID NO: 454090 - DNA, 15 bp, Homo sapiens
gctgcggctgtcttt

SEQ ID NO: 454091 - DNA, 15 bp, Homo sapiens
ggctgcggctgtctt

SEQ ID NO: 454092 - DNA, 15 bp, Homo sapiens
aggctgcggctgtct

SEQ ID NO: 454093 - DNA, 15 bp, Homo sapiens
caggctgcggctgtc

SEQ ID NO: 454094 - DNA, 15 bp, Homo sapiens
tcaggctgcggctgt

SEQ ID NO: 454095 - DNA, 15 bp, Homo sapiens
ttcaggctgcggctg

SEQ ID NO: 454096 - DNA, 15 bp, Homo sapiens
tttcaggctgcggct

SEQ ID NO: 454097 - DNA, 15 bp, Homo sapiens
ttttcaggctgcggc

SEQ ID NO: 454098 - DNA, 15 bp, Homo sapiens
tttttcaggctgcgg

SEQ ID NO: 454099 - DNA, 15 bp, Homo sapiens
ttttttcaggctgcg

SEQ ID NO: 454100 - DNA, 15 bp, Homo sapiens
cttttttcaggctgc

SEQ ID NO: 454101 - DNA, 15 bp, Homo sapiens
acttttttcaggctg

SEQ ID NO: 454102 - DNA, 15 bp, Homo sapiens
gacttttttcaggct

SEQ ID NO: 454103 - DNA, 15 bp, Homo sapiens
agacttttttcaggc

SEQ ID NO: 454104 - DNA, 15 bp, Homo sapiens
aagacttttttcagg

SEQ ID NO: 454105 - DNA, 15 bp, Homo sapiens
aaagacttttttcag

SEQ ID NO: 454106 - DNA, 15 bp, Homo sapiens
aaaagacttttttca

SEQ ID NO: 454107 - DNA, 15 bp, Homo sapiens
caaaagacttttttc

SEQ ID NO: 454108 - DNA, 15 bp, Homo sapiens
tcaaaagactttttt

SEQ ID NO: 454109 - DNA, 15 bp, Homo sapiens
ttcaaaagacttttt

SEQ ID NO: 454110 - DNA, 15 bp, Homo sapiens
cttcaaaagactttt

SEQ ID NO: 454111 - DNA, 15 bp, Homo sapiens
gcttcaaaagacttt

SEQ ID NO: 454112 - DNA, 15 bp, Homo sapiens
agcttcaaaagactt

SEQ ID NO: 454113 - DNA, 15 bp, Homo sapiens
tagcttcaaaagact

SEQ ID NO: 454114 - DNA, 15 bp, Homo sapiens
ttagcttcaaaagac

SEQ ID NO: 454115 - DNA, 15 bp, Homo sapiens
gttagcttcaaaaga

SEQ ID NO: 454116 - DNA, 15 bp, Homo sapiens
ggttagcttcaaaag

SEQ ID NO: 454117 - DNA, 15 bp, Homo sapiens
aggttagcttcaaaa

SEQ ID NO: 454118 - DNA, 15 bp, Homo sapiens
aaggttagcttcaaa

SEQ ID NO: 454119 - DNA, 15 bp, Homo sapiens
gaaggttagcttcaa

SEQ ID NO: 454120 - DNA, 15 bp, Homo sapiens
agaaggttagcttca

SEQ ID NO: 454121 - DNA, 15 bp, Homo sapiens
tagaaggttagcttc

SEQ ID NO: 454122 - DNA, 15 bp, Homo sapiens
ctagaaggttagctt

SEQ ID NO: 454123 - DNA, 15 bp, Homo sapiens
cctagaaggttagct

SEQ ID NO: 454124 - DNA, 15 bp, Homo sapiens
acctagaaggttagc

SEQ ID NO: 454125 - DNA, 15 bp, Homo sapiens
gacctagaaggttag

SEQ ID NO: 454126 - DNA, 15 bp, Homo sapiens
tgacctagaaggtta

SEQ ID NO: 454127 - DNA, 15 bp, Homo sapiens
ctgacctagaaggtt

SEQ ID NO: 454128 - DNA, 15 bp, Homo sapiens
cctgacctagaaggt

SEQ ID NO: 454129 - DNA, 15 bp, Homo sapiens
gcctgacctagaagg

SEQ ID NO: 454130 - DNA, 15 bp, Homo sapiens
tgcctgacctagaag

SEQ ID NO: 454131 - DNA, 15 bp, Homo sapiens
atgcctgacctagaa

SEQ ID NO: 454132 - DNA, 15 bp, Homo sapiens
aatgcctgacctaga

SEQ ID NO: 454133 - DNA, 15 bp, Homo sapiens
aaatgcctgacctag

SEQ ID NO: 454134 - DNA, 15 bp, Homo sapiens
aaaatgcctgaccta

SEQ ID NO: 454135 - DNA, 15 bp, Homo sapiens
caaaatgcctgacct

SEQ ID NO: 454136 - DNA, 15 bp, Homo sapiens
tcaaaatgcctgacc

SEQ ID NO: 454137 - DNA, 15 bp, Homo sapiens
ctcaaaatgcctgac

SEQ ID NO: 454138 - DNA, 15 bp, Homo sapiens
cctcaaaatgcctga

SEQ ID NO: 454139 - DNA, 15 bp, Homo sapiens
tcctcaaaatgcctg

SEQ ID NO: 454140 - DNA, 15 bp, Homo sapiens
gtcctcaaaatgcct

SEQ ID NO: 454141 - DNA, 15 bp, Homo sapiens
ggtcctcaaaatgcc

SEQ ID NO: 454142 - DNA, 15 bp, Homo sapiens
tggtcctcaaaatgc

SEQ ID NO: 454143 - DNA, 15 bp, Homo sapiens
ctggtcctcaaaatg

SEQ ID NO: 454144 - DNA, 15 bp, Homo sapiens
gctggtcctcaaaat

SEQ ID NO: 454145 - DNA, 15 bp, Homo sapiens
cgctggtcctcaaaa

SEQ ID NO: 454146 - DNA, 15 bp, Homo sapiens
ccgctggtcctcaaa

SEQ ID NO: 454147 - DNA, 15 bp, Homo sapiens
tccgctggtcctcaa

SEQ ID NO: 454148 - DNA, 15 bp, Homo sapiens
ctccgctggtcctca

SEQ ID NO: 454149 - DNA, 15 bp, Homo sapiens
tctccgctggtcctc

SEQ ID NO: 454150 - DNA, 15 bp, Homo sapiens
ctctccgctggtcct

SEQ ID NO: 454151 - DNA, 15 bp, Homo sapiens
tctctccgctggtcc

SEQ ID NO: 454152 - DNA, 15 bp, Homo sapiens
atctctccgctggtc

SEQ ID NO: 454153 - DNA, 15 bp, Homo sapiens
gatctctccgctggt

SEQ ID NO: 454154 - DNA, 15 bp, Homo sapiens
ggatctctccgctgg

SEQ ID NO: 454155 - DNA, 15 bp, Homo sapiens
cggatctctccgctg

SEQ ID NO: 454156 - DNA, 15 bp, Homo sapiens
tcggatctctccgct

SEQ ID NO: 454157 - DNA, 15 bp, Homo sapiens
ctcggatctctccgc

SEQ ID NO: 454158 - DNA, 15 bp, Homo sapiens
cctcggatctctccg

SEQ ID NO: 454159 - DNA, 15 bp, Homo sapiens
gcctcggatctctcc

SEQ ID NO: 454160 - DNA, 15 bp, Homo sapiens
ggcctcggatctctc

SEQ ID NO: 454161 - DNA, 15 bp, Homo sapiens
aggcctcggatctct

SEQ ID NO: 454162 - DNA, 15 bp, Homo sapiens
gaggcctcggatctc

SEQ ID NO: 454163 - DNA, 15 bp, Homo sapiens
agaggcctcggatct

SEQ ID NO: 454164 - DNA, 15 bp, Homo sapiens
tagaggcctcggatc

SEQ ID NO: 454165 - DNA, 15 bp, Homo sapiens
ttagaggcctcggat

SEQ ID NO: 454166 - DNA, 15 bp, Homo sapiens
attagaggcctcgga

SEQ ID NO: 454167 - DNA, 15 bp, Homo sapiens
gattagaggcctcgg

SEQ ID NO: 454168 - DNA, 15 bp, Homo sapiens
ggattagaggcctcg

SEQ ID NO: 454169 - DNA, 15 bp, Homo sapiens
aggattagaggcctc

SEQ ID NO: 454170 - DNA, 15 bp, Homo sapiens
gaggattagaggcct

SEQ ID NO: 454171 - DNA, 15 bp, Homo sapiens
cgaggattagaggcc

SEQ ID NO: 454172 - DNA, 15 bp, Homo sapiens
tcgaggattagaggc

SEQ ID NO: 454173 - DNA, 15 bp, Homo sapiens
ttcgaggattagagg

SEQ ID NO: 454174 - DNA, 15 bp, Homo sapiens
cttcgaggattagag

SEQ ID NO: 454175 - DNA, 15 bp, Homo sapiens
gcttcgaggattaga

SEQ ID NO: 454176 - DNA, 15 bp, Homo sapiens
agcttcgaggattag

SEQ ID NO: 454177 - DNA, 15 bp, Homo sapiens
gagcttcgaggatta

SEQ ID NO: 454178 - DNA, 15 bp, Homo sapiens
cgagcttcgaggatt

SEQ ID NO: 454179 - DNA, 15 bp, Homo sapiens
gcgagcttcgaggat

SEQ ID NO: 454180 - DNA, 15 bp, Homo sapiens
agcgagcttcgagga

SEQ ID NO: 454181 - DNA, 15 bp, Homo sapiens
gagcgagcttcgagg

SEQ ID NO: 454182 - DNA, 15 bp, Homo sapiens
agagcgagcttcgag

SEQ ID NO: 454183 - DNA, 15 bp, Homo sapiens
gagagcgagcttcga

SEQ ID NO: 454184 - DNA, 15 bp, Homo sapiens
ggagagcgagcttcg

SEQ ID NO: 454185 - DNA, 15 bp, Homo sapiens
gggagagcgagcttc

SEQ ID NO: 454186 - DNA, 15 bp, Homo sapiens
ggggagagcgagctt

SEQ ID NO: 454187 - DNA, 15 bp, Homo sapiens
aggggagagcgagct

SEQ ID NO: 454188 - DNA, 15 bp, Homo sapiens
aaggggagagcgagc

SEQ ID NO: 454189 - DNA, 15 bp, Homo sapiens
gaaggggagagcgag

SEQ ID NO: 454190 - DNA, 15 bp, Homo sapiens
ggaaggggagagcga

SEQ ID NO: 454191 - DNA, 15 bp, Homo sapiens
gggaaggggagagcg

SEQ ID NO: 454192 - DNA, 15 bp, Homo sapiens
ggggaaggggagagc

SEQ ID NO: 454193 - DNA, 15 bp, Homo sapiens
tggggaaggggagag

SEQ ID NO: 454194 - DNA, 15 bp, Homo sapiens
ctggggaaggggaga

SEQ ID NO: 454195 - DNA, 15 bp, Homo sapiens
cctggggaaggggag

SEQ ID NO: 454196 - DNA, 15 bp, Homo sapiens
gcctggggaagggga

SEQ ID NO: 454197 - DNA, 15 bp, Homo sapiens
agcctggggaagggg

SEQ ID NO: 454198 - DNA, 15 bp, Homo sapiens
cagcctggggaaggg

SEQ ID NO: 454199 - DNA, 15 bp, Homo sapiens
tcagcctggggaagg

SEQ ID NO: 454200 - DNA, 15 bp, Homo sapiens
ctcagcctggggaag

SEQ ID NO: 454201 - DNA, 15 bp, Homo sapiens
tctcagcctggggaa

SEQ ID NO: 454202 - DNA, 15 bp, Homo sapiens
gtctcagcctgggga

SEQ ID NO: 454203 - DNA, 15 bp, Homo sapiens
tgtctcagcctgggg

SEQ ID NO: 454204 - DNA, 15 bp, Homo sapiens
ctgtctcagcctggg

SEQ ID NO: 454205 - DNA, 15 bp, Homo sapiens
actgtctcagcctgg

SEQ ID NO: 454206 - DNA, 15 bp, Homo sapiens
gactgtctcagcctg

SEQ ID NO: 454207 - DNA, 15 bp, Homo sapiens
tgactgtctcagcct

SEQ ID NO: 454208 - DNA, 15 bp, Homo sapiens
atgactgtctcagcc

SEQ ID NO: 454209 - DNA, 15 bp, Homo sapiens
gatgactgtctcagc

SEQ ID NO: 454210 - DNA, 15 bp, Homo sapiens
tgatgactgtctcag

SEQ ID NO: 454211 - DNA, 15 bp, Homo sapiens
gtgatgactgtctca

SEQ ID NO: 454212 - DNA, 15 bp, Homo sapiens
agtgatgactgtctc

SEQ ID NO: 454213 - DNA, 15 bp, Homo sapiens
cagtgatgactgtct

SEQ ID NO: 454214 - DNA, 15 bp, Homo sapiens
tcagtgatgactgtc

SEQ ID NO: 454215 - DNA, 15 bp, Homo sapiens
ctcagtgatgactgt

SEQ ID NO: 454216 - DNA, 15 bp, Homo sapiens
cctcagtgatgactg

SEQ ID NO: 454217 - DNA, 15 bp, Homo sapiens
gcctcagtgatgact

SEQ ID NO: 454218 - DNA, 15 bp, Homo sapiens
agcctcagtgatgac

SEQ ID NO: 454219 - DNA, 15 bp, Homo sapiens
aagcctcagtgatga

SEQ ID NO: 454220 - DNA, 15 bp, Homo sapiens
aaagcctcagtgatg

SEQ ID NO: 454221 - DNA, 15 bp, Homo sapiens
caaagcctcagtgat

SEQ ID NO: 454222 - DNA, 15 bp, Homo sapiens
ccaaagcctcagtga

SEQ ID NO: 454223 - DNA, 15 bp, Homo sapiens
tccaaagcctcagtg

SEQ ID NO: 454224 - DNA, 15 bp, Homo sapiens
ttccaaagcctcagt

SEQ ID NO: 454225 - DNA, 15 bp, Homo sapiens
tttccaaagcctcag

SEQ ID NO: 454226 - DNA, 15 bp, Homo sapiens
ctttccaaagcctca

SEQ ID NO: 454227 - DNA, 15 bp, Homo sapiens
cctttccaaagcctc

SEQ ID NO: 454228 - DNA, 15 bp, Homo sapiens
tcctttccaaagcct

SEQ ID NO: 454229 - DNA, 15 bp, Homo sapiens
ttcctttccaaagcc

SEQ ID NO: 454230 - DNA, 15 bp, Homo sapiens
attcctttccaaagc

SEQ ID NO: 454231 - DNA, 15 bp, Homo sapiens
aattcctttccaaag

SEQ ID NO: 454232 - DNA, 15 bp, Homo sapiens
taattcctttccaaa

SEQ ID NO: 454233 - DNA, 15 bp, Homo sapiens
gtaattcctttccaa

SEQ ID NO: 454234 - DNA, 15 bp, Homo sapiens
ggtaattcctttcca

SEQ ID NO: 454235 - DNA, 15 bp, Homo sapiens
cggtaattcctttcc

SEQ ID NO: 454236 - DNA, 15 bp, Homo sapiens
tcggtaattcctttc

SEQ ID NO: 454237 - DNA, 15 bp, Homo sapiens
ctcggtaattccttt

SEQ ID NO: 454238 - DNA, 15 bp, Homo sapiens
cctcggtaattcctt

SEQ ID NO: 454239 - DNA, 15 bp, Homo sapiens
ccctcggtaattcct

SEQ ID NO: 454240 - DNA, 15 bp, Homo sapiens
accctcggtaattcc

SEQ ID NO: 454241 - DNA, 15 bp, Homo sapiens
taccctcggtaattc

SEQ ID NO: 454242 - DNA, 15 bp, Homo sapiens
ataccctcggtaatt

SEQ ID NO: 454243 - DNA, 15 bp, Homo sapiens
tataccctcggtaat

SEQ ID NO: 454244 - DNA, 15 bp, Homo sapiens
ttataccctcggtaa

SEQ ID NO: 454245 - DNA, 15 bp, Homo sapiens
attataccctcggta

SEQ ID NO: 454246 - DNA, 15 bp, Homo sapiens
aattataccctcggt

SEQ ID NO: 454247 - DNA, 15 bp, Homo sapiens
aaattataccctcgg

SEQ ID NO: 454248 - DNA, 15 bp, Homo sapiens
caaattataccctcg

SEQ ID NO: 454249 - DNA, 15 bp, Homo sapiens
ccaaattataccctc

SEQ ID NO: 454250 - DNA, 15 bp, Homo sapiens
cccaaattataccct

SEQ ID NO: 454251 - DNA, 15 bp, Homo sapiens
ccccaaattataccc

SEQ ID NO: 454252 - DNA, 15 bp, Homo sapiens
accccaaattatacc

SEQ ID NO: 454253 - DNA, 15 bp, Homo sapiens
caccccaaattatac

SEQ ID NO: 454254 - DNA, 15 bp, Homo sapiens
ccaccccaaattata

SEQ ID NO: 454255 - DNA, 15 bp, Homo sapiens
cccaccccaaattat

SEQ ID NO: 454256 - DNA, 15 bp, Homo sapiens
ccccaccccaaatta

SEQ ID NO: 454257 - DNA, 15 bp, Homo sapiens
accccaccccaaatt

SEQ ID NO: 454258 - DNA, 15 bp, Homo sapiens
caccccaccccaaat

SEQ ID NO: 454259 - DNA, 15 bp, Homo sapiens
ccaccccaccccaaa

SEQ ID NO: 454260 - DNA, 15 bp, Homo sapiens
tccaccccaccccaa

SEQ ID NO: 454261 - DNA, 15 bp, Homo sapiens
ctccaccccacccca

SEQ ID NO: 454262 - DNA, 15 bp, Homo sapiens
tctccaccccacccc

SEQ ID NO: 454263 - DNA, 15 bp, Homo sapiens
gtctccaccccaccc

SEQ ID NO: 454264 - DNA, 15 bp, Homo sapiens
tgtctccaccccacc

SEQ ID NO: 454265 - DNA, 15 bp, Homo sapiens
atgtctccaccccac

SEQ ID NO: 454266 - DNA, 15 bp, Homo sapiens
gatgtctccacccca

SEQ ID NO: 454267 - DNA, 15 bp, Homo sapiens
agatgtctccacccc

SEQ ID NO: 454268 - DNA, 15 bp, Homo sapiens
tagatgtctccaccc

SEQ ID NO: 454269 - DNA, 15 bp, Homo sapiens
atagatgtctccacc

SEQ ID NO: 454270 - DNA, 15 bp, Homo sapiens
catagatgtctccac

SEQ ID NO: 454271 - DNA, 15 bp, Homo sapiens
acatagatgtctcca

SEQ ID NO: 454272 - DNA, 15 bp, Homo sapiens
aacatagatgtctcc

SEQ ID NO: 454273 - DNA, 15 bp, Homo sapiens
aaacatagatgtctc

SEQ ID NO: 454274 - DNA, 15 bp, Homo sapiens
aaaacatagatgtct

SEQ ID NO: 454275 - DNA, 15 bp, Homo sapiens
aaaaacatagatgtc

SEQ ID NO: 454276 - DNA, 15 bp, Homo sapiens
taaaaacatagatgt

SEQ ID NO: 454277 - DNA, 15 bp, Homo sapiens
ataaaaacatagatg

SEQ ID NO: 454278 - DNA, 15 bp, Homo sapiens
tataaaaacatagat

SEQ ID NO: 454279 - DNA, 15 bp, Homo sapiens
ttataaaaacataga

SEQ ID NO: 454280 - DNA, 15 bp, Homo sapiens
tttataaaaacatag

SEQ ID NO: 454281 - DNA, 15 bp, Homo sapiens
ttttataaaaacata

SEQ ID NO: 454282 - DNA, 15 bp, Homo sapiens
tttttataaaaacat

SEQ ID NO: 454283 - DNA, 15 bp, Homo sapiens
ttttttataaaaaca

SEQ ID NO: 454284 - DNA, 15 bp, Homo sapiens
gttttttataaaaac

SEQ ID NO: 454285 - DNA, 15 bp, Homo sapiens
ggttttttataaaaa

SEQ ID NO: 454286 - DNA, 15 bp, Homo sapiens
tggttttttataaaa

SEQ ID NO: 454287 - DNA, 15 bp, Homo sapiens
ctggttttttataaa

SEQ ID NO: 454288 - DNA, 15 bp, Homo sapiens
cctggttttttataa

SEQ ID NO: 454289 - DNA, 15 bp, Homo sapiens
acctggttttttata

SEQ ID NO: 454290 - DNA, 15 bp, Homo sapiens
cacctggttttttat

SEQ ID NO: 454291 - DNA, 15 bp, Homo sapiens
gcacctggtttttta

SEQ ID NO: 454292 - DNA, 15 bp, Homo sapiens
ggcacctggtttttt

SEQ ID NO: 454293 - DNA, 15 bp, Homo sapiens
tggcacctggttttt

SEQ ID NO: 454294 - DNA, 15 bp, Homo sapiens
atggcacctggtttt

SEQ ID NO: 454295 - DNA, 15 bp, Homo sapiens
catggcacctggttt

SEQ ID NO: 454296 - DNA, 15 bp, Homo sapiens
tcatggcacctggtt

SEQ ID NO: 454297 - DNA, 15 bp, Homo sapiens
ttcatggcacctggt

SEQ ID NO: 454298 - DNA, 15 bp, Homo sapiens
attcatggcacctgg

SEQ ID NO: 454299 - DNA, 15 bp, Homo sapiens
tattcatggcacctg

SEQ ID NO: 454300 - DNA, 15 bp, Homo sapiens
ttattcatggcacct

SEQ ID NO: 454301 - DNA, 15 bp, Homo sapiens
tttattcatggcacc

SEQ ID NO: 454302 - DNA, 15 bp, Homo sapiens
ttttattcatggcac

SEQ ID NO: 454303 - DNA, 15 bp, Homo sapiens
tttttattcatggca

SEQ ID NO: 454304 - DNA, 15 bp, Homo sapiens
atttttattcatggc

SEQ ID NO: 454305 - DNA, 15 bp, Homo sapiens
catttttattcatgg

SEQ ID NO: 454306 - DNA, 15 bp, Homo sapiens
acatttttattcatg

SEQ ID NO: 454307 - DNA, 15 bp, Homo sapiens
cacatttttattcat

SEQ ID NO: 454308 - DNA, 15 bp, Homo sapiens
gcacatttttattca

SEQ ID NO: 454309 - DNA, 15 bp, Homo sapiens
agcacatttttattc

SEQ ID NO: 454310 - DNA, 15 bp, Homo sapiens
aagcacatttttatt

SEQ ID NO: 454311 - DNA, 15 bp, Homo sapiens
gaagcacatttttat

SEQ ID NO: 454312 - DNA, 15 bp, Homo sapiens
ggaagcacattttta

SEQ ID NO: 454313 - DNA, 15 bp, Homo sapiens
gggaagcacattttt

SEQ ID NO: 454314 - DNA, 15 bp, Homo sapiens
tgggaagcacatttt

SEQ ID NO: 454315 - DNA, 15 bp, Homo sapiens
ttgggaagcacattt

SEQ ID NO: 454316 - DNA, 15 bp, Homo sapiens
tttgggaagcacatt

SEQ ID NO: 454317 - DNA, 15 bp, Homo sapiens
ttttgggaagcacat

SEQ ID NO: 454318 - DNA, 15 bp, Homo sapiens
attttgggaagcaca

SEQ ID NO: 454319 - DNA, 15 bp, Homo sapiens
cattttgggaagcac

SEQ ID NO: 454320 - DNA, 15 bp, Homo sapiens
tcattttgggaagca

SEQ ID NO: 454321 - DNA, 15 bp, Homo sapiens
atcattttgggaagc

SEQ ID NO: 454322 - DNA, 15 bp, Homo sapiens
tatcattttgggaag

SEQ ID NO: 454323 - DNA, 15 bp, Homo sapiens
atatcattttgggaa

SEQ ID NO: 454324 - DNA, 15 bp, Homo sapiens
catatcattttggga

SEQ ID NO: 454325 - DNA, 15 bp, Homo sapiens
acatatcattttggg

SEQ ID NO: 454326 - DNA, 15 bp, Homo sapiens
tacatatcattttgg

SEQ ID NO: 454327 - DNA, 15 bp, Homo sapiens
ctacatatcattttg

SEQ ID NO: 454328 - DNA, 15 bp, Homo sapiens
cctacatatcatttt

SEQ ID NO: 454329 - DNA, 15 bp, Homo sapiens
gcctacatatcattt

SEQ ID NO: 454330 - DNA, 15 bp, Homo sapiens
ggcctacatatcatt

SEQ ID NO: 454331 - DNA, 15 bp, Homo sapiens
aggcctacatatcat

SEQ ID NO: 454332 - DNA, 15 bp, Homo sapiens
caggcctacatatca

SEQ ID NO: 454333 - DNA, 15 bp, Homo sapiens
ccaggcctacatatc

SEQ ID NO: 454334 - DNA, 15 bp, Homo sapiens
cccaggcctacatat

SEQ ID NO: 454335 - DNA, 15 bp, Homo sapiens
ccccaggcctacata

SEQ ID NO: 454336 - DNA, 15 bp, Homo sapiens
accccaggcctacat

SEQ ID NO: 454337 - DNA, 15 bp, Homo sapiens
caccccaggcctaca

SEQ ID NO: 454338 - DNA, 15 bp, Homo sapiens
acaccccaggcctac

SEQ ID NO: 454339 - DNA, 15 bp, Homo sapiens
cacaccccaggccta

SEQ ID NO: 454340 - DNA, 15 bp, Homo sapiens
gcacaccccaggcct

SEQ ID NO: 454341 - DNA, 15 bp, Homo sapiens
tgcacaccccaggcc

SEQ ID NO: 454342 - DNA, 15 bp, Homo sapiens
ttgcacaccccaggc

SEQ ID NO: 454343 - DNA, 15 bp, Homo sapiens
tttgcacaccccagg

SEQ ID NO: 454344 - DNA, 15 bp, Homo sapiens
gtttgcacaccccag

SEQ ID NO: 454345 - DNA, 15 bp, Homo sapiens
agtttgcacacccca

SEQ ID NO: 454346 - DNA, 15 bp, Homo sapiens
aagtttgcacacccc

SEQ ID NO: 454347 - DNA, 15 bp, Homo sapiens
caagtttgcacaccc

SEQ ID NO: 454348 - DNA, 15 bp, Homo sapiens
ccaagtttgcacacc

SEQ ID NO: 454349 - DNA, 15 bp, Homo sapiens
tccaagtttgcacac

SEQ ID NO: 454350 - DNA, 15 bp, Homo sapiens
ttccaagtttgcaca

SEQ ID NO: 454351 - DNA, 15 bp, Homo sapiens
cttccaagtttgcac

SEQ ID NO: 454352 - DNA, 15 bp, Homo sapiens
gcttccaagtttgca

SEQ ID NO: 454353 - DNA, 15 bp, Homo sapiens
ggcttccaagtttgc

SEQ ID NO: 454354 - DNA, 15 bp, Homo sapiens
cggcttccaagtttg

SEQ ID NO: 454355 - DNA, 15 bp, Homo sapiens
ccggcttccaagttt

SEQ ID NO: 454356 - DNA, 15 bp, Homo sapiens
accggcttccaagtt

SEQ ID NO: 454357 - DNA, 15 bp, Homo sapiens
taccggcttccaagt

SEQ ID NO: 454358 - DNA, 15 bp, Homo sapiens
ataccggcttccaag

SEQ ID NO: 454359 - DNA, 15 bp, Homo sapiens
aataccggcttccaa

SEQ ID NO: 454360 - DNA, 15 bp, Homo sapiens
aaataccggcttcca

SEQ ID NO: 454361 - DNA, 15 bp, Homo sapiens
gaaataccggcttcc

SEQ ID NO: 454362 - DNA, 15 bp, Homo sapiens
agaaataccggcttc

SEQ ID NO: 454363 - DNA, 15 bp, Homo sapiens
cagaaataccggctt

SEQ ID NO: 454364 - DNA, 15 bp, Homo sapiens
tcagaaataccggct

SEQ ID NO: 454365 - DNA, 15 bp, Homo sapiens
ctcagaaataccggc

SEQ ID NO: 454366 - DNA, 15 bp, Homo sapiens
tctcagaaataccgg

SEQ ID NO: 454367 - DNA, 15 bp, Homo sapiens
gtctcagaaataccg

SEQ ID NO: 454368 - DNA, 15 bp, Homo sapiens
agtctcagaaatacc

SEQ ID NO: 454369 - DNA, 15 bp, Homo sapiens
aagtctcagaaatac

SEQ ID NO: 454370 - DNA, 15 bp, Homo sapiens
caagtctcagaaata

SEQ ID NO: 454371 - DNA, 15 bp, Homo sapiens
gcaagtctcagaaat

SEQ ID NO: 454372 - DNA, 15 bp, Homo sapiens
tgcaagtctcagaaa

SEQ ID NO: 454373 - DNA, 15 bp, Homo sapiens
ttgcaagtctcagaa

SEQ ID NO: 454374 - DNA, 15 bp, Homo sapiens
tttgcaagtctcaga

SEQ ID NO: 454375 - DNA, 15 bp, Homo sapiens
gtttgcaagtctcag

SEQ ID NO: 454376 - DNA, 15 bp, Homo sapiens
cgtttgcaagtctca

SEQ ID NO: 454377 - DNA, 15 bp, Homo sapiens
tcgtttgcaagtctc

SEQ ID NO: 454378 - DNA, 15 bp, Homo sapiens
ctcgtttgcaagtct

SEQ ID NO: 454379 - DNA, 15 bp, Homo sapiens
tctcgtttgcaagtc

SEQ ID NO: 454380 - DNA, 15 bp, Homo sapiens
ctctcgtttgcaagt

SEQ ID NO: 454381 - DNA, 15 bp, Homo sapiens
cctctcgtttgcaag

SEQ ID NO: 454382 - DNA, 15 bp, Homo sapiens
ccctctcgtttgcaa

SEQ ID NO: 454383 - DNA, 15 bp, Homo sapiens
tccctctcgtttgca

SEQ ID NO: 454384 - DNA, 15 bp, Homo sapiens
ctccctctcgtttgc

SEQ ID NO: 454385 - DNA, 15 bp, Homo sapiens
cctccctctcgtttg

SEQ ID NO: 454386 - DNA, 15 bp, Homo sapiens
gcctccctctcgttt

SEQ ID NO: 454387 - DNA, 15 bp, Homo sapiens
tgcctccctctcgtt

SEQ ID NO: 454388 - DNA, 15 bp, Homo sapiens
gtgcctccctctcgt

SEQ ID NO: 454389 - DNA, 15 bp, Homo sapiens
agtgcctccctctcg

SEQ ID NO: 454390 - DNA, 15 bp, Homo sapiens
tagtgcctccctctc

SEQ ID NO: 454391 - DNA, 15 bp, Homo sapiens
ctagtgcctccctct

SEQ ID NO: 454392 - DNA, 15 bp, Homo sapiens
tctagtgcctccctc

SEQ ID NO: 454393 - DNA, 15 bp, Homo sapiens
atctagtgcctccct

SEQ ID NO: 454394 - DNA, 15 bp, Homo sapiens
tatctagtgcctccc

SEQ ID NO: 454395 - DNA, 15 bp, Homo sapiens
atatctagtgcctcc

SEQ ID NO: 454396 - DNA, 15 bp, Homo sapiens
aatatctagtgcctc

SEQ ID NO: 454397 - DNA, 15 bp, Homo sapiens
caatatctagtgcct

SEQ ID NO: 454398 - DNA, 15 bp, Homo sapiens
ccaatatctagtgcc

SEQ ID NO: 454399 - DNA, 15 bp, Homo sapiens
gccaatatctagtgc

SEQ ID NO: 454400 - DNA, 15 bp, Homo sapiens
cgccaatatctagtg

SEQ ID NO: 454401 - DNA, 15 bp, Homo sapiens
tcgccaatatctagt

SEQ ID NO: 454402 - DNA, 15 bp, Homo sapiens
gtcgccaatatctag

SEQ ID NO: 454403 - DNA, 15 bp, Homo sapiens
agtcgccaatatcta

SEQ ID NO: 454404 - DNA, 15 bp, Homo sapiens
aagtcgccaatatct

SEQ ID NO: 454405 - DNA, 15 bp, Homo sapiens
aaagtcgccaatatc

SEQ ID NO: 454406 - DNA, 15 bp, Homo sapiens
aaaagtcgccaatat

SEQ ID NO: 454407 - DNA, 15 bp, Homo sapiens
gaaaagtcgccaata

SEQ ID NO: 454408 - DNA, 15 bp, Homo sapiens
ggaaaagtcgccaat

SEQ ID NO: 454409 - DNA, 15 bp, Homo sapiens
aggaaaagtcgccaa

SEQ ID NO: 454410 - DNA, 15 bp, Homo sapiens
gaggaaaagtcgcca

SEQ ID NO: 454411 - DNA, 15 bp, Homo sapiens
ggaggaaaagtcgcc

SEQ ID NO: 454412 - DNA, 15 bp, Homo sapiens
aggaggaaaagtcgc

SEQ ID NO: 454413 - DNA, 15 bp, Homo sapiens
gaggaggaaaagtcg

SEQ ID NO: 454414 - DNA, 15 bp, Homo sapiens
ggaggaggaaaagtc

SEQ ID NO: 454415 - DNA, 15 bp, Homo sapiens
gggaggaggaaaagt

SEQ ID NO: 454416 - DNA, 15 bp, Homo sapiens
ggggaggaggaaaag

SEQ ID NO: 454417 - DNA, 15 bp, Homo sapiens
gggggaggaggaaaa

SEQ ID NO: 454418 - DNA, 15 bp, Homo sapiens
ggggggaggaggaaa

SEQ ID NO: 454419 - DNA, 15 bp, Homo sapiens
gggggggaggaggaa

SEQ ID NO: 454420 - DNA, 15 bp, Homo sapiens
tgggggggaggagga

SEQ ID NO: 454421 - DNA, 15 bp, Homo sapiens
gtgggggggaggagg

SEQ ID NO: 454422 - DNA, 15 bp, Homo sapiens
ggtgggggggaggag

SEQ ID NO: 454423 - DNA, 15 bp, Homo sapiens
gggtgggggggagga

SEQ ID NO: 454424 - DNA, 15 bp, Homo sapiens
ggggtgggggggagg

SEQ ID NO: 454425 - DNA, 15 bp, Homo sapiens
gggggtgggggggag

SEQ ID NO: 454426 - DNA, 15 bp, Homo sapiens
tgggggtggggggga

SEQ ID NO: 454427 - DNA, 15 bp, Homo sapiens
atgggggtggggggg

SEQ ID NO: 454428 - DNA, 15 bp, Homo sapiens
aatgggggtgggggg

SEQ ID NO: 454429 - DNA, 15 bp, Homo sapiens
taatgggggtggggg

SEQ ID NO: 454430 - DNA, 15 bp, Homo sapiens
gtaatgggggtgggg

SEQ ID NO: 454431 - DNA, 15 bp, Homo sapiens
ggtaatgggggtggg

SEQ ID NO: 454432 - DNA, 15 bp, Homo sapiens
gggtaatgggggtgg

SEQ ID NO: 454433 - DNA, 15 bp, Homo sapiens
agggtaatgggggtg

SEQ ID NO: 454434 - DNA, 15 bp, Homo sapiens
gagggtaatgggggt

SEQ ID NO: 454435 - DNA, 15 bp, Homo sapiens
ggagggtaatggggg

SEQ ID NO: 454436 - DNA, 15 bp, Homo sapiens
cggagggtaatgggg

SEQ ID NO: 454437 - DNA, 15 bp, Homo sapiens
tcggagggtaatggg

SEQ ID NO: 454438 - DNA, 15 bp, Homo sapiens
ctcggagggtaatgg

SEQ ID NO: 454439 - DNA, 15 bp, Homo sapiens
cctcggagggtaatg

SEQ ID NO: 454440 - DNA, 15 bp, Homo sapiens
gcctcggagggtaat

SEQ ID NO: 454441 - DNA, 15 bp, Homo sapiens
tgcctcggagggtaa

SEQ ID NO: 454442 - DNA, 15 bp, Homo sapiens
ttgcctcggagggta

SEQ ID NO: 454443 - DNA, 15 bp, Homo sapiens
tttgcctcggagggt

SEQ ID NO: 454444 - DNA, 15 bp, Homo sapiens
gtttgcctcggaggg

SEQ ID NO: 454445 - DNA, 15 bp, Homo sapiens
tgtttgcctcggagg

SEQ ID NO: 454446 - DNA, 15 bp, Homo sapiens
gtgtttgcctcggag

SEQ ID NO: 454447 - DNA, 15 bp, Homo sapiens
agtgtttgcctcgga

SEQ ID NO: 454448 - DNA, 15 bp, Homo sapiens
cagtgtttgcctcgg

SEQ ID NO: 454449 - DNA, 15 bp, Homo sapiens
ccagtgtttgcctcg

SEQ ID NO: 454450 - DNA, 15 bp, Homo sapiens
gccagtgtttgcctc

SEQ ID NO: 454451 - DNA, 15 bp, Homo sapiens
tgccagtgtttgcct

SEQ ID NO: 454452 - DNA, 15 bp, Homo sapiens
atgccagtgtttgcc

SEQ ID NO: 454453 - DNA, 15 bp, Homo sapiens
aatgccagtgtttgc

SEQ ID NO: 454454 - DNA, 15 bp, Homo sapiens
gaatgccagtgtttg

SEQ ID NO: 454455 - DNA, 15 bp, Homo sapiens
tgaatgccagtgttt

SEQ ID NO: 454456 - DNA, 15 bp, Homo sapiens
ttgaatgccagtgtt

SEQ ID NO: 454457 - DNA, 15 bp, Homo sapiens
tttgaatgccagtgt

SEQ ID NO: 454458 - DNA, 15 bp, Homo sapiens
gtttgaatgccagtg

SEQ ID NO: 454459 - DNA, 15 bp, Homo sapiens
tgtttgaatgccagt

SEQ ID NO: 454460 - DNA, 15 bp, Homo sapiens
gtgtttgaatgccag

SEQ ID NO: 454461 - DNA, 15 bp, Homo sapiens
cgtgtttgaatgcca

SEQ ID NO: 454462 - DNA, 15 bp, Homo sapiens
gcgtgtttgaatgcc

SEQ ID NO: 454463 - DNA, 15 bp, Homo sapiens
tgcgtgtttgaatgc

SEQ ID NO: 454464 - DNA, 15 bp, Homo sapiens
gtgcgtgtttgaatg

SEQ ID NO: 454465 - DNA, 15 bp, Homo sapiens
cgtgcgtgtttgaat

SEQ ID NO: 454466 - DNA, 15 bp, Homo sapiens
tcgtgcgtgtttgaa

SEQ ID NO: 454467 - DNA, 15 bp, Homo sapiens
gtcgtgcgtgtttga

SEQ ID NO: 454468 - DNA, 15 bp, Homo sapiens
tgtcgtgcgtgtttg

SEQ ID NO: 454469 - DNA, 15 bp, Homo sapiens
ttgtcgtgcgtgttt

SEQ ID NO: 454470 - DNA, 15 bp, Homo sapiens
tttgtcgtgcgtgtt

SEQ ID NO: 454471 - DNA, 15 bp, Homo sapiens
gtttgtcgtgcgtgt

SEQ ID NO: 454472 - DNA, 15 bp, Homo sapiens
tgtttgtcgtgcgtg

SEQ ID NO: 454473 - DNA, 15 bp, Homo sapiens
gtgtttgtcgtgcgt

SEQ ID NO: 454474 - DNA, 15 bp, Homo sapiens
tgtgtttgtcgtgcg

SEQ ID NO: 454475 - DNA, 15 bp, Homo sapiens
ctgtgtttgtcgtgc

SEQ ID NO: 454476 - DNA, 15 bp, Homo sapiens
cctgtgtttgtcgtg

SEQ ID NO: 454477 - DNA, 15 bp, Homo sapiens
gcctgtgtttgtcgt

SEQ ID NO: 454478 - DNA, 15 bp, Homo sapiens
agcctgtgtttgtcg

SEQ ID NO: 454479 - DNA, 15 bp, Homo sapiens
gagcctgtgtttgtc

SEQ ID NO: 454480 - DNA, 15 bp, Homo sapiens
tgagcctgtgtttgt

SEQ ID NO: 454481 - DNA, 15 bp, Homo sapiens
ttgagcctgtgtttg

SEQ ID NO: 454482 - DNA, 15 bp, Homo sapiens
tttgagcctgtgttt

SEQ ID NO: 454483 - DNA, 15 bp, Homo sapiens
gtttgagcctgtgtt

SEQ ID NO: 454484 - DNA, 15 bp, Homo sapiens
tgtttgagcctgtgt

SEQ ID NO: 454485 - DNA, 15 bp, Homo sapiens
ttgtttgagcctgtg

SEQ ID NO: 454486 - DNA, 15 bp, Homo sapiens
tttgtttgagcctgt

SEQ ID NO: 454487 - DNA, 15 bp, Homo sapiens
gtttgtttgagcctg

SEQ ID NO: 454488 - DNA, 15 bp, Homo sapiens
agtttgtttgagcct

SEQ ID NO: 454489 - DNA, 15 bp, Homo sapiens
gagtttgtttgagcc

SEQ ID NO: 454490 - DNA, 15 bp, Homo sapiens
tgagtttgtttgagc

SEQ ID NO: 454491 - DNA, 15 bp, Homo sapiens
atgagtttgtttgag

SEQ ID NO: 454492 - DNA, 15 bp, Homo sapiens
catgagtttgtttga

SEQ ID NO: 454493 - DNA, 15 bp, Homo sapiens
tcatgagtttgtttg

SEQ ID NO: 454494 - DNA, 15 bp, Homo sapiens
ttcatgagtttgttt

SEQ ID NO: 454495 - DNA, 15 bp, Homo sapiens
attcatgagtttgtt

SEQ ID NO: 454496 - DNA, 15 bp, Homo sapiens
cattcatgagtttgt

SEQ ID NO: 454497 - DNA, 15 bp, Homo sapiens
gcattcatgagtttg

SEQ ID NO: 454498 - DNA, 15 bp, Homo sapiens
tgcattcatgagttt

SEQ ID NO: 454499 - DNA, 15 bp, Homo sapiens
gtgcattcatgagtt

SEQ ID NO: 454500 - DNA, 15 bp, Homo sapiens
tgtgcattcatgagt

SEQ ID NO: 454501 - DNA, 15 bp, Homo sapiens
gtgtgcattcatgag

SEQ ID NO: 454502 - DNA, 15 bp, Homo sapiens
agtgtgcattcatga

SEQ ID NO: 454503 - DNA, 15 bp, Homo sapiens
aagtgtgcattcatg

SEQ ID NO: 454504 - DNA, 15 bp, Homo sapiens
caagtgtgcattcat

SEQ ID NO: 454505 - DNA, 15 bp, Homo sapiens
gcaagtgtgcattca

SEQ ID NO: 454506 - DNA, 15 bp, Homo sapiens
tgcaagtgtgcattc

SEQ ID NO: 454507 - DNA, 15 bp, Homo sapiens
gtgcaagtgtgcatt

SEQ ID NO: 454508 - DNA, 15 bp, Homo sapiens
agtgcaagtgtgcat

SEQ ID NO: 454509 - DNA, 15 bp, Homo sapiens
cagtgcaagtgtgca

SEQ ID NO: 454510 - DNA, 15 bp, Homo sapiens
acagtgcaagtgtgc

SEQ ID NO: 454511 - DNA, 15 bp, Homo sapiens
gacagtgcaagtgtg

SEQ ID NO: 454512 - DNA, 15 bp, Homo sapiens
agacagtgcaagtgt

SEQ ID NO: 454513 - DNA, 15 bp, Homo sapiens
aagacagtgcaagtg

SEQ ID NO: 454514 - DNA, 15 bp, Homo sapiens
caagacagtgcaagt

SEQ ID NO: 454515 - DNA, 15 bp, Homo sapiens
tcaagacagtgcaag

SEQ ID NO: 454516 - DNA, 15 bp, Homo sapiens
ctcaagacagtgcaa

SEQ ID NO: 454517 - DNA, 15 bp, Homo sapiens
tctcaagacagtgca

SEQ ID NO: 454518 - DNA, 15 bp, Homo sapiens
ttctcaagacagtgc

SEQ ID NO: 454519 - DNA, 15 bp, Homo sapiens
tttctcaagacagtg

SEQ ID NO: 454520 - DNA, 15 bp, Homo sapiens
ttttctcaagacagt

SEQ ID NO: 454521 - DNA, 15 bp, Homo sapiens
tttttctcaagacag

SEQ ID NO: 454522 - DNA, 15 bp, Homo sapiens
ctttttctcaagaca

SEQ ID NO: 454523 - DNA, 15 bp, Homo sapiens
cctttttctcaagac

SEQ ID NO: 454524 - DNA, 15 bp, Homo sapiens
acctttttctcaaga

SEQ ID NO: 454525 - DNA, 15 bp, Homo sapiens
gacctttttctcaag

SEQ ID NO: 454526 - DNA, 15 bp, Homo sapiens
cgacctttttctcaa

SEQ ID NO: 454527 - DNA, 15 bp, Homo sapiens
ccgacctttttctca

SEQ ID NO: 454528 - DNA, 15 bp, Homo sapiens
tccgacctttttctc

SEQ ID NO: 454529 - DNA, 15 bp, Homo sapiens
atccgacctttttct

SEQ ID NO: 454530 - DNA, 15 bp, Homo sapiens
gatccgacctttttc

SEQ ID NO: 454531 - DNA, 15 bp, Homo sapiens
ggatccgaccttttt

SEQ ID NO: 454532 - DNA, 15 bp, Homo sapiens
cggatccgacctttt

SEQ ID NO: 454533 - DNA, 15 bp, Homo sapiens
ccggatccgaccttt

SEQ ID NO: 454534 - DNA, 15 bp, Homo sapiens
tccggatccgacctt

SEQ ID NO: 454535 - DNA, 15 bp, Homo sapiens
atccggatccgacct

SEQ ID NO: 454536 - DNA, 15 bp, Homo sapiens
gatccggatccgacc

SEQ ID NO: 454537 - DNA, 15 bp, Homo sapiens
cgatccggatccgac

SEQ ID NO: 454538 - DNA, 15 bp, Homo sapiens
gcgatccggatccga

SEQ ID NO: 454539 - DNA, 15 bp, Homo sapiens
cgcgatccggatccg

SEQ ID NO: 454540 - DNA, 15 bp, Homo sapiens
gcgcgatccggatcc

SEQ ID NO: 454541 - DNA, 15 bp, Homo sapiens
agcgcgatccggatc

SEQ ID NO: 454542 - DNA, 15 bp, Homo sapiens
gagcgcgatccggat

SEQ ID NO: 454543 - DNA, 15 bp, Homo sapiens
tgagcgcgatccgga

SEQ ID NO: 454544 - DNA, 15 bp, Homo sapiens
ctgagcgcgatccgg

SEQ ID NO: 454545 - DNA, 15 bp, Homo sapiens
tctgagcgcgatccg

SEQ ID NO: 454546 - DNA, 15 bp, Homo sapiens
ttctgagcgcgatcc

SEQ ID NO: 454547 - DNA, 15 bp, Homo sapiens
tttctgagcgcgatc

SEQ ID NO: 454548 - DNA, 15 bp, Homo sapiens
ctttctgagcgcgat

SEQ ID NO: 454549 - DNA, 15 bp, Homo sapiens
cctttctgagcgcga

SEQ ID NO: 454550 - DNA, 15 bp, Homo sapiens
tcctttctgagcgcg

SEQ ID NO: 454551 - DNA, 15 bp, Homo sapiens
ctcctttctgagcgc

SEQ ID NO: 454552 - DNA, 15 bp, Homo sapiens
cctcctttctgagcg

SEQ ID NO: 454553 - DNA, 15 bp, Homo sapiens
acctcctttctgagc

SEQ ID NO: 454554 - DNA, 15 bp, Homo sapiens
aacctcctttctgag

SEQ ID NO: 454555 - DNA, 15 bp, Homo sapiens
gaacctcctttctga

SEQ ID NO: 454556 - DNA, 15 bp, Homo sapiens
tgaacctcctttctg

SEQ ID NO: 454557 - DNA, 15 bp, Homo sapiens
ctgaacctcctttct

SEQ ID NO: 454558 - DNA, 15 bp, Homo sapiens
cctgaacctcctttc

SEQ ID NO: 454559 - DNA, 15 bp, Homo sapiens
tcctgaacctccttt

SEQ ID NO: 454560 - DNA, 15 bp, Homo sapiens
ctcctgaacctcctt

SEQ ID NO: 454561 - DNA, 15 bp, Homo sapiens
tctcctgaacctcct

SEQ ID NO: 454562 - DNA, 15 bp, Homo sapiens
gtctcctgaacctcc

SEQ ID NO: 454563 - DNA, 15 bp, Homo sapiens
tgtctcctgaacctc

SEQ ID NO: 454564 - DNA, 15 bp, Homo sapiens
ttgtctcctgaacct

SEQ ID NO: 454565 - DNA, 15 bp, Homo sapiens
cttgtctcctgaacc

SEQ ID NO: 454566 - DNA, 15 bp, Homo sapiens
acttgtctcctgaac

SEQ ID NO: 454567 - DNA, 15 bp, Homo sapiens
tacttgtctcctgaa

SEQ ID NO: 454568 - DNA, 15 bp, Homo sapiens
gtacttgtctcctga

SEQ ID NO: 454569 - DNA, 15 bp, Homo sapiens
tgtacttgtctcctg

SEQ ID NO: 454570 - DNA, 15 bp, Homo sapiens
ctgtacttgtctcct

SEQ ID NO: 454571 - DNA, 15 bp, Homo sapiens
tctgtacttgtctcc

SEQ ID NO: 454572 - DNA, 15 bp, Homo sapiens
ctctgtacttgtctc

SEQ ID NO: 454573 - DNA, 15 bp, Homo sapiens
tctctgtacttgtct

SEQ ID NO: 454574 - DNA, 15 bp, Homo sapiens
atctctgtacttgtc

SEQ ID NO: 454575 - DNA, 15 bp, Homo sapiens
aatctctgtacttgt

SEQ ID NO: 454576 - DNA, 15 bp, Homo sapiens
aaatctctgtacttg

SEQ ID NO: 454577 - DNA, 15 bp, Homo sapiens
gaaatctctgtactt

SEQ ID NO: 454578 - DNA, 15 bp, Homo sapiens
tgaaatctctgtact

SEQ ID NO: 454579 - DNA, 15 bp, Homo sapiens
ttgaaatctctgtac

SEQ ID NO: 454580 - DNA, 15 bp, Homo sapiens
gttgaaatctctgta

SEQ ID NO: 454581 - DNA, 15 bp, Homo sapiens
agttgaaatctctgt

SEQ ID NO: 454582 - DNA, 15 bp, Homo sapiens
aagttgaaatctctg

SEQ ID NO: 454583 - DNA, 15 bp, Homo sapiens
aaagttgaaatctct

SEQ ID NO: 454584 - DNA, 15 bp, Homo sapiens
gaaagttgaaatctc

SEQ ID NO: 454585 - DNA, 15 bp, Homo sapiens
agaaagttgaaatct

SEQ ID NO: 454586 - DNA, 15 bp, Homo sapiens
tagaaagttgaaatc

SEQ ID NO: 454587 - DNA, 15 bp, Homo sapiens
ttagaaagttgaaat

SEQ ID NO: 454588 - DNA, 15 bp, Homo sapiens
tttagaaagttgaaa

SEQ ID NO: 454589 - DNA, 15 bp, Homo sapiens
ttttagaaagttgaa

SEQ ID NO: 454590 - DNA, 15 bp, Homo sapiens
cttttagaaagttga

SEQ ID NO: 454591 - DNA, 15 bp, Homo sapiens
acttttagaaagttg

SEQ ID NO: 454592 - DNA, 15 bp, Homo sapiens
cacttttagaaagtt

SEQ ID NO: 454593 - DNA, 15 bp, Homo sapiens
gcacttttagaaagt

SEQ ID NO: 454594 - DNA, 15 bp, Homo sapiens
cgcacttttagaaag

SEQ ID NO: 454595 - DNA, 15 bp, Homo sapiens
gcgcacttttagaaa

SEQ ID NO: 454596 - DNA, 15 bp, Homo sapiens
agcgcacttttagaa

SEQ ID NO: 454597 - DNA, 15 bp, Homo sapiens
cagcgcacttttaga

SEQ ID NO: 454598 - DNA, 15 bp, Homo sapiens
ccagcgcacttttag

SEQ ID NO: 454599 - DNA, 15 bp, Homo sapiens
tccagcgcactttta

SEQ ID NO: 454600 - DNA, 15 bp, Homo sapiens
atccagcgcactttt

SEQ ID NO: 454601 - DNA, 15 bp, Homo sapiens
aatccagcgcacttt

SEQ ID NO: 454602 - DNA, 15 bp, Homo sapiens
aaatccagcgcactt

SEQ ID NO: 454603 - DNA, 15 bp, Homo sapiens
caaatccagcgcact

SEQ ID NO: 454604 - DNA, 15 bp, Homo sapiens
gcaaatccagcgcac

SEQ ID NO: 454605 - DNA, 15 bp, Homo sapiens
agcaaatccagcgca

SEQ ID NO: 454606 - DNA, 15 bp, Homo sapiens
aagcaaatccagcgc

SEQ ID NO: 454607 - DNA, 15 bp, Homo sapiens
aaagcaaatccagcg

SEQ ID NO: 454608 - DNA, 15 bp, Homo sapiens
gaaagcaaatccagc

SEQ ID NO: 454609 - DNA, 15 bp, Homo sapiens
agaaagcaaatccag

SEQ ID NO: 454610 - DNA, 15 bp, Homo sapiens
tagaaagcaaatcca

SEQ ID NO: 454611 - DNA, 15 bp, Homo sapiens
ctagaaagcaaatcc

SEQ ID NO: 454612 - DNA, 15 bp, Homo sapiens
actagaaagcaaatc

SEQ ID NO: 454613 - DNA, 15 bp, Homo sapiens
cactagaaagcaaat

SEQ ID NO: 454614 - DNA, 15 bp, Homo sapiens
tcactagaaagcaaa

SEQ ID NO: 454615 - DNA, 15 bp, Homo sapiens
ctcactagaaagcaa

SEQ ID NO: 454616 - DNA, 15 bp, Homo sapiens
tctcactagaaagca

SEQ ID NO: 454617 - DNA, 15 bp, Homo sapiens
ctctcactagaaagc

SEQ ID NO: 454618 - DNA, 15 bp, Homo sapiens
tctctcactagaaag

SEQ ID NO: 454619 - DNA, 15 bp, Homo sapiens
ctctctcactagaaa

SEQ ID NO: 454620 - DNA, 15 bp, Homo sapiens
tctctctcactagaa

SEQ ID NO: 454621 - DNA, 15 bp, Homo sapiens
atctctctcactaga

SEQ ID NO: 454622 - DNA, 15 bp, Homo sapiens
catctctctcactag

SEQ ID NO: 454623 - DNA, 15 bp, Homo sapiens
ccatctctctcacta

SEQ ID NO: 454624 - DNA, 15 bp, Homo sapiens
cccatctctctcact

SEQ ID NO: 454625 - DNA, 15 bp, Homo sapiens
ccccatctctctcac

SEQ ID NO: 454626 - DNA, 15 bp, Homo sapiens
tccccatctctctca

SEQ ID NO: 454627 - DNA, 15 bp, Homo sapiens
gtccccatctctctc

SEQ ID NO: 454628 - DNA, 15 bp, Homo sapiens
tgtccccatctctct

SEQ ID NO: 454629 - DNA, 15 bp, Homo sapiens
ttgtccccatctctc

SEQ ID NO: 454630 - DNA, 15 bp, Homo sapiens
gttgtccccatctct

SEQ ID NO: 454631 - DNA, 15 bp, Homo sapiens
agttgtccccatctc

SEQ ID NO: 454632 - DNA, 15 bp, Homo sapiens
cagttgtccccatct

SEQ ID NO: 454633 - DNA, 15 bp, Homo sapiens
tcagttgtccccatc

SEQ ID NO: 454634 - DNA, 15 bp, Homo sapiens
atcagttgtccccat

SEQ ID NO: 454635 - DNA, 15 bp, Homo sapiens
aatcagttgtcccca

SEQ ID NO: 454636 - DNA, 15 bp, Homo sapiens
aaatcagttgtcccc

SEQ ID NO: 454637 - DNA, 15 bp, Homo sapiens
taaatcagttgtccc

SEQ ID NO: 454638 - DNA, 15 bp, Homo sapiens
ttaaatcagttgtcc

SEQ ID NO: 454639 - DNA, 15 bp, Homo sapiens
tttaaatcagttgtc

SEQ ID NO: 454640 - DNA, 15 bp, Homo sapiens
atttaaatcagttgt

SEQ ID NO: 454641 - DNA, 15 bp, Homo sapiens
aatttaaatcagttg

SEQ ID NO: 454642 - DNA, 15 bp, Homo sapiens
gaatttaaatcagtt

SEQ ID NO: 454643 - DNA, 15 bp, Homo sapiens
agaatttaaatcagt

SEQ ID NO: 454644 - DNA, 15 bp, Homo sapiens
aagaatttaaatcag

SEQ ID NO: 454645 - DNA, 15 bp, Homo sapiens
gaagaatttaaatca

SEQ ID NO: 454646 - DNA, 15 bp, Homo sapiens
tgaagaatttaaatc

SEQ ID NO: 454647 - DNA, 15 bp, Homo sapiens
gtgaagaatttaaat

SEQ ID NO: 454648 - DNA, 15 bp, Homo sapiens
agtgaagaatttaaa

SEQ ID NO: 454649 - DNA, 15 bp, Homo sapiens
gagtgaagaatttaa

SEQ ID NO: 454650 - DNA, 15 bp, Homo sapiens
ggagtgaagaattta

SEQ ID NO: 454651 - DNA, 15 bp, Homo sapiens
cggagtgaagaattt

SEQ ID NO: 454652 - DNA, 15 bp, Homo sapiens
tcggagtgaagaatt

SEQ ID NO: 454653 - DNA, 15 bp, Homo sapiens
ttcggagtgaagaat

SEQ ID NO: 454654 - DNA, 15 bp, Homo sapiens
gttcggagtgaagaa

SEQ ID NO: 454655 - DNA, 15 bp, Homo sapiens
ggttcggagtgaaga

SEQ ID NO: 454656 - DNA, 15 bp, Homo sapiens
tggttcggagtgaag

SEQ ID NO: 454657 - DNA, 15 bp, Homo sapiens
atggttcggagtgaa

SEQ ID NO: 454658 - DNA, 15 bp, Homo sapiens
aatggttcggagtga

SEQ ID NO: 454659 - DNA, 15 bp, Homo sapiens
aaatggttcggagtg

SEQ ID NO: 454660 - DNA, 15 bp, Homo sapiens
caaatggttcggagt

SEQ ID NO: 454661 - DNA, 15 bp, Homo sapiens
ccaaatggttcggag

SEQ ID NO: 454662 - DNA, 15 bp, Homo sapiens
cccaaatggttcgga

SEQ ID NO: 454663 - DNA, 15 bp, Homo sapiens
tcccaaatggttcgg

SEQ ID NO: 454664 - DNA, 15 bp, Homo sapiens
ctcccaaatggttcg

SEQ ID NO: 454665 - DNA, 15 bp, Homo sapiens
tctcccaaatggttc

SEQ ID NO: 454666 - DNA, 15 bp, Homo sapiens
ctctcccaaatggtt

SEQ ID NO: 454667 - DNA, 15 bp, Homo sapiens
tctctcccaaatggt

SEQ ID NO: 454668 - DNA, 15 bp, Homo sapiens
ctctctcccaaatgg

SEQ ID NO: 454669 - DNA, 15 bp, Homo sapiens
cctctctcccaaatg

SEQ ID NO: 454670 - DNA, 15 bp, Homo sapiens
gcctctctcccaaat

SEQ ID NO: 454671 - DNA, 15 bp, Homo sapiens
tgcctctctcccaaa

SEQ ID NO: 454672 - DNA, 15 bp, Homo sapiens
gtgcctctctcccaa

SEQ ID NO: 454673 - DNA, 15 bp, Homo sapiens
agtgcctctctccca

SEQ ID NO: 454674 - DNA, 15 bp, Homo sapiens
gagtgcctctctccc

SEQ ID NO: 454675 - DNA, 15 bp, Homo sapiens
ggagtgcctctctcc

SEQ ID NO: 454676 - DNA, 15 bp, Homo sapiens
aggagtgcctctctc

SEQ ID NO: 454677 - DNA, 15 bp, Homo sapiens
caggagtgcctctct

SEQ ID NO: 454678 - DNA, 15 bp, Homo sapiens
tcaggagtgcctctc

SEQ ID NO: 454679 - DNA, 15 bp, Homo sapiens
gtcaggagtgcctct

SEQ ID NO: 454680 - DNA, 15 bp, Homo sapiens
ggtcaggagtgcctc

SEQ ID NO: 454681 - DNA, 15 bp, Homo sapiens
tggtcaggagtgcct

SEQ ID NO: 454682 - DNA, 15 bp, Homo sapiens
gtggtcaggagtgcc

SEQ ID NO: 454683 - DNA, 15 bp, Homo sapiens
agtggtcaggagtgc

SEQ ID NO: 454684 - DNA, 15 bp, Homo sapiens
aagtggtcaggagtg

SEQ ID NO: 454685 - DNA, 15 bp, Homo sapiens
gaagtggtcaggagt

SEQ ID NO: 454686 - DNA, 15 bp, Homo sapiens
agaagtggtcaggag

SEQ ID NO: 454687 - DNA, 15 bp, Homo sapiens
gagaagtggtcagga

SEQ ID NO: 454688 - DNA, 15 bp, Homo sapiens
cgagaagtggtcagg

SEQ ID NO: 454689 - DNA, 15 bp, Homo sapiens
ccgagaagtggtcag

SEQ ID NO: 454690 - DNA, 15 bp, Homo sapiens
cccgagaagtggtca

SEQ ID NO: 454691 - DNA, 15 bp, Homo sapiens
gcccgagaagtggtc

SEQ ID NO: 454692 - DNA, 15 bp, Homo sapiens
agcccgagaagtggt

SEQ ID NO: 454693 - DNA, 15 bp, Homo sapiens
gagcccgagaagtgg

SEQ ID NO: 454694 - DNA, 15 bp, Homo sapiens
ggagcccgagaagtg

SEQ ID NO: 454695 - DNA, 15 bp, Homo sapiens
aggagcccgagaagt

SEQ ID NO: 454696 - DNA, 15 bp, Homo sapiens
aaggagcccgagaag

SEQ ID NO: 454697 - DNA, 15 bp, Homo sapiens
gaaggagcccgagaa

SEQ ID NO: 454698 - DNA, 15 bp, Homo sapiens
ggaaggagcccgaga

SEQ ID NO: 454699 - DNA, 15 bp, Homo sapiens
cggaaggagcccgag

SEQ ID NO: 454700 - DNA, 15 bp, Homo sapiens
ccggaaggagcccga

SEQ ID NO: 454701 - DNA, 15 bp, Homo sapiens
gccggaaggagcccg

SEQ ID NO: 454702 - DNA, 15 bp, Homo sapiens
ggccggaaggagccc

SEQ ID NO: 454703 - DNA, 15 bp, Homo sapiens
gggccggaaggagcc

SEQ ID NO: 454704 - DNA, 15 bp, Homo sapiens
ggggccggaaggagc

SEQ ID NO: 454705 - DNA, 15 bp, Homo sapiens
aggggccggaaggag

SEQ ID NO: 454706 - DNA, 15 bp, Homo sapiens
gaggggccggaagga

SEQ ID NO: 454707 - DNA, 15 bp, Homo sapiens
agaggggccggaagg

SEQ ID NO: 454708 - DNA, 15 bp, Homo sapiens
aagaggggccggaag

SEQ ID NO: 454709 - DNA, 15 bp, Homo sapiens
aaagaggggccggaa

SEQ ID NO: 454710 - DNA, 15 bp, Homo sapiens
aaaagaggggccgga

SEQ ID NO: 454711 - DNA, 15 bp, Homo sapiens
gaaaagaggggccgg

SEQ ID NO: 454712 - DNA, 15 bp, Homo sapiens
ggaaaagaggggccg

SEQ ID NO: 454713 - DNA, 15 bp, Homo sapiens
tggaaaagaggggcc

SEQ ID NO: 454714 - DNA, 15 bp, Homo sapiens
ctggaaaagaggggc

SEQ ID NO: 454715 - DNA, 15 bp, Homo sapiens
cctggaaaagagggg

SEQ ID NO: 454716 - DNA, 15 bp, Homo sapiens
ccctggaaaagaggg

SEQ ID NO: 454717 - DNA, 15 bp, Homo sapiens
cccctggaaaagagg

SEQ ID NO: 454718 - DNA, 15 bp, Homo sapiens
tcccctggaaaagag

SEQ ID NO: 454719 - DNA, 15 bp, Homo sapiens
ttcccctggaaaaga

SEQ ID NO: 454720 - DNA, 15 bp, Homo sapiens
tttcccctggaaaag

SEQ ID NO: 454721 - DNA, 15 bp, Homo sapiens
ctttcccctggaaaa

SEQ ID NO: 454722 - DNA, 15 bp, Homo sapiens
tctttcccctggaaa

SEQ ID NO: 454723 - DNA, 15 bp, Homo sapiens
ctctttcccctggaa

SEQ ID NO: 454724 - DNA, 15 bp, Homo sapiens
actctttcccctgga

SEQ ID NO: 454725 - DNA, 15 bp, Homo sapiens
aactctttcccctgg

SEQ ID NO: 454726 - DNA, 15 bp, Homo sapiens
caactctttcccctg

SEQ ID NO: 454727 - DNA, 15 bp, Homo sapiens
acaactctttcccct

SEQ ID NO: 454728 - DNA, 15 bp, Homo sapiens
tacaactctttcccc

SEQ ID NO: 454729 - DNA, 15 bp, Homo sapiens
ttacaactctttccc

SEQ ID NO: 454730 - DNA, 15 bp, Homo sapiens
attacaactctttcc

SEQ ID NO: 454731 - DNA, 15 bp, Homo sapiens
tattacaactctttc

SEQ ID NO: 454732 - DNA, 15 bp, Homo sapiens
ttattacaactcttt

SEQ ID NO: 454733 - DNA, 15 bp, Homo sapiens
attattacaactctt

SEQ ID NO: 454734 - DNA, 15 bp, Homo sapiens
tattattacaactct

SEQ ID NO: 454735 - DNA, 15 bp, Homo sapiens
ttattattacaactc

SEQ ID NO: 454736 - DNA, 15 bp, Homo sapiens
gttattattacaact

SEQ ID NO: 454737 - DNA, 15 bp, Homo sapiens
tgttattattacaac

SEQ ID NO: 454738 - DNA, 15 bp, Homo sapiens
ctgttattattacaa

SEQ ID NO: 454739 - DNA, 15 bp, Homo sapiens
actgttattattaca

SEQ ID NO: 454740 - DNA, 15 bp, Homo sapiens
cactgttattattac

SEQ ID NO: 454741 - DNA, 15 bp, Homo sapiens
ccactgttattatta

SEQ ID NO: 454742 - DNA, 15 bp, Homo sapiens
cccactgttattatt

SEQ ID NO: 454743 - DNA, 15 bp, Homo sapiens
gcccactgttattat

SEQ ID NO: 454744 - DNA, 15 bp, Homo sapiens
cgcccactgttatta

SEQ ID NO: 454745 - DNA, 15 bp, Homo sapiens
gcgcccactgttatt

SEQ ID NO: 454746 - DNA, 15 bp, Homo sapiens
agcgcccactgttat

SEQ ID NO: 454747 - DNA, 15 bp, Homo sapiens
aagcgcccactgtta

SEQ ID NO: 454748 - DNA, 15 bp, Homo sapiens
aaagcgcccactgtt

SEQ ID NO: 454749 - DNA, 15 bp, Homo sapiens
aaaagcgcccactgt

SEQ ID NO: 454750 - DNA, 15 bp, Homo sapiens
caaaagcgcccactg

SEQ ID NO: 454751 - DNA, 15 bp, Homo sapiens
tcaaaagcgcccact

SEQ ID NO: 454752 - DNA, 15 bp, Homo sapiens
ctcaaaagcgcccac

SEQ ID NO: 454753 - DNA, 15 bp, Homo sapiens
gctcaaaagcgccca

SEQ ID NO: 454754 - DNA, 15 bp, Homo sapiens
cgctcaaaagcgccc

SEQ ID NO: 454755 - DNA, 15 bp, Homo sapiens
gcgctcaaaagcgcc

SEQ ID NO: 454756 - DNA, 15 bp, Homo sapiens
agcgctcaaaagcgc

SEQ ID NO: 454757 - DNA, 15 bp, Homo sapiens
cagcgctcaaaagcg

SEQ ID NO: 454758 - DNA, 15 bp, Homo sapiens
ccagcgctcaaaagc

SEQ ID NO: 454759 - DNA, 15 bp, Homo sapiens
gccagcgctcaaaag

SEQ ID NO: 454760 - DNA, 15 bp, Homo sapiens
agccagcgctcaaaa

SEQ ID NO: 454761 - DNA, 15 bp, Homo sapiens
tagccagcgctcaaa

SEQ ID NO: 454762 - DNA, 15 bp, Homo sapiens
ctagccagcgctcaa

SEQ ID NO: 454763 - DNA, 15 bp, Homo sapiens
actagccagcgctca

SEQ ID NO: 454764 - DNA, 15 bp, Homo sapiens
cactagccagcgctc

SEQ ID NO: 454765 - DNA, 15 bp, Homo sapiens
ccactagccagcgct

SEQ ID NO: 454766 - DNA, 15 bp, Homo sapiens
gccactagccagcgc

SEQ ID NO: 454767 - DNA, 15 bp, Homo sapiens
cgccactagccagcg

SEQ ID NO: 454768 - DNA, 15 bp, Homo sapiens
tcgccactagccagc

SEQ ID NO: 454769 - DNA, 15 bp, Homo sapiens
ctcgccactagccag

SEQ ID NO: 454770 - DNA, 15 bp, Homo sapiens
actcgccactagcca

SEQ ID NO: 454771 - DNA, 15 bp, Homo sapiens
aactcgccactagcc

SEQ ID NO: 454772 - DNA, 15 bp, Homo sapiens
taactcgccactagc

SEQ ID NO: 454773 - DNA, 15 bp, Homo sapiens
gtaactcgccactag

SEQ ID NO: 454774 - DNA, 15 bp, Homo sapiens
agtaactcgccacta

SEQ ID NO: 454775 - DNA, 15 bp, Homo sapiens
gagtaactcgccact

SEQ ID NO: 454776 - DNA, 15 bp, Homo sapiens
agagtaactcgccac

SEQ ID NO: 454777 - DNA, 15 bp, Homo sapiens
aagagtaactcgcca

SEQ ID NO: 454778 - DNA, 15 bp, Homo sapiens
gaagagtaactcgcc

SEQ ID NO: 454779 - DNA, 15 bp, Homo sapiens
agaagagtaactcgc

SEQ ID NO: 454780 - DNA, 15 bp, Homo sapiens
tagaagagtaactcg

SEQ ID NO: 454781 - DNA, 15 bp, Homo sapiens
ttagaagagtaactc

SEQ ID NO: 454782 - DNA, 15 bp, Homo sapiens
cttagaagagtaact

SEQ ID NO: 454783 - DNA, 15 bp, Homo sapiens
acttagaagagtaac

SEQ ID NO: 454784 - DNA, 15 bp, Homo sapiens
cacttagaagagtaa

SEQ ID NO: 454785 - DNA, 15 bp, Homo sapiens
gcacttagaagagta

SEQ ID NO: 454786 - DNA, 15 bp, Homo sapiens
tgcacttagaagagt

SEQ ID NO: 454787 - DNA, 15 bp, Homo sapiens
atgcacttagaagag

SEQ ID NO: 454788 - DNA, 15 bp, Homo sapiens
tatgcacttagaaga

SEQ ID NO: 454789 - DNA, 15 bp, Homo sapiens
gtatgcacttagaag

SEQ ID NO: 454790 - DNA, 15 bp, Homo sapiens
tgtatgcacttagaa

SEQ ID NO: 454791 - DNA, 15 bp, Homo sapiens
atgtatgcacttaga

SEQ ID NO: 454792 - DNA, 15 bp, Homo sapiens
aatgtatgcacttag

SEQ ID NO: 454793 - DNA, 15 bp, Homo sapiens
aaatgtatgcactta

SEQ ID NO: 454794 - DNA, 15 bp, Homo sapiens
gaaatgtatgcactt

SEQ ID NO: 454795 - DNA, 15 bp, Homo sapiens
agaaatgtatgcact

SEQ ID NO: 454796 - DNA, 15 bp, Homo sapiens
aagaaatgtatgcac

SEQ ID NO: 454797 - DNA, 15 bp, Homo sapiens
aaagaaatgtatgca

SEQ ID NO: 454798 - DNA, 15 bp, Homo sapiens
gaaagaaatgtatgc

SEQ ID NO: 454799 - DNA, 15 bp, Homo sapiens
tgaaagaaatgtatg

SEQ ID NO: 454800 - DNA, 15 bp, Homo sapiens
gtgaaagaaatgtat

SEQ ID NO: 454801 - DNA, 15 bp, Homo sapiens
tgtgaaagaaatgta

SEQ ID NO: 454802 - DNA, 15 bp, Homo sapiens
ctgtgaaagaaatgt

SEQ ID NO: 454803 - DNA, 15 bp, Homo sapiens
cctgtgaaagaaatg

SEQ ID NO: 454804 - DNA, 15 bp, Homo sapiens
ccctgtgaaagaaat

SEQ ID NO: 454805 - DNA, 15 bp, Homo sapiens
tccctgtgaaagaaa

SEQ ID NO: 454806 - DNA, 15 bp, Homo sapiens
atccctgtgaaagaa

SEQ ID NO: 454807 - DNA, 15 bp, Homo sapiens
tatccctgtgaaaga

SEQ ID NO: 454808 - DNA, 15 bp, Homo sapiens
gtatccctgtgaaag

SEQ ID NO: 454809 - DNA, 15 bp, Homo sapiens
agtatccctgtgaaa

SEQ ID NO: 454810 - DNA, 15 bp, Homo sapiens
cagtatccctgtgaa

SEQ ID NO: 454811 - DNA, 15 bp, Homo sapiens
ccagtatccctgtga

SEQ ID NO: 454812 - DNA, 15 bp, Homo sapiens
gccagtatccctgtg

SEQ ID NO: 454813 - DNA, 15 bp, Homo sapiens
ggccagtatccctgt

SEQ ID NO: 454814 - DNA, 15 bp, Homo sapiens
aggccagtatccctg

SEQ ID NO: 454815 - DNA, 15 bp, Homo sapiens
caggccagtatccct

SEQ ID NO: 454816 - DNA, 15 bp, Homo sapiens
acaggccagtatccc

SEQ ID NO: 454817 - DNA, 15 bp, Homo sapiens
cacaggccagtatcc

SEQ ID NO: 454818 - DNA, 15 bp, Homo sapiens
tcacaggccagtatc

SEQ ID NO: 454819 - DNA, 15 bp, Homo sapiens
ctcacaggccagtat

SEQ ID NO: 454820 - DNA, 15 bp, Homo sapiens
actcacaggccagta

SEQ ID NO: 454821 - DNA, 15 bp, Homo sapiens
aactcacaggccagt

SEQ ID NO: 454822 - DNA, 15 bp, Homo sapiens
aaactcacaggccag

SEQ ID NO: 454823 - DNA, 15 bp, Homo sapiens
gaaactcacaggcca

SEQ ID NO: 454824 - DNA, 15 bp, Homo sapiens
tgaaactcacaggcc

SEQ ID NO: 454825 - DNA, 15 bp, Homo sapiens
ctgaaactcacaggc

SEQ ID NO: 454826 - DNA, 15 bp, Homo sapiens
gctgaaactcacagg

SEQ ID NO: 454827 - DNA, 15 bp, Homo sapiens
tgctgaaactcacag

SEQ ID NO: 454828 - DNA, 15 bp, Homo sapiens
gtgctgaaactcaca

SEQ ID NO: 454829 - DNA, 15 bp, Homo sapiens
ggtgctgaaactcac

SEQ ID NO: 454830 - DNA, 15 bp, Homo sapiens
cggtgctgaaactca

SEQ ID NO: 454831 - DNA, 15 bp, Homo sapiens
tcggtgctgaaactc

SEQ ID NO: 454832 - DNA, 15 bp, Homo sapiens
gtcggtgctgaaact

SEQ ID NO: 454833 - DNA, 15 bp, Homo sapiens
agtcggtgctgaaac

SEQ ID NO: 454834 - DNA, 15 bp, Homo sapiens
aagtcggtgctgaaa

SEQ ID NO: 454835 - DNA, 15 bp, Homo sapiens
aaagtcggtgctgaa

SEQ ID NO: 454836 - DNA, 15 bp, Homo sapiens
gaaagtcggtgctga

SEQ ID NO: 454837 - DNA, 15 bp, Homo sapiens
agaaagtcggtgctg

SEQ ID NO: 454838 - DNA, 15 bp, Homo sapiens
cagaaagtcggtgct

SEQ ID NO: 454839 - DNA, 15 bp, Homo sapiens
ccagaaagtcggtgc

SEQ ID NO: 454840 - DNA, 15 bp, Homo sapiens
tccagaaagtcggtg

SEQ ID NO: 454841 - DNA, 15 bp, Homo sapiens
ttccagaaagtcggt

SEQ ID NO: 454842 - DNA, 15 bp, Homo sapiens
gttccagaaagtcgg

SEQ ID NO: 454843 - DNA, 15 bp, Homo sapiens
agttccagaaagtcg

SEQ ID NO: 454844 - DNA, 15 bp, Homo sapiens
cagttccagaaagtc

SEQ ID NO: 454845 - DNA, 15 bp, Homo sapiens
acagttccagaaagt

SEQ ID NO: 454846 - DNA, 15 bp, Homo sapiens
tacagttccagaaag

SEQ ID NO: 454847 - DNA, 15 bp, Homo sapiens
ttacagttccagaaa

SEQ ID NO: 454848 - DNA, 15 bp, Homo sapiens
tttacagttccagaa

SEQ ID NO: 454849 - DNA, 15 bp, Homo sapiens
ctttacagttccaga

SEQ ID NO: 454850 - DNA, 15 bp, Homo sapiens
actttacagttccag

SEQ ID NO: 454851 - DNA, 15 bp, Homo sapiens
tactttacagttcca

SEQ ID NO: 454852 - DNA, 15 bp, Homo sapiens
ttactttacagttcc

SEQ ID NO: 454853 - DNA, 15 bp, Homo sapiens
cttactttacagttc

SEQ ID NO: 454854 - DNA, 15 bp, Homo sapiens
gcttactttacagtt

SEQ ID NO: 454855 - DNA, 15 bp, Homo sapiens
ggcttactttacagt

SEQ ID NO: 454856 - DNA, 15 bp, Homo sapiens
tggcttactttacag

SEQ ID NO: 454857 - DNA, 15 bp, Homo sapiens
ttggcttactttaca

SEQ ID NO: 454858 - DNA, 15 bp, Homo sapiens
attggcttactttac

SEQ ID NO: 454859 - DNA, 15 bp, Homo sapiens
aattggcttacttta

SEQ ID NO: 454860 - DNA, 15 bp, Homo sapiens
aaattggcttacttt

SEQ ID NO: 454861 - DNA, 15 bp, Homo sapiens
aaaattggcttactt

SEQ ID NO: 454862 - DNA, 15 bp, Homo sapiens
caaaattggcttact

SEQ ID NO: 454863 - DNA, 15 bp, Homo sapiens
tcaaaattggcttac

SEQ ID NO: 454864 - DNA, 15 bp, Homo sapiens
gtcaaaattggctta

SEQ ID NO: 454865 - DNA, 15 bp, Homo sapiens
cgtcaaaattggctt

SEQ ID NO: 454866 - DNA, 15 bp, Homo sapiens
gcgtcaaaattggct

SEQ ID NO: 454867 - DNA, 15 bp, Homo sapiens
tgcgtcaaaattggc

SEQ ID NO: 454868 - DNA, 15 bp, Homo sapiens
atgcgtcaaaattgg

SEQ ID NO: 454869 - DNA, 15 bp, Homo sapiens
tatgcgtcaaaattg

SEQ ID NO: 454870 - DNA, 15 bp, Homo sapiens
ctatgcgtcaaaatt

SEQ ID NO: 454871 - DNA, 15 bp, Homo sapiens
actatgcgtcaaaat

SEQ ID NO: 454872 - DNA, 15 bp, Homo sapiens
tactatgcgtcaaaa

SEQ ID NO: 454873 - DNA, 15 bp, Homo sapiens
ctactatgcgtcaaa

SEQ ID NO: 454874 - DNA, 15 bp, Homo sapiens
cctactatgcgtcaa

SEQ ID NO: 454875 - DNA, 15 bp, Homo sapiens
ccctactatgcgtca

SEQ ID NO: 454876 - DNA, 15 bp, Homo sapiens
cccctactatgcgtc

SEQ ID NO: 454877 - DNA, 15 bp, Homo sapiens
gcccctactatgcgt

SEQ ID NO: 454878 - DNA, 15 bp, Homo sapiens
agcccctactatgcg

SEQ ID NO: 454879 - DNA, 15 bp, Homo sapiens
aagcccctactatgc

SEQ ID NO: 454880 - DNA, 15 bp, Homo sapiens
gaagcccctactatg

SEQ ID NO: 454881 - DNA, 15 bp, Homo sapiens
cgaagcccctactat

SEQ ID NO: 454882 - DNA, 15 bp, Homo sapiens
acgaagcccctacta

SEQ ID NO: 454883 - DNA, 15 bp, Homo sapiens
tacgaagcccctact

SEQ ID NO: 454884 - DNA, 15 bp, Homo sapiens
ttacgaagcccctac

SEQ ID NO: 454885 - DNA, 15 bp, Homo sapiens
tttacgaagccccta

SEQ ID NO: 454886 - DNA, 15 bp, Homo sapiens
atttacgaagcccct

SEQ ID NO: 454887 - DNA, 15 bp, Homo sapiens
catttacgaagcccc

SEQ ID NO: 454888 - DNA, 15 bp, Homo sapiens
acatttacgaagccc

SEQ ID NO: 454889 - DNA, 15 bp, Homo sapiens
aacatttacgaagcc

SEQ ID NO: 454890 - DNA, 15 bp, Homo sapiens
aaacatttacgaagc

SEQ ID NO: 454891 - DNA, 15 bp, Homo sapiens
gaaacatttacgaag

SEQ ID NO: 454892 - DNA, 15 bp, Homo sapiens
agaaacatttacgaa

SEQ ID NO: 454893 - DNA, 15 bp, Homo sapiens
cagaaacatttacga

SEQ ID NO: 454894 - DNA, 15 bp, Homo sapiens
gcagaaacatttacg

SEQ ID NO: 454895 - DNA, 15 bp, Homo sapiens
tgcagaaacatttac

SEQ ID NO: 454896 - DNA, 15 bp, Homo sapiens
ttgcagaaacattta

SEQ ID NO: 454897 - DNA, 15 bp, Homo sapiens
attgcagaaacattt

SEQ ID NO: 454898 - DNA, 15 bp, Homo sapiens
cattgcagaaacatt

SEQ ID NO: 454899 - DNA, 15 bp, Homo sapiens
gcattgcagaaacat

SEQ ID NO: 454900 - DNA, 15 bp, Homo sapiens
agcattgcagaaaca

SEQ ID NO: 454901 - DNA, 15 bp, Homo sapiens
cagcattgcagaaac

SEQ ID NO: 454902 - DNA, 15 bp, Homo sapiens
acagcattgcagaaa

SEQ ID NO: 454903 - DNA, 15 bp, Homo sapiens
aacagcattgcagaa

SEQ ID NO: 454904 - DNA, 15 bp, Homo sapiens
aaacagcattgcaga

SEQ ID NO: 454905 - DNA, 15 bp, Homo sapiens
caaacagcattgcag

SEQ ID NO: 454906 - DNA, 15 bp, Homo sapiens
gcaaacagcattgca

SEQ ID NO: 454907 - DNA, 15 bp, Homo sapiens
cgcaaacagcattgc

SEQ ID NO: 454908 - DNA, 15 bp, Homo sapiens
tcgcaaacagcattg

SEQ ID NO: 454909 - DNA, 15 bp, Homo sapiens
ttcgcaaacagcatt

SEQ ID NO: 454910 - DNA, 15 bp, Homo sapiens
attcgcaaacagcat

SEQ ID NO: 454911 - DNA, 15 bp, Homo sapiens
gattcgcaaacagca

SEQ ID NO: 454912 - DNA, 15 bp, Homo sapiens
agattcgcaaacagc

SEQ ID NO: 454913 - DNA, 15 bp, Homo sapiens
aagattcgcaaacag

SEQ ID NO: 454914 - DNA, 15 bp, Homo sapiens
caagattcgcaaaca

SEQ ID NO: 454915 - DNA, 15 bp, Homo sapiens
tcaagattcgcaaac

SEQ ID NO: 454916 - DNA, 15 bp, Homo sapiens
ttcaagattcgcaaa

SEQ ID NO: 454917 - DNA, 15 bp, Homo sapiens
gttcaagattcgcaa

SEQ ID NO: 454918 - DNA, 15 bp, Homo sapiens
agttcaagattcgca

SEQ ID NO: 454919 - DNA, 15 bp, Homo sapiens
aagttcaagattcgc

SEQ ID NO: 454920 - DNA, 15 bp, Homo sapiens
taagttcaagattcg

SEQ ID NO: 454921 - DNA, 15 bp, Homo sapiens
ataagttcaagattc

SEQ ID NO: 454922 - DNA, 15 bp, Homo sapiens
aataagttcaagatt

SEQ ID NO: 454923 - DNA, 15 bp, Homo sapiens
gaataagttcaagat

SEQ ID NO: 454924 - DNA, 15 bp, Homo sapiens
agaataagttcaaga

SEQ ID NO: 454925 - DNA, 15 bp, Homo sapiens
cagaataagttcaag

SEQ ID NO: 454926 - DNA, 15 bp, Homo sapiens
ccagaataagttcaa

SEQ ID NO: 454927 - DNA, 15 bp, Homo sapiens
gccagaataagttca

SEQ ID NO: 454928 - DNA, 15 bp, Homo sapiens
cgccagaataagttc

SEQ ID NO: 454929 - DNA, 15 bp, Homo sapiens
ccgccagaataagtt

SEQ ID NO: 454930 - DNA, 15 bp, Homo sapiens
accgccagaataagt

SEQ ID NO: 454931 - DNA, 15 bp, Homo sapiens
taccgccagaataag

SEQ ID NO: 454932 - DNA, 15 bp, Homo sapiens
ctaccgccagaataa

SEQ ID NO: 454933 - DNA, 15 bp, Homo sapiens
tctaccgccagaata

SEQ ID NO: 454934 - DNA, 15 bp, Homo sapiens
ctctaccgccagaat

SEQ ID NO: 454935 - DNA, 15 bp, Homo sapiens
cctctaccgccagaa

SEQ ID NO: 454936 - DNA, 15 bp, Homo sapiens
ccctctaccgccaga

SEQ ID NO: 454937 - DNA, 15 bp, Homo sapiens
tccctctaccgccag

SEQ ID NO: 454938 - DNA, 15 bp, Homo sapiens
ctccctctaccgcca

SEQ ID NO: 454939 - DNA, 15 bp, Homo sapiens
tctccctctaccgcc

SEQ ID NO: 454940 - DNA, 15 bp, Homo sapiens
ctctccctctaccgc

SEQ ID NO: 454941 - DNA, 15 bp, Homo sapiens
actctccctctaccg

SEQ ID NO: 454942 - DNA, 15 bp, Homo sapiens
cactctccctctacc

SEQ ID NO: 454943 - DNA, 15 bp, Homo sapiens
ccactctccctctac

SEQ ID NO: 454944 - DNA, 15 bp, Homo sapiens
cccactctccctcta

SEQ ID NO: 454945 - DNA, 15 bp, Homo sapiens
tcccactctccctct

SEQ ID NO: 454946 - DNA, 15 bp, Homo sapiens
atcccactctccctc

SEQ ID NO: 454947 - DNA, 15 bp, Homo sapiens
catcccactctccct

SEQ ID NO: 454948 - DNA, 15 bp, Homo sapiens
ccatcccactctccc

SEQ ID NO: 454949 - DNA, 15 bp, Homo sapiens
cccatcccactctcc

SEQ ID NO: 454950 - DNA, 15 bp, Homo sapiens
gcccatcccactctc

SEQ ID NO: 454951 - DNA, 15 bp, Homo sapiens
cgcccatcccactct

SEQ ID NO: 454952 - DNA, 15 bp, Homo sapiens
gcgcccatcccactc

SEQ ID NO: 454953 - DNA, 15 bp, Homo sapiens
tgcgcccatcccact

SEQ ID NO: 454954 - DNA, 15 bp, Homo sapiens
ctgcgcccatcccac

SEQ ID NO: 454955 - DNA, 15 bp, Homo sapiens
cctgcgcccatccca

SEQ ID NO: 454956 - DNA, 15 bp, Homo sapiens
ccctgcgcccatccc

SEQ ID NO: 454957 - DNA, 15 bp, Homo sapiens
accctgcgcccatcc

SEQ ID NO: 454958 - DNA, 15 bp, Homo sapiens
gaccctgcgcccatc

SEQ ID NO: 454959 - DNA, 15 bp, Homo sapiens
ggaccctgcgcccat

SEQ ID NO: 454960 - DNA, 15 bp, Homo sapiens
gggaccctgcgccca

SEQ ID NO: 454961 - DNA, 15 bp, Homo sapiens
agggaccctgcgccc

SEQ ID NO: 454962 - DNA, 15 bp, Homo sapiens
aagggaccctgcgcc

SEQ ID NO: 454963 - DNA, 15 bp, Homo sapiens
aaagggaccctgcgc

SEQ ID NO: 454964 - DNA, 15 bp, Homo sapiens
aaaagggaccctgcg

SEQ ID NO: 454965 - DNA, 15 bp, Homo sapiens
taaaagggaccctgc

SEQ ID NO: 454966 - DNA, 15 bp, Homo sapiens
ttaaaagggaccctg

SEQ ID NO: 454967 - DNA, 15 bp, Homo sapiens
tttaaaagggaccct

SEQ ID NO: 454968 - DNA, 15 bp, Homo sapiens
ctttaaaagggaccc

SEQ ID NO: 454969 - DNA, 15 bp, Homo sapiens
tctttaaaagggacc

SEQ ID NO: 454970 - DNA, 15 bp, Homo sapiens
ttctttaaaagggac

SEQ ID NO: 454971 - DNA, 15 bp, Homo sapiens
cttctttaaaaggga

SEQ ID NO: 454972 - DNA, 15 bp, Homo sapiens
ccttctttaaaaggg

SEQ ID NO: 454973 - DNA, 15 bp, Homo sapiens
cccttctttaaaagg

SEQ ID NO: 454974 - DNA, 15 bp, Homo sapiens
acccttctttaaaag

SEQ ID NO: 454975 - DNA, 15 bp, Homo sapiens
gacccttctttaaaa

SEQ ID NO: 454976 - DNA, 15 bp, Homo sapiens
tgacccttctttaaa

SEQ ID NO: 454977 - DNA, 15 bp, Homo sapiens
ttgacccttctttaa

SEQ ID NO: 454978 - DNA, 15 bp, Homo sapiens
tttgacccttcttta

SEQ ID NO: 454979 - DNA, 15 bp, Homo sapiens
ttttgacccttcttt

SEQ ID NO: 454980 - DNA, 15 bp, Homo sapiens
cttttgacccttctt

SEQ ID NO: 454981 - DNA, 15 bp, Homo sapiens
tcttttgacccttct

SEQ ID NO: 454982 - DNA, 15 bp, Homo sapiens
ctcttttgacccttc

SEQ ID NO: 454983 - DNA, 15 bp, Homo sapiens
tctcttttgaccctt

SEQ ID NO: 454984 - DNA, 15 bp, Homo sapiens
ctctcttttgaccct

SEQ ID NO: 454985 - DNA, 15 bp, Homo sapiens
tctctcttttgaccc

SEQ ID NO: 454986 - DNA, 15 bp, Homo sapiens
ttctctcttttgacc

SEQ ID NO: 454987 - DNA, 15 bp, Homo sapiens
cttctctcttttgac

SEQ ID NO: 454988 - DNA, 15 bp, Homo sapiens
tcttctctcttttga

SEQ ID NO: 454989 - DNA, 15 bp, Homo sapiens
ttcttctctcttttg

SEQ ID NO: 454990 - DNA, 15 bp, Homo sapiens
tttcttctctctttt

SEQ ID NO: 454991 - DNA, 15 bp, Homo sapiens
atttcttctctcttt

SEQ ID NO: 454992 - DNA, 15 bp, Homo sapiens
catttcttctctctt

SEQ ID NO: 454993 - DNA, 15 bp, Homo sapiens
ccatttcttctctct

SEQ ID NO: 454994 - DNA, 15 bp, Homo sapiens
cccatttcttctctc

SEQ ID NO: 454995 - DNA, 15 bp, Homo sapiens
tcccatttcttctct

SEQ ID NO: 454996 - DNA, 15 bp, Homo sapiens
gtcccatttcttctc

SEQ ID NO: 454997 - DNA, 15 bp, Homo sapiens
agtcccatttcttct

SEQ ID NO: 454998 - DNA, 15 bp, Homo sapiens
gagtcccatttcttc

SEQ ID NO: 454999 - DNA, 15 bp, Homo sapiens
cgagtcccatttctt

SEQ ID NO: 455000 - DNA, 15 bp, Homo sapiens
ccgagtcccatttct

SEQ ID NO: 455001 - DNA, 15 bp, Homo sapiens
gccgagtcccatttc

SEQ ID NO: 455002 - DNA, 15 bp, Homo sapiens
cgccgagtcccattt

SEQ ID NO: 455003 - DNA, 15 bp, Homo sapiens
tcgccgagtcccatt

SEQ ID NO: 455004 - DNA, 15 bp, Homo sapiens
ttcgccgagtcccat

SEQ ID NO: 455005 - DNA, 15 bp, Homo sapiens
gttcgccgagtccca

SEQ ID NO: 455006 - DNA, 15 bp, Homo sapiens
agttcgccgagtccc

SEQ ID NO: 455007 - DNA, 15 bp, Homo sapiens
aagttcgccgagtcc

SEQ ID NO: 455008 - DNA, 15 bp, Homo sapiens
gaagttcgccgagtc

SEQ ID NO: 455009 - DNA, 15 bp, Homo sapiens
ggaagttcgccgagt

SEQ ID NO: 455010 - DNA, 15 bp, Homo sapiens
cggaagttcgccgag

SEQ ID NO: 455011 - DNA, 15 bp, Homo sapiens
gcggaagttcgccga

SEQ ID NO: 455012 - DNA, 15 bp, Homo sapiens
agcggaagttcgccg

SEQ ID NO: 455013 - DNA, 15 bp, Homo sapiens
aagcggaagttcgcc

SEQ ID NO: 455014 - DNA, 15 bp, Homo sapiens
aaagcggaagttcgc

SEQ ID NO: 455015 - DNA, 15 bp, Homo sapiens
taaagcggaagttcg

SEQ ID NO: 455016 - DNA, 15 bp, Homo sapiens
ttaaagcggaagttc

SEQ ID NO: 455017 - DNA, 15 bp, Homo sapiens
tttaaagcggaagtt

SEQ ID NO: 455018 - DNA, 15 bp, Homo sapiens
atttaaagcggaagt

SEQ ID NO: 455019 - DNA, 15 bp, Homo sapiens
tatttaaagcggaag

SEQ ID NO: 455020 - DNA, 15 bp, Homo sapiens
ttatttaaagcggaa

SEQ ID NO: 455021 - DNA, 15 bp, Homo sapiens
attatttaaagcgga

SEQ ID NO: 455022 - DNA, 15 bp, Homo sapiens
gattatttaaagcgg

SEQ ID NO: 455023 - DNA, 15 bp, Homo sapiens
cgattatttaaagcg

SEQ ID NO: 455024 - DNA, 15 bp, Homo sapiens
gcgattatttaaagc

SEQ ID NO: 455025 - DNA, 15 bp, Homo sapiens
agcgattatttaaag

SEQ ID NO: 455026 - DNA, 15 bp, Homo sapiens
gagcgattatttaaa

SEQ ID NO: 455027 - DNA, 15 bp, Homo sapiens
agagcgattatttaa

SEQ ID NO: 455028 - DNA, 15 bp, Homo sapiens
aagagcgattattta

SEQ ID NO: 455029 - DNA, 15 bp, Homo sapiens
taagagcgattattt

SEQ ID NO: 455030 - DNA, 15 bp, Homo sapiens
ttaagagcgattatt

SEQ ID NO: 455031 - DNA, 15 bp, Homo sapiens
attaagagcgattat

SEQ ID NO: 455032 - DNA, 15 bp, Homo sapiens
aattaagagcgatta

SEQ ID NO: 455033 - DNA, 15 bp, Homo sapiens
taattaagagcgatt

SEQ ID NO: 455034 - DNA, 15 bp, Homo sapiens
ctaattaagagcgat

SEQ ID NO: 455035 - DNA, 15 bp, Homo sapiens
cctaattaagagcga

SEQ ID NO: 455036 - DNA, 15 bp, Homo sapiens
acctaattaagagcg

SEQ ID NO: 455037 - DNA, 15 bp, Homo sapiens
gacctaattaagagc

SEQ ID NO: 455038 - DNA, 15 bp, Homo sapiens
agacctaattaagag

SEQ ID NO: 455039 - DNA, 15 bp, Homo sapiens
gagacctaattaaga

SEQ ID NO: 455040 - DNA, 15 bp, Homo sapiens
cgagacctaattaag

SEQ ID NO: 455041 - DNA, 15 bp, Homo sapiens
ccgagacctaattaa

SEQ ID NO: 455042 - DNA, 15 bp, Homo sapiens
cccgagacctaatta

SEQ ID NO: 455043 - DNA, 15 bp, Homo sapiens
gcccgagacctaatt

SEQ ID NO: 455044 - DNA, 15 bp, Homo sapiens
agcccgagacctaat

SEQ ID NO: 455045 - DNA, 15 bp, Homo sapiens
aagcccgagacctaa

SEQ ID NO: 455046 - DNA, 15 bp, Homo sapiens
aaagcccgagaccta

SEQ ID NO: 455047 - DNA, 15 bp, Homo sapiens
aaaagcccgagacct

SEQ ID NO: 455048 - DNA, 15 bp, Homo sapiens
gaaaagcccgagacc

SEQ ID NO: 455049 - DNA, 15 bp, Homo sapiens
tgaaaagcccgagac

SEQ ID NO: 455050 - DNA, 15 bp, Homo sapiens
ctgaaaagcccgaga

SEQ ID NO: 455051 - DNA, 15 bp, Homo sapiens
actgaaaagcccgag

SEQ ID NO: 455052 - DNA, 15 bp, Homo sapiens
aactgaaaagcccga

SEQ ID NO: 455053 - DNA, 15 bp, Homo sapiens
aaactgaaaagcccg

SEQ ID NO: 455054 - DNA, 15 bp, Homo sapiens
gaaactgaaaagccc

SEQ ID NO: 455055 - DNA, 15 bp, Homo sapiens
cgaaactgaaaagcc

SEQ ID NO: 455056 - DNA, 15 bp, Homo sapiens
ccgaaactgaaaagc

SEQ ID NO: 455057 - DNA, 15 bp, Homo sapiens
gccgaaactgaaaag

SEQ ID NO: 455058 - DNA, 15 bp, Homo sapiens
cgccgaaactgaaaa

SEQ ID NO: 455059 - DNA, 15 bp, Homo sapiens
acgccgaaactgaaa

SEQ ID NO: 455060 - DNA, 15 bp, Homo sapiens
cacgccgaaactgaa

SEQ ID NO: 455061 - DNA, 15 bp, Homo sapiens
tcacgccgaaactga

SEQ ID NO: 455062 - DNA, 15 bp, Homo sapiens
atcacgccgaaactg

SEQ ID NO: 455063 - DNA, 15 bp, Homo sapiens
aatcacgccgaaact

SEQ ID NO: 455064 - DNA, 15 bp, Homo sapiens
taatcacgccgaaac

SEQ ID NO: 455065 - DNA, 15 bp, Homo sapiens
ataatcacgccgaaa

SEQ ID NO: 455066 - DNA, 15 bp, Homo sapiens
tataatcacgccgaa

SEQ ID NO: 455067 - DNA, 15 bp, Homo sapiens
ttataatcacgccga

SEQ ID NO: 455068 - DNA, 15 bp, Homo sapiens
gttataatcacgccg

SEQ ID NO: 455069 - DNA, 15 bp, Homo sapiens
ggttataatcacgcc

SEQ ID NO: 455070 - DNA, 15 bp, Homo sapiens
gggttataatcacgc

SEQ ID NO: 455071 - DNA, 15 bp, Homo sapiens
agggttataatcacg

SEQ ID NO: 455072 - DNA, 15 bp, Homo sapiens
aagggttataatcac

SEQ ID NO: 455073 - DNA, 15 bp, Homo sapiens
gaagggttataatca

SEQ ID NO: 455074 - DNA, 15 bp, Homo sapiens
tgaagggttataatc

SEQ ID NO: 455075 - DNA, 15 bp, Homo sapiens
ctgaagggttataat

SEQ ID NO: 455076 - DNA, 15 bp, Homo sapiens
cctgaagggttataa

SEQ ID NO: 455077 - DNA, 15 bp, Homo sapiens
ccctgaagggttata

SEQ ID NO: 455078 - DNA, 15 bp, Homo sapiens
tccctgaagggttat

SEQ ID NO: 455079 - DNA, 15 bp, Homo sapiens
atccctgaagggtta

SEQ ID NO: 455080 - DNA, 15 bp, Homo sapiens
gatccctgaagggtt

SEQ ID NO: 455081 - DNA, 15 bp, Homo sapiens
cgatccctgaagggt

SEQ ID NO: 455082 - DNA, 15 bp, Homo sapiens
gcgatccctgaaggg

SEQ ID NO: 455083 - DNA, 15 bp, Homo sapiens
ggcgatccctgaagg

SEQ ID NO: 455084 - DNA, 15 bp, Homo sapiens
aggcgatccctgaag

SEQ ID NO: 455085 - DNA, 15 bp, Homo sapiens
taggcgatccctgaa

SEQ ID NO: 455086 - DNA, 15 bp, Homo sapiens
ttaggcgatccctga

SEQ ID NO: 455087 - DNA, 15 bp, Homo sapiens
attaggcgatccctg

SEQ ID NO: 455088 - DNA, 15 bp, Homo sapiens
tattaggcgatccct

SEQ ID NO: 455089 - DNA, 15 bp, Homo sapiens
ttattaggcgatccc

SEQ ID NO: 455090 - DNA, 15 bp, Homo sapiens
gttattaggcgatcc

SEQ ID NO: 455091 - DNA, 15 bp, Homo sapiens
tgttattaggcgatc

SEQ ID NO: 455092 - DNA, 15 bp, Homo sapiens
ttgttattaggcgat

SEQ ID NO: 455093 - DNA, 15 bp, Homo sapiens
gttgttattaggcga

SEQ ID NO: 455094 - DNA, 15 bp, Homo sapiens
agttgttattaggcg

SEQ ID NO: 455095 - DNA, 15 bp, Homo sapiens
gagttgttattaggc

SEQ ID NO: 455096 - DNA, 15 bp, Homo sapiens
agagttgttattagg

SEQ ID NO: 455097 - DNA, 15 bp, Homo sapiens
cagagttgttattag

SEQ ID NO: 455098 - DNA, 15 bp, Homo sapiens
gcagagttgttatta

SEQ ID NO: 455099 - DNA, 15 bp, Homo sapiens
agcagagttgttatt

SEQ ID NO: 455100 - DNA, 15 bp, Homo sapiens
cagcagagttgttat

SEQ ID NO: 455101 - DNA, 15 bp, Homo sapiens
tcagcagagttgtta

SEQ ID NO: 455102 - DNA, 15 bp, Homo sapiens
gtcagcagagttgtt

SEQ ID NO: 455103 - DNA, 15 bp, Homo sapiens
agtcagcagagttgt

SEQ ID NO: 455104 - DNA, 15 bp, Homo sapiens
cagtcagcagagttg

SEQ ID NO: 455105 - DNA, 15 bp, Homo sapiens
gcagtcagcagagtt

SEQ ID NO: 455106 - DNA, 15 bp, Homo sapiens
agcagtcagcagagt

SEQ ID NO: 455107 - DNA, 15 bp, Homo sapiens
gagcagtcagcagag

SEQ ID NO: 455108 - DNA, 15 bp, Homo sapiens
ggagcagtcagcaga

SEQ ID NO: 455109 - DNA, 15 bp, Homo sapiens
aggagcagtcagcag

SEQ ID NO: 455110 - DNA, 15 bp, Homo sapiens
caggagcagtcagca

SEQ ID NO: 455111 - DNA, 15 bp, Homo sapiens
acaggagcagtcagc

SEQ ID NO: 455112 - DNA, 15 bp, Homo sapiens
tacaggagcagtcag

SEQ ID NO: 455113 - DNA, 15 bp, Homo sapiens
ttacaggagcagtca

SEQ ID NO: 455114 - DNA, 15 bp, Homo sapiens
attacaggagcagtc

SEQ ID NO: 455115 - DNA, 15 bp, Homo sapiens
aattacaggagcagt

SEQ ID NO: 455116 - DNA, 15 bp, Homo sapiens
taattacaggagcag

SEQ ID NO: 455117 - DNA, 15 bp, Homo sapiens
ttaattacaggagca

SEQ ID NO: 455118 - DNA, 15 bp, Homo sapiens
gttaattacaggagc

SEQ ID NO: 455119 - DNA, 15 bp, Homo sapiens
agttaattacaggag

SEQ ID NO: 455120 - DNA, 15 bp, Homo sapiens
gagttaattacagga

SEQ ID NO: 455121 - DNA, 15 bp, Homo sapiens
ggagttaattacagg

SEQ ID NO: 455122 - DNA, 15 bp, Homo sapiens
aggagttaattacag

SEQ ID NO: 455123 - DNA, 15 bp, Homo sapiens
taggagttaattaca

SEQ ID NO: 455124 - DNA, 15 bp, Homo sapiens
ttaggagttaattac

SEQ ID NO: 455125 - DNA, 15 bp, Homo sapiens
attaggagttaatta

SEQ ID NO: 455126 - DNA, 15 bp, Homo sapiens
aattaggagttaatt

SEQ ID NO: 455127 - DNA, 15 bp, Homo sapiens
aaattaggagttaat

SEQ ID NO: 455128 - DNA, 15 bp, Homo sapiens
taaattaggagttaa

SEQ ID NO: 455129 - DNA, 15 bp, Homo sapiens
ataaattaggagtta

SEQ ID NO: 455130 - DNA, 15 bp, Homo sapiens
aataaattaggagtt

SEQ ID NO: 455131 - DNA, 15 bp, Homo sapiens
aaataaattaggagt

SEQ ID NO: 455132 - DNA, 15 bp, Homo sapiens
gaaataaattaggag

SEQ ID NO: 455133 - DNA, 15 bp, Homo sapiens
tgaaataaattagga

SEQ ID NO: 455134 - DNA, 15 bp, Homo sapiens
ttgaaataaattagg

SEQ ID NO: 455135 - DNA, 15 bp, Homo sapiens
tttgaaataaattag

SEQ ID NO: 455136 - DNA, 15 bp, Homo sapiens
gtttgaaataaatta

SEQ ID NO: 455137 - DNA, 15 bp, Homo sapiens
tgtttgaaataaatt

SEQ ID NO: 455138 - DNA, 15 bp, Homo sapiens
ctgtttgaaataaat

SEQ ID NO: 455139 - DNA, 15 bp, Homo sapiens
cctgtttgaaataaa

SEQ ID NO: 455140 - DNA, 15 bp, Homo sapiens
tcctgtttgaaataa

SEQ ID NO: 455141 - DNA, 15 bp, Homo sapiens
ttcctgtttgaaata

SEQ ID NO: 455142 - DNA, 15 bp, Homo sapiens
tttcctgtttgaaat

SEQ ID NO: 455143 - DNA, 15 bp, Homo sapiens
ttttcctgtttgaaa

SEQ ID NO: 455144 - DNA, 15 bp, Homo sapiens
tttttcctgtttgaa

SEQ ID NO: 455145 - DNA, 15 bp, Homo sapiens
ttttttcctgtttga

SEQ ID NO: 455146 - DNA, 15 bp, Homo sapiens
tttttttcctgtttg

SEQ ID NO: 455147 - DNA, 15 bp, Homo sapiens
ttttttttcctgttt

SEQ ID NO: 455148 - DNA, 15 bp, Homo sapiens
tttttttttcctgtt

SEQ ID NO: 455149 - DNA, 15 bp, Homo sapiens
ttttttttttcctgt

SEQ ID NO: 455150 - DNA, 15 bp, Homo sapiens
tttttttttttcctg

SEQ ID NO: 455151 - DNA, 15 bp, Homo sapiens
ttttttttttttcct

SEQ ID NO: 455152 - DNA, 15 bp, Homo sapiens
tttttttttttttcc

SEQ ID NO: 455153 - DNA, 15 bp, Homo sapiens
ttttttttttttttc

SEQ ID NO: 455154 - DNA, 15 bp, Homo sapiens
ttttttttttttttt

SEQ ID NO: 455155 - DNA, 15 bp, Homo sapiens
ctttttttttttttt

SEQ ID NO: 455156 - DNA, 15 bp, Homo sapiens
ccttttttttttttt

SEQ ID NO: 455157 - DNA, 15 bp, Homo sapiens
tcctttttttttttt

SEQ ID NO: 455158 - DNA, 15 bp, Homo sapiens
ctccttttttttttt

SEQ ID NO: 455159 - DNA, 15 bp, Homo sapiens
cctcctttttttttt

SEQ ID NO: 455160 - DNA, 15 bp, Homo sapiens
ccctccttttttttt

SEQ ID NO: 455161 - DNA, 15 bp, Homo sapiens
cccctcctttttttt

SEQ ID NO: 455162 - DNA, 15 bp, Homo sapiens
ccccctccttttttt

SEQ ID NO: 455163 - DNA, 15 bp, Homo sapiens
cccccctcctttttt

SEQ ID NO: 455164 - DNA, 15 bp, Homo sapiens
ccccccctccttttt

SEQ ID NO: 455165 - DNA, 15 bp, Homo sapiens
gccccccctcctttt

SEQ ID NO: 455166 - DNA, 15 bp, Homo sapiens
tgccccccctccttt

SEQ ID NO: 455167 - DNA, 15 bp, Homo sapiens
ctgccccccctcctt

SEQ ID NO: 455168 - DNA, 15 bp, Homo sapiens
gctgccccccctcct

SEQ ID NO: 455169 - DNA, 15 bp, Homo sapiens
ggctgccccccctcc

SEQ ID NO: 455170 - DNA, 15 bp, Homo sapiens
gggctgccccccctc

SEQ ID NO: 455171 - DNA, 15 bp, Homo sapiens
ggggctgccccccct

SEQ ID NO: 455172 - DNA, 15 bp, Homo sapiens
aggggctgccccccc

SEQ ID NO: 455173 - DNA, 15 bp, Homo sapiens
aaggggctgcccccc

SEQ ID NO: 455174 - DNA, 15 bp, Homo sapiens
gaaggggctgccccc

SEQ ID NO: 455175 - DNA, 15 bp, Homo sapiens
cgaaggggctgcccc

SEQ ID NO: 455176 - DNA, 15 bp, Homo sapiens
ccgaaggggctgccc

SEQ ID NO: 455177 - DNA, 15 bp, Homo sapiens
cccgaaggggctgcc

SEQ ID NO: 455178 - DNA, 15 bp, Homo sapiens
tcccgaaggggctgc

SEQ ID NO: 455179 - DNA, 15 bp, Homo sapiens
ttcccgaaggggctg

SEQ ID NO: 455180 - DNA, 15 bp, Homo sapiens
cttcccgaaggggct

SEQ ID NO: 455181 - DNA, 15 bp, Homo sapiens
tcttcccgaaggggc

SEQ ID NO: 455182 - DNA, 15 bp, Homo sapiens
ctcttcccgaagggg

SEQ ID NO: 455183 - DNA, 15 bp, Homo sapiens
gctcttcccgaaggg

SEQ ID NO: 455184 - DNA, 15 bp, Homo sapiens
ggctcttcccgaagg

SEQ ID NO: 455185 - DNA, 15 bp, Homo sapiens
tggctcttcccgaag

SEQ ID NO: 455186 - DNA, 15 bp, Homo sapiens
ttggctcttcccgaa

SEQ ID NO: 455187 - DNA, 15 bp, Homo sapiens
attggctcttcccga

SEQ ID NO: 455188 - DNA, 15 bp, Homo sapiens
gattggctcttcccg

SEQ ID NO: 455189 - DNA, 15 bp, Homo sapiens
tgattggctcttccc

SEQ ID NO: 455190 - DNA, 15 bp, Homo sapiens
ctgattggctcttcc

SEQ ID NO: 455191 - DNA, 15 bp, Homo sapiens
cctgattggctcttc

SEQ ID NO: 455192 - DNA, 15 bp, Homo sapiens
ccctgattggctctt

SEQ ID NO: 455193 - DNA, 15 bp, Homo sapiens
cccctgattggctct

SEQ ID NO: 455194 - DNA, 15 bp, Homo sapiens
gcccctgattggctc

SEQ ID NO: 455195 - DNA, 15 bp, Homo sapiens
cgcccctgattggct

SEQ ID NO: 455196 - DNA, 15 bp, Homo sapiens
tcgcccctgattggc

SEQ ID NO: 455197 - DNA, 15 bp, Homo sapiens
ctcgcccctgattgg

SEQ ID NO: 455198 - DNA, 15 bp, Homo sapiens
gctcgcccctgattg

SEQ ID NO: 455199 - DNA, 15 bp, Homo sapiens
cgctcgcccctgatt

SEQ ID NO: 455200 - DNA, 15 bp, Homo sapiens
acgctcgcccctgat

SEQ ID NO: 455201 - DNA, 15 bp, Homo sapiens
gacgctcgcccctga

SEQ ID NO: 455202 - DNA, 15 bp, Homo sapiens
agacgctcgcccctg

SEQ ID NO: 455203 - DNA, 15 bp, Homo sapiens
gagacgctcgcccct

SEQ ID NO: 455204 - DNA, 15 bp, Homo sapiens
agagacgctcgcccc

SEQ ID NO: 455205 - DNA, 15 bp, Homo sapiens
cagagacgctcgccc

SEQ ID NO: 455206 - DNA, 15 bp, Homo sapiens
ccagagacgctcgcc

SEQ ID NO: 455207 - DNA, 15 bp, Homo sapiens
gccagagacgctcgc

SEQ ID NO: 455208 - DNA, 15 bp, Homo sapiens
cgccagagacgctcg

SEQ ID NO: 455209 - DNA, 15 bp, Homo sapiens
acgccagagacgctc

SEQ ID NO: 455210 - DNA, 15 bp, Homo sapiens
gacgccagagacgct

SEQ ID NO: 455211 - DNA, 15 bp, Homo sapiens
tgacgccagagacgc

SEQ ID NO: 455212 - DNA, 15 bp, Homo sapiens
ctgacgccagagacg

SEQ ID NO: 455213 - DNA, 15 bp, Homo sapiens
gctgacgccagagac

SEQ ID NO: 455214 - DNA, 15 bp, Homo sapiens
cgctgacgccagaga

SEQ ID NO: 455215 - DNA, 15 bp, Homo sapiens
gcgctgacgccagag

SEQ ID NO: 455216 - DNA, 15 bp, Homo sapiens
ggcgctgacgccaga

SEQ ID NO: 455217 - DNA, 15 bp, Homo sapiens
tggcgctgacgccag

SEQ ID NO: 455218 - DNA, 15 bp, Homo sapiens
ctggcgctgacgcca

SEQ ID NO: 455219 - DNA, 15 bp, Homo sapiens
cctggcgctgacgcc

SEQ ID NO: 455220 - DNA, 15 bp, Homo sapiens
gcctggcgctgacgc

SEQ ID NO: 455221 - DNA, 15 bp, Homo sapiens
ggcctggcgctgacg

SEQ ID NO: 455222 - DNA, 15 bp, Homo sapiens
gggcctggcgctgac

SEQ ID NO: 455223 - DNA, 15 bp, Homo sapiens
cgggcctggcgctga

SEQ ID NO: 455224 - DNA, 15 bp, Homo sapiens
ccgggcctggcgctg

SEQ ID NO: 455225 - DNA, 15 bp, Homo sapiens
gccgggcctggcgct

SEQ ID NO: 455226 - DNA, 15 bp, Homo sapiens
cgccgggcctggcgc

SEQ ID NO: 455227 - DNA, 15 bp, Homo sapiens
gcgccgggcctggcg

SEQ ID NO: 455228 - DNA, 15 bp, Homo sapiens
cgcgccgggcctggc

SEQ ID NO: 455229 - DNA, 15 bp, Homo sapiens
ccgcgccgggcctgg

SEQ ID NO: 455230 - DNA, 15 bp, Homo sapiens
tccgcgccgggcctg

SEQ ID NO: 455231 - DNA, 15 bp, Homo sapiens
atccgcgccgggcct

SEQ ID NO: 455232 - DNA, 15 bp, Homo sapiens
aatccgcgccgggcc

SEQ ID NO: 455233 - DNA, 15 bp, Homo sapiens
caatccgcgccgggc

SEQ ID NO: 455234 - DNA, 15 bp, Homo sapiens
ccaatccgcgccggg

SEQ ID NO: 455235 - DNA, 15 bp, Homo sapiens
gccaatccgcgccgg

SEQ ID NO: 455236 - DNA, 15 bp, Homo sapiens
cgccaatccgcgccg

SEQ ID NO: 455237 - DNA, 15 bp, Homo sapiens
ccgccaatccgcgcc

SEQ ID NO: 455238 - DNA, 15 bp, Homo sapiens
gccgccaatccgcgc

SEQ ID NO: 455239 - DNA, 15 bp, Homo sapiens
cgccgccaatccgcg

SEQ ID NO: 455240 - DNA, 15 bp, Homo sapiens
gcgccgccaatccgc

SEQ ID NO: 455241 - DNA, 15 bp, Homo sapiens
cgcgccgccaatccg

SEQ ID NO: 455242 - DNA, 15 bp, Homo sapiens
gcgcgccgccaatcc

SEQ ID NO: 455243 - DNA, 15 bp, Homo sapiens
cgcgcgccgccaatc

SEQ ID NO: 455244 - DNA, 15 bp, Homo sapiens
acgcgcgccgccaat

SEQ ID NO: 455245 - DNA, 15 bp, Homo sapiens
gacgcgcgccgccaa

SEQ ID NO: 455246 - DNA, 15 bp, Homo sapiens
agacgcgcgccgcca

SEQ ID NO: 455247 - DNA, 15 bp, Homo sapiens
gagacgcgcgccgcc

SEQ ID NO: 455248 - DNA, 15 bp, Homo sapiens
ggagacgcgcgccgc

SEQ ID NO: 455249 - DNA, 15 bp, Homo sapiens
gggagacgcgcgccg

SEQ ID NO: 455250 - DNA, 15 bp, Homo sapiens
tgggagacgcgcgcc

SEQ ID NO: 455251 - DNA, 15 bp, Homo sapiens
gtgggagacgcgcgc

SEQ ID NO: 455252 - DNA, 15 bp, Homo sapiens
agtgggagacgcgcg

SEQ ID NO: 455253 - DNA, 15 bp, Homo sapiens
aagtgggagacgcgc

SEQ ID NO: 455254 - DNA, 15 bp, Homo sapiens
gaagtgggagacgcg

SEQ ID NO: 455255 - DNA, 15 bp, Homo sapiens
ggaagtgggagacgc

SEQ ID NO: 455256 - DNA, 15 bp, Homo sapiens
gggaagtgggagacg

SEQ ID NO: 455257 - DNA, 15 bp, Homo sapiens
ggggaagtgggagac

SEQ ID NO: 455258 - DNA, 15 bp, Homo sapiens
aggggaagtgggaga

SEQ ID NO: 455259 - DNA, 15 bp, Homo sapiens
gaggggaagtgggag

SEQ ID NO: 455260 - DNA, 15 bp, Homo sapiens
cgaggggaagtggga

SEQ ID NO: 455261 - DNA, 15 bp, Homo sapiens
ccgaggggaagtggg

SEQ ID NO: 455262 - DNA, 15 bp, Homo sapiens
tccgaggggaagtgg

SEQ ID NO: 455263 - DNA, 15 bp, Homo sapiens
ctccgaggggaagtg

SEQ ID NO: 455264 - DNA, 15 bp, Homo sapiens
cctccgaggggaagt

SEQ ID NO: 455265 - DNA, 15 bp, Homo sapiens
tcctccgaggggaag

SEQ ID NO: 455266 - DNA, 15 bp, Homo sapiens
ttcctccgaggggaa

SEQ ID NO: 455267 - DNA, 15 bp, Homo sapiens
tttcctccgagggga

SEQ ID NO: 455268 - DNA, 15 bp, Homo sapiens
ctttcctccgagggg

SEQ ID NO: 455269 - DNA, 15 bp, Homo sapiens
cctttcctccgaggg

SEQ ID NO: 455270 - DNA, 15 bp, Homo sapiens
gcctttcctccgagg

SEQ ID NO: 455271 - DNA, 15 bp, Homo sapiens
agcctttcctccgag

SEQ ID NO: 455272 - DNA, 15 bp, Homo sapiens
gagcctttcctccga

SEQ ID NO: 455273 - DNA, 15 bp, Homo sapiens
tgagcctttcctccg

SEQ ID NO: 455274 - DNA, 15 bp, Homo sapiens
ctgagcctttcctcc

SEQ ID NO: 455275 - DNA, 15 bp, Homo sapiens
gctgagcctttcctc

SEQ ID NO: 455276 - DNA, 15 bp, Homo sapiens
agctgagcctttcct

SEQ ID NO: 455277 - DNA, 15 bp, Homo sapiens
gagctgagcctttcc

SEQ ID NO: 455278 - DNA, 15 bp, Homo sapiens
ggagctgagcctttc

SEQ ID NO: 455279 - DNA, 15 bp, Homo sapiens
gggagctgagccttt

SEQ ID NO: 455280 - DNA, 15 bp, Homo sapiens
tgggagctgagcctt

SEQ ID NO: 455281 - DNA, 15 bp, Homo sapiens
ctgggagctgagcct

SEQ ID NO: 455282 - DNA, 15 bp, Homo sapiens
gctgggagctgagcc

SEQ ID NO: 455283 - DNA, 15 bp, Homo sapiens
cgctgggagctgagc

SEQ ID NO: 455284 - DNA, 15 bp, Homo sapiens
gcgctgggagctgag

SEQ ID NO: 455285 - DNA, 15 bp, Homo sapiens
cgcgctgggagctga

SEQ ID NO: 455286 - DNA, 15 bp, Homo sapiens
gcgcgctgggagctg

SEQ ID NO: 455287 - DNA, 15 bp, Homo sapiens
ggcgcgctgggagct

SEQ ID NO: 455288 - DNA, 15 bp, Homo sapiens
gggcgcgctgggagc

SEQ ID NO: 455289 - DNA, 15 bp, Homo sapiens
ggggcgcgctgggag

SEQ ID NO: 455290 - DNA, 15 bp, Homo sapiens
aggggcgcgctggga

SEQ ID NO: 455291 - DNA, 15 bp, Homo sapiens
gaggggcgcgctggg

SEQ ID NO: 455292 - DNA, 15 bp, Homo sapiens
ggaggggcgcgctgg

SEQ ID NO: 455293 - DNA, 15 bp, Homo sapiens
gggaggggcgcgctg

SEQ ID NO: 455294 - DNA, 15 bp, Homo sapiens
cgggaggggcgcgct

SEQ ID NO: 455295 - DNA, 15 bp, Homo sapiens
acgggaggggcgcgc

SEQ ID NO: 455296 - DNA, 15 bp, Homo sapiens
gacgggaggggcgcg

SEQ ID NO: 455297 - DNA, 15 bp, Homo sapiens
agacgggaggggcgc

SEQ ID NO: 455298 - DNA, 15 bp, Homo sapiens
gagacgggaggggcg

SEQ ID NO: 455299 - DNA, 15 bp, Homo sapiens
ggagacgggaggggc

SEQ ID NO: 455300 - DNA, 15 bp, Homo sapiens
cggagacgggagggg

SEQ ID NO: 455301 - DNA, 15 bp, Homo sapiens
gcggagacgggaggg

SEQ ID NO: 455302 - DNA, 15 bp, Homo sapiens
tgcggagacgggagg

SEQ ID NO: 455303 - DNA, 15 bp, Homo sapiens
ctgcggagacgggag

SEQ ID NO: 455304 - DNA, 15 bp, Homo sapiens
gctgcggagacggga

SEQ ID NO: 455305 - DNA, 15 bp, Homo sapiens
tgctgcggagacggg

SEQ ID NO: 455306 - DNA, 15 bp, Homo sapiens
ttgctgcggagacgg

SEQ ID NO: 455307 - DNA, 15 bp, Homo sapiens
tttgctgcggagacg

SEQ ID NO: 455308 - DNA, 15 bp, Homo sapiens
ttttgctgcggagac

SEQ ID NO: 455309 - DNA, 15 bp, Homo sapiens
tttttgctgcggaga

SEQ ID NO: 455310 - DNA, 15 bp, Homo sapiens
ttttttgctgcggag

SEQ ID NO: 455311 - DNA, 15 bp, Homo sapiens
cttttttgctgcgga

SEQ ID NO: 455312 - DNA, 15 bp, Homo sapiens
acttttttgctgcgg

SEQ ID NO: 455313 - DNA, 15 bp, Homo sapiens
aacttttttgctgcg

SEQ ID NO: 455314 - DNA, 15 bp, Homo sapiens
aaacttttttgctgc

SEQ ID NO: 455315 - DNA, 15 bp, Homo sapiens
caaacttttttgctg

SEQ ID NO: 455316 - DNA, 15 bp, Homo sapiens
tcaaacttttttgct

SEQ ID NO: 455317 - DNA, 15 bp, Homo sapiens
ctcaaacttttttgc

SEQ ID NO: 455318 - DNA, 15 bp, Homo sapiens
actcaaacttttttg

SEQ ID NO: 455319 - DNA, 15 bp, Homo sapiens
gactcaaactttttt

SEQ ID NO: 455320 - DNA, 15 bp, Homo sapiens
cgactcaaacttttt

SEQ ID NO: 455321 - DNA, 15 bp, Homo sapiens
gcgactcaaactttt

SEQ ID NO: 455322 - DNA, 15 bp, Homo sapiens
ggcgactcaaacttt

SEQ ID NO: 455323 - DNA, 15 bp, Homo sapiens
cggcgactcaaactt

SEQ ID NO: 455324 - DNA, 15 bp, Homo sapiens
gcggcgactcaaact

SEQ ID NO: 455325 - DNA, 15 bp, Homo sapiens
agcggcgactcaaac

SEQ ID NO: 455326 - DNA, 15 bp, Homo sapiens
cagcggcgactcaaa

SEQ ID NO: 455327 - DNA, 15 bp, Homo sapiens
gcagcggcgactcaa

SEQ ID NO: 455328 - DNA, 15 bp, Homo sapiens
ggcagcggcgactca

SEQ ID NO: 455329 - DNA, 15 bp, Homo sapiens
cggcagcggcgactc

SEQ ID NO: 455330 - DNA, 15 bp, Homo sapiens
ccggcagcggcgact

SEQ ID NO: 455331 - DNA, 15 bp, Homo sapiens
cccggcagcggcgac

SEQ ID NO: 455332 - DNA, 15 bp, Homo sapiens
acccggcagcggcga

SEQ ID NO: 455333 - DNA, 15 bp, Homo sapiens
aacccggcagcggcg

SEQ ID NO: 455334 - DNA, 15 bp, Homo sapiens
caacccggcagcggc

SEQ ID NO: 455335 - DNA, 15 bp, Homo sapiens
gcaacccggcagcgg

SEQ ID NO: 455336 - DNA, 15 bp, Homo sapiens
ggcaacccggcagcg

SEQ ID NO: 455337 - DNA, 15 bp, Homo sapiens
tggcaacccggcagc

SEQ ID NO: 455338 - DNA, 15 bp, Homo sapiens
ctggcaacccggcag

SEQ ID NO: 455339 - DNA, 15 bp, Homo sapiens
gctggcaacccggca

SEQ ID NO: 455340 - DNA, 15 bp, Homo sapiens
cgctggcaacccggc

SEQ ID NO: 455341 - DNA, 15 bp, Homo sapiens
ccgctggcaacccgg

SEQ ID NO: 455342 - DNA, 15 bp, Homo sapiens
tccgctggcaacccg

SEQ ID NO: 455343 - DNA, 15 bp, Homo sapiens
ctccgctggcaaccc

SEQ ID NO: 455344 - DNA, 15 bp, Homo sapiens
actccgctggcaacc

SEQ ID NO: 455345 - DNA, 15 bp, Homo sapiens
gactccgctggcaac

SEQ ID NO: 455346 - DNA, 15 bp, Homo sapiens
cgactccgctggcaa

SEQ ID NO: 455347 - DNA, 15 bp, Homo sapiens
gcgactccgctggca

SEQ ID NO: 455348 - DNA, 15 bp, Homo sapiens
cgcgactccgctggc

SEQ ID NO: 455349 - DNA, 15 bp, Homo sapiens
gcgcgactccgctgg

SEQ ID NO: 455350 - DNA, 15 bp, Homo sapiens
cgcgcgactccgctg

SEQ ID NO: 455351 - DNA, 15 bp, Homo sapiens
acgcgcgactccgct

SEQ ID NO: 455352 - DNA, 15 bp, Homo sapiens
gacgcgcgactccgc

SEQ ID NO: 455353 - DNA, 15 bp, Homo sapiens
cgacgcgcgactccg

SEQ ID NO: 455354 - DNA, 15 bp, Homo sapiens
ccgacgcgcgactcc

SEQ ID NO: 455355 - DNA, 15 bp, Homo sapiens
cccgacgcgcgactc

SEQ ID NO: 455356 - DNA, 15 bp, Homo sapiens
tcccgacgcgcgact

SEQ ID NO: 455357 - DNA, 15 bp, Homo sapiens
ctcccgacgcgcgac

SEQ ID NO: 455358 - DNA, 15 bp, Homo sapiens
gctcccgacgcgcga

SEQ ID NO: 455359 - DNA, 15 bp, Homo sapiens
agctcccgacgcgcg

SEQ ID NO: 455360 - DNA, 15 bp, Homo sapiens
tagctcccgacgcgc

SEQ ID NO: 455361 - DNA, 15 bp, Homo sapiens
gtagctcccgacgcg

SEQ ID NO: 455362 - DNA, 15 bp, Homo sapiens
cgtagctcccgacgc

SEQ ID NO: 455363 - DNA, 15 bp, Homo sapiens
acgtagctcccgacg

SEQ ID NO: 455364 - DNA, 15 bp, Homo sapiens
tacgtagctcccgac

SEQ ID NO: 455365 - DNA, 15 bp, Homo sapiens
ctacgtagctcccga

SEQ ID NO: 455366 - DNA, 15 bp, Homo sapiens
cctacgtagctcccg

SEQ ID NO: 455367 - DNA, 15 bp, Homo sapiens
ccctacgtagctccc

SEQ ID NO: 455368 - DNA, 15 bp, Homo sapiens
gccctacgtagctcc

SEQ ID NO: 455369 - DNA, 15 bp, Homo sapiens
tgccctacgtagctc

SEQ ID NO: 455370 - DNA, 15 bp, Homo sapiens
ctgccctacgtagct

SEQ ID NO: 455371 - DNA, 15 bp, Homo sapiens
tctgccctacgtagc

SEQ ID NO: 455372 - DNA, 15 bp, Homo sapiens
ctctgccctacgtag

SEQ ID NO: 455373 - DNA, 15 bp, Homo sapiens
tctctgccctacgta

SEQ ID NO: 455374 - DNA, 15 bp, Homo sapiens
ttctctgccctacgt

SEQ ID NO: 455375 - DNA, 15 bp, Homo sapiens
cttctctgccctacg

SEQ ID NO: 455376 - DNA, 15 bp, Homo sapiens
acttctctgccctac

SEQ ID NO: 455377 - DNA, 15 bp, Homo sapiens
gacttctctgcccta

SEQ ID NO: 455378 - DNA, 15 bp, Homo sapiens
tgacttctctgccct

SEQ ID NO: 455379 - DNA, 15 bp, Homo sapiens
atgacttctctgccc

SEQ ID NO: 455380 - DNA, 15 bp, Homo sapiens
catgacttctctgcc

SEQ ID NO: 455381 - DNA, 15 bp, Homo sapiens
ccatgacttctctgc

SEQ ID NO: 455382 - DNA, 15 bp, Homo sapiens
gccatgacttctctg

SEQ ID NO: 455383 - DNA, 15 bp, Homo sapiens
agccatgacttctct

SEQ ID NO: 455384 - DNA, 15 bp, Homo sapiens
aagccatgacttctc

SEQ ID NO: 455385 - DNA, 15 bp, Homo sapiens
gaagccatgacttct

SEQ ID NO: 455386 - DNA, 15 bp, Homo sapiens
agaagccatgacttc

SEQ ID NO: 455387 - DNA, 15 bp, Homo sapiens
gagaagccatgactt

SEQ ID NO: 455388 - DNA, 15 bp, Homo sapiens
ggagaagccatgact

SEQ ID NO: 455389 - DNA, 15 bp, Homo sapiens
cggagaagccatgac

SEQ ID NO: 455390 - DNA, 15 bp, Homo sapiens
acggagaagccatga

SEQ ID NO: 455391 - DNA, 15 bp, Homo sapiens
gacggagaagccatg

SEQ ID NO: 455392 - DNA, 15 bp, Homo sapiens
ggacggagaagccat

SEQ ID NO: 455393 - DNA, 15 bp, Homo sapiens
tggacggagaagcca

SEQ ID NO: 455394 - DNA, 15 bp, Homo sapiens
ttggacggagaagcc

SEQ ID NO: 455395 - DNA, 15 bp, Homo sapiens
tttggacggagaagc

SEQ ID NO: 455396 - DNA, 15 bp, Homo sapiens
ctttggacggagaag

SEQ ID NO: 455397 - DNA, 15 bp, Homo sapiens
cctttggacggagaa

SEQ ID NO: 455398 - DNA, 15 bp, Homo sapiens
gcctttggacggaga

SEQ ID NO: 455399 - DNA, 15 bp, Homo sapiens
tgcctttggacggag

SEQ ID NO: 455400 - DNA, 15 bp, Homo sapiens
ttgcctttggacgga

SEQ ID NO: 455401 - DNA, 15 bp, Homo sapiens
attgcctttggacgg

SEQ ID NO: 455402 - DNA, 15 bp, Homo sapiens
cattgcctttggacg

SEQ ID NO: 455403 - DNA, 15 bp, Homo sapiens
tcattgcctttggac

SEQ ID NO: 455404 - DNA, 15 bp, Homo sapiens
gtcattgcctttgga

SEQ ID NO: 455405 - DNA, 15 bp, Homo sapiens
agtcattgcctttgg

SEQ ID NO: 455406 - DNA, 15 bp, Homo sapiens
aagtcattgcctttg

SEQ ID NO: 455407 - DNA, 15 bp, Homo sapiens
caagtcattgccttt

SEQ ID NO: 455408 - DNA, 15 bp, Homo sapiens
acaagtcattgcctt

SEQ ID NO: 455409 - DNA, 15 bp, Homo sapiens
aacaagtcattgcct

SEQ ID NO: 455410 - DNA, 15 bp, Homo sapiens
aaacaagtcattgcc

SEQ ID NO: 455411 - DNA, 15 bp, Homo sapiens
aaaacaagtcattgc

SEQ ID NO: 455412 - DNA, 15 bp, Homo sapiens
gaaaacaagtcattg

SEQ ID NO: 455413 - DNA, 15 bp, Homo sapiens
cgaaaacaagtcatt

SEQ ID NO: 455414 - DNA, 15 bp, Homo sapiens
gcgaaaacaagtcat

SEQ ID NO: 455415 - DNA, 15 bp, Homo sapiens
ggcgaaaacaagtca

SEQ ID NO: 455416 - DNA, 15 bp, Homo sapiens
gggcgaaaacaagtc

SEQ ID NO: 455417 - DNA, 15 bp, Homo sapiens
cgggcgaaaacaagt

SEQ ID NO: 455418 - DNA, 15 bp, Homo sapiens
tcgggcgaaaacaag

SEQ ID NO: 455419 - DNA, 15 bp, Homo sapiens
gtcgggcgaaaacaa

SEQ ID NO: 455420 - DNA, 15 bp, Homo sapiens
cgtcgggcgaaaaca

SEQ ID NO: 455421 - DNA, 15 bp, Homo sapiens
tcgtcgggcgaaaac

SEQ ID NO: 455422 - DNA, 15 bp, Homo sapiens
ctcgtcgggcgaaaa

SEQ ID NO: 455423 - DNA, 15 bp, Homo sapiens
cctcgtcgggcgaaa

SEQ ID NO: 455424 - DNA, 15 bp, Homo sapiens
tcctcgtcgggcgaa

SEQ ID NO: 455425 - DNA, 15 bp, Homo sapiens
ctcctcgtcgggcga

SEQ ID NO: 455426 - DNA, 15 bp, Homo sapiens
cctcctcgtcgggcg

SEQ ID NO: 455427 - DNA, 15 bp, Homo sapiens
ccctcctcgtcgggc

SEQ ID NO: 455428 - DNA, 15 bp, Homo sapiens
gccctcctcgtcggg

SEQ ID NO: 455429 - DNA, 15 bp, Homo sapiens
ggccctcctcgtcgg

SEQ ID NO: 455430 - DNA, 15 bp, Homo sapiens
gggccctcctcgtcg

SEQ ID NO: 455431 - DNA, 15 bp, Homo sapiens
tgggccctcctcgtc

SEQ ID NO: 455432 - DNA, 15 bp, Homo sapiens
ctgggccctcctcgt

SEQ ID NO: 455433 - DNA, 15 bp, Homo sapiens
gctgggccctcctcg

SEQ ID NO: 455434 - DNA, 15 bp, Homo sapiens
tgctgggccctcctc

SEQ ID NO: 455435 - DNA, 15 bp, Homo sapiens
ctgctgggccctcct

SEQ ID NO: 455436 - DNA, 15 bp, Homo sapiens
actgctgggccctcc

SEQ ID NO: 455437 - DNA, 15 bp, Homo sapiens
cactgctgggccctc

SEQ ID NO: 455438 - DNA, 15 bp, Homo sapiens
ccactgctgggccct

SEQ ID NO: 455439 - DNA, 15 bp, Homo sapiens
accactgctgggccc

SEQ ID NO: 455440 - DNA, 15 bp, Homo sapiens
caccactgctgggcc

SEQ ID NO: 455441 - DNA, 15 bp, Homo sapiens
ccaccactgctgggc

SEQ ID NO: 455442 - DNA, 15 bp, Homo sapiens
gccaccactgctggg

SEQ ID NO: 455443 - DNA, 15 bp, Homo sapiens
ggccaccactgctgg

SEQ ID NO: 455444 - DNA, 15 bp, Homo sapiens
cggccaccactgctg

SEQ ID NO: 455445 - DNA, 15 bp, Homo sapiens
ccggccaccactgct

SEQ ID NO: 455446 - DNA, 15 bp, Homo sapiens
tccggccaccactgc

SEQ ID NO: 455447 - DNA, 15 bp, Homo sapiens
gtccggccaccactg

SEQ ID NO: 455448 - DNA, 15 bp, Homo sapiens
ggtccggccaccact

SEQ ID NO: 455449 - DNA, 15 bp, Homo sapiens
tggtccggccaccac

SEQ ID NO: 455450 - DNA, 15 bp, Homo sapiens
ctggtccggccacca

SEQ ID NO: 455451 - DNA, 15 bp, Homo sapiens
cctggtccggccacc

SEQ ID NO: 455452 - DNA, 15 bp, Homo sapiens
gcctggtccggccac

SEQ ID NO: 455453 - DNA, 15 bp, Homo sapiens
ggcctggtccggcca

SEQ ID NO: 455454 - DNA, 15 bp, Homo sapiens
gggcctggtccggcc

SEQ ID NO: 455455 - DNA, 15 bp, Homo sapiens
cgggcctggtccggc

SEQ ID NO: 455456 - DNA, 15 bp, Homo sapiens
ccgggcctggtccgg

SEQ ID NO: 455457 - DNA, 15 bp, Homo sapiens
cccgggcctggtccg

SEQ ID NO: 455458 - DNA, 15 bp, Homo sapiens
ccccgggcctggtcc

SEQ ID NO: 455459 - DNA, 15 bp, Homo sapiens
gccccgggcctggtc

SEQ ID NO: 455460 - DNA, 15 bp, Homo sapiens
ggccccgggcctggt

SEQ ID NO: 455461 - DNA, 15 bp, Homo sapiens
aggccccgggcctgg

SEQ ID NO: 455462 - DNA, 15 bp, Homo sapiens
caggccccgggcctg

SEQ ID NO: 455463 - DNA, 15 bp, Homo sapiens
ccaggccccgggcct

SEQ ID NO: 455464 - DNA, 15 bp, Homo sapiens
cccaggccccgggcc

SEQ ID NO: 455465 - DNA, 15 bp, Homo sapiens
ccccaggccccgggc

SEQ ID NO: 455466 - DNA, 15 bp, Homo sapiens
cccccaggccccggg

SEQ ID NO: 455467 - DNA, 15 bp, Homo sapiens
gcccccaggccccgg

SEQ ID NO: 455468 - DNA, 15 bp, Homo sapiens
cgcccccaggccccg

SEQ ID NO: 455469 - DNA, 15 bp, Homo sapiens
gcgcccccaggcccc

SEQ ID NO: 455470 - DNA, 15 bp, Homo sapiens
ggcgcccccaggccc

SEQ ID NO: 455471 - DNA, 15 bp, Homo sapiens
cggcgcccccaggcc

SEQ ID NO: 455472 - DNA, 15 bp, Homo sapiens
tcggcgcccccaggc

SEQ ID NO: 455473 - DNA, 15 bp, Homo sapiens
ctcggcgcccccagg

SEQ ID NO: 455474 - DNA, 15 bp, Homo sapiens
cctcggcgcccccag

SEQ ID NO: 455475 - DNA, 15 bp, Homo sapiens
ccctcggcgccccca

SEQ ID NO: 455476 - DNA, 15 bp, Homo sapiens
cccctcggcgccccc

SEQ ID NO: 455477 - DNA, 15 bp, Homo sapiens
ccccctcggcgcccc

SEQ ID NO: 455478 - DNA, 15 bp, Homo sapiens
gccccctcggcgccc

SEQ ID NO: 455479 - DNA, 15 bp, Homo sapiens
ggccccctcggcgcc

SEQ ID NO: 455480 - DNA, 15 bp, Homo sapiens
cggccccctcggcgc

SEQ ID NO: 455481 - DNA, 15 bp, Homo sapiens
gcggccccctcggcg

SEQ ID NO: 455482 - DNA, 15 bp, Homo sapiens
cgcggccccctcggc

SEQ ID NO: 455483 - DNA, 15 bp, Homo sapiens
ccgcggccccctcgg

SEQ ID NO: 455484 - DNA, 15 bp, Homo sapiens
tccgcggccccctcg

SEQ ID NO: 455485 - DNA, 15 bp, Homo sapiens
ctccgcggccccctc

SEQ ID NO: 455486 - DNA, 15 bp, Homo sapiens
cctccgcggccccct

SEQ ID NO: 455487 - DNA, 15 bp, Homo sapiens
tcctccgcggccccc

SEQ ID NO: 455488 - DNA, 15 bp, Homo sapiens
ctcctccgcggcccc

SEQ ID NO: 455489 - DNA, 15 bp, Homo sapiens
gctcctccgcggccc

SEQ ID NO: 455490 - DNA, 15 bp, Homo sapiens
cgctcctccgcggcc

SEQ ID NO: 455491 - DNA, 15 bp, Homo sapiens
gcgctcctccgcggc

SEQ ID NO: 455492 - DNA, 15 bp, Homo sapiens
ggcgctcctccgcgg

SEQ ID NO: 455493 - DNA, 15 bp, Homo sapiens
cggcgctcctccgcg

SEQ ID NO: 455494 - DNA, 15 bp, Homo sapiens
gcggcgctcctccgc

SEQ ID NO: 455495 - DNA, 15 bp, Homo sapiens
cgcggcgctcctccg

SEQ ID NO: 455496 - DNA, 15 bp, Homo sapiens
acgcggcgctcctcc

SEQ ID NO: 455497 - DNA, 15 bp, Homo sapiens
gacgcggcgctcctc

SEQ ID NO: 455498 - DNA, 15 bp, Homo sapiens
tgacgcggcgctcct

SEQ ID NO: 455499 - DNA, 15 bp, Homo sapiens
ttgacgcggcgctcc

SEQ ID NO: 455500 - DNA, 15 bp, Homo sapiens
cttgacgcggcgctc

SEQ ID NO: 455501 - DNA, 15 bp, Homo sapiens
ccttgacgcggcgct

SEQ ID NO: 455502 - DNA, 15 bp, Homo sapiens
accttgacgcggcgc

SEQ ID NO: 455503 - DNA, 15 bp, Homo sapiens
gaccttgacgcggcg

SEQ ID NO: 455504 - DNA, 15 bp, Homo sapiens
agaccttgacgcggc

SEQ ID NO: 455505 - DNA, 15 bp, Homo sapiens
gagaccttgacgcgg

SEQ ID NO: 455506 - DNA, 15 bp, Homo sapiens
ggagaccttgacgcg

SEQ ID NO: 455507 - DNA, 15 bp, Homo sapiens
tggagaccttgacgc

SEQ ID NO: 455508 - DNA, 15 bp, Homo sapiens
ctggagaccttgacg

SEQ ID NO: 455509 - DNA, 15 bp, Homo sapiens
gctggagaccttgac

SEQ ID NO: 455510 - DNA, 15 bp, Homo sapiens
ggctggagaccttga

SEQ ID NO: 455511 - DNA, 15 bp, Homo sapiens
aggctggagaccttg

SEQ ID NO: 455512 - DNA, 15 bp, Homo sapiens
caggctggagacctt

SEQ ID NO: 455513 - DNA, 15 bp, Homo sapiens
gcaggctggagacct

SEQ ID NO: 455514 - DNA, 15 bp, Homo sapiens
ggcaggctggagacc

SEQ ID NO: 455515 - DNA, 15 bp, Homo sapiens
gggcaggctggagac

SEQ ID NO: 455516 - DNA, 15 bp, Homo sapiens
agggcaggctggaga

SEQ ID NO: 455517 - DNA, 15 bp, Homo sapiens
aagggcaggctggag

SEQ ID NO: 455518 - DNA, 15 bp, Homo sapiens
gaagggcaggctgga

SEQ ID NO: 455519 - DNA, 15 bp, Homo sapiens
tgaagggcaggctgg

SEQ ID NO: 455520 - DNA, 15 bp, Homo sapiens
ctgaagggcaggctg

SEQ ID NO: 455521 - DNA, 15 bp, Homo sapiens
gctgaagggcaggct

SEQ ID NO: 455522 - DNA, 15 bp, Homo sapiens
cgctgaagggcaggc

SEQ ID NO: 455523 - DNA, 15 bp, Homo sapiens
acgctgaagggcagg

SEQ ID NO: 455524 - DNA, 15 bp, Homo sapiens
cacgctgaagggcag

SEQ ID NO: 455525 - DNA, 15 bp, Homo sapiens
ccacgctgaagggca

SEQ ID NO: 455526 - DNA, 15 bp, Homo sapiens
tccacgctgaagggc

SEQ ID NO: 455527 - DNA, 15 bp, Homo sapiens
ctccacgctgaaggg

SEQ ID NO: 455528 - DNA, 15 bp, Homo sapiens
cctccacgctgaagg

SEQ ID NO: 455529 - DNA, 15 bp, Homo sapiens
gcctccacgctgaag

SEQ ID NO: 455530 - DNA, 15 bp, Homo sapiens
cgcctccacgctgaa

SEQ ID NO: 455531 - DNA, 15 bp, Homo sapiens
gcgcctccacgctga

SEQ ID NO: 455532 - DNA, 15 bp, Homo sapiens
agcgcctccacgctg

SEQ ID NO: 455533 - DNA, 15 bp, Homo sapiens
gagcgcctccacgct

SEQ ID NO: 455534 - DNA, 15 bp, Homo sapiens
tgagcgcctccacgc

SEQ ID NO: 455535 - DNA, 15 bp, Homo sapiens
atgagcgcctccacg

SEQ ID NO: 455536 - DNA, 15 bp, Homo sapiens
catgagcgcctccac

SEQ ID NO: 455537 - DNA, 15 bp, Homo sapiens
acatgagcgcctcca

SEQ ID NO: 455538 - DNA, 15 bp, Homo sapiens
gacatgagcgcctcc

SEQ ID NO: 455539 - DNA, 15 bp, Homo sapiens
ggacatgagcgcctc

SEQ ID NO: 455540 - DNA, 15 bp, Homo sapiens
cggacatgagcgcct

SEQ ID NO: 455541 - DNA, 15 bp, Homo sapiens
tcggacatgagcgcc

SEQ ID NO: 455542 - DNA, 15 bp, Homo sapiens
gtcggacatgagcgc

SEQ ID NO: 455543 - DNA, 15 bp, Homo sapiens
tgtcggacatgagcg

SEQ ID NO: 455544 - DNA, 15 bp, Homo sapiens
ttgtcggacatgagc

SEQ ID NO: 455545 - DNA, 15 bp, Homo sapiens
cttgtcggacatgag

SEQ ID NO: 455546 - DNA, 15 bp, Homo sapiens
tcttgtcggacatga

SEQ ID NO: 455547 - DNA, 15 bp, Homo sapiens
ttcttgtcggacatg

SEQ ID NO: 455548 - DNA, 15 bp, Homo sapiens
cttcttgtcggacat

SEQ ID NO: 455549 - DNA, 15 bp, Homo sapiens
gcttcttgtcggaca

SEQ ID NO: 455550 - DNA, 15 bp, Homo sapiens
ggcttcttgtcggac

SEQ ID NO: 455551 - DNA, 15 bp, Homo sapiens
cggcttcttgtcgga

SEQ ID NO: 455552 - DNA, 15 bp, Homo sapiens
gcggcttcttgtcgg

SEQ ID NO: 455553 - DNA, 15 bp, Homo sapiens
ggcggcttcttgtcg

SEQ ID NO: 455554 - DNA, 15 bp, Homo sapiens
gggcggcttcttgtc

SEQ ID NO: 455555 - DNA, 15 bp, Homo sapiens
tgggcggcttcttgt

SEQ ID NO: 455556 - DNA, 15 bp, Homo sapiens
ttgggcggcttcttg

SEQ ID NO: 455557 - DNA, 15 bp, Homo sapiens
cttgggcggcttctt

SEQ ID NO: 455558 - DNA, 15 bp, Homo sapiens
ccttgggcggcttct

SEQ ID NO: 455559 - DNA, 15 bp, Homo sapiens
tccttgggcggcttc

SEQ ID NO: 455560 - DNA, 15 bp, Homo sapiens
ctccttgggcggctt

SEQ ID NO: 455561 - DNA, 15 bp, Homo sapiens
cctccttgggcggct

SEQ ID NO: 455562 - DNA, 15 bp, Homo sapiens
gcctccttgggcggc

SEQ ID NO: 455563 - DNA, 15 bp, Homo sapiens
cgcctccttgggcgg

SEQ ID NO: 455564 - DNA, 15 bp, Homo sapiens
acgcctccttgggcg

SEQ ID NO: 455565 - DNA, 15 bp, Homo sapiens
gacgcctccttgggc

SEQ ID NO: 455566 - DNA, 15 bp, Homo sapiens
ggacgcctccttggg

SEQ ID NO: 455567 - DNA, 15 bp, Homo sapiens
gggacgcctccttgg

SEQ ID NO: 455568 - DNA, 15 bp, Homo sapiens
ggggacgcctccttg

SEQ ID NO: 455569 - DNA, 15 bp, Homo sapiens
cggggacgcctcctt

SEQ ID NO: 455570 - DNA, 15 bp, Homo sapiens
gcggggacgcctcct

SEQ ID NO: 455571 - DNA, 15 bp, Homo sapiens
agcggggacgcctcc

SEQ ID NO: 455572 - DNA, 15 bp, Homo sapiens
cagcggggacgcctc

SEQ ID NO: 455573 - DNA, 15 bp, Homo sapiens
gcagcggggacgcct

SEQ ID NO: 455574 - DNA, 15 bp, Homo sapiens
ggcagcggggacgcc

SEQ ID NO: 455575 - DNA, 15 bp, Homo sapiens
cggcagcggggacgc

SEQ ID NO: 455576 - DNA, 15 bp, Homo sapiens
ccggcagcggggacg

SEQ ID NO: 455577 - DNA, 15 bp, Homo sapiens
gccggcagcggggac

SEQ ID NO: 455578 - DNA, 15 bp, Homo sapiens
ggccggcagcgggga

SEQ ID NO: 455579 - DNA, 15 bp, Homo sapiens
cggccggcagcgggg

SEQ ID NO: 455580 - DNA, 15 bp, Homo sapiens
tcggccggcagcggg

SEQ ID NO: 455581 - DNA, 15 bp, Homo sapiens
ttcggccggcagcgg

SEQ ID NO: 455582 - DNA, 15 bp, Homo sapiens
tttcggccggcagcg

SEQ ID NO: 455583 - DNA, 15 bp, Homo sapiens
ctttcggccggcagc

SEQ ID NO: 455584 - DNA, 15 bp, Homo sapiens
gctttcggccggcag

SEQ ID NO: 455585 - DNA, 15 bp, Homo sapiens
cgctttcggccggca

SEQ ID NO: 455586 - DNA, 15 bp, Homo sapiens
gcgctttcggccggc

SEQ ID NO: 455587 - DNA, 15 bp, Homo sapiens
ggcgctttcggccgg

SEQ ID NO: 455588 - DNA, 15 bp, Homo sapiens
aggcgctttcggccg

SEQ ID NO: 455589 - DNA, 15 bp, Homo sapiens
gaggcgctttcggcc

SEQ ID NO: 455590 - DNA, 15 bp, Homo sapiens
cgaggcgctttcggc

SEQ ID NO: 455591 - DNA, 15 bp, Homo sapiens
ccgaggcgctttcgg

SEQ ID NO: 455592 - DNA, 15 bp, Homo sapiens
gccgaggcgctttcg

SEQ ID NO: 455593 - DNA, 15 bp, Homo sapiens
ggccgaggcgctttc

SEQ ID NO: 455594 - DNA, 15 bp, Homo sapiens
cggccgaggcgcttt

SEQ ID NO: 455595 - DNA, 15 bp, Homo sapiens
ccggccgaggcgctt

SEQ ID NO: 455596 - DNA, 15 bp, Homo sapiens
cccggccgaggcgct

SEQ ID NO: 455597 - DNA, 15 bp, Homo sapiens
ccccggccgaggcgc

SEQ ID NO: 455598 - DNA, 15 bp, Homo sapiens
gccccggccgaggcg

SEQ ID NO: 455599 - DNA, 15 bp, Homo sapiens
ggccccggccgaggc

SEQ ID NO: 455600 - DNA, 15 bp, Homo sapiens
tggccccggccgagg

SEQ ID NO: 455601 - DNA, 15 bp, Homo sapiens
gtggccccggccgag

SEQ ID NO: 455602 - DNA, 15 bp, Homo sapiens
ggtggccccggccga

SEQ ID NO: 455603 - DNA, 15 bp, Homo sapiens
gggtggccccggccg

SEQ ID NO: 455604 - DNA, 15 bp, Homo sapiens
agggtggccccggcc

SEQ ID NO: 455605 - DNA, 15 bp, Homo sapiens
cagggtggccccggc

SEQ ID NO: 455606 - DNA, 15 bp, Homo sapiens
gcagggtggccccgg

SEQ ID NO: 455607 - DNA, 15 bp, Homo sapiens
cgcagggtggccccg

SEQ ID NO: 455608 - DNA, 15 bp, Homo sapiens
ccgcagggtggcccc

SEQ ID NO: 455609 - DNA, 15 bp, Homo sapiens
gccgcagggtggccc

SEQ ID NO: 455610 - DNA, 15 bp, Homo sapiens
ggccgcagggtggcc

SEQ ID NO: 455611 - DNA, 15 bp, Homo sapiens
tggccgcagggtggc

SEQ ID NO: 455612 - DNA, 15 bp, Homo sapiens
gtggccgcagggtgg

SEQ ID NO: 455613 - DNA, 15 bp, Homo sapiens
agtggccgcagggtg

SEQ ID NO: 455614 - DNA, 15 bp, Homo sapiens
cagtggccgcagggt

SEQ ID NO: 455615 - DNA, 15 bp, Homo sapiens
gcagtggccgcaggg

SEQ ID NO: 455616 - DNA, 15 bp, Homo sapiens
agcagtggccgcagg

SEQ ID NO: 455617 - DNA, 15 bp, Homo sapiens
cagcagtggccgcag

SEQ ID NO: 455618 - DNA, 15 bp, Homo sapiens
gcagcagtggccgca

SEQ ID NO: 455619 - DNA, 15 bp, Homo sapiens
agcagcagtggccgc

SEQ ID NO: 455620 - DNA, 15 bp, Homo sapiens
cagcagcagtggccg

SEQ ID NO: 455621 - DNA, 15 bp, Homo sapiens
acagcagcagtggcc

SEQ ID NO: 455622 - DNA, 15 bp, Homo sapiens
gacagcagcagtggc

SEQ ID NO: 455623 - DNA, 15 bp, Homo sapiens
cgacagcagcagtgg

SEQ ID NO: 455624 - DNA, 15 bp, Homo sapiens
ccgacagcagcagtg

SEQ ID NO: 455625 - DNA, 15 bp, Homo sapiens
cccgacagcagcagt

SEQ ID NO: 455626 - DNA, 15 bp, Homo sapiens
ccccgacagcagcag

SEQ ID NO: 455627 - DNA, 15 bp, Homo sapiens
gccccgacagcagca

SEQ ID NO: 455628 - DNA, 15 bp, Homo sapiens
tgccccgacagcagc

SEQ ID NO: 455629 - DNA, 15 bp, Homo sapiens
gtgccccgacagcag

SEQ ID NO: 455630 - DNA, 15 bp, Homo sapiens
cgtgccccgacagca

SEQ ID NO: 455631 - DNA, 15 bp, Homo sapiens
ccgtgccccgacagc

SEQ ID NO: 455632 - DNA, 15 bp, Homo sapiens
gccgtgccccgacag

SEQ ID NO: 455633 - DNA, 15 bp, Homo sapiens
cgccgtgccccgaca

SEQ ID NO: 455634 - DNA, 15 bp, Homo sapiens
gcgccgtgccccgac

SEQ ID NO: 455635 - DNA, 15 bp, Homo sapiens
agcgccgtgccccga

SEQ ID NO: 455636 - DNA, 15 bp, Homo sapiens
gagcgccgtgccccg

SEQ ID NO: 455637 - DNA, 15 bp, Homo sapiens
cgagcgccgtgcccc

SEQ ID NO: 455638 - DNA, 15 bp, Homo sapiens
ccgagcgccgtgccc

SEQ ID NO: 455639 - DNA, 15 bp, Homo sapiens
cccgagcgccgtgcc

SEQ ID NO: 455640 - DNA, 15 bp, Homo sapiens
tcccgagcgccgtgc

SEQ ID NO: 455641 - DNA, 15 bp, Homo sapiens
ttcccgagcgccgtg

SEQ ID NO: 455642 - DNA, 15 bp, Homo sapiens
cttcccgagcgccgt

SEQ ID NO: 455643 - DNA, 15 bp, Homo sapiens
gcttcccgagcgccg

SEQ ID NO: 455644 - DNA, 15 bp, Homo sapiens
cgcttcccgagcgcc

SEQ ID NO: 455645 - DNA, 15 bp, Homo sapiens
gcgcttcccgagcgc

SEQ ID NO: 455646 - DNA, 15 bp, Homo sapiens
tgcgcttcccgagcg

SEQ ID NO: 455647 - DNA, 15 bp, Homo sapiens
gtgcgcttcccgagc

SEQ ID NO: 455648 - DNA, 15 bp, Homo sapiens
tgtgcgcttcccgag

SEQ ID NO: 455649 - DNA, 15 bp, Homo sapiens
ctgtgcgcttcccga

SEQ ID NO: 455650 - DNA, 15 bp, Homo sapiens
gctgtgcgcttcccg

SEQ ID NO: 455651 - DNA, 15 bp, Homo sapiens
ggctgtgcgcttccc

SEQ ID NO: 455652 - DNA, 15 bp, Homo sapiens
gggctgtgcgcttcc

SEQ ID NO: 455653 - DNA, 15 bp, Homo sapiens
ggggctgtgcgcttc

SEQ ID NO: 455654 - DNA, 15 bp, Homo sapiens
cggggctgtgcgctt

SEQ ID NO: 455655 - DNA, 15 bp, Homo sapiens
ccggggctgtgcgct

SEQ ID NO: 455656 - DNA, 15 bp, Homo sapiens
cccggggctgtgcgc

SEQ ID NO: 455657 - DNA, 15 bp, Homo sapiens
gcccggggctgtgcg

SEQ ID NO: 455658 - DNA, 15 bp, Homo sapiens
ggcccggggctgtgc

SEQ ID NO: 455659 - DNA, 15 bp, Homo sapiens
cggcccggggctgtg

SEQ ID NO: 455660 - DNA, 15 bp, Homo sapiens
gcggcccggggctgt

SEQ ID NO: 455661 - DNA, 15 bp, Homo sapiens
agcggcccggggctg

SEQ ID NO: 455662 - DNA, 15 bp, Homo sapiens
cagcggcccggggct

SEQ ID NO: 455663 - DNA, 15 bp, Homo sapiens
ccagcggcccggggc

SEQ ID NO: 455664 - DNA, 15 bp, Homo sapiens
accagcggcccgggg

SEQ ID NO: 455665 - DNA, 15 bp, Homo sapiens
caccagcggcccggg

SEQ ID NO: 455666 - DNA, 15 bp, Homo sapiens
tcaccagcggcccgg

SEQ ID NO: 455667 - DNA, 15 bp, Homo sapiens
ttcaccagcggcccg

SEQ ID NO: 455668 - DNA, 15 bp, Homo sapiens
cttcaccagcggccc

SEQ ID NO: 455669 - DNA, 15 bp, Homo sapiens
gcttcaccagcggcc

SEQ ID NO: 455670 - DNA, 15 bp, Homo sapiens
ggcttcaccagcggc

SEQ ID NO: 455671 - DNA, 15 bp, Homo sapiens
gggcttcaccagcgg

SEQ ID NO: 455672 - DNA, 15 bp, Homo sapiens
agggcttcaccagcg

SEQ ID NO: 455673 - DNA, 15 bp, Homo sapiens
aagggcttcaccagc

SEQ ID NO: 455674 - DNA, 15 bp, Homo sapiens
gaagggcttcaccag

SEQ ID NO: 455675 - DNA, 15 bp, Homo sapiens
cgaagggcttcacca

SEQ ID NO: 455676 - DNA, 15 bp, Homo sapiens
tcgaagggcttcacc

SEQ ID NO: 455677 - DNA, 15 bp, Homo sapiens
ctcgaagggcttcac

SEQ ID NO: 455678 - DNA, 15 bp, Homo sapiens
tctcgaagggcttca

SEQ ID NO: 455679 - DNA, 15 bp, Homo sapiens
gtctcgaagggcttc

SEQ ID NO: 455680 - DNA, 15 bp, Homo sapiens
ggtctcgaagggctt

SEQ ID NO: 455681 - DNA, 15 bp, Homo sapiens
cggtctcgaagggct

SEQ ID NO: 455682 - DNA, 15 bp, Homo sapiens
gcggtctcgaagggc

SEQ ID NO: 455683 - DNA, 15 bp, Homo sapiens
ggcggtctcgaaggg

SEQ ID NO: 455684 - DNA, 15 bp, Homo sapiens
aggcggtctcgaagg

SEQ ID NO: 455685 - DNA, 15 bp, Homo sapiens
gaggcggtctcgaag

SEQ ID NO: 455686 - DNA, 15 bp, Homo sapiens
cgaggcggtctcgaa

SEQ ID NO: 455687 - DNA, 15 bp, Homo sapiens
ccgaggcggtctcga

SEQ ID NO: 455688 - DNA, 15 bp, Homo sapiens
accgaggcggtctcg

SEQ ID NO: 455689 - DNA, 15 bp, Homo sapiens
gaccgaggcggtctc

SEQ ID NO: 455690 - DNA, 15 bp, Homo sapiens
tgaccgaggcggtct

SEQ ID NO: 455691 - DNA, 15 bp, Homo sapiens
ttgaccgaggcggtc

SEQ ID NO: 455692 - DNA, 15 bp, Homo sapiens
cttgaccgaggcggt

SEQ ID NO: 455693 - DNA, 15 bp, Homo sapiens
acttgaccgaggcgg

SEQ ID NO: 455694 - DNA, 15 bp, Homo sapiens
gacttgaccgaggcg

SEQ ID NO: 455695 - DNA, 15 bp, Homo sapiens
cgacttgaccgaggc

SEQ ID NO: 455696 - DNA, 15 bp, Homo sapiens
ccgacttgaccgagg

SEQ ID NO: 455697 - DNA, 15 bp, Homo sapiens
tccgacttgaccgag

SEQ ID NO: 455698 - DNA, 15 bp, Homo sapiens
ttccgacttgaccga

SEQ ID NO: 455699 - DNA, 15 bp, Homo sapiens
tttccgacttgaccg

SEQ ID NO: 455700 - DNA, 15 bp, Homo sapiens
ttttccgacttgacc

SEQ ID NO: 455701 - DNA, 15 bp, Homo sapiens
attttccgacttgac

SEQ ID NO: 455702 - DNA, 15 bp, Homo sapiens
aattttccgacttga

SEQ ID NO: 455703 - DNA, 15 bp, Homo sapiens
gaattttccgacttg

SEQ ID NO: 455704 - DNA, 15 bp, Homo sapiens
tgaattttccgactt

SEQ ID NO: 455705 - DNA, 15 bp, Homo sapiens
ctgaattttccgact

SEQ ID NO: 455706 - DNA, 15 bp, Homo sapiens
tctgaattttccgac

SEQ ID NO: 455707 - DNA, 15 bp, Homo sapiens
ttctgaattttccga

SEQ ID NO: 455708 - DNA, 15 bp, Homo sapiens
cttctgaattttccg

SEQ ID NO: 455709 - DNA, 15 bp, Homo sapiens
tcttctgaattttcc

SEQ ID NO: 455710 - DNA, 15 bp, Homo sapiens
atcttctgaattttc

SEQ ID NO: 455711 - DNA, 15 bp, Homo sapiens
catcttctgaatttt

SEQ ID NO: 455712 - DNA, 15 bp, Homo sapiens
ccatcttctgaattt

SEQ ID NO: 455713 - DNA, 15 bp, Homo sapiens
tccatcttctgaatt

SEQ ID NO: 455714 - DNA, 15 bp, Homo sapiens
ctccatcttctgaat

SEQ ID NO: 455715 - DNA, 15 bp, Homo sapiens
gctccatcttctgaa

SEQ ID NO: 455716 - DNA, 15 bp, Homo sapiens
cgctccatcttctga

SEQ ID NO: 455717 - DNA, 15 bp, Homo sapiens
ccgctccatcttctg

SEQ ID NO: 455718 - DNA, 15 bp, Homo sapiens
gccgctccatcttct

SEQ ID NO: 455719 - DNA, 15 bp, Homo sapiens
cgccgctccatcttc

SEQ ID NO: 455720 - DNA, 15 bp, Homo sapiens
acgccgctccatctt

SEQ ID NO: 455721 - DNA, 15 bp, Homo sapiens
cacgccgctccatct

SEQ ID NO: 455722 - DNA, 15 bp, Homo sapiens
ccacgccgctccatc

SEQ ID NO: 455723 - DNA, 15 bp, Homo sapiens
tccacgccgctccat

SEQ ID NO: 455724 - DNA, 15 bp, Homo sapiens
atccacgccgctcca

SEQ ID NO: 455725 - DNA, 15 bp, Homo sapiens
catccacgccgctcc

SEQ ID NO: 455726 - DNA, 15 bp, Homo sapiens
gcatccacgccgctc

SEQ ID NO: 455727 - DNA, 15 bp, Homo sapiens
tgcatccacgccgct

SEQ ID NO: 455728 - DNA, 15 bp, Homo sapiens
ctgcatccacgccgc

SEQ ID NO: 455729 - DNA, 15 bp, Homo sapiens
cctgcatccacgccg

SEQ ID NO: 455730 - DNA, 15 bp, Homo sapiens
tcctgcatccacgcc

SEQ ID NO: 455731 - DNA, 15 bp, Homo sapiens
ttcctgcatccacgc

SEQ ID NO: 455732 - DNA, 15 bp, Homo sapiens
gttcctgcatccacg

SEQ ID NO: 455733 - DNA, 15 bp, Homo sapiens
ggttcctgcatccac

SEQ ID NO: 455734 - DNA, 15 bp, Homo sapiens
gggttcctgcatcca

SEQ ID NO: 455735 - DNA, 15 bp, Homo sapiens
cgggttcctgcatcc

SEQ ID NO: 455736 - DNA, 15 bp, Homo sapiens
ccgggttcctgcatc

SEQ ID NO: 455737 - DNA, 15 bp, Homo sapiens
gccgggttcctgcat

SEQ ID NO: 455738 - DNA, 15 bp, Homo sapiens
ggccgggttcctgca

SEQ ID NO: 455739 - DNA, 15 bp, Homo sapiens
cggccgggttcctgc

SEQ ID NO: 455740 - DNA, 15 bp, Homo sapiens
tcggccgggttcctg

SEQ ID NO: 455741 - DNA, 15 bp, Homo sapiens
atcggccgggttcct

SEQ ID NO: 455742 - DNA, 15 bp, Homo sapiens
tatcggccgggttcc

SEQ ID NO: 455743 - DNA, 15 bp, Homo sapiens
atatcggccgggttc

SEQ ID NO: 455744 - DNA, 15 bp, Homo sapiens
aatatcggccgggtt

SEQ ID NO: 455745 - DNA, 15 bp, Homo sapiens
gaatatcggccgggt

SEQ ID NO: 455746 - DNA, 15 bp, Homo sapiens
cgaatatcggccggg

SEQ ID NO: 455747 - DNA, 15 bp, Homo sapiens
gcgaatatcggccgg

SEQ ID NO: 455748 - DNA, 15 bp, Homo sapiens
ggcgaatatcggccg

SEQ ID NO: 455749 - DNA, 15 bp, Homo sapiens
cggcgaatatcggcc

SEQ ID NO: 455750 - DNA, 15 bp, Homo sapiens
gcggcgaatatcggc

SEQ ID NO: 455751 - DNA, 15 bp, Homo sapiens
ggcggcgaatatcgg

SEQ ID NO: 455752 - DNA, 15 bp, Homo sapiens
cggcggcgaatatcg

SEQ ID NO: 455753 - DNA, 15 bp, Homo sapiens
gcggcggcgaatatc

SEQ ID NO: 455754 - DNA, 15 bp, Homo sapiens
ggcggcggcgaatat

SEQ ID NO: 455755 - DNA, 15 bp, Homo sapiens
tggcggcggcgaata

SEQ ID NO: 455756 - DNA, 15 bp, Homo sapiens
ttggcggcggcgaat

SEQ ID NO: 455757 - DNA, 15 bp, Homo sapiens
cttggcggcggcgaa

SEQ ID NO: 455758 - DNA, 15 bp, Homo sapiens
acttggcggcggcga

SEQ ID NO: 455759 - DNA, 15 bp, Homo sapiens
cacttggcggcggcg

SEQ ID NO: 455760 - DNA, 15 bp, Homo sapiens
tcacttggcggcggc

SEQ ID NO: 455761 - DNA, 15 bp, Homo sapiens
ctcacttggcggcgg

SEQ ID NO: 455762 - DNA, 15 bp, Homo sapiens
actcacttggcggcg

SEQ ID NO: 455763 - DNA, 15 bp, Homo sapiens
cactcacttggcggc

SEQ ID NO: 455764 - DNA, 15 bp, Homo sapiens
gcactcacttggcgg

SEQ ID NO: 455765 - DNA, 15 bp, Homo sapiens
cgcactcacttggcg

SEQ ID NO: 455766 - DNA, 15 bp, Homo sapiens
gcgcactcacttggc

SEQ ID NO: 455767 - DNA, 15 bp, Homo sapiens
cgcgcactcacttgg

SEQ ID NO: 455768 - DNA, 15 bp, Homo sapiens
gcgcgcactcacttg

SEQ ID NO: 455769 - DNA, 15 bp, Homo sapiens
ggcgcgcactcactt

SEQ ID NO: 455770 - DNA, 15 bp, Homo sapiens
cggcgcgcactcact

SEQ ID NO: 455771 - DNA, 15 bp, Homo sapiens
ccggcgcgcactcac

SEQ ID NO: 455772 - DNA, 15 bp, Homo sapiens
cccggcgcgcactca

SEQ ID NO: 455773 - DNA, 15 bp, Homo sapiens
ccccggcgcgcactc

SEQ ID NO: 455774 - DNA, 15 bp, Homo sapiens
gccccggcgcgcact

SEQ ID NO: 455775 - DNA, 15 bp, Homo sapiens
tgccccggcgcgcac

SEQ ID NO: 455776 - DNA, 15 bp, Homo sapiens
ctgccccggcgcgca

SEQ ID NO: 455777 - DNA, 15 bp, Homo sapiens
cctgccccggcgcgc

SEQ ID NO: 455778 - DNA, 15 bp, Homo sapiens
tcctgccccggcgcg

SEQ ID NO: 455779 - DNA, 15 bp, Homo sapiens
ctcctgccccggcgc

SEQ ID NO: 455780 - DNA, 15 bp, Homo sapiens
actcctgccccggcg

SEQ ID NO: 455781 - DNA, 15 bp, Homo sapiens
tactcctgccccggc

SEQ ID NO: 455782 - DNA, 15 bp, Homo sapiens
ctactcctgccccgg

SEQ ID NO: 455783 - DNA, 15 bp, Homo sapiens
cctactcctgccccg

SEQ ID NO: 455784 - DNA, 15 bp, Homo sapiens
tcctactcctgcccc

SEQ ID NO: 455785 - DNA, 15 bp, Homo sapiens
ctcctactcctgccc

SEQ ID NO: 455786 - DNA, 15 bp, Homo sapiens
cctcctactcctgcc

SEQ ID NO: 455787 - DNA, 15 bp, Homo sapiens
acctcctactcctgc

SEQ ID NO: 455788 - DNA, 15 bp, Homo sapiens
tacctcctactcctg

SEQ ID NO: 455789 - DNA, 15 bp, Homo sapiens
ctacctcctactcct

SEQ ID NO: 455790 - DNA, 15 bp, Homo sapiens
gctacctcctactcc

SEQ ID NO: 455791 - DNA, 15 bp, Homo sapiens
cgctacctcctactc

SEQ ID NO: 455792 - DNA, 15 bp, Homo sapiens
gcgctacctcctact

SEQ ID NO: 455793 - DNA, 15 bp, Homo sapiens
cgcgctacctcctac

SEQ ID NO: 455794 - DNA, 15 bp, Homo sapiens
ccgcgctacctccta

SEQ ID NO: 455795 - DNA, 15 bp, Homo sapiens
cccgcgctacctcct

SEQ ID NO: 455796 - DNA, 15 bp, Homo sapiens
ccccgcgctacctcc

SEQ ID NO: 455797 - DNA, 15 bp, Homo sapiens
accccgcgctacctc

SEQ ID NO: 455798 - DNA, 15 bp, Homo sapiens
taccccgcgctacct

SEQ ID NO: 455799 - DNA, 15 bp, Homo sapiens
gtaccccgcgctacc

SEQ ID NO: 455800 - DNA, 15 bp, Homo sapiens
agtaccccgcgctac

SEQ ID NO: 455801 - DNA, 15 bp, Homo sapiens
cagtaccccgcgcta

SEQ ID NO: 455802 - DNA, 15 bp, Homo sapiens
ccagtaccccgcgct

SEQ ID NO: 455803 - DNA, 15 bp, Homo sapiens
tccagtaccccgcgc

SEQ ID NO: 455804 - DNA, 15 bp, Homo sapiens
ctccagtaccccgcg

SEQ ID NO: 455805 - DNA, 15 bp, Homo sapiens
cctccagtaccccgc

SEQ ID NO: 455806 - DNA, 15 bp, Homo sapiens
ccctccagtaccccg

SEQ ID NO: 455807 - DNA, 15 bp, Homo sapiens
tccctccagtacccc

SEQ ID NO: 455808 - DNA, 15 bp, Homo sapiens
ctccctccagtaccc

SEQ ID NO: 455809 - DNA, 15 bp, Homo sapiens
gctccctccagtacc

SEQ ID NO: 455810 - DNA, 15 bp, Homo sapiens
cgctccctccagtac

SEQ ID NO: 455811 - DNA, 15 bp, Homo sapiens
ccgctccctccagta

SEQ ID NO: 455812 - DNA, 15 bp, Homo sapiens
cccgctccctccagt

SEQ ID NO: 455813 - DNA, 15 bp, Homo sapiens
ccccgctccctccag

SEQ ID NO: 455814 - DNA, 15 bp, Homo sapiens
cccccgctccctcca

SEQ ID NO: 455815 - DNA, 15 bp, Homo sapiens
ccccccgctccctcc

SEQ ID NO: 455816 - DNA, 15 bp, Homo sapiens
gccccccgctccctc

SEQ ID NO: 455817 - DNA, 15 bp, Homo sapiens
cgccccccgctccct

SEQ ID NO: 455818 - DNA, 15 bp, Homo sapiens
ccgccccccgctccc

SEQ ID NO: 455819 - DNA, 15 bp, Homo sapiens
cccgccccccgctcc

SEQ ID NO: 455820 - DNA, 15 bp, Homo sapiens
acccgccccccgctc

SEQ ID NO: 455821 - DNA, 15 bp, Homo sapiens
cacccgccccccgct

SEQ ID NO: 455822 - DNA, 15 bp, Homo sapiens
acacccgccccccgc

SEQ ID NO: 455823 - DNA, 15 bp, Homo sapiens
aacacccgccccccg

SEQ ID NO: 455824 - DNA, 15 bp, Homo sapiens
gaacacccgcccccc

SEQ ID NO: 455825 - DNA, 15 bp, Homo sapiens
ggaacacccgccccc

SEQ ID NO: 455826 - DNA, 15 bp, Homo sapiens
tggaacacccgcccc

SEQ ID NO: 455827 - DNA, 15 bp, Homo sapiens
ctggaacacccgccc

SEQ ID NO: 455828 - DNA, 15 bp, Homo sapiens
cctggaacacccgcc

SEQ ID NO: 455829 - DNA, 15 bp, Homo sapiens
ccctggaacacccgc

SEQ ID NO: 455830 - DNA, 15 bp, Homo sapiens
gccctggaacacccg

SEQ ID NO: 455831 - DNA, 15 bp, Homo sapiens
agccctggaacaccc

SEQ ID NO: 455832 - DNA, 15 bp, Homo sapiens
cagccctggaacacc

SEQ ID NO: 455833 - DNA, 15 bp, Homo sapiens
tcagccctggaacac

SEQ ID NO: 455834 - DNA, 15 bp, Homo sapiens
ctcagccctggaaca

SEQ ID NO: 455835 - DNA, 15 bp, Homo sapiens
cctcagccctggaac

SEQ ID NO: 455836 - DNA, 15 bp, Homo sapiens
ccctcagccctggaa

SEQ ID NO: 455837 - DNA, 15 bp, Homo sapiens
accctcagccctgga

SEQ ID NO: 455838 - DNA, 15 bp, Homo sapiens
taccctcagccctgg

SEQ ID NO: 455839 - DNA, 15 bp, Homo sapiens
gtaccctcagccctg

SEQ ID NO: 455840 - DNA, 15 bp, Homo sapiens
ggtaccctcagccct

SEQ ID NO: 455841 - DNA, 15 bp, Homo sapiens
cggtaccctcagccc

SEQ ID NO: 455842 - DNA, 15 bp, Homo sapiens
tcggtaccctcagcc

SEQ ID NO: 455843 - DNA, 15 bp, Homo sapiens
ctcggtaccctcagc

SEQ ID NO: 455844 - DNA, 15 bp, Homo sapiens
tctcggtaccctcag

SEQ ID NO: 455845 - DNA, 15 bp, Homo sapiens
gtctcggtaccctca

SEQ ID NO: 455846 - DNA, 15 bp, Homo sapiens
ggtctcggtaccctc

SEQ ID NO: 455847 - DNA, 15 bp, Homo sapiens
gggtctcggtaccct

SEQ ID NO: 455848 - DNA, 15 bp, Homo sapiens
agggtctcggtaccc

SEQ ID NO: 455849 - DNA, 15 bp, Homo sapiens
aagggtctcggtacc

SEQ ID NO: 455850 - DNA, 15 bp, Homo sapiens
gaagggtctcggtac

SEQ ID NO: 455851 - DNA, 15 bp, Homo sapiens
agaagggtctcggta

SEQ ID NO: 455852 - DNA, 15 bp, Homo sapiens
cagaagggtctcggt

SEQ ID NO: 455853 - DNA, 15 bp, Homo sapiens
gcagaagggtctcgg

SEQ ID NO: 455854 - DNA, 15 bp, Homo sapiens
cgcagaagggtctcg

SEQ ID NO: 455855 - DNA, 15 bp, Homo sapiens
acgcagaagggtctc

SEQ ID NO: 455856 - DNA, 15 bp, Homo sapiens
cacgcagaagggtct

SEQ ID NO: 455857 - DNA, 15 bp, Homo sapiens
gcacgcagaagggtc

SEQ ID NO: 455858 - DNA, 15 bp, Homo sapiens
cgcacgcagaagggt

SEQ ID NO: 455859 - DNA, 15 bp, Homo sapiens
gcgcacgcagaaggg

SEQ ID NO: 455860 - DNA, 15 bp, Homo sapiens
agcgcacgcagaagg

SEQ ID NO: 455861 - DNA, 15 bp, Homo sapiens
tagcgcacgcagaag

SEQ ID NO: 455862 - DNA, 15 bp, Homo sapiens
gtagcgcacgcagaa

SEQ ID NO: 455863 - DNA, 15 bp, Homo sapiens
tgtagcgcacgcaga

SEQ ID NO: 455864 - DNA, 15 bp, Homo sapiens
gtgtagcgcacgcag

SEQ ID NO: 455865 - DNA, 15 bp, Homo sapiens
agtgtagcgcacgca

SEQ ID NO: 455866 - DNA, 15 bp, Homo sapiens
gagtgtagcgcacgc

SEQ ID NO: 455867 - DNA, 15 bp, Homo sapiens
ggagtgtagcgcacg

SEQ ID NO: 455868 - DNA, 15 bp, Homo sapiens
gggagtgtagcgcac

SEQ ID NO: 455869 - DNA, 15 bp, Homo sapiens
cgggagtgtagcgca

SEQ ID NO: 455870 - DNA, 15 bp, Homo sapiens
ccgggagtgtagcgc

SEQ ID NO: 455871 - DNA, 15 bp, Homo sapiens
cccgggagtgtagcg

SEQ ID NO: 455872 - DNA, 15 bp, Homo sapiens
tcccgggagtgtagc

SEQ ID NO: 455873 - DNA, 15 bp, Homo sapiens
ttcccgggagtgtag

SEQ ID NO: 455874 - DNA, 15 bp, Homo sapiens
tttcccgggagtgta

SEQ ID NO: 455875 - DNA, 15 bp, Homo sapiens
ctttcccgggagtgt

SEQ ID NO: 455876 - DNA, 15 bp, Homo sapiens
gctttcccgggagtg

SEQ ID NO: 455877 - DNA, 15 bp, Homo sapiens
tgctttcccgggagt

SEQ ID NO: 455878 - DNA, 15 bp, Homo sapiens
ttgctttcccgggag

SEQ ID NO: 455879 - DNA, 15 bp, Homo sapiens
cttgctttcccggga

SEQ ID NO: 455880 - DNA, 15 bp, Homo sapiens
gcttgctttcccggg

SEQ ID NO: 455881 - DNA, 15 bp, Homo sapiens
ggcttgctttcccgg

SEQ ID NO: 455882 - DNA, 15 bp, Homo sapiens
gggcttgctttcccg

SEQ ID NO: 455883 - DNA, 15 bp, Homo sapiens
tgggcttgctttccc

SEQ ID NO: 455884 - DNA, 15 bp, Homo sapiens
ctgggcttgctttcc

SEQ ID NO: 455885 - DNA, 15 bp, Homo sapiens
cctgggcttgctttc

SEQ ID NO: 455886 - DNA, 15 bp, Homo sapiens
ccctgggcttgcttt

SEQ ID NO: 455887 - DNA, 15 bp, Homo sapiens
gccctgggcttgctt

SEQ ID NO: 455888 - DNA, 15 bp, Homo sapiens
ggccctgggcttgct

SEQ ID NO: 455889 - DNA, 15 bp, Homo sapiens
aggccctgggcttgc

SEQ ID NO: 455890 - DNA, 15 bp, Homo sapiens
gaggccctgggcttg

SEQ ID NO: 455891 - DNA, 15 bp, Homo sapiens
agaggccctgggctt

SEQ ID NO: 455892 - DNA, 15 bp, Homo sapiens
cagaggccctgggct

SEQ ID NO: 455893 - DNA, 15 bp, Homo sapiens
ccagaggccctgggc

SEQ ID NO: 455894 - DNA, 15 bp, Homo sapiens
tccagaggccctggg

SEQ ID NO: 455895 - DNA, 15 bp, Homo sapiens
gtccagaggccctgg

SEQ ID NO: 455896 - DNA, 15 bp, Homo sapiens
agtccagaggccctg

SEQ ID NO: 455897 - DNA, 15 bp, Homo sapiens
gagtccagaggccct

SEQ ID NO: 455898 - DNA, 15 bp, Homo sapiens
ggagtccagaggccc

SEQ ID NO: 455899 - DNA, 15 bp, Homo sapiens
aggagtccagaggcc

SEQ ID NO: 455900 - DNA, 15 bp, Homo sapiens
caggagtccagaggc

SEQ ID NO: 455901 - DNA, 15 bp, Homo sapiens
ccaggagtccagagg

SEQ ID NO: 455902 - DNA, 15 bp, Homo sapiens
cccaggagtccagag

SEQ ID NO: 455903 - DNA, 15 bp, Homo sapiens
acccaggagtccaga

SEQ ID NO: 455904 - DNA, 15 bp, Homo sapiens
cacccaggagtccag

SEQ ID NO: 455905 - DNA, 15 bp, Homo sapiens
gcacccaggagtcca

SEQ ID NO: 455906 - DNA, 15 bp, Homo sapiens
ggcacccaggagtcc

SEQ ID NO: 455907 - DNA, 15 bp, Homo sapiens
gggcacccaggagtc

SEQ ID NO: 455908 - DNA, 15 bp, Homo sapiens
cgggcacccaggagt

SEQ ID NO: 455909 - DNA, 15 bp, Homo sapiens
ccgggcacccaggag

SEQ ID NO: 455910 - DNA, 15 bp, Homo sapiens
cccgggcacccagga

SEQ ID NO: 455911 - DNA, 15 bp, Homo sapiens
ccccgggcacccagg

SEQ ID NO: 455912 - DNA, 15 bp, Homo sapiens
gccccgggcacccag

SEQ ID NO: 455913 - DNA, 15 bp, Homo sapiens
cgccccgggcaccca

SEQ ID NO: 455914 - DNA, 15 bp, Homo sapiens
acgccccgggcaccc

SEQ ID NO: 455915 - DNA, 15 bp, Homo sapiens
aacgccccgggcacc

SEQ ID NO: 455916 - DNA, 15 bp, Homo sapiens
gaacgccccgggcac

SEQ ID NO: 455917 - DNA, 15 bp, Homo sapiens
cgaacgccccgggca

SEQ ID NO: 455918 - DNA, 15 bp, Homo sapiens
ccgaacgccccgggc

SEQ ID NO: 455919 - DNA, 15 bp, Homo sapiens
gccgaacgccccggg

SEQ ID NO: 455920 - DNA, 15 bp, Homo sapiens
cgccgaacgccccgg

SEQ ID NO: 455921 - DNA, 15 bp, Homo sapiens
gcgccgaacgccccg

SEQ ID NO: 455922 - DNA, 15 bp, Homo sapiens
cgcgccgaacgcccc

SEQ ID NO: 455923 - DNA, 15 bp, Homo sapiens
gcgcgccgaacgccc

SEQ ID NO: 455924 - DNA, 15 bp, Homo sapiens
ggcgcgccgaacgcc

SEQ ID NO: 455925 - DNA, 15 bp, Homo sapiens
gggcgcgccgaacgc

SEQ ID NO: 455926 - DNA, 15 bp, Homo sapiens
tgggcgcgccgaacg

SEQ ID NO: 455927 - DNA, 15 bp, Homo sapiens
ctgggcgcgccgaac

SEQ ID NO: 455928 - DNA, 15 bp, Homo sapiens
actgggcgcgccgaa

SEQ ID NO: 455929 - DNA, 15 bp, Homo sapiens
cactgggcgcgccga

SEQ ID NO: 455930 - DNA, 15 bp, Homo sapiens
gcactgggcgcgccg

SEQ ID NO: 455931 - DNA, 15 bp, Homo sapiens
cgcactgggcgcgcc

SEQ ID NO: 455932 - DNA, 15 bp, Homo sapiens
gcgcactgggcgcgc

SEQ ID NO: 455933 - DNA, 15 bp, Homo sapiens
ggcgcactgggcgcg

SEQ ID NO: 455934 - DNA, 15 bp, Homo sapiens
cggcgcactgggcgc

SEQ ID NO: 455935 - DNA, 15 bp, Homo sapiens
acggcgcactgggcg

SEQ ID NO: 455936 - DNA, 15 bp, Homo sapiens
gacggcgcactgggc

SEQ ID NO: 455937 - DNA, 15 bp, Homo sapiens
ggacggcgcactggg

SEQ ID NO: 455938 - DNA, 15 bp, Homo sapiens
cggacggcgcactgg

SEQ ID NO: 455939 - DNA, 15 bp, Homo sapiens
gcggacggcgcactg

SEQ ID NO: 455940 - DNA, 15 bp, Homo sapiens
tgcggacggcgcact

SEQ ID NO: 455941 - DNA, 15 bp, Homo sapiens
atgcggacggcgcac

SEQ ID NO: 455942 - DNA, 15 bp, Homo sapiens
gatgcggacggcgca

SEQ ID NO: 455943 - DNA, 15 bp, Homo sapiens
ggatgcggacggcgc

SEQ ID NO: 455944 - DNA, 15 bp, Homo sapiens
tggatgcggacggcg

SEQ ID NO: 455945 - DNA, 15 bp, Homo sapiens
ttggatgcggacggc

SEQ ID NO: 455946 - DNA, 15 bp, Homo sapiens
cttggatgcggacgg

SEQ ID NO: 455947 - DNA, 15 bp, Homo sapiens
tcttggatgcggacg

SEQ ID NO: 455948 - DNA, 15 bp, Homo sapiens
gtcttggatgcggac

SEQ ID NO: 455949 - DNA, 15 bp, Homo sapiens
tgtcttggatgcgga

SEQ ID NO: 455950 - DNA, 15 bp, Homo sapiens
gtgtcttggatgcgg

SEQ ID NO: 455951 - DNA, 15 bp, Homo sapiens
ggtgtcttggatgcg

SEQ ID NO: 455952 - DNA, 15 bp, Homo sapiens
gggtgtcttggatgc

SEQ ID NO: 455953 - DNA, 15 bp, Homo sapiens
agggtgtcttggatg

SEQ ID NO: 455954 - DNA, 15 bp, Homo sapiens
gagggtgtcttggat

SEQ ID NO: 455955 - DNA, 15 bp, Homo sapiens
agagggtgtcttgga

SEQ ID NO: 455956 - DNA, 15 bp, Homo sapiens
cagagggtgtcttgg

SEQ ID NO: 455957 - DNA, 15 bp, Homo sapiens
ccagagggtgtcttg

SEQ ID NO: 455958 - DNA, 15 bp, Homo sapiens
cccagagggtgtctt

SEQ ID NO: 455959 - DNA, 15 bp, Homo sapiens
acccagagggtgtct

SEQ ID NO: 455960 - DNA, 15 bp, Homo sapiens
tacccagagggtgtc

SEQ ID NO: 455961 - DNA, 15 bp, Homo sapiens
ttacccagagggtgt

SEQ ID NO: 455962 - DNA, 15 bp, Homo sapiens
attacccagagggtg

SEQ ID NO: 455963 - DNA, 15 bp, Homo sapiens
tattacccagagggt

SEQ ID NO: 455964 - DNA, 15 bp, Homo sapiens
ttattacccagaggg

SEQ ID NO: 455965 - DNA, 15 bp, Homo sapiens
gttattacccagagg

SEQ ID NO: 455966 - DNA, 15 bp, Homo sapiens
ggttattacccagag

SEQ ID NO: 455967 - DNA, 15 bp, Homo sapiens
cggttattacccaga

SEQ ID NO: 455968 - DNA, 15 bp, Homo sapiens
gcggttattacccag

SEQ ID NO: 455969 - DNA, 15 bp, Homo sapiens
cgcggttattaccca

SEQ ID NO: 455970 - DNA, 15 bp, Homo sapiens
gcgcggttattaccc

SEQ ID NO: 455971 - DNA, 15 bp, Homo sapiens
agcgcggttattacc

SEQ ID NO: 455972 - DNA, 15 bp, Homo sapiens
cagcgcggttattac

SEQ ID NO: 455973 - DNA, 15 bp, Homo sapiens
acagcgcggttatta

SEQ ID NO: 455974 - DNA, 15 bp, Homo sapiens
cacagcgcggttatt

SEQ ID NO: 455975 - DNA, 15 bp, Homo sapiens
acacagcgcggttat

SEQ ID NO: 455976 - DNA, 15 bp, Homo sapiens
cacacagcgcggtta

SEQ ID NO: 455977 - DNA, 15 bp, Homo sapiens
acacacagcgcggtt

SEQ ID NO: 455978 - DNA, 15 bp, Homo sapiens
cacacacagcgcggt

SEQ ID NO: 455979 - DNA, 15 bp, Homo sapiens
acacacacagcgcgg

SEQ ID NO: 455980 - DNA, 15 bp, Homo sapiens
gacacacacagcgcg

SEQ ID NO: 455981 - DNA, 15 bp, Homo sapiens
agacacacacagcgc

SEQ ID NO: 455982 - DNA, 15 bp, Homo sapiens
cagacacacacagcg

SEQ ID NO: 455983 - DNA, 15 bp, Homo sapiens
tcagacacacacagc

SEQ ID NO: 455984 - DNA, 15 bp, Homo sapiens
ctcagacacacacag

SEQ ID NO: 455985 - DNA, 15 bp, Homo sapiens
tctcagacacacaca

SEQ ID NO: 455986 - DNA, 15 bp, Homo sapiens
gtctcagacacacac

SEQ ID NO: 455987 - DNA, 15 bp, Homo sapiens
agtctcagacacaca

SEQ ID NO: 455988 - DNA, 15 bp, Homo sapiens
gagtctcagacacac

SEQ ID NO: 455989 - DNA, 15 bp, Homo sapiens
ggagtctcagacaca

SEQ ID NO: 455990 - DNA, 15 bp, Homo sapiens
gggagtctcagacac

SEQ ID NO: 455991 - DNA, 15 bp, Homo sapiens
agggagtctcagaca

SEQ ID NO: 455992 - DNA, 15 bp, Homo sapiens
gagggagtctcagac

SEQ ID NO: 455993 - DNA, 15 bp, Homo sapiens
cgagggagtctcaga

SEQ ID NO: 455994 - DNA, 15 bp, Homo sapiens
tcgagggagtctcag

SEQ ID NO: 455995 - DNA, 15 bp, Homo sapiens
gtcgagggagtctca

SEQ ID NO: 455996 - DNA, 15 bp, Homo sapiens
tgtcgagggagtctc

SEQ ID NO: 455997 - DNA, 15 bp, Homo sapiens
atgtcgagggagtct

SEQ ID NO: 455998 - DNA, 15 bp, Homo sapiens
tatgtcgagggagtc

SEQ ID NO: 455999 - DNA, 15 bp, Homo sapiens
gtatgtcgagggagt

SEQ ID NO: 456000 - DNA, 15 bp, Homo sapiens
tgtatgtcgagggag

SEQ ID NO: 456001 - DNA, 15 bp, Homo sapiens
ctgtatgtcgaggga

SEQ ID NO: 456002 - DNA, 15 bp, Homo sapiens
tctgtatgtcgaggg

SEQ ID NO: 456003 - DNA, 15 bp, Homo sapiens
atctgtatgtcgagg

SEQ ID NO: 456004 - DNA, 15 bp, Homo sapiens
aatctgtatgtcgag

SEQ ID NO: 456005 - DNA, 15 bp, Homo sapiens
caatctgtatgtcga

SEQ ID NO: 456006 - DNA, 15 bp, Homo sapiens
acaatctgtatgtcg

SEQ ID NO: 456007 - DNA, 15 bp, Homo sapiens
aacaatctgtatgtc

SEQ ID NO: 456008 - DNA, 15 bp, Homo sapiens
aaacaatctgtatgt

SEQ ID NO: 456009 - DNA, 15 bp, Homo sapiens
aaaacaatctgtatg

SEQ ID NO: 456010 - DNA, 15 bp, Homo sapiens
aaaaacaatctgtat

SEQ ID NO: 456011 - DNA, 15 bp, Homo sapiens
aaaaaacaatctgta

SEQ ID NO: 456012 - DNA, 15 bp, Homo sapiens
gaaaaaacaatctgt

SEQ ID NO: 456013 - DNA, 15 bp, Homo sapiens
tgaaaaaacaatctg

SEQ ID NO: 456014 - DNA, 15 bp, Homo sapiens
ttgaaaaaacaatct

SEQ ID NO: 456015 - DNA, 15 bp, Homo sapiens
cttgaaaaaacaatc

SEQ ID NO: 456016 - DNA, 15 bp, Homo sapiens
tcttgaaaaaacaat

SEQ ID NO: 456017 - DNA, 15 bp, Homo sapiens
ctcttgaaaaaacaa

SEQ ID NO: 456018 - DNA, 15 bp, Homo sapiens
gctcttgaaaaaaca

SEQ ID NO: 456019 - DNA, 15 bp, Homo sapiens
cgctcttgaaaaaac

SEQ ID NO: 456020 - DNA, 15 bp, Homo sapiens
tcgctcttgaaaaaa

SEQ ID NO: 456021 - DNA, 15 bp, Homo sapiens
ttcgctcttgaaaaa

SEQ ID NO: 456022 - DNA, 15 bp, Homo sapiens
gttcgctcttgaaaa

SEQ ID NO: 456023 - DNA, 15 bp, Homo sapiens
ggttcgctcttgaaa

SEQ ID NO: 456024 - DNA, 15 bp, Homo sapiens
gggttcgctcttgaa

SEQ ID NO: 456025 - DNA, 15 bp, Homo sapiens
ggggttcgctcttga

SEQ ID NO: 456026 - DNA, 15 bp, Homo sapiens
tggggttcgctcttg

SEQ ID NO: 456027 - DNA, 15 bp, Homo sapiens
ctggggttcgctctt

SEQ ID NO: 456028 - DNA, 15 bp, Homo sapiens
gctggggttcgctct

SEQ ID NO: 456029 - DNA, 15 bp, Homo sapiens
agctggggttcgctc

SEQ ID NO: 456030 - DNA, 15 bp, Homo sapiens
cagctggggttcgct

SEQ ID NO: 456031 - DNA, 15 bp, Homo sapiens
ccagctggggttcgc

SEQ ID NO: 456032 - DNA, 15 bp, Homo sapiens
cccagctggggttcg

SEQ ID NO: 456033 - DNA, 15 bp, Homo sapiens
acccagctggggttc

SEQ ID NO: 456034 - DNA, 15 bp, Homo sapiens
aacccagctggggtt

SEQ ID NO: 456035 - DNA, 15 bp, Homo sapiens
aaacccagctggggt

SEQ ID NO: 456036 - DNA, 15 bp, Homo sapiens
taaacccagctgggg

SEQ ID NO: 456037 - DNA, 15 bp, Homo sapiens
gtaaacccagctggg

SEQ ID NO: 456038 - DNA, 15 bp, Homo sapiens
cgtaaacccagctgg

SEQ ID NO: 456039 - DNA, 15 bp, Homo sapiens
ccgtaaacccagctg

SEQ ID NO: 456040 - DNA, 15 bp, Homo sapiens
cccgtaaacccagct

SEQ ID NO: 456041 - DNA, 15 bp, Homo sapiens
ccccgtaaacccagc

SEQ ID NO: 456042 - DNA, 15 bp, Homo sapiens
accccgtaaacccag

SEQ ID NO: 456043 - DNA, 15 bp, Homo sapiens
gaccccgtaaaccca

SEQ ID NO: 456044 - DNA, 15 bp, Homo sapiens
cgaccccgtaaaccc

SEQ ID NO: 456045 - DNA, 15 bp, Homo sapiens
gcgaccccgtaaacc

SEQ ID NO: 456046 - DNA, 15 bp, Homo sapiens
agcgaccccgtaaac

SEQ ID NO: 456047 - DNA, 15 bp, Homo sapiens
gagcgaccccgtaaa

SEQ ID NO: 456048 - DNA, 15 bp, Homo sapiens
cgagcgaccccgtaa

SEQ ID NO: 456049 - DNA, 15 bp, Homo sapiens
ccgagcgaccccgta

SEQ ID NO: 456050 - DNA, 15 bp, Homo sapiens
accgagcgaccccgt

SEQ ID NO: 456051 - DNA, 15 bp, Homo sapiens
caccgagcgaccccg

SEQ ID NO: 456052 - DNA, 15 bp, Homo sapiens
ccaccgagcgacccc

SEQ ID NO: 456053 - DNA, 15 bp, Homo sapiens
accaccgagcgaccc

SEQ ID NO: 456054 - DNA, 15 bp, Homo sapiens
gaccaccgagcgacc

SEQ ID NO: 456055 - DNA, 15 bp, Homo sapiens
ggaccaccgagcgac

SEQ ID NO: 456056 - DNA, 15 bp, Homo sapiens
cggaccaccgagcga

SEQ ID NO: 456057 - DNA, 15 bp, Homo sapiens
acggaccaccgagcg

SEQ ID NO: 456058 - DNA, 15 bp, Homo sapiens
aacggaccaccgagc

SEQ ID NO: 456059 - DNA, 15 bp, Homo sapiens
aaacggaccaccgag

SEQ ID NO: 456060 - DNA, 15 bp, Homo sapiens
gaaacggaccaccga

SEQ ID NO: 456061 - DNA, 15 bp, Homo sapiens
agaaacggaccaccg

SEQ ID NO: 456062 - DNA, 15 bp, Homo sapiens
tagaaacggaccacc

SEQ ID NO: 456063 - DNA, 15 bp, Homo sapiens
gtagaaacggaccac

SEQ ID NO: 456064 - DNA, 15 bp, Homo sapiens
tgtagaaacggacca

SEQ ID NO: 456065 - DNA, 15 bp, Homo sapiens
ctgtagaaacggacc

SEQ ID NO: 456066 - DNA, 15 bp, Homo sapiens
gctgtagaaacggac

SEQ ID NO: 456067 - DNA, 15 bp, Homo sapiens
ggctgtagaaacgga

SEQ ID NO: 456068 - DNA, 15 bp, Homo sapiens
gggctgtagaaacgg

SEQ ID NO: 456069 - DNA, 15 bp, Homo sapiens
agggctgtagaaacg

SEQ ID NO: 456070 - DNA, 15 bp, Homo sapiens
gagggctgtagaaac

SEQ ID NO: 456071 - DNA, 15 bp, Homo sapiens
cgagggctgtagaaa

SEQ ID NO: 456072 - DNA, 15 bp, Homo sapiens
ccgagggctgtagaa

SEQ ID NO: 456073 - DNA, 15 bp, Homo sapiens
gccgagggctgtaga

SEQ ID NO: 456074 - DNA, 15 bp, Homo sapiens
ggccgagggctgtag

SEQ ID NO: 456075 - DNA, 15 bp, Homo sapiens
gggccgagggctgta

SEQ ID NO: 456076 - DNA, 15 bp, Homo sapiens
agggccgagggctgt

SEQ ID NO: 456077 - DNA, 15 bp, Homo sapiens
cagggccgagggctg

SEQ ID NO: 456078 - DNA, 15 bp, Homo sapiens
gcagggccgagggct

SEQ ID NO: 456079 - DNA, 15 bp, Homo sapiens
cgcagggccgagggc

SEQ ID NO: 456080 - DNA, 15 bp, Homo sapiens
gcgcagggccgaggg

SEQ ID NO: 456081 - DNA, 15 bp, Homo sapiens
agcgcagggccgagg

SEQ ID NO: 456082 - DNA, 15 bp, Homo sapiens
gagcgcagggccgag

SEQ ID NO: 456083 - DNA, 15 bp, Homo sapiens
agagcgcagggccga

SEQ ID NO: 456084 - DNA, 15 bp, Homo sapiens
cagagcgcagggccg

SEQ ID NO: 456085 - DNA, 15 bp, Homo sapiens
ccagagcgcagggcc

SEQ ID NO: 456086 - DNA, 15 bp, Homo sapiens
gccagagcgcagggc

SEQ ID NO: 456087 - DNA, 15 bp, Homo sapiens
ggccagagcgcaggg

SEQ ID NO: 456088 - DNA, 15 bp, Homo sapiens
tggccagagcgcagg

SEQ ID NO: 456089 - DNA, 15 bp, Homo sapiens
gtggccagagcgcag

SEQ ID NO: 456090 - DNA, 15 bp, Homo sapiens
agtggccagagcgca

SEQ ID NO: 456091 - DNA, 15 bp, Homo sapiens
aagtggccagagcgc

SEQ ID NO: 456092 - DNA, 15 bp, Homo sapiens
caagtggccagagcg

SEQ ID NO: 456093 - DNA, 15 bp, Homo sapiens
ccaagtggccagagc

SEQ ID NO: 456094 - DNA, 15 bp, Homo sapiens
gccaagtggccagag

SEQ ID NO: 456095 - DNA, 15 bp, Homo sapiens
agccaagtggccaga

SEQ ID NO: 456096 - DNA, 15 bp, Homo sapiens
aagccaagtggccag

SEQ ID NO: 456097 - DNA, 15 bp, Homo sapiens
caagccaagtggcca

SEQ ID NO: 456098 - DNA, 15 bp, Homo sapiens
acaagccaagtggcc

SEQ ID NO: 456099 - DNA, 15 bp, Homo sapiens
aacaagccaagtggc

SEQ ID NO: 456100 - DNA, 15 bp, Homo sapiens
aaacaagccaagtgg

SEQ ID NO: 456101 - DNA, 15 bp, Homo sapiens
aaaacaagccaagtg

SEQ ID NO: 456102 - DNA, 15 bp, Homo sapiens
aaaaacaagccaagt

SEQ ID NO: 456103 - DNA, 15 bp, Homo sapiens
caaaaacaagccaag

SEQ ID NO: 456104 - DNA, 15 bp, Homo sapiens
acaaaaacaagccaa

SEQ ID NO: 456105 - DNA, 15 bp, Homo sapiens
aacaaaaacaagcca

SEQ ID NO: 456106 - DNA, 15 bp, Homo sapiens
aaacaaaaacaagcc

SEQ ID NO: 456107 - DNA, 15 bp, Homo sapiens
gaaacaaaaacaagc

SEQ ID NO: 456108 - DNA, 15 bp, Homo sapiens
tgaaacaaaaacaag

SEQ ID NO: 456109 - DNA, 15 bp, Homo sapiens
gtgaaacaaaaacaa

SEQ ID NO: 456110 - DNA, 15 bp, Homo sapiens
agtgaaacaaaaaca

SEQ ID NO: 456111 - DNA, 15 bp, Homo sapiens
cagtgaaacaaaaac

SEQ ID NO: 456112 - DNA, 15 bp, Homo sapiens
acagtgaaacaaaaa

SEQ ID NO: 456113 - DNA, 15 bp, Homo sapiens
aacagtgaaacaaaa

SEQ ID NO: 456114 - DNA, 15 bp, Homo sapiens
gaacagtgaaacaaa

SEQ ID NO: 456115 - DNA, 15 bp, Homo sapiens
ggaacagtgaaacaa

SEQ ID NO: 456116 - DNA, 15 bp, Homo sapiens
gggaacagtgaaaca

SEQ ID NO: 456117 - DNA, 15 bp, Homo sapiens
ggggaacagtgaaac

SEQ ID NO: 456118 - DNA, 15 bp, Homo sapiens
cggggaacagtgaaa

SEQ ID NO: 456119 - DNA, 15 bp, Homo sapiens
ccggggaacagtgaa

SEQ ID NO: 456120 - DNA, 15 bp, Homo sapiens
tccggggaacagtga

SEQ ID NO: 456121 - DNA, 15 bp, Homo sapiens
ctccggggaacagtg

SEQ ID NO: 456122 - DNA, 15 bp, Homo sapiens
actccggggaacagt

SEQ ID NO: 456123 - DNA, 15 bp, Homo sapiens
gactccggggaacag

SEQ ID NO: 456124 - DNA, 15 bp, Homo sapiens
agactccggggaaca

SEQ ID NO: 456125 - DNA, 15 bp, Homo sapiens
gagactccggggaac

SEQ ID NO: 456126 - DNA, 15 bp, Homo sapiens
agagactccggggaa

SEQ ID NO: 456127 - DNA, 15 bp, Homo sapiens
cagagactccgggga

SEQ ID NO: 456128 - DNA, 15 bp, Homo sapiens
gcagagactccgggg

SEQ ID NO: 456129 - DNA, 15 bp, Homo sapiens
ggcagagactccggg

SEQ ID NO: 456130 - DNA, 15 bp, Homo sapiens
aggcagagactccgg

SEQ ID NO: 456131 - DNA, 15 bp, Homo sapiens
caggcagagactccg

SEQ ID NO: 456132 - DNA, 15 bp, Homo sapiens
ccaggcagagactcc

SEQ ID NO: 456133 - DNA, 15 bp, Homo sapiens
cccaggcagagactc

SEQ ID NO: 456134 - DNA, 15 bp, Homo sapiens
ccccaggcagagact

SEQ ID NO: 456135 - DNA, 15 bp, Homo sapiens
tccccaggcagagac

SEQ ID NO: 456136 - DNA, 15 bp, Homo sapiens
ctccccaggcagaga

SEQ ID NO: 456137 - DNA, 15 bp, Homo sapiens
actccccaggcagag

SEQ ID NO: 456138 - DNA, 15 bp, Homo sapiens
cactccccaggcaga

SEQ ID NO: 456139 - DNA, 15 bp, Homo sapiens
tcactccccaggcag

SEQ ID NO: 456140 - DNA, 15 bp, Homo sapiens
ttcactccccaggca

SEQ ID NO: 456141 - DNA, 15 bp, Homo sapiens
cttcactccccaggc

SEQ ID NO: 456142 - DNA, 15 bp, Homo sapiens
ccttcactccccagg

SEQ ID NO: 456143 - DNA, 15 bp, Homo sapiens
tccttcactccccag

SEQ ID NO: 456144 - DNA, 15 bp, Homo sapiens
ctccttcactcccca

SEQ ID NO: 456145 - DNA, 15 bp, Homo sapiens
actccttcactcccc

SEQ ID NO: 456146 - DNA, 15 bp, Homo sapiens
aactccttcactccc

SEQ ID NO: 456147 - DNA, 15 bp, Homo sapiens
caactccttcactcc

SEQ ID NO: 456148 - DNA, 15 bp, Homo sapiens
ccaactccttcactc

SEQ ID NO: 456149 - DNA, 15 bp, Homo sapiens
tccaactccttcact

SEQ ID NO: 456150 - DNA, 15 bp, Homo sapiens
atccaactccttcac

SEQ ID NO: 456151 - DNA, 15 bp, Homo sapiens
gatccaactccttca

SEQ ID NO: 456152 - DNA, 15 bp, Homo sapiens
ggatccaactccttc

SEQ ID NO: 456153 - DNA, 15 bp, Homo sapiens
tggatccaactcctt

SEQ ID NO: 456154 - DNA, 15 bp, Homo sapiens
atggatccaactcct

SEQ ID NO: 456155 - DNA, 15 bp, Homo sapiens
catggatccaactcc

SEQ ID NO: 456156 - DNA, 15 bp, Homo sapiens
acatggatccaactc

SEQ ID NO: 456157 - DNA, 15 bp, Homo sapiens
aacatggatccaact

SEQ ID NO: 456158 - DNA, 15 bp, Homo sapiens
gaacatggatccaac

SEQ ID NO: 456159 - DNA, 15 bp, Homo sapiens
tgaacatggatccaa

SEQ ID NO: 456160 - DNA, 15 bp, Homo sapiens
ctgaacatggatcca

SEQ ID NO: 456161 - DNA, 15 bp, Homo sapiens
actgaacatggatcc

SEQ ID NO: 456162 - DNA, 15 bp, Homo sapiens
cactgaacatggatc

SEQ ID NO: 456163 - DNA, 15 bp, Homo sapiens
tcactgaacatggat

SEQ ID NO: 456164 - DNA, 15 bp, Homo sapiens
ctcactgaacatgga

SEQ ID NO: 456165 - DNA, 15 bp, Homo sapiens
gctcactgaacatgg

SEQ ID NO: 456166 - DNA, 15 bp, Homo sapiens
tgctcactgaacatg

SEQ ID NO: 456167 - DNA, 15 bp, Homo sapiens
gtgctcactgaacat

SEQ ID NO: 456168 - DNA, 15 bp, Homo sapiens
agtgctcactgaaca

SEQ ID NO: 456169 - DNA, 15 bp, Homo sapiens
aagtgctcactgaac

SEQ ID NO: 456170 - DNA, 15 bp, Homo sapiens
caagtgctcactgaa

SEQ ID NO: 456171 - DNA, 15 bp, Homo sapiens
ccaagtgctcactga

SEQ ID NO: 456172 - DNA, 15 bp, Homo sapiens
tccaagtgctcactg

SEQ ID NO: 456173 - DNA, 15 bp, Homo sapiens
atccaagtgctcact

SEQ ID NO: 456174 - DNA, 15 bp, Homo sapiens
catccaagtgctcac

SEQ ID NO: 456175 - DNA, 15 bp, Homo sapiens
acatccaagtgctca

SEQ ID NO: 456176 - DNA, 15 bp, Homo sapiens
tacatccaagtgctc

SEQ ID NO: 456177 - DNA, 15 bp, Homo sapiens
gtacatccaagtgct

SEQ ID NO: 456178 - DNA, 15 bp, Homo sapiens
ggtacatccaagtgc

SEQ ID NO: 456179 - DNA, 15 bp, Homo sapiens
tggtacatccaagtg

SEQ ID NO: 456180 - DNA, 15 bp, Homo sapiens
ctggtacatccaagt

SEQ ID NO: 456181 - DNA, 15 bp, Homo sapiens
cctggtacatccaag

SEQ ID NO: 456182 - DNA, 15 bp, Homo sapiens
tcctggtacatccaa

SEQ ID NO: 456183 - DNA, 15 bp, Homo sapiens
ttcctggtacatcca

SEQ ID NO: 456184 - DNA, 15 bp, Homo sapiens
gttcctggtacatcc

SEQ ID NO: 456185 - DNA, 15 bp, Homo sapiens
cgttcctggtacatc

SEQ ID NO: 456186 - DNA, 15 bp, Homo sapiens
tcgttcctggtacat

SEQ ID NO: 456187 - DNA, 15 bp, Homo sapiens
ctcgttcctggtaca

SEQ ID NO: 456188 - DNA, 15 bp, Homo sapiens
tctcgttcctggtac

SEQ ID NO: 456189 - DNA, 15 bp, Homo sapiens
gtctcgttcctggta

SEQ ID NO: 456190 - DNA, 15 bp, Homo sapiens
tgtctcgttcctggt

SEQ ID NO: 456191 - DNA, 15 bp, Homo sapiens
ctgtctcgttcctgg

SEQ ID NO: 456192 - DNA, 15 bp, Homo sapiens
cctgtctcgttcctg

SEQ ID NO: 456193 - DNA, 15 bp, Homo sapiens
acctgtctcgttcct

SEQ ID NO: 456194 - DNA, 15 bp, Homo sapiens
aacctgtctcgttcc

SEQ ID NO: 456195 - DNA, 15 bp, Homo sapiens
gaacctgtctcgttc

SEQ ID NO: 456196 - DNA, 15 bp, Homo sapiens
tgaacctgtctcgtt

SEQ ID NO: 456197 - DNA, 15 bp, Homo sapiens
ttgaacctgtctcgt

SEQ ID NO: 456198 - DNA, 15 bp, Homo sapiens
tttgaacctgtctcg

SEQ ID NO: 456199 - DNA, 15 bp, Homo sapiens
ttttgaacctgtctc

SEQ ID NO: 456200 - DNA, 15 bp, Homo sapiens
gttttgaacctgtct

SEQ ID NO: 456201 - DNA, 15 bp, Homo sapiens
agttttgaacctgtc

SEQ ID NO: 456202 - DNA, 15 bp, Homo sapiens
gagttttgaacctgt

SEQ ID NO: 456203 - DNA, 15 bp, Homo sapiens
tgagttttgaacctg

SEQ ID NO: 456204 - DNA, 15 bp, Homo sapiens
ttgagttttgaacct

SEQ ID NO: 456205 - DNA, 15 bp, Homo sapiens
gttgagttttgaacc

SEQ ID NO: 456206 - DNA, 15 bp, Homo sapiens
ggttgagttttgaac

SEQ ID NO: 456207 - DNA, 15 bp, Homo sapiens
gggttgagttttgaa

SEQ ID NO: 456208 - DNA, 15 bp, Homo sapiens
agggttgagttttga

SEQ ID NO: 456209 - DNA, 15 bp, Homo sapiens
cagggttgagttttg

SEQ ID NO: 456210 - DNA, 15 bp, Homo sapiens
tcagggttgagtttt

SEQ ID NO: 456211 - DNA, 15 bp, Homo sapiens
ctcagggttgagttt

SEQ ID NO: 456212 - DNA, 15 bp, Homo sapiens
tctcagggttgagtt

SEQ ID NO: 456213 - DNA, 15 bp, Homo sapiens
ctctcagggttgagt

SEQ ID NO: 456214 - DNA, 15 bp, Homo sapiens
actctcagggttgag

SEQ ID NO: 456215 - DNA, 15 bp, Homo sapiens
aactctcagggttga

SEQ ID NO: 456216 - DNA, 15 bp, Homo sapiens
caactctcagggttg

SEQ ID NO: 456217 - DNA, 15 bp, Homo sapiens
acaactctcagggtt

SEQ ID NO: 456218 - DNA, 15 bp, Homo sapiens
cacaactctcagggt

SEQ ID NO: 456219 - DNA, 15 bp, Homo sapiens
gcacaactctcaggg

SEQ ID NO: 456220 - DNA, 15 bp, Homo sapiens
ggcacaactctcagg

SEQ ID NO: 456221 - DNA, 15 bp, Homo sapiens
gggcacaactctcag

SEQ ID NO: 456222 - DNA, 15 bp, Homo sapiens
ggggcacaactctca

SEQ ID NO: 456223 - DNA, 15 bp, Homo sapiens
gggggcacaactctc

SEQ ID NO: 456224 - DNA, 15 bp, Homo sapiens
tgggggcacaactct

SEQ ID NO: 456225 - DNA, 15 bp, Homo sapiens
atgggggcacaactc

SEQ ID NO: 456226 - DNA, 15 bp, Homo sapiens
aatgggggcacaact

SEQ ID NO: 456227 - DNA, 15 bp, Homo sapiens
aaatgggggcacaac

SEQ ID NO: 456228 - DNA, 15 bp, Homo sapiens
aaaatgggggcacaa

SEQ ID NO: 456229 - DNA, 15 bp, Homo sapiens
taaaatgggggcaca

SEQ ID NO: 456230 - DNA, 15 bp, Homo sapiens
ttaaaatgggggcac

SEQ ID NO: 456231 - DNA, 15 bp, Homo sapiens
tttaaaatgggggca

SEQ ID NO: 456232 - DNA, 15 bp, Homo sapiens
ctttaaaatgggggc

SEQ ID NO: 456233 - DNA, 15 bp, Homo sapiens
tctttaaaatggggg

SEQ ID NO: 456234 - DNA, 15 bp, Homo sapiens
atctttaaaatgggg

SEQ ID NO: 456235 - DNA, 15 bp, Homo sapiens
catctttaaaatggg

SEQ ID NO: 456236 - DNA, 15 bp, Homo sapiens
tcatctttaaaatgg

SEQ ID NO: 456237 - DNA, 15 bp, Homo sapiens
ctcatctttaaaatg

SEQ ID NO: 456238 - DNA, 15 bp, Homo sapiens
gctcatctttaaaat

SEQ ID NO: 456239 - DNA, 15 bp, Homo sapiens
agctcatctttaaaa

SEQ ID NO: 456240 - DNA, 15 bp, Homo sapiens
tagctcatctttaaa

SEQ ID NO: 456241 - DNA, 15 bp, Homo sapiens
ttagctcatctttaa

SEQ ID NO: 456242 - DNA, 15 bp, Homo sapiens
gttagctcatcttta

SEQ ID NO: 456243 - DNA, 15 bp, Homo sapiens
agttagctcatcttt

SEQ ID NO: 456244 - DNA, 15 bp, Homo sapiens
cagttagctcatctt

SEQ ID NO: 456245 - DNA, 15 bp, Homo sapiens
ccagttagctcatct

SEQ ID NO: 456246 - DNA, 15 bp, Homo sapiens
cccagttagctcatc

SEQ ID NO: 456247 - DNA, 15 bp, Homo sapiens
gcccagttagctcat

SEQ ID NO: 456248 - DNA, 15 bp, Homo sapiens
agcccagttagctca

SEQ ID NO: 456249 - DNA, 15 bp, Homo sapiens
aagcccagttagctc

SEQ ID NO: 456250 - DNA, 15 bp, Homo sapiens
taagcccagttagct

SEQ ID NO: 456251 - DNA, 15 bp, Homo sapiens
ctaagcccagttagc

SEQ ID NO: 456252 - DNA, 15 bp, Homo sapiens
gctaagcccagttag

SEQ ID NO: 456253 - DNA, 15 bp, Homo sapiens
ggctaagcccagtta

SEQ ID NO: 456254 - DNA, 15 bp, Homo sapiens
tggctaagcccagtt

SEQ ID NO: 456255 - DNA, 15 bp, Homo sapiens
ctggctaagcccagt

SEQ ID NO: 456256 - DNA, 15 bp, Homo sapiens
tctggctaagcccag

SEQ ID NO: 456257 - DNA, 15 bp, Homo sapiens
gtctggctaagccca

SEQ ID NO: 456258 - DNA, 15 bp, Homo sapiens
tgtctggctaagccc

SEQ ID NO: 456259 - DNA, 15 bp, Homo sapiens
atgtctggctaagcc

SEQ ID NO: 456260 - DNA, 15 bp, Homo sapiens
aatgtctggctaagc

SEQ ID NO: 456261 - DNA, 15 bp, Homo sapiens
caatgtctggctaag

SEQ ID NO: 456262 - DNA, 15 bp, Homo sapiens
tcaatgtctggctaa

SEQ ID NO: 456263 - DNA, 15 bp, Homo sapiens
ctcaatgtctggcta

SEQ ID NO: 456264 - DNA, 15 bp, Homo sapiens
cctcaatgtctggct

SEQ ID NO: 456265 - DNA, 15 bp, Homo sapiens
tcctcaatgtctggc

SEQ ID NO: 456266 - DNA, 15 bp, Homo sapiens
ctcctcaatgtctgg

SEQ ID NO: 456267 - DNA, 15 bp, Homo sapiens
tctcctcaatgtctg

SEQ ID NO: 456268 - DNA, 15 bp, Homo sapiens
ttctcctcaatgtct

SEQ ID NO: 456269 - DNA, 15 bp, Homo sapiens
tttctcctcaatgtc

SEQ ID NO: 456270 - DNA, 15 bp, Homo sapiens
gtttctcctcaatgt

SEQ ID NO: 456271 - DNA, 15 bp, Homo sapiens
ggtttctcctcaatg

SEQ ID NO: 456272 - DNA, 15 bp, Homo sapiens
tggtttctcctcaat

SEQ ID NO: 456273 - DNA, 15 bp, Homo sapiens
atggtttctcctcaa

SEQ ID NO: 456274 - DNA, 15 bp, Homo sapiens
aatggtttctcctca

SEQ ID NO: 456275 - DNA, 15 bp, Homo sapiens
aaatggtttctcctc

SEQ ID NO: 456276 - DNA, 15 bp, Homo sapiens
aaaatggtttctcct

SEQ ID NO: 456277 - DNA, 15 bp, Homo sapiens
gaaaatggtttctcc

SEQ ID NO: 456278 - DNA, 15 bp, Homo sapiens
agaaaatggtttctc

SEQ ID NO: 456279 - DNA, 15 bp, Homo sapiens
aagaaaatggtttct

SEQ ID NO: 456280 - DNA, 15 bp, Homo sapiens
aaagaaaatggtttc

SEQ ID NO: 456281 - DNA, 15 bp, Homo sapiens
gaaagaaaatggttt

SEQ ID NO: 456282 - DNA, 15 bp, Homo sapiens
cgaaagaaaatggtt

SEQ ID NO: 456283 - DNA, 15 bp, Homo sapiens
acgaaagaaaatggt

SEQ ID NO: 456284 - DNA, 15 bp, Homo sapiens
cacgaaagaaaatgg

SEQ ID NO: 456285 - DNA, 15 bp, Homo sapiens
tcacgaaagaaaatg

SEQ ID NO: 456286 - DNA, 15 bp, Homo sapiens
ctcacgaaagaaaat

SEQ ID NO: 456287 - DNA, 15 bp, Homo sapiens
actcacgaaagaaaa

SEQ ID NO: 456288 - DNA, 15 bp, Homo sapiens
gactcacgaaagaaa

SEQ ID NO: 456289 - DNA, 15 bp, Homo sapiens
ggactcacgaaagaa

SEQ ID NO: 456290 - DNA, 15 bp, Homo sapiens
gggactcacgaaaga

SEQ ID NO: 456291 - DNA, 15 bp, Homo sapiens
cgggactcacgaaag

SEQ ID NO: 456292 - DNA, 15 bp, Homo sapiens
gcgggactcacgaaa

SEQ ID NO: 456293 - DNA, 15 bp, Homo sapiens
cgcgggactcacgaa

SEQ ID NO: 456294 - DNA, 15 bp, Homo sapiens
ccgcgggactcacga

SEQ ID NO: 456295 - DNA, 15 bp, Homo sapiens
cccgcgggactcacg

SEQ ID NO: 456296 - DNA, 15 bp, Homo sapiens
acccgcgggactcac

SEQ ID NO: 456297 - DNA, 15 bp, Homo sapiens
cacccgcgggactca

SEQ ID NO: 456298 - DNA, 15 bp, Homo sapiens
acacccgcgggactc

SEQ ID NO: 456299 - DNA, 15 bp, Homo sapiens
gacacccgcgggact

SEQ ID NO: 456300 - DNA, 15 bp, Homo sapiens
cgacacccgcgggac

SEQ ID NO: 456301 - DNA, 15 bp, Homo sapiens
tcgacacccgcggga

SEQ ID NO: 456302 - DNA, 15 bp, Homo sapiens
ttcgacacccgcggg

SEQ ID NO: 456303 - DNA, 15 bp, Homo sapiens
cttcgacacccgcgg

SEQ ID NO: 456304 - DNA, 15 bp, Homo sapiens
gcttcgacacccgcg

SEQ ID NO: 456305 - DNA, 15 bp, Homo sapiens
ggcttcgacacccgc

SEQ ID NO: 456306 - DNA, 15 bp, Homo sapiens
cggcttcgacacccg

SEQ ID NO: 456307 - DNA, 15 bp, Homo sapiens
ccggcttcgacaccc

SEQ ID NO: 456308 - DNA, 15 bp, Homo sapiens
tccggcttcgacacc

SEQ ID NO: 456309 - DNA, 15 bp, Homo sapiens
atccggcttcgacac

SEQ ID NO: 456310 - DNA, 15 bp, Homo sapiens
gatccggcttcgaca

SEQ ID NO: 456311 - DNA, 15 bp, Homo sapiens
ggatccggcttcgac

SEQ ID NO: 456312 - DNA, 15 bp, Homo sapiens
gggatccggcttcga

SEQ ID NO: 456313 - DNA, 15 bp, Homo sapiens
tgggatccggcttcg

SEQ ID NO: 456314 - DNA, 15 bp, Homo sapiens
gtgggatccggcttc

SEQ ID NO: 456315 - DNA, 15 bp, Homo sapiens
cgtgggatccggctt

SEQ ID NO: 456316 - DNA, 15 bp, Homo sapiens
tcgtgggatccggct

SEQ ID NO: 456317 - DNA, 15 bp, Homo sapiens
ttcgtgggatccggc

SEQ ID NO: 456318 - DNA, 15 bp, Homo sapiens
cttcgtgggatccgg

SEQ ID NO: 456319 - DNA, 15 bp, Homo sapiens
ccttcgtgggatccg

SEQ ID NO: 456320 - DNA, 15 bp, Homo sapiens
cccttcgtgggatcc

SEQ ID NO: 456321 - DNA, 15 bp, Homo sapiens
tcccttcgtgggatc

SEQ ID NO: 456322 - DNA, 15 bp, Homo sapiens
atcccttcgtgggat

SEQ ID NO: 456323 - DNA, 15 bp, Homo sapiens
catcccttcgtggga

SEQ ID NO: 456324 - DNA, 15 bp, Homo sapiens
ccatcccttcgtggg

SEQ ID NO: 456325 - DNA, 15 bp, Homo sapiens
accatcccttcgtgg

SEQ ID NO: 456326 - DNA, 15 bp, Homo sapiens
caccatcccttcgtg

SEQ ID NO: 456327 - DNA, 15 bp, Homo sapiens
ccaccatcccttcgt

SEQ ID NO: 456328 - DNA, 15 bp, Homo sapiens
gccaccatcccttcg

SEQ ID NO: 456329 - DNA, 15 bp, Homo sapiens
tgccaccatcccttc

SEQ ID NO: 456330 - DNA, 15 bp, Homo sapiens
gtgccaccatccctt

SEQ ID NO: 456331 - DNA, 15 bp, Homo sapiens
ggtgccaccatccct

SEQ ID NO: 456332 - DNA, 15 bp, Homo sapiens
tggtgccaccatccc

SEQ ID NO: 456333 - DNA, 15 bp, Homo sapiens
ctggtgccaccatcc

SEQ ID NO: 456334 - DNA, 15 bp, Homo sapiens
cctggtgccaccatc

SEQ ID NO: 456335 - DNA, 15 bp, Homo sapiens
ccctggtgccaccat

SEQ ID NO: 456336 - DNA, 15 bp, Homo sapiens
tccctggtgccacca

SEQ ID NO: 456337 - DNA, 15 bp, Homo sapiens
atccctggtgccacc

SEQ ID NO: 456338 - DNA, 15 bp, Homo sapiens
catccctggtgccac

SEQ ID NO: 456339 - DNA, 15 bp, Homo sapiens
ccatccctggtgcca

SEQ ID NO: 456340 - DNA, 15 bp, Homo sapiens
accatccctggtgcc

SEQ ID NO: 456341 - DNA, 15 bp, Homo sapiens
caccatccctggtgc

SEQ ID NO: 456342 - DNA, 15 bp, Homo sapiens
ccaccatccctggtg

SEQ ID NO: 456343 - DNA, 15 bp, Homo sapiens
gccaccatccctggt

SEQ ID NO: 456344 - DNA, 15 bp, Homo sapiens
tgccaccatccctgg

SEQ ID NO: 456345 - DNA, 15 bp, Homo sapiens
atgccaccatccctg

SEQ ID NO: 456346 - DNA, 15 bp, Homo sapiens
gatgccaccatccct

SEQ ID NO: 456347 - DNA, 15 bp, Homo sapiens
tgatgccaccatccc

SEQ ID NO: 456348 - DNA, 15 bp, Homo sapiens
ctgatgccaccatcc

SEQ ID NO: 456349 - DNA, 15 bp, Homo sapiens
tctgatgccaccatc

SEQ ID NO: 456350 - DNA, 15 bp, Homo sapiens
ctctgatgccaccat

SEQ ID NO: 456351 - DNA, 15 bp, Homo sapiens
actctgatgccacca

SEQ ID NO: 456352 - DNA, 15 bp, Homo sapiens
gactctgatgccacc

SEQ ID NO: 456353 - DNA, 15 bp, Homo sapiens
agactctgatgccac

SEQ ID NO: 456354 - DNA, 15 bp, Homo sapiens
cagactctgatgcca

SEQ ID NO: 456355 - DNA, 15 bp, Homo sapiens
ccagactctgatgcc

SEQ ID NO: 456356 - DNA, 15 bp, Homo sapiens
accagactctgatgc

SEQ ID NO: 456357 - DNA, 15 bp, Homo sapiens
caccagactctgatg

SEQ ID NO: 456358 - DNA, 15 bp, Homo sapiens
gcaccagactctgat

SEQ ID NO: 456359 - DNA, 15 bp, Homo sapiens
cgcaccagactctga

SEQ ID NO: 456360 - DNA, 15 bp, Homo sapiens
ccgcaccagactctg

SEQ ID NO: 456361 - DNA, 15 bp, Homo sapiens
cccgcaccagactct

SEQ ID NO: 456362 - DNA, 15 bp, Homo sapiens
ccccgcaccagactc

SEQ ID NO: 456363 - DNA, 15 bp, Homo sapiens
tccccgcaccagact

SEQ ID NO: 456364 - DNA, 15 bp, Homo sapiens
ctccccgcaccagac

SEQ ID NO: 456365 - DNA, 15 bp, Homo sapiens
cctccccgcaccaga

SEQ ID NO: 456366 - DNA, 15 bp, Homo sapiens
tcctccccgcaccag

SEQ ID NO: 456367 - DNA, 15 bp, Homo sapiens
ttcctccccgcacca

SEQ ID NO: 456368 - DNA, 15 bp, Homo sapiens
tttcctccccgcacc

SEQ ID NO: 456369 - DNA, 15 bp, Homo sapiens
atttcctccccgcac

SEQ ID NO: 456370 - DNA, 15 bp, Homo sapiens
catttcctccccgca

SEQ ID NO: 456371 - DNA, 15 bp, Homo sapiens
acatttcctccccgc

SEQ ID NO: 456372 - DNA, 15 bp, Homo sapiens
gacatttcctccccg

SEQ ID NO: 456373 - DNA, 15 bp, Homo sapiens
agacatttcctcccc

SEQ ID NO: 456374 - DNA, 15 bp, Homo sapiens
gagacatttcctccc

SEQ ID NO: 456375 - DNA, 15 bp, Homo sapiens
agagacatttcctcc

SEQ ID NO: 456376 - DNA, 15 bp, Homo sapiens
gagagacatttcctc

SEQ ID NO: 456377 - DNA, 15 bp, Homo sapiens
agagagacatttcct

SEQ ID NO: 456378 - DNA, 15 bp, Homo sapiens
cagagagacatttcc

SEQ ID NO: 456379 - DNA, 15 bp, Homo sapiens
acagagagacatttc

SEQ ID NO: 456380 - DNA, 15 bp, Homo sapiens
cacagagagacattt

SEQ ID NO: 456381 - DNA, 15 bp, Homo sapiens
ccacagagagacatt

SEQ ID NO: 456382 - DNA, 15 bp, Homo sapiens
accacagagagacat

SEQ ID NO: 456383 - DNA, 15 bp, Homo sapiens
gaccacagagagaca

SEQ ID NO: 456384 - DNA, 15 bp, Homo sapiens
agaccacagagagac

SEQ ID NO: 456385 - DNA, 15 bp, Homo sapiens
gagaccacagagaga

SEQ ID NO: 456386 - DNA, 15 bp, Homo sapiens
ggagaccacagagag

SEQ ID NO: 456387 - DNA, 15 bp, Homo sapiens
cggagaccacagaga

SEQ ID NO: 456388 - DNA, 15 bp, Homo sapiens
gcggagaccacagag

SEQ ID NO: 456389 - DNA, 15 bp, Homo sapiens
tgcggagaccacaga

SEQ ID NO: 456390 - DNA, 15 bp, Homo sapiens
ctgcggagaccacag

SEQ ID NO: 456391 - DNA, 15 bp, Homo sapiens
gctgcggagaccaca

SEQ ID NO: 456392 - DNA, 15 bp, Homo sapiens
ggctgcggagaccac

SEQ ID NO: 456393 - DNA, 15 bp, Homo sapiens
tggctgcggagacca

SEQ ID NO: 456394 - DNA, 15 bp, Homo sapiens
ctggctgcggagacc

SEQ ID NO: 456395 - DNA, 15 bp, Homo sapiens
gctggctgcggagac

SEQ ID NO: 456396 - DNA, 15 bp, Homo sapiens
tgctggctgcggaga

SEQ ID NO: 456397 - DNA, 15 bp, Homo sapiens
gtgctggctgcggag

SEQ ID NO: 456398 - DNA, 15 bp, Homo sapiens
ggtgctggctgcgga

SEQ ID NO: 456399 - DNA, 15 bp, Homo sapiens
aggtgctggctgcgg

SEQ ID NO: 456400 - DNA, 15 bp, Homo sapiens
gaggtgctggctgcg

SEQ ID NO: 456401 - DNA, 15 bp, Homo sapiens
ggaggtgctggctgc

SEQ ID NO: 456402 - DNA, 15 bp, Homo sapiens
gggaggtgctggctg

SEQ ID NO: 456403 - DNA, 15 bp, Homo sapiens
ggggaggtgctggct

SEQ ID NO: 456404 - DNA, 15 bp, Homo sapiens
cggggaggtgctggc

SEQ ID NO: 456405 - DNA, 15 bp, Homo sapiens
ccggggaggtgctgg

SEQ ID NO: 456406 - DNA, 15 bp, Homo sapiens
gccggggaggtgctg

SEQ ID NO: 456407 - DNA, 15 bp, Homo sapiens
tgccggggaggtgct

SEQ ID NO: 456408 - DNA, 15 bp, Homo sapiens
ttgccggggaggtgc

SEQ ID NO: 456409 - DNA, 15 bp, Homo sapiens
cttgccggggaggtg

SEQ ID NO: 456410 - DNA, 15 bp, Homo sapiens
ccttgccggggaggt

SEQ ID NO: 456411 - DNA, 15 bp, Homo sapiens
accttgccggggagg

SEQ ID NO: 456412 - DNA, 15 bp, Homo sapiens
aaccttgccggggag

SEQ ID NO: 456413 - DNA, 15 bp, Homo sapiens
gaaccttgccgggga

SEQ ID NO: 456414 - DNA, 15 bp, Homo sapiens
agaaccttgccgggg

SEQ ID NO: 456415 - DNA, 15 bp, Homo sapiens
cagaaccttgccggg

SEQ ID NO: 456416 - DNA, 15 bp, Homo sapiens
tcagaaccttgccgg

SEQ ID NO: 456417 - DNA, 15 bp, Homo sapiens
ctcagaaccttgccg

SEQ ID NO: 456418 - DNA, 15 bp, Homo sapiens
gctcagaaccttgcc

SEQ ID NO: 456419 - DNA, 15 bp, Homo sapiens
agctcagaaccttgc

SEQ ID NO: 456420 - DNA, 15 bp, Homo sapiens
aagctcagaaccttg

SEQ ID NO: 456421 - DNA, 15 bp, Homo sapiens
gaagctcagaacctt

SEQ ID NO: 456422 - DNA, 15 bp, Homo sapiens
cgaagctcagaacct

SEQ ID NO: 456423 - DNA, 15 bp, Homo sapiens
gcgaagctcagaacc

SEQ ID NO: 456424 - DNA, 15 bp, Homo sapiens
ggcgaagctcagaac

SEQ ID NO: 456425 - DNA, 15 bp, Homo sapiens
cggcgaagctcagaa

SEQ ID NO: 456426 - DNA, 15 bp, Homo sapiens
ccggcgaagctcaga

SEQ ID NO: 456427 - DNA, 15 bp, Homo sapiens
cccggcgaagctcag

SEQ ID NO: 456428 - DNA, 15 bp, Homo sapiens
tcccggcgaagctca

SEQ ID NO: 456429 - DNA, 15 bp, Homo sapiens
ctcccggcgaagctc

SEQ ID NO: 456430 - DNA, 15 bp, Homo sapiens
gctcccggcgaagct

SEQ ID NO: 456431 - DNA, 15 bp, Homo sapiens
cgctcccggcgaagc

SEQ ID NO: 456432 - DNA, 15 bp, Homo sapiens
ccgctcccggcgaag

SEQ ID NO: 456433 - DNA, 15 bp, Homo sapiens
cccgctcccggcgaa

SEQ ID NO: 456434 - DNA, 15 bp, Homo sapiens
gcccgctcccggcga

SEQ ID NO: 456435 - DNA, 15 bp, Homo sapiens
agcccgctcccggcg

SEQ ID NO: 456436 - DNA, 15 bp, Homo sapiens
cagcccgctcccggc

SEQ ID NO: 456437 - DNA, 15 bp, Homo sapiens
ccagcccgctcccgg

SEQ ID NO: 456438 - DNA, 15 bp, Homo sapiens
cccagcccgctcccg

SEQ ID NO: 456439 - DNA, 15 bp, Homo sapiens
ccccagcccgctccc

SEQ ID NO: 456440 - DNA, 15 bp, Homo sapiens
gccccagcccgctcc

SEQ ID NO: 456441 - DNA, 15 bp, Homo sapiens
ggccccagcccgctc

SEQ ID NO: 456442 - DNA, 15 bp, Homo sapiens
tggccccagcccgct

SEQ ID NO: 456443 - DNA, 15 bp, Homo sapiens
ctggccccagcccgc

SEQ ID NO: 456444 - DNA, 15 bp, Homo sapiens
tctggccccagcccg

SEQ ID NO: 456445 - DNA, 15 bp, Homo sapiens
ttctggccccagccc

SEQ ID NO: 456446 - DNA, 15 bp, Homo sapiens
cttctggccccagcc

SEQ ID NO: 456447 - DNA, 15 bp, Homo sapiens
gcttctggccccagc

SEQ ID NO: 456448 - DNA, 15 bp, Homo sapiens
cgcttctggccccag

SEQ ID NO: 456449 - DNA, 15 bp, Homo sapiens
gcgcttctggcccca

SEQ ID NO: 456450 - DNA, 15 bp, Homo sapiens
tgcgcttctggcccc

SEQ ID NO: 456451 - DNA, 15 bp, Homo sapiens
gtgcgcttctggccc

SEQ ID NO: 456452 - DNA, 15 bp, Homo sapiens
cgtgcgcttctggcc

SEQ ID NO: 456453 - DNA, 15 bp, Homo sapiens
ccgtgcgcttctggc

SEQ ID NO: 456454 - DNA, 15 bp, Homo sapiens
cccgtgcgcttctgg

SEQ ID NO: 456455 - DNA, 15 bp, Homo sapiens
gcccgtgcgcttctg

SEQ ID NO: 456456 - DNA, 15 bp, Homo sapiens
agcccgtgcgcttct

SEQ ID NO: 456457 - DNA, 15 bp, Homo sapiens
gagcccgtgcgcttc

SEQ ID NO: 456458 - DNA, 15 bp, Homo sapiens
agagcccgtgcgctt

SEQ ID NO: 456459 - DNA, 15 bp, Homo sapiens
aagagcccgtgcgct

SEQ ID NO: 456460 - DNA, 15 bp, Homo sapiens
gaagagcccgtgcgc

SEQ ID NO: 456461 - DNA, 15 bp, Homo sapiens
agaagagcccgtgcg

SEQ ID NO: 456462 - DNA, 15 bp, Homo sapiens
aagaagagcccgtgc

SEQ ID NO: 456463 - DNA, 15 bp, Homo sapiens
caagaagagcccgtg

SEQ ID NO: 456464 - DNA, 15 bp, Homo sapiens
ccaagaagagcccgt

SEQ ID NO: 456465 - DNA, 15 bp, Homo sapiens
gccaagaagagcccg

SEQ ID NO: 456466 - DNA, 15 bp, Homo sapiens
agccaagaagagccc

SEQ ID NO: 456467 - DNA, 15 bp, Homo sapiens
gagccaagaagagcc

SEQ ID NO: 456468 - DNA, 15 bp, Homo sapiens
tgagccaagaagagc

SEQ ID NO: 456469 - DNA, 15 bp, Homo sapiens
gtgagccaagaagag

SEQ ID NO: 456470 - DNA, 15 bp, Homo sapiens
tgtgagccaagaaga

SEQ ID NO: 456471 - DNA, 15 bp, Homo sapiens
ctgtgagccaagaag

SEQ ID NO: 456472 - DNA, 15 bp, Homo sapiens
actgtgagccaagaa

SEQ ID NO: 456473 - DNA, 15 bp, Homo sapiens
tactgtgagccaaga

SEQ ID NO: 456474 - DNA, 15 bp, Homo sapiens
ttactgtgagccaag

SEQ ID NO: 456475 - DNA, 15 bp, Homo sapiens
attactgtgagccaa

SEQ ID NO: 456476 - DNA, 15 bp, Homo sapiens
tattactgtgagcca

SEQ ID NO: 456477 - DNA, 15 bp, Homo sapiens
ttattactgtgagcc

SEQ ID NO: 456478 - DNA, 15 bp, Homo sapiens
attattactgtgagc

SEQ ID NO: 456479 - DNA, 15 bp, Homo sapiens
aattattactgtgag

SEQ ID NO: 456480 - DNA, 15 bp, Homo sapiens
taattattactgtga

SEQ ID NO: 456481 - DNA, 15 bp, Homo sapiens
ttaattattactgtg

SEQ ID NO: 456482 - DNA, 15 bp, Homo sapiens
gttaattattactgt

SEQ ID NO: 456483 - DNA, 15 bp, Homo sapiens
ggttaattattactg

SEQ ID NO: 456484 - DNA, 15 bp, Homo sapiens
cggttaattattact

SEQ ID NO: 456485 - DNA, 15 bp, Homo sapiens
gcggttaattattac

SEQ ID NO: 456486 - DNA, 15 bp, Homo sapiens
tgcggttaattatta

SEQ ID NO: 456487 - DNA, 15 bp, Homo sapiens
atgcggttaattatt

SEQ ID NO: 456488 - DNA, 15 bp, Homo sapiens
aatgcggttaattat

SEQ ID NO: 456489 - DNA, 15 bp, Homo sapiens
gaatgcggttaatta

SEQ ID NO: 456490 - DNA, 15 bp, Homo sapiens
ggaatgcggttaatt

SEQ ID NO: 456491 - DNA, 15 bp, Homo sapiens
tggaatgcggttaat

SEQ ID NO: 456492 - DNA, 15 bp, Homo sapiens
ctggaatgcggttaa

SEQ ID NO: 456493 - DNA, 15 bp, Homo sapiens
gctggaatgcggtta

SEQ ID NO: 456494 - DNA, 15 bp, Homo sapiens
tgctggaatgcggtt

SEQ ID NO: 456495 - DNA, 15 bp, Homo sapiens
ctgctggaatgcggt

SEQ ID NO: 456496 - DNA, 15 bp, Homo sapiens
cctgctggaatgcgg

SEQ ID NO: 456497 - DNA, 15 bp, Homo sapiens
ccctgctggaatgcg

SEQ ID NO: 456498 - DNA, 15 bp, Homo sapiens
gccctgctggaatgc

SEQ ID NO: 456499 - DNA, 15 bp, Homo sapiens
agccctgctggaatg

SEQ ID NO: 456500 - DNA, 15 bp, Homo sapiens
aagccctgctggaat

SEQ ID NO: 456501 - DNA, 15 bp, Homo sapiens
caagccctgctggaa

SEQ ID NO: 456502 - DNA, 15 bp, Homo sapiens
tcaagccctgctgga

SEQ ID NO: 456503 - DNA, 15 bp, Homo sapiens
ctcaagccctgctgg

SEQ ID NO: 456504 - DNA, 15 bp, Homo sapiens
tctcaagccctgctg

SEQ ID NO: 456505 - DNA, 15 bp, Homo sapiens
ctctcaagccctgct

SEQ ID NO: 456506 - DNA, 15 bp, Homo sapiens
actctcaagccctgc

SEQ ID NO: 456507 - DNA, 15 bp, Homo sapiens
aactctcaagccctg

SEQ ID NO: 456508 - DNA, 15 bp, Homo sapiens
aaactctcaagccct

SEQ ID NO: 456509 - DNA, 15 bp, Homo sapiens
caaactctcaagccc

SEQ ID NO: 456510 - DNA, 15 bp, Homo sapiens
gcaaactctcaagcc

SEQ ID NO: 456511 - DNA, 15 bp, Homo sapiens
tgcaaactctcaagc

SEQ ID NO: 456512 - DNA, 15 bp, Homo sapiens
ctgcaaactctcaag

SEQ ID NO: 456513 - DNA, 15 bp, Homo sapiens
tctgcaaactctcaa

SEQ ID NO: 456514 - DNA, 15 bp, Homo sapiens
ctctgcaaactctca

SEQ ID NO: 456515 - DNA, 15 bp, Homo sapiens
actctgcaaactctc

SEQ ID NO: 456516 - DNA, 15 bp, Homo sapiens
cactctgcaaactct

SEQ ID NO: 456517 - DNA, 15 bp, Homo sapiens
tcactctgcaaactc

SEQ ID NO: 456518 - DNA, 15 bp, Homo sapiens
atcactctgcaaact

SEQ ID NO: 456519 - DNA, 15 bp, Homo sapiens
catcactctgcaaac

SEQ ID NO: 456520 - DNA, 15 bp, Homo sapiens
acatcactctgcaaa

SEQ ID NO: 456521 - DNA, 15 bp, Homo sapiens
aacatcactctgcaa

SEQ ID NO: 456522 - DNA, 15 bp, Homo sapiens
gaacatcactctgca

SEQ ID NO: 456523 - DNA, 15 bp, Homo sapiens
tgaacatcactctgc

SEQ ID NO: 456524 - DNA, 15 bp, Homo sapiens
gtgaacatcactctg

SEQ ID NO: 456525 - DNA, 15 bp, Homo sapiens
agtgaacatcactct

SEQ ID NO: 456526 - DNA, 15 bp, Homo sapiens
tagtgaacatcactc

SEQ ID NO: 456527 - DNA, 15 bp, Homo sapiens
ctagtgaacatcact

SEQ ID NO: 456528 - DNA, 15 bp, Homo sapiens
gctagtgaacatcac

SEQ ID NO: 456529 - DNA, 15 bp, Homo sapiens
agctagtgaacatca

SEQ ID NO: 456530 - DNA, 15 bp, Homo sapiens
gagctagtgaacatc

SEQ ID NO: 456531 - DNA, 15 bp, Homo sapiens
tgagctagtgaacat

SEQ ID NO: 456532 - DNA, 15 bp, Homo sapiens
gtgagctagtgaaca

SEQ ID NO: 456533 - DNA, 15 bp, Homo sapiens
ggtgagctagtgaac

SEQ ID NO: 456534 - DNA, 15 bp, Homo sapiens
tggtgagctagtgaa

SEQ ID NO: 456535 - DNA, 15 bp, Homo sapiens
ctggtgagctagtga

SEQ ID NO: 456536 - DNA, 15 bp, Homo sapiens
tctggtgagctagtg

SEQ ID NO: 456537 - DNA, 15 bp, Homo sapiens
atctggtgagctagt

SEQ ID NO: 456538 - DNA, 15 bp, Homo sapiens
gatctggtgagctag

SEQ ID NO: 456539 - DNA, 15 bp, Homo sapiens
cgatctggtgagcta

SEQ ID NO: 456540 - DNA, 15 bp, Homo sapiens
tcgatctggtgagct

SEQ ID NO: 456541 - DNA, 15 bp, Homo sapiens
ctcgatctggtgagc

SEQ ID NO: 456542 - DNA, 15 bp, Homo sapiens
tctcgatctggtgag

SEQ ID NO: 456543 - DNA, 15 bp, Homo sapiens
atctcgatctggtga

SEQ ID NO: 456544 - DNA, 15 bp, Homo sapiens
gatctcgatctggtg

SEQ ID NO: 456545 - DNA, 15 bp, Homo sapiens
ggatctcgatctggt

SEQ ID NO: 456546 - DNA, 15 bp, Homo sapiens
aggatctcgatctgg

SEQ ID NO: 456547 - DNA, 15 bp, Homo sapiens
gaggatctcgatctg

SEQ ID NO: 456548 - DNA, 15 bp, Homo sapiens
tgaggatctcgatct

SEQ ID NO: 456549 - DNA, 15 bp, Homo sapiens
gtgaggatctcgatc

SEQ ID NO: 456550 - DNA, 15 bp, Homo sapiens
agtgaggatctcgat

SEQ ID NO: 456551 - DNA, 15 bp, Homo sapiens
tagtgaggatctcga

SEQ ID NO: 456552 - DNA, 15 bp, Homo sapiens
ctagtgaggatctcg

SEQ ID NO: 456553 - DNA, 15 bp, Homo sapiens
tctagtgaggatctc

SEQ ID NO: 456554 - DNA, 15 bp, Homo sapiens
ttctagtgaggatct

SEQ ID NO: 456555 - DNA, 15 bp, Homo sapiens
gttctagtgaggatc

SEQ ID NO: 456556 - DNA, 15 bp, Homo sapiens
ggttctagtgaggat

SEQ ID NO: 456557 - DNA, 15 bp, Homo sapiens
gggttctagtgagga

SEQ ID NO: 456558 - DNA, 15 bp, Homo sapiens
ggggttctagtgagg

SEQ ID NO: 456559 - DNA, 15 bp, Homo sapiens
gggggttctagtgag

SEQ ID NO: 456560 - DNA, 15 bp, Homo sapiens
tgggggttctagtga

SEQ ID NO: 456561 - DNA, 15 bp, Homo sapiens
ttgggggttctagtg

SEQ ID NO: 456562 - DNA, 15 bp, Homo sapiens
cttgggggttctagt

SEQ ID NO: 456563 - DNA, 15 bp, Homo sapiens
acttgggggttctag

SEQ ID NO: 456564 - DNA, 15 bp, Homo sapiens
cacttgggggttcta

SEQ ID NO: 456565 - DNA, 15 bp, Homo sapiens
acacttgggggttct

SEQ ID NO: 456566 - DNA, 15 bp, Homo sapiens
tacacttgggggttc

SEQ ID NO: 456567 - DNA, 15 bp, Homo sapiens
ctacacttgggggtt

SEQ ID NO: 456568 - DNA, 15 bp, Homo sapiens
tctacacttgggggt

SEQ ID NO: 456569 - DNA, 15 bp, Homo sapiens
gtctacacttggggg

SEQ ID NO: 456570 - DNA, 15 bp, Homo sapiens
tgtctacacttgggg

SEQ ID NO: 456571 - DNA, 15 bp, Homo sapiens
gtgtctacacttggg

SEQ ID NO: 456572 - DNA, 15 bp, Homo sapiens
agtgtctacacttgg

SEQ ID NO: 456573 - DNA, 15 bp, Homo sapiens
cagtgtctacacttg

SEQ ID NO: 456574 - DNA, 15 bp, Homo sapiens
ccagtgtctacactt

SEQ ID NO: 456575 - DNA, 15 bp, Homo sapiens
tccagtgtctacact

SEQ ID NO: 456576 - DNA, 15 bp, Homo sapiens
gtccagtgtctacac

SEQ ID NO: 456577 - DNA, 15 bp, Homo sapiens
agtccagtgtctaca

SEQ ID NO: 456578 - DNA, 15 bp, Homo sapiens
aagtccagtgtctac

SEQ ID NO: 456579 - DNA, 15 bp, Homo sapiens
caagtccagtgtcta

SEQ ID NO: 456580 - DNA, 15 bp, Homo sapiens
acaagtccagtgtct

SEQ ID NO: 456581 - DNA, 15 bp, Homo sapiens
cacaagtccagtgtc

SEQ ID NO: 456582 - DNA, 15 bp, Homo sapiens
tcacaagtccagtgt

SEQ ID NO: 456583 - DNA, 15 bp, Homo sapiens
gtcacaagtccagtg

SEQ ID NO: 456584 - DNA, 15 bp, Homo sapiens
agtcacaagtccagt

SEQ ID NO: 456585 - DNA, 15 bp, Homo sapiens
tagtcacaagtccag

SEQ ID NO: 456586 - DNA, 15 bp, Homo sapiens
gtagtcacaagtcca

SEQ ID NO: 456587 - DNA, 15 bp, Homo sapiens
ggtagtcacaagtcc

SEQ ID NO: 456588 - DNA, 15 bp, Homo sapiens
gggtagtcacaagtc

SEQ ID NO: 456589 - DNA, 15 bp, Homo sapiens
agggtagtcacaagt

SEQ ID NO: 456590 - DNA, 15 bp, Homo sapiens
tagggtagtcacaag

SEQ ID NO: 456591 - DNA, 15 bp, Homo sapiens
atagggtagtcacaa

SEQ ID NO: 456592 - DNA, 15 bp, Homo sapiens
aatagggtagtcaca

SEQ ID NO: 456593 - DNA, 15 bp, Homo sapiens
aaatagggtagtcac

SEQ ID NO: 456594 - DNA, 15 bp, Homo sapiens
aaaatagggtagtca

SEQ ID NO: 456595 - DNA, 15 bp, Homo sapiens
aaaaatagggtagtc

SEQ ID NO: 456596 - DNA, 15 bp, Homo sapiens
gaaaaatagggtagt

SEQ ID NO: 456597 - DNA, 15 bp, Homo sapiens
tgaaaaatagggtag

SEQ ID NO: 456598 - DNA, 15 bp, Homo sapiens
ctgaaaaatagggta

SEQ ID NO: 456599 - DNA, 15 bp, Homo sapiens
tctgaaaaatagggt

SEQ ID NO: 456600 - DNA, 15 bp, Homo sapiens
gtctgaaaaataggg

SEQ ID NO: 456601 - DNA, 15 bp, Homo sapiens
cgtctgaaaaatagg

SEQ ID NO: 456602 - DNA, 15 bp, Homo sapiens
acgtctgaaaaatag

SEQ ID NO: 456603 - DNA, 15 bp, Homo sapiens
cacgtctgaaaaata

SEQ ID NO: 456604 - DNA, 15 bp, Homo sapiens
ccacgtctgaaaaat

SEQ ID NO: 456605 - DNA, 15 bp, Homo sapiens
tccacgtctgaaaaa

SEQ ID NO: 456606 - DNA, 15 bp, Homo sapiens
gtccacgtctgaaaa

SEQ ID NO: 456607 - DNA, 15 bp, Homo sapiens
cgtccacgtctgaaa

SEQ ID NO: 456608 - DNA, 15 bp, Homo sapiens
gcgtccacgtctgaa

SEQ ID NO: 456609 - DNA, 15 bp, Homo sapiens
agcgtccacgtctga

SEQ ID NO: 456610 - DNA, 15 bp, Homo sapiens
cagcgtccacgtctg

SEQ ID NO: 456611 - DNA, 15 bp, Homo sapiens
tcagcgtccacgtct

SEQ ID NO: 456612 - DNA, 15 bp, Homo sapiens
ctcagcgtccacgtc

SEQ ID NO: 456613 - DNA, 15 bp, Homo sapiens
cctcagcgtccacgt

SEQ ID NO: 456614 - DNA, 15 bp, Homo sapiens
gcctcagcgtccacg

SEQ ID NO: 456615 - DNA, 15 bp, Homo sapiens
agcctcagcgtccac

SEQ ID NO: 456616 - DNA, 15 bp, Homo sapiens
aagcctcagcgtcca

SEQ ID NO: 456617 - DNA, 15 bp, Homo sapiens
aaagcctcagcgtcc

SEQ ID NO: 456618 - DNA, 15 bp, Homo sapiens
aaaagcctcagcgtc

SEQ ID NO: 456619 - DNA, 15 bp, Homo sapiens
taaaagcctcagcgt

SEQ ID NO: 456620 - DNA, 15 bp, Homo sapiens
ttaaaagcctcagcg

SEQ ID NO: 456621 - DNA, 15 bp, Homo sapiens
tttaaaagcctcagc

SEQ ID NO: 456622 - DNA, 15 bp, Homo sapiens
ctttaaaagcctcag

SEQ ID NO: 456623 - DNA, 15 bp, Homo sapiens
tctttaaaagcctca

SEQ ID NO: 456624 - DNA, 15 bp, Homo sapiens
ttctttaaaagcctc

SEQ ID NO: 456625 - DNA, 15 bp, Homo sapiens
cttctttaaaagcct

SEQ ID NO: 456626 - DNA, 15 bp, Homo sapiens
tcttctttaaaagcc

SEQ ID NO: 456627 - DNA, 15 bp, Homo sapiens
gtcttctttaaaagc

SEQ ID NO: 456628 - DNA, 15 bp, Homo sapiens
cgtcttctttaaaag

SEQ ID NO: 456629 - DNA, 15 bp, Homo sapiens
ccgtcttctttaaaa

SEQ ID NO: 456630 - DNA, 15 bp, Homo sapiens
gccgtcttctttaaa

SEQ ID NO: 456631 - DNA, 15 bp, Homo sapiens
ggccgtcttctttaa

SEQ ID NO: 456632 - DNA, 15 bp, Homo sapiens
aggccgtcttcttta

SEQ ID NO: 456633 - DNA, 15 bp, Homo sapiens
aaggccgtcttcttt

SEQ ID NO: 456634 - DNA, 15 bp, Homo sapiens
aaaggccgtcttctt

SEQ ID NO: 456635 - DNA, 15 bp, Homo sapiens
caaaggccgtcttct

SEQ ID NO: 456636 - DNA, 15 bp, Homo sapiens
gcaaaggccgtcttc

SEQ ID NO: 456637 - DNA, 15 bp, Homo sapiens
agcaaaggccgtctt

SEQ ID NO: 456638 - DNA, 15 bp, Homo sapiens
aagcaaaggccgtct

SEQ ID NO: 456639 - DNA, 15 bp, Homo sapiens
caagcaaaggccgtc

SEQ ID NO: 456640 - DNA, 15 bp, Homo sapiens
acaagcaaaggccgt

SEQ ID NO: 456641 - DNA, 15 bp, Homo sapiens
gacaagcaaaggccg

SEQ ID NO: 456642 - DNA, 15 bp, Homo sapiens
ggacaagcaaaggcc

SEQ ID NO: 456643 - DNA, 15 bp, Homo sapiens
gggacaagcaaaggc

SEQ ID NO: 456644 - DNA, 15 bp, Homo sapiens
tgggacaagcaaagg

SEQ ID NO: 456645 - DNA, 15 bp, Homo sapiens
ctgggacaagcaaag

SEQ ID NO: 456646 - DNA, 15 bp, Homo sapiens
cctgggacaagcaaa

SEQ ID NO: 456647 - DNA, 15 bp, Homo sapiens
acctgggacaagcaa

SEQ ID NO: 456648 - DNA, 15 bp, Homo sapiens
aacctgggacaagca

SEQ ID NO: 456649 - DNA, 15 bp, Homo sapiens
taacctgggacaagc

SEQ ID NO: 456650 - DNA, 15 bp, Homo sapiens
gtaacctgggacaag

SEQ ID NO: 456651 - DNA, 15 bp, Homo sapiens
ggtaacctgggacaa

SEQ ID NO: 456652 - DNA, 15 bp, Homo sapiens
tggtaacctgggaca

SEQ ID NO: 456653 - DNA, 15 bp, Homo sapiens
ttggtaacctgggac

SEQ ID NO: 456654 - DNA, 15 bp, Homo sapiens
gttggtaacctggga

SEQ ID NO: 456655 - DNA, 15 bp, Homo sapiens
tgttggtaacctggg

SEQ ID NO: 456656 - DNA, 15 bp, Homo sapiens
ttgttggtaacctgg

SEQ ID NO: 456657 - DNA, 15 bp, Homo sapiens
gttgttggtaacctg

SEQ ID NO: 456658 - DNA, 15 bp, Homo sapiens
ggttgttggtaacct

SEQ ID NO: 456659 - DNA, 15 bp, Homo sapiens
tggttgttggtaacc

SEQ ID NO: 456660 - DNA, 15 bp, Homo sapiens
gtggttgttggtaac

SEQ ID NO: 456661 - DNA, 15 bp, Homo sapiens
agtggttgttggtaa

SEQ ID NO: 456662 - DNA, 15 bp, Homo sapiens
cagtggttgttggta

SEQ ID NO: 456663 - DNA, 15 bp, Homo sapiens
tcagtggttgttggt

SEQ ID NO: 456664 - DNA, 15 bp, Homo sapiens
atcagtggttgttgg

SEQ ID NO: 456665 - DNA, 15 bp, Homo sapiens
aatcagtggttgttg

SEQ ID NO: 456666 - DNA, 15 bp, Homo sapiens
caatcagtggttgtt

SEQ ID NO: 456667 - DNA, 15 bp, Homo sapiens
ccaatcagtggttgt

SEQ ID NO: 456668 - DNA, 15 bp, Homo sapiens
gccaatcagtggttg

SEQ ID NO: 456669 - DNA, 15 bp, Homo sapiens
ggccaatcagtggtt

SEQ ID NO: 456670 - DNA, 15 bp, Homo sapiens
tggccaatcagtggt

SEQ ID NO: 456671 - DNA, 15 bp, Homo sapiens
ctggccaatcagtgg

SEQ ID NO: 456672 - DNA, 15 bp, Homo sapiens
cctggccaatcagtg

SEQ ID NO: 456673 - DNA, 15 bp, Homo sapiens
ccctggccaatcagt

SEQ ID NO: 456674 - DNA, 15 bp, Homo sapiens
cccctggccaatcag

SEQ ID NO: 456675 - DNA, 15 bp, Homo sapiens
gcccctggccaatca

SEQ ID NO: 456676 - DNA, 15 bp, Homo sapiens
tgcccctggccaatc

SEQ ID NO: 456677 - DNA, 15 bp, Homo sapiens
gtgcccctggccaat

SEQ ID NO: 456678 - DNA, 15 bp, Homo sapiens
ggtgcccctggccaa

SEQ ID NO: 456679 - DNA, 15 bp, Homo sapiens
aggtgcccctggcca

SEQ ID NO: 456680 - DNA, 15 bp, Homo sapiens
caggtgcccctggcc

SEQ ID NO: 456681 - DNA, 15 bp, Homo sapiens
acaggtgcccctggc

SEQ ID NO: 456682 - DNA, 15 bp, Homo sapiens
aacaggtgcccctgg

SEQ ID NO: 456683 - DNA, 15 bp, Homo sapiens
caacaggtgcccctg

SEQ ID NO: 456684 - DNA, 15 bp, Homo sapiens
gcaacaggtgcccct

SEQ ID NO: 456685 - DNA, 15 bp, Homo sapiens
ggcaacaggtgcccc

SEQ ID NO: 456686 - DNA, 15 bp, Homo sapiens
gggcaacaggtgccc

SEQ ID NO: 456687 - DNA, 15 bp, Homo sapiens
tgggcaacaggtgcc

SEQ ID NO: 456688 - DNA, 15 bp, Homo sapiens
gtgggcaacaggtgc

SEQ ID NO: 456689 - DNA, 15 bp, Homo sapiens
cgtgggcaacaggtg

SEQ ID NO: 456690 - DNA, 15 bp, Homo sapiens
gcgtgggcaacaggt

SEQ ID NO: 456691 - DNA, 15 bp, Homo sapiens
ggcgtgggcaacagg

SEQ ID NO: 456692 - DNA, 15 bp, Homo sapiens
gggcgtgggcaacag

SEQ ID NO: 456693 - DNA, 15 bp, Homo sapiens
agggcgtgggcaaca

SEQ ID NO: 456694 - DNA, 15 bp, Homo sapiens
cagggcgtgggcaac

SEQ ID NO: 456695 - DNA, 15 bp, Homo sapiens
gcagggcgtgggcaa

SEQ ID NO: 456696 - DNA, 15 bp, Homo sapiens
agcagggcgtgggca

SEQ ID NO: 456697 - DNA, 15 bp, Homo sapiens
gagcagggcgtgggc

SEQ ID NO: 456698 - DNA, 15 bp, Homo sapiens
ggagcagggcgtggg

SEQ ID NO: 456699 - DNA, 15 bp, Homo sapiens
aggagcagggcgtgg

SEQ ID NO: 456700 - DNA, 15 bp, Homo sapiens
gaggagcagggcgtg

SEQ ID NO: 456701 - DNA, 15 bp, Homo sapiens
agaggagcagggcgt

SEQ ID NO: 456702 - DNA, 15 bp, Homo sapiens
cagaggagcagggcg

SEQ ID NO: 456703 - DNA, 15 bp, Homo sapiens
acagaggagcagggc

SEQ ID NO: 456704 - DNA, 15 bp, Homo sapiens
aacagaggagcaggg

SEQ ID NO: 456705 - DNA, 15 bp, Homo sapiens
aaacagaggagcagg

SEQ ID NO: 456706 - DNA, 15 bp, Homo sapiens
caaacagaggagcag

SEQ ID NO: 456707 - DNA, 15 bp, Homo sapiens
tcaaacagaggagca

SEQ ID NO: 456708 - DNA, 15 bp, Homo sapiens
atcaaacagaggagc

SEQ ID NO: 456709 - DNA, 15 bp, Homo sapiens
tatcaaacagaggag

SEQ ID NO: 456710 - DNA, 15 bp, Homo sapiens
atatcaaacagagga

SEQ ID NO: 456711 - DNA, 15 bp, Homo sapiens
catatcaaacagagg

SEQ ID NO: 456712 - DNA, 15 bp, Homo sapiens
gcatatcaaacagag

SEQ ID NO: 456713 - DNA, 15 bp, Homo sapiens
ggcatatcaaacaga

SEQ ID NO: 456714 - DNA, 15 bp, Homo sapiens
gggcatatcaaacag

SEQ ID NO: 456715 - DNA, 15 bp, Homo sapiens
agggcatatcaaaca

SEQ ID NO: 456716 - DNA, 15 bp, Homo sapiens
cagggcatatcaaac

SEQ ID NO: 456717 - DNA, 15 bp, Homo sapiens
tcagggcatatcaaa

SEQ ID NO: 456718 - DNA, 15 bp, Homo sapiens
gtcagggcatatcaa

SEQ ID NO: 456719 - DNA, 15 bp, Homo sapiens
ggtcagggcatatca

SEQ ID NO: 456720 - DNA, 15 bp, Homo sapiens
tggtcagggcatatc

SEQ ID NO: 456721 - DNA, 15 bp, Homo sapiens
gtggtcagggcatat

SEQ ID NO: 456722 - DNA, 15 bp, Homo sapiens
agtggtcagggcata

SEQ ID NO: 456723 - DNA, 15 bp, Homo sapiens
aagtggtcagggcat

SEQ ID NO: 456724 - DNA, 15 bp, Homo sapiens
aaagtggtcagggca

SEQ ID NO: 456725 - DNA, 15 bp, Homo sapiens
aaaagtggtcagggc

SEQ ID NO: 456726 - DNA, 15 bp, Homo sapiens
caaaagtggtcaggg

SEQ ID NO: 456727 - DNA, 15 bp, Homo sapiens
gcaaaagtggtcagg

SEQ ID NO: 456728 - DNA, 15 bp, Homo sapiens
cgcaaaagtggtcag

SEQ ID NO: 456729 - DNA, 15 bp, Homo sapiens
acgcaaaagtggtca

SEQ ID NO: 456730 - DNA, 15 bp, Homo sapiens
gacgcaaaagtggtc

SEQ ID NO: 456731 - DNA, 15 bp, Homo sapiens
ggacgcaaaagtggt

SEQ ID NO: 456732 - DNA, 15 bp, Homo sapiens
aggacgcaaaagtgg

SEQ ID NO: 456733 - DNA, 15 bp, Homo sapiens
gaggacgcaaaagtg

SEQ ID NO: 456734 - DNA, 15 bp, Homo sapiens
agaggacgcaaaagt

SEQ ID NO: 456735 - DNA, 15 bp, Homo sapiens
gagaggacgcaaaag

SEQ ID NO: 456736 - DNA, 15 bp, Homo sapiens
ggagaggacgcaaaa

SEQ ID NO: 456737 - DNA, 15 bp, Homo sapiens
gggagaggacgcaaa

SEQ ID NO: 456738 - DNA, 15 bp, Homo sapiens
ggggagaggacgcaa

SEQ ID NO: 456739 - DNA, 15 bp, Homo sapiens
tggggagaggacgca

SEQ ID NO: 456740 - DNA, 15 bp, Homo sapiens
ctggggagaggacgc

SEQ ID NO: 456741 - DNA, 15 bp, Homo sapiens
tctggggagaggacg

SEQ ID NO: 456742 - DNA, 15 bp, Homo sapiens
ctctggggagaggac

SEQ ID NO: 456743 - DNA, 15 bp, Homo sapiens
tctctggggagagga

SEQ ID NO: 456744 - DNA, 15 bp, Homo sapiens
ctctctggggagagg

SEQ ID NO: 456745 - DNA, 15 bp, Homo sapiens
tctctctggggagag

SEQ ID NO: 456746 - DNA, 15 bp, Homo sapiens
gtctctctggggaga

SEQ ID NO: 456747 - DNA, 15 bp, Homo sapiens
agtctctctggggag

SEQ ID NO: 456748 - DNA, 15 bp, Homo sapiens
tagtctctctgggga

SEQ ID NO: 456749 - DNA, 15 bp, Homo sapiens
ctagtctctctgggg

SEQ ID NO: 456750 - DNA, 15 bp, Homo sapiens
cctagtctctctggg

SEQ ID NO: 456751 - DNA, 15 bp, Homo sapiens
acctagtctctctgg

SEQ ID NO: 456752 - DNA, 15 bp, Homo sapiens
tacctagtctctctg

SEQ ID NO: 456753 - DNA, 15 bp, Homo sapiens
ctacctagtctctct

SEQ ID NO: 456754 - DNA, 15 bp, Homo sapiens
tctacctagtctctc

SEQ ID NO: 456755 - DNA, 15 bp, Homo sapiens
ctctacctagtctct

SEQ ID NO: 456756 - DNA, 15 bp, Homo sapiens
tctctacctagtctc

SEQ ID NO: 456757 - DNA, 15 bp, Homo sapiens
atctctacctagtct

SEQ ID NO: 456758 - DNA, 15 bp, Homo sapiens
gatctctacctagtc

SEQ ID NO: 456759 - DNA, 15 bp, Homo sapiens
ggatctctacctagt

SEQ ID NO: 456760 - DNA, 15 bp, Homo sapiens
cggatctctacctag

SEQ ID NO: 456761 - DNA, 15 bp, Homo sapiens
gcggatctctaccta

SEQ ID NO: 456762 - DNA, 15 bp, Homo sapiens
tgcggatctctacct

SEQ ID NO: 456763 - DNA, 15 bp, Homo sapiens
gtgcggatctctacc

SEQ ID NO: 456764 - DNA, 15 bp, Homo sapiens
ggtgcggatctctac

SEQ ID NO: 456765 - DNA, 15 bp, Homo sapiens
aggtgcggatctcta

SEQ ID NO: 456766 - DNA, 15 bp, Homo sapiens
caggtgcggatctct

SEQ ID NO: 456767 - DNA, 15 bp, Homo sapiens
gcaggtgcggatctc

SEQ ID NO: 456768 - DNA, 15 bp, Homo sapiens
tgcaggtgcggatct

SEQ ID NO: 456769 - DNA, 15 bp, Homo sapiens
gtgcaggtgcggatc

SEQ ID NO: 456770 - DNA, 15 bp, Homo sapiens
ggtgcaggtgcggat

SEQ ID NO: 456771 - DNA, 15 bp, Homo sapiens
gggtgcaggtgcgga

SEQ ID NO: 456772 - DNA, 15 bp, Homo sapiens
ggggtgcaggtgcgg

SEQ ID NO: 456773 - DNA, 15 bp, Homo sapiens
tggggtgcaggtgcg

SEQ ID NO: 456774 - DNA, 15 bp, Homo sapiens
gtggggtgcaggtgc

SEQ ID NO: 456775 - DNA, 15 bp, Homo sapiens
agtggggtgcaggtg

SEQ ID NO: 456776 - DNA, 15 bp, Homo sapiens
aagtggggtgcaggt

SEQ ID NO: 456777 - DNA, 15 bp, Homo sapiens
caagtggggtgcagg

SEQ ID NO: 456778 - DNA, 15 bp, Homo sapiens
tcaagtggggtgcag

SEQ ID NO: 456779 - DNA, 15 bp, Homo sapiens
ctcaagtggggtgca

SEQ ID NO: 456780 - DNA, 15 bp, Homo sapiens
tctcaagtggggtgc

SEQ ID NO: 456781 - DNA, 15 bp, Homo sapiens
ttctcaagtggggtg

SEQ ID NO: 456782 - DNA, 15 bp, Homo sapiens
attctcaagtggggt

SEQ ID NO: 456783 - DNA, 15 bp, Homo sapiens
aattctcaagtgggg

SEQ ID NO: 456784 - DNA, 15 bp, Homo sapiens
caattctcaagtggg

SEQ ID NO: 456785 - DNA, 15 bp, Homo sapiens
tcaattctcaagtgg

SEQ ID NO: 456786 - DNA, 15 bp, Homo sapiens
ctcaattctcaagtg

SEQ ID NO: 456787 - DNA, 15 bp, Homo sapiens
cctcaattctcaagt

SEQ ID NO: 456788 - DNA, 15 bp, Homo sapiens
gcctcaattctcaag

SEQ ID NO: 456789 - DNA, 15 bp, Homo sapiens
agcctcaattctcaa

SEQ ID NO: 456790 - DNA, 15 bp, Homo sapiens
cagcctcaattctca

SEQ ID NO: 456791 - DNA, 15 bp, Homo sapiens
gcagcctcaattctc

SEQ ID NO: 456792 - DNA, 15 bp, Homo sapiens
tgcagcctcaattct

SEQ ID NO: 456793 - DNA, 15 bp, Homo sapiens
ctgcagcctcaattc

SEQ ID NO: 456794 - DNA, 15 bp, Homo sapiens
tctgcagcctcaatt

SEQ ID NO: 456795 - DNA, 15 bp, Homo sapiens
ctctgcagcctcaat

SEQ ID NO: 456796 - DNA, 15 bp, Homo sapiens
tctctgcagcctcaa

SEQ ID NO: 456797 - DNA, 15 bp, Homo sapiens
ttctctgcagcctca

SEQ ID NO: 456798 - DNA, 15 bp, Homo sapiens
attctctgcagcctc

SEQ ID NO: 456799 - DNA, 15 bp, Homo sapiens
aattctctgcagcct

SEQ ID NO: 456800 - DNA, 15 bp, Homo sapiens
gaattctctgcagcc

SEQ ID NO: 456801 - DNA, 15 bp, Homo sapiens
agaattctctgcagc

SEQ ID NO: 456802 - DNA, 15 bp, Homo sapiens
gagaattctctgcag

SEQ ID NO: 456803 - DNA, 15 bp, Homo sapiens
ggagaattctctgca

SEQ ID NO: 456804 - DNA, 15 bp, Homo sapiens
cggagaattctctgc

SEQ ID NO: 456805 - DNA, 15 bp, Homo sapiens
gcggagaattctctg

SEQ ID NO: 456806 - DNA, 15 bp, Homo sapiens
agcggagaattctct

SEQ ID NO: 456807 - DNA, 15 bp, Homo sapiens
aagcggagaattctc

SEQ ID NO: 456808 - DNA, 15 bp, Homo sapiens
gaagcggagaattct

SEQ ID NO: 456809 - DNA, 15 bp, Homo sapiens
tgaagcggagaattc

SEQ ID NO: 456810 - DNA, 15 bp, Homo sapiens
ctgaagcggagaatt

SEQ ID NO: 456811 - DNA, 15 bp, Homo sapiens
gctgaagcggagaat

SEQ ID NO: 456812 - DNA, 15 bp, Homo sapiens
tgctgaagcggagaa

SEQ ID NO: 456813 - DNA, 15 bp, Homo sapiens
atgctgaagcggaga

SEQ ID NO: 456814 - DNA, 15 bp, Homo sapiens
gatgctgaagcggag

SEQ ID NO: 456815 - DNA, 15 bp, Homo sapiens
ggatgctgaagcgga

SEQ ID NO: 456816 - DNA, 15 bp, Homo sapiens
tggatgctgaagcgg

SEQ ID NO: 456817 - DNA, 15 bp, Homo sapiens
atggatgctgaagcg

SEQ ID NO: 456818 - DNA, 15 bp, Homo sapiens
aatggatgctgaagc

SEQ ID NO: 456819 - DNA, 15 bp, Homo sapiens
aaatggatgctgaag

SEQ ID NO: 456820 - DNA, 15 bp, Homo sapiens
aaaatggatgctgaa

SEQ ID NO: 456821 - DNA, 15 bp, Homo sapiens
aaaaatggatgctga

SEQ ID NO: 456822 - DNA, 15 bp, Homo sapiens
caaaaatggatgctg

SEQ ID NO: 456823 - DNA, 15 bp, Homo sapiens
ccaaaaatggatgct

SEQ ID NO: 456824 - DNA, 15 bp, Homo sapiens
accaaaaatggatgc

SEQ ID NO: 456825 - DNA, 15 bp, Homo sapiens
gaccaaaaatggatg

SEQ ID NO: 456826 - DNA, 15 bp, Homo sapiens
ggaccaaaaatggat

SEQ ID NO: 456827 - DNA, 15 bp, Homo sapiens
gggaccaaaaatgga

SEQ ID NO: 456828 - DNA, 15 bp, Homo sapiens
agggaccaaaaatgg

SEQ ID NO: 456829 - DNA, 15 bp, Homo sapiens
cagggaccaaaaatg

SEQ ID NO: 456830 - DNA, 15 bp, Homo sapiens
tcagggaccaaaaat

SEQ ID NO: 456831 - DNA, 15 bp, Homo sapiens
ctcagggaccaaaaa

SEQ ID NO: 456832 - DNA, 15 bp, Homo sapiens
actcagggaccaaaa

SEQ ID NO: 456833 - DNA, 15 bp, Homo sapiens
gactcagggaccaaa

SEQ ID NO: 456834 - DNA, 15 bp, Homo sapiens
ggactcagggaccaa

SEQ ID NO: 456835 - DNA, 15 bp, Homo sapiens
aggactcagggacca

SEQ ID NO: 456836 - DNA, 15 bp, Homo sapiens
aaggactcagggacc

SEQ ID NO: 456837 - DNA, 15 bp, Homo sapiens
aaaggactcagggac

SEQ ID NO: 456838 - DNA, 15 bp, Homo sapiens
aaaaggactcaggga

SEQ ID NO: 456839 - DNA, 15 bp, Homo sapiens
taaaaggactcaggg

SEQ ID NO: 456840 - DNA, 15 bp, Homo sapiens
gtaaaaggactcagg

SEQ ID NO: 456841 - DNA, 15 bp, Homo sapiens
tgtaaaaggactcag

SEQ ID NO: 456842 - DNA, 15 bp, Homo sapiens
ttgtaaaaggactca

SEQ ID NO: 456843 - DNA, 15 bp, Homo sapiens
attgtaaaaggactc

SEQ ID NO: 456844 - DNA, 15 bp, Homo sapiens
aattgtaaaaggact

SEQ ID NO: 456845 - DNA, 15 bp, Homo sapiens
aaattgtaaaaggac

SEQ ID NO: 456846 - DNA, 15 bp, Homo sapiens
caaattgtaaaagga

SEQ ID NO: 456847 - DNA, 15 bp, Homo sapiens
ccaaattgtaaaagg

SEQ ID NO: 456848 - DNA, 15 bp, Homo sapiens
tccaaattgtaaaag

SEQ ID NO: 456849 - DNA, 15 bp, Homo sapiens
ctccaaattgtaaaa

SEQ ID NO: 456850 - DNA, 15 bp, Homo sapiens
tctccaaattgtaaa

SEQ ID NO: 456851 - DNA, 15 bp, Homo sapiens
gtctccaaattgtaa

SEQ ID NO: 456852 - DNA, 15 bp, Homo sapiens
cgtctccaaattgta

SEQ ID NO: 456853 - DNA, 15 bp, Homo sapiens
acgtctccaaattgt

SEQ ID NO: 456854 - DNA, 15 bp, Homo sapiens
gacgtctccaaattg

SEQ ID NO: 456855 - DNA, 15 bp, Homo sapiens
tgacgtctccaaatt

SEQ ID NO: 456856 - DNA, 15 bp, Homo sapiens
atgacgtctccaaat

SEQ ID NO: 456857 - DNA, 15 bp, Homo sapiens
gatgacgtctccaaa

SEQ ID NO: 456858 - DNA, 15 bp, Homo sapiens
ggatgacgtctccaa

SEQ ID NO: 456859 - DNA, 15 bp, Homo sapiens
aggatgacgtctcca

SEQ ID NO: 456860 - DNA, 15 bp, Homo sapiens
aaggatgacgtctcc

SEQ ID NO: 456861 - DNA, 15 bp, Homo sapiens
aaaggatgacgtctc

SEQ ID NO: 456862 - DNA, 15 bp, Homo sapiens
taaaggatgacgtct

SEQ ID NO: 456863 - DNA, 15 bp, Homo sapiens
gtaaaggatgacgtc

SEQ ID NO: 456864 - DNA, 15 bp, Homo sapiens
tgtaaaggatgacgt

SEQ ID NO: 456865 - DNA, 15 bp, Homo sapiens
ctgtaaaggatgacg

SEQ ID NO: 456866 - DNA, 15 bp, Homo sapiens
gctgtaaaggatgac

SEQ ID NO: 456867 - DNA, 15 bp, Homo sapiens
ggctgtaaaggatga

SEQ ID NO: 456868 - DNA, 15 bp, Homo sapiens
aggctgtaaaggatg

SEQ ID NO: 456869 - DNA, 15 bp, Homo sapiens
gaggctgtaaaggat

SEQ ID NO: 456870 - DNA, 15 bp, Homo sapiens
agaggctgtaaagga

SEQ ID NO: 456871 - DNA, 15 bp, Homo sapiens
aagaggctgtaaagg

SEQ ID NO: 456872 - DNA, 15 bp, Homo sapiens
aaagaggctgtaaag

SEQ ID NO: 456873 - DNA, 15 bp, Homo sapiens
aaaagaggctgtaaa

SEQ ID NO: 456874 - DNA, 15 bp, Homo sapiens
taaaagaggctgtaa

SEQ ID NO: 456875 - DNA, 15 bp, Homo sapiens
gtaaaagaggctgta

SEQ ID NO: 456876 - DNA, 15 bp, Homo sapiens
agtaaaagaggctgt

SEQ ID NO: 456877 - DNA, 15 bp, Homo sapiens
aagtaaaagaggctg

SEQ ID NO: 456878 - DNA, 15 bp, Homo sapiens
aaagtaaaagaggct

SEQ ID NO: 456879 - DNA, 15 bp, Homo sapiens
aaaagtaaaagaggc

SEQ ID NO: 456880 - DNA, 15 bp, Homo sapiens
taaaagtaaaagagg

SEQ ID NO: 456881 - DNA, 15 bp, Homo sapiens
ataaaagtaaaagag

SEQ ID NO: 456882 - DNA, 15 bp, Homo sapiens
gataaaagtaaaaga

SEQ ID NO: 456883 - DNA, 15 bp, Homo sapiens
agataaaagtaaaag

SEQ ID NO: 456884 - DNA, 15 bp, Homo sapiens
gagataaaagtaaaa

SEQ ID NO: 456885 - DNA, 15 bp, Homo sapiens
agagataaaagtaaa

SEQ ID NO: 456886 - DNA, 15 bp, Homo sapiens
aagagataaaagtaa

SEQ ID NO: 456887 - DNA, 15 bp, Homo sapiens
caagagataaaagta

SEQ ID NO: 456888 - DNA, 15 bp, Homo sapiens
ccaagagataaaagt

SEQ ID NO: 456889 - DNA, 15 bp, Homo sapiens
gccaagagataaaag

SEQ ID NO: 456890 - DNA, 15 bp, Homo sapiens
agccaagagataaaa

SEQ ID NO: 456891 - DNA, 15 bp, Homo sapiens
aagccaagagataaa

SEQ ID NO: 456892 - DNA, 15 bp, Homo sapiens
aaagccaagagataa

SEQ ID NO: 456893 - DNA, 15 bp, Homo sapiens
aaaagccaagagata

SEQ ID NO: 456894 - DNA, 15 bp, Homo sapiens
taaaagccaagagat

SEQ ID NO: 456895 - DNA, 15 bp, Homo sapiens
ataaaagccaagaga

SEQ ID NO: 456896 - DNA, 15 bp, Homo sapiens
cataaaagccaagag

SEQ ID NO: 456897 - DNA, 15 bp, Homo sapiens
ccataaaagccaaga

SEQ ID NO: 456898 - DNA, 15 bp, Homo sapiens
accataaaagccaag

SEQ ID NO: 456899 - DNA, 15 bp, Homo sapiens
aaccataaaagccaa

SEQ ID NO: 456900 - DNA, 15 bp, Homo sapiens
aaaccataaaagcca

SEQ ID NO: 456901 - DNA, 15 bp, Homo sapiens
gaaaccataaaagcc

SEQ ID NO: 456902 - DNA, 15 bp, Homo sapiens
agaaaccataaaagc

SEQ ID NO: 456903 - DNA, 15 bp, Homo sapiens
gagaaaccataaaag

SEQ ID NO: 456904 - DNA, 15 bp, Homo sapiens
agagaaaccataaaa

SEQ ID NO: 456905 - DNA, 15 bp, Homo sapiens
tagagaaaccataaa

SEQ ID NO: 456906 - DNA, 15 bp, Homo sapiens
gtagagaaaccataa

SEQ ID NO: 456907 - DNA, 15 bp, Homo sapiens
ggtagagaaaccata

SEQ ID NO: 456908 - DNA, 15 bp, Homo sapiens
gggtagagaaaccat

SEQ ID NO: 456909 - DNA, 15 bp, Homo sapiens
ggggtagagaaacca

SEQ ID NO: 456910 - DNA, 15 bp, Homo sapiens
gggggtagagaaacc

SEQ ID NO: 456911 - DNA, 15 bp, Homo sapiens
agggggtagagaaac

SEQ ID NO: 456912 - DNA, 15 bp, Homo sapiens
tagggggtagagaaa

SEQ ID NO: 456913 - DNA, 15 bp, Homo sapiens
ttagggggtagagaa

SEQ ID NO: 456914 - DNA, 15 bp, Homo sapiens
attagggggtagaga

SEQ ID NO: 456915 - DNA, 15 bp, Homo sapiens
aattagggggtagag

SEQ ID NO: 456916 - DNA, 15 bp, Homo sapiens
aaattagggggtaga

SEQ ID NO: 456917 - DNA, 15 bp, Homo sapiens
gaaattagggggtag

SEQ ID NO: 456918 - DNA, 15 bp, Homo sapiens
ggaaattagggggta

SEQ ID NO: 456919 - DNA, 15 bp, Homo sapiens
gggaaattagggggt

SEQ ID NO: 456920 - DNA, 15 bp, Homo sapiens
tgggaaattaggggg

SEQ ID NO: 456921 - DNA, 15 bp, Homo sapiens
gtgggaaattagggg

SEQ ID NO: 456922 - DNA, 15 bp, Homo sapiens
ggtgggaaattaggg

SEQ ID NO: 456923 - DNA, 15 bp, Homo sapiens
tggtgggaaattagg

SEQ ID NO: 456924 - DNA, 15 bp, Homo sapiens
gtggtgggaaattag

SEQ ID NO: 456925 - DNA, 15 bp, Homo sapiens
cgtggtgggaaatta

SEQ ID NO: 456926 - DNA, 15 bp, Homo sapiens
gcgtggtgggaaatt

SEQ ID NO: 456927 - DNA, 15 bp, Homo sapiens
ggcgtggtgggaaat

SEQ ID NO: 456928 - DNA, 15 bp, Homo sapiens
tggcgtggtgggaaa

SEQ ID NO: 456929 - DNA, 15 bp, Homo sapiens
atggcgtggtgggaa

SEQ ID NO: 456930 - DNA, 15 bp, Homo sapiens
gatggcgtggtggga

SEQ ID NO: 456931 - DNA, 15 bp, Homo sapiens
ggatggcgtggtggg

SEQ ID NO: 456932 - DNA, 15 bp, Homo sapiens
gggatggcgtggtgg

SEQ ID NO: 456933 - DNA, 15 bp, Homo sapiens
ggggatggcgtggtg

SEQ ID NO: 456934 - DNA, 15 bp, Homo sapiens
aggggatggcgtggt

SEQ ID NO: 456935 - DNA, 15 bp, Homo sapiens
taggggatggcgtgg

SEQ ID NO: 456936 - DNA, 15 bp, Homo sapiens
gtaggggatggcgtg

SEQ ID NO: 456937 - DNA, 15 bp, Homo sapiens
ggtaggggatggcgt

SEQ ID NO: 456938 - DNA, 15 bp, Homo sapiens
aggtaggggatggcg

SEQ ID NO: 456939 - DNA, 15 bp, Homo sapiens
caggtaggggatggc

SEQ ID NO: 456940 - DNA, 15 bp, Homo sapiens
acaggtaggggatgg

SEQ ID NO: 456941 - DNA, 15 bp, Homo sapiens
tacaggtaggggatg

SEQ ID NO: 456942 - DNA, 15 bp, Homo sapiens
ctacaggtaggggat

SEQ ID NO: 456943 - DNA, 15 bp, Homo sapiens
cctacaggtagggga

SEQ ID NO: 456944 - DNA, 15 bp, Homo sapiens
tcctacaggtagggg

SEQ ID NO: 456945 - DNA, 15 bp, Homo sapiens
ttcctacaggtaggg

SEQ ID NO: 456946 - DNA, 15 bp, Homo sapiens
tttcctacaggtagg

SEQ ID NO: 456947 - DNA, 15 bp, Homo sapiens
ctttcctacaggtag

SEQ ID NO: 456948 - DNA, 15 bp, Homo sapiens
cctttcctacaggta

SEQ ID NO: 456949 - DNA, 15 bp, Homo sapiens
acctttcctacaggt

SEQ ID NO: 456950 - DNA, 15 bp, Homo sapiens
cacctttcctacagg

SEQ ID NO: 456951 - DNA, 15 bp, Homo sapiens
tcacctttcctacag

SEQ ID NO: 456952 - DNA, 15 bp, Homo sapiens
ctcacctttcctaca

SEQ ID NO: 456953 - DNA, 15 bp, Homo sapiens
cctcacctttcctac

SEQ ID NO: 456954 - DNA, 15 bp, Homo sapiens
ccctcacctttccta

SEQ ID NO: 456955 - DNA, 15 bp, Homo sapiens
accctcacctttcct

SEQ ID NO: 456956 - DNA, 15 bp, Homo sapiens
caccctcacctttcc

SEQ ID NO: 456957 - DNA, 15 bp, Homo sapiens
ccaccctcacctttc

SEQ ID NO: 456958 - DNA, 15 bp, Homo sapiens
cccaccctcaccttt

SEQ ID NO: 456959 - DNA, 15 bp, Homo sapiens
ccccaccctcacctt

SEQ ID NO: 456960 - DNA, 15 bp, Homo sapiens
cccccaccctcacct

SEQ ID NO: 456961 - DNA, 15 bp, Homo sapiens
gcccccaccctcacc

SEQ ID NO: 456962 - DNA, 15 bp, Homo sapiens
agcccccaccctcac

SEQ ID NO: 456963 - DNA, 15 bp, Homo sapiens
cagcccccaccctca

SEQ ID NO: 456964 - DNA, 15 bp, Homo sapiens
acagcccccaccctc

SEQ ID NO: 456965 - DNA, 15 bp, Homo sapiens
cacagcccccaccct

SEQ ID NO: 456966 - DNA, 15 bp, Homo sapiens
ccacagcccccaccc

SEQ ID NO: 456967 - DNA, 15 bp, Homo sapiens
tccacagcccccacc

SEQ ID NO: 456968 - DNA, 15 bp, Homo sapiens
ctccacagcccccac

SEQ ID NO: 456969 - DNA, 15 bp, Homo sapiens
cctccacagccccca

SEQ ID NO: 456970 - DNA, 15 bp, Homo sapiens
ccctccacagccccc

SEQ ID NO: 456971 - DNA, 15 bp, Homo sapiens
tccctccacagcccc

SEQ ID NO: 456972 - DNA, 15 bp, Homo sapiens
gtccctccacagccc

SEQ ID NO: 456973 - DNA, 15 bp, Homo sapiens
agtccctccacagcc

SEQ ID NO: 456974 - DNA, 15 bp, Homo sapiens
aagtccctccacagc

SEQ ID NO: 456975 - DNA, 15 bp, Homo sapiens
aaagtccctccacag

SEQ ID NO: 456976 - DNA, 15 bp, Homo sapiens
gaaagtccctccaca

SEQ ID NO: 456977 - DNA, 15 bp, Homo sapiens
agaaagtccctccac

SEQ ID NO: 456978 - DNA, 15 bp, Homo sapiens
gagaaagtccctcca

SEQ ID NO: 456979 - DNA, 15 bp, Homo sapiens
ggagaaagtccctcc

SEQ ID NO: 456980 - DNA, 15 bp, Homo sapiens
tggagaaagtccctc

SEQ ID NO: 456981 - DNA, 15 bp, Homo sapiens
ttggagaaagtccct

SEQ ID NO: 456982 - DNA, 15 bp, Homo sapiens
tttggagaaagtccc

SEQ ID NO: 456983 - DNA, 15 bp, Homo sapiens
ctttggagaaagtcc

SEQ ID NO: 456984 - DNA, 15 bp, Homo sapiens
gctttggagaaagtc

SEQ ID NO: 456985 - DNA, 15 bp, Homo sapiens
agctttggagaaagt

SEQ ID NO: 456986 - DNA, 15 bp, Homo sapiens
cagctttggagaaag

SEQ ID NO: 456987 - DNA, 15 bp, Homo sapiens
tcagctttggagaaa

SEQ ID NO: 456988 - DNA, 15 bp, Homo sapiens
ctcagctttggagaa

SEQ ID NO: 456989 - DNA, 15 bp, Homo sapiens
tctcagctttggaga

SEQ ID NO: 456990 - DNA, 15 bp, Homo sapiens
ctctcagctttggag

SEQ ID NO: 456991 - DNA, 15 bp, Homo sapiens
tctctcagctttgga

SEQ ID NO: 456992 - DNA, 15 bp, Homo sapiens
ctctctcagctttgg

SEQ ID NO: 456993 - DNA, 15 bp, Homo sapiens
tctctctcagctttg

SEQ ID NO: 456994 - DNA, 15 bp, Homo sapiens
atctctctcagcttt

SEQ ID NO: 456995 - DNA, 15 bp, Homo sapiens
gatctctctcagctt

SEQ ID NO: 456996 - DNA, 15 bp, Homo sapiens
ggatctctctcagct

SEQ ID NO: 456997 - DNA, 15 bp, Homo sapiens
aggatctctctcagc

SEQ ID NO: 456998 - DNA, 15 bp, Homo sapiens
aaggatctctctcag

SEQ ID NO: 456999 - DNA, 15 bp, Homo sapiens
aaaggatctctctca

SEQ ID NO: 457000 - DNA, 15 bp, Homo sapiens
gaaaggatctctctc

SEQ ID NO: 457001 - DNA, 15 bp, Homo sapiens
tgaaaggatctctct

SEQ ID NO: 457002 - DNA, 15 bp, Homo sapiens
gtgaaaggatctctc

SEQ ID NO: 457003 - DNA, 15 bp, Homo sapiens
agtgaaaggatctct

SEQ ID NO: 457004 - DNA, 15 bp, Homo sapiens
tagtgaaaggatctc

SEQ ID NO: 457005 - DNA, 15 bp, Homo sapiens
atagtgaaaggatct

SEQ ID NO: 457006 - DNA, 15 bp, Homo sapiens
aatagtgaaaggatc

SEQ ID NO: 457007 - DNA, 15 bp, Homo sapiens
aaatagtgaaaggat

SEQ ID NO: 457008 - DNA, 15 bp, Homo sapiens
taaatagtgaaagga

SEQ ID NO: 457009 - DNA, 15 bp, Homo sapiens
gtaaatagtgaaagg

SEQ ID NO: 457010 - DNA, 15 bp, Homo sapiens
tgtaaatagtgaaag

SEQ ID NO: 457011 - DNA, 15 bp, Homo sapiens
atgtaaatagtgaaa

SEQ ID NO: 457012 - DNA, 15 bp, Homo sapiens
gatgtaaatagtgaa

SEQ ID NO: 457013 - DNA, 15 bp, Homo sapiens
tgatgtaaatagtga

SEQ ID NO: 457014 - DNA, 15 bp, Homo sapiens
atgatgtaaatagtg

SEQ ID NO: 457015 - DNA, 15 bp, Homo sapiens
aatgatgtaaatagt

SEQ ID NO: 457016 - DNA, 15 bp, Homo sapiens
gaatgatgtaaatag

SEQ ID NO: 457017 - DNA, 15 bp, Homo sapiens
tgaatgatgtaaata

SEQ ID NO: 457018 - DNA, 15 bp, Homo sapiens
ctgaatgatgtaaat

SEQ ID NO: 457019 - DNA, 15 bp, Homo sapiens
gctgaatgatgtaaa

SEQ ID NO: 457020 - DNA, 15 bp, Homo sapiens
ggctgaatgatgtaa

SEQ ID NO: 457021 - DNA, 15 bp, Homo sapiens
gggctgaatgatgta

SEQ ID NO: 457022 - DNA, 15 bp, Homo sapiens
agggctgaatgatgt

SEQ ID NO: 457023 - DNA, 15 bp, Homo sapiens
gagggctgaatgatg

SEQ ID NO: 457024 - DNA, 15 bp, Homo sapiens
tgagggctgaatgat

SEQ ID NO: 457025 - DNA, 15 bp, Homo sapiens
ttgagggctgaatga

SEQ ID NO: 457026 - DNA, 15 bp, Homo sapiens
cttgagggctgaatg

SEQ ID NO: 457027 - DNA, 15 bp, Homo sapiens
tcttgagggctgaat

SEQ ID NO: 457028 - DNA, 15 bp, Homo sapiens
aagccttaaggttct

SEQ ID NO: 457029 - DNA, 15 bp, Homo sapiens
taagccttaaggttc

SEQ ID NO: 457030 - DNA, 15 bp, Homo sapiens
ttaagccttaaggtt

SEQ ID NO: 457031 - DNA, 15 bp, Homo sapiens
cttaagccttaaggt

SEQ ID NO: 457032 - DNA, 15 bp, Homo sapiens
acttaagccttaagg

SEQ ID NO: 457033 - DNA, 15 bp, Homo sapiens
gacttaagccttaag

SEQ ID NO: 457034 - DNA, 15 bp, Homo sapiens
ggacttaagccttaa

SEQ ID NO: 457035 - DNA, 15 bp, Homo sapiens
gggacttaagcctta

SEQ ID NO: 457036 - DNA, 15 bp, Homo sapiens
ggggacttaagcctt

SEQ ID NO: 457037 - DNA, 15 bp, Homo sapiens
aggggacttaagcct

SEQ ID NO: 457038 - DNA, 15 bp, Homo sapiens
aaggggacttaagcc

SEQ ID NO: 457039 - DNA, 15 bp, Homo sapiens
caaggggacttaagc

SEQ ID NO: 457040 - DNA, 15 bp, Homo sapiens
acaaggggacttaag

SEQ ID NO: 457041 - DNA, 15 bp, Homo sapiens
aacaaggggacttaa

SEQ ID NO: 457042 - DNA, 15 bp, Homo sapiens
aaacaaggggactta

SEQ ID NO: 457043 - DNA, 15 bp, Homo sapiens
caaacaaggggactt

SEQ ID NO: 457044 - DNA, 15 bp, Homo sapiens
acaaacaaggggact

SEQ ID NO: 457045 - DNA, 15 bp, Homo sapiens
aacaaacaaggggac

SEQ ID NO: 457046 - DNA, 15 bp, Homo sapiens
gaacaaacaagggga

SEQ ID NO: 457047 - DNA, 15 bp, Homo sapiens
tgaacaaacaagggg

SEQ ID NO: 457048 - DNA, 15 bp, Homo sapiens
gtgaacaaacaaggg

SEQ ID NO: 457049 - DNA, 15 bp, Homo sapiens
agtgaacaaacaagg

SEQ ID NO: 457050 - DNA, 15 bp, Homo sapiens
gagtgaacaaacaag

SEQ ID NO: 457051 - DNA, 15 bp, Homo sapiens
ggagtgaacaaacaa

SEQ ID NO: 457052 - DNA, 15 bp, Homo sapiens
tggagtgaacaaaca

SEQ ID NO: 457053 - DNA, 15 bp, Homo sapiens
ttggagtgaacaaac

SEQ ID NO: 457054 - DNA, 15 bp, Homo sapiens
cttggagtgaacaaa

SEQ ID NO: 457055 - DNA, 15 bp, Homo sapiens
gcttggagtgaacaa

SEQ ID NO: 457056 - DNA, 15 bp, Homo sapiens
ggcttggagtgaaca

SEQ ID NO: 457057 - DNA, 15 bp, Homo sapiens
aggcttggagtgaac

SEQ ID NO: 457058 - DNA, 15 bp, Homo sapiens
gaggcttggagtgaa

SEQ ID NO: 457059 - DNA, 15 bp, Homo sapiens
agaggcttggagtga

SEQ ID NO: 457060 - DNA, 15 bp, Homo sapiens
cagaggcttggagtg

SEQ ID NO: 457061 - DNA, 15 bp, Homo sapiens
gcagaggcttggagt

SEQ ID NO: 457062 - DNA, 15 bp, Homo sapiens
agcagaggcttggag

SEQ ID NO: 457063 - DNA, 15 bp, Homo sapiens
aagcagaggcttgga

SEQ ID NO: 457064 - DNA, 15 bp, Homo sapiens
aaagcagaggcttgg

SEQ ID NO: 457065 - DNA, 15 bp, Homo sapiens
aaaagcagaggcttg

SEQ ID NO: 457066 - DNA, 15 bp, Homo sapiens
gaaaagcagaggctt

SEQ ID NO: 457067 - DNA, 15 bp, Homo sapiens
ggaaaagcagaggct

SEQ ID NO: 457068 - DNA, 15 bp, Homo sapiens
gggaaaagcagaggc

SEQ ID NO: 457069 - DNA, 15 bp, Homo sapiens
tgggaaaagcagagg

SEQ ID NO: 457070 - DNA, 15 bp, Homo sapiens
ttgggaaaagcagag

SEQ ID NO: 457071 - DNA, 15 bp, Homo sapiens
gttgggaaaagcaga

SEQ ID NO: 457072 - DNA, 15 bp, Homo sapiens
ggttgggaaaagcag

SEQ ID NO: 457073 - DNA, 15 bp, Homo sapiens
aggttgggaaaagca

SEQ ID NO: 457074 - DNA, 15 bp, Homo sapiens
aaggttgggaaaagc

SEQ ID NO: 457075 - DNA, 15 bp, Homo sapiens
gaaggttgggaaaag

SEQ ID NO: 457076 - DNA, 15 bp, Homo sapiens
ggaaggttgggaaaa

SEQ ID NO: 457077 - DNA, 15 bp, Homo sapiens
gggaaggttgggaaa

SEQ ID NO: 457078 - DNA, 15 bp, Homo sapiens
ggggaaggttgggaa

SEQ ID NO: 457079 - DNA, 15 bp, Homo sapiens
tggggaaggttggga

SEQ ID NO: 457080 - DNA, 15 bp, Homo sapiens
ctggggaaggttggg

SEQ ID NO: 457081 - DNA, 15 bp, Homo sapiens
actggggaaggttgg

SEQ ID NO: 457082 - DNA, 15 bp, Homo sapiens
gactggggaaggttg

SEQ ID NO: 457083 - DNA, 15 bp, Homo sapiens
ggactggggaaggtt

SEQ ID NO: 457084 - DNA, 15 bp, Homo sapiens
aggactggggaaggt

SEQ ID NO: 457085 - DNA, 15 bp, Homo sapiens
caggactggggaagg

SEQ ID NO: 457086 - DNA, 15 bp, Homo sapiens
ccaggactggggaag

SEQ ID NO: 457087 - DNA, 15 bp, Homo sapiens
cccaggactggggaa

SEQ ID NO: 457088 - DNA, 15 bp, Homo sapiens
gcccaggactgggga

SEQ ID NO: 457089 - DNA, 15 bp, Homo sapiens
agcccaggactgggg

SEQ ID NO: 457090 - DNA, 15 bp, Homo sapiens
tagcccaggactggg

SEQ ID NO: 457091 - DNA, 15 bp, Homo sapiens
ctagcccaggactgg

SEQ ID NO: 457092 - DNA, 15 bp, Homo sapiens
cctagcccaggactg

SEQ ID NO: 457093 - DNA, 15 bp, Homo sapiens
gcctagcccaggact

SEQ ID NO: 457094 - DNA, 15 bp, Homo sapiens
tgcctagcccaggac

SEQ ID NO: 457095 - DNA, 15 bp, Homo sapiens
ttgcctagcccagga

SEQ ID NO: 457096 - DNA, 15 bp, Homo sapiens
cttgcctagcccagg

SEQ ID NO: 457097 - DNA, 15 bp, Homo sapiens
ccttgcctagcccag

SEQ ID NO: 457098 - DNA, 15 bp, Homo sapiens
cccttgcctagccca

SEQ ID NO: 457099 - DNA, 15 bp, Homo sapiens
ccccttgcctagccc

SEQ ID NO: 457100 - DNA, 15 bp, Homo sapiens
cccccttgcctagcc

SEQ ID NO: 457101 - DNA, 15 bp, Homo sapiens
gcccccttgcctagc

SEQ ID NO: 457102 - DNA, 15 bp, Homo sapiens
ggcccccttgcctag

SEQ ID NO: 457103 - DNA, 15 bp, Homo sapiens
aggcccccttgccta

SEQ ID NO: 457104 - DNA, 15 bp, Homo sapiens
gaggcccccttgcct

SEQ ID NO: 457105 - DNA, 15 bp, Homo sapiens
agaggcccccttgcc

SEQ ID NO: 457106 - DNA, 15 bp, Homo sapiens
tagaggcccccttgc

SEQ ID NO: 457107 - DNA, 15 bp, Homo sapiens
ctagaggcccccttg

SEQ ID NO: 457108 - DNA, 15 bp, Homo sapiens
gctagaggccccctt

SEQ ID NO: 457109 - DNA, 15 bp, Homo sapiens
tgctagaggccccct

SEQ ID NO: 457110 - DNA, 15 bp, Homo sapiens
ttgctagaggccccc

SEQ ID NO: 457111 - DNA, 15 bp, Homo sapiens
cttgctagaggcccc

SEQ ID NO: 457112 - DNA, 15 bp, Homo sapiens
tcttgctagaggccc

SEQ ID NO: 457113 - DNA, 15 bp, Homo sapiens
ctcttgctagaggcc

SEQ ID NO: 457114 - DNA, 15 bp, Homo sapiens
tctcttgctagaggc

SEQ ID NO: 457115 - DNA, 15 bp, Homo sapiens
ctctcttgctagagg

SEQ ID NO: 457116 - DNA, 15 bp, Homo sapiens
cctctcttgctagag

SEQ ID NO: 457117 - DNA, 15 bp, Homo sapiens
gcctctcttgctaga

SEQ ID NO: 457118 - DNA, 15 bp, Homo sapiens
ggcctctcttgctag

SEQ ID NO: 457119 - DNA, 15 bp, Homo sapiens
tggcctctcttgcta

SEQ ID NO: 457120 - DNA, 15 bp, Homo sapiens
ttggcctctcttgct

SEQ ID NO: 457121 - DNA, 15 bp, Homo sapiens
gttggcctctcttgc

SEQ ID NO: 457122 - DNA, 15 bp, Homo sapiens
tgttggcctctcttg

SEQ ID NO: 457123 - DNA, 15 bp, Homo sapiens
atgttggcctctctt

SEQ ID NO: 457124 - DNA, 15 bp, Homo sapiens
catgttggcctctct

SEQ ID NO: 457125 - DNA, 15 bp, Homo sapiens
acatgttggcctctc

SEQ ID NO: 457126 - DNA, 15 bp, Homo sapiens
aacatgttggcctct

SEQ ID NO: 457127 - DNA, 15 bp, Homo sapiens
gaacatgttggcctc

SEQ ID NO: 457128 - DNA, 15 bp, Homo sapiens
agaacatgttggcct

SEQ ID NO: 457129 - DNA, 15 bp, Homo sapiens
cagaacatgttggcc

SEQ ID NO: 457130 - DNA, 15 bp, Homo sapiens
gcagaacatgttggc

SEQ ID NO: 457131 - DNA, 15 bp, Homo sapiens
agcagaacatgttgg

SEQ ID NO: 457132 - DNA, 15 bp, Homo sapiens
cagcagaacatgttg

SEQ ID NO: 457133 - DNA, 15 bp, Homo sapiens
acagcagaacatgtt

SEQ ID NO: 457134 - DNA, 15 bp, Homo sapiens
cacagcagaacatgt

SEQ ID NO: 457135 - DNA, 15 bp, Homo sapiens
gcacagcagaacatg

SEQ ID NO: 457136 - DNA, 15 bp, Homo sapiens
cgcacagcagaacat

SEQ ID NO: 457137 - DNA, 15 bp, Homo sapiens
ccgcacagcagaaca

SEQ ID NO: 457138 - DNA, 15 bp, Homo sapiens
cccgcacagcagaac

SEQ ID NO: 457139 - DNA, 15 bp, Homo sapiens
ccccgcacagcagaa

SEQ ID NO: 457140 - DNA, 15 bp, Homo sapiens
gccccgcacagcaga

SEQ ID NO: 457141 - DNA, 15 bp, Homo sapiens
agccccgcacagcag

SEQ ID NO: 457142 - DNA, 15 bp, Homo sapiens
cagccccgcacagca

SEQ ID NO: 457143 - DNA, 15 bp, Homo sapiens
acagccccgcacagc

SEQ ID NO: 457144 - DNA, 15 bp, Homo sapiens
cacagccccgcacag

SEQ ID NO: 457145 - DNA, 15 bp, Homo sapiens
gcacagccccgcaca

SEQ ID NO: 457146 - DNA, 15 bp, Homo sapiens
tgcacagccccgcac

SEQ ID NO: 457147 - DNA, 15 bp, Homo sapiens
atgcacagccccgca

SEQ ID NO: 457148 - DNA, 15 bp, Homo sapiens
aatgcacagccccgc

SEQ ID NO: 457149 - DNA, 15 bp, Homo sapiens
caatgcacagccccg

SEQ ID NO: 457150 - DNA, 15 bp, Homo sapiens
gcaatgcacagcccc

SEQ ID NO: 457151 - DNA, 15 bp, Homo sapiens
tgcaatgcacagccc

SEQ ID NO: 457152 - DNA, 15 bp, Homo sapiens
gtgcaatgcacagcc

SEQ ID NO: 457153 - DNA, 15 bp, Homo sapiens
tgtgcaatgcacagc

SEQ ID NO: 457154 - DNA, 15 bp, Homo sapiens
ttgtgcaatgcacag

SEQ ID NO: 457155 - DNA, 15 bp, Homo sapiens
tttgtgcaatgcaca

SEQ ID NO: 457156 - DNA, 15 bp, Homo sapiens
ttttgtgcaatgcac

SEQ ID NO: 457157 - DNA, 15 bp, Homo sapiens
cttttgtgcaatgca

SEQ ID NO: 457158 - DNA, 15 bp, Homo sapiens
gcttttgtgcaatgc

SEQ ID NO: 457159 - DNA, 15 bp, Homo sapiens
ggcttttgtgcaatg

SEQ ID NO: 457160 - DNA, 15 bp, Homo sapiens
aggcttttgtgcaat

SEQ ID NO: 457161 - DNA, 15 bp, Homo sapiens
caggcttttgtgcaa

SEQ ID NO: 457162 - DNA, 15 bp, Homo sapiens
acaggcttttgtgca

SEQ ID NO: 457163 - DNA, 15 bp, Homo sapiens
tacaggcttttgtgc

SEQ ID NO: 457164 - DNA, 15 bp, Homo sapiens
atacaggcttttgtg

SEQ ID NO: 457165 - DNA, 15 bp, Homo sapiens
aatacaggcttttgt

SEQ ID NO: 457166 - DNA, 15 bp, Homo sapiens
aaatacaggcttttg

SEQ ID NO: 457167 - DNA, 15 bp, Homo sapiens
gaaatacaggctttt

SEQ ID NO: 457168 - DNA, 15 bp, Homo sapiens
tgaaatacaggcttt

SEQ ID NO: 457169 - DNA, 15 bp, Homo sapiens
gtgaaatacaggctt

SEQ ID NO: 457170 - DNA, 15 bp, Homo sapiens
ggtgaaatacaggct

SEQ ID NO: 457171 - DNA, 15 bp, Homo sapiens
tggtgaaatacaggc

SEQ ID NO: 457172 - DNA, 15 bp, Homo sapiens
gtggtgaaatacagg

SEQ ID NO: 457173 - DNA, 15 bp, Homo sapiens
tgtggtgaaatacag

SEQ ID NO: 457174 - DNA, 15 bp, Homo sapiens
ttgtggtgaaataca

SEQ ID NO: 457175 - DNA, 15 bp, Homo sapiens
gttgtggtgaaatac

SEQ ID NO: 457176 - DNA, 15 bp, Homo sapiens
ggttgtggtgaaata

SEQ ID NO: 457177 - DNA, 15 bp, Homo sapiens
tggttgtggtgaaat

SEQ ID NO: 457178 - DNA, 15 bp, Homo sapiens
atggttgtggtgaaa

SEQ ID NO: 457179 - DNA, 15 bp, Homo sapiens
catggttgtggtgaa

SEQ ID NO: 457180 - DNA, 15 bp, Homo sapiens
acatggttgtggtga

SEQ ID NO: 457181 - DNA, 15 bp, Homo sapiens
cacatggttgtggtg

SEQ ID NO: 457182 - DNA, 15 bp, Homo sapiens
gcacatggttgtggt

SEQ ID NO: 457183 - DNA, 15 bp, Homo sapiens
ggcacatggttgtgg

SEQ ID NO: 457184 - DNA, 15 bp, Homo sapiens
tggcacatggttgtg

SEQ ID NO: 457185 - DNA, 15 bp, Homo sapiens
ctggcacatggttgt

SEQ ID NO: 457186 - DNA, 15 bp, Homo sapiens
gctggcacatggttg

SEQ ID NO: 457187 - DNA, 15 bp, Homo sapiens
tgctggcacatggtt

SEQ ID NO: 457188 - DNA, 15 bp, Homo sapiens
ctgctggcacatggt

SEQ ID NO: 457189 - DNA, 15 bp, Homo sapiens
tctgctggcacatgg

SEQ ID NO: 457190 - DNA, 15 bp, Homo sapiens
atctgctggcacatg

SEQ ID NO: 457191 - DNA, 15 bp, Homo sapiens
catctgctggcacat

SEQ ID NO: 457192 - DNA, 15 bp, Homo sapiens
ccatctgctggcaca

SEQ ID NO: 457193 - DNA, 15 bp, Homo sapiens
gccatctgctggcac

SEQ ID NO: 457194 - DNA, 15 bp, Homo sapiens
tgccatctgctggca

SEQ ID NO: 457195 - DNA, 15 bp, Homo sapiens
ttgccatctgctggc

SEQ ID NO: 457196 - DNA, 15 bp, Homo sapiens
attgccatctgctgg

SEQ ID NO: 457197 - DNA, 15 bp, Homo sapiens
gattgccatctgctg

SEQ ID NO: 457198 - DNA, 15 bp, Homo sapiens
tgattgccatctgct

SEQ ID NO: 457199 - DNA, 15 bp, Homo sapiens
atgattgccatctgc

SEQ ID NO: 457200 - DNA, 15 bp, Homo sapiens
catgattgccatctg

SEQ ID NO: 457201 - DNA, 15 bp, Homo sapiens
ccatgattgccatct

SEQ ID NO: 457202 - DNA, 15 bp, Homo sapiens
cccatgattgccatc

SEQ ID NO: 457203 - DNA, 15 bp, Homo sapiens
acccatgattgccat

SEQ ID NO: 457204 - DNA, 15 bp, Homo sapiens
aacccatgattgcca

SEQ ID NO: 457205 - DNA, 15 bp, Homo sapiens
aaacccatgattgcc

SEQ ID NO: 457206 - DNA, 15 bp, Homo sapiens
gaaacccatgattgc

SEQ ID NO: 457207 - DNA, 15 bp, Homo sapiens
cgaaacccatgattg

SEQ ID NO: 457208 - DNA, 15 bp, Homo sapiens
tcgaaacccatgatt

SEQ ID NO: 457209 - DNA, 15 bp, Homo sapiens
ctcgaaacccatgat

SEQ ID NO: 457210 - DNA, 15 bp, Homo sapiens
tctcgaaacccatga

SEQ ID NO: 457211 - DNA, 15 bp, Homo sapiens
atctcgaaacccatg

SEQ ID NO: 457212 - DNA, 15 bp, Homo sapiens
tatctcgaaacccat

SEQ ID NO: 457213 - DNA, 15 bp, Homo sapiens
ctatctcgaaaccca

SEQ ID NO: 457214 - DNA, 15 bp, Homo sapiens
actatctcgaaaccc

SEQ ID NO: 457215 - DNA, 15 bp, Homo sapiens
gactatctcgaaacc

SEQ ID NO: 457216 - DNA, 15 bp, Homo sapiens
ggactatctcgaaac

SEQ ID NO: 457217 - DNA, 15 bp, Homo sapiens
gggactatctcgaaa

SEQ ID NO: 457218 - DNA, 15 bp, Homo sapiens
ggggactatctcgaa

SEQ ID NO: 457219 - DNA, 15 bp, Homo sapiens
aggggactatctcga

SEQ ID NO: 457220 - DNA, 15 bp, Homo sapiens
aaggggactatctcg

SEQ ID NO: 457221 - DNA, 15 bp, Homo sapiens
aaaggggactatctc

SEQ ID NO: 457222 - DNA, 15 bp, Homo sapiens
gaaaggggactatct

SEQ ID NO: 457223 - DNA, 15 bp, Homo sapiens
agaaaggggactatc

SEQ ID NO: 457224 - DNA, 15 bp, Homo sapiens
gagaaaggggactat

SEQ ID NO: 457225 - DNA, 15 bp, Homo sapiens
agagaaaggggacta

SEQ ID NO: 457226 - DNA, 15 bp, Homo sapiens
cagagaaaggggact

SEQ ID NO: 457227 - DNA, 15 bp, Homo sapiens
acagagaaaggggac

SEQ ID NO: 457228 - DNA, 15 bp, Homo sapiens
tacagagaaagggga

SEQ ID NO: 457229 - DNA, 15 bp, Homo sapiens
gtacagagaaagggg

SEQ ID NO: 457230 - DNA, 15 bp, Homo sapiens
tgtacagagaaaggg

SEQ ID NO: 457231 - DNA, 15 bp, Homo sapiens
ttgtacagagaaagg

SEQ ID NO: 457232 - DNA, 15 bp, Homo sapiens
tttgtacagagaaag

SEQ ID NO: 457233 - DNA, 15 bp, Homo sapiens
ttttgtacagagaaa

SEQ ID NO: 457234 - DNA, 15 bp, Homo sapiens
tttttgtacagagaa

SEQ ID NO: 457235 - DNA, 15 bp, Homo sapiens
gtttttgtacagaga

SEQ ID NO: 457236 - DNA, 15 bp, Homo sapiens
agtttttgtacagag

SEQ ID NO: 457237 - DNA, 15 bp, Homo sapiens
gagtttttgtacaga

SEQ ID NO: 457238 - DNA, 15 bp, Homo sapiens
agagtttttgtacag

SEQ ID NO: 457239 - DNA, 15 bp, Homo sapiens
cagagtttttgtaca

SEQ ID NO: 457240 - DNA, 15 bp, Homo sapiens
acagagtttttgtac

SEQ ID NO: 457241 - DNA, 15 bp, Homo sapiens
tacagagtttttgta

SEQ ID NO: 457242 - DNA, 15 bp, Homo sapiens
atacagagtttttgt

SEQ ID NO: 457243 - DNA, 15 bp, Homo sapiens
catacagagtttttg

SEQ ID NO: 457244 - DNA, 15 bp, Homo sapiens
ccatacagagttttt

SEQ ID NO: 457245 - DNA, 15 bp, Homo sapiens
cccatacagagtttt

SEQ ID NO: 457246 - DNA, 15 bp, Homo sapiens
acccatacagagttt

SEQ ID NO: 457247 - DNA, 15 bp, Homo sapiens
aacccatacagagtt

SEQ ID NO: 457248 - DNA, 15 bp, Homo sapiens
taacccatacagagt

SEQ ID NO: 457249 - DNA, 15 bp, Homo sapiens
ttaacccatacagag

SEQ ID NO: 457250 - DNA, 15 bp, Homo sapiens
gttaacccatacaga

SEQ ID NO: 457251 - DNA, 15 bp, Homo sapiens
agttaacccatacag

SEQ ID NO: 457252 - DNA, 15 bp, Homo sapiens
tagttaacccataca

SEQ ID NO: 457253 - DNA, 15 bp, Homo sapiens
ttagttaacccatac

SEQ ID NO: 457254 - DNA, 15 bp, Homo sapiens
tttagttaacccata

SEQ ID NO: 457255 - DNA, 15 bp, Homo sapiens
ctttagttaacccat

SEQ ID NO: 457256 - DNA, 15 bp, Homo sapiens
gctttagttaaccca

SEQ ID NO: 457257 - DNA, 15 bp, Homo sapiens
ggctttagttaaccc

SEQ ID NO: 457258 - DNA, 15 bp, Homo sapiens
aggctttagttaacc

SEQ ID NO: 457259 - DNA, 15 bp, Homo sapiens
caggctttagttaac

SEQ ID NO: 457260 - DNA, 15 bp, Homo sapiens
tcaggctttagttaa

SEQ ID NO: 457261 - DNA, 15 bp, Homo sapiens
ctcaggctttagtta

SEQ ID NO: 457262 - DNA, 15 bp, Homo sapiens
cctcaggctttagtt

SEQ ID NO: 457263 - DNA, 15 bp, Homo sapiens
ccctcaggctttagt

SEQ ID NO: 457264 - DNA, 15 bp, Homo sapiens
accctcaggctttag

SEQ ID NO: 457265 - DNA, 15 bp, Homo sapiens
caccctcaggcttta

SEQ ID NO: 457266 - DNA, 15 bp, Homo sapiens
gcaccctcaggcttt

SEQ ID NO: 457267 - DNA, 15 bp, Homo sapiens
cgcaccctcaggctt

SEQ ID NO: 457268 - DNA, 15 bp, Homo sapiens
tcgcaccctcaggct

SEQ ID NO: 457269 - DNA, 15 bp, Homo sapiens
ttcgcaccctcaggc

SEQ ID NO: 457270 - DNA, 15 bp, Homo sapiens
cttcgcaccctcagg

SEQ ID NO: 457271 - DNA, 15 bp, Homo sapiens
tcttcgcaccctcag

SEQ ID NO: 457272 - DNA, 15 bp, Homo sapiens
atcttcgcaccctca

SEQ ID NO: 457273 - DNA, 15 bp, Homo sapiens
gatcttcgcaccctc

SEQ ID NO: 457274 - DNA, 15 bp, Homo sapiens
cgatcttcgcaccct

SEQ ID NO: 457275 - DNA, 15 bp, Homo sapiens
tcgatcttcgcaccc

SEQ ID NO: 457276 - DNA, 15 bp, Homo sapiens
atcgatcttcgcacc

SEQ ID NO: 457277 - DNA, 15 bp, Homo sapiens
catcgatcttcgcac

SEQ ID NO: 457278 - DNA, 15 bp, Homo sapiens
tcatcgatcttcgca

SEQ ID NO: 457279 - DNA, 15 bp, Homo sapiens
ctcatcgatcttcgc

SEQ ID NO: 457280 - DNA, 15 bp, Homo sapiens
gctcatcgatcttcg

SEQ ID NO: 457281 - DNA, 15 bp, Homo sapiens
tgctcatcgatcttc

SEQ ID NO: 457282 - DNA, 15 bp, Homo sapiens
atgctcatcgatctt

SEQ ID NO: 457283 - DNA, 15 bp, Homo sapiens
aatgctcatcgatct

SEQ ID NO: 457284 - DNA, 15 bp, Homo sapiens
aaatgctcatcgatc

SEQ ID NO: 457285 - DNA, 15 bp, Homo sapiens
caaatgctcatcgat

SEQ ID NO: 457286 - DNA, 15 bp, Homo sapiens
acaaatgctcatcga

SEQ ID NO: 457287 - DNA, 15 bp, Homo sapiens
gacaaatgctcatcg

SEQ ID NO: 457288 - DNA, 15 bp, Homo sapiens
tgacaaatgctcatc

SEQ ID NO: 457289 - DNA, 15 bp, Homo sapiens
gtgacaaatgctcat

SEQ ID NO: 457290 - DNA, 15 bp, Homo sapiens
agtgacaaatgctca

SEQ ID NO: 457291 - DNA, 15 bp, Homo sapiens
gagtgacaaatgctc

SEQ ID NO: 457292 - DNA, 15 bp, Homo sapiens
ggagtgacaaatgct

SEQ ID NO: 457293 - DNA, 15 bp, Homo sapiens
gggagtgacaaatgc

SEQ ID NO: 457294 - DNA, 15 bp, Homo sapiens
tgggagtgacaaatg

SEQ ID NO: 457295 - DNA, 15 bp, Homo sapiens
ctgggagtgacaaat

SEQ ID NO: 457296 - DNA, 15 bp, Homo sapiens
gctgggagtgacaaa

SEQ ID NO: 457297 - DNA, 15 bp, Homo sapiens
ggctgggagtgacaa

SEQ ID NO: 457298 - DNA, 15 bp, Homo sapiens
aggctgggagtgaca

SEQ ID NO: 457299 - DNA, 15 bp, Homo sapiens
gaggctgggagtgac

SEQ ID NO: 457300 - DNA, 15 bp, Homo sapiens
ggaggctgggagtga

SEQ ID NO: 457301 - DNA, 15 bp, Homo sapiens
aggaggctgggagtg

SEQ ID NO: 457302 - DNA, 15 bp, Homo sapiens
aaggaggctgggagt

SEQ ID NO: 457303 - DNA, 15 bp, Homo sapiens
aaaggaggctgggag

SEQ ID NO: 457304 - DNA, 15 bp, Homo sapiens
taaaggaggctggga

SEQ ID NO: 457305 - DNA, 15 bp, Homo sapiens
ttaaaggaggctggg

SEQ ID NO: 457306 - DNA, 15 bp, Homo sapiens
tttaaaggaggctgg

SEQ ID NO: 457307 - DNA, 15 bp, Homo sapiens
atttaaaggaggctg

SEQ ID NO: 457308 - DNA, 15 bp, Homo sapiens
tatttaaaggaggct

SEQ ID NO: 457309 - DNA, 15 bp, Homo sapiens
atatttaaaggaggc

SEQ ID NO: 457310 - DNA, 15 bp, Homo sapiens
tatatttaaaggagg

SEQ ID NO: 457311 - DNA, 15 bp, Homo sapiens
atatatttaaaggag

SEQ ID NO: 457312 - DNA, 15 bp, Homo sapiens
tatatatttaaagga

SEQ ID NO: 457313 - DNA, 15 bp, Homo sapiens
atatatatttaaagg

SEQ ID NO: 457314 - DNA, 15 bp, Homo sapiens
tatatatatttaaag

SEQ ID NO: 457315 - DNA, 15 bp, Homo sapiens
atatatatatttaaa

SEQ ID NO: 457316 - DNA, 15 bp, Homo sapiens
tatatatatatttaa

SEQ ID NO: 457317 - DNA, 15 bp, Homo sapiens
atatatatatattta

SEQ ID NO: 457318 - DNA, 15 bp, Homo sapiens
tatatatatatattt

SEQ ID NO: 457319 - DNA, 15 bp, Homo sapiens
atatatatatatatt

SEQ ID NO: 457320 - DNA, 15 bp, Homo sapiens
tatatatatatatat

SEQ ID NO: 457321 - DNA, 15 bp, Homo sapiens
atatatatatatata

SEQ ID NO: 457322 - DNA, 15 bp, Homo sapiens
ttatatatatatata

SEQ ID NO: 457323 - DNA, 15 bp, Homo sapiens
attatatatatatat

SEQ ID NO: 457324 - DNA, 15 bp, Homo sapiens
aattatatatatata

SEQ ID NO: 457325 - DNA, 15 bp, Homo sapiens
aaattatatatatat

SEQ ID NO: 457326 - DNA, 15 bp, Homo sapiens
caaattatatatata

SEQ ID NO: 457327 - DNA, 15 bp, Homo sapiens
tcaaattatatatat

SEQ ID NO: 457328 - DNA, 15 bp, Homo sapiens
ctcaaattatatata

SEQ ID NO: 457329 - DNA, 15 bp, Homo sapiens
tctcaaattatatat

SEQ ID NO: 457330 - DNA, 15 bp, Homo sapiens
gtctcaaattatata

SEQ ID NO: 457331 - DNA, 15 bp, Homo sapiens
tgtctcaaattatat

SEQ ID NO: 457332 - DNA, 15 bp, Homo sapiens
ctgtctcaaattata

SEQ ID NO: 457333 - DNA, 15 bp, Homo sapiens
cctgtctcaaattat

SEQ ID NO: 457334 - DNA, 15 bp, Homo sapiens
ccctgtctcaaatta

SEQ ID NO: 457335 - DNA, 15 bp, Homo sapiens
accctgtctcaaatt

SEQ ID NO: 457336 - DNA, 15 bp, Homo sapiens
gaccctgtctcaaat

SEQ ID NO: 457337 - DNA, 15 bp, Homo sapiens
gagaccctgtctcaa

SEQ ID NO: 457338 - DNA, 15 bp, Homo sapiens
cgagaccctgtctca

SEQ ID NO: 457339 - DNA, 15 bp, Homo sapiens
gcgagaccctgtctc

SEQ ID NO: 457340 - DNA, 15 bp, Homo sapiens
agcgagaccctgtct

SEQ ID NO: 457341 - DNA, 15 bp, Homo sapiens
gagcgagaccctgtc

SEQ ID NO: 457342 - DNA, 15 bp, Homo sapiens
agagcgagaccctgt

SEQ ID NO: 457343 - DNA, 15 bp, Homo sapiens
cagagcgagaccctg

SEQ ID NO: 457344 - DNA, 15 bp, Homo sapiens
acagagcgagaccct

SEQ ID NO: 457345 - DNA, 15 bp, Homo sapiens
gacagagcgagaccc

SEQ ID NO: 457346 - DNA, 15 bp, Homo sapiens
cgacagagcgagacc

SEQ ID NO: 457347 - DNA, 15 bp, Homo sapiens
gcgacagagcgagac

SEQ ID NO: 457348 - DNA, 15 bp, Homo sapiens
agcgacagagcgaga

SEQ ID NO: 457349 - DNA, 15 bp, Homo sapiens
gagcgacagagcgag

SEQ ID NO: 457350 - DNA, 15 bp, Homo sapiens
tgagcgacagagcga

SEQ ID NO: 457351 - DNA, 15 bp, Homo sapiens
ctgagcgacagagcg

SEQ ID NO: 457352 - DNA, 15 bp, Homo sapiens
cctgagcgacagagc

SEQ ID NO: 457353 - DNA, 15 bp, Homo sapiens
gcctgagcgacagag

SEQ ID NO: 457354 - DNA, 15 bp, Homo sapiens
agcctgagcgacaga

SEQ ID NO: 457355 - DNA, 15 bp, Homo sapiens
cagcctgagcgacag

SEQ ID NO: 457356 - DNA, 15 bp, Homo sapiens
ccagcctgagcgaca

SEQ ID NO: 457357 - DNA, 15 bp, Homo sapiens
tccagcctgagcgac

SEQ ID NO: 457358 - DNA, 15 bp, Homo sapiens
ctccagcctgagcga

SEQ ID NO: 457359 - DNA, 15 bp, Homo sapiens
actccagcctgagcg

SEQ ID NO: 457360 - DNA, 15 bp, Homo sapiens
cactccagcctgagc

SEQ ID NO: 457361 - DNA, 15 bp, Homo sapiens
gcactccagcctgag

SEQ ID NO: 457362 - DNA, 15 bp, Homo sapiens
tgcactccagcctga

SEQ ID NO: 457363 - DNA, 15 bp, Homo sapiens
agccactgcactcca

SEQ ID NO: 457364 - DNA, 15 bp, Homo sapiens
gagccactgcactcc

SEQ ID NO: 457365 - DNA, 15 bp, Homo sapiens
tgagccactgcactc

SEQ ID NO: 457366 - DNA, 15 bp, Homo sapiens
ttgagccactgcact

SEQ ID NO: 457367 - DNA, 15 bp, Homo sapiens
attgagccactgcac

SEQ ID NO: 457368 - DNA, 15 bp, Homo sapiens
gattgagccactgca

SEQ ID NO: 457369 - DNA, 15 bp, Homo sapiens
agattgagccactgc

SEQ ID NO: 457370 - DNA, 15 bp, Homo sapiens
gagattgagccactg

SEQ ID NO: 457371 - DNA, 15 bp, Homo sapiens
cgagattgagccact

SEQ ID NO: 457372 - DNA, 15 bp, Homo sapiens
ccgagattgagccac

SEQ ID NO: 457373 - DNA, 15 bp, Homo sapiens
gccgagattgagcca

SEQ ID NO: 457374 - DNA, 15 bp, Homo sapiens
agccgagattgagcc

SEQ ID NO: 457375 - DNA, 15 bp, Homo sapiens
gagccgagattgagc

SEQ ID NO: 457376 - DNA, 15 bp, Homo sapiens
tgagccgagattgag

SEQ ID NO: 457377 - DNA, 15 bp, Homo sapiens
gtgagccgagattga

SEQ ID NO: 457378 - DNA, 15 bp, Homo sapiens
ttgcagtgagccgag

SEQ ID NO: 457379 - DNA, 15 bp, Homo sapiens
gttgcagtgagccga

SEQ ID NO: 457380 - DNA, 15 bp, Homo sapiens
ggttgcagtgagccg

SEQ ID NO: 457381 - DNA, 15 bp, Homo sapiens
tggaggttgcagtga

SEQ ID NO: 457382 - DNA, 15 bp, Homo sapiens
gtggaggttgcagtg

SEQ ID NO: 457383 - DNA, 15 bp, Homo sapiens
ggtggaggttgcagt

SEQ ID NO: 457384 - DNA, 15 bp, Homo sapiens
aggtggaggttgcag

SEQ ID NO: 457385 - DNA, 15 bp, Homo sapiens
gaggtggaggttgca

SEQ ID NO: 457386 - DNA, 15 bp, Homo sapiens
ggaggtggaggttgc

SEQ ID NO: 457387 - DNA, 15 bp, Homo sapiens
aggaggtggaggttg

SEQ ID NO: 457388 - DNA, 15 bp, Homo sapiens
caggaggtggaggtt

SEQ ID NO: 457389 - DNA, 15 bp, Homo sapiens
ccaggaggtggaggt

SEQ ID NO: 457390 - DNA, 15 bp, Homo sapiens
cccaggaggtggagg

SEQ ID NO: 457391 - DNA, 15 bp, Homo sapiens
acccaggaggtggag

SEQ ID NO: 457392 - DNA, 15 bp, Homo sapiens
aacccaggaggtgga

SEQ ID NO: 457393 - DNA, 15 bp, Homo sapiens
gaacccaggaggtgg

SEQ ID NO: 457394 - DNA, 15 bp, Homo sapiens
tgaacccaggaggtg

SEQ ID NO: 457395 - DNA, 15 bp, Homo sapiens
ttgaacccaggaggt

SEQ ID NO: 457396 - DNA, 15 bp, Homo sapiens
cttgaacccaggagg

SEQ ID NO: 457397 - DNA, 15 bp, Homo sapiens
gcttgaacccaggag

SEQ ID NO: 457398 - DNA, 15 bp, Homo sapiens
cgcttgaacccagga

SEQ ID NO: 457399 - DNA, 15 bp, Homo sapiens
tcgcttgaacccagg

SEQ ID NO: 457400 - DNA, 15 bp, Homo sapiens
atcgcttgaacccag

SEQ ID NO: 457401 - DNA, 15 bp, Homo sapiens
aatcgcttgaaccca

SEQ ID NO: 457402 - DNA, 15 bp, Homo sapiens
gggagaatcgcttga

SEQ ID NO: 457403 - DNA, 15 bp, Homo sapiens
tgggagaatcgcttg

SEQ ID NO: 457404 - DNA, 15 bp, Homo sapiens
gtgggagaatcgctt

SEQ ID NO: 457405 - DNA, 15 bp, Homo sapiens
ggtgggagaatcgct

SEQ ID NO: 457406 - DNA, 15 bp, Homo sapiens
aggtgggagaatcgc

SEQ ID NO: 457407 - DNA, 15 bp, Homo sapiens
gaggtgggagaatcg

SEQ ID NO: 457408 - DNA, 15 bp, Homo sapiens
tgaggtgggagaatc

SEQ ID NO: 457409 - DNA, 15 bp, Homo sapiens
ctgaggtgggagaat

SEQ ID NO: 457410 - DNA, 15 bp, Homo sapiens
gctgaggtgggagaa

SEQ ID NO: 457411 - DNA, 15 bp, Homo sapiens
ggctgaggtgggaga

SEQ ID NO: 457412 - DNA, 15 bp, Homo sapiens
gggaggctgaggtgg

SEQ ID NO: 457413 - DNA, 15 bp, Homo sapiens
cgggaggctgaggtg

SEQ ID NO: 457414 - DNA, 15 bp, Homo sapiens
tcgggaggctgaggt

SEQ ID NO: 457415 - DNA, 15 bp, Homo sapiens
actcgggaggctgag

SEQ ID NO: 457416 - DNA, 15 bp, Homo sapiens
tactcgggaggctga

SEQ ID NO: 457417 - DNA, 15 bp, Homo sapiens
ctactcgggaggctg

SEQ ID NO: 457418 - DNA, 15 bp, Homo sapiens
gctactcgggaggct

SEQ ID NO: 457419 - DNA, 15 bp, Homo sapiens
agctactcgggaggc

SEQ ID NO: 457420 - DNA, 15 bp, Homo sapiens
cagctactcgggagg

SEQ ID NO: 457421 - DNA, 15 bp, Homo sapiens
tcagctactcgggag

SEQ ID NO: 457422 - DNA, 15 bp, Homo sapiens
ttcagctactcggga

SEQ ID NO: 457423 - DNA, 15 bp, Homo sapiens
tttcagctactcggg

SEQ ID NO: 457424 - DNA, 15 bp, Homo sapiens
gtttcagctactcgg

SEQ ID NO: 457425 - DNA, 15 bp, Homo sapiens
agtttcagctactcg

SEQ ID NO: 457426 - DNA, 15 bp, Homo sapiens
tagtttcagctactc

SEQ ID NO: 457427 - DNA, 15 bp, Homo sapiens
ctagtttcagctact

SEQ ID NO: 457428 - DNA, 15 bp, Homo sapiens
tctagtttcagctac

SEQ ID NO: 457429 - DNA, 15 bp, Homo sapiens
ctctagtttcagcta

SEQ ID NO: 457430 - DNA, 15 bp, Homo sapiens
cctctagtttcagct

SEQ ID NO: 457431 - DNA, 15 bp, Homo sapiens
acctctagtttcagc

SEQ ID NO: 457432 - DNA, 15 bp, Homo sapiens
cacctctagtttcag

SEQ ID NO: 457433 - DNA, 15 bp, Homo sapiens
acacctctagtttca

SEQ ID NO: 457434 - DNA, 15 bp, Homo sapiens
cacacctctagtttc

SEQ ID NO: 457435 - DNA, 15 bp, Homo sapiens
gcacacctctagttt

SEQ ID NO: 457436 - DNA, 15 bp, Homo sapiens
tgcacacctctagtt

SEQ ID NO: 457437 - DNA, 15 bp, Homo sapiens
gtgcacacctctagt

SEQ ID NO: 457438 - DNA, 15 bp, Homo sapiens
ggtgcacacctctag

SEQ ID NO: 457439 - DNA, 15 bp, Homo sapiens
tggtgcacacctcta

SEQ ID NO: 457440 - DNA, 15 bp, Homo sapiens
gtggtgcacacctct

SEQ ID NO: 457441 - DNA, 15 bp, Homo sapiens
ggtggtgcacacctc

SEQ ID NO: 457442 - DNA, 15 bp, Homo sapiens
tggtggtgcacacct

SEQ ID NO: 457443 - DNA, 15 bp, Homo sapiens
atggtggtgcacacc

SEQ ID NO: 457444 - DNA, 15 bp, Homo sapiens
tatggtggtgcacac

SEQ ID NO: 457445 - DNA, 15 bp, Homo sapiens
gtatggtggtgcaca

SEQ ID NO: 457446 - DNA, 15 bp, Homo sapiens
agtatggtggtgcac

SEQ ID NO: 457447 - DNA, 15 bp, Homo sapiens
aagtatggtggtgca

SEQ ID NO: 457448 - DNA, 15 bp, Homo sapiens
caagtatggtggtgc

SEQ ID NO: 457449 - DNA, 15 bp, Homo sapiens
ccaagtatggtggtg

SEQ ID NO: 457450 - DNA, 15 bp, Homo sapiens
gccaagtatggtggt

SEQ ID NO: 457451 - DNA, 15 bp, Homo sapiens
agccaagtatggtgg

SEQ ID NO: 457452 - DNA, 15 bp, Homo sapiens
tagccaagtatggtg

SEQ ID NO: 457453 - DNA, 15 bp, Homo sapiens
ttagccaagtatggt

SEQ ID NO: 457454 - DNA, 15 bp, Homo sapiens
attagccaagtatgg

SEQ ID NO: 457455 - DNA, 15 bp, Homo sapiens
aattagccaagtatg

SEQ ID NO: 457456 - DNA, 15 bp, Homo sapiens
aaattagccaagtat

SEQ ID NO: 457457 - DNA, 15 bp, Homo sapiens
aaaattagccaagta

SEQ ID NO: 457458 - DNA, 15 bp, Homo sapiens
gaaaattagccaagt

SEQ ID NO: 457459 - DNA, 15 bp, Homo sapiens
cgaaaattagccaag

SEQ ID NO: 457460 - DNA, 15 bp, Homo sapiens
acgaaaattagccaa

SEQ ID NO: 457461 - DNA, 15 bp, Homo sapiens
aacgaaaattagcca

SEQ ID NO: 457462 - DNA, 15 bp, Homo sapiens
taacgaaaattagcc

SEQ ID NO: 457463 - DNA, 15 bp, Homo sapiens
ataacgaaaattagc

SEQ ID NO: 457464 - DNA, 15 bp, Homo sapiens
aataacgaaaattag

SEQ ID NO: 457465 - DNA, 15 bp, Homo sapiens
aaataacgaaaatta

SEQ ID NO: 457466 - DNA, 15 bp, Homo sapiens
aaaataacgaaaatt

SEQ ID NO: 457467 - DNA, 15 bp, Homo sapiens
aaaaataacgaaaat

SEQ ID NO: 457468 - DNA, 15 bp, Homo sapiens
taaaaataacgaaaa

SEQ ID NO: 457469 - DNA, 15 bp, Homo sapiens
ctaaaaataacgaaa

SEQ ID NO: 457470 - DNA, 15 bp, Homo sapiens
actaaaaataacgaa

SEQ ID NO: 457471 - DNA, 15 bp, Homo sapiens
tactaaaaataacga

SEQ ID NO: 457472 - DNA, 15 bp, Homo sapiens
ctactaaaaataacg

SEQ ID NO: 457473 - DNA, 15 bp, Homo sapiens
tctactaaaaataac

SEQ ID NO: 457474 - DNA, 15 bp, Homo sapiens
ctctactaaaaataa

SEQ ID NO: 457475 - DNA, 15 bp, Homo sapiens
tctctactaaaaata

SEQ ID NO: 457476 - DNA, 15 bp, Homo sapiens
gtctctactaaaaat

SEQ ID NO: 457477 - DNA, 15 bp, Homo sapiens
cgtctctactaaaaa

SEQ ID NO: 457478 - DNA, 15 bp, Homo sapiens
ccgtctctactaaaa

SEQ ID NO: 457479 - DNA, 15 bp, Homo sapiens
tccgtctctactaaa

SEQ ID NO: 457480 - DNA, 15 bp, Homo sapiens
ttccgtctctactaa

SEQ ID NO: 457481 - DNA, 15 bp, Homo sapiens
attccgtctctacta

SEQ ID NO: 457482 - DNA, 15 bp, Homo sapiens
aattccgtctctact

SEQ ID NO: 457483 - DNA, 15 bp, Homo sapiens
aaattccgtctctac

SEQ ID NO: 457484 - DNA, 15 bp, Homo sapiens
gaaattccgtctcta

SEQ ID NO: 457485 - DNA, 15 bp, Homo sapiens
tgaaattccgtctct

SEQ ID NO: 457486 - DNA, 15 bp, Homo sapiens
gtgaaattccgtctc

SEQ ID NO: 457487 - DNA, 15 bp, Homo sapiens
ggtgaaattccgtct

SEQ ID NO: 457488 - DNA, 15 bp, Homo sapiens
tggtgaaattccgtc

SEQ ID NO: 457489 - DNA, 15 bp, Homo sapiens
gtggtgaaattccgt

SEQ ID NO: 457490 - DNA, 15 bp, Homo sapiens
cgtggtgaaattccg

SEQ ID NO: 457491 - DNA, 15 bp, Homo sapiens
acgtggtgaaattcc

SEQ ID NO: 457492 - DNA, 15 bp, Homo sapiens
aacgtggtgaaattc

SEQ ID NO: 457493 - DNA, 15 bp, Homo sapiens
caacgtggtgaaatt

SEQ ID NO: 457494 - DNA, 15 bp, Homo sapiens
gcctggccaacgtgg

SEQ ID NO: 457495 - DNA, 15 bp, Homo sapiens
agcctggccaacgtg

SEQ ID NO: 457496 - DNA, 15 bp, Homo sapiens
cagcctggccaacgt

SEQ ID NO: 457497 - DNA, 15 bp, Homo sapiens
ccagcctggccaacg

SEQ ID NO: 457498 - DNA, 15 bp, Homo sapiens
cagaccagcctggcc

SEQ ID NO: 457499 - DNA, 15 bp, Homo sapiens
ccagaccagcctggc

SEQ ID NO: 457500 - DNA, 15 bp, Homo sapiens
tccagaccagcctgg

SEQ ID NO: 457501 - DNA, 15 bp, Homo sapiens
ctccagaccagcctg

SEQ ID NO: 457502 - DNA, 15 bp, Homo sapiens
gctccagaccagcct

SEQ ID NO: 457503 - DNA, 15 bp, Homo sapiens
agctccagaccagcc

SEQ ID NO: 457504 - DNA, 15 bp, Homo sapiens
gagctccagaccagc

SEQ ID NO: 457505 - DNA, 15 bp, Homo sapiens
ggagctccagaccag

SEQ ID NO: 457506 - DNA, 15 bp, Homo sapiens
aggagctccagacca

SEQ ID NO: 457507 - DNA, 15 bp, Homo sapiens
caggagctccagacc

SEQ ID NO: 457508 - DNA, 15 bp, Homo sapiens
ccaggagctccagac

SEQ ID NO: 457509 - DNA, 15 bp, Homo sapiens
accaggagctccaga

SEQ ID NO: 457510 - DNA, 15 bp, Homo sapiens
gaccaggagctccag

SEQ ID NO: 457511 - DNA, 15 bp, Homo sapiens
agaccaggagctcca

SEQ ID NO: 457512 - DNA, 15 bp, Homo sapiens
aagaccaggagctcc

SEQ ID NO: 457513 - DNA, 15 bp, Homo sapiens
taagaccaggagctc

SEQ ID NO: 457514 - DNA, 15 bp, Homo sapiens
ataagaccaggagct

SEQ ID NO: 457515 - DNA, 15 bp, Homo sapiens
cataagaccaggagc

SEQ ID NO: 457516 - DNA, 15 bp, Homo sapiens
acataagaccaggag

SEQ ID NO: 457517 - DNA, 15 bp, Homo sapiens
cacataagaccagga

SEQ ID NO: 457518 - DNA, 15 bp, Homo sapiens
tcacataagaccagg

SEQ ID NO: 457519 - DNA, 15 bp, Homo sapiens
atcacataagaccag

SEQ ID NO: 457520 - DNA, 15 bp, Homo sapiens
gatcacataagacca

SEQ ID NO: 457521 - DNA, 15 bp, Homo sapiens
ggatcacataagacc

SEQ ID NO: 457522 - DNA, 15 bp, Homo sapiens
cggatcacataagac

SEQ ID NO: 457523 - DNA, 15 bp, Homo sapiens
gcggatcacataaga

SEQ ID NO: 457524 - DNA, 15 bp, Homo sapiens
ggcggatcacataag

SEQ ID NO: 457525 - DNA, 15 bp, Homo sapiens
gggcggatcacataa

SEQ ID NO: 457526 - DNA, 15 bp, Homo sapiens
cgggcggatcacata

SEQ ID NO: 457527 - DNA, 15 bp, Homo sapiens
gcgggcggatcacat

SEQ ID NO: 457528 - DNA, 15 bp, Homo sapiens
ggcgggcggatcaca

SEQ ID NO: 457529 - DNA, 15 bp, Homo sapiens
aggcgggcggatcac

SEQ ID NO: 457530 - DNA, 15 bp, Homo sapiens
tgaggcgggcggatc

SEQ ID NO: 457531 - DNA, 15 bp, Homo sapiens
ctgaggcgggcggat

SEQ ID NO: 457532 - DNA, 15 bp, Homo sapiens
gctgaggcgggcgga

SEQ ID NO: 457533 - DNA, 15 bp, Homo sapiens
ggctgaggcgggcgg

SEQ ID NO: 457534 - DNA, 15 bp, Homo sapiens
aggctgaggcgggcg

SEQ ID NO: 457535 - DNA, 15 bp, Homo sapiens
ccactttgggaggct

SEQ ID NO: 457536 - DNA, 15 bp, Homo sapiens
cccactttgggaggc

SEQ ID NO: 457537 - DNA, 15 bp, Homo sapiens
ccccactttgggagg

SEQ ID NO: 457538 - DNA, 15 bp, Homo sapiens
tccccactttgggag

SEQ ID NO: 457539 - DNA, 15 bp, Homo sapiens
atccccactttggga

SEQ ID NO: 457540 - DNA, 15 bp, Homo sapiens
aatccccactttggg

SEQ ID NO: 457541 - DNA, 15 bp, Homo sapiens
taatccccactttgg

SEQ ID NO: 457542 - DNA, 15 bp, Homo sapiens
gtaatccccactttg

SEQ ID NO: 457543 - DNA, 15 bp, Homo sapiens
tgtaatccccacttt

SEQ ID NO: 457544 - DNA, 15 bp, Homo sapiens
ctgtaatccccactt

SEQ ID NO: 457545 - DNA, 15 bp, Homo sapiens
cctgtaatccccact

SEQ ID NO: 457546 - DNA, 15 bp, Homo sapiens
gcctgtaatccccac

SEQ ID NO: 457547 - DNA, 15 bp, Homo sapiens
ggcctgtaatcccca

SEQ ID NO: 457548 - DNA, 15 bp, Homo sapiens
aggcctgtaatcccc

SEQ ID NO: 457549 - DNA, 15 bp, Homo sapiens
caggcctgtaatccc

SEQ ID NO: 457550 - DNA, 15 bp, Homo sapiens
tcaggcctgtaatcc

SEQ ID NO: 457551 - DNA, 15 bp, Homo sapiens
ctcaggcctgtaatc

SEQ ID NO: 457552 - DNA, 15 bp, Homo sapiens
gctcaggcctgtaat

SEQ ID NO: 457553 - DNA, 15 bp, Homo sapiens
ggctcaggcctgtaa

SEQ ID NO: 457554 - DNA, 15 bp, Homo sapiens
tggctcaggcctgta

SEQ ID NO: 457555 - DNA, 15 bp, Homo sapiens
gtggctcaggcctgt

SEQ ID NO: 457556 - DNA, 15 bp, Homo sapiens
ggtggctcaggcctg

SEQ ID NO: 457557 - DNA, 15 bp, Homo sapiens
cggtggctcaggcct

SEQ ID NO: 457558 - DNA, 15 bp, Homo sapiens
gcggtggctcaggcc

SEQ ID NO: 457559 - DNA, 15 bp, Homo sapiens
cgcggtggctcaggc

SEQ ID NO: 457560 - DNA, 15 bp, Homo sapiens
gcgcggtggctcagg

SEQ ID NO: 457561 - DNA, 15 bp, Homo sapiens
ggcgcggtggctcag

SEQ ID NO: 457562 - DNA, 15 bp, Homo sapiens
gggcgcggtggctca

SEQ ID NO: 457563 - DNA, 15 bp, Homo sapiens
cgggcgcggtggctc

SEQ ID NO: 457564 - DNA, 15 bp, Homo sapiens
ccgggcgcggtggct

SEQ ID NO: 457565 - DNA, 15 bp, Homo sapiens
gccgggcgcggtggc

SEQ ID NO: 457566 - DNA, 15 bp, Homo sapiens
ggccgggcgcggtgg

SEQ ID NO: 457567 - DNA, 15 bp, Homo sapiens
tggccgggcgcggtg

SEQ ID NO: 457568 - DNA, 15 bp, Homo sapiens
gtggccgggcgcggt

SEQ ID NO: 457569 - DNA, 15 bp, Homo sapiens
agtggccgggcgcgg

SEQ ID NO: 457570 - DNA, 15 bp, Homo sapiens
gagtggccgggcgcg

SEQ ID NO: 457571 - DNA, 15 bp, Homo sapiens
ggagtggccgggcgc

SEQ ID NO: 457572 - DNA, 15 bp, Homo sapiens
gggagtggccgggcg

SEQ ID NO: 457573 - DNA, 15 bp, Homo sapiens
tgggagtggccgggc

SEQ ID NO: 457574 - DNA, 15 bp, Homo sapiens
ctgggagtggccggg

SEQ ID NO: 457575 - DNA, 15 bp, Homo sapiens
actgggagtggccgg

SEQ ID NO: 457576 - DNA, 15 bp, Homo sapiens
gactgggagtggccg

SEQ ID NO: 457577 - DNA, 15 bp, Homo sapiens
agactgggagtggcc

SEQ ID NO: 457578 - DNA, 15 bp, Homo sapiens
gagactgggagtggc

SEQ ID NO: 457579 - DNA, 15 bp, Homo sapiens
ggagactgggagtgg

SEQ ID NO: 457580 - DNA, 15 bp, Homo sapiens
aggagactgggagtg

SEQ ID NO: 457581 - DNA, 15 bp, Homo sapiens
aaggagactgggagt

SEQ ID NO: 457582 - DNA, 15 bp, Homo sapiens
aaaggagactgggag

SEQ ID NO: 457583 - DNA, 15 bp, Homo sapiens
taaaggagactggga

SEQ ID NO: 457584 - DNA, 15 bp, Homo sapiens
ttaaaggagactggg

SEQ ID NO: 457585 - DNA, 15 bp, Homo sapiens
cttaaaggagactgg

SEQ ID NO: 457586 - DNA, 15 bp, Homo sapiens
ccttaaaggagactg

SEQ ID NO: 457587 - DNA, 15 bp, Homo sapiens
cccttaaaggagact

SEQ ID NO: 457588 - DNA, 15 bp, Homo sapiens
acccttaaaggagac

SEQ ID NO: 457589 - DNA, 15 bp, Homo sapiens
cacccttaaaggaga

SEQ ID NO: 457590 - DNA, 15 bp, Homo sapiens
gcacccttaaaggag

SEQ ID NO: 457591 - DNA, 15 bp, Homo sapiens
cgcacccttaaagga

SEQ ID NO: 457592 - DNA, 15 bp, Homo sapiens
ccgcacccttaaagg

SEQ ID NO: 457593 - DNA, 15 bp, Homo sapiens
tccgcacccttaaag

SEQ ID NO: 457594 - DNA, 15 bp, Homo sapiens
ctccgcacccttaaa

SEQ ID NO: 457595 - DNA, 15 bp, Homo sapiens
gctccgcacccttaa

SEQ ID NO: 457596 - DNA, 15 bp, Homo sapiens
ggctccgcaccctta

SEQ ID NO: 457597 - DNA, 15 bp, Homo sapiens
aggctccgcaccctt

SEQ ID NO: 457598 - DNA, 15 bp, Homo sapiens
aaggctccgcaccct

SEQ ID NO: 457599 - DNA, 15 bp, Homo sapiens
caaggctccgcaccc

SEQ ID NO: 457600 - DNA, 15 bp, Homo sapiens
acaaggctccgcacc

SEQ ID NO: 457601 - DNA, 15 bp, Homo sapiens
gacaaggctccgcac

SEQ ID NO: 457602 - DNA, 15 bp, Homo sapiens
agacaaggctccgca

SEQ ID NO: 457603 - DNA, 15 bp, Homo sapiens
gagacaaggctccgc

SEQ ID NO: 457604 - DNA, 15 bp, Homo sapiens
ggagacaaggctccg

SEQ ID NO: 457605 - DNA, 15 bp, Homo sapiens
gggagacaaggctcc

SEQ ID NO: 457606 - DNA, 15 bp, Homo sapiens
cgggagacaaggctc

SEQ ID NO: 457607 - DNA, 15 bp, Homo sapiens
ccgggagacaaggct

SEQ ID NO: 457608 - DNA, 15 bp, Homo sapiens
gccgggagacaaggc

SEQ ID NO: 457609 - DNA, 15 bp, Homo sapiens
ggccgggagacaagg

SEQ ID NO: 457610 - DNA, 15 bp, Homo sapiens
gggccgggagacaag

SEQ ID NO: 457611 - DNA, 15 bp, Homo sapiens
ggggccgggagacaa

SEQ ID NO: 457612 - DNA, 15 bp, Homo sapiens
aggggccgggagaca

SEQ ID NO: 457613 - DNA, 15 bp, Homo sapiens
caggggccgggagac

SEQ ID NO: 457614 - DNA, 15 bp, Homo sapiens
ccaggggccgggaga

SEQ ID NO: 457615 - DNA, 15 bp, Homo sapiens
accaggggccgggag

SEQ ID NO: 457616 - DNA, 15 bp, Homo sapiens
caccaggggccggga

SEQ ID NO: 457617 - DNA, 15 bp, Homo sapiens
acaccaggggccggg

SEQ ID NO: 457618 - DNA, 15 bp, Homo sapiens
gacaccaggggccgg

SEQ ID NO: 457619 - DNA, 15 bp, Homo sapiens
ggacaccaggggccg

SEQ ID NO: 457620 - DNA, 15 bp, Homo sapiens
gggacaccaggggcc

SEQ ID NO: 457621 - DNA, 15 bp, Homo sapiens
ggggacaccaggggc

SEQ ID NO: 457622 - DNA, 15 bp, Homo sapiens
aggggacaccagggg

SEQ ID NO: 457623 - DNA, 15 bp, Homo sapiens
caggggacaccaggg

SEQ ID NO: 457624 - DNA, 15 bp, Homo sapiens
tcaggggacaccagg

SEQ ID NO: 457625 - DNA, 15 bp, Homo sapiens
gtcaggggacaccag

SEQ ID NO: 457626 - DNA, 15 bp, Homo sapiens
cgtcaggggacacca

SEQ ID NO: 457627 - DNA, 15 bp, Homo sapiens
gcgtcaggggacacc

SEQ ID NO: 457628 - DNA, 15 bp, Homo sapiens
ggcgtcaggggacac

SEQ ID NO: 457629 - DNA, 15 bp, Homo sapiens
gggcgtcaggggaca

SEQ ID NO: 457630 - DNA, 15 bp, Homo sapiens
ggggcgtcaggggac

SEQ ID NO: 457631 - DNA, 15 bp, Homo sapiens
cggggcgtcagggga

SEQ ID NO: 457632 - DNA, 15 bp, Homo sapiens
acggggcgtcagggg

SEQ ID NO: 457633 - DNA, 15 bp, Homo sapiens
gacggggcgtcaggg

SEQ ID NO: 457634 - DNA, 15 bp, Homo sapiens
ggacggggcgtcagg

SEQ ID NO: 457635 - DNA, 15 bp, Homo sapiens
gggacggggcgtcag

SEQ ID NO: 457636 - DNA, 15 bp, Homo sapiens
agggacggggcgtca

SEQ ID NO: 457637 - DNA, 15 bp, Homo sapiens
gagggacggggcgtc

SEQ ID NO: 457638 - DNA, 15 bp, Homo sapiens
ggagggacggggcgt

SEQ ID NO: 457639 - DNA, 15 bp, Homo sapiens
tggagggacggggcg

SEQ ID NO: 457640 - DNA, 15 bp, Homo sapiens
atggagggacggggc

SEQ ID NO: 457641 - DNA, 15 bp, Homo sapiens
catggagggacgggg

SEQ ID NO: 457642 - DNA, 15 bp, Homo sapiens
gcatggagggacggg

SEQ ID NO: 457643 - DNA, 15 bp, Homo sapiens
tgcatggagggacgg

SEQ ID NO: 457644 - DNA, 15 bp, Homo sapiens
gtgcatggagggacg

SEQ ID NO: 457645 - DNA, 15 bp, Homo sapiens
tgtgcatggagggac

SEQ ID NO: 457646 - DNA, 15 bp, Homo sapiens
gtgtgcatggaggga

SEQ ID NO: 457647 - DNA, 15 bp, Homo sapiens
tgtgtgcatggaggg

SEQ ID NO: 457648 - DNA, 15 bp, Homo sapiens
ctgtgtgcatggagg

SEQ ID NO: 457649 - DNA, 15 bp, Homo sapiens
cctgtgtgcatggag

SEQ ID NO: 457650 - DNA, 15 bp, Homo sapiens
acctgtgtgcatgga

SEQ ID NO: 457651 - DNA, 15 bp, Homo sapiens
gacctgtgtgcatgg

SEQ ID NO: 457652 - DNA, 15 bp, Homo sapiens
agacctgtgtgcatg

SEQ ID NO: 457653 - DNA, 15 bp, Homo sapiens
tagacctgtgtgcat

SEQ ID NO: 457654 - DNA, 15 bp, Homo sapiens
atagacctgtgtgca

SEQ ID NO: 457655 - DNA, 15 bp, Homo sapiens
gatagacctgtgtgc

SEQ ID NO: 457656 - DNA, 15 bp, Homo sapiens
agatagacctgtgtg

SEQ ID NO: 457657 - DNA, 15 bp, Homo sapiens
cagatagacctgtgt

SEQ ID NO: 457658 - DNA, 15 bp, Homo sapiens
acagatagacctgtg

SEQ ID NO: 457659 - DNA, 15 bp, Homo sapiens
aacagatagacctgt

SEQ ID NO: 457660 - DNA, 15 bp, Homo sapiens
gaacagatagacctg

SEQ ID NO: 457661 - DNA, 15 bp, Homo sapiens
cgaacagatagacct

SEQ ID NO: 457662 - DNA, 15 bp, Homo sapiens
tcgaacagatagacc

SEQ ID NO: 457663 - DNA, 15 bp, Homo sapiens
ctcgaacagatagac

SEQ ID NO: 457664 - DNA, 15 bp, Homo sapiens
gctcgaacagataga

SEQ ID NO: 457665 - DNA, 15 bp, Homo sapiens
agctcgaacagatag

SEQ ID NO: 457666 - DNA, 15 bp, Homo sapiens
cagctcgaacagata

SEQ ID NO: 457667 - DNA, 15 bp, Homo sapiens
gcagctcgaacagat

SEQ ID NO: 457668 - DNA, 15 bp, Homo sapiens
tgcagctcgaacaga

SEQ ID NO: 457669 - DNA, 15 bp, Homo sapiens
gtgcagctcgaacag

SEQ ID NO: 457670 - DNA, 15 bp, Homo sapiens
tgtgcagctcgaaca

SEQ ID NO: 457671 - DNA, 15 bp, Homo sapiens
atgtgcagctcgaac

SEQ ID NO: 457672 - DNA, 15 bp, Homo sapiens
gatgtgcagctcgaa

SEQ ID NO: 457673 - DNA, 15 bp, Homo sapiens
tgatgtgcagctcga

SEQ ID NO: 457674 - DNA, 15 bp, Homo sapiens
gtgatgtgcagctcg

SEQ ID NO: 457675 - DNA, 15 bp, Homo sapiens
ggtgatgtgcagctc

SEQ ID NO: 457676 - DNA, 15 bp, Homo sapiens
cggtgatgtgcagct

SEQ ID NO: 457677 - DNA, 15 bp, Homo sapiens
tcggtgatgtgcagc

SEQ ID NO: 457678 - DNA, 15 bp, Homo sapiens
atcggtgatgtgcag

SEQ ID NO: 457679 - DNA, 15 bp, Homo sapiens
catcggtgatgtgca

SEQ ID NO: 457680 - DNA, 15 bp, Homo sapiens
gcatcggtgatgtgc

SEQ ID NO: 457681 - DNA, 15 bp, Homo sapiens
ggcatcggtgatgtg

SEQ ID NO: 457682 - DNA, 15 bp, Homo sapiens
gggcatcggtgatgt

SEQ ID NO: 457683 - DNA, 15 bp, Homo sapiens
tgggcatcggtgatg

SEQ ID NO: 457684 - DNA, 15 bp, Homo sapiens
ctgggcatcggtgat

SEQ ID NO: 457685 - DNA, 15 bp, Homo sapiens
gctgggcatcggtga

SEQ ID NO: 457686 - DNA, 15 bp, Homo sapiens
ggctgggcatcggtg

SEQ ID NO: 457687 - DNA, 15 bp, Homo sapiens
aggctgggcatcggt

SEQ ID NO: 457688 - DNA, 15 bp, Homo sapiens
caggctgggcatcgg

SEQ ID NO: 457689 - DNA, 15 bp, Homo sapiens
gcaggctgggcatcg

SEQ ID NO: 457690 - DNA, 15 bp, Homo sapiens
ggcaggctgggcatc

SEQ ID NO: 457691 - DNA, 15 bp, Homo sapiens
aggcaggctgggcat

SEQ ID NO: 457692 - DNA, 15 bp, Homo sapiens
aaggcaggctgggca

SEQ ID NO: 457693 - DNA, 15 bp, Homo sapiens
gaaggcaggctgggc

SEQ ID NO: 457694 - DNA, 15 bp, Homo sapiens
tgaaggcaggctggg

SEQ ID NO: 457695 - DNA, 15 bp, Homo sapiens
gtgaaggcaggctgg

SEQ ID NO: 457696 - DNA, 15 bp, Homo sapiens
agtgaaggcaggctg

SEQ ID NO: 457697 - DNA, 15 bp, Homo sapiens
cagtgaaggcaggct

SEQ ID NO: 457698 - DNA, 15 bp, Homo sapiens
ccagtgaaggcaggc

SEQ ID NO: 457699 - DNA, 15 bp, Homo sapiens
gccagtgaaggcagg

SEQ ID NO: 457700 - DNA, 15 bp, Homo sapiens
tgccagtgaaggcag

SEQ ID NO: 457701 - DNA, 15 bp, Homo sapiens
ctgccagtgaaggca

SEQ ID NO: 457702 - DNA, 15 bp, Homo sapiens
gctgccagtgaaggc

SEQ ID NO: 457703 - DNA, 15 bp, Homo sapiens
agctgccagtgaagg

SEQ ID NO: 457704 - DNA, 15 bp, Homo sapiens
tagctgccagtgaag

SEQ ID NO: 457705 - DNA, 15 bp, Homo sapiens
gtagctgccagtgaa

SEQ ID NO: 457706 - DNA, 15 bp, Homo sapiens
ggtagctgccagtga

SEQ ID NO: 457707 - DNA, 15 bp, Homo sapiens
cggtagctgccagtg

SEQ ID NO: 457708 - DNA, 15 bp, Homo sapiens
gcggtagctgccagt

SEQ ID NO: 457709 - DNA, 15 bp, Homo sapiens
agcggtagctgccag

SEQ ID NO: 457710 - DNA, 15 bp, Homo sapiens
cagcggtagctgcca

SEQ ID NO: 457711 - DNA, 15 bp, Homo sapiens
acagcggtagctgcc

SEQ ID NO: 457712 - DNA, 15 bp, Homo sapiens
cacagcggtagctgc

SEQ ID NO: 457713 - DNA, 15 bp, Homo sapiens
tcacagcggtagctg

SEQ ID NO: 457714 - DNA, 15 bp, Homo sapiens
ctcacagcggtagct

SEQ ID NO: 457715 - DNA, 15 bp, Homo sapiens
cctcacagcggtagc

SEQ ID NO: 457716 - DNA, 15 bp, Homo sapiens
acctcacagcggtag

SEQ ID NO: 457717 - DNA, 15 bp, Homo sapiens
cacctcacagcggta

SEQ ID NO: 457718 - DNA, 15 bp, Homo sapiens
acacctcacagcggt

SEQ ID NO: 457719 - DNA, 15 bp, Homo sapiens
gacacctcacagcgg

SEQ ID NO: 457720 - DNA, 15 bp, Homo sapiens
ggacacctcacagcg

SEQ ID NO: 457721 - DNA, 15 bp, Homo sapiens
tggacacctcacagc

SEQ ID NO: 457722 - DNA, 15 bp, Homo sapiens
gtggacacctcacag

SEQ ID NO: 457723 - DNA, 15 bp, Homo sapiens
ggtggacacctcaca

SEQ ID NO: 457724 - DNA, 15 bp, Homo sapiens
tggtggacacctcac

SEQ ID NO: 457725 - DNA, 15 bp, Homo sapiens
ttggtggacacctca

SEQ ID NO: 457726 - DNA, 15 bp, Homo sapiens
cttggtggacacctc

SEQ ID NO: 457727 - DNA, 15 bp, Homo sapiens
ccttggtggacacct

SEQ ID NO: 457728 - DNA, 15 bp, Homo sapiens
tccttggtggacacc

SEQ ID NO: 457729 - DNA, 15 bp, Homo sapiens
gtccttggtggacac

SEQ ID NO: 457730 - DNA, 15 bp, Homo sapiens
tgtccttggtggaca

SEQ ID NO: 457731 - DNA, 15 bp, Homo sapiens
ttgtccttggtggac

SEQ ID NO: 457732 - DNA, 15 bp, Homo sapiens
tttgtccttggtgga

SEQ ID NO: 457733 - DNA, 15 bp, Homo sapiens
atttgtccttggtgg

SEQ ID NO: 457734 - DNA, 15 bp, Homo sapiens
aatttgtccttggtg

SEQ ID NO: 457735 - DNA, 15 bp, Homo sapiens
aaatttgtccttggt

SEQ ID NO: 457736 - DNA, 15 bp, Homo sapiens
caaatttgtccttgg

SEQ ID NO: 457737 - DNA, 15 bp, Homo sapiens
tcaaatttgtccttg

SEQ ID NO: 457738 - DNA, 15 bp, Homo sapiens
gtcaaatttgtcctt

SEQ ID NO: 457739 - DNA, 15 bp, Homo sapiens
agtcaaatttgtcct

SEQ ID NO: 457740 - DNA, 15 bp, Homo sapiens
cagtcaaatttgtcc

SEQ ID NO: 457741 - DNA, 15 bp, Homo sapiens
gcagtcaaatttgtc

SEQ ID NO: 457742 - DNA, 15 bp, Homo sapiens
agcagtcaaatttgt

SEQ ID NO: 457743 - DNA, 15 bp, Homo sapiens
gagcagtcaaatttg

SEQ ID NO: 457744 - DNA, 15 bp, Homo sapiens
ggagcagtcaaattt

SEQ ID NO: 457745 - DNA, 15 bp, Homo sapiens
tggagcagtcaaatt

SEQ ID NO: 457746 - DNA, 15 bp, Homo sapiens
ttggagcagtcaaat

SEQ ID NO: 457747 - DNA, 15 bp, Homo sapiens
gttggagcagtcaaa

SEQ ID NO: 457748 - DNA, 15 bp, Homo sapiens
agttggagcagtcaa

SEQ ID NO: 457749 - DNA, 15 bp, Homo sapiens
aagttggagcagtca

SEQ ID NO: 457750 - DNA, 15 bp, Homo sapiens
gaagttggagcagtc

SEQ ID NO: 457751 - DNA, 15 bp, Homo sapiens
tgaagttggagcagt

SEQ ID NO: 457752 - DNA, 15 bp, Homo sapiens
ttgaagttggagcag

SEQ ID NO: 457753 - DNA, 15 bp, Homo sapiens
attgaagttggagca

SEQ ID NO: 457754 - DNA, 15 bp, Homo sapiens
gattgaagttggagc

SEQ ID NO: 457755 - DNA, 15 bp, Homo sapiens
agattgaagttggag

SEQ ID NO: 457756 - DNA, 15 bp, Homo sapiens
gagattgaagttgga

SEQ ID NO: 457757 - DNA, 15 bp, Homo sapiens
tgagattgaagttgg

SEQ ID NO: 457758 - DNA, 15 bp, Homo sapiens
gtgagattgaagttg

SEQ ID NO: 457759 - DNA, 15 bp, Homo sapiens
agtgagattgaagtt

SEQ ID NO: 457760 - DNA, 15 bp, Homo sapiens
cagtgagattgaagt

SEQ ID NO: 457761 - DNA, 15 bp, Homo sapiens
acagtgagattgaag

SEQ ID NO: 457762 - DNA, 15 bp, Homo sapiens
gacagtgagattgaa

SEQ ID NO: 457763 - DNA, 15 bp, Homo sapiens
ggacagtgagattga

SEQ ID NO: 457764 - DNA, 15 bp, Homo sapiens
tggacagtgagattg

SEQ ID NO: 457765 - DNA, 15 bp, Homo sapiens
gtggacagtgagatt

SEQ ID NO: 457766 - DNA, 15 bp, Homo sapiens
cgtggacagtgagat

SEQ ID NO: 457767 - DNA, 15 bp, Homo sapiens
ccgtggacagtgaga

SEQ ID NO: 457768 - DNA, 15 bp, Homo sapiens
accgtggacagtgag

SEQ ID NO: 457769 - DNA, 15 bp, Homo sapiens
caccgtggacagtga

SEQ ID NO: 457770 - DNA, 15 bp, Homo sapiens
tcaccgtggacagtg

SEQ ID NO: 457771 - DNA, 15 bp, Homo sapiens
ctcaccgtggacagt

SEQ ID NO: 457772 - DNA, 15 bp, Homo sapiens
cctcaccgtggacag

SEQ ID NO: 457773 - DNA, 15 bp, Homo sapiens
ccctcaccgtggaca

SEQ ID NO: 457774 - DNA, 15 bp, Homo sapiens
cccctcaccgtggac

SEQ ID NO: 457775 - DNA, 15 bp, Homo sapiens
ccccctcaccgtgga

SEQ ID NO: 457776 - DNA, 15 bp, Homo sapiens
gccccctcaccgtgg

SEQ ID NO: 457777 - DNA, 15 bp, Homo sapiens
ggccccctcaccgtg

SEQ ID NO: 457778 - DNA, 15 bp, Homo sapiens
gggccccctcaccgt

SEQ ID NO: 457779 - DNA, 15 bp, Homo sapiens
agggccccctcaccg

SEQ ID NO: 457780 - DNA, 15 bp, Homo sapiens
cagggccccctcacc

SEQ ID NO: 457781 - DNA, 15 bp, Homo sapiens
ccagggccccctcac

SEQ ID NO: 457782 - DNA, 15 bp, Homo sapiens
accagggccccctca

SEQ ID NO: 457783 - DNA, 15 bp, Homo sapiens
caccagggccccctc

SEQ ID NO: 457784 - DNA, 15 bp, Homo sapiens
acaccagggccccct

SEQ ID NO: 457785 - DNA, 15 bp, Homo sapiens
gacaccagggccccc

SEQ ID NO: 457786 - DNA, 15 bp, Homo sapiens
agacaccagggcccc

SEQ ID NO: 457787 - DNA, 15 bp, Homo sapiens
cagacaccagggccc

SEQ ID NO: 457788 - DNA, 15 bp, Homo sapiens
acagacaccagggcc

SEQ ID NO: 457789 - DNA, 15 bp, Homo sapiens
gacagacaccagggc

SEQ ID NO: 457790 - DNA, 15 bp, Homo sapiens
ggacagacaccaggg

SEQ ID NO: 457791 - DNA, 15 bp, Homo sapiens
aggacagacaccagg

SEQ ID NO: 457792 - DNA, 15 bp, Homo sapiens
caggacagacaccag

SEQ ID NO: 457793 - DNA, 15 bp, Homo sapiens
ccaggacagacacca

SEQ ID NO: 457794 - DNA, 15 bp, Homo sapiens
cccaggacagacacc

SEQ ID NO: 457795 - DNA, 15 bp, Homo sapiens
gcccaggacagacac

SEQ ID NO: 457796 - DNA, 15 bp, Homo sapiens
agcccaggacagaca

SEQ ID NO: 457797 - DNA, 15 bp, Homo sapiens
gagcccaggacagac

SEQ ID NO: 457798 - DNA, 15 bp, Homo sapiens
cgagcccaggacaga

SEQ ID NO: 457799 - DNA, 15 bp, Homo sapiens
ccgagcccaggacag

SEQ ID NO: 457800 - DNA, 15 bp, Homo sapiens
cccgagcccaggaca

SEQ ID NO: 457801 - DNA, 15 bp, Homo sapiens
gcccgagcccaggac

SEQ ID NO: 457802 - DNA, 15 bp, Homo sapiens
agcccgagcccagga

SEQ ID NO: 457803 - DNA, 15 bp, Homo sapiens
gagcccgagcccagg

SEQ ID NO: 457804 - DNA, 15 bp, Homo sapiens
ggagcccgagcccag

SEQ ID NO: 457805 - DNA, 15 bp, Homo sapiens
gggagcccgagccca

SEQ ID NO: 457806 - DNA, 15 bp, Homo sapiens
ggggagcccgagccc

SEQ ID NO: 457807 - DNA, 15 bp, Homo sapiens
tggggagcccgagcc

SEQ ID NO: 457808 - DNA, 15 bp, Homo sapiens
atggggagcccgagc

SEQ ID NO: 457809 - DNA, 15 bp, Homo sapiens
catggggagcccgag

SEQ ID NO: 457810 - DNA, 15 bp, Homo sapiens
ccatggggagcccga

SEQ ID NO: 457811 - DNA, 15 bp, Homo sapiens
cccatggggagcccg

SEQ ID NO: 457812 - DNA, 15 bp, Homo sapiens
acccatggggagccc

SEQ ID NO: 457813 - DNA, 15 bp, Homo sapiens
gacccatggggagcc

SEQ ID NO: 457814 - DNA, 15 bp, Homo sapiens
ggacccatggggagc

SEQ ID NO: 457815 - DNA, 15 bp, Homo sapiens
aggacccatggggag

SEQ ID NO: 457816 - DNA, 15 bp, Homo sapiens
caggacccatgggga

SEQ ID NO: 457817 - DNA, 15 bp, Homo sapiens
ccaggacccatgggg

SEQ ID NO: 457818 - DNA, 15 bp, Homo sapiens
accaggacccatggg

SEQ ID NO: 457819 - DNA, 15 bp, Homo sapiens
gaccaggacccatgg

SEQ ID NO: 457820 - DNA, 15 bp, Homo sapiens
agaccaggacccatg

SEQ ID NO: 457821 - DNA, 15 bp, Homo sapiens
gagaccaggacccat

SEQ ID NO: 457822 - DNA, 15 bp, Homo sapiens
ggagaccaggaccca

SEQ ID NO: 457823 - DNA, 15 bp, Homo sapiens
aggagaccaggaccc

SEQ ID NO: 457824 - DNA, 15 bp, Homo sapiens
taggagaccaggacc

SEQ ID NO: 457825 - DNA, 15 bp, Homo sapiens
gtaggagaccaggac

SEQ ID NO: 457826 - DNA, 15 bp, Homo sapiens
ggtaggagaccagga

SEQ ID NO: 457827 - DNA, 15 bp, Homo sapiens
aggtaggagaccagg

SEQ ID NO: 457828 - DNA, 15 bp, Homo sapiens
gaggtaggagaccag

SEQ ID NO: 457829 - DNA, 15 bp, Homo sapiens
ggaggtaggagacca

SEQ ID NO: 457830 - DNA, 15 bp, Homo sapiens
aggaggtaggagacc

SEQ ID NO: 457831 - DNA, 15 bp, Homo sapiens
aaggaggtaggagac

SEQ ID NO: 457832 - DNA, 15 bp, Homo sapiens
aaaggaggtaggaga

SEQ ID NO: 457833 - DNA, 15 bp, Homo sapiens
aaaaggaggtaggag

SEQ ID NO: 457834 - DNA, 15 bp, Homo sapiens
gaaaaggaggtagga

SEQ ID NO: 457835 - DNA, 15 bp, Homo sapiens
ggaaaaggaggtagg

SEQ ID NO: 457836 - DNA, 15 bp, Homo sapiens
gggaaaaggaggtag

SEQ ID NO: 457837 - DNA, 15 bp, Homo sapiens
tgggaaaaggaggta

SEQ ID NO: 457838 - DNA, 15 bp, Homo sapiens
ttgggaaaaggaggt

SEQ ID NO: 457839 - DNA, 15 bp, Homo sapiens
gttgggaaaaggagg

SEQ ID NO: 457840 - DNA, 15 bp, Homo sapiens
tgttgggaaaaggag

SEQ ID NO: 457841 - DNA, 15 bp, Homo sapiens
gtgttgggaaaagga

SEQ ID NO: 457842 - DNA, 15 bp, Homo sapiens
agtgttgggaaaagg

SEQ ID NO: 457843 - DNA, 15 bp, Homo sapiens
tagtgttgggaaaag

SEQ ID NO: 457844 - DNA, 15 bp, Homo sapiens
ttagtgttgggaaaa

SEQ ID NO: 457845 - DNA, 15 bp, Homo sapiens
cttagtgttgggaaa

SEQ ID NO: 457846 - DNA, 15 bp, Homo sapiens
ccttagtgttgggaa

SEQ ID NO: 457847 - DNA, 15 bp, Homo sapiens
tccttagtgttggga

SEQ ID NO: 457848 - DNA, 15 bp, Homo sapiens
ctccttagtgttggg

SEQ ID NO: 457849 - DNA, 15 bp, Homo sapiens
cctccttagtgttgg

SEQ ID NO: 457850 - DNA, 15 bp, Homo sapiens
tcctccttagtgttg

SEQ ID NO: 457851 - DNA, 15 bp, Homo sapiens
atcctccttagtgtt

SEQ ID NO: 457852 - DNA, 15 bp, Homo sapiens
catcctccttagtgt

SEQ ID NO: 457853 - DNA, 15 bp, Homo sapiens
gcatcctccttagtg

SEQ ID NO: 457854 - DNA, 15 bp, Homo sapiens
ggcatcctccttagt

SEQ ID NO: 457855 - DNA, 15 bp, Homo sapiens
aggcatcctccttag

SEQ ID NO: 457856 - DNA, 15 bp, Homo sapiens
gaggcatcctcctta

SEQ ID NO: 457857 - DNA, 15 bp, Homo sapiens
cgaggcatcctcctt

SEQ ID NO: 457858 - DNA, 15 bp, Homo sapiens
acgaggcatcctcct

SEQ ID NO: 457859 - DNA, 15 bp, Homo sapiens
gacgaggcatcctcc

SEQ ID NO: 457860 - DNA, 15 bp, Homo sapiens
ggacgaggcatcctc

SEQ ID NO: 457861 - DNA, 15 bp, Homo sapiens
gggacgaggcatcct

SEQ ID NO: 457862 - DNA, 15 bp, Homo sapiens
tgggacgaggcatcc

SEQ ID NO: 457863 - DNA, 15 bp, Homo sapiens
atgggacgaggcatc

SEQ ID NO: 457864 - DNA, 15 bp, Homo sapiens
gatgggacgaggcat

SEQ ID NO: 457865 - DNA, 15 bp, Homo sapiens
ggatgggacgaggca

SEQ ID NO: 457866 - DNA, 15 bp, Homo sapiens
tggatgggacgaggc

SEQ ID NO: 457867 - DNA, 15 bp, Homo sapiens
ctggatgggacgagg

SEQ ID NO: 457868 - DNA, 15 bp, Homo sapiens
tctggatgggacgag

SEQ ID NO: 457869 - DNA, 15 bp, Homo sapiens
gtctggatgggacga

SEQ ID NO: 457870 - DNA, 15 bp, Homo sapiens
tgtctggatgggacg

SEQ ID NO: 457871 - DNA, 15 bp, Homo sapiens
atgtctggatgggac

SEQ ID NO: 457872 - DNA, 15 bp, Homo sapiens
catgtctggatggga

SEQ ID NO: 457873 - DNA, 15 bp, Homo sapiens
tcatgtctggatggg

SEQ ID NO: 457874 - DNA, 15 bp, Homo sapiens
ctcatgtctggatgg

SEQ ID NO: 457875 - DNA, 15 bp, Homo sapiens
actcatgtctggatg

SEQ ID NO: 457876 - DNA, 15 bp, Homo sapiens
cactcatgtctggat

SEQ ID NO: 457877 - DNA, 15 bp, Homo sapiens
gcactcatgtctgga

SEQ ID NO: 457878 - DNA, 15 bp, Homo sapiens
agcactcatgtctgg

SEQ ID NO: 457879 - DNA, 15 bp, Homo sapiens
cagcactcatgtctg

SEQ ID NO: 457880 - DNA, 15 bp, Homo sapiens
ccagcactcatgtct

SEQ ID NO: 457881 - DNA, 15 bp, Homo sapiens
gccagcactcatgtc

SEQ ID NO: 457882 - DNA, 15 bp, Homo sapiens
ggccagcactcatgt

SEQ ID NO: 457883 - DNA, 15 bp, Homo sapiens
tggccagcactcatg

SEQ ID NO: 457884 - DNA, 15 bp, Homo sapiens
gtggccagcactcat

SEQ ID NO: 457885 - DNA, 15 bp, Homo sapiens
cgtggccagcactca

SEQ ID NO: 457886 - DNA, 15 bp, Homo sapiens
acgtggccagcactc

SEQ ID NO: 457887 - DNA, 15 bp, Homo sapiens
cacgtggccagcact

SEQ ID NO: 457888 - DNA, 15 bp, Homo sapiens
gcacgtggccagcac

SEQ ID NO: 457889 - DNA, 15 bp, Homo sapiens
ggcacgtggccagca

SEQ ID NO: 457890 - DNA, 15 bp, Homo sapiens
gggcacgtggccagc

SEQ ID NO: 457891 - DNA, 15 bp, Homo sapiens
tgggcacgtggccag

SEQ ID NO: 457892 - DNA, 15 bp, Homo sapiens
ctgggcacgtggcca

SEQ ID NO: 457893 - DNA, 15 bp, Homo sapiens
actgggcacgtggcc

SEQ ID NO: 457894 - DNA, 15 bp, Homo sapiens
cactgggcacgtggc

SEQ ID NO: 457895 - DNA, 15 bp, Homo sapiens
gcactgggcacgtgg

SEQ ID NO: 457896 - DNA, 15 bp, Homo sapiens
agcactgggcacgtg

SEQ ID NO: 457897 - DNA, 15 bp, Homo sapiens
cagcactgggcacgt

SEQ ID NO: 457898 - DNA, 15 bp, Homo sapiens
gcagcactgggcacg

SEQ ID NO: 457899 - DNA, 15 bp, Homo sapiens
tgcagcactgggcac

SEQ ID NO: 457900 - DNA, 15 bp, Homo sapiens
gtgcagcactgggca

SEQ ID NO: 457901 - DNA, 15 bp, Homo sapiens
tgtgcagcactgggc

SEQ ID NO: 457902 - DNA, 15 bp, Homo sapiens
gtgtgcagcactggg

SEQ ID NO: 457903 - DNA, 15 bp, Homo sapiens
tgtgtgcagcactgg

SEQ ID NO: 457904 - DNA, 15 bp, Homo sapiens
gtgtgtgcagcactg

SEQ ID NO: 457905 - DNA, 15 bp, Homo sapiens
tgtgtgtgcagcact

SEQ ID NO: 457906 - DNA, 15 bp, Homo sapiens
ctgtgtgtgcagcac

SEQ ID NO: 457907 - DNA, 15 bp, Homo sapiens
cctgtgtgtgcagca

SEQ ID NO: 457908 - DNA, 15 bp, Homo sapiens
ccctgtgtgtgcagc

SEQ ID NO: 457909 - DNA, 15 bp, Homo sapiens
accctgtgtgtgcag

SEQ ID NO: 457910 - DNA, 15 bp, Homo sapiens
caccctgtgtgtgca

SEQ ID NO: 457911 - DNA, 15 bp, Homo sapiens
acaccctgtgtgtgc

SEQ ID NO: 457912 - DNA, 15 bp, Homo sapiens
cacaccctgtgtgtg

SEQ ID NO: 457913 - DNA, 15 bp, Homo sapiens
tcacaccctgtgtgt

SEQ ID NO: 457914 - DNA, 15 bp, Homo sapiens
ctcacaccctgtgtg

SEQ ID NO: 457915 - DNA, 15 bp, Homo sapiens
tctcacaccctgtgt

SEQ ID NO: 457916 - DNA, 15 bp, Homo sapiens
ctctcacaccctgtg

SEQ ID NO: 457917 - DNA, 15 bp, Homo sapiens
tctctcacaccctgt

SEQ ID NO: 457918 - DNA, 15 bp, Homo sapiens
ttctctcacaccctg

SEQ ID NO: 457919 - DNA, 15 bp, Homo sapiens
tttctctcacaccct

SEQ ID NO: 457920 - DNA, 15 bp, Homo sapiens
gtttctctcacaccc

SEQ ID NO: 457921 - DNA, 15 bp, Homo sapiens
ggtttctctcacacc

SEQ ID NO: 457922 - DNA, 15 bp, Homo sapiens
gggtttctctcacac

SEQ ID NO: 457923 - DNA, 15 bp, Homo sapiens
ggggtttctctcaca

SEQ ID NO: 457924 - DNA, 15 bp, Homo sapiens
tggggtttctctcac

SEQ ID NO: 457925 - DNA, 15 bp, Homo sapiens
ttggggtttctctca

SEQ ID NO: 457926 - DNA, 15 bp, Homo sapiens
cttggggtttctctc

SEQ ID NO: 457927 - DNA, 15 bp, Homo sapiens
ccttggggtttctct

SEQ ID NO: 457928 - DNA, 15 bp, Homo sapiens
gccttggggtttctc

SEQ ID NO: 457929 - DNA, 15 bp, Homo sapiens
agccttggggtttct

SEQ ID NO: 457930 - DNA, 15 bp, Homo sapiens
aagccttggggtttc

SEQ ID NO: 457931 - DNA, 15 bp, Homo sapiens
caagccttggggttt

SEQ ID NO: 457932 - DNA, 15 bp, Homo sapiens
gcaagccttggggtt

SEQ ID NO: 457933 - DNA, 15 bp, Homo sapiens
tgcaagccttggggt

SEQ ID NO: 457934 - DNA, 15 bp, Homo sapiens
ctgcaagccttgggg

SEQ ID NO: 457935 - DNA, 15 bp, Homo sapiens
cctgcaagccttggg

SEQ ID NO: 457936 - DNA, 15 bp, Homo sapiens
ccctgcaagccttgg

SEQ ID NO: 457937 - DNA, 15 bp, Homo sapiens
accctgcaagccttg

SEQ ID NO: 457938 - DNA, 15 bp, Homo sapiens
taccctgcaagcctt

SEQ ID NO: 457939 - DNA, 15 bp, Homo sapiens
ctaccctgcaagcct

SEQ ID NO: 457940 - DNA, 15 bp, Homo sapiens
cctaccctgcaagcc

SEQ ID NO: 457941 - DNA, 15 bp, Homo sapiens
gcctaccctgcaagc

SEQ ID NO: 457942 - DNA, 15 bp, Homo sapiens
cgcctaccctgcaag

SEQ ID NO: 457943 - DNA, 15 bp, Homo sapiens
acgcctaccctgcaa

SEQ ID NO: 457944 - DNA, 15 bp, Homo sapiens
cacgcctaccctgca

SEQ ID NO: 457945 - DNA, 15 bp, Homo sapiens
ccacgcctaccctgc

SEQ ID NO: 457946 - DNA, 15 bp, Homo sapiens
cccacgcctaccctg

SEQ ID NO: 457947 - DNA, 15 bp, Homo sapiens
ccccacgcctaccct

SEQ ID NO: 457948 - DNA, 15 bp, Homo sapiens
cccccacgcctaccc

SEQ ID NO: 457949 - DNA, 15 bp, Homo sapiens
gcccccacgcctacc

SEQ ID NO: 457950 - DNA, 15 bp, Homo sapiens
agcccccacgcctac

SEQ ID NO: 457951 - DNA, 15 bp, Homo sapiens
aagcccccacgccta

SEQ ID NO: 457952 - DNA, 15 bp, Homo sapiens
taagcccccacgcct

SEQ ID NO: 457953 - DNA, 15 bp, Homo sapiens
ctaagcccccacgcc

SEQ ID NO: 457954 - DNA, 15 bp, Homo sapiens
cctaagcccccacgc

SEQ ID NO: 457955 - DNA, 15 bp, Homo sapiens
ccctaagcccccacg

SEQ ID NO: 457956 - DNA, 15 bp, Homo sapiens
gccctaagcccccac

SEQ ID NO: 457957 - DNA, 15 bp, Homo sapiens
agccctaagccccca

SEQ ID NO: 457958 - DNA, 15 bp, Homo sapiens
cagccctaagccccc

SEQ ID NO: 457959 - DNA, 15 bp, Homo sapiens
tcagccctaagcccc

SEQ ID NO: 457960 - DNA, 15 bp, Homo sapiens
ctcagccctaagccc

SEQ ID NO: 457961 - DNA, 15 bp, Homo sapiens
actcagccctaagcc

SEQ ID NO: 457962 - DNA, 15 bp, Homo sapiens
gactcagccctaagc

SEQ ID NO: 457963 - DNA, 15 bp, Homo sapiens
ggactcagccctaag

SEQ ID NO: 457964 - DNA, 15 bp, Homo sapiens
cggactcagccctaa

SEQ ID NO: 457965 - DNA, 15 bp, Homo sapiens
ccggactcagcccta

SEQ ID NO: 457966 - DNA, 15 bp, Homo sapiens
cccggactcagccct

SEQ ID NO: 457967 - DNA, 15 bp, Homo sapiens
acccggactcagccc

SEQ ID NO: 457968 - DNA, 15 bp, Homo sapiens
gacccggactcagcc

SEQ ID NO: 457969 - DNA, 15 bp, Homo sapiens
agacccggactcagc

SEQ ID NO: 457970 - DNA, 15 bp, Homo sapiens
gagacccggactcag

SEQ ID NO: 457971 - DNA, 15 bp, Homo sapiens
tgagacccggactca

SEQ ID NO: 457972 - DNA, 15 bp, Homo sapiens
atgagacccggactc

SEQ ID NO: 457973 - DNA, 15 bp, Homo sapiens
gatgagacccggact

SEQ ID NO: 457974 - DNA, 15 bp, Homo sapiens
agatgagacccggac

SEQ ID NO: 457975 - DNA, 15 bp, Homo sapiens
cagatgagacccgga

SEQ ID NO: 457976 - DNA, 15 bp, Homo sapiens
ccagatgagacccgg

SEQ ID NO: 457977 - DNA, 15 bp, Homo sapiens
cccagatgagacccg

SEQ ID NO: 457978 - DNA, 15 bp, Homo sapiens
acccagatgagaccc

SEQ ID NO: 457979 - DNA, 15 bp, Homo sapiens
cacccagatgagacc

SEQ ID NO: 457980 - DNA, 15 bp, Homo sapiens
ccacccagatgagac

SEQ ID NO: 457981 - DNA, 15 bp, Homo sapiens
cccacccagatgaga

SEQ ID NO: 457982 - DNA, 15 bp, Homo sapiens
tcccacccagatgag

SEQ ID NO: 457983 - DNA, 15 bp, Homo sapiens
gtcccacccagatga

SEQ ID NO: 457984 - DNA, 15 bp, Homo sapiens
agtcccacccagatg

SEQ ID NO: 457985 - DNA, 15 bp, Homo sapiens
gagtcccacccagat

SEQ ID NO: 457986 - DNA, 15 bp, Homo sapiens
agagtcccacccaga

SEQ ID NO: 457987 - DNA, 15 bp, Homo sapiens
cagagtcccacccag

SEQ ID NO: 457988 - DNA, 15 bp, Homo sapiens
acagagtcccaccca

SEQ ID NO: 457989 - DNA, 15 bp, Homo sapiens
aacagagtcccaccc

SEQ ID NO: 457990 - DNA, 15 bp, Homo sapiens
aaacagagtcccacc

SEQ ID NO: 457991 - DNA, 15 bp, Homo sapiens
aaaacagagtcccac

SEQ ID NO: 457992 - DNA, 15 bp, Homo sapiens
taaaacagagtccca

SEQ ID NO: 457993 - DNA, 15 bp, Homo sapiens
ataaaacagagtccc

SEQ ID NO: 457994 - DNA, 15 bp, Homo sapiens
gataaaacagagtcc

SEQ ID NO: 457995 - DNA, 15 bp, Homo sapiens
tgataaaacagagtc

SEQ ID NO: 457996 - DNA, 15 bp, Homo sapiens
atgataaaacagagt

SEQ ID NO: 457997 - DNA, 15 bp, Homo sapiens
gatgataaaacagag

SEQ ID NO: 457998 - DNA, 15 bp, Homo sapiens
agatgataaaacaga

SEQ ID NO: 457999 - DNA, 15 bp, Homo sapiens
aagatgataaaacag

SEQ ID NO: 458000 - DNA, 15 bp, Homo sapiens
caagatgataaaaca

SEQ ID NO: 458001 - DNA, 15 bp, Homo sapiens
ccaagatgataaaac

SEQ ID NO: 458002 - DNA, 15 bp, Homo sapiens
accaagatgataaaa

SEQ ID NO: 458003 - DNA, 15 bp, Homo sapiens
caccaagatgataaa

SEQ ID NO: 458004 - DNA, 15 bp, Homo sapiens
acaccaagatgataa

SEQ ID NO: 458005 - DNA, 15 bp, Homo sapiens
gacaccaagatgata

SEQ ID NO: 458006 - DNA, 15 bp, Homo sapiens
tgacaccaagatgat

SEQ ID NO: 458007 - DNA, 15 bp, Homo sapiens
gtgacaccaagatga

SEQ ID NO: 458008 - DNA, 15 bp, Homo sapiens
cgtgacaccaagatg

SEQ ID NO: 458009 - DNA, 15 bp, Homo sapiens
ccgtgacaccaagat

SEQ ID NO: 458010 - DNA, 15 bp, Homo sapiens
gccgtgacaccaaga

SEQ ID NO: 458011 - DNA, 15 bp, Homo sapiens
agccgtgacaccaag

SEQ ID NO: 458012 - DNA, 15 bp, Homo sapiens
gagccgtgacaccaa

SEQ ID NO: 458013 - DNA, 15 bp, Homo sapiens
ggagccgtgacacca

SEQ ID NO: 458014 - DNA, 15 bp, Homo sapiens
aggagccgtgacacc

SEQ ID NO: 458015 - DNA, 15 bp, Homo sapiens
caggagccgtgacac

SEQ ID NO: 458016 - DNA, 15 bp, Homo sapiens
ccaggagccgtgaca

SEQ ID NO: 458017 - DNA, 15 bp, Homo sapiens
gccaggagccgtgac

SEQ ID NO: 458018 - DNA, 15 bp, Homo sapiens
ggccaggagccgtga

SEQ ID NO: 458019 - DNA, 15 bp, Homo sapiens
gggccaggagccgtg

SEQ ID NO: 458020 - DNA, 15 bp, Homo sapiens
tgggccaggagccgt

SEQ ID NO: 458021 - DNA, 15 bp, Homo sapiens
atgggccaggagccg

SEQ ID NO: 458022 - DNA, 15 bp, Homo sapiens
catgggccaggagcc

SEQ ID NO: 458023 - DNA, 15 bp, Homo sapiens
ccatgggccaggagc

SEQ ID NO: 458024 - DNA, 15 bp, Homo sapiens
gccatgggccaggag

SEQ ID NO: 458025 - DNA, 15 bp, Homo sapiens
ggccatgggccagga

SEQ ID NO: 458026 - DNA, 15 bp, Homo sapiens
aggccatgggccagg

SEQ ID NO: 458027 - DNA, 15 bp, Homo sapiens
caggccatgggccag

SEQ ID NO: 458028 - DNA, 15 bp, Homo sapiens
ccaggccatgggcca

SEQ ID NO: 458029 - DNA, 15 bp, Homo sapiens
gccaggccatgggcc

SEQ ID NO: 458030 - DNA, 15 bp, Homo sapiens
tgccaggccatgggc

SEQ ID NO: 458031 - DNA, 15 bp, Homo sapiens
gtgccaggccatggg

SEQ ID NO: 458032 - DNA, 15 bp, Homo sapiens
agtgccaggccatgg

SEQ ID NO: 458033 - DNA, 15 bp, Homo sapiens
cagtgccaggccatg

SEQ ID NO: 458034 - DNA, 15 bp, Homo sapiens
acagtgccaggccat

SEQ ID NO: 458035 - DNA, 15 bp, Homo sapiens
gacagtgccaggcca

SEQ ID NO: 458036 - DNA, 15 bp, Homo sapiens
agacagtgccaggcc

SEQ ID NO: 458037 - DNA, 15 bp, Homo sapiens
cagacagtgccaggc

SEQ ID NO: 458038 - DNA, 15 bp, Homo sapiens
tcagacagtgccagg

SEQ ID NO: 458039 - DNA, 15 bp, Homo sapiens
ttcagacagtgccag

SEQ ID NO: 458040 - DNA, 15 bp, Homo sapiens
attcagacagtgcca

SEQ ID NO: 458041 - DNA, 15 bp, Homo sapiens
cattcagacagtgcc

SEQ ID NO: 458042 - DNA, 15 bp, Homo sapiens
acattcagacagtgc

SEQ ID NO: 458043 - DNA, 15 bp, Homo sapiens
aacattcagacagtg

SEQ ID NO: 458044 - DNA, 15 bp, Homo sapiens
aaacattcagacagt

SEQ ID NO: 458045 - DNA, 15 bp, Homo sapiens
caaacattcagacag

SEQ ID NO: 458046 - DNA, 15 bp, Homo sapiens
ccaaacattcagaca

SEQ ID NO: 458047 - DNA, 15 bp, Homo sapiens
cccaaacattcagac

SEQ ID NO: 458048 - DNA, 15 bp, Homo sapiens
gcccaaacattcaga

SEQ ID NO: 458049 - DNA, 15 bp, Homo sapiens
cgcccaaacattcag

SEQ ID NO: 458050 - DNA, 15 bp, Homo sapiens
tcgcccaaacattca

SEQ ID NO: 458051 - DNA, 15 bp, Homo sapiens
atcgcccaaacattc

SEQ ID NO: 458052 - DNA, 15 bp, Homo sapiens
catcgcccaaacatt

SEQ ID NO: 458053 - DNA, 15 bp, Homo sapiens
ccatcgcccaaacat

SEQ ID NO: 458054 - DNA, 15 bp, Homo sapiens
cccatcgcccaaaca

SEQ ID NO: 458055 - DNA, 15 bp, Homo sapiens
acccatcgcccaaac

SEQ ID NO: 458056 - DNA, 15 bp, Homo sapiens
cacccatcgcccaaa

SEQ ID NO: 458057 - DNA, 15 bp, Homo sapiens
tcacccatcgcccaa

SEQ ID NO: 458058 - DNA, 15 bp, Homo sapiens
ttcacccatcgccca

SEQ ID NO: 458059 - DNA, 15 bp, Homo sapiens
cttcacccatcgccc

SEQ ID NO: 458060 - DNA, 15 bp, Homo sapiens
ccttcacccatcgcc

SEQ ID NO: 458061 - DNA, 15 bp, Homo sapiens
accttcacccatcgc

SEQ ID NO: 458062 - DNA, 15 bp, Homo sapiens
caccttcacccatcg

SEQ ID NO: 458063 - DNA, 15 bp, Homo sapiens
tcaccttcacccatc

SEQ ID NO: 458064 - DNA, 15 bp, Homo sapiens
ctcaccttcacccat

SEQ ID NO: 458065 - DNA, 15 bp, Homo sapiens
actcaccttcaccca

SEQ ID NO: 458066 - DNA, 15 bp, Homo sapiens
aactcaccttcaccc

SEQ ID NO: 458067 - DNA, 15 bp, Homo sapiens
caactcaccttcacc

SEQ ID NO: 458068 - DNA, 15 bp, Homo sapiens
tcaactcaccttcac

SEQ ID NO: 458069 - DNA, 15 bp, Homo sapiens
ctcaactcaccttca

SEQ ID NO: 458070 - DNA, 15 bp, Homo sapiens
tctcaactcaccttc

SEQ ID NO: 458071 - DNA, 15 bp, Homo sapiens
ctctcaactcacctt

SEQ ID NO: 458072 - DNA, 15 bp, Homo sapiens
tctctcaactcacct

SEQ ID NO: 458073 - DNA, 15 bp, Homo sapiens
atctctcaactcacc

SEQ ID NO: 458074 - DNA, 15 bp, Homo sapiens
catctctcaactcac

SEQ ID NO: 458075 - DNA, 15 bp, Homo sapiens
ccatctctcaactca

SEQ ID NO: 458076 - DNA, 15 bp, Homo sapiens
cccatctctcaactc

SEQ ID NO: 458077 - DNA, 15 bp, Homo sapiens
acccatctctcaact

SEQ ID NO: 458078 - DNA, 15 bp, Homo sapiens
cacccatctctcaac

SEQ ID NO: 458079 - DNA, 15 bp, Homo sapiens
ccacccatctctcaa

SEQ ID NO: 458080 - DNA, 15 bp, Homo sapiens
cccacccatctctca

SEQ ID NO: 458081 - DNA, 15 bp, Homo sapiens
tcccacccatctctc

SEQ ID NO: 458082 - DNA, 15 bp, Homo sapiens
ttcccacccatctct

SEQ ID NO: 458083 - DNA, 15 bp, Homo sapiens
attcccacccatctc

SEQ ID NO: 458084 - DNA, 15 bp, Homo sapiens
aattcccacccatct

SEQ ID NO: 458085 - DNA, 15 bp, Homo sapiens
caattcccacccatc

SEQ ID NO: 458086 - DNA, 15 bp, Homo sapiens
ccaattcccacccat

SEQ ID NO: 458087 - DNA, 15 bp, Homo sapiens
cccaattcccaccca

SEQ ID NO: 458088 - DNA, 15 bp, Homo sapiens
ccccaattcccaccc

SEQ ID NO: 458089 - DNA, 15 bp, Homo sapiens
tccccaattcccacc

SEQ ID NO: 458090 - DNA, 15 bp, Homo sapiens
gtccccaattcccac

SEQ ID NO: 458091 - DNA, 15 bp, Homo sapiens
tgtccccaattccca

SEQ ID NO: 458092 - DNA, 15 bp, Homo sapiens
ttgtccccaattccc

SEQ ID NO: 458093 - DNA, 15 bp, Homo sapiens
attgtccccaattcc

SEQ ID NO: 458094 - DNA, 15 bp, Homo sapiens
tattgtccccaattc

SEQ ID NO: 458095 - DNA, 15 bp, Homo sapiens
ttattgtccccaatt

SEQ ID NO: 458096 - DNA, 15 bp, Homo sapiens
tttattgtccccaat

SEQ ID NO: 458097 - DNA, 15 bp, Homo sapiens
gtttattgtccccaa

SEQ ID NO: 458098 - DNA, 15 bp, Homo sapiens
ggtttattgtcccca

SEQ ID NO: 458099 - DNA, 15 bp, Homo sapiens
cggtttattgtcccc

SEQ ID NO: 458100 - DNA, 15 bp, Homo sapiens
acggtttattgtccc

SEQ ID NO: 458101 - DNA, 15 bp, Homo sapiens
gacggtttattgtcc

SEQ ID NO: 458102 - DNA, 15 bp, Homo sapiens
ggacggtttattgtc

SEQ ID NO: 458103 - DNA, 15 bp, Homo sapiens
gggacggtttattgt

SEQ ID NO: 458104 - DNA, 15 bp, Homo sapiens
tgggacggtttattg

SEQ ID NO: 458105 - DNA, 15 bp, Homo sapiens
gtgggacggtttatt

SEQ ID NO: 458106 - DNA, 15 bp, Homo sapiens
ggtgggacggtttat

SEQ ID NO: 458107 - DNA, 15 bp, Homo sapiens
aggtgggacggttta

SEQ ID NO: 458108 - DNA, 15 bp, Homo sapiens
caggtgggacggttt

SEQ ID NO: 458109 - DNA, 15 bp, Homo sapiens
gcaggtgggacggtt

SEQ ID NO: 458110 - DNA, 15 bp, Homo sapiens
ggcaggtgggacggt

SEQ ID NO: 458111 - DNA, 15 bp, Homo sapiens
aggcaggtgggacgg

SEQ ID NO: 458112 - DNA, 15 bp, Homo sapiens
caggcaggtgggacg

SEQ ID NO: 458113 - DNA, 15 bp, Homo sapiens
ccaggcaggtgggac

SEQ ID NO: 458114 - DNA, 15 bp, Homo sapiens
accaggcaggtggga

SEQ ID NO: 458115 - DNA, 15 bp, Homo sapiens
taccaggcaggtggg

SEQ ID NO: 458116 - DNA, 15 bp, Homo sapiens
gtaccaggcaggtgg

SEQ ID NO: 458117 - DNA, 15 bp, Homo sapiens
ggtaccaggcaggtg

SEQ ID NO: 458118 - DNA, 15 bp, Homo sapiens
aggtaccaggcaggt

SEQ ID NO: 458119 - DNA, 15 bp, Homo sapiens
aaggtaccaggcagg

SEQ ID NO: 458120 - DNA, 15 bp, Homo sapiens
caaggtaccaggcag

SEQ ID NO: 458121 - DNA, 15 bp, Homo sapiens
tcaaggtaccaggca

SEQ ID NO: 458122 - DNA, 15 bp, Homo sapiens
gtcaaggtaccaggc

SEQ ID NO: 458123 - DNA, 15 bp, Homo sapiens
ggtcaaggtaccagg

SEQ ID NO: 458124 - DNA, 15 bp, Homo sapiens
gggtcaaggtaccag

SEQ ID NO: 458125 - DNA, 15 bp, Homo sapiens
agggtcaaggtacca

SEQ ID NO: 458126 - DNA, 15 bp, Homo sapiens
cagggtcaaggtacc

SEQ ID NO: 458127 - DNA, 15 bp, Homo sapiens
ccagggtcaaggtac

SEQ ID NO: 458128 - DNA, 15 bp, Homo sapiens
cccagggtcaaggta

SEQ ID NO: 458129 - DNA, 15 bp, Homo sapiens
tcccagggtcaaggt

SEQ ID NO: 458130 - DNA, 15 bp, Homo sapiens
ttcccagggtcaagg

SEQ ID NO: 458131 - DNA, 15 bp, Homo sapiens
tttcccagggtcaag

SEQ ID NO: 458132 - DNA, 15 bp, Homo sapiens
ctttcccagggtcaa

SEQ ID NO: 458133 - DNA, 15 bp, Homo sapiens
cctttcccagggtca

SEQ ID NO: 458134 - DNA, 15 bp, Homo sapiens
gcctttcccagggtc

SEQ ID NO: 458135 - DNA, 15 bp, Homo sapiens
agcctttcccagggt

SEQ ID NO: 458136 - DNA, 15 bp, Homo sapiens
cagcctttcccaggg

SEQ ID NO: 458137 - DNA, 15 bp, Homo sapiens
ccagcctttcccagg

SEQ ID NO: 458138 - DNA, 15 bp, Homo sapiens
cccagcctttcccag

SEQ ID NO: 458139 - DNA, 15 bp, Homo sapiens
tcccagcctttccca

SEQ ID NO: 458140 - DNA, 15 bp, Homo sapiens
ttcccagcctttccc

SEQ ID NO: 458141 - DNA, 15 bp, Homo sapiens
cttcccagcctttcc

SEQ ID NO: 458142 - DNA, 15 bp, Homo sapiens
ccttcccagcctttc

SEQ ID NO: 458143 - DNA, 15 bp, Homo sapiens
accttcccagccttt

SEQ ID NO: 458144 - DNA, 15 bp, Homo sapiens
caccttcccagcctt

SEQ ID NO: 458145 - DNA, 15 bp, Homo sapiens
tcaccttcccagcct

SEQ ID NO: 458146 - DNA, 15 bp, Homo sapiens
ctcaccttcccagcc

SEQ ID NO: 458147 - DNA, 15 bp, Homo sapiens
tctcaccttcccagc

SEQ ID NO: 458148 - DNA, 15 bp, Homo sapiens
atctcaccttcccag

SEQ ID NO: 458149 - DNA, 15 bp, Homo sapiens
gatctcaccttccca

SEQ ID NO: 458150 - DNA, 15 bp, Homo sapiens
ggatctcaccttccc

SEQ ID NO: 458151 - DNA, 15 bp, Homo sapiens
aggatctcaccttcc

SEQ ID NO: 458152 - DNA, 15 bp, Homo sapiens
caggatctcaccttc

SEQ ID NO: 458153 - DNA, 15 bp, Homo sapiens
ccaggatctcacctt

SEQ ID NO: 458154 - DNA, 15 bp, Homo sapiens
cccaggatctcacct

SEQ ID NO: 458155 - DNA, 15 bp, Homo sapiens
ccccaggatctcacc

SEQ ID NO: 458156 - DNA, 15 bp, Homo sapiens
gccccaggatctcac

SEQ ID NO: 458157 - DNA, 15 bp, Homo sapiens
tgccccaggatctca

SEQ ID NO: 458158 - DNA, 15 bp, Homo sapiens
ctgccccaggatctc

SEQ ID NO: 458159 - DNA, 15 bp, Homo sapiens
tctgccccaggatct

SEQ ID NO: 458160 - DNA, 15 bp, Homo sapiens
atctgccccaggatc

SEQ ID NO: 458161 - DNA, 15 bp, Homo sapiens
catctgccccaggat

SEQ ID NO: 458162 - DNA, 15 bp, Homo sapiens
gcatctgccccagga

SEQ ID NO: 458163 - DNA, 15 bp, Homo sapiens
ggcatctgccccagg

SEQ ID NO: 458164 - DNA, 15 bp, Homo sapiens
gggcatctgccccag

SEQ ID NO: 458165 - DNA, 15 bp, Homo sapiens
tgggcatctgcccca

SEQ ID NO: 458166 - DNA, 15 bp, Homo sapiens
ctgggcatctgcccc

SEQ ID NO: 458167 - DNA, 15 bp, Homo sapiens
gctgggcatctgccc

SEQ ID NO: 458168 - DNA, 15 bp, Homo sapiens
ggctgggcatctgcc

SEQ ID NO: 458169 - DNA, 15 bp, Homo sapiens
aggctgggcatctgc

SEQ ID NO: 458170 - DNA, 15 bp, Homo sapiens
gaggctgggcatctg

SEQ ID NO: 458171 - DNA, 15 bp, Homo sapiens
tgaggctgggcatct

SEQ ID NO: 458172 - DNA, 15 bp, Homo sapiens
atgaggctgggcatc

SEQ ID NO: 458173 - DNA, 15 bp, Homo sapiens
catgaggctgggcat

SEQ ID NO: 458174 - DNA, 15 bp, Homo sapiens
ccatgaggctgggca

SEQ ID NO: 458175 - DNA, 15 bp, Homo sapiens
cccatgaggctgggc

SEQ ID NO: 458176 - DNA, 15 bp, Homo sapiens
ccccatgaggctggg

SEQ ID NO: 458177 - DNA, 15 bp, Homo sapiens
accccatgaggctgg

SEQ ID NO: 458178 - DNA, 15 bp, Homo sapiens
gaccccatgaggctg

SEQ ID NO: 458179 - DNA, 15 bp, Homo sapiens
tgaccccatgaggct

SEQ ID NO: 458180 - DNA, 15 bp, Homo sapiens
atgaccccatgaggc

SEQ ID NO: 458181 - DNA, 15 bp, Homo sapiens
catgaccccatgagg

SEQ ID NO: 458182 - DNA, 15 bp, Homo sapiens
tcatgaccccatgag

SEQ ID NO: 458183 - DNA, 15 bp, Homo sapiens
ttcatgaccccatga

SEQ ID NO: 458184 - DNA, 15 bp, Homo sapiens
attcatgaccccatg

SEQ ID NO: 458185 - DNA, 15 bp, Homo sapiens
cattcatgaccccat

SEQ ID NO: 458186 - DNA, 15 bp, Homo sapiens
ccattcatgacccca

SEQ ID NO: 458187 - DNA, 15 bp, Homo sapiens
cccattcatgacccc

SEQ ID NO: 458188 - DNA, 15 bp, Homo sapiens
gcccattcatgaccc

SEQ ID NO: 458189 - DNA, 15 bp, Homo sapiens
tgcccattcatgacc

SEQ ID NO: 458190 - DNA, 15 bp, Homo sapiens
ttgcccattcatgac

SEQ ID NO: 458191 - DNA, 15 bp, Homo sapiens
cttgcccattcatga

SEQ ID NO: 458192 - DNA, 15 bp, Homo sapiens
acttgcccattcatg

SEQ ID NO: 458193 - DNA, 15 bp, Homo sapiens
gacttgcccattcat

SEQ ID NO: 458194 - DNA, 15 bp, Homo sapiens
agacttgcccattca

SEQ ID NO: 458195 - DNA, 15 bp, Homo sapiens
cagacttgcccattc

SEQ ID NO: 458196 - DNA, 15 bp, Homo sapiens
acagacttgcccatt

SEQ ID NO: 458197 - DNA, 15 bp, Homo sapiens
cacagacttgcccat

SEQ ID NO: 458198 - DNA, 15 bp, Homo sapiens
tcacagacttgccca

SEQ ID NO: 458199 - DNA, 15 bp, Homo sapiens
ttcacagacttgccc

SEQ ID NO: 458200 - DNA, 15 bp, Homo sapiens
attcacagacttgcc

SEQ ID NO: 458201 - DNA, 15 bp, Homo sapiens
tattcacagacttgc

SEQ ID NO: 458202 - DNA, 15 bp, Homo sapiens
gtattcacagacttg

SEQ ID NO: 458203 - DNA, 15 bp, Homo sapiens
agtattcacagactt

SEQ ID NO: 458204 - DNA, 15 bp, Homo sapiens
gagtattcacagact

SEQ ID NO: 458205 - DNA, 15 bp, Homo sapiens
tgagtattcacagac

SEQ ID NO: 458206 - DNA, 15 bp, Homo sapiens
ctgagtattcacaga

SEQ ID NO: 458207 - DNA, 15 bp, Homo sapiens
tctgagtattcacag

SEQ ID NO: 458208 - DNA, 15 bp, Homo sapiens
ctctgagtattcaca

SEQ ID NO: 458209 - DNA, 15 bp, Homo sapiens
cctctgagtattcac

SEQ ID NO: 458210 - DNA, 15 bp, Homo sapiens
gcctctgagtattca

SEQ ID NO: 458211 - DNA, 15 bp, Homo sapiens
ggcctctgagtattc

SEQ ID NO: 458212 - DNA, 15 bp, Homo sapiens
cggcctctgagtatt

SEQ ID NO: 458213 - DNA, 15 bp, Homo sapiens
gcggcctctgagtat

SEQ ID NO: 458214 - DNA, 15 bp, Homo sapiens
ggcggcctctgagta

SEQ ID NO: 458215 - DNA, 15 bp, Homo sapiens
gggcggcctctgagt

SEQ ID NO: 458216 - DNA, 15 bp, Homo sapiens
ggggcggcctctgag

SEQ ID NO: 458217 - DNA, 15 bp, Homo sapiens
gggggcggcctctga

SEQ ID NO: 458218 - DNA, 15 bp, Homo sapiens
tgggggcggcctctg

SEQ ID NO: 458219 - DNA, 15 bp, Homo sapiens
ctgggggcggcctct

SEQ ID NO: 458220 - DNA, 15 bp, Homo sapiens
cctgggggcggcctc

SEQ ID NO: 458221 - DNA, 15 bp, Homo sapiens
ccctgggggcggcct

SEQ ID NO: 458222 - DNA, 15 bp, Homo sapiens
gccctgggggcggcc

SEQ ID NO: 458223 - DNA, 15 bp, Homo sapiens
tgccctgggggcggc

SEQ ID NO: 458224 - DNA, 15 bp, Homo sapiens
ctgccctgggggcgg

SEQ ID NO: 458225 - DNA, 15 bp, Homo sapiens
cctgccctgggggcg

SEQ ID NO: 458226 - DNA, 15 bp, Homo sapiens
ccctgccctgggggc

SEQ ID NO: 458227 - DNA, 15 bp, Homo sapiens
gccctgccctggggg

SEQ ID NO: 458228 - DNA, 15 bp, Homo sapiens
agccctgccctgggg

SEQ ID NO: 458229 - DNA, 15 bp, Homo sapiens
aagccctgccctggg

SEQ ID NO: 458230 - DNA, 15 bp, Homo sapiens
gaagccctgccctgg

SEQ ID NO: 458231 - DNA, 15 bp, Homo sapiens
agaagccctgccctg

SEQ ID NO: 458232 - DNA, 15 bp, Homo sapiens
gagaagccctgccct

SEQ ID NO: 458233 - DNA, 15 bp, Homo sapiens
tgagaagccctgccc

SEQ ID NO: 458234 - DNA, 15 bp, Homo sapiens
ttgagaagccctgcc

SEQ ID NO: 458235 - DNA, 15 bp, Homo sapiens
tttgagaagccctgc

SEQ ID NO: 458236 - DNA, 15 bp, Homo sapiens
gtttgagaagccctg

SEQ ID NO: 458237 - DNA, 15 bp, Homo sapiens
cgtttgagaagccct

SEQ ID NO: 458238 - DNA, 15 bp, Homo sapiens
ccgtttgagaagccc

SEQ ID NO: 458239 - DNA, 15 bp, Homo sapiens
gccgtttgagaagcc

SEQ ID NO: 458240 - DNA, 15 bp, Homo sapiens
ggccgtttgagaagc

SEQ ID NO: 458241 - DNA, 15 bp, Homo sapiens
gggccgtttgagaag

SEQ ID NO: 458242 - DNA, 15 bp, Homo sapiens
ggggccgtttgagaa

SEQ ID NO: 458243 - DNA, 15 bp, Homo sapiens
gggggccgtttgaga

SEQ ID NO: 458244 - DNA, 15 bp, Homo sapiens
agggggccgtttgag

SEQ ID NO: 458245 - DNA, 15 bp, Homo sapiens
gagggggccgtttga

SEQ ID NO: 458246 - DNA, 15 bp, Homo sapiens
agagggggccgtttg

SEQ ID NO: 458247 - DNA, 15 bp, Homo sapiens
cagagggggccgttt

SEQ ID NO: 458248 - DNA, 15 bp, Homo sapiens
tcagagggggccgtt

SEQ ID NO: 458249 - DNA, 15 bp, Homo sapiens
ttcagagggggccgt

SEQ ID NO: 458250 - DNA, 15 bp, Homo sapiens
cttcagagggggccg

SEQ ID NO: 458251 - DNA, 15 bp, Homo sapiens
gcttcagagggggcc

SEQ ID NO: 458252 - DNA, 15 bp, Homo sapiens
ggcttcagagggggc

SEQ ID NO: 458253 - DNA, 15 bp, Homo sapiens
gggcttcagaggggg

SEQ ID NO: 458254 - DNA, 15 bp, Homo sapiens
ggggcttcagagggg

SEQ ID NO: 458255 - DNA, 15 bp, Homo sapiens
aggggcttcagaggg

SEQ ID NO: 458256 - DNA, 15 bp, Homo sapiens
aaggggcttcagagg

SEQ ID NO: 458257 - DNA, 15 bp, Homo sapiens
gaaggggcttcagag

SEQ ID NO: 458258 - DNA, 15 bp, Homo sapiens
ggaaggggcttcaga

SEQ ID NO: 458259 - DNA, 15 bp, Homo sapiens
gggaaggggcttcag

SEQ ID NO: 458260 - DNA, 15 bp, Homo sapiens
ggggaaggggcttca

SEQ ID NO: 458261 - DNA, 15 bp, Homo sapiens
gggggaaggggcttc

SEQ ID NO: 458262 - DNA, 15 bp, Homo sapiens
tgggggaaggggctt

SEQ ID NO: 458263 - DNA, 15 bp, Homo sapiens
atgggggaaggggct

SEQ ID NO: 458264 - DNA, 15 bp, Homo sapiens
gatgggggaaggggc

SEQ ID NO: 458265 - DNA, 15 bp, Homo sapiens
agatgggggaagggg

SEQ ID NO: 458266 - DNA, 15 bp, Homo sapiens
gagatgggggaaggg

SEQ ID NO: 458267 - DNA, 15 bp, Homo sapiens
agagatgggggaagg

SEQ ID NO: 458268 - DNA, 15 bp, Homo sapiens
gagagatgggggaag

SEQ ID NO: 458269 - DNA, 15 bp, Homo sapiens
ggagagatgggggaa

SEQ ID NO: 458270 - DNA, 15 bp, Homo sapiens
tggagagatggggga

SEQ ID NO: 458271 - DNA, 15 bp, Homo sapiens
gtggagagatggggg

SEQ ID NO: 458272 - DNA, 15 bp, Homo sapiens
ggtggagagatgggg

SEQ ID NO: 458273 - DNA, 15 bp, Homo sapiens
gggtggagagatggg

SEQ ID NO: 458274 - DNA, 15 bp, Homo sapiens
agggtggagagatgg

SEQ ID NO: 458275 - DNA, 15 bp, Homo sapiens
aagggtggagagatg

SEQ ID NO: 458276 - DNA, 15 bp, Homo sapiens
aaagggtggagagat

SEQ ID NO: 458277 - DNA, 15 bp, Homo sapiens
caaagggtggagaga

SEQ ID NO: 458278 - DNA, 15 bp, Homo sapiens
tcaaagggtggagag

SEQ ID NO: 458279 - DNA, 15 bp, Homo sapiens
ttcaaagggtggaga

SEQ ID NO: 458280 - DNA, 15 bp, Homo sapiens
gttcaaagggtggag

SEQ ID NO: 458281 - DNA, 15 bp, Homo sapiens
ggttcaaagggtgga

SEQ ID NO: 458282 - DNA, 15 bp, Homo sapiens
gggttcaaagggtgg

SEQ ID NO: 458283 - DNA, 15 bp, Homo sapiens
tgggttcaaagggtg

SEQ ID NO: 458284 - DNA, 15 bp, Homo sapiens
ctgggttcaaagggt

SEQ ID NO: 458285 - DNA, 15 bp, Homo sapiens
tctgggttcaaaggg

SEQ ID NO: 458286 - DNA, 15 bp, Homo sapiens
ctctgggttcaaagg

SEQ ID NO: 458287 - DNA, 15 bp, Homo sapiens
cctctgggttcaaag

SEQ ID NO: 458288 - DNA, 15 bp, Homo sapiens
gcctctgggttcaaa

SEQ ID NO: 458289 - DNA, 15 bp, Homo sapiens
ggcctctgggttcaa

SEQ ID NO: 458290 - DNA, 15 bp, Homo sapiens
tggcctctgggttca

SEQ ID NO: 458291 - DNA, 15 bp, Homo sapiens
atggcctctgggttc

SEQ ID NO: 458292 - DNA, 15 bp, Homo sapiens
catggcctctgggtt

SEQ ID NO: 458293 - DNA, 15 bp, Homo sapiens
ccatggcctctgggt

SEQ ID NO: 458294 - DNA, 15 bp, Homo sapiens
cccatggcctctggg

SEQ ID NO: 458295 - DNA, 15 bp, Homo sapiens
gcccatggcctctgg

SEQ ID NO: 458296 - DNA, 15 bp, Homo sapiens
tgcccatggcctctg

SEQ ID NO: 458297 - DNA, 15 bp, Homo sapiens
gtgcccatggcctct

SEQ ID NO: 458298 - DNA, 15 bp, Homo sapiens
ggtgcccatggcctc

SEQ ID NO: 458299 - DNA, 15 bp, Homo sapiens
cggtgcccatggcct

SEQ ID NO: 458300 - DNA, 15 bp, Homo sapiens
ccggtgcccatggcc

SEQ ID NO: 458301 - DNA, 15 bp, Homo sapiens
tccggtgcccatggc

SEQ ID NO: 458302 - DNA, 15 bp, Homo sapiens
ctccggtgcccatgg

SEQ ID NO: 458303 - DNA, 15 bp, Homo sapiens
tctccggtgcccatg

SEQ ID NO: 458304 - DNA, 15 bp, Homo sapiens
gtctccggtgcccat

SEQ ID NO: 458305 - DNA, 15 bp, Homo sapiens
ggtctccggtgccca

SEQ ID NO: 458306 - DNA, 15 bp, Homo sapiens
aggtctccggtgccc

SEQ ID NO: 458307 - DNA, 15 bp, Homo sapiens
caggtctccggtgcc

SEQ ID NO: 458308 - DNA, 15 bp, Homo sapiens
ccaggtctccggtgc

SEQ ID NO: 458309 - DNA, 15 bp, Homo sapiens
tccaggtctccggtg

SEQ ID NO: 458310 - DNA, 15 bp, Homo sapiens
gtccaggtctccggt

SEQ ID NO: 458311 - DNA, 15 bp, Homo sapiens
ggtccaggtctccgg

SEQ ID NO: 458312 - DNA, 15 bp, Homo sapiens
aggtccaggtctccg

SEQ ID NO: 458313 - DNA, 15 bp, Homo sapiens
gaggtccaggtctcc

SEQ ID NO: 458314 - DNA, 15 bp, Homo sapiens
ggaggtccaggtctc

SEQ ID NO: 458315 - DNA, 15 bp, Homo sapiens
aggaggtccaggtct

SEQ ID NO: 458316 - DNA, 15 bp, Homo sapiens
taggaggtccaggtc

SEQ ID NO: 458317 - DNA, 15 bp, Homo sapiens
ataggaggtccaggt

SEQ ID NO: 458318 - DNA, 15 bp, Homo sapiens
gataggaggtccagg

SEQ ID NO: 458319 - DNA, 15 bp, Homo sapiens
tgataggaggtccag

SEQ ID NO: 458320 - DNA, 15 bp, Homo sapiens
ctgataggaggtcca

SEQ ID NO: 458321 - DNA, 15 bp, Homo sapiens
gctgataggaggtcc

SEQ ID NO: 458322 - DNA, 15 bp, Homo sapiens
ggctgataggaggtc

SEQ ID NO: 458323 - DNA, 15 bp, Homo sapiens
aggctgataggaggt

SEQ ID NO: 458324 - DNA, 15 bp, Homo sapiens
aaggctgataggagg

SEQ ID NO: 458325 - DNA, 15 bp, Homo sapiens
gaaggctgataggag

SEQ ID NO: 458326 - DNA, 15 bp, Homo sapiens
ggaaggctgatagga

SEQ ID NO: 458327 - DNA, 15 bp, Homo sapiens
cggaaggctgatagg

SEQ ID NO: 458328 - DNA, 15 bp, Homo sapiens
gcggaaggctgatag

SEQ ID NO: 458329 - DNA, 15 bp, Homo sapiens
ggcggaaggctgata

SEQ ID NO: 458330 - DNA, 15 bp, Homo sapiens
cggcggaaggctgat

SEQ ID NO: 458331 - DNA, 15 bp, Homo sapiens
gcggcggaaggctga

SEQ ID NO: 458332 - DNA, 15 bp, Homo sapiens
tgcggcggaaggctg

SEQ ID NO: 458333 - DNA, 15 bp, Homo sapiens
gtgcggcggaaggct

SEQ ID NO: 458334 - DNA, 15 bp, Homo sapiens
cgtgcggcggaaggc

SEQ ID NO: 458335 - DNA, 15 bp, Homo sapiens
acgtgcggcggaagg

SEQ ID NO: 458336 - DNA, 15 bp, Homo sapiens
cacgtgcggcggaag

SEQ ID NO: 458337 - DNA, 15 bp, Homo sapiens
tcacgtgcggcggaa

SEQ ID NO: 458338 - DNA, 15 bp, Homo sapiens
ctcacgtgcggcgga

SEQ ID NO: 458339 - DNA, 15 bp, Homo sapiens
actcacgtgcggcgg

SEQ ID NO: 458340 - DNA, 15 bp, Homo sapiens
cactcacgtgcggcg

SEQ ID NO: 458341 - DNA, 15 bp, Homo sapiens
ccactcacgtgcggc

SEQ ID NO: 458342 - DNA, 15 bp, Homo sapiens
gccactcacgtgcgg

SEQ ID NO: 458343 - DNA, 15 bp, Homo sapiens
ggccactcacgtgcg

SEQ ID NO: 458344 - DNA, 15 bp, Homo sapiens
tggccactcacgtgc

SEQ ID NO: 458345 - DNA, 15 bp, Homo sapiens
atggccactcacgtg

SEQ ID NO: 458346 - DNA, 15 bp, Homo sapiens
gatggccactcacgt

SEQ ID NO: 458347 - DNA, 15 bp, Homo sapiens
ggatggccactcacg

SEQ ID NO: 458348 - DNA, 15 bp, Homo sapiens
aggatggccactcac

SEQ ID NO: 458349 - DNA, 15 bp, Homo sapiens
gaggatggccactca

SEQ ID NO: 458350 - DNA, 15 bp, Homo sapiens
tgaggatggccactc

SEQ ID NO: 458351 - DNA, 15 bp, Homo sapiens
ctgaggatggccact

SEQ ID NO: 458352 - DNA, 15 bp, Homo sapiens
cctgaggatggccac

SEQ ID NO: 458353 - DNA, 15 bp, Homo sapiens
ccctgaggatggcca

SEQ ID NO: 458354 - DNA, 15 bp, Homo sapiens
gccctgaggatggcc

SEQ ID NO: 458355 - DNA, 15 bp, Homo sapiens
ggccctgaggatggc

SEQ ID NO: 458356 - DNA, 15 bp, Homo sapiens
aggccctgaggatgg

SEQ ID NO: 458357 - DNA, 15 bp, Homo sapiens
caggccctgaggatg

SEQ ID NO: 458358 - DNA, 15 bp, Homo sapiens
ccaggccctgaggat

SEQ ID NO: 458359 - DNA, 15 bp, Homo sapiens
cccaggccctgagga

SEQ ID NO: 458360 - DNA, 15 bp, Homo sapiens
ccccaggccctgagg

SEQ ID NO: 458361 - DNA, 15 bp, Homo sapiens
cccccaggccctgag

SEQ ID NO: 458362 - DNA, 15 bp, Homo sapiens
tcccccaggccctga

SEQ ID NO: 458363 - DNA, 15 bp, Homo sapiens
ctcccccaggccctg

SEQ ID NO: 458364 - DNA, 15 bp, Homo sapiens
cctcccccaggccct

SEQ ID NO: 458365 - DNA, 15 bp, Homo sapiens
gcctcccccaggccc

SEQ ID NO: 458366 - DNA, 15 bp, Homo sapiens
ggcctcccccaggcc

SEQ ID NO: 458367 - DNA, 15 bp, Homo sapiens
tggcctcccccaggc

SEQ ID NO: 458368 - DNA, 15 bp, Homo sapiens
ctggcctcccccagg

SEQ ID NO: 458369 - DNA, 15 bp, Homo sapiens
actggcctcccccag

SEQ ID NO: 458370 - DNA, 15 bp, Homo sapiens
cactggcctccccca

SEQ ID NO: 458371 - DNA, 15 bp, Homo sapiens
gcactggcctccccc

SEQ ID NO: 458372 - DNA, 15 bp, Homo sapiens
agcactggcctcccc

SEQ ID NO: 458373 - DNA, 15 bp, Homo sapiens
cagcactggcctccc

SEQ ID NO: 458374 - DNA, 15 bp, Homo sapiens
ccagcactggcctcc

SEQ ID NO: 458375 - DNA, 15 bp, Homo sapiens
tccagcactggcctc

SEQ ID NO: 458376 - DNA, 15 bp, Homo sapiens
ctccagcactggcct

SEQ ID NO: 458377 - DNA, 15 bp, Homo sapiens
actccagcactggcc

SEQ ID NO: 458378 - DNA, 15 bp, Homo sapiens
gactccagcactggc

SEQ ID NO: 458379 - DNA, 15 bp, Homo sapiens
agactccagcactgg

SEQ ID NO: 458380 - DNA, 15 bp, Homo sapiens
cagactccagcactg

SEQ ID NO: 458381 - DNA, 15 bp, Homo sapiens
tcagactccagcact

SEQ ID NO: 458382 - DNA, 15 bp, Homo sapiens
ctcagactccagcac

SEQ ID NO: 458383 - DNA, 15 bp, Homo sapiens
cctcagactccagca

SEQ ID NO: 458384 - DNA, 15 bp, Homo sapiens
gcctcagactccagc

SEQ ID NO: 458385 - DNA, 15 bp, Homo sapiens
ggcctcagactccag

SEQ ID NO: 458386 - DNA, 15 bp, Homo sapiens
gggcctcagactcca

SEQ ID NO: 458387 - DNA, 15 bp, Homo sapiens
agggcctcagactcc

SEQ ID NO: 458388 - DNA, 15 bp, Homo sapiens
aagggcctcagactc

SEQ ID NO: 458389 - DNA, 15 bp, Homo sapiens
gaagggcctcagact

SEQ ID NO: 458390 - DNA, 15 bp, Homo sapiens
tgaagggcctcagac

SEQ ID NO: 458391 - DNA, 15 bp, Homo sapiens
ctgaagggcctcaga

SEQ ID NO: 458392 - DNA, 15 bp, Homo sapiens
cctgaagggcctcag

SEQ ID NO: 458393 - DNA, 15 bp, Homo sapiens
ccctgaagggcctca

SEQ ID NO: 458394 - DNA, 15 bp, Homo sapiens
accctgaagggcctc

SEQ ID NO: 458395 - DNA, 15 bp, Homo sapiens
gaccctgaagggcct

SEQ ID NO: 458396 - DNA, 15 bp, Homo sapiens
agaccctgaagggcc

SEQ ID NO: 458397 - DNA, 15 bp, Homo sapiens
gagaccctgaagggc

SEQ ID NO: 458398 - DNA, 15 bp, Homo sapiens
cgagaccctgaaggg

SEQ ID NO: 458399 - DNA, 15 bp, Homo sapiens
tcgagaccctgaagg

SEQ ID NO: 458400 - DNA, 15 bp, Homo sapiens
gtcgagaccctgaag

SEQ ID NO: 458401 - DNA, 15 bp, Homo sapiens
agtcgagaccctgaa

SEQ ID NO: 458402 - DNA, 15 bp, Homo sapiens
cagtcgagaccctga

SEQ ID NO: 458403 - DNA, 15 bp, Homo sapiens
ccagtcgagaccctg

SEQ ID NO: 458404 - DNA, 15 bp, Homo sapiens
cccagtcgagaccct

SEQ ID NO: 458405 - DNA, 15 bp, Homo sapiens
ccccagtcgagaccc

SEQ ID NO: 458406 - DNA, 15 bp, Homo sapiens
cccccagtcgagacc

SEQ ID NO: 458407 - DNA, 15 bp, Homo sapiens
acccccagtcgagac

SEQ ID NO: 458408 - DNA, 15 bp, Homo sapiens
gacccccagtcgaga

SEQ ID NO: 458409 - DNA, 15 bp, Homo sapiens
tgacccccagtcgag

SEQ ID NO: 458410 - DNA, 15 bp, Homo sapiens
ctgacccccagtcga

SEQ ID NO: 458411 - DNA, 15 bp, Homo sapiens
cctgacccccagtcg

SEQ ID NO: 458412 - DNA, 15 bp, Homo sapiens
ccctgacccccagtc

SEQ ID NO: 458413 - DNA, 15 bp, Homo sapiens
gccctgacccccagt

SEQ ID NO: 458414 - DNA, 15 bp, Homo sapiens
agccctgacccccag

SEQ ID NO: 458415 - DNA, 15 bp, Homo sapiens
cagccctgaccccca

SEQ ID NO: 458416 - DNA, 15 bp, Homo sapiens
ccagccctgaccccc

SEQ ID NO: 458417 - DNA, 15 bp, Homo sapiens
cccagccctgacccc

SEQ ID NO: 458418 - DNA, 15 bp, Homo sapiens
ccccagccctgaccc

SEQ ID NO: 458419 - DNA, 15 bp, Homo sapiens
tccccagccctgacc

SEQ ID NO: 458420 - DNA, 15 bp, Homo sapiens
atccccagccctgac

SEQ ID NO: 458421 - DNA, 15 bp, Homo sapiens
catccccagccctga

SEQ ID NO: 458422 - DNA, 15 bp, Homo sapiens
tcatccccagccctg

SEQ ID NO: 458423 - DNA, 15 bp, Homo sapiens
atcatccccagccct

SEQ ID NO: 458424 - DNA, 15 bp, Homo sapiens
aatcatccccagccc

SEQ ID NO: 458425 - DNA, 15 bp, Homo sapiens
aaatcatccccagcc

SEQ ID NO: 458426 - DNA, 15 bp, Homo sapiens
caaatcatccccagc

SEQ ID NO: 458427 - DNA, 15 bp, Homo sapiens
gcaaatcatccccag

SEQ ID NO: 458428 - DNA, 15 bp, Homo sapiens
cgcaaatcatcccca

SEQ ID NO: 458429 - DNA, 15 bp, Homo sapiens
ccgcaaatcatcccc

SEQ ID NO: 458430 - DNA, 15 bp, Homo sapiens
cccgcaaatcatccc

SEQ ID NO: 458431 - DNA, 15 bp, Homo sapiens
ccccgcaaatcatcc

SEQ ID NO: 458432 - DNA, 15 bp, Homo sapiens
gccccgcaaatcatc

SEQ ID NO: 458433 - DNA, 15 bp, Homo sapiens
cgccccgcaaatcat

SEQ ID NO: 458434 - DNA, 15 bp, Homo sapiens
ccgccccgcaaatca

SEQ ID NO: 458435 - DNA, 15 bp, Homo sapiens
tccgccccgcaaatc

SEQ ID NO: 458436 - DNA, 15 bp, Homo sapiens
ctccgccccgcaaat

SEQ ID NO: 458437 - DNA, 15 bp, Homo sapiens
gctccgccccgcaaa

SEQ ID NO: 458438 - DNA, 15 bp, Homo sapiens
agctccgccccgcaa

SEQ ID NO: 458439 - DNA, 15 bp, Homo sapiens
cagctccgccccgca

SEQ ID NO: 458440 - DNA, 15 bp, Homo sapiens
tcagctccgccccgc

SEQ ID NO: 458441 - DNA, 15 bp, Homo sapiens
ttcagctccgccccg

SEQ ID NO: 458442 - DNA, 15 bp, Homo sapiens
cttcagctccgcccc

SEQ ID NO: 458443 - DNA, 15 bp, Homo sapiens
acttcagctccgccc

SEQ ID NO: 458444 - DNA, 15 bp, Homo sapiens
gacttcagctccgcc

SEQ ID NO: 458445 - DNA, 15 bp, Homo sapiens
tgacttcagctccgc

SEQ ID NO: 458446 - DNA, 15 bp, Homo sapiens
ctgacttcagctccg

SEQ ID NO: 458447 - DNA, 15 bp, Homo sapiens
actgacttcagctcc

SEQ ID NO: 458448 - DNA, 15 bp, Homo sapiens
cactgacttcagctc

SEQ ID NO: 458449 - DNA, 15 bp, Homo sapiens
ccactgacttcagct

SEQ ID NO: 458450 - DNA, 15 bp, Homo sapiens
cccactgacttcagc

SEQ ID NO: 458451 - DNA, 15 bp, Homo sapiens
ccccactgacttcag

SEQ ID NO: 458452 - DNA, 15 bp, Homo sapiens
cccccactgacttca

SEQ ID NO: 458453 - DNA, 15 bp, Homo sapiens
gcccccactgacttc

SEQ ID NO: 458454 - DNA, 15 bp, Homo sapiens
agcccccactgactt

SEQ ID NO: 458455 - DNA, 15 bp, Homo sapiens
cagcccccactgact

SEQ ID NO: 458456 - DNA, 15 bp, Homo sapiens
gcagcccccactgac

SEQ ID NO: 458457 - DNA, 15 bp, Homo sapiens
tgcagcccccactga

SEQ ID NO: 458458 - DNA, 15 bp, Homo sapiens
ctgcagcccccactg

SEQ ID NO: 458459 - DNA, 15 bp, Homo sapiens
cctgcagcccccact

SEQ ID NO: 458460 - DNA, 15 bp, Homo sapiens
ccctgcagcccccac

SEQ ID NO: 458461 - DNA, 15 bp, Homo sapiens
cccctgcagccccca

SEQ ID NO: 458462 - DNA, 15 bp, Homo sapiens
tcccctgcagccccc

SEQ ID NO: 458463 - DNA, 15 bp, Homo sapiens
ctcccctgcagcccc

SEQ ID NO: 458464 - DNA, 15 bp, Homo sapiens
tctcccctgcagccc

SEQ ID NO: 458465 - DNA, 15 bp, Homo sapiens
ctctcccctgcagcc

SEQ ID NO: 458466 - DNA, 15 bp, Homo sapiens
gctctcccctgcagc

SEQ ID NO: 458467 - DNA, 15 bp, Homo sapiens
tgctctcccctgcag

SEQ ID NO: 458468 - DNA, 15 bp, Homo sapiens
ttgctctcccctgca

SEQ ID NO: 458469 - DNA, 15 bp, Homo sapiens
cttgctctcccctgc

SEQ ID NO: 458470 - DNA, 15 bp, Homo sapiens
gcttgctctcccctg

SEQ ID NO: 458471 - DNA, 15 bp, Homo sapiens
agcttgctctcccct

SEQ ID NO: 458472 - DNA, 15 bp, Homo sapiens
aagcttgctctcccc

SEQ ID NO: 458473 - DNA, 15 bp, Homo sapiens
gaagcttgctctccc

SEQ ID NO: 458474 - DNA, 15 bp, Homo sapiens
ggaagcttgctctcc

SEQ ID NO: 458475 - DNA, 15 bp, Homo sapiens
gggaagcttgctctc

SEQ ID NO: 458476 - DNA, 15 bp, Homo sapiens
tgggaagcttgctct

SEQ ID NO: 458477 - DNA, 15 bp, Homo sapiens
ctgggaagcttgctc

SEQ ID NO: 458478 - DNA, 15 bp, Homo sapiens
cctgggaagcttgct

SEQ ID NO: 458479 - DNA, 15 bp, Homo sapiens
gcctgggaagcttgc

SEQ ID NO: 458480 - DNA, 15 bp, Homo sapiens
tgcctgggaagcttg

SEQ ID NO: 458481 - DNA, 15 bp, Homo sapiens
ctgcctgggaagctt

SEQ ID NO: 458482 - DNA, 15 bp, Homo sapiens
cctgcctgggaagct

SEQ ID NO: 458483 - DNA, 15 bp, Homo sapiens
acctgcctgggaagc

SEQ ID NO: 458484 - DNA, 15 bp, Homo sapiens
cacctgcctgggaag

SEQ ID NO: 458485 - DNA, 15 bp, Homo sapiens
tcacctgcctgggaa

SEQ ID NO: 458486 - DNA, 15 bp, Homo sapiens
ctcacctgcctggga

SEQ ID NO: 458487 - DNA, 15 bp, Homo sapiens
cctcacctgcctggg

SEQ ID NO: 458488 - DNA, 15 bp, Homo sapiens
tcctcacctgcctgg

SEQ ID NO: 458489 - DNA, 15 bp, Homo sapiens
atcctcacctgcctg

SEQ ID NO: 458490 - DNA, 15 bp, Homo sapiens
tatcctcacctgcct

SEQ ID NO: 458491 - DNA, 15 bp, Homo sapiens
gtatcctcacctgcc

SEQ ID NO: 458492 - DNA, 15 bp, Homo sapiens
agtatcctcacctgc

SEQ ID NO: 458493 - DNA, 15 bp, Homo sapiens
cagtatcctcacctg

SEQ ID NO: 458494 - DNA, 15 bp, Homo sapiens
tcagtatcctcacct

SEQ ID NO: 458495 - DNA, 15 bp, Homo sapiens
ctcagtatcctcacc

SEQ ID NO: 458496 - DNA, 15 bp, Homo sapiens
actcagtatcctcac

SEQ ID NO: 458497 - DNA, 15 bp, Homo sapiens
gactcagtatcctca

SEQ ID NO: 458498 - DNA, 15 bp, Homo sapiens
agactcagtatcctc

SEQ ID NO: 458499 - DNA, 15 bp, Homo sapiens
tagactcagtatcct

SEQ ID NO: 458500 - DNA, 15 bp, Homo sapiens
ttagactcagtatcc

SEQ ID NO: 458501 - DNA, 15 bp, Homo sapiens
gttagactcagtatc

SEQ ID NO: 458502 - DNA, 15 bp, Homo sapiens
ggttagactcagtat

SEQ ID NO: 458503 - DNA, 15 bp, Homo sapiens
gggttagactcagta

SEQ ID NO: 458504 - DNA, 15 bp, Homo sapiens
ggggttagactcagt

SEQ ID NO: 458505 - DNA, 15 bp, Homo sapiens
gggggttagactcag

SEQ ID NO: 458506 - DNA, 15 bp, Homo sapiens
tgggggttagactca

SEQ ID NO: 458507 - DNA, 15 bp, Homo sapiens
gtgggggttagactc

SEQ ID NO: 458508 - DNA, 15 bp, Homo sapiens
tgtgggggttagact

SEQ ID NO: 458509 - DNA, 15 bp, Homo sapiens
ctgtgggggttagac

SEQ ID NO: 458510 - DNA, 15 bp, Homo sapiens
cctgtgggggttaga

SEQ ID NO: 458511 - DNA, 15 bp, Homo sapiens
tcctgtgggggttag

SEQ ID NO: 458512 - DNA, 15 bp, Homo sapiens
ctcctgtgggggtta

SEQ ID NO: 458513 - DNA, 15 bp, Homo sapiens
gctcctgtgggggtt

SEQ ID NO: 458514 - DNA, 15 bp, Homo sapiens
ggctcctgtgggggt

SEQ ID NO: 458515 - DNA, 15 bp, Homo sapiens
aggctcctgtggggg

SEQ ID NO: 458516 - DNA, 15 bp, Homo sapiens
caggctcctgtgggg

SEQ ID NO: 458517 - DNA, 15 bp, Homo sapiens
ccaggctcctgtggg

SEQ ID NO: 458518 - DNA, 15 bp, Homo sapiens
gccaggctcctgtgg

SEQ ID NO: 458519 - DNA, 15 bp, Homo sapiens
agccaggctcctgtg

SEQ ID NO: 458520 - DNA, 15 bp, Homo sapiens
cagccaggctcctgt

SEQ ID NO: 458521 - DNA, 15 bp, Homo sapiens
ccagccaggctcctg

SEQ ID NO: 458522 - DNA, 15 bp, Homo sapiens
tccagccaggctcct

SEQ ID NO: 458523 - DNA, 15 bp, Homo sapiens
ctccagccaggctcc

SEQ ID NO: 458524 - DNA, 15 bp, Homo sapiens
cctccagccaggctc

SEQ ID NO: 458525 - DNA, 15 bp, Homo sapiens
acctccagccaggct

SEQ ID NO: 458526 - DNA, 15 bp, Homo sapiens
cacctccagccaggc

SEQ ID NO: 458527 - DNA, 15 bp, Homo sapiens
ccacctccagccagg

SEQ ID NO: 458528 - DNA, 15 bp, Homo sapiens
accacctccagccag

SEQ ID NO: 458529 - DNA, 15 bp, Homo sapiens
gaccacctccagcca

SEQ ID NO: 458530 - DNA, 15 bp, Homo sapiens
cgaccacctccagcc

SEQ ID NO: 458531 - DNA, 15 bp, Homo sapiens
ccgaccacctccagc

SEQ ID NO: 458532 - DNA, 15 bp, Homo sapiens
gccgaccacctccag

SEQ ID NO: 458533 - DNA, 15 bp, Homo sapiens
cgccgaccacctcca

SEQ ID NO: 458534 - DNA, 15 bp, Homo sapiens
ccgccgaccacctcc

SEQ ID NO: 458535 - DNA, 15 bp, Homo sapiens
tccgccgaccacctc

SEQ ID NO: 458536 - DNA, 15 bp, Homo sapiens
atccgccgaccacct

SEQ ID NO: 458537 - DNA, 15 bp, Homo sapiens
gatccgccgaccacc

SEQ ID NO: 458538 - DNA, 15 bp, Homo sapiens
tgatccgccgaccac

SEQ ID NO: 458539 - DNA, 15 bp, Homo sapiens
ctgatccgccgacca

SEQ ID NO: 458540 - DNA, 15 bp, Homo sapiens
cctgatccgccgacc

SEQ ID NO: 458541 - DNA, 15 bp, Homo sapiens
acctgatccgccgac

SEQ ID NO: 458542 - DNA, 15 bp, Homo sapiens
tacctgatccgccga

SEQ ID NO: 458543 - DNA, 15 bp, Homo sapiens
gtacctgatccgccg

SEQ ID NO: 458544 - DNA, 15 bp, Homo sapiens
ggtacctgatccgcc

SEQ ID NO: 458545 - DNA, 15 bp, Homo sapiens
gggtacctgatccgc

SEQ ID NO: 458546 - DNA, 15 bp, Homo sapiens
ggggtacctgatccg

SEQ ID NO: 458547 - DNA, 15 bp, Homo sapiens
aggggtacctgatcc

SEQ ID NO: 458548 - DNA, 15 bp, Homo sapiens
caggggtacctgatc

SEQ ID NO: 458549 - DNA, 15 bp, Homo sapiens
gcaggggtacctgat

SEQ ID NO: 458550 - DNA, 15 bp, Homo sapiens
ggcaggggtacctga

SEQ ID NO: 458551 - DNA, 15 bp, Homo sapiens
gggcaggggtacctg

SEQ ID NO: 458552 - DNA, 15 bp, Homo sapiens
ggggcaggggtacct

SEQ ID NO: 458553 - DNA, 15 bp, Homo sapiens
tggggcaggggtacc

SEQ ID NO: 458554 - DNA, 15 bp, Homo sapiens
ctggggcaggggtac

SEQ ID NO: 458555 - DNA, 15 bp, Homo sapiens
cctggggcaggggta

SEQ ID NO: 458556 - DNA, 15 bp, Homo sapiens
gcctggggcaggggt

SEQ ID NO: 458557 - DNA, 15 bp, Homo sapiens
ggcctggggcagggg

SEQ ID NO: 458558 - DNA, 15 bp, Homo sapiens
gggcctggggcaggg

SEQ ID NO: 458559 - DNA, 15 bp, Homo sapiens
agggcctggggcagg

SEQ ID NO: 458560 - DNA, 15 bp, Homo sapiens
tagggcctggggcag

SEQ ID NO: 458561 - DNA, 15 bp, Homo sapiens
gtagggcctggggca

SEQ ID NO: 458562 - DNA, 15 bp, Homo sapiens
ggtagggcctggggc

SEQ ID NO: 458563 - DNA, 15 bp, Homo sapiens
aggtagggcctgggg

SEQ ID NO: 458564 - DNA, 15 bp, Homo sapiens
caggtagggcctggg

SEQ ID NO: 458565 - DNA, 15 bp, Homo sapiens
gcaggtagggcctgg

SEQ ID NO: 458566 - DNA, 15 bp, Homo sapiens
tgcaggtagggcctg

SEQ ID NO: 458567 - DNA, 15 bp, Homo sapiens
gtgcaggtagggcct

SEQ ID NO: 458568 - DNA, 15 bp, Homo sapiens
ggtgcaggtagggcc

SEQ ID NO: 458569 - DNA, 15 bp, Homo sapiens
tggtgcaggtagggc

SEQ ID NO: 458570 - DNA, 15 bp, Homo sapiens
atggtgcaggtaggg

SEQ ID NO: 458571 - DNA, 15 bp, Homo sapiens
gatggtgcaggtagg

SEQ ID NO: 458572 - DNA, 15 bp, Homo sapiens
ggatggtgcaggtag

SEQ ID NO: 458573 - DNA, 15 bp, Homo sapiens
cggatggtgcaggta

SEQ ID NO: 458574 - DNA, 15 bp, Homo sapiens
gcggatggtgcaggt

SEQ ID NO: 458575 - DNA, 15 bp, Homo sapiens
tgcggatggtgcagg

SEQ ID NO: 458576 - DNA, 15 bp, Homo sapiens
ctgcggatggtgcag

SEQ ID NO: 458577 - DNA, 15 bp, Homo sapiens
tctgcggatggtgca

SEQ ID NO: 458578 - DNA, 15 bp, Homo sapiens
gtctgcggatggtgc

SEQ ID NO: 458579 - DNA, 15 bp, Homo sapiens
ggtctgcggatggtg

SEQ ID NO: 458580 - DNA, 15 bp, Homo sapiens
gggtctgcggatggt

SEQ ID NO: 458581 - DNA, 15 bp, Homo sapiens
ggggtctgcggatgg

SEQ ID NO: 458582 - DNA, 15 bp, Homo sapiens
gggggtctgcggatg

SEQ ID NO: 458583 - DNA, 15 bp, Homo sapiens
tgggggtctgcggat

SEQ ID NO: 458584 - DNA, 15 bp, Homo sapiens
ctgggggtctgcgga

SEQ ID NO: 458585 - DNA, 15 bp, Homo sapiens
cctgggggtctgcgg

SEQ ID NO: 458586 - DNA, 15 bp, Homo sapiens
ccctgggggtctgcg

SEQ ID NO: 458587 - DNA, 15 bp, Homo sapiens
cccctgggggtctgc

SEQ ID NO: 458588 - DNA, 15 bp, Homo sapiens
acccctgggggtctg

SEQ ID NO: 458589 - DNA, 15 bp, Homo sapiens
gacccctgggggtct

SEQ ID NO: 458590 - DNA, 15 bp, Homo sapiens
agacccctgggggtc

SEQ ID NO: 458591 - DNA, 15 bp, Homo sapiens
cagacccctgggggt

SEQ ID NO: 458592 - DNA, 15 bp, Homo sapiens
tcagacccctggggg

SEQ ID NO: 458593 - DNA, 15 bp, Homo sapiens
ctcagacccctgggg

SEQ ID NO: 458594 - DNA, 15 bp, Homo sapiens
tctcagacccctggg

SEQ ID NO: 458595 - DNA, 15 bp, Homo sapiens
gtctcagacccctgg

SEQ ID NO: 458596 - DNA, 15 bp, Homo sapiens
cgtctcagacccctg

SEQ ID NO: 458597 - DNA, 15 bp, Homo sapiens
ccgtctcagacccct

SEQ ID NO: 458598 - DNA, 15 bp, Homo sapiens
cccgtctcagacccc

SEQ ID NO: 458599 - DNA, 15 bp, Homo sapiens
acccgtctcagaccc

SEQ ID NO: 458600 - DNA, 15 bp, Homo sapiens
cacccgtctcagacc

SEQ ID NO: 458601 - DNA, 15 bp, Homo sapiens
ccacccgtctcagac

SEQ ID NO: 458602 - DNA, 15 bp, Homo sapiens
cccacccgtctcaga

SEQ ID NO: 458603 - DNA, 15 bp, Homo sapiens
tcccacccgtctcag

SEQ ID NO: 458604 - DNA, 15 bp, Homo sapiens
ctcccacccgtctca

SEQ ID NO: 458605 - DNA, 15 bp, Homo sapiens
gctcccacccgtctc

SEQ ID NO: 458606 - DNA, 15 bp, Homo sapiens
ggctcccacccgtct

SEQ ID NO: 458607 - DNA, 15 bp, Homo sapiens
gggctcccacccgtc

SEQ ID NO: 458608 - DNA, 15 bp, Homo sapiens
tgggctcccacccgt

SEQ ID NO: 458609 - DNA, 15 bp, Homo sapiens
ttgggctcccacccg

SEQ ID NO: 458610 - DNA, 15 bp, Homo sapiens
attgggctcccaccc

SEQ ID NO: 458611 - DNA, 15 bp, Homo sapiens
gattgggctcccacc

SEQ ID NO: 458612 - DNA, 15 bp, Homo sapiens
agattgggctcccac

SEQ ID NO: 458613 - DNA, 15 bp, Homo sapiens
cagattgggctccca

SEQ ID NO: 458614 - DNA, 15 bp, Homo sapiens
ccagattgggctccc

SEQ ID NO: 458615 - DNA, 15 bp, Homo sapiens
gccagattgggctcc

SEQ ID NO: 458616 - DNA, 15 bp, Homo sapiens
agccagattgggctc

SEQ ID NO: 458617 - DNA, 15 bp, Homo sapiens
tagccagattgggct

SEQ ID NO: 458618 - DNA, 15 bp, Homo sapiens
ctagccagattgggc

SEQ ID NO: 458619 - DNA, 15 bp, Homo sapiens
actagccagattggg

SEQ ID NO: 458620 - DNA, 15 bp, Homo sapiens
cactagccagattgg

SEQ ID NO: 458621 - DNA, 15 bp, Homo sapiens
acactagccagattg

SEQ ID NO: 458622 - DNA, 15 bp, Homo sapiens
gacactagccagatt

SEQ ID NO: 458623 - DNA, 15 bp, Homo sapiens
ggacactagccagat

SEQ ID NO: 458624 - DNA, 15 bp, Homo sapiens
gggacactagccaga

SEQ ID NO: 458625 - DNA, 15 bp, Homo sapiens
agggacactagccag

SEQ ID NO: 458626 - DNA, 15 bp, Homo sapiens
aagggacactagcca

SEQ ID NO: 458627 - DNA, 15 bp, Homo sapiens
aaagggacactagcc

SEQ ID NO: 458628 - DNA, 15 bp, Homo sapiens
gaaagggacactagc

SEQ ID NO: 458629 - DNA, 15 bp, Homo sapiens
agaaagggacactag

SEQ ID NO: 458630 - DNA, 15 bp, Homo sapiens
gagaaagggacacta

SEQ ID NO: 458631 - DNA, 15 bp, Homo sapiens
ggagaaagggacact

SEQ ID NO: 458632 - DNA, 15 bp, Homo sapiens
gggagaaagggacac

SEQ ID NO: 458633 - DNA, 15 bp, Homo sapiens
agggagaaagggaca

SEQ ID NO: 458634 - DNA, 15 bp, Homo sapiens
gagggagaaagggac

SEQ ID NO: 458635 - DNA, 15 bp, Homo sapiens
ggagggagaaaggga

SEQ ID NO: 458636 - DNA, 15 bp, Homo sapiens
gggagggagaaaggg

SEQ ID NO: 458637 - DNA, 15 bp, Homo sapiens
ggggagggagaaagg

SEQ ID NO: 458638 - DNA, 15 bp, Homo sapiens
tggggagggagaaag

SEQ ID NO: 458639 - DNA, 15 bp, Homo sapiens
gtggggagggagaaa

SEQ ID NO: 458640 - DNA, 15 bp, Homo sapiens
agtggggagggagaa

SEQ ID NO: 458641 - DNA, 15 bp, Homo sapiens
gagtggggagggaga

SEQ ID NO: 458642 - DNA, 15 bp, Homo sapiens
ggagtggggagggag

SEQ ID NO: 458643 - DNA, 15 bp, Homo sapiens
tggagtggggaggga

SEQ ID NO: 458644 - DNA, 15 bp, Homo sapiens
gtggagtggggaggg

SEQ ID NO: 458645 - DNA, 15 bp, Homo sapiens
agtggagtggggagg

SEQ ID NO: 458646 - DNA, 15 bp, Homo sapiens
gagtggagtggggag

SEQ ID NO: 458647 - DNA, 15 bp, Homo sapiens
ggagtggagtgggga

SEQ ID NO: 458648 - DNA, 15 bp, Homo sapiens
gggagtggagtgggg

SEQ ID NO: 458649 - DNA, 15 bp, Homo sapiens
tgggagtggagtggg

SEQ ID NO: 458650 - DNA, 15 bp, Homo sapiens
atgggagtggagtgg

SEQ ID NO: 458651 - DNA, 15 bp, Homo sapiens
gatgggagtggagtg

SEQ ID NO: 458652 - DNA, 15 bp, Homo sapiens
ggatgggagtggagt

SEQ ID NO: 458653 - DNA, 15 bp, Homo sapiens
aggatgggagtggag

SEQ ID NO: 458654 - DNA, 15 bp, Homo sapiens
caggatgggagtgga

SEQ ID NO: 458655 - DNA, 15 bp, Homo sapiens
gcaggatgggagtgg

SEQ ID NO: 458656 - DNA, 15 bp, Homo sapiens
agcaggatgggagtg

SEQ ID NO: 458657 - DNA, 15 bp, Homo sapiens
gagcaggatgggagt

SEQ ID NO: 458658 - DNA, 15 bp, Homo sapiens
ggagcaggatgggag

SEQ ID NO: 458659 - DNA, 15 bp, Homo sapiens
aggagcaggatggga

SEQ ID NO: 458660 - DNA, 15 bp, Homo sapiens
taggagcaggatggg

SEQ ID NO: 458661 - DNA, 15 bp, Homo sapiens
ttaggagcaggatgg

SEQ ID NO: 458662 - DNA, 15 bp, Homo sapiens
attaggagcaggatg

SEQ ID NO: 458663 - DNA, 15 bp, Homo sapiens
gattaggagcaggat

SEQ ID NO: 458664 - DNA, 15 bp, Homo sapiens
ggattaggagcagga

SEQ ID NO: 458665 - DNA, 15 bp, Homo sapiens
gggattaggagcagg

SEQ ID NO: 458666 - DNA, 15 bp, Homo sapiens
agggattaggagcag

SEQ ID NO: 458667 - DNA, 15 bp, Homo sapiens
aagggattaggagca

SEQ ID NO: 458668 - DNA, 15 bp, Homo sapiens
aaagggattaggagc

SEQ ID NO: 458669 - DNA, 15 bp, Homo sapiens
gaaagggattaggag

SEQ ID NO: 458670 - DNA, 15 bp, Homo sapiens
ggaaagggattagga

SEQ ID NO: 458671 - DNA, 15 bp, Homo sapiens
tggaaagggattagg

SEQ ID NO: 458672 - DNA, 15 bp, Homo sapiens
ctggaaagggattag

SEQ ID NO: 458673 - DNA, 15 bp, Homo sapiens
actggaaagggatta

SEQ ID NO: 458674 - DNA, 15 bp, Homo sapiens
gactggaaagggatt

SEQ ID NO: 458675 - DNA, 15 bp, Homo sapiens
ggactggaaagggat

SEQ ID NO: 458676 - DNA, 15 bp, Homo sapiens
gggactggaaaggga

SEQ ID NO: 458677 - DNA, 15 bp, Homo sapiens
agggactggaaaggg

SEQ ID NO: 458678 - DNA, 15 bp, Homo sapiens
gagggactggaaagg

SEQ ID NO: 458679 - DNA, 15 bp, Homo sapiens
tgagggactggaaag

SEQ ID NO: 458680 - DNA, 15 bp, Homo sapiens
gtgagggactggaaa

SEQ ID NO: 458681 - DNA, 15 bp, Homo sapiens
agtgagggactggaa

SEQ ID NO: 458682 - DNA, 15 bp, Homo sapiens
cagtgagggactgga

SEQ ID NO: 458683 - DNA, 15 bp, Homo sapiens
gcagtgagggactgg

SEQ ID NO: 458684 - DNA, 15 bp, Homo sapiens
tgcagtgagggactg

SEQ ID NO: 458685 - DNA, 15 bp, Homo sapiens
ctgcagtgagggact

SEQ ID NO: 458686 - DNA, 15 bp, Homo sapiens
gctgcagtgagggac

SEQ ID NO: 458687 - DNA, 15 bp, Homo sapiens
ggctgcagtgaggga

SEQ ID NO: 458688 - DNA, 15 bp, Homo sapiens
aggctgcagtgaggg

SEQ ID NO: 458689 - DNA, 15 bp, Homo sapiens
gaggctgcagtgagg

SEQ ID NO: 458690 - DNA, 15 bp, Homo sapiens
gtgaggctgcagtga

SEQ ID NO: 458691 - DNA, 15 bp, Homo sapiens
agtgaggctgcagtg

SEQ ID NO: 458692 - DNA, 15 bp, Homo sapiens
cagtgaggctgcagt

SEQ ID NO: 458693 - DNA, 15 bp, Homo sapiens
ccagtgaggctgcag

SEQ ID NO: 458694 - DNA, 15 bp, Homo sapiens
cccagtgaggctgca

SEQ ID NO: 458695 - DNA, 15 bp, Homo sapiens
ccccagtgaggctgc

SEQ ID NO: 458696 - DNA, 15 bp, Homo sapiens
cccccagtgaggctg

SEQ ID NO: 458697 - DNA, 15 bp, Homo sapiens
acccccagtgaggct

SEQ ID NO: 458698 - DNA, 15 bp, Homo sapiens
gacccccagtgaggc

SEQ ID NO: 458699 - DNA, 15 bp, Homo sapiens
ggacccccagtgagg

SEQ ID NO: 458700 - DNA, 15 bp, Homo sapiens
gggacccccagtgag

SEQ ID NO: 458701 - DNA, 15 bp, Homo sapiens
agggacccccagtga

SEQ ID NO: 458702 - DNA, 15 bp, Homo sapiens
gagggacccccagtg

SEQ ID NO: 458703 - DNA, 15 bp, Homo sapiens
agagggacccccagt

SEQ ID NO: 458704 - DNA, 15 bp, Homo sapiens
gagagggacccccag

SEQ ID NO: 458705 - DNA, 15 bp, Homo sapiens
ggagagggaccccca

SEQ ID NO: 458706 - DNA, 15 bp, Homo sapiens
tggagagggaccccc

SEQ ID NO: 458707 - DNA, 15 bp, Homo sapiens
atggagagggacccc

SEQ ID NO: 458708 - DNA, 15 bp, Homo sapiens
tatggagagggaccc

SEQ ID NO: 458709 - DNA, 15 bp, Homo sapiens
ctatggagagggacc

SEQ ID NO: 458710 - DNA, 15 bp, Homo sapiens
actatggagagggac

SEQ ID NO: 458711 - DNA, 15 bp, Homo sapiens
cactatggagaggga

SEQ ID NO: 458712 - DNA, 15 bp, Homo sapiens
tcactatggagaggg

SEQ ID NO: 458713 - DNA, 15 bp, Homo sapiens
atcactatggagagg

SEQ ID NO: 458714 - DNA, 15 bp, Homo sapiens
tatcactatggagag

SEQ ID NO: 458715 - DNA, 15 bp, Homo sapiens
ctatcactatggaga

SEQ ID NO: 458716 - DNA, 15 bp, Homo sapiens
gctatcactatggag

SEQ ID NO: 458717 - DNA, 15 bp, Homo sapiens
ggctatcactatgga

SEQ ID NO: 458718 - DNA, 15 bp, Homo sapiens
tggctatcactatgg

SEQ ID NO: 458719 - DNA, 15 bp, Homo sapiens
atggctatcactatg

SEQ ID NO: 458720 - DNA, 15 bp, Homo sapiens
catggctatcactat

SEQ ID NO: 458721 - DNA, 15 bp, Homo sapiens
tcatggctatcacta

SEQ ID NO: 458722 - DNA, 15 bp, Homo sapiens
ctcatggctatcact

SEQ ID NO: 458723 - DNA, 15 bp, Homo sapiens
cctcatggctatcac

SEQ ID NO: 458724 - DNA, 15 bp, Homo sapiens
tcctcatggctatca

SEQ ID NO: 458725 - DNA, 15 bp, Homo sapiens
gtcctcatggctatc

SEQ ID NO: 458726 - DNA, 15 bp, Homo sapiens
tgtcctcatggctat

SEQ ID NO: 458727 - DNA, 15 bp, Homo sapiens
gtgtcctcatggcta

SEQ ID NO: 458728 - DNA, 15 bp, Homo sapiens
agtgtcctcatggct

SEQ ID NO: 458729 - DNA, 15 bp, Homo sapiens
cagtgtcctcatggc

SEQ ID NO: 458730 - DNA, 15 bp, Homo sapiens
ccagtgtcctcatgg

SEQ ID NO: 458731 - DNA, 15 bp, Homo sapiens
cccagtgtcctcatg

SEQ ID NO: 458732 - DNA, 15 bp, Homo sapiens
tcccagtgtcctcat

SEQ ID NO: 458733 - DNA, 15 bp, Homo sapiens
atcccagtgtcctca

SEQ ID NO: 458734 - DNA, 15 bp, Homo sapiens
aatcccagtgtcctc

SEQ ID NO: 458735 - DNA, 15 bp, Homo sapiens
gaatcccagtgtcct

SEQ ID NO: 458736 - DNA, 15 bp, Homo sapiens
agaatcccagtgtcc

SEQ ID NO: 458737 - DNA, 15 bp, Homo sapiens
cagaatcccagtgtc

SEQ ID NO: 458738 - DNA, 15 bp, Homo sapiens
ccagaatcccagtgt

SEQ ID NO: 458739 - DNA, 15 bp, Homo sapiens
tccagaatcccagtg

SEQ ID NO: 458740 - DNA, 15 bp, Homo sapiens
gtccagaatcccagt

SEQ ID NO: 458741 - DNA, 15 bp, Homo sapiens
agtccagaatcccag

SEQ ID NO: 458742 - DNA, 15 bp, Homo sapiens
aagtccagaatccca

SEQ ID NO: 458743 - DNA, 15 bp, Homo sapiens
gaagtccagaatccc

SEQ ID NO: 458744 - DNA, 15 bp, Homo sapiens
tgaagtccagaatcc

SEQ ID NO: 458745 - DNA, 15 bp, Homo sapiens
ctgaagtccagaatc

SEQ ID NO: 458746 - DNA, 15 bp, Homo sapiens
gctgaagtccagaat

SEQ ID NO: 458747 - DNA, 15 bp, Homo sapiens
agctgaagtccagaa

SEQ ID NO: 458748 - DNA, 15 bp, Homo sapiens
gagctgaagtccaga

SEQ ID NO: 458749 - DNA, 15 bp, Homo sapiens
tgagctgaagtccag

SEQ ID NO: 458750 - DNA, 15 bp, Homo sapiens
gtgagctgaagtcca

SEQ ID NO: 458751 - DNA, 15 bp, Homo sapiens
agtgagctgaagtcc

SEQ ID NO: 458752 - DNA, 15 bp, Homo sapiens
cagtgagctgaagtc

SEQ ID NO: 458753 - DNA, 15 bp, Homo sapiens
gcagtgagctgaagt

SEQ ID NO: 458754 - DNA, 15 bp, Homo sapiens
agcagtgagctgaag

SEQ ID NO: 458755 - DNA, 15 bp, Homo sapiens
cagcagtgagctgaa

SEQ ID NO: 458756 - DNA, 15 bp, Homo sapiens
tcagcagtgagctga

SEQ ID NO: 458757 - DNA, 15 bp, Homo sapiens
ttcagcagtgagctg

SEQ ID NO: 458758 - DNA, 15 bp, Homo sapiens
tttcagcagtgagct

SEQ ID NO: 458759 - DNA, 15 bp, Homo sapiens
ttttcagcagtgagc

SEQ ID NO: 458760 - DNA, 15 bp, Homo sapiens
tttttcagcagtgag

SEQ ID NO: 458761 - DNA, 15 bp, Homo sapiens
ctttttcagcagtga

SEQ ID NO: 458762 - DNA, 15 bp, Homo sapiens
tctttttcagcagtg

SEQ ID NO: 458763 - DNA, 15 bp, Homo sapiens
ctctttttcagcagt

SEQ ID NO: 458764 - DNA, 15 bp, Homo sapiens
cctctttttcagcag

SEQ ID NO: 458765 - DNA, 15 bp, Homo sapiens
acctctttttcagca

SEQ ID NO: 458766 - DNA, 15 bp, Homo sapiens
cacctctttttcagc

SEQ ID NO: 458767 - DNA, 15 bp, Homo sapiens
tcacctctttttcag

SEQ ID NO: 458768 - DNA, 15 bp, Homo sapiens
ctcacctctttttca

SEQ ID NO: 458769 - DNA, 15 bp, Homo sapiens
actcacctctttttc

SEQ ID NO: 458770 - DNA, 15 bp, Homo sapiens
gactcacctcttttt

SEQ ID NO: 458771 - DNA, 15 bp, Homo sapiens
ggactcacctctttt

SEQ ID NO: 458772 - DNA, 15 bp, Homo sapiens
aggactcacctcttt

SEQ ID NO: 458773 - DNA, 15 bp, Homo sapiens
caggactcacctctt

SEQ ID NO: 458774 - DNA, 15 bp, Homo sapiens
ccaggactcacctct

SEQ ID NO: 458775 - DNA, 15 bp, Homo sapiens
cccaggactcacctc

SEQ ID NO: 458776 - DNA, 15 bp, Homo sapiens
acccaggactcacct

SEQ ID NO: 458777 - DNA, 15 bp, Homo sapiens
cacccaggactcacc

SEQ ID NO: 458778 - DNA, 15 bp, Homo sapiens
ccacccaggactcac

SEQ ID NO: 458779 - DNA, 15 bp, Homo sapiens
gccacccaggactca

SEQ ID NO: 458780 - DNA, 15 bp, Homo sapiens
tgccacccaggactc

SEQ ID NO: 458781 - DNA, 15 bp, Homo sapiens
ctgccacccaggact

SEQ ID NO: 458782 - DNA, 15 bp, Homo sapiens
actgccacccaggac

SEQ ID NO: 458783 - DNA, 15 bp, Homo sapiens
aactgccacccagga

SEQ ID NO: 458784 - DNA, 15 bp, Homo sapiens
gaactgccacccagg

SEQ ID NO: 458785 - DNA, 15 bp, Homo sapiens
ggaactgccacccag

SEQ ID NO: 458786 - DNA, 15 bp, Homo sapiens
aggaactgccaccca

SEQ ID NO: 458787 - DNA, 15 bp, Homo sapiens
caggaactgccaccc

SEQ ID NO: 458788 - DNA, 15 bp, Homo sapiens
ccaggaactgccacc

SEQ ID NO: 458789 - DNA, 15 bp, Homo sapiens
cccaggaactgccac

SEQ ID NO: 458790 - DNA, 15 bp, Homo sapiens
ccccaggaactgcca

SEQ ID NO: 458791 - DNA, 15 bp, Homo sapiens
gccccaggaactgcc

SEQ ID NO: 458792 - DNA, 15 bp, Homo sapiens
tgccccaggaactgc

SEQ ID NO: 458793 - DNA, 15 bp, Homo sapiens
ctgccccaggaactg

SEQ ID NO: 458794 - DNA, 15 bp, Homo sapiens
gctgccccaggaact

SEQ ID NO: 458795 - DNA, 15 bp, Homo sapiens
agctgccccaggaac

SEQ ID NO: 458796 - DNA, 15 bp, Homo sapiens
cagctgccccaggaa

SEQ ID NO: 458797 - DNA, 15 bp, Homo sapiens
ccagctgccccagga

SEQ ID NO: 458798 - DNA, 15 bp, Homo sapiens
accagctgccccagg

SEQ ID NO: 458799 - DNA, 15 bp, Homo sapiens
caccagctgccccag

SEQ ID NO: 458800 - DNA, 15 bp, Homo sapiens
tcaccagctgcccca

SEQ ID NO: 458801 - DNA, 15 bp, Homo sapiens
ctcaccagctgcccc

SEQ ID NO: 458802 - DNA, 15 bp, Homo sapiens
cctcaccagctgccc

SEQ ID NO: 458803 - DNA, 15 bp, Homo sapiens
gcctcaccagctgcc

SEQ ID NO: 458804 - DNA, 15 bp, Homo sapiens
ggcctcaccagctgc

SEQ ID NO: 458805 - DNA, 15 bp, Homo sapiens
aggcctcaccagctg

SEQ ID NO: 458806 - DNA, 15 bp, Homo sapiens
caggcctcaccagct

SEQ ID NO: 458807 - DNA, 15 bp, Homo sapiens
ccaggcctcaccagc

SEQ ID NO: 458808 - DNA, 15 bp, Homo sapiens
gccaggcctcaccag

SEQ ID NO: 458809 - DNA, 15 bp, Homo sapiens
agccaggcctcacca

SEQ ID NO: 458810 - DNA, 15 bp, Homo sapiens
gagccaggcctcacc

SEQ ID NO: 458811 - DNA, 15 bp, Homo sapiens
ggagccaggcctcac

SEQ ID NO: 458812 - DNA, 15 bp, Homo sapiens
tggagccaggcctca

SEQ ID NO: 458813 - DNA, 15 bp, Homo sapiens
ttggagccaggcctc

SEQ ID NO: 458814 - DNA, 15 bp, Homo sapiens
tttggagccaggcct

SEQ ID NO: 458815 - DNA, 15 bp, Homo sapiens
atttggagccaggcc

SEQ ID NO: 458816 - DNA, 15 bp, Homo sapiens
gatttggagccaggc

SEQ ID NO: 458817 - DNA, 15 bp, Homo sapiens
ggatttggagccagg

SEQ ID NO: 458818 - DNA, 15 bp, Homo sapiens
gggatttggagccag

SEQ ID NO: 458819 - DNA, 15 bp, Homo sapiens
tgggatttggagcca

SEQ ID NO: 458820 - DNA, 15 bp, Homo sapiens
ctgggatttggagcc

SEQ ID NO: 458821 - DNA, 15 bp, Homo sapiens
gctgggatttggagc

SEQ ID NO: 458822 - DNA, 15 bp, Homo sapiens
tgctgggatttggag

SEQ ID NO: 458823 - DNA, 15 bp, Homo sapiens
gtgctgggatttgga

SEQ ID NO: 458824 - DNA, 15 bp, Homo sapiens
agtgctgggatttgg

SEQ ID NO: 458825 - DNA, 15 bp, Homo sapiens
cagtgctgggatttg

SEQ ID NO: 458826 - DNA, 15 bp, Homo sapiens
acagtgctgggattt

SEQ ID NO: 458827 - DNA, 15 bp, Homo sapiens
cacagtgctgggatt

SEQ ID NO: 458828 - DNA, 15 bp, Homo sapiens
ccacagtgctgggat

SEQ ID NO: 458829 - DNA, 15 bp, Homo sapiens
accacagtgctggga

SEQ ID NO: 458830 - DNA, 15 bp, Homo sapiens
aaccacagtgctggg

SEQ ID NO: 458831 - DNA, 15 bp, Homo sapiens
aaaccacagtgctgg

SEQ ID NO: 458832 - DNA, 15 bp, Homo sapiens
caaaccacagtgctg

SEQ ID NO: 458833 - DNA, 15 bp, Homo sapiens
gcaaaccacagtgct

SEQ ID NO: 458834 - DNA, 15 bp, Homo sapiens
ggcaaaccacagtgc

SEQ ID NO: 458835 - DNA, 15 bp, Homo sapiens
tggcaaaccacagtg

SEQ ID NO: 458836 - DNA, 15 bp, Homo sapiens
ctggcaaaccacagt

SEQ ID NO: 458837 - DNA, 15 bp, Homo sapiens
gctggcaaaccacag

SEQ ID NO: 458838 - DNA, 15 bp, Homo sapiens
agctggcaaaccaca

SEQ ID NO: 458839 - DNA, 15 bp, Homo sapiens
cagctggcaaaccac

SEQ ID NO: 458840 - DNA, 15 bp, Homo sapiens
acagctggcaaacca

SEQ ID NO: 458841 - DNA, 15 bp, Homo sapiens
cacagctggcaaacc

SEQ ID NO: 458842 - DNA, 15 bp, Homo sapiens
acacagctggcaaac

SEQ ID NO: 458843 - DNA, 15 bp, Homo sapiens
cacacagctggcaaa

SEQ ID NO: 458844 - DNA, 15 bp, Homo sapiens
tcacacagctggcaa

SEQ ID NO: 458845 - DNA, 15 bp, Homo sapiens
gtcacacagctggca

SEQ ID NO: 458846 - DNA, 15 bp, Homo sapiens
ggtcacacagctggc

SEQ ID NO: 458847 - DNA, 15 bp, Homo sapiens
gggtcacacagctgg

SEQ ID NO: 458848 - DNA, 15 bp, Homo sapiens
agggtcacacagctg

SEQ ID NO: 458849 - DNA, 15 bp, Homo sapiens
cagggtcacacagct

SEQ ID NO: 458850 - DNA, 15 bp, Homo sapiens
tcagggtcacacagc

SEQ ID NO: 458851 - DNA, 15 bp, Homo sapiens
ctcagggtcacacag

SEQ ID NO: 458852 - DNA, 15 bp, Homo sapiens
gctcagggtcacaca

SEQ ID NO: 458853 - DNA, 15 bp, Homo sapiens
tgctcagggtcacac

SEQ ID NO: 458854 - DNA, 15 bp, Homo sapiens
gtgctcagggtcaca

SEQ ID NO: 458855 - DNA, 15 bp, Homo sapiens
tgtgctcagggtcac

SEQ ID NO: 458856 - DNA, 15 bp, Homo sapiens
ttgtgctcagggtca

SEQ ID NO: 458857 - DNA, 15 bp, Homo sapiens
gttgtgctcagggtc

SEQ ID NO: 458858 - DNA, 15 bp, Homo sapiens
tgttgtgctcagggt

SEQ ID NO: 458859 - DNA, 15 bp, Homo sapiens
gtgttgtgctcaggg

SEQ ID NO: 458860 - DNA, 15 bp, Homo sapiens
agtgttgtgctcagg

SEQ ID NO: 458861 - DNA, 15 bp, Homo sapiens
cagtgttgtgctcag

SEQ ID NO: 458862 - DNA, 15 bp, Homo sapiens
gcagtgttgtgctca

SEQ ID NO: 458863 - DNA, 15 bp, Homo sapiens
tgcagtgttgtgctc

SEQ ID NO: 458864 - DNA, 15 bp, Homo sapiens
gtgcagtgttgtgct

SEQ ID NO: 458865 - DNA, 15 bp, Homo sapiens
ggtgcagtgttgtgc

SEQ ID NO: 458866 - DNA, 15 bp, Homo sapiens
aggtgcagtgttgtg

SEQ ID NO: 458867 - DNA, 15 bp, Homo sapiens
gaggtgcagtgttgt

SEQ ID NO: 458868 - DNA, 15 bp, Homo sapiens
agaggtgcagtgttg

SEQ ID NO: 458869 - DNA, 15 bp, Homo sapiens
gagaggtgcagtgtt

SEQ ID NO: 458870 - DNA, 15 bp, Homo sapiens
agagaggtgcagtgt

SEQ ID NO: 458871 - DNA, 15 bp, Homo sapiens
cagagaggtgcagtg

SEQ ID NO: 458872 - DNA, 15 bp, Homo sapiens
tcagagaggtgcagt

SEQ ID NO: 458873 - DNA, 15 bp, Homo sapiens
ctcagagaggtgcag

SEQ ID NO: 458874 - DNA, 15 bp, Homo sapiens
actcagagaggtgca

SEQ ID NO: 458875 - DNA, 15 bp, Homo sapiens
aactcagagaggtgc

SEQ ID NO: 458876 - DNA, 15 bp, Homo sapiens
caactcagagaggtg

SEQ ID NO: 458877 - DNA, 15 bp, Homo sapiens
ccaactcagagaggt

SEQ ID NO: 458878 - DNA, 15 bp, Homo sapiens
accaactcagagagg

SEQ ID NO: 458879 - DNA, 15 bp, Homo sapiens
aaccaactcagagag

SEQ ID NO: 458880 - DNA, 15 bp, Homo sapiens
aaaccaactcagaga

SEQ ID NO: 458881 - DNA, 15 bp, Homo sapiens
gaaaccaactcagag

SEQ ID NO: 458882 - DNA, 15 bp, Homo sapiens
ggaaaccaactcaga

SEQ ID NO: 458883 - DNA, 15 bp, Homo sapiens
aggaaaccaactcag

SEQ ID NO: 458884 - DNA, 15 bp, Homo sapiens
aaggaaaccaactca

SEQ ID NO: 458885 - DNA, 15 bp, Homo sapiens
caaggaaaccaactc

SEQ ID NO: 458886 - DNA, 15 bp, Homo sapiens
acaaggaaaccaact

SEQ ID NO: 458887 - DNA, 15 bp, Homo sapiens
gacaaggaaaccaac

SEQ ID NO: 458888 - DNA, 15 bp, Homo sapiens
agacaaggaaaccaa

SEQ ID NO: 458889 - DNA, 15 bp, Homo sapiens
cagacaaggaaacca

SEQ ID NO: 458890 - DNA, 15 bp, Homo sapiens
acagacaaggaaacc

SEQ ID NO: 458891 - DNA, 15 bp, Homo sapiens
gacagacaaggaaac

SEQ ID NO: 458892 - DNA, 15 bp, Homo sapiens
cgacagacaaggaaa

SEQ ID NO: 458893 - DNA, 15 bp, Homo sapiens
tcgacagacaaggaa

SEQ ID NO: 458894 - DNA, 15 bp, Homo sapiens
ctcgacagacaagga

SEQ ID NO: 458895 - DNA, 15 bp, Homo sapiens
cctcgacagacaagg

SEQ ID NO: 458896 - DNA, 15 bp, Homo sapiens
ccctcgacagacaag

SEQ ID NO: 458897 - DNA, 15 bp, Homo sapiens
cccctcgacagacaa

SEQ ID NO: 458898 - DNA, 15 bp, Homo sapiens
tcccctcgacagaca

SEQ ID NO: 458899 - DNA, 15 bp, Homo sapiens
atcccctcgacagac

SEQ ID NO: 458900 - DNA, 15 bp, Homo sapiens
catcccctcgacaga

SEQ ID NO: 458901 - DNA, 15 bp, Homo sapiens
tcatcccctcgacag

SEQ ID NO: 458902 - DNA, 15 bp, Homo sapiens
atcatcccctcgaca

SEQ ID NO: 458903 - DNA, 15 bp, Homo sapiens
gatcatcccctcgac

SEQ ID NO: 458904 - DNA, 15 bp, Homo sapiens
ggatcatcccctcga

SEQ ID NO: 458905 - DNA, 15 bp, Homo sapiens
gggatcatcccctcg

SEQ ID NO: 458906 - DNA, 15 bp, Homo sapiens
tgggatcatcccctc

SEQ ID NO: 458907 - DNA, 15 bp, Homo sapiens
ctgggatcatcccct

SEQ ID NO: 458908 - DNA, 15 bp, Homo sapiens
actgggatcatcccc

SEQ ID NO: 458909 - DNA, 15 bp, Homo sapiens
cactgggatcatccc

SEQ ID NO: 458910 - DNA, 15 bp, Homo sapiens
acactgggatcatcc

SEQ ID NO: 458911 - DNA, 15 bp, Homo sapiens
cacactgggatcatc

SEQ ID NO: 458912 - DNA, 15 bp, Homo sapiens
ccacactgggatcat

SEQ ID NO: 458913 - DNA, 15 bp, Homo sapiens
tccacactgggatca

SEQ ID NO: 458914 - DNA, 15 bp, Homo sapiens
ttccacactgggatc

SEQ ID NO: 458915 - DNA, 15 bp, Homo sapiens
cttccacactgggat

SEQ ID NO: 458916 - DNA, 15 bp, Homo sapiens
ccttccacactggga

SEQ ID NO: 458917 - DNA, 15 bp, Homo sapiens
tccttccacactggg

SEQ ID NO: 458918 - DNA, 15 bp, Homo sapiens
ctccttccacactgg

SEQ ID NO: 458919 - DNA, 15 bp, Homo sapiens
actccttccacactg

SEQ ID NO: 458920 - DNA, 15 bp, Homo sapiens
aactccttccacact

SEQ ID NO: 458921 - DNA, 15 bp, Homo sapiens
taactccttccacac

SEQ ID NO: 458922 - DNA, 15 bp, Homo sapiens
ttaactccttccaca

SEQ ID NO: 458923 - DNA, 15 bp, Homo sapiens
tttaactccttccac

SEQ ID NO: 458924 - DNA, 15 bp, Homo sapiens
ctttaactccttcca

SEQ ID NO: 458925 - DNA, 15 bp, Homo sapiens
cctttaactccttcc

SEQ ID NO: 458926 - DNA, 15 bp, Homo sapiens
ccctttaactccttc

SEQ ID NO: 458927 - DNA, 15 bp, Homo sapiens
gccctttaactcctt

SEQ ID NO: 458928 - DNA, 15 bp, Homo sapiens
agccctttaactcct

SEQ ID NO: 458929 - DNA, 15 bp, Homo sapiens
gagccctttaactcc

SEQ ID NO: 458930 - DNA, 15 bp, Homo sapiens
agagccctttaactc

SEQ ID NO: 458931 - DNA, 15 bp, Homo sapiens
cagagccctttaact

SEQ ID NO: 458932 - DNA, 15 bp, Homo sapiens
gcagagccctttaac

SEQ ID NO: 458933 - DNA, 15 bp, Homo sapiens
tgcagagccctttaa

SEQ ID NO: 458934 - DNA, 15 bp, Homo sapiens
ctgcagagcccttta

SEQ ID NO: 458935 - DNA, 15 bp, Homo sapiens
tctgcagagcccttt

SEQ ID NO: 458936 - DNA, 15 bp, Homo sapiens
gtctgcagagccctt

SEQ ID NO: 458937 - DNA, 15 bp, Homo sapiens
tgtctgcagagccct

SEQ ID NO: 458938 - DNA, 15 bp, Homo sapiens
atgtctgcagagccc

SEQ ID NO: 458939 - DNA, 15 bp, Homo sapiens
aatgtctgcagagcc

SEQ ID NO: 458940 - DNA, 15 bp, Homo sapiens
taatgtctgcagagc

SEQ ID NO: 458941 - DNA, 15 bp, Homo sapiens
ataatgtctgcagag

SEQ ID NO: 458942 - DNA, 15 bp, Homo sapiens
cataatgtctgcaga

SEQ ID NO: 458943 - DNA, 15 bp, Homo sapiens
acataatgtctgcag

SEQ ID NO: 458944 - DNA, 15 bp, Homo sapiens
gacataatgtctgca

SEQ ID NO: 458945 - DNA, 15 bp, Homo sapiens
ggacataatgtctgc

SEQ ID NO: 458946 - DNA, 15 bp, Homo sapiens
gggacataatgtctg

SEQ ID NO: 458947 - DNA, 15 bp, Homo sapiens
cgggacataatgtct

SEQ ID NO: 458948 - DNA, 15 bp, Homo sapiens
acgggacataatgtc

SEQ ID NO: 458949 - DNA, 15 bp, Homo sapiens
gacgggacataatgt

SEQ ID NO: 458950 - DNA, 15 bp, Homo sapiens
tgacgggacataatg

SEQ ID NO: 458951 - DNA, 15 bp, Homo sapiens
ttgacgggacataat

SEQ ID NO: 458952 - DNA, 15 bp, Homo sapiens
gttgacgggacataa

SEQ ID NO: 458953 - DNA, 15 bp, Homo sapiens
tgttgacgggacata

SEQ ID NO: 458954 - DNA, 15 bp, Homo sapiens
ctgttgacgggacat

SEQ ID NO: 458955 - DNA, 15 bp, Homo sapiens
actgttgacgggaca

SEQ ID NO: 458956 - DNA, 15 bp, Homo sapiens
gactgttgacgggac

SEQ ID NO: 458957 - DNA, 15 bp, Homo sapiens
tgactgttgacggga

SEQ ID NO: 458958 - DNA, 15 bp, Homo sapiens
atgactgttgacggg

SEQ ID NO: 458959 - DNA, 15 bp, Homo sapiens
gatgactgttgacgg

SEQ ID NO: 458960 - DNA, 15 bp, Homo sapiens
ggatgactgttgacg

SEQ ID NO: 458961 - DNA, 15 bp, Homo sapiens
aggatgactgttgac

SEQ ID NO: 458962 - DNA, 15 bp, Homo sapiens
gaggatgactgttga

SEQ ID NO: 458963 - DNA, 15 bp, Homo sapiens
tgaggatgactgttg

SEQ ID NO: 458964 - DNA, 15 bp, Homo sapiens
gtgaggatgactgtt

SEQ ID NO: 458965 - DNA, 15 bp, Homo sapiens
tgtgaggatgactgt

SEQ ID NO: 458966 - DNA, 15 bp, Homo sapiens
ctgtgaggatgactg

SEQ ID NO: 458967 - DNA, 15 bp, Homo sapiens
actgtgaggatgact

SEQ ID NO: 458968 - DNA, 15 bp, Homo sapiens
cactgtgaggatgac

SEQ ID NO: 458969 - DNA, 15 bp, Homo sapiens
acactgtgaggatga

SEQ ID NO: 458970 - DNA, 15 bp, Homo sapiens
gacactgtgaggatg

SEQ ID NO: 458971 - DNA, 15 bp, Homo sapiens
ggacactgtgaggat

SEQ ID NO: 458972 - DNA, 15 bp, Homo sapiens
gggacactgtgagga

SEQ ID NO: 458973 - DNA, 15 bp, Homo sapiens
ggggacactgtgagg

SEQ ID NO: 458974 - DNA, 15 bp, Homo sapiens
gggggacactgtgag

SEQ ID NO: 458975 - DNA, 15 bp, Homo sapiens
tgggggacactgtga

SEQ ID NO: 458976 - DNA, 15 bp, Homo sapiens
gtgggggacactgtg

SEQ ID NO: 458977 - DNA, 15 bp, Homo sapiens
cgtgggggacactgt

SEQ ID NO: 458978 - DNA, 15 bp, Homo sapiens
ccgtgggggacactg

SEQ ID NO: 458979 - DNA, 15 bp, Homo sapiens
gccgtgggggacact

SEQ ID NO: 458980 - DNA, 15 bp, Homo sapiens
ggccgtgggggacac

SEQ ID NO: 458981 - DNA, 15 bp, Homo sapiens
tggccgtgggggaca

SEQ ID NO: 458982 - DNA, 15 bp, Homo sapiens
gtggccgtgggggac

SEQ ID NO: 458983 - DNA, 15 bp, Homo sapiens
agtggccgtggggga

SEQ ID NO: 458984 - DNA, 15 bp, Homo sapiens
gagtggccgtggggg

SEQ ID NO: 458985 - DNA, 15 bp, Homo sapiens
ggagtggccgtgggg

SEQ ID NO: 458986 - DNA, 15 bp, Homo sapiens
tggagtggccgtggg

SEQ ID NO: 458987 - DNA, 15 bp, Homo sapiens
gtggagtggccgtgg

SEQ ID NO: 458988 - DNA, 15 bp, Homo sapiens
tgtggagtggccgtg

SEQ ID NO: 458989 - DNA, 15 bp, Homo sapiens
gtgtggagtggccgt

SEQ ID NO: 458990 - DNA, 15 bp, Homo sapiens
agtgtggagtggccg

SEQ ID NO: 458991 - DNA, 15 bp, Homo sapiens
aagtgtggagtggcc

SEQ ID NO: 458992 - DNA, 15 bp, Homo sapiens
caagtgtggagtggc

SEQ ID NO: 458993 - DNA, 15 bp, Homo sapiens
tcaagtgtggagtgg

SEQ ID NO: 458994 - DNA, 15 bp, Homo sapiens
ctcaagtgtggagtg

SEQ ID NO: 458995 - DNA, 15 bp, Homo sapiens
cctcaagtgtggagt

SEQ ID NO: 458996 - DNA, 15 bp, Homo sapiens
gcctcaagtgtggag

SEQ ID NO: 458997 - DNA, 15 bp, Homo sapiens
agcctcaagtgtgga

SEQ ID NO: 458998 - DNA, 15 bp, Homo sapiens
cagcctcaagtgtgg

SEQ ID NO: 458999 - DNA, 15 bp, Homo sapiens
gcagcctcaagtgtg

SEQ ID NO: 459000 - DNA, 15 bp, Homo sapiens
tgcagcctcaagtgt

SEQ ID NO: 459001 - DNA, 15 bp, Homo sapiens
ttgcagcctcaagtg

SEQ ID NO: 459002 - DNA, 15 bp, Homo sapiens
tttgcagcctcaagt

SEQ ID NO: 459003 - DNA, 15 bp, Homo sapiens
ttttgcagcctcaag

SEQ ID NO: 459004 - DNA, 15 bp, Homo sapiens
cttttgcagcctcaa

SEQ ID NO: 459005 - DNA, 15 bp, Homo sapiens
gcttttgcagcctca

SEQ ID NO: 459006 - DNA, 15 bp, Homo sapiens
agcttttgcagcctc

SEQ ID NO: 459007 - DNA, 15 bp, Homo sapiens
gagcttttgcagcct

SEQ ID NO: 459008 - DNA, 15 bp, Homo sapiens
ggagcttttgcagcc

SEQ ID NO: 459009 - DNA, 15 bp, Homo sapiens
gggagcttttgcagc

SEQ ID NO: 459010 - DNA, 15 bp, Homo sapiens
agggagcttttgcag

SEQ ID NO: 459011 - DNA, 15 bp, Homo sapiens
gagggagcttttgca

SEQ ID NO: 459012 - DNA, 15 bp, Homo sapiens
ggagggagcttttgc

SEQ ID NO: 459013 - DNA, 15 bp, Homo sapiens
cggagggagcttttg

SEQ ID NO: 459014 - DNA, 15 bp, Homo sapiens
acggagggagctttt

SEQ ID NO: 459015 - DNA, 15 bp, Homo sapiens
tacggagggagcttt

SEQ ID NO: 459016 - DNA, 15 bp, Homo sapiens
ttacggagggagctt

SEQ ID NO: 459017 - DNA, 15 bp, Homo sapiens
tttacggagggagct

SEQ ID NO: 459018 - DNA, 15 bp, Homo sapiens
gtttacggagggagc

SEQ ID NO: 459019 - DNA, 15 bp, Homo sapiens
agtttacggagggag

SEQ ID NO: 459020 - DNA, 15 bp, Homo sapiens
gagtttacggaggga

SEQ ID NO: 459021 - DNA, 15 bp, Homo sapiens
ggagtttacggaggg

SEQ ID NO: 459022 - DNA, 15 bp, Homo sapiens
cggagtttacggagg

SEQ ID NO: 459023 - DNA, 15 bp, Homo sapiens
ccggagtttacggag

SEQ ID NO: 459024 - DNA, 15 bp, Homo sapiens
cccggagtttacgga

SEQ ID NO: 459025 - DNA, 15 bp, Homo sapiens
ccccggagtttacgg

SEQ ID NO: 459026 - DNA, 15 bp, Homo sapiens
tccccggagtttacg

SEQ ID NO: 459027 - DNA, 15 bp, Homo sapiens
gtccccggagtttac

SEQ ID NO: 459028 - DNA, 15 bp, Homo sapiens
ggtccccggagttta

SEQ ID NO: 459029 - DNA, 15 bp, Homo sapiens
gggtccccggagttt

SEQ ID NO: 459030 - DNA, 15 bp, Homo sapiens
tgggtccccggagtt

SEQ ID NO: 459031 - DNA, 15 bp, Homo sapiens
ctgggtccccggagt

SEQ ID NO: 459032 - DNA, 15 bp, Homo sapiens
tctgggtccccggag

SEQ ID NO: 459033 - DNA, 15 bp, Homo sapiens
ttctgggtccccgga

SEQ ID NO: 459034 - DNA, 15 bp, Homo sapiens
cttctgggtccccgg

SEQ ID NO: 459035 - DNA, 15 bp, Homo sapiens
ccttctgggtccccg

SEQ ID NO: 459036 - DNA, 15 bp, Homo sapiens
tccttctgggtcccc

SEQ ID NO: 459037 - DNA, 15 bp, Homo sapiens
ttccttctgggtccc

SEQ ID NO: 459038 - DNA, 15 bp, Homo sapiens
gttccttctgggtcc

SEQ ID NO: 459039 - DNA, 15 bp, Homo sapiens
tgttccttctgggtc

SEQ ID NO: 459040 - DNA, 15 bp, Homo sapiens
ctgttccttctgggt

SEQ ID NO: 459041 - DNA, 15 bp, Homo sapiens
tctgttccttctggg

SEQ ID NO: 459042 - DNA, 15 bp, Homo sapiens
ctctgttccttctgg

SEQ ID NO: 459043 - DNA, 15 bp, Homo sapiens
tctctgttccttctg

SEQ ID NO: 459044 - DNA, 15 bp, Homo sapiens
ctctctgttccttct

SEQ ID NO: 459045 - DNA, 15 bp, Homo sapiens
tctctctgttccttc

SEQ ID NO: 459046 - DNA, 15 bp, Homo sapiens
ctctctctgttcctt

SEQ ID NO: 459047 - DNA, 15 bp, Homo sapiens
cctctctctgttcct

SEQ ID NO: 459048 - DNA, 15 bp, Homo sapiens
ccctctctctgttcc

SEQ ID NO: 459049 - DNA, 15 bp, Homo sapiens
accctctctctgttc

SEQ ID NO: 459050 - DNA, 15 bp, Homo sapiens
gaccctctctctgtt

SEQ ID NO: 459051 - DNA, 15 bp, Homo sapiens
ggaccctctctctgt

SEQ ID NO: 459052 - DNA, 15 bp, Homo sapiens
gggaccctctctctg

SEQ ID NO: 459053 - DNA, 15 bp, Homo sapiens
ggggaccctctctct

SEQ ID NO: 459054 - DNA, 15 bp, Homo sapiens
tggggaccctctctc

SEQ ID NO: 459055 - DNA, 15 bp, Homo sapiens
ctggggaccctctct

SEQ ID NO: 459056 - DNA, 15 bp, Homo sapiens
tctggggaccctctc

SEQ ID NO: 459057 - DNA, 15 bp, Homo sapiens
ctctggggaccctct

SEQ ID NO: 459058 - DNA, 15 bp, Homo sapiens
gctctggggaccctc

SEQ ID NO: 459059 - DNA, 15 bp, Homo sapiens
agctctggggaccct

SEQ ID NO: 459060 - DNA, 15 bp, Homo sapiens
cagctctggggaccc

SEQ ID NO: 459061 - DNA, 15 bp, Homo sapiens
gcagctctggggacc

SEQ ID NO: 459062 - DNA, 15 bp, Homo sapiens
tgcagctctggggac

SEQ ID NO: 459063 - DNA, 15 bp, Homo sapiens
ctgcagctctgggga

SEQ ID NO: 459064 - DNA, 15 bp, Homo sapiens
cctgcagctctgggg

SEQ ID NO: 459065 - DNA, 15 bp, Homo sapiens
ccctgcagctctggg

SEQ ID NO: 459066 - DNA, 15 bp, Homo sapiens
accctgcagctctgg

SEQ ID NO: 459067 - DNA, 15 bp, Homo sapiens
gaccctgcagctctg

SEQ ID NO: 459068 - DNA, 15 bp, Homo sapiens
agaccctgcagctct

SEQ ID NO: 459069 - DNA, 15 bp, Homo sapiens
tagaccctgcagctc

SEQ ID NO: 459070 - DNA, 15 bp, Homo sapiens
gtagaccctgcagct

SEQ ID NO: 459071 - DNA, 15 bp, Homo sapiens
ggtagaccctgcagc

SEQ ID NO: 459072 - DNA, 15 bp, Homo sapiens
tggtagaccctgcag

SEQ ID NO: 459073 - DNA, 15 bp, Homo sapiens
ctggtagaccctgca

SEQ ID NO: 459074 - DNA, 15 bp, Homo sapiens
cctggtagaccctgc

SEQ ID NO: 459075 - DNA, 15 bp, Homo sapiens
acctggtagaccctg

SEQ ID NO: 459076 - DNA, 15 bp, Homo sapiens
gacctggtagaccct

SEQ ID NO: 459077 - DNA, 15 bp, Homo sapiens
cgacctggtagaccc

SEQ ID NO: 459078 - DNA, 15 bp, Homo sapiens
ccgacctggtagacc

SEQ ID NO: 459079 - DNA, 15 bp, Homo sapiens
gccgacctggtagac

SEQ ID NO: 459080 - DNA, 15 bp, Homo sapiens
ggccgacctggtaga

SEQ ID NO: 459081 - DNA, 15 bp, Homo sapiens
gggccgacctggtag

SEQ ID NO: 459082 - DNA, 15 bp, Homo sapiens
tgggccgacctggta

SEQ ID NO: 459083 - DNA, 15 bp, Homo sapiens
ttgggccgacctggt

SEQ ID NO: 459084 - DNA, 15 bp, Homo sapiens
gttgggccgacctgg

SEQ ID NO: 459085 - DNA, 15 bp, Homo sapiens
agttgggccgacctg

SEQ ID NO: 459086 - DNA, 15 bp, Homo sapiens
cagttgggccgacct

SEQ ID NO: 459087 - DNA, 15 bp, Homo sapiens
tcagttgggccgacc

SEQ ID NO: 459088 - DNA, 15 bp, Homo sapiens
gtcagttgggccgac

SEQ ID NO: 459089 - DNA, 15 bp, Homo sapiens
agtcagttgggccga

SEQ ID NO: 459090 - DNA, 15 bp, Homo sapiens
aagtcagttgggccg

SEQ ID NO: 459091 - DNA, 15 bp, Homo sapiens
taagtcagttgggcc

SEQ ID NO: 459092 - DNA, 15 bp, Homo sapiens
ataagtcagttgggc

SEQ ID NO: 459093 - DNA, 15 bp, Homo sapiens
cataagtcagttggg

SEQ ID NO: 459094 - DNA, 15 bp, Homo sapiens
acataagtcagttgg

SEQ ID NO: 459095 - DNA, 15 bp, Homo sapiens
aacataagtcagttg

SEQ ID NO: 459096 - DNA, 15 bp, Homo sapiens
gaacataagtcagtt

SEQ ID NO: 459097 - DNA, 15 bp, Homo sapiens
agaacataagtcagt

SEQ ID NO: 459098 - DNA, 15 bp, Homo sapiens
gagaacataagtcag

SEQ ID NO: 459099 - DNA, 15 bp, Homo sapiens
agagaacataagtca

SEQ ID NO: 459100 - DNA, 15 bp, Homo sapiens
gagagaacataagtc

SEQ ID NO: 459101 - DNA, 15 bp, Homo sapiens
agagagaacataagt

SEQ ID NO: 459102 - DNA, 15 bp, Homo sapiens
cagagagaacataag

SEQ ID NO: 459103 - DNA, 15 bp, Homo sapiens
gcagagagaacataa

SEQ ID NO: 459104 - DNA, 15 bp, Homo sapiens
ggcagagagaacata

SEQ ID NO: 459105 - DNA, 15 bp, Homo sapiens
gggcagagagaacat

SEQ ID NO: 459106 - DNA, 15 bp, Homo sapiens
agggcagagagaaca

SEQ ID NO: 459107 - DNA, 15 bp, Homo sapiens
gagggcagagagaac

SEQ ID NO: 459108 - DNA, 15 bp, Homo sapiens
agagggcagagagaa

SEQ ID NO: 459109 - DNA, 15 bp, Homo sapiens
gagagggcagagaga

SEQ ID NO: 459110 - DNA, 15 bp, Homo sapiens
agagagggcagagag

SEQ ID NO: 459111 - DNA, 15 bp, Homo sapiens
gagagagggcagaga

SEQ ID NO: 459112 - DNA, 15 bp, Homo sapiens
agagagagggcagag

SEQ ID NO: 459113 - DNA, 15 bp, Homo sapiens
gagagagagggcaga

SEQ ID NO: 459114 - DNA, 15 bp, Homo sapiens
ggagagagagggcag

SEQ ID NO: 459115 - DNA, 15 bp, Homo sapiens
gggagagagagggca

SEQ ID NO: 459116 - DNA, 15 bp, Homo sapiens
agggagagagagggc

SEQ ID NO: 459117 - DNA, 15 bp, Homo sapiens
gagggagagagaggg

SEQ ID NO: 459118 - DNA, 15 bp, Homo sapiens
agagggagagagagg

SEQ ID NO: 459119 - DNA, 15 bp, Homo sapiens
gagagggagagagag

SEQ ID NO: 459120 - DNA, 15 bp, Homo sapiens
ggagagggagagaga

SEQ ID NO: 459121 - DNA, 15 bp, Homo sapiens
gggagagggagagag

SEQ ID NO: 459122 - DNA, 15 bp, Homo sapiens
ggggagagggagaga

SEQ ID NO: 459123 - DNA, 15 bp, Homo sapiens
gggggagagggagag

SEQ ID NO: 459124 - DNA, 15 bp, Homo sapiens
cgggggagagggaga

SEQ ID NO: 459125 - DNA, 15 bp, Homo sapiens
ccgggggagagggag

SEQ ID NO: 459126 - DNA, 15 bp, Homo sapiens
gccgggggagaggga

SEQ ID NO: 459127 - DNA, 15 bp, Homo sapiens
ggccgggggagaggg

SEQ ID NO: 459128 - DNA, 15 bp, Homo sapiens
gggccgggggagagg

SEQ ID NO: 459129 - DNA, 15 bp, Homo sapiens
ggggccgggggagag

SEQ ID NO: 459130 - DNA, 15 bp, Homo sapiens
aggggccgggggaga

SEQ ID NO: 459131 - DNA, 15 bp, Homo sapiens
gaggggccgggggag

SEQ ID NO: 459132 - DNA, 15 bp, Homo sapiens
ggaggggccggggga

SEQ ID NO: 459133 - DNA, 15 bp, Homo sapiens
tggaggggccggggg

SEQ ID NO: 459134 - DNA, 15 bp, Homo sapiens
atggaggggccgggg

SEQ ID NO: 459135 - DNA, 15 bp, Homo sapiens
aatggaggggccggg

SEQ ID NO: 459136 - DNA, 15 bp, Homo sapiens
taatggaggggccgg

SEQ ID NO: 459137 - DNA, 15 bp, Homo sapiens
ataatggaggggccg

SEQ ID NO: 459138 - DNA, 15 bp, Homo sapiens
cataatggaggggcc

SEQ ID NO: 459139 - DNA, 15 bp, Homo sapiens
ccataatggaggggc

SEQ ID NO: 459140 - DNA, 15 bp, Homo sapiens
gccataatggagggg

SEQ ID NO: 459141 - DNA, 15 bp, Homo sapiens
agccataatggaggg

SEQ ID NO: 459142 - DNA, 15 bp, Homo sapiens
cagccataatggagg

SEQ ID NO: 459143 - DNA, 15 bp, Homo sapiens
gcagccataatggag

SEQ ID NO: 459144 - DNA, 15 bp, Homo sapiens
agcagccataatgga

SEQ ID NO: 459145 - DNA, 15 bp, Homo sapiens
cagcagccataatgg

SEQ ID NO: 459146 - DNA, 15 bp, Homo sapiens
gcagcagccataatg

SEQ ID NO: 459147 - DNA, 15 bp, Homo sapiens
agcagcagccataat

SEQ ID NO: 459148 - DNA, 15 bp, Homo sapiens
cagcagcagccataa

SEQ ID NO: 459149 - DNA, 15 bp, Homo sapiens
gcagcagcagccata

SEQ ID NO: 459150 - DNA, 15 bp, Homo sapiens
agcagcagcagccat

SEQ ID NO: 459151 - DNA, 15 bp, Homo sapiens
cagcagcagcagcca

SEQ ID NO: 459152 - DNA, 15 bp, Homo sapiens
acagcagcagcagcc

SEQ ID NO: 459153 - DNA, 15 bp, Homo sapiens
cacagcagcagcagc

SEQ ID NO: 459154 - DNA, 15 bp, Homo sapiens
ccacagcagcagcag

SEQ ID NO: 459155 - DNA, 15 bp, Homo sapiens
gccacagcagcagca

SEQ ID NO: 459156 - DNA, 15 bp, Homo sapiens
ggccacagcagcagc

SEQ ID NO: 459157 - DNA, 15 bp, Homo sapiens
gggccacagcagcag

SEQ ID NO: 459158 - DNA, 15 bp, Homo sapiens
tgggccacagcagca

SEQ ID NO: 459159 - DNA, 15 bp, Homo sapiens
ctgggccacagcagc

SEQ ID NO: 459160 - DNA, 15 bp, Homo sapiens
tctgggccacagcag

SEQ ID NO: 459161 - DNA, 15 bp, Homo sapiens
ctctgggccacagca

SEQ ID NO: 459162 - DNA, 15 bp, Homo sapiens
tctctgggccacagc

SEQ ID NO: 459163 - DNA, 15 bp, Homo sapiens
ctctctgggccacag

SEQ ID NO: 459164 - DNA, 15 bp, Homo sapiens
actctctgggccaca

SEQ ID NO: 459165 - DNA, 15 bp, Homo sapiens
tactctctgggccac

SEQ ID NO: 459166 - DNA, 15 bp, Homo sapiens
ttactctctgggcca

SEQ ID NO: 459167 - DNA, 15 bp, Homo sapiens
cttactctctgggcc

SEQ ID NO: 459168 - DNA, 15 bp, Homo sapiens
tcttactctctgggc

SEQ ID NO: 459169 - DNA, 15 bp, Homo sapiens
ttcttactctctggg

SEQ ID NO: 459170 - DNA, 15 bp, Homo sapiens
attcttactctctgg

SEQ ID NO: 459171 - DNA, 15 bp, Homo sapiens
gattcttactctctg

SEQ ID NO: 459172 - DNA, 15 bp, Homo sapiens
cgattcttactctct

SEQ ID NO: 459173 - DNA, 15 bp, Homo sapiens
ccgattcttactctc

SEQ ID NO: 459174 - DNA, 15 bp, Homo sapiens
cccgattcttactct

SEQ ID NO: 459175 - DNA, 15 bp, Homo sapiens
ccccgattcttactc

SEQ ID NO: 459176 - DNA, 15 bp, Homo sapiens
accccgattcttact

SEQ ID NO: 459177 - DNA, 15 bp, Homo sapiens
gaccccgattcttac

SEQ ID NO: 459178 - DNA, 15 bp, Homo sapiens
agaccccgattctta

SEQ ID NO: 459179 - DNA, 15 bp, Homo sapiens
cagaccccgattctt

SEQ ID NO: 459180 - DNA, 15 bp, Homo sapiens
ccagaccccgattct

SEQ ID NO: 459181 - DNA, 15 bp, Homo sapiens
cccagaccccgattc

SEQ ID NO: 459182 - DNA, 15 bp, Homo sapiens
acccagaccccgatt

SEQ ID NO: 459183 - DNA, 15 bp, Homo sapiens
cacccagaccccgat

SEQ ID NO: 459184 - DNA, 15 bp, Homo sapiens
acacccagaccccga

SEQ ID NO: 459185 - DNA, 15 bp, Homo sapiens
aacacccagaccccg

SEQ ID NO: 459186 - DNA, 15 bp, Homo sapiens
aaacacccagacccc

SEQ ID NO: 459187 - DNA, 15 bp, Homo sapiens
caaacacccagaccc

SEQ ID NO: 459188 - DNA, 15 bp, Homo sapiens
ccaaacacccagacc

SEQ ID NO: 459189 - DNA, 15 bp, Homo sapiens
cccaaacacccagac

SEQ ID NO: 459190 - DNA, 15 bp, Homo sapiens
ccccaaacacccaga

SEQ ID NO: 459191 - DNA, 15 bp, Homo sapiens
cccccaaacacccag

SEQ ID NO: 459192 - DNA, 15 bp, Homo sapiens
gcccccaaacaccca

SEQ ID NO: 459193 - DNA, 15 bp, Homo sapiens
cgcccccaaacaccc

SEQ ID NO: 459194 - DNA, 15 bp, Homo sapiens
ccgcccccaaacacc

SEQ ID NO: 459195 - DNA, 15 bp, Homo sapiens
gccgcccccaaacac

SEQ ID NO: 459196 - DNA, 15 bp, Homo sapiens
tgccgcccccaaaca

SEQ ID NO: 459197 - DNA, 15 bp, Homo sapiens
ctgccgcccccaaac

SEQ ID NO: 459198 - DNA, 15 bp, Homo sapiens
cctgccgcccccaaa

SEQ ID NO: 459199 - DNA, 15 bp, Homo sapiens
ccctgccgcccccaa

SEQ ID NO: 459200 - DNA, 15 bp, Homo sapiens
gccctgccgccccca

SEQ ID NO: 459201 - DNA, 15 bp, Homo sapiens
cgccctgccgccccc

SEQ ID NO: 459202 - DNA, 15 bp, Homo sapiens
gcgccctgccgcccc

SEQ ID NO: 459203 - DNA, 15 bp, Homo sapiens
agcgccctgccgccc

SEQ ID NO: 459204 - DNA, 15 bp, Homo sapiens
cagcgccctgccgcc

SEQ ID NO: 459205 - DNA, 15 bp, Homo sapiens
ccagcgccctgccgc

SEQ ID NO: 459206 - DNA, 15 bp, Homo sapiens
accagcgccctgccg

SEQ ID NO: 459207 - DNA, 15 bp, Homo sapiens
caccagcgccctgcc

SEQ ID NO: 459208 - DNA, 15 bp, Homo sapiens
ccaccagcgccctgc

SEQ ID NO: 459209 - DNA, 15 bp, Homo sapiens
cccaccagcgccctg

SEQ ID NO: 459210 - DNA, 15 bp, Homo sapiens
acccaccagcgccct

SEQ ID NO: 459211 - DNA, 15 bp, Homo sapiens
cacccaccagcgccc

SEQ ID NO: 459212 - DNA, 15 bp, Homo sapiens
gcacccaccagcgcc

SEQ ID NO: 459213 - DNA, 15 bp, Homo sapiens
tgcacccaccagcgc

SEQ ID NO: 459214 - DNA, 15 bp, Homo sapiens
ctgcacccaccagcg

SEQ ID NO: 459215 - DNA, 15 bp, Homo sapiens
tctgcacccaccagc

SEQ ID NO: 459216 - DNA, 15 bp, Homo sapiens
ctctgcacccaccag

SEQ ID NO: 459217 - DNA, 15 bp, Homo sapiens
cctctgcacccacca

SEQ ID NO: 459218 - DNA, 15 bp, Homo sapiens
ccctctgcacccacc

SEQ ID NO: 459219 - DNA, 15 bp, Homo sapiens
cccctctgcacccac

SEQ ID NO: 459220 - DNA, 15 bp, Homo sapiens
tcccctctgcaccca

SEQ ID NO: 459221 - DNA, 15 bp, Homo sapiens
atcccctctgcaccc

SEQ ID NO: 459222 - DNA, 15 bp, Homo sapiens
aatcccctctgcacc

SEQ ID NO: 459223 - DNA, 15 bp, Homo sapiens
gaatcccctctgcac

SEQ ID NO: 459224 - DNA, 15 bp, Homo sapiens
ggaatcccctctgca

SEQ ID NO: 459225 - DNA, 15 bp, Homo sapiens
gggaatcccctctgc

SEQ ID NO: 459226 - DNA, 15 bp, Homo sapiens
cgggaatcccctctg

SEQ ID NO: 459227 - DNA, 15 bp, Homo sapiens
acgggaatcccctct

SEQ ID NO: 459228 - DNA, 15 bp, Homo sapiens
gacgggaatcccctc

SEQ ID NO: 459229 - DNA, 15 bp, Homo sapiens
ggacgggaatcccct

SEQ ID NO: 459230 - DNA, 15 bp, Homo sapiens
gggacgggaatcccc

SEQ ID NO: 459231 - DNA, 15 bp, Homo sapiens
ggggacgggaatccc

SEQ ID NO: 459232 - DNA, 15 bp, Homo sapiens
aggggacgggaatcc

SEQ ID NO: 459233 - DNA, 15 bp, Homo sapiens
gaggggacgggaatc

SEQ ID NO: 459234 - DNA, 15 bp, Homo sapiens
agaggggacgggaat

SEQ ID NO: 459235 - DNA, 15 bp, Homo sapiens
gagaggggacgggaa

SEQ ID NO: 459236 - DNA, 15 bp, Homo sapiens
agagaggggacggga

SEQ ID NO: 459237 - DNA, 15 bp, Homo sapiens
cagagaggggacggg

SEQ ID NO: 459238 - DNA, 15 bp, Homo sapiens
tcagagaggggacgg

SEQ ID NO: 459239 - DNA, 15 bp, Homo sapiens
ctcagagaggggacg

SEQ ID NO: 459240 - DNA, 15 bp, Homo sapiens
tctcagagaggggac

SEQ ID NO: 459241 - DNA, 15 bp, Homo sapiens
ctctcagagagggga

SEQ ID NO: 459242 - DNA, 15 bp, Homo sapiens
cctctcagagagggg

SEQ ID NO: 459243 - DNA, 15 bp, Homo sapiens
gcctctcagagaggg

SEQ ID NO: 459244 - DNA, 15 bp, Homo sapiens
agcctctcagagagg

SEQ ID NO: 459245 - DNA, 15 bp, Homo sapiens
cagcctctcagagag

SEQ ID NO: 459246 - DNA, 15 bp, Homo sapiens
acagcctctcagaga

SEQ ID NO: 459247 - DNA, 15 bp, Homo sapiens
cacagcctctcagag

SEQ ID NO: 459248 - DNA, 15 bp, Homo sapiens
ccacagcctctcaga

SEQ ID NO: 459249 - DNA, 15 bp, Homo sapiens
accacagcctctcag

SEQ ID NO: 459250 - DNA, 15 bp, Homo sapiens
caccacagcctctca

SEQ ID NO: 459251 - DNA, 15 bp, Homo sapiens
tcaccacagcctctc

SEQ ID NO: 459252 - DNA, 15 bp, Homo sapiens
ctcaccacagcctct

SEQ ID NO: 459253 - DNA, 15 bp, Homo sapiens
tctcaccacagcctc

SEQ ID NO: 459254 - DNA, 15 bp, Homo sapiens
ctctcaccacagcct

SEQ ID NO: 459255 - DNA, 15 bp, Homo sapiens
tctctcaccacagcc

SEQ ID NO: 459256 - DNA, 15 bp, Homo sapiens
gtctctcaccacagc

SEQ ID NO: 459257 - DNA, 15 bp, Homo sapiens
agtctctcaccacag

SEQ ID NO: 459258 - DNA, 15 bp, Homo sapiens
gagtctctcaccaca

SEQ ID NO: 459259 - DNA, 15 bp, Homo sapiens
tgagtctctcaccac

SEQ ID NO: 459260 - DNA, 15 bp, Homo sapiens
ctgagtctctcacca

SEQ ID NO: 459261 - DNA, 15 bp, Homo sapiens
tctgagtctctcacc

SEQ ID NO: 459262 - DNA, 15 bp, Homo sapiens
ctctgagtctctcac

SEQ ID NO: 459263 - DNA, 15 bp, Homo sapiens
gctctgagtctctca

SEQ ID NO: 459264 - DNA, 15 bp, Homo sapiens
tgctctgagtctctc

SEQ ID NO: 459265 - DNA, 15 bp, Homo sapiens
ctgctctgagtctct

SEQ ID NO: 459266 - DNA, 15 bp, Homo sapiens
cctgctctgagtctc

SEQ ID NO: 459267 - DNA, 15 bp, Homo sapiens
ccctgctctgagtct

SEQ ID NO: 459268 - DNA, 15 bp, Homo sapiens
accctgctctgagtc

SEQ ID NO: 459269 - DNA, 15 bp, Homo sapiens
caccctgctctgagt

SEQ ID NO: 459270 - DNA, 15 bp, Homo sapiens
gcaccctgctctgag

SEQ ID NO: 459271 - DNA, 15 bp, Homo sapiens
cgcaccctgctctga

SEQ ID NO: 459272 - DNA, 15 bp, Homo sapiens
ccgcaccctgctctg

SEQ ID NO: 459273 - DNA, 15 bp, Homo sapiens
gccgcaccctgctct

SEQ ID NO: 459274 - DNA, 15 bp, Homo sapiens
agccgcaccctgctc

SEQ ID NO: 459275 - DNA, 15 bp, Homo sapiens
gagccgcaccctgct

SEQ ID NO: 459276 - DNA, 15 bp, Homo sapiens
ggagccgcaccctgc

SEQ ID NO: 459277 - DNA, 15 bp, Homo sapiens
gggagccgcaccctg

SEQ ID NO: 459278 - DNA, 15 bp, Homo sapiens
ggggagccgcaccct

SEQ ID NO: 459279 - DNA, 15 bp, Homo sapiens
tggggagccgcaccc

SEQ ID NO: 459280 - DNA, 15 bp, Homo sapiens
gtggggagccgcacc

SEQ ID NO: 459281 - DNA, 15 bp, Homo sapiens
cgtggggagccgcac

SEQ ID NO: 459282 - DNA, 15 bp, Homo sapiens
ccgtggggagccgca

SEQ ID NO: 459283 - DNA, 15 bp, Homo sapiens
tccgtggggagccgc

SEQ ID NO: 459284 - DNA, 15 bp, Homo sapiens
gtccgtggggagccg

SEQ ID NO: 459285 - DNA, 15 bp, Homo sapiens
tgtccgtggggagcc

SEQ ID NO: 459286 - DNA, 15 bp, Homo sapiens
ctgtccgtggggagc

SEQ ID NO: 459287 - DNA, 15 bp, Homo sapiens
cctgtccgtggggag

SEQ ID NO: 459288 - DNA, 15 bp, Homo sapiens
ccctgtccgtgggga

SEQ ID NO: 459289 - DNA, 15 bp, Homo sapiens
cccctgtccgtgggg

SEQ ID NO: 459290 - DNA, 15 bp, Homo sapiens
acccctgtccgtggg

SEQ ID NO: 459291 - DNA, 15 bp, Homo sapiens
cacccctgtccgtgg

SEQ ID NO: 459292 - DNA, 15 bp, Homo sapiens
tcacccctgtccgtg

SEQ ID NO: 459293 - DNA, 15 bp, Homo sapiens
ctcacccctgtccgt

SEQ ID NO: 459294 - DNA, 15 bp, Homo sapiens
actcacccctgtccg

SEQ ID NO: 459295 - DNA, 15 bp, Homo sapiens
gactcacccctgtcc

SEQ ID NO: 459296 - DNA, 15 bp, Homo sapiens
agactcacccctgtc

SEQ ID NO: 459297 - DNA, 15 bp, Homo sapiens
gagactcacccctgt

SEQ ID NO: 459298 - DNA, 15 bp, Homo sapiens
agagactcacccctg

SEQ ID NO: 459299 - DNA, 15 bp, Homo sapiens
cagagactcacccct

SEQ ID NO: 459300 - DNA, 15 bp, Homo sapiens
acagagactcacccc

SEQ ID NO: 459301 - DNA, 15 bp, Homo sapiens
cacagagactcaccc

SEQ ID NO: 459302 - DNA, 15 bp, Homo sapiens
gcacagagactcacc

SEQ ID NO: 459303 - DNA, 15 bp, Homo sapiens
ggcacagagactcac

SEQ ID NO: 459304 - DNA, 15 bp, Homo sapiens
aggcacagagactca

SEQ ID NO: 459305 - DNA, 15 bp, Homo sapiens
aaggcacagagactc

SEQ ID NO: 459306 - DNA, 15 bp, Homo sapiens
caaggcacagagact

SEQ ID NO: 459307 - DNA, 15 bp, Homo sapiens
ccaaggcacagagac

SEQ ID NO: 459308 - DNA, 15 bp, Homo sapiens
cccaaggcacagaga

SEQ ID NO: 459309 - DNA, 15 bp, Homo sapiens
gcccaaggcacagag

SEQ ID NO: 459310 - DNA, 15 bp, Homo sapiens
agcccaaggcacaga

SEQ ID NO: 459311 - DNA, 15 bp, Homo sapiens
aagcccaaggcacag

SEQ ID NO: 459312 - DNA, 15 bp, Homo sapiens
gaagcccaaggcaca

SEQ ID NO: 459313 - DNA, 15 bp, Homo sapiens
agaagcccaaggcac

SEQ ID NO: 459314 - DNA, 15 bp, Homo sapiens
gagaagcccaaggca

SEQ ID NO: 459315 - DNA, 15 bp, Homo sapiens
ggagaagcccaaggc

SEQ ID NO: 459316 - DNA, 15 bp, Homo sapiens
aggagaagcccaagg

SEQ ID NO: 459317 - DNA, 15 bp, Homo sapiens
caggagaagcccaag

SEQ ID NO: 459318 - DNA, 15 bp, Homo sapiens
gcaggagaagcccaa

SEQ ID NO: 459319 - DNA, 15 bp, Homo sapiens
ggcaggagaagccca

SEQ ID NO: 459320 - DNA, 15 bp, Homo sapiens
tggcaggagaagccc

SEQ ID NO: 459321 - DNA, 15 bp, Homo sapiens
gtggcaggagaagcc

SEQ ID NO: 459322 - DNA, 15 bp, Homo sapiens
ggtggcaggagaagc

SEQ ID NO: 459323 - DNA, 15 bp, Homo sapiens
gggtggcaggagaag

SEQ ID NO: 459324 - DNA, 15 bp, Homo sapiens
tgggtggcaggagaa

SEQ ID NO: 459325 - DNA, 15 bp, Homo sapiens
gtgggtggcaggaga

SEQ ID NO: 459326 - DNA, 15 bp, Homo sapiens
ggtgggtggcaggag

SEQ ID NO: 459327 - DNA, 15 bp, Homo sapiens
aggtgggtggcagga

SEQ ID NO: 459328 - DNA, 15 bp, Homo sapiens
taggtgggtggcagg

SEQ ID NO: 459329 - DNA, 15 bp, Homo sapiens
ataggtgggtggcag

SEQ ID NO: 459330 - DNA, 15 bp, Homo sapiens
gataggtgggtggca

SEQ ID NO: 459331 - DNA, 15 bp, Homo sapiens
agataggtgggtggc

SEQ ID NO: 459332 - DNA, 15 bp, Homo sapiens
cagataggtgggtgg

SEQ ID NO: 459333 - DNA, 15 bp, Homo sapiens
acagataggtgggtg

SEQ ID NO: 459334 - DNA, 15 bp, Homo sapiens
gacagataggtgggt

SEQ ID NO: 459335 - DNA, 15 bp, Homo sapiens
tgacagataggtggg

SEQ ID NO: 459336 - DNA, 15 bp, Homo sapiens
ctgacagataggtgg

SEQ ID NO: 459337 - DNA, 15 bp, Homo sapiens
tctgacagataggtg

SEQ ID NO: 459338 - DNA, 15 bp, Homo sapiens
ctctgacagataggt

SEQ ID NO: 459339 - DNA, 15 bp, Homo sapiens
gctctgacagatagg

SEQ ID NO: 459340 - DNA, 15 bp, Homo sapiens
agctctgacagatag

SEQ ID NO: 459341 - DNA, 15 bp, Homo sapiens
aagctctgacagata

SEQ ID NO: 459342 - DNA, 15 bp, Homo sapiens
taagctctgacagat

SEQ ID NO: 459343 - DNA, 15 bp, Homo sapiens
ctaagctctgacaga

SEQ ID NO: 459344 - DNA, 15 bp, Homo sapiens
cctaagctctgacag

SEQ ID NO: 459345 - DNA, 15 bp, Homo sapiens
tcctaagctctgaca

SEQ ID NO: 459346 - DNA, 15 bp, Homo sapiens
ctcctaagctctgac

SEQ ID NO: 459347 - DNA, 15 bp, Homo sapiens
cctcctaagctctga

SEQ ID NO: 459348 - DNA, 15 bp, Homo sapiens
ccctcctaagctctg

SEQ ID NO: 459349 - DNA, 15 bp, Homo sapiens
tccctcctaagctct

SEQ ID NO: 459350 - DNA, 15 bp, Homo sapiens
atccctcctaagctc

SEQ ID NO: 459351 - DNA, 15 bp, Homo sapiens
tatccctcctaagct

SEQ ID NO: 459352 - DNA, 15 bp, Homo sapiens
ttatccctcctaagc

SEQ ID NO: 459353 - DNA, 15 bp, Homo sapiens
cttatccctcctaag

SEQ ID NO: 459354 - DNA, 15 bp, Homo sapiens
tcttatccctcctaa

SEQ ID NO: 459355 - DNA, 15 bp, Homo sapiens
ttcttatccctccta

SEQ ID NO: 459356 - DNA, 15 bp, Homo sapiens
tttcttatccctcct

SEQ ID NO: 459357 - DNA, 15 bp, Homo sapiens
ttttcttatccctcc

SEQ ID NO: 459358 - DNA, 15 bp, Homo sapiens
tttttcttatccctc

SEQ ID NO: 459359 - DNA, 15 bp, Homo sapiens
ctttttcttatccct

SEQ ID NO: 459360 - DNA, 15 bp, Homo sapiens
actttttcttatccc

SEQ ID NO: 459361 - DNA, 15 bp, Homo sapiens
tactttttcttatcc

SEQ ID NO: 459362 - DNA, 15 bp, Homo sapiens
ttactttttcttatc

SEQ ID NO: 459363 - DNA, 15 bp, Homo sapiens
attactttttcttat

SEQ ID NO: 459364 - DNA, 15 bp, Homo sapiens
cattactttttctta

SEQ ID NO: 459365 - DNA, 15 bp, Homo sapiens
gcattactttttctt

SEQ ID NO: 459366 - DNA, 15 bp, Homo sapiens
tgcattactttttct

SEQ ID NO: 459367 - DNA, 15 bp, Homo sapiens
gtgcattactttttc

SEQ ID NO: 459368 - DNA, 15 bp, Homo sapiens
tgtgcattacttttt

SEQ ID NO: 459369 - DNA, 15 bp, Homo sapiens
gtgtgcattactttt

SEQ ID NO: 459370 - DNA, 15 bp, Homo sapiens
tgtgtgcattacttt

SEQ ID NO: 459371 - DNA, 15 bp, Homo sapiens
ctgtgtgcattactt

SEQ ID NO: 459372 - DNA, 15 bp, Homo sapiens
cctgtgtgcattact

SEQ ID NO: 459373 - DNA, 15 bp, Homo sapiens
tcctgtgtgcattac

SEQ ID NO: 459374 - DNA, 15 bp, Homo sapiens
ctcctgtgtgcatta

SEQ ID NO: 459375 - DNA, 15 bp, Homo sapiens
cctcctgtgtgcatt

SEQ ID NO: 459376 - DNA, 15 bp, Homo sapiens
acctcctgtgtgcat

SEQ ID NO: 459377 - DNA, 15 bp, Homo sapiens
gacctcctgtgtgca

SEQ ID NO: 459378 - DNA, 15 bp, Homo sapiens
ggacctcctgtgtgc

SEQ ID NO: 459379 - DNA, 15 bp, Homo sapiens
aggacctcctgtgtg

SEQ ID NO: 459380 - DNA, 15 bp, Homo sapiens
caggacctcctgtgt

SEQ ID NO: 459381 - DNA, 15 bp, Homo sapiens
gcaggacctcctgtg

SEQ ID NO: 459382 - DNA, 15 bp, Homo sapiens
ggcaggacctcctgt

SEQ ID NO: 459383 - DNA, 15 bp, Homo sapiens
tggcaggacctcctg

SEQ ID NO: 459384 - DNA, 15 bp, Homo sapiens
ctggcaggacctcct

SEQ ID NO: 459385 - DNA, 15 bp, Homo sapiens
tctggcaggacctcc

SEQ ID NO: 459386 - DNA, 15 bp, Homo sapiens
ctctggcaggacctc

SEQ ID NO: 459387 - DNA, 15 bp, Homo sapiens
gctctggcaggacct

SEQ ID NO: 459388 - DNA, 15 bp, Homo sapiens
ggctctggcaggacc

SEQ ID NO: 459389 - DNA, 15 bp, Homo sapiens
aggctctggcaggac

SEQ ID NO: 459390 - DNA, 15 bp, Homo sapiens
gaggctctggcagga

SEQ ID NO: 459391 - DNA, 15 bp, Homo sapiens
ggaggctctggcagg

SEQ ID NO: 459392 - DNA, 15 bp, Homo sapiens
cggaggctctggcag

SEQ ID NO: 459393 - DNA, 15 bp, Homo sapiens
ccggaggctctggca

SEQ ID NO: 459394 - DNA, 15 bp, Homo sapiens
tccggaggctctggc

SEQ ID NO: 459395 - DNA, 15 bp, Homo sapiens
ctccggaggctctgg

SEQ ID NO: 459396 - DNA, 15 bp, Homo sapiens
gctccggaggctctg

SEQ ID NO: 459397 - DNA, 15 bp, Homo sapiens
tgctccggaggctct

SEQ ID NO: 459398 - DNA, 15 bp, Homo sapiens
ctgctccggaggctc

SEQ ID NO: 459399 - DNA, 15 bp, Homo sapiens
gctgctccggaggct

SEQ ID NO: 459400 - DNA, 15 bp, Homo sapiens
tgctgctccggaggc

SEQ ID NO: 459401 - DNA, 15 bp, Homo sapiens
atgctgctccggagg

SEQ ID NO: 459402 - DNA, 15 bp, Homo sapiens
catgctgctccggag

SEQ ID NO: 459403 - DNA, 15 bp, Homo sapiens
ccatgctgctccgga

SEQ ID NO: 459404 - DNA, 15 bp, Homo sapiens
cccatgctgctccgg

SEQ ID NO: 459405 - DNA, 15 bp, Homo sapiens
acccatgctgctccg

SEQ ID NO: 459406 - DNA, 15 bp, Homo sapiens
cacccatgctgctcc

SEQ ID NO: 459407 - DNA, 15 bp, Homo sapiens
gcacccatgctgctc

SEQ ID NO: 459408 - DNA, 15 bp, Homo sapiens
ggcacccatgctgct

SEQ ID NO: 459409 - DNA, 15 bp, Homo sapiens
gggcacccatgctgc

SEQ ID NO: 459410 - DNA, 15 bp, Homo sapiens
ggggcacccatgctg

SEQ ID NO: 459411 - DNA, 15 bp, Homo sapiens
tggggcacccatgct

SEQ ID NO: 459412 - DNA, 15 bp, Homo sapiens
gtggggcacccatgc

SEQ ID NO: 459413 - DNA, 15 bp, Homo sapiens
tgtggggcacccatg

SEQ ID NO: 459414 - DNA, 15 bp, Homo sapiens
ttgtggggcacccat

SEQ ID NO: 459415 - DNA, 15 bp, Homo sapiens
gttgtggggcaccca

SEQ ID NO: 459416 - DNA, 15 bp, Homo sapiens
tgttgtggggcaccc

SEQ ID NO: 459417 - DNA, 15 bp, Homo sapiens
gtgttgtggggcacc

SEQ ID NO: 459418 - DNA, 15 bp, Homo sapiens
tgtgttgtggggcac

SEQ ID NO: 459419 - DNA, 15 bp, Homo sapiens
ctgtgttgtggggca

SEQ ID NO: 459420 - DNA, 15 bp, Homo sapiens
cctgtgttgtggggc

SEQ ID NO: 459421 - DNA, 15 bp, Homo sapiens
ccctgtgttgtgggg

SEQ ID NO: 459422 - DNA, 15 bp, Homo sapiens
tccctgtgttgtggg

SEQ ID NO: 459423 - DNA, 15 bp, Homo sapiens
ctccctgtgttgtgg

SEQ ID NO: 459424 - DNA, 15 bp, Homo sapiens
actccctgtgttgtg

SEQ ID NO: 459425 - DNA, 15 bp, Homo sapiens
cactccctgtgttgt

SEQ ID NO: 459426 - DNA, 15 bp, Homo sapiens
gcactccctgtgttg

SEQ ID NO: 459427 - DNA, 15 bp, Homo sapiens
tgcactccctgtgtt

SEQ ID NO: 459428 - DNA, 15 bp, Homo sapiens
ttgcactccctgtgt

SEQ ID NO: 459429 - DNA, 15 bp, Homo sapiens
cttgcactccctgtg

SEQ ID NO: 459430 - DNA, 15 bp, Homo sapiens
acttgcactccctgt

SEQ ID NO: 459431 - DNA, 15 bp, Homo sapiens
cacttgcactccctg

SEQ ID NO: 459432 - DNA, 15 bp, Homo sapiens
gcacttgcactccct

SEQ ID NO: 459433 - DNA, 15 bp, Homo sapiens
cgcacttgcactccc

SEQ ID NO: 459434 - DNA, 15 bp, Homo sapiens
ccgcacttgcactcc

SEQ ID NO: 459435 - DNA, 15 bp, Homo sapiens
tccgcacttgcactc

SEQ ID NO: 459436 - DNA, 15 bp, Homo sapiens
ttccgcacttgcact

SEQ ID NO: 459437 - DNA, 15 bp, Homo sapiens
tttccgcacttgcac

SEQ ID NO: 459438 - DNA, 15 bp, Homo sapiens
ttttccgcacttgca

SEQ ID NO: 459439 - DNA, 15 bp, Homo sapiens
attttccgcacttgc

SEQ ID NO: 459440 - DNA, 15 bp, Homo sapiens
tattttccgcacttg

SEQ ID NO: 459441 - DNA, 15 bp, Homo sapiens
ctattttccgcactt

SEQ ID NO: 459442 - DNA, 15 bp, Homo sapiens
cctattttccgcact

SEQ ID NO: 459443 - DNA, 15 bp, Homo sapiens
ccctattttccgcac

SEQ ID NO: 459444 - DNA, 15 bp, Homo sapiens
tccctattttccgca

SEQ ID NO: 459445 - DNA, 15 bp, Homo sapiens
ctccctattttccgc

SEQ ID NO: 459446 - DNA, 15 bp, Homo sapiens
cctccctattttccg

SEQ ID NO: 459447 - DNA, 15 bp, Homo sapiens
tcctccctattttcc

SEQ ID NO: 459448 - DNA, 15 bp, Homo sapiens
ttcctccctattttc

SEQ ID NO: 459449 - DNA, 15 bp, Homo sapiens
cttcctccctatttt

SEQ ID NO: 459450 - DNA, 15 bp, Homo sapiens
acttcctccctattt

SEQ ID NO: 459451 - DNA, 15 bp, Homo sapiens
tacttcctccctatt

SEQ ID NO: 459452 - DNA, 15 bp, Homo sapiens
ttacttcctccctat

SEQ ID NO: 459453 - DNA, 15 bp, Homo sapiens
tttacttcctcccta

SEQ ID NO: 459454 - DNA, 15 bp, Homo sapiens
ctttacttcctccct

SEQ ID NO: 459455 - DNA, 15 bp, Homo sapiens
cctttacttcctccc

SEQ ID NO: 459456 - DNA, 15 bp, Homo sapiens
gcctttacttcctcc

SEQ ID NO: 459457 - DNA, 15 bp, Homo sapiens
ggcctttacttcctc

SEQ ID NO: 459458 - DNA, 15 bp, Homo sapiens
gggcctttacttcct

SEQ ID NO: 459459 - DNA, 15 bp, Homo sapiens
tgggcctttacttcc

SEQ ID NO: 459460 - DNA, 15 bp, Homo sapiens
atgggcctttacttc

SEQ ID NO: 459461 - DNA, 15 bp, Homo sapiens
catgggcctttactt

SEQ ID NO: 459462 - DNA, 15 bp, Homo sapiens
ccatgggcctttact

SEQ ID NO: 459463 - DNA, 15 bp, Homo sapiens
cccatgggcctttac

SEQ ID NO: 459464 - DNA, 15 bp, Homo sapiens
acccatgggccttta

SEQ ID NO: 459465 - DNA, 15 bp, Homo sapiens
cacccatgggccttt

SEQ ID NO: 459466 - DNA, 15 bp, Homo sapiens
ccacccatgggcctt

SEQ ID NO: 459467 - DNA, 15 bp, Homo sapiens
cccacccatgggcct

SEQ ID NO: 459468 - DNA, 15 bp, Homo sapiens
ccccacccatgggcc

SEQ ID NO: 459469 - DNA, 15 bp, Homo sapiens
accccacccatgggc

SEQ ID NO: 459470 - DNA, 15 bp, Homo sapiens
gaccccacccatggg

SEQ ID NO: 459471 - DNA, 15 bp, Homo sapiens
ggaccccacccatgg

SEQ ID NO: 459472 - DNA, 15 bp, Homo sapiens
tggaccccacccatg

SEQ ID NO: 459473 - DNA, 15 bp, Homo sapiens
ctggaccccacccat

SEQ ID NO: 459474 - DNA, 15 bp, Homo sapiens
cctggaccccaccca

SEQ ID NO: 459475 - DNA, 15 bp, Homo sapiens
acctggaccccaccc

SEQ ID NO: 459476 - DNA, 15 bp, Homo sapiens
gacctggaccccacc

SEQ ID NO: 459477 - DNA, 15 bp, Homo sapiens
agacctggaccccac

SEQ ID NO: 459478 - DNA, 15 bp, Homo sapiens
aagacctggacccca

SEQ ID NO: 459479 - DNA, 15 bp, Homo sapiens
aaagacctggacccc

SEQ ID NO: 459480 - DNA, 15 bp, Homo sapiens
caaagacctggaccc

SEQ ID NO: 459481 - DNA, 15 bp, Homo sapiens
tcaaagacctggacc

SEQ ID NO: 459482 - DNA, 15 bp, Homo sapiens
ctcaaagacctggac

SEQ ID NO: 459483 - DNA, 15 bp, Homo sapiens
cctcaaagacctgga

SEQ ID NO: 459484 - DNA, 15 bp, Homo sapiens
ccctcaaagacctgg

SEQ ID NO: 459485 - DNA, 15 bp, Homo sapiens
tccctcaaagacctg

SEQ ID NO: 459486 - DNA, 15 bp, Homo sapiens
ttccctcaaagacct

SEQ ID NO: 459487 - DNA, 15 bp, Homo sapiens
cttccctcaaagacc

SEQ ID NO: 459488 - DNA, 15 bp, Homo sapiens
ccttccctcaaagac

SEQ ID NO: 459489 - DNA, 15 bp, Homo sapiens
accttccctcaaaga

SEQ ID NO: 459490 - DNA, 15 bp, Homo sapiens
caccttccctcaaag

SEQ ID NO: 459491 - DNA, 15 bp, Homo sapiens
ccaccttccctcaaa

SEQ ID NO: 459492 - DNA, 15 bp, Homo sapiens
gccaccttccctcaa

SEQ ID NO: 459493 - DNA, 15 bp, Homo sapiens
ggccaccttccctca

SEQ ID NO: 459494 - DNA, 15 bp, Homo sapiens
tggccaccttccctc

SEQ ID NO: 459495 - DNA, 15 bp, Homo sapiens
atggccaccttccct

SEQ ID NO: 459496 - DNA, 15 bp, Homo sapiens
tatggccaccttccc

SEQ ID NO: 459497 - DNA, 15 bp, Homo sapiens
gtatggccaccttcc

SEQ ID NO: 459498 - DNA, 15 bp, Homo sapiens
ggtatggccaccttc

SEQ ID NO: 459499 - DNA, 15 bp, Homo sapiens
aggtatggccacctt

SEQ ID NO: 459500 - DNA, 15 bp, Homo sapiens
gaggtatggccacct

SEQ ID NO: 459501 - DNA, 15 bp, Homo sapiens
agaggtatggccacc

SEQ ID NO: 459502 - DNA, 15 bp, Homo sapiens
gagaggtatggccac

SEQ ID NO: 459503 - DNA, 15 bp, Homo sapiens
tgagaggtatggcca

SEQ ID NO: 459504 - DNA, 15 bp, Homo sapiens
atgagaggtatggcc

SEQ ID NO: 459505 - DNA, 15 bp, Homo sapiens
catgagaggtatggc

SEQ ID NO: 459506 - DNA, 15 bp, Homo sapiens
acatgagaggtatgg

SEQ ID NO: 459507 - DNA, 15 bp, Homo sapiens
cacatgagaggtatg

SEQ ID NO: 459508 - DNA, 15 bp, Homo sapiens
gcacatgagaggtat

SEQ ID NO: 459509 - DNA, 15 bp, Homo sapiens
ggcacatgagaggta

SEQ ID NO: 459510 - DNA, 15 bp, Homo sapiens
tggcacatgagaggt

SEQ ID NO: 459511 - DNA, 15 bp, Homo sapiens
gtggcacatgagagg

SEQ ID NO: 459512 - DNA, 15 bp, Homo sapiens
ggtggcacatgagag

SEQ ID NO: 459513 - DNA, 15 bp, Homo sapiens
aggtggcacatgaga

SEQ ID NO: 459514 - DNA, 15 bp, Homo sapiens
taggtggcacatgag

SEQ ID NO: 459515 - DNA, 15 bp, Homo sapiens
gtaggtggcacatga

SEQ ID NO: 459516 - DNA, 15 bp, Homo sapiens
ggtaggtggcacatg

SEQ ID NO: 459517 - DNA, 15 bp, Homo sapiens
gggtaggtggcacat

SEQ ID NO: 459518 - DNA, 15 bp, Homo sapiens
agggtaggtggcaca

SEQ ID NO: 459519 - DNA, 15 bp, Homo sapiens
aagggtaggtggcac

SEQ ID NO: 459520 - DNA, 15 bp, Homo sapiens
aaagggtaggtggca

SEQ ID NO: 459521 - DNA, 15 bp, Homo sapiens
gaaagggtaggtggc

SEQ ID NO: 459522 - DNA, 15 bp, Homo sapiens
agaaagggtaggtgg

SEQ ID NO: 459523 - DNA, 15 bp, Homo sapiens
gagaaagggtaggtg

SEQ ID NO: 459524 - DNA, 15 bp, Homo sapiens
ggagaaagggtaggt

SEQ ID NO: 459525 - DNA, 15 bp, Homo sapiens
gggagaaagggtagg

SEQ ID NO: 459526 - DNA, 15 bp, Homo sapiens
tgggagaaagggtag

SEQ ID NO: 459527 - DNA, 15 bp, Homo sapiens
gtgggagaaagggta

SEQ ID NO: 459528 - DNA, 15 bp, Homo sapiens
ggtgggagaaagggt

SEQ ID NO: 459529 - DNA, 15 bp, Homo sapiens
gggtgggagaaaggg

SEQ ID NO: 459530 - DNA, 15 bp, Homo sapiens
ggggtgggagaaagg

SEQ ID NO: 459531 - DNA, 15 bp, Homo sapiens
gggggtgggagaaag

SEQ ID NO: 459532 - DNA, 15 bp, Homo sapiens
tgggggtgggagaaa

SEQ ID NO: 459533 - DNA, 15 bp, Homo sapiens
gtgggggtgggagaa

SEQ ID NO: 459534 - DNA, 15 bp, Homo sapiens
ggtgggggtgggaga

SEQ ID NO: 459535 - DNA, 15 bp, Homo sapiens
gggtgggggtgggag

SEQ ID NO: 459536 - DNA, 15 bp, Homo sapiens
ggggtgggggtggga

SEQ ID NO: 459537 - DNA, 15 bp, Homo sapiens
aggggtgggggtggg

SEQ ID NO: 459538 - DNA, 15 bp, Homo sapiens
caggggtgggggtgg

SEQ ID NO: 459539 - DNA, 15 bp, Homo sapiens
ccaggggtgggggtg

SEQ ID NO: 459540 - DNA, 15 bp, Homo sapiens
tccaggggtgggggt

SEQ ID NO: 459541 - DNA, 15 bp, Homo sapiens
ctccaggggtggggg

SEQ ID NO: 459542 - DNA, 15 bp, Homo sapiens
gctccaggggtgggg

SEQ ID NO: 459543 - DNA, 15 bp, Homo sapiens
tgctccaggggtggg

SEQ ID NO: 459544 - DNA, 15 bp, Homo sapiens
ctgctccaggggtgg

SEQ ID NO: 459545 - DNA, 15 bp, Homo sapiens
gctgctccaggggtg

SEQ ID NO: 459546 - DNA, 15 bp, Homo sapiens
tgctgctccaggggt

SEQ ID NO: 459547 - DNA, 15 bp, Homo sapiens
ctgctgctccagggg

SEQ ID NO: 459548 - DNA, 15 bp, Homo sapiens
actgctgctccaggg

SEQ ID NO: 459549 - DNA, 15 bp, Homo sapiens
aactgctgctccagg

SEQ ID NO: 459550 - DNA, 15 bp, Homo sapiens
aaactgctgctccag

SEQ ID NO: 459551 - DNA, 15 bp, Homo sapiens
gaaactgctgctcca

SEQ ID NO: 459552 - DNA, 15 bp, Homo sapiens
ggaaactgctgctcc

SEQ ID NO: 459553 - DNA, 15 bp, Homo sapiens
cggaaactgctgctc

SEQ ID NO: 459554 - DNA, 15 bp, Homo sapiens
ccggaaactgctgct

SEQ ID NO: 459555 - DNA, 15 bp, Homo sapiens
tccggaaactgctgc

SEQ ID NO: 459556 - DNA, 15 bp, Homo sapiens
gtccggaaactgctg

SEQ ID NO: 459557 - DNA, 15 bp, Homo sapiens
ggtccggaaactgct

SEQ ID NO: 459558 - DNA, 15 bp, Homo sapiens
gggtccggaaactgc

SEQ ID NO: 459559 - DNA, 15 bp, Homo sapiens
ggggtccggaaactg

SEQ ID NO: 459560 - DNA, 15 bp, Homo sapiens
cggggtccggaaact

SEQ ID NO: 459561 - DNA, 15 bp, Homo sapiens
tcggggtccggaaac

SEQ ID NO: 459562 - DNA, 15 bp, Homo sapiens
ctcggggtccggaaa

SEQ ID NO: 459563 - DNA, 15 bp, Homo sapiens
cctcggggtccggaa

SEQ ID NO: 459564 - DNA, 15 bp, Homo sapiens
acctcggggtccgga

SEQ ID NO: 459565 - DNA, 15 bp, Homo sapiens
cacctcggggtccgg

SEQ ID NO: 459566 - DNA, 15 bp, Homo sapiens
tcacctcggggtccg

SEQ ID NO: 459567 - DNA, 15 bp, Homo sapiens
ctcacctcggggtcc

SEQ ID NO: 459568 - DNA, 15 bp, Homo sapiens
actcacctcggggtc

SEQ ID NO: 459569 - DNA, 15 bp, Homo sapiens
cactcacctcggggt

SEQ ID NO: 459570 - DNA, 15 bp, Homo sapiens
gcactcacctcgggg

SEQ ID NO: 459571 - DNA, 15 bp, Homo sapiens
ggcactcacctcggg

SEQ ID NO: 459572 - DNA, 15 bp, Homo sapiens
gggcactcacctcgg

SEQ ID NO: 459573 - DNA, 15 bp, Homo sapiens
tgggcactcacctcg

SEQ ID NO: 459574 - DNA, 15 bp, Homo sapiens
ttgggcactcacctc

SEQ ID NO: 459575 - DNA, 15 bp, Homo sapiens
gttgggcactcacct

SEQ ID NO: 459576 - DNA, 15 bp, Homo sapiens
tgttgggcactcacc

SEQ ID NO: 459577 - DNA, 15 bp, Homo sapiens
atgttgggcactcac

SEQ ID NO: 459578 - DNA, 15 bp, Homo sapiens
tatgttgggcactca

SEQ ID NO: 459579 - DNA, 15 bp, Homo sapiens
ctatgttgggcactc

SEQ ID NO: 459580 - DNA, 15 bp, Homo sapiens
gctatgttgggcact

SEQ ID NO: 459581 - DNA, 15 bp, Homo sapiens
tgctatgttgggcac

SEQ ID NO: 459582 - DNA, 15 bp, Homo sapiens
gtgctatgttgggca

SEQ ID NO: 459583 - DNA, 15 bp, Homo sapiens
tgtgctatgttgggc

SEQ ID NO: 459584 - DNA, 15 bp, Homo sapiens
ctgtgctatgttggg

SEQ ID NO: 459585 - DNA, 15 bp, Homo sapiens
gctgtgctatgttgg

SEQ ID NO: 459586 - DNA, 15 bp, Homo sapiens
tgctgtgctatgttg

SEQ ID NO: 459587 - DNA, 15 bp, Homo sapiens
gtgctgtgctatgtt

SEQ ID NO: 459588 - DNA, 15 bp, Homo sapiens
ggtgctgtgctatgt

SEQ ID NO: 459589 - DNA, 15 bp, Homo sapiens
gggtgctgtgctatg

SEQ ID NO: 459590 - DNA, 15 bp, Homo sapiens
agggtgctgtgctat

SEQ ID NO: 459591 - DNA, 15 bp, Homo sapiens
gagggtgctgtgcta

SEQ ID NO: 459592 - DNA, 15 bp, Homo sapiens
tgagggtgctgtgct

SEQ ID NO: 459593 - DNA, 15 bp, Homo sapiens
atgagggtgctgtgc

SEQ ID NO: 459594 - DNA, 15 bp, Homo sapiens
gatgagggtgctgtg

SEQ ID NO: 459595 - DNA, 15 bp, Homo sapiens
tgatgagggtgctgt

SEQ ID NO: 459596 - DNA, 15 bp, Homo sapiens
gtgatgagggtgctg

SEQ ID NO: 459597 - DNA, 15 bp, Homo sapiens
ggtgatgagggtgct

SEQ ID NO: 459598 - DNA, 15 bp, Homo sapiens
gggtgatgagggtgc

SEQ ID NO: 459599 - DNA, 15 bp, Homo sapiens
ggggtgatgagggtg

SEQ ID NO: 459600 - DNA, 15 bp, Homo sapiens
aggggtgatgagggt

SEQ ID NO: 459601 - DNA, 15 bp, Homo sapiens
taggggtgatgaggg

SEQ ID NO: 459602 - DNA, 15 bp, Homo sapiens
ttaggggtgatgagg

SEQ ID NO: 459603 - DNA, 15 bp, Homo sapiens
attaggggtgatgag

SEQ ID NO: 459604 - DNA, 15 bp, Homo sapiens
aattaggggtgatga

SEQ ID NO: 459605 - DNA, 15 bp, Homo sapiens
gaattaggggtgatg

SEQ ID NO: 459606 - DNA, 15 bp, Homo sapiens
agaattaggggtgat

SEQ ID NO: 459607 - DNA, 15 bp, Homo sapiens
cagaattaggggtga

SEQ ID NO: 459608 - DNA, 15 bp, Homo sapiens
gcagaattaggggtg

SEQ ID NO: 459609 - DNA, 15 bp, Homo sapiens
ggcagaattaggggt

SEQ ID NO: 459610 - DNA, 15 bp, Homo sapiens
tggcagaattagggg

SEQ ID NO: 459611 - DNA, 15 bp, Homo sapiens
ctggcagaattaggg

SEQ ID NO: 459612 - DNA, 15 bp, Homo sapiens
cctggcagaattagg

SEQ ID NO: 459613 - DNA, 15 bp, Homo sapiens
tcctggcagaattag

SEQ ID NO: 459614 - DNA, 15 bp, Homo sapiens
ctcctggcagaatta

SEQ ID NO: 459615 - DNA, 15 bp, Homo sapiens
gctcctggcagaatt

SEQ ID NO: 459616 - DNA, 15 bp, Homo sapiens
ggctcctggcagaat

SEQ ID NO: 459617 - DNA, 15 bp, Homo sapiens
gggctcctggcagaa

SEQ ID NO: 459618 - DNA, 15 bp, Homo sapiens
ggggctcctggcaga

SEQ ID NO: 459619 - DNA, 15 bp, Homo sapiens
aggggctcctggcag

SEQ ID NO: 459620 - DNA, 15 bp, Homo sapiens
gaggggctcctggca

SEQ ID NO: 459621 - DNA, 15 bp, Homo sapiens
ggaggggctcctggc

SEQ ID NO: 459622 - DNA, 15 bp, Homo sapiens
tggaggggctcctgg

SEQ ID NO: 459623 - DNA, 15 bp, Homo sapiens
ctggaggggctcctg

SEQ ID NO: 459624 - DNA, 15 bp, Homo sapiens
tctggaggggctcct

SEQ ID NO: 459625 - DNA, 15 bp, Homo sapiens
atctggaggggctcc

SEQ ID NO: 459626 - DNA, 15 bp, Homo sapiens
gatctggaggggctc

SEQ ID NO: 459627 - DNA, 15 bp, Homo sapiens
ggatctggaggggct

SEQ ID NO: 459628 - DNA, 15 bp, Homo sapiens
gggatctggaggggc

SEQ ID NO: 459629 - DNA, 15 bp, Homo sapiens
ggggatctggagggg

SEQ ID NO: 459630 - DNA, 15 bp, Homo sapiens
tggggatctggaggg

SEQ ID NO: 459631 - DNA, 15 bp, Homo sapiens
ctggggatctggagg

SEQ ID NO: 459632 - DNA, 15 bp, Homo sapiens
gctggggatctggag

SEQ ID NO: 459633 - DNA, 15 bp, Homo sapiens
ggctggggatctgga

SEQ ID NO: 459634 - DNA, 15 bp, Homo sapiens
gggctggggatctgg

SEQ ID NO: 459635 - DNA, 15 bp, Homo sapiens
ggggctggggatctg

SEQ ID NO: 459636 - DNA, 15 bp, Homo sapiens
aggggctggggatct

SEQ ID NO: 459637 - DNA, 15 bp, Homo sapiens
gaggggctggggatc

SEQ ID NO: 459638 - DNA, 15 bp, Homo sapiens
agaggggctggggat

SEQ ID NO: 459639 - DNA, 15 bp, Homo sapiens
aagaggggctgggga

SEQ ID NO: 459640 - DNA, 15 bp, Homo sapiens
gaagaggggctgggg

SEQ ID NO: 459641 - DNA, 15 bp, Homo sapiens
tgaagaggggctggg

SEQ ID NO: 459642 - DNA, 15 bp, Homo sapiens
ctgaagaggggctgg

SEQ ID NO: 459643 - DNA, 15 bp, Homo sapiens
gctgaagaggggctg

SEQ ID NO: 459644 - DNA, 15 bp, Homo sapiens
agctgaagaggggct

SEQ ID NO: 459645 - DNA, 15 bp, Homo sapiens
gagctgaagaggggc

SEQ ID NO: 459646 - DNA, 15 bp, Homo sapiens
ggagctgaagagggg

SEQ ID NO: 459647 - DNA, 15 bp, Homo sapiens
gggagctgaagaggg

SEQ ID NO: 459648 - DNA, 15 bp, Homo sapiens
agggagctgaagagg

SEQ ID NO: 459649 - DNA, 15 bp, Homo sapiens
aagggagctgaagag

SEQ ID NO: 459650 - DNA, 15 bp, Homo sapiens
caagggagctgaaga

SEQ ID NO: 459651 - DNA, 15 bp, Homo sapiens
ccaagggagctgaag

SEQ ID NO: 459652 - DNA, 15 bp, Homo sapiens
gccaagggagctgaa

SEQ ID NO: 459653 - DNA, 15 bp, Homo sapiens
ggccaagggagctga

SEQ ID NO: 459654 - DNA, 15 bp, Homo sapiens
gggccaagggagctg

SEQ ID NO: 459655 - DNA, 15 bp, Homo sapiens
ggggccaagggagct

SEQ ID NO: 459656 - DNA, 15 bp, Homo sapiens
gggggccaagggagc

SEQ ID NO: 459657 - DNA, 15 bp, Homo sapiens
tgggggccaagggag

SEQ ID NO: 459658 - DNA, 15 bp, Homo sapiens
ctgggggccaaggga

SEQ ID NO: 459659 - DNA, 15 bp, Homo sapiens
actgggggccaaggg

SEQ ID NO: 459660 - DNA, 15 bp, Homo sapiens
gactgggggccaagg

SEQ ID NO: 459661 - DNA, 15 bp, Homo sapiens
ggactgggggccaag

SEQ ID NO: 459662 - DNA, 15 bp, Homo sapiens
aggactgggggccaa

SEQ ID NO: 459663 - DNA, 15 bp, Homo sapiens
caggactgggggcca

SEQ ID NO: 459664 - DNA, 15 bp, Homo sapiens
gcaggactgggggcc

SEQ ID NO: 459665 - DNA, 15 bp, Homo sapiens
ggcaggactgggggc

SEQ ID NO: 459666 - DNA, 15 bp, Homo sapiens
aggcaggactggggg

SEQ ID NO: 459667 - DNA, 15 bp, Homo sapiens
caggcaggactgggg

SEQ ID NO: 459668 - DNA, 15 bp, Homo sapiens
ccaggcaggactggg

SEQ ID NO: 459669 - DNA, 15 bp, Homo sapiens
gccaggcaggactgg

SEQ ID NO: 459670 - DNA, 15 bp, Homo sapiens
ggccaggcaggactg

SEQ ID NO: 459671 - DNA, 15 bp, Homo sapiens
aggccaggcaggact

SEQ ID NO: 459672 - DNA, 15 bp, Homo sapiens
caggccaggcaggac

SEQ ID NO: 459673 - DNA, 15 bp, Homo sapiens
ccaggccaggcagga

SEQ ID NO: 459674 - DNA, 15 bp, Homo sapiens
cccaggccaggcagg

SEQ ID NO: 459675 - DNA, 15 bp, Homo sapiens
tcccaggccaggcag

SEQ ID NO: 459676 - DNA, 15 bp, Homo sapiens
gtcccaggccaggca

SEQ ID NO: 459677 - DNA, 15 bp, Homo sapiens
ggtcccaggccaggc

SEQ ID NO: 459678 - DNA, 15 bp, Homo sapiens
gggtcccaggccagg

SEQ ID NO: 459679 - DNA, 15 bp, Homo sapiens
tgggtcccaggccag

SEQ ID NO: 459680 - DNA, 15 bp, Homo sapiens
ctgggtcccaggcca

SEQ ID NO: 459681 - DNA, 15 bp, Homo sapiens
tctgggtcccaggcc

SEQ ID NO: 459682 - DNA, 15 bp, Homo sapiens
ctctgggtcccaggc

SEQ ID NO: 459683 - DNA, 15 bp, Homo sapiens
gctctgggtcccagg

SEQ ID NO: 459684 - DNA, 15 bp, Homo sapiens
tgctctgggtcccag

SEQ ID NO: 459685 - DNA, 15 bp, Homo sapiens
ctgctctgggtccca

SEQ ID NO: 459686 - DNA, 15 bp, Homo sapiens
gctgctctgggtccc

SEQ ID NO: 459687 - DNA, 15 bp, Homo sapiens
agctgctctgggtcc

SEQ ID NO: 459688 - DNA, 15 bp, Homo sapiens
gagctgctctgggtc

SEQ ID NO: 459689 - DNA, 15 bp, Homo sapiens
ggagctgctctgggt

SEQ ID NO: 459690 - DNA, 15 bp, Homo sapiens
tggagctgctctggg

SEQ ID NO: 459691 - DNA, 15 bp, Homo sapiens
ctggagctgctctgg

SEQ ID NO: 459692 - DNA, 15 bp, Homo sapiens
gctggagctgctctg

SEQ ID NO: 459693 - DNA, 15 bp, Homo sapiens
agctggagctgctct

SEQ ID NO: 459694 - DNA, 15 bp, Homo sapiens
cagctggagctgctc

SEQ ID NO: 459695 - DNA, 15 bp, Homo sapiens
gcagctggagctgct

SEQ ID NO: 459696 - DNA, 15 bp, Homo sapiens
ggcagctggagctgc

SEQ ID NO: 459697 - DNA, 15 bp, Homo sapiens
gggcagctggagctg

SEQ ID NO: 459698 - DNA, 15 bp, Homo sapiens
ggggcagctggagct

SEQ ID NO: 459699 - DNA, 15 bp, Homo sapiens
tggggcagctggagc

SEQ ID NO: 459700 - DNA, 15 bp, Homo sapiens
gtggggcagctggag

SEQ ID NO: 459701 - DNA, 15 bp, Homo sapiens
ggtggggcagctgga

SEQ ID NO: 459702 - DNA, 15 bp, Homo sapiens
tggtggggcagctgg

SEQ ID NO: 459703 - DNA, 15 bp, Homo sapiens
ctggtggggcagctg

SEQ ID NO: 459704 - DNA, 15 bp, Homo sapiens
tctggtggggcagct

SEQ ID NO: 459705 - DNA, 15 bp, Homo sapiens
ttctggtggggcagc

SEQ ID NO: 459706 - DNA, 15 bp, Homo sapiens
cttctggtggggcag

SEQ ID NO: 459707 - DNA, 15 bp, Homo sapiens
ccttctggtggggca

SEQ ID NO: 459708 - DNA, 15 bp, Homo sapiens
cccttctggtggggc

SEQ ID NO: 459709 - DNA, 15 bp, Homo sapiens
tcccttctggtgggg

SEQ ID NO: 459710 - DNA, 15 bp, Homo sapiens
ttcccttctggtggg

SEQ ID NO: 459711 - DNA, 15 bp, Homo sapiens
cttcccttctggtgg

SEQ ID NO: 459712 - DNA, 15 bp, Homo sapiens
ccttcccttctggtg

SEQ ID NO: 459713 - DNA, 15 bp, Homo sapiens
cccttcccttctggt

SEQ ID NO: 459714 - DNA, 15 bp, Homo sapiens
ccccttcccttctgg

SEQ ID NO: 459715 - DNA, 15 bp, Homo sapiens
gccccttcccttctg

SEQ ID NO: 459716 - DNA, 15 bp, Homo sapiens
tgccccttcccttct

SEQ ID NO: 459717 - DNA, 15 bp, Homo sapiens
ctgccccttcccttc

SEQ ID NO: 459718 - DNA, 15 bp, Homo sapiens
tctgccccttccctt

SEQ ID NO: 459719 - DNA, 15 bp, Homo sapiens
ctctgccccttccct

SEQ ID NO: 459720 - DNA, 15 bp, Homo sapiens
cctctgccccttccc

SEQ ID NO: 459721 - DNA, 15 bp, Homo sapiens
ccctctgccccttcc

SEQ ID NO: 459722 - DNA, 15 bp, Homo sapiens
tccctctgccccttc

SEQ ID NO: 459723 - DNA, 15 bp, Homo sapiens
gtccctctgcccctt

SEQ ID NO: 459724 - DNA, 15 bp, Homo sapiens
tgtccctctgcccct

SEQ ID NO: 459725 - DNA, 15 bp, Homo sapiens
ctgtccctctgcccc

SEQ ID NO: 459726 - DNA, 15 bp, Homo sapiens
cctgtccctctgccc

SEQ ID NO: 459727 - DNA, 15 bp, Homo sapiens
ccctgtccctctgcc

SEQ ID NO: 459728 - DNA, 15 bp, Homo sapiens
cccctgtccctctgc

SEQ ID NO: 459729 - DNA, 15 bp, Homo sapiens
acccctgtccctctg

SEQ ID NO: 459730 - DNA, 15 bp, Homo sapiens
cacccctgtccctct

SEQ ID NO: 459731 - DNA, 15 bp, Homo sapiens
ccacccctgtccctc

SEQ ID NO: 459732 - DNA, 15 bp, Homo sapiens
gccacccctgtccct

SEQ ID NO: 459733 - DNA, 15 bp, Homo sapiens
agccacccctgtccc

SEQ ID NO: 459734 - DNA, 15 bp, Homo sapiens
tagccacccctgtcc

SEQ ID NO: 459735 - DNA, 15 bp, Homo sapiens
gtagccacccctgtc

SEQ ID NO: 459736 - DNA, 15 bp, Homo sapiens
tgtagccacccctgt

SEQ ID NO: 459737 - DNA, 15 bp, Homo sapiens
ctgtagccacccctg

SEQ ID NO: 459738 - DNA, 15 bp, Homo sapiens
gctgtagccacccct

SEQ ID NO: 459739 - DNA, 15 bp, Homo sapiens
agctgtagccacccc

SEQ ID NO: 459740 - DNA, 15 bp, Homo sapiens
gagctgtagccaccc

SEQ ID NO: 459741 - DNA, 15 bp, Homo sapiens
ggagctgtagccacc

SEQ ID NO: 459742 - DNA, 15 bp, Homo sapiens
aggagctgtagccac

SEQ ID NO: 459743 - DNA, 15 bp, Homo sapiens
aaggagctgtagcca

SEQ ID NO: 459744 - DNA, 15 bp, Homo sapiens
caaggagctgtagcc

SEQ ID NO: 459745 - DNA, 15 bp, Homo sapiens
ccaaggagctgtagc

SEQ ID NO: 459746 - DNA, 15 bp, Homo sapiens
accaaggagctgtag

SEQ ID NO: 459747 - DNA, 15 bp, Homo sapiens
gaccaaggagctgta

SEQ ID NO: 459748 - DNA, 15 bp, Homo sapiens
ggaccaaggagctgt

SEQ ID NO: 459749 - DNA, 15 bp, Homo sapiens
aggaccaaggagctg

SEQ ID NO: 459750 - DNA, 15 bp, Homo sapiens
caggaccaaggagct

SEQ ID NO: 459751 - DNA, 15 bp, Homo sapiens
ccaggaccaaggagc

SEQ ID NO: 459752 - DNA, 15 bp, Homo sapiens
cccaggaccaaggag

SEQ ID NO: 459753 - DNA, 15 bp, Homo sapiens
gcccaggaccaagga

SEQ ID NO: 459754 - DNA, 15 bp, Homo sapiens
ggcccaggaccaagg

SEQ ID NO: 459755 - DNA, 15 bp, Homo sapiens
gggcccaggaccaag

SEQ ID NO: 459756 - DNA, 15 bp, Homo sapiens
tgggcccaggaccaa

SEQ ID NO: 459757 - DNA, 15 bp, Homo sapiens
ctgggcccaggacca

SEQ ID NO: 459758 - DNA, 15 bp, Homo sapiens
cctgggcccaggacc

SEQ ID NO: 459759 - DNA, 15 bp, Homo sapiens
tcctgggcccaggac

SEQ ID NO: 459760 - DNA, 15 bp, Homo sapiens
ttcctgggcccagga

SEQ ID NO: 459761 - DNA, 15 bp, Homo sapiens
cttcctgggcccagg

SEQ ID NO: 459762 - DNA, 15 bp, Homo sapiens
gcttcctgggcccag

SEQ ID NO: 459763 - DNA, 15 bp, Homo sapiens
ggcttcctgggccca

SEQ ID NO: 459764 - DNA, 15 bp, Homo sapiens
gggcttcctgggccc

SEQ ID NO: 459765 - DNA, 15 bp, Homo sapiens
ggggcttcctgggcc

SEQ ID NO: 459766 - DNA, 15 bp, Homo sapiens
cggggcttcctgggc

SEQ ID NO: 459767 - DNA, 15 bp, Homo sapiens
gcggggcttcctggg

SEQ ID NO: 459768 - DNA, 15 bp, Homo sapiens
ggcggggcttcctgg

SEQ ID NO: 459769 - DNA, 15 bp, Homo sapiens
gggcggggcttcctg

SEQ ID NO: 459770 - DNA, 15 bp, Homo sapiens
tgggcggggcttcct

SEQ ID NO: 459771 - DNA, 15 bp, Homo sapiens
ctgggcggggcttcc

SEQ ID NO: 459772 - DNA, 15 bp, Homo sapiens
cctgggcggggcttc

SEQ ID NO: 459773 - DNA, 15 bp, Homo sapiens
ccctgggcggggctt

SEQ ID NO: 459774 - DNA, 15 bp, Homo sapiens
cccctgggcggggct

SEQ ID NO: 459775 - DNA, 15 bp, Homo sapiens
ccccctgggcggggc

SEQ ID NO: 459776 - DNA, 15 bp, Homo sapiens
gccccctgggcgggg

SEQ ID NO: 459777 - DNA, 15 bp, Homo sapiens
agccccctgggcggg

SEQ ID NO: 459778 - DNA, 15 bp, Homo sapiens
cagccccctgggcgg

SEQ ID NO: 459779 - DNA, 15 bp, Homo sapiens
gcagccccctgggcg

SEQ ID NO: 459780 - DNA, 15 bp, Homo sapiens
tgcagccccctgggc

SEQ ID NO: 459781 - DNA, 15 bp, Homo sapiens
ctgcagccccctggg

SEQ ID NO: 459782 - DNA, 15 bp, Homo sapiens
actgcagccccctgg

SEQ ID NO: 459783 - DNA, 15 bp, Homo sapiens
gactgcagccccctg

SEQ ID NO: 459784 - DNA, 15 bp, Homo sapiens
agactgcagccccct

SEQ ID NO: 459785 - DNA, 15 bp, Homo sapiens
aagactgcagccccc

SEQ ID NO: 459786 - DNA, 15 bp, Homo sapiens
caagactgcagcccc

SEQ ID NO: 459787 - DNA, 15 bp, Homo sapiens
gcaagactgcagccc

SEQ ID NO: 459788 - DNA, 15 bp, Homo sapiens
ggcaagactgcagcc

SEQ ID NO: 459789 - DNA, 15 bp, Homo sapiens
gggcaagactgcagc

SEQ ID NO: 459790 - DNA, 15 bp, Homo sapiens
ggggcaagactgcag

SEQ ID NO: 459791 - DNA, 15 bp, Homo sapiens
gggggcaagactgca

SEQ ID NO: 459792 - DNA, 15 bp, Homo sapiens
cgggggcaagactgc

SEQ ID NO: 459793 - DNA, 15 bp, Homo sapiens
ccgggggcaagactg

SEQ ID NO: 459794 - DNA, 15 bp, Homo sapiens
gccgggggcaagact

SEQ ID NO: 459795 - DNA, 15 bp, Homo sapiens
ggccgggggcaagac

SEQ ID NO: 459796 - DNA, 15 bp, Homo sapiens
tggccgggggcaaga

SEQ ID NO: 459797 - DNA, 15 bp, Homo sapiens
gtggccgggggcaag

SEQ ID NO: 459798 - DNA, 15 bp, Homo sapiens
tgtggccgggggcaa

SEQ ID NO: 459799 - DNA, 15 bp, Homo sapiens
ctgtggccgggggca

SEQ ID NO: 459800 - DNA, 15 bp, Homo sapiens
gctgtggccgggggc

SEQ ID NO: 459801 - DNA, 15 bp, Homo sapiens
ggctgtggccggggg

SEQ ID NO: 459802 - DNA, 15 bp, Homo sapiens
aggctgtggccgggg

SEQ ID NO: 459803 - DNA, 15 bp, Homo sapiens
taggctgtggccggg

SEQ ID NO: 459804 - DNA, 15 bp, Homo sapiens
ctaggctgtggccgg

SEQ ID NO: 459805 - DNA, 15 bp, Homo sapiens
tctaggctgtggccg

SEQ ID NO: 459806 - DNA, 15 bp, Homo sapiens
gtctaggctgtggcc

SEQ ID NO: 459807 - DNA, 15 bp, Homo sapiens
agtctaggctgtggc

SEQ ID NO: 459808 - DNA, 15 bp, Homo sapiens
cagtctaggctgtgg

SEQ ID NO: 459809 - DNA, 15 bp, Homo sapiens
gcagtctaggctgtg

SEQ ID NO: 459810 - DNA, 15 bp, Homo sapiens
cgcagtctaggctgt

SEQ ID NO: 459811 - DNA, 15 bp, Homo sapiens
ccgcagtctaggctg

SEQ ID NO: 459812 - DNA, 15 bp, Homo sapiens
cccgcagtctaggct

SEQ ID NO: 459813 - DNA, 15 bp, Homo sapiens
tcccgcagtctaggc

SEQ ID NO: 459814 - DNA, 15 bp, Homo sapiens
gtcccgcagtctagg

SEQ ID NO: 459815 - DNA, 15 bp, Homo sapiens
tgtcccgcagtctag

SEQ ID NO: 459816 - DNA, 15 bp, Homo sapiens
gtgtcccgcagtcta

SEQ ID NO: 459817 - DNA, 15 bp, Homo sapiens
tgtgtcccgcagtct

SEQ ID NO: 459818 - DNA, 15 bp, Homo sapiens
ctgtgtcccgcagtc

SEQ ID NO: 459819 - DNA, 15 bp, Homo sapiens
cctgtgtcccgcagt

SEQ ID NO: 459820 - DNA, 15 bp, Homo sapiens
ccctgtgtcccgcag

SEQ ID NO: 459821 - DNA, 15 bp, Homo sapiens
tccctgtgtcccgca

SEQ ID NO: 459822 - DNA, 15 bp, Homo sapiens
gtccctgtgtcccgc

SEQ ID NO: 459823 - DNA, 15 bp, Homo sapiens
agtccctgtgtcccg

SEQ ID NO: 459824 - DNA, 15 bp, Homo sapiens
gagtccctgtgtccc

SEQ ID NO: 459825 - DNA, 15 bp, Homo sapiens
cgagtccctgtgtcc

SEQ ID NO: 459826 - DNA, 15 bp, Homo sapiens
tcgagtccctgtgtc

SEQ ID NO: 459827 - DNA, 15 bp, Homo sapiens
ttcgagtccctgtgt

SEQ ID NO: 459828 - DNA, 15 bp, Homo sapiens
cttcgagtccctgtg

SEQ ID NO: 459829 - DNA, 15 bp, Homo sapiens
gcttcgagtccctgt

SEQ ID NO: 459830 - DNA, 15 bp, Homo sapiens
agcttcgagtccctg

SEQ ID NO: 459831 - DNA, 15 bp, Homo sapiens
cagcttcgagtccct

SEQ ID NO: 459832 - DNA, 15 bp, Homo sapiens
ccagcttcgagtccc

SEQ ID NO: 459833 - DNA, 15 bp, Homo sapiens
tccagcttcgagtcc

SEQ ID NO: 459834 - DNA, 15 bp, Homo sapiens
ctccagcttcgagtc

SEQ ID NO: 459835 - DNA, 15 bp, Homo sapiens
cctccagcttcgagt

SEQ ID NO: 459836 - DNA, 15 bp, Homo sapiens
gcctccagcttcgag

SEQ ID NO: 459837 - DNA, 15 bp, Homo sapiens
tgcctccagcttcga

SEQ ID NO: 459838 - DNA, 15 bp, Homo sapiens
gtgcctccagcttcg

SEQ ID NO: 459839 - DNA, 15 bp, Homo sapiens
ggtgcctccagcttc

SEQ ID NO: 459840 - DNA, 15 bp, Homo sapiens
tggtgcctccagctt

SEQ ID NO: 459841 - DNA, 15 bp, Homo sapiens
ctggtgcctccagct

SEQ ID NO: 459842 - DNA, 15 bp, Homo sapiens
gctggtgcctccagc

SEQ ID NO: 459843 - DNA, 15 bp, Homo sapiens
tgctggtgcctccag

SEQ ID NO: 459844 - DNA, 15 bp, Homo sapiens
ctgctggtgcctcca

SEQ ID NO: 459845 - DNA, 15 bp, Homo sapiens
tctgctggtgcctcc

SEQ ID NO: 459846 - DNA, 15 bp, Homo sapiens
ctctgctggtgcctc

SEQ ID NO: 459847 - DNA, 15 bp, Homo sapiens
cctctgctggtgcct

SEQ ID NO: 459848 - DNA, 15 bp, Homo sapiens
tcctctgctggtgcc

SEQ ID NO: 459849 - DNA, 15 bp, Homo sapiens
ctcctctgctggtgc

SEQ ID NO: 459850 - DNA, 15 bp, Homo sapiens
cctcctctgctggtg

SEQ ID NO: 459851 - DNA, 15 bp, Homo sapiens
tcctcctctgctggt

SEQ ID NO: 459852 - DNA, 15 bp, Homo sapiens
gtcctcctctgctgg

SEQ ID NO: 459853 - DNA, 15 bp, Homo sapiens
cgtcctcctctgctg

SEQ ID NO: 459854 - DNA, 15 bp, Homo sapiens
acgtcctcctctgct

SEQ ID NO: 459855 - DNA, 15 bp, Homo sapiens
cacgtcctcctctgc

SEQ ID NO: 459856 - DNA, 15 bp, Homo sapiens
acacgtcctcctctg

SEQ ID NO: 459857 - DNA, 15 bp, Homo sapiens
cacacgtcctcctct

SEQ ID NO: 459858 - DNA, 15 bp, Homo sapiens
ccacacgtcctcctc

SEQ ID NO: 459859 - DNA, 15 bp, Homo sapiens
cccacacgtcctcct

SEQ ID NO: 459860 - DNA, 15 bp, Homo sapiens
tcccacacgtcctcc

SEQ ID NO: 459861 - DNA, 15 bp, Homo sapiens
ctcccacacgtcctc

SEQ ID NO: 459862 - DNA, 15 bp, Homo sapiens
tctcccacacgtcct

SEQ ID NO: 459863 - DNA, 15 bp, Homo sapiens
atctcccacacgtcc

SEQ ID NO: 459864 - DNA, 15 bp, Homo sapiens
gatctcccacacgtc

SEQ ID NO: 459865 - DNA, 15 bp, Homo sapiens
ggatctcccacacgt

SEQ ID NO: 459866 - DNA, 15 bp, Homo sapiens
aggatctcccacacg

SEQ ID NO: 459867 - DNA, 15 bp, Homo sapiens
taggatctcccacac

SEQ ID NO: 459868 - DNA, 15 bp, Homo sapiens
gtaggatctcccaca

SEQ ID NO: 459869 - DNA, 15 bp, Homo sapiens
cgtaggatctcccac

SEQ ID NO: 459870 - DNA, 15 bp, Homo sapiens
ccgtaggatctccca

SEQ ID NO: 459871 - DNA, 15 bp, Homo sapiens
gccgtaggatctccc

SEQ ID NO: 459872 - DNA, 15 bp, Homo sapiens
tgccgtaggatctcc

SEQ ID NO: 459873 - DNA, 15 bp, Homo sapiens
ctgccgtaggatctc

SEQ ID NO: 459874 - DNA, 15 bp, Homo sapiens
cctgccgtaggatct

SEQ ID NO: 459875 - DNA, 15 bp, Homo sapiens
gcctgccgtaggatc

SEQ ID NO: 459876 - DNA, 15 bp, Homo sapiens
tgcctgccgtaggat

SEQ ID NO: 459877 - DNA, 15 bp, Homo sapiens
gtgcctgccgtagga

SEQ ID NO: 459878 - DNA, 15 bp, Homo sapiens
ggtgcctgccgtagg

SEQ ID NO: 459879 - DNA, 15 bp, Homo sapiens
gggtgcctgccgtag

SEQ ID NO: 459880 - DNA, 15 bp, Homo sapiens
ggggtgcctgccgta

SEQ ID NO: 459881 - DNA, 15 bp, Homo sapiens
gggggtgcctgccgt

SEQ ID NO: 459882 - DNA, 15 bp, Homo sapiens
tgggggtgcctgccg

SEQ ID NO: 459883 - DNA, 15 bp, Homo sapiens
atgggggtgcctgcc

SEQ ID NO: 459884 - DNA, 15 bp, Homo sapiens
gatgggggtgcctgc

SEQ ID NO: 459885 - DNA, 15 bp, Homo sapiens
agatgggggtgcctg

SEQ ID NO: 459886 - DNA, 15 bp, Homo sapiens
cagatgggggtgcct

SEQ ID NO: 459887 - DNA, 15 bp, Homo sapiens
tcagatgggggtgcc

SEQ ID NO: 459888 - DNA, 15 bp, Homo sapiens
ctcagatgggggtgc

SEQ ID NO: 459889 - DNA, 15 bp, Homo sapiens
actcagatgggggtg

SEQ ID NO: 459890 - DNA, 15 bp, Homo sapiens
tactcagatgggggt

SEQ ID NO: 459891 - DNA, 15 bp, Homo sapiens
gtactcagatggggg

SEQ ID NO: 459892 - DNA, 15 bp, Homo sapiens
cgtactcagatgggg

SEQ ID NO: 459893 - DNA, 15 bp, Homo sapiens
tcgtactcagatggg

SEQ ID NO: 459894 - DNA, 15 bp, Homo sapiens
ctcgtactcagatgg

SEQ ID NO: 459895 - DNA, 15 bp, Homo sapiens
gctcgtactcagatg

SEQ ID NO: 459896 - DNA, 15 bp, Homo sapiens
cgctcgtactcagat

SEQ ID NO: 459897 - DNA, 15 bp, Homo sapiens
gcgctcgtactcaga

SEQ ID NO: 459898 - DNA, 15 bp, Homo sapiens
tgcgctcgtactcag

SEQ ID NO: 459899 - DNA, 15 bp, Homo sapiens
atgcgctcgtactca

SEQ ID NO: 459900 - DNA, 15 bp, Homo sapiens
gatgcgctcgtactc

SEQ ID NO: 459901 - DNA, 15 bp, Homo sapiens
cgatgcgctcgtact

SEQ ID NO: 459902 - DNA, 15 bp, Homo sapiens
gcgatgcgctcgtac

SEQ ID NO: 459903 - DNA, 15 bp, Homo sapiens
ggcgatgcgctcgta

SEQ ID NO: 459904 - DNA, 15 bp, Homo sapiens
aggcgatgcgctcgt

SEQ ID NO: 459905 - DNA, 15 bp, Homo sapiens
aaggcgatgcgctcg

SEQ ID NO: 459906 - DNA, 15 bp, Homo sapiens
gaaggcgatgcgctc

SEQ ID NO: 459907 - DNA, 15 bp, Homo sapiens
ggaaggcgatgcgct

SEQ ID NO: 459908 - DNA, 15 bp, Homo sapiens
tggaaggcgatgcgc

SEQ ID NO: 459909 - DNA, 15 bp, Homo sapiens
ctggaaggcgatgcg

SEQ ID NO: 459910 - DNA, 15 bp, Homo sapiens
actggaaggcgatgc

SEQ ID NO: 459911 - DNA, 15 bp, Homo sapiens
tactggaaggcgatg

SEQ ID NO: 459912 - DNA, 15 bp, Homo sapiens
gtactggaaggcgat

SEQ ID NO: 459913 - DNA, 15 bp, Homo sapiens
cgtactggaaggcga

SEQ ID NO: 459914 - DNA, 15 bp, Homo sapiens
ccgtactggaaggcg

SEQ ID NO: 459915 - DNA, 15 bp, Homo sapiens
gccgtactggaaggc

SEQ ID NO: 459916 - DNA, 15 bp, Homo sapiens
cgccgtactggaagg

SEQ ID NO: 459917 - DNA, 15 bp, Homo sapiens
acgccgtactggaag

SEQ ID NO: 459918 - DNA, 15 bp, Homo sapiens
gacgccgtactggaa

SEQ ID NO: 459919 - DNA, 15 bp, Homo sapiens
tgacgccgtactgga

SEQ ID NO: 459920 - DNA, 15 bp, Homo sapiens
gtgacgccgtactgg

SEQ ID NO: 459921 - DNA, 15 bp, Homo sapiens
agtgacgccgtactg

SEQ ID NO: 459922 - DNA, 15 bp, Homo sapiens
cagtgacgccgtact

SEQ ID NO: 459923 - DNA, 15 bp, Homo sapiens
tcagtgacgccgtac

SEQ ID NO: 459924 - DNA, 15 bp, Homo sapiens
gtcagtgacgccgta

SEQ ID NO: 459925 - DNA, 15 bp, Homo sapiens
ggtcagtgacgccgt

SEQ ID NO: 459926 - DNA, 15 bp, Homo sapiens
aggtcagtgacgccg

SEQ ID NO: 459927 - DNA, 15 bp, Homo sapiens
caggtcagtgacgcc

SEQ ID NO: 459928 - DNA, 15 bp, Homo sapiens
gcaggtcagtgacgc

SEQ ID NO: 459929 - DNA, 15 bp, Homo sapiens
cgcaggtcagtgacg

SEQ ID NO: 459930 - DNA, 15 bp, Homo sapiens
gcgcaggtcagtgac

SEQ ID NO: 459931 - DNA, 15 bp, Homo sapiens
cgcgcaggtcagtga

SEQ ID NO: 459932 - DNA, 15 bp, Homo sapiens
ccgcgcaggtcagtg

SEQ ID NO: 459933 - DNA, 15 bp, Homo sapiens
gccgcgcaggtcagt

SEQ ID NO: 459934 - DNA, 15 bp, Homo sapiens
tgccgcgcaggtcag

SEQ ID NO: 459935 - DNA, 15 bp, Homo sapiens
atgccgcgcaggtca

SEQ ID NO: 459936 - DNA, 15 bp, Homo sapiens
catgccgcgcaggtc

SEQ ID NO: 459937 - DNA, 15 bp, Homo sapiens
gcatgccgcgcaggt

SEQ ID NO: 459938 - DNA, 15 bp, Homo sapiens
agcatgccgcgcagg

SEQ ID NO: 459939 - DNA, 15 bp, Homo sapiens
tagcatgccgcgcag

SEQ ID NO: 459940 - DNA, 15 bp, Homo sapiens
ttagcatgccgcgca

SEQ ID NO: 459941 - DNA, 15 bp, Homo sapiens
tttagcatgccgcgc

SEQ ID NO: 459942 - DNA, 15 bp, Homo sapiens
ctttagcatgccgcg

SEQ ID NO: 459943 - DNA, 15 bp, Homo sapiens
tctttagcatgccgc

SEQ ID NO: 459944 - DNA, 15 bp, Homo sapiens
ctctttagcatgccg

SEQ ID NO: 459945 - DNA, 15 bp, Homo sapiens
cctctttagcatgcc

SEQ ID NO: 459946 - DNA, 15 bp, Homo sapiens
gcctctttagcatgc

SEQ ID NO: 459947 - DNA, 15 bp, Homo sapiens
agcctctttagcatg

SEQ ID NO: 459948 - DNA, 15 bp, Homo sapiens
gagcctctttagcat

SEQ ID NO: 459949 - DNA, 15 bp, Homo sapiens
tgagcctctttagca

SEQ ID NO: 459950 - DNA, 15 bp, Homo sapiens
ttgagcctctttagc

SEQ ID NO: 459951 - DNA, 15 bp, Homo sapiens
cttgagcctctttag

SEQ ID NO: 459952 - DNA, 15 bp, Homo sapiens
ccttgagcctcttta

SEQ ID NO: 459953 - DNA, 15 bp, Homo sapiens
cccttgagcctcttt

SEQ ID NO: 459954 - DNA, 15 bp, Homo sapiens
gcccttgagcctctt

SEQ ID NO: 459955 - DNA, 15 bp, Homo sapiens
tgcccttgagcctct

SEQ ID NO: 459956 - DNA, 15 bp, Homo sapiens
atgcccttgagcctc

SEQ ID NO: 459957 - DNA, 15 bp, Homo sapiens
catgcccttgagcct

SEQ ID NO: 459958 - DNA, 15 bp, Homo sapiens
tcatgcccttgagcc

SEQ ID NO: 459959 - DNA, 15 bp, Homo sapiens
ctcatgcccttgagc

SEQ ID NO: 459960 - DNA, 15 bp, Homo sapiens
cctcatgcccttgag

SEQ ID NO: 459961 - DNA, 15 bp, Homo sapiens
gcctcatgcccttga

SEQ ID NO: 459962 - DNA, 15 bp, Homo sapiens
cgcctcatgcccttg

SEQ ID NO: 459963 - DNA, 15 bp, Homo sapiens
gcgcctcatgccctt

SEQ ID NO: 459964 - DNA, 15 bp, Homo sapiens
cgcgcctcatgccct

SEQ ID NO: 459965 - DNA, 15 bp, Homo sapiens
tcgcgcctcatgccc

SEQ ID NO: 459966 - DNA, 15 bp, Homo sapiens
atcgcgcctcatgcc

SEQ ID NO: 459967 - DNA, 15 bp, Homo sapiens
catcgcgcctcatgc

SEQ ID NO: 459968 - DNA, 15 bp, Homo sapiens
tcatcgcgcctcatg

SEQ ID NO: 459969 - DNA, 15 bp, Homo sapiens
ctcatcgcgcctcat

SEQ ID NO: 459970 - DNA, 15 bp, Homo sapiens
tctcatcgcgcctca

SEQ ID NO: 459971 - DNA, 15 bp, Homo sapiens
ttctcatcgcgcctc

SEQ ID NO: 459972 - DNA, 15 bp, Homo sapiens
cttctcatcgcgcct

SEQ ID NO: 459973 - DNA, 15 bp, Homo sapiens
tcttctcatcgcgcc

SEQ ID NO: 459974 - DNA, 15 bp, Homo sapiens
ttcttctcatcgcgc

SEQ ID NO: 459975 - DNA, 15 bp, Homo sapiens
cttcttctcatcgcg

SEQ ID NO: 459976 - DNA, 15 bp, Homo sapiens
tcttcttctcatcgc

SEQ ID NO: 459977 - DNA, 15 bp, Homo sapiens
ctcttcttctcatcg

SEQ ID NO: 459978 - DNA, 15 bp, Homo sapiens
gctcttcttctcatc

SEQ ID NO: 459979 - DNA, 15 bp, Homo sapiens
tgctcttcttctcat

SEQ ID NO: 459980 - DNA, 15 bp, Homo sapiens
gtgctcttcttctca

SEQ ID NO: 459981 - DNA, 15 bp, Homo sapiens
tgtgctcttcttctc

SEQ ID NO: 459982 - DNA, 15 bp, Homo sapiens
ctgtgctcttcttct

SEQ ID NO: 459983 - DNA, 15 bp, Homo sapiens
cctgtgctcttcttc

SEQ ID NO: 459984 - DNA, 15 bp, Homo sapiens
acctgtgctcttctt

SEQ ID NO: 459985 - DNA, 15 bp, Homo sapiens
aacctgtgctcttct

SEQ ID NO: 459986 - DNA, 15 bp, Homo sapiens
taacctgtgctcttc

SEQ ID NO: 459987 - DNA, 15 bp, Homo sapiens
ctaacctgtgctctt

SEQ ID NO: 459988 - DNA, 15 bp, Homo sapiens
gctaacctgtgctct

SEQ ID NO: 459989 - DNA, 15 bp, Homo sapiens
ggctaacctgtgctc

SEQ ID NO: 459990 - DNA, 15 bp, Homo sapiens
gggctaacctgtgct

SEQ ID NO: 459991 - DNA, 15 bp, Homo sapiens
agggctaacctgtgc

SEQ ID NO: 459992 - DNA, 15 bp, Homo sapiens
aagggctaacctgtg

SEQ ID NO: 459993 - DNA, 15 bp, Homo sapiens
gaagggctaacctgt

SEQ ID NO: 459994 - DNA, 15 bp, Homo sapiens
ggaagggctaacctg

SEQ ID NO: 459995 - DNA, 15 bp, Homo sapiens
aggaagggctaacct

SEQ ID NO: 459996 - DNA, 15 bp, Homo sapiens
gaggaagggctaacc

SEQ ID NO: 459997 - DNA, 15 bp, Homo sapiens
tgaggaagggctaac

SEQ ID NO: 459998 - DNA, 15 bp, Homo sapiens
ctgaggaagggctaa

SEQ ID NO: 459999 - DNA, 15 bp, Homo sapiens
tctgaggaagggcta

SEQ ID NO: 460000 - DNA, 15 bp, Homo sapiens
ctctgaggaagggct

SEQ ID NO: 460001 - DNA, 15 bp, Homo sapiens
cctctgaggaagggc

SEQ ID NO: 460002 - DNA, 15 bp, Homo sapiens
ccctctgaggaaggg

SEQ ID NO: 460003 - DNA, 15 bp, Homo sapiens
cccctctgaggaagg

SEQ ID NO: 460004 - DNA, 15 bp, Homo sapiens
tcccctctgaggaag

SEQ ID NO: 460005 - DNA, 15 bp, Homo sapiens
ctcccctctgaggaa

SEQ ID NO: 460006 - DNA, 15 bp, Homo sapiens
tctcccctctgagga

SEQ ID NO: 460007 - DNA, 15 bp, Homo sapiens
ctctcccctctgagg

SEQ ID NO: 460008 - DNA, 15 bp, Homo sapiens
cctctcccctctgag

SEQ ID NO: 460009 - DNA, 15 bp, Homo sapiens
tcctctcccctctga

SEQ ID NO: 460010 - DNA, 15 bp, Homo sapiens
ctcctctcccctctg

SEQ ID NO: 460011 - DNA, 15 bp, Homo sapiens
tctcctctcccctct

SEQ ID NO: 460012 - DNA, 15 bp, Homo sapiens
ctctcctctcccctc

SEQ ID NO: 460013 - DNA, 15 bp, Homo sapiens
cctctcctctcccct

SEQ ID NO: 460014 - DNA, 15 bp, Homo sapiens
ccctctcctctcccc

SEQ ID NO: 460015 - DNA, 15 bp, Homo sapiens
gccctctcctctccc

SEQ ID NO: 460016 - DNA, 15 bp, Homo sapiens
tgccctctcctctcc

SEQ ID NO: 460017 - DNA, 15 bp, Homo sapiens
gtgccctctcctctc

SEQ ID NO: 460018 - DNA, 15 bp, Homo sapiens
tgtgccctctcctct

SEQ ID NO: 460019 - DNA, 15 bp, Homo sapiens
ctgtgccctctcctc

SEQ ID NO: 460020 - DNA, 15 bp, Homo sapiens
cctgtgccctctcct

SEQ ID NO: 460021 - DNA, 15 bp, Homo sapiens
gcctgtgccctctcc

SEQ ID NO: 460022 - DNA, 15 bp, Homo sapiens
agcctgtgccctctc

SEQ ID NO: 460023 - DNA, 15 bp, Homo sapiens
tagcctgtgccctct

SEQ ID NO: 460024 - DNA, 15 bp, Homo sapiens
ctagcctgtgccctc

SEQ ID NO: 460025 - DNA, 15 bp, Homo sapiens
gctagcctgtgccct

SEQ ID NO: 460026 - DNA, 15 bp, Homo sapiens
ggctagcctgtgccc

SEQ ID NO: 460027 - DNA, 15 bp, Homo sapiens
gggctagcctgtgcc

SEQ ID NO: 460028 - DNA, 15 bp, Homo sapiens
agggctagcctgtgc

SEQ ID NO: 460029 - DNA, 15 bp, Homo sapiens
aagggctagcctgtg

SEQ ID NO: 460030 - DNA, 15 bp, Homo sapiens
gaagggctagcctgt

SEQ ID NO: 460031 - DNA, 15 bp, Homo sapiens
ggaagggctagcctg

SEQ ID NO: 460032 - DNA, 15 bp, Homo sapiens
gggaagggctagcct

SEQ ID NO: 460033 - DNA, 15 bp, Homo sapiens
agggaagggctagcc

SEQ ID NO: 460034 - DNA, 15 bp, Homo sapiens
tagggaagggctagc

SEQ ID NO: 460035 - DNA, 15 bp, Homo sapiens
gtagggaagggctag

SEQ ID NO: 460036 - DNA, 15 bp, Homo sapiens
tgtagggaagggcta

SEQ ID NO: 460037 - DNA, 15 bp, Homo sapiens
gtgtagggaagggct

SEQ ID NO: 460038 - DNA, 15 bp, Homo sapiens
tgtgtagggaagggc

SEQ ID NO: 460039 - DNA, 15 bp, Homo sapiens
ctgtgtagggaaggg

SEQ ID NO: 460040 - DNA, 15 bp, Homo sapiens
cctgtgtagggaagg

SEQ ID NO: 460041 - DNA, 15 bp, Homo sapiens
tcctgtgtagggaag

SEQ ID NO: 460042 - DNA, 15 bp, Homo sapiens
ctcctgtgtagggaa

SEQ ID NO: 460043 - DNA, 15 bp, Homo sapiens
tctcctgtgtaggga

SEQ ID NO: 460044 - DNA, 15 bp, Homo sapiens
ctctcctgtgtaggg

SEQ ID NO: 460045 - DNA, 15 bp, Homo sapiens
cctctcctgtgtagg

SEQ ID NO: 460046 - DNA, 15 bp, Homo sapiens
tcctctcctgtgtag

SEQ ID NO: 460047 - DNA, 15 bp, Homo sapiens
ctcctctcctgtgta

SEQ ID NO: 460048 - DNA, 15 bp, Homo sapiens
tctcctctcctgtgt

SEQ ID NO: 460049 - DNA, 15 bp, Homo sapiens
ctctcctctcctgtg

SEQ ID NO: 460050 - DNA, 15 bp, Homo sapiens
cctctcctctcctgt

SEQ ID NO: 460051 - DNA, 15 bp, Homo sapiens
ccctctcctctcctg

SEQ ID NO: 460052 - DNA, 15 bp, Homo sapiens
gccctctcctctcct

SEQ ID NO: 460053 - DNA, 15 bp, Homo sapiens
atgccctctcctctc

SEQ ID NO: 460054 - DNA, 15 bp, Homo sapiens
tatgccctctcctct

SEQ ID NO: 460055 - DNA, 15 bp, Homo sapiens
ctatgccctctcctc

SEQ ID NO: 460056 - DNA, 15 bp, Homo sapiens
cctatgccctctcct

SEQ ID NO: 460057 - DNA, 15 bp, Homo sapiens
acctatgccctctcc

SEQ ID NO: 460058 - DNA, 15 bp, Homo sapiens
aacctatgccctctc

SEQ ID NO: 460059 - DNA, 15 bp, Homo sapiens
taacctatgccctct

SEQ ID NO: 460060 - DNA, 15 bp, Homo sapiens
ctaacctatgccctc

SEQ ID NO: 460061 - DNA, 15 bp, Homo sapiens
gctaacctatgccct

SEQ ID NO: 460062 - DNA, 15 bp, Homo sapiens
ggctaacctatgccc

SEQ ID NO: 460063 - DNA, 15 bp, Homo sapiens
gggctaacctatgcc

SEQ ID NO: 460064 - DNA, 15 bp, Homo sapiens
agggctaacctatgc

SEQ ID NO: 460065 - DNA, 15 bp, Homo sapiens
aagggctaacctatg

SEQ ID NO: 460066 - DNA, 15 bp, Homo sapiens
gaagggctaacctat

SEQ ID NO: 460067 - DNA, 15 bp, Homo sapiens
ggaagggctaaccta

SEQ ID NO: 460068 - DNA, 15 bp, Homo sapiens
gggaagggctaacct

SEQ ID NO: 460069 - DNA, 15 bp, Homo sapiens
ggggaagggctaacc

SEQ ID NO: 460070 - DNA, 15 bp, Homo sapiens
tggggaagggctaac

SEQ ID NO: 460071 - DNA, 15 bp, Homo sapiens
gtggggaagggctaa

SEQ ID NO: 460072 - DNA, 15 bp, Homo sapiens
tgtggggaagggcta

SEQ ID NO: 460073 - DNA, 15 bp, Homo sapiens
ctgtggggaagggct

SEQ ID NO: 460074 - DNA, 15 bp, Homo sapiens
cctgtggggaagggc

SEQ ID NO: 460075 - DNA, 15 bp, Homo sapiens
ccctgtggggaaggg

SEQ ID NO: 460076 - DNA, 15 bp, Homo sapiens
cccctgtggggaagg

SEQ ID NO: 460077 - DNA, 15 bp, Homo sapiens
tcccctgtggggaag

SEQ ID NO: 460078 - DNA, 15 bp, Homo sapiens
ctcccctgtggggaa

SEQ ID NO: 460079 - DNA, 15 bp, Homo sapiens
tctcccctgtgggga

SEQ ID NO: 460080 - DNA, 15 bp, Homo sapiens
ctctcccctgtgggg

SEQ ID NO: 460081 - DNA, 15 bp, Homo sapiens
cctctcccctgtggg

SEQ ID NO: 460082 - DNA, 15 bp, Homo sapiens
tcctctcccctgtgg

SEQ ID NO: 460083 - DNA, 15 bp, Homo sapiens
ctcctctcccctgtg

SEQ ID NO: 460084 - DNA, 15 bp, Homo sapiens
tctcctctcccctgt

SEQ ID NO: 460085 - DNA, 15 bp, Homo sapiens
ctctcctctcccctg

SEQ ID NO: 460086 - DNA, 15 bp, Homo sapiens
acctgtgccctctcc

SEQ ID NO: 460087 - DNA, 15 bp, Homo sapiens
aacctgtgccctctc

SEQ ID NO: 460088 - DNA, 15 bp, Homo sapiens
taacctgtgccctct

SEQ ID NO: 460089 - DNA, 15 bp, Homo sapiens
ctaacctgtgccctc

SEQ ID NO: 460090 - DNA, 15 bp, Homo sapiens
gctaacctgtgccct

SEQ ID NO: 460091 - DNA, 15 bp, Homo sapiens
ggctaacctgtgccc

SEQ ID NO: 460092 - DNA, 15 bp, Homo sapiens
gggctaacctgtgcc

SEQ ID NO: 460093 - DNA, 15 bp, Homo sapiens
ggggctaacctgtgc

SEQ ID NO: 460094 - DNA, 15 bp, Homo sapiens
gggggctaacctgtg

SEQ ID NO: 460095 - DNA, 15 bp, Homo sapiens
ggggggctaacctgt

SEQ ID NO: 460096 - DNA, 15 bp, Homo sapiens
tggggggctaacctg

SEQ ID NO: 460097 - DNA, 15 bp, Homo sapiens
gtggggggctaacct

SEQ ID NO: 460098 - DNA, 15 bp, Homo sapiens
ggtggggggctaacc

SEQ ID NO: 460099 - DNA, 15 bp, Homo sapiens
aggtggggggctaac

SEQ ID NO: 460100 - DNA, 15 bp, Homo sapiens
gaggtggggggctaa

SEQ ID NO: 460101 - DNA, 15 bp, Homo sapiens
cgaggtggggggcta

SEQ ID NO: 460102 - DNA, 15 bp, Homo sapiens
acgaggtggggggct

SEQ ID NO: 460103 - DNA, 15 bp, Homo sapiens
gacgaggtggggggc

SEQ ID NO: 460104 - DNA, 15 bp, Homo sapiens
ggacgaggtgggggg

SEQ ID NO: 460105 - DNA, 15 bp, Homo sapiens
tggacgaggtggggg

SEQ ID NO: 460106 - DNA, 15 bp, Homo sapiens
gtggacgaggtgggg

SEQ ID NO: 460107 - DNA, 15 bp, Homo sapiens
tgtggacgaggtggg

SEQ ID NO: 460108 - DNA, 15 bp, Homo sapiens
atgtggacgaggtgg

SEQ ID NO: 460109 - DNA, 15 bp, Homo sapiens
tatgtggacgaggtg

SEQ ID NO: 460110 - DNA, 15 bp, Homo sapiens
gtatgtggacgaggt

SEQ ID NO: 460111 - DNA, 15 bp, Homo sapiens
tgtatgtggacgagg

SEQ ID NO: 460112 - DNA, 15 bp, Homo sapiens
atgtatgtggacgag

SEQ ID NO: 460113 - DNA, 15 bp, Homo sapiens
catgtatgtggacga

SEQ ID NO: 460114 - DNA, 15 bp, Homo sapiens
ccatgtatgtggacg

SEQ ID NO: 460115 - DNA, 15 bp, Homo sapiens
tccatgtatgtggac

SEQ ID NO: 460116 - DNA, 15 bp, Homo sapiens
ttccatgtatgtgga

SEQ ID NO: 460117 - DNA, 15 bp, Homo sapiens
tttccatgtatgtgg

SEQ ID NO: 460118 - DNA, 15 bp, Homo sapiens
ctttccatgtatgtg

SEQ ID NO: 460119 - DNA, 15 bp, Homo sapiens
tctttccatgtatgt

SEQ ID NO: 460120 - DNA, 15 bp, Homo sapiens
ctctttccatgtatg

SEQ ID NO: 460121 - DNA, 15 bp, Homo sapiens
gctctttccatgtat

SEQ ID NO: 460122 - DNA, 15 bp, Homo sapiens
cgctctttccatgta

SEQ ID NO: 460123 - DNA, 15 bp, Homo sapiens
ccgctctttccatgt

SEQ ID NO: 460124 - DNA, 15 bp, Homo sapiens
tccgctctttccatg

SEQ ID NO: 460125 - DNA, 15 bp, Homo sapiens
ctccgctctttccat

SEQ ID NO: 460126 - DNA, 15 bp, Homo sapiens
actccgctctttcca

SEQ ID NO: 460127 - DNA, 15 bp, Homo sapiens
gactccgctctttcc

SEQ ID NO: 460128 - DNA, 15 bp, Homo sapiens
ggactccgctctttc

SEQ ID NO: 460129 - DNA, 15 bp, Homo sapiens
cggactccgctcttt

SEQ ID NO: 460130 - DNA, 15 bp, Homo sapiens
ccggactccgctctt

SEQ ID NO: 460131 - DNA, 15 bp, Homo sapiens
gccggactccgctct

SEQ ID NO: 460132 - DNA, 15 bp, Homo sapiens
agccggactccgctc

SEQ ID NO: 460133 - DNA, 15 bp, Homo sapiens
aagccggactccgct

SEQ ID NO: 460134 - DNA, 15 bp, Homo sapiens
taagccggactccgc

SEQ ID NO: 460135 - DNA, 15 bp, Homo sapiens
ctaagccggactccg

SEQ ID NO: 460136 - DNA, 15 bp, Homo sapiens
gctaagccggactcc

SEQ ID NO: 460137 - DNA, 15 bp, Homo sapiens
tgctaagccggactc

SEQ ID NO: 460138 - DNA, 15 bp, Homo sapiens
gtgctaagccggact

SEQ ID NO: 460139 - DNA, 15 bp, Homo sapiens
tgtgctaagccggac

SEQ ID NO: 460140 - DNA, 15 bp, Homo sapiens
ctgtgctaagccgga

SEQ ID NO: 460141 - DNA, 15 bp, Homo sapiens
tctgtgctaagccgg

SEQ ID NO: 460142 - DNA, 15 bp, Homo sapiens
ctctgtgctaagccg

SEQ ID NO: 460143 - DNA, 15 bp, Homo sapiens
tctctgtgctaagcc

SEQ ID NO: 460144 - DNA, 15 bp, Homo sapiens
gtctctgtgctaagc

SEQ ID NO: 460145 - DNA, 15 bp, Homo sapiens
agtctctgtgctaag

SEQ ID NO: 460146 - DNA, 15 bp, Homo sapiens
gagtctctgtgctaa

SEQ ID NO: 460147 - DNA, 15 bp, Homo sapiens
tgagtctctgtgcta

SEQ ID NO: 460148 - DNA, 15 bp, Homo sapiens
gtgagtctctgtgct

SEQ ID NO: 460149 - DNA, 15 bp, Homo sapiens
tgtgagtctctgtgc

SEQ ID NO: 460150 - DNA, 15 bp, Homo sapiens
ctgtgagtctctgtg

SEQ ID NO: 460151 - DNA, 15 bp, Homo sapiens
cctgtgagtctctgt

SEQ ID NO: 460152 - DNA, 15 bp, Homo sapiens
tcctgtgagtctctg

SEQ ID NO: 460153 - DNA, 15 bp, Homo sapiens
ttcctgtgagtctct

SEQ ID NO: 460154 - DNA, 15 bp, Homo sapiens
tttcctgtgagtctc

SEQ ID NO: 460155 - DNA, 15 bp, Homo sapiens
ctttcctgtgagtct

SEQ ID NO: 460156 - DNA, 15 bp, Homo sapiens
tctttcctgtgagtc

SEQ ID NO: 460157 - DNA, 15 bp, Homo sapiens
ttctttcctgtgagt

SEQ ID NO: 460158 - DNA, 15 bp, Homo sapiens
cttctttcctgtgag

SEQ ID NO: 460159 - DNA, 15 bp, Homo sapiens
tcttctttcctgtga

SEQ ID NO: 460160 - DNA, 15 bp, Homo sapiens
ctcttctttcctgtg

SEQ ID NO: 460161 - DNA, 15 bp, Homo sapiens
gctcttctttcctgt

SEQ ID NO: 460162 - DNA, 15 bp, Homo sapiens
ggctcttctttcctg

SEQ ID NO: 460163 - DNA, 15 bp, Homo sapiens
gggctcttctttcct

SEQ ID NO: 460164 - DNA, 15 bp, Homo sapiens
tgggctcttctttcc

SEQ ID NO: 460165 - DNA, 15 bp, Homo sapiens
ctgggctcttctttc

SEQ ID NO: 460166 - DNA, 15 bp, Homo sapiens
cctgggctcttcttt

SEQ ID NO: 460167 - DNA, 15 bp, Homo sapiens
acctgggctcttctt

SEQ ID NO: 460168 - DNA, 15 bp, Homo sapiens
aacctgggctcttct

SEQ ID NO: 460169 - DNA, 15 bp, Homo sapiens
taacctgggctcttc

SEQ ID NO: 460170 - DNA, 15 bp, Homo sapiens
ttaacctgggctctt

SEQ ID NO: 460171 - DNA, 15 bp, Homo sapiens
gttaacctgggctct

SEQ ID NO: 460172 - DNA, 15 bp, Homo sapiens
ggttaacctgggctc

SEQ ID NO: 460173 - DNA, 15 bp, Homo sapiens
gggttaacctgggct

SEQ ID NO: 460174 - DNA, 15 bp, Homo sapiens
ggggttaacctgggc

SEQ ID NO: 460175 - DNA, 15 bp, Homo sapiens
aggggttaacctggg

SEQ ID NO: 460176 - DNA, 15 bp, Homo sapiens
gaggggttaacctgg

SEQ ID NO: 460177 - DNA, 15 bp, Homo sapiens
ggaggggttaacctg

SEQ ID NO: 460178 - DNA, 15 bp, Homo sapiens
aggaggggttaacct

SEQ ID NO: 460179 - DNA, 15 bp, Homo sapiens
aaggaggggttaacc

SEQ ID NO: 460180 - DNA, 15 bp, Homo sapiens
caaggaggggttaac

SEQ ID NO: 460181 - DNA, 15 bp, Homo sapiens
acaaggaggggttaa

SEQ ID NO: 460182 - DNA, 15 bp, Homo sapiens
cacaaggaggggtta

SEQ ID NO: 460183 - DNA, 15 bp, Homo sapiens
acacaaggaggggtt

SEQ ID NO: 460184 - DNA, 15 bp, Homo sapiens
tacacaaggaggggt

SEQ ID NO: 460185 - DNA, 15 bp, Homo sapiens
ctacacaaggagggg

SEQ ID NO: 460186 - DNA, 15 bp, Homo sapiens
tctacacaaggaggg

SEQ ID NO: 460187 - DNA, 15 bp, Homo sapiens
ttctacacaaggagg

SEQ ID NO: 460188 - DNA, 15 bp, Homo sapiens
tttctacacaaggag

SEQ ID NO: 460189 - DNA, 15 bp, Homo sapiens
ttttctacacaagga

SEQ ID NO: 460190 - DNA, 15 bp, Homo sapiens
tttttctacacaagg

SEQ ID NO: 460191 - DNA, 15 bp, Homo sapiens
ctttttctacacaag

SEQ ID NO: 460192 - DNA, 15 bp, Homo sapiens
gctttttctacacaa

SEQ ID NO: 460193 - DNA, 15 bp, Homo sapiens
ggctttttctacaca

SEQ ID NO: 460194 - DNA, 15 bp, Homo sapiens
tggctttttctacac

SEQ ID NO: 460195 - DNA, 15 bp, Homo sapiens
ttggctttttctaca

SEQ ID NO: 460196 - DNA, 15 bp, Homo sapiens
cttggctttttctac

SEQ ID NO: 460197 - DNA, 15 bp, Homo sapiens
tcttggctttttcta

SEQ ID NO: 460198 - DNA, 15 bp, Homo sapiens
ttcttggctttttct

SEQ ID NO: 460199 - DNA, 15 bp, Homo sapiens
attcttggctttttc

SEQ ID NO: 460200 - DNA, 15 bp, Homo sapiens
cattcttggcttttt

SEQ ID NO: 460201 - DNA, 15 bp, Homo sapiens
gcattcttggctttt

SEQ ID NO: 460202 - DNA, 15 bp, Homo sapiens
ggcattcttggcttt

SEQ ID NO: 460203 - DNA, 15 bp, Homo sapiens
gggcattcttggctt

SEQ ID NO: 460204 - DNA, 15 bp, Homo sapiens
tgggcattcttggct

SEQ ID NO: 460205 - DNA, 15 bp, Homo sapiens
ctgggcattcttggc

SEQ ID NO: 460206 - DNA, 15 bp, Homo sapiens
cctgggcattcttgg

SEQ ID NO: 460207 - DNA, 15 bp, Homo sapiens
acctgggcattcttg

SEQ ID NO: 460208 - DNA, 15 bp, Homo sapiens
aacctgggcattctt

SEQ ID NO: 460209 - DNA, 15 bp, Homo sapiens
taacctgggcattct

SEQ ID NO: 460210 - DNA, 15 bp, Homo sapiens
ctaacctgggcattc

SEQ ID NO: 460211 - DNA, 15 bp, Homo sapiens
gctaacctgggcatt

SEQ ID NO: 460212 - DNA, 15 bp, Homo sapiens
ggctaacctgggcat

SEQ ID NO: 460213 - DNA, 15 bp, Homo sapiens
gggctaacctgggca

SEQ ID NO: 460214 - DNA, 15 bp, Homo sapiens
ggggctaacctgggc

SEQ ID NO: 460215 - DNA, 15 bp, Homo sapiens
aggggctaacctggg

SEQ ID NO: 460216 - DNA, 15 bp, Homo sapiens
aaggggctaacctgg

SEQ ID NO: 460217 - DNA, 15 bp, Homo sapiens
taaggggctaacctg

SEQ ID NO: 460218 - DNA, 15 bp, Homo sapiens
gtaaggggctaacct

SEQ ID NO: 460219 - DNA, 15 bp, Homo sapiens
ggtaaggggctaacc

SEQ ID NO: 460220 - DNA, 15 bp, Homo sapiens
tggtaaggggctaac

SEQ ID NO: 460221 - DNA, 15 bp, Homo sapiens
gtggtaaggggctaa

SEQ ID NO: 460222 - DNA, 15 bp, Homo sapiens
tgtggtaaggggcta

SEQ ID NO: 460223 - DNA, 15 bp, Homo sapiens
ctgtggtaaggggct

SEQ ID NO: 460224 - DNA, 15 bp, Homo sapiens
tctgtggtaaggggc

SEQ ID NO: 460225 - DNA, 15 bp, Homo sapiens
ctctgtggtaagggg

SEQ ID NO: 460226 - DNA, 15 bp, Homo sapiens
tctctgtggtaaggg

SEQ ID NO: 460227 - DNA, 15 bp, Homo sapiens
atctctgtggtaagg

SEQ ID NO: 460228 - DNA, 15 bp, Homo sapiens
tatctctgtggtaag

SEQ ID NO: 460229 - DNA, 15 bp, Homo sapiens
ctatctctgtggtaa

SEQ ID NO: 460230 - DNA, 15 bp, Homo sapiens
tctatctctgtggta

SEQ ID NO: 460231 - DNA, 15 bp, Homo sapiens
ttctatctctgtggt

SEQ ID NO: 460232 - DNA, 15 bp, Homo sapiens
cttctatctctgtgg

SEQ ID NO: 460233 - DNA, 15 bp, Homo sapiens
tcttctatctctgtg

SEQ ID NO: 460234 - DNA, 15 bp, Homo sapiens
ctcttctatctctgt

SEQ ID NO: 460235 - DNA, 15 bp, Homo sapiens
tctcttctatctctg

SEQ ID NO: 460236 - DNA, 15 bp, Homo sapiens
ttctcttctatctct

SEQ ID NO: 460237 - DNA, 15 bp, Homo sapiens
cttctcttctatctc

SEQ ID NO: 460238 - DNA, 15 bp, Homo sapiens
tcttctcttctatct

SEQ ID NO: 460239 - DNA, 15 bp, Homo sapiens
ctcttctcttctatc

SEQ ID NO: 460240 - DNA, 15 bp, Homo sapiens
gctcttctcttctat

SEQ ID NO: 460241 - DNA, 15 bp, Homo sapiens
tgctcttctcttcta

SEQ ID NO: 460242 - DNA, 15 bp, Homo sapiens
ttgctcttctcttct

SEQ ID NO: 460243 - DNA, 15 bp, Homo sapiens
tttgctcttctcttc

SEQ ID NO: 460244 - DNA, 15 bp, Homo sapiens
ttttgctcttctctt

SEQ ID NO: 460245 - DNA, 15 bp, Homo sapiens
cttttgctcttctct

SEQ ID NO: 460246 - DNA, 15 bp, Homo sapiens
acttttgctcttctc

SEQ ID NO: 460247 - DNA, 15 bp, Homo sapiens
aacttttgctcttct

SEQ ID NO: 460248 - DNA, 15 bp, Homo sapiens
taacttttgctcttc

SEQ ID NO: 460249 - DNA, 15 bp, Homo sapiens
ctaacttttgctctt

SEQ ID NO: 460250 - DNA, 15 bp, Homo sapiens
cctaacttttgctct

SEQ ID NO: 460251 - DNA, 15 bp, Homo sapiens
gcctaacttttgctc

SEQ ID NO: 460252 - DNA, 15 bp, Homo sapiens
ggcctaacttttgct

SEQ ID NO: 460253 - DNA, 15 bp, Homo sapiens
tggcctaacttttgc

SEQ ID NO: 460254 - DNA, 15 bp, Homo sapiens
ctggcctaacttttg

SEQ ID NO: 460255 - DNA, 15 bp, Homo sapiens
cctggcctaactttt

SEQ ID NO: 460256 - DNA, 15 bp, Homo sapiens
tcctggcctaacttt

SEQ ID NO: 460257 - DNA, 15 bp, Homo sapiens
gtcctggcctaactt

SEQ ID NO: 460258 - DNA, 15 bp, Homo sapiens
tgtcctggcctaact

SEQ ID NO: 460259 - DNA, 15 bp, Homo sapiens
ctgtcctggcctaac

SEQ ID NO: 460260 - DNA, 15 bp, Homo sapiens
gctgtcctggcctaa

SEQ ID NO: 460261 - DNA, 15 bp, Homo sapiens
ggctgtcctggccta

SEQ ID NO: 460262 - DNA, 15 bp, Homo sapiens
tggctgtcctggcct

SEQ ID NO: 460263 - DNA, 15 bp, Homo sapiens
gtggctgtcctggcc

SEQ ID NO: 460264 - DNA, 15 bp, Homo sapiens
tgtggctgtcctggc

SEQ ID NO: 460265 - DNA, 15 bp, Homo sapiens
ttgtggctgtcctgg

SEQ ID NO: 460266 - DNA, 15 bp, Homo sapiens
cttgtggctgtcctg

SEQ ID NO: 460267 - DNA, 15 bp, Homo sapiens
ccttgtggctgtcct

SEQ ID NO: 460268 - DNA, 15 bp, Homo sapiens
tccttgtggctgtcc

SEQ ID NO: 460269 - DNA, 15 bp, Homo sapiens
ttccttgtggctgtc

SEQ ID NO: 460270 - DNA, 15 bp, Homo sapiens
tttccttgtggctgt

SEQ ID NO: 460271 - DNA, 15 bp, Homo sapiens
ttttccttgtggctg

SEQ ID NO: 460272 - DNA, 15 bp, Homo sapiens
cttttccttgtggct

SEQ ID NO: 460273 - DNA, 15 bp, Homo sapiens
ccttttccttgtggc

SEQ ID NO: 460274 - DNA, 15 bp, Homo sapiens
tccttttccttgtgg

SEQ ID NO: 460275 - DNA, 15 bp, Homo sapiens
gtccttttccttgtg

SEQ ID NO: 460276 - DNA, 15 bp, Homo sapiens
tgtccttttccttgt

SEQ ID NO: 460277 - DNA, 15 bp, Homo sapiens
ctgtccttttccttg

SEQ ID NO: 460278 - DNA, 15 bp, Homo sapiens
tctgtccttttcctt

SEQ ID NO: 460279 - DNA, 15 bp, Homo sapiens
ctctgtccttttcct

SEQ ID NO: 460280 - DNA, 15 bp, Homo sapiens
gctctgtccttttcc

SEQ ID NO: 460281 - DNA, 15 bp, Homo sapiens
agctctgtccttttc

SEQ ID NO: 460282 - DNA, 15 bp, Homo sapiens
gagctctgtcctttt

SEQ ID NO: 460283 - DNA, 15 bp, Homo sapiens
tgagctctgtccttt

SEQ ID NO: 460284 - DNA, 15 bp, Homo sapiens
ctgagctctgtcctt

SEQ ID NO: 460285 - DNA, 15 bp, Homo sapiens
cctgagctctgtcct

SEQ ID NO: 460286 - DNA, 15 bp, Homo sapiens
acctgagctctgtcc

SEQ ID NO: 460287 - DNA, 15 bp, Homo sapiens
aacctgagctctgtc

SEQ ID NO: 460288 - DNA, 15 bp, Homo sapiens
taacctgagctctgt

SEQ ID NO: 460289 - DNA, 15 bp, Homo sapiens
ttaacctgagctctg

SEQ ID NO: 460290 - DNA, 15 bp, Homo sapiens
gttaacctgagctct

SEQ ID NO: 460291 - DNA, 15 bp, Homo sapiens
ggttaacctgagctc

SEQ ID NO: 460292 - DNA, 15 bp, Homo sapiens
gggttaacctgagct

SEQ ID NO: 460293 - DNA, 15 bp, Homo sapiens
agggttaacctgagc

SEQ ID NO: 460294 - DNA, 15 bp, Homo sapiens
gagggttaacctgag

SEQ ID NO: 460295 - DNA, 15 bp, Homo sapiens
ggagggttaacctga

SEQ ID NO: 460296 - DNA, 15 bp, Homo sapiens
aggagggttaacctg

SEQ ID NO: 460297 - DNA, 15 bp, Homo sapiens
gaggagggttaacct

SEQ ID NO: 460298 - DNA, 15 bp, Homo sapiens
tgaggagggttaacc

SEQ ID NO: 460299 - DNA, 15 bp, Homo sapiens
gtgaggagggttaac

SEQ ID NO: 460300 - DNA, 15 bp, Homo sapiens
ggtgaggagggttaa

SEQ ID NO: 460301 - DNA, 15 bp, Homo sapiens
tggtgaggagggtta

SEQ ID NO: 460302 - DNA, 15 bp, Homo sapiens
ttggtgaggagggtt

SEQ ID NO: 460303 - DNA, 15 bp, Homo sapiens
cttggtgaggagggt

SEQ ID NO: 460304 - DNA, 15 bp, Homo sapiens
ccttggtgaggaggg

SEQ ID NO: 460305 - DNA, 15 bp, Homo sapiens
tccttggtgaggagg

SEQ ID NO: 460306 - DNA, 15 bp, Homo sapiens
ttccttggtgaggag

SEQ ID NO: 460307 - DNA, 15 bp, Homo sapiens
tttccttggtgagga

SEQ ID NO: 460308 - DNA, 15 bp, Homo sapiens
ttttccttggtgagg

SEQ ID NO: 460309 - DNA, 15 bp, Homo sapiens
tttttccttggtgag

SEQ ID NO: 460310 - DNA, 15 bp, Homo sapiens
atttttccttggtga

SEQ ID NO: 460311 - DNA, 15 bp, Homo sapiens
gatttttccttggtg

SEQ ID NO: 460312 - DNA, 15 bp, Homo sapiens
tgatttttccttggt

SEQ ID NO: 460313 - DNA, 15 bp, Homo sapiens
ctgatttttccttgg

SEQ ID NO: 460314 - DNA, 15 bp, Homo sapiens
cctgatttttccttg

SEQ ID NO: 460315 - DNA, 15 bp, Homo sapiens
gcctgatttttcctt

SEQ ID NO: 460316 - DNA, 15 bp, Homo sapiens
agcctgatttttcct

SEQ ID NO: 460317 - DNA, 15 bp, Homo sapiens
tagcctgatttttcc

SEQ ID NO: 460318 - DNA, 15 bp, Homo sapiens
gtagcctgatttttc

SEQ ID NO: 460319 - DNA, 15 bp, Homo sapiens
tgtagcctgattttt

SEQ ID NO: 460320 - DNA, 15 bp, Homo sapiens
gtgtagcctgatttt

SEQ ID NO: 460321 - DNA, 15 bp, Homo sapiens
agtgtagcctgattt

SEQ ID NO: 460322 - DNA, 15 bp, Homo sapiens
aagtgtagcctgatt

SEQ ID NO: 460323 - DNA, 15 bp, Homo sapiens
aaagtgtagcctgat

SEQ ID NO: 460324 - DNA, 15 bp, Homo sapiens
gaaagtgtagcctga

SEQ ID NO: 460325 - DNA, 15 bp, Homo sapiens
agaaagtgtagcctg

SEQ ID NO: 460326 - DNA, 15 bp, Homo sapiens
aagaaagtgtagcct

SEQ ID NO: 460327 - DNA, 15 bp, Homo sapiens
aaagaaagtgtagcc

SEQ ID NO: 460328 - DNA, 15 bp, Homo sapiens
gaaagaaagtgtagc

SEQ ID NO: 460329 - DNA, 15 bp, Homo sapiens
agaaagaaagtgtag

SEQ ID NO: 460330 - DNA, 15 bp, Homo sapiens
gagaaagaaagtgta

SEQ ID NO: 460331 - DNA, 15 bp, Homo sapiens
agagaaagaaagtgt

SEQ ID NO: 460332 - DNA, 15 bp, Homo sapiens
tagagaaagaaagtg

SEQ ID NO: 460333 - DNA, 15 bp, Homo sapiens
gtagagaaagaaagt

SEQ ID NO: 460334 - DNA, 15 bp, Homo sapiens
ggtagagaaagaaag

SEQ ID NO: 460335 - DNA, 15 bp, Homo sapiens
gggtagagaaagaaa

SEQ ID NO: 460336 - DNA, 15 bp, Homo sapiens
agggtagagaaagaa

SEQ ID NO: 460337 - DNA, 15 bp, Homo sapiens
gagggtagagaaaga

SEQ ID NO: 460338 - DNA, 15 bp, Homo sapiens
agagggtagagaaag

SEQ ID NO: 460339 - DNA, 15 bp, Homo sapiens
aagagggtagagaaa

SEQ ID NO: 460340 - DNA, 15 bp, Homo sapiens
gaagagggtagagaa

SEQ ID NO: 460341 - DNA, 15 bp, Homo sapiens
agaagagggtagaga

SEQ ID NO: 460342 - DNA, 15 bp, Homo sapiens
cagaagagggtagag

SEQ ID NO: 460343 - DNA, 15 bp, Homo sapiens
tcagaagagggtaga

SEQ ID NO: 460344 - DNA, 15 bp, Homo sapiens
ttcagaagagggtag

SEQ ID NO: 460345 - DNA, 15 bp, Homo sapiens
tttcagaagagggta

SEQ ID NO: 460346 - DNA, 15 bp, Homo sapiens
ttttcagaagagggt

SEQ ID NO: 460347 - DNA, 15 bp, Homo sapiens
cttttcagaagaggg

SEQ ID NO: 460348 - DNA, 15 bp, Homo sapiens
tcttttcagaagagg

SEQ ID NO: 460349 - DNA, 15 bp, Homo sapiens
ttcttttcagaagag

SEQ ID NO: 460350 - DNA, 15 bp, Homo sapiens
tttcttttcagaaga

SEQ ID NO: 460351 - DNA, 15 bp, Homo sapiens
atttcttttcagaag

SEQ ID NO: 460352 - DNA, 15 bp, Homo sapiens
catttcttttcagaa

SEQ ID NO: 460353 - DNA, 15 bp, Homo sapiens
tcatttcttttcaga

SEQ ID NO: 460354 - DNA, 15 bp, Homo sapiens
ttcatttcttttcag

SEQ ID NO: 460355 - DNA, 15 bp, Homo sapiens
cttcatttcttttca

SEQ ID NO: 460356 - DNA, 15 bp, Homo sapiens
gcttcatttcttttc

SEQ ID NO: 460357 - DNA, 15 bp, Homo sapiens
ggcttcatttctttt

SEQ ID NO: 460358 - DNA, 15 bp, Homo sapiens
gggcttcatttcttt

SEQ ID NO: 460359 - DNA, 15 bp, Homo sapiens
cgggcttcatttctt

SEQ ID NO: 460360 - DNA, 15 bp, Homo sapiens
ccgggcttcatttct

SEQ ID NO: 460361 - DNA, 15 bp, Homo sapiens
accgggcttcatttc

SEQ ID NO: 460362 - DNA, 15 bp, Homo sapiens
aaccgggcttcattt

SEQ ID NO: 460363 - DNA, 15 bp, Homo sapiens
taaccgggcttcatt

SEQ ID NO: 460364 - DNA, 15 bp, Homo sapiens
ttaaccgggcttcat

SEQ ID NO: 460365 - DNA, 15 bp, Homo sapiens
gttaaccgggcttca

SEQ ID NO: 460366 - DNA, 15 bp, Homo sapiens
ggttaaccgggcttc

SEQ ID NO: 460367 - DNA, 15 bp, Homo sapiens
gggttaaccgggctt

SEQ ID NO: 460368 - DNA, 15 bp, Homo sapiens
agggttaaccgggct

SEQ ID NO: 460369 - DNA, 15 bp, Homo sapiens
gagggttaaccgggc

SEQ ID NO: 460370 - DNA, 15 bp, Homo sapiens
agagggttaaccggg

SEQ ID NO: 460371 - DNA, 15 bp, Homo sapiens
gagagggttaaccgg

SEQ ID NO: 460372 - DNA, 15 bp, Homo sapiens
ggagagggttaaccg

SEQ ID NO: 460373 - DNA, 15 bp, Homo sapiens
tggagagggttaacc

SEQ ID NO: 460374 - DNA, 15 bp, Homo sapiens
gtggagagggttaac

SEQ ID NO: 460375 - DNA, 15 bp, Homo sapiens
tgtggagagggttaa

SEQ ID NO: 460376 - DNA, 15 bp, Homo sapiens
gtgtggagagggtta

SEQ ID NO: 460377 - DNA, 15 bp, Homo sapiens
ggtgtggagagggtt

SEQ ID NO: 460378 - DNA, 15 bp, Homo sapiens
gggtgtggagagggt

SEQ ID NO: 460379 - DNA, 15 bp, Homo sapiens
tgggtgtggagaggg

SEQ ID NO: 460380 - DNA, 15 bp, Homo sapiens
ttgggtgtggagagg

SEQ ID NO: 460381 - DNA, 15 bp, Homo sapiens
tttgggtgtggagag

SEQ ID NO: 460382 - DNA, 15 bp, Homo sapiens
ttttgggtgtggaga

SEQ ID NO: 460383 - DNA, 15 bp, Homo sapiens
cttttgggtgtggag

SEQ ID NO: 460384 - DNA, 15 bp, Homo sapiens
tcttttgggtgtgga

SEQ ID NO: 460385 - DNA, 15 bp, Homo sapiens
ttcttttgggtgtgg

SEQ ID NO: 460386 - DNA, 15 bp, Homo sapiens
tttcttttgggtgtg

SEQ ID NO: 460387 - DNA, 15 bp, Homo sapiens
ttttcttttgggtgt

SEQ ID NO: 460388 - DNA, 15 bp, Homo sapiens
cttttcttttgggtg

SEQ ID NO: 460389 - DNA, 15 bp, Homo sapiens
ccttttcttttgggt

SEQ ID NO: 460390 - DNA, 15 bp, Homo sapiens
cccttttcttttggg

SEQ ID NO: 460391 - DNA, 15 bp, Homo sapiens
tcccttttcttttgg

SEQ ID NO: 460392 - DNA, 15 bp, Homo sapiens
ttcccttttcttttg

SEQ ID NO: 460393 - DNA, 15 bp, Homo sapiens
cttcccttttctttt

SEQ ID NO: 460394 - DNA, 15 bp, Homo sapiens
tcttcccttttcttt

SEQ ID NO: 460395 - DNA, 15 bp, Homo sapiens
ctcttcccttttctt

SEQ ID NO: 460396 - DNA, 15 bp, Homo sapiens
cctcttcccttttct

SEQ ID NO: 460397 - DNA, 15 bp, Homo sapiens
gcctcttcccttttc

SEQ ID NO: 460398 - DNA, 15 bp, Homo sapiens
ggcctcttccctttt

SEQ ID NO: 460399 - DNA, 15 bp, Homo sapiens
gggcctcttcccttt

SEQ ID NO: 460400 - DNA, 15 bp, Homo sapiens
cgggcctcttccctt

SEQ ID NO: 460401 - DNA, 15 bp, Homo sapiens
gcgggcctcttccct

SEQ ID NO: 460402 - DNA, 15 bp, Homo sapiens
agcgggcctcttccc

SEQ ID NO: 460403 - DNA, 15 bp, Homo sapiens
tagcgggcctcttcc

SEQ ID NO: 460404 - DNA, 15 bp, Homo sapiens
ttagcgggcctcttc

SEQ ID NO: 460405 - DNA, 15 bp, Homo sapiens
cttagcgggcctctt

SEQ ID NO: 460406 - DNA, 15 bp, Homo sapiens
gcttagcgggcctct

SEQ ID NO: 460407 - DNA, 15 bp, Homo sapiens
ggcttagcgggcctc

SEQ ID NO: 460408 - DNA, 15 bp, Homo sapiens
aggcttagcgggcct

SEQ ID NO: 460409 - DNA, 15 bp, Homo sapiens
caggcttagcgggcc

SEQ ID NO: 460410 - DNA, 15 bp, Homo sapiens
ccaggcttagcgggc

SEQ ID NO: 460411 - DNA, 15 bp, Homo sapiens
tccaggcttagcggg

SEQ ID NO: 460412 - DNA, 15 bp, Homo sapiens
ctccaggcttagcgg

SEQ ID NO: 460413 - DNA, 15 bp, Homo sapiens
tctccaggcttagcg

SEQ ID NO: 460414 - DNA, 15 bp, Homo sapiens
ctctccaggcttagc

SEQ ID NO: 460415 - DNA, 15 bp, Homo sapiens
gctctccaggcttag

SEQ ID NO: 460416 - DNA, 15 bp, Homo sapiens
ggctctccaggctta

SEQ ID NO: 460417 - DNA, 15 bp, Homo sapiens
tggctctccaggctt

SEQ ID NO: 460418 - DNA, 15 bp, Homo sapiens
gtggctctccaggct

SEQ ID NO: 460419 - DNA, 15 bp, Homo sapiens
tgtggctctccaggc

SEQ ID NO: 460420 - DNA, 15 bp, Homo sapiens
gtgtggctctccagg

SEQ ID NO: 460421 - DNA, 15 bp, Homo sapiens
tgtgtggctctccag

SEQ ID NO: 460422 - DNA, 15 bp, Homo sapiens
gtgtgtggctctcca

SEQ ID NO: 460423 - DNA, 15 bp, Homo sapiens
tgtgtgtggctctcc

SEQ ID NO: 460424 - DNA, 15 bp, Homo sapiens
ctgtgtgtggctctc

SEQ ID NO: 460425 - DNA, 15 bp, Homo sapiens
cctgtgtgtggctct

SEQ ID NO: 460426 - DNA, 15 bp, Homo sapiens
gcctgtgtgtggctc

SEQ ID NO: 460427 - DNA, 15 bp, Homo sapiens
tgcctgtgtgtggct

SEQ ID NO: 460428 - DNA, 15 bp, Homo sapiens
ttgcctgtgtgtggc

SEQ ID NO: 460429 - DNA, 15 bp, Homo sapiens
tttgcctgtgtgtgg

SEQ ID NO: 460430 - DNA, 15 bp, Homo sapiens
ctttgcctgtgtgtg

SEQ ID NO: 460431 - DNA, 15 bp, Homo sapiens
tctttgcctgtgtgt

SEQ ID NO: 460432 - DNA, 15 bp, Homo sapiens
ttctttgcctgtgtg

SEQ ID NO: 460433 - DNA, 15 bp, Homo sapiens
tttctttgcctgtgt

SEQ ID NO: 460434 - DNA, 15 bp, Homo sapiens
ttttctttgcctgtg

SEQ ID NO: 460435 - DNA, 15 bp, Homo sapiens
cttttctttgcctgt

SEQ ID NO: 460436 - DNA, 15 bp, Homo sapiens
tcttttctttgcctg

SEQ ID NO: 460437 - DNA, 15 bp, Homo sapiens
ctcttttctttgcct

SEQ ID NO: 460438 - DNA, 15 bp, Homo sapiens
gctcttttctttgcc

SEQ ID NO: 460439 - DNA, 15 bp, Homo sapiens
ggctcttttctttgc

SEQ ID NO: 460440 - DNA, 15 bp, Homo sapiens
aggctcttttctttg

SEQ ID NO: 460441 - DNA, 15 bp, Homo sapiens
caggctcttttcttt

SEQ ID NO: 460442 - DNA, 15 bp, Homo sapiens
ccaggctcttttctt

SEQ ID NO: 460443 - DNA, 15 bp, Homo sapiens
gccaggctcttttct

SEQ ID NO: 460444 - DNA, 15 bp, Homo sapiens
agccaggctcttttc

SEQ ID NO: 460445 - DNA, 15 bp, Homo sapiens
tagccaggctctttt

SEQ ID NO: 460446 - DNA, 15 bp, Homo sapiens
ttagccaggctcttt

SEQ ID NO: 460447 - DNA, 15 bp, Homo sapiens
attagccaggctctt

SEQ ID NO: 460448 - DNA, 15 bp, Homo sapiens
gattagccaggctct

SEQ ID NO: 460449 - DNA, 15 bp, Homo sapiens
agattagccaggctc

SEQ ID NO: 460450 - DNA, 15 bp, Homo sapiens
aagattagccaggct

SEQ ID NO: 460451 - DNA, 15 bp, Homo sapiens
aaagattagccaggc

SEQ ID NO: 460452 - DNA, 15 bp, Homo sapiens
gaaagattagccagg

SEQ ID NO: 460453 - DNA, 15 bp, Homo sapiens
agaaagattagccag

SEQ ID NO: 460454 - DNA, 15 bp, Homo sapiens
gagaaagattagcca

SEQ ID NO: 460455 - DNA, 15 bp, Homo sapiens
agagaaagattagcc

SEQ ID NO: 460456 - DNA, 15 bp, Homo sapiens
gagagaaagattagc

SEQ ID NO: 460457 - DNA, 15 bp, Homo sapiens
tgagagaaagattag

SEQ ID NO: 460458 - DNA, 15 bp, Homo sapiens
ctgagagaaagatta

SEQ ID NO: 460459 - DNA, 15 bp, Homo sapiens
cctgagagaaagatt

SEQ ID NO: 460460 - DNA, 15 bp, Homo sapiens
gcctgagagaaagat

SEQ ID NO: 460461 - DNA, 15 bp, Homo sapiens
tgcctgagagaaaga

SEQ ID NO: 460462 - DNA, 15 bp, Homo sapiens
ttgcctgagagaaag

SEQ ID NO: 460463 - DNA, 15 bp, Homo sapiens
tttgcctgagagaaa

SEQ ID NO: 460464 - DNA, 15 bp, Homo sapiens
gtttgcctgagagaa

SEQ ID NO: 460465 - DNA, 15 bp, Homo sapiens
tgtttgcctgagaga

SEQ ID NO: 460466 - DNA, 15 bp, Homo sapiens
ttgtttgcctgagag

SEQ ID NO: 460467 - DNA, 15 bp, Homo sapiens
tttgtttgcctgaga

SEQ ID NO: 460468 - DNA, 15 bp, Homo sapiens
ctttgtttgcctgag

SEQ ID NO: 460469 - DNA, 15 bp, Homo sapiens
gctttgtttgcctga

SEQ ID NO: 460470 - DNA, 15 bp, Homo sapiens
tgctttgtttgcctg

SEQ ID NO: 460471 - DNA, 15 bp, Homo sapiens
ctgctttgtttgcct

SEQ ID NO: 460472 - DNA, 15 bp, Homo sapiens
cctgctttgtttgcc

SEQ ID NO: 460473 - DNA, 15 bp, Homo sapiens
tcctgctttgtttgc

SEQ ID NO: 460474 - DNA, 15 bp, Homo sapiens
ctcctgctttgtttg

SEQ ID NO: 460475 - DNA, 15 bp, Homo sapiens
cctcctgctttgttt

SEQ ID NO: 460476 - DNA, 15 bp, Homo sapiens
ccctcctgctttgtt

SEQ ID NO: 460477 - DNA, 15 bp, Homo sapiens
gccctcctgctttgt

SEQ ID NO: 460478 - DNA, 15 bp, Homo sapiens
agccctcctgctttg

SEQ ID NO: 460479 - DNA, 15 bp, Homo sapiens
aagccctcctgcttt

SEQ ID NO: 460480 - DNA, 15 bp, Homo sapiens
caagccctcctgctt

SEQ ID NO: 460481 - DNA, 15 bp, Homo sapiens
ccaagccctcctgct

SEQ ID NO: 460482 - DNA, 15 bp, Homo sapiens
cccaagccctcctgc

SEQ ID NO: 460483 - DNA, 15 bp, Homo sapiens
acccaagccctcctg

SEQ ID NO: 460484 - DNA, 15 bp, Homo sapiens
aacccaagccctcct

SEQ ID NO: 460485 - DNA, 15 bp, Homo sapiens
taacccaagccctcc

SEQ ID NO: 460486 - DNA, 15 bp, Homo sapiens
ttaacccaagccctc

SEQ ID NO: 460487 - DNA, 15 bp, Homo sapiens
gttaacccaagccct

SEQ ID NO: 460488 - DNA, 15 bp, Homo sapiens
agttaacccaagccc

SEQ ID NO: 460489 - DNA, 15 bp, Homo sapiens
tagttaacccaagcc

SEQ ID NO: 460490 - DNA, 15 bp, Homo sapiens
gtagttaacccaagc

SEQ ID NO: 460491 - DNA, 15 bp, Homo sapiens
ggtagttaacccaag

SEQ ID NO: 460492 - DNA, 15 bp, Homo sapiens
gggtagttaacccaa

SEQ ID NO: 460493 - DNA, 15 bp, Homo sapiens
agggtagttaaccca

SEQ ID NO: 460494 - DNA, 15 bp, Homo sapiens
gagggtagttaaccc

SEQ ID NO: 460495 - DNA, 15 bp, Homo sapiens
tgagggtagttaacc

SEQ ID NO: 460496 - DNA, 15 bp, Homo sapiens
gtgagggtagttaac

SEQ ID NO: 460497 - DNA, 15 bp, Homo sapiens
ggtgagggtagttaa

SEQ ID NO: 460498 - DNA, 15 bp, Homo sapiens
gggtgagggtagtta

SEQ ID NO: 460499 - DNA, 15 bp, Homo sapiens
ggggtgagggtagtt

SEQ ID NO: 460500 - DNA, 15 bp, Homo sapiens
gggggtgagggtagt

SEQ ID NO: 460501 - DNA, 15 bp, Homo sapiens
tgggggtgagggtag

SEQ ID NO: 460502 - DNA, 15 bp, Homo sapiens
ctgggggtgagggta

SEQ ID NO: 460503 - DNA, 15 bp, Homo sapiens
cctgggggtgagggt

SEQ ID NO: 460504 - DNA, 15 bp, Homo sapiens
gcctgggggtgaggg

SEQ ID NO: 460505 - DNA, 15 bp, Homo sapiens
tgcctgggggtgagg

SEQ ID NO: 460506 - DNA, 15 bp, Homo sapiens
ctgcctgggggtgag

SEQ ID NO: 460507 - DNA, 15 bp, Homo sapiens
tctgcctgggggtga

SEQ ID NO: 460508 - DNA, 15 bp, Homo sapiens
atctgcctgggggtg

SEQ ID NO: 460509 - DNA, 15 bp, Homo sapiens
catctgcctgggggt

SEQ ID NO: 460510 - DNA, 15 bp, Homo sapiens
ccatctgcctggggg

SEQ ID NO: 460511 - DNA, 15 bp, Homo sapiens
tccatctgcctgggg

SEQ ID NO: 460512 - DNA, 15 bp, Homo sapiens
ttccatctgcctggg

SEQ ID NO: 460513 - DNA, 15 bp, Homo sapiens
tttccatctgcctgg

SEQ ID NO: 460514 - DNA, 15 bp, Homo sapiens
ctttccatctgcctg

SEQ ID NO: 460515 - DNA, 15 bp, Homo sapiens
tctttccatctgcct

SEQ ID NO: 460516 - DNA, 15 bp, Homo sapiens
ctctttccatctgcc

SEQ ID NO: 460517 - DNA, 15 bp, Homo sapiens
cctctttccatctgc

SEQ ID NO: 460518 - DNA, 15 bp, Homo sapiens
tcctctttccatctg

SEQ ID NO: 460519 - DNA, 15 bp, Homo sapiens
ctcctctttccatct

SEQ ID NO: 460520 - DNA, 15 bp, Homo sapiens
tctcctctttccatc

SEQ ID NO: 460521 - DNA, 15 bp, Homo sapiens
ctctcctctttccat

SEQ ID NO: 460522 - DNA, 15 bp, Homo sapiens
gctctcctctttcca

SEQ ID NO: 460523 - DNA, 15 bp, Homo sapiens
ggctctcctctttcc

SEQ ID NO: 460524 - DNA, 15 bp, Homo sapiens
gggctctcctctttc

SEQ ID NO: 460525 - DNA, 15 bp, Homo sapiens
tgggctctcctcttt

SEQ ID NO: 460526 - DNA, 15 bp, Homo sapiens
ctgggctctcctctt

SEQ ID NO: 460527 - DNA, 15 bp, Homo sapiens
cctgggctctcctct

SEQ ID NO: 460528 - DNA, 15 bp, Homo sapiens
tcctgggctctcctc

SEQ ID NO: 460529 - DNA, 15 bp, Homo sapiens
ttcctgggctctcct

SEQ ID NO: 460530 - DNA, 15 bp, Homo sapiens
attcctgggctctcc

SEQ ID NO: 460531 - DNA, 15 bp, Homo sapiens
tattcctgggctctc

SEQ ID NO: 460532 - DNA, 15 bp, Homo sapiens
ctattcctgggctct

SEQ ID NO: 460533 - DNA, 15 bp, Homo sapiens
gctattcctgggctc

SEQ ID NO: 460534 - DNA, 15 bp, Homo sapiens
ggctattcctgggct

SEQ ID NO: 460535 - DNA, 15 bp, Homo sapiens
gggctattcctgggc

SEQ ID NO: 460536 - DNA, 15 bp, Homo sapiens
agggctattcctggg

SEQ ID NO: 460537 - DNA, 15 bp, Homo sapiens
aagggctattcctgg

SEQ ID NO: 460538 - DNA, 15 bp, Homo sapiens
gaagggctattcctg

SEQ ID NO: 460539 - DNA, 15 bp, Homo sapiens
agaagggctattcct

SEQ ID NO: 460540 - DNA, 15 bp, Homo sapiens
gagaagggctattcc

SEQ ID NO: 460541 - DNA, 15 bp, Homo sapiens
ggagaagggctattc

SEQ ID NO: 460542 - DNA, 15 bp, Homo sapiens
tggagaagggctatt

SEQ ID NO: 460543 - DNA, 15 bp, Homo sapiens
gtggagaagggctat

SEQ ID NO: 460544 - DNA, 15 bp, Homo sapiens
agtggagaagggcta

SEQ ID NO: 460545 - DNA, 15 bp, Homo sapiens
cagtggagaagggct

SEQ ID NO: 460546 - DNA, 15 bp, Homo sapiens
tcagtggagaagggc

SEQ ID NO: 460547 - DNA, 15 bp, Homo sapiens
ctcagtggagaaggg

SEQ ID NO: 460548 - DNA, 15 bp, Homo sapiens
cctcagtggagaagg

SEQ ID NO: 460549 - DNA, 15 bp, Homo sapiens
ccctcagtggagaag

SEQ ID NO: 460550 - DNA, 15 bp, Homo sapiens
cccctcagtggagaa

SEQ ID NO: 460551 - DNA, 15 bp, Homo sapiens
acccctcagtggaga

SEQ ID NO: 460552 - DNA, 15 bp, Homo sapiens
aacccctcagtggag

SEQ ID NO: 460553 - DNA, 15 bp, Homo sapiens
caacccctcagtgga

SEQ ID NO: 460554 - DNA, 15 bp, Homo sapiens
tcaacccctcagtgg

SEQ ID NO: 460555 - DNA, 15 bp, Homo sapiens
gtcaacccctcagtg

SEQ ID NO: 460556 - DNA, 15 bp, Homo sapiens
tgtcaacccctcagt

SEQ ID NO: 460557 - DNA, 15 bp, Homo sapiens
ttgtcaacccctcag

SEQ ID NO: 460558 - DNA, 15 bp, Homo sapiens
cttgtcaacccctca

SEQ ID NO: 460559 - DNA, 15 bp, Homo sapiens
ccttgtcaacccctc

SEQ ID NO: 460560 - DNA, 15 bp, Homo sapiens
cccttgtcaacccct

SEQ ID NO: 460561 - DNA, 15 bp, Homo sapiens
gcccttgtcaacccc

SEQ ID NO: 460562 - DNA, 15 bp, Homo sapiens
cgcccttgtcaaccc

SEQ ID NO: 460563 - DNA, 15 bp, Homo sapiens
ccgcccttgtcaacc

SEQ ID NO: 460564 - DNA, 15 bp, Homo sapiens
cccgcccttgtcaac

SEQ ID NO: 460565 - DNA, 15 bp, Homo sapiens
acccgcccttgtcaa

SEQ ID NO: 460566 - DNA, 15 bp, Homo sapiens
cacccgcccttgtca

SEQ ID NO: 460567 - DNA, 15 bp, Homo sapiens
acacccgcccttgtc

SEQ ID NO: 460568 - DNA, 15 bp, Homo sapiens
cacacccgcccttgt

SEQ ID NO: 460569 - DNA, 15 bp, Homo sapiens
tcacacccgcccttg

SEQ ID NO: 460570 - DNA, 15 bp, Homo sapiens
ctcacacccgccctt

SEQ ID NO: 460571 - DNA, 15 bp, Homo sapiens
gctcacacccgccct

SEQ ID NO: 460572 - DNA, 15 bp, Homo sapiens
ggctcacacccgccc

SEQ ID NO: 460573 - DNA, 15 bp, Homo sapiens
cggctcacacccgcc

SEQ ID NO: 460574 - DNA, 15 bp, Homo sapiens
ccggctcacacccgc

SEQ ID NO: 460575 - DNA, 15 bp, Homo sapiens
cccggctcacacccg

SEQ ID NO: 460576 - DNA, 15 bp, Homo sapiens
tcccggctcacaccc

SEQ ID NO: 460577 - DNA, 15 bp, Homo sapiens
ttcccggctcacacc

SEQ ID NO: 460578 - DNA, 15 bp, Homo sapiens
tttcccggctcacac

SEQ ID NO: 460579 - DNA, 15 bp, Homo sapiens
ctttcccggctcaca

SEQ ID NO: 460580 - DNA, 15 bp, Homo sapiens
gctttcccggctcac

SEQ ID NO: 460581 - DNA, 15 bp, Homo sapiens
tgctttcccggctca

SEQ ID NO: 460582 - DNA, 15 bp, Homo sapiens
ctgctttcccggctc

SEQ ID NO: 460583 - DNA, 15 bp, Homo sapiens
cctgctttcccggct

SEQ ID NO: 460584 - DNA, 15 bp, Homo sapiens
ccctgctttcccggc

SEQ ID NO: 460585 - DNA, 15 bp, Homo sapiens
cccctgctttcccgg

SEQ ID NO: 460586 - DNA, 15 bp, Homo sapiens
acccctgctttcccg

SEQ ID NO: 460587 - DNA, 15 bp, Homo sapiens
gacccctgctttccc

SEQ ID NO: 460588 - DNA, 15 bp, Homo sapiens
agacccctgctttcc

SEQ ID NO: 460589 - DNA, 15 bp, Homo sapiens
gagacccctgctttc

SEQ ID NO: 460590 - DNA, 15 bp, Homo sapiens
tgagacccctgcttt

SEQ ID NO: 460591 - DNA, 15 bp, Homo sapiens
gtgagacccctgctt

SEQ ID NO: 460592 - DNA, 15 bp, Homo sapiens
tgtgagacccctgct

SEQ ID NO: 460593 - DNA, 15 bp, Homo sapiens
atgtgagacccctgc

SEQ ID NO: 460594 - DNA, 15 bp, Homo sapiens
catgtgagacccctg

SEQ ID NO: 460595 - DNA, 15 bp, Homo sapiens
gcatgtgagacccct

SEQ ID NO: 460596 - DNA, 15 bp, Homo sapiens
ggcatgtgagacccc

SEQ ID NO: 460597 - DNA, 15 bp, Homo sapiens
aggcatgtgagaccc

SEQ ID NO: 460598 - DNA, 15 bp, Homo sapiens
aaggcatgtgagacc

SEQ ID NO: 460599 - DNA, 15 bp, Homo sapiens
gaaggcatgtgagac

SEQ ID NO: 460600 - DNA, 15 bp, Homo sapiens
agaaggcatgtgaga

SEQ ID NO: 460601 - DNA, 15 bp, Homo sapiens
gagaaggcatgtgag

SEQ ID NO: 460602 - DNA, 15 bp, Homo sapiens
ggagaaggcatgtga

SEQ ID NO: 460603 - DNA, 15 bp, Homo sapiens
gggagaaggcatgtg

SEQ ID NO: 460604 - DNA, 15 bp, Homo sapiens
ggggagaaggcatgt

SEQ ID NO: 460605 - DNA, 15 bp, Homo sapiens
tggggagaaggcatg

SEQ ID NO: 460606 - DNA, 15 bp, Homo sapiens
gtggggagaaggcat

SEQ ID NO: 460607 - DNA, 15 bp, Homo sapiens
ggtggggagaaggca

SEQ ID NO: 460608 - DNA, 15 bp, Homo sapiens
tggtggggagaaggc

SEQ ID NO: 460609 - DNA, 15 bp, Homo sapiens
atggtggggagaagg

SEQ ID NO: 460610 - DNA, 15 bp, Homo sapiens
catggtggggagaag

SEQ ID NO: 460611 - DNA, 15 bp, Homo sapiens
acatggtggggagaa

SEQ ID NO: 460612 - DNA, 15 bp, Homo sapiens
gacatggtggggaga

SEQ ID NO: 460613 - DNA, 15 bp, Homo sapiens
agacatggtggggag

SEQ ID NO: 460614 - DNA, 15 bp, Homo sapiens
cagacatggtgggga

SEQ ID NO: 460615 - DNA, 15 bp, Homo sapiens
ccagacatggtgggg

SEQ ID NO: 460616 - DNA, 15 bp, Homo sapiens
cccagacatggtggg

SEQ ID NO: 460617 - DNA, 15 bp, Homo sapiens
acccagacatggtgg

SEQ ID NO: 460618 - DNA, 15 bp, Homo sapiens
gacccagacatggtg

SEQ ID NO: 460619 - DNA, 15 bp, Homo sapiens
agacccagacatggt

SEQ ID NO: 460620 - DNA, 15 bp, Homo sapiens
tagacccagacatgg

SEQ ID NO: 460621 - DNA, 15 bp, Homo sapiens
ctagacccagacatg

SEQ ID NO: 460622 - DNA, 15 bp, Homo sapiens
gctagacccagacat

SEQ ID NO: 460623 - DNA, 15 bp, Homo sapiens
tgctagacccagaca

SEQ ID NO: 460624 - DNA, 15 bp, Homo sapiens
gtgctagacccagac

SEQ ID NO: 460625 - DNA, 15 bp, Homo sapiens
tgtgctagacccaga

SEQ ID NO: 460626 - DNA, 15 bp, Homo sapiens
ctgtgctagacccag

SEQ ID NO: 460627 - DNA, 15 bp, Homo sapiens
cctgtgctagaccca

SEQ ID NO: 460628 - DNA, 15 bp, Homo sapiens
ccctgtgctagaccc

SEQ ID NO: 460629 - DNA, 15 bp, Homo sapiens
gccctgtgctagacc

SEQ ID NO: 460630 - DNA, 15 bp, Homo sapiens
ggccctgtgctagac

SEQ ID NO: 460631 - DNA, 15 bp, Homo sapiens
aggccctgtgctaga

SEQ ID NO: 460632 - DNA, 15 bp, Homo sapiens
caggccctgtgctag

SEQ ID NO: 460633 - DNA, 15 bp, Homo sapiens
ccaggccctgtgcta

SEQ ID NO: 460634 - DNA, 15 bp, Homo sapiens
gccaggccctgtgct

SEQ ID NO: 460635 - DNA, 15 bp, Homo sapiens
tgccaggccctgtgc

SEQ ID NO: 460636 - DNA, 15 bp, Homo sapiens
gtgccaggccctgtg

SEQ ID NO: 460637 - DNA, 15 bp, Homo sapiens
tgtgccaggccctgt

SEQ ID NO: 460638 - DNA, 15 bp, Homo sapiens
gtgtgccaggccctg

SEQ ID NO: 460639 - DNA, 15 bp, Homo sapiens
tgtgtgccaggccct

SEQ ID NO: 460640 - DNA, 15 bp, Homo sapiens
gtgtgtgccaggccc

SEQ ID NO: 460641 - DNA, 15 bp, Homo sapiens
ggtgtgtgccaggcc

SEQ ID NO: 460642 - DNA, 15 bp, Homo sapiens
aggtgtgtgccaggc

SEQ ID NO: 460643 - DNA, 15 bp, Homo sapiens
gaggtgtgtgccagg

SEQ ID NO: 460644 - DNA, 15 bp, Homo sapiens
cgaggtgtgtgccag

SEQ ID NO: 460645 - DNA, 15 bp, Homo sapiens
tcgaggtgtgtgcca

SEQ ID NO: 460646 - DNA, 15 bp, Homo sapiens
ctcgaggtgtgtgcc

SEQ ID NO: 460647 - DNA, 15 bp, Homo sapiens
gctcgaggtgtgtgc

SEQ ID NO: 460648 - DNA, 15 bp, Homo sapiens
cgctcgaggtgtgtg

SEQ ID NO: 460649 - DNA, 15 bp, Homo sapiens
gcgctcgaggtgtgt

SEQ ID NO: 460650 - DNA, 15 bp, Homo sapiens
agcgctcgaggtgtg

SEQ ID NO: 460651 - DNA, 15 bp, Homo sapiens
gagcgctcgaggtgt

SEQ ID NO: 460652 - DNA, 15 bp, Homo sapiens
agagcgctcgaggtg

SEQ ID NO: 460653 - DNA, 15 bp, Homo sapiens
tagagcgctcgaggt

SEQ ID NO: 460654 - DNA, 15 bp, Homo sapiens
atagagcgctcgagg

SEQ ID NO: 460655 - DNA, 15 bp, Homo sapiens
tatagagcgctcgag

SEQ ID NO: 460656 - DNA, 15 bp, Homo sapiens
ttatagagcgctcga

SEQ ID NO: 460657 - DNA, 15 bp, Homo sapiens
tttatagagcgctcg

SEQ ID NO: 460658 - DNA, 15 bp, Homo sapiens
gtttatagagcgctc

SEQ ID NO: 460659 - DNA, 15 bp, Homo sapiens
tgtttatagagcgct

SEQ ID NO: 460660 - DNA, 15 bp, Homo sapiens
gtgtttatagagcgc

SEQ ID NO: 460661 - DNA, 15 bp, Homo sapiens
ggtgtttatagagcg

SEQ ID NO: 460662 - DNA, 15 bp, Homo sapiens
cggtgtttatagagc

SEQ ID NO: 460663 - DNA, 15 bp, Homo sapiens
tcggtgtttatagag

SEQ ID NO: 460664 - DNA, 15 bp, Homo sapiens
gtcggtgtttataga

SEQ ID NO: 460665 - DNA, 15 bp, Homo sapiens
agtcggtgtttatag

SEQ ID NO: 460666 - DNA, 15 bp, Homo sapiens
cagtcggtgtttata

SEQ ID NO: 460667 - DNA, 15 bp, Homo sapiens
tcagtcggtgtttat

SEQ ID NO: 460668 - DNA, 15 bp, Homo sapiens
ttcagtcggtgttta

SEQ ID NO: 460669 - DNA, 15 bp, Homo sapiens
attcagtcggtgttt

SEQ ID NO: 460670 - DNA, 15 bp, Homo sapiens
cattcagtcggtgtt

SEQ ID NO: 460671 - DNA, 15 bp, Homo sapiens
ccattcagtcggtgt

SEQ ID NO: 460672 - DNA, 15 bp, Homo sapiens
tccattcagtcggtg

SEQ ID NO: 460673 - DNA, 15 bp, Homo sapiens
ctccattcagtcggt

SEQ ID NO: 460674 - DNA, 15 bp, Homo sapiens
cctccattcagtcgg

SEQ ID NO: 460675 - DNA, 15 bp, Homo sapiens
ccctccattcagtcg

SEQ ID NO: 460676 - DNA, 15 bp, Homo sapiens
cccctccattcagtc

SEQ ID NO: 460677 - DNA, 15 bp, Homo sapiens
acccctccattcagt

SEQ ID NO: 460678 - DNA, 15 bp, Homo sapiens
gacccctccattcag

SEQ ID NO: 460679 - DNA, 15 bp, Homo sapiens
tgacccctccattca

SEQ ID NO: 460680 - DNA, 15 bp, Homo sapiens
ctgacccctccattc

SEQ ID NO: 460681 - DNA, 15 bp, Homo sapiens
gctgacccctccatt

SEQ ID NO: 460682 - DNA, 15 bp, Homo sapiens
agctgacccctccat

SEQ ID NO: 460683 - DNA, 15 bp, Homo sapiens
aagctgacccctcca

SEQ ID NO: 460684 - DNA, 15 bp, Homo sapiens
gaagctgacccctcc

SEQ ID NO: 460685 - DNA, 15 bp, Homo sapiens
ggaagctgacccctc

SEQ ID NO: 460686 - DNA, 15 bp, Homo sapiens
tggaagctgacccct

SEQ ID NO: 460687 - DNA, 15 bp, Homo sapiens
atggaagctgacccc

SEQ ID NO: 460688 - DNA, 15 bp, Homo sapiens
catggaagctgaccc

SEQ ID NO: 460689 - DNA, 15 bp, Homo sapiens
gcatggaagctgacc

SEQ ID NO: 460690 - DNA, 15 bp, Homo sapiens
tgcatggaagctgac

SEQ ID NO: 460691 - DNA, 15 bp, Homo sapiens
ctgcatggaagctga

SEQ ID NO: 460692 - DNA, 15 bp, Homo sapiens
cctgcatggaagctg

SEQ ID NO: 460693 - DNA, 15 bp, Homo sapiens
tcctgcatggaagct

SEQ ID NO: 460694 - DNA, 15 bp, Homo sapiens
atcctgcatggaagc

SEQ ID NO: 460695 - DNA, 15 bp, Homo sapiens
tatcctgcatggaag

SEQ ID NO: 460696 - DNA, 15 bp, Homo sapiens
atatcctgcatggaa

SEQ ID NO: 460697 - DNA, 15 bp, Homo sapiens
catatcctgcatgga

SEQ ID NO: 460698 - DNA, 15 bp, Homo sapiens
ccatatcctgcatgg

SEQ ID NO: 460699 - DNA, 15 bp, Homo sapiens
cccatatcctgcatg

SEQ ID NO: 460700 - DNA, 15 bp, Homo sapiens
tcccatatcctgcat

SEQ ID NO: 460701 - DNA, 15 bp, Homo sapiens
ctcccatatcctgca

SEQ ID NO: 460702 - DNA, 15 bp, Homo sapiens
tctcccatatcctgc

SEQ ID NO: 460703 - DNA, 15 bp, Homo sapiens
gtctcccatatcctg

SEQ ID NO: 460704 - DNA, 15 bp, Homo sapiens
tgtctcccatatcct

SEQ ID NO: 460705 - DNA, 15 bp, Homo sapiens
ttgtctcccatatcc

SEQ ID NO: 460706 - DNA, 15 bp, Homo sapiens
cttgtctcccatatc

SEQ ID NO: 460707 - DNA, 15 bp, Homo sapiens
gcttgtctcccatat

SEQ ID NO: 460708 - DNA, 15 bp, Homo sapiens
ggcttgtctcccata

SEQ ID NO: 460709 - DNA, 15 bp, Homo sapiens
gggcttgtctcccat

SEQ ID NO: 460710 - DNA, 15 bp, Homo sapiens
ggggcttgtctccca

SEQ ID NO: 460711 - DNA, 15 bp, Homo sapiens
aggggcttgtctccc

SEQ ID NO: 460712 - DNA, 15 bp, Homo sapiens
gaggggcttgtctcc

SEQ ID NO: 460713 - DNA, 15 bp, Homo sapiens
ggaggggcttgtctc

SEQ ID NO: 460714 - DNA, 15 bp, Homo sapiens
gggaggggcttgtct

SEQ ID NO: 460715 - DNA, 15 bp, Homo sapiens
tgggaggggcttgtc

SEQ ID NO: 460716 - DNA, 15 bp, Homo sapiens
ttgggaggggcttgt

SEQ ID NO: 460717 - DNA, 15 bp, Homo sapiens
tttgggaggggcttg

SEQ ID NO: 460718 - DNA, 15 bp, Homo sapiens
ctttgggaggggctt

SEQ ID NO: 460719 - DNA, 15 bp, Homo sapiens
gctttgggaggggct

SEQ ID NO: 460720 - DNA, 15 bp, Homo sapiens
tgctttgggaggggc

SEQ ID NO: 460721 - DNA, 15 bp, Homo sapiens
gtgctttgggagggg

SEQ ID NO: 460722 - DNA, 15 bp, Homo sapiens
tgtgctttgggaggg

SEQ ID NO: 460723 - DNA, 15 bp, Homo sapiens
gtgtgctttgggagg

SEQ ID NO: 460724 - DNA, 15 bp, Homo sapiens
tgtgtgctttgggag

SEQ ID NO: 460725 - DNA, 15 bp, Homo sapiens
gtgtgtgctttggga

SEQ ID NO: 460726 - DNA, 15 bp, Homo sapiens
tgtgtgtgctttggg

SEQ ID NO: 460727 - DNA, 15 bp, Homo sapiens
gtgtgtgtgctttgg

SEQ ID NO: 460728 - DNA, 15 bp, Homo sapiens
tgtgtgtgtgctttg

SEQ ID NO: 460729 - DNA, 15 bp, Homo sapiens
ttgtgtgtgtgcttt

SEQ ID NO: 460730 - DNA, 15 bp, Homo sapiens
tttgtgtgtgtgctt

SEQ ID NO: 460731 - DNA, 15 bp, Homo sapiens
ttttgtgtgtgtgct

SEQ ID NO: 460732 - DNA, 15 bp, Homo sapiens
gttttgtgtgtgtgc

SEQ ID NO: 460733 - DNA, 15 bp, Homo sapiens
tgttttgtgtgtgtg

SEQ ID NO: 460734 - DNA, 15 bp, Homo sapiens
gtgttttgtgtgtgt

SEQ ID NO: 460735 - DNA, 15 bp, Homo sapiens
tgtgttttgtgtgtg

SEQ ID NO: 460736 - DNA, 15 bp, Homo sapiens
gtgtgttttgtgtgt

SEQ ID NO: 460737 - DNA, 15 bp, Homo sapiens
tgtgtgttttgtgtg

SEQ ID NO: 460738 - DNA, 15 bp, Homo sapiens
gtgtgtgttttgtgt

SEQ ID NO: 460739 - DNA, 15 bp, Homo sapiens
cgtgtgtgttttgtg

SEQ ID NO: 460740 - DNA, 15 bp, Homo sapiens
tcgtgtgtgttttgt

SEQ ID NO: 460741 - DNA, 15 bp, Homo sapiens
atcgtgtgtgttttg

SEQ ID NO: 460742 - DNA, 15 bp, Homo sapiens
gatcgtgtgtgtttt

SEQ ID NO: 460743 - DNA, 15 bp, Homo sapiens
tgatcgtgtgtgttt

SEQ ID NO: 460744 - DNA, 15 bp, Homo sapiens
atgatcgtgtgtgtt

SEQ ID NO: 460745 - DNA, 15 bp, Homo sapiens
catgatcgtgtgtgt

SEQ ID NO: 460746 - DNA, 15 bp, Homo sapiens
ccatgatcgtgtgtg

SEQ ID NO: 460747 - DNA, 15 bp, Homo sapiens
cccatgatcgtgtgt

SEQ ID NO: 460748 - DNA, 15 bp, Homo sapiens
ccccatgatcgtgtg

SEQ ID NO: 460749 - DNA, 15 bp, Homo sapiens
tccccatgatcgtgt

SEQ ID NO: 460750 - DNA, 15 bp, Homo sapiens
gtccccatgatcgtg

SEQ ID NO: 460751 - DNA, 15 bp, Homo sapiens
cgtccccatgatcgt

SEQ ID NO: 460752 - DNA, 15 bp, Homo sapiens
ccgtccccatgatcg

SEQ ID NO: 460753 - DNA, 15 bp, Homo sapiens
cccgtccccatgatc

SEQ ID NO: 460754 - DNA, 15 bp, Homo sapiens
ccccgtccccatgat

SEQ ID NO: 460755 - DNA, 15 bp, Homo sapiens
tccccgtccccatga

SEQ ID NO: 460756 - DNA, 15 bp, Homo sapiens
ctccccgtccccatg

SEQ ID NO: 460757 - DNA, 15 bp, Homo sapiens
tctccccgtccccat

SEQ ID NO: 460758 - DNA, 15 bp, Homo sapiens
ctctccccgtcccca

SEQ ID NO: 460759 - DNA, 15 bp, Homo sapiens
cctctccccgtcccc

SEQ ID NO: 460760 - DNA, 15 bp, Homo sapiens
tcctctccccgtccc

SEQ ID NO: 460761 - DNA, 15 bp, Homo sapiens
ctcctctccccgtcc

SEQ ID NO: 460762 - DNA, 15 bp, Homo sapiens
gctcctctccccgtc

SEQ ID NO: 460763 - DNA, 15 bp, Homo sapiens
agctcctctccccgt

SEQ ID NO: 460764 - DNA, 15 bp, Homo sapiens
cagctcctctccccg

SEQ ID NO: 460765 - DNA, 15 bp, Homo sapiens
ccagctcctctcccc

SEQ ID NO: 460766 - DNA, 15 bp, Homo sapiens
accagctcctctccc

SEQ ID NO: 460767 - DNA, 15 bp, Homo sapiens
aaccagctcctctcc

SEQ ID NO: 460768 - DNA, 15 bp, Homo sapiens
taaccagctcctctc

SEQ ID NO: 460769 - DNA, 15 bp, Homo sapiens
ctaaccagctcctct

SEQ ID NO: 460770 - DNA, 15 bp, Homo sapiens
actaaccagctcctc

SEQ ID NO: 460771 - DNA, 15 bp, Homo sapiens
gactaaccagctcct

SEQ ID NO: 460772 - DNA, 15 bp, Homo sapiens
ggactaaccagctcc

SEQ ID NO: 460773 - DNA, 15 bp, Homo sapiens
gggactaaccagctc

SEQ ID NO: 460774 - DNA, 15 bp, Homo sapiens
agggactaaccagct

SEQ ID NO: 460775 - DNA, 15 bp, Homo sapiens
gagggactaaccagc

SEQ ID NO: 460776 - DNA, 15 bp, Homo sapiens
ggagggactaaccag

SEQ ID NO: 460777 - DNA, 15 bp, Homo sapiens
gggagggactaacca

SEQ ID NO: 460778 - DNA, 15 bp, Homo sapiens
agggagggactaacc

SEQ ID NO: 460779 - DNA, 15 bp, Homo sapiens
cagggagggactaac

SEQ ID NO: 460780 - DNA, 15 bp, Homo sapiens
gcagggagggactaa

SEQ ID NO: 460781 - DNA, 15 bp, Homo sapiens
agcagggagggacta

SEQ ID NO: 460782 - DNA, 15 bp, Homo sapiens
cagcagggagggact

SEQ ID NO: 460783 - DNA, 15 bp, Homo sapiens
tcagcagggagggac

SEQ ID NO: 460784 - DNA, 15 bp, Homo sapiens
gtcagcagggaggga

SEQ ID NO: 460785 - DNA, 15 bp, Homo sapiens
ggtcagcagggaggg

SEQ ID NO: 460786 - DNA, 15 bp, Homo sapiens
aggtcagcagggagg

SEQ ID NO: 460787 - DNA, 15 bp, Homo sapiens
gaggtcagcagggag

SEQ ID NO: 460788 - DNA, 15 bp, Homo sapiens
ggaggtcagcaggga

SEQ ID NO: 460789 - DNA, 15 bp, Homo sapiens
gggaggtcagcaggg

SEQ ID NO: 460790 - DNA, 15 bp, Homo sapiens
ggggaggtcagcagg

SEQ ID NO: 460791 - DNA, 15 bp, Homo sapiens
gggggaggtcagcag

SEQ ID NO: 460792 - DNA, 15 bp, Homo sapiens
tgggggaggtcagca

SEQ ID NO: 460793 - DNA, 15 bp, Homo sapiens
ctgggggaggtcagc

SEQ ID NO: 460794 - DNA, 15 bp, Homo sapiens
cctgggggaggtcag

SEQ ID NO: 460795 - DNA, 15 bp, Homo sapiens
gcctgggggaggtca

SEQ ID NO: 460796 - DNA, 15 bp, Homo sapiens
ggcctgggggaggtc

SEQ ID NO: 460797 - DNA, 15 bp, Homo sapiens
gggcctgggggaggt

SEQ ID NO: 460798 - DNA, 15 bp, Homo sapiens
ggggcctgggggagg

SEQ ID NO: 460799 - DNA, 15 bp, Homo sapiens
aggggcctgggggag

SEQ ID NO: 460800 - DNA, 15 bp, Homo sapiens
aaggggcctggggga

SEQ ID NO: 460801 - DNA, 15 bp, Homo sapiens
taaggggcctggggg

SEQ ID NO: 460802 - DNA, 15 bp, Homo sapiens
ataaggggcctgggg

SEQ ID NO: 460803 - DNA, 15 bp, Homo sapiens
gataaggggcctggg

SEQ ID NO: 460804 - DNA, 15 bp, Homo sapiens
ggataaggggcctgg

SEQ ID NO: 460805 - DNA, 15 bp, Homo sapiens
gggataaggggcctg

SEQ ID NO: 460806 - DNA, 15 bp, Homo sapiens
agggataaggggcct

SEQ ID NO: 460807 - DNA, 15 bp, Homo sapiens
gagggataaggggcc

SEQ ID NO: 460808 - DNA, 15 bp, Homo sapiens
agagggataaggggc

SEQ ID NO: 460809 - DNA, 15 bp, Homo sapiens
cagagggataagggg

SEQ ID NO: 460810 - DNA, 15 bp, Homo sapiens
gcagagggataaggg

SEQ ID NO: 460811 - DNA, 15 bp, Homo sapiens
ggcagagggataagg

SEQ ID NO: 460812 - DNA, 15 bp, Homo sapiens
gggcagagggataag

SEQ ID NO: 460813 - DNA, 15 bp, Homo sapiens
agggcagagggataa

SEQ ID NO: 460814 - DNA, 15 bp, Homo sapiens
cagggcagagggata

SEQ ID NO: 460815 - DNA, 15 bp, Homo sapiens
gcagggcagagggat

SEQ ID NO: 460816 - DNA, 15 bp, Homo sapiens
ggcagggcagaggga

SEQ ID NO: 460817 - DNA, 15 bp, Homo sapiens
aggcagggcagaggg

SEQ ID NO: 460818 - DNA, 15 bp, Homo sapiens
gaggcagggcagagg

SEQ ID NO: 460819 - DNA, 15 bp, Homo sapiens
ggaggcagggcagag

SEQ ID NO: 460820 - DNA, 15 bp, Homo sapiens
gggaggcagggcaga

SEQ ID NO: 460821 - DNA, 15 bp, Homo sapiens
agggaggcagggcag

SEQ ID NO: 460822 - DNA, 15 bp, Homo sapiens
cagggaggcagggca

SEQ ID NO: 460823 - DNA, 15 bp, Homo sapiens
acagggaggcagggc

SEQ ID NO: 460824 - DNA, 15 bp, Homo sapiens
aacagggaggcaggg

SEQ ID NO: 460825 - DNA, 15 bp, Homo sapiens
caacagggaggcagg

SEQ ID NO: 460826 - DNA, 15 bp, Homo sapiens
acaacagggaggcag

SEQ ID NO: 460827 - DNA, 15 bp, Homo sapiens
gacaacagggaggca

SEQ ID NO: 460828 - DNA, 15 bp, Homo sapiens
agacaacagggaggc

SEQ ID NO: 460829 - DNA, 15 bp, Homo sapiens
gagacaacagggagg

SEQ ID NO: 460830 - DNA, 15 bp, Homo sapiens
tgagacaacagggag

SEQ ID NO: 460831 - DNA, 15 bp, Homo sapiens
ctgagacaacaggga

SEQ ID NO: 460832 - DNA, 15 bp, Homo sapiens
gctgagacaacaggg

SEQ ID NO: 460833 - DNA, 15 bp, Homo sapiens
ggctgagacaacagg

SEQ ID NO: 460834 - DNA, 15 bp, Homo sapiens
aggctgagacaacag

SEQ ID NO: 460835 - DNA, 15 bp, Homo sapiens
gaggctgagacaaca

SEQ ID NO: 460836 - DNA, 15 bp, Homo sapiens
tgaggctgagacaac

SEQ ID NO: 460837 - DNA, 15 bp, Homo sapiens
gtgaggctgagacaa

SEQ ID NO: 460838 - DNA, 15 bp, Homo sapiens
agtgaggctgagaca

SEQ ID NO: 460839 - DNA, 15 bp, Homo sapiens
cagtgaggctgagac

SEQ ID NO: 460840 - DNA, 15 bp, Homo sapiens
ccagtgaggctgaga

SEQ ID NO: 460841 - DNA, 15 bp, Homo sapiens
cccagtgaggctgag

SEQ ID NO: 460842 - DNA, 15 bp, Homo sapiens
acccagtgaggctga

SEQ ID NO: 460843 - DNA, 15 bp, Homo sapiens
aacccagtgaggctg

SEQ ID NO: 460844 - DNA, 15 bp, Homo sapiens
aaacccagtgaggct

SEQ ID NO: 460845 - DNA, 15 bp, Homo sapiens
gaaacccagtgaggc

SEQ ID NO: 460846 - DNA, 15 bp, Homo sapiens
ggaaacccagtgagg

SEQ ID NO: 460847 - DNA, 15 bp, Homo sapiens
gggaaacccagtgag

SEQ ID NO: 460848 - DNA, 15 bp, Homo sapiens
tgggaaacccagtga

SEQ ID NO: 460849 - DNA, 15 bp, Homo sapiens
atgggaaacccagtg

SEQ ID NO: 460850 - DNA, 15 bp, Homo sapiens
gatgggaaacccagt

SEQ ID NO: 460851 - DNA, 15 bp, Homo sapiens
tgatgggaaacccag

SEQ ID NO: 460852 - DNA, 15 bp, Homo sapiens
gtgatgggaaaccca

SEQ ID NO: 460853 - DNA, 15 bp, Homo sapiens
ggtgatgggaaaccc

SEQ ID NO: 460854 - DNA, 15 bp, Homo sapiens
gggtgatgggaaacc

SEQ ID NO: 460855 - DNA, 15 bp, Homo sapiens
ggggtgatgggaaac

SEQ ID NO: 460856 - DNA, 15 bp, Homo sapiens
tggggtgatgggaaa

SEQ ID NO: 460857 - DNA, 15 bp, Homo sapiens
atggggtgatgggaa

SEQ ID NO: 460858 - DNA, 15 bp, Homo sapiens
gatggggtgatggga

SEQ ID NO: 460859 - DNA, 15 bp, Homo sapiens
cgatggggtgatggg

SEQ ID NO: 460860 - DNA, 15 bp, Homo sapiens
gcgatggggtgatgg

SEQ ID NO: 460861 - DNA, 15 bp, Homo sapiens
agcgatggggtgatg

SEQ ID NO: 460862 - DNA, 15 bp, Homo sapiens
tagcgatggggtgat

SEQ ID NO: 460863 - DNA, 15 bp, Homo sapiens
ctagcgatggggtga

SEQ ID NO: 460864 - DNA, 15 bp, Homo sapiens
cctagcgatggggtg

SEQ ID NO: 460865 - DNA, 15 bp, Homo sapiens
acctagcgatggggt

SEQ ID NO: 460866 - DNA, 15 bp, Homo sapiens
cacctagcgatgggg

SEQ ID NO: 460867 - DNA, 15 bp, Homo sapiens
ccacctagcgatggg

SEQ ID NO: 460868 - DNA, 15 bp, Homo sapiens
gccacctagcgatgg

SEQ ID NO: 460869 - DNA, 15 bp, Homo sapiens
ggccacctagcgatg

SEQ ID NO: 460870 - DNA, 15 bp, Homo sapiens
aggccacctagcgat

SEQ ID NO: 460871 - DNA, 15 bp, Homo sapiens
caggccacctagcga

SEQ ID NO: 460872 - DNA, 15 bp, Homo sapiens
ccaggccacctagcg

SEQ ID NO: 460873 - DNA, 15 bp, Homo sapiens
gccaggccacctagc

SEQ ID NO: 460874 - DNA, 15 bp, Homo sapiens
ggccaggccacctag

SEQ ID NO: 460875 - DNA, 15 bp, Homo sapiens
gggccaggccaccta

SEQ ID NO: 460876 - DNA, 15 bp, Homo sapiens
agggccaggccacct

SEQ ID NO: 460877 - DNA, 15 bp, Homo sapiens
aagggccaggccacc

SEQ ID NO: 460878 - DNA, 15 bp, Homo sapiens
taagggccaggccac

SEQ ID NO: 460879 - DNA, 15 bp, Homo sapiens
gtaagggccaggcca

SEQ ID NO: 460880 - DNA, 15 bp, Homo sapiens
ggtaagggccaggcc

SEQ ID NO: 460881 - DNA, 15 bp, Homo sapiens
cggtaagggccaggc

SEQ ID NO: 460882 - DNA, 15 bp, Homo sapiens
ccggtaagggccagg

SEQ ID NO: 460883 - DNA, 15 bp, Homo sapiens
gccggtaagggccag

SEQ ID NO: 460884 - DNA, 15 bp, Homo sapiens
tgccggtaagggcca

SEQ ID NO: 460885 - DNA, 15 bp, Homo sapiens
gtgccggtaagggcc

SEQ ID NO: 460886 - DNA, 15 bp, Homo sapiens
ggtgccggtaagggc

SEQ ID NO: 460887 - DNA, 15 bp, Homo sapiens
cggtgccggtaaggg

SEQ ID NO: 460888 - DNA, 15 bp, Homo sapiens
acggtgccggtaagg

SEQ ID NO: 460889 - DNA, 15 bp, Homo sapiens
cacggtgccggtaag

SEQ ID NO: 460890 - DNA, 15 bp, Homo sapiens
ccacggtgccggtaa

SEQ ID NO: 460891 - DNA, 15 bp, Homo sapiens
gccacggtgccggta

SEQ ID NO: 460892 - DNA, 15 bp, Homo sapiens
ggccacggtgccggt

SEQ ID NO: 460893 - DNA, 15 bp, Homo sapiens
gggccacggtgccgg

SEQ ID NO: 460894 - DNA, 15 bp, Homo sapiens
ggggccacggtgccg

SEQ ID NO: 460895 - DNA, 15 bp, Homo sapiens
tggggccacggtgcc

SEQ ID NO: 460896 - DNA, 15 bp, Homo sapiens
atggggccacggtgc

SEQ ID NO: 460897 - DNA, 15 bp, Homo sapiens
aatggggccacggtg

SEQ ID NO: 460898 - DNA, 15 bp, Homo sapiens
aaatggggccacggt

SEQ ID NO: 460899 - DNA, 15 bp, Homo sapiens
taaatggggccacgg

SEQ ID NO: 460900 - DNA, 15 bp, Homo sapiens
ttaaatggggccacg

SEQ ID NO: 460901 - DNA, 15 bp, Homo sapiens
cttaaatggggccac

SEQ ID NO: 460902 - DNA, 15 bp, Homo sapiens
gcttaaatggggcca

SEQ ID NO: 460903 - DNA, 15 bp, Homo sapiens
ggcttaaatggggcc

SEQ ID NO: 460904 - DNA, 15 bp, Homo sapiens
tggcttaaatggggc

SEQ ID NO: 460905 - DNA, 15 bp, Homo sapiens
ctggcttaaatgggg

SEQ ID NO: 460906 - DNA, 15 bp, Homo sapiens
cctggcttaaatggg

SEQ ID NO: 460907 - DNA, 15 bp, Homo sapiens
ccctggcttaaatgg

SEQ ID NO: 460908 - DNA, 15 bp, Homo sapiens
tccctggcttaaatg

SEQ ID NO: 460909 - DNA, 15 bp, Homo sapiens
atccctggcttaaat

SEQ ID NO: 460910 - DNA, 15 bp, Homo sapiens
gatccctggcttaaa

SEQ ID NO: 460911 - DNA, 15 bp, Homo sapiens
ggatccctggcttaa

SEQ ID NO: 460912 - DNA, 15 bp, Homo sapiens
gggatccctggctta

SEQ ID NO: 460913 - DNA, 15 bp, Homo sapiens
ggggatccctggctt

SEQ ID NO: 460914 - DNA, 15 bp, Homo sapiens
aggggatccctggct

SEQ ID NO: 460915 - DNA, 15 bp, Homo sapiens
caggggatccctggc

SEQ ID NO: 460916 - DNA, 15 bp, Homo sapiens
tcaggggatccctgg

SEQ ID NO: 460917 - DNA, 15 bp, Homo sapiens
ttcaggggatccctg

SEQ ID NO: 460918 - DNA, 15 bp, Homo sapiens
attcaggggatccct

SEQ ID NO: 460919 - DNA, 15 bp, Homo sapiens
cattcaggggatccc

SEQ ID NO: 460920 - DNA, 15 bp, Homo sapiens
gcattcaggggatcc

SEQ ID NO: 460921 - DNA, 15 bp, Homo sapiens
ggcattcaggggatc

SEQ ID NO: 460922 - DNA, 15 bp, Homo sapiens
tggcattcaggggat

SEQ ID NO: 460923 - DNA, 15 bp, Homo sapiens
gtggcattcagggga

SEQ ID NO: 460924 - DNA, 15 bp, Homo sapiens
ggtggcattcagggg

SEQ ID NO: 460925 - DNA, 15 bp, Homo sapiens
tggtggcattcaggg

SEQ ID NO: 460926 - DNA, 15 bp, Homo sapiens
ttggtggcattcagg

SEQ ID NO: 460927 - DNA, 15 bp, Homo sapiens
attggtggcattcag

SEQ ID NO: 460928 - DNA, 15 bp, Homo sapiens
cattggtggcattca

SEQ ID NO: 460929 - DNA, 15 bp, Homo sapiens
acattggtggcattc

SEQ ID NO: 460930 - DNA, 15 bp, Homo sapiens
aacattggtggcatt

SEQ ID NO: 460931 - DNA, 15 bp, Homo sapiens
gaacattggtggcat

SEQ ID NO: 460932 - DNA, 15 bp, Homo sapiens
ggaacattggtggca

SEQ ID NO: 460933 - DNA, 15 bp, Homo sapiens
aggaacattggtggc

SEQ ID NO: 460934 - DNA, 15 bp, Homo sapiens
gaggaacattggtgg

SEQ ID NO: 460935 - DNA, 15 bp, Homo sapiens
agaggaacattggtg

SEQ ID NO: 460936 - DNA, 15 bp, Homo sapiens
cagaggaacattggt

SEQ ID NO: 460937 - DNA, 15 bp, Homo sapiens
ccagaggaacattgg

SEQ ID NO: 460938 - DNA, 15 bp, Homo sapiens
cccagaggaacattg

SEQ ID NO: 460939 - DNA, 15 bp, Homo sapiens
acccagaggaacatt

SEQ ID NO: 460940 - DNA, 15 bp, Homo sapiens
aacccagaggaacat

SEQ ID NO: 460941 - DNA, 15 bp, Homo sapiens
taacccagaggaaca

SEQ ID NO: 460942 - DNA, 15 bp, Homo sapiens
ttaacccagaggaac

SEQ ID NO: 460943 - DNA, 15 bp, Homo sapiens
gttaacccagaggaa

SEQ ID NO: 460944 - DNA, 15 bp, Homo sapiens
agttaacccagagga

SEQ ID NO: 460945 - DNA, 15 bp, Homo sapiens
gagttaacccagagg

SEQ ID NO: 460946 - DNA, 15 bp, Homo sapiens
ggagttaacccagag

SEQ ID NO: 460947 - DNA, 15 bp, Homo sapiens
aggagttaacccaga

SEQ ID NO: 460948 - DNA, 15 bp, Homo sapiens
caggagttaacccag

SEQ ID NO: 460949 - DNA, 15 bp, Homo sapiens
tcaggagttaaccca

SEQ ID NO: 460950 - DNA, 15 bp, Homo sapiens
ttcaggagttaaccc

SEQ ID NO: 460951 - DNA, 15 bp, Homo sapiens
gttcaggagttaacc

SEQ ID NO: 460952 - DNA, 15 bp, Homo sapiens
agttcaggagttaac

SEQ ID NO: 460953 - DNA, 15 bp, Homo sapiens
cagttcaggagttaa

SEQ ID NO: 460954 - DNA, 15 bp, Homo sapiens
gcagttcaggagtta

SEQ ID NO: 460955 - DNA, 15 bp, Homo sapiens
agcagttcaggagtt

SEQ ID NO: 460956 - DNA, 15 bp, Homo sapiens
cagcagttcaggagt

SEQ ID NO: 460957 - DNA, 15 bp, Homo sapiens
tcagcagttcaggag

SEQ ID NO: 460958 - DNA, 15 bp, Homo sapiens
ctcagcagttcagga

SEQ ID NO: 460959 - DNA, 15 bp, Homo sapiens
gctcagcagttcagg

SEQ ID NO: 460960 - DNA, 15 bp, Homo sapiens
ggctcagcagttcag

SEQ ID NO: 460961 - DNA, 15 bp, Homo sapiens
gggctcagcagttca

SEQ ID NO: 460962 - DNA, 15 bp, Homo sapiens
tgggctcagcagttc

SEQ ID NO: 460963 - DNA, 15 bp, Homo sapiens
ctgggctcagcagtt

SEQ ID NO: 460964 - DNA, 15 bp, Homo sapiens
tctgggctcagcagt

SEQ ID NO: 460965 - DNA, 15 bp, Homo sapiens
ctctgggctcagcag

SEQ ID NO: 460966 - DNA, 15 bp, Homo sapiens
cctctgggctcagca

SEQ ID NO: 460967 - DNA, 15 bp, Homo sapiens
ccctctgggctcagc

SEQ ID NO: 460968 - DNA, 15 bp, Homo sapiens
gccctctgggctcag

SEQ ID NO: 460969 - DNA, 15 bp, Homo sapiens
tgccctctgggctca

SEQ ID NO: 460970 - DNA, 15 bp, Homo sapiens
gtgccctctgggctc

SEQ ID NO: 460971 - DNA, 15 bp, Homo sapiens
ggtgccctctgggct

SEQ ID NO: 460972 - DNA, 15 bp, Homo sapiens
tggtgccctctgggc

SEQ ID NO: 460973 - DNA, 15 bp, Homo sapiens
ttggtgccctctggg

SEQ ID NO: 460974 - DNA, 15 bp, Homo sapiens
cttggtgccctctgg

SEQ ID NO: 460975 - DNA, 15 bp, Homo sapiens
gcttggtgccctctg

SEQ ID NO: 460976 - DNA, 15 bp, Homo sapiens
tgcttggtgccctct

SEQ ID NO: 460977 - DNA, 15 bp, Homo sapiens
ttgcttggtgccctc

SEQ ID NO: 460978 - DNA, 15 bp, Homo sapiens
tttgcttggtgccct

SEQ ID NO: 460979 - DNA, 15 bp, Homo sapiens
ctttgcttggtgccc

SEQ ID NO: 460980 - DNA, 15 bp, Homo sapiens
cctttgcttggtgcc

SEQ ID NO: 460981 - DNA, 15 bp, Homo sapiens
tcctttgcttggtgc

SEQ ID NO: 460982 - DNA, 15 bp, Homo sapiens
gtcctttgcttggtg

SEQ ID NO: 460983 - DNA, 15 bp, Homo sapiens
agtcctttgcttggt

SEQ ID NO: 460984 - DNA, 15 bp, Homo sapiens
cagtcctttgcttgg

SEQ ID NO: 460985 - DNA, 15 bp, Homo sapiens
acagtcctttgcttg

SEQ ID NO: 460986 - DNA, 15 bp, Homo sapiens
tacagtcctttgctt

SEQ ID NO: 460987 - DNA, 15 bp, Homo sapiens
ctacagtcctttgct

SEQ ID NO: 460988 - DNA, 15 bp, Homo sapiens
cctacagtcctttgc

SEQ ID NO: 460989 - DNA, 15 bp, Homo sapiens
acctacagtcctttg

SEQ ID NO: 460990 - DNA, 15 bp, Homo sapiens
cacctacagtccttt

SEQ ID NO: 460991 - DNA, 15 bp, Homo sapiens
gcacctacagtcctt

SEQ ID NO: 460992 - DNA, 15 bp, Homo sapiens
ggcacctacagtcct

SEQ ID NO: 460993 - DNA, 15 bp, Homo sapiens
gggcacctacagtcc

SEQ ID NO: 460994 - DNA, 15 bp, Homo sapiens
tgggcacctacagtc

SEQ ID NO: 460995 - DNA, 15 bp, Homo sapiens
ttgggcacctacagt

SEQ ID NO: 460996 - DNA, 15 bp, Homo sapiens
cttgggcacctacag

SEQ ID NO: 460997 - DNA, 15 bp, Homo sapiens
ccttgggcacctaca

SEQ ID NO: 460998 - DNA, 15 bp, Homo sapiens
tccttgggcacctac

SEQ ID NO: 460999 - DNA, 15 bp, Homo sapiens
ctccttgggcaccta

SEQ ID NO: 461000 - DNA, 15 bp, Homo sapiens
cctccttgggcacct

SEQ ID NO: 461001 - DNA, 15 bp, Homo sapiens
tcctccttgggcacc

SEQ ID NO: 461002 - DNA, 15 bp, Homo sapiens
ttcctccttgggcac

SEQ ID NO: 461003 - DNA, 15 bp, Homo sapiens
tttcctccttgggca

SEQ ID NO: 461004 - DNA, 15 bp, Homo sapiens
ttttcctccttgggc

SEQ ID NO: 461005 - DNA, 15 bp, Homo sapiens
cttttcctccttggg

SEQ ID NO: 461006 - DNA, 15 bp, Homo sapiens
tcttttcctccttgg

SEQ ID NO: 461007 - DNA, 15 bp, Homo sapiens
atcttttcctccttg

SEQ ID NO: 461008 - DNA, 15 bp, Homo sapiens
catcttttcctcctt

SEQ ID NO: 461009 - DNA, 15 bp, Homo sapiens
ccatcttttcctcct

SEQ ID NO: 461010 - DNA, 15 bp, Homo sapiens
tccatcttttcctcc

SEQ ID NO: 461011 - DNA, 15 bp, Homo sapiens
ctccatcttttcctc

SEQ ID NO: 461012 - DNA, 15 bp, Homo sapiens
cctccatcttttcct

SEQ ID NO: 461013 - DNA, 15 bp, Homo sapiens
gcctccatcttttcc

SEQ ID NO: 461014 - DNA, 15 bp, Homo sapiens
agcctccatcttttc

SEQ ID NO: 461015 - DNA, 15 bp, Homo sapiens
cagcctccatctttt

SEQ ID NO: 461016 - DNA, 15 bp, Homo sapiens
ccagcctccatcttt

SEQ ID NO: 461017 - DNA, 15 bp, Homo sapiens
gccagcctccatctt

SEQ ID NO: 461018 - DNA, 15 bp, Homo sapiens
tgccagcctccatct

SEQ ID NO: 461019 - DNA, 15 bp, Homo sapiens
ttgccagcctccatc

SEQ ID NO: 461020 - DNA, 15 bp, Homo sapiens
cttgccagcctccat

SEQ ID NO: 461021 - DNA, 15 bp, Homo sapiens
ccttgccagcctcca

SEQ ID NO: 461022 - DNA, 15 bp, Homo sapiens
gccttgccagcctcc

SEQ ID NO: 461023 - DNA, 15 bp, Homo sapiens
tgccttgccagcctc

SEQ ID NO: 461024 - DNA, 15 bp, Homo sapiens
ctgccttgccagcct

SEQ ID NO: 461025 - DNA, 15 bp, Homo sapiens
tctgccttgccagcc

SEQ ID NO: 461026 - DNA, 15 bp, Homo sapiens
atctgccttgccagc

SEQ ID NO: 461027 - DNA, 15 bp, Homo sapiens
catctgccttgccag

SEQ ID NO: 461028 - DNA, 15 bp, Homo sapiens
ccatctgccttgcca

SEQ ID NO: 461029 - DNA, 15 bp, Homo sapiens
cccatctgccttgcc

SEQ ID NO: 461030 - DNA, 15 bp, Homo sapiens
ccccatctgccttgc

SEQ ID NO: 461031 - DNA, 15 bp, Homo sapiens
tccccatctgccttg

SEQ ID NO: 461032 - DNA, 15 bp, Homo sapiens
gtccccatctgcctt

SEQ ID NO: 461033 - DNA, 15 bp, Homo sapiens
ggtccccatctgcct

SEQ ID NO: 461034 - DNA, 15 bp, Homo sapiens
aggtccccatctgcc

SEQ ID NO: 461035 - DNA, 15 bp, Homo sapiens
gaggtccccatctgc

SEQ ID NO: 461036 - DNA, 15 bp, Homo sapiens
ggaggtccccatctg

SEQ ID NO: 461037 - DNA, 15 bp, Homo sapiens
cggaggtccccatct

SEQ ID NO: 461038 - DNA, 15 bp, Homo sapiens
tcggaggtccccatc

SEQ ID NO: 461039 - DNA, 15 bp, Homo sapiens
ctcggaggtccccat

SEQ ID NO: 461040 - DNA, 15 bp, Homo sapiens
gtctctgtctgtctg

SEQ ID NO: 461041 - DNA, 15 bp, Homo sapiens
tgtctctgtctgtct

SEQ ID NO: 461042 - DNA, 15 bp, Homo sapiens
ttgtctctgtctgtc

SEQ ID NO: 461043 - DNA, 15 bp, Homo sapiens
cttgtctctgtctgt

SEQ ID NO: 461044 - DNA, 15 bp, Homo sapiens
ccttgtctctgtctg

SEQ ID NO: 461045 - DNA, 15 bp, Homo sapiens
tccttgtctctgtct

SEQ ID NO: 461046 - DNA, 15 bp, Homo sapiens
ctccttgtctctgtc

SEQ ID NO: 461047 - DNA, 15 bp, Homo sapiens
cctccttgtctctgt

SEQ ID NO: 461048 - DNA, 15 bp, Homo sapiens
acctccttgtctctg

SEQ ID NO: 461049 - DNA, 15 bp, Homo sapiens
cacctccttgtctct

SEQ ID NO: 461050 - DNA, 15 bp, Homo sapiens
ccacctccttgtctc

SEQ ID NO: 461051 - DNA, 15 bp, Homo sapiens
cccacctccttgtct

SEQ ID NO: 461052 - DNA, 15 bp, Homo sapiens
acccacctccttgtc

SEQ ID NO: 461053 - DNA, 15 bp, Homo sapiens
aacccacctccttgt

SEQ ID NO: 461054 - DNA, 15 bp, Homo sapiens
caacccacctccttg

SEQ ID NO: 461055 - DNA, 15 bp, Homo sapiens
tcaacccacctcctt

SEQ ID NO: 461056 - DNA, 15 bp, Homo sapiens
gtcaacccacctcct

SEQ ID NO: 461057 - DNA, 15 bp, Homo sapiens
tgtcaacccacctcc

SEQ ID NO: 461058 - DNA, 15 bp, Homo sapiens
gtgtcaacccacctc

SEQ ID NO: 461059 - DNA, 15 bp, Homo sapiens
tgtgtcaacccacct

SEQ ID NO: 461060 - DNA, 15 bp, Homo sapiens
atgtgtcaacccacc

SEQ ID NO: 461061 - DNA, 15 bp, Homo sapiens
tatgtgtcaacccac

SEQ ID NO: 461062 - DNA, 15 bp, Homo sapiens
ctatgtgtcaaccca

SEQ ID NO: 461063 - DNA, 15 bp, Homo sapiens
tctatgtgtcaaccc

SEQ ID NO: 461064 - DNA, 15 bp, Homo sapiens
gtctatgtgtcaacc

SEQ ID NO: 461065 - DNA, 15 bp, Homo sapiens
tgtctatgtgtcaac

SEQ ID NO: 461066 - DNA, 15 bp, Homo sapiens
gtgtctatgtgtcaa

SEQ ID NO: 461067 - DNA, 15 bp, Homo sapiens
tgtgtctatgtgtca

SEQ ID NO: 461068 - DNA, 15 bp, Homo sapiens
ctgtgtctatgtgtc

SEQ ID NO: 461069 - DNA, 15 bp, Homo sapiens
tctgtgtctatgtgt

SEQ ID NO: 461070 - DNA, 15 bp, Homo sapiens
atctgtgtctatgtg

SEQ ID NO: 461071 - DNA, 15 bp, Homo sapiens
tatctgtgtctatgt

SEQ ID NO: 461072 - DNA, 15 bp, Homo sapiens
ttatctgtgtctatg

SEQ ID NO: 461073 - DNA, 15 bp, Homo sapiens
tttatctgtgtctat

SEQ ID NO: 461074 - DNA, 15 bp, Homo sapiens
ctttatctgtgtcta

SEQ ID NO: 461075 - DNA, 15 bp, Homo sapiens
tctttatctgtgtct

SEQ ID NO: 461076 - DNA, 15 bp, Homo sapiens
ttctttatctgtgtc

SEQ ID NO: 461077 - DNA, 15 bp, Homo sapiens
tttctttatctgtgt

SEQ ID NO: 461078 - DNA, 15 bp, Homo sapiens
atttctttatctgtg

SEQ ID NO: 461079 - DNA, 15 bp, Homo sapiens
catttctttatctgt

SEQ ID NO: 461080 - DNA, 15 bp, Homo sapiens
tcatttctttatctg

SEQ ID NO: 461081 - DNA, 15 bp, Homo sapiens
ttcatttctttatct

SEQ ID NO: 461082 - DNA, 15 bp, Homo sapiens
cttcatttctttatc

SEQ ID NO: 461083 - DNA, 15 bp, Homo sapiens
tcttcatttctttat

SEQ ID NO: 461084 - DNA, 15 bp, Homo sapiens
gtcttcatttcttta

SEQ ID NO: 461085 - DNA, 15 bp, Homo sapiens
tgtcttcatttcttt

SEQ ID NO: 461086 - DNA, 15 bp, Homo sapiens
gtgtcttcatttctt

SEQ ID NO: 461087 - DNA, 15 bp, Homo sapiens
ggtgtcttcatttct

SEQ ID NO: 461088 - DNA, 15 bp, Homo sapiens
tggtgtcttcatttc

SEQ ID NO: 461089 - DNA, 15 bp, Homo sapiens
atggtgtcttcattt

SEQ ID NO: 461090 - DNA, 15 bp, Homo sapiens
catggtgtcttcatt

SEQ ID NO: 461091 - DNA, 15 bp, Homo sapiens
gcatggtgtcttcat

SEQ ID NO: 461092 - DNA, 15 bp, Homo sapiens
ggcatggtgtcttca

SEQ ID NO: 461093 - DNA, 15 bp, Homo sapiens
aggcatggtgtcttc

SEQ ID NO: 461094 - DNA, 15 bp, Homo sapiens
caggcatggtgtctt

SEQ ID NO: 461095 - DNA, 15 bp, Homo sapiens
acaggcatggtgtct

SEQ ID NO: 461096 - DNA, 15 bp, Homo sapiens
tacaggcatggtgtc

SEQ ID NO: 461097 - DNA, 15 bp, Homo sapiens
ttacaggcatggtgt

SEQ ID NO: 461098 - DNA, 15 bp, Homo sapiens
attacaggcatggtg

SEQ ID NO: 461099 - DNA, 15 bp, Homo sapiens
gattacaggcatggt

SEQ ID NO: 461100 - DNA, 15 bp, Homo sapiens
ggattacaggcatgg

SEQ ID NO: 461101 - DNA, 15 bp, Homo sapiens
gggattacaggcatg

SEQ ID NO: 461102 - DNA, 15 bp, Homo sapiens
tgggattacaggcat

SEQ ID NO: 461103 - DNA, 15 bp, Homo sapiens
ctgggattacaggca

SEQ ID NO: 461104 - DNA, 15 bp, Homo sapiens
cgcctcagcctccca

SEQ ID NO: 461105 - DNA, 15 bp, Homo sapiens
ccgcctcagcctccc

SEQ ID NO: 461106 - DNA, 15 bp, Homo sapiens
cccgcctcagcctcc

SEQ ID NO: 461107 - DNA, 15 bp, Homo sapiens
gcccgcctcagcctc

SEQ ID NO: 461108 - DNA, 15 bp, Homo sapiens
cgcccgcctcagcct

SEQ ID NO: 461109 - DNA, 15 bp, Homo sapiens
gcgcccgcctcagcc

SEQ ID NO: 461110 - DNA, 15 bp, Homo sapiens
tgcgcccgcctcagc

SEQ ID NO: 461111 - DNA, 15 bp, Homo sapiens
atgcgcccgcctcag

SEQ ID NO: 461112 - DNA, 15 bp, Homo sapiens
gatgcgcccgcctca

SEQ ID NO: 461113 - DNA, 15 bp, Homo sapiens
tgatgcgcccgcctc

SEQ ID NO: 461114 - DNA, 15 bp, Homo sapiens
gtgatgcgcccgcct

SEQ ID NO: 461115 - DNA, 15 bp, Homo sapiens
ggtgatgcgcccgcc

SEQ ID NO: 461116 - DNA, 15 bp, Homo sapiens
aggtgatgcgcccgc

SEQ ID NO: 461117 - DNA, 15 bp, Homo sapiens
caggtgatgcgcccg

SEQ ID NO: 461118 - DNA, 15 bp, Homo sapiens
tcaggtgatgcgccc

SEQ ID NO: 461119 - DNA, 15 bp, Homo sapiens
ctcaggtgatgcgcc

SEQ ID NO: 461120 - DNA, 15 bp, Homo sapiens
cctcaggtgatgcgc

SEQ ID NO: 461121 - DNA, 15 bp, Homo sapiens
acctcaggtgatgcg

SEQ ID NO: 461122 - DNA, 15 bp, Homo sapiens
gacctcaggtgatgc

SEQ ID NO: 461123 - DNA, 15 bp, Homo sapiens
tgacctcaggtgatg

SEQ ID NO: 461124 - DNA, 15 bp, Homo sapiens
tcctgacctcaggtg

SEQ ID NO: 461125 - DNA, 15 bp, Homo sapiens
atcctgacctcaggt

SEQ ID NO: 461126 - DNA, 15 bp, Homo sapiens
aatcctgacctcagg

SEQ ID NO: 461127 - DNA, 15 bp, Homo sapiens
aaatcctgacctcag

SEQ ID NO: 461128 - DNA, 15 bp, Homo sapiens
gaaatcctgacctca

SEQ ID NO: 461129 - DNA, 15 bp, Homo sapiens
tgaaatcctgacctc

SEQ ID NO: 461130 - DNA, 15 bp, Homo sapiens
ttgaaatcctgacct

SEQ ID NO: 461131 - DNA, 15 bp, Homo sapiens
cttgaaatcctgacc

SEQ ID NO: 461132 - DNA, 15 bp, Homo sapiens
tcttgaaatcctgac

SEQ ID NO: 461133 - DNA, 15 bp, Homo sapiens
gtcttgaaatcctga

SEQ ID NO: 461134 - DNA, 15 bp, Homo sapiens
ggtcttgaaatcctg

SEQ ID NO: 461135 - DNA, 15 bp, Homo sapiens
tggtcttgaaatcct

SEQ ID NO: 461136 - DNA, 15 bp, Homo sapiens
ctggtcttgaaatcc

SEQ ID NO: 461137 - DNA, 15 bp, Homo sapiens
gctggtcttgaaatc

SEQ ID NO: 461138 - DNA, 15 bp, Homo sapiens
ggctggtcttgaaat

SEQ ID NO: 461139 - DNA, 15 bp, Homo sapiens
gggctggtcttgaaa

SEQ ID NO: 461140 - DNA, 15 bp, Homo sapiens
cgggctggtcttgaa

SEQ ID NO: 461141 - DNA, 15 bp, Homo sapiens
ccgggctggtcttga

SEQ ID NO: 461142 - DNA, 15 bp, Homo sapiens
gccgggctggtcttg

SEQ ID NO: 461143 - DNA, 15 bp, Homo sapiens
ggccgggctggtctt

SEQ ID NO: 461144 - DNA, 15 bp, Homo sapiens
tggccgggctggtct

SEQ ID NO: 461145 - DNA, 15 bp, Homo sapiens
ttggccgggctggtc

SEQ ID NO: 461146 - DNA, 15 bp, Homo sapiens
gttggccgggctggt

SEQ ID NO: 461147 - DNA, 15 bp, Homo sapiens
tgttggccgggctgg

SEQ ID NO: 461148 - DNA, 15 bp, Homo sapiens
atgttggccgggctg

SEQ ID NO: 461149 - DNA, 15 bp, Homo sapiens
catgttggccgggct

SEQ ID NO: 461150 - DNA, 15 bp, Homo sapiens
ccatgttggccgggc

SEQ ID NO: 461151 - DNA, 15 bp, Homo sapiens
accatgttggccggg

SEQ ID NO: 461152 - DNA, 15 bp, Homo sapiens
taccatgttggccgg

SEQ ID NO: 461153 - DNA, 15 bp, Homo sapiens
ttaccatgttggccg

SEQ ID NO: 461154 - DNA, 15 bp, Homo sapiens
tttaccatgttggcc

SEQ ID NO: 461155 - DNA, 15 bp, Homo sapiens
ttttaccatgttggc

SEQ ID NO: 461156 - DNA, 15 bp, Homo sapiens
gttttaccatgttgg

SEQ ID NO: 461157 - DNA, 15 bp, Homo sapiens
ggttttaccatgttg

SEQ ID NO: 461158 - DNA, 15 bp, Homo sapiens
gggttttaccatgtt

SEQ ID NO: 461159 - DNA, 15 bp, Homo sapiens
ggggttttaccatgt

SEQ ID NO: 461160 - DNA, 15 bp, Homo sapiens
cggggttttaccatg

SEQ ID NO: 461161 - DNA, 15 bp, Homo sapiens
acggggttttaccat

SEQ ID NO: 461162 - DNA, 15 bp, Homo sapiens
gacggggttttacca

SEQ ID NO: 461163 - DNA, 15 bp, Homo sapiens
agacggggttttacc

SEQ ID NO: 461164 - DNA, 15 bp, Homo sapiens
gagacggggttttac

SEQ ID NO: 461165 - DNA, 15 bp, Homo sapiens
agagacggggtttta

SEQ ID NO: 461166 - DNA, 15 bp, Homo sapiens
tagagacggggtttt

SEQ ID NO: 461167 - DNA, 15 bp, Homo sapiens
cgcccagctaatttt

SEQ ID NO: 461168 - DNA, 15 bp, Homo sapiens
acgcccagctaattt

SEQ ID NO: 461169 - DNA, 15 bp, Homo sapiens
cacgcccagctaatt

SEQ ID NO: 461170 - DNA, 15 bp, Homo sapiens
ccacgcccagctaat

SEQ ID NO: 461171 - DNA, 15 bp, Homo sapiens
accacgcccagctaa

SEQ ID NO: 461172 - DNA, 15 bp, Homo sapiens
caccacgcccagcta

SEQ ID NO: 461173 - DNA, 15 bp, Homo sapiens
ccaccacgcccagct

SEQ ID NO: 461174 - DNA, 15 bp, Homo sapiens
gccaccacgcccagc

SEQ ID NO: 461175 - DNA, 15 bp, Homo sapiens
tgccaccacgcccag

SEQ ID NO: 461176 - DNA, 15 bp, Homo sapiens
gtgccaccacgccca

SEQ ID NO: 461177 - DNA, 15 bp, Homo sapiens
tgtgccaccacgccc

SEQ ID NO: 461178 - DNA, 15 bp, Homo sapiens
atgtgccaccacgcc

SEQ ID NO: 461179 - DNA, 15 bp, Homo sapiens
catgtgccaccacgc

SEQ ID NO: 461180 - DNA, 15 bp, Homo sapiens
gcatgtgccaccacg

SEQ ID NO: 461181 - DNA, 15 bp, Homo sapiens
ggcatgtgccaccac

SEQ ID NO: 461182 - DNA, 15 bp, Homo sapiens
aggcatgtgccacca

SEQ ID NO: 461183 - DNA, 15 bp, Homo sapiens
caggcatgtgccacc

SEQ ID NO: 461184 - DNA, 15 bp, Homo sapiens
acaggcatgtgccac

SEQ ID NO: 461185 - DNA, 15 bp, Homo sapiens
tacaggcatgtgcca

SEQ ID NO: 461186 - DNA, 15 bp, Homo sapiens
ttacaggcatgtgcc

SEQ ID NO: 461187 - DNA, 15 bp, Homo sapiens
attacaggcatgtgc

SEQ ID NO: 461188 - DNA, 15 bp, Homo sapiens
gattacaggcatgtg

SEQ ID NO: 461189 - DNA, 15 bp, Homo sapiens
ggattacaggcatgt

SEQ ID NO: 461190 - DNA, 15 bp, Homo sapiens
cgagtagctgggatt

SEQ ID NO: 461191 - DNA, 15 bp, Homo sapiens
ccgagtagctgggat

SEQ ID NO: 461192 - DNA, 15 bp, Homo sapiens
ggcctcccgagtagc

SEQ ID NO: 461193 - DNA, 15 bp, Homo sapiens
cggcctcccgagtag

SEQ ID NO: 461194 - DNA, 15 bp, Homo sapiens
tcggcctcccgagta

SEQ ID NO: 461195 - DNA, 15 bp, Homo sapiens
ctcggcctcccgagt

SEQ ID NO: 461196 - DNA, 15 bp, Homo sapiens
cctcggcctcccgag

SEQ ID NO: 461197 - DNA, 15 bp, Homo sapiens
gcctcggcctcccga

SEQ ID NO: 461198 - DNA, 15 bp, Homo sapiens
tgcctcggcctcccg

SEQ ID NO: 461199 - DNA, 15 bp, Homo sapiens
tcctgcctcggcctc

SEQ ID NO: 461200 - DNA, 15 bp, Homo sapiens
ctcctgcctcggcct

SEQ ID NO: 461201 - DNA, 15 bp, Homo sapiens
tctcctgcctcggcc

SEQ ID NO: 461202 - DNA, 15 bp, Homo sapiens
ttctcctgcctcggc

SEQ ID NO: 461203 - DNA, 15 bp, Homo sapiens
attctcctgcctcgg

SEQ ID NO: 461204 - DNA, 15 bp, Homo sapiens
gattctcctgcctcg

SEQ ID NO: 461205 - DNA, 15 bp, Homo sapiens
aggttcaagtgattc

SEQ ID NO: 461206 - DNA, 15 bp, Homo sapiens
caggttcaagtgatt

SEQ ID NO: 461207 - DNA, 15 bp, Homo sapiens
ccaggttcaagtgat

SEQ ID NO: 461208 - DNA, 15 bp, Homo sapiens
cccaggttcaagtga

SEQ ID NO: 461209 - DNA, 15 bp, Homo sapiens
tcccaggttcaagtg

SEQ ID NO: 461210 - DNA, 15 bp, Homo sapiens
ctcccaggttcaagt

SEQ ID NO: 461211 - DNA, 15 bp, Homo sapiens
cctcccaggttcaag

SEQ ID NO: 461212 - DNA, 15 bp, Homo sapiens
gcctcccaggttcaa

SEQ ID NO: 461213 - DNA, 15 bp, Homo sapiens
tgcctcccaggttca

SEQ ID NO: 461214 - DNA, 15 bp, Homo sapiens
ctgcctcccaggttc

SEQ ID NO: 461215 - DNA, 15 bp, Homo sapiens
tctgcctcccaggtt

SEQ ID NO: 461216 - DNA, 15 bp, Homo sapiens
ctctgcctcccaggt

SEQ ID NO: 461217 - DNA, 15 bp, Homo sapiens
cctctgcctcccagg

SEQ ID NO: 461218 - DNA, 15 bp, Homo sapiens
acctctgcctcccag

SEQ ID NO: 461219 - DNA, 15 bp, Homo sapiens
aacctctgcctccca

SEQ ID NO: 461220 - DNA, 15 bp, Homo sapiens
tggctcactgcaacc

SEQ ID NO: 461221 - DNA, 15 bp, Homo sapiens
ttggctcactgcaac

SEQ ID NO: 461222 - DNA, 15 bp, Homo sapiens
cttggctcactgcaa

SEQ ID NO: 461223 - DNA, 15 bp, Homo sapiens
catcttggctcactg

SEQ ID NO: 461224 - DNA, 15 bp, Homo sapiens
ccatcttggctcact

SEQ ID NO: 461225 - DNA, 15 bp, Homo sapiens
gccatcttggctcac

SEQ ID NO: 461226 - DNA, 15 bp, Homo sapiens
cgccatcttggctca

SEQ ID NO: 461227 - DNA, 15 bp, Homo sapiens
gcgccatcttggctc

SEQ ID NO: 461228 - DNA, 15 bp, Homo sapiens
ggcgccatcttggct

SEQ ID NO: 461229 - DNA, 15 bp, Homo sapiens
tggcgccatcttggc

SEQ ID NO: 461230 - DNA, 15 bp, Homo sapiens
atggcgccatcttgg

SEQ ID NO: 461231 - DNA, 15 bp, Homo sapiens
aatggcgccatcttg

SEQ ID NO: 461232 - DNA, 15 bp, Homo sapiens
caatggcgccatctt

SEQ ID NO: 461233 - DNA, 15 bp, Homo sapiens
gcaatggcgccatct

SEQ ID NO: 461234 - DNA, 15 bp, Homo sapiens
tgcaatggcgccatc

SEQ ID NO: 461235 - DNA, 15 bp, Homo sapiens
gtgcaatggcgccat

SEQ ID NO: 461236 - DNA, 15 bp, Homo sapiens
agtgcaatggcgcca

SEQ ID NO: 461237 - DNA, 15 bp, Homo sapiens
gagtgcaatggcgcc

SEQ ID NO: 461238 - DNA, 15 bp, Homo sapiens
ggagtgcaatggcgc

SEQ ID NO: 461239 - DNA, 15 bp, Homo sapiens
tggagtgcaatggcg

SEQ ID NO: 461240 - DNA, 15 bp, Homo sapiens
gccaggctggagtgc

SEQ ID NO: 461241 - DNA, 15 bp, Homo sapiens
ggccaggctggagtg

SEQ ID NO: 461242 - DNA, 15 bp, Homo sapiens
tggccaggctggagt

SEQ ID NO: 461243 - DNA, 15 bp, Homo sapiens
ttggccaggctggag

SEQ ID NO: 461244 - DNA, 15 bp, Homo sapiens
gttggccaggctgga

SEQ ID NO: 461245 - DNA, 15 bp, Homo sapiens
ctgttggccaggctg

SEQ ID NO: 461246 - DNA, 15 bp, Homo sapiens
tctgttggccaggct

SEQ ID NO: 461247 - DNA, 15 bp, Homo sapiens
ctctgttggccaggc

SEQ ID NO: 461248 - DNA, 15 bp, Homo sapiens
gctctgttggccagg

SEQ ID NO: 461249 - DNA, 15 bp, Homo sapiens
tgctctgttggccag

SEQ ID NO: 461250 - DNA, 15 bp, Homo sapiens
ttgctctgttggcca

SEQ ID NO: 461251 - DNA, 15 bp, Homo sapiens
cttgctctgttggcc

SEQ ID NO: 461252 - DNA, 15 bp, Homo sapiens
tcttgctctgttggc

SEQ ID NO: 461253 - DNA, 15 bp, Homo sapiens
gtcttgctctgttgg

SEQ ID NO: 461254 - DNA, 15 bp, Homo sapiens
agtcttgctctgttg

SEQ ID NO: 461255 - DNA, 15 bp, Homo sapiens
gagtcttgctctgtt

SEQ ID NO: 461256 - DNA, 15 bp, Homo sapiens
agagtcttgctctgt

SEQ ID NO: 461257 - DNA, 15 bp, Homo sapiens
cagagtcttgctctg

SEQ ID NO: 461258 - DNA, 15 bp, Homo sapiens
acagagtcttgctct

SEQ ID NO: 461259 - DNA, 15 bp, Homo sapiens
gacagagtcttgctc

SEQ ID NO: 461260 - DNA, 15 bp, Homo sapiens
ggacagagtcttgct

SEQ ID NO: 461261 - DNA, 15 bp, Homo sapiens
tggacagagtcttgc

SEQ ID NO: 461262 - DNA, 15 bp, Homo sapiens
ttggacagagtcttg

SEQ ID NO: 461263 - DNA, 15 bp, Homo sapiens
tttggacagagtctt

SEQ ID NO: 461264 - DNA, 15 bp, Homo sapiens
ttttggacagagtct

SEQ ID NO: 461265 - DNA, 15 bp, Homo sapiens
tttttggacagagtc

SEQ ID NO: 461266 - DNA, 15 bp, Homo sapiens
ttttttggacagagt

SEQ ID NO: 461267 - DNA, 15 bp, Homo sapiens
gttttttggacagag

SEQ ID NO: 461268 - DNA, 15 bp, Homo sapiens
tgttttttggacaga

SEQ ID NO: 461269 - DNA, 15 bp, Homo sapiens
ttgttttttggacag

SEQ ID NO: 461270 - DNA, 15 bp, Homo sapiens
tttgttttttggaca

SEQ ID NO: 461271 - DNA, 15 bp, Homo sapiens
gtttgttttttggac

SEQ ID NO: 461272 - DNA, 15 bp, Homo sapiens
tgtttgttttttgga

SEQ ID NO: 461273 - DNA, 15 bp, Homo sapiens
ttgtttgttttttgg

SEQ ID NO: 461274 - DNA, 15 bp, Homo sapiens
tttgtttgttttttg

SEQ ID NO: 461275 - DNA, 15 bp, Homo sapiens
gtttgtttgtttttt

SEQ ID NO: 461276 - DNA, 15 bp, Homo sapiens
tgtttgtttgttttt

SEQ ID NO: 461277 - DNA, 15 bp, Homo sapiens
ctgtttgtttgtttt

SEQ ID NO: 461278 - DNA, 15 bp, Homo sapiens
tctgtttgtttgttt

SEQ ID NO: 461279 - DNA, 15 bp, Homo sapiens
gtctgtttgtttgtt

SEQ ID NO: 461280 - DNA, 15 bp, Homo sapiens
tgtctgtttgtttgt

SEQ ID NO: 461281 - DNA, 15 bp, Homo sapiens
ttgtctgtttgtttg

SEQ ID NO: 461282 - DNA, 15 bp, Homo sapiens
tttgtctgtttgttt

SEQ ID NO: 461283 - DNA, 15 bp, Homo sapiens
gtttgtctgtttgtt

SEQ ID NO: 461284 - DNA, 15 bp, Homo sapiens
tgtttgtctgtttgt

SEQ ID NO: 461285 - DNA, 15 bp, Homo sapiens
ttgtttgtctgtttg

SEQ ID NO: 461286 - DNA, 15 bp, Homo sapiens
tttgtttgtctgttt

SEQ ID NO: 461287 - DNA, 15 bp, Homo sapiens
gtttgtttgtctgtt

SEQ ID NO: 461288 - DNA, 15 bp, Homo sapiens
tgtttgtttgtctgt

SEQ ID NO: 461289 - DNA, 15 bp, Homo sapiens
ttgtttgtttgtctg

SEQ ID NO: 461290 - DNA, 15 bp, Homo sapiens
tttgtttgtttgtct

SEQ ID NO: 461291 - DNA, 15 bp, Homo sapiens
ttttgtttgtttgtc

SEQ ID NO: 461292 - DNA, 15 bp, Homo sapiens
gttttgtttgtttgt

SEQ ID NO: 461293 - DNA, 15 bp, Homo sapiens
tgttttgtttgtttg

SEQ ID NO: 461294 - DNA, 15 bp, Homo sapiens
ttgttttgtttgttt

SEQ ID NO: 461295 - DNA, 15 bp, Homo sapiens
tttgttttgtttgtt

SEQ ID NO: 461296 - DNA, 15 bp, Homo sapiens
ttttgttttgtttgt

SEQ ID NO: 461297 - DNA, 15 bp, Homo sapiens
tttttgttttgtttg

SEQ ID NO: 461298 - DNA, 15 bp, Homo sapiens
ctttttgttttgttt

SEQ ID NO: 461299 - DNA, 15 bp, Homo sapiens
tctttttgttttgtt

SEQ ID NO: 461300 - DNA, 15 bp, Homo sapiens
ttctttttgttttgt

SEQ ID NO: 461301 - DNA, 15 bp, Homo sapiens
tttctttttgttttg

SEQ ID NO: 461302 - DNA, 15 bp, Homo sapiens
atttctttttgtttt

SEQ ID NO: 461303 - DNA, 15 bp, Homo sapiens
tatttctttttgttt

SEQ ID NO: 461304 - DNA, 15 bp, Homo sapiens
ctatttctttttgtt

SEQ ID NO: 461305 - DNA, 15 bp, Homo sapiens
tctatttctttttgt

SEQ ID NO: 461306 - DNA, 15 bp, Homo sapiens
ctctatttctttttg

SEQ ID NO: 461307 - DNA, 15 bp, Homo sapiens
tctctatttcttttt

SEQ ID NO: 461308 - DNA, 15 bp, Homo sapiens
gtctctatttctttt

SEQ ID NO: 461309 - DNA, 15 bp, Homo sapiens
tgtctctatttcttt

SEQ ID NO: 461310 - DNA, 15 bp, Homo sapiens
gtgtctctatttctt

SEQ ID NO: 461311 - DNA, 15 bp, Homo sapiens
tgtgtctctatttct

SEQ ID NO: 461312 - DNA, 15 bp, Homo sapiens
ctgtgtctctatttc

SEQ ID NO: 461313 - DNA, 15 bp, Homo sapiens
tctgtgtctctattt

SEQ ID NO: 461314 - DNA, 15 bp, Homo sapiens
ctctgtgtctctatt

SEQ ID NO: 461315 - DNA, 15 bp, Homo sapiens
tctctgtgtctctat

SEQ ID NO: 461316 - DNA, 15 bp, Homo sapiens
ttctctgtgtctcta

SEQ ID NO: 461317 - DNA, 15 bp, Homo sapiens
cttctctgtgtctct

SEQ ID NO: 461318 - DNA, 15 bp, Homo sapiens
acttctctgtgtctc

SEQ ID NO: 461319 - DNA, 15 bp, Homo sapiens
cacttctctgtgtct

SEQ ID NO: 461320 - DNA, 15 bp, Homo sapiens
ccacttctctgtgtc

SEQ ID NO: 461321 - DNA, 15 bp, Homo sapiens
tccacttctctgtgt

SEQ ID NO: 461322 - DNA, 15 bp, Homo sapiens
ttccacttctctgtg

SEQ ID NO: 461323 - DNA, 15 bp, Homo sapiens
cttccacttctctgt

SEQ ID NO: 461324 - DNA, 15 bp, Homo sapiens
gcttccacttctctg

SEQ ID NO: 461325 - DNA, 15 bp, Homo sapiens
cgcttccacttctct

SEQ ID NO: 461326 - DNA, 15 bp, Homo sapiens
ccgcttccacttctc

SEQ ID NO: 461327 - DNA, 15 bp, Homo sapiens
cccgcttccacttct

SEQ ID NO: 461328 - DNA, 15 bp, Homo sapiens
ccccgcttccacttc

SEQ ID NO: 461329 - DNA, 15 bp, Homo sapiens
gccccgcttccactt

SEQ ID NO: 461330 - DNA, 15 bp, Homo sapiens
cgccccgcttccact

SEQ ID NO: 461331 - DNA, 15 bp, Homo sapiens
ccgccccgcttccac

SEQ ID NO: 461332 - DNA, 15 bp, Homo sapiens
gccgccccgcttcca

SEQ ID NO: 461333 - DNA, 15 bp, Homo sapiens
tgccgccccgcttcc

SEQ ID NO: 461334 - DNA, 15 bp, Homo sapiens
gtgccgccccgcttc

SEQ ID NO: 461335 - DNA, 15 bp, Homo sapiens
tgtgccgccccgctt

SEQ ID NO: 461336 - DNA, 15 bp, Homo sapiens
ctgtgccgccccgct

SEQ ID NO: 461337 - DNA, 15 bp, Homo sapiens
tctgtgccgccccgc

SEQ ID NO: 461338 - DNA, 15 bp, Homo sapiens
ctctgtgccgccccg

SEQ ID NO: 461339 - DNA, 15 bp, Homo sapiens
cctctgtgccgcccc

SEQ ID NO: 461340 - DNA, 15 bp, Homo sapiens
ccctctgtgccgccc

SEQ ID NO: 461341 - DNA, 15 bp, Homo sapiens
cccctctgtgccgcc

SEQ ID NO: 461342 - DNA, 15 bp, Homo sapiens
tcccctctgtgccgc

SEQ ID NO: 461343 - DNA, 15 bp, Homo sapiens
atcccctctgtgccg

SEQ ID NO: 461344 - DNA, 15 bp, Homo sapiens
aatcccctctgtgcc

SEQ ID NO: 461345 - DNA, 15 bp, Homo sapiens
caatcccctctgtgc

SEQ ID NO: 461346 - DNA, 15 bp, Homo sapiens
ccaatcccctctgtg

SEQ ID NO: 461347 - DNA, 15 bp, Homo sapiens
tccaatcccctctgt

SEQ ID NO: 461348 - DNA, 15 bp, Homo sapiens
ctccaatcccctctg

SEQ ID NO: 461349 - DNA, 15 bp, Homo sapiens
cctccaatcccctct

SEQ ID NO: 461350 - DNA, 15 bp, Homo sapiens
ccctccaatcccctc

SEQ ID NO: 461351 - DNA, 15 bp, Homo sapiens
cccctccaatcccct

SEQ ID NO: 461352 - DNA, 15 bp, Homo sapiens
ccccctccaatcccc

SEQ ID NO: 461353 - DNA, 15 bp, Homo sapiens
cccccctccaatccc

SEQ ID NO: 461354 - DNA, 15 bp, Homo sapiens
ccccccctccaatcc

SEQ ID NO: 461355 - DNA, 15 bp, Homo sapiens
tccccccctccaatc

SEQ ID NO: 461356 - DNA, 15 bp, Homo sapiens
gtccccccctccaat

SEQ ID NO: 461357 - DNA, 15 bp, Homo sapiens
ggtccccccctccaa

SEQ ID NO: 461358 - DNA, 15 bp, Homo sapiens
aggtccccccctcca

SEQ ID NO: 461359 - DNA, 15 bp, Homo sapiens
caggtccccccctcc

SEQ ID NO: 461360 - DNA, 15 bp, Homo sapiens
ccaggtccccccctc

SEQ ID NO: 461361 - DNA, 15 bp, Homo sapiens
cccaggtccccccct

SEQ ID NO: 461362 - DNA, 15 bp, Homo sapiens
gcccaggtccccccc

SEQ ID NO: 461363 - DNA, 15 bp, Homo sapiens
ggcccaggtcccccc

SEQ ID NO: 461364 - DNA, 15 bp, Homo sapiens
gggcccaggtccccc

SEQ ID NO: 461365 - DNA, 15 bp, Homo sapiens
ggggcccaggtcccc

SEQ ID NO: 461366 - DNA, 15 bp, Homo sapiens
tggggcccaggtccc

SEQ ID NO: 461367 - DNA, 15 bp, Homo sapiens
ctggggcccaggtcc

SEQ ID NO: 461368 - DNA, 15 bp, Homo sapiens
gctggggcccaggtc

SEQ ID NO: 461369 - DNA, 15 bp, Homo sapiens
ggctggggcccaggt

SEQ ID NO: 461370 - DNA, 15 bp, Homo sapiens
tggctggggcccagg

SEQ ID NO: 461371 - DNA, 15 bp, Homo sapiens
gtggctggggcccag

SEQ ID NO: 461372 - DNA, 15 bp, Homo sapiens
tgtggctggggccca

SEQ ID NO: 461373 - DNA, 15 bp, Homo sapiens
ctgtggctggggccc

SEQ ID NO: 461374 - DNA, 15 bp, Homo sapiens
gctgtggctggggcc

SEQ ID NO: 461375 - DNA, 15 bp, Homo sapiens
ggctgtggctggggc

SEQ ID NO: 461376 - DNA, 15 bp, Homo sapiens
tggctgtggctgggg

SEQ ID NO: 461377 - DNA, 15 bp, Homo sapiens
gtggctgtggctggg

SEQ ID NO: 461378 - DNA, 15 bp, Homo sapiens
tgtggctgtggctgg

SEQ ID NO: 461379 - DNA, 15 bp, Homo sapiens
ctgtggctgtggctg

SEQ ID NO: 461380 - DNA, 15 bp, Homo sapiens
actgtggctgtggct

SEQ ID NO: 461381 - DNA, 15 bp, Homo sapiens
tactgtggctgtggc

SEQ ID NO: 461382 - DNA, 15 bp, Homo sapiens
ctactgtggctgtgg

SEQ ID NO: 461383 - DNA, 15 bp, Homo sapiens
gctactgtggctgtg

SEQ ID NO: 461384 - DNA, 15 bp, Homo sapiens
agctactgtggctgt

SEQ ID NO: 461385 - DNA, 15 bp, Homo sapiens
aagctactgtggctg

SEQ ID NO: 461386 - DNA, 15 bp, Homo sapiens
caagctactgtggct

SEQ ID NO: 461387 - DNA, 15 bp, Homo sapiens
ccaagctactgtggc

SEQ ID NO: 461388 - DNA, 15 bp, Homo sapiens
gccaagctactgtgg

SEQ ID NO: 461389 - DNA, 15 bp, Homo sapiens
ggccaagctactgtg

SEQ ID NO: 461390 - DNA, 15 bp, Homo sapiens
aggccaagctactgt

SEQ ID NO: 461391 - DNA, 15 bp, Homo sapiens
caggccaagctactg

SEQ ID NO: 461392 - DNA, 15 bp, Homo sapiens
ccaggccaagctact

SEQ ID NO: 461393 - DNA, 15 bp, Homo sapiens
cccaggccaagctac

SEQ ID NO: 461394 - DNA, 15 bp, Homo sapiens
ccccaggccaagcta

SEQ ID NO: 461395 - DNA, 15 bp, Homo sapiens
cccccaggccaagct

SEQ ID NO: 461396 - DNA, 15 bp, Homo sapiens
tcccccaggccaagc

SEQ ID NO: 461397 - DNA, 15 bp, Homo sapiens
ctcccccaggccaag

SEQ ID NO: 461398 - DNA, 15 bp, Homo sapiens
gctcccccaggccaa

SEQ ID NO: 461399 - DNA, 15 bp, Homo sapiens
tgctcccccaggcca

SEQ ID NO: 461400 - DNA, 15 bp, Homo sapiens
ctgctcccccaggcc

SEQ ID NO: 461401 - DNA, 15 bp, Homo sapiens
cctgctcccccaggc

SEQ ID NO: 461402 - DNA, 15 bp, Homo sapiens
ccctgctcccccagg

SEQ ID NO: 461403 - DNA, 15 bp, Homo sapiens
accctgctcccccag

SEQ ID NO: 461404 - DNA, 15 bp, Homo sapiens
caccctgctccccca

SEQ ID NO: 461405 - DNA, 15 bp, Homo sapiens
gcaccctgctccccc

SEQ ID NO: 461406 - DNA, 15 bp, Homo sapiens
cgcaccctgctcccc

SEQ ID NO: 461407 - DNA, 15 bp, Homo sapiens
ccgcaccctgctccc

SEQ ID NO: 461408 - DNA, 15 bp, Homo sapiens
cccgcaccctgctcc

SEQ ID NO: 461409 - DNA, 15 bp, Homo sapiens
gcccgcaccctgctc

SEQ ID NO: 461410 - DNA, 15 bp, Homo sapiens
cgcccgcaccctgct

SEQ ID NO: 461411 - DNA, 15 bp, Homo sapiens
ccgcccgcaccctgc

SEQ ID NO: 461412 - DNA, 15 bp, Homo sapiens
accgcccgcaccctg

SEQ ID NO: 461413 - DNA, 15 bp, Homo sapiens
caccgcccgcaccct

SEQ ID NO: 461414 - DNA, 15 bp, Homo sapiens
ccaccgcccgcaccc

SEQ ID NO: 461415 - DNA, 15 bp, Homo sapiens
cccaccgcccgcacc

SEQ ID NO: 461416 - DNA, 15 bp, Homo sapiens
ccccaccgcccgcac

SEQ ID NO: 461417 - DNA, 15 bp, Homo sapiens
accccaccgcccgca

SEQ ID NO: 461418 - DNA, 15 bp, Homo sapiens
caccccaccgcccgc

SEQ ID NO: 461419 - DNA, 15 bp, Homo sapiens
ccaccccaccgcccg

SEQ ID NO: 461420 - DNA, 15 bp, Homo sapiens
gccaccccaccgccc

SEQ ID NO: 461421 - DNA, 15 bp, Homo sapiens
ggccaccccaccgcc

SEQ ID NO: 461422 - DNA, 15 bp, Homo sapiens
cggccaccccaccgc

SEQ ID NO: 461423 - DNA, 15 bp, Homo sapiens
ccggccaccccaccg

SEQ ID NO: 461424 - DNA, 15 bp, Homo sapiens
cccggccaccccacc

SEQ ID NO: 461425 - DNA, 15 bp, Homo sapiens
ccccggccaccccac

SEQ ID NO: 461426 - DNA, 15 bp, Homo sapiens
gccccggccacccca

SEQ ID NO: 461427 - DNA, 15 bp, Homo sapiens
agccccggccacccc

SEQ ID NO: 461428 - DNA, 15 bp, Homo sapiens
cagccccggccaccc

SEQ ID NO: 461429 - DNA, 15 bp, Homo sapiens
tcagccccggccacc

SEQ ID NO: 461430 - DNA, 15 bp, Homo sapiens
ctcagccccggccac

SEQ ID NO: 461431 - DNA, 15 bp, Homo sapiens
cctcagccccggcca

SEQ ID NO: 461432 - DNA, 15 bp, Homo sapiens
ccctcagccccggcc

SEQ ID NO: 461433 - DNA, 15 bp, Homo sapiens
cccctcagccccggc

SEQ ID NO: 461434 - DNA, 15 bp, Homo sapiens
acccctcagccccgg

SEQ ID NO: 461435 - DNA, 15 bp, Homo sapiens
cacccctcagccccg

SEQ ID NO: 461436 - DNA, 15 bp, Homo sapiens
ccacccctcagcccc

SEQ ID NO: 461437 - DNA, 15 bp, Homo sapiens
accacccctcagccc

SEQ ID NO: 461438 - DNA, 15 bp, Homo sapiens
caccacccctcagcc

SEQ ID NO: 461439 - DNA, 15 bp, Homo sapiens
gcaccacccctcagc

SEQ ID NO: 461440 - DNA, 15 bp, Homo sapiens
agcaccacccctcag

SEQ ID NO: 461441 - DNA, 15 bp, Homo sapiens
gagcaccacccctca

SEQ ID NO: 461442 - DNA, 15 bp, Homo sapiens
tgagcaccacccctc

SEQ ID NO: 461443 - DNA, 15 bp, Homo sapiens
ctgagcaccacccct

SEQ ID NO: 461444 - DNA, 15 bp, Homo sapiens
gctgagcaccacccc

SEQ ID NO: 461445 - DNA, 15 bp, Homo sapiens
ggctgagcaccaccc

SEQ ID NO: 461446 - DNA, 15 bp, Homo sapiens
aggctgagcaccacc

SEQ ID NO: 461447 - DNA, 15 bp, Homo sapiens
aaggctgagcaccac

SEQ ID NO: 461448 - DNA, 15 bp, Homo sapiens
aaaggctgagcacca

SEQ ID NO: 461449 - DNA, 15 bp, Homo sapiens
gaaaggctgagcacc

SEQ ID NO: 461450 - DNA, 15 bp, Homo sapiens
tgaaaggctgagcac

SEQ ID NO: 461451 - DNA, 15 bp, Homo sapiens
ctgaaaggctgagca

SEQ ID NO: 461452 - DNA, 15 bp, Homo sapiens
tctgaaaggctgagc

SEQ ID NO: 461453 - DNA, 15 bp, Homo sapiens
ttctgaaaggctgag

SEQ ID NO: 461454 - DNA, 15 bp, Homo sapiens
cttctgaaaggctga

SEQ ID NO: 461455 - DNA, 15 bp, Homo sapiens
tcttctgaaaggctg

SEQ ID NO: 461456 - DNA, 15 bp, Homo sapiens
ttcttctgaaaggct

SEQ ID NO: 461457 - DNA, 15 bp, Homo sapiens
cttcttctgaaaggc

SEQ ID NO: 461458 - DNA, 15 bp, Homo sapiens
gcttcttctgaaagg

SEQ ID NO: 461459 - DNA, 15 bp, Homo sapiens
agcttcttctgaaag

SEQ ID NO: 461460 - DNA, 15 bp, Homo sapiens
cagcttcttctgaaa

SEQ ID NO: 461461 - DNA, 15 bp, Homo sapiens
ccagcttcttctgaa

SEQ ID NO: 461462 - DNA, 15 bp, Homo sapiens
tccagcttcttctga

SEQ ID NO: 461463 - DNA, 15 bp, Homo sapiens
ctccagcttcttctg

SEQ ID NO: 461464 - DNA, 15 bp, Homo sapiens
gctccagcttcttct

SEQ ID NO: 461465 - DNA, 15 bp, Homo sapiens
ggctccagcttcttc

SEQ ID NO: 461466 - DNA, 15 bp, Homo sapiens
cggctccagcttctt

SEQ ID NO: 461467 - DNA, 15 bp, Homo sapiens
ccggctccagcttct

SEQ ID NO: 461468 - DNA, 15 bp, Homo sapiens
gccggctccagcttc

SEQ ID NO: 461469 - DNA, 15 bp, Homo sapiens
ggccggctccagctt

SEQ ID NO: 461470 - DNA, 15 bp, Homo sapiens
aggccggctccagct

SEQ ID NO: 461471 - DNA, 15 bp, Homo sapiens
taggccggctccagc

SEQ ID NO: 461472 - DNA, 15 bp, Homo sapiens
gtaggccggctccag

SEQ ID NO: 461473 - DNA, 15 bp, Homo sapiens
ggtaggccggctcca

SEQ ID NO: 461474 - DNA, 15 bp, Homo sapiens
tggtaggccggctcc

SEQ ID NO: 461475 - DNA, 15 bp, Homo sapiens
ctggtaggccggctc

SEQ ID NO: 461476 - DNA, 15 bp, Homo sapiens
cctggtaggccggct

SEQ ID NO: 461477 - DNA, 15 bp, Homo sapiens
acctggtaggccggc

SEQ ID NO: 461478 - DNA, 15 bp, Homo sapiens
cacctggtaggccgg

SEQ ID NO: 461479 - DNA, 15 bp, Homo sapiens
tcacctggtaggccg

SEQ ID NO: 461480 - DNA, 15 bp, Homo sapiens
ctcacctggtaggcc

SEQ ID NO: 461481 - DNA, 15 bp, Homo sapiens
gctcacctggtaggc

SEQ ID NO: 461482 - DNA, 15 bp, Homo sapiens
tgctcacctggtagg

SEQ ID NO: 461483 - DNA, 15 bp, Homo sapiens
ttgctcacctggtag

SEQ ID NO: 461484 - DNA, 15 bp, Homo sapiens
tttgctcacctggta

SEQ ID NO: 461485 - DNA, 15 bp, Homo sapiens
ctttgctcacctggt

SEQ ID NO: 461486 - DNA, 15 bp, Homo sapiens
cctttgctcacctgg

SEQ ID NO: 461487 - DNA, 15 bp, Homo sapiens
gcctttgctcacctg

SEQ ID NO: 461488 - DNA, 15 bp, Homo sapiens
ggcctttgctcacct

SEQ ID NO: 461489 - DNA, 15 bp, Homo sapiens
tggcctttgctcacc

SEQ ID NO: 461490 - DNA, 15 bp, Homo sapiens
gtggcctttgctcac

SEQ ID NO: 461491 - DNA, 15 bp, Homo sapiens
tgtggcctttgctca

SEQ ID NO: 461492 - DNA, 15 bp, Homo sapiens
ttgtggcctttgctc

SEQ ID NO: 461493 - DNA, 15 bp, Homo sapiens
cttgtggcctttgct

SEQ ID NO: 461494 - DNA, 15 bp, Homo sapiens
tcttgtggcctttgc

SEQ ID NO: 461495 - DNA, 15 bp, Homo sapiens
atcttgtggcctttg

SEQ ID NO: 461496 - DNA, 15 bp, Homo sapiens
gatcttgtggccttt

SEQ ID NO: 461497 - DNA, 15 bp, Homo sapiens
ggatcttgtggcctt

SEQ ID NO: 461498 - DNA, 15 bp, Homo sapiens
cggatcttgtggcct

SEQ ID NO: 461499 - DNA, 15 bp, Homo sapiens
ccggatcttgtggcc

SEQ ID NO: 461500 - DNA, 15 bp, Homo sapiens
gccggatcttgtggc

SEQ ID NO: 461501 - DNA, 15 bp, Homo sapiens
agccggatcttgtgg

SEQ ID NO: 461502 - DNA, 15 bp, Homo sapiens
cagccggatcttgtg

SEQ ID NO: 461503 - DNA, 15 bp, Homo sapiens
tcagccggatcttgt

SEQ ID NO: 461504 - DNA, 15 bp, Homo sapiens
gtcagccggatcttg

SEQ ID NO: 461505 - DNA, 15 bp, Homo sapiens
ggtcagccggatctt

SEQ ID NO: 461506 - DNA, 15 bp, Homo sapiens
cggtcagccggatct

SEQ ID NO: 461507 - DNA, 15 bp, Homo sapiens
acggtcagccggatc

SEQ ID NO: 461508 - DNA, 15 bp, Homo sapiens
cacggtcagccggat

SEQ ID NO: 461509 - DNA, 15 bp, Homo sapiens
ccacggtcagccgga

SEQ ID NO: 461510 - DNA, 15 bp, Homo sapiens
tccacggtcagccgg

SEQ ID NO: 461511 - DNA, 15 bp, Homo sapiens
ttccacggtcagccg

SEQ ID NO: 461512 - DNA, 15 bp, Homo sapiens
gttccacggtcagcc

SEQ ID NO: 461513 - DNA, 15 bp, Homo sapiens
agttccacggtcagc

SEQ ID NO: 461514 - DNA, 15 bp, Homo sapiens
cagttccacggtcag

SEQ ID NO: 461515 - DNA, 15 bp, Homo sapiens
ccagttccacggtca

SEQ ID NO: 461516 - DNA, 15 bp, Homo sapiens
gccagttccacggtc

SEQ ID NO: 461517 - DNA, 15 bp, Homo sapiens
agccagttccacggt

SEQ ID NO: 461518 - DNA, 15 bp, Homo sapiens
cagccagttccacgg

SEQ ID NO: 461519 - DNA, 15 bp, Homo sapiens
tcagccagttccacg

SEQ ID NO: 461520 - DNA, 15 bp, Homo sapiens
gtcagccagttccac

SEQ ID NO: 461521 - DNA, 15 bp, Homo sapiens
ggtcagccagttcca

SEQ ID NO: 461522 - DNA, 15 bp, Homo sapiens
tggtcagccagttcc

SEQ ID NO: 461523 - DNA, 15 bp, Homo sapiens
atggtcagccagttc

SEQ ID NO: 461524 - DNA, 15 bp, Homo sapiens
catggtcagccagtt

SEQ ID NO: 461525 - DNA, 15 bp, Homo sapiens
tcatggtcagccagt

SEQ ID NO: 461526 - DNA, 15 bp, Homo sapiens
gtcatggtcagccag

SEQ ID NO: 461527 - DNA, 15 bp, Homo sapiens
cgtcatggtcagcca

SEQ ID NO: 461528 - DNA, 15 bp, Homo sapiens
gcgtcatggtcagcc

SEQ ID NO: 461529 - DNA, 15 bp, Homo sapiens
agcgtcatggtcagc

SEQ ID NO: 461530 - DNA, 15 bp, Homo sapiens
cagcgtcatggtcag

SEQ ID NO: 461531 - DNA, 15 bp, Homo sapiens
tcagcgtcatggtca

SEQ ID NO: 461532 - DNA, 15 bp, Homo sapiens
ctcagcgtcatggtc

SEQ ID NO: 461533 - DNA, 15 bp, Homo sapiens
cctcagcgtcatggt

SEQ ID NO: 461534 - DNA, 15 bp, Homo sapiens
acctcagcgtcatgg

SEQ ID NO: 461535 - DNA, 15 bp, Homo sapiens
gacctcagcgtcatg

SEQ ID NO: 461536 - DNA, 15 bp, Homo sapiens
tgacctcagcgtcat

SEQ ID NO: 461537 - DNA, 15 bp, Homo sapiens
ttgacctcagcgtca

SEQ ID NO: 461538 - DNA, 15 bp, Homo sapiens
tttgacctcagcgtc

SEQ ID NO: 461539 - DNA, 15 bp, Homo sapiens
atttgacctcagcgt

SEQ ID NO: 461540 - DNA, 15 bp, Homo sapiens
catttgacctcagcg

SEQ ID NO: 461541 - DNA, 15 bp, Homo sapiens
ccatttgacctcagc

SEQ ID NO: 461542 - DNA, 15 bp, Homo sapiens
gccatttgacctcag

SEQ ID NO: 461543 - DNA, 15 bp, Homo sapiens
agccatttgacctca

SEQ ID NO: 461544 - DNA, 15 bp, Homo sapiens
gagccatttgacctc

SEQ ID NO: 461545 - DNA, 15 bp, Homo sapiens
tgagccatttgacct

SEQ ID NO: 461546 - DNA, 15 bp, Homo sapiens
ttgagccatttgacc

SEQ ID NO: 461547 - DNA, 15 bp, Homo sapiens
cttgagccatttgac

SEQ ID NO: 461548 - DNA, 15 bp, Homo sapiens
tcttgagccatttga

SEQ ID NO: 461549 - DNA, 15 bp, Homo sapiens
ttcttgagccatttg

SEQ ID NO: 461550 - DNA, 15 bp, Homo sapiens
attcttgagccattt

SEQ ID NO: 461551 - DNA, 15 bp, Homo sapiens
cattcttgagccatt

SEQ ID NO: 461552 - DNA, 15 bp, Homo sapiens
ccattcttgagccat

SEQ ID NO: 461553 - DNA, 15 bp, Homo sapiens
gccattcttgagcca

SEQ ID NO: 461554 - DNA, 15 bp, Homo sapiens
ggccattcttgagcc

SEQ ID NO: 461555 - DNA, 15 bp, Homo sapiens
tggccattcttgagc

SEQ ID NO: 461556 - DNA, 15 bp, Homo sapiens
ctggccattcttgag

SEQ ID NO: 461557 - DNA, 15 bp, Homo sapiens
cctggccattcttga

SEQ ID NO: 461558 - DNA, 15 bp, Homo sapiens
tcctggccattcttg

SEQ ID NO: 461559 - DNA, 15 bp, Homo sapiens
ctcctggccattctt

SEQ ID NO: 461560 - DNA, 15 bp, Homo sapiens
tctcctggccattct

SEQ ID NO: 461561 - DNA, 15 bp, Homo sapiens
atctcctggccattc

SEQ ID NO: 461562 - DNA, 15 bp, Homo sapiens
gatctcctggccatt

SEQ ID NO: 461563 - DNA, 15 bp, Homo sapiens
ggatctcctggccat

SEQ ID NO: 461564 - DNA, 15 bp, Homo sapiens
tggatctcctggcca

SEQ ID NO: 461565 - DNA, 15 bp, Homo sapiens
ctggatctcctggcc

SEQ ID NO: 461566 - DNA, 15 bp, Homo sapiens
tctggatctcctggc

SEQ ID NO: 461567 - DNA, 15 bp, Homo sapiens
atctggatctcctgg

SEQ ID NO: 461568 - DNA, 15 bp, Homo sapiens
catctggatctcctg

SEQ ID NO: 461569 - DNA, 15 bp, Homo sapiens
tcatctggatctcct

SEQ ID NO: 461570 - DNA, 15 bp, Homo sapiens
ctcatctggatctcc

SEQ ID NO: 461571 - DNA, 15 bp, Homo sapiens
gctcatctggatctc

SEQ ID NO: 461572 - DNA, 15 bp, Homo sapiens
cgctcatctggatct

SEQ ID NO: 461573 - DNA, 15 bp, Homo sapiens
ccgctcatctggatc

SEQ ID NO: 461574 - DNA, 15 bp, Homo sapiens
gccgctcatctggat

SEQ ID NO: 461575 - DNA, 15 bp, Homo sapiens
tgccgctcatctgga

SEQ ID NO: 461576 - DNA, 15 bp, Homo sapiens
ctgccgctcatctgg

SEQ ID NO: 461577 - DNA, 15 bp, Homo sapiens
cctgccgctcatctg

SEQ ID NO: 461578 - DNA, 15 bp, Homo sapiens
acctgccgctcatct

SEQ ID NO: 461579 - DNA, 15 bp, Homo sapiens
cacctgccgctcatc

SEQ ID NO: 461580 - DNA, 15 bp, Homo sapiens
gcacctgccgctcat

SEQ ID NO: 461581 - DNA, 15 bp, Homo sapiens
tgcacctgccgctca

SEQ ID NO: 461582 - DNA, 15 bp, Homo sapiens
ctgcacctgccgctc

SEQ ID NO: 461583 - DNA, 15 bp, Homo sapiens
gctgcacctgccgct

SEQ ID NO: 461584 - DNA, 15 bp, Homo sapiens
ggctgcacctgccgc

SEQ ID NO: 461585 - DNA, 15 bp, Homo sapiens
aggctgcacctgccg

SEQ ID NO: 461586 - DNA, 15 bp, Homo sapiens
caggctgcacctgcc

SEQ ID NO: 461587 - DNA, 15 bp, Homo sapiens
ccaggctgcacctgc

SEQ ID NO: 461588 - DNA, 15 bp, Homo sapiens
cccaggctgcacctg

SEQ ID NO: 461589 - DNA, 15 bp, Homo sapiens
ccccaggctgcacct

SEQ ID NO: 461590 - DNA, 15 bp, Homo sapiens
accccaggctgcacc

SEQ ID NO: 461591 - DNA, 15 bp, Homo sapiens
caccccaggctgcac

SEQ ID NO: 461592 - DNA, 15 bp, Homo sapiens
ccaccccaggctgca

SEQ ID NO: 461593 - DNA, 15 bp, Homo sapiens
cccaccccaggctgc

SEQ ID NO: 461594 - DNA, 15 bp, Homo sapiens
ccccaccccaggctg

SEQ ID NO: 461595 - DNA, 15 bp, Homo sapiens
tccccaccccaggct

SEQ ID NO: 461596 - DNA, 15 bp, Homo sapiens
ctccccaccccaggc

SEQ ID NO: 461597 - DNA, 15 bp, Homo sapiens
cctccccaccccagg

SEQ ID NO: 461598 - DNA, 15 bp, Homo sapiens
ccctccccaccccag

SEQ ID NO: 461599 - DNA, 15 bp, Homo sapiens
cccctccccacccca

SEQ ID NO: 461600 - DNA, 15 bp, Homo sapiens
ccccctccccacccc

SEQ ID NO: 461601 - DNA, 15 bp, Homo sapiens
cccccctccccaccc

SEQ ID NO: 461602 - DNA, 15 bp, Homo sapiens
gcccccctccccacc

SEQ ID NO: 461603 - DNA, 15 bp, Homo sapiens
agcccccctccccac

SEQ ID NO: 461604 - DNA, 15 bp, Homo sapiens
gagcccccctcccca

SEQ ID NO: 461605 - DNA, 15 bp, Homo sapiens
cgagcccccctcccc

SEQ ID NO: 461606 - DNA, 15 bp, Homo sapiens
ccgagcccccctccc

SEQ ID NO: 461607 - DNA, 15 bp, Homo sapiens
cccgagcccccctcc

SEQ ID NO: 461608 - DNA, 15 bp, Homo sapiens
acccgagcccccctc

SEQ ID NO: 461609 - DNA, 15 bp, Homo sapiens
cacccgagcccccct

SEQ ID NO: 461610 - DNA, 15 bp, Homo sapiens
ccacccgagcccccc

SEQ ID NO: 461611 - DNA, 15 bp, Homo sapiens
tccacccgagccccc

SEQ ID NO: 461612 - DNA, 15 bp, Homo sapiens
ctccacccgagcccc

SEQ ID NO: 461613 - DNA, 15 bp, Homo sapiens
cctccacccgagccc

SEQ ID NO: 461614 - DNA, 15 bp, Homo sapiens
acctccacccgagcc

SEQ ID NO: 461615 - DNA, 15 bp, Homo sapiens
cacctccacccgagc

SEQ ID NO: 461616 - DNA, 15 bp, Homo sapiens
ccacctccacccgag

SEQ ID NO: 461617 - DNA, 15 bp, Homo sapiens
cccacctccacccga

SEQ ID NO: 461618 - DNA, 15 bp, Homo sapiens
ccccacctccacccg

SEQ ID NO: 461619 - DNA, 15 bp, Homo sapiens
tccccacctccaccc

SEQ ID NO: 461620 - DNA, 15 bp, Homo sapiens
gtccccacctccacc

SEQ ID NO: 461621 - DNA, 15 bp, Homo sapiens
ggtccccacctccac

SEQ ID NO: 461622 - DNA, 15 bp, Homo sapiens
gggtccccacctcca

SEQ ID NO: 461623 - DNA, 15 bp, Homo sapiens
ggggtccccacctcc

SEQ ID NO: 461624 - DNA, 15 bp, Homo sapiens
gggggtccccacctc

SEQ ID NO: 461625 - DNA, 15 bp, Homo sapiens
tgggggtccccacct

SEQ ID NO: 461626 - DNA, 15 bp, Homo sapiens
atgggggtccccacc

SEQ ID NO: 461627 - DNA, 15 bp, Homo sapiens
tatgggggtccccac

SEQ ID NO: 461628 - DNA, 15 bp, Homo sapiens
ctatgggggtcccca

SEQ ID NO: 461629 - DNA, 15 bp, Homo sapiens
gctatgggggtcccc

SEQ ID NO: 461630 - DNA, 15 bp, Homo sapiens
ggctatgggggtccc

SEQ ID NO: 461631 - DNA, 15 bp, Homo sapiens
aggctatgggggtcc

SEQ ID NO: 461632 - DNA, 15 bp, Homo sapiens
aaggctatgggggtc

SEQ ID NO: 461633 - DNA, 15 bp, Homo sapiens
caaggctatgggggt

SEQ ID NO: 461634 - DNA, 15 bp, Homo sapiens
gcaaggctatggggg

SEQ ID NO: 461635 - DNA, 15 bp, Homo sapiens
ggcaaggctatgggg

SEQ ID NO: 461636 - DNA, 15 bp, Homo sapiens
aggcaaggctatggg

SEQ ID NO: 461637 - DNA, 15 bp, Homo sapiens
gaggcaaggctatgg

SEQ ID NO: 461638 - DNA, 15 bp, Homo sapiens
ggaggcaaggctatg

SEQ ID NO: 461639 - DNA, 15 bp, Homo sapiens
aggaggcaaggctat

SEQ ID NO: 461640 - DNA, 15 bp, Homo sapiens
caggaggcaaggcta

SEQ ID NO: 461641 - DNA, 15 bp, Homo sapiens
gcaggaggcaaggct

SEQ ID NO: 461642 - DNA, 15 bp, Homo sapiens
ggcaggaggcaaggc

SEQ ID NO: 461643 - DNA, 15 bp, Homo sapiens
gggcaggaggcaagg

SEQ ID NO: 461644 - DNA, 15 bp, Homo sapiens
ggggcaggaggcaag

SEQ ID NO: 461645 - DNA, 15 bp, Homo sapiens
aggggcaggaggcaa

SEQ ID NO: 461646 - DNA, 15 bp, Homo sapiens
gaggggcaggaggca

SEQ ID NO: 461647 - DNA, 15 bp, Homo sapiens
agaggggcaggaggc

SEQ ID NO: 461648 - DNA, 15 bp, Homo sapiens
gagaggggcaggagg

SEQ ID NO: 461649 - DNA, 15 bp, Homo sapiens
ggagaggggcaggag

SEQ ID NO: 461650 - DNA, 15 bp, Homo sapiens
tggagaggggcagga

SEQ ID NO: 461651 - DNA, 15 bp, Homo sapiens
gtggagaggggcagg

SEQ ID NO: 461652 - DNA, 15 bp, Homo sapiens
tgtggagaggggcag

SEQ ID NO: 461653 - DNA, 15 bp, Homo sapiens
atgtggagaggggca

SEQ ID NO: 461654 - DNA, 15 bp, Homo sapiens
catgtggagaggggc

SEQ ID NO: 461655 - DNA, 15 bp, Homo sapiens
gcatgtggagagggg

SEQ ID NO: 461656 - DNA, 15 bp, Homo sapiens
cgcatgtggagaggg

SEQ ID NO: 461657 - DNA, 15 bp, Homo sapiens
acgcatgtggagagg

SEQ ID NO: 461658 - DNA, 15 bp, Homo sapiens
tacgcatgtggagag

SEQ ID NO: 461659 - DNA, 15 bp, Homo sapiens
atacgcatgtggaga

SEQ ID NO: 461660 - DNA, 15 bp, Homo sapiens
gatacgcatgtggag

SEQ ID NO: 461661 - DNA, 15 bp, Homo sapiens
agatacgcatgtgga

SEQ ID NO: 461662 - DNA, 15 bp, Homo sapiens
gagatacgcatgtgg

SEQ ID NO: 461663 - DNA, 15 bp, Homo sapiens
agagatacgcatgtg

SEQ ID NO: 461664 - DNA, 15 bp, Homo sapiens
cagagatacgcatgt

SEQ ID NO: 461665 - DNA, 15 bp, Homo sapiens
tcagagatacgcatg

SEQ ID NO: 461666 - DNA, 15 bp, Homo sapiens
gtcagagatacgcat

SEQ ID NO: 461667 - DNA, 15 bp, Homo sapiens
agtcagagatacgca

SEQ ID NO: 461668 - DNA, 15 bp, Homo sapiens
gagtcagagatacgc

SEQ ID NO: 461669 - DNA, 15 bp, Homo sapiens
cgagtcagagatacg

SEQ ID NO: 461670 - DNA, 15 bp, Homo sapiens
ccgagtcagagatac

SEQ ID NO: 461671 - DNA, 15 bp, Homo sapiens
accgagtcagagata

SEQ ID NO: 461672 - DNA, 15 bp, Homo sapiens
caccgagtcagagat

SEQ ID NO: 461673 - DNA, 15 bp, Homo sapiens
acaccgagtcagaga

SEQ ID NO: 461674 - DNA, 15 bp, Homo sapiens
cacaccgagtcagag

SEQ ID NO: 461675 - DNA, 15 bp, Homo sapiens
ccacaccgagtcaga

SEQ ID NO: 461676 - DNA, 15 bp, Homo sapiens
gccacaccgagtcag

SEQ ID NO: 461677 - DNA, 15 bp, Homo sapiens
agccacaccgagtca

SEQ ID NO: 461678 - DNA, 15 bp, Homo sapiens
gagccacaccgagtc

SEQ ID NO: 461679 - DNA, 15 bp, Homo sapiens
agagccacaccgagt

SEQ ID NO: 461680 - DNA, 15 bp, Homo sapiens
gagagccacaccgag

SEQ ID NO: 461681 - DNA, 15 bp, Homo sapiens
tgagagccacaccga

SEQ ID NO: 461682 - DNA, 15 bp, Homo sapiens
ctgagagccacaccg

SEQ ID NO: 461683 - DNA, 15 bp, Homo sapiens
gctgagagccacacc

SEQ ID NO: 461684 - DNA, 15 bp, Homo sapiens
ggctgagagccacac

SEQ ID NO: 461685 - DNA, 15 bp, Homo sapiens
gggctgagagccaca

SEQ ID NO: 461686 - DNA, 15 bp, Homo sapiens
ggggctgagagccac

SEQ ID NO: 461687 - DNA, 15 bp, Homo sapiens
tggggctgagagcca

SEQ ID NO: 461688 - DNA, 15 bp, Homo sapiens
atggggctgagagcc

SEQ ID NO: 461689 - DNA, 15 bp, Homo sapiens
gatggggctgagagc

SEQ ID NO: 461690 - DNA, 15 bp, Homo sapiens
agatggggctgagag

SEQ ID NO: 461691 - DNA, 15 bp, Homo sapiens
gagatggggctgaga

SEQ ID NO: 461692 - DNA, 15 bp, Homo sapiens
agagatggggctgag

SEQ ID NO: 461693 - DNA, 15 bp, Homo sapiens
gagagatggggctga

SEQ ID NO: 461694 - DNA, 15 bp, Homo sapiens
agagagatggggctg

SEQ ID NO: 461695 - DNA, 15 bp, Homo sapiens
cagagagatggggct

SEQ ID NO: 461696 - DNA, 15 bp, Homo sapiens
ccagagagatggggc

SEQ ID NO: 461697 - DNA, 15 bp, Homo sapiens
cccagagagatgggg

SEQ ID NO: 461698 - DNA, 15 bp, Homo sapiens
gcccagagagatggg

SEQ ID NO: 461699 - DNA, 15 bp, Homo sapiens
ggcccagagagatgg

SEQ ID NO: 461700 - DNA, 15 bp, Homo sapiens
aggcccagagagatg

SEQ ID NO: 461701 - DNA, 15 bp, Homo sapiens
taggcccagagagat

SEQ ID NO: 461702 - DNA, 15 bp, Homo sapiens
ttaggcccagagaga

SEQ ID NO: 461703 - DNA, 15 bp, Homo sapiens
attaggcccagagag

SEQ ID NO: 461704 - DNA, 15 bp, Homo sapiens
aattaggcccagaga

SEQ ID NO: 461705 - DNA, 15 bp, Homo sapiens
aaattaggcccagag

SEQ ID NO: 461706 - DNA, 15 bp, Homo sapiens
gaaattaggcccaga

SEQ ID NO: 461707 - DNA, 15 bp, Homo sapiens
ggaaattaggcccag

SEQ ID NO: 461708 - DNA, 15 bp, Homo sapiens
gggaaattaggccca

SEQ ID NO: 461709 - DNA, 15 bp, Homo sapiens
tgggaaattaggccc

SEQ ID NO: 461710 - DNA, 15 bp, Homo sapiens
atgggaaattaggcc

SEQ ID NO: 461711 - DNA, 15 bp, Homo sapiens
gatgggaaattaggc

SEQ ID NO: 461712 - DNA, 15 bp, Homo sapiens
ggatgggaaattagg

SEQ ID NO: 461713 - DNA, 15 bp, Homo sapiens
aggatgggaaattag

SEQ ID NO: 461714 - DNA, 15 bp, Homo sapiens
aaggatgggaaatta

SEQ ID NO: 461715 - DNA, 15 bp, Homo sapiens
aaaggatgggaaatt

SEQ ID NO: 461716 - DNA, 15 bp, Homo sapiens
aaaaggatgggaaat

SEQ ID NO: 461717 - DNA, 15 bp, Homo sapiens
caaaaggatgggaaa

SEQ ID NO: 461718 - DNA, 15 bp, Homo sapiens
gcaaaaggatgggaa

SEQ ID NO: 461719 - DNA, 15 bp, Homo sapiens
agcaaaaggatggga

SEQ ID NO: 461720 - DNA, 15 bp, Homo sapiens
gagcaaaaggatggg

SEQ ID NO: 461721 - DNA, 15 bp, Homo sapiens
ggagcaaaaggatgg

SEQ ID NO: 461722 - DNA, 15 bp, Homo sapiens
aggagcaaaaggatg

SEQ ID NO: 461723 - DNA, 15 bp, Homo sapiens
caggagcaaaaggat

SEQ ID NO: 461724 - DNA, 15 bp, Homo sapiens
gcaggagcaaaagga

SEQ ID NO: 461725 - DNA, 15 bp, Homo sapiens
ggcaggagcaaaagg

SEQ ID NO: 461726 - DNA, 15 bp, Homo sapiens
cggcaggagcaaaag

SEQ ID NO: 461727 - DNA, 15 bp, Homo sapiens
ccggcaggagcaaaa

SEQ ID NO: 461728 - DNA, 15 bp, Homo sapiens
accggcaggagcaaa

SEQ ID NO: 461729 - DNA, 15 bp, Homo sapiens
gaccggcaggagcaa

SEQ ID NO: 461730 - DNA, 15 bp, Homo sapiens
ggaccggcaggagca

SEQ ID NO: 461731 - DNA, 15 bp, Homo sapiens
gggaccggcaggagc

SEQ ID NO: 461732 - DNA, 15 bp, Homo sapiens
agggaccggcaggag

SEQ ID NO: 461733 - DNA, 15 bp, Homo sapiens
gagggaccggcagga

SEQ ID NO: 461734 - DNA, 15 bp, Homo sapiens
agagggaccggcagg

SEQ ID NO: 461735 - DNA, 15 bp, Homo sapiens
gagagggaccggcag

SEQ ID NO: 461736 - DNA, 15 bp, Homo sapiens
agagagggaccggca

SEQ ID NO: 461737 - DNA, 15 bp, Homo sapiens
gagagagggaccggc

SEQ ID NO: 461738 - DNA, 15 bp, Homo sapiens
agagagagggaccgg

SEQ ID NO: 461739 - DNA, 15 bp, Homo sapiens
gagagagagggaccg

SEQ ID NO: 461740 - DNA, 15 bp, Homo sapiens
agagagagagggacc

SEQ ID NO: 461741 - DNA, 15 bp, Homo sapiens
gagagagagagggac

SEQ ID NO: 461742 - DNA, 15 bp, Homo sapiens
agagagagagaggga

SEQ ID NO: 461743 - DNA, 15 bp, Homo sapiens
gagagagagagaggg

SEQ ID NO: 461744 - DNA, 15 bp, Homo sapiens
ggagagagagagagg

SEQ ID NO: 461745 - DNA, 15 bp, Homo sapiens
aggagagagagagag

SEQ ID NO: 461746 - DNA, 15 bp, Homo sapiens
aaggagagagagaga

SEQ ID NO: 461747 - DNA, 15 bp, Homo sapiens
aaaggagagagagag

SEQ ID NO: 461748 - DNA, 15 bp, Homo sapiens
aaaaggagagagaga

SEQ ID NO: 461749 - DNA, 15 bp, Homo sapiens
caaaaggagagagag

SEQ ID NO: 461750 - DNA, 15 bp, Homo sapiens
acaaaaggagagaga

SEQ ID NO: 461751 - DNA, 15 bp, Homo sapiens
gacaaaaggagagag

SEQ ID NO: 461752 - DNA, 15 bp, Homo sapiens
agacaaaaggagaga

SEQ ID NO: 461753 - DNA, 15 bp, Homo sapiens
gagacaaaaggagag

SEQ ID NO: 461754 - DNA, 15 bp, Homo sapiens
cgagacaaaaggaga

SEQ ID NO: 461755 - DNA, 15 bp, Homo sapiens
ccgagacaaaaggag

SEQ ID NO: 461756 - DNA, 15 bp, Homo sapiens
cccgagacaaaagga

SEQ ID NO: 461757 - DNA, 15 bp, Homo sapiens
gcccgagacaaaagg

SEQ ID NO: 461758 - DNA, 15 bp, Homo sapiens
agcccgagacaaaag

SEQ ID NO: 461759 - DNA, 15 bp, Homo sapiens
gagcccgagacaaaa

SEQ ID NO: 461760 - DNA, 15 bp, Homo sapiens
tgagcccgagacaaa

SEQ ID NO: 461761 - DNA, 15 bp, Homo sapiens
gtgagcccgagacaa

SEQ ID NO: 461762 - DNA, 15 bp, Homo sapiens
agtgagcccgagaca

SEQ ID NO: 461763 - DNA, 15 bp, Homo sapiens
aagtgagcccgagac

SEQ ID NO: 461764 - DNA, 15 bp, Homo sapiens
gaagtgagcccgaga

SEQ ID NO: 461765 - DNA, 15 bp, Homo sapiens
ggaagtgagcccgag

SEQ ID NO: 461766 - DNA, 15 bp, Homo sapiens
aggaagtgagcccga

SEQ ID NO: 461767 - DNA, 15 bp, Homo sapiens
gaggaagtgagcccg

SEQ ID NO: 461768 - DNA, 15 bp, Homo sapiens
ggaggaagtgagccc

SEQ ID NO: 461769 - DNA, 15 bp, Homo sapiens
gggaggaagtgagcc

SEQ ID NO: 461770 - DNA, 15 bp, Homo sapiens
cgggaggaagtgagc

SEQ ID NO: 461771 - DNA, 15 bp, Homo sapiens
acgggaggaagtgag

SEQ ID NO: 461772 - DNA, 15 bp, Homo sapiens
gacgggaggaagtga

SEQ ID NO: 461773 - DNA, 15 bp, Homo sapiens
cgacgggaggaagtg

SEQ ID NO: 461774 - DNA, 15 bp, Homo sapiens
ccgacgggaggaagt

SEQ ID NO: 461775 - DNA, 15 bp, Homo sapiens
cccgacgggaggaag

SEQ ID NO: 461776 - DNA, 15 bp, Homo sapiens
tcccgacgggaggaa

SEQ ID NO: 461777 - DNA, 15 bp, Homo sapiens
ttcccgacgggagga

SEQ ID NO: 461778 - DNA, 15 bp, Homo sapiens
gttcccgacgggagg

SEQ ID NO: 461779 - DNA, 15 bp, Homo sapiens
tgttcccgacgggag

SEQ ID NO: 461780 - DNA, 15 bp, Homo sapiens
gtgttcccgacggga

SEQ ID NO: 461781 - DNA, 15 bp, Homo sapiens
agtgttcccgacggg

SEQ ID NO: 461782 - DNA, 15 bp, Homo sapiens
aagtgttcccgacgg

SEQ ID NO: 461783 - DNA, 15 bp, Homo sapiens
gaagtgttcccgacg

SEQ ID NO: 461784 - DNA, 15 bp, Homo sapiens
tgaagtgttcccgac

SEQ ID NO: 461785 - DNA, 15 bp, Homo sapiens
ttgaagtgttcccga

SEQ ID NO: 461786 - DNA, 15 bp, Homo sapiens
gttgaagtgttcccg

SEQ ID NO: 461787 - DNA, 15 bp, Homo sapiens
cgttgaagtgttccc

SEQ ID NO: 461788 - DNA, 15 bp, Homo sapiens
ccgttgaagtgttcc

SEQ ID NO: 461789 - DNA, 15 bp, Homo sapiens
gccgttgaagtgttc

SEQ ID NO: 461790 - DNA, 15 bp, Homo sapiens
ggccgttgaagtgtt

SEQ ID NO: 461791 - DNA, 15 bp, Homo sapiens
gggccgttgaagtgt

SEQ ID NO: 461792 - DNA, 15 bp, Homo sapiens
ggggccgttgaagtg

SEQ ID NO: 461793 - DNA, 15 bp, Homo sapiens
aggggccgttgaagt

SEQ ID NO: 461794 - DNA, 15 bp, Homo sapiens
aaggggccgttgaag

SEQ ID NO: 461795 - DNA, 15 bp, Homo sapiens
gaaggggccgttgaa

SEQ ID NO: 461796 - DNA, 15 bp, Homo sapiens
agaaggggccgttga

SEQ ID NO: 461797 - DNA, 15 bp, Homo sapiens
cagaaggggccgttg

SEQ ID NO: 461798 - DNA, 15 bp, Homo sapiens
acagaaggggccgtt

SEQ ID NO: 461799 - DNA, 15 bp, Homo sapiens
aacagaaggggccgt

SEQ ID NO: 461800 - DNA, 15 bp, Homo sapiens
gaacagaaggggccg

SEQ ID NO: 461801 - DNA, 15 bp, Homo sapiens
agaacagaaggggcc

SEQ ID NO: 461802 - DNA, 15 bp, Homo sapiens
tagaacagaaggggc

SEQ ID NO: 461803 - DNA, 15 bp, Homo sapiens
gtagaacagaagggg

SEQ ID NO: 461804 - DNA, 15 bp, Homo sapiens
tgtagaacagaaggg

SEQ ID NO: 461805 - DNA, 15 bp, Homo sapiens
ctgtagaacagaagg

SEQ ID NO: 461806 - DNA, 15 bp, Homo sapiens
gctgtagaacagaag

SEQ ID NO: 461807 - DNA, 15 bp, Homo sapiens
tgctgtagaacagaa

SEQ ID NO: 461808 - DNA, 15 bp, Homo sapiens
ttgctgtagaacaga

SEQ ID NO: 461809 - DNA, 15 bp, Homo sapiens
cttgctgtagaacag

SEQ ID NO: 461810 - DNA, 15 bp, Homo sapiens
acttgctgtagaaca

SEQ ID NO: 461811 - DNA, 15 bp, Homo sapiens
tacttgctgtagaac

SEQ ID NO: 461812 - DNA, 15 bp, Homo sapiens
ttacttgctgtagaa

SEQ ID NO: 461813 - DNA, 15 bp, Homo sapiens
cttacttgctgtaga

SEQ ID NO: 461814 - DNA, 15 bp, Homo sapiens
acttacttgctgtag

SEQ ID NO: 461815 - DNA, 15 bp, Homo sapiens
aacttacttgctgta

SEQ ID NO: 461816 - DNA, 15 bp, Homo sapiens
gaacttacttgctgt

SEQ ID NO: 461817 - DNA, 15 bp, Homo sapiens
ggaacttacttgctg

SEQ ID NO: 461818 - DNA, 15 bp, Homo sapiens
gggaacttacttgct

SEQ ID NO: 461819 - DNA, 15 bp, Homo sapiens
ggggaacttacttgc

SEQ ID NO: 461820 - DNA, 15 bp, Homo sapiens
aggggaacttacttg

SEQ ID NO: 461821 - DNA, 15 bp, Homo sapiens
gaggggaacttactt

SEQ ID NO: 461822 - DNA, 15 bp, Homo sapiens
agaggggaacttact

SEQ ID NO: 461823 - DNA, 15 bp, Homo sapiens
cagaggggaacttac

SEQ ID NO: 461824 - DNA, 15 bp, Homo sapiens
ccagaggggaactta

SEQ ID NO: 461825 - DNA, 15 bp, Homo sapiens
tccagaggggaactt

SEQ ID NO: 461826 - DNA, 15 bp, Homo sapiens
atccagaggggaact

SEQ ID NO: 461827 - DNA, 15 bp, Homo sapiens
catccagaggggaac

SEQ ID NO: 461828 - DNA, 15 bp, Homo sapiens
ccatccagaggggaa

SEQ ID NO: 461829 - DNA, 15 bp, Homo sapiens
gccatccagagggga

SEQ ID NO: 461830 - DNA, 15 bp, Homo sapiens
agccatccagagggg

SEQ ID NO: 461831 - DNA, 15 bp, Homo sapiens
aagccatccagaggg

SEQ ID NO: 461832 - DNA, 15 bp, Homo sapiens
caagccatccagagg

SEQ ID NO: 461833 - DNA, 15 bp, Homo sapiens
ccaagccatccagag

SEQ ID NO: 461834 - DNA, 15 bp, Homo sapiens
cccaagccatccaga

SEQ ID NO: 461835 - DNA, 15 bp, Homo sapiens
ccccaagccatccag

SEQ ID NO: 461836 - DNA, 15 bp, Homo sapiens
accccaagccatcca

SEQ ID NO: 461837 - DNA, 15 bp, Homo sapiens
caccccaagccatcc

SEQ ID NO: 461838 - DNA, 15 bp, Homo sapiens
ccaccccaagccatc

SEQ ID NO: 461839 - DNA, 15 bp, Homo sapiens
cccaccccaagccat

SEQ ID NO: 461840 - DNA, 15 bp, Homo sapiens
ccccaccccaagcca

SEQ ID NO: 461841 - DNA, 15 bp, Homo sapiens
cccccaccccaagcc

SEQ ID NO: 461842 - DNA, 15 bp, Homo sapiens
ccccccaccccaagc

SEQ ID NO: 461843 - DNA, 15 bp, Homo sapiens
gccccccaccccaag

SEQ ID NO: 461844 - DNA, 15 bp, Homo sapiens
tgccccccaccccaa

SEQ ID NO: 461845 - DNA, 15 bp, Homo sapiens
gtgccccccacccca

SEQ ID NO: 461846 - DNA, 15 bp, Homo sapiens
tgtgccccccacccc

SEQ ID NO: 461847 - DNA, 15 bp, Homo sapiens
ctgtgccccccaccc

SEQ ID NO: 461848 - DNA, 15 bp, Homo sapiens
cctgtgccccccacc

SEQ ID NO: 461849 - DNA, 15 bp, Homo sapiens
ccctgtgccccccac

SEQ ID NO: 461850 - DNA, 15 bp, Homo sapiens
tccctgtgcccccca

SEQ ID NO: 461851 - DNA, 15 bp, Homo sapiens
atccctgtgcccccc

SEQ ID NO: 461852 - DNA, 15 bp, Homo sapiens
aatccctgtgccccc

SEQ ID NO: 461853 - DNA, 15 bp, Homo sapiens
taatccctgtgcccc

SEQ ID NO: 461854 - DNA, 15 bp, Homo sapiens
ataatccctgtgccc

SEQ ID NO: 461855 - DNA, 15 bp, Homo sapiens
gataatccctgtgcc

SEQ ID NO: 461856 - DNA, 15 bp, Homo sapiens
tgataatccctgtgc

SEQ ID NO: 461857 - DNA, 15 bp, Homo sapiens
atgataatccctgtg

SEQ ID NO: 461858 - DNA, 15 bp, Homo sapiens
catgataatccctgt

SEQ ID NO: 461859 - DNA, 15 bp, Homo sapiens
ccatgataatccctg

SEQ ID NO: 461860 - DNA, 15 bp, Homo sapiens
cccatgataatccct

SEQ ID NO: 461861 - DNA, 15 bp, Homo sapiens
ccccatgataatccc

SEQ ID NO: 461862 - DNA, 15 bp, Homo sapiens
gccccatgataatcc

SEQ ID NO: 461863 - DNA, 15 bp, Homo sapiens
cgccccatgataatc

SEQ ID NO: 461864 - DNA, 15 bp, Homo sapiens
gcgccccatgataat

SEQ ID NO: 461865 - DNA, 15 bp, Homo sapiens
tgcgccccatgataa

SEQ ID NO: 461866 - DNA, 15 bp, Homo sapiens
gtgcgccccatgata

SEQ ID NO: 461867 - DNA, 15 bp, Homo sapiens
agtgcgccccatgat

SEQ ID NO: 461868 - DNA, 15 bp, Homo sapiens
cagtgcgccccatga

SEQ ID NO: 461869 - DNA, 15 bp, Homo sapiens
ccagtgcgccccatg

SEQ ID NO: 461870 - DNA, 15 bp, Homo sapiens
cccagtgcgccccat

SEQ ID NO: 461871 - DNA, 15 bp, Homo sapiens
gcccagtgcgcccca

SEQ ID NO: 461872 - DNA, 15 bp, Homo sapiens
ggcccagtgcgcccc

SEQ ID NO: 461873 - DNA, 15 bp, Homo sapiens
gggcccagtgcgccc

SEQ ID NO: 461874 - DNA, 15 bp, Homo sapiens
cgggcccagtgcgcc

SEQ ID NO: 461875 - DNA, 15 bp, Homo sapiens
ccgggcccagtgcgc

SEQ ID NO: 461876 - DNA, 15 bp, Homo sapiens
tccgggcccagtgcg

SEQ ID NO: 461877 - DNA, 15 bp, Homo sapiens
ctccgggcccagtgc

SEQ ID NO: 461878 - DNA, 15 bp, Homo sapiens
cctccgggcccagtg

SEQ ID NO: 461879 - DNA, 15 bp, Homo sapiens
ccctccgggcccagt

SEQ ID NO: 461880 - DNA, 15 bp, Homo sapiens
cccctccgggcccag

SEQ ID NO: 461881 - DNA, 15 bp, Homo sapiens
acccctccgggccca

SEQ ID NO: 461882 - DNA, 15 bp, Homo sapiens
cacccctccgggccc

SEQ ID NO: 461883 - DNA, 15 bp, Homo sapiens
acacccctccgggcc

SEQ ID NO: 461884 - DNA, 15 bp, Homo sapiens
gacacccctccgggc

SEQ ID NO: 461885 - DNA, 15 bp, Homo sapiens
ggacacccctccggg

SEQ ID NO: 461886 - DNA, 15 bp, Homo sapiens
cggacacccctccgg

SEQ ID NO: 461887 - DNA, 15 bp, Homo sapiens
gcggacacccctccg

SEQ ID NO: 461888 - DNA, 15 bp, Homo sapiens
tgcggacacccctcc

SEQ ID NO: 461889 - DNA, 15 bp, Homo sapiens
ctgcggacacccctc

SEQ ID NO: 461890 - DNA, 15 bp, Homo sapiens
gctgcggacacccct

SEQ ID NO: 461891 - DNA, 15 bp, Homo sapiens
agctgcggacacccc

SEQ ID NO: 461892 - DNA, 15 bp, Homo sapiens
aagctgcggacaccc

SEQ ID NO: 461893 - DNA, 15 bp, Homo sapiens
aaagctgcggacacc

SEQ ID NO: 461894 - DNA, 15 bp, Homo sapiens
gaaagctgcggacac

SEQ ID NO: 461895 - DNA, 15 bp, Homo sapiens
ggaaagctgcggaca

SEQ ID NO: 461896 - DNA, 15 bp, Homo sapiens
aggaaagctgcggac

SEQ ID NO: 461897 - DNA, 15 bp, Homo sapiens
caggaaagctgcgga

SEQ ID NO: 461898 - DNA, 15 bp, Homo sapiens
gcaggaaagctgcgg

SEQ ID NO: 461899 - DNA, 15 bp, Homo sapiens
ggcaggaaagctgcg

SEQ ID NO: 461900 - DNA, 15 bp, Homo sapiens
tggcaggaaagctgc

SEQ ID NO: 461901 - DNA, 15 bp, Homo sapiens
gtggcaggaaagctg

SEQ ID NO: 461902 - DNA, 15 bp, Homo sapiens
agtggcaggaaagct

SEQ ID NO: 461903 - DNA, 15 bp, Homo sapiens
aagtggcaggaaagc

SEQ ID NO: 461904 - DNA, 15 bp, Homo sapiens
gaagtggcaggaaag

SEQ ID NO: 461905 - DNA, 15 bp, Homo sapiens
ggaagtggcaggaaa

SEQ ID NO: 461906 - DNA, 15 bp, Homo sapiens
gggaagtggcaggaa

SEQ ID NO: 461907 - DNA, 15 bp, Homo sapiens
agggaagtggcagga

SEQ ID NO: 461908 - DNA, 15 bp, Homo sapiens
cagggaagtggcagg

SEQ ID NO: 461909 - DNA, 15 bp, Homo sapiens
gcagggaagtggcag

SEQ ID NO: 461910 - DNA, 15 bp, Homo sapiens
cgcagggaagtggca

SEQ ID NO: 461911 - DNA, 15 bp, Homo sapiens
ccgcagggaagtggc

SEQ ID NO: 461912 - DNA, 15 bp, Homo sapiens
gccgcagggaagtgg

SEQ ID NO: 461913 - DNA, 15 bp, Homo sapiens
ggccgcagggaagtg

SEQ ID NO: 461914 - DNA, 15 bp, Homo sapiens
gggccgcagggaagt

SEQ ID NO: 461915 - DNA, 15 bp, Homo sapiens
ggggccgcagggaag

SEQ ID NO: 461916 - DNA, 15 bp, Homo sapiens
gggggccgcagggaa

SEQ ID NO: 461917 - DNA, 15 bp, Homo sapiens
tgggggccgcaggga

SEQ ID NO: 461918 - DNA, 15 bp, Homo sapiens
gtgggggccgcaggg

SEQ ID NO: 461919 - DNA, 15 bp, Homo sapiens
ggtgggggccgcagg

SEQ ID NO: 461920 - DNA, 15 bp, Homo sapiens
gggtgggggccgcag

SEQ ID NO: 461921 - DNA, 15 bp, Homo sapiens
tgggtgggggccgca

SEQ ID NO: 461922 - DNA, 15 bp, Homo sapiens
ctgggtgggggccgc

SEQ ID NO: 461923 - DNA, 15 bp, Homo sapiens
cctgggtgggggccg

SEQ ID NO: 461924 - DNA, 15 bp, Homo sapiens
acctgggtgggggcc

SEQ ID NO: 461925 - DNA, 15 bp, Homo sapiens
tacctgggtgggggc

SEQ ID NO: 461926 - DNA, 15 bp, Homo sapiens
gtacctgggtggggg

SEQ ID NO: 461927 - DNA, 15 bp, Homo sapiens
tgtacctgggtgggg

SEQ ID NO: 461928 - DNA, 15 bp, Homo sapiens
atgtacctgggtggg

SEQ ID NO: 461929 - DNA, 15 bp, Homo sapiens
gatgtacctgggtgg

SEQ ID NO: 461930 - DNA, 15 bp, Homo sapiens
agatgtacctgggtg

SEQ ID NO: 461931 - DNA, 15 bp, Homo sapiens
aagatgtacctgggt

SEQ ID NO: 461932 - DNA, 15 bp, Homo sapiens
aaagatgtacctggg

SEQ ID NO: 461933 - DNA, 15 bp, Homo sapiens
caaagatgtacctgg

SEQ ID NO: 461934 - DNA, 15 bp, Homo sapiens
tcaaagatgtacctg

SEQ ID NO: 461935 - DNA, 15 bp, Homo sapiens
ctcaaagatgtacct

SEQ ID NO: 461936 - DNA, 15 bp, Homo sapiens
actcaaagatgtacc

SEQ ID NO: 461937 - DNA, 15 bp, Homo sapiens
gactcaaagatgtac

SEQ ID NO: 461938 - DNA, 15 bp, Homo sapiens
ggactcaaagatgta

SEQ ID NO: 461939 - DNA, 15 bp, Homo sapiens
tggactcaaagatgt

SEQ ID NO: 461940 - DNA, 15 bp, Homo sapiens
atggactcaaagatg

SEQ ID NO: 461941 - DNA, 15 bp, Homo sapiens
gatggactcaaagat

SEQ ID NO: 461942 - DNA, 15 bp, Homo sapiens
cgatggactcaaaga

SEQ ID NO: 461943 - DNA, 15 bp, Homo sapiens
ccgatggactcaaag

SEQ ID NO: 461944 - DNA, 15 bp, Homo sapiens
accgatggactcaaa

SEQ ID NO: 461945 - DNA, 15 bp, Homo sapiens
caccgatggactcaa

SEQ ID NO: 461946 - DNA, 15 bp, Homo sapiens
gcaccgatggactca

SEQ ID NO: 461947 - DNA, 15 bp, Homo sapiens
ggcaccgatggactc

SEQ ID NO: 461948 - DNA, 15 bp, Homo sapiens
tggcaccgatggact

SEQ ID NO: 461949 - DNA, 15 bp, Homo sapiens
ttggcaccgatggac

SEQ ID NO: 461950 - DNA, 15 bp, Homo sapiens
cttggcaccgatgga

SEQ ID NO: 461951 - DNA, 15 bp, Homo sapiens
gcttggcaccgatgg

SEQ ID NO: 461952 - DNA, 15 bp, Homo sapiens
cgcttggcaccgatg

SEQ ID NO: 461953 - DNA, 15 bp, Homo sapiens
acgcttggcaccgat

SEQ ID NO: 461954 - DNA, 15 bp, Homo sapiens
tacgcttggcaccga

SEQ ID NO: 461955 - DNA, 15 bp, Homo sapiens
gtacgcttggcaccg

SEQ ID NO: 461956 - DNA, 15 bp, Homo sapiens
ggtacgcttggcacc

SEQ ID NO: 461957 - DNA, 15 bp, Homo sapiens
gggtacgcttggcac

SEQ ID NO: 461958 - DNA, 15 bp, Homo sapiens
agggtacgcttggca

SEQ ID NO: 461959 - DNA, 15 bp, Homo sapiens
cagggtacgcttggc

SEQ ID NO: 461960 - DNA, 15 bp, Homo sapiens
tcagggtacgcttgg

SEQ ID NO: 461961 - DNA, 15 bp, Homo sapiens
gtcagggtacgcttg

SEQ ID NO: 461962 - DNA, 15 bp, Homo sapiens
ggtcagggtacgctt

SEQ ID NO: 461963 - DNA, 15 bp, Homo sapiens
tggtcagggtacgct

SEQ ID NO: 461964 - DNA, 15 bp, Homo sapiens
atggtcagggtacgc

SEQ ID NO: 461965 - DNA, 15 bp, Homo sapiens
gatggtcagggtacg

SEQ ID NO: 461966 - DNA, 15 bp, Homo sapiens
tgatggtcagggtac

SEQ ID NO: 461967 - DNA, 15 bp, Homo sapiens
ctgatggtcagggta

SEQ ID NO: 461968 - DNA, 15 bp, Homo sapiens
gctgatggtcagggt

SEQ ID NO: 461969 - DNA, 15 bp, Homo sapiens
ggctgatggtcaggg

SEQ ID NO: 461970 - DNA, 15 bp, Homo sapiens
tggctgatggtcagg

SEQ ID NO: 461971 - DNA, 15 bp, Homo sapiens
ctggctgatggtcag

SEQ ID NO: 461972 - DNA, 15 bp, Homo sapiens
actggctgatggtca

SEQ ID NO: 461973 - DNA, 15 bp, Homo sapiens
cactggctgatggtc

SEQ ID NO: 461974 - DNA, 15 bp, Homo sapiens
gcactggctgatggt

SEQ ID NO: 461975 - DNA, 15 bp, Homo sapiens
agcactggctgatgg

SEQ ID NO: 461976 - DNA, 15 bp, Homo sapiens
gagcactggctgatg

SEQ ID NO: 461977 - DNA, 15 bp, Homo sapiens
tgagcactggctgat

SEQ ID NO: 461978 - DNA, 15 bp, Homo sapiens
atgagcactggctga

SEQ ID NO: 461979 - DNA, 15 bp, Homo sapiens
aatgagcactggctg

SEQ ID NO: 461980 - DNA, 15 bp, Homo sapiens
caatgagcactggct

SEQ ID NO: 461981 - DNA, 15 bp, Homo sapiens
ccaatgagcactggc

SEQ ID NO: 461982 - DNA, 15 bp, Homo sapiens
gccaatgagcactgg

SEQ ID NO: 461983 - DNA, 15 bp, Homo sapiens
cgccaatgagcactg

SEQ ID NO: 461984 - DNA, 15 bp, Homo sapiens
ccgccaatgagcact

SEQ ID NO: 461985 - DNA, 15 bp, Homo sapiens
tccgccaatgagcac

SEQ ID NO: 461986 - DNA, 15 bp, Homo sapiens
gtccgccaatgagca

SEQ ID NO: 461987 - DNA, 15 bp, Homo sapiens
cgtccgccaatgagc

SEQ ID NO: 461988 - DNA, 15 bp, Homo sapiens
tcgtccgccaatgag

SEQ ID NO: 461989 - DNA, 15 bp, Homo sapiens
gtcgtccgccaatga

SEQ ID NO: 461990 - DNA, 15 bp, Homo sapiens
cgtcgtccgccaatg

SEQ ID NO: 461991 - DNA, 15 bp, Homo sapiens
gcgtcgtccgccaat

SEQ ID NO: 461992 - DNA, 15 bp, Homo sapiens
tgcgtcgtccgccaa

SEQ ID NO: 461993 - DNA, 15 bp, Homo sapiens
ctgcgtcgtccgcca

SEQ ID NO: 461994 - DNA, 15 bp, Homo sapiens
gctgcgtcgtccgcc

SEQ ID NO: 461995 - DNA, 15 bp, Homo sapiens
ggctgcgtcgtccgc

SEQ ID NO: 461996 - DNA, 15 bp, Homo sapiens
aggctgcgtcgtccg

SEQ ID NO: 461997 - DNA, 15 bp, Homo sapiens
taggctgcgtcgtcc

SEQ ID NO: 461998 - DNA, 15 bp, Homo sapiens
gtaggctgcgtcgtc

SEQ ID NO: 461999 - DNA, 15 bp, Homo sapiens
ggtaggctgcgtcgt

SEQ ID NO: 462000 - DNA, 15 bp, Homo sapiens
tggtaggctgcgtcg

SEQ ID NO: 462001 - DNA, 15 bp, Homo sapiens
ctggtaggctgcgtc

SEQ ID NO: 462002 - DNA, 15 bp, Homo sapiens
actggtaggctgcgt

SEQ ID NO: 462003 - DNA, 15 bp, Homo sapiens
cactggtaggctgcg

SEQ ID NO: 462004 - DNA, 15 bp, Homo sapiens
gcactggtaggctgc

SEQ ID NO: 462005 - DNA, 15 bp, Homo sapiens
cgcactggtaggctg

SEQ ID NO: 462006 - DNA, 15 bp, Homo sapiens
acgcactggtaggct

SEQ ID NO: 462007 - DNA, 15 bp, Homo sapiens
cacgcactggtaggc

SEQ ID NO: 462008 - DNA, 15 bp, Homo sapiens
ccacgcactggtagg

SEQ ID NO: 462009 - DNA, 15 bp, Homo sapiens
accacgcactggtag

SEQ ID NO: 462010 - DNA, 15 bp, Homo sapiens
caccacgcactggta

SEQ ID NO: 462011 - DNA, 15 bp, Homo sapiens
ccaccacgcactggt

SEQ ID NO: 462012 - DNA, 15 bp, Homo sapiens
cccaccacgcactgg

SEQ ID NO: 462013 - DNA, 15 bp, Homo sapiens
acccaccacgcactg

SEQ ID NO: 462014 - DNA, 15 bp, Homo sapiens
cacccaccacgcact

SEQ ID NO: 462015 - DNA, 15 bp, Homo sapiens
ccacccaccacgcac

SEQ ID NO: 462016 - DNA, 15 bp, Homo sapiens
gccacccaccacgca

SEQ ID NO: 462017 - DNA, 15 bp, Homo sapiens
cgccacccaccacgc

SEQ ID NO: 462018 - DNA, 15 bp, Homo sapiens
tcgccacccaccacg

SEQ ID NO: 462019 - DNA, 15 bp, Homo sapiens
ctcgccacccaccac

SEQ ID NO: 462020 - DNA, 15 bp, Homo sapiens
tctcgccacccacca

SEQ ID NO: 462021 - DNA, 15 bp, Homo sapiens
ttctcgccacccacc

SEQ ID NO: 462022 - DNA, 15 bp, Homo sapiens
cttctcgccacccac

SEQ ID NO: 462023 - DNA, 15 bp, Homo sapiens
acttctcgccaccca

SEQ ID NO: 462024 - DNA, 15 bp, Homo sapiens
cacttctcgccaccc

SEQ ID NO: 462025 - DNA, 15 bp, Homo sapiens
acacttctcgccacc

SEQ ID NO: 462026 - DNA, 15 bp, Homo sapiens
tacacttctcgccac

SEQ ID NO: 462027 - DNA, 15 bp, Homo sapiens
ctacacttctcgcca

SEQ ID NO: 462028 - DNA, 15 bp, Homo sapiens
gctacacttctcgcc

SEQ ID NO: 462029 - DNA, 15 bp, Homo sapiens
tgctacacttctcgc

SEQ ID NO: 462030 - DNA, 15 bp, Homo sapiens
gtgctacacttctcg

SEQ ID NO: 462031 - DNA, 15 bp, Homo sapiens
cgtgctacacttctc

SEQ ID NO: 462032 - DNA, 15 bp, Homo sapiens
ccgtgctacacttct

SEQ ID NO: 462033 - DNA, 15 bp, Homo sapiens
tccgtgctacacttc

SEQ ID NO: 462034 - DNA, 15 bp, Homo sapiens
ctccgtgctacactt

SEQ ID NO: 462035 - DNA, 15 bp, Homo sapiens
gctccgtgctacact

SEQ ID NO: 462036 - DNA, 15 bp, Homo sapiens
agctccgtgctacac

SEQ ID NO: 462037 - DNA, 15 bp, Homo sapiens
gagctccgtgctaca

SEQ ID NO: 462038 - DNA, 15 bp, Homo sapiens
agagctccgtgctac

SEQ ID NO: 462039 - DNA, 15 bp, Homo sapiens
aagagctccgtgcta

SEQ ID NO: 462040 - DNA, 15 bp, Homo sapiens
aaagagctccgtgct

SEQ ID NO: 462041 - DNA, 15 bp, Homo sapiens
caaagagctccgtgc

SEQ ID NO: 462042 - DNA, 15 bp, Homo sapiens
acaaagagctccgtg

SEQ ID NO: 462043 - DNA, 15 bp, Homo sapiens
cacaaagagctccgt

SEQ ID NO: 462044 - DNA, 15 bp, Homo sapiens
tcacaaagagctccg

SEQ ID NO: 462045 - DNA, 15 bp, Homo sapiens
ttcacaaagagctcc

SEQ ID NO: 462046 - DNA, 15 bp, Homo sapiens
tttcacaaagagctc

SEQ ID NO: 462047 - DNA, 15 bp, Homo sapiens
ctttcacaaagagct

SEQ ID NO: 462048 - DNA, 15 bp, Homo sapiens
cctttcacaaagagc

SEQ ID NO: 462049 - DNA, 15 bp, Homo sapiens
acctttcacaaagag

SEQ ID NO: 462050 - DNA, 15 bp, Homo sapiens
cacctttcacaaaga

SEQ ID NO: 462051 - DNA, 15 bp, Homo sapiens
ccacctttcacaaag

SEQ ID NO: 462052 - DNA, 15 bp, Homo sapiens
cccacctttcacaaa

SEQ ID NO: 462053 - DNA, 15 bp, Homo sapiens
gcccacctttcacaa

SEQ ID NO: 462054 - DNA, 15 bp, Homo sapiens
ggcccacctttcaca

SEQ ID NO: 462055 - DNA, 15 bp, Homo sapiens
aggcccacctttcac

SEQ ID NO: 462056 - DNA, 15 bp, Homo sapiens
caggcccacctttca

SEQ ID NO: 462057 - DNA, 15 bp, Homo sapiens
ccaggcccacctttc

SEQ ID NO: 462058 - DNA, 15 bp, Homo sapiens
cccaggcccaccttt

SEQ ID NO: 462059 - DNA, 15 bp, Homo sapiens
tcccaggcccacctt

SEQ ID NO: 462060 - DNA, 15 bp, Homo sapiens
gtcccaggcccacct

SEQ ID NO: 462061 - DNA, 15 bp, Homo sapiens
ggtcccaggcccacc

SEQ ID NO: 462062 - DNA, 15 bp, Homo sapiens
aggtcccaggcccac

SEQ ID NO: 462063 - DNA, 15 bp, Homo sapiens
caggtcccaggccca

SEQ ID NO: 462064 - DNA, 15 bp, Homo sapiens
tcaggtcccaggccc

SEQ ID NO: 462065 - DNA, 15 bp, Homo sapiens
ctcaggtcccaggcc

SEQ ID NO: 462066 - DNA, 15 bp, Homo sapiens
cctcaggtcccaggc

SEQ ID NO: 462067 - DNA, 15 bp, Homo sapiens
tcctcaggtcccagg

SEQ ID NO: 462068 - DNA, 15 bp, Homo sapiens
atcctcaggtcccag

SEQ ID NO: 462069 - DNA, 15 bp, Homo sapiens
catcctcaggtccca

SEQ ID NO: 462070 - DNA, 15 bp, Homo sapiens
acatcctcaggtccc

SEQ ID NO: 462071 - DNA, 15 bp, Homo sapiens
cacatcctcaggtcc

SEQ ID NO: 462072 - DNA, 15 bp, Homo sapiens
ccacatcctcaggtc

SEQ ID NO: 462073 - DNA, 15 bp, Homo sapiens
cccacatcctcaggt

SEQ ID NO: 462074 - DNA, 15 bp, Homo sapiens
tcccacatcctcagg

SEQ ID NO: 462075 - DNA, 15 bp, Homo sapiens
ttcccacatcctcag

SEQ ID NO: 462076 - DNA, 15 bp, Homo sapiens
gttcccacatcctca

SEQ ID NO: 462077 - DNA, 15 bp, Homo sapiens
ggttcccacatcctc

SEQ ID NO: 462078 - DNA, 15 bp, Homo sapiens
aggttcccacatcct

SEQ ID NO: 462079 - DNA, 15 bp, Homo sapiens
caggttcccacatcc

SEQ ID NO: 462080 - DNA, 15 bp, Homo sapiens
ccaggttcccacatc

SEQ ID NO: 462081 - DNA, 15 bp, Homo sapiens
cccaggttcccacat

SEQ ID NO: 462082 - DNA, 15 bp, Homo sapiens
ccccaggttcccaca

SEQ ID NO: 462083 - DNA, 15 bp, Homo sapiens
tccccaggttcccac

SEQ ID NO: 462084 - DNA, 15 bp, Homo sapiens
ctccccaggttccca

SEQ ID NO: 462085 - DNA, 15 bp, Homo sapiens
cctccccaggttccc

SEQ ID NO: 462086 - DNA, 15 bp, Homo sapiens
tcctccccaggttcc

SEQ ID NO: 462087 - DNA, 15 bp, Homo sapiens
ctcctccccaggttc

SEQ ID NO: 462088 - DNA, 15 bp, Homo sapiens
tctcctccccaggtt

SEQ ID NO: 462089 - DNA, 15 bp, Homo sapiens
atctcctccccaggt

SEQ ID NO: 462090 - DNA, 15 bp, Homo sapiens
catctcctccccagg

SEQ ID NO: 462091 - DNA, 15 bp, Homo sapiens
ccatctcctccccag

SEQ ID NO: 462092 - DNA, 15 bp, Homo sapiens
gccatctcctcccca

SEQ ID NO: 462093 - DNA, 15 bp, Homo sapiens
ggccatctcctcccc

SEQ ID NO: 462094 - DNA, 15 bp, Homo sapiens
aggccatctcctccc

SEQ ID NO: 462095 - DNA, 15 bp, Homo sapiens
gaggccatctcctcc

SEQ ID NO: 462096 - DNA, 15 bp, Homo sapiens
tgaggccatctcctc

SEQ ID NO: 462097 - DNA, 15 bp, Homo sapiens
ctgaggccatctcct

SEQ ID NO: 462098 - DNA, 15 bp, Homo sapiens
cctgaggccatctcc

SEQ ID NO: 462099 - DNA, 15 bp, Homo sapiens
ccctgaggccatctc

SEQ ID NO: 462100 - DNA, 15 bp, Homo sapiens
cccctgaggccatct

SEQ ID NO: 462101 - DNA, 15 bp, Homo sapiens
tcccctgaggccatc

SEQ ID NO: 462102 - DNA, 15 bp, Homo sapiens
ctcccctgaggccat

SEQ ID NO: 462103 - DNA, 15 bp, Homo sapiens
gctcccctgaggcca

SEQ ID NO: 462104 - DNA, 15 bp, Homo sapiens
ggctcccctgaggcc

SEQ ID NO: 462105 - DNA, 15 bp, Homo sapiens
tggctcccctgaggc

SEQ ID NO: 462106 - DNA, 15 bp, Homo sapiens
ttggctcccctgagg

SEQ ID NO: 462107 - DNA, 15 bp, Homo sapiens
gttggctcccctgag

SEQ ID NO: 462108 - DNA, 15 bp, Homo sapiens
ggttggctcccctga

SEQ ID NO: 462109 - DNA, 15 bp, Homo sapiens
gggttggctcccctg

SEQ ID NO: 462110 - DNA, 15 bp, Homo sapiens
agggttggctcccct

SEQ ID NO: 462111 - DNA, 15 bp, Homo sapiens
gagggttggctcccc

SEQ ID NO: 462112 - DNA, 15 bp, Homo sapiens
tgagggttggctccc

SEQ ID NO: 462113 - DNA, 15 bp, Homo sapiens
atgagggttggctcc

SEQ ID NO: 462114 - DNA, 15 bp, Homo sapiens
catgagggttggctc

SEQ ID NO: 462115 - DNA, 15 bp, Homo sapiens
gcatgagggttggct

SEQ ID NO: 462116 - DNA, 15 bp, Homo sapiens
agcatgagggttggc

SEQ ID NO: 462117 - DNA, 15 bp, Homo sapiens
gagcatgagggttgg

SEQ ID NO: 462118 - DNA, 15 bp, Homo sapiens
tgagcatgagggttg

SEQ ID NO: 462119 - DNA, 15 bp, Homo sapiens
gtgagcatgagggtt

SEQ ID NO: 462120 - DNA, 15 bp, Homo sapiens
ggtgagcatgagggt

SEQ ID NO: 462121 - DNA, 15 bp, Homo sapiens
gggtgagcatgaggg

SEQ ID NO: 462122 - DNA, 15 bp, Homo sapiens
agggtgagcatgagg

SEQ ID NO: 462123 - DNA, 15 bp, Homo sapiens
cagggtgagcatgag

SEQ ID NO: 462124 - DNA, 15 bp, Homo sapiens
gcagggtgagcatga

SEQ ID NO: 462125 - DNA, 15 bp, Homo sapiens
ggcagggtgagcatg

SEQ ID NO: 462126 - DNA, 15 bp, Homo sapiens
aggcagggtgagcat

SEQ ID NO: 462127 - DNA, 15 bp, Homo sapiens
caggcagggtgagca

SEQ ID NO: 462128 - DNA, 15 bp, Homo sapiens
ccaggcagggtgagc

SEQ ID NO: 462129 - DNA, 15 bp, Homo sapiens
tccaggcagggtgag

SEQ ID NO: 462130 - DNA, 15 bp, Homo sapiens
gtccaggcagggtga

SEQ ID NO: 462131 - DNA, 15 bp, Homo sapiens
tgtccaggcagggtg

SEQ ID NO: 462132 - DNA, 15 bp, Homo sapiens
ctgtccaggcagggt

SEQ ID NO: 462133 - DNA, 15 bp, Homo sapiens
tctgtccaggcaggg

SEQ ID NO: 462134 - DNA, 15 bp, Homo sapiens
ctctgtccaggcagg

SEQ ID NO: 462135 - DNA, 15 bp, Homo sapiens
gctctgtccaggcag

SEQ ID NO: 462136 - DNA, 15 bp, Homo sapiens
ggctctgtccaggca

SEQ ID NO: 462137 - DNA, 15 bp, Homo sapiens
gggctctgtccaggc

SEQ ID NO: 462138 - DNA, 15 bp, Homo sapiens
ggggctctgtccagg

SEQ ID NO: 462139 - DNA, 15 bp, Homo sapiens
gggggctctgtccag

SEQ ID NO: 462140 - DNA, 15 bp, Homo sapiens
agggggctctgtcca

SEQ ID NO: 462141 - DNA, 15 bp, Homo sapiens
cagggggctctgtcc

SEQ ID NO: 462142 - DNA, 15 bp, Homo sapiens
acagggggctctgtc

SEQ ID NO: 462143 - DNA, 15 bp, Homo sapiens
cacagggggctctgt

SEQ ID NO: 462144 - DNA, 15 bp, Homo sapiens
gcacagggggctctg

SEQ ID NO: 462145 - DNA, 15 bp, Homo sapiens
agcacagggggctct

SEQ ID NO: 462146 - DNA, 15 bp, Homo sapiens
gagcacagggggctc

SEQ ID NO: 462147 - DNA, 15 bp, Homo sapiens
tgagcacagggggct

SEQ ID NO: 462148 - DNA, 15 bp, Homo sapiens
atgagcacagggggc

SEQ ID NO: 462149 - DNA, 15 bp, Homo sapiens
gatgagcacaggggg

SEQ ID NO: 462150 - DNA, 15 bp, Homo sapiens
tgatgagcacagggg

SEQ ID NO: 462151 - DNA, 15 bp, Homo sapiens
gtgatgagcacaggg

SEQ ID NO: 462152 - DNA, 15 bp, Homo sapiens
cgtgatgagcacagg

SEQ ID NO: 462153 - DNA, 15 bp, Homo sapiens
gcgtgatgagcacag

SEQ ID NO: 462154 - DNA, 15 bp, Homo sapiens
cgcgtgatgagcaca

SEQ ID NO: 462155 - DNA, 15 bp, Homo sapiens
gcgcgtgatgagcac

SEQ ID NO: 462156 - DNA, 15 bp, Homo sapiens
ggcgcgtgatgagca

SEQ ID NO: 462157 - DNA, 15 bp, Homo sapiens
gggcgcgtgatgagc

SEQ ID NO: 462158 - DNA, 15 bp, Homo sapiens
ggggcgcgtgatgag

SEQ ID NO: 462159 - DNA, 15 bp, Homo sapiens
aggggcgcgtgatga

SEQ ID NO: 462160 - DNA, 15 bp, Homo sapiens
aaggggcgcgtgatg

SEQ ID NO: 462161 - DNA, 15 bp, Homo sapiens
caaggggcgcgtgat

SEQ ID NO: 462162 - DNA, 15 bp, Homo sapiens
ccaaggggcgcgtga

SEQ ID NO: 462163 - DNA, 15 bp, Homo sapiens
tccaaggggcgcgtg

SEQ ID NO: 462164 - DNA, 15 bp, Homo sapiens
ctccaaggggcgcgt

SEQ ID NO: 462165 - DNA, 15 bp, Homo sapiens
cctccaaggggcgcg

SEQ ID NO: 462166 - DNA, 15 bp, Homo sapiens
tcctccaaggggcgc

SEQ ID NO: 462167 - DNA, 15 bp, Homo sapiens
gtcctccaaggggcg

SEQ ID NO: 462168 - DNA, 15 bp, Homo sapiens
ggtcctccaaggggc

SEQ ID NO: 462169 - DNA, 15 bp, Homo sapiens
tggtcctccaagggg

SEQ ID NO: 462170 - DNA, 15 bp, Homo sapiens
ctggtcctccaaggg

SEQ ID NO: 462171 - DNA, 15 bp, Homo sapiens
gctggtcctccaagg

SEQ ID NO: 462172 - DNA, 15 bp, Homo sapiens
agctggtcctccaag

SEQ ID NO: 462173 - DNA, 15 bp, Homo sapiens
cagctggtcctccaa

SEQ ID NO: 462174 - DNA, 15 bp, Homo sapiens
ccagctggtcctcca

SEQ ID NO: 462175 - DNA, 15 bp, Homo sapiens
accagctggtcctcc

SEQ ID NO: 462176 - DNA, 15 bp, Homo sapiens
caccagctggtcctc

SEQ ID NO: 462177 - DNA, 15 bp, Homo sapiens
tcaccagctggtcct

SEQ ID NO: 462178 - DNA, 15 bp, Homo sapiens
atcaccagctggtcc

SEQ ID NO: 462179 - DNA, 15 bp, Homo sapiens
catcaccagctggtc

SEQ ID NO: 462180 - DNA, 15 bp, Homo sapiens
ccatcaccagctggt

SEQ ID NO: 462181 - DNA, 15 bp, Homo sapiens
accatcaccagctgg

SEQ ID NO: 462182 - DNA, 15 bp, Homo sapiens
caccatcaccagctg

SEQ ID NO: 462183 - DNA, 15 bp, Homo sapiens
ccaccatcaccagct

SEQ ID NO: 462184 - DNA, 15 bp, Homo sapiens
cccaccatcaccagc

SEQ ID NO: 462185 - DNA, 15 bp, Homo sapiens
ccccaccatcaccag

SEQ ID NO: 462186 - DNA, 15 bp, Homo sapiens
gccccaccatcacca

SEQ ID NO: 462187 - DNA, 15 bp, Homo sapiens
tgccccaccatcacc

SEQ ID NO: 462188 - DNA, 15 bp, Homo sapiens
ctgccccaccatcac

SEQ ID NO: 462189 - DNA, 15 bp, Homo sapiens
gctgccccaccatca

SEQ ID NO: 462190 - DNA, 15 bp, Homo sapiens
cgctgccccaccatc

SEQ ID NO: 462191 - DNA, 15 bp, Homo sapiens
ccgctgccccaccat

SEQ ID NO: 462192 - DNA, 15 bp, Homo sapiens
cccgctgccccacca

SEQ ID NO: 462193 - DNA, 15 bp, Homo sapiens
acccgctgccccacc

SEQ ID NO: 462194 - DNA, 15 bp, Homo sapiens
cacccgctgccccac

SEQ ID NO: 462195 - DNA, 15 bp, Homo sapiens
ccacccgctgcccca

SEQ ID NO: 462196 - DNA, 15 bp, Homo sapiens
tccacccgctgcccc

SEQ ID NO: 462197 - DNA, 15 bp, Homo sapiens
ctccacccgctgccc

SEQ ID NO: 462198 - DNA, 15 bp, Homo sapiens
actccacccgctgcc

SEQ ID NO: 462199 - DNA, 15 bp, Homo sapiens
aactccacccgctgc

SEQ ID NO: 462200 - DNA, 15 bp, Homo sapiens
aaactccacccgctg

SEQ ID NO: 462201 - DNA, 15 bp, Homo sapiens
caaactccacccgct

SEQ ID NO: 462202 - DNA, 15 bp, Homo sapiens
tcaaactccacccgc

SEQ ID NO: 462203 - DNA, 15 bp, Homo sapiens
ctcaaactccacccg

SEQ ID NO: 462204 - DNA, 15 bp, Homo sapiens
actcaaactccaccc

SEQ ID NO: 462205 - DNA, 15 bp, Homo sapiens
cactcaaactccacc

SEQ ID NO: 462206 - DNA, 15 bp, Homo sapiens
acactcaaactccac

SEQ ID NO: 462207 - DNA, 15 bp, Homo sapiens
cacactcaaactcca

SEQ ID NO: 462208 - DNA, 15 bp, Homo sapiens
tcacactcaaactcc

SEQ ID NO: 462209 - DNA, 15 bp, Homo sapiens
ttcacactcaaactc

SEQ ID NO: 462210 - DNA, 15 bp, Homo sapiens
cttcacactcaaact

SEQ ID NO: 462211 - DNA, 15 bp, Homo sapiens
acttcacactcaaac

SEQ ID NO: 462212 - DNA, 15 bp, Homo sapiens
tacttcacactcaaa

SEQ ID NO: 462213 - DNA, 15 bp, Homo sapiens
atacttcacactcaa

SEQ ID NO: 462214 - DNA, 15 bp, Homo sapiens
gatacttcacactca

SEQ ID NO: 462215 - DNA, 15 bp, Homo sapiens
cgatacttcacactc

SEQ ID NO: 462216 - DNA, 15 bp, Homo sapiens
ccgatacttcacact

SEQ ID NO: 462217 - DNA, 15 bp, Homo sapiens
tccgatacttcacac

SEQ ID NO: 462218 - DNA, 15 bp, Homo sapiens
ctccgatacttcaca

SEQ ID NO: 462219 - DNA, 15 bp, Homo sapiens
cctccgatacttcac

SEQ ID NO: 462220 - DNA, 15 bp, Homo sapiens
tcctccgatacttca

SEQ ID NO: 462221 - DNA, 15 bp, Homo sapiens
ctcctccgatacttc

SEQ ID NO: 462222 - DNA, 15 bp, Homo sapiens
cctcctccgatactt

SEQ ID NO: 462223 - DNA, 15 bp, Homo sapiens
ccctcctccgatact

SEQ ID NO: 462224 - DNA, 15 bp, Homo sapiens
cccctcctccgatac

SEQ ID NO: 462225 - DNA, 15 bp, Homo sapiens
ccccctcctccgata

SEQ ID NO: 462226 - DNA, 15 bp, Homo sapiens
gccccctcctccgat

SEQ ID NO: 462227 - DNA, 15 bp, Homo sapiens
cgccccctcctccga

SEQ ID NO: 462228 - DNA, 15 bp, Homo sapiens
gcgccccctcctccg

SEQ ID NO: 462229 - DNA, 15 bp, Homo sapiens
tgcgccccctcctcc

SEQ ID NO: 462230 - DNA, 15 bp, Homo sapiens
ttgcgccccctcctc

SEQ ID NO: 462231 - DNA, 15 bp, Homo sapiens
cttgcgccccctcct

SEQ ID NO: 462232 - DNA, 15 bp, Homo sapiens
acttgcgccccctcc

SEQ ID NO: 462233 - DNA, 15 bp, Homo sapiens
gacttgcgccccctc

SEQ ID NO: 462234 - DNA, 15 bp, Homo sapiens
tgacttgcgccccct

SEQ ID NO: 462235 - DNA, 15 bp, Homo sapiens
ttgacttgcgccccc

SEQ ID NO: 462236 - DNA, 15 bp, Homo sapiens
tttgacttgcgcccc

SEQ ID NO: 462237 - DNA, 15 bp, Homo sapiens
atttgacttgcgccc

SEQ ID NO: 462238 - DNA, 15 bp, Homo sapiens
catttgacttgcgcc

SEQ ID NO: 462239 - DNA, 15 bp, Homo sapiens
ccatttgacttgcgc

SEQ ID NO: 462240 - DNA, 15 bp, Homo sapiens
accatttgacttgcg

SEQ ID NO: 462241 - DNA, 15 bp, Homo sapiens
caccatttgacttgc

SEQ ID NO: 462242 - DNA, 15 bp, Homo sapiens
tcaccatttgacttg

SEQ ID NO: 462243 - DNA, 15 bp, Homo sapiens
ctcaccatttgactt

SEQ ID NO: 462244 - DNA, 15 bp, Homo sapiens
actcaccatttgact

SEQ ID NO: 462245 - DNA, 15 bp, Homo sapiens
aactcaccatttgac

SEQ ID NO: 462246 - DNA, 15 bp, Homo sapiens
gaactcaccatttga

SEQ ID NO: 462247 - DNA, 15 bp, Homo sapiens
ggaactcaccatttg

SEQ ID NO: 462248 - DNA, 15 bp, Homo sapiens
tggaactcaccattt

SEQ ID NO: 462249 - DNA, 15 bp, Homo sapiens
ctggaactcaccatt

SEQ ID NO: 462250 - DNA, 15 bp, Homo sapiens
tctggaactcaccat

SEQ ID NO: 462251 - DNA, 15 bp, Homo sapiens
ttctggaactcacca

SEQ ID NO: 462252 - DNA, 15 bp, Homo sapiens
cttctggaactcacc

SEQ ID NO: 462253 - DNA, 15 bp, Homo sapiens
gcttctggaactcac

SEQ ID NO: 462254 - DNA, 15 bp, Homo sapiens
tgcttctggaactca

SEQ ID NO: 462255 - DNA, 15 bp, Homo sapiens
gtgcttctggaactc

SEQ ID NO: 462256 - DNA, 15 bp, Homo sapiens
cgtgcttctggaact

SEQ ID NO: 462257 - DNA, 15 bp, Homo sapiens
ccgtgcttctggaac

SEQ ID NO: 462258 - DNA, 15 bp, Homo sapiens
cccgtgcttctggaa

SEQ ID NO: 462259 - DNA, 15 bp, Homo sapiens
ccccgtgcttctgga

SEQ ID NO: 462260 - DNA, 15 bp, Homo sapiens
gccccgtgcttctgg

SEQ ID NO: 462261 - DNA, 15 bp, Homo sapiens
tgccccgtgcttctg

SEQ ID NO: 462262 - DNA, 15 bp, Homo sapiens
atgccccgtgcttct

SEQ ID NO: 462263 - DNA, 15 bp, Homo sapiens
catgccccgtgcttc

SEQ ID NO: 462264 - DNA, 15 bp, Homo sapiens
ccatgccccgtgctt

SEQ ID NO: 462265 - DNA, 15 bp, Homo sapiens
cccatgccccgtgct

SEQ ID NO: 462266 - DNA, 15 bp, Homo sapiens
acccatgccccgtgc

SEQ ID NO: 462267 - DNA, 15 bp, Homo sapiens
cacccatgccccgtg

SEQ ID NO: 462268 - DNA, 15 bp, Homo sapiens
acacccatgccccgt

SEQ ID NO: 462269 - DNA, 15 bp, Homo sapiens
aacacccatgccccg

SEQ ID NO: 462270 - DNA, 15 bp, Homo sapiens
caacacccatgcccc

SEQ ID NO: 462271 - DNA, 15 bp, Homo sapiens
ccaacacccatgccc

SEQ ID NO: 462272 - DNA, 15 bp, Homo sapiens
cccaacacccatgcc

SEQ ID NO: 462273 - DNA, 15 bp, Homo sapiens
ccccaacacccatgc

SEQ ID NO: 462274 - DNA, 15 bp, Homo sapiens
cccccaacacccatg

SEQ ID NO: 462275 - DNA, 15 bp, Homo sapiens
gcccccaacacccat

SEQ ID NO: 462276 - DNA, 15 bp, Homo sapiens
tgcccccaacaccca

SEQ ID NO: 462277 - DNA, 15 bp, Homo sapiens
atgcccccaacaccc

SEQ ID NO: 462278 - DNA, 15 bp, Homo sapiens
gatgcccccaacacc

SEQ ID NO: 462279 - DNA, 15 bp, Homo sapiens
agatgcccccaacac

SEQ ID NO: 462280 - DNA, 15 bp, Homo sapiens
cagatgcccccaaca

SEQ ID NO: 462281 - DNA, 15 bp, Homo sapiens
gcagatgcccccaac

SEQ ID NO: 462282 - DNA, 15 bp, Homo sapiens
ggcagatgcccccaa

SEQ ID NO: 462283 - DNA, 15 bp, Homo sapiens
gggcagatgccccca

SEQ ID NO: 462284 - DNA, 15 bp, Homo sapiens
tgggcagatgccccc

SEQ ID NO: 462285 - DNA, 15 bp, Homo sapiens
ctgggcagatgcccc

SEQ ID NO: 462286 - DNA, 15 bp, Homo sapiens
tctgggcagatgccc

SEQ ID NO: 462287 - DNA, 15 bp, Homo sapiens
ttctgggcagatgcc

SEQ ID NO: 462288 - DNA, 15 bp, Homo sapiens
cttctgggcagatgc

SEQ ID NO: 462289 - DNA, 15 bp, Homo sapiens
tcttctgggcagatg

SEQ ID NO: 462290 - DNA, 15 bp, Homo sapiens
ctcttctgggcagat

SEQ ID NO: 462291 - DNA, 15 bp, Homo sapiens
cctcttctgggcaga

SEQ ID NO: 462292 - DNA, 15 bp, Homo sapiens
gcctcttctgggcag

SEQ ID NO: 462293 - DNA, 15 bp, Homo sapiens
ggcctcttctgggca

SEQ ID NO: 462294 - DNA, 15 bp, Homo sapiens
tggcctcttctgggc

SEQ ID NO: 462295 - DNA, 15 bp, Homo sapiens
gtggcctcttctggg

SEQ ID NO: 462296 - DNA, 15 bp, Homo sapiens
tgtggcctcttctgg

SEQ ID NO: 462297 - DNA, 15 bp, Homo sapiens
ctgtggcctcttctg

SEQ ID NO: 462298 - DNA, 15 bp, Homo sapiens
gctgtggcctcttct

SEQ ID NO: 462299 - DNA, 15 bp, Homo sapiens
tgctgtggcctcttc

SEQ ID NO: 462300 - DNA, 15 bp, Homo sapiens
gtgctgtggcctctt

SEQ ID NO: 462301 - DNA, 15 bp, Homo sapiens
agtgctgtggcctct

SEQ ID NO: 462302 - DNA, 15 bp, Homo sapiens
aagtgctgtggcctc

SEQ ID NO: 462303 - DNA, 15 bp, Homo sapiens
caagtgctgtggcct

SEQ ID NO: 462304 - DNA, 15 bp, Homo sapiens
gcaagtgctgtggcc

SEQ ID NO: 462305 - DNA, 15 bp, Homo sapiens
ggcaagtgctgtggc

SEQ ID NO: 462306 - DNA, 15 bp, Homo sapiens
tggcaagtgctgtgg

SEQ ID NO: 462307 - DNA, 15 bp, Homo sapiens
gtggcaagtgctgtg

SEQ ID NO: 462308 - DNA, 15 bp, Homo sapiens
ggtggcaagtgctgt

SEQ ID NO: 462309 - DNA, 15 bp, Homo sapiens
gggtggcaagtgctg

SEQ ID NO: 462310 - DNA, 15 bp, Homo sapiens
tgggtggcaagtgct

SEQ ID NO: 462311 - DNA, 15 bp, Homo sapiens
gtgggtggcaagtgc

SEQ ID NO: 462312 - DNA, 15 bp, Homo sapiens
ggtgggtggcaagtg

SEQ ID NO: 462313 - DNA, 15 bp, Homo sapiens
gggtgggtggcaagt

SEQ ID NO: 462314 - DNA, 15 bp, Homo sapiens
tgggtgggtggcaag

SEQ ID NO: 462315 - DNA, 15 bp, Homo sapiens
gtgggtgggtggcaa

SEQ ID NO: 462316 - DNA, 15 bp, Homo sapiens
ggtgggtgggtggca

SEQ ID NO: 462317 - DNA, 15 bp, Homo sapiens
gggtgggtgggtggc

SEQ ID NO: 462318 - DNA, 15 bp, Homo sapiens
cgggtgggtgggtgg

SEQ ID NO: 462319 - DNA, 15 bp, Homo sapiens
ccgggtgggtgggtg

SEQ ID NO: 462320 - DNA, 15 bp, Homo sapiens
gccgggtgggtgggt

SEQ ID NO: 462321 - DNA, 15 bp, Homo sapiens
agccgggtgggtggg

SEQ ID NO: 462322 - DNA, 15 bp, Homo sapiens
tagccgggtgggtgg

SEQ ID NO: 462323 - DNA, 15 bp, Homo sapiens
ctagccgggtgggtg

SEQ ID NO: 462324 - DNA, 15 bp, Homo sapiens
cctagccgggtgggt

SEQ ID NO: 462325 - DNA, 15 bp, Homo sapiens
gcctagccgggtggg

SEQ ID NO: 462326 - DNA, 15 bp, Homo sapiens
agcctagccgggtgg

SEQ ID NO: 462327 - DNA, 15 bp, Homo sapiens
cagcctagccgggtg

SEQ ID NO: 462328 - DNA, 15 bp, Homo sapiens
tcagcctagccgggt

SEQ ID NO: 462329 - DNA, 15 bp, Homo sapiens
ttcagcctagccggg

SEQ ID NO: 462330 - DNA, 15 bp, Homo sapiens
cttcagcctagccgg

SEQ ID NO: 462331 - DNA, 15 bp, Homo sapiens
ccttcagcctagccg

SEQ ID NO: 462332 - DNA, 15 bp, Homo sapiens
tccttcagcctagcc

SEQ ID NO: 462333 - DNA, 15 bp, Homo sapiens
gtccttcagcctagc

SEQ ID NO: 462334 - DNA, 15 bp, Homo sapiens
cgtccttcagcctag

SEQ ID NO: 462335 - DNA, 15 bp, Homo sapiens
ccgtccttcagccta

SEQ ID NO: 462336 - DNA, 15 bp, Homo sapiens
cccgtccttcagcct

SEQ ID NO: 462337 - DNA, 15 bp, Homo sapiens
ccccgtccttcagcc

SEQ ID NO: 462338 - DNA, 15 bp, Homo sapiens
accccgtccttcagc

SEQ ID NO: 462339 - DNA, 15 bp, Homo sapiens
caccccgtccttcag

SEQ ID NO: 462340 - DNA, 15 bp, Homo sapiens
ccaccccgtccttca

SEQ ID NO: 462341 - DNA, 15 bp, Homo sapiens
tccaccccgtccttc

SEQ ID NO: 462342 - DNA, 15 bp, Homo sapiens
ctccaccccgtcctt

SEQ ID NO: 462343 - DNA, 15 bp, Homo sapiens
gctccaccccgtcct

SEQ ID NO: 462344 - DNA, 15 bp, Homo sapiens
agctccaccccgtcc

SEQ ID NO: 462345 - DNA, 15 bp, Homo sapiens
cagctccaccccgtc

SEQ ID NO: 462346 - DNA, 15 bp, Homo sapiens
tcagctccaccccgt

SEQ ID NO: 462347 - DNA, 15 bp, Homo sapiens
gtcagctccaccccg

SEQ ID NO: 462348 - DNA, 15 bp, Homo sapiens
ggtcagctccacccc

SEQ ID NO: 462349 - DNA, 15 bp, Homo sapiens
gggtcagctccaccc

SEQ ID NO: 462350 - DNA, 15 bp, Homo sapiens
cgggtcagctccacc

SEQ ID NO: 462351 - DNA, 15 bp, Homo sapiens
ccgggtcagctccac

SEQ ID NO: 462352 - DNA, 15 bp, Homo sapiens
cccgggtcagctcca

SEQ ID NO: 462353 - DNA, 15 bp, Homo sapiens
tcccgggtcagctcc

SEQ ID NO: 462354 - DNA, 15 bp, Homo sapiens
ctcccgggtcagctc

SEQ ID NO: 462355 - DNA, 15 bp, Homo sapiens
cctcccgggtcagct

SEQ ID NO: 462356 - DNA, 15 bp, Homo sapiens
tcctcccgggtcagc

SEQ ID NO: 462357 - DNA, 15 bp, Homo sapiens
ctcctcccgggtcag

SEQ ID NO: 462358 - DNA, 15 bp, Homo sapiens
tctcctcccgggtca

SEQ ID NO: 462359 - DNA, 15 bp, Homo sapiens
gtctcctcccgggtc

SEQ ID NO: 462360 - DNA, 15 bp, Homo sapiens
ggtctcctcccgggt

SEQ ID NO: 462361 - DNA, 15 bp, Homo sapiens
aggtctcctcccggg

SEQ ID NO: 462362 - DNA, 15 bp, Homo sapiens
aaggtctcctcccgg

SEQ ID NO: 462363 - DNA, 15 bp, Homo sapiens
gaaggtctcctcccg

SEQ ID NO: 462364 - DNA, 15 bp, Homo sapiens
tgaaggtctcctccc

SEQ ID NO: 462365 - DNA, 15 bp, Homo sapiens
ttgaaggtctcctcc

SEQ ID NO: 462366 - DNA, 15 bp, Homo sapiens
tttgaaggtctcctc

SEQ ID NO: 462367 - DNA, 15 bp, Homo sapiens
atttgaaggtctcct

SEQ ID NO: 462368 - DNA, 15 bp, Homo sapiens
tatttgaaggtctcc

SEQ ID NO: 462369 - DNA, 15 bp, Homo sapiens
gtatttgaaggtctc

SEQ ID NO: 462370 - DNA, 15 bp, Homo sapiens
ggtatttgaaggtct

SEQ ID NO: 462371 - DNA, 15 bp, Homo sapiens
cggtatttgaaggtc

SEQ ID NO: 462372 - DNA, 15 bp, Homo sapiens
ccggtatttgaaggt

SEQ ID NO: 462373 - DNA, 15 bp, Homo sapiens
accggtatttgaagg

SEQ ID NO: 462374 - DNA, 15 bp, Homo sapiens
aaccggtatttgaag

SEQ ID NO: 462375 - DNA, 15 bp, Homo sapiens
gaaccggtatttgaa

SEQ ID NO: 462376 - DNA, 15 bp, Homo sapiens
tgaaccggtatttga

SEQ ID NO: 462377 - DNA, 15 bp, Homo sapiens
ttgaaccggtatttg

SEQ ID NO: 462378 - DNA, 15 bp, Homo sapiens
cttgaaccggtattt

SEQ ID NO: 462379 - DNA, 15 bp, Homo sapiens
tcttgaaccggtatt

SEQ ID NO: 462380 - DNA, 15 bp, Homo sapiens
ttcttgaaccggtat

SEQ ID NO: 462381 - DNA, 15 bp, Homo sapiens
cttcttgaaccggta

SEQ ID NO: 462382 - DNA, 15 bp, Homo sapiens
ccttcttgaaccggt

SEQ ID NO: 462383 - DNA, 15 bp, Homo sapiens
tccttcttgaaccgg

SEQ ID NO: 462384 - DNA, 15 bp, Homo sapiens
gtccttcttgaaccg

SEQ ID NO: 462385 - DNA, 15 bp, Homo sapiens
cgtccttcttgaacc

SEQ ID NO: 462386 - DNA, 15 bp, Homo sapiens
ccgtccttcttgaac

SEQ ID NO: 462387 - DNA, 15 bp, Homo sapiens
cccgtccttcttgaa

SEQ ID NO: 462388 - DNA, 15 bp, Homo sapiens
gcccgtccttcttga

SEQ ID NO: 462389 - DNA, 15 bp, Homo sapiens
tgcccgtccttcttg

SEQ ID NO: 462390 - DNA, 15 bp, Homo sapiens
ctgcccgtccttctt

SEQ ID NO: 462391 - DNA, 15 bp, Homo sapiens
tctgcccgtccttct

SEQ ID NO: 462392 - DNA, 15 bp, Homo sapiens
ctctgcccgtccttc

SEQ ID NO: 462393 - DNA, 15 bp, Homo sapiens
tctctgcccgtcctt

SEQ ID NO: 462394 - DNA, 15 bp, Homo sapiens
gtctctgcccgtcct

SEQ ID NO: 462395 - DNA, 15 bp, Homo sapiens
tgtctctgcccgtcc

SEQ ID NO: 462396 - DNA, 15 bp, Homo sapiens
gtgtctctgcccgtc

SEQ ID NO: 462397 - DNA, 15 bp, Homo sapiens
ggtgtctctgcccgt

SEQ ID NO: 462398 - DNA, 15 bp, Homo sapiens
tggtgtctctgcccg

SEQ ID NO: 462399 - DNA, 15 bp, Homo sapiens
gtggtgtctctgccc

SEQ ID NO: 462400 - DNA, 15 bp, Homo sapiens
ggtggtgtctctgcc

SEQ ID NO: 462401 - DNA, 15 bp, Homo sapiens
aggtggtgtctctgc

SEQ ID NO: 462402 - DNA, 15 bp, Homo sapiens
caggtggtgtctctg

SEQ ID NO: 462403 - DNA, 15 bp, Homo sapiens
tcaggtggtgtctct

SEQ ID NO: 462404 - DNA, 15 bp, Homo sapiens
atcaggtggtgtctc

SEQ ID NO: 462405 - DNA, 15 bp, Homo sapiens
gatcaggtggtgtct

SEQ ID NO: 462406 - DNA, 15 bp, Homo sapiens
tgatcaggtggtgtc

SEQ ID NO: 462407 - DNA, 15 bp, Homo sapiens
atgatcaggtggtgt

SEQ ID NO: 462408 - DNA, 15 bp, Homo sapiens
gatgatcaggtggtg

SEQ ID NO: 462409 - DNA, 15 bp, Homo sapiens
tgatgatcaggtggt

SEQ ID NO: 462410 - DNA, 15 bp, Homo sapiens
ttgatgatcaggtgg

SEQ ID NO: 462411 - DNA, 15 bp, Homo sapiens
gttgatgatcaggtg

SEQ ID NO: 462412 - DNA, 15 bp, Homo sapiens
cgttgatgatcaggt

SEQ ID NO: 462413 - DNA, 15 bp, Homo sapiens
tcgttgatgatcagg

SEQ ID NO: 462414 - DNA, 15 bp, Homo sapiens
ctcgttgatgatcag

SEQ ID NO: 462415 - DNA, 15 bp, Homo sapiens
cctcgttgatgatca

SEQ ID NO: 462416 - DNA, 15 bp, Homo sapiens
gcctcgttgatgatc

SEQ ID NO: 462417 - DNA, 15 bp, Homo sapiens
ggcctcgttgatgat

SEQ ID NO: 462418 - DNA, 15 bp, Homo sapiens
tggcctcgttgatga

SEQ ID NO: 462419 - DNA, 15 bp, Homo sapiens
atggcctcgttgatg

SEQ ID NO: 462420 - DNA, 15 bp, Homo sapiens
catggcctcgttgat

SEQ ID NO: 462421 - DNA, 15 bp, Homo sapiens
gcatggcctcgttga

SEQ ID NO: 462422 - DNA, 15 bp, Homo sapiens
agcatggcctcgttg

SEQ ID NO: 462423 - DNA, 15 bp, Homo sapiens
cagcatggcctcgtt

SEQ ID NO: 462424 - DNA, 15 bp, Homo sapiens
ccagcatggcctcgt

SEQ ID NO: 462425 - DNA, 15 bp, Homo sapiens
tccagcatggcctcg

SEQ ID NO: 462426 - DNA, 15 bp, Homo sapiens
ctccagcatggcctc

SEQ ID NO: 462427 - DNA, 15 bp, Homo sapiens
cctccagcatggcct

SEQ ID NO: 462428 - DNA, 15 bp, Homo sapiens
tcctccagcatggcc

SEQ ID NO: 462429 - DNA, 15 bp, Homo sapiens
gtcctccagcatggc

SEQ ID NO: 462430 - DNA, 15 bp, Homo sapiens
cgtcctccagcatgg

SEQ ID NO: 462431 - DNA, 15 bp, Homo sapiens
gcgtcctccagcatg

SEQ ID NO: 462432 - DNA, 15 bp, Homo sapiens
cgcgtcctccagcat

SEQ ID NO: 462433 - DNA, 15 bp, Homo sapiens
ccgcgtcctccagca

SEQ ID NO: 462434 - DNA, 15 bp, Homo sapiens
cccgcgtcctccagc

SEQ ID NO: 462435 - DNA, 15 bp, Homo sapiens
ccccgcgtcctccag

SEQ ID NO: 462436 - DNA, 15 bp, Homo sapiens
gccccgcgtcctcca

SEQ ID NO: 462437 - DNA, 15 bp, Homo sapiens
tgccccgcgtcctcc

SEQ ID NO: 462438 - DNA, 15 bp, Homo sapiens
gtgccccgcgtcctc

SEQ ID NO: 462439 - DNA, 15 bp, Homo sapiens
agtgccccgcgtcct

SEQ ID NO: 462440 - DNA, 15 bp, Homo sapiens
tagtgccccgcgtcc

SEQ ID NO: 462441 - DNA, 15 bp, Homo sapiens
atagtgccccgcgtc

SEQ ID NO: 462442 - DNA, 15 bp, Homo sapiens
catagtgccccgcgt

SEQ ID NO: 462443 - DNA, 15 bp, Homo sapiens
gcatagtgccccgcg

SEQ ID NO: 462444 - DNA, 15 bp, Homo sapiens
tgcatagtgccccgc

SEQ ID NO: 462445 - DNA, 15 bp, Homo sapiens
gtgcatagtgccccg

SEQ ID NO: 462446 - DNA, 15 bp, Homo sapiens
agtgcatagtgcccc

SEQ ID NO: 462447 - DNA, 15 bp, Homo sapiens
cagtgcatagtgccc

SEQ ID NO: 462448 - DNA, 15 bp, Homo sapiens
acagtgcatagtgcc

SEQ ID NO: 462449 - DNA, 15 bp, Homo sapiens
cacagtgcatagtgc

SEQ ID NO: 462450 - DNA, 15 bp, Homo sapiens
gcacagtgcatagtg

SEQ ID NO: 462451 - DNA, 15 bp, Homo sapiens
tgcacagtgcatagt

SEQ ID NO: 462452 - DNA, 15 bp, Homo sapiens
gtgcacagtgcatag

SEQ ID NO: 462453 - DNA, 15 bp, Homo sapiens
agtgcacagtgcata

SEQ ID NO: 462454 - DNA, 15 bp, Homo sapiens
tagtgcacagtgcat

SEQ ID NO: 462455 - DNA, 15 bp, Homo sapiens
ctagtgcacagtgca

SEQ ID NO: 462456 - DNA, 15 bp, Homo sapiens
gctagtgcacagtgc

SEQ ID NO: 462457 - DNA, 15 bp, Homo sapiens
cgctagtgcacagtg

SEQ ID NO: 462458 - DNA, 15 bp, Homo sapiens
ccgctagtgcacagt

SEQ ID NO: 462459 - DNA, 15 bp, Homo sapiens
cccgctagtgcacag

SEQ ID NO: 462460 - DNA, 15 bp, Homo sapiens
ccccgctagtgcaca

SEQ ID NO: 462461 - DNA, 15 bp, Homo sapiens
cccccgctagtgcac

SEQ ID NO: 462462 - DNA, 15 bp, Homo sapiens
gcccccgctagtgca

SEQ ID NO: 462463 - DNA, 15 bp, Homo sapiens
ggcccccgctagtgc

SEQ ID NO: 462464 - DNA, 15 bp, Homo sapiens
tggcccccgctagtg

SEQ ID NO: 462465 - DNA, 15 bp, Homo sapiens
ctggcccccgctagt

SEQ ID NO: 462466 - DNA, 15 bp, Homo sapiens
cctggcccccgctag

SEQ ID NO: 462467 - DNA, 15 bp, Homo sapiens
gcctggcccccgcta

SEQ ID NO: 462468 - DNA, 15 bp, Homo sapiens
cgcctggcccccgct

SEQ ID NO: 462469 - DNA, 15 bp, Homo sapiens
gcgcctggcccccgc

SEQ ID NO: 462470 - DNA, 15 bp, Homo sapiens
agcgcctggcccccg

SEQ ID NO: 462471 - DNA, 15 bp, Homo sapiens
cagcgcctggccccc

SEQ ID NO: 462472 - DNA, 15 bp, Homo sapiens
ccagcgcctggcccc

SEQ ID NO: 462473 - DNA, 15 bp, Homo sapiens
gccagcgcctggccc

SEQ ID NO: 462474 - DNA, 15 bp, Homo sapiens
agccagcgcctggcc

SEQ ID NO: 462475 - DNA, 15 bp, Homo sapiens
cagccagcgcctggc

SEQ ID NO: 462476 - DNA, 15 bp, Homo sapiens
tcagccagcgcctgg

SEQ ID NO: 462477 - DNA, 15 bp, Homo sapiens
ctcagccagcgcctg

SEQ ID NO: 462478 - DNA, 15 bp, Homo sapiens
gctcagccagcgcct

SEQ ID NO: 462479 - DNA, 15 bp, Homo sapiens
agctcagccagcgcc

SEQ ID NO: 462480 - DNA, 15 bp, Homo sapiens
gagctcagccagcgc

SEQ ID NO: 462481 - DNA, 15 bp, Homo sapiens
tgagctcagccagcg

SEQ ID NO: 462482 - DNA, 15 bp, Homo sapiens
atgagctcagccagc

SEQ ID NO: 462483 - DNA, 15 bp, Homo sapiens
aatgagctcagccag

SEQ ID NO: 462484 - DNA, 15 bp, Homo sapiens
caatgagctcagcca

SEQ ID NO: 462485 - DNA, 15 bp, Homo sapiens
acaatgagctcagcc

SEQ ID NO: 462486 - DNA, 15 bp, Homo sapiens
cacaatgagctcagc

SEQ ID NO: 462487 - DNA, 15 bp, Homo sapiens
gcacaatgagctcag

SEQ ID NO: 462488 - DNA, 15 bp, Homo sapiens
tgcacaatgagctca

SEQ ID NO: 462489 - DNA, 15 bp, Homo sapiens
ctgcacaatgagctc

SEQ ID NO: 462490 - DNA, 15 bp, Homo sapiens
cctgcacaatgagct

SEQ ID NO: 462491 - DNA, 15 bp, Homo sapiens
ccctgcacaatgagc

SEQ ID NO: 462492 - DNA, 15 bp, Homo sapiens
accctgcacaatgag

SEQ ID NO: 462493 - DNA, 15 bp, Homo sapiens
caccctgcacaatga

SEQ ID NO: 462494 - DNA, 15 bp, Homo sapiens
tcaccctgcacaatg

SEQ ID NO: 462495 - DNA, 15 bp, Homo sapiens
ctcaccctgcacaat

SEQ ID NO: 462496 - DNA, 15 bp, Homo sapiens
gctcaccctgcacaa

SEQ ID NO: 462497 - DNA, 15 bp, Homo sapiens
ggctcaccctgcaca

SEQ ID NO: 462498 - DNA, 15 bp, Homo sapiens
aggctcaccctgcac

SEQ ID NO: 462499 - DNA, 15 bp, Homo sapiens
caggctcaccctgca

SEQ ID NO: 462500 - DNA, 15 bp, Homo sapiens
ccaggctcaccctgc

SEQ ID NO: 462501 - DNA, 15 bp, Homo sapiens
gccaggctcaccctg

SEQ ID NO: 462502 - DNA, 15 bp, Homo sapiens
agccaggctcaccct

SEQ ID NO: 462503 - DNA, 15 bp, Homo sapiens
cagccaggctcaccc

SEQ ID NO: 462504 - DNA, 15 bp, Homo sapiens
ccagccaggctcacc

SEQ ID NO: 462505 - DNA, 15 bp, Homo sapiens
cccagccaggctcac

SEQ ID NO: 462506 - DNA, 15 bp, Homo sapiens
ccccagccaggctca

SEQ ID NO: 462507 - DNA, 15 bp, Homo sapiens
cccccagccaggctc

SEQ ID NO: 462508 - DNA, 15 bp, Homo sapiens
ccccccagccaggct

SEQ ID NO: 462509 - DNA, 15 bp, Homo sapiens
cccccccagccaggc

SEQ ID NO: 462510 - DNA, 15 bp, Homo sapiens
gcccccccagccagg

SEQ ID NO: 462511 - DNA, 15 bp, Homo sapiens
tgcccccccagccag

SEQ ID NO: 462512 - DNA, 15 bp, Homo sapiens
gtgcccccccagcca

SEQ ID NO: 462513 - DNA, 15 bp, Homo sapiens
tgtgcccccccagcc

SEQ ID NO: 462514 - DNA, 15 bp, Homo sapiens
atgtgcccccccagc

SEQ ID NO: 462515 - DNA, 15 bp, Homo sapiens
catgtgcccccccag

SEQ ID NO: 462516 - DNA, 15 bp, Homo sapiens
tcatgtgccccccca

SEQ ID NO: 462517 - DNA, 15 bp, Homo sapiens
ctcatgtgccccccc

SEQ ID NO: 462518 - DNA, 15 bp, Homo sapiens
cctcatgtgcccccc

SEQ ID NO: 462519 - DNA, 15 bp, Homo sapiens
gcctcatgtgccccc

SEQ ID NO: 462520 - DNA, 15 bp, Homo sapiens
agcctcatgtgcccc

SEQ ID NO: 462521 - DNA, 15 bp, Homo sapiens
aagcctcatgtgccc

SEQ ID NO: 462522 - DNA, 15 bp, Homo sapiens
aaagcctcatgtgcc

SEQ ID NO: 462523 - DNA, 15 bp, Homo sapiens
taaagcctcatgtgc

SEQ ID NO: 462524 - DNA, 15 bp, Homo sapiens
ctaaagcctcatgtg

SEQ ID NO: 462525 - DNA, 15 bp, Homo sapiens
cctaaagcctcatgt

SEQ ID NO: 462526 - DNA, 15 bp, Homo sapiens
ccctaaagcctcatg

SEQ ID NO: 462527 - DNA, 15 bp, Homo sapiens
gccctaaagcctcat

SEQ ID NO: 462528 - DNA, 15 bp, Homo sapiens
agccctaaagcctca

SEQ ID NO: 462529 - DNA, 15 bp, Homo sapiens
aagccctaaagcctc

SEQ ID NO: 462530 - DNA, 15 bp, Homo sapiens
caagccctaaagcct

SEQ ID NO: 462531 - DNA, 15 bp, Homo sapiens
ccaagccctaaagcc

SEQ ID NO: 462532 - DNA, 15 bp, Homo sapiens
tccaagccctaaagc

SEQ ID NO: 462533 - DNA, 15 bp, Homo sapiens
gtccaagccctaaag

SEQ ID NO: 462534 - DNA, 15 bp, Homo sapiens
ggtccaagccctaaa

SEQ ID NO: 462535 - DNA, 15 bp, Homo sapiens
gggtccaagccctaa

SEQ ID NO: 462536 - DNA, 15 bp, Homo sapiens
ggggtccaagcccta

SEQ ID NO: 462537 - DNA, 15 bp, Homo sapiens
aggggtccaagccct

SEQ ID NO: 462538 - DNA, 15 bp, Homo sapiens
gaggggtccaagccc

SEQ ID NO: 462539 - DNA, 15 bp, Homo sapiens
tgaggggtccaagcc

SEQ ID NO: 462540 - DNA, 15 bp, Homo sapiens
ctgaggggtccaagc

SEQ ID NO: 462541 - DNA, 15 bp, Homo sapiens
gctgaggggtccaag

SEQ ID NO: 462542 - DNA, 15 bp, Homo sapiens
ggctgaggggtccaa

SEQ ID NO: 462543 - DNA, 15 bp, Homo sapiens
gggctgaggggtcca

SEQ ID NO: 462544 - DNA, 15 bp, Homo sapiens
ggggctgaggggtcc

SEQ ID NO: 462545 - DNA, 15 bp, Homo sapiens
gggggctgaggggtc

SEQ ID NO: 462546 - DNA, 15 bp, Homo sapiens
tgggggctgaggggt

SEQ ID NO: 462547 - DNA, 15 bp, Homo sapiens
gtgggggctgagggg

SEQ ID NO: 462548 - DNA, 15 bp, Homo sapiens
ggtgggggctgaggg

SEQ ID NO: 462549 - DNA, 15 bp, Homo sapiens
gggtgggggctgagg

SEQ ID NO: 462550 - DNA, 15 bp, Homo sapiens
ggggtgggggctgag

SEQ ID NO: 462551 - DNA, 15 bp, Homo sapiens
tggggtgggggctga

SEQ ID NO: 462552 - DNA, 15 bp, Homo sapiens
gtggggtgggggctg

SEQ ID NO: 462553 - DNA, 15 bp, Homo sapiens
ggtggggtgggggct

SEQ ID NO: 462554 - DNA, 15 bp, Homo sapiens
aggtggggtgggggc

SEQ ID NO: 462555 - DNA, 15 bp, Homo sapiens
taggtggggtggggg

SEQ ID NO: 462556 - DNA, 15 bp, Homo sapiens
ctaggtggggtgggg

SEQ ID NO: 462557 - DNA, 15 bp, Homo sapiens
gctaggtggggtggg

SEQ ID NO: 462558 - DNA, 15 bp, Homo sapiens
ggctaggtggggtgg

SEQ ID NO: 462559 - DNA, 15 bp, Homo sapiens
gggctaggtggggtg

SEQ ID NO: 462560 - DNA, 15 bp, Homo sapiens
agggctaggtggggt

SEQ ID NO: 462561 - DNA, 15 bp, Homo sapiens
cagggctaggtgggg

SEQ ID NO: 462562 - DNA, 15 bp, Homo sapiens
acagggctaggtggg

SEQ ID NO: 462563 - DNA, 15 bp, Homo sapiens
tacagggctaggtgg

SEQ ID NO: 462564 - DNA, 15 bp, Homo sapiens
ctacagggctaggtg

SEQ ID NO: 462565 - DNA, 15 bp, Homo sapiens
cctacagggctaggt

SEQ ID NO: 462566 - DNA, 15 bp, Homo sapiens
ccctacagggctagg

SEQ ID NO: 462567 - DNA, 15 bp, Homo sapiens
cccctacagggctag

SEQ ID NO: 462568 - DNA, 15 bp, Homo sapiens
tcccctacagggcta

SEQ ID NO: 462569 - DNA, 15 bp, Homo sapiens
ctcccctacagggct

SEQ ID NO: 462570 - DNA, 15 bp, Homo sapiens
gctcccctacagggc

SEQ ID NO: 462571 - DNA, 15 bp, Homo sapiens
tgctcccctacaggg

SEQ ID NO: 462572 - DNA, 15 bp, Homo sapiens
ctgctcccctacagg

SEQ ID NO: 462573 - DNA, 15 bp, Homo sapiens
cctgctcccctacag

SEQ ID NO: 462574 - DNA, 15 bp, Homo sapiens
gcctgctcccctaca

SEQ ID NO: 462575 - DNA, 15 bp, Homo sapiens
tgcctgctcccctac

SEQ ID NO: 462576 - DNA, 15 bp, Homo sapiens
ttgcctgctccccta

SEQ ID NO: 462577 - DNA, 15 bp, Homo sapiens
tttgcctgctcccct

SEQ ID NO: 462578 - DNA, 15 bp, Homo sapiens
gtttgcctgctcccc

SEQ ID NO: 462579 - DNA, 15 bp, Homo sapiens
ggtttgcctgctccc

SEQ ID NO: 462580 - DNA, 15 bp, Homo sapiens
aggtttgcctgctcc

SEQ ID NO: 462581 - DNA, 15 bp, Homo sapiens
caggtttgcctgctc

SEQ ID NO: 462582 - DNA, 15 bp, Homo sapiens
ccaggtttgcctgct

SEQ ID NO: 462583 - DNA, 15 bp, Homo sapiens
cccaggtttgcctgc

SEQ ID NO: 462584 - DNA, 15 bp, Homo sapiens
gcccaggtttgcctg

SEQ ID NO: 462585 - DNA, 15 bp, Homo sapiens
agcccaggtttgcct

SEQ ID NO: 462586 - DNA, 15 bp, Homo sapiens
gagcccaggtttgcc

SEQ ID NO: 462587 - DNA, 15 bp, Homo sapiens
tgagcccaggtttgc

SEQ ID NO: 462588 - DNA, 15 bp, Homo sapiens
ttgagcccaggtttg

SEQ ID NO: 462589 - DNA, 15 bp, Homo sapiens
cttgagcccaggttt

SEQ ID NO: 462590 - DNA, 15 bp, Homo sapiens
ccttgagcccaggtt

SEQ ID NO: 462591 - DNA, 15 bp, Homo sapiens
gccttgagcccaggt

SEQ ID NO: 462592 - DNA, 15 bp, Homo sapiens
ggccttgagcccagg

SEQ ID NO: 462593 - DNA, 15 bp, Homo sapiens
aggccttgagcccag

SEQ ID NO: 462594 - DNA, 15 bp, Homo sapiens
gaggccttgagccca

SEQ ID NO: 462595 - DNA, 15 bp, Homo sapiens
agaggccttgagccc

SEQ ID NO: 462596 - DNA, 15 bp, Homo sapiens
cagaggccttgagcc

SEQ ID NO: 462597 - DNA, 15 bp, Homo sapiens
acagaggccttgagc

SEQ ID NO: 462598 - DNA, 15 bp, Homo sapiens
cacagaggccttgag

SEQ ID NO: 462599 - DNA, 15 bp, Homo sapiens
tcacagaggccttga

SEQ ID NO: 462600 - DNA, 15 bp, Homo sapiens
gtcacagaggccttg

SEQ ID NO: 462601 - DNA, 15 bp, Homo sapiens
ggtcacagaggcctt

SEQ ID NO: 462602 - DNA, 15 bp, Homo sapiens
aggtcacagaggcct

SEQ ID NO: 462603 - DNA, 15 bp, Homo sapiens
aaggtcacagaggcc

SEQ ID NO: 462604 - DNA, 15 bp, Homo sapiens
caaggtcacagaggc

SEQ ID NO: 462605 - DNA, 15 bp, Homo sapiens
ccaaggtcacagagg

SEQ ID NO: 462606 - DNA, 15 bp, Homo sapiens
cccaaggtcacagag

SEQ ID NO: 462607 - DNA, 15 bp, Homo sapiens
gcccaaggtcacaga

SEQ ID NO: 462608 - DNA, 15 bp, Homo sapiens
ggcccaaggtcacag

SEQ ID NO: 462609 - DNA, 15 bp, Homo sapiens
aggcccaaggtcaca

SEQ ID NO: 462610 - DNA, 15 bp, Homo sapiens
aaggcccaaggtcac

SEQ ID NO: 462611 - DNA, 15 bp, Homo sapiens
aaaggcccaaggtca

SEQ ID NO: 462612 - DNA, 15 bp, Homo sapiens
caaaggcccaaggtc

SEQ ID NO: 462613 - DNA, 15 bp, Homo sapiens
tcaaaggcccaaggt

SEQ ID NO: 462614 - DNA, 15 bp, Homo sapiens
gtcaaaggcccaagg

SEQ ID NO: 462615 - DNA, 15 bp, Homo sapiens
tgtcaaaggcccaag

SEQ ID NO: 462616 - DNA, 15 bp, Homo sapiens
ctgtcaaaggcccaa

SEQ ID NO: 462617 - DNA, 15 bp, Homo sapiens
gctgtcaaaggccca

SEQ ID NO: 462618 - DNA, 15 bp, Homo sapiens
ggctgtcaaaggccc

SEQ ID NO: 462619 - DNA, 15 bp, Homo sapiens
aggctgtcaaaggcc

SEQ ID NO: 462620 - DNA, 15 bp, Homo sapiens
taggctgtcaaaggc

SEQ ID NO: 462621 - DNA, 15 bp, Homo sapiens
ttaggctgtcaaagg

SEQ ID NO: 462622 - DNA, 15 bp, Homo sapiens
tttaggctgtcaaag

SEQ ID NO: 462623 - DNA, 15 bp, Homo sapiens
gtttaggctgtcaaa

SEQ ID NO: 462624 - DNA, 15 bp, Homo sapiens
ggtttaggctgtcaa

SEQ ID NO: 462625 - DNA, 15 bp, Homo sapiens
aggtttaggctgtca

SEQ ID NO: 462626 - DNA, 15 bp, Homo sapiens
gaggtttaggctgtc

SEQ ID NO: 462627 - DNA, 15 bp, Homo sapiens
tgaggtttaggctgt

SEQ ID NO: 462628 - DNA, 15 bp, Homo sapiens
atgaggtttaggctg

SEQ ID NO: 462629 - DNA, 15 bp, Homo sapiens
gatgaggtttaggct

SEQ ID NO: 462630 - DNA, 15 bp, Homo sapiens
ggatgaggtttaggc

SEQ ID NO: 462631 - DNA, 15 bp, Homo sapiens
aggatgaggtttagg

SEQ ID NO: 462632 - DNA, 15 bp, Homo sapiens
aaggatgaggtttag

SEQ ID NO: 462633 - DNA, 15 bp, Homo sapiens
gaaggatgaggttta

SEQ ID NO: 462634 - DNA, 15 bp, Homo sapiens
agaaggatgaggttt

SEQ ID NO: 462635 - DNA, 15 bp, Homo sapiens
gagaaggatgaggtt

SEQ ID NO: 462636 - DNA, 15 bp, Homo sapiens
tgagaaggatgaggt

SEQ ID NO: 462637 - DNA, 15 bp, Homo sapiens
atgagaaggatgagg

SEQ ID NO: 462638 - DNA, 15 bp, Homo sapiens
gatgagaaggatgag

SEQ ID NO: 462639 - DNA, 15 bp, Homo sapiens
agatgagaaggatga

SEQ ID NO: 462640 - DNA, 15 bp, Homo sapiens
gagatgagaaggatg

SEQ ID NO: 462641 - DNA, 15 bp, Homo sapiens
agagatgagaaggat

SEQ ID NO: 462642 - DNA, 15 bp, Homo sapiens
tagagatgagaagga

SEQ ID NO: 462643 - DNA, 15 bp, Homo sapiens
ttagagatgagaagg

SEQ ID NO: 462644 - DNA, 15 bp, Homo sapiens
tttagagatgagaag

SEQ ID NO: 462645 - DNA, 15 bp, Homo sapiens
ttttagagatgagaa

SEQ ID NO: 462646 - DNA, 15 bp, Homo sapiens
attttagagatgaga

SEQ ID NO: 462647 - DNA, 15 bp, Homo sapiens
cattttagagatgag

SEQ ID NO: 462648 - DNA, 15 bp, Homo sapiens
tcattttagagatga

SEQ ID NO: 462649 - DNA, 15 bp, Homo sapiens
gtcattttagagatg

SEQ ID NO: 462650 - DNA, 15 bp, Homo sapiens
cgtcattttagagat

SEQ ID NO: 462651 - DNA, 15 bp, Homo sapiens
tcgtcattttagaga

SEQ ID NO: 462652 - DNA, 15 bp, Homo sapiens
atcgtcattttagag

SEQ ID NO: 462653 - DNA, 15 bp, Homo sapiens
catcgtcattttaga

SEQ ID NO: 462654 - DNA, 15 bp, Homo sapiens
gcatcgtcattttag

SEQ ID NO: 462655 - DNA, 15 bp, Homo sapiens
agcatcgtcatttta

SEQ ID NO: 462656 - DNA, 15 bp, Homo sapiens
cagcatcgtcatttt

SEQ ID NO: 462657 - DNA, 15 bp, Homo sapiens
tcagcatcgtcattt

SEQ ID NO: 462658 - DNA, 15 bp, Homo sapiens
ctcagcatcgtcatt

SEQ ID NO: 462659 - DNA, 15 bp, Homo sapiens
cctcagcatcgtcat

SEQ ID NO: 462660 - DNA, 15 bp, Homo sapiens
acctcagcatcgtca

SEQ ID NO: 462661 - DNA, 15 bp, Homo sapiens
cacctcagcatcgtc

SEQ ID NO: 462662 - DNA, 15 bp, Homo sapiens
tcacctcagcatcgt

SEQ ID NO: 462663 - DNA, 15 bp, Homo sapiens
gtcacctcagcatcg

SEQ ID NO: 462664 - DNA, 15 bp, Homo sapiens
ggtcacctcagcatc

SEQ ID NO: 462665 - DNA, 15 bp, Homo sapiens
cggtcacctcagcat

SEQ ID NO: 462666 - DNA, 15 bp, Homo sapiens
gcggtcacctcagca

SEQ ID NO: 462667 - DNA, 15 bp, Homo sapiens
agcggtcacctcagc

SEQ ID NO: 462668 - DNA, 15 bp, Homo sapiens
gagcggtcacctcag

SEQ ID NO: 462669 - DNA, 15 bp, Homo sapiens
ggagcggtcacctca

SEQ ID NO: 462670 - DNA, 15 bp, Homo sapiens
tggagcggtcacctc

SEQ ID NO: 462671 - DNA, 15 bp, Homo sapiens
ctggagcggtcacct

SEQ ID NO: 462672 - DNA, 15 bp, Homo sapiens
tctggagcggtcacc

SEQ ID NO: 462673 - DNA, 15 bp, Homo sapiens
ctctggagcggtcac

SEQ ID NO: 462674 - DNA, 15 bp, Homo sapiens
cctctggagcggtca

SEQ ID NO: 462675 - DNA, 15 bp, Homo sapiens
ccctctggagcggtc

SEQ ID NO: 462676 - DNA, 15 bp, Homo sapiens
accctctggagcggt

SEQ ID NO: 462677 - DNA, 15 bp, Homo sapiens
taccctctggagcgg

SEQ ID NO: 462678 - DNA, 15 bp, Homo sapiens
gtaccctctggagcg

SEQ ID NO: 462679 - DNA, 15 bp, Homo sapiens
agtaccctctggagc

SEQ ID NO: 462680 - DNA, 15 bp, Homo sapiens
cagtaccctctggag

SEQ ID NO: 462681 - DNA, 15 bp, Homo sapiens
tcagtaccctctgga

SEQ ID NO: 462682 - DNA, 15 bp, Homo sapiens
ctcagtaccctctgg

SEQ ID NO: 462683 - DNA, 15 bp, Homo sapiens
tctcagtaccctctg

SEQ ID NO: 462684 - DNA, 15 bp, Homo sapiens
ctctcagtaccctct

SEQ ID NO: 462685 - DNA, 15 bp, Homo sapiens
cctctcagtaccctc

SEQ ID NO: 462686 - DNA, 15 bp, Homo sapiens
ccctctcagtaccct

SEQ ID NO: 462687 - DNA, 15 bp, Homo sapiens
accctctcagtaccc

SEQ ID NO: 462688 - DNA, 15 bp, Homo sapiens
gaccctctcagtacc

SEQ ID NO: 462689 - DNA, 15 bp, Homo sapiens
tgaccctctcagtac

SEQ ID NO: 462690 - DNA, 15 bp, Homo sapiens
atgaccctctcagta

SEQ ID NO: 462691 - DNA, 15 bp, Homo sapiens
tatgaccctctcagt

SEQ ID NO: 462692 - DNA, 15 bp, Homo sapiens
gtatgaccctctcag

SEQ ID NO: 462693 - DNA, 15 bp, Homo sapiens
cgtatgaccctctca

SEQ ID NO: 462694 - DNA, 15 bp, Homo sapiens
ccgtatgaccctctc

SEQ ID NO: 462695 - DNA, 15 bp, Homo sapiens
cccgtatgaccctct

SEQ ID NO: 462696 - DNA, 15 bp, Homo sapiens
gcccgtatgaccctc

SEQ ID NO: 462697 - DNA, 15 bp, Homo sapiens
ggcccgtatgaccct

SEQ ID NO: 462698 - DNA, 15 bp, Homo sapiens
aggcccgtatgaccc

SEQ ID NO: 462699 - DNA, 15 bp, Homo sapiens
caggcccgtatgacc

SEQ ID NO: 462700 - DNA, 15 bp, Homo sapiens
ccaggcccgtatgac

SEQ ID NO: 462701 - DNA, 15 bp, Homo sapiens
accaggcccgtatga

SEQ ID NO: 462702 - DNA, 15 bp, Homo sapiens
caccaggcccgtatg

SEQ ID NO: 462703 - DNA, 15 bp, Homo sapiens
tcaccaggcccgtat

SEQ ID NO: 462704 - DNA, 15 bp, Homo sapiens
ctcaccaggcccgta

SEQ ID NO: 462705 - DNA, 15 bp, Homo sapiens
gctcaccaggcccgt

SEQ ID NO: 462706 - DNA, 15 bp, Homo sapiens
tgctcaccaggcccg

SEQ ID NO: 462707 - DNA, 15 bp, Homo sapiens
atgctcaccaggccc

SEQ ID NO: 462708 - DNA, 15 bp, Homo sapiens
gatgctcaccaggcc

SEQ ID NO: 462709 - DNA, 15 bp, Homo sapiens
tgatgctcaccaggc

SEQ ID NO: 462710 - DNA, 15 bp, Homo sapiens
gtgatgctcaccagg

SEQ ID NO: 462711 - DNA, 15 bp, Homo sapiens
ggtgatgctcaccag

SEQ ID NO: 462712 - DNA, 15 bp, Homo sapiens
tggtgatgctcacca

SEQ ID NO: 462713 - DNA, 15 bp, Homo sapiens
gtggtgatgctcacc

SEQ ID NO: 462714 - DNA, 15 bp, Homo sapiens
ggtggtgatgctcac

SEQ ID NO: 462715 - DNA, 15 bp, Homo sapiens
gggtggtgatgctca

SEQ ID NO: 462716 - DNA, 15 bp, Homo sapiens
ggggtggtgatgctc

SEQ ID NO: 462717 - DNA, 15 bp, Homo sapiens
aggggtggtgatgct

SEQ ID NO: 462718 - DNA, 15 bp, Homo sapiens
gaggggtggtgatgc

SEQ ID NO: 462719 - DNA, 15 bp, Homo sapiens
tgaggggtggtgatg

SEQ ID NO: 462720 - DNA, 15 bp, Homo sapiens
ctgaggggtggtgat

SEQ ID NO: 462721 - DNA, 15 bp, Homo sapiens
tctgaggggtggtga

SEQ ID NO: 462722 - DNA, 15 bp, Homo sapiens
gtctgaggggtggtg

SEQ ID NO: 462723 - DNA, 15 bp, Homo sapiens
tgtctgaggggtggt

SEQ ID NO: 462724 - DNA, 15 bp, Homo sapiens
gtgtctgaggggtgg

SEQ ID NO: 462725 - DNA, 15 bp, Homo sapiens
agtgtctgaggggtg

SEQ ID NO: 462726 - DNA, 15 bp, Homo sapiens
aagtgtctgaggggt

SEQ ID NO: 462727 - DNA, 15 bp, Homo sapiens
caagtgtctgagggg

SEQ ID NO: 462728 - DNA, 15 bp, Homo sapiens
tcaagtgtctgaggg

SEQ ID NO: 462729 - DNA, 15 bp, Homo sapiens
ctcaagtgtctgagg

SEQ ID NO: 462730 - DNA, 15 bp, Homo sapiens
cctcaagtgtctgag

SEQ ID NO: 462731 - DNA, 15 bp, Homo sapiens
acctcaagtgtctga

SEQ ID NO: 462732 - DNA, 15 bp, Homo sapiens
aacctcaagtgtctg

SEQ ID NO: 462733 - DNA, 15 bp, Homo sapiens
gaacctcaagtgtct

SEQ ID NO: 462734 - DNA, 15 bp, Homo sapiens
ggaacctcaagtgtc

SEQ ID NO: 462735 - DNA, 15 bp, Homo sapiens
aggaacctcaagtgt

SEQ ID NO: 462736 - DNA, 15 bp, Homo sapiens
aaggaacctcaagtg

SEQ ID NO: 462737 - DNA, 15 bp, Homo sapiens
taaggaacctcaagt

SEQ ID NO: 462738 - DNA, 15 bp, Homo sapiens
ataaggaacctcaag

SEQ ID NO: 462739 - DNA, 15 bp, Homo sapiens
cataaggaacctcaa

SEQ ID NO: 462740 - DNA, 15 bp, Homo sapiens
acataaggaacctca

SEQ ID NO: 462741 - DNA, 15 bp, Homo sapiens
cacataaggaacctc

SEQ ID NO: 462742 - DNA, 15 bp, Homo sapiens
gcacataaggaacct

SEQ ID NO: 462743 - DNA, 15 bp, Homo sapiens
tgcacataaggaacc

SEQ ID NO: 462744 - DNA, 15 bp, Homo sapiens
gtgcacataaggaac

SEQ ID NO: 462745 - DNA, 15 bp, Homo sapiens
agtgcacataaggaa

SEQ ID NO: 462746 - DNA, 15 bp, Homo sapiens
cagtgcacataagga

SEQ ID NO: 462747 - DNA, 15 bp, Homo sapiens
gcagtgcacataagg

SEQ ID NO: 462748 - DNA, 15 bp, Homo sapiens
tgcagtgcacataag

SEQ ID NO: 462749 - DNA, 15 bp, Homo sapiens
gtgcagtgcacataa

SEQ ID NO: 462750 - DNA, 15 bp, Homo sapiens
ggtgcagtgcacata

SEQ ID NO: 462751 - DNA, 15 bp, Homo sapiens
tggtgcagtgcacat

SEQ ID NO: 462752 - DNA, 15 bp, Homo sapiens
atggtgcagtgcaca

SEQ ID NO: 462753 - DNA, 15 bp, Homo sapiens
gatggtgcagtgcac

SEQ ID NO: 462754 - DNA, 15 bp, Homo sapiens
tgatggtgcagtgca

SEQ ID NO: 462755 - DNA, 15 bp, Homo sapiens
gtgatggtgcagtgc

SEQ ID NO: 462756 - DNA, 15 bp, Homo sapiens
tgtgatggtgcagtg

SEQ ID NO: 462757 - DNA, 15 bp, Homo sapiens
ctgtgatggtgcagt

SEQ ID NO: 462758 - DNA, 15 bp, Homo sapiens
cctgtgatggtgcag

SEQ ID NO: 462759 - DNA, 15 bp, Homo sapiens
gcctgtgatggtgca

SEQ ID NO: 462760 - DNA, 15 bp, Homo sapiens
tgcctgtgatggtgc

SEQ ID NO: 462761 - DNA, 15 bp, Homo sapiens
ttgcctgtgatggtg

SEQ ID NO: 462762 - DNA, 15 bp, Homo sapiens
tttgcctgtgatggt

SEQ ID NO: 462763 - DNA, 15 bp, Homo sapiens
gtttgcctgtgatgg

SEQ ID NO: 462764 - DNA, 15 bp, Homo sapiens
tgtttgcctgtgatg

SEQ ID NO: 462765 - DNA, 15 bp, Homo sapiens
atgtttgcctgtgat

SEQ ID NO: 462766 - DNA, 15 bp, Homo sapiens
catgtttgcctgtga

SEQ ID NO: 462767 - DNA, 15 bp, Homo sapiens
ccatgtttgcctgtg

SEQ ID NO: 462768 - DNA, 15 bp, Homo sapiens
gccatgtttgcctgt

SEQ ID NO: 462769 - DNA, 15 bp, Homo sapiens
tgccatgtttgcctg

SEQ ID NO: 462770 - DNA, 15 bp, Homo sapiens
gtgccatgtttgcct

SEQ ID NO: 462771 - DNA, 15 bp, Homo sapiens
tgtgccatgtttgcc

SEQ ID NO: 462772 - DNA, 15 bp, Homo sapiens
gtgtgccatgtttgc

SEQ ID NO: 462773 - DNA, 15 bp, Homo sapiens
tgtgtgccatgtttg

SEQ ID NO: 462774 - DNA, 15 bp, Homo sapiens
gtgtgtgccatgttt

SEQ ID NO: 462775 - DNA, 15 bp, Homo sapiens
tgtgtgtgccatgtt

SEQ ID NO: 462776 - DNA, 15 bp, Homo sapiens
ctgtgtgtgccatgt

SEQ ID NO: 462777 - DNA, 15 bp, Homo sapiens
cctgtgtgtgccatg

SEQ ID NO: 462778 - DNA, 15 bp, Homo sapiens
gcctgtgtgtgccat

SEQ ID NO: 462779 - DNA, 15 bp, Homo sapiens
tgcctgtgtgtgcca

SEQ ID NO: 462780 - DNA, 15 bp, Homo sapiens
gtgcctgtgtgtgcc

SEQ ID NO: 462781 - DNA, 15 bp, Homo sapiens
tgtgcctgtgtgtgc

SEQ ID NO: 462782 - DNA, 15 bp, Homo sapiens
gtgtgcctgtgtgtg

SEQ ID NO: 462783 - DNA, 15 bp, Homo sapiens
cgtgtgcctgtgtgt

SEQ ID NO: 462784 - DNA, 15 bp, Homo sapiens
acgtgtgcctgtgtg

SEQ ID NO: 462785 - DNA, 15 bp, Homo sapiens
cacgtgtgcctgtgt

SEQ ID NO: 462786 - DNA, 15 bp, Homo sapiens
acacgtgtgcctgtg

SEQ ID NO: 462787 - DNA, 15 bp, Homo sapiens
aacacgtgtgcctgt

SEQ ID NO: 462788 - DNA, 15 bp, Homo sapiens
aaacacgtgtgcctg

SEQ ID NO: 462789 - DNA, 15 bp, Homo sapiens
aaaacacgtgtgcct

SEQ ID NO: 462790 - DNA, 15 bp, Homo sapiens
gaaaacacgtgtgcc

SEQ ID NO: 462791 - DNA, 15 bp, Homo sapiens
tgaaaacacgtgtgc

SEQ ID NO: 462792 - DNA, 15 bp, Homo sapiens
gtgaaaacacgtgtg

SEQ ID NO: 462793 - DNA, 15 bp, Homo sapiens
tgtgaaaacacgtgt

SEQ ID NO: 462794 - DNA, 15 bp, Homo sapiens
atgtgaaaacacgtg

SEQ ID NO: 462795 - DNA, 15 bp, Homo sapiens
catgtgaaaacacgt

SEQ ID NO: 462796 - DNA, 15 bp, Homo sapiens
gcatgtgaaaacacg

SEQ ID NO: 462797 - DNA, 15 bp, Homo sapiens
ggcatgtgaaaacac

SEQ ID NO: 462798 - DNA, 15 bp, Homo sapiens
gggcatgtgaaaaca

SEQ ID NO: 462799 - DNA, 15 bp, Homo sapiens
tgggcatgtgaaaac

SEQ ID NO: 462800 - DNA, 15 bp, Homo sapiens
gtgggcatgtgaaaa

SEQ ID NO: 462801 - DNA, 15 bp, Homo sapiens
tgtgggcatgtgaaa

SEQ ID NO: 462802 - DNA, 15 bp, Homo sapiens
atgtgggcatgtgaa

SEQ ID NO: 462803 - DNA, 15 bp, Homo sapiens
catgtgggcatgtga

SEQ ID NO: 462804 - DNA, 15 bp, Homo sapiens
gcatgtgggcatgtg

SEQ ID NO: 462805 - DNA, 15 bp, Homo sapiens
tgcatgtgggcatgt

SEQ ID NO: 462806 - DNA, 15 bp, Homo sapiens
gtgcatgtgggcatg

SEQ ID NO: 462807 - DNA, 15 bp, Homo sapiens
ggtgcatgtgggcat

SEQ ID NO: 462808 - DNA, 15 bp, Homo sapiens
gggtgcatgtgggca

SEQ ID NO: 462809 - DNA, 15 bp, Homo sapiens
tgggtgcatgtgggc

SEQ ID NO: 462810 - DNA, 15 bp, Homo sapiens
ctgggtgcatgtggg

SEQ ID NO: 462811 - DNA, 15 bp, Homo sapiens
tctgggtgcatgtgg

SEQ ID NO: 462812 - DNA, 15 bp, Homo sapiens
gtctgggtgcatgtg

SEQ ID NO: 462813 - DNA, 15 bp, Homo sapiens
tgtctgggtgcatgt

SEQ ID NO: 462814 - DNA, 15 bp, Homo sapiens
gtgtctgggtgcatg

SEQ ID NO: 462815 - DNA, 15 bp, Homo sapiens
cgtgtctgggtgcat

SEQ ID NO: 462816 - DNA, 15 bp, Homo sapiens
acgtgtctgggtgca

SEQ ID NO: 462817 - DNA, 15 bp, Homo sapiens
cacgtgtctgggtgc

SEQ ID NO: 462818 - DNA, 15 bp, Homo sapiens
gcacgtgtctgggtg

SEQ ID NO: 462819 - DNA, 15 bp, Homo sapiens
cgcacgtgtctgggt

SEQ ID NO: 462820 - DNA, 15 bp, Homo sapiens
gcgcacgtgtctggg

SEQ ID NO: 462821 - DNA, 15 bp, Homo sapiens
tgcgcacgtgtctgg

SEQ ID NO: 462822 - DNA, 15 bp, Homo sapiens
gtgcgcacgtgtctg

SEQ ID NO: 462823 - DNA, 15 bp, Homo sapiens
ggtgcgcacgtgtct

SEQ ID NO: 462824 - DNA, 15 bp, Homo sapiens
tggtgcgcacgtgtc

SEQ ID NO: 462825 - DNA, 15 bp, Homo sapiens
ctggtgcgcacgtgt

SEQ ID NO: 462826 - DNA, 15 bp, Homo sapiens
gctggtgcgcacgtg

SEQ ID NO: 462827 - DNA, 15 bp, Homo sapiens
cgctggtgcgcacgt

SEQ ID NO: 462828 - DNA, 15 bp, Homo sapiens
gcgctggtgcgcacg

SEQ ID NO: 462829 - DNA, 15 bp, Homo sapiens
ggcgctggtgcgcac

SEQ ID NO: 462830 - DNA, 15 bp, Homo sapiens
gggcgctggtgcgca

SEQ ID NO: 462831 - DNA, 15 bp, Homo sapiens
tgggcgctggtgcgc

SEQ ID NO: 462832 - DNA, 15 bp, Homo sapiens
atgggcgctggtgcg

SEQ ID NO: 462833 - DNA, 15 bp, Homo sapiens
catgggcgctggtgc

SEQ ID NO: 462834 - DNA, 15 bp, Homo sapiens
ccatgggcgctggtg

SEQ ID NO: 462835 - DNA, 15 bp, Homo sapiens
cccatgggcgctggt

SEQ ID NO: 462836 - DNA, 15 bp, Homo sapiens
gcccatgggcgctgg

SEQ ID NO: 462837 - DNA, 15 bp, Homo sapiens
ggcccatgggcgctg

SEQ ID NO: 462838 - DNA, 15 bp, Homo sapiens
gggcccatgggcgct

SEQ ID NO: 462839 - DNA, 15 bp, Homo sapiens
tgggcccatgggcgc

SEQ ID NO: 462840 - DNA, 15 bp, Homo sapiens
gtgggcccatgggcg

SEQ ID NO: 462841 - DNA, 15 bp, Homo sapiens
tgtgggcccatgggc

SEQ ID NO: 462842 - DNA, 15 bp, Homo sapiens
gtgtgggcccatggg

SEQ ID NO: 462843 - DNA, 15 bp, Homo sapiens
cgtgtgggcccatgg

SEQ ID NO: 462844 - DNA, 15 bp, Homo sapiens
gcgtgtgggcccatg

SEQ ID NO: 462845 - DNA, 15 bp, Homo sapiens
ggcgtgtgggcccat

SEQ ID NO: 462846 - DNA, 15 bp, Homo sapiens
gggcgtgtgggccca

SEQ ID NO: 462847 - DNA, 15 bp, Homo sapiens
agggcgtgtgggccc

SEQ ID NO: 462848 - DNA, 15 bp, Homo sapiens
gagggcgtgtgggcc

SEQ ID NO: 462849 - DNA, 15 bp, Homo sapiens
ggagggcgtgtgggc

SEQ ID NO: 462850 - DNA, 15 bp, Homo sapiens
tggagggcgtgtggg

SEQ ID NO: 462851 - DNA, 15 bp, Homo sapiens
gtggagggcgtgtgg

SEQ ID NO: 462852 - DNA, 15 bp, Homo sapiens
tgtggagggcgtgtg

SEQ ID NO: 462853 - DNA, 15 bp, Homo sapiens
ctgtggagggcgtgt

SEQ ID NO: 462854 - DNA, 15 bp, Homo sapiens
cctgtggagggcgtg

SEQ ID NO: 462855 - DNA, 15 bp, Homo sapiens
ccctgtggagggcgt

SEQ ID NO: 462856 - DNA, 15 bp, Homo sapiens
tccctgtggagggcg

SEQ ID NO: 462857 - DNA, 15 bp, Homo sapiens
atccctgtggagggc

SEQ ID NO: 462858 - DNA, 15 bp, Homo sapiens
aatccctgtggaggg

SEQ ID NO: 462859 - DNA, 15 bp, Homo sapiens
gaatccctgtggagg

SEQ ID NO: 462860 - DNA, 15 bp, Homo sapiens
tgaatccctgtggag

SEQ ID NO: 462861 - DNA, 15 bp, Homo sapiens
gtgaatccctgtgga

SEQ ID NO: 462862 - DNA, 15 bp, Homo sapiens
cgtgaatccctgtgg

SEQ ID NO: 462863 - DNA, 15 bp, Homo sapiens
gcgtgaatccctgtg

SEQ ID NO: 462864 - DNA, 15 bp, Homo sapiens
ggcgtgaatccctgt

SEQ ID NO: 462865 - DNA, 15 bp, Homo sapiens
tggcgtgaatccctg

SEQ ID NO: 462866 - DNA, 15 bp, Homo sapiens
gtggcgtgaatccct

SEQ ID NO: 462867 - DNA, 15 bp, Homo sapiens
tgtggcgtgaatccc

SEQ ID NO: 462868 - DNA, 15 bp, Homo sapiens
gtgtggcgtgaatcc

SEQ ID NO: 462869 - DNA, 15 bp, Homo sapiens
ggtgtggcgtgaatc

SEQ ID NO: 462870 - DNA, 15 bp, Homo sapiens
gggtgtggcgtgaat

SEQ ID NO: 462871 - DNA, 15 bp, Homo sapiens
tgggtgtggcgtgaa

SEQ ID NO: 462872 - DNA, 15 bp, Homo sapiens
gtgggtgtggcgtga

SEQ ID NO: 462873 - DNA, 15 bp, Homo sapiens
tgtgggtgtggcgtg

SEQ ID NO: 462874 - DNA, 15 bp, Homo sapiens
gtgtgggtgtggcgt

SEQ ID NO: 462875 - DNA, 15 bp, Homo sapiens
tgtgtgggtgtggcg

SEQ ID NO: 462876 - DNA, 15 bp, Homo sapiens
gtgtgtgggtgtggc

SEQ ID NO: 462877 - DNA, 15 bp, Homo sapiens
ggtgtgtgggtgtgg

SEQ ID NO: 462878 - DNA, 15 bp, Homo sapiens
gggtgtgtgggtgtg

SEQ ID NO: 462879 - DNA, 15 bp, Homo sapiens
agggtgtgtgggtgt

SEQ ID NO: 462880 - DNA, 15 bp, Homo sapiens
gagggtgtgtgggtg

SEQ ID NO: 462881 - DNA, 15 bp, Homo sapiens
ggagggtgtgtgggt

SEQ ID NO: 462882 - DNA, 15 bp, Homo sapiens
gggagggtgtgtggg

SEQ ID NO: 462883 - DNA, 15 bp, Homo sapiens
cgggagggtgtgtgg

SEQ ID NO: 462884 - DNA, 15 bp, Homo sapiens
tcgggagggtgtgtg

SEQ ID NO: 462885 - DNA, 15 bp, Homo sapiens
ctcgggagggtgtgt

SEQ ID NO: 462886 - DNA, 15 bp, Homo sapiens
gctcgggagggtgtg

SEQ ID NO: 462887 - DNA, 15 bp, Homo sapiens
agctcgggagggtgt

SEQ ID NO: 462888 - DNA, 15 bp, Homo sapiens
gagctcgggagggtg

SEQ ID NO: 462889 - DNA, 15 bp, Homo sapiens
tgagctcgggagggt

SEQ ID NO: 462890 - DNA, 15 bp, Homo sapiens
ttgagctcgggaggg

SEQ ID NO: 462891 - DNA, 15 bp, Homo sapiens
attgagctcgggagg

SEQ ID NO: 462892 - DNA, 15 bp, Homo sapiens
cattgagctcgggag

SEQ ID NO: 462893 - DNA, 15 bp, Homo sapiens
ccattgagctcggga

SEQ ID NO: 462894 - DNA, 15 bp, Homo sapiens
gccattgagctcggg

SEQ ID NO: 462895 - DNA, 15 bp, Homo sapiens
agccattgagctcgg

SEQ ID NO: 462896 - DNA, 15 bp, Homo sapiens
gagccattgagctcg

SEQ ID NO: 462897 - DNA, 15 bp, Homo sapiens
agagccattgagctc

SEQ ID NO: 462898 - DNA, 15 bp, Homo sapiens
cagagccattgagct

SEQ ID NO: 462899 - DNA, 15 bp, Homo sapiens
gcagagccattgagc

SEQ ID NO: 462900 - DNA, 15 bp, Homo sapiens
ggcagagccattgag

SEQ ID NO: 462901 - DNA, 15 bp, Homo sapiens
gggcagagccattga

SEQ ID NO: 462902 - DNA, 15 bp, Homo sapiens
agggcagagccattg

SEQ ID NO: 462903 - DNA, 15 bp, Homo sapiens
cagggcagagccatt

SEQ ID NO: 462904 - DNA, 15 bp, Homo sapiens
gcagggcagagccat

SEQ ID NO: 462905 - DNA, 15 bp, Homo sapiens
ggcagggcagagcca

SEQ ID NO: 462906 - DNA, 15 bp, Homo sapiens
gggcagggcagagcc

SEQ ID NO: 462907 - DNA, 15 bp, Homo sapiens
agggcagggcagagc

SEQ ID NO: 462908 - DNA, 15 bp, Homo sapiens
cagggcagggcagag

SEQ ID NO: 462909 - DNA, 15 bp, Homo sapiens
gcagggcagggcaga

SEQ ID NO: 462910 - DNA, 15 bp, Homo sapiens
tgcagggcagggcag

SEQ ID NO: 462911 - DNA, 15 bp, Homo sapiens
ctgcagggcagggca

SEQ ID NO: 462912 - DNA, 15 bp, Homo sapiens
tctgcagggcagggc

SEQ ID NO: 462913 - DNA, 15 bp, Homo sapiens
ttctgcagggcaggg

SEQ ID NO: 462914 - DNA, 15 bp, Homo sapiens
tttctgcagggcagg

SEQ ID NO: 462915 - DNA, 15 bp, Homo sapiens
ttttctgcagggcag

SEQ ID NO: 462916 - DNA, 15 bp, Homo sapiens
cttttctgcagggca

SEQ ID NO: 462917 - DNA, 15 bp, Homo sapiens
tcttttctgcagggc

SEQ ID NO: 462918 - DNA, 15 bp, Homo sapiens
ttcttttctgcaggg

SEQ ID NO: 462919 - DNA, 15 bp, Homo sapiens
cttcttttctgcagg

SEQ ID NO: 462920 - DNA, 15 bp, Homo sapiens
gcttcttttctgcag

SEQ ID NO: 462921 - DNA, 15 bp, Homo sapiens
agcttcttttctgca

SEQ ID NO: 462922 - DNA, 15 bp, Homo sapiens
cagcttcttttctgc

SEQ ID NO: 462923 - DNA, 15 bp, Homo sapiens
ccagcttcttttctg

SEQ ID NO: 462924 - DNA, 15 bp, Homo sapiens
tccagcttcttttct

SEQ ID NO: 462925 - DNA, 15 bp, Homo sapiens
ctccagcttcttttc

SEQ ID NO: 462926 - DNA, 15 bp, Homo sapiens
cctccagcttctttt

SEQ ID NO: 462927 - DNA, 15 bp, Homo sapiens
acctccagcttcttt

SEQ ID NO: 462928 - DNA, 15 bp, Homo sapiens
cacctccagcttctt

SEQ ID NO: 462929 - DNA, 15 bp, Homo sapiens
acacctccagcttct

SEQ ID NO: 462930 - DNA, 15 bp, Homo sapiens
tacacctccagcttc

SEQ ID NO: 462931 - DNA, 15 bp, Homo sapiens
gtacacctccagctt

SEQ ID NO: 462932 - DNA, 15 bp, Homo sapiens
ggtacacctccagct

SEQ ID NO: 462933 - DNA, 15 bp, Homo sapiens
tggtacacctccagc

SEQ ID NO: 462934 - DNA, 15 bp, Homo sapiens
ctggtacacctccag

SEQ ID NO: 462935 - DNA, 15 bp, Homo sapiens
tctggtacacctcca

SEQ ID NO: 462936 - DNA, 15 bp, Homo sapiens
ctctggtacacctcc

SEQ ID NO: 462937 - DNA, 15 bp, Homo sapiens
gctctggtacacctc

SEQ ID NO: 462938 - DNA, 15 bp, Homo sapiens
tgctctggtacacct

SEQ ID NO: 462939 - DNA, 15 bp, Homo sapiens
atgctctggtacacc

SEQ ID NO: 462940 - DNA, 15 bp, Homo sapiens
gatgctctggtacac

SEQ ID NO: 462941 - DNA, 15 bp, Homo sapiens
cgatgctctggtaca

SEQ ID NO: 462942 - DNA, 15 bp, Homo sapiens
gcgatgctctggtac

SEQ ID NO: 462943 - DNA, 15 bp, Homo sapiens
tgcgatgctctggta

SEQ ID NO: 462944 - DNA, 15 bp, Homo sapiens
ctgcgatgctctggt

SEQ ID NO: 462945 - DNA, 15 bp, Homo sapiens
tctgcgatgctctgg

SEQ ID NO: 462946 - DNA, 15 bp, Homo sapiens
gtctgcgatgctctg

SEQ ID NO: 462947 - DNA, 15 bp, Homo sapiens
ggtctgcgatgctct

SEQ ID NO: 462948 - DNA, 15 bp, Homo sapiens
aggtctgcgatgctc

SEQ ID NO: 462949 - DNA, 15 bp, Homo sapiens
caggtctgcgatgct

SEQ ID NO: 462950 - DNA, 15 bp, Homo sapiens
tcaggtctgcgatgc

SEQ ID NO: 462951 - DNA, 15 bp, Homo sapiens
atcaggtctgcgatg

SEQ ID NO: 462952 - DNA, 15 bp, Homo sapiens
catcaggtctgcgat

SEQ ID NO: 462953 - DNA, 15 bp, Homo sapiens
ccatcaggtctgcga

SEQ ID NO: 462954 - DNA, 15 bp, Homo sapiens
accatcaggtctgcg

SEQ ID NO: 462955 - DNA, 15 bp, Homo sapiens
caccatcaggtctgc

SEQ ID NO: 462956 - DNA, 15 bp, Homo sapiens
ccaccatcaggtctg

SEQ ID NO: 462957 - DNA, 15 bp, Homo sapiens
cccaccatcaggtct

SEQ ID NO: 462958 - DNA, 15 bp, Homo sapiens
gcccaccatcaggtc

SEQ ID NO: 462959 - DNA, 15 bp, Homo sapiens
cgcccaccatcaggt

SEQ ID NO: 462960 - DNA, 15 bp, Homo sapiens
gcgcccaccatcagg

SEQ ID NO: 462961 - DNA, 15 bp, Homo sapiens
tgcgcccaccatcag

SEQ ID NO: 462962 - DNA, 15 bp, Homo sapiens
ttgcgcccaccatca

SEQ ID NO: 462963 - DNA, 15 bp, Homo sapiens
tttgcgcccaccatc

SEQ ID NO: 462964 - DNA, 15 bp, Homo sapiens
ctttgcgcccaccat

SEQ ID NO: 462965 - DNA, 15 bp, Homo sapiens
cctttgcgcccacca

SEQ ID NO: 462966 - DNA, 15 bp, Homo sapiens
tcctttgcgcccacc

SEQ ID NO: 462967 - DNA, 15 bp, Homo sapiens
gtcctttgcgcccac

SEQ ID NO: 462968 - DNA, 15 bp, Homo sapiens
ggtcctttgcgccca

SEQ ID NO: 462969 - DNA, 15 bp, Homo sapiens
tggtcctttgcgccc

SEQ ID NO: 462970 - DNA, 15 bp, Homo sapiens
ctggtcctttgcgcc

SEQ ID NO: 462971 - DNA, 15 bp, Homo sapiens
cctggtcctttgcgc

SEQ ID NO: 462972 - DNA, 15 bp, Homo sapiens
gcctggtcctttgcg

SEQ ID NO: 462973 - DNA, 15 bp, Homo sapiens
cgcctggtcctttgc

SEQ ID NO: 462974 - DNA, 15 bp, Homo sapiens
ccgcctggtcctttg

SEQ ID NO: 462975 - DNA, 15 bp, Homo sapiens
accgcctggtccttt

SEQ ID NO: 462976 - DNA, 15 bp, Homo sapiens
caccgcctggtcctt

SEQ ID NO: 462977 - DNA, 15 bp, Homo sapiens
acaccgcctggtcct

SEQ ID NO: 462978 - DNA, 15 bp, Homo sapiens
aacaccgcctggtcc

SEQ ID NO: 462979 - DNA, 15 bp, Homo sapiens
gaacaccgcctggtc

SEQ ID NO: 462980 - DNA, 15 bp, Homo sapiens
tgaacaccgcctggt

SEQ ID NO: 462981 - DNA, 15 bp, Homo sapiens
ttgaacaccgcctgg

SEQ ID NO: 462982 - DNA, 15 bp, Homo sapiens
tttgaacaccgcctg

SEQ ID NO: 462983 - DNA, 15 bp, Homo sapiens
atttgaacaccgcct

SEQ ID NO: 462984 - DNA, 15 bp, Homo sapiens
catttgaacaccgcc

SEQ ID NO: 462985 - DNA, 15 bp, Homo sapiens
acatttgaacaccgc

SEQ ID NO: 462986 - DNA, 15 bp, Homo sapiens
cacatttgaacaccg

SEQ ID NO: 462987 - DNA, 15 bp, Homo sapiens
tcacatttgaacacc

SEQ ID NO: 462988 - DNA, 15 bp, Homo sapiens
ctcacatttgaacac

SEQ ID NO: 462989 - DNA, 15 bp, Homo sapiens
cctcacatttgaaca

SEQ ID NO: 462990 - DNA, 15 bp, Homo sapiens
acctcacatttgaac

SEQ ID NO: 462991 - DNA, 15 bp, Homo sapiens
gacctcacatttgaa

SEQ ID NO: 462992 - DNA, 15 bp, Homo sapiens
agacctcacatttga

SEQ ID NO: 462993 - DNA, 15 bp, Homo sapiens
gagacctcacatttg

SEQ ID NO: 462994 - DNA, 15 bp, Homo sapiens
tgagacctcacattt

SEQ ID NO: 462995 - DNA, 15 bp, Homo sapiens
ctgagacctcacatt

SEQ ID NO: 462996 - DNA, 15 bp, Homo sapiens
tctgagacctcacat

SEQ ID NO: 462997 - DNA, 15 bp, Homo sapiens
atctgagacctcaca

SEQ ID NO: 462998 - DNA, 15 bp, Homo sapiens
catctgagacctcac

SEQ ID NO: 462999 - DNA, 15 bp, Homo sapiens
tcatctgagacctca

SEQ ID NO: 463000 - DNA, 15 bp, Homo sapiens
ctcatctgagacctc

SEQ ID NO: 463001 - DNA, 15 bp, Homo sapiens
tctcatctgagacct

SEQ ID NO: 463002 - DNA, 15 bp, Homo sapiens
ttctcatctgagacc

SEQ ID NO: 463003 - DNA, 15 bp, Homo sapiens
attctcatctgagac

SEQ ID NO: 463004 - DNA, 15 bp, Homo sapiens
cattctcatctgaga

SEQ ID NO: 463005 - DNA, 15 bp, Homo sapiens
acattctcatctgag

SEQ ID NO: 463006 - DNA, 15 bp, Homo sapiens
aacattctcatctga

SEQ ID NO: 463007 - DNA, 15 bp, Homo sapiens
gaacattctcatctg

SEQ ID NO: 463008 - DNA, 15 bp, Homo sapiens
cgaacattctcatct

SEQ ID NO: 463009 - DNA, 15 bp, Homo sapiens
ccgaacattctcatc

SEQ ID NO: 463010 - DNA, 15 bp, Homo sapiens
cccgaacattctcat

SEQ ID NO: 463011 - DNA, 15 bp, Homo sapiens
ccccgaacattctca

SEQ ID NO: 463012 - DNA, 15 bp, Homo sapiens
accccgaacattctc

SEQ ID NO: 463013 - DNA, 15 bp, Homo sapiens
caccccgaacattct

SEQ ID NO: 463014 - DNA, 15 bp, Homo sapiens
acaccccgaacattc

SEQ ID NO: 463015 - DNA, 15 bp, Homo sapiens
cacaccccgaacatt

SEQ ID NO: 463016 - DNA, 15 bp, Homo sapiens
acacaccccgaacat

SEQ ID NO: 463017 - DNA, 15 bp, Homo sapiens
cacacaccccgaaca

SEQ ID NO: 463018 - DNA, 15 bp, Homo sapiens
ccacacaccccgaac

SEQ ID NO: 463019 - DNA, 15 bp, Homo sapiens
gccacacaccccgaa

SEQ ID NO: 463020 - DNA, 15 bp, Homo sapiens
agccacacaccccga

SEQ ID NO: 463021 - DNA, 15 bp, Homo sapiens
cagccacacaccccg

SEQ ID NO: 463022 - DNA, 15 bp, Homo sapiens
tcagccacacacccc

SEQ ID NO: 463023 - DNA, 15 bp, Homo sapiens
ttcagccacacaccc

SEQ ID NO: 463024 - DNA, 15 bp, Homo sapiens
cttcagccacacacc

SEQ ID NO: 463025 - DNA, 15 bp, Homo sapiens
tcttcagccacacac

SEQ ID NO: 463026 - DNA, 15 bp, Homo sapiens
ttcttcagccacaca

SEQ ID NO: 463027 - DNA, 15 bp, Homo sapiens
attcttcagccacac

SEQ ID NO: 463028 - DNA, 15 bp, Homo sapiens
cattcttcagccaca

SEQ ID NO: 463029 - DNA, 15 bp, Homo sapiens
ccattcttcagccac

SEQ ID NO: 463030 - DNA, 15 bp, Homo sapiens
cccattcttcagcca

SEQ ID NO: 463031 - DNA, 15 bp, Homo sapiens
tcccattcttcagcc

SEQ ID NO: 463032 - DNA, 15 bp, Homo sapiens
ttcccattcttcagc

SEQ ID NO: 463033 - DNA, 15 bp, Homo sapiens
cttcccattcttcag

SEQ ID NO: 463034 - DNA, 15 bp, Homo sapiens
ccttcccattcttca

SEQ ID NO: 463035 - DNA, 15 bp, Homo sapiens
tccttcccattcttc

SEQ ID NO: 463036 - DNA, 15 bp, Homo sapiens
ctccttcccattctt

SEQ ID NO: 463037 - DNA, 15 bp, Homo sapiens
gctccttcccattct

SEQ ID NO: 463038 - DNA, 15 bp, Homo sapiens
agctccttcccattc

SEQ ID NO: 463039 - DNA, 15 bp, Homo sapiens
cagctccttcccatt

SEQ ID NO: 463040 - DNA, 15 bp, Homo sapiens
ccagctccttcccat

SEQ ID NO: 463041 - DNA, 15 bp, Homo sapiens
accagctccttccca

SEQ ID NO: 463042 - DNA, 15 bp, Homo sapiens
caccagctccttccc

SEQ ID NO: 463043 - DNA, 15 bp, Homo sapiens
gcaccagctccttcc

SEQ ID NO: 463044 - DNA, 15 bp, Homo sapiens
ggcaccagctccttc

SEQ ID NO: 463045 - DNA, 15 bp, Homo sapiens
gggcaccagctcctt

SEQ ID NO: 463046 - DNA, 15 bp, Homo sapiens
cgggcaccagctcct

SEQ ID NO: 463047 - DNA, 15 bp, Homo sapiens
tcgggcaccagctcc

SEQ ID NO: 463048 - DNA, 15 bp, Homo sapiens
gtcgggcaccagctc

SEQ ID NO: 463049 - DNA, 15 bp, Homo sapiens
tgtcgggcaccagct

SEQ ID NO: 463050 - DNA, 15 bp, Homo sapiens
ctgtcgggcaccagc

SEQ ID NO: 463051 - DNA, 15 bp, Homo sapiens
gctgtcgggcaccag

SEQ ID NO: 463052 - DNA, 15 bp, Homo sapiens
ggctgtcgggcacca

SEQ ID NO: 463053 - DNA, 15 bp, Homo sapiens
cggctgtcgggcacc

SEQ ID NO: 463054 - DNA, 15 bp, Homo sapiens
gcggctgtcgggcac

SEQ ID NO: 463055 - DNA, 15 bp, Homo sapiens
tgcggctgtcgggca

SEQ ID NO: 463056 - DNA, 15 bp, Homo sapiens
atgcggctgtcgggc

SEQ ID NO: 463057 - DNA, 15 bp, Homo sapiens
tatgcggctgtcggg

SEQ ID NO: 463058 - DNA, 15 bp, Homo sapiens
ttatgcggctgtcgg

SEQ ID NO: 463059 - DNA, 15 bp, Homo sapiens
tttatgcggctgtcg

SEQ ID NO: 463060 - DNA, 15 bp, Homo sapiens
ctttatgcggctgtc

SEQ ID NO: 463061 - DNA, 15 bp, Homo sapiens
cctttatgcggctgt

SEQ ID NO: 463062 - DNA, 15 bp, Homo sapiens
acctttatgcggctg

SEQ ID NO: 463063 - DNA, 15 bp, Homo sapiens
cacctttatgcggct

SEQ ID NO: 463064 - DNA, 15 bp, Homo sapiens
acacctttatgcggc

SEQ ID NO: 463065 - DNA, 15 bp, Homo sapiens
gacacctttatgcgg

SEQ ID NO: 463066 - DNA, 15 bp, Homo sapiens
ggacacctttatgcg

SEQ ID NO: 463067 - DNA, 15 bp, Homo sapiens
gggacacctttatgc

SEQ ID NO: 463068 - DNA, 15 bp, Homo sapiens
tgggacacctttatg

SEQ ID NO: 463069 - DNA, 15 bp, Homo sapiens
gtgggacacctttat

SEQ ID NO: 463070 - DNA, 15 bp, Homo sapiens
tgtgggacaccttta

SEQ ID NO: 463071 - DNA, 15 bp, Homo sapiens
atgtgggacaccttt

SEQ ID NO: 463072 - DNA, 15 bp, Homo sapiens
gatgtgggacacctt

SEQ ID NO: 463073 - DNA, 15 bp, Homo sapiens
cgatgtgggacacct

SEQ ID NO: 463074 - DNA, 15 bp, Homo sapiens
ccgatgtgggacacc

SEQ ID NO: 463075 - DNA, 15 bp, Homo sapiens
cccgatgtgggacac

SEQ ID NO: 463076 - DNA, 15 bp, Homo sapiens
gcccgatgtgggaca

SEQ ID NO: 463077 - DNA, 15 bp, Homo sapiens
cgcccgatgtgggac

SEQ ID NO: 463078 - DNA, 15 bp, Homo sapiens
ccgcccgatgtggga

SEQ ID NO: 463079 - DNA, 15 bp, Homo sapiens
accgcccgatgtggg

SEQ ID NO: 463080 - DNA, 15 bp, Homo sapiens
caccgcccgatgtgg

SEQ ID NO: 463081 - DNA, 15 bp, Homo sapiens
tcaccgcccgatgtg

SEQ ID NO: 463082 - DNA, 15 bp, Homo sapiens
ctcaccgcccgatgt

SEQ ID NO: 463083 - DNA, 15 bp, Homo sapiens
actcaccgcccgatg

SEQ ID NO: 463084 - DNA, 15 bp, Homo sapiens
cactcaccgcccgat

SEQ ID NO: 463085 - DNA, 15 bp, Homo sapiens
acactcaccgcccga

SEQ ID NO: 463086 - DNA, 15 bp, Homo sapiens
cacactcaccgcccg

SEQ ID NO: 463087 - DNA, 15 bp, Homo sapiens
gcacactcaccgccc

SEQ ID NO: 463088 - DNA, 15 bp, Homo sapiens
tgcacactcaccgcc

SEQ ID NO: 463089 - DNA, 15 bp, Homo sapiens
ctgcacactcaccgc

SEQ ID NO: 463090 - DNA, 15 bp, Homo sapiens
cctgcacactcaccg

SEQ ID NO: 463091 - DNA, 15 bp, Homo sapiens
ccctgcacactcacc

SEQ ID NO: 463092 - DNA, 15 bp, Homo sapiens
gccctgcacactcac

SEQ ID NO: 463093 - DNA, 15 bp, Homo sapiens
tgccctgcacactca

SEQ ID NO: 463094 - DNA, 15 bp, Homo sapiens
ctgccctgcacactc

SEQ ID NO: 463095 - DNA, 15 bp, Homo sapiens
cctgccctgcacact

SEQ ID NO: 463096 - DNA, 15 bp, Homo sapiens
acctgccctgcacac

SEQ ID NO: 463097 - DNA, 15 bp, Homo sapiens
cacctgccctgcaca

SEQ ID NO: 463098 - DNA, 15 bp, Homo sapiens
ccacctgccctgcac

SEQ ID NO: 463099 - DNA, 15 bp, Homo sapiens
tccacctgccctgca

SEQ ID NO: 463100 - DNA, 15 bp, Homo sapiens
atccacctgccctgc

SEQ ID NO: 463101 - DNA, 15 bp, Homo sapiens
catccacctgccctg

SEQ ID NO: 463102 - DNA, 15 bp, Homo sapiens
ccatccacctgccct

SEQ ID NO: 463103 - DNA, 15 bp, Homo sapiens
cccatccacctgccc

SEQ ID NO: 463104 - DNA, 15 bp, Homo sapiens
tcccatccacctgcc

SEQ ID NO: 463105 - DNA, 15 bp, Homo sapiens
gtcccatccacctgc

SEQ ID NO: 463106 - DNA, 15 bp, Homo sapiens
tgtcccatccacctg

SEQ ID NO: 463107 - DNA, 15 bp, Homo sapiens
ctgtcccatccacct

SEQ ID NO: 463108 - DNA, 15 bp, Homo sapiens
cctgtcccatccacc

SEQ ID NO: 463109 - DNA, 15 bp, Homo sapiens
acctgtcccatccac

SEQ ID NO: 463110 - DNA, 15 bp, Homo sapiens
cacctgtcccatcca

SEQ ID NO: 463111 - DNA, 15 bp, Homo sapiens
ccacctgtcccatcc

SEQ ID NO: 463112 - DNA, 15 bp, Homo sapiens
tccacctgtcccatc

SEQ ID NO: 463113 - DNA, 15 bp, Homo sapiens
ctccacctgtcccat

SEQ ID NO: 463114 - DNA, 15 bp, Homo sapiens
tctccacctgtccca

SEQ ID NO: 463115 - DNA, 15 bp, Homo sapiens
gtctccacctgtccc

SEQ ID NO: 463116 - DNA, 15 bp, Homo sapiens
agtctccacctgtcc

SEQ ID NO: 463117 - DNA, 15 bp, Homo sapiens
cagtctccacctgtc

SEQ ID NO: 463118 - DNA, 15 bp, Homo sapiens
tcagtctccacctgt

SEQ ID NO: 463119 - DNA, 15 bp, Homo sapiens
ctcagtctccacctg

SEQ ID NO: 463120 - DNA, 15 bp, Homo sapiens
tctcagtctccacct

SEQ ID NO: 463121 - DNA, 15 bp, Homo sapiens
atctcagtctccacc

SEQ ID NO: 463122 - DNA, 15 bp, Homo sapiens
catctcagtctccac

SEQ ID NO: 463123 - DNA, 15 bp, Homo sapiens
ccatctcagtctcca

SEQ ID NO: 463124 - DNA, 15 bp, Homo sapiens
tccatctcagtctcc

SEQ ID NO: 463125 - DNA, 15 bp, Homo sapiens
ctccatctcagtctc

SEQ ID NO: 463126 - DNA, 15 bp, Homo sapiens
tctccatctcagtct

SEQ ID NO: 463127 - DNA, 15 bp, Homo sapiens
gtctccatctcagtc

SEQ ID NO: 463128 - DNA, 15 bp, Homo sapiens
tgtctccatctcagt

SEQ ID NO: 463129 - DNA, 15 bp, Homo sapiens
ctgtctccatctcag

SEQ ID NO: 463130 - DNA, 15 bp, Homo sapiens
tctgtctccatctca

SEQ ID NO: 463131 - DNA, 15 bp, Homo sapiens
ctctgtctccatctc

SEQ ID NO: 463132 - DNA, 15 bp, Homo sapiens
tctctgtctccatct

SEQ ID NO: 463133 - DNA, 15 bp, Homo sapiens
ctctctgtctccatc

SEQ ID NO: 463134 - DNA, 15 bp, Homo sapiens
tctctctgtctccat

SEQ ID NO: 463135 - DNA, 15 bp, Homo sapiens
ctctctctgtctcca

SEQ ID NO: 463136 - DNA, 15 bp, Homo sapiens
tctctctctgtctcc

SEQ ID NO: 463137 - DNA, 15 bp, Homo sapiens
gtctctctctgtctc

SEQ ID NO: 463138 - DNA, 15 bp, Homo sapiens
tgtctctctctgtct

SEQ ID NO: 463139 - DNA, 15 bp, Homo sapiens
gtgtctctctctgtc

SEQ ID NO: 463140 - DNA, 15 bp, Homo sapiens
tgtgtctctctctgt

SEQ ID NO: 463141 - DNA, 15 bp, Homo sapiens
ctgtgtctctctctg

SEQ ID NO: 463142 - DNA, 15 bp, Homo sapiens
cctgtgtctctctct

SEQ ID NO: 463143 - DNA, 15 bp, Homo sapiens
ccctgtgtctctctc

SEQ ID NO: 463144 - DNA, 15 bp, Homo sapiens
tccctgtgtctctct

SEQ ID NO: 463145 - DNA, 15 bp, Homo sapiens
ctccctgtgtctctc

SEQ ID NO: 463146 - DNA, 15 bp, Homo sapiens
tctccctgtgtctct

SEQ ID NO: 463147 - DNA, 15 bp, Homo sapiens
ttctccctgtgtctc

SEQ ID NO: 463148 - DNA, 15 bp, Homo sapiens
tttctccctgtgtct

SEQ ID NO: 463149 - DNA, 15 bp, Homo sapiens
gtttctccctgtgtc

SEQ ID NO: 463150 - DNA, 15 bp, Homo sapiens
tgtttctccctgtgt

SEQ ID NO: 463151 - DNA, 15 bp, Homo sapiens
ctgtttctccctgtg

SEQ ID NO: 463152 - DNA, 15 bp, Homo sapiens
tctgtttctccctgt

SEQ ID NO: 463153 - DNA, 15 bp, Homo sapiens
ctctgtttctccctg

SEQ ID NO: 463154 - DNA, 15 bp, Homo sapiens
tctctgtttctccct

SEQ ID NO: 463155 - DNA, 15 bp, Homo sapiens
ctctctgtttctccc

SEQ ID NO: 463156 - DNA, 15 bp, Homo sapiens
tctctctgtttctcc

SEQ ID NO: 463157 - DNA, 15 bp, Homo sapiens
ctctctctgtttctc

SEQ ID NO: 463158 - DNA, 15 bp, Homo sapiens
tctctctctgtttct

SEQ ID NO: 463159 - DNA, 15 bp, Homo sapiens
ctctctctctgtttc

SEQ ID NO: 463160 - DNA, 15 bp, Homo sapiens
tctctctctctgttt

SEQ ID NO: 463161 - DNA, 15 bp, Homo sapiens
ctctctctctctgtt

SEQ ID NO: 463162 - DNA, 15 bp, Homo sapiens
tctctctctctctgt

SEQ ID NO: 463163 - DNA, 15 bp, Homo sapiens
atctctctctctctg

SEQ ID NO: 463164 - DNA, 15 bp, Homo sapiens
tatctctctctctct

SEQ ID NO: 463165 - DNA, 15 bp, Homo sapiens
ttatctctctctctc

SEQ ID NO: 463166 - DNA, 15 bp, Homo sapiens
tttatctctctctct

SEQ ID NO: 463167 - DNA, 15 bp, Homo sapiens
ctttatctctctctc

SEQ ID NO: 463168 - DNA, 15 bp, Homo sapiens
tctttatctctctct

SEQ ID NO: 463169 - DNA, 15 bp, Homo sapiens
gtctttatctctctc

SEQ ID NO: 463170 - DNA, 15 bp, Homo sapiens
tgtctttatctctct

SEQ ID NO: 463171 - DNA, 15 bp, Homo sapiens
ctgtctttatctctc

SEQ ID NO: 463172 - DNA, 15 bp, Homo sapiens
cctgtctttatctct

SEQ ID NO: 463173 - DNA, 15 bp, Homo sapiens
acctgtctttatctc

SEQ ID NO: 463174 - DNA, 15 bp, Homo sapiens
cacctgtctttatct

SEQ ID NO: 463175 - DNA, 15 bp, Homo sapiens
ccacctgtctttatc

SEQ ID NO: 463176 - DNA, 15 bp, Homo sapiens
tccacctgtctttat

SEQ ID NO: 463177 - DNA, 15 bp, Homo sapiens
gtccacctgtcttta

SEQ ID NO: 463178 - DNA, 15 bp, Homo sapiens
tgtccacctgtcttt

SEQ ID NO: 463179 - DNA, 15 bp, Homo sapiens
ctgtccacctgtctt

SEQ ID NO: 463180 - DNA, 15 bp, Homo sapiens
tctgtccacctgtct

SEQ ID NO: 463181 - DNA, 15 bp, Homo sapiens
ctctgtccacctgtc

SEQ ID NO: 463182 - DNA, 15 bp, Homo sapiens
tctctgtccacctgt

SEQ ID NO: 463183 - DNA, 15 bp, Homo sapiens
ctctctgtccacctg

SEQ ID NO: 463184 - DNA, 15 bp, Homo sapiens
cctctctgtccacct

SEQ ID NO: 463185 - DNA, 15 bp, Homo sapiens
gcctctctgtccacc

SEQ ID NO: 463186 - DNA, 15 bp, Homo sapiens
tgcctctctgtccac

SEQ ID NO: 463187 - DNA, 15 bp, Homo sapiens
ctgcctctctgtcca

SEQ ID NO: 463188 - DNA, 15 bp, Homo sapiens
tctgcctctctgtcc

SEQ ID NO: 463189 - DNA, 15 bp, Homo sapiens
atctgcctctctgtc

SEQ ID NO: 463190 - DNA, 15 bp, Homo sapiens
catctgcctctctgt

SEQ ID NO: 463191 - DNA, 15 bp, Homo sapiens
gcatctgcctctctg

SEQ ID NO: 463192 - DNA, 15 bp, Homo sapiens
tgcatctgcctctct

SEQ ID NO: 463193 - DNA, 15 bp, Homo sapiens
gtgcatctgcctctc

SEQ ID NO: 463194 - DNA, 15 bp, Homo sapiens
tgtgcatctgcctct

SEQ ID NO: 463195 - DNA, 15 bp, Homo sapiens
ctgtgcatctgcctc

SEQ ID NO: 463196 - DNA, 15 bp, Homo sapiens
tctgtgcatctgcct

SEQ ID NO: 463197 - DNA, 15 bp, Homo sapiens
ctctgtgcatctgcc

SEQ ID NO: 463198 - DNA, 15 bp, Homo sapiens
tctctgtgcatctgc

SEQ ID NO: 463199 - DNA, 15 bp, Homo sapiens
gtctctgtgcatctg

SEQ ID NO: 463200 - DNA, 15 bp, Homo sapiens
tgtctctgtgcatct

SEQ ID NO: 463201 - DNA, 15 bp, Homo sapiens
ctgtctctgtgcatc

SEQ ID NO: 463202 - DNA, 15 bp, Homo sapiens
cctgtctctgtgcat

SEQ ID NO: 463203 - DNA, 15 bp, Homo sapiens
tcctgtctctgtgca

SEQ ID NO: 463204 - DNA, 15 bp, Homo sapiens
gtcctgtctctgtgc

SEQ ID NO: 463205 - DNA, 15 bp, Homo sapiens
tgtcctgtctctgtg

SEQ ID NO: 463206 - DNA, 15 bp, Homo sapiens
ctgtcctgtctctgt

SEQ ID NO: 463207 - DNA, 15 bp, Homo sapiens
tctgtcctgtctctg

SEQ ID NO: 463208 - DNA, 15 bp, Homo sapiens
ctctgtcctgtctct

SEQ ID NO: 463209 - DNA, 15 bp, Homo sapiens
tctctgtcctgtctc

SEQ ID NO: 463210 - DNA, 15 bp, Homo sapiens
gtctctgtcctgtct

SEQ ID NO: 463211 - DNA, 15 bp, Homo sapiens
agtctctgtcctgtc

SEQ ID NO: 463212 - DNA, 15 bp, Homo sapiens
cagtctctgtcctgt

SEQ ID NO: 463213 - DNA, 15 bp, Homo sapiens
tcagtctctgtcctg

SEQ ID NO: 463214 - DNA, 15 bp, Homo sapiens
ctcagtctctgtcct

SEQ ID NO: 463215 - DNA, 15 bp, Homo sapiens
tctcagtctctgtcc

SEQ ID NO: 463216 - DNA, 15 bp, Homo sapiens
gtctcagtctctgtc

SEQ ID NO: 463217 - DNA, 15 bp, Homo sapiens
tgtctcagtctctgt

SEQ ID NO: 463218 - DNA, 15 bp, Homo sapiens
ctgtctcagtctctg

SEQ ID NO: 463219 - DNA, 15 bp, Homo sapiens
tctgtctcagtctct

SEQ ID NO: 463220 - DNA, 15 bp, Homo sapiens
ctctgtctcagtctc

SEQ ID NO: 463221 - DNA, 15 bp, Homo sapiens
tctctgtctcagtct

SEQ ID NO: 463222 - DNA, 15 bp, Homo sapiens
gtctctgtctcagtc

SEQ ID NO: 463223 - DNA, 15 bp, Homo sapiens
ggtctctgtctcagt

SEQ ID NO: 463224 - DNA, 15 bp, Homo sapiens
gggtctctgtctcag

SEQ ID NO: 463225 - DNA, 15 bp, Homo sapiens
tgggtctctgtctca

SEQ ID NO: 463226 - DNA, 15 bp, Homo sapiens
gtgggtctctgtctc

SEQ ID NO: 463227 - DNA, 15 bp, Homo sapiens
tgtgggtctctgtct

SEQ ID NO: 463228 - DNA, 15 bp, Homo sapiens
ctgtgggtctctgtc

SEQ ID NO: 463229 - DNA, 15 bp, Homo sapiens
tctgtgggtctctgt

SEQ ID NO: 463230 - DNA, 15 bp, Homo sapiens
ctctgtgggtctctg

SEQ ID NO: 463231 - DNA, 15 bp, Homo sapiens
tctctgtgggtctct

SEQ ID NO: 463232 - DNA, 15 bp, Homo sapiens
ctctctgtgggtctc

SEQ ID NO: 463233 - DNA, 15 bp, Homo sapiens
cctctctgtgggtct

SEQ ID NO: 463234 - DNA, 15 bp, Homo sapiens
ccctctctgtgggtc

SEQ ID NO: 463235 - DNA, 15 bp, Homo sapiens
tccctctctgtgggt

SEQ ID NO: 463236 - DNA, 15 bp, Homo sapiens
ctccctctctgtggg

SEQ ID NO: 463237 - DNA, 15 bp, Homo sapiens
tctccctctctgtgg

SEQ ID NO: 463238 - DNA, 15 bp, Homo sapiens
ttctccctctctgtg

SEQ ID NO: 463239 - DNA, 15 bp, Homo sapiens
tttctccctctctgt

SEQ ID NO: 463240 - DNA, 15 bp, Homo sapiens
gtttctccctctctg

SEQ ID NO: 463241 - DNA, 15 bp, Homo sapiens
tgtttctccctctct

SEQ ID NO: 463242 - DNA, 15 bp, Homo sapiens
ctgtttctccctctc

SEQ ID NO: 463243 - DNA, 15 bp, Homo sapiens
tctgtttctccctct

SEQ ID NO: 463244 - DNA, 15 bp, Homo sapiens
gtctgtttctccctc

SEQ ID NO: 463245 - DNA, 15 bp, Homo sapiens
tgtctgtttctccct

SEQ ID NO: 463246 - DNA, 15 bp, Homo sapiens
ctgtctgtttctccc

SEQ ID NO: 463247 - DNA, 15 bp, Homo sapiens
tctgtctgtttctcc

SEQ ID NO: 463248 - DNA, 15 bp, Homo sapiens
gtctgtctgtttctc

SEQ ID NO: 463249 - DNA, 15 bp, Homo sapiens
ggtctgtctgtttct

SEQ ID NO: 463250 - DNA, 15 bp, Homo sapiens
gggtctgtctgtttc

SEQ ID NO: 463251 - DNA, 15 bp, Homo sapiens
tgggtctgtctgttt

SEQ ID NO: 463252 - DNA, 15 bp, Homo sapiens
ttgggtctgtctgtt

SEQ ID NO: 463253 - DNA, 15 bp, Homo sapiens
tttgggtctgtctgt

SEQ ID NO: 463254 - DNA, 15 bp, Homo sapiens
ttttgggtctgtctg

SEQ ID NO: 463255 - DNA, 15 bp, Homo sapiens
tttttgggtctgtct

SEQ ID NO: 463256 - DNA, 15 bp, Homo sapiens
ctttttgggtctgtc

SEQ ID NO: 463257 - DNA, 15 bp, Homo sapiens
tctttttgggtctgt

SEQ ID NO: 463258 - DNA, 15 bp, Homo sapiens
gtctttttgggtctg

SEQ ID NO: 463259 - DNA, 15 bp, Homo sapiens
tgtctttttgggtct

SEQ ID NO: 463260 - DNA, 15 bp, Homo sapiens
ttgtctttttgggtc

SEQ ID NO: 463261 - DNA, 15 bp, Homo sapiens
tttgtctttttgggt

SEQ ID NO: 463262 - DNA, 15 bp, Homo sapiens
ctttgtctttttggg

SEQ ID NO: 463263 - DNA, 15 bp, Homo sapiens
tctttgtctttttgg

SEQ ID NO: 463264 - DNA, 15 bp, Homo sapiens
ctctttgtctttttg

SEQ ID NO: 463265 - DNA, 15 bp, Homo sapiens
tctctttgtcttttt

SEQ ID NO: 463266 - DNA, 15 bp, Homo sapiens
gtctctttgtctttt

SEQ ID NO: 463267 - DNA, 15 bp, Homo sapiens
tgtctctttgtcttt

SEQ ID NO: 463268 - DNA, 15 bp, Homo sapiens
ctgtctctttgtctt

SEQ ID NO: 463269 - DNA, 15 bp, Homo sapiens
tctgtctctttgtct

SEQ ID NO: 463270 - DNA, 15 bp, Homo sapiens
ttctgtctctttgtc

SEQ ID NO: 463271 - DNA, 15 bp, Homo sapiens
tttctgtctctttgt

SEQ ID NO: 463272 - DNA, 15 bp, Homo sapiens
ctttctgtctctttg

SEQ ID NO: 463273 - DNA, 15 bp, Homo sapiens
tctttctgtctcttt

SEQ ID NO: 463274 - DNA, 15 bp, Homo sapiens
gtctttctgtctctt

SEQ ID NO: 463275 - DNA, 15 bp, Homo sapiens
tgtctttctgtctct

SEQ ID NO: 463276 - DNA, 15 bp, Homo sapiens
ctgtctttctgtctc

SEQ ID NO: 463277 - DNA, 15 bp, Homo sapiens
tctgtctttctgtct

SEQ ID NO: 463278 - DNA, 15 bp, Homo sapiens
ttctgtctttctgtc

SEQ ID NO: 463279 - DNA, 15 bp, Homo sapiens
tttctgtctttctgt

SEQ ID NO: 463280 - DNA, 15 bp, Homo sapiens
atttctgtctttctg

SEQ ID NO: 463281 - DNA, 15 bp, Homo sapiens
tatttctgtctttct

SEQ ID NO: 463282 - DNA, 15 bp, Homo sapiens
ctatttctgtctttc

SEQ ID NO: 463283 - DNA, 15 bp, Homo sapiens
actatttctgtcttt

SEQ ID NO: 463284 - DNA, 15 bp, Homo sapiens
aactatttctgtctt

SEQ ID NO: 463285 - DNA, 15 bp, Homo sapiens
gaactatttctgtct

SEQ ID NO: 463286 - DNA, 15 bp, Homo sapiens
agaactatttctgtc

SEQ ID NO: 463287 - DNA, 15 bp, Homo sapiens
tagaactatttctgt

SEQ ID NO: 463288 - DNA, 15 bp, Homo sapiens
atagaactatttctg

SEQ ID NO: 463289 - DNA, 15 bp, Homo sapiens
tatagaactatttct

SEQ ID NO: 463290 - DNA, 15 bp, Homo sapiens
ctatagaactatttc

SEQ ID NO: 463291 - DNA, 15 bp, Homo sapiens
tctatagaactattt

SEQ ID NO: 463292 - DNA, 15 bp, Homo sapiens
ctctatagaactatt

SEQ ID NO: 463293 - DNA, 15 bp, Homo sapiens
tctctatagaactat

SEQ ID NO: 463294 - DNA, 15 bp, Homo sapiens
gtctctatagaacta

SEQ ID NO: 463295 - DNA, 15 bp, Homo sapiens
tgtctctatagaact

SEQ ID NO: 463296 - DNA, 15 bp, Homo sapiens
ctgtctctatagaac

SEQ ID NO: 463297 - DNA, 15 bp, Homo sapiens
tctgtctctatagaa

SEQ ID NO: 463298 - DNA, 15 bp, Homo sapiens
ttctgtctctataga

SEQ ID NO: 463299 - DNA, 15 bp, Homo sapiens
tttctgtctctatag

SEQ ID NO: 463300 - DNA, 15 bp, Homo sapiens
ctttctgtctctata

SEQ ID NO: 463301 - DNA, 15 bp, Homo sapiens
tctttctgtctctat

SEQ ID NO: 463302 - DNA, 15 bp, Homo sapiens
atctttctgtctcta

SEQ ID NO: 463303 - DNA, 15 bp, Homo sapiens
tatctttctgtctct

SEQ ID NO: 463304 - DNA, 15 bp, Homo sapiens
atatctttctgtctc

SEQ ID NO: 463305 - DNA, 15 bp, Homo sapiens
catatctttctgtct

SEQ ID NO: 463306 - DNA, 15 bp, Homo sapiens
gcatatctttctgtc

SEQ ID NO: 463307 - DNA, 15 bp, Homo sapiens
tgcatatctttctgt

SEQ ID NO: 463308 - DNA, 15 bp, Homo sapiens
gtgcatatctttctg

SEQ ID NO: 463309 - DNA, 15 bp, Homo sapiens
tgtgcatatctttct

SEQ ID NO: 463310 - DNA, 15 bp, Homo sapiens
ctgtgcatatctttc

SEQ ID NO: 463311 - DNA, 15 bp, Homo sapiens
cctgtgcatatcttt

SEQ ID NO: 463312 - DNA, 15 bp, Homo sapiens
ccctgtgcatatctt

SEQ ID NO: 463313 - DNA, 15 bp, Homo sapiens
tccctgtgcatatct

SEQ ID NO: 463314 - DNA, 15 bp, Homo sapiens
ctccctgtgcatatc

SEQ ID NO: 463315 - DNA, 15 bp, Homo sapiens
cctccctgtgcatat

SEQ ID NO: 463316 - DNA, 15 bp, Homo sapiens
gcctccctgtgcata

SEQ ID NO: 463317 - DNA, 15 bp, Homo sapiens
tgcctccctgtgcat

SEQ ID NO: 463318 - DNA, 15 bp, Homo sapiens
gtgcctccctgtgca

SEQ ID NO: 463319 - DNA, 15 bp, Homo sapiens
tgtgcctccctgtgc

SEQ ID NO: 463320 - DNA, 15 bp, Homo sapiens
gtgtgcctccctgtg

SEQ ID NO: 463321 - DNA, 15 bp, Homo sapiens
tgtgtgcctccctgt

SEQ ID NO: 463322 - DNA, 15 bp, Homo sapiens
gtgtgtgcctccctg

SEQ ID NO: 463323 - DNA, 15 bp, Homo sapiens
tgtgtgtgcctccct

SEQ ID NO: 463324 - DNA, 15 bp, Homo sapiens
atgtgtgtgcctccc

SEQ ID NO: 463325 - DNA, 15 bp, Homo sapiens
tatgtgtgtgcctcc

SEQ ID NO: 463326 - DNA, 15 bp, Homo sapiens
ctatgtgtgtgcctc

SEQ ID NO: 463327 - DNA, 15 bp, Homo sapiens
cctatgtgtgtgcct

SEQ ID NO: 463328 - DNA, 15 bp, Homo sapiens
tcctatgtgtgtgcc

SEQ ID NO: 463329 - DNA, 15 bp, Homo sapiens
ctcctatgtgtgtgc

SEQ ID NO: 463330 - DNA, 15 bp, Homo sapiens
tctcctatgtgtgtg

SEQ ID NO: 463331 - DNA, 15 bp, Homo sapiens
ctctcctatgtgtgt

SEQ ID NO: 463332 - DNA, 15 bp, Homo sapiens
actctcctatgtgtg

SEQ ID NO: 463333 - DNA, 15 bp, Homo sapiens
aactctcctatgtgt

SEQ ID NO: 463334 - DNA, 15 bp, Homo sapiens
gaactctcctatgtg

SEQ ID NO: 463335 - DNA, 15 bp, Homo sapiens
cgaactctcctatgt

SEQ ID NO: 463336 - DNA, 15 bp, Homo sapiens
acgaactctcctatg

SEQ ID NO: 463337 - DNA, 15 bp, Homo sapiens
gacgaactctcctat

SEQ ID NO: 463338 - DNA, 15 bp, Homo sapiens
tgacgaactctccta

SEQ ID NO: 463339 - DNA, 15 bp, Homo sapiens
ctgacgaactctcct

SEQ ID NO: 463340 - DNA, 15 bp, Homo sapiens
tctgacgaactctcc

SEQ ID NO: 463341 - DNA, 15 bp, Homo sapiens
ctctgacgaactctc

SEQ ID NO: 463342 - DNA, 15 bp, Homo sapiens
tctctgacgaactct

SEQ ID NO: 463343 - DNA, 15 bp, Homo sapiens
gtctctgacgaactc

SEQ ID NO: 463344 - DNA, 15 bp, Homo sapiens
tgtctctgacgaact

SEQ ID NO: 463345 - DNA, 15 bp, Homo sapiens
ctgtctctgacgaac

SEQ ID NO: 463346 - DNA, 15 bp, Homo sapiens
tctgtctctgacgaa

SEQ ID NO: 463347 - DNA, 15 bp, Homo sapiens
ctctgtctctgacga

SEQ ID NO: 463348 - DNA, 15 bp, Homo sapiens
tctctgtctctgacg

SEQ ID NO: 463349 - DNA, 15 bp, Homo sapiens
ttctctgtctctgac

SEQ ID NO: 463350 - DNA, 15 bp, Homo sapiens
cttctctgtctctga

SEQ ID NO: 463351 - DNA, 15 bp, Homo sapiens
tcttctctgtctctg

SEQ ID NO: 463352 - DNA, 15 bp, Homo sapiens
ttcttctctgtctct

SEQ ID NO: 463353 - DNA, 15 bp, Homo sapiens
gttcttctctgtctc

SEQ ID NO: 463354 - DNA, 15 bp, Homo sapiens
tgttcttctctgtct

SEQ ID NO: 463355 - DNA, 15 bp, Homo sapiens
ctgttcttctctgtc

SEQ ID NO: 463356 - DNA, 15 bp, Homo sapiens
tctgttcttctctgt

SEQ ID NO: 463357 - DNA, 15 bp, Homo sapiens
ctctgttcttctctg

SEQ ID NO: 463358 - DNA, 15 bp, Homo sapiens
cctctgttcttctct

SEQ ID NO: 463359 - DNA, 15 bp, Homo sapiens
ccctctgttcttctc

SEQ ID NO: 463360 - DNA, 15 bp, Homo sapiens
tccctctgttcttct

SEQ ID NO: 463361 - DNA, 15 bp, Homo sapiens
gtccctctgttcttc

SEQ ID NO: 463362 - DNA, 15 bp, Homo sapiens
tgtccctctgttctt

SEQ ID NO: 463363 - DNA, 15 bp, Homo sapiens
ctgtccctctgttct

SEQ ID NO: 463364 - DNA, 15 bp, Homo sapiens
tctgtccctctgttc

SEQ ID NO: 463365 - DNA, 15 bp, Homo sapiens
ctctgtccctctgtt

SEQ ID NO: 463366 - DNA, 15 bp, Homo sapiens
tctctgtccctctgt

SEQ ID NO: 463367 - DNA, 15 bp, Homo sapiens
gtctctgtccctctg

SEQ ID NO: 463368 - DNA, 15 bp, Homo sapiens
tgtctctgtccctct

SEQ ID NO: 463369 - DNA, 15 bp, Homo sapiens
ttgtctctgtccctc

SEQ ID NO: 463370 - DNA, 15 bp, Homo sapiens
tttgtctctgtccct

SEQ ID NO: 463371 - DNA, 15 bp, Homo sapiens
ctttgtctctgtccc

SEQ ID NO: 463372 - DNA, 15 bp, Homo sapiens
tctttgtctctgtcc

SEQ ID NO: 463373 - DNA, 15 bp, Homo sapiens
ctctttgtctctgtc

SEQ ID NO: 463374 - DNA, 15 bp, Homo sapiens
cctctttgtctctgt

SEQ ID NO: 463375 - DNA, 15 bp, Homo sapiens
gcctctttgtctctg

SEQ ID NO: 463376 - DNA, 15 bp, Homo sapiens
tgcctctttgtctct

SEQ ID NO: 463377 - DNA, 15 bp, Homo sapiens
ctgcctctttgtctc

SEQ ID NO: 463378 - DNA, 15 bp, Homo sapiens
gctgcctctttgtct

SEQ ID NO: 463379 - DNA, 15 bp, Homo sapiens
tgctgcctctttgtc

SEQ ID NO: 463380 - DNA, 15 bp, Homo sapiens
ctgctgcctctttgt

SEQ ID NO: 463381 - DNA, 15 bp, Homo sapiens
cctgctgcctctttg

SEQ ID NO: 463382 - DNA, 15 bp, Homo sapiens
ccctgctgcctcttt

SEQ ID NO: 463383 - DNA, 15 bp, Homo sapiens
tccctgctgcctctt

SEQ ID NO: 463384 - DNA, 15 bp, Homo sapiens
ctccctgctgcctct

SEQ ID NO: 463385 - DNA, 15 bp, Homo sapiens
tctccctgctgcctc

SEQ ID NO: 463386 - DNA, 15 bp, Homo sapiens
ctctccctgctgcct

SEQ ID NO: 463387 - DNA, 15 bp, Homo sapiens
tctctccctgctgcc

SEQ ID NO: 463388 - DNA, 15 bp, Homo sapiens
gtctctccctgctgc

SEQ ID NO: 463389 - DNA, 15 bp, Homo sapiens
tgtctctccctgctg

SEQ ID NO: 463390 - DNA, 15 bp, Homo sapiens
gtgtctctccctgct

SEQ ID NO: 463391 - DNA, 15 bp, Homo sapiens
cgtgtctctccctgc

SEQ ID NO: 463392 - DNA, 15 bp, Homo sapiens
ccgtgtctctccctg

SEQ ID NO: 463393 - DNA, 15 bp, Homo sapiens
tccgtgtctctccct

SEQ ID NO: 463394 - DNA, 15 bp, Homo sapiens
gtccgtgtctctccc

SEQ ID NO: 463395 - DNA, 15 bp, Homo sapiens
cgtccgtgtctctcc

SEQ ID NO: 463396 - DNA, 15 bp, Homo sapiens
ccgtccgtgtctctc

SEQ ID NO: 463397 - DNA, 15 bp, Homo sapiens
cccgtccgtgtctct

SEQ ID NO: 463398 - DNA, 15 bp, Homo sapiens
ccccgtccgtgtctc

SEQ ID NO: 463399 - DNA, 15 bp, Homo sapiens
accccgtccgtgtct

SEQ ID NO: 463400 - DNA, 15 bp, Homo sapiens
gaccccgtccgtgtc

SEQ ID NO: 463401 - DNA, 15 bp, Homo sapiens
cgaccccgtccgtgt

SEQ ID NO: 463402 - DNA, 15 bp, Homo sapiens
tcgaccccgtccgtg

SEQ ID NO: 463403 - DNA, 15 bp, Homo sapiens
ctcgaccccgtccgt

SEQ ID NO: 463404 - DNA, 15 bp, Homo sapiens
gctcgaccccgtccg

SEQ ID NO: 463405 - DNA, 15 bp, Homo sapiens
cgctcgaccccgtcc

SEQ ID NO: 463406 - DNA, 15 bp, Homo sapiens
gcgctcgaccccgtc

SEQ ID NO: 463407 - DNA, 15 bp, Homo sapiens
agcgctcgaccccgt

SEQ ID NO: 463408 - DNA, 15 bp, Homo sapiens
gagcgctcgaccccg

SEQ ID NO: 463409 - DNA, 15 bp, Homo sapiens
ggagcgctcgacccc

SEQ ID NO: 463410 - DNA, 15 bp, Homo sapiens
gggagcgctcgaccc

SEQ ID NO: 463411 - DNA, 15 bp, Homo sapiens
ggggagcgctcgacc

SEQ ID NO: 463412 - DNA, 15 bp, Homo sapiens
tggggagcgctcgac

SEQ ID NO: 463413 - DNA, 15 bp, Homo sapiens
ctggggagcgctcga

SEQ ID NO: 463414 - DNA, 15 bp, Homo sapiens
gctggggagcgctcg

SEQ ID NO: 463415 - DNA, 15 bp, Homo sapiens
tgctggggagcgctc

SEQ ID NO: 463416 - DNA, 15 bp, Homo sapiens
gtgctggggagcgct

SEQ ID NO: 463417 - DNA, 15 bp, Homo sapiens
ggtgctggggagcgc

SEQ ID NO: 463418 - DNA, 15 bp, Homo sapiens
gggtgctggggagcg

SEQ ID NO: 463419 - DNA, 15 bp, Homo sapiens
agggtgctggggagc

SEQ ID NO: 463420 - DNA, 15 bp, Homo sapiens
gagggtgctggggag

SEQ ID NO: 463421 - DNA, 15 bp, Homo sapiens
ggagggtgctgggga

SEQ ID NO: 463422 - DNA, 15 bp, Homo sapiens
gggagggtgctgggg

SEQ ID NO: 463423 - DNA, 15 bp, Homo sapiens
ggggagggtgctggg

SEQ ID NO: 463424 - DNA, 15 bp, Homo sapiens
gggggagggtgctgg

SEQ ID NO: 463425 - DNA, 15 bp, Homo sapiens
tgggggagggtgctg

SEQ ID NO: 463426 - DNA, 15 bp, Homo sapiens
ctgggggagggtgct

SEQ ID NO: 463427 - DNA, 15 bp, Homo sapiens
gctgggggagggtgc

SEQ ID NO: 463428 - DNA, 15 bp, Homo sapiens
agctgggggagggtg

SEQ ID NO: 463429 - DNA, 15 bp, Homo sapiens
aagctgggggagggt

SEQ ID NO: 463430 - DNA, 15 bp, Homo sapiens
caagctgggggaggg

SEQ ID NO: 463431 - DNA, 15 bp, Homo sapiens
acaagctgggggagg

SEQ ID NO: 463432 - DNA, 15 bp, Homo sapiens
cacaagctgggggag

SEQ ID NO: 463433 - DNA, 15 bp, Homo sapiens
tcacaagctggggga

SEQ ID NO: 463434 - DNA, 15 bp, Homo sapiens
gtcacaagctggggg

SEQ ID NO: 463435 - DNA, 15 bp, Homo sapiens
ggtcacaagctgggg

SEQ ID NO: 463436 - DNA, 15 bp, Homo sapiens
tggtcacaagctggg

SEQ ID NO: 463437 - DNA, 15 bp, Homo sapiens
ctggtcacaagctgg

SEQ ID NO: 463438 - DNA, 15 bp, Homo sapiens
cctggtcacaagctg

SEQ ID NO: 463439 - DNA, 15 bp, Homo sapiens
ccctggtcacaagct

SEQ ID NO: 463440 - DNA, 15 bp, Homo sapiens
gccctggtcacaagc

SEQ ID NO: 463441 - DNA, 15 bp, Homo sapiens
tgccctggtcacaag

SEQ ID NO: 463442 - DNA, 15 bp, Homo sapiens
ctgccctggtcacaa

SEQ ID NO: 463443 - DNA, 15 bp, Homo sapiens
cctgccctggtcaca

SEQ ID NO: 463444 - DNA, 15 bp, Homo sapiens
ccctgccctggtcac

SEQ ID NO: 463445 - DNA, 15 bp, Homo sapiens
gccctgccctggtca

SEQ ID NO: 463446 - DNA, 15 bp, Homo sapiens
tgccctgccctggtc

SEQ ID NO: 463447 - DNA, 15 bp, Homo sapiens
ctgccctgccctggt

SEQ ID NO: 463448 - DNA, 15 bp, Homo sapiens
cctgccctgccctgg

SEQ ID NO: 463449 - DNA, 15 bp, Homo sapiens
tcctgccctgccctg

SEQ ID NO: 463450 - DNA, 15 bp, Homo sapiens
ctcctgccctgccct

SEQ ID NO: 463451 - DNA, 15 bp, Homo sapiens
cctcctgccctgccc

SEQ ID NO: 463452 - DNA, 15 bp, Homo sapiens
gcctcctgccctgcc

SEQ ID NO: 463453 - DNA, 15 bp, Homo sapiens
ggcctcctgccctgc

SEQ ID NO: 463454 - DNA, 15 bp, Homo sapiens
tggcctcctgccctg

SEQ ID NO: 463455 - DNA, 15 bp, Homo sapiens
gtggcctcctgccct

SEQ ID NO: 463456 - DNA, 15 bp, Homo sapiens
ggtggcctcctgccc

SEQ ID NO: 463457 - DNA, 15 bp, Homo sapiens
tggtggcctcctgcc

SEQ ID NO: 463458 - DNA, 15 bp, Homo sapiens
ttggtggcctcctgc

SEQ ID NO: 463459 - DNA, 15 bp, Homo sapiens
cttggtggcctcctg

SEQ ID NO: 463460 - DNA, 15 bp, Homo sapiens
ccttggtggcctcct

SEQ ID NO: 463461 - DNA, 15 bp, Homo sapiens
tccttggtggcctcc

SEQ ID NO: 463462 - DNA, 15 bp, Homo sapiens
ctccttggtggcctc

SEQ ID NO: 463463 - DNA, 15 bp, Homo sapiens
cctccttggtggcct

SEQ ID NO: 463464 - DNA, 15 bp, Homo sapiens
gcctccttggtggcc

SEQ ID NO: 463465 - DNA, 15 bp, Homo sapiens
ggcctccttggtggc

SEQ ID NO: 463466 - DNA, 15 bp, Homo sapiens
cggcctccttggtgg

SEQ ID NO: 463467 - DNA, 15 bp, Homo sapiens
ccggcctccttggtg

SEQ ID NO: 463468 - DNA, 15 bp, Homo sapiens
gccggcctccttggt

SEQ ID NO: 463469 - DNA, 15 bp, Homo sapiens
agccggcctccttgg

SEQ ID NO: 463470 - DNA, 15 bp, Homo sapiens
gagccggcctccttg

SEQ ID NO: 463471 - DNA, 15 bp, Homo sapiens
agagccggcctcctt

SEQ ID NO: 463472 - DNA, 15 bp, Homo sapiens
cagagccggcctcct

SEQ ID NO: 463473 - DNA, 15 bp, Homo sapiens
ccagagccggcctcc

SEQ ID NO: 463474 - DNA, 15 bp, Homo sapiens
gccagagccggcctc

SEQ ID NO: 463475 - DNA, 15 bp, Homo sapiens
ggccagagccggcct

SEQ ID NO: 463476 - DNA, 15 bp, Homo sapiens
tggccagagccggcc

SEQ ID NO: 463477 - DNA, 15 bp, Homo sapiens
ctggccagagccggc

SEQ ID NO: 463478 - DNA, 15 bp, Homo sapiens
tctggccagagccgg

SEQ ID NO: 463479 - DNA, 15 bp, Homo sapiens
ctctggccagagccg

SEQ ID NO: 463480 - DNA, 15 bp, Homo sapiens
cctctggccagagcc

SEQ ID NO: 463481 - DNA, 15 bp, Homo sapiens
gcctctggccagagc

SEQ ID NO: 463482 - DNA, 15 bp, Homo sapiens
ggcctctggccagag

SEQ ID NO: 463483 - DNA, 15 bp, Homo sapiens
gggcctctggccaga

SEQ ID NO: 463484 - DNA, 15 bp, Homo sapiens
agggcctctggccag

SEQ ID NO: 463485 - DNA, 15 bp, Homo sapiens
gagggcctctggcca

SEQ ID NO: 463486 - DNA, 15 bp, Homo sapiens
tgagggcctctggcc

SEQ ID NO: 463487 - DNA, 15 bp, Homo sapiens
gtgagggcctctggc

SEQ ID NO: 463488 - DNA, 15 bp, Homo sapiens
agtgagggcctctgg

SEQ ID NO: 463489 - DNA, 15 bp, Homo sapiens
cagtgagggcctctg

SEQ ID NO: 463490 - DNA, 15 bp, Homo sapiens
gcagtgagggcctct

SEQ ID NO: 463491 - DNA, 15 bp, Homo sapiens
ggcagtgagggcctc

SEQ ID NO: 463492 - DNA, 15 bp, Homo sapiens
aggcagtgagggcct

SEQ ID NO: 463493 - DNA, 15 bp, Homo sapiens
gaggcagtgagggcc

SEQ ID NO: 463494 - DNA, 15 bp, Homo sapiens
agaggcagtgagggc

SEQ ID NO: 463495 - DNA, 15 bp, Homo sapiens
gagaggcagtgaggg

SEQ ID NO: 463496 - DNA, 15 bp, Homo sapiens
ggagaggcagtgagg

SEQ ID NO: 463497 - DNA, 15 bp, Homo sapiens
gggagaggcagtgag

SEQ ID NO: 463498 - DNA, 15 bp, Homo sapiens
cgggagaggcagtga

SEQ ID NO: 463499 - DNA, 15 bp, Homo sapiens
gcgggagaggcagtg

SEQ ID NO: 463500 - DNA, 15 bp, Homo sapiens
ggcgggagaggcagt

SEQ ID NO: 463501 - DNA, 15 bp, Homo sapiens
gggcgggagaggcag

SEQ ID NO: 463502 - DNA, 15 bp, Homo sapiens
agggcgggagaggca

SEQ ID NO: 463503 - DNA, 15 bp, Homo sapiens
gagggcgggagaggc

SEQ ID NO: 463504 - DNA, 15 bp, Homo sapiens
agagggcgggagagg

SEQ ID NO: 463505 - DNA, 15 bp, Homo sapiens
aagagggcgggagag

SEQ ID NO: 463506 - DNA, 15 bp, Homo sapiens
caagagggcgggaga

SEQ ID NO: 463507 - DNA, 15 bp, Homo sapiens
gcaagagggcgggag

SEQ ID NO: 463508 - DNA, 15 bp, Homo sapiens
agcaagagggcggga

SEQ ID NO: 463509 - DNA, 15 bp, Homo sapiens
gagcaagagggcggg

SEQ ID NO: 463510 - DNA, 15 bp, Homo sapiens
tgagcaagagggcgg

SEQ ID NO: 463511 - DNA, 15 bp, Homo sapiens
atgagcaagagggcg

SEQ ID NO: 463512 - DNA, 15 bp, Homo sapiens
gatgagcaagagggc

SEQ ID NO: 463513 - DNA, 15 bp, Homo sapiens
ggatgagcaagaggg

SEQ ID NO: 463514 - DNA, 15 bp, Homo sapiens
gggatgagcaagagg

SEQ ID NO: 463515 - DNA, 15 bp, Homo sapiens
agggatgagcaagag

SEQ ID NO: 463516 - DNA, 15 bp, Homo sapiens
cagggatgagcaaga

SEQ ID NO: 463517 - DNA, 15 bp, Homo sapiens
ccagggatgagcaag

SEQ ID NO: 463518 - DNA, 15 bp, Homo sapiens
tccagggatgagcaa

SEQ ID NO: 463519 - DNA, 15 bp, Homo sapiens
ctccagggatgagca

SEQ ID NO: 463520 - DNA, 15 bp, Homo sapiens
gctccagggatgagc

SEQ ID NO: 463521 - DNA, 15 bp, Homo sapiens
tgctccagggatgag

SEQ ID NO: 463522 - DNA, 15 bp, Homo sapiens
ttgctccagggatga

SEQ ID NO: 463523 - DNA, 15 bp, Homo sapiens
gttgctccagggatg

SEQ ID NO: 463524 - DNA, 15 bp, Homo sapiens
agttgctccagggat

SEQ ID NO: 463525 - DNA, 15 bp, Homo sapiens
cagttgctccaggga

SEQ ID NO: 463526 - DNA, 15 bp, Homo sapiens
ccagttgctccaggg

SEQ ID NO: 463527 - DNA, 15 bp, Homo sapiens
cccagttgctccagg

SEQ ID NO: 463528 - DNA, 15 bp, Homo sapiens
gcccagttgctccag

SEQ ID NO: 463529 - DNA, 15 bp, Homo sapiens
agcccagttgctcca

SEQ ID NO: 463530 - DNA, 15 bp, Homo sapiens
cagcccagttgctcc

SEQ ID NO: 463531 - DNA, 15 bp, Homo sapiens
ccagcccagttgctc

SEQ ID NO: 463532 - DNA, 15 bp, Homo sapiens
gccagcccagttgct

SEQ ID NO: 463533 - DNA, 15 bp, Homo sapiens
ggccagcccagttgc

SEQ ID NO: 463534 - DNA, 15 bp, Homo sapiens
cggccagcccagttg

SEQ ID NO: 463535 - DNA, 15 bp, Homo sapiens
acggccagcccagtt

SEQ ID NO: 463536 - DNA, 15 bp, Homo sapiens
cacggccagcccagt

SEQ ID NO: 463537 - DNA, 15 bp, Homo sapiens
gcacggccagcccag

SEQ ID NO: 463538 - DNA, 15 bp, Homo sapiens
agcacggccagccca

SEQ ID NO: 463539 - DNA, 15 bp, Homo sapiens
cagcacggccagccc

SEQ ID NO: 463540 - DNA, 15 bp, Homo sapiens
ccagcacggccagcc

SEQ ID NO: 463541 - DNA, 15 bp, Homo sapiens
cccagcacggccagc

SEQ ID NO: 463542 - DNA, 15 bp, Homo sapiens
gcccagcacggccag

SEQ ID NO: 463543 - DNA, 15 bp, Homo sapiens
ggcccagcacggcca

SEQ ID NO: 463544 - DNA, 15 bp, Homo sapiens
gggcccagcacggcc

SEQ ID NO: 463545 - DNA, 15 bp, Homo sapiens
tgggcccagcacggc

SEQ ID NO: 463546 - DNA, 15 bp, Homo sapiens
ttgggcccagcacgg

SEQ ID NO: 463547 - DNA, 15 bp, Homo sapiens
cttgggcccagcacg

SEQ ID NO: 463548 - DNA, 15 bp, Homo sapiens
acttgggcccagcac

SEQ ID NO: 463549 - DNA, 15 bp, Homo sapiens
aacttgggcccagca

SEQ ID NO: 463550 - DNA, 15 bp, Homo sapiens
gaacttgggcccagc

SEQ ID NO: 463551 - DNA, 15 bp, Homo sapiens
tgaacttgggcccag

SEQ ID NO: 463552 - DNA, 15 bp, Homo sapiens
gtgaacttgggccca

SEQ ID NO: 463553 - DNA, 15 bp, Homo sapiens
tgtgaacttgggccc

SEQ ID NO: 463554 - DNA, 15 bp, Homo sapiens
ctgtgaacttgggcc

SEQ ID NO: 463555 - DNA, 15 bp, Homo sapiens
tctgtgaacttgggc

SEQ ID NO: 463556 - DNA, 15 bp, Homo sapiens
ctctgtgaacttggg

SEQ ID NO: 463557 - DNA, 15 bp, Homo sapiens
tctctgtgaacttgg

SEQ ID NO: 463558 - DNA, 15 bp, Homo sapiens
atctctgtgaacttg

SEQ ID NO: 463559 - DNA, 15 bp, Homo sapiens
aatctctgtgaactt

SEQ ID NO: 463560 - DNA, 15 bp, Homo sapiens
taatctctgtgaact

SEQ ID NO: 463561 - DNA, 15 bp, Homo sapiens
ttaatctctgtgaac

SEQ ID NO: 463562 - DNA, 15 bp, Homo sapiens
attaatctctgtgaa

SEQ ID NO: 463563 - DNA, 15 bp, Homo sapiens
cattaatctctgtga

SEQ ID NO: 463564 - DNA, 15 bp, Homo sapiens
tcattaatctctgtg

SEQ ID NO: 463565 - DNA, 15 bp, Homo sapiens
ctcattaatctctgt

SEQ ID NO: 463566 - DNA, 15 bp, Homo sapiens
tctcattaatctctg

SEQ ID NO: 463567 - DNA, 15 bp, Homo sapiens
gtctcattaatctct

SEQ ID NO: 463568 - DNA, 15 bp, Homo sapiens
ggtctcattaatctc

SEQ ID NO: 463569 - DNA, 15 bp, Homo sapiens
gggtctcattaatct

SEQ ID NO: 463570 - DNA, 15 bp, Homo sapiens
tgggtctcattaatc

SEQ ID NO: 463571 - DNA, 15 bp, Homo sapiens
ctgggtctcattaat

SEQ ID NO: 463572 - DNA, 15 bp, Homo sapiens
gctgggtctcattaa

SEQ ID NO: 463573 - DNA, 15 bp, Homo sapiens
ggctgggtctcatta

SEQ ID NO: 463574 - DNA, 15 bp, Homo sapiens
gggctgggtctcatt

SEQ ID NO: 463575 - DNA, 15 bp, Homo sapiens
ggggctgggtctcat

SEQ ID NO: 463576 - DNA, 15 bp, Homo sapiens
aggggctgggtctca

SEQ ID NO: 463577 - DNA, 15 bp, Homo sapiens
caggggctgggtctc

SEQ ID NO: 463578 - DNA, 15 bp, Homo sapiens
gcaggggctgggtct

SEQ ID NO: 463579 - DNA, 15 bp, Homo sapiens
ggcaggggctgggtc

SEQ ID NO: 463580 - DNA, 15 bp, Homo sapiens
gggcaggggctgggt

SEQ ID NO: 463581 - DNA, 15 bp, Homo sapiens
tgggcaggggctggg

SEQ ID NO: 463582 - DNA, 15 bp, Homo sapiens
ctgggcaggggctgg

SEQ ID NO: 463583 - DNA, 15 bp, Homo sapiens
actgggcaggggctg

SEQ ID NO: 463584 - DNA, 15 bp, Homo sapiens
gactgggcaggggct

SEQ ID NO: 463585 - DNA, 15 bp, Homo sapiens
agactgggcaggggc

SEQ ID NO: 463586 - DNA, 15 bp, Homo sapiens
gagactgggcagggg

SEQ ID NO: 463587 - DNA, 15 bp, Homo sapiens
ggagactgggcaggg

SEQ ID NO: 463588 - DNA, 15 bp, Homo sapiens
tggagactgggcagg

SEQ ID NO: 463589 - DNA, 15 bp, Homo sapiens
ttggagactgggcag

SEQ ID NO: 463590 - DNA, 15 bp, Homo sapiens
cttggagactgggca

SEQ ID NO: 463591 - DNA, 15 bp, Homo sapiens
ccttggagactgggc

SEQ ID NO: 463592 - DNA, 15 bp, Homo sapiens
cccttggagactggg

SEQ ID NO: 463593 - DNA, 15 bp, Homo sapiens
gcccttggagactgg

SEQ ID NO: 463594 - DNA, 15 bp, Homo sapiens
ggcccttggagactg

SEQ ID NO: 463595 - DNA, 15 bp, Homo sapiens
gggcccttggagact

SEQ ID NO: 463596 - DNA, 15 bp, Homo sapiens
tgggcccttggagac

SEQ ID NO: 463597 - DNA, 15 bp, Homo sapiens
ctgggcccttggaga

SEQ ID NO: 463598 - DNA, 15 bp, Homo sapiens
gctgggcccttggag

SEQ ID NO: 463599 - DNA, 15 bp, Homo sapiens
ggctgggcccttgga

SEQ ID NO: 463600 - DNA, 15 bp, Homo sapiens
tggctgggcccttgg

SEQ ID NO: 463601 - DNA, 15 bp, Homo sapiens
ttggctgggcccttg

SEQ ID NO: 463602 - DNA, 15 bp, Homo sapiens
cttggctgggccctt

SEQ ID NO: 463603 - DNA, 15 bp, Homo sapiens
ccttggctgggccct

SEQ ID NO: 463604 - DNA, 15 bp, Homo sapiens
tccttggctgggccc

SEQ ID NO: 463605 - DNA, 15 bp, Homo sapiens
ctccttggctgggcc

SEQ ID NO: 463606 - DNA, 15 bp, Homo sapiens
tctccttggctgggc

SEQ ID NO: 463607 - DNA, 15 bp, Homo sapiens
atctccttggctggg

SEQ ID NO: 463608 - DNA, 15 bp, Homo sapiens
catctccttggctgg

SEQ ID NO: 463609 - DNA, 15 bp, Homo sapiens
gcatctccttggctg

SEQ ID NO: 463610 - DNA, 15 bp, Homo sapiens
agcatctccttggct

SEQ ID NO: 463611 - DNA, 15 bp, Homo sapiens
aagcatctccttggc

SEQ ID NO: 463612 - DNA, 15 bp, Homo sapiens
aaagcatctccttgg

SEQ ID NO: 463613 - DNA, 15 bp, Homo sapiens
caaagcatctccttg

SEQ ID NO: 463614 - DNA, 15 bp, Homo sapiens
tcaaagcatctcctt

SEQ ID NO: 463615 - DNA, 15 bp, Homo sapiens
atcaaagcatctcct

SEQ ID NO: 463616 - DNA, 15 bp, Homo sapiens
catcaaagcatctcc

SEQ ID NO: 463617 - DNA, 15 bp, Homo sapiens
acatcaaagcatctc

SEQ ID NO: 463618 - DNA, 15 bp, Homo sapiens
tacatcaaagcatct

SEQ ID NO: 463619 - DNA, 15 bp, Homo sapiens
ctacatcaaagcatc

SEQ ID NO: 463620 - DNA, 15 bp, Homo sapiens
tctacatcaaagcat

SEQ ID NO: 463621 - DNA, 15 bp, Homo sapiens
ttctacatcaaagca

SEQ ID NO: 463622 - DNA, 15 bp, Homo sapiens
tttctacatcaaagc

SEQ ID NO: 463623 - DNA, 15 bp, Homo sapiens
atttctacatcaaag

SEQ ID NO: 463624 - DNA, 15 bp, Homo sapiens
gatttctacatcaaa

SEQ ID NO: 463625 - DNA, 15 bp, Homo sapiens
tgatttctacatcaa

SEQ ID NO: 463626 - DNA, 15 bp, Homo sapiens
gtgatttctacatca

SEQ ID NO: 463627 - DNA, 15 bp, Homo sapiens
agtgatttctacatc

SEQ ID NO: 463628 - DNA, 15 bp, Homo sapiens
aagtgatttctacat

SEQ ID NO: 463629 - DNA, 15 bp, Homo sapiens
aaagtgatttctaca

SEQ ID NO: 463630 - DNA, 15 bp, Homo sapiens
aaaagtgatttctac

SEQ ID NO: 463631 - DNA, 15 bp, Homo sapiens
taaaagtgatttcta

SEQ ID NO: 463632 - DNA, 15 bp, Homo sapiens
gtaaaagtgatttct

SEQ ID NO: 463633 - DNA, 15 bp, Homo sapiens
cgtaaaagtgatttc

SEQ ID NO: 463634 - DNA, 15 bp, Homo sapiens
gcgtaaaagtgattt

SEQ ID NO: 463635 - DNA, 15 bp, Homo sapiens
agcgtaaaagtgatt

SEQ ID NO: 463636 - DNA, 15 bp, Homo sapiens
cagcgtaaaagtgat

SEQ ID NO: 463637 - DNA, 15 bp, Homo sapiens
gcagcgtaaaagtga

SEQ ID NO: 463638 - DNA, 15 bp, Homo sapiens
ggcagcgtaaaagtg

SEQ ID NO: 463639 - DNA, 15 bp, Homo sapiens
aggcagcgtaaaagt

SEQ ID NO: 463640 - DNA, 15 bp, Homo sapiens
taggcagcgtaaaag

SEQ ID NO: 463641 - DNA, 15 bp, Homo sapiens
gtaggcagcgtaaaa

SEQ ID NO: 463642 - DNA, 15 bp, Homo sapiens
ggtaggcagcgtaaa

SEQ ID NO: 463643 - DNA, 15 bp, Homo sapiens
aggtaggcagcgtaa

SEQ ID NO: 463644 - DNA, 15 bp, Homo sapiens
gaggtaggcagcgta

SEQ ID NO: 463645 - DNA, 15 bp, Homo sapiens
agaggtaggcagcgt

SEQ ID NO: 463646 - DNA, 15 bp, Homo sapiens
cagaggtaggcagcg

SEQ ID NO: 463647 - DNA, 15 bp, Homo sapiens
tcagaggtaggcagc

SEQ ID NO: 463648 - DNA, 15 bp, Homo sapiens
ttcagaggtaggcag

SEQ ID NO: 463649 - DNA, 15 bp, Homo sapiens
cttcagaggtaggca

SEQ ID NO: 463650 - DNA, 15 bp, Homo sapiens
ccttcagaggtaggc

SEQ ID NO: 463651 - DNA, 15 bp, Homo sapiens
gccttcagaggtagg

SEQ ID NO: 463652 - DNA, 15 bp, Homo sapiens
tgccttcagaggtag

SEQ ID NO: 463653 - DNA, 15 bp, Homo sapiens
gtgccttcagaggta

SEQ ID NO: 463654 - DNA, 15 bp, Homo sapiens
tgtgccttcagaggt

SEQ ID NO: 463655 - DNA, 15 bp, Homo sapiens
atgtgccttcagagg

SEQ ID NO: 463656 - DNA, 15 bp, Homo sapiens
aatgtgccttcagag

SEQ ID NO: 463657 - DNA, 15 bp, Homo sapiens
taatgtgccttcaga

SEQ ID NO: 463658 - DNA, 15 bp, Homo sapiens
ttaatgtgccttcag

SEQ ID NO: 463659 - DNA, 15 bp, Homo sapiens
tttaatgtgccttca

SEQ ID NO: 463660 - DNA, 15 bp, Homo sapiens
ttttaatgtgccttc

SEQ ID NO: 463661 - DNA, 15 bp, Homo sapiens
tttttaatgtgcctt

SEQ ID NO: 463662 - DNA, 15 bp, Homo sapiens
ctttttaatgtgcct

SEQ ID NO: 463663 - DNA, 15 bp, Homo sapiens
gctttttaatgtgcc

SEQ ID NO: 463664 - DNA, 15 bp, Homo sapiens
agctttttaatgtgc

SEQ ID NO: 463665 - DNA, 15 bp, Homo sapiens
cagctttttaatgtg

SEQ ID NO: 463666 - DNA, 15 bp, Homo sapiens
ccagctttttaatgt

SEQ ID NO: 463667 - DNA, 15 bp, Homo sapiens
tccagctttttaatg

SEQ ID NO: 463668 - DNA, 15 bp, Homo sapiens
ttccagctttttaat

SEQ ID NO: 463669 - DNA, 15 bp, Homo sapiens
tttccagctttttaa

SEQ ID NO: 463670 - DNA, 15 bp, Homo sapiens
ttttccagcttttta

SEQ ID NO: 463671 - DNA, 15 bp, Homo sapiens
attttccagcttttt

SEQ ID NO: 463672 - DNA, 15 bp, Homo sapiens
aattttccagctttt

SEQ ID NO: 463673 - DNA, 15 bp, Homo sapiens
taattttccagcttt

SEQ ID NO: 463674 - DNA, 15 bp, Homo sapiens
ctaattttccagctt

SEQ ID NO: 463675 - DNA, 15 bp, Homo sapiens
tctaattttccagct

SEQ ID NO: 463676 - DNA, 15 bp, Homo sapiens
atctaattttccagc

SEQ ID NO: 463677 - DNA, 15 bp, Homo sapiens
tatctaattttccag

SEQ ID NO: 463678 - DNA, 15 bp, Homo sapiens
ttatctaattttcca

SEQ ID NO: 463679 - DNA, 15 bp, Homo sapiens
attatctaattttcc

SEQ ID NO: 463680 - DNA, 15 bp, Homo sapiens
tattatctaattttc

SEQ ID NO: 463681 - DNA, 15 bp, Homo sapiens
atattatctaatttt

SEQ ID NO: 463682 - DNA, 15 bp, Homo sapiens
tatattatctaattt

SEQ ID NO: 463683 - DNA, 15 bp, Homo sapiens
ctatattatctaatt

SEQ ID NO: 463684 - DNA, 15 bp, Homo sapiens
tctatattatctaat

SEQ ID NO: 463685 - DNA, 15 bp, Homo sapiens
ttctatattatctaa

SEQ ID NO: 463686 - DNA, 15 bp, Homo sapiens
tttctatattatcta

SEQ ID NO: 463687 - DNA, 15 bp, Homo sapiens
ttttctatattatct

SEQ ID NO: 463688 - DNA, 15 bp, Homo sapiens
tttttctatattatc

SEQ ID NO: 463689 - DNA, 15 bp, Homo sapiens
ttttttctatattat

SEQ ID NO: 463690 - DNA, 15 bp, Homo sapiens
tttttttctatatta

SEQ ID NO: 463691 - DNA, 15 bp, Homo sapiens
ttttttttctatatt

SEQ ID NO: 463692 - DNA, 15 bp, Homo sapiens
tttttttttctatat

SEQ ID NO: 463693 - DNA, 15 bp, Homo sapiens
ctttttttttctata

SEQ ID NO: 463694 - DNA, 15 bp, Homo sapiens
cctttttttttctat

SEQ ID NO: 463695 - DNA, 15 bp, Homo sapiens
gcctttttttttcta

SEQ ID NO: 463696 - DNA, 15 bp, Homo sapiens
tgcctttttttttct

SEQ ID NO: 463697 - DNA, 15 bp, Homo sapiens
atgcctttttttttc

SEQ ID NO: 463698 - DNA, 15 bp, Homo sapiens
aatgccttttttttt

SEQ ID NO: 463699 - DNA, 15 bp, Homo sapiens
aaatgcctttttttt

SEQ ID NO: 463700 - DNA, 15 bp, Homo sapiens
aaaatgccttttttt

SEQ ID NO: 463701 - DNA, 15 bp, Homo sapiens
aaaaatgcctttttt

SEQ ID NO: 463702 - DNA, 15 bp, Homo sapiens
taaaaatgccttttt

SEQ ID NO: 463703 - DNA, 15 bp, Homo sapiens
ttaaaaatgcctttt

SEQ ID NO: 463704 - DNA, 15 bp, Homo sapiens
tttaaaaatgccttt

SEQ ID NO: 463705 - DNA, 15 bp, Homo sapiens
ttttaaaaatgcctt

SEQ ID NO: 463706 - DNA, 15 bp, Homo sapiens
tttttaaaaatgcct

SEQ ID NO: 463707 - DNA, 15 bp, Homo sapiens
atttttaaaaatgcc

SEQ ID NO: 463708 - DNA, 15 bp, Homo sapiens
gatttttaaaaatgc

SEQ ID NO: 463709 - DNA, 15 bp, Homo sapiens
tgatttttaaaaatg

SEQ ID NO: 463710 - DNA, 15 bp, Homo sapiens
ctgatttttaaaaat

SEQ ID NO: 463711 - DNA, 15 bp, Homo sapiens
tctgatttttaaaaa

SEQ ID NO: 463712 - DNA, 15 bp, Homo sapiens
ttctgatttttaaaa

SEQ ID NO: 463713 - DNA, 15 bp, Homo sapiens
attctgatttttaaa

SEQ ID NO: 463714 - DNA, 15 bp, Homo sapiens
tattctgatttttaa

SEQ ID NO: 463715 - DNA, 15 bp, Homo sapiens
gtattctgattttta

SEQ ID NO: 463716 - DNA, 15 bp, Homo sapiens
ggtattctgattttt

SEQ ID NO: 463717 - DNA, 15 bp, Homo sapiens
tggtattctgatttt

SEQ ID NO: 463718 - DNA, 15 bp, Homo sapiens
ttggtattctgattt

SEQ ID NO: 463719 - DNA, 15 bp, Homo sapiens
gttggtattctgatt

SEQ ID NO: 463720 - DNA, 15 bp, Homo sapiens
tgttggtattctgat

SEQ ID NO: 463721 - DNA, 15 bp, Homo sapiens
ttgttggtattctga

SEQ ID NO: 463722 - DNA, 15 bp, Homo sapiens
cttgttggtattctg

SEQ ID NO: 463723 - DNA, 15 bp, Homo sapiens
gcttgttggtattct

SEQ ID NO: 463724 - DNA, 15 bp, Homo sapiens
ggcttgttggtattc

SEQ ID NO: 463725 - DNA, 15 bp, Homo sapiens
tggcttgttggtatt

SEQ ID NO: 463726 - DNA, 15 bp, Homo sapiens
ctggcttgttggtat

SEQ ID NO: 463727 - DNA, 15 bp, Homo sapiens
cctggcttgttggta

SEQ ID NO: 463728 - DNA, 15 bp, Homo sapiens
tcctggcttgttggt

SEQ ID NO: 463729 - DNA, 15 bp, Homo sapiens
gtcctggcttgttgg

SEQ ID NO: 463730 - DNA, 15 bp, Homo sapiens
tgtcctggcttgttg

SEQ ID NO: 463731 - DNA, 15 bp, Homo sapiens
ttgtcctggcttgtt

SEQ ID NO: 463732 - DNA, 15 bp, Homo sapiens
cttgtcctggcttgt

SEQ ID NO: 463733 - DNA, 15 bp, Homo sapiens
ccttgtcctggcttg

SEQ ID NO: 463734 - DNA, 15 bp, Homo sapiens
accttgtcctggctt

SEQ ID NO: 463735 - DNA, 15 bp, Homo sapiens
caccttgtcctggct

SEQ ID NO: 463736 - DNA, 15 bp, Homo sapiens
tcaccttgtcctggc

SEQ ID NO: 463737 - DNA, 15 bp, Homo sapiens
ctcaccttgtcctgg

SEQ ID NO: 463738 - DNA, 15 bp, Homo sapiens
cctcaccttgtcctg

SEQ ID NO: 463739 - DNA, 15 bp, Homo sapiens
ccctcaccttgtcct

SEQ ID NO: 463740 - DNA, 15 bp, Homo sapiens
gccctcaccttgtcc

SEQ ID NO: 463741 - DNA, 15 bp, Homo sapiens
ggccctcaccttgtc

SEQ ID NO: 463742 - DNA, 15 bp, Homo sapiens
aggccctcaccttgt

SEQ ID NO: 463743 - DNA, 15 bp, Homo sapiens
gaggccctcaccttg

SEQ ID NO: 463744 - DNA, 15 bp, Homo sapiens
ggaggccctcacctt

SEQ ID NO: 463745 - DNA, 15 bp, Homo sapiens
aggaggccctcacct

SEQ ID NO: 463746 - DNA, 15 bp, Homo sapiens
caggaggccctcacc

SEQ ID NO: 463747 - DNA, 15 bp, Homo sapiens
ccaggaggccctcac

SEQ ID NO: 463748 - DNA, 15 bp, Homo sapiens
cccaggaggccctca

SEQ ID NO: 463749 - DNA, 15 bp, Homo sapiens
tcccaggaggccctc

SEQ ID NO: 463750 - DNA, 15 bp, Homo sapiens
gtcccaggaggccct

SEQ ID NO: 463751 - DNA, 15 bp, Homo sapiens
ggtcccaggaggccc

SEQ ID NO: 463752 - DNA, 15 bp, Homo sapiens
gggtcccaggaggcc

SEQ ID NO: 463753 - DNA, 15 bp, Homo sapiens
agggtcccaggaggc

SEQ ID NO: 463754 - DNA, 15 bp, Homo sapiens
cagggtcccaggagg

SEQ ID NO: 463755 - DNA, 15 bp, Homo sapiens
ccagggtcccaggag

SEQ ID NO: 463756 - DNA, 15 bp, Homo sapiens
gccagggtcccagga

SEQ ID NO: 463757 - DNA, 15 bp, Homo sapiens
agccagggtcccagg

SEQ ID NO: 463758 - DNA, 15 bp, Homo sapiens
cagccagggtcccag

SEQ ID NO: 463759 - DNA, 15 bp, Homo sapiens
ccagccagggtccca

SEQ ID NO: 463760 - DNA, 15 bp, Homo sapiens
cccagccagggtccc

SEQ ID NO: 463761 - DNA, 15 bp, Homo sapiens
ccccagccagggtcc

SEQ ID NO: 463762 - DNA, 15 bp, Homo sapiens
accccagccagggtc

SEQ ID NO: 463763 - DNA, 15 bp, Homo sapiens
taccccagccagggt

SEQ ID NO: 463764 - DNA, 15 bp, Homo sapiens
ataccccagccaggg

SEQ ID NO: 463765 - DNA, 15 bp, Homo sapiens
gataccccagccagg

SEQ ID NO: 463766 - DNA, 15 bp, Homo sapiens
agataccccagccag

SEQ ID NO: 463767 - DNA, 15 bp, Homo sapiens
cagataccccagcca

SEQ ID NO: 463768 - DNA, 15 bp, Homo sapiens
ccagataccccagcc

SEQ ID NO: 463769 - DNA, 15 bp, Homo sapiens
gccagataccccagc

SEQ ID NO: 463770 - DNA, 15 bp, Homo sapiens
tgccagataccccag

SEQ ID NO: 463771 - DNA, 15 bp, Homo sapiens
ttgccagatacccca

SEQ ID NO: 463772 - DNA, 15 bp, Homo sapiens
cttgccagatacccc

SEQ ID NO: 463773 - DNA, 15 bp, Homo sapiens
ccttgccagataccc

SEQ ID NO: 463774 - DNA, 15 bp, Homo sapiens
gccttgccagatacc

SEQ ID NO: 463775 - DNA, 15 bp, Homo sapiens
ggccttgccagatac

SEQ ID NO: 463776 - DNA, 15 bp, Homo sapiens
tggccttgccagata

SEQ ID NO: 463777 - DNA, 15 bp, Homo sapiens
ctggccttgccagat

SEQ ID NO: 463778 - DNA, 15 bp, Homo sapiens
cctggccttgccaga

SEQ ID NO: 463779 - DNA, 15 bp, Homo sapiens
ccctggccttgccag

SEQ ID NO: 463780 - DNA, 15 bp, Homo sapiens
cccctggccttgcca

SEQ ID NO: 463781 - DNA, 15 bp, Homo sapiens
acccctggccttgcc

SEQ ID NO: 463782 - DNA, 15 bp, Homo sapiens
cacccctggccttgc

SEQ ID NO: 463783 - DNA, 15 bp, Homo sapiens
acacccctggccttg

SEQ ID NO: 463784 - DNA, 15 bp, Homo sapiens
cacacccctggcctt

SEQ ID NO: 463785 - DNA, 15 bp, Homo sapiens
acacacccctggcct

SEQ ID NO: 463786 - DNA, 15 bp, Homo sapiens
cacacacccctggcc

SEQ ID NO: 463787 - DNA, 15 bp, Homo sapiens
ccacacacccctggc

SEQ ID NO: 463788 - DNA, 15 bp, Homo sapiens
gccacacacccctgg

SEQ ID NO: 463789 - DNA, 15 bp, Homo sapiens
ggccacacacccctg

SEQ ID NO: 463790 - DNA, 15 bp, Homo sapiens
gggccacacacccct

SEQ ID NO: 463791 - DNA, 15 bp, Homo sapiens
tgggccacacacccc

SEQ ID NO: 463792 - DNA, 15 bp, Homo sapiens
ctgggccacacaccc

SEQ ID NO: 463793 - DNA, 15 bp, Homo sapiens
actgggccacacacc

SEQ ID NO: 463794 - DNA, 15 bp, Homo sapiens
cactgggccacacac

SEQ ID NO: 463795 - DNA, 15 bp, Homo sapiens
ccactgggccacaca

SEQ ID NO: 463796 - DNA, 15 bp, Homo sapiens
cccactgggccacac

SEQ ID NO: 463797 - DNA, 15 bp, Homo sapiens
ccccactgggccaca

SEQ ID NO: 463798 - DNA, 15 bp, Homo sapiens
accccactgggccac

SEQ ID NO: 463799 - DNA, 15 bp, Homo sapiens
gaccccactgggcca

SEQ ID NO: 463800 - DNA, 15 bp, Homo sapiens
ggaccccactgggcc

SEQ ID NO: 463801 - DNA, 15 bp, Homo sapiens
gggaccccactgggc

SEQ ID NO: 463802 - DNA, 15 bp, Homo sapiens
ggggaccccactggg

SEQ ID NO: 463803 - DNA, 15 bp, Homo sapiens
aggggaccccactgg

SEQ ID NO: 463804 - DNA, 15 bp, Homo sapiens
caggggaccccactg

SEQ ID NO: 463805 - DNA, 15 bp, Homo sapiens
tcaggggaccccact

SEQ ID NO: 463806 - DNA, 15 bp, Homo sapiens
ctcaggggaccccac

SEQ ID NO: 463807 - DNA, 15 bp, Homo sapiens
gctcaggggacccca

SEQ ID NO: 463808 - DNA, 15 bp, Homo sapiens
ggctcaggggacccc

SEQ ID NO: 463809 - DNA, 15 bp, Homo sapiens
tggctcaggggaccc

SEQ ID NO: 463810 - DNA, 15 bp, Homo sapiens
gtggctcaggggacc

SEQ ID NO: 463811 - DNA, 15 bp, Homo sapiens
agtggctcaggggac

SEQ ID NO: 463812 - DNA, 15 bp, Homo sapiens
cagtggctcagggga

SEQ ID NO: 463813 - DNA, 15 bp, Homo sapiens
gcagtggctcagggg

SEQ ID NO: 463814 - DNA, 15 bp, Homo sapiens
agcagtggctcaggg

SEQ ID NO: 463815 - DNA, 15 bp, Homo sapiens
gagcagtggctcagg

SEQ ID NO: 463816 - DNA, 15 bp, Homo sapiens
ggagcagtggctcag

SEQ ID NO: 463817 - DNA, 15 bp, Homo sapiens
gggagcagtggctca

SEQ ID NO: 463818 - DNA, 15 bp, Homo sapiens
ggggagcagtggctc

SEQ ID NO: 463819 - DNA, 15 bp, Homo sapiens
aggggagcagtggct

SEQ ID NO: 463820 - DNA, 15 bp, Homo sapiens
caggggagcagtggc

SEQ ID NO: 463821 - DNA, 15 bp, Homo sapiens
gcaggggagcagtgg

SEQ ID NO: 463822 - DNA, 15 bp, Homo sapiens
tgcaggggagcagtg

SEQ ID NO: 463823 - DNA, 15 bp, Homo sapiens
ctgcaggggagcagt

SEQ ID NO: 463824 - DNA, 15 bp, Homo sapiens
cctgcaggggagcag

SEQ ID NO: 463825 - DNA, 15 bp, Homo sapiens
ccctgcaggggagca

SEQ ID NO: 463826 - DNA, 15 bp, Homo sapiens
accctgcaggggagc

SEQ ID NO: 463827 - DNA, 15 bp, Homo sapiens
gaccctgcaggggag

SEQ ID NO: 463828 - DNA, 15 bp, Homo sapiens
ggaccctgcagggga

SEQ ID NO: 463829 - DNA, 15 bp, Homo sapiens
tggaccctgcagggg

SEQ ID NO: 463830 - DNA, 15 bp, Homo sapiens
gtggaccctgcaggg

SEQ ID NO: 463831 - DNA, 15 bp, Homo sapiens
tgtggaccctgcagg

SEQ ID NO: 463832 - DNA, 15 bp, Homo sapiens
ttgtggaccctgcag

SEQ ID NO: 463833 - DNA, 15 bp, Homo sapiens
tttgtggaccctgca

SEQ ID NO: 463834 - DNA, 15 bp, Homo sapiens
gtttgtggaccctgc

SEQ ID NO: 463835 - DNA, 15 bp, Homo sapiens
agtttgtggaccctg

SEQ ID NO: 463836 - DNA, 15 bp, Homo sapiens
cagtttgtggaccct

SEQ ID NO: 463837 - DNA, 15 bp, Homo sapiens
tcagtttgtggaccc

SEQ ID NO: 463838 - DNA, 15 bp, Homo sapiens
gtcagtttgtggacc

SEQ ID NO: 463839 - DNA, 15 bp, Homo sapiens
ggtcagtttgtggac

SEQ ID NO: 463840 - DNA, 15 bp, Homo sapiens
tggtcagtttgtgga

SEQ ID NO: 463841 - DNA, 15 bp, Homo sapiens
atggtcagtttgtgg

SEQ ID NO: 463842 - DNA, 15 bp, Homo sapiens
aatggtcagtttgtg

SEQ ID NO: 463843 - DNA, 15 bp, Homo sapiens
caatggtcagtttgt

SEQ ID NO: 463844 - DNA, 15 bp, Homo sapiens
tcaatggtcagtttg

SEQ ID NO: 463845 - DNA, 15 bp, Homo sapiens
gtcaatggtcagttt

SEQ ID NO: 463846 - DNA, 15 bp, Homo sapiens
cgtcaatggtcagtt

SEQ ID NO: 463847 - DNA, 15 bp, Homo sapiens
tcgtcaatggtcagt

SEQ ID NO: 463848 - DNA, 15 bp, Homo sapiens
gtcgtcaatggtcag

SEQ ID NO: 463849 - DNA, 15 bp, Homo sapiens
cgtcgtcaatggtca

SEQ ID NO: 463850 - DNA, 15 bp, Homo sapiens
acgtcgtcaatggtc

SEQ ID NO: 463851 - DNA, 15 bp, Homo sapiens
gacgtcgtcaatggt

SEQ ID NO: 463852 - DNA, 15 bp, Homo sapiens
tgacgtcgtcaatgg

SEQ ID NO: 463853 - DNA, 15 bp, Homo sapiens
gtgacgtcgtcaatg

SEQ ID NO: 463854 - DNA, 15 bp, Homo sapiens
tgtgacgtcgtcaat

SEQ ID NO: 463855 - DNA, 15 bp, Homo sapiens
gtgtgacgtcgtcaa

SEQ ID NO: 463856 - DNA, 15 bp, Homo sapiens
ggtgtgacgtcgtca

SEQ ID NO: 463857 - DNA, 15 bp, Homo sapiens
aggtgtgacgtcgtc

SEQ ID NO: 463858 - DNA, 15 bp, Homo sapiens
caggtgtgacgtcgt

SEQ ID NO: 463859 - DNA, 15 bp, Homo sapiens
gcaggtgtgacgtcg

SEQ ID NO: 463860 - DNA, 15 bp, Homo sapiens
ggcaggtgtgacgtc

SEQ ID NO: 463861 - DNA, 15 bp, Homo sapiens
cggcaggtgtgacgt

SEQ ID NO: 463862 - DNA, 15 bp, Homo sapiens
tcggcaggtgtgacg

SEQ ID NO: 463863 - DNA, 15 bp, Homo sapiens
gtcggcaggtgtgac

SEQ ID NO: 463864 - DNA, 15 bp, Homo sapiens
cgtcggcaggtgtga

SEQ ID NO: 463865 - DNA, 15 bp, Homo sapiens
tcgtcggcaggtgtg

SEQ ID NO: 463866 - DNA, 15 bp, Homo sapiens
ctcgtcggcaggtgt

SEQ ID NO: 463867 - DNA, 15 bp, Homo sapiens
cctcgtcggcaggtg

SEQ ID NO: 463868 - DNA, 15 bp, Homo sapiens
gcctcgtcggcaggt

SEQ ID NO: 463869 - DNA, 15 bp, Homo sapiens
agcctcgtcggcagg

SEQ ID NO: 463870 - DNA, 15 bp, Homo sapiens
cagcctcgtcggcag

SEQ ID NO: 463871 - DNA, 15 bp, Homo sapiens
tcagcctcgtcggca

SEQ ID NO: 463872 - DNA, 15 bp, Homo sapiens
gtcagcctcgtcggc

SEQ ID NO: 463873 - DNA, 15 bp, Homo sapiens
agtcagcctcgtcgg

SEQ ID NO: 463874 - DNA, 15 bp, Homo sapiens
tagtcagcctcgtcg

SEQ ID NO: 463875 - DNA, 15 bp, Homo sapiens
gtagtcagcctcgtc

SEQ ID NO: 463876 - DNA, 15 bp, Homo sapiens
tgtagtcagcctcgt

SEQ ID NO: 463877 - DNA, 15 bp, Homo sapiens
ctgtagtcagcctcg

SEQ ID NO: 463878 - DNA, 15 bp, Homo sapiens
gctgtagtcagcctc

SEQ ID NO: 463879 - DNA, 15 bp, Homo sapiens
agctgtagtcagcct

SEQ ID NO: 463880 - DNA, 15 bp, Homo sapiens
aagctgtagtcagcc

SEQ ID NO: 463881 - DNA, 15 bp, Homo sapiens
aaagctgtagtcagc

SEQ ID NO: 463882 - DNA, 15 bp, Homo sapiens
caaagctgtagtcag

SEQ ID NO: 463883 - DNA, 15 bp, Homo sapiens
acaaagctgtagtca

SEQ ID NO: 463884 - DNA, 15 bp, Homo sapiens
cacaaagctgtagtc

SEQ ID NO: 463885 - DNA, 15 bp, Homo sapiens
gcacaaagctgtagt

SEQ ID NO: 463886 - DNA, 15 bp, Homo sapiens
ggcacaaagctgtag

SEQ ID NO: 463887 - DNA, 15 bp, Homo sapiens
gggcacaaagctgta

SEQ ID NO: 463888 - DNA, 15 bp, Homo sapiens
cgggcacaaagctgt

SEQ ID NO: 463889 - DNA, 15 bp, Homo sapiens
tcgggcacaaagctg

SEQ ID NO: 463890 - DNA, 15 bp, Homo sapiens
ctcgggcacaaagct

SEQ ID NO: 463891 - DNA, 15 bp, Homo sapiens
cctcgggcacaaagc

SEQ ID NO: 463892 - DNA, 15 bp, Homo sapiens
ccctcgggcacaaag

SEQ ID NO: 463893 - DNA, 15 bp, Homo sapiens
gccctcgggcacaaa

SEQ ID NO: 463894 - DNA, 15 bp, Homo sapiens
agccctcgggcacaa

SEQ ID NO: 463895 - DNA, 15 bp, Homo sapiens
aagccctcgggcaca

SEQ ID NO: 463896 - DNA, 15 bp, Homo sapiens
gaagccctcgggcac

SEQ ID NO: 463897 - DNA, 15 bp, Homo sapiens
cgaagccctcgggca

SEQ ID NO: 463898 - DNA, 15 bp, Homo sapiens
gcgaagccctcgggc

SEQ ID NO: 463899 - DNA, 15 bp, Homo sapiens
ggcgaagccctcggg

SEQ ID NO: 463900 - DNA, 15 bp, Homo sapiens
aggcgaagccctcgg

SEQ ID NO: 463901 - DNA, 15 bp, Homo sapiens
caggcgaagccctcg

SEQ ID NO: 463902 - DNA, 15 bp, Homo sapiens
gcaggcgaagccctc

SEQ ID NO: 463903 - DNA, 15 bp, Homo sapiens
tgcaggcgaagccct

SEQ ID NO: 463904 - DNA, 15 bp, Homo sapiens
ttgcaggcgaagccc

SEQ ID NO: 463905 - DNA, 15 bp, Homo sapiens
gttgcaggcgaagcc

SEQ ID NO: 463906 - DNA, 15 bp, Homo sapiens
ggttgcaggcgaagc

SEQ ID NO: 463907 - DNA, 15 bp, Homo sapiens
aggttgcaggcgaag

SEQ ID NO: 463908 - DNA, 15 bp, Homo sapiens
caggttgcaggcgaa

SEQ ID NO: 463909 - DNA, 15 bp, Homo sapiens
acaggttgcaggcga

SEQ ID NO: 463910 - DNA, 15 bp, Homo sapiens
gacaggttgcaggcg

SEQ ID NO: 463911 - DNA, 15 bp, Homo sapiens
tgacaggttgcaggc

SEQ ID NO: 463912 - DNA, 15 bp, Homo sapiens
ctgacaggttgcagg

SEQ ID NO: 463913 - DNA, 15 bp, Homo sapiens
gctgacaggttgcag

SEQ ID NO: 463914 - DNA, 15 bp, Homo sapiens
ggctgacaggttgca

SEQ ID NO: 463915 - DNA, 15 bp, Homo sapiens
tggctgacaggttgc

SEQ ID NO: 463916 - DNA, 15 bp, Homo sapiens
ttggctgacaggttg

SEQ ID NO: 463917 - DNA, 15 bp, Homo sapiens
cttggctgacaggtt

SEQ ID NO: 463918 - DNA, 15 bp, Homo sapiens
gcttggctgacaggt

SEQ ID NO: 463919 - DNA, 15 bp, Homo sapiens
agcttggctgacagg

SEQ ID NO: 463920 - DNA, 15 bp, Homo sapiens
gagcttggctgacag

SEQ ID NO: 463921 - DNA, 15 bp, Homo sapiens
ggagcttggctgaca

SEQ ID NO: 463922 - DNA, 15 bp, Homo sapiens
tggagcttggctgac

SEQ ID NO: 463923 - DNA, 15 bp, Homo sapiens
gtggagcttggctga

SEQ ID NO: 463924 - DNA, 15 bp, Homo sapiens
agtggagcttggctg

SEQ ID NO: 463925 - DNA, 15 bp, Homo sapiens
aagtggagcttggct

SEQ ID NO: 463926 - DNA, 15 bp, Homo sapiens
gaagtggagcttggc

SEQ ID NO: 463927 - DNA, 15 bp, Homo sapiens
tgaagtggagcttgg

SEQ ID NO: 463928 - DNA, 15 bp, Homo sapiens
atgaagtggagcttg

SEQ ID NO: 463929 - DNA, 15 bp, Homo sapiens
catgaagtggagctt

SEQ ID NO: 463930 - DNA, 15 bp, Homo sapiens
ccatgaagtggagct

SEQ ID NO: 463931 - DNA, 15 bp, Homo sapiens
cccatgaagtggagc

SEQ ID NO: 463932 - DNA, 15 bp, Homo sapiens
acccatgaagtggag

SEQ ID NO: 463933 - DNA, 15 bp, Homo sapiens
cacccatgaagtgga

SEQ ID NO: 463934 - DNA, 15 bp, Homo sapiens
tcacccatgaagtgg

SEQ ID NO: 463935 - DNA, 15 bp, Homo sapiens
ctcacccatgaagtg

SEQ ID NO: 463936 - DNA, 15 bp, Homo sapiens
gctcacccatgaagt

SEQ ID NO: 463937 - DNA, 15 bp, Homo sapiens
ggctcacccatgaag

SEQ ID NO: 463938 - DNA, 15 bp, Homo sapiens
aggctcacccatgaa

SEQ ID NO: 463939 - DNA, 15 bp, Homo sapiens
caggctcacccatga

SEQ ID NO: 463940 - DNA, 15 bp, Homo sapiens
gcaggctcacccatg

SEQ ID NO: 463941 - DNA, 15 bp, Homo sapiens
agcaggctcacccat

SEQ ID NO: 463942 - DNA, 15 bp, Homo sapiens
gagcaggctcaccca

SEQ ID NO: 463943 - DNA, 15 bp, Homo sapiens
ggagcaggctcaccc

SEQ ID NO: 463944 - DNA, 15 bp, Homo sapiens
tggagcaggctcacc

SEQ ID NO: 463945 - DNA, 15 bp, Homo sapiens
ctggagcaggctcac

SEQ ID NO: 463946 - DNA, 15 bp, Homo sapiens
cctggagcaggctca

SEQ ID NO: 463947 - DNA, 15 bp, Homo sapiens
ccctggagcaggctc

SEQ ID NO: 463948 - DNA, 15 bp, Homo sapiens
accctggagcaggct

SEQ ID NO: 463949 - DNA, 15 bp, Homo sapiens
taccctggagcaggc

SEQ ID NO: 463950 - DNA, 15 bp, Homo sapiens
ctaccctggagcagg

SEQ ID NO: 463951 - DNA, 15 bp, Homo sapiens
cctaccctggagcag

SEQ ID NO: 463952 - DNA, 15 bp, Homo sapiens
ccctaccctggagca

SEQ ID NO: 463953 - DNA, 15 bp, Homo sapiens
accctaccctggagc

SEQ ID NO: 463954 - DNA, 15 bp, Homo sapiens
caccctaccctggag

SEQ ID NO: 463955 - DNA, 15 bp, Homo sapiens
ccaccctaccctgga

SEQ ID NO: 463956 - DNA, 15 bp, Homo sapiens
cccaccctaccctgg

SEQ ID NO: 463957 - DNA, 15 bp, Homo sapiens
acccaccctaccctg

SEQ ID NO: 463958 - DNA, 15 bp, Homo sapiens
gacccaccctaccct

SEQ ID NO: 463959 - DNA, 15 bp, Homo sapiens
cgacccaccctaccc

SEQ ID NO: 463960 - DNA, 15 bp, Homo sapiens
ccgacccaccctacc

SEQ ID NO: 463961 - DNA, 15 bp, Homo sapiens
cccgacccaccctac

SEQ ID NO: 463962 - DNA, 15 bp, Homo sapiens
ccccgacccacccta

SEQ ID NO: 463963 - DNA, 15 bp, Homo sapiens
gccccgacccaccct

SEQ ID NO: 463964 - DNA, 15 bp, Homo sapiens
tgccccgacccaccc

SEQ ID NO: 463965 - DNA, 15 bp, Homo sapiens
ctgccccgacccacc

SEQ ID NO: 463966 - DNA, 15 bp, Homo sapiens
actgccccgacccac

SEQ ID NO: 463967 - DNA, 15 bp, Homo sapiens
cactgccccgaccca

SEQ ID NO: 463968 - DNA, 15 bp, Homo sapiens
ccactgccccgaccc

SEQ ID NO: 463969 - DNA, 15 bp, Homo sapiens
cccactgccccgacc

SEQ ID NO: 463970 - DNA, 15 bp, Homo sapiens
ccccactgccccgac

SEQ ID NO: 463971 - DNA, 15 bp, Homo sapiens
gccccactgccccga

SEQ ID NO: 463972 - DNA, 15 bp, Homo sapiens
ggccccactgccccg

SEQ ID NO: 463973 - DNA, 15 bp, Homo sapiens
tggccccactgcccc

SEQ ID NO: 463974 - DNA, 15 bp, Homo sapiens
ctggccccactgccc

SEQ ID NO: 463975 - DNA, 15 bp, Homo sapiens
cctggccccactgcc

SEQ ID NO: 463976 - DNA, 15 bp, Homo sapiens
tcctggccccactgc

SEQ ID NO: 463977 - DNA, 15 bp, Homo sapiens
ctcctggccccactg

SEQ ID NO: 463978 - DNA, 15 bp, Homo sapiens
gctcctggccccact

SEQ ID NO: 463979 - DNA, 15 bp, Homo sapiens
ggctcctggccccac

SEQ ID NO: 463980 - DNA, 15 bp, Homo sapiens
gggctcctggcccca

SEQ ID NO: 463981 - DNA, 15 bp, Homo sapiens
ggggctcctggcccc

SEQ ID NO: 463982 - DNA, 15 bp, Homo sapiens
aggggctcctggccc

SEQ ID NO: 463983 - DNA, 15 bp, Homo sapiens
caggggctcctggcc

SEQ ID NO: 463984 - DNA, 15 bp, Homo sapiens
acaggggctcctggc

SEQ ID NO: 463985 - DNA, 15 bp, Homo sapiens
gacaggggctcctgg

SEQ ID NO: 463986 - DNA, 15 bp, Homo sapiens
tgacaggggctcctg

SEQ ID NO: 463987 - DNA, 15 bp, Homo sapiens
gtgacaggggctcct

SEQ ID NO: 463988 - DNA, 15 bp, Homo sapiens
agtgacaggggctcc

SEQ ID NO: 463989 - DNA, 15 bp, Homo sapiens
cagtgacaggggctc

SEQ ID NO: 463990 - DNA, 15 bp, Homo sapiens
ccagtgacaggggct

SEQ ID NO: 463991 - DNA, 15 bp, Homo sapiens
cccagtgacaggggc

SEQ ID NO: 463992 - DNA, 15 bp, Homo sapiens
gcccagtgacagggg

SEQ ID NO: 463993 - DNA, 15 bp, Homo sapiens
ggcccagtgacaggg

SEQ ID NO: 463994 - DNA, 15 bp, Homo sapiens
gggcccagtgacagg

SEQ ID NO: 463995 - DNA, 15 bp, Homo sapiens
agggcccagtgacag

SEQ ID NO: 463996 - DNA, 15 bp, Homo sapiens
cagggcccagtgaca

SEQ ID NO: 463997 - DNA, 15 bp, Homo sapiens
gcagggcccagtgac

SEQ ID NO: 463998 - DNA, 15 bp, Homo sapiens
ggcagggcccagtga

SEQ ID NO: 463999 - DNA, 15 bp, Homo sapiens
aggcagggcccagtg

SEQ ID NO: 464000 - DNA, 15 bp, Homo sapiens
aaggcagggcccagt

SEQ ID NO: 464001 - DNA, 15 bp, Homo sapiens
aaaggcagggcccag

SEQ ID NO: 464002 - DNA, 15 bp, Homo sapiens
caaaggcagggccca

SEQ ID NO: 464003 - DNA, 15 bp, Homo sapiens
gcaaaggcagggccc

SEQ ID NO: 464004 - DNA, 15 bp, Homo sapiens
ggcaaaggcagggcc

SEQ ID NO: 464005 - DNA, 15 bp, Homo sapiens
gggcaaaggcagggc

SEQ ID NO: 464006 - DNA, 15 bp, Homo sapiens
ggggcaaaggcaggg

SEQ ID NO: 464007 - DNA, 15 bp, Homo sapiens
gggggcaaaggcagg

SEQ ID NO: 464008 - DNA, 15 bp, Homo sapiens
cgggggcaaaggcag

SEQ ID NO: 464009 - DNA, 15 bp, Homo sapiens
acgggggcaaaggca

SEQ ID NO: 464010 - DNA, 15 bp, Homo sapiens
cacgggggcaaaggc

SEQ ID NO: 464011 - DNA, 15 bp, Homo sapiens
gcacgggggcaaagg

SEQ ID NO: 464012 - DNA, 15 bp, Homo sapiens
agcacgggggcaaag

SEQ ID NO: 464013 - DNA, 15 bp, Homo sapiens
tagcacgggggcaaa

SEQ ID NO: 464014 - DNA, 15 bp, Homo sapiens
gtagcacgggggcaa

SEQ ID NO: 464015 - DNA, 15 bp, Homo sapiens
agtagcacgggggca

SEQ ID NO: 464016 - DNA, 15 bp, Homo sapiens
aagtagcacgggggc

SEQ ID NO: 464017 - DNA, 15 bp, Homo sapiens
caagtagcacggggg

SEQ ID NO: 464018 - DNA, 15 bp, Homo sapiens
gcaagtagcacgggg

SEQ ID NO: 464019 - DNA, 15 bp, Homo sapiens
agcaagtagcacggg

SEQ ID NO: 464020 - DNA, 15 bp, Homo sapiens
gagcaagtagcacgg

SEQ ID NO: 464021 - DNA, 15 bp, Homo sapiens
agagcaagtagcacg

SEQ ID NO: 464022 - DNA, 15 bp, Homo sapiens
aagagcaagtagcac

SEQ ID NO: 464023 - DNA, 15 bp, Homo sapiens
gaagagcaagtagca

SEQ ID NO: 464024 - DNA, 15 bp, Homo sapiens
ggaagagcaagtagc

SEQ ID NO: 464025 - DNA, 15 bp, Homo sapiens
aggaagagcaagtag

SEQ ID NO: 464026 - DNA, 15 bp, Homo sapiens
aaggaagagcaagta

SEQ ID NO: 464027 - DNA, 15 bp, Homo sapiens
gaaggaagagcaagt

SEQ ID NO: 464028 - DNA, 15 bp, Homo sapiens
agaaggaagagcaag

SEQ ID NO: 464029 - DNA, 15 bp, Homo sapiens
gagaaggaagagcaa

SEQ ID NO: 464030 - DNA, 15 bp, Homo sapiens
agagaaggaagagca

SEQ ID NO: 464031 - DNA, 15 bp, Homo sapiens
aagagaaggaagagc

SEQ ID NO: 464032 - DNA, 15 bp, Homo sapiens
caagagaaggaagag

SEQ ID NO: 464033 - DNA, 15 bp, Homo sapiens
gcaagagaaggaaga

SEQ ID NO: 464034 - DNA, 15 bp, Homo sapiens
tgcaagagaaggaag

SEQ ID NO: 464035 - DNA, 15 bp, Homo sapiens
ctgcaagagaaggaa

SEQ ID NO: 464036 - DNA, 15 bp, Homo sapiens
tctgcaagagaagga

SEQ ID NO: 464037 - DNA, 15 bp, Homo sapiens
ctctgcaagagaagg

SEQ ID NO: 464038 - DNA, 15 bp, Homo sapiens
cctctgcaagagaag

SEQ ID NO: 464039 - DNA, 15 bp, Homo sapiens
acctctgcaagagaa

SEQ ID NO: 464040 - DNA, 15 bp, Homo sapiens
gacctctgcaagaga

SEQ ID NO: 464041 - DNA, 15 bp, Homo sapiens
tgacctctgcaagag

SEQ ID NO: 464042 - DNA, 15 bp, Homo sapiens
ttgacctctgcaaga

SEQ ID NO: 464043 - DNA, 15 bp, Homo sapiens
cttgacctctgcaag

SEQ ID NO: 464044 - DNA, 15 bp, Homo sapiens
tcttgacctctgcaa

SEQ ID NO: 464045 - DNA, 15 bp, Homo sapiens
atcttgacctctgca

SEQ ID NO: 464046 - DNA, 15 bp, Homo sapiens
aatcttgacctctgc

SEQ ID NO: 464047 - DNA, 15 bp, Homo sapiens
caatcttgacctctg

SEQ ID NO: 464048 - DNA, 15 bp, Homo sapiens
tcaatcttgacctct

SEQ ID NO: 464049 - DNA, 15 bp, Homo sapiens
gtcaatcttgacctc

SEQ ID NO: 464050 - DNA, 15 bp, Homo sapiens
agtcaatcttgacct

SEQ ID NO: 464051 - DNA, 15 bp, Homo sapiens
aagtcaatcttgacc

SEQ ID NO: 464052 - DNA, 15 bp, Homo sapiens
gaagtcaatcttgac

SEQ ID NO: 464053 - DNA, 15 bp, Homo sapiens
cgaagtcaatcttga

SEQ ID NO: 464054 - DNA, 15 bp, Homo sapiens
acgaagtcaatcttg

SEQ ID NO: 464055 - DNA, 15 bp, Homo sapiens
tacgaagtcaatctt

SEQ ID NO: 464056 - DNA, 15 bp, Homo sapiens
gtacgaagtcaatct

SEQ ID NO: 464057 - DNA, 15 bp, Homo sapiens
ggtacgaagtcaatc

SEQ ID NO: 464058 - DNA, 15 bp, Homo sapiens
gggtacgaagtcaat

SEQ ID NO: 464059 - DNA, 15 bp, Homo sapiens
tgggtacgaagtcaa

SEQ ID NO: 464060 - DNA, 15 bp, Homo sapiens
ctgggtacgaagtca

SEQ ID NO: 464061 - DNA, 15 bp, Homo sapiens
cctgggtacgaagtc

SEQ ID NO: 464062 - DNA, 15 bp, Homo sapiens
gcctgggtacgaagt

SEQ ID NO: 464063 - DNA, 15 bp, Homo sapiens
tgcctgggtacgaag

SEQ ID NO: 464064 - DNA, 15 bp, Homo sapiens
ctgcctgggtacgaa

SEQ ID NO: 464065 - DNA, 15 bp, Homo sapiens
cctgcctgggtacga

SEQ ID NO: 464066 - DNA, 15 bp, Homo sapiens
ccctgcctgggtacg

SEQ ID NO: 464067 - DNA, 15 bp, Homo sapiens
accctgcctgggtac

SEQ ID NO: 464068 - DNA, 15 bp, Homo sapiens
taccctgcctgggta

SEQ ID NO: 464069 - DNA, 15 bp, Homo sapiens
ttaccctgcctgggt

SEQ ID NO: 464070 - DNA, 15 bp, Homo sapiens
cttaccctgcctggg

SEQ ID NO: 464071 - DNA, 15 bp, Homo sapiens
acttaccctgcctgg

SEQ ID NO: 464072 - DNA, 15 bp, Homo sapiens
gacttaccctgcctg

SEQ ID NO: 464073 - DNA, 15 bp, Homo sapiens
agacttaccctgcct

SEQ ID NO: 464074 - DNA, 15 bp, Homo sapiens
aagacttaccctgcc

SEQ ID NO: 464075 - DNA, 15 bp, Homo sapiens
caagacttaccctgc

SEQ ID NO: 464076 - DNA, 15 bp, Homo sapiens
ccaagacttaccctg

SEQ ID NO: 464077 - DNA, 15 bp, Homo sapiens
cccaagacttaccct

SEQ ID NO: 464078 - DNA, 15 bp, Homo sapiens
ccccaagacttaccc

SEQ ID NO: 464079 - DNA, 15 bp, Homo sapiens
gccccaagacttacc

SEQ ID NO: 464080 - DNA, 15 bp, Homo sapiens
ggccccaagacttac

SEQ ID NO: 464081 - DNA, 15 bp, Homo sapiens
gggccccaagactta

SEQ ID NO: 464082 - DNA, 15 bp, Homo sapiens
ggggccccaagactt

SEQ ID NO: 464083 - DNA, 15 bp, Homo sapiens
aggggccccaagact

SEQ ID NO: 464084 - DNA, 15 bp, Homo sapiens
caggggccccaagac

SEQ ID NO: 464085 - DNA, 15 bp, Homo sapiens
tcaggggccccaaga

SEQ ID NO: 464086 - DNA, 15 bp, Homo sapiens
ctcaggggccccaag

SEQ ID NO: 464087 - DNA, 15 bp, Homo sapiens
actcaggggccccaa

SEQ ID NO: 464088 - DNA, 15 bp, Homo sapiens
gactcaggggcccca

SEQ ID NO: 464089 - DNA, 15 bp, Homo sapiens
agactcaggggcccc

SEQ ID NO: 464090 - DNA, 15 bp, Homo sapiens
aagactcaggggccc

SEQ ID NO: 464091 - DNA, 15 bp, Homo sapiens
caagactcaggggcc

SEQ ID NO: 464092 - DNA, 15 bp, Homo sapiens
ccaagactcaggggc

SEQ ID NO: 464093 - DNA, 15 bp, Homo sapiens
accaagactcagggg

SEQ ID NO: 464094 - DNA, 15 bp, Homo sapiens
aaccaagactcaggg

SEQ ID NO: 464095 - DNA, 15 bp, Homo sapiens
gaaccaagactcagg

SEQ ID NO: 464096 - DNA, 15 bp, Homo sapiens
agaaccaagactcag

SEQ ID NO: 464097 - DNA, 15 bp, Homo sapiens
cagaaccaagactca

SEQ ID NO: 464098 - DNA, 15 bp, Homo sapiens
gcagaaccaagactc

SEQ ID NO: 464099 - DNA, 15 bp, Homo sapiens
agcagaaccaagact

SEQ ID NO: 464100 - DNA, 15 bp, Homo sapiens
gagcagaaccaagac

SEQ ID NO: 464101 - DNA, 15 bp, Homo sapiens
tgagcagaaccaaga

SEQ ID NO: 464102 - DNA, 15 bp, Homo sapiens
gtgagcagaaccaag

SEQ ID NO: 464103 - DNA, 15 bp, Homo sapiens
agtgagcagaaccaa

SEQ ID NO: 464104 - DNA, 15 bp, Homo sapiens
aagtgagcagaacca

SEQ ID NO: 464105 - DNA, 15 bp, Homo sapiens
aaagtgagcagaacc

SEQ ID NO: 464106 - DNA, 15 bp, Homo sapiens
gaaagtgagcagaac

SEQ ID NO: 464107 - DNA, 15 bp, Homo sapiens
ggaaagtgagcagaa

SEQ ID NO: 464108 - DNA, 15 bp, Homo sapiens
gggaaagtgagcaga

SEQ ID NO: 464109 - DNA, 15 bp, Homo sapiens
cgggaaagtgagcag

SEQ ID NO: 464110 - DNA, 15 bp, Homo sapiens
gcgggaaagtgagca

SEQ ID NO: 464111 - DNA, 15 bp, Homo sapiens
tgcgggaaagtgagc

SEQ ID NO: 464112 - DNA, 15 bp, Homo sapiens
ttgcgggaaagtgag

SEQ ID NO: 464113 - DNA, 15 bp, Homo sapiens
gttgcgggaaagtga

SEQ ID NO: 464114 - DNA, 15 bp, Homo sapiens
ggttgcgggaaagtg

SEQ ID NO: 464115 - DNA, 15 bp, Homo sapiens
gggttgcgggaaagt

SEQ ID NO: 464116 - DNA, 15 bp, Homo sapiens
tgggttgcgggaaag

SEQ ID NO: 464117 - DNA, 15 bp, Homo sapiens
gtgggttgcgggaaa

SEQ ID NO: 464118 - DNA, 15 bp, Homo sapiens
ggtgggttgcgggaa

SEQ ID NO: 464119 - DNA, 15 bp, Homo sapiens
gggtgggttgcggga

SEQ ID NO: 464120 - DNA, 15 bp, Homo sapiens
tgggtgggttgcggg

SEQ ID NO: 464121 - DNA, 15 bp, Homo sapiens
gtgggtgggttgcgg

SEQ ID NO: 464122 - DNA, 15 bp, Homo sapiens
cgtgggtgggttgcg

SEQ ID NO: 464123 - DNA, 15 bp, Homo sapiens
gcgtgggtgggttgc

SEQ ID NO: 464124 - DNA, 15 bp, Homo sapiens
tgcgtgggtgggttg

SEQ ID NO: 464125 - DNA, 15 bp, Homo sapiens
ctgcgtgggtgggtt

SEQ ID NO: 464126 - DNA, 15 bp, Homo sapiens
cctgcgtgggtgggt

SEQ ID NO: 464127 - DNA, 15 bp, Homo sapiens
gcctgcgtgggtggg

SEQ ID NO: 464128 - DNA, 15 bp, Homo sapiens
ggcctgcgtgggtgg

SEQ ID NO: 464129 - DNA, 15 bp, Homo sapiens
aggcctgcgtgggtg

SEQ ID NO: 464130 - DNA, 15 bp, Homo sapiens
gaggcctgcgtgggt

SEQ ID NO: 464131 - DNA, 15 bp, Homo sapiens
ggaggcctgcgtggg

SEQ ID NO: 464132 - DNA, 15 bp, Homo sapiens
gggaggcctgcgtgg

SEQ ID NO: 464133 - DNA, 15 bp, Homo sapiens
ggggaggcctgcgtg

SEQ ID NO: 464134 - DNA, 15 bp, Homo sapiens
aggggaggcctgcgt

SEQ ID NO: 464135 - DNA, 15 bp, Homo sapiens
gaggggaggcctgcg

SEQ ID NO: 464136 - DNA, 15 bp, Homo sapiens
ggaggggaggcctgc

SEQ ID NO: 464137 - DNA, 15 bp, Homo sapiens
tggaggggaggcctg

SEQ ID NO: 464138 - DNA, 15 bp, Homo sapiens
gtggaggggaggcct

SEQ ID NO: 464139 - DNA, 15 bp, Homo sapiens
agtggaggggaggcc

SEQ ID NO: 464140 - DNA, 15 bp, Homo sapiens
gagtggaggggaggc

SEQ ID NO: 464141 - DNA, 15 bp, Homo sapiens
tgagtggaggggagg

SEQ ID NO: 464142 - DNA, 15 bp, Homo sapiens
gtgagtggaggggag

SEQ ID NO: 464143 - DNA, 15 bp, Homo sapiens
tgtgagtggagggga

SEQ ID NO: 464144 - DNA, 15 bp, Homo sapiens
ctgtgagtggagggg

SEQ ID NO: 464145 - DNA, 15 bp, Homo sapiens
tctgtgagtggaggg

SEQ ID NO: 464146 - DNA, 15 bp, Homo sapiens
ctctgtgagtggagg

SEQ ID NO: 464147 - DNA, 15 bp, Homo sapiens
cctctgtgagtggag

SEQ ID NO: 464148 - DNA, 15 bp, Homo sapiens
ccctctgtgagtgga

SEQ ID NO: 464149 - DNA, 15 bp, Homo sapiens
tccctctgtgagtgg

SEQ ID NO: 464150 - DNA, 15 bp, Homo sapiens
ttccctctgtgagtg

SEQ ID NO: 464151 - DNA, 15 bp, Homo sapiens
cttccctctgtgagt

SEQ ID NO: 464152 - DNA, 15 bp, Homo sapiens
tcttccctctgtgag

SEQ ID NO: 464153 - DNA, 15 bp, Homo sapiens
ctcttccctctgtga

SEQ ID NO: 464154 - DNA, 15 bp, Homo sapiens
gctcttccctctgtg

SEQ ID NO: 464155 - DNA, 15 bp, Homo sapiens
tgctcttccctctgt

SEQ ID NO: 464156 - DNA, 15 bp, Homo sapiens
ttgctcttccctctg

SEQ ID NO: 464157 - DNA, 15 bp, Homo sapiens
cttgctcttccctct

SEQ ID NO: 464158 - DNA, 15 bp, Homo sapiens
ccttgctcttccctc

SEQ ID NO: 464159 - DNA, 15 bp, Homo sapiens
tccttgctcttccct

SEQ ID NO: 464160 - DNA, 15 bp, Homo sapiens
atccttgctcttccc

SEQ ID NO: 464161 - DNA, 15 bp, Homo sapiens
gatccttgctcttcc

SEQ ID NO: 464162 - DNA, 15 bp, Homo sapiens
tgatccttgctcttc

SEQ ID NO: 464163 - DNA, 15 bp, Homo sapiens
ttgatccttgctctt

SEQ ID NO: 464164 - DNA, 15 bp, Homo sapiens
tttgatccttgctct

SEQ ID NO: 464165 - DNA, 15 bp, Homo sapiens
ttttgatccttgctc

SEQ ID NO: 464166 - DNA, 15 bp, Homo sapiens
cttttgatccttgct

SEQ ID NO: 464167 - DNA, 15 bp, Homo sapiens
acttttgatccttgc

SEQ ID NO: 464168 - DNA, 15 bp, Homo sapiens
cacttttgatccttg

SEQ ID NO: 464169 - DNA, 15 bp, Homo sapiens
ccacttttgatcctt

SEQ ID NO: 464170 - DNA, 15 bp, Homo sapiens
cccacttttgatcct

SEQ ID NO: 464171 - DNA, 15 bp, Homo sapiens
ccccacttttgatcc

SEQ ID NO: 464172 - DNA, 15 bp, Homo sapiens
cccccacttttgatc

SEQ ID NO: 464173 - DNA, 15 bp, Homo sapiens
acccccacttttgat

SEQ ID NO: 464174 - DNA, 15 bp, Homo sapiens
gacccccacttttga

SEQ ID NO: 464175 - DNA, 15 bp, Homo sapiens
ggacccccacttttg

SEQ ID NO: 464176 - DNA, 15 bp, Homo sapiens
aggacccccactttt

SEQ ID NO: 464177 - DNA, 15 bp, Homo sapiens
caggacccccacttt

SEQ ID NO: 464178 - DNA, 15 bp, Homo sapiens
ccaggacccccactt

SEQ ID NO: 464179 - DNA, 15 bp, Homo sapiens
cccaggacccccact

SEQ ID NO: 464180 - DNA, 15 bp, Homo sapiens
ccccaggacccccac

SEQ ID NO: 464181 - DNA, 15 bp, Homo sapiens
gccccaggaccccca

SEQ ID NO: 464182 - DNA, 15 bp, Homo sapiens
ggccccaggaccccc

SEQ ID NO: 464183 - DNA, 15 bp, Homo sapiens
gggccccaggacccc

SEQ ID NO: 464184 - DNA, 15 bp, Homo sapiens
tgggccccaggaccc

SEQ ID NO: 464185 - DNA, 15 bp, Homo sapiens
ctgggccccaggacc

SEQ ID NO: 464186 - DNA, 15 bp, Homo sapiens
gctgggccccaggac

SEQ ID NO: 464187 - DNA, 15 bp, Homo sapiens
agctgggccccagga

SEQ ID NO: 464188 - DNA, 15 bp, Homo sapiens
aagctgggccccagg

SEQ ID NO: 464189 - DNA, 15 bp, Homo sapiens
gaagctgggccccag

SEQ ID NO: 464190 - DNA, 15 bp, Homo sapiens
tgaagctgggcccca

SEQ ID NO: 464191 - DNA, 15 bp, Homo sapiens
ctgaagctgggcccc

SEQ ID NO: 464192 - DNA, 15 bp, Homo sapiens
gctgaagctgggccc

SEQ ID NO: 464193 - DNA, 15 bp, Homo sapiens
agctgaagctgggcc

SEQ ID NO: 464194 - DNA, 15 bp, Homo sapiens
aagctgaagctgggc

SEQ ID NO: 464195 - DNA, 15 bp, Homo sapiens
aaagctgaagctggg

SEQ ID NO: 464196 - DNA, 15 bp, Homo sapiens
caaagctgaagctgg

SEQ ID NO: 464197 - DNA, 15 bp, Homo sapiens
gcaaagctgaagctg

SEQ ID NO: 464198 - DNA, 15 bp, Homo sapiens
ggcaaagctgaagct

SEQ ID NO: 464199 - DNA, 15 bp, Homo sapiens
tggcaaagctgaagc

SEQ ID NO: 464200 - DNA, 15 bp, Homo sapiens
gtggcaaagctgaag

SEQ ID NO: 464201 - DNA, 15 bp, Homo sapiens
agtggcaaagctgaa

SEQ ID NO: 464202 - DNA, 15 bp, Homo sapiens
gagtggcaaagctga

SEQ ID NO: 464203 - DNA, 15 bp, Homo sapiens
tgagtggcaaagctg

SEQ ID NO: 464204 - DNA, 15 bp, Homo sapiens
atgagtggcaaagct

SEQ ID NO: 464205 - DNA, 15 bp, Homo sapiens
catgagtggcaaagc

SEQ ID NO: 464206 - DNA, 15 bp, Homo sapiens
tcatgagtggcaaag

SEQ ID NO: 464207 - DNA, 15 bp, Homo sapiens
gtcatgagtggcaaa

SEQ ID NO: 464208 - DNA, 15 bp, Homo sapiens
ggtcatgagtggcaa

SEQ ID NO: 464209 - DNA, 15 bp, Homo sapiens
tggtcatgagtggca

SEQ ID NO: 464210 - DNA, 15 bp, Homo sapiens
atggtcatgagtggc

SEQ ID NO: 464211 - DNA, 15 bp, Homo sapiens
catggtcatgagtgg

SEQ ID NO: 464212 - DNA, 15 bp, Homo sapiens
ccatggtcatgagtg

SEQ ID NO: 464213 - DNA, 15 bp, Homo sapiens
cccatggtcatgagt

SEQ ID NO: 464214 - DNA, 15 bp, Homo sapiens
acccatggtcatgag

SEQ ID NO: 464215 - DNA, 15 bp, Homo sapiens
gacccatggtcatga

SEQ ID NO: 464216 - DNA, 15 bp, Homo sapiens
tgacccatggtcatg

SEQ ID NO: 464217 - DNA, 15 bp, Homo sapiens
ttgacccatggtcat

SEQ ID NO: 464218 - DNA, 15 bp, Homo sapiens
attgacccatggtca

SEQ ID NO: 464219 - DNA, 15 bp, Homo sapiens
aattgacccatggtc

SEQ ID NO: 464220 - DNA, 15 bp, Homo sapiens
taattgacccatggt

SEQ ID NO: 464221 - DNA, 15 bp, Homo sapiens
ataattgacccatgg

SEQ ID NO: 464222 - DNA, 15 bp, Homo sapiens
tataattgacccatg

SEQ ID NO: 464223 - DNA, 15 bp, Homo sapiens
ttataattgacccat

SEQ ID NO: 464224 - DNA, 15 bp, Homo sapiens
attataattgaccca

SEQ ID NO: 464225 - DNA, 15 bp, Homo sapiens
gattataattgaccc

SEQ ID NO: 464226 - DNA, 15 bp, Homo sapiens
agattataattgacc

SEQ ID NO: 464227 - DNA, 15 bp, Homo sapiens
gagattataattgac

SEQ ID NO: 464228 - DNA, 15 bp, Homo sapiens
agagattataattga

SEQ ID NO: 464229 - DNA, 15 bp, Homo sapiens
cagagattataattg

SEQ ID NO: 464230 - DNA, 15 bp, Homo sapiens
acagagattataatt

SEQ ID NO: 464231 - DNA, 15 bp, Homo sapiens
cacagagattataat

SEQ ID NO: 464232 - DNA, 15 bp, Homo sapiens
tcacagagattataa

SEQ ID NO: 464233 - DNA, 15 bp, Homo sapiens
ctcacagagattata

SEQ ID NO: 464234 - DNA, 15 bp, Homo sapiens
gctcacagagattat

SEQ ID NO: 464235 - DNA, 15 bp, Homo sapiens
ggctcacagagatta

SEQ ID NO: 464236 - DNA, 15 bp, Homo sapiens
aggctcacagagatt

SEQ ID NO: 464237 - DNA, 15 bp, Homo sapiens
gaggctcacagagat

SEQ ID NO: 464238 - DNA, 15 bp, Homo sapiens
tgaggctcacagaga

SEQ ID NO: 464239 - DNA, 15 bp, Homo sapiens
ctgaggctcacagag

SEQ ID NO: 464240 - DNA, 15 bp, Homo sapiens
actgaggctcacaga

SEQ ID NO: 464241 - DNA, 15 bp, Homo sapiens
aactgaggctcacag

SEQ ID NO: 464242 - DNA, 15 bp, Homo sapiens
aaactgaggctcaca

SEQ ID NO: 464243 - DNA, 15 bp, Homo sapiens
gaaactgaggctcac

SEQ ID NO: 464244 - DNA, 15 bp, Homo sapiens
ggaaactgaggctca

SEQ ID NO: 464245 - DNA, 15 bp, Homo sapiens
aggaaactgaggctc

SEQ ID NO: 464246 - DNA, 15 bp, Homo sapiens
gaggaaactgaggct

SEQ ID NO: 464247 - DNA, 15 bp, Homo sapiens
agaggaaactgaggc

SEQ ID NO: 464248 - DNA, 15 bp, Homo sapiens
aagaggaaactgagg

SEQ ID NO: 464249 - DNA, 15 bp, Homo sapiens
gaagaggaaactgag

SEQ ID NO: 464250 - DNA, 15 bp, Homo sapiens
agaagaggaaactga

SEQ ID NO: 464251 - DNA, 15 bp, Homo sapiens
gagaagaggaaactg

SEQ ID NO: 464252 - DNA, 15 bp, Homo sapiens
agagaagaggaaact

SEQ ID NO: 464253 - DNA, 15 bp, Homo sapiens
tagagaagaggaaac

SEQ ID NO: 464254 - DNA, 15 bp, Homo sapiens
ttagagaagaggaaa

SEQ ID NO: 464255 - DNA, 15 bp, Homo sapiens
tttagagaagaggaa

SEQ ID NO: 464256 - DNA, 15 bp, Homo sapiens
ttttagagaagagga

SEQ ID NO: 464257 - DNA, 15 bp, Homo sapiens
attttagagaagagg

SEQ ID NO: 464258 - DNA, 15 bp, Homo sapiens
cattttagagaagag

SEQ ID NO: 464259 - DNA, 15 bp, Homo sapiens
ccattttagagaaga

SEQ ID NO: 464260 - DNA, 15 bp, Homo sapiens
cccattttagagaag

SEQ ID NO: 464261 - DNA, 15 bp, Homo sapiens
tcccattttagagaa

SEQ ID NO: 464262 - DNA, 15 bp, Homo sapiens
ttcccattttagaga

SEQ ID NO: 464263 - DNA, 15 bp, Homo sapiens
gttcccattttagag

SEQ ID NO: 464264 - DNA, 15 bp, Homo sapiens
ggttcccattttaga

SEQ ID NO: 464265 - DNA, 15 bp, Homo sapiens
gggttcccattttag

SEQ ID NO: 464266 - DNA, 15 bp, Homo sapiens
agggttcccatttta

SEQ ID NO: 464267 - DNA, 15 bp, Homo sapiens
cagggttcccatttt

SEQ ID NO: 464268 - DNA, 15 bp, Homo sapiens
tcagggttcccattt

SEQ ID NO: 464269 - DNA, 15 bp, Homo sapiens
atcagggttcccatt

SEQ ID NO: 464270 - DNA, 15 bp, Homo sapiens
tatcagggttcccat

SEQ ID NO: 464271 - DNA, 15 bp, Homo sapiens
ctatcagggttccca

SEQ ID NO: 464272 - DNA, 15 bp, Homo sapiens
actatcagggttccc

SEQ ID NO: 464273 - DNA, 15 bp, Homo sapiens
cactatcagggttcc

SEQ ID NO: 464274 - DNA, 15 bp, Homo sapiens
gcactatcagggttc

SEQ ID NO: 464275 - DNA, 15 bp, Homo sapiens
ggcactatcagggtt

SEQ ID NO: 464276 - DNA, 15 bp, Homo sapiens
tggcactatcagggt

SEQ ID NO: 464277 - DNA, 15 bp, Homo sapiens
gtggcactatcaggg

SEQ ID NO: 464278 - DNA, 15 bp, Homo sapiens
ggtggcactatcagg

SEQ ID NO: 464279 - DNA, 15 bp, Homo sapiens
aggtggcactatcag

SEQ ID NO: 464280 - DNA, 15 bp, Homo sapiens
gaggtggcactatca

SEQ ID NO: 464281 - DNA, 15 bp, Homo sapiens
tgaggtggcactatc

SEQ ID NO: 464282 - DNA, 15 bp, Homo sapiens
atgaggtggcactat

SEQ ID NO: 464283 - DNA, 15 bp, Homo sapiens
tatgaggtggcacta

SEQ ID NO: 464284 - DNA, 15 bp, Homo sapiens
ctatgaggtggcact

SEQ ID NO: 464285 - DNA, 15 bp, Homo sapiens
cctatgaggtggcac

SEQ ID NO: 464286 - DNA, 15 bp, Homo sapiens
tcctatgaggtggca

SEQ ID NO: 464287 - DNA, 15 bp, Homo sapiens
atcctatgaggtggc

SEQ ID NO: 464288 - DNA, 15 bp, Homo sapiens
tatcctatgaggtgg

SEQ ID NO: 464289 - DNA, 15 bp, Homo sapiens
ctatcctatgaggtg

SEQ ID NO: 464290 - DNA, 15 bp, Homo sapiens
actatcctatgaggt

SEQ ID NO: 464291 - DNA, 15 bp, Homo sapiens
aactatcctatgagg

SEQ ID NO: 464292 - DNA, 15 bp, Homo sapiens
taactatcctatgag

SEQ ID NO: 464293 - DNA, 15 bp, Homo sapiens
ataactatcctatga

SEQ ID NO: 464294 - DNA, 15 bp, Homo sapiens
tataactatcctatg

SEQ ID NO: 464295 - DNA, 15 bp, Homo sapiens
ttataactatcctat

SEQ ID NO: 464296 - DNA, 15 bp, Homo sapiens
tttataactatccta

SEQ ID NO: 464297 - DNA, 15 bp, Homo sapiens
ctttataactatcct

SEQ ID NO: 464298 - DNA, 15 bp, Homo sapiens
tctttataactatcc

SEQ ID NO: 464299 - DNA, 15 bp, Homo sapiens
atctttataactatc

SEQ ID NO: 464300 - DNA, 15 bp, Homo sapiens
catctttataactat

SEQ ID NO: 464301 - DNA, 15 bp, Homo sapiens
tcatctttataacta

SEQ ID NO: 464302 - DNA, 15 bp, Homo sapiens
ctcatctttataact

SEQ ID NO: 464303 - DNA, 15 bp, Homo sapiens
cctcatctttataac

SEQ ID NO: 464304 - DNA, 15 bp, Homo sapiens
acctcatctttataa

SEQ ID NO: 464305 - DNA, 15 bp, Homo sapiens
cacctcatctttata

SEQ ID NO: 464306 - DNA, 15 bp, Homo sapiens
tcacctcatctttat

SEQ ID NO: 464307 - DNA, 15 bp, Homo sapiens
gtcacctcatcttta

SEQ ID NO: 464308 - DNA, 15 bp, Homo sapiens
tgtcacctcatcttt

SEQ ID NO: 464309 - DNA, 15 bp, Homo sapiens
atgtcacctcatctt

SEQ ID NO: 464310 - DNA, 15 bp, Homo sapiens
catgtcacctcatct

SEQ ID NO: 464311 - DNA, 15 bp, Homo sapiens
tcatgtcacctcatc

SEQ ID NO: 464312 - DNA, 15 bp, Homo sapiens
atcatgtcacctcat

SEQ ID NO: 464313 - DNA, 15 bp, Homo sapiens
catcatgtcacctca

SEQ ID NO: 464314 - DNA, 15 bp, Homo sapiens
acatcatgtcacctc

SEQ ID NO: 464315 - DNA, 15 bp, Homo sapiens
tacatcatgtcacct

SEQ ID NO: 464316 - DNA, 15 bp, Homo sapiens
atacatcatgtcacc

SEQ ID NO: 464317 - DNA, 15 bp, Homo sapiens
gatacatcatgtcac

SEQ ID NO: 464318 - DNA, 15 bp, Homo sapiens
tgatacatcatgtca

SEQ ID NO: 464319 - DNA, 15 bp, Homo sapiens
ctgatacatcatgtc

SEQ ID NO: 464320 - DNA, 15 bp, Homo sapiens
tctgatacatcatgt

SEQ ID NO: 464321 - DNA, 15 bp, Homo sapiens
gtctgatacatcatg

SEQ ID NO: 464322 - DNA, 15 bp, Homo sapiens
ggtctgatacatcat

SEQ ID NO: 464323 - DNA, 15 bp, Homo sapiens
aggtctgatacatca

SEQ ID NO: 464324 - DNA, 15 bp, Homo sapiens
caggtctgatacatc

SEQ ID NO: 464325 - DNA, 15 bp, Homo sapiens
acaggtctgatacat

SEQ ID NO: 464326 - DNA, 15 bp, Homo sapiens
gacaggtctgataca

SEQ ID NO: 464327 - DNA, 15 bp, Homo sapiens
tgacaggtctgatac

SEQ ID NO: 464328 - DNA, 15 bp, Homo sapiens
ttgacaggtctgata

SEQ ID NO: 464329 - DNA, 15 bp, Homo sapiens
cttgacaggtctgat

SEQ ID NO: 464330 - DNA, 15 bp, Homo sapiens
acttgacaggtctga

SEQ ID NO: 464331 - DNA, 15 bp, Homo sapiens
cacttgacaggtctg

SEQ ID NO: 464332 - DNA, 15 bp, Homo sapiens
gcacttgacaggtct

SEQ ID NO: 464333 - DNA, 15 bp, Homo sapiens
agcacttgacaggtc

SEQ ID NO: 464334 - DNA, 15 bp, Homo sapiens
cagcacttgacaggt

SEQ ID NO: 464335 - DNA, 15 bp, Homo sapiens
acagcacttgacagg

SEQ ID NO: 464336 - DNA, 15 bp, Homo sapiens
gacagcacttgacag

SEQ ID NO: 464337 - DNA, 15 bp, Homo sapiens
tgacagcacttgaca

SEQ ID NO: 464338 - DNA, 15 bp, Homo sapiens
gtgacagcacttgac

SEQ ID NO: 464339 - DNA, 15 bp, Homo sapiens
tgtgacagcacttga

SEQ ID NO: 464340 - DNA, 15 bp, Homo sapiens
atgtgacagcacttg

SEQ ID NO: 464341 - DNA, 15 bp, Homo sapiens
catgtgacagcactt

SEQ ID NO: 464342 - DNA, 15 bp, Homo sapiens
acatgtgacagcact

SEQ ID NO: 464343 - DNA, 15 bp, Homo sapiens
cacatgtgacagcac

SEQ ID NO: 464344 - DNA, 15 bp, Homo sapiens
acacatgtgacagca

SEQ ID NO: 464345 - DNA, 15 bp, Homo sapiens
cacacatgtgacagc

SEQ ID NO: 464346 - DNA, 15 bp, Homo sapiens
tcacacatgtgacag

SEQ ID NO: 464347 - DNA, 15 bp, Homo sapiens
gtcacacatgtgaca

SEQ ID NO: 464348 - DNA, 15 bp, Homo sapiens
agtcacacatgtgac

SEQ ID NO: 464349 - DNA, 15 bp, Homo sapiens
cagtcacacatgtga

SEQ ID NO: 464350 - DNA, 15 bp, Homo sapiens
acagtcacacatgtg

SEQ ID NO: 464351 - DNA, 15 bp, Homo sapiens
aacagtcacacatgt

SEQ ID NO: 464352 - DNA, 15 bp, Homo sapiens
taacagtcacacatg

SEQ ID NO: 464353 - DNA, 15 bp, Homo sapiens
ataacagtcacacat

SEQ ID NO: 464354 - DNA, 15 bp, Homo sapiens
aataacagtcacaca

SEQ ID NO: 464355 - DNA, 15 bp, Homo sapiens
taataacagtcacac

SEQ ID NO: 464356 - DNA, 15 bp, Homo sapiens
ataataacagtcaca

SEQ ID NO: 464357 - DNA, 15 bp, Homo sapiens
aataataacagtcac

SEQ ID NO: 464358 - DNA, 15 bp, Homo sapiens
taataataacagtca

SEQ ID NO: 464359 - DNA, 15 bp, Homo sapiens
gtaataataacagtc

SEQ ID NO: 464360 - DNA, 15 bp, Homo sapiens
tgtaataataacagt

SEQ ID NO: 464361 - DNA, 15 bp, Homo sapiens
atgtaataataacag

SEQ ID NO: 464362 - DNA, 15 bp, Homo sapiens
gatgtaataataaca

SEQ ID NO: 464363 - DNA, 15 bp, Homo sapiens
agatgtaataataac

SEQ ID NO: 464364 - DNA, 15 bp, Homo sapiens
aagatgtaataataa

SEQ ID NO: 464365 - DNA, 15 bp, Homo sapiens
aaagatgtaataata

SEQ ID NO: 464366 - DNA, 15 bp, Homo sapiens
aaaagatgtaataat

SEQ ID NO: 464367 - DNA, 15 bp, Homo sapiens
gaaaagatgtaataa

SEQ ID NO: 464368 - DNA, 15 bp, Homo sapiens
agaaaagatgtaata

SEQ ID NO: 464369 - DNA, 15 bp, Homo sapiens
aagaaaagatgtaat

SEQ ID NO: 464370 - DNA, 15 bp, Homo sapiens
gaagaaaagatgtaa

SEQ ID NO: 464371 - DNA, 15 bp, Homo sapiens
agaagaaaagatgta

SEQ ID NO: 464372 - DNA, 15 bp, Homo sapiens
aagaagaaaagatgt

SEQ ID NO: 464373 - DNA, 15 bp, Homo sapiens
gaagaagaaaagatg

SEQ ID NO: 464374 - DNA, 15 bp, Homo sapiens
agaagaagaaaagat

SEQ ID NO: 464375 - DNA, 15 bp, Homo sapiens
aagaagaagaaaaga

SEQ ID NO: 464376 - DNA, 15 bp, Homo sapiens
gaagaagaagaaaag

SEQ ID NO: 464377 - DNA, 15 bp, Homo sapiens
ggaagaagaagaaaa

SEQ ID NO: 464378 - DNA, 15 bp, Homo sapiens
aggaagaagaagaaa

SEQ ID NO: 464379 - DNA, 15 bp, Homo sapiens
aaggaagaagaagaa

SEQ ID NO: 464380 - DNA, 15 bp, Homo sapiens
aaaggaagaagaaga

SEQ ID NO: 464381 - DNA, 15 bp, Homo sapiens
aaaaggaagaagaag

SEQ ID NO: 464382 - DNA, 15 bp, Homo sapiens
aaaaaggaagaagaa

SEQ ID NO: 464383 - DNA, 15 bp, Homo sapiens
aaaaaaggaagaaga

SEQ ID NO: 464384 - DNA, 15 bp, Homo sapiens
aaaaaaaggaagaag

SEQ ID NO: 464385 - DNA, 15 bp, Homo sapiens
aaaaaaaaggaagaa

SEQ ID NO: 464386 - DNA, 15 bp, Homo sapiens
aaaaaaaaaggaaga

SEQ ID NO: 464387 - DNA, 15 bp, Homo sapiens
taaaaaaaaaggaag

SEQ ID NO: 464388 - DNA, 15 bp, Homo sapiens
ataaaaaaaaaggaa

SEQ ID NO: 464389 - DNA, 15 bp, Homo sapiens
aataaaaaaaaagga

SEQ ID NO: 464390 - DNA, 15 bp, Homo sapiens
aaataaaaaaaaagg

SEQ ID NO: 464391 - DNA, 15 bp, Homo sapiens
aaaataaaaaaaaag

SEQ ID NO: 464392 - DNA, 15 bp, Homo sapiens
aaaaataaaaaaaaa

SEQ ID NO: 464393 - DNA, 15 bp, Homo sapiens
taaaaataaaaaaaa

SEQ ID NO: 464394 - DNA, 15 bp, Homo sapiens
ataaaaataaaaaaa

SEQ ID NO: 464395 - DNA, 15 bp, Homo sapiens
aataaaaataaaaaa

SEQ ID NO: 464396 - DNA, 15 bp, Homo sapiens
aaataaaaataaaaa

SEQ ID NO: 464397 - DNA, 15 bp, Homo sapiens
aaaataaaaataaaa

SEQ ID NO: 464398 - DNA, 15 bp, Homo sapiens
aaaaataaaaataaa

SEQ ID NO: 464399 - DNA, 15 bp, Homo sapiens
aaaaaataaaaataa

SEQ ID NO: 464400 - DNA, 15 bp, Homo sapiens
caaaaaaaataaaaa

SEQ ID NO: 464401 - DNA, 15 bp, Homo sapiens
tcaaaaaaaataaaa

SEQ ID NO: 464402 - DNA, 15 bp, Homo sapiens
ctcaaaaaaaataaa

SEQ ID NO: 464403 - DNA, 15 bp, Homo sapiens
tctcaaaaaaaataa

SEQ ID NO: 464404 - DNA, 15 bp, Homo sapiens
gtctcaaaaaaaata

SEQ ID NO: 464405 - DNA, 15 bp, Homo sapiens
cgtctcaaaaaaaat

SEQ ID NO: 464406 - DNA, 15 bp, Homo sapiens
ccgtctcaaaaaaaa

SEQ ID NO: 464407 - DNA, 15 bp, Homo sapiens
tccgtctcaaaaaaa

SEQ ID NO: 464408 - DNA, 15 bp, Homo sapiens
ctccgtctcaaaaaa

SEQ ID NO: 464409 - DNA, 15 bp, Homo sapiens
ggagactccgtctca

SEQ ID NO: 464410 - DNA, 15 bp, Homo sapiens
gggagactccgtctc

SEQ ID NO: 464411 - DNA, 15 bp, Homo sapiens
agggagactccgtct

SEQ ID NO: 464412 - DNA, 15 bp, Homo sapiens
gagggagactccgtc

SEQ ID NO: 464413 - DNA, 15 bp, Homo sapiens
agagggagactccgt

SEQ ID NO: 464414 - DNA, 15 bp, Homo sapiens
cagagggagactccg

SEQ ID NO: 464415 - DNA, 15 bp, Homo sapiens
acagagggagactcc

SEQ ID NO: 464416 - DNA, 15 bp, Homo sapiens
gacagagggagactc

SEQ ID NO: 464417 - DNA, 15 bp, Homo sapiens
cgacagagggagact

SEQ ID NO: 464418 - DNA, 15 bp, Homo sapiens
gcgacagagggagac

SEQ ID NO: 464419 - DNA, 15 bp, Homo sapiens
ggcgacagagggaga

SEQ ID NO: 464420 - DNA, 15 bp, Homo sapiens
gggcgacagagggag

SEQ ID NO: 464421 - DNA, 15 bp, Homo sapiens
tgggcgacagaggga

SEQ ID NO: 464422 - DNA, 15 bp, Homo sapiens
gtgggcgacagaggg

SEQ ID NO: 464423 - DNA, 15 bp, Homo sapiens
cgtgggcgacagagg

SEQ ID NO: 464424 - DNA, 15 bp, Homo sapiens
gcgtgggcgacagag

SEQ ID NO: 464425 - DNA, 15 bp, Homo sapiens
agcgtgggcgacaga

SEQ ID NO: 464426 - DNA, 15 bp, Homo sapiens
cagcgtgggcgacag

SEQ ID NO: 464427 - DNA, 15 bp, Homo sapiens
ccagcgtgggcgaca

SEQ ID NO: 464428 - DNA, 15 bp, Homo sapiens
tccagcgtgggcgac

SEQ ID NO: 464429 - DNA, 15 bp, Homo sapiens
ctccagcgtgggcga

SEQ ID NO: 464430 - DNA, 15 bp, Homo sapiens
tctccagcgtgggcg

SEQ ID NO: 464431 - DNA, 15 bp, Homo sapiens
ctctccagcgtgggc

SEQ ID NO: 464432 - DNA, 15 bp, Homo sapiens
tctctccagcgtggg

SEQ ID NO: 464433 - DNA, 15 bp, Homo sapiens
ttctctccagcgtgg

SEQ ID NO: 464434 - DNA, 15 bp, Homo sapiens
cttctctccagcgtg

SEQ ID NO: 464435 - DNA, 15 bp, Homo sapiens
acttctctccagcgt

SEQ ID NO: 464436 - DNA, 15 bp, Homo sapiens
cacttctctccagcg

SEQ ID NO: 464437 - DNA, 15 bp, Homo sapiens
ccacttctctccagc

SEQ ID NO: 464438 - DNA, 15 bp, Homo sapiens
gccacttctctccag

SEQ ID NO: 464439 - DNA, 15 bp, Homo sapiens
cgccacttctctcca

SEQ ID NO: 464440 - DNA, 15 bp, Homo sapiens
gcgccacttctctcc

SEQ ID NO: 464441 - DNA, 15 bp, Homo sapiens
cgcgccacttctctc

SEQ ID NO: 464442 - DNA, 15 bp, Homo sapiens
tcgcgccacttctct

SEQ ID NO: 464443 - DNA, 15 bp, Homo sapiens
atcgcgccacttctc

SEQ ID NO: 464444 - DNA, 15 bp, Homo sapiens
gatcgcgccacttct

SEQ ID NO: 464445 - DNA, 15 bp, Homo sapiens
agatcgcgccacttc

SEQ ID NO: 464446 - DNA, 15 bp, Homo sapiens
gagatcgcgccactt

SEQ ID NO: 464447 - DNA, 15 bp, Homo sapiens
cgagatcgcgccact

SEQ ID NO: 464448 - DNA, 15 bp, Homo sapiens
ccgagatcgcgccac

SEQ ID NO: 464449 - DNA, 15 bp, Homo sapiens
gccgagatcgcgcca

SEQ ID NO: 464450 - DNA, 15 bp, Homo sapiens
agccgagatcgcgcc

SEQ ID NO: 464451 - DNA, 15 bp, Homo sapiens
gagccgagatcgcgc

SEQ ID NO: 464452 - DNA, 15 bp, Homo sapiens
tgagccgagatcgcg

SEQ ID NO: 464453 - DNA, 15 bp, Homo sapiens
gtgagccgagatcgc

SEQ ID NO: 464454 - DNA, 15 bp, Homo sapiens
agtgagccgagatcg

SEQ ID NO: 464455 - DNA, 15 bp, Homo sapiens
cagtgagccgagatc

SEQ ID NO: 464456 - DNA, 15 bp, Homo sapiens
cttgcagtgagccga

SEQ ID NO: 464457 - DNA, 15 bp, Homo sapiens
gcttgcagtgagccg

SEQ ID NO: 464458 - DNA, 15 bp, Homo sapiens
agcttgcagtgagcc

SEQ ID NO: 464459 - DNA, 15 bp, Homo sapiens
gagcttgcagtgagc

SEQ ID NO: 464460 - DNA, 15 bp, Homo sapiens
ggagcttgcagtgag

SEQ ID NO: 464461 - DNA, 15 bp, Homo sapiens
cggagcttgcagtga

SEQ ID NO: 464462 - DNA, 15 bp, Homo sapiens
gcggagcttgcagtg

SEQ ID NO: 464463 - DNA, 15 bp, Homo sapiens
ggcggagcttgcagt

SEQ ID NO: 464464 - DNA, 15 bp, Homo sapiens
aggcggagcttgcag

SEQ ID NO: 464465 - DNA, 15 bp, Homo sapiens
gaggcggagcttgca

SEQ ID NO: 464466 - DNA, 15 bp, Homo sapiens
ggaggcggagcttgc

SEQ ID NO: 464467 - DNA, 15 bp, Homo sapiens
gggaggcggagcttg

SEQ ID NO: 464468 - DNA, 15 bp, Homo sapiens
tgggaggcggagctt

SEQ ID NO: 464469 - DNA, 15 bp, Homo sapiens
ctgggaggcggagct

SEQ ID NO: 464470 - DNA, 15 bp, Homo sapiens
cctgggaggcggagc

SEQ ID NO: 464471 - DNA, 15 bp, Homo sapiens
gtgaacctgggaggc

SEQ ID NO: 464472 - DNA, 15 bp, Homo sapiens
tgtgaacctgggagg

SEQ ID NO: 464473 - DNA, 15 bp, Homo sapiens
gtgtgaacctgggag

SEQ ID NO: 464474 - DNA, 15 bp, Homo sapiens
ggtgtgaacctggga

SEQ ID NO: 464475 - DNA, 15 bp, Homo sapiens
tggtgtgaacctggg

SEQ ID NO: 464476 - DNA, 15 bp, Homo sapiens
gtggtgtgaacctgg

SEQ ID NO: 464477 - DNA, 15 bp, Homo sapiens
agtggtgtgaacctg

SEQ ID NO: 464478 - DNA, 15 bp, Homo sapiens
gagtggtgtgaacct

SEQ ID NO: 464479 - DNA, 15 bp, Homo sapiens
agagtggtgtgaacc

SEQ ID NO: 464480 - DNA, 15 bp, Homo sapiens
gagagtggtgtgaac

SEQ ID NO: 464481 - DNA, 15 bp, Homo sapiens
ggagagtggtgtgaa

SEQ ID NO: 464482 - DNA, 15 bp, Homo sapiens
aggagagtggtgtga

SEQ ID NO: 464483 - DNA, 15 bp, Homo sapiens
caggagagtggtgtg

SEQ ID NO: 464484 - DNA, 15 bp, Homo sapiens
gcaggagagtggtgt

SEQ ID NO: 464485 - DNA, 15 bp, Homo sapiens
ggcaggagagtggtg

SEQ ID NO: 464486 - DNA, 15 bp, Homo sapiens
aggcaggagagtggt

SEQ ID NO: 464487 - DNA, 15 bp, Homo sapiens
gaggcaggagagtgg

SEQ ID NO: 464488 - DNA, 15 bp, Homo sapiens
tgaggcaggagagtg

SEQ ID NO: 464489 - DNA, 15 bp, Homo sapiens
ctgaggcaggagagt

SEQ ID NO: 464490 - DNA, 15 bp, Homo sapiens
gctgaggcaggagag

SEQ ID NO: 464491 - DNA, 15 bp, Homo sapiens
cgcctgtagtcccag

SEQ ID NO: 464492 - DNA, 15 bp, Homo sapiens
gcgcctgtagtccca

SEQ ID NO: 464493 - DNA, 15 bp, Homo sapiens
ggcgcctgtagtccc

SEQ ID NO: 464494 - DNA, 15 bp, Homo sapiens
gggcgcctgtagtcc

SEQ ID NO: 464495 - DNA, 15 bp, Homo sapiens
cgggcgcctgtagtc

SEQ ID NO: 464496 - DNA, 15 bp, Homo sapiens
gcgggcgcctgtagt

SEQ ID NO: 464497 - DNA, 15 bp, Homo sapiens
ggcgggcgcctgtag

SEQ ID NO: 464498 - DNA, 15 bp, Homo sapiens
tggcgggcgcctgta

SEQ ID NO: 464499 - DNA, 15 bp, Homo sapiens
gtggcgggcgcctgt

SEQ ID NO: 464500 - DNA, 15 bp, Homo sapiens
ggtggcgggcgcctg

SEQ ID NO: 464501 - DNA, 15 bp, Homo sapiens
tggtggcgggcgcct

SEQ ID NO: 464502 - DNA, 15 bp, Homo sapiens
atggtggcgggcgcc

SEQ ID NO: 464503 - DNA, 15 bp, Homo sapiens
catggtggcgggcgc

SEQ ID NO: 464504 - DNA, 15 bp, Homo sapiens
gcatggtggcgggcg

SEQ ID NO: 464505 - DNA, 15 bp, Homo sapiens
ggcatggtggcgggc

SEQ ID NO: 464506 - DNA, 15 bp, Homo sapiens
gggcatggtggcggg

SEQ ID NO: 464507 - DNA, 15 bp, Homo sapiens
tgggcatggtggcgg

SEQ ID NO: 464508 - DNA, 15 bp, Homo sapiens
ctgggcatggtggcg

SEQ ID NO: 464509 - DNA, 15 bp, Homo sapiens
gctgggcatggtggc

SEQ ID NO: 464510 - DNA, 15 bp, Homo sapiens
agctgggcatggtgg

SEQ ID NO: 464511 - DNA, 15 bp, Homo sapiens
tagctgggcatggtg

SEQ ID NO: 464512 - DNA, 15 bp, Homo sapiens
ttagctgggcatggt

SEQ ID NO: 464513 - DNA, 15 bp, Homo sapiens
attagctgggcatgg

SEQ ID NO: 464514 - DNA, 15 bp, Homo sapiens
aattagctgggcatg

SEQ ID NO: 464515 - DNA, 15 bp, Homo sapiens
taattagctgggcat

SEQ ID NO: 464516 - DNA, 15 bp, Homo sapiens
ataattagctgggca

SEQ ID NO: 464517 - DNA, 15 bp, Homo sapiens
aataattagctgggc

SEQ ID NO: 464518 - DNA, 15 bp, Homo sapiens
aaataattagctggg

SEQ ID NO: 464519 - DNA, 15 bp, Homo sapiens
aaaataattagctgg

SEQ ID NO: 464520 - DNA, 15 bp, Homo sapiens
aaaaataattagctg

SEQ ID NO: 464521 - DNA, 15 bp, Homo sapiens
aaaaaataattagct

SEQ ID NO: 464522 - DNA, 15 bp, Homo sapiens
caaaaaataattagc

SEQ ID NO: 464523 - DNA, 15 bp, Homo sapiens
acaaaaaataattag

SEQ ID NO: 464524 - DNA, 15 bp, Homo sapiens
tacaaaaaataatta

SEQ ID NO: 464525 - DNA, 15 bp, Homo sapiens
atacaaaaaataatt

SEQ ID NO: 464526 - DNA, 15 bp, Homo sapiens
aatacaaaaaataat

SEQ ID NO: 464527 - DNA, 15 bp, Homo sapiens
aaatacaaaaaataa

SEQ ID NO: 464528 - DNA, 15 bp, Homo sapiens
aaaatacaaaaaata

SEQ ID NO: 464529 - DNA, 15 bp, Homo sapiens
aaaaatacaaaaaat

SEQ ID NO: 464530 - DNA, 15 bp, Homo sapiens
taaaaatacaaaaaa

SEQ ID NO: 464531 - DNA, 15 bp, Homo sapiens
ctaaaaatacaaaaa

SEQ ID NO: 464532 - DNA, 15 bp, Homo sapiens
actaaaaatacaaaa

SEQ ID NO: 464533 - DNA, 15 bp, Homo sapiens
tactaaaaatacaaa

SEQ ID NO: 464534 - DNA, 15 bp, Homo sapiens
ctactaaaaatacaa

SEQ ID NO: 464535 - DNA, 15 bp, Homo sapiens
tctactaaaaataca

SEQ ID NO: 464536 - DNA, 15 bp, Homo sapiens
ctctactaaaaatac

SEQ ID NO: 464537 - DNA, 15 bp, Homo sapiens
cccgtctctactaaa

SEQ ID NO: 464538 - DNA, 15 bp, Homo sapiens
ccccgtctctactaa

SEQ ID NO: 464539 - DNA, 15 bp, Homo sapiens
accccgtctctacta

SEQ ID NO: 464540 - DNA, 15 bp, Homo sapiens
ggtgaaaccccgtct

SEQ ID NO: 464541 - DNA, 15 bp, Homo sapiens
tggtgaaaccccgtc

SEQ ID NO: 464542 - DNA, 15 bp, Homo sapiens
atggtgaaaccccgt

SEQ ID NO: 464543 - DNA, 15 bp, Homo sapiens
catggtgaaaccccg

SEQ ID NO: 464544 - DNA, 15 bp, Homo sapiens
acatggtgaaacccc

SEQ ID NO: 464545 - DNA, 15 bp, Homo sapiens
aacatggtgaaaccc

SEQ ID NO: 464546 - DNA, 15 bp, Homo sapiens
taacatggtgaaacc

SEQ ID NO: 464547 - DNA, 15 bp, Homo sapiens
ctaacatggtgaaac

SEQ ID NO: 464548 - DNA, 15 bp, Homo sapiens
gctaacatggtgaaa

SEQ ID NO: 464549 - DNA, 15 bp, Homo sapiens
ggctaacatggtgaa

SEQ ID NO: 464550 - DNA, 15 bp, Homo sapiens
tggctaacatggtga

SEQ ID NO: 464551 - DNA, 15 bp, Homo sapiens
ctggctaacatggtg

SEQ ID NO: 464552 - DNA, 15 bp, Homo sapiens
cctggctaacatggt

SEQ ID NO: 464553 - DNA, 15 bp, Homo sapiens
tcctggctaacatgg

SEQ ID NO: 464554 - DNA, 15 bp, Homo sapiens
atcctggctaacatg

SEQ ID NO: 464555 - DNA, 15 bp, Homo sapiens
catcctggctaacat

SEQ ID NO: 464556 - DNA, 15 bp, Homo sapiens
aaccatcctggctaa

SEQ ID NO: 464557 - DNA, 15 bp, Homo sapiens
aaaccatcctggcta

SEQ ID NO: 464558 - DNA, 15 bp, Homo sapiens
gaaaccatcctggct

SEQ ID NO: 464559 - DNA, 15 bp, Homo sapiens
cgaaaccatcctggc

SEQ ID NO: 464560 - DNA, 15 bp, Homo sapiens
tcgaaaccatcctgg

SEQ ID NO: 464561 - DNA, 15 bp, Homo sapiens
atcgaaaccatcctg

SEQ ID NO: 464562 - DNA, 15 bp, Homo sapiens
gatcgaaaccatcct

SEQ ID NO: 464563 - DNA, 15 bp, Homo sapiens
agatcgaaaccatcc

SEQ ID NO: 464564 - DNA, 15 bp, Homo sapiens
gagatcgaaaccatc

SEQ ID NO: 464565 - DNA, 15 bp, Homo sapiens
ggagatcgaaaccat

SEQ ID NO: 464566 - DNA, 15 bp, Homo sapiens
aggagatcgaaacca

SEQ ID NO: 464567 - DNA, 15 bp, Homo sapiens
caggagatcgaaacc

SEQ ID NO: 464568 - DNA, 15 bp, Homo sapiens
tcaggagatcgaaac

SEQ ID NO: 464569 - DNA, 15 bp, Homo sapiens
atcaggagatcgaaa

SEQ ID NO: 464570 - DNA, 15 bp, Homo sapiens
gatcaggagatcgaa

SEQ ID NO: 464571 - DNA, 15 bp, Homo sapiens
agatcaggagatcga

SEQ ID NO: 464572 - DNA, 15 bp, Homo sapiens
gagatcaggagatcg

SEQ ID NO: 464573 - DNA, 15 bp, Homo sapiens
tgagatcaggagatc

SEQ ID NO: 464574 - DNA, 15 bp, Homo sapiens
atgagatcaggagat

SEQ ID NO: 464575 - DNA, 15 bp, Homo sapiens
catgagatcaggaga

SEQ ID NO: 464576 - DNA, 15 bp, Homo sapiens
tcatgagatcaggag

SEQ ID NO: 464577 - DNA, 15 bp, Homo sapiens
atcatgagatcagga

SEQ ID NO: 464578 - DNA, 15 bp, Homo sapiens
gatcatgagatcagg

SEQ ID NO: 464579 - DNA, 15 bp, Homo sapiens
agatcatgagatcag

SEQ ID NO: 464580 - DNA, 15 bp, Homo sapiens
cagatcatgagatca

SEQ ID NO: 464581 - DNA, 15 bp, Homo sapiens
gcagatcatgagatc

SEQ ID NO: 464582 - DNA, 15 bp, Homo sapiens
ggcagatcatgagat

SEQ ID NO: 464583 - DNA, 15 bp, Homo sapiens
aggcagatcatgaga

SEQ ID NO: 464584 - DNA, 15 bp, Homo sapiens
caggcagatcatgag

SEQ ID NO: 464585 - DNA, 15 bp, Homo sapiens
gcaggcagatcatga

SEQ ID NO: 464586 - DNA, 15 bp, Homo sapiens
ggcaggcagatcatg

SEQ ID NO: 464587 - DNA, 15 bp, Homo sapiens
aggcaggcagatcat

SEQ ID NO: 464588 - DNA, 15 bp, Homo sapiens
gaggcaggcagatca

SEQ ID NO: 464589 - DNA, 15 bp, Homo sapiens
cgaggcaggcagatc

SEQ ID NO: 464590 - DNA, 15 bp, Homo sapiens
acgcagtggctcacg

SEQ ID NO: 464591 - DNA, 15 bp, Homo sapiens
gacgcagtggctcac

SEQ ID NO: 464592 - DNA, 15 bp, Homo sapiens
ggacgcagtggctca

SEQ ID NO: 464593 - DNA, 15 bp, Homo sapiens
tggacgcagtggctc

SEQ ID NO: 464594 - DNA, 15 bp, Homo sapiens
ctggacgcagtggct

SEQ ID NO: 464595 - DNA, 15 bp, Homo sapiens
tctggacgcagtggc

SEQ ID NO: 464596 - DNA, 15 bp, Homo sapiens
gtctggacgcagtgg

SEQ ID NO: 464597 - DNA, 15 bp, Homo sapiens
agtctggacgcagtg

SEQ ID NO: 464598 - DNA, 15 bp, Homo sapiens
cagtctggacgcagt

SEQ ID NO: 464599 - DNA, 15 bp, Homo sapiens
gcagtctggacgcag

SEQ ID NO: 464600 - DNA, 15 bp, Homo sapiens
agcagtctggacgca

SEQ ID NO: 464601 - DNA, 15 bp, Homo sapiens
aagcagtctggacgc

SEQ ID NO: 464602 - DNA, 15 bp, Homo sapiens
aaagcagtctggacg

SEQ ID NO: 464603 - DNA, 15 bp, Homo sapiens
caaagcagtctggac

SEQ ID NO: 464604 - DNA, 15 bp, Homo sapiens
gcaaagcagtctgga

SEQ ID NO: 464605 - DNA, 15 bp, Homo sapiens
agcaaagcagtctgg

SEQ ID NO: 464606 - DNA, 15 bp, Homo sapiens
aagcaaagcagtctg

SEQ ID NO: 464607 - DNA, 15 bp, Homo sapiens
aaagcaaagcagtct

SEQ ID NO: 464608 - DNA, 15 bp, Homo sapiens
caaagcaaagcagtc

SEQ ID NO: 464609 - DNA, 15 bp, Homo sapiens
acaaagcaaagcagt

SEQ ID NO: 464610 - DNA, 15 bp, Homo sapiens
aacaaagcaaagcag

SEQ ID NO: 464611 - DNA, 15 bp, Homo sapiens
aaacaaagcaaagca

SEQ ID NO: 464612 - DNA, 15 bp, Homo sapiens
taaacaaagcaaagc

SEQ ID NO: 464613 - DNA, 15 bp, Homo sapiens
ttaaacaaagcaaag

SEQ ID NO: 464614 - DNA, 15 bp, Homo sapiens
gttaaacaaagcaaa

SEQ ID NO: 464615 - DNA, 15 bp, Homo sapiens
agttaaacaaagcaa

SEQ ID NO: 464616 - DNA, 15 bp, Homo sapiens
cagttaaacaaagca

SEQ ID NO: 464617 - DNA, 15 bp, Homo sapiens
tcagttaaacaaagc

SEQ ID NO: 464618 - DNA, 15 bp, Homo sapiens
ctcagttaaacaaag

SEQ ID NO: 464619 - DNA, 15 bp, Homo sapiens
cctcagttaaacaaa

SEQ ID NO: 464620 - DNA, 15 bp, Homo sapiens
ccctcagttaaacaa

SEQ ID NO: 464621 - DNA, 15 bp, Homo sapiens
gccctcagttaaaca

SEQ ID NO: 464622 - DNA, 15 bp, Homo sapiens
tgccctcagttaaac

SEQ ID NO: 464623 - DNA, 15 bp, Homo sapiens
ctgccctcagttaaa

SEQ ID NO: 464624 - DNA, 15 bp, Homo sapiens
tctgccctcagttaa

SEQ ID NO: 464625 - DNA, 15 bp, Homo sapiens
atctgccctcagtta

SEQ ID NO: 464626 - DNA, 15 bp, Homo sapiens
aatctgccctcagtt

SEQ ID NO: 464627 - DNA, 15 bp, Homo sapiens
gaatctgccctcagt

SEQ ID NO: 464628 - DNA, 15 bp, Homo sapiens
ggaatctgccctcag

SEQ ID NO: 464629 - DNA, 15 bp, Homo sapiens
aggaatctgccctca

SEQ ID NO: 464630 - DNA, 15 bp, Homo sapiens
caggaatctgccctc

SEQ ID NO: 464631 - DNA, 15 bp, Homo sapiens
tcaggaatctgccct

SEQ ID NO: 464632 - DNA, 15 bp, Homo sapiens
atcaggaatctgccc

SEQ ID NO: 464633 - DNA, 15 bp, Homo sapiens
aatcaggaatctgcc

SEQ ID NO: 464634 - DNA, 15 bp, Homo sapiens
aaatcaggaatctgc

SEQ ID NO: 464635 - DNA, 15 bp, Homo sapiens
taaatcaggaatctg

SEQ ID NO: 464636 - DNA, 15 bp, Homo sapiens
ataaatcaggaatct

SEQ ID NO: 464637 - DNA, 15 bp, Homo sapiens
aataaatcaggaatc

SEQ ID NO: 464638 - DNA, 15 bp, Homo sapiens
aaataaatcaggaat

SEQ ID NO: 464639 - DNA, 15 bp, Homo sapiens
caaataaatcaggaa

SEQ ID NO: 464640 - DNA, 15 bp, Homo sapiens
ccaaataaatcagga

SEQ ID NO: 464641 - DNA, 15 bp, Homo sapiens
gccaaataaatcagg

SEQ ID NO: 464642 - DNA, 15 bp, Homo sapiens
ggccaaataaatcag

SEQ ID NO: 464643 - DNA, 15 bp, Homo sapiens
tggccaaataaatca

SEQ ID NO: 464644 - DNA, 15 bp, Homo sapiens
ctggccaaataaatc

SEQ ID NO: 464645 - DNA, 15 bp, Homo sapiens
cctggccaaataaat

SEQ ID NO: 464646 - DNA, 15 bp, Homo sapiens
ccctggccaaataaa

SEQ ID NO: 464647 - DNA, 15 bp, Homo sapiens
tccctggccaaataa

SEQ ID NO: 464648 - DNA, 15 bp, Homo sapiens
ttccctggccaaata

SEQ ID NO: 464649 - DNA, 15 bp, Homo sapiens
gttccctggccaaat

SEQ ID NO: 464650 - DNA, 15 bp, Homo sapiens
ggttccctggccaaa

SEQ ID NO: 464651 - DNA, 15 bp, Homo sapiens
aggttccctggccaa

SEQ ID NO: 464652 - DNA, 15 bp, Homo sapiens
aaggttccctggcca

SEQ ID NO: 464653 - DNA, 15 bp, Homo sapiens
aaaggttccctggcc

SEQ ID NO: 464654 - DNA, 15 bp, Homo sapiens
aaaaggttccctggc

SEQ ID NO: 464655 - DNA, 15 bp, Homo sapiens
aaaaaggttccctgg

SEQ ID NO: 464656 - DNA, 15 bp, Homo sapiens
taaaaaggttccctg

SEQ ID NO: 464657 - DNA, 15 bp, Homo sapiens
ttaaaaaggttccct

SEQ ID NO: 464658 - DNA, 15 bp, Homo sapiens
attaaaaaggttccc

SEQ ID NO: 464659 - DNA, 15 bp, Homo sapiens
cattaaaaaggttcc

SEQ ID NO: 464660 - DNA, 15 bp, Homo sapiens
acattaaaaaggttc

SEQ ID NO: 464661 - DNA, 15 bp, Homo sapiens
cacattaaaaaggtt

SEQ ID NO: 464662 - DNA, 15 bp, Homo sapiens
acacattaaaaaggt

SEQ ID NO: 464663 - DNA, 15 bp, Homo sapiens
cacacattaaaaagg

SEQ ID NO: 464664 - DNA, 15 bp, Homo sapiens
gcacacattaaaaag

SEQ ID NO: 464665 - DNA, 15 bp, Homo sapiens
tgcacacattaaaaa

SEQ ID NO: 464666 - DNA, 15 bp, Homo sapiens
atgcacacattaaaa

SEQ ID NO: 464667 - DNA, 15 bp, Homo sapiens
catgcacacattaaa

SEQ ID NO: 464668 - DNA, 15 bp, Homo sapiens
acatgcacacattaa

SEQ ID NO: 464669 - DNA, 15 bp, Homo sapiens
cacatgcacacatta

SEQ ID NO: 464670 - DNA, 15 bp, Homo sapiens
acacatgcacacatt

SEQ ID NO: 464671 - DNA, 15 bp, Homo sapiens
cacacatgcacacat

SEQ ID NO: 464672 - DNA, 15 bp, Homo sapiens
gcacacatgcacaca

SEQ ID NO: 464673 - DNA, 15 bp, Homo sapiens
cgcacacatgcacac

SEQ ID NO: 464674 - DNA, 15 bp, Homo sapiens
acgcacacatgcaca

SEQ ID NO: 464675 - DNA, 15 bp, Homo sapiens
cacgcacacatgcac

SEQ ID NO: 464676 - DNA, 15 bp, Homo sapiens
gcacgcacacatgca

SEQ ID NO: 464677 - DNA, 15 bp, Homo sapiens
tgcacgcacacatgc

SEQ ID NO: 464678 - DNA, 15 bp, Homo sapiens
atgcacgcacacatg

SEQ ID NO: 464679 - DNA, 15 bp, Homo sapiens
catgcacgcacacat

SEQ ID NO: 464680 - DNA, 15 bp, Homo sapiens
acatgcacgcacaca

SEQ ID NO: 464681 - DNA, 15 bp, Homo sapiens
cacatgcacgcacac

SEQ ID NO: 464682 - DNA, 15 bp, Homo sapiens
acacatgcacgcaca

SEQ ID NO: 464683 - DNA, 15 bp, Homo sapiens
cacacatgcacgcac

SEQ ID NO: 464684 - DNA, 15 bp, Homo sapiens
gcacacatgcacgca

SEQ ID NO: 464685 - DNA, 15 bp, Homo sapiens
cgcacacatgcacgc

SEQ ID NO: 464686 - DNA, 15 bp, Homo sapiens
gcgcacacatgcacg

SEQ ID NO: 464687 - DNA, 15 bp, Homo sapiens
cgcgcacacatgcac

SEQ ID NO: 464688 - DNA, 15 bp, Homo sapiens
gcgcgcacacatgca

SEQ ID NO: 464689 - DNA, 15 bp, Homo sapiens
cgcgcgcacacatgc

SEQ ID NO: 464690 - DNA, 15 bp, Homo sapiens
acgcgcgcacacatg

SEQ ID NO: 464691 - DNA, 15 bp, Homo sapiens
cacgcgcgcacacat

SEQ ID NO: 464692 - DNA, 15 bp, Homo sapiens
acacgcgcgcacaca

SEQ ID NO: 464693 - DNA, 15 bp, Homo sapiens
cacacgcgcgcacac

SEQ ID NO: 464694 - DNA, 15 bp, Homo sapiens
acacacgcgcgcaca

SEQ ID NO: 464695 - DNA, 15 bp, Homo sapiens
cacacacgcgcgcac

SEQ ID NO: 464696 - DNA, 15 bp, Homo sapiens
acacacacgcgcgca

SEQ ID NO: 464697 - DNA, 15 bp, Homo sapiens
cacacacacgcgcgc

SEQ ID NO: 464698 - DNA, 15 bp, Homo sapiens
acacacacacgcgcg

SEQ ID NO: 464699 - DNA, 15 bp, Homo sapiens
cacacacacacgcgc

SEQ ID NO: 464700 - DNA, 15 bp, Homo sapiens
gcacacacacacacg

SEQ ID NO: 464701 - DNA, 15 bp, Homo sapiens
gacacatgcacacac

SEQ ID NO: 464702 - DNA, 15 bp, Homo sapiens
agacacatgcacaca

SEQ ID NO: 464703 - DNA, 15 bp, Homo sapiens
cagacacatgcacac

SEQ ID NO: 464704 - DNA, 15 bp, Homo sapiens
acagacacatgcaca

SEQ ID NO: 464705 - DNA, 15 bp, Homo sapiens
cacagacacatgcac

SEQ ID NO: 464706 - DNA, 15 bp, Homo sapiens
acacagacacatgca

SEQ ID NO: 464707 - DNA, 15 bp, Homo sapiens
cacacagacacatgc

SEQ ID NO: 464708 - DNA, 15 bp, Homo sapiens
acacacagacacatg

SEQ ID NO: 464709 - DNA, 15 bp, Homo sapiens
cacacacagacacat

SEQ ID NO: 464710 - DNA, 15 bp, Homo sapiens
acacacacagacaca

SEQ ID NO: 464711 - DNA, 15 bp, Homo sapiens
tacacacacagacac

SEQ ID NO: 464712 - DNA, 15 bp, Homo sapiens
atacacacacagaca

SEQ ID NO: 464713 - DNA, 15 bp, Homo sapiens
catacacacacagac

SEQ ID NO: 464714 - DNA, 15 bp, Homo sapiens
acatacacacacaga

SEQ ID NO: 464715 - DNA, 15 bp, Homo sapiens
tacatacacacacag

SEQ ID NO: 464716 - DNA, 15 bp, Homo sapiens
atacatacacacaca

SEQ ID NO: 464717 - DNA, 15 bp, Homo sapiens
tatacatacacacac

SEQ ID NO: 464718 - DNA, 15 bp, Homo sapiens
atatacatacacaca

SEQ ID NO: 464719 - DNA, 15 bp, Homo sapiens
tatatacatacacac

SEQ ID NO: 464720 - DNA, 15 bp, Homo sapiens
atatatacatacaca

SEQ ID NO: 464721 - DNA, 15 bp, Homo sapiens
catatatacatacac

SEQ ID NO: 464722 - DNA, 15 bp, Homo sapiens
acatatatacataca

SEQ ID NO: 464723 - DNA, 15 bp, Homo sapiens
cacatatatacatac

SEQ ID NO: 464724 - DNA, 15 bp, Homo sapiens
acacatatatacata

SEQ ID NO: 464725 - DNA, 15 bp, Homo sapiens
cacacatatatacat

SEQ ID NO: 464726 - DNA, 15 bp, Homo sapiens
acacacatatataca

SEQ ID NO: 464727 - DNA, 15 bp, Homo sapiens
gacacacatatatac

SEQ ID NO: 464728 - DNA, 15 bp, Homo sapiens
agacacacatatata

SEQ ID NO: 464729 - DNA, 15 bp, Homo sapiens
cagacacacatatat

SEQ ID NO: 464730 - DNA, 15 bp, Homo sapiens
acagacacacatata

SEQ ID NO: 464731 - DNA, 15 bp, Homo sapiens
cacagacacacatat

SEQ ID NO: 464732 - DNA, 15 bp, Homo sapiens
acacagacacacata

SEQ ID NO: 464733 - DNA, 15 bp, Homo sapiens
gacacagacacacat

SEQ ID NO: 464734 - DNA, 15 bp, Homo sapiens
agacacagacacaca

SEQ ID NO: 464735 - DNA, 15 bp, Homo sapiens
cagacacagacacac

SEQ ID NO: 464736 - DNA, 15 bp, Homo sapiens
acagacacagacaca

SEQ ID NO: 464737 - DNA, 15 bp, Homo sapiens
cacagacacagacac

SEQ ID NO: 464738 - DNA, 15 bp, Homo sapiens
acacagacacagaca

SEQ ID NO: 464739 - DNA, 15 bp, Homo sapiens
cacacagacacagac

SEQ ID NO: 464740 - DNA, 15 bp, Homo sapiens
acacacagacacaga

SEQ ID NO: 464741 - DNA, 15 bp, Homo sapiens
cacacacagacacag

SEQ ID NO: 464742 - DNA, 15 bp, Homo sapiens
cacacacacagacac

SEQ ID NO: 464743 - DNA, 15 bp, Homo sapiens
gcacacacacagaca

SEQ ID NO: 464744 - DNA, 15 bp, Homo sapiens
cgcacacacacagac

SEQ ID NO: 464745 - DNA, 15 bp, Homo sapiens
acgcacacacacaga

SEQ ID NO: 464746 - DNA, 15 bp, Homo sapiens
cacgcacacacacag

SEQ ID NO: 464747 - DNA, 15 bp, Homo sapiens
acacgcacacacaca

SEQ ID NO: 464748 - DNA, 15 bp, Homo sapiens
tacacgcacacacac

SEQ ID NO: 464749 - DNA, 15 bp, Homo sapiens
atacacgcacacaca

SEQ ID NO: 464750 - DNA, 15 bp, Homo sapiens
catacacgcacacac

SEQ ID NO: 464751 - DNA, 15 bp, Homo sapiens
acatacacgcacaca

SEQ ID NO: 464752 - DNA, 15 bp, Homo sapiens
tacatacacgcacac

SEQ ID NO: 464753 - DNA, 15 bp, Homo sapiens
atacatacacgcaca

SEQ ID NO: 464754 - DNA, 15 bp, Homo sapiens
catacatacacgcac

SEQ ID NO: 464755 - DNA, 15 bp, Homo sapiens
acatacatacacgca

SEQ ID NO: 464756 - DNA, 15 bp, Homo sapiens
cacatacatacacgc

SEQ ID NO: 464757 - DNA, 15 bp, Homo sapiens
acacatacatacacg

SEQ ID NO: 464758 - DNA, 15 bp, Homo sapiens
tacacatacatacac

SEQ ID NO: 464759 - DNA, 15 bp, Homo sapiens
atacacatacataca

SEQ ID NO: 464760 - DNA, 15 bp, Homo sapiens
aatacacatacatac

SEQ ID NO: 464761 - DNA, 15 bp, Homo sapiens
aaatacacatacata

SEQ ID NO: 464762 - DNA, 15 bp, Homo sapiens
caaatacacatacat

SEQ ID NO: 464763 - DNA, 15 bp, Homo sapiens
acaaatacacataca

SEQ ID NO: 464764 - DNA, 15 bp, Homo sapiens
cacaaatacacatac

SEQ ID NO: 464765 - DNA, 15 bp, Homo sapiens
acacaaatacacata

SEQ ID NO: 464766 - DNA, 15 bp, Homo sapiens
gacacaaatacacat

SEQ ID NO: 464767 - DNA, 15 bp, Homo sapiens
agacacaaatacaca

SEQ ID NO: 464768 - DNA, 15 bp, Homo sapiens
cagacacaaatacac

SEQ ID NO: 464769 - DNA, 15 bp, Homo sapiens
acagacacaaataca

SEQ ID NO: 464770 - DNA, 15 bp, Homo sapiens
cacagacacaaatac

SEQ ID NO: 464771 - DNA, 15 bp, Homo sapiens
acacagacacaaata

SEQ ID NO: 464772 - DNA, 15 bp, Homo sapiens
cacacagacacaaat

SEQ ID NO: 464773 - DNA, 15 bp, Homo sapiens
gcacacagacacaaa

SEQ ID NO: 464774 - DNA, 15 bp, Homo sapiens
tgcacacagacacaa

SEQ ID NO: 464775 - DNA, 15 bp, Homo sapiens
atgcacacagacaca

SEQ ID NO: 464776 - DNA, 15 bp, Homo sapiens
catgcacacagacac

SEQ ID NO: 464777 - DNA, 15 bp, Homo sapiens
acatgcacacagaca

SEQ ID NO: 464778 - DNA, 15 bp, Homo sapiens
cacatgcacacagac

SEQ ID NO: 464779 - DNA, 15 bp, Homo sapiens
acacatgcacacaga

SEQ ID NO: 464780 - DNA, 15 bp, Homo sapiens
cacacatgcacacag

SEQ ID NO: 464781 - DNA, 15 bp, Homo sapiens
acacacacatgcaca

SEQ ID NO: 464782 - DNA, 15 bp, Homo sapiens
gacacacacatgcac

SEQ ID NO: 464783 - DNA, 15 bp, Homo sapiens
agacacacacatgca

SEQ ID NO: 464784 - DNA, 15 bp, Homo sapiens
cagacacacacatgc

SEQ ID NO: 464785 - DNA, 15 bp, Homo sapiens
acagacacacacatg

SEQ ID NO: 464786 - DNA, 15 bp, Homo sapiens
cacagacacacacat

SEQ ID NO: 464787 - DNA, 15 bp, Homo sapiens
acacagacacacaca

SEQ ID NO: 464788 - DNA, 15 bp, Homo sapiens
cacacagacacacac

SEQ ID NO: 464789 - DNA, 15 bp, Homo sapiens
acacacagacacaca

SEQ ID NO: 464790 - DNA, 15 bp, Homo sapiens
cacacacagacacac

SEQ ID NO: 464791 - DNA, 15 bp, Homo sapiens
gcacacacagacaca

SEQ ID NO: 464792 - DNA, 15 bp, Homo sapiens
tgcacacacagacac

SEQ ID NO: 464793 - DNA, 15 bp, Homo sapiens
atgcacacacagaca

SEQ ID NO: 464794 - DNA, 15 bp, Homo sapiens
catgcacacacagac

SEQ ID NO: 464795 - DNA, 15 bp, Homo sapiens
acatgcacacacaga

SEQ ID NO: 464796 - DNA, 15 bp, Homo sapiens
cacatgcacacacag

SEQ ID NO: 464797 - DNA, 15 bp, Homo sapiens
tacacacatgcacac

SEQ ID NO: 464798 - DNA, 15 bp, Homo sapiens
atacacacatgcaca

SEQ ID NO: 464799 - DNA, 15 bp, Homo sapiens
catacacacatgcac

SEQ ID NO: 464800 - DNA, 15 bp, Homo sapiens
acatacacacatgca

SEQ ID NO: 464801 - DNA, 15 bp, Homo sapiens
cacatacacacatgc

SEQ ID NO: 464802 - DNA, 15 bp, Homo sapiens
acacatacacacatg

SEQ ID NO: 464803 - DNA, 15 bp, Homo sapiens
tacacatacacacat

SEQ ID NO: 464804 - DNA, 15 bp, Homo sapiens
atacacatacacaca

SEQ ID NO: 464805 - DNA, 15 bp, Homo sapiens
catacacatacacac

SEQ ID NO: 464806 - DNA, 15 bp, Homo sapiens
acatacacatacaca

SEQ ID NO: 464807 - DNA, 15 bp, Homo sapiens
cacatacacatacac

SEQ ID NO: 464808 - DNA, 15 bp, Homo sapiens
acacatacacataca

SEQ ID NO: 464809 - DNA, 15 bp, Homo sapiens
acacacatacacata

SEQ ID NO: 464810 - DNA, 15 bp, Homo sapiens
gacacacatacacat

SEQ ID NO: 464811 - DNA, 15 bp, Homo sapiens
agacacacatacaca

SEQ ID NO: 464812 - DNA, 15 bp, Homo sapiens
cagacacacatacac

SEQ ID NO: 464813 - DNA, 15 bp, Homo sapiens
acagacacacataca

SEQ ID NO: 464814 - DNA, 15 bp, Homo sapiens
cacagacacacatac

SEQ ID NO: 464815 - DNA, 15 bp, Homo sapiens
cacacagacacacat

SEQ ID NO: 464816 - DNA, 15 bp, Homo sapiens
tacacacagacacac

SEQ ID NO: 464817 - DNA, 15 bp, Homo sapiens
atacacacagacaca

SEQ ID NO: 464818 - DNA, 15 bp, Homo sapiens
catacacacagacac

SEQ ID NO: 464819 - DNA, 15 bp, Homo sapiens
acatacacacagaca

SEQ ID NO: 464820 - DNA, 15 bp, Homo sapiens
cacatacacacagac

SEQ ID NO: 464821 - DNA, 15 bp, Homo sapiens
acacatacacacaga

SEQ ID NO: 464822 - DNA, 15 bp, Homo sapiens
tacacatacacacag

SEQ ID NO: 464823 - DNA, 15 bp, Homo sapiens
tatacacatacacac

SEQ ID NO: 464824 - DNA, 15 bp, Homo sapiens
atatacacatacaca

SEQ ID NO: 464825 - DNA, 15 bp, Homo sapiens
catatacacatacac

SEQ ID NO: 464826 - DNA, 15 bp, Homo sapiens
gcatatacacataca

SEQ ID NO: 464827 - DNA, 15 bp, Homo sapiens
cgcatatacacatac

SEQ ID NO: 464828 - DNA, 15 bp, Homo sapiens
acgcatatacacata

SEQ ID NO: 464829 - DNA, 15 bp, Homo sapiens
cacgcatatacacat

SEQ ID NO: 464830 - DNA, 15 bp, Homo sapiens
acacgcatatacaca

SEQ ID NO: 464831 - DNA, 15 bp, Homo sapiens
cacacgcatatacac

SEQ ID NO: 464832 - DNA, 15 bp, Homo sapiens
acacacgcatataca

SEQ ID NO: 464833 - DNA, 15 bp, Homo sapiens
cacacacgcatatac

SEQ ID NO: 464834 - DNA, 15 bp, Homo sapiens
acacacacgcatata

SEQ ID NO: 464835 - DNA, 15 bp, Homo sapiens
cacacacacgcatat

SEQ ID NO: 464836 - DNA, 15 bp, Homo sapiens
acacacacacgcata

SEQ ID NO: 464837 - DNA, 15 bp, Homo sapiens
cacacacacacgcat

SEQ ID NO: 464838 - DNA, 15 bp, Homo sapiens
acacacacacacgca

SEQ ID NO: 464839 - DNA, 15 bp, Homo sapiens
caatacacacacaca

SEQ ID NO: 464840 - DNA, 15 bp, Homo sapiens
acaatacacacacac

SEQ ID NO: 464841 - DNA, 15 bp, Homo sapiens
cacaatacacacaca

SEQ ID NO: 464842 - DNA, 15 bp, Homo sapiens
acacaatacacacac

SEQ ID NO: 464843 - DNA, 15 bp, Homo sapiens
cacacaatacacaca

SEQ ID NO: 464844 - DNA, 15 bp, Homo sapiens
acacacaatacacac

SEQ ID NO: 464845 - DNA, 15 bp, Homo sapiens
cacacacaatacaca

SEQ ID NO: 464846 - DNA, 15 bp, Homo sapiens
acacacacaatacac

SEQ ID NO: 464847 - DNA, 15 bp, Homo sapiens
cacacacacaataca

SEQ ID NO: 464848 - DNA, 15 bp, Homo sapiens
acacacacacaatac

SEQ ID NO: 464849 - DNA, 15 bp, Homo sapiens
cacacacacacaata

SEQ ID NO: 464850 - DNA, 15 bp, Homo sapiens
acacacacacacaat

SEQ ID NO: 464851 - DNA, 15 bp, Homo sapiens
tacacacacacacaa

SEQ ID NO: 464852 - DNA, 15 bp, Homo sapiens
catacacacacacac

SEQ ID NO: 464853 - DNA, 15 bp, Homo sapiens
acatacacacacaca

SEQ ID NO: 464854 - DNA, 15 bp, Homo sapiens
cacatacacacacac

SEQ ID NO: 464855 - DNA, 15 bp, Homo sapiens
acacatacacacaca

SEQ ID NO: 464856 - DNA, 15 bp, Homo sapiens
cacacatacacacac

SEQ ID NO: 464857 - DNA, 15 bp, Homo sapiens
acacacatacacaca

SEQ ID NO: 464858 - DNA, 15 bp, Homo sapiens
cacacacatacacac

SEQ ID NO: 464859 - DNA, 15 bp, Homo sapiens
ccacacacatacaca

SEQ ID NO: 464860 - DNA, 15 bp, Homo sapiens
gccacacacatacac

SEQ ID NO: 464861 - DNA, 15 bp, Homo sapiens
tgccacacacataca

SEQ ID NO: 464862 - DNA, 15 bp, Homo sapiens
ttgccacacacatac

SEQ ID NO: 464863 - DNA, 15 bp, Homo sapiens
cttgccacacacata

SEQ ID NO: 464864 - DNA, 15 bp, Homo sapiens
tcttgccacacacat

SEQ ID NO: 464865 - DNA, 15 bp, Homo sapiens
gtcttgccacacaca

SEQ ID NO: 464866 - DNA, 15 bp, Homo sapiens
tgtcttgccacacac

SEQ ID NO: 464867 - DNA, 15 bp, Homo sapiens
gtgtcttgccacaca

SEQ ID NO: 464868 - DNA, 15 bp, Homo sapiens
agtgtcttgccacac

SEQ ID NO: 464869 - DNA, 15 bp, Homo sapiens
cagtgtcttgccaca

SEQ ID NO: 464870 - DNA, 15 bp, Homo sapiens
tcagtgtcttgccac

SEQ ID NO: 464871 - DNA, 15 bp, Homo sapiens
atcagtgtcttgcca

SEQ ID NO: 464872 - DNA, 15 bp, Homo sapiens
catcagtgtcttgcc

SEQ ID NO: 464873 - DNA, 15 bp, Homo sapiens
acatcagtgtcttgc

SEQ ID NO: 464874 - DNA, 15 bp, Homo sapiens
aacatcagtgtcttg

SEQ ID NO: 464875 - DNA, 15 bp, Homo sapiens
gaacatcagtgtctt

SEQ ID NO: 464876 - DNA, 15 bp, Homo sapiens
ggaacatcagtgtct

SEQ ID NO: 464877 - DNA, 15 bp, Homo sapiens
gggaacatcagtgtc

SEQ ID NO: 464878 - DNA, 15 bp, Homo sapiens
ggggaacatcagtgt

SEQ ID NO: 464879 - DNA, 15 bp, Homo sapiens
gggggaacatcagtg

SEQ ID NO: 464880 - DNA, 15 bp, Homo sapiens
tgggggaacatcagt

SEQ ID NO: 464881 - DNA, 15 bp, Homo sapiens
ctgggggaacatcag

SEQ ID NO: 464882 - DNA, 15 bp, Homo sapiens
actgggggaacatca

SEQ ID NO: 464883 - DNA, 15 bp, Homo sapiens
aactgggggaacatc

SEQ ID NO: 464884 - DNA, 15 bp, Homo sapiens
aaactgggggaacat

SEQ ID NO: 464885 - DNA, 15 bp, Homo sapiens
aaaactgggggaaca

SEQ ID NO: 464886 - DNA, 15 bp, Homo sapiens
gaaaactgggggaac

SEQ ID NO: 464887 - DNA, 15 bp, Homo sapiens
tgaaaactgggggaa

SEQ ID NO: 464888 - DNA, 15 bp, Homo sapiens
ttgaaaactggggga

SEQ ID NO: 464889 - DNA, 15 bp, Homo sapiens
tttgaaaactggggg

SEQ ID NO: 464890 - DNA, 15 bp, Homo sapiens
ttttgaaaactgggg

SEQ ID NO: 464891 - DNA, 15 bp, Homo sapiens
attttgaaaactggg

SEQ ID NO: 464892 - DNA, 15 bp, Homo sapiens
cattttgaaaactgg

SEQ ID NO: 464893 - DNA, 15 bp, Homo sapiens
gcattttgaaaactg

SEQ ID NO: 464894 - DNA, 15 bp, Homo sapiens
agcattttgaaaact

SEQ ID NO: 464895 - DNA, 15 bp, Homo sapiens
tagcattttgaaaac

SEQ ID NO: 464896 - DNA, 15 bp, Homo sapiens
atagcattttgaaaa

SEQ ID NO: 464897 - DNA, 15 bp, Homo sapiens
catagcattttgaaa

SEQ ID NO: 464898 - DNA, 15 bp, Homo sapiens
tgttaccacctgagt

SEQ ID NO: 464899 - DNA, 15 bp, Homo sapiens
ttgttaccacctgag

SEQ ID NO: 464900 - DNA, 15 bp, Homo sapiens
gttgttaccacctga

SEQ ID NO: 464901 - DNA, 15 bp, Homo sapiens
tgttgttaccacctg

SEQ ID NO: 464902 - DNA, 15 bp, Homo sapiens
gtgttgttaccacct

SEQ ID NO: 464903 - DNA, 15 bp, Homo sapiens
tgtgttgttaccacc

SEQ ID NO: 464904 - DNA, 15 bp, Homo sapiens
ctgtgttgttaccac

SEQ ID NO: 464905 - DNA, 15 bp, Homo sapiens
cctgtgttgttacca

SEQ ID NO: 464906 - DNA, 15 bp, Homo sapiens
ccctgtgttgttacc

SEQ ID NO: 464907 - DNA, 15 bp, Homo sapiens
gccctgtgttgttac

SEQ ID NO: 464908 - DNA, 15 bp, Homo sapiens
tgccctgtgttgtta

SEQ ID NO: 464909 - DNA, 15 bp, Homo sapiens
atgccctgtgttgtt

SEQ ID NO: 464910 - DNA, 15 bp, Homo sapiens
tatgccctgtgttgt

SEQ ID NO: 464911 - DNA, 15 bp, Homo sapiens
ctatgccctgtgttg

SEQ ID NO: 464912 - DNA, 15 bp, Homo sapiens
cctatgccctgtgtt

SEQ ID NO: 464913 - DNA, 15 bp, Homo sapiens
ccctatgccctgtgt

SEQ ID NO: 464914 - DNA, 15 bp, Homo sapiens
accctatgccctgtg

SEQ ID NO: 464915 - DNA, 15 bp, Homo sapiens
caccctatgccctgt

SEQ ID NO: 464916 - DNA, 15 bp, Homo sapiens
acaccctatgccctg

SEQ ID NO: 464917 - DNA, 15 bp, Homo sapiens
gacaccctatgccct

SEQ ID NO: 464918 - DNA, 15 bp, Homo sapiens
tgacaccctatgccc

SEQ ID NO: 464919 - DNA, 15 bp, Homo sapiens
ttgacaccctatgcc

SEQ ID NO: 464920 - DNA, 15 bp, Homo sapiens
tttgacaccctatgc

SEQ ID NO: 464921 - DNA, 15 bp, Homo sapiens
ctttgacaccctatg

SEQ ID NO: 464922 - DNA, 15 bp, Homo sapiens
gctttgacaccctat

SEQ ID NO: 464923 - DNA, 15 bp, Homo sapiens
ggctttgacacccta

SEQ ID NO: 464924 - DNA, 15 bp, Homo sapiens
gggctttgacaccct

SEQ ID NO: 464925 - DNA, 15 bp, Homo sapiens
tgggctttgacaccc

SEQ ID NO: 464926 - DNA, 15 bp, Homo sapiens
ctgggctttgacacc

SEQ ID NO: 464927 - DNA, 15 bp, Homo sapiens
cctgggctttgacac

SEQ ID NO: 464928 - DNA, 15 bp, Homo sapiens
gcctgggctttgaca

SEQ ID NO: 464929 - DNA, 15 bp, Homo sapiens
agcctgggctttgac

SEQ ID NO: 464930 - DNA, 15 bp, Homo sapiens
aagcctgggctttga

SEQ ID NO: 464931 - DNA, 15 bp, Homo sapiens
taagcctgggctttg

SEQ ID NO: 464932 - DNA, 15 bp, Homo sapiens
gtaagcctgggcttt

SEQ ID NO: 464933 - DNA, 15 bp, Homo sapiens
tgtaagcctgggctt

SEQ ID NO: 464934 - DNA, 15 bp, Homo sapiens
gtgtaagcctgggct

SEQ ID NO: 464935 - DNA, 15 bp, Homo sapiens
ggtgtaagcctgggc

SEQ ID NO: 464936 - DNA, 15 bp, Homo sapiens
gggtgtaagcctggg

SEQ ID NO: 464937 - DNA, 15 bp, Homo sapiens
agggtgtaagcctgg

SEQ ID NO: 464938 - DNA, 15 bp, Homo sapiens
cagggtgtaagcctg

SEQ ID NO: 464939 - DNA, 15 bp, Homo sapiens
ccagggtgtaagcct

SEQ ID NO: 464940 - DNA, 15 bp, Homo sapiens
accagggtgtaagcc

SEQ ID NO: 464941 - DNA, 15 bp, Homo sapiens
gaccagggtgtaagc

SEQ ID NO: 464942 - DNA, 15 bp, Homo sapiens
agaccagggtgtaag

SEQ ID NO: 464943 - DNA, 15 bp, Homo sapiens
tagaccagggtgtaa

SEQ ID NO: 464944 - DNA, 15 bp, Homo sapiens
atagaccagggtgta

SEQ ID NO: 464945 - DNA, 15 bp, Homo sapiens
catagaccagggtgt

SEQ ID NO: 464946 - DNA, 15 bp, Homo sapiens
tcatagaccagggtg

SEQ ID NO: 464947 - DNA, 15 bp, Homo sapiens
gtcatagaccagggt

SEQ ID NO: 464948 - DNA, 15 bp, Homo sapiens
agtcatagaccaggg

SEQ ID NO: 464949 - DNA, 15 bp, Homo sapiens
aagtcatagaccagg

SEQ ID NO: 464950 - DNA, 15 bp, Homo sapiens
taagtcatagaccag

SEQ ID NO: 464951 - DNA, 15 bp, Homo sapiens
gtaagtcatagacca

SEQ ID NO: 464952 - DNA, 15 bp, Homo sapiens
agtaagtcatagacc

SEQ ID NO: 464953 - DNA, 15 bp, Homo sapiens
tagtaagtcatagac

SEQ ID NO: 464954 - DNA, 15 bp, Homo sapiens
ctagtaagtcataga

SEQ ID NO: 464955 - DNA, 15 bp, Homo sapiens
gctagtaagtcatag

SEQ ID NO: 464956 - DNA, 15 bp, Homo sapiens
agctagtaagtcata

SEQ ID NO: 464957 - DNA, 15 bp, Homo sapiens
cagctagtaagtcat

SEQ ID NO: 464958 - DNA, 15 bp, Homo sapiens
acagctagtaagtca

SEQ ID NO: 464959 - DNA, 15 bp, Homo sapiens
cacagctagtaagtc

SEQ ID NO: 464960 - DNA, 15 bp, Homo sapiens
acacagctagtaagt

SEQ ID NO: 464961 - DNA, 15 bp, Homo sapiens
cacacagctagtaag

SEQ ID NO: 464962 - DNA, 15 bp, Homo sapiens
tcacacagctagtaa

SEQ ID NO: 464963 - DNA, 15 bp, Homo sapiens
gtcacacagctagta

SEQ ID NO: 464964 - DNA, 15 bp, Homo sapiens
agtcacacagctagt

SEQ ID NO: 464965 - DNA, 15 bp, Homo sapiens
aagtcacacagctag

SEQ ID NO: 464966 - DNA, 15 bp, Homo sapiens
gaagtcacacagcta

SEQ ID NO: 464967 - DNA, 15 bp, Homo sapiens
tgaagtcacacagct

SEQ ID NO: 464968 - DNA, 15 bp, Homo sapiens
ctgaagtcacacagc

SEQ ID NO: 464969 - DNA, 15 bp, Homo sapiens
actgaagtcacacag

SEQ ID NO: 464970 - DNA, 15 bp, Homo sapiens
gactgaagtcacaca

SEQ ID NO: 464971 - DNA, 15 bp, Homo sapiens
tgactgaagtcacac

SEQ ID NO: 464972 - DNA, 15 bp, Homo sapiens
ttgactgaagtcaca

SEQ ID NO: 464973 - DNA, 15 bp, Homo sapiens
cttgactgaagtcac

SEQ ID NO: 464974 - DNA, 15 bp, Homo sapiens
acttgactgaagtca

SEQ ID NO: 464975 - DNA, 15 bp, Homo sapiens
aacttgactgaagtc

SEQ ID NO: 464976 - DNA, 15 bp, Homo sapiens
caacttgactgaagt

SEQ ID NO: 464977 - DNA, 15 bp, Homo sapiens
gcaacttgactgaag

SEQ ID NO: 464978 - DNA, 15 bp, Homo sapiens
agcaacttgactgaa

SEQ ID NO: 464979 - DNA, 15 bp, Homo sapiens
aagcaacttgactga

SEQ ID NO: 464980 - DNA, 15 bp, Homo sapiens
taagcaacttgactg

SEQ ID NO: 464981 - DNA, 15 bp, Homo sapiens
gtaagcaacttgact

SEQ ID NO: 464982 - DNA, 15 bp, Homo sapiens
ggtaagcaacttgac

SEQ ID NO: 464983 - DNA, 15 bp, Homo sapiens
gggtaagcaacttga

SEQ ID NO: 464984 - DNA, 15 bp, Homo sapiens
agggtaagcaacttg

SEQ ID NO: 464985 - DNA, 15 bp, Homo sapiens
gagggtaagcaactt

SEQ ID NO: 464986 - DNA, 15 bp, Homo sapiens
agagggtaagcaact

SEQ ID NO: 464987 - DNA, 15 bp, Homo sapiens
gagagggtaagcaac

SEQ ID NO: 464988 - DNA, 15 bp, Homo sapiens
agagagggtaagcaa

SEQ ID NO: 464989 - DNA, 15 bp, Homo sapiens
cagagagggtaagca

SEQ ID NO: 464990 - DNA, 15 bp, Homo sapiens
tcagagagggtaagc

SEQ ID NO: 464991 - DNA, 15 bp, Homo sapiens
atcagagagggtaag

SEQ ID NO: 464992 - DNA, 15 bp, Homo sapiens
gatcagagagggtaa

SEQ ID NO: 464993 - DNA, 15 bp, Homo sapiens
ggatcagagagggta

SEQ ID NO: 464994 - DNA, 15 bp, Homo sapiens
gggatcagagagggt

SEQ ID NO: 464995 - DNA, 15 bp, Homo sapiens
agggatcagagaggg

SEQ ID NO: 464996 - DNA, 15 bp, Homo sapiens
cagggatcagagagg

SEQ ID NO: 464997 - DNA, 15 bp, Homo sapiens
gcagggatcagagag

SEQ ID NO: 464998 - DNA, 15 bp, Homo sapiens
ggcagggatcagaga

SEQ ID NO: 464999 - DNA, 15 bp, Homo sapiens
aggcagggatcagag

SEQ ID NO: 465000 - DNA, 15 bp, Homo sapiens
aaggcagggatcaga

SEQ ID NO: 465001 - DNA, 15 bp, Homo sapiens
aaaggcagggatcag

SEQ ID NO: 465002 - DNA, 15 bp, Homo sapiens
aaaaggcagggatca

SEQ ID NO: 465003 - DNA, 15 bp, Homo sapiens
caaaaggcagggatc

SEQ ID NO: 465004 - DNA, 15 bp, Homo sapiens
tcaaaaggcagggat

SEQ ID NO: 465005 - DNA, 15 bp, Homo sapiens
ttcaaaaggcaggga

SEQ ID NO: 465006 - DNA, 15 bp, Homo sapiens
cttcaaaaggcaggg

SEQ ID NO: 465007 - DNA, 15 bp, Homo sapiens
acttcaaaaggcagg

SEQ ID NO: 465008 - DNA, 15 bp, Homo sapiens
cacttcaaaaggcag

SEQ ID NO: 465009 - DNA, 15 bp, Homo sapiens
ccacttcaaaaggca

SEQ ID NO: 465010 - DNA, 15 bp, Homo sapiens
accacttcaaaaggc

SEQ ID NO: 465011 - DNA, 15 bp, Homo sapiens
caccacttcaaaagg

SEQ ID NO: 465012 - DNA, 15 bp, Homo sapiens
tcaccacttcaaaag

SEQ ID NO: 465013 - DNA, 15 bp, Homo sapiens
ctcaccacttcaaaa

SEQ ID NO: 465014 - DNA, 15 bp, Homo sapiens
cctcaccacttcaaa

SEQ ID NO: 465015 - DNA, 15 bp, Homo sapiens
gcctcaccacttcaa

SEQ ID NO: 465016 - DNA, 15 bp, Homo sapiens
agcctcaccacttca

SEQ ID NO: 465017 - DNA, 15 bp, Homo sapiens
gagcctcaccacttc

SEQ ID NO: 465018 - DNA, 15 bp, Homo sapiens
cgagcctcaccactt

SEQ ID NO: 465019 - DNA, 15 bp, Homo sapiens
ccgagcctcaccact

SEQ ID NO: 465020 - DNA, 15 bp, Homo sapiens
cccgagcctcaccac

SEQ ID NO: 465021 - DNA, 15 bp, Homo sapiens
ccccgagcctcacca

SEQ ID NO: 465022 - DNA, 15 bp, Homo sapiens
tccccgagcctcacc

SEQ ID NO: 465023 - DNA, 15 bp, Homo sapiens
ttccccgagcctcac

SEQ ID NO: 465024 - DNA, 15 bp, Homo sapiens
cttccccgagcctca

SEQ ID NO: 465025 - DNA, 15 bp, Homo sapiens
gcttccccgagcctc

SEQ ID NO: 465026 - DNA, 15 bp, Homo sapiens
ggcttccccgagcct

SEQ ID NO: 465027 - DNA, 15 bp, Homo sapiens
tggcttccccgagcc

SEQ ID NO: 465028 - DNA, 15 bp, Homo sapiens
ctggcttccccgagc

SEQ ID NO: 465029 - DNA, 15 bp, Homo sapiens
gctggcttccccgag

SEQ ID NO: 465030 - DNA, 15 bp, Homo sapiens
agctggcttccccga

SEQ ID NO: 465031 - DNA, 15 bp, Homo sapiens
cagctggcttccccg

SEQ ID NO: 465032 - DNA, 15 bp, Homo sapiens
ccagctggcttcccc

SEQ ID NO: 465033 - DNA, 15 bp, Homo sapiens
cccagctggcttccc

SEQ ID NO: 465034 - DNA, 15 bp, Homo sapiens
gcccagctggcttcc

SEQ ID NO: 465035 - DNA, 15 bp, Homo sapiens
agcccagctggcttc

SEQ ID NO: 465036 - DNA, 15 bp, Homo sapiens
aagcccagctggctt

SEQ ID NO: 465037 - DNA, 15 bp, Homo sapiens
caagcccagctggct

SEQ ID NO: 465038 - DNA, 15 bp, Homo sapiens
ccaagcccagctggc

SEQ ID NO: 465039 - DNA, 15 bp, Homo sapiens
cccaagcccagctgg

SEQ ID NO: 465040 - DNA, 15 bp, Homo sapiens
gcccaagcccagctg

SEQ ID NO: 465041 - DNA, 15 bp, Homo sapiens
tgcccaagcccagct

SEQ ID NO: 465042 - DNA, 15 bp, Homo sapiens
ctgcccaagcccagc

SEQ ID NO: 465043 - DNA, 15 bp, Homo sapiens
gctgcccaagcccag

SEQ ID NO: 465044 - DNA, 15 bp, Homo sapiens
ggctgcccaagccca

SEQ ID NO: 465045 - DNA, 15 bp, Homo sapiens
aggctgcccaagccc

SEQ ID NO: 465046 - DNA, 15 bp, Homo sapiens
caggctgcccaagcc

SEQ ID NO: 465047 - DNA, 15 bp, Homo sapiens
ccaggctgcccaagc

SEQ ID NO: 465048 - DNA, 15 bp, Homo sapiens
tccaggctgcccaag

SEQ ID NO: 465049 - DNA, 15 bp, Homo sapiens
ctccaggctgcccaa

SEQ ID NO: 465050 - DNA, 15 bp, Homo sapiens
actccaggctgccca

SEQ ID NO: 465051 - DNA, 15 bp, Homo sapiens
aactccaggctgccc

SEQ ID NO: 465052 - DNA, 15 bp, Homo sapiens
caactccaggctgcc

SEQ ID NO: 465053 - DNA, 15 bp, Homo sapiens
gcaactccaggctgc

SEQ ID NO: 465054 - DNA, 15 bp, Homo sapiens
agcaactccaggctg

SEQ ID NO: 465055 - DNA, 15 bp, Homo sapiens
cagcaactccaggct

SEQ ID NO: 465056 - DNA, 15 bp, Homo sapiens
acagcaactccaggc

SEQ ID NO: 465057 - DNA, 15 bp, Homo sapiens
cacagcaactccagg

SEQ ID NO: 465058 - DNA, 15 bp, Homo sapiens
acacagcaactccag

SEQ ID NO: 465059 - DNA, 15 bp, Homo sapiens
aacacagcaactcca

SEQ ID NO: 465060 - DNA, 15 bp, Homo sapiens
taacacagcaactcc

SEQ ID NO: 465061 - DNA, 15 bp, Homo sapiens
ctaacacagcaactc

SEQ ID NO: 465062 - DNA, 15 bp, Homo sapiens
gctaacacagcaact

SEQ ID NO: 465063 - DNA, 15 bp, Homo sapiens
tgctaacacagcaac

SEQ ID NO: 465064 - DNA, 15 bp, Homo sapiens
ctgctaacacagcaa

SEQ ID NO: 465065 - DNA, 15 bp, Homo sapiens
cctgctaacacagca

SEQ ID NO: 465066 - DNA, 15 bp, Homo sapiens
tcctgctaacacagc

SEQ ID NO: 465067 - DNA, 15 bp, Homo sapiens
ctcctgctaacacag

SEQ ID NO: 465068 - DNA, 15 bp, Homo sapiens
gctcctgctaacaca

SEQ ID NO: 465069 - DNA, 15 bp, Homo sapiens
agctcctgctaacac

SEQ ID NO: 465070 - DNA, 15 bp, Homo sapiens
tagctcctgctaaca

SEQ ID NO: 465071 - DNA, 15 bp, Homo sapiens
ttagctcctgctaac

SEQ ID NO: 465072 - DNA, 15 bp, Homo sapiens
tttagctcctgctaa

SEQ ID NO: 465073 - DNA, 15 bp, Homo sapiens
ctttagctcctgcta

SEQ ID NO: 465074 - DNA, 15 bp, Homo sapiens
cctttagctcctgct

SEQ ID NO: 465075 - DNA, 15 bp, Homo sapiens
tcctttagctcctgc

SEQ ID NO: 465076 - DNA, 15 bp, Homo sapiens
ctcctttagctcctg

SEQ ID NO: 465077 - DNA, 15 bp, Homo sapiens
cctcctttagctcct

SEQ ID NO: 465078 - DNA, 15 bp, Homo sapiens
gcctcctttagctcc

SEQ ID NO: 465079 - DNA, 15 bp, Homo sapiens
cgcctcctttagctc

SEQ ID NO: 465080 - DNA, 15 bp, Homo sapiens
gcgcctcctttagct

SEQ ID NO: 465081 - DNA, 15 bp, Homo sapiens
tgcgcctcctttagc

SEQ ID NO: 465082 - DNA, 15 bp, Homo sapiens
ctgcgcctcctttag

SEQ ID NO: 465083 - DNA, 15 bp, Homo sapiens
cctgcgcctccttta

SEQ ID NO: 465084 - DNA, 15 bp, Homo sapiens
ccctgcgcctccttt

SEQ ID NO: 465085 - DNA, 15 bp, Homo sapiens
gccctgcgcctcctt

SEQ ID NO: 465086 - DNA, 15 bp, Homo sapiens
ggccctgcgcctcct

SEQ ID NO: 465087 - DNA, 15 bp, Homo sapiens
gggccctgcgcctcc

SEQ ID NO: 465088 - DNA, 15 bp, Homo sapiens
tgggccctgcgcctc

SEQ ID NO: 465089 - DNA, 15 bp, Homo sapiens
ctgggccctgcgcct

SEQ ID NO: 465090 - DNA, 15 bp, Homo sapiens
gctgggccctgcgcc

SEQ ID NO: 465091 - DNA, 15 bp, Homo sapiens
tgctgggccctgcgc

SEQ ID NO: 465092 - DNA, 15 bp, Homo sapiens
ctgctgggccctgcg

SEQ ID NO: 465093 - DNA, 15 bp, Homo sapiens
cctgctgggccctgc

SEQ ID NO: 465094 - DNA, 15 bp, Homo sapiens
gcctgctgggccctg

SEQ ID NO: 465095 - DNA, 15 bp, Homo sapiens
tgcctgctgggccct

SEQ ID NO: 465096 - DNA, 15 bp, Homo sapiens
ctgcctgctgggccc

SEQ ID NO: 465097 - DNA, 15 bp, Homo sapiens
gctgcctgctgggcc

SEQ ID NO: 465098 - DNA, 15 bp, Homo sapiens
agctgcctgctgggc

SEQ ID NO: 465099 - DNA, 15 bp, Homo sapiens
aagctgcctgctggg

SEQ ID NO: 465100 - DNA, 15 bp, Homo sapiens
aaagctgcctgctgg

SEQ ID NO: 465101 - DNA, 15 bp, Homo sapiens
aaaagctgcctgctg

SEQ ID NO: 465102 - DNA, 15 bp, Homo sapiens
aaaaagctgcctgct

SEQ ID NO: 465103 - DNA, 15 bp, Homo sapiens
aaaaaagctgcctgc

SEQ ID NO: 465104 - DNA, 15 bp, Homo sapiens
gaaaaaagctgcctg

SEQ ID NO: 465105 - DNA, 15 bp, Homo sapiens
agaaaaaagctgcct

SEQ ID NO: 465106 - DNA, 15 bp, Homo sapiens
aagaaaaaagctgcc

SEQ ID NO: 465107 - DNA, 15 bp, Homo sapiens
taagaaaaaagctgc

SEQ ID NO: 465108 - DNA, 15 bp, Homo sapiens
ctaagaaaaaagctg

SEQ ID NO: 465109 - DNA, 15 bp, Homo sapiens
gctaagaaaaaagct

SEQ ID NO: 465110 - DNA, 15 bp, Homo sapiens
agctaagaaaaaagc

SEQ ID NO: 465111 - DNA, 15 bp, Homo sapiens
cagctaagaaaaaag

SEQ ID NO: 465112 - DNA, 15 bp, Homo sapiens
gcagctaagaaaaaa

SEQ ID NO: 465113 - DNA, 15 bp, Homo sapiens
tgcagctaagaaaaa

SEQ ID NO: 465114 - DNA, 15 bp, Homo sapiens
ctgcagctaagaaaa

SEQ ID NO: 465115 - DNA, 15 bp, Homo sapiens
gctgcagctaagaaa

SEQ ID NO: 465116 - DNA, 15 bp, Homo sapiens
agctgcagctaagaa

SEQ ID NO: 465117 - DNA, 15 bp, Homo sapiens
gagctgcagctaaga

SEQ ID NO: 465118 - DNA, 15 bp, Homo sapiens
agagctgcagctaag

SEQ ID NO: 465119 - DNA, 15 bp, Homo sapiens
gagagctgcagctaa

SEQ ID NO: 465120 - DNA, 15 bp, Homo sapiens
agagagctgcagcta

SEQ ID NO: 465121 - DNA, 15 bp, Homo sapiens
cagagagctgcagct

SEQ ID NO: 465122 - DNA, 15 bp, Homo sapiens
ccagagagctgcagc

SEQ ID NO: 465123 - DNA, 15 bp, Homo sapiens
cccagagagctgcag

SEQ ID NO: 465124 - DNA, 15 bp, Homo sapiens
gcccagagagctgca

SEQ ID NO: 465125 - DNA, 15 bp, Homo sapiens
ggcccagagagctgc

SEQ ID NO: 465126 - DNA, 15 bp, Homo sapiens
aggcccagagagctg

SEQ ID NO: 465127 - DNA, 15 bp, Homo sapiens
aaggcccagagagct

SEQ ID NO: 465128 - DNA, 15 bp, Homo sapiens
caaggcccagagagc

SEQ ID NO: 465129 - DNA, 15 bp, Homo sapiens
acaaggcccagagag

SEQ ID NO: 465130 - DNA, 15 bp, Homo sapiens
gacaaggcccagaga

SEQ ID NO: 465131 - DNA, 15 bp, Homo sapiens
agacaaggcccagag

SEQ ID NO: 465132 - DNA, 15 bp, Homo sapiens
gagacaaggcccaga

SEQ ID NO: 465133 - DNA, 15 bp, Homo sapiens
tgagacaaggcccag

SEQ ID NO: 465134 - DNA, 15 bp, Homo sapiens
ttgagacaaggccca

SEQ ID NO: 465135 - DNA, 15 bp, Homo sapiens
cttgagacaaggccc

SEQ ID NO: 465136 - DNA, 15 bp, Homo sapiens
ccttgagacaaggcc

SEQ ID NO: 465137 - DNA, 15 bp, Homo sapiens
cccttgagacaaggc

SEQ ID NO: 465138 - DNA, 15 bp, Homo sapiens
tcccttgagacaagg

SEQ ID NO: 465139 - DNA, 15 bp, Homo sapiens
ctcccttgagacaag

SEQ ID NO: 465140 - DNA, 15 bp, Homo sapiens
cctcccttgagacaa

SEQ ID NO: 465141 - DNA, 15 bp, Homo sapiens
acctcccttgagaca

SEQ ID NO: 465142 - DNA, 15 bp, Homo sapiens
aacctcccttgagac

SEQ ID NO: 465143 - DNA, 15 bp, Homo sapiens
caacctcccttgaga

SEQ ID NO: 465144 - DNA, 15 bp, Homo sapiens
ccaacctcccttgag

SEQ ID NO: 465145 - DNA, 15 bp, Homo sapiens
tccaacctcccttga

SEQ ID NO: 465146 - DNA, 15 bp, Homo sapiens
ctccaacctcccttg

SEQ ID NO: 465147 - DNA, 15 bp, Homo sapiens
gctccaacctccctt

SEQ ID NO: 465148 - DNA, 15 bp, Homo sapiens
agctccaacctccct

SEQ ID NO: 465149 - DNA, 15 bp, Homo sapiens
cagctccaacctccc

SEQ ID NO: 465150 - DNA, 15 bp, Homo sapiens
acagctccaacctcc

SEQ ID NO: 465151 - DNA, 15 bp, Homo sapiens
cacagctccaacctc

SEQ ID NO: 465152 - DNA, 15 bp, Homo sapiens
ccacagctccaacct

SEQ ID NO: 465153 - DNA, 15 bp, Homo sapiens
tccacagctccaacc

SEQ ID NO: 465154 - DNA, 15 bp, Homo sapiens
ctccacagctccaac

SEQ ID NO: 465155 - DNA, 15 bp, Homo sapiens
gctccacagctccaa

SEQ ID NO: 465156 - DNA, 15 bp, Homo sapiens
ggctccacagctcca

SEQ ID NO: 465157 - DNA, 15 bp, Homo sapiens
gggctccacagctcc

SEQ ID NO: 465158 - DNA, 15 bp, Homo sapiens
ggggctccacagctc

SEQ ID NO: 465159 - DNA, 15 bp, Homo sapiens
aggggctccacagct

SEQ ID NO: 465160 - DNA, 15 bp, Homo sapiens
gaggggctccacagc

SEQ ID NO: 465161 - DNA, 15 bp, Homo sapiens
tgaggggctccacag

SEQ ID NO: 465162 - DNA, 15 bp, Homo sapiens
ctgaggggctccaca

SEQ ID NO: 465163 - DNA, 15 bp, Homo sapiens
tctgaggggctccac

SEQ ID NO: 465164 - DNA, 15 bp, Homo sapiens
ctctgaggggctcca

SEQ ID NO: 465165 - DNA, 15 bp, Homo sapiens
gctctgaggggctcc

SEQ ID NO: 465166 - DNA, 15 bp, Homo sapiens
agctctgaggggctc

SEQ ID NO: 465167 - DNA, 15 bp, Homo sapiens
cagctctgaggggct

SEQ ID NO: 465168 - DNA, 15 bp, Homo sapiens
acagctctgaggggc

SEQ ID NO: 465169 - DNA, 15 bp, Homo sapiens
cacagctctgagggg

SEQ ID NO: 465170 - DNA, 15 bp, Homo sapiens
ccacagctctgaggg

SEQ ID NO: 465171 - DNA, 15 bp, Homo sapiens
gccacagctctgagg

SEQ ID NO: 465172 - DNA, 15 bp, Homo sapiens
cgccacagctctgag

SEQ ID NO: 465173 - DNA, 15 bp, Homo sapiens
ccgccacagctctga

SEQ ID NO: 465174 - DNA, 15 bp, Homo sapiens
cccgccacagctctg

SEQ ID NO: 465175 - DNA, 15 bp, Homo sapiens
gcccgccacagctct

SEQ ID NO: 465176 - DNA, 15 bp, Homo sapiens
ggcccgccacagctc

SEQ ID NO: 465177 - DNA, 15 bp, Homo sapiens
gggcccgccacagct

SEQ ID NO: 465178 - DNA, 15 bp, Homo sapiens
agggcccgccacagc

SEQ ID NO: 465179 - DNA, 15 bp, Homo sapiens
gagggcccgccacag

SEQ ID NO: 465180 - DNA, 15 bp, Homo sapiens
tgagggcccgccaca

SEQ ID NO: 465181 - DNA, 15 bp, Homo sapiens
gtgagggcccgccac

SEQ ID NO: 465182 - DNA, 15 bp, Homo sapiens
agtgagggcccgcca

SEQ ID NO: 465183 - DNA, 15 bp, Homo sapiens
aagtgagggcccgcc

SEQ ID NO: 465184 - DNA, 15 bp, Homo sapiens
taagtgagggcccgc

SEQ ID NO: 465185 - DNA, 15 bp, Homo sapiens
ctaagtgagggcccg

SEQ ID NO: 465186 - DNA, 15 bp, Homo sapiens
gctaagtgagggccc

SEQ ID NO: 465187 - DNA, 15 bp, Homo sapiens
agctaagtgagggcc

SEQ ID NO: 465188 - DNA, 15 bp, Homo sapiens
tagctaagtgagggc

SEQ ID NO: 465189 - DNA, 15 bp, Homo sapiens
gtagctaagtgaggg

SEQ ID NO: 465190 - DNA, 15 bp, Homo sapiens
ggtagctaagtgagg

SEQ ID NO: 465191 - DNA, 15 bp, Homo sapiens
gggtagctaagtgag

SEQ ID NO: 465192 - DNA, 15 bp, Homo sapiens
tgggtagctaagtga

SEQ ID NO: 465193 - DNA, 15 bp, Homo sapiens
gtgggtagctaagtg

SEQ ID NO: 465194 - DNA, 15 bp, Homo sapiens
agtgggtagctaagt

SEQ ID NO: 465195 - DNA, 15 bp, Homo sapiens
gagtgggtagctaag

SEQ ID NO: 465196 - DNA, 15 bp, Homo sapiens
agagtgggtagctaa

SEQ ID NO: 465197 - DNA, 15 bp, Homo sapiens
tagagtgggtagcta

SEQ ID NO: 465198 - DNA, 15 bp, Homo sapiens
atagagtgggtagct

SEQ ID NO: 465199 - DNA, 15 bp, Homo sapiens
tatagagtgggtagc

SEQ ID NO: 465200 - DNA, 15 bp, Homo sapiens
gtatagagtgggtag

SEQ ID NO: 465201 - DNA, 15 bp, Homo sapiens
ggtatagagtgggta

SEQ ID NO: 465202 - DNA, 15 bp, Homo sapiens
gggtatagagtgggt

SEQ ID NO: 465203 - DNA, 15 bp, Homo sapiens
tgggtatagagtggg

SEQ ID NO: 465204 - DNA, 15 bp, Homo sapiens
gtgggtatagagtgg

SEQ ID NO: 465205 - DNA, 15 bp, Homo sapiens
tgtgggtatagagtg

SEQ ID NO: 465206 - DNA, 15 bp, Homo sapiens
ctgtgggtatagagt

SEQ ID NO: 465207 - DNA, 15 bp, Homo sapiens
tctgtgggtatagag

SEQ ID NO: 465208 - DNA, 15 bp, Homo sapiens
ttctgtgggtataga

SEQ ID NO: 465209 - DNA, 15 bp, Homo sapiens
gttctgtgggtatag

SEQ ID NO: 465210 - DNA, 15 bp, Homo sapiens
cgttctgtgggtata

SEQ ID NO: 465211 - DNA, 15 bp, Homo sapiens
ccgttctgtgggtat

SEQ ID NO: 465212 - DNA, 15 bp, Homo sapiens
gccgttctgtgggta

SEQ ID NO: 465213 - DNA, 15 bp, Homo sapiens
ggccgttctgtgggt

SEQ ID NO: 465214 - DNA, 15 bp, Homo sapiens
tggccgttctgtggg

SEQ ID NO: 465215 - DNA, 15 bp, Homo sapiens
gtggccgttctgtgg

SEQ ID NO: 465216 - DNA, 15 bp, Homo sapiens
cgtggccgttctgtg

SEQ ID NO: 465217 - DNA, 15 bp, Homo sapiens
ccgtggccgttctgt

SEQ ID NO: 465218 - DNA, 15 bp, Homo sapiens
gccgtggccgttctg

SEQ ID NO: 465219 - DNA, 15 bp, Homo sapiens
agccgtggccgttct

SEQ ID NO: 465220 - DNA, 15 bp, Homo sapiens
aagccgtggccgttc

SEQ ID NO: 465221 - DNA, 15 bp, Homo sapiens
gaagccgtggccgtt

SEQ ID NO: 465222 - DNA, 15 bp, Homo sapiens
tgaagccgtggccgt

SEQ ID NO: 465223 - DNA, 15 bp, Homo sapiens
ctgaagccgtggccg

SEQ ID NO: 465224 - DNA, 15 bp, Homo sapiens
gctgaagccgtggcc

SEQ ID NO: 465225 - DNA, 15 bp, Homo sapiens
agctgaagccgtggc

SEQ ID NO: 465226 - DNA, 15 bp, Homo sapiens
cagctgaagccgtgg

SEQ ID NO: 465227 - DNA, 15 bp, Homo sapiens
gcagctgaagccgtg

SEQ ID NO: 465228 - DNA, 15 bp, Homo sapiens
ggcagctgaagccgt

SEQ ID NO: 465229 - DNA, 15 bp, Homo sapiens
gggcagctgaagccg

SEQ ID NO: 465230 - DNA, 15 bp, Homo sapiens
tgggcagctgaagcc

SEQ ID NO: 465231 - DNA, 15 bp, Homo sapiens
ctgggcagctgaagc

SEQ ID NO: 465232 - DNA, 15 bp, Homo sapiens
cctgggcagctgaag

SEQ ID NO: 465233 - DNA, 15 bp, Homo sapiens
gcctgggcagctgaa

SEQ ID NO: 465234 - DNA, 15 bp, Homo sapiens
tgcctgggcagctga

SEQ ID NO: 465235 - DNA, 15 bp, Homo sapiens
gtgcctgggcagctg

SEQ ID NO: 465236 - DNA, 15 bp, Homo sapiens
ggtgcctgggcagct

SEQ ID NO: 465237 - DNA, 15 bp, Homo sapiens
aggtgcctgggcagc

SEQ ID NO: 465238 - DNA, 15 bp, Homo sapiens
caggtgcctgggcag

SEQ ID NO: 465239 - DNA, 15 bp, Homo sapiens
gcaggtgcctgggca

SEQ ID NO: 465240 - DNA, 15 bp, Homo sapiens
cgcaggtgcctgggc

SEQ ID NO: 465241 - DNA, 15 bp, Homo sapiens
gcgcaggtgcctggg

SEQ ID NO: 465242 - DNA, 15 bp, Homo sapiens
ggcgcaggtgcctgg

SEQ ID NO: 465243 - DNA, 15 bp, Homo sapiens
tggcgcaggtgcctg

SEQ ID NO: 465244 - DNA, 15 bp, Homo sapiens
ctggcgcaggtgcct

SEQ ID NO: 465245 - DNA, 15 bp, Homo sapiens
tctggcgcaggtgcc

SEQ ID NO: 465246 - DNA, 15 bp, Homo sapiens
gtctggcgcaggtgc

SEQ ID NO: 465247 - DNA, 15 bp, Homo sapiens
ggtctggcgcaggtg

SEQ ID NO: 465248 - DNA, 15 bp, Homo sapiens
tggtctggcgcaggt

SEQ ID NO: 465249 - DNA, 15 bp, Homo sapiens
atggtctggcgcagg

SEQ ID NO: 465250 - DNA, 15 bp, Homo sapiens
aatggtctggcgcag

SEQ ID NO: 465251 - DNA, 15 bp, Homo sapiens
gaatggtctggcgca

SEQ ID NO: 465252 - DNA, 15 bp, Homo sapiens
tgaatggtctggcgc

SEQ ID NO: 465253 - DNA, 15 bp, Homo sapiens
ctgaatggtctggcg

SEQ ID NO: 465254 - DNA, 15 bp, Homo sapiens
tctgaatggtctggc

SEQ ID NO: 465255 - DNA, 15 bp, Homo sapiens
ttctgaatggtctgg

SEQ ID NO: 465256 - DNA, 15 bp, Homo sapiens
cttctgaatggtctg

SEQ ID NO: 465257 - DNA, 15 bp, Homo sapiens
tcttctgaatggtct

SEQ ID NO: 465258 - DNA, 15 bp, Homo sapiens
ttcttctgaatggtc

SEQ ID NO: 465259 - DNA, 15 bp, Homo sapiens
cttcttctgaatggt

SEQ ID NO: 465260 - DNA, 15 bp, Homo sapiens
ccttcttctgaatgg

SEQ ID NO: 465261 - DNA, 15 bp, Homo sapiens
accttcttctgaatg

SEQ ID NO: 465262 - DNA, 15 bp, Homo sapiens
gaccttcttctgaat

SEQ ID NO: 465263 - DNA, 15 bp, Homo sapiens
cgaccttcttctgaa

SEQ ID NO: 465264 - DNA, 15 bp, Homo sapiens
ccgaccttcttctga

SEQ ID NO: 465265 - DNA, 15 bp, Homo sapiens
cccgaccttcttctg

SEQ ID NO: 465266 - DNA, 15 bp, Homo sapiens
ccccgaccttcttct

SEQ ID NO: 465267 - DNA, 15 bp, Homo sapiens
tccccgaccttcttc

SEQ ID NO: 465268 - DNA, 15 bp, Homo sapiens
ctccccgaccttctt

SEQ ID NO: 465269 - DNA, 15 bp, Homo sapiens
gctccccgaccttct

SEQ ID NO: 465270 - DNA, 15 bp, Homo sapiens
ggctccccgaccttc

SEQ ID NO: 465271 - DNA, 15 bp, Homo sapiens
aggctccccgacctt

SEQ ID NO: 465272 - DNA, 15 bp, Homo sapiens
caggctccccgacct

SEQ ID NO: 465273 - DNA, 15 bp, Homo sapiens
acaggctccccgacc

SEQ ID NO: 465274 - DNA, 15 bp, Homo sapiens
cacaggctccccgac

SEQ ID NO: 465275 - DNA, 15 bp, Homo sapiens
tcacaggctccccga

SEQ ID NO: 465276 - DNA, 15 bp, Homo sapiens
ttcacaggctccccg

SEQ ID NO: 465277 - DNA, 15 bp, Homo sapiens
gttcacaggctcccc

SEQ ID NO: 465278 - DNA, 15 bp, Homo sapiens
ggttcacaggctccc

SEQ ID NO: 465279 - DNA, 15 bp, Homo sapiens
aggttcacaggctcc

SEQ ID NO: 465280 - DNA, 15 bp, Homo sapiens
aaggttcacaggctc

SEQ ID NO: 465281 - DNA, 15 bp, Homo sapiens
gaaggttcacaggct

SEQ ID NO: 465282 - DNA, 15 bp, Homo sapiens
agaaggttcacaggc

SEQ ID NO: 465283 - DNA, 15 bp, Homo sapiens
gagaaggttcacagg

SEQ ID NO: 465284 - DNA, 15 bp, Homo sapiens
tgagaaggttcacag

SEQ ID NO: 465285 - DNA, 15 bp, Homo sapiens
atgagaaggttcaca

SEQ ID NO: 465286 - DNA, 15 bp, Homo sapiens
gatgagaaggttcac

SEQ ID NO: 465287 - DNA, 15 bp, Homo sapiens
ggatgagaaggttca

SEQ ID NO: 465288 - DNA, 15 bp, Homo sapiens
gggatgagaaggttc

SEQ ID NO: 465289 - DNA, 15 bp, Homo sapiens
agggatgagaaggtt

SEQ ID NO: 465290 - DNA, 15 bp, Homo sapiens
aagggatgagaaggt

SEQ ID NO: 465291 - DNA, 15 bp, Homo sapiens
aaagggatgagaagg

SEQ ID NO: 465292 - DNA, 15 bp, Homo sapiens
gaaagggatgagaag

SEQ ID NO: 465293 - DNA, 15 bp, Homo sapiens
ggaaagggatgagaa

SEQ ID NO: 465294 - DNA, 15 bp, Homo sapiens
tggaaagggatgaga

SEQ ID NO: 465295 - DNA, 15 bp, Homo sapiens
ctggaaagggatgag

SEQ ID NO: 465296 - DNA, 15 bp, Homo sapiens
cctggaaagggatga

SEQ ID NO: 465297 - DNA, 15 bp, Homo sapiens
acctggaaagggatg

SEQ ID NO: 465298 - DNA, 15 bp, Homo sapiens
cacctggaaagggat

SEQ ID NO: 465299 - DNA, 15 bp, Homo sapiens
ccacctggaaaggga

SEQ ID NO: 465300 - DNA, 15 bp, Homo sapiens
cccacctggaaaggg

SEQ ID NO: 465301 - DNA, 15 bp, Homo sapiens
tcccacctggaaagg

SEQ ID NO: 465302 - DNA, 15 bp, Homo sapiens
gtcccacctggaaag

SEQ ID NO: 465303 - DNA, 15 bp, Homo sapiens
agtcccacctggaaa

SEQ ID NO: 465304 - DNA, 15 bp, Homo sapiens
cagtcccacctggaa

SEQ ID NO: 465305 - DNA, 15 bp, Homo sapiens
ccagtcccacctgga

SEQ ID NO: 465306 - DNA, 15 bp, Homo sapiens
gccagtcccacctgg

SEQ ID NO: 465307 - DNA, 15 bp, Homo sapiens
ggccagtcccacctg

SEQ ID NO: 465308 - DNA, 15 bp, Homo sapiens
gggccagtcccacct

SEQ ID NO: 465309 - DNA, 15 bp, Homo sapiens
ggggccagtcccacc

SEQ ID NO: 465310 - DNA, 15 bp, Homo sapiens
gggggccagtcccac

SEQ ID NO: 465311 - DNA, 15 bp, Homo sapiens
agggggccagtccca

SEQ ID NO: 465312 - DNA, 15 bp, Homo sapiens
aagggggccagtccc

SEQ ID NO: 465313 - DNA, 15 bp, Homo sapiens
gaagggggccagtcc

SEQ ID NO: 465314 - DNA, 15 bp, Homo sapiens
ggaagggggccagtc

SEQ ID NO: 465315 - DNA, 15 bp, Homo sapiens
gggaagggggccagt

SEQ ID NO: 465316 - DNA, 15 bp, Homo sapiens
agggaagggggccag

SEQ ID NO: 465317 - DNA, 15 bp, Homo sapiens
cagggaagggggcca

SEQ ID NO: 465318 - DNA, 15 bp, Homo sapiens
acagggaagggggcc

SEQ ID NO: 465319 - DNA, 15 bp, Homo sapiens
gacagggaagggggc

SEQ ID NO: 465320 - DNA, 15 bp, Homo sapiens
ggacagggaaggggg

SEQ ID NO: 465321 - DNA, 15 bp, Homo sapiens
ggggacagggaaggg

SEQ ID NO: 465322 - DNA, 15 bp, Homo sapiens
gggggacagggaagg

SEQ ID NO: 465323 - DNA, 15 bp, Homo sapiens
tgggggacagggaag

SEQ ID NO: 465324 - DNA, 15 bp, Homo sapiens
ctgggggacagggaa

SEQ ID NO: 465325 - DNA, 15 bp, Homo sapiens
cctgggggacaggga

SEQ ID NO: 465326 - DNA, 15 bp, Homo sapiens
ccctgggggacaggg

SEQ ID NO: 465327 - DNA, 15 bp, Homo sapiens
cccctgggggacagg

SEQ ID NO: 465328 - DNA, 15 bp, Homo sapiens
tcccctgggggacag

SEQ ID NO: 465329 - DNA, 15 bp, Homo sapiens
ctcccctgggggaca

SEQ ID NO: 465330 - DNA, 15 bp, Homo sapiens
tctcccctgggggac

SEQ ID NO: 465331 - DNA, 15 bp, Homo sapiens
ctctcccctggggga

SEQ ID NO: 465332 - DNA, 15 bp, Homo sapiens
tctctcccctggggg

SEQ ID NO: 465333 - DNA, 15 bp, Homo sapiens
ctctctcccctgggg

SEQ ID NO: 465334 - DNA, 15 bp, Homo sapiens
cctctctcccctggg

SEQ ID NO: 465335 - DNA, 15 bp, Homo sapiens
gcctctctcccctgg

SEQ ID NO: 465336 - DNA, 15 bp, Homo sapiens
agcctctctcccctg

SEQ ID NO: 465337 - DNA, 15 bp, Homo sapiens
tagcctctctcccct

SEQ ID NO: 465338 - DNA, 15 bp, Homo sapiens
atagcctctctcccc

SEQ ID NO: 465339 - DNA, 15 bp, Homo sapiens
tatagcctctctccc

SEQ ID NO: 465340 - DNA, 15 bp, Homo sapiens
ctatagcctctctcc

SEQ ID NO: 465341 - DNA, 15 bp, Homo sapiens
actatagcctctctc

SEQ ID NO: 465342 - DNA, 15 bp, Homo sapiens
cactatagcctctct

SEQ ID NO: 465343 - DNA, 15 bp, Homo sapiens
acactatagcctctc

SEQ ID NO: 465344 - DNA, 15 bp, Homo sapiens
cacactatagcctct

SEQ ID NO: 465345 - DNA, 15 bp, Homo sapiens
acacactatagcctc

SEQ ID NO: 465346 - DNA, 15 bp, Homo sapiens
aacacactatagcct

SEQ ID NO: 465347 - DNA, 15 bp, Homo sapiens
caacacactatagcc

SEQ ID NO: 465348 - DNA, 15 bp, Homo sapiens
acaacacactatagc

SEQ ID NO: 465349 - DNA, 15 bp, Homo sapiens
aacaacacactatag

SEQ ID NO: 465350 - DNA, 15 bp, Homo sapiens
gaacaacacactata

SEQ ID NO: 465351 - DNA, 15 bp, Homo sapiens
ggaacaacacactat

SEQ ID NO: 465352 - DNA, 15 bp, Homo sapiens
gggaacaacacacta

SEQ ID NO: 465353 - DNA, 15 bp, Homo sapiens
tgggaacaacacact

SEQ ID NO: 465354 - DNA, 15 bp, Homo sapiens
atgggaacaacacac

SEQ ID NO: 465355 - DNA, 15 bp, Homo sapiens
gatgggaacaacaca

SEQ ID NO: 465356 - DNA, 15 bp, Homo sapiens
ggatgggaacaacac

SEQ ID NO: 465357 - DNA, 15 bp, Homo sapiens
tggatgggaacaaca

SEQ ID NO: 465358 - DNA, 15 bp, Homo sapiens
ctggatgggaacaac

SEQ ID NO: 465359 - DNA, 15 bp, Homo sapiens
actggatgggaacaa

SEQ ID NO: 465360 - DNA, 15 bp, Homo sapiens
cactggatgggaaca

SEQ ID NO: 465361 - DNA, 15 bp, Homo sapiens
ccactggatgggaac

SEQ ID NO: 465362 - DNA, 15 bp, Homo sapiens
tccactggatgggaa

SEQ ID NO: 465363 - DNA, 15 bp, Homo sapiens
gtccactggatggga

SEQ ID NO: 465364 - DNA, 15 bp, Homo sapiens
agtccactggatggg

SEQ ID NO: 465365 - DNA, 15 bp, Homo sapiens
cagtccactggatgg

SEQ ID NO: 465366 - DNA, 15 bp, Homo sapiens
tcagtccactggatg

SEQ ID NO: 465367 - DNA, 15 bp, Homo sapiens
atcagtccactggat

SEQ ID NO: 465368 - DNA, 15 bp, Homo sapiens
catcagtccactgga

SEQ ID NO: 465369 - DNA, 15 bp, Homo sapiens
acatcagtccactgg

SEQ ID NO: 465370 - DNA, 15 bp, Homo sapiens
gacatcagtccactg

SEQ ID NO: 465371 - DNA, 15 bp, Homo sapiens
agacatcagtccact

SEQ ID NO: 465372 - DNA, 15 bp, Homo sapiens
gagacatcagtccac

SEQ ID NO: 465373 - DNA, 15 bp, Homo sapiens
tgagacatcagtcca

SEQ ID NO: 465374 - DNA, 15 bp, Homo sapiens
ctgagacatcagtcc

SEQ ID NO: 465375 - DNA, 15 bp, Homo sapiens
cctgagacatcagtc

SEQ ID NO: 465376 - DNA, 15 bp, Homo sapiens
ccctgagacatcagt

SEQ ID NO: 465377 - DNA, 15 bp, Homo sapiens
gccctgagacatcag

SEQ ID NO: 465378 - DNA, 15 bp, Homo sapiens
agccctgagacatca

SEQ ID NO: 465379 - DNA, 15 bp, Homo sapiens
cagccctgagacatc

SEQ ID NO: 465380 - DNA, 15 bp, Homo sapiens
ccagccctgagacat

SEQ ID NO: 465381 - DNA, 15 bp, Homo sapiens
gccagccctgagaca

SEQ ID NO: 465382 - DNA, 15 bp, Homo sapiens
ggccagccctgagac

SEQ ID NO: 465383 - DNA, 15 bp, Homo sapiens
aggccagccctgaga

SEQ ID NO: 465384 - DNA, 15 bp, Homo sapiens
caggccagccctgag

SEQ ID NO: 465385 - DNA, 15 bp, Homo sapiens
tcaggccagccctga

SEQ ID NO: 465386 - DNA, 15 bp, Homo sapiens
atcaggccagccctg

SEQ ID NO: 465387 - DNA, 15 bp, Homo sapiens
gatcaggccagccct

SEQ ID NO: 465388 - DNA, 15 bp, Homo sapiens
agatcaggccagccc

SEQ ID NO: 465389 - DNA, 15 bp, Homo sapiens
cagatcaggccagcc

SEQ ID NO: 465390 - DNA, 15 bp, Homo sapiens
tcagatcaggccagc

SEQ ID NO: 465391 - DNA, 15 bp, Homo sapiens
ctcagatcaggccag

SEQ ID NO: 465392 - DNA, 15 bp, Homo sapiens
cctcagatcaggcca

SEQ ID NO: 465393 - DNA, 15 bp, Homo sapiens
acctcagatcaggcc

SEQ ID NO: 465394 - DNA, 15 bp, Homo sapiens
tacctcagatcaggc

SEQ ID NO: 465395 - DNA, 15 bp, Homo sapiens
gtacctcagatcagg

SEQ ID NO: 465396 - DNA, 15 bp, Homo sapiens
ggtacctcagatcag

SEQ ID NO: 465397 - DNA, 15 bp, Homo sapiens
tggtacctcagatca

SEQ ID NO: 465398 - DNA, 15 bp, Homo sapiens
ctggtacctcagatc

SEQ ID NO: 465399 - DNA, 15 bp, Homo sapiens
tctggtacctcagat

SEQ ID NO: 465400 - DNA, 15 bp, Homo sapiens
ctctggtacctcaga

SEQ ID NO: 465401 - DNA, 15 bp, Homo sapiens
cctctggtacctcag

SEQ ID NO: 465402 - DNA, 15 bp, Homo sapiens
gcctctggtacctca

SEQ ID NO: 465403 - DNA, 15 bp, Homo sapiens
agcctctggtacctc

SEQ ID NO: 465404 - DNA, 15 bp, Homo sapiens
cagcctctggtacct

SEQ ID NO: 465405 - DNA, 15 bp, Homo sapiens
ccagcctctggtacc

SEQ ID NO: 465406 - DNA, 15 bp, Homo sapiens
cccagcctctggtac

SEQ ID NO: 465407 - DNA, 15 bp, Homo sapiens
ccccagcctctggta

SEQ ID NO: 465408 - DNA, 15 bp, Homo sapiens
accccagcctctggt

SEQ ID NO: 465409 - DNA, 15 bp, Homo sapiens
caccccagcctctgg

SEQ ID NO: 465410 - DNA, 15 bp, Homo sapiens
ccaccccagcctctg

SEQ ID NO: 465411 - DNA, 15 bp, Homo sapiens
gccaccccagcctct

SEQ ID NO: 465412 - DNA, 15 bp, Homo sapiens
cgccaccccagcctc

SEQ ID NO: 465413 - DNA, 15 bp, Homo sapiens
ccgccaccccagcct

SEQ ID NO: 465414 - DNA, 15 bp, Homo sapiens
gccgccaccccagcc

SEQ ID NO: 465415 - DNA, 15 bp, Homo sapiens
ggccgccaccccagc

SEQ ID NO: 465416 - DNA, 15 bp, Homo sapiens
cggccgccaccccag

SEQ ID NO: 465417 - DNA, 15 bp, Homo sapiens
ccggccgccacccca

SEQ ID NO: 465418 - DNA, 15 bp, Homo sapiens
gccggccgccacccc

SEQ ID NO: 465419 - DNA, 15 bp, Homo sapiens
ggccggccgccaccc

SEQ ID NO: 465420 - DNA, 15 bp, Homo sapiens
gggccggccgccacc

SEQ ID NO: 465421 - DNA, 15 bp, Homo sapiens
agggccggccgccac

SEQ ID NO: 465422 - DNA, 15 bp, Homo sapiens
aagggccggccgcca

SEQ ID NO: 465423 - DNA, 15 bp, Homo sapiens
caagggccggccgcc

SEQ ID NO: 465424 - DNA, 15 bp, Homo sapiens
ccaagggccggccgc

SEQ ID NO: 465425 - DNA, 15 bp, Homo sapiens
tccaagggccggccg

SEQ ID NO: 465426 - DNA, 15 bp, Homo sapiens
ctccaagggccggcc

SEQ ID NO: 465427 - DNA, 15 bp, Homo sapiens
actccaagggccggc

SEQ ID NO: 465428 - DNA, 15 bp, Homo sapiens
cactccaagggccgg

SEQ ID NO: 465429 - DNA, 15 bp, Homo sapiens
tcactccaagggccg

SEQ ID NO: 465430 - DNA, 15 bp, Homo sapiens
atcactccaagggcc

SEQ ID NO: 465431 - DNA, 15 bp, Homo sapiens
gatcactccaagggc

SEQ ID NO: 465432 - DNA, 15 bp, Homo sapiens
ggatcactccaaggg

SEQ ID NO: 465433 - DNA, 15 bp, Homo sapiens
tggatcactccaagg

SEQ ID NO: 465434 - DNA, 15 bp, Homo sapiens
ctggatcactccaag

SEQ ID NO: 465435 - DNA, 15 bp, Homo sapiens
cctggatcactccaa

SEQ ID NO: 465436 - DNA, 15 bp, Homo sapiens
acctggatcactcca

SEQ ID NO: 465437 - DNA, 15 bp, Homo sapiens
aacctggatcactcc

SEQ ID NO: 465438 - DNA, 15 bp, Homo sapiens
gaacctggatcactc

SEQ ID NO: 465439 - DNA, 15 bp, Homo sapiens
tgaacctggatcact

SEQ ID NO: 465440 - DNA, 15 bp, Homo sapiens
ctgaacctggatcac

SEQ ID NO: 465441 - DNA, 15 bp, Homo sapiens
cctgaacctggatca

SEQ ID NO: 465442 - DNA, 15 bp, Homo sapiens
ccctgaacctggatc

SEQ ID NO: 465443 - DNA, 15 bp, Homo sapiens
accctgaacctggat

SEQ ID NO: 465444 - DNA, 15 bp, Homo sapiens
aaccctgaacctgga

SEQ ID NO: 465445 - DNA, 15 bp, Homo sapiens
taaccctgaacctgg

SEQ ID NO: 465446 - DNA, 15 bp, Homo sapiens
ttaaccctgaacctg

SEQ ID NO: 465447 - DNA, 15 bp, Homo sapiens
cttaaccctgaacct

SEQ ID NO: 465448 - DNA, 15 bp, Homo sapiens
gcttaaccctgaacc

SEQ ID NO: 465449 - DNA, 15 bp, Homo sapiens
agcttaaccctgaac

SEQ ID NO: 465450 - DNA, 15 bp, Homo sapiens
aagcttaaccctgaa

SEQ ID NO: 465451 - DNA, 15 bp, Homo sapiens
aaagcttaaccctga

SEQ ID NO: 465452 - DNA, 15 bp, Homo sapiens
aaaagcttaaccctg

SEQ ID NO: 465453 - DNA, 15 bp, Homo sapiens
gaaaagcttaaccct

SEQ ID NO: 465454 - DNA, 15 bp, Homo sapiens
ggaaaagcttaaccc

SEQ ID NO: 465455 - DNA, 15 bp, Homo sapiens
aggaaaagcttaacc

SEQ ID NO: 465456 - DNA, 15 bp, Homo sapiens
gaggaaaagcttaac

SEQ ID NO: 465457 - DNA, 15 bp, Homo sapiens
ggaggaaaagcttaa

SEQ ID NO: 465458 - DNA, 15 bp, Homo sapiens
gggaggaaaagctta

SEQ ID NO: 465459 - DNA, 15 bp, Homo sapiens
ggggaggaaaagctt

SEQ ID NO: 465460 - DNA, 15 bp, Homo sapiens
aggggaggaaaagct

SEQ ID NO: 465461 - DNA, 15 bp, Homo sapiens
gaggggaggaaaagc

SEQ ID NO: 465462 - DNA, 15 bp, Homo sapiens
tgaggggaggaaaag

SEQ ID NO: 465463 - DNA, 15 bp, Homo sapiens
ctgaggggaggaaaa

SEQ ID NO: 465464 - DNA, 15 bp, Homo sapiens
cctgaggggaggaaa

SEQ ID NO: 465465 - DNA, 15 bp, Homo sapiens
ccctgaggggaggaa

SEQ ID NO: 465466 - DNA, 15 bp, Homo sapiens
gccctgaggggagga

SEQ ID NO: 465467 - DNA, 15 bp, Homo sapiens
tgccctgaggggagg

SEQ ID NO: 465468 - DNA, 15 bp, Homo sapiens
ttgccctgaggggag

SEQ ID NO: 465469 - DNA, 15 bp, Homo sapiens
cttgccctgagggga

SEQ ID NO: 465470 - DNA, 15 bp, Homo sapiens
gcttgccctgagggg

SEQ ID NO: 465471 - DNA, 15 bp, Homo sapiens
ggcttgccctgaggg

SEQ ID NO: 465472 - DNA, 15 bp, Homo sapiens
gggcttgccctgagg

SEQ ID NO: 465473 - DNA, 15 bp, Homo sapiens
ggggcttgccctgag

SEQ ID NO: 465474 - DNA, 15 bp, Homo sapiens
cggggcttgccctga

SEQ ID NO: 465475 - DNA, 15 bp, Homo sapiens
ccggggcttgccctg

SEQ ID NO: 465476 - DNA, 15 bp, Homo sapiens
gccggggcttgccct

SEQ ID NO: 465477 - DNA, 15 bp, Homo sapiens
ggccggggcttgccc

SEQ ID NO: 465478 - DNA, 15 bp, Homo sapiens
aggccggggcttgcc

SEQ ID NO: 465479 - DNA, 15 bp, Homo sapiens
gaggccggggcttgc

SEQ ID NO: 465480 - DNA, 15 bp, Homo sapiens
tgaggccggggcttg

SEQ ID NO: 465481 - DNA, 15 bp, Homo sapiens
ctgaggccggggctt

SEQ ID NO: 465482 - DNA, 15 bp, Homo sapiens
cctgaggccggggct

SEQ ID NO: 465483 - DNA, 15 bp, Homo sapiens
acctgaggccggggc

SEQ ID NO: 465484 - DNA, 15 bp, Homo sapiens
cacctgaggccgggg

SEQ ID NO: 465485 - DNA, 15 bp, Homo sapiens
tcacctgaggccggg

SEQ ID NO: 465486 - DNA, 15 bp, Homo sapiens
gtcacctgaggccgg

SEQ ID NO: 465487 - DNA, 15 bp, Homo sapiens
ggtcacctgaggccg

SEQ ID NO: 465488 - DNA, 15 bp, Homo sapiens
aggtcacctgaggcc

SEQ ID NO: 465489 - DNA, 15 bp, Homo sapiens
caggtcacctgaggc

SEQ ID NO: 465490 - DNA, 15 bp, Homo sapiens
ccaggtcacctgagg

SEQ ID NO: 465491 - DNA, 15 bp, Homo sapiens
tccaggtcacctgag

SEQ ID NO: 465492 - DNA, 15 bp, Homo sapiens
gtccaggtcacctga

SEQ ID NO: 465493 - DNA, 15 bp, Homo sapiens
ggtccaggtcacctg

SEQ ID NO: 465494 - DNA, 15 bp, Homo sapiens
tggtccaggtcacct

SEQ ID NO: 465495 - DNA, 15 bp, Homo sapiens
ttggtccaggtcacc

SEQ ID NO: 465496 - DNA, 15 bp, Homo sapiens
tttggtccaggtcac

SEQ ID NO: 465497 - DNA, 15 bp, Homo sapiens
ctttggtccaggtca

SEQ ID NO: 465498 - DNA, 15 bp, Homo sapiens
tctttggtccaggtc

SEQ ID NO: 465499 - DNA, 15 bp, Homo sapiens
ctctttggtccaggt

SEQ ID NO: 465500 - DNA, 15 bp, Homo sapiens
cctctttggtccagg

SEQ ID NO: 465501 - DNA, 15 bp, Homo sapiens
ccctctttggtccag

SEQ ID NO: 465502 - DNA, 15 bp, Homo sapiens
cccctctttggtcca

SEQ ID NO: 465503 - DNA, 15 bp, Homo sapiens
gcccctctttggtcc

SEQ ID NO: 465504 - DNA, 15 bp, Homo sapiens
tgcccctctttggtc

SEQ ID NO: 465505 - DNA, 15 bp, Homo sapiens
ctgcccctctttggt

SEQ ID NO: 465506 - DNA, 15 bp, Homo sapiens
gctgcccctctttgg

SEQ ID NO: 465507 - DNA, 15 bp, Homo sapiens
ggctgcccctctttg

SEQ ID NO: 465508 - DNA, 15 bp, Homo sapiens
gggctgcccctcttt

SEQ ID NO: 465509 - DNA, 15 bp, Homo sapiens
ggggctgcccctctt

SEQ ID NO: 465510 - DNA, 15 bp, Homo sapiens
aggggctgcccctct

SEQ ID NO: 465511 - DNA, 15 bp, Homo sapiens
caggggctgcccctc

SEQ ID NO: 465512 - DNA, 15 bp, Homo sapiens
ccaggggctgcccct

SEQ ID NO: 465513 - DNA, 15 bp, Homo sapiens
gccaggggctgcccc

SEQ ID NO: 465514 - DNA, 15 bp, Homo sapiens
tgccaggggctgccc

SEQ ID NO: 465515 - DNA, 15 bp, Homo sapiens
ctgccaggggctgcc

SEQ ID NO: 465516 - DNA, 15 bp, Homo sapiens
cctgccaggggctgc

SEQ ID NO: 465517 - DNA, 15 bp, Homo sapiens
gcctgccaggggctg

SEQ ID NO: 465518 - DNA, 15 bp, Homo sapiens
cgcctgccaggggct

SEQ ID NO: 465519 - DNA, 15 bp, Homo sapiens
tcgcctgccaggggc

SEQ ID NO: 465520 - DNA, 15 bp, Homo sapiens
ctcgcctgccagggg

SEQ ID NO: 465521 - DNA, 15 bp, Homo sapiens
cctcgcctgccaggg

SEQ ID NO: 465522 - DNA, 15 bp, Homo sapiens
tcctcgcctgccagg

SEQ ID NO: 465523 - DNA, 15 bp, Homo sapiens
ctcctcgcctgccag

SEQ ID NO: 465524 - DNA, 15 bp, Homo sapiens
cctcctcgcctgcca

SEQ ID NO: 465525 - DNA, 15 bp, Homo sapiens
acctcctcgcctgcc

SEQ ID NO: 465526 - DNA, 15 bp, Homo sapiens
cacctcctcgcctgc

SEQ ID NO: 465527 - DNA, 15 bp, Homo sapiens
tcacctcctcgcctg

SEQ ID NO: 465528 - DNA, 15 bp, Homo sapiens
ctcacctcctcgcct

SEQ ID NO: 465529 - DNA, 15 bp, Homo sapiens
gctcacctcctcgcc

SEQ ID NO: 465530 - DNA, 15 bp, Homo sapiens
tgctcacctcctcgc

SEQ ID NO: 465531 - DNA, 15 bp, Homo sapiens
atgctcacctcctcg

SEQ ID NO: 465532 - DNA, 15 bp, Homo sapiens
gatgctcacctcctc

SEQ ID NO: 465533 - DNA, 15 bp, Homo sapiens
ggatgctcacctcct

SEQ ID NO: 465534 - DNA, 15 bp, Homo sapiens
cggatgctcacctcc

SEQ ID NO: 465535 - DNA, 15 bp, Homo sapiens
gcggatgctcacctc

SEQ ID NO: 465536 - DNA, 15 bp, Homo sapiens
tgcggatgctcacct

SEQ ID NO: 465537 - DNA, 15 bp, Homo sapiens
ttgcggatgctcacc

SEQ ID NO: 465538 - DNA, 15 bp, Homo sapiens
gttgcggatgctcac

SEQ ID NO: 465539 - DNA, 15 bp, Homo sapiens
tgttgcggatgctca

SEQ ID NO: 465540 - DNA, 15 bp, Homo sapiens
ctgttgcggatgctc

SEQ ID NO: 465541 - DNA, 15 bp, Homo sapiens
gctgttgcggatgct

SEQ ID NO: 465542 - DNA, 15 bp, Homo sapiens
ggctgttgcggatgc

SEQ ID NO: 465543 - DNA, 15 bp, Homo sapiens
gggctgttgcggatg

SEQ ID NO: 465544 - DNA, 15 bp, Homo sapiens
ggggctgttgcggat

SEQ ID NO: 465545 - DNA, 15 bp, Homo sapiens
tggggctgttgcgga

SEQ ID NO: 465546 - DNA, 15 bp, Homo sapiens
gtggggctgttgcgg

SEQ ID NO: 465547 - DNA, 15 bp, Homo sapiens
tgtggggctgttgcg

SEQ ID NO: 465548 - DNA, 15 bp, Homo sapiens
ctgtggggctgttgc

SEQ ID NO: 465549 - DNA, 15 bp, Homo sapiens
tctgtggggctgttg

SEQ ID NO: 465550 - DNA, 15 bp, Homo sapiens
gtctgtggggctgtt

SEQ ID NO: 465551 - DNA, 15 bp, Homo sapiens
tgtctgtggggctgt

SEQ ID NO: 465552 - DNA, 15 bp, Homo sapiens
gtgtctgtggggctg

SEQ ID NO: 465553 - DNA, 15 bp, Homo sapiens
ggtgtctgtggggct

SEQ ID NO: 465554 - DNA, 15 bp, Homo sapiens
tggtgtctgtggggc

SEQ ID NO: 465555 - DNA, 15 bp, Homo sapiens
atggtgtctgtgggg

SEQ ID NO: 465556 - DNA, 15 bp, Homo sapiens
gatggtgtctgtggg

SEQ ID NO: 465557 - DNA, 15 bp, Homo sapiens
ggatggtgtctgtgg

SEQ ID NO: 465558 - DNA, 15 bp, Homo sapiens
aggatggtgtctgtg

SEQ ID NO: 465559 - DNA, 15 bp, Homo sapiens
caggatggtgtctgt

SEQ ID NO: 465560 - DNA, 15 bp, Homo sapiens
acaggatggtgtctg

SEQ ID NO: 465561 - DNA, 15 bp, Homo sapiens
aacaggatggtgtct

SEQ ID NO: 465562 - DNA, 15 bp, Homo sapiens
gaacaggatggtgtc

SEQ ID NO: 465563 - DNA, 15 bp, Homo sapiens
tgaacaggatggtgt

SEQ ID NO: 465564 - DNA, 15 bp, Homo sapiens
atgaacaggatggtg

SEQ ID NO: 465565 - DNA, 15 bp, Homo sapiens
gatgaacaggatggt

SEQ ID NO: 465566 - DNA, 15 bp, Homo sapiens
ggatgaacaggatgg

SEQ ID NO: 465567 - DNA, 15 bp, Homo sapiens
cggatgaacaggatg

SEQ ID NO: 465568 - DNA, 15 bp, Homo sapiens
ccggatgaacaggat

SEQ ID NO: 465569 - DNA, 15 bp, Homo sapiens
cccggatgaacagga

SEQ ID NO: 465570 - DNA, 15 bp, Homo sapiens
gcccggatgaacagg

SEQ ID NO: 465571 - DNA, 15 bp, Homo sapiens
ggcccggatgaacag

SEQ ID NO: 465572 - DNA, 15 bp, Homo sapiens
cggcccggatgaaca

SEQ ID NO: 465573 - DNA, 15 bp, Homo sapiens
gcggcccggatgaac

SEQ ID NO: 465574 - DNA, 15 bp, Homo sapiens
agcggcccggatgaa

SEQ ID NO: 465575 - DNA, 15 bp, Homo sapiens
gagcggcccggatga

SEQ ID NO: 465576 - DNA, 15 bp, Homo sapiens
cgagcggcccggatg

SEQ ID NO: 465577 - DNA, 15 bp, Homo sapiens
gcgagcggcccggat

SEQ ID NO: 465578 - DNA, 15 bp, Homo sapiens
ggcgagcggcccgga

SEQ ID NO: 465579 - DNA, 15 bp, Homo sapiens
cggcgagcggcccgg

SEQ ID NO: 465580 - DNA, 15 bp, Homo sapiens
gcggcgagcggcccg

SEQ ID NO: 465581 - DNA, 15 bp, Homo sapiens
cgcggcgagcggccc

SEQ ID NO: 465582 - DNA, 15 bp, Homo sapiens
acgcggcgagcggcc

SEQ ID NO: 465583 - DNA, 15 bp, Homo sapiens
cacgcggcgagcggc

SEQ ID NO: 465584 - DNA, 15 bp, Homo sapiens
gcacgcggcgagcgg

SEQ ID NO: 465585 - DNA, 15 bp, Homo sapiens
tgcacgcggcgagcg

SEQ ID NO: 465586 - DNA, 15 bp, Homo sapiens
atgcacgcggcgagc

SEQ ID NO: 465587 - DNA, 15 bp, Homo sapiens
aatgcacgcggcgag

SEQ ID NO: 465588 - DNA, 15 bp, Homo sapiens
gaatgcacgcggcga

SEQ ID NO: 465589 - DNA, 15 bp, Homo sapiens
tgaatgcacgcggcg

SEQ ID NO: 465590 - DNA, 15 bp, Homo sapiens
ctgaatgcacgcggc

SEQ ID NO: 465591 - DNA, 15 bp, Homo sapiens
cctgaatgcacgcgg

SEQ ID NO: 465592 - DNA, 15 bp, Homo sapiens
gcctgaatgcacgcg

SEQ ID NO: 465593 - DNA, 15 bp, Homo sapiens
tgcctgaatgcacgc

SEQ ID NO: 465594 - DNA, 15 bp, Homo sapiens
gtgcctgaatgcacg

SEQ ID NO: 465595 - DNA, 15 bp, Homo sapiens
agtgcctgaatgcac

SEQ ID NO: 465596 - DNA, 15 bp, Homo sapiens
aagtgcctgaatgca

SEQ ID NO: 465597 - DNA, 15 bp, Homo sapiens
taagtgcctgaatgc

SEQ ID NO: 465598 - DNA, 15 bp, Homo sapiens
gtaagtgcctgaatg

SEQ ID NO: 465599 - DNA, 15 bp, Homo sapiens
ggtaagtgcctgaat

SEQ ID NO: 465600 - DNA, 15 bp, Homo sapiens
tggtaagtgcctgaa

SEQ ID NO: 465601 - DNA, 15 bp, Homo sapiens
ctggtaagtgcctga

SEQ ID NO: 465602 - DNA, 15 bp, Homo sapiens
cctggtaagtgcctg

SEQ ID NO: 465603 - DNA, 15 bp, Homo sapiens
acctggtaagtgcct

SEQ ID NO: 465604 - DNA, 15 bp, Homo sapiens
cacctggtaagtgcc

SEQ ID NO: 465605 - DNA, 15 bp, Homo sapiens
tcacctggtaagtgc

SEQ ID NO: 465606 - DNA, 15 bp, Homo sapiens
gtcacctggtaagtg

SEQ ID NO: 465607 - DNA, 15 bp, Homo sapiens
cgtcacctggtaagt

SEQ ID NO: 465608 - DNA, 15 bp, Homo sapiens
ccgtcacctggtaag

SEQ ID NO: 465609 - DNA, 15 bp, Homo sapiens
accgtcacctggtaa

SEQ ID NO: 465610 - DNA, 15 bp, Homo sapiens
caccgtcacctggta

SEQ ID NO: 465611 - DNA, 15 bp, Homo sapiens
gcaccgtcacctggt

SEQ ID NO: 465612 - DNA, 15 bp, Homo sapiens
cgcaccgtcacctgg

SEQ ID NO: 465613 - DNA, 15 bp, Homo sapiens
gcgcaccgtcacctg

SEQ ID NO: 465614 - DNA, 15 bp, Homo sapiens
tgcgcaccgtcacct

SEQ ID NO: 465615 - DNA, 15 bp, Homo sapiens
atgcgcaccgtcacc

SEQ ID NO: 465616 - DNA, 15 bp, Homo sapiens
aatgcgcaccgtcac

SEQ ID NO: 465617 - DNA, 15 bp, Homo sapiens
caatgcgcaccgtca

SEQ ID NO: 465618 - DNA, 15 bp, Homo sapiens
tcaatgcgcaccgtc

SEQ ID NO: 465619 - DNA, 15 bp, Homo sapiens
ctcaatgcgcaccgt

SEQ ID NO: 465620 - DNA, 15 bp, Homo sapiens
tctcaatgcgcaccg

SEQ ID NO: 465621 - DNA, 15 bp, Homo sapiens
ttctcaatgcgcacc

SEQ ID NO: 465622 - DNA, 15 bp, Homo sapiens
gttctcaatgcgcac

SEQ ID NO: 465623 - DNA, 15 bp, Homo sapiens
tgttctcaatgcgca

SEQ ID NO: 465624 - DNA, 15 bp, Homo sapiens
atgttctcaatgcgc

SEQ ID NO: 465625 - DNA, 15 bp, Homo sapiens
catgttctcaatgcg

SEQ ID NO: 465626 - DNA, 15 bp, Homo sapiens
ccatgttctcaatgc

SEQ ID NO: 465627 - DNA, 15 bp, Homo sapiens
tccatgttctcaatg

SEQ ID NO: 465628 - DNA, 15 bp, Homo sapiens
ctccatgttctcaat

SEQ ID NO: 465629 - DNA, 15 bp, Homo sapiens
cctccatgttctcaa

SEQ ID NO: 465630 - DNA, 15 bp, Homo sapiens
tcctccatgttctca

SEQ ID NO: 465631 - DNA, 15 bp, Homo sapiens
gtcctccatgttctc

SEQ ID NO: 465632 - DNA, 15 bp, Homo sapiens
tgtcctccatgttct

SEQ ID NO: 465633 - DNA, 15 bp, Homo sapiens
ttgtcctccatgttc

SEQ ID NO: 465634 - DNA, 15 bp, Homo sapiens
cttgtcctccatgtt

SEQ ID NO: 465635 - DNA, 15 bp, Homo sapiens
ccttgtcctccatgt

SEQ ID NO: 465636 - DNA, 15 bp, Homo sapiens
gccttgtcctccatg

SEQ ID NO: 465637 - DNA, 15 bp, Homo sapiens
ggccttgtcctccat

SEQ ID NO: 465638 - DNA, 15 bp, Homo sapiens
tggccttgtcctcca

SEQ ID NO: 465639 - DNA, 15 bp, Homo sapiens
gtggccttgtcctcc

SEQ ID NO: 465640 - DNA, 15 bp, Homo sapiens
cgtggccttgtcctc

SEQ ID NO: 465641 - DNA, 15 bp, Homo sapiens
gcgtggccttgtcct

SEQ ID NO: 465642 - DNA, 15 bp, Homo sapiens
agcgtggccttgtcc

SEQ ID NO: 465643 - DNA, 15 bp, Homo sapiens
cagcgtggccttgtc

SEQ ID NO: 465644 - DNA, 15 bp, Homo sapiens
ccagcgtggccttgt

SEQ ID NO: 465645 - DNA, 15 bp, Homo sapiens
accagcgtggccttg

SEQ ID NO: 465646 - DNA, 15 bp, Homo sapiens
caccagcgtggcctt

SEQ ID NO: 465647 - DNA, 15 bp, Homo sapiens
gcaccagcgtggcct

SEQ ID NO: 465648 - DNA, 15 bp, Homo sapiens
agcaccagcgtggcc

SEQ ID NO: 465649 - DNA, 15 bp, Homo sapiens
cagcaccagcgtggc

SEQ ID NO: 465650 - DNA, 15 bp, Homo sapiens
gcagcaccagcgtgg

SEQ ID NO: 465651 - DNA, 15 bp, Homo sapiens
tgcagcaccagcgtg

SEQ ID NO: 465652 - DNA, 15 bp, Homo sapiens
ctgcagcaccagcgt

SEQ ID NO: 465653 - DNA, 15 bp, Homo sapiens
cctgcagcaccagcg

SEQ ID NO: 465654 - DNA, 15 bp, Homo sapiens
acctgcagcaccagc

SEQ ID NO: 465655 - DNA, 15 bp, Homo sapiens
aacctgcagcaccag

SEQ ID NO: 465656 - DNA, 15 bp, Homo sapiens
caacctgcagcacca

SEQ ID NO: 465657 - DNA, 15 bp, Homo sapiens
acaacctgcagcacc

SEQ ID NO: 465658 - DNA, 15 bp, Homo sapiens
aacaacctgcagcac

SEQ ID NO: 465659 - DNA, 15 bp, Homo sapiens
caacaacctgcagca

SEQ ID NO: 465660 - DNA, 15 bp, Homo sapiens
ccaacaacctgcagc

SEQ ID NO: 465661 - DNA, 15 bp, Homo sapiens
accaacaacctgcag

SEQ ID NO: 465662 - DNA, 15 bp, Homo sapiens
caccaacaacctgca

SEQ ID NO: 465663 - DNA, 15 bp, Homo sapiens
gcaccaacaacctgc

SEQ ID NO: 465664 - DNA, 15 bp, Homo sapiens
cgcaccaacaacctg

SEQ ID NO: 465665 - DNA, 15 bp, Homo sapiens
acgcaccaacaacct

SEQ ID NO: 465666 - DNA, 15 bp, Homo sapiens
cacgcaccaacaacc

SEQ ID NO: 465667 - DNA, 15 bp, Homo sapiens
ccacgcaccaacaac

SEQ ID NO: 465668 - DNA, 15 bp, Homo sapiens
gccacgcaccaacaa

SEQ ID NO: 465669 - DNA, 15 bp, Homo sapiens
ggccacgcaccaaca

SEQ ID NO: 465670 - DNA, 15 bp, Homo sapiens
tggccacgcaccaac

SEQ ID NO: 465671 - DNA, 15 bp, Homo sapiens
ttggccacgcaccaa

SEQ ID NO: 465672 - DNA, 15 bp, Homo sapiens
cttggccacgcacca

SEQ ID NO: 465673 - DNA, 15 bp, Homo sapiens
ccttggccacgcacc

SEQ ID NO: 465674 - DNA, 15 bp, Homo sapiens
gccttggccacgcac

SEQ ID NO: 465675 - DNA, 15 bp, Homo sapiens
ggccttggccacgca

SEQ ID NO: 465676 - DNA, 15 bp, Homo sapiens
aggccttggccacgc

SEQ ID NO: 465677 - DNA, 15 bp, Homo sapiens
gaggccttggccacg

SEQ ID NO: 465678 - DNA, 15 bp, Homo sapiens
ggaggccttggccac

SEQ ID NO: 465679 - DNA, 15 bp, Homo sapiens
aggaggccttggcca

SEQ ID NO: 465680 - DNA, 15 bp, Homo sapiens
aaggaggccttggcc

SEQ ID NO: 465681 - DNA, 15 bp, Homo sapiens
caaggaggccttggc

SEQ ID NO: 465682 - DNA, 15 bp, Homo sapiens
tcaaggaggccttgg

SEQ ID NO: 465683 - DNA, 15 bp, Homo sapiens
ctcaaggaggccttg

SEQ ID NO: 465684 - DNA, 15 bp, Homo sapiens
gctcaaggaggcctt

SEQ ID NO: 465685 - DNA, 15 bp, Homo sapiens
ggctcaaggaggcct

SEQ ID NO: 465686 - DNA, 15 bp, Homo sapiens
gggctcaaggaggcc

SEQ ID NO: 465687 - DNA, 15 bp, Homo sapiens
ggggctcaaggaggc

SEQ ID NO: 465688 - DNA, 15 bp, Homo sapiens
gggggctcaaggagg

SEQ ID NO: 465689 - DNA, 15 bp, Homo sapiens
agggggctcaaggag

SEQ ID NO: 465690 - DNA, 15 bp, Homo sapiens
aagggggctcaagga

SEQ ID NO: 465691 - DNA, 15 bp, Homo sapiens
caagggggctcaagg

SEQ ID NO: 465692 - DNA, 15 bp, Homo sapiens
acaagggggctcaag

SEQ ID NO: 465693 - DNA, 15 bp, Homo sapiens
aacaagggggctcaa

SEQ ID NO: 465694 - DNA, 15 bp, Homo sapiens
aaacaagggggctca

SEQ ID NO: 465695 - DNA, 15 bp, Homo sapiens
gaaacaagggggctc

SEQ ID NO: 465696 - DNA, 15 bp, Homo sapiens
ggaaacaagggggct

SEQ ID NO: 465697 - DNA, 15 bp, Homo sapiens
gggaaacaagggggc

SEQ ID NO: 465698 - DNA, 15 bp, Homo sapiens
agggaaacaaggggg

SEQ ID NO: 465699 - DNA, 15 bp, Homo sapiens
aagggaaacaagggg

SEQ ID NO: 465700 - DNA, 15 bp, Homo sapiens
gaagggaaacaaggg

SEQ ID NO: 465701 - DNA, 15 bp, Homo sapiens
ggaagggaaacaagg

SEQ ID NO: 465702 - DNA, 15 bp, Homo sapiens
gggaagggaaacaag

SEQ ID NO: 465703 - DNA, 15 bp, Homo sapiens
agggaagggaaacaa

SEQ ID NO: 465704 - DNA, 15 bp, Homo sapiens
cagggaagggaaaca

SEQ ID NO: 465705 - DNA, 15 bp, Homo sapiens
ccagggaagggaaac

SEQ ID NO: 465706 - DNA, 15 bp, Homo sapiens
cccagggaagggaaa

SEQ ID NO: 465707 - DNA, 15 bp, Homo sapiens
gcccagggaagggaa

SEQ ID NO: 465708 - DNA, 15 bp, Homo sapiens
agcccagggaaggga

SEQ ID NO: 465709 - DNA, 15 bp, Homo sapiens
cagcccagggaaggg

SEQ ID NO: 465710 - DNA, 15 bp, Homo sapiens
ccagcccagggaagg

SEQ ID NO: 465711 - DNA, 15 bp, Homo sapiens
cccagcccagggaag

SEQ ID NO: 465712 - DNA, 15 bp, Homo sapiens
gcccagcccagggaa

SEQ ID NO: 465713 - DNA, 15 bp, Homo sapiens
agcccagcccaggga

SEQ ID NO: 465714 - DNA, 15 bp, Homo sapiens
cagcccagcccaggg

SEQ ID NO: 465715 - DNA, 15 bp, Homo sapiens
gcagcccagcccagg

SEQ ID NO: 465716 - DNA, 15 bp, Homo sapiens
agcagcccagcccag

SEQ ID NO: 465717 - DNA, 15 bp, Homo sapiens
cagcagcccagccca

SEQ ID NO: 465718 - DNA, 15 bp, Homo sapiens
ccagcagcccagccc

SEQ ID NO: 465719 - DNA, 15 bp, Homo sapiens
cccagcagcccagcc

SEQ ID NO: 465720 - DNA, 15 bp, Homo sapiens
ccccagcagcccagc

SEQ ID NO: 465721 - DNA, 15 bp, Homo sapiens
gccccagcagcccag

SEQ ID NO: 465722 - DNA, 15 bp, Homo sapiens
ggccccagcagccca

SEQ ID NO: 465723 - DNA, 15 bp, Homo sapiens
tggccccagcagccc

SEQ ID NO: 465724 - DNA, 15 bp, Homo sapiens
ttggccccagcagcc

SEQ ID NO: 465725 - DNA, 15 bp, Homo sapiens
cttggccccagcagc

SEQ ID NO: 465726 - DNA, 15 bp, Homo sapiens
ccttggccccagcag

SEQ ID NO: 465727 - DNA, 15 bp, Homo sapiens
cccttggccccagca

SEQ ID NO: 465728 - DNA, 15 bp, Homo sapiens
acccttggccccagc

SEQ ID NO: 465729 - DNA, 15 bp, Homo sapiens
cacccttggccccag

SEQ ID NO: 465730 - DNA, 15 bp, Homo sapiens
ccacccttggcccca

SEQ ID NO: 465731 - DNA, 15 bp, Homo sapiens
cccacccttggcccc

SEQ ID NO: 465732 - DNA, 15 bp, Homo sapiens
ccccacccttggccc

SEQ ID NO: 465733 - DNA, 15 bp, Homo sapiens
gccccacccttggcc

SEQ ID NO: 465734 - DNA, 15 bp, Homo sapiens
ggccccacccttggc

SEQ ID NO: 465735 - DNA, 15 bp, Homo sapiens
tggccccacccttgg

SEQ ID NO: 465736 - DNA, 15 bp, Homo sapiens
ctggccccacccttg

SEQ ID NO: 465737 - DNA, 15 bp, Homo sapiens
cctggccccaccctt

SEQ ID NO: 465738 - DNA, 15 bp, Homo sapiens
ccctggccccaccct

SEQ ID NO: 465739 - DNA, 15 bp, Homo sapiens
cccctggccccaccc

SEQ ID NO: 465740 - DNA, 15 bp, Homo sapiens
tcccctggccccacc

SEQ ID NO: 465741 - DNA, 15 bp, Homo sapiens
gtcccctggccccac

SEQ ID NO: 465742 - DNA, 15 bp, Homo sapiens
ggtcccctggcccca

SEQ ID NO: 465743 - DNA, 15 bp, Homo sapiens
gggtcccctggcccc

SEQ ID NO: 465744 - DNA, 15 bp, Homo sapiens
tgggtcccctggccc

SEQ ID NO: 465745 - DNA, 15 bp, Homo sapiens
ttgggtcccctggcc

SEQ ID NO: 465746 - DNA, 15 bp, Homo sapiens
gttgggtcccctggc

SEQ ID NO: 465747 - DNA, 15 bp, Homo sapiens
ggttgggtcccctgg

SEQ ID NO: 465748 - DNA, 15 bp, Homo sapiens
gggttgggtcccctg

SEQ ID NO: 465749 - DNA, 15 bp, Homo sapiens
tgggttgggtcccct

SEQ ID NO: 465750 - DNA, 15 bp, Homo sapiens
gtgggttgggtcccc

SEQ ID NO: 465751 - DNA, 15 bp, Homo sapiens
tgtgggttgggtccc

SEQ ID NO: 465752 - DNA, 15 bp, Homo sapiens
ctgtgggttgggtcc

SEQ ID NO: 465753 - DNA, 15 bp, Homo sapiens
gctgtgggttgggtc

SEQ ID NO: 465754 - DNA, 15 bp, Homo sapiens
agctgtgggttgggt

SEQ ID NO: 465755 - DNA, 15 bp, Homo sapiens
gagctgtgggttggg

SEQ ID NO: 465756 - DNA, 15 bp, Homo sapiens
tgagctgtgggttgg

SEQ ID NO: 465757 - DNA, 15 bp, Homo sapiens
gtgagctgtgggttg

SEQ ID NO: 465758 - DNA, 15 bp, Homo sapiens
tgtgagctgtgggtt

SEQ ID NO: 465759 - DNA, 15 bp, Homo sapiens
atgtgagctgtgggt

SEQ ID NO: 465760 - DNA, 15 bp, Homo sapiens
aatgtgagctgtggg

SEQ ID NO: 465761 - DNA, 15 bp, Homo sapiens
aaatgtgagctgtgg

SEQ ID NO: 465762 - DNA, 15 bp, Homo sapiens
aaaatgtgagctgtg

SEQ ID NO: 465763 - DNA, 15 bp, Homo sapiens
gaaaatgtgagctgt

SEQ ID NO: 465764 - DNA, 15 bp, Homo sapiens
ggaaaatgtgagctg

SEQ ID NO: 465765 - DNA, 15 bp, Homo sapiens
tggaaaatgtgagct

SEQ ID NO: 465766 - DNA, 15 bp, Homo sapiens
ctggaaaatgtgagc

SEQ ID NO: 465767 - DNA, 15 bp, Homo sapiens
actggaaaatgtgag

SEQ ID NO: 465768 - DNA, 15 bp, Homo sapiens
gactggaaaatgtga

SEQ ID NO: 465769 - DNA, 15 bp, Homo sapiens
ggactggaaaatgtg

SEQ ID NO: 465770 - DNA, 15 bp, Homo sapiens
tggactggaaaatgt

SEQ ID NO: 465771 - DNA, 15 bp, Homo sapiens
gtggactggaaaatg

SEQ ID NO: 465772 - DNA, 15 bp, Homo sapiens
agtggactggaaaat

SEQ ID NO: 465773 - DNA, 15 bp, Homo sapiens
cagtggactggaaaa

SEQ ID NO: 465774 - DNA, 15 bp, Homo sapiens
gcagtggactggaaa

SEQ ID NO: 465775 - DNA, 15 bp, Homo sapiens
ggcagtggactggaa

SEQ ID NO: 465776 - DNA, 15 bp, Homo sapiens
gggcagtggactgga

SEQ ID NO: 465777 - DNA, 15 bp, Homo sapiens
ggggcagtggactgg

SEQ ID NO: 465778 - DNA, 15 bp, Homo sapiens
tggggcagtggactg

SEQ ID NO: 465779 - DNA, 15 bp, Homo sapiens
ctggggcagtggact

SEQ ID NO: 465780 - DNA, 15 bp, Homo sapiens
gctggggcagtggac

SEQ ID NO: 465781 - DNA, 15 bp, Homo sapiens
tgctggggcagtgga

SEQ ID NO: 465782 - DNA, 15 bp, Homo sapiens
ctgctggggcagtgg

SEQ ID NO: 465783 - DNA, 15 bp, Homo sapiens
cctgctggggcagtg

SEQ ID NO: 465784 - DNA, 15 bp, Homo sapiens
gcctgctggggcagt

SEQ ID NO: 465785 - DNA, 15 bp, Homo sapiens
ggcctgctggggcag

SEQ ID NO: 465786 - DNA, 15 bp, Homo sapiens
aggcctgctggggca

SEQ ID NO: 465787 - DNA, 15 bp, Homo sapiens
caggcctgctggggc

SEQ ID NO: 465788 - DNA, 15 bp, Homo sapiens
ccaggcctgctgggg

SEQ ID NO: 465789 - DNA, 15 bp, Homo sapiens
gccaggcctgctggg

SEQ ID NO: 465790 - DNA, 15 bp, Homo sapiens
ggccaggcctgctgg

SEQ ID NO: 465791 - DNA, 15 bp, Homo sapiens
gggccaggcctgctg

SEQ ID NO: 465792 - DNA, 15 bp, Homo sapiens
agggccaggcctgct

SEQ ID NO: 465793 - DNA, 15 bp, Homo sapiens
cagggccaggcctgc

SEQ ID NO: 465794 - DNA, 15 bp, Homo sapiens
ccagggccaggcctg

SEQ ID NO: 465795 - DNA, 15 bp, Homo sapiens
accagggccaggcct

SEQ ID NO: 465796 - DNA, 15 bp, Homo sapiens
aaccagggccaggcc

SEQ ID NO: 465797 - DNA, 15 bp, Homo sapiens
caaccagggccaggc

SEQ ID NO: 465798 - DNA, 15 bp, Homo sapiens
ccaaccagggccagg

SEQ ID NO: 465799 - DNA, 15 bp, Homo sapiens
gccaaccagggccag

SEQ ID NO: 465800 - DNA, 15 bp, Homo sapiens
tgccaaccagggcca

SEQ ID NO: 465801 - DNA, 15 bp, Homo sapiens
ctgccaaccagggcc

SEQ ID NO: 465802 - DNA, 15 bp, Homo sapiens
cctgccaaccagggc

SEQ ID NO: 465803 - DNA, 15 bp, Homo sapiens
ccctgccaaccaggg

SEQ ID NO: 465804 - DNA, 15 bp, Homo sapiens
cccctgccaaccagg

SEQ ID NO: 465805 - DNA, 15 bp, Homo sapiens
acccctgccaaccag

SEQ ID NO: 465806 - DNA, 15 bp, Homo sapiens
cacccctgccaacca

SEQ ID NO: 465807 - DNA, 15 bp, Homo sapiens
ccacccctgccaacc

SEQ ID NO: 465808 - DNA, 15 bp, Homo sapiens
cccacccctgccaac

SEQ ID NO: 465809 - DNA, 15 bp, Homo sapiens
ccccacccctgccaa

SEQ ID NO: 465810 - DNA, 15 bp, Homo sapiens
accccacccctgcca

SEQ ID NO: 465811 - DNA, 15 bp, Homo sapiens
caccccacccctgcc

SEQ ID NO: 465812 - DNA, 15 bp, Homo sapiens
ccaccccacccctgc

SEQ ID NO: 465813 - DNA, 15 bp, Homo sapiens
accaccccacccctg

SEQ ID NO: 465814 - DNA, 15 bp, Homo sapiens
gaccaccccacccct

SEQ ID NO: 465815 - DNA, 15 bp, Homo sapiens
ggaccaccccacccc

SEQ ID NO: 465816 - DNA, 15 bp, Homo sapiens
gggaccaccccaccc

SEQ ID NO: 465817 - DNA, 15 bp, Homo sapiens
agggaccaccccacc

SEQ ID NO: 465818 - DNA, 15 bp, Homo sapiens
cagggaccaccccac

SEQ ID NO: 465819 - DNA, 15 bp, Homo sapiens
ccagggaccacccca

SEQ ID NO: 465820 - DNA, 15 bp, Homo sapiens
tccagggaccacccc

SEQ ID NO: 465821 - DNA, 15 bp, Homo sapiens
ctccagggaccaccc

SEQ ID NO: 465822 - DNA, 15 bp, Homo sapiens
gctccagggaccacc

SEQ ID NO: 465823 - DNA, 15 bp, Homo sapiens
ggctccagggaccac

SEQ ID NO: 465824 - DNA, 15 bp, Homo sapiens
tggctccagggacca

SEQ ID NO: 465825 - DNA, 15 bp, Homo sapiens
ctggctccagggacc

SEQ ID NO: 465826 - DNA, 15 bp, Homo sapiens
actggctccagggac

SEQ ID NO: 465827 - DNA, 15 bp, Homo sapiens
cactggctccaggga

SEQ ID NO: 465828 - DNA, 15 bp, Homo sapiens
tcactggctccaggg

SEQ ID NO: 465829 - DNA, 15 bp, Homo sapiens
gtcactggctccagg

SEQ ID NO: 465830 - DNA, 15 bp, Homo sapiens
ggtcactggctccag

SEQ ID NO: 465831 - DNA, 15 bp, Homo sapiens
gggtcactggctcca

SEQ ID NO: 465832 - DNA, 15 bp, Homo sapiens
ggggtcactggctcc

SEQ ID NO: 465833 - DNA, 15 bp, Homo sapiens
gggggtcactggctc

SEQ ID NO: 465834 - DNA, 15 bp, Homo sapiens
agggggtcactggct

SEQ ID NO: 465835 - DNA, 15 bp, Homo sapiens
cagggggtcactggc

SEQ ID NO: 465836 - DNA, 15 bp, Homo sapiens
gcagggggtcactgg

SEQ ID NO: 465837 - DNA, 15 bp, Homo sapiens
agcagggggtcactg

SEQ ID NO: 465838 - DNA, 15 bp, Homo sapiens
gagcagggggtcact

SEQ ID NO: 465839 - DNA, 15 bp, Homo sapiens
tgagcagggggtcac

SEQ ID NO: 465840 - DNA, 15 bp, Homo sapiens
gtgagcagggggtca

SEQ ID NO: 465841 - DNA, 15 bp, Homo sapiens
agtgagcagggggtc

SEQ ID NO: 465842 - DNA, 15 bp, Homo sapiens
cagtgagcagggggt

SEQ ID NO: 465843 - DNA, 15 bp, Homo sapiens
acagtgagcaggggg

SEQ ID NO: 465844 - DNA, 15 bp, Homo sapiens
gacagtgagcagggg

SEQ ID NO: 465845 - DNA, 15 bp, Homo sapiens
tgacagtgagcaggg

SEQ ID NO: 465846 - DNA, 15 bp, Homo sapiens
ctgacagtgagcagg

SEQ ID NO: 465847 - DNA, 15 bp, Homo sapiens
cctgacagtgagcag

SEQ ID NO: 465848 - DNA, 15 bp, Homo sapiens
tcctgacagtgagca

SEQ ID NO: 465849 - DNA, 15 bp, Homo sapiens
ctcctgacagtgagc

SEQ ID NO: 465850 - DNA, 15 bp, Homo sapiens
cctcctgacagtgag

SEQ ID NO: 465851 - DNA, 15 bp, Homo sapiens
gcctcctgacagtga

SEQ ID NO: 465852 - DNA, 15 bp, Homo sapiens
cgcctcctgacagtg

SEQ ID NO: 465853 - DNA, 15 bp, Homo sapiens
acgcctcctgacagt

SEQ ID NO: 465854 - DNA, 15 bp, Homo sapiens
cacgcctcctgacag

SEQ ID NO: 465855 - DNA, 15 bp, Homo sapiens
ccacgcctcctgaca

SEQ ID NO: 465856 - DNA, 15 bp, Homo sapiens
accacgcctcctgac

SEQ ID NO: 465857 - DNA, 15 bp, Homo sapiens
caccacgcctcctga

SEQ ID NO: 465858 - DNA, 15 bp, Homo sapiens
tcaccacgcctcctg

SEQ ID NO: 465859 - DNA, 15 bp, Homo sapiens
gtcaccacgcctcct

SEQ ID NO: 465860 - DNA, 15 bp, Homo sapiens
ggtcaccacgcctcc

SEQ ID NO: 465861 - DNA, 15 bp, Homo sapiens
gggtcaccacgcctc

SEQ ID NO: 465862 - DNA, 15 bp, Homo sapiens
tgggtcaccacgcct

SEQ ID NO: 465863 - DNA, 15 bp, Homo sapiens
ttgggtcaccacgcc

SEQ ID NO: 465864 - DNA, 15 bp, Homo sapiens
gttgggtcaccacgc

SEQ ID NO: 465865 - DNA, 15 bp, Homo sapiens
agttgggtcaccacg

SEQ ID NO: 465866 - DNA, 15 bp, Homo sapiens
cagttgggtcaccac

SEQ ID NO: 465867 - DNA, 15 bp, Homo sapiens
ccagttgggtcacca

SEQ ID NO: 465868 - DNA, 15 bp, Homo sapiens
cccagttgggtcacc

SEQ ID NO: 465869 - DNA, 15 bp, Homo sapiens
acccagttgggtcac

SEQ ID NO: 465870 - DNA, 15 bp, Homo sapiens
gacccagttgggtca

SEQ ID NO: 465871 - DNA, 15 bp, Homo sapiens
agacccagttgggtc

SEQ ID NO: 465872 - DNA, 15 bp, Homo sapiens
cagacccagttgggt

SEQ ID NO: 465873 - DNA, 15 bp, Homo sapiens
acagacccagttggg

SEQ ID NO: 465874 - DNA, 15 bp, Homo sapiens
gacagacccagttgg

SEQ ID NO: 465875 - DNA, 15 bp, Homo sapiens
agacagacccagttg

SEQ ID NO: 465876 - DNA, 15 bp, Homo sapiens
gagacagacccagtt

SEQ ID NO: 465877 - DNA, 15 bp, Homo sapiens
ggagacagacccagt

SEQ ID NO: 465878 - DNA, 15 bp, Homo sapiens
gggagacagacccag

SEQ ID NO: 465879 - DNA, 15 bp, Homo sapiens
cgggagacagaccca

SEQ ID NO: 465880 - DNA, 15 bp, Homo sapiens
gcgggagacagaccc

SEQ ID NO: 465881 - DNA, 15 bp, Homo sapiens
tgcgggagacagacc

SEQ ID NO: 465882 - DNA, 15 bp, Homo sapiens
ctgcgggagacagac

SEQ ID NO: 465883 - DNA, 15 bp, Homo sapiens
tctgcgggagacaga

SEQ ID NO: 465884 - DNA, 15 bp, Homo sapiens
gtctgcgggagacag

SEQ ID NO: 465885 - DNA, 15 bp, Homo sapiens
tgtctgcgggagaca

SEQ ID NO: 465886 - DNA, 15 bp, Homo sapiens
ttgtctgcgggagac

SEQ ID NO: 465887 - DNA, 15 bp, Homo sapiens
cttgtctgcgggaga

SEQ ID NO: 465888 - DNA, 15 bp, Homo sapiens
gcttgtctgcgggag

SEQ ID NO: 465889 - DNA, 15 bp, Homo sapiens
ggcttgtctgcggga

SEQ ID NO: 465890 - DNA, 15 bp, Homo sapiens
tggcttgtctgcggg

SEQ ID NO: 465891 - DNA, 15 bp, Homo sapiens
ttggcttgtctgcgg

SEQ ID NO: 465892 - DNA, 15 bp, Homo sapiens
cttggcttgtctgcg

SEQ ID NO: 465893 - DNA, 15 bp, Homo sapiens
acttggcttgtctgc

SEQ ID NO: 465894 - DNA, 15 bp, Homo sapiens
gacttggcttgtctg

SEQ ID NO: 465895 - DNA, 15 bp, Homo sapiens
ggacttggcttgtct

SEQ ID NO: 465896 - DNA, 15 bp, Homo sapiens
aggacttggcttgtc

SEQ ID NO: 465897 - DNA, 15 bp, Homo sapiens
gaggacttggcttgt

SEQ ID NO: 465898 - DNA, 15 bp, Homo sapiens
ggaggacttggcttg

SEQ ID NO: 465899 - DNA, 15 bp, Homo sapiens
gggaggacttggctt

SEQ ID NO: 465900 - DNA, 15 bp, Homo sapiens
ggggaggacttggct

SEQ ID NO: 465901 - DNA, 15 bp, Homo sapiens
tggggaggacttggc

SEQ ID NO: 465902 - DNA, 15 bp, Homo sapiens
ctggggaggacttgg

SEQ ID NO: 465903 - DNA, 15 bp, Homo sapiens
cctggggaggacttg

SEQ ID NO: 465904 - DNA, 15 bp, Homo sapiens
tcctggggaggactt

SEQ ID NO: 465905 - DNA, 15 bp, Homo sapiens
atcctggggaggact

SEQ ID NO: 465906 - DNA, 15 bp, Homo sapiens
gatcctggggaggac

SEQ ID NO: 465907 - DNA, 15 bp, Homo sapiens
agatcctggggagga

SEQ ID NO: 465908 - DNA, 15 bp, Homo sapiens
gagatcctggggagg

SEQ ID NO: 465909 - DNA, 15 bp, Homo sapiens
ggagatcctggggag

SEQ ID NO: 465910 - DNA, 15 bp, Homo sapiens
cggagatcctgggga

SEQ ID NO: 465911 - DNA, 15 bp, Homo sapiens
ccggagatcctgggg

SEQ ID NO: 465912 - DNA, 15 bp, Homo sapiens
cccggagatcctggg

SEQ ID NO: 465913 - DNA, 15 bp, Homo sapiens
acccggagatcctgg

SEQ ID NO: 465914 - DNA, 15 bp, Homo sapiens
cacccggagatcctg

SEQ ID NO: 465915 - DNA, 15 bp, Homo sapiens
tcacccggagatcct

SEQ ID NO: 465916 - DNA, 15 bp, Homo sapiens
gtcacccggagatcc

SEQ ID NO: 465917 - DNA, 15 bp, Homo sapiens
agtcacccggagatc

SEQ ID NO: 465918 - DNA, 15 bp, Homo sapiens
cagtcacccggagat

SEQ ID NO: 465919 - DNA, 15 bp, Homo sapiens
tcagtcacccggaga

SEQ ID NO: 465920 - DNA, 15 bp, Homo sapiens
gtcagtcacccggag

SEQ ID NO: 465921 - DNA, 15 bp, Homo sapiens
cgtcagtcacccgga

SEQ ID NO: 465922 - DNA, 15 bp, Homo sapiens
gcgtcagtcacccgg

SEQ ID NO: 465923 - DNA, 15 bp, Homo sapiens
ggcgtcagtcacccg

SEQ ID NO: 465924 - DNA, 15 bp, Homo sapiens
aggcgtcagtcaccc

SEQ ID NO: 465925 - DNA, 15 bp, Homo sapiens
caggcgtcagtcacc

SEQ ID NO: 465926 - DNA, 15 bp, Homo sapiens
ccaggcgtcagtcac

SEQ ID NO: 465927 - DNA, 15 bp, Homo sapiens
cccaggcgtcagtca

SEQ ID NO: 465928 - DNA, 15 bp, Homo sapiens
ccccaggcgtcagtc

SEQ ID NO: 465929 - DNA, 15 bp, Homo sapiens
accccaggcgtcagt

SEQ ID NO: 465930 - DNA, 15 bp, Homo sapiens
gaccccaggcgtcag

SEQ ID NO: 465931 - DNA, 15 bp, Homo sapiens
agaccccaggcgtca

SEQ ID NO: 465932 - DNA, 15 bp, Homo sapiens
aagaccccaggcgtc

SEQ ID NO: 465933 - DNA, 15 bp, Homo sapiens
taagaccccaggcgt

SEQ ID NO: 465934 - DNA, 15 bp, Homo sapiens
ttaagaccccaggcg

SEQ ID NO: 465935 - DNA, 15 bp, Homo sapiens
attaagaccccaggc

SEQ ID NO: 465936 - DNA, 15 bp, Homo sapiens
cattaagaccccagg

SEQ ID NO: 465937 - DNA, 15 bp, Homo sapiens
acattaagaccccag

SEQ ID NO: 465938 - DNA, 15 bp, Homo sapiens
cacattaagacccca

SEQ ID NO: 465939 - DNA, 15 bp, Homo sapiens
ccacattaagacccc

SEQ ID NO: 465940 - DNA, 15 bp, Homo sapiens
gccacattaagaccc

SEQ ID NO: 465941 - DNA, 15 bp, Homo sapiens
agccacattaagacc

SEQ ID NO: 465942 - DNA, 15 bp, Homo sapiens
gagccacattaagac

SEQ ID NO: 465943 - DNA, 15 bp, Homo sapiens
agagccacattaaga

SEQ ID NO: 465944 - DNA, 15 bp, Homo sapiens
cagagccacattaag

SEQ ID NO: 465945 - DNA, 15 bp, Homo sapiens
ccagagccacattaa

SEQ ID NO: 465946 - DNA, 15 bp, Homo sapiens
tccagagccacatta

SEQ ID NO: 465947 - DNA, 15 bp, Homo sapiens
ctccagagccacatt

SEQ ID NO: 465948 - DNA, 15 bp, Homo sapiens
actccagagccacat

SEQ ID NO: 465949 - DNA, 15 bp, Homo sapiens
cactccagagccaca

SEQ ID NO: 465950 - DNA, 15 bp, Homo sapiens
ccactccagagccac

SEQ ID NO: 465951 - DNA, 15 bp, Homo sapiens
tccactccagagcca

SEQ ID NO: 465952 - DNA, 15 bp, Homo sapiens
ttccactccagagcc

SEQ ID NO: 465953 - DNA, 15 bp, Homo sapiens
cttccactccagagc

SEQ ID NO: 465954 - DNA, 15 bp, Homo sapiens
gcttccactccagag

SEQ ID NO: 465955 - DNA, 15 bp, Homo sapiens
ggcttccactccaga

SEQ ID NO: 465956 - DNA, 15 bp, Homo sapiens
tggcttccactccag

SEQ ID NO: 465957 - DNA, 15 bp, Homo sapiens
gtggcttccactcca

SEQ ID NO: 465958 - DNA, 15 bp, Homo sapiens
ggtggcttccactcc

SEQ ID NO: 465959 - DNA, 15 bp, Homo sapiens
gggtggcttccactc

SEQ ID NO: 465960 - DNA, 15 bp, Homo sapiens
ggggtggcttccact

SEQ ID NO: 465961 - DNA, 15 bp, Homo sapiens
tggggtggcttccac

SEQ ID NO: 465962 - DNA, 15 bp, Homo sapiens
ctggggtggcttcca

SEQ ID NO: 465963 - DNA, 15 bp, Homo sapiens
cctggggtggcttcc

SEQ ID NO: 465964 - DNA, 15 bp, Homo sapiens
tcctggggtggcttc

SEQ ID NO: 465965 - DNA, 15 bp, Homo sapiens
atcctggggtggctt

SEQ ID NO: 465966 - DNA, 15 bp, Homo sapiens
catcctggggtggct

SEQ ID NO: 465967 - DNA, 15 bp, Homo sapiens
acatcctggggtggc

SEQ ID NO: 465968 - DNA, 15 bp, Homo sapiens
gacatcctggggtgg

SEQ ID NO: 465969 - DNA, 15 bp, Homo sapiens
cgacatcctggggtg

SEQ ID NO: 465970 - DNA, 15 bp, Homo sapiens
ccgacatcctggggt

SEQ ID NO: 465971 - DNA, 15 bp, Homo sapiens
gccgacatcctgggg

SEQ ID NO: 465972 - DNA, 15 bp, Homo sapiens
tgccgacatcctggg

SEQ ID NO: 465973 - DNA, 15 bp, Homo sapiens
ttgccgacatcctgg

SEQ ID NO: 465974 - DNA, 15 bp, Homo sapiens
gttgccgacatcctg

SEQ ID NO: 465975 - DNA, 15 bp, Homo sapiens
tgttgccgacatcct

SEQ ID NO: 465976 - DNA, 15 bp, Homo sapiens
gtgttgccgacatcc

SEQ ID NO: 465977 - DNA, 15 bp, Homo sapiens
cgtgttgccgacatc

SEQ ID NO: 465978 - DNA, 15 bp, Homo sapiens
ccgtgttgccgacat

SEQ ID NO: 465979 - DNA, 15 bp, Homo sapiens
tccgtgttgccgaca

SEQ ID NO: 465980 - DNA, 15 bp, Homo sapiens
ctccgtgttgccgac

SEQ ID NO: 465981 - DNA, 15 bp, Homo sapiens
gctccgtgttgccga

SEQ ID NO: 465982 - DNA, 15 bp, Homo sapiens
agctccgtgttgccg

SEQ ID NO: 465983 - DNA, 15 bp, Homo sapiens
gagctccgtgttgcc

SEQ ID NO: 465984 - DNA, 15 bp, Homo sapiens
agagctccgtgttgc

SEQ ID NO: 465985 - DNA, 15 bp, Homo sapiens
cagagctccgtgttg

SEQ ID NO: 465986 - DNA, 15 bp, Homo sapiens
ccagagctccgtgtt

SEQ ID NO: 465987 - DNA, 15 bp, Homo sapiens
cccagagctccgtgt

SEQ ID NO: 465988 - DNA, 15 bp, Homo sapiens
ccccagagctccgtg

SEQ ID NO: 465989 - DNA, 15 bp, Homo sapiens
cccccagagctccgt

SEQ ID NO: 465990 - DNA, 15 bp, Homo sapiens
acccccagagctccg

SEQ ID NO: 465991 - DNA, 15 bp, Homo sapiens
tacccccagagctcc

SEQ ID NO: 465992 - DNA, 15 bp, Homo sapiens
gtacccccagagctc

SEQ ID NO: 465993 - DNA, 15 bp, Homo sapiens
tgtacccccagagct

SEQ ID NO: 465994 - DNA, 15 bp, Homo sapiens
gtgtacccccagagc

SEQ ID NO: 465995 - DNA, 15 bp, Homo sapiens
tgtgtacccccagag

SEQ ID NO: 465996 - DNA, 15 bp, Homo sapiens
ctgtgtacccccaga

SEQ ID NO: 465997 - DNA, 15 bp, Homo sapiens
actgtgtacccccag

SEQ ID NO: 465998 - DNA, 15 bp, Homo sapiens
cactgtgtaccccca

SEQ ID NO: 465999 - DNA, 15 bp, Homo sapiens
gcactgtgtaccccc

SEQ ID NO: 466000 - DNA, 15 bp, Homo sapiens
tgcactgtgtacccc

SEQ ID NO: 466001 - DNA, 15 bp, Homo sapiens
ctgcactgtgtaccc

SEQ ID NO: 466002 - DNA, 15 bp, Homo sapiens
tctgcactgtgtacc

SEQ ID NO: 466003 - DNA, 15 bp, Homo sapiens
ttctgcactgtgtac

SEQ ID NO: 466004 - DNA, 15 bp, Homo sapiens
tttctgcactgtgta

SEQ ID NO: 466005 - DNA, 15 bp, Homo sapiens
ctttctgcactgtgt

SEQ ID NO: 466006 - DNA, 15 bp, Homo sapiens
gctttctgcactgtg

SEQ ID NO: 466007 - DNA, 15 bp, Homo sapiens
ggctttctgcactgt

SEQ ID NO: 466008 - DNA, 15 bp, Homo sapiens
cggctttctgcactg

SEQ ID NO: 466009 - DNA, 15 bp, Homo sapiens
tcggctttctgcact

SEQ ID NO: 466010 - DNA, 15 bp, Homo sapiens
gtcggctttctgcac

SEQ ID NO: 466011 - DNA, 15 bp, Homo sapiens
tgtcggctttctgca

SEQ ID NO: 466012 - DNA, 15 bp, Homo sapiens
ttgtcggctttctgc

SEQ ID NO: 466013 - DNA, 15 bp, Homo sapiens
cttgtcggctttctg

SEQ ID NO: 466014 - DNA, 15 bp, Homo sapiens
tcttgtcggctttct

SEQ ID NO: 466015 - DNA, 15 bp, Homo sapiens
ttcttgtcggctttc

SEQ ID NO: 466016 - DNA, 15 bp, Homo sapiens
cttcttgtcggcttt

SEQ ID NO: 466017 - DNA, 15 bp, Homo sapiens
tcttcttgtcggctt

SEQ ID NO: 466018 - DNA, 15 bp, Homo sapiens
gtcttcttgtcggct

SEQ ID NO: 466019 - DNA, 15 bp, Homo sapiens
ggtcttcttgtcggc

SEQ ID NO: 466020 - DNA, 15 bp, Homo sapiens
tggtcttcttgtcgg

SEQ ID NO: 466021 - DNA, 15 bp, Homo sapiens
atggtcttcttgtcg

SEQ ID NO: 466022 - DNA, 15 bp, Homo sapiens
catggtcttcttgtc

SEQ ID NO: 466023 - DNA, 15 bp, Homo sapiens
ccatggtcttcttgt

SEQ ID NO: 466024 - DNA, 15 bp, Homo sapiens
accatggtcttcttg

SEQ ID NO: 466025 - DNA, 15 bp, Homo sapiens
caccatggtcttctt

SEQ ID NO: 466026 - DNA, 15 bp, Homo sapiens
tcaccatggtcttct

SEQ ID NO: 466027 - DNA, 15 bp, Homo sapiens
ctcaccatggtcttc

SEQ ID NO: 466028 - DNA, 15 bp, Homo sapiens
gctcaccatggtctt

SEQ ID NO: 466029 - DNA, 15 bp, Homo sapiens
ggctcaccatggtct

SEQ ID NO: 466030 - DNA, 15 bp, Homo sapiens
gggctcaccatggtc

SEQ ID NO: 466031 - DNA, 15 bp, Homo sapiens
tgggctcaccatggt

SEQ ID NO: 466032 - DNA, 15 bp, Homo sapiens
ctgggctcaccatgg

SEQ ID NO: 466033 - DNA, 15 bp, Homo sapiens
cctgggctcaccatg

SEQ ID NO: 466034 - DNA, 15 bp, Homo sapiens
ccctgggctcaccat

SEQ ID NO: 466035 - DNA, 15 bp, Homo sapiens
accctgggctcacca

SEQ ID NO: 466036 - DNA, 15 bp, Homo sapiens
gaccctgggctcacc

SEQ ID NO: 466037 - DNA, 15 bp, Homo sapiens
agaccctgggctcac

SEQ ID NO: 466038 - DNA, 15 bp, Homo sapiens
cagaccctgggctca

SEQ ID NO: 466039 - DNA, 15 bp, Homo sapiens
ccagaccctgggctc

SEQ ID NO: 466040 - DNA, 15 bp, Homo sapiens
cccagaccctgggct

SEQ ID NO: 466041 - DNA, 15 bp, Homo sapiens
ccccagaccctgggc

SEQ ID NO: 466042 - DNA, 15 bp, Homo sapiens
accccagaccctggg

SEQ ID NO: 466043 - DNA, 15 bp, Homo sapiens
gaccccagaccctgg

SEQ ID NO: 466044 - DNA, 15 bp, Homo sapiens
ggaccccagaccctg

SEQ ID NO: 466045 - DNA, 15 bp, Homo sapiens
gggaccccagaccct

SEQ ID NO: 466046 - DNA, 15 bp, Homo sapiens
ggggaccccagaccc

SEQ ID NO: 466047 - DNA, 15 bp, Homo sapiens
tggggaccccagacc

SEQ ID NO: 466048 - DNA, 15 bp, Homo sapiens
gtggggaccccagac

SEQ ID NO: 466049 - DNA, 15 bp, Homo sapiens
cgtggggaccccaga

SEQ ID NO: 466050 - DNA, 15 bp, Homo sapiens
acgtggggaccccag

SEQ ID NO: 466051 - DNA, 15 bp, Homo sapiens
cacgtggggacccca

SEQ ID NO: 466052 - DNA, 15 bp, Homo sapiens
gcacgtggggacccc

SEQ ID NO: 466053 - DNA, 15 bp, Homo sapiens
tgcacgtggggaccc

SEQ ID NO: 466054 - DNA, 15 bp, Homo sapiens
gtgcacgtggggacc

SEQ ID NO: 466055 - DNA, 15 bp, Homo sapiens
ggtgcacgtggggac

SEQ ID NO: 466056 - DNA, 15 bp, Homo sapiens
gggtgcacgtgggga

SEQ ID NO: 466057 - DNA, 15 bp, Homo sapiens
agggtgcacgtgggg

SEQ ID NO: 466058 - DNA, 15 bp, Homo sapiens
cagggtgcacgtggg

SEQ ID NO: 466059 - DNA, 15 bp, Homo sapiens
gcagggtgcacgtgg

SEQ ID NO: 466060 - DNA, 15 bp, Homo sapiens
ggcagggtgcacgtg

SEQ ID NO: 466061 - DNA, 15 bp, Homo sapiens
aggcagggtgcacgt

SEQ ID NO: 466062 - DNA, 15 bp, Homo sapiens
taggcagggtgcacg

SEQ ID NO: 466063 - DNA, 15 bp, Homo sapiens
ctaggcagggtgcac

SEQ ID NO: 466064 - DNA, 15 bp, Homo sapiens
cctaggcagggtgca

SEQ ID NO: 466065 - DNA, 15 bp, Homo sapiens
gcctaggcagggtgc

SEQ ID NO: 466066 - DNA, 15 bp, Homo sapiens
ggcctaggcagggtg

SEQ ID NO: 466067 - DNA, 15 bp, Homo sapiens
gggcctaggcagggt

SEQ ID NO: 466068 - DNA, 15 bp, Homo sapiens
cgggcctaggcaggg

SEQ ID NO: 466069 - DNA, 15 bp, Homo sapiens
ccgggcctaggcagg

SEQ ID NO: 466070 - DNA, 15 bp, Homo sapiens
gccgggcctaggcag

SEQ ID NO: 466071 - DNA, 15 bp, Homo sapiens
tgccgggcctaggca

SEQ ID NO: 466072 - DNA, 15 bp, Homo sapiens
ctgccgggcctaggc

SEQ ID NO: 466073 - DNA, 15 bp, Homo sapiens
tctgccgggcctagg

SEQ ID NO: 466074 - DNA, 15 bp, Homo sapiens
gtctgccgggcctag

SEQ ID NO: 466075 - DNA, 15 bp, Homo sapiens
ggtctgccgggccta

SEQ ID NO: 466076 - DNA, 15 bp, Homo sapiens
gggtctgccgggcct

SEQ ID NO: 466077 - DNA, 15 bp, Homo sapiens
tgggtctgccgggcc

SEQ ID NO: 466078 - DNA, 15 bp, Homo sapiens
ctgggtctgccgggc

SEQ ID NO: 466079 - DNA, 15 bp, Homo sapiens
cctgggtctgccggg

SEQ ID NO: 466080 - DNA, 15 bp, Homo sapiens
gcctgggtctgccgg

SEQ ID NO: 466081 - DNA, 15 bp, Homo sapiens
ggcctgggtctgccg

SEQ ID NO: 466082 - DNA, 15 bp, Homo sapiens
cggcctgggtctgcc

SEQ ID NO: 466083 - DNA, 15 bp, Homo sapiens
gcggcctgggtctgc

SEQ ID NO: 466084 - DNA, 15 bp, Homo sapiens
tgcggcctgggtctg

SEQ ID NO: 466085 - DNA, 15 bp, Homo sapiens
ctgcggcctgggtct

SEQ ID NO: 466086 - DNA, 15 bp, Homo sapiens
gctgcggcctgggtc

SEQ ID NO: 466087 - DNA, 15 bp, Homo sapiens
agctgcggcctgggt

SEQ ID NO: 466088 - DNA, 15 bp, Homo sapiens
tagctgcggcctggg

SEQ ID NO: 466089 - DNA, 15 bp, Homo sapiens
gtagctgcggcctgg

SEQ ID NO: 466090 - DNA, 15 bp, Homo sapiens
ggtagctgcggcctg

SEQ ID NO: 466091 - DNA, 15 bp, Homo sapiens
gggtagctgcggcct

SEQ ID NO: 466092 - DNA, 15 bp, Homo sapiens
agggtagctgcggcc

SEQ ID NO: 466093 - DNA, 15 bp, Homo sapiens
aagggtagctgcggc

SEQ ID NO: 466094 - DNA, 15 bp, Homo sapiens
gaagggtagctgcgg

SEQ ID NO: 466095 - DNA, 15 bp, Homo sapiens
tgaagggtagctgcg

SEQ ID NO: 466096 - DNA, 15 bp, Homo sapiens
gtgaagggtagctgc

SEQ ID NO: 466097 - DNA, 15 bp, Homo sapiens
agtgaagggtagctg

SEQ ID NO: 466098 - DNA, 15 bp, Homo sapiens
cagtgaagggtagct

SEQ ID NO: 466099 - DNA, 15 bp, Homo sapiens
acagtgaagggtagc

SEQ ID NO: 466100 - DNA, 15 bp, Homo sapiens
gacagtgaagggtag

SEQ ID NO: 466101 - DNA, 15 bp, Homo sapiens
ggacagtgaagggta

SEQ ID NO: 466102 - DNA, 15 bp, Homo sapiens
aggacagtgaagggt

SEQ ID NO: 466103 - DNA, 15 bp, Homo sapiens
gaggacagtgaaggg

SEQ ID NO: 466104 - DNA, 15 bp, Homo sapiens
tgaggacagtgaagg

SEQ ID NO: 466105 - DNA, 15 bp, Homo sapiens
gtgaggacagtgaag

SEQ ID NO: 466106 - DNA, 15 bp, Homo sapiens
ggtgaggacagtgaa

SEQ ID NO: 466107 - DNA, 15 bp, Homo sapiens
cggtgaggacagtga

SEQ ID NO: 466108 - DNA, 15 bp, Homo sapiens
acggtgaggacagtg

SEQ ID NO: 466109 - DNA, 15 bp, Homo sapiens
cacggtgaggacagt

SEQ ID NO: 466110 - DNA, 15 bp, Homo sapiens
ccacggtgaggacag

SEQ ID NO: 466111 - DNA, 15 bp, Homo sapiens
tccacggtgaggaca

SEQ ID NO: 466112 - DNA, 15 bp, Homo sapiens
gtccacggtgaggac

SEQ ID NO: 466113 - DNA, 15 bp, Homo sapiens
ggtccacggtgagga

SEQ ID NO: 466114 - DNA, 15 bp, Homo sapiens
gggtccacggtgagg

SEQ ID NO: 466115 - DNA, 15 bp, Homo sapiens
ggggtccacggtgag

SEQ ID NO: 466116 - DNA, 15 bp, Homo sapiens
aggggtccacggtga

SEQ ID NO: 466117 - DNA, 15 bp, Homo sapiens
gaggggtccacggtg

SEQ ID NO: 466118 - DNA, 15 bp, Homo sapiens
tgaggggtccacggt

SEQ ID NO: 466119 - DNA, 15 bp, Homo sapiens
gtgaggggtccacgg

SEQ ID NO: 466120 - DNA, 15 bp, Homo sapiens
ggtgaggggtccacg

SEQ ID NO: 466121 - DNA, 15 bp, Homo sapiens
gggtgaggggtccac

SEQ ID NO: 466122 - DNA, 15 bp, Homo sapiens
agggtgaggggtcca

SEQ ID NO: 466123 - DNA, 15 bp, Homo sapiens
gagggtgaggggtcc

SEQ ID NO: 466124 - DNA, 15 bp, Homo sapiens
ggagggtgaggggtc

SEQ ID NO: 466125 - DNA, 15 bp, Homo sapiens
gggagggtgaggggt

SEQ ID NO: 466126 - DNA, 15 bp, Homo sapiens
agggagggtgagggg

SEQ ID NO: 466127 - DNA, 15 bp, Homo sapiens
gagggagggtgaggg

SEQ ID NO: 466128 - DNA, 15 bp, Homo sapiens
agagggagggtgagg

SEQ ID NO: 466129 - DNA, 15 bp, Homo sapiens
cagagggagggtgag

SEQ ID NO: 466130 - DNA, 15 bp, Homo sapiens
gcagagggagggtga

SEQ ID NO: 466131 - DNA, 15 bp, Homo sapiens
agcagagggagggtg

SEQ ID NO: 466132 - DNA, 15 bp, Homo sapiens
cagcagagggagggt

SEQ ID NO: 466133 - DNA, 15 bp, Homo sapiens
tcagcagagggaggg

SEQ ID NO: 466134 - DNA, 15 bp, Homo sapiens
atcagcagagggagg

SEQ ID NO: 466135 - DNA, 15 bp, Homo sapiens
gatcagcagagggag

SEQ ID NO: 466136 - DNA, 15 bp, Homo sapiens
agatcagcagaggga

SEQ ID NO: 466137 - DNA, 15 bp, Homo sapiens
cagatcagcagaggg

SEQ ID NO: 466138 - DNA, 15 bp, Homo sapiens
tcagatcagcagagg

SEQ ID NO: 466139 - DNA, 15 bp, Homo sapiens
ttcagatcagcagag

SEQ ID NO: 466140 - DNA, 15 bp, Homo sapiens
attcagatcagcaga

SEQ ID NO: 466141 - DNA, 15 bp, Homo sapiens
gattcagatcagcag

SEQ ID NO: 466142 - DNA, 15 bp, Homo sapiens
ggattcagatcagca

SEQ ID NO: 466143 - DNA, 15 bp, Homo sapiens
gggattcagatcagc

SEQ ID NO: 466144 - DNA, 15 bp, Homo sapiens
agggattcagatcag

SEQ ID NO: 466145 - DNA, 15 bp, Homo sapiens
gagggattcagatca

SEQ ID NO: 466146 - DNA, 15 bp, Homo sapiens
ggagggattcagatc

SEQ ID NO: 466147 - DNA, 15 bp, Homo sapiens
tggagggattcagat

SEQ ID NO: 466148 - DNA, 15 bp, Homo sapiens
atggagggattcaga

SEQ ID NO: 466149 - DNA, 15 bp, Homo sapiens
tatggagggattcag

SEQ ID NO: 466150 - DNA, 15 bp, Homo sapiens
ctatggagggattca

SEQ ID NO: 466151 - DNA, 15 bp, Homo sapiens
actatggagggattc

SEQ ID NO: 466152 - DNA, 15 bp, Homo sapiens
tactatggagggatt

SEQ ID NO: 466153 - DNA, 15 bp, Homo sapiens
ctactatggagggat

SEQ ID NO: 466154 - DNA, 15 bp, Homo sapiens
cctactatggaggga

SEQ ID NO: 466155 - DNA, 15 bp, Homo sapiens
ccctactatggaggg

SEQ ID NO: 466156 - DNA, 15 bp, Homo sapiens
cccctactatggagg

SEQ ID NO: 466157 - DNA, 15 bp, Homo sapiens
acccctactatggag

SEQ ID NO: 466158 - DNA, 15 bp, Homo sapiens
cacccctactatgga

SEQ ID NO: 466159 - DNA, 15 bp, Homo sapiens
ccacccctactatgg

SEQ ID NO: 466160 - DNA, 15 bp, Homo sapiens
tccacccctactatg

SEQ ID NO: 466161 - DNA, 15 bp, Homo sapiens
ctccacccctactat

SEQ ID NO: 466162 - DNA, 15 bp, Homo sapiens
tctccacccctacta

SEQ ID NO: 466163 - DNA, 15 bp, Homo sapiens
atctccacccctact

SEQ ID NO: 466164 - DNA, 15 bp, Homo sapiens
catctccacccctac

SEQ ID NO: 466165 - DNA, 15 bp, Homo sapiens
gcatctccaccccta

SEQ ID NO: 466166 - DNA, 15 bp, Homo sapiens
ggcatctccacccct

SEQ ID NO: 466167 - DNA, 15 bp, Homo sapiens
tggcatctccacccc

SEQ ID NO: 466168 - DNA, 15 bp, Homo sapiens
ttggcatctccaccc

SEQ ID NO: 466169 - DNA, 15 bp, Homo sapiens
cttggcatctccacc

SEQ ID NO: 466170 - DNA, 15 bp, Homo sapiens
ccttggcatctccac

SEQ ID NO: 466171 - DNA, 15 bp, Homo sapiens
cccttggcatctcca

SEQ ID NO: 466172 - DNA, 15 bp, Homo sapiens
gcccttggcatctcc

SEQ ID NO: 466173 - DNA, 15 bp, Homo sapiens
tgcccttggcatctc

SEQ ID NO: 466174 - DNA, 15 bp, Homo sapiens
gtgcccttggcatct

SEQ ID NO: 466175 - DNA, 15 bp, Homo sapiens
ggtgcccttggcatc

SEQ ID NO: 466176 - DNA, 15 bp, Homo sapiens
gggtgcccttggcat

SEQ ID NO: 466177 - DNA, 15 bp, Homo sapiens
tgggtgcccttggca

SEQ ID NO: 466178 - DNA, 15 bp, Homo sapiens
ctgggtgcccttggc

SEQ ID NO: 466179 - DNA, 15 bp, Homo sapiens
cctgggtgcccttgg

SEQ ID NO: 466180 - DNA, 15 bp, Homo sapiens
tcctgggtgcccttg

SEQ ID NO: 466181 - DNA, 15 bp, Homo sapiens
ctcctgggtgccctt

SEQ ID NO: 466182 - DNA, 15 bp, Homo sapiens
tctcctgggtgccct

SEQ ID NO: 466183 - DNA, 15 bp, Homo sapiens
ctctcctgggtgccc

SEQ ID NO: 466184 - DNA, 15 bp, Homo sapiens
cctctcctgggtgcc

SEQ ID NO: 466185 - DNA, 15 bp, Homo sapiens
gcctctcctgggtgc

SEQ ID NO: 466186 - DNA, 15 bp, Homo sapiens
agcctctcctgggtg

SEQ ID NO: 466187 - DNA, 15 bp, Homo sapiens
gagcctctcctgggt

SEQ ID NO: 466188 - DNA, 15 bp, Homo sapiens
agagcctctcctggg

SEQ ID NO: 466189 - DNA, 15 bp, Homo sapiens
gagagcctctcctgg

SEQ ID NO: 466190 - DNA, 15 bp, Homo sapiens
cgagagcctctcctg

SEQ ID NO: 466191 - DNA, 15 bp, Homo sapiens
ccgagagcctctcct

SEQ ID NO: 466192 - DNA, 15 bp, Homo sapiens
gccgagagcctctcc

SEQ ID NO: 466193 - DNA, 15 bp, Homo sapiens
tgccgagagcctctc

SEQ ID NO: 466194 - DNA, 15 bp, Homo sapiens
atgccgagagcctct

SEQ ID NO: 466195 - DNA, 15 bp, Homo sapiens
gatgccgagagcctc

SEQ ID NO: 466196 - DNA, 15 bp, Homo sapiens
tgatgccgagagcct

SEQ ID NO: 466197 - DNA, 15 bp, Homo sapiens
ctgatgccgagagcc

SEQ ID NO: 466198 - DNA, 15 bp, Homo sapiens
cctgatgccgagagc

SEQ ID NO: 466199 - DNA, 15 bp, Homo sapiens
tcctgatgccgagag

SEQ ID NO: 466200 - DNA, 15 bp, Homo sapiens
ttcctgatgccgaga

SEQ ID NO: 466201 - DNA, 15 bp, Homo sapiens
cttcctgatgccgag

SEQ ID NO: 466202 - DNA, 15 bp, Homo sapiens
ccttcctgatgccga

SEQ ID NO: 466203 - DNA, 15 bp, Homo sapiens
cccttcctgatgccg

SEQ ID NO: 466204 - DNA, 15 bp, Homo sapiens
gcccttcctgatgcc

SEQ ID NO: 466205 - DNA, 15 bp, Homo sapiens
ggcccttcctgatgc

SEQ ID NO: 466206 - DNA, 15 bp, Homo sapiens
aggcccttcctgatg

SEQ ID NO: 466207 - DNA, 15 bp, Homo sapiens
caggcccttcctgat

SEQ ID NO: 466208 - DNA, 15 bp, Homo sapiens
ccaggcccttcctga

SEQ ID NO: 466209 - DNA, 15 bp, Homo sapiens
gccaggcccttcctg

SEQ ID NO: 466210 - DNA, 15 bp, Homo sapiens
ggccaggcccttcct

SEQ ID NO: 466211 - DNA, 15 bp, Homo sapiens
gggccaggcccttcc

SEQ ID NO: 466212 - DNA, 15 bp, Homo sapiens
tgggccaggcccttc

SEQ ID NO: 466213 - DNA, 15 bp, Homo sapiens
ctgggccaggccctt

SEQ ID NO: 466214 - DNA, 15 bp, Homo sapiens
tctgggccaggccct

SEQ ID NO: 466215 - DNA, 15 bp, Homo sapiens
ctctgggccaggccc

SEQ ID NO: 466216 - DNA, 15 bp, Homo sapiens
tctctgggccaggcc

SEQ ID NO: 466217 - DNA, 15 bp, Homo sapiens
atctctgggccaggc

SEQ ID NO: 466218 - DNA, 15 bp, Homo sapiens
catctctgggccagg

SEQ ID NO: 466219 - DNA, 15 bp, Homo sapiens
gcatctctgggccag

SEQ ID NO: 466220 - DNA, 15 bp, Homo sapiens
ggcatctctgggcca

SEQ ID NO: 466221 - DNA, 15 bp, Homo sapiens
aggcatctctgggcc

SEQ ID NO: 466222 - DNA, 15 bp, Homo sapiens
gaggcatctctgggc

SEQ ID NO: 466223 - DNA, 15 bp, Homo sapiens
ggaggcatctctggg

SEQ ID NO: 466224 - DNA, 15 bp, Homo sapiens
gggaggcatctctgg

SEQ ID NO: 466225 - DNA, 15 bp, Homo sapiens
ggggaggcatctctg

SEQ ID NO: 466226 - DNA, 15 bp, Homo sapiens
aggggaggcatctct

SEQ ID NO: 466227 - DNA, 15 bp, Homo sapiens
gaggggaggcatctc

SEQ ID NO: 466228 - DNA, 15 bp, Homo sapiens
ggaggggaggcatct

SEQ ID NO: 466229 - DNA, 15 bp, Homo sapiens
gggaggggaggcatc

SEQ ID NO: 466230 - DNA, 15 bp, Homo sapiens
agggaggggaggcat

SEQ ID NO: 466231 - DNA, 15 bp, Homo sapiens
gagggaggggaggca

SEQ ID NO: 466232 - DNA, 15 bp, Homo sapiens
ggagggaggggaggc

SEQ ID NO: 466233 - DNA, 15 bp, Homo sapiens
gggagggaggggagg

SEQ ID NO: 466234 - DNA, 15 bp, Homo sapiens
agggagggaggggag

SEQ ID NO: 466235 - DNA, 15 bp, Homo sapiens
cagggagggagggga

SEQ ID NO: 466236 - DNA, 15 bp, Homo sapiens
gcagggagggagggg

SEQ ID NO: 466237 - DNA, 15 bp, Homo sapiens
ggcagggagggaggg

SEQ ID NO: 466238 - DNA, 15 bp, Homo sapiens
gggcagggagggagg

SEQ ID NO: 466239 - DNA, 15 bp, Homo sapiens
ggggcagggagggag

SEQ ID NO: 466240 - DNA, 15 bp, Homo sapiens
gggggcagggaggga

SEQ ID NO: 466241 - DNA, 15 bp, Homo sapiens
tgggggcagggaggg

SEQ ID NO: 466242 - DNA, 15 bp, Homo sapiens
ctgggggcagggagg

SEQ ID NO: 466243 - DNA, 15 bp, Homo sapiens
cctgggggcagggag

SEQ ID NO: 466244 - DNA, 15 bp, Homo sapiens
tcctgggggcaggga

SEQ ID NO: 466245 - DNA, 15 bp, Homo sapiens
ctcctgggggcaggg

SEQ ID NO: 466246 - DNA, 15 bp, Homo sapiens
actcctgggggcagg

SEQ ID NO: 466247 - DNA, 15 bp, Homo sapiens
cactcctgggggcag

SEQ ID NO: 466248 - DNA, 15 bp, Homo sapiens
ccactcctgggggca

SEQ ID NO: 466249 - DNA, 15 bp, Homo sapiens
accactcctgggggc

SEQ ID NO: 466250 - DNA, 15 bp, Homo sapiens
aaccactcctggggg

SEQ ID NO: 466251 - DNA, 15 bp, Homo sapiens
gaaccactcctgggg

SEQ ID NO: 466252 - DNA, 15 bp, Homo sapiens
tgaaccactcctggg

SEQ ID NO: 466253 - DNA, 15 bp, Homo sapiens
gtgaaccactcctgg

SEQ ID NO: 466254 - DNA, 15 bp, Homo sapiens
ggtgaaccactcctg

SEQ ID NO: 466255 - DNA, 15 bp, Homo sapiens
cggtgaaccactcct

SEQ ID NO: 466256 - DNA, 15 bp, Homo sapiens
acggtgaaccactcc

SEQ ID NO: 466257 - DNA, 15 bp, Homo sapiens
gacggtgaaccactc

SEQ ID NO: 466258 - DNA, 15 bp, Homo sapiens
agacggtgaaccact

SEQ ID NO: 466259 - DNA, 15 bp, Homo sapiens
aagacggtgaaccac

SEQ ID NO: 466260 - DNA, 15 bp, Homo sapiens
caagacggtgaacca

SEQ ID NO: 466261 - DNA, 15 bp, Homo sapiens
ccaagacggtgaacc

SEQ ID NO: 466262 - DNA, 15 bp, Homo sapiens
tccaagacggtgaac

SEQ ID NO: 466263 - DNA, 15 bp, Homo sapiens
ctccaagacggtgaa

SEQ ID NO: 466264 - DNA, 15 bp, Homo sapiens
gctccaagacggtga

SEQ ID NO: 466265 - DNA, 15 bp, Homo sapiens
tgctccaagacggtg

SEQ ID NO: 466266 - DNA, 15 bp, Homo sapiens
atgctccaagacggt

SEQ ID NO: 466267 - DNA, 15 bp, Homo sapiens
aatgctccaagacgg

SEQ ID NO: 466268 - DNA, 15 bp, Homo sapiens
taatgctccaagacg

SEQ ID NO: 466269 - DNA, 15 bp, Homo sapiens
gtaatgctccaagac

SEQ ID NO: 466270 - DNA, 15 bp, Homo sapiens
ggtaatgctccaaga

SEQ ID NO: 466271 - DNA, 15 bp, Homo sapiens
cggtaatgctccaag

SEQ ID NO: 466272 - DNA, 15 bp, Homo sapiens
gcggtaatgctccaa

SEQ ID NO: 466273 - DNA, 15 bp, Homo sapiens
ggcggtaatgctcca

SEQ ID NO: 466274 - DNA, 15 bp, Homo sapiens
cggcggtaatgctcc

SEQ ID NO: 466275 - DNA, 15 bp, Homo sapiens
gcggcggtaatgctc

SEQ ID NO: 466276 - DNA, 15 bp, Homo sapiens
tgcggcggtaatgct

SEQ ID NO: 466277 - DNA, 15 bp, Homo sapiens
gtgcggcggtaatgc

SEQ ID NO: 466278 - DNA, 15 bp, Homo sapiens
ggtgcggcggtaatg

SEQ ID NO: 466279 - DNA, 15 bp, Homo sapiens
gggtgcggcggtaat

SEQ ID NO: 466280 - DNA, 15 bp, Homo sapiens
tgggtgcggcggtaa

SEQ ID NO: 466281 - DNA, 15 bp, Homo sapiens
gtgggtgcggcggta

SEQ ID NO: 466282 - DNA, 15 bp, Homo sapiens
agtgggtgcggcggt

SEQ ID NO: 466283 - DNA, 15 bp, Homo sapiens
cagtgggtgcggcgg

SEQ ID NO: 466284 - DNA, 15 bp, Homo sapiens
gcagtgggtgcggcg

SEQ ID NO: 466285 - DNA, 15 bp, Homo sapiens
cgcagtgggtgcggc

SEQ ID NO: 466286 - DNA, 15 bp, Homo sapiens
acgcagtgggtgcgg

SEQ ID NO: 466287 - DNA, 15 bp, Homo sapiens
cacgcagtgggtgcg

SEQ ID NO: 466288 - DNA, 15 bp, Homo sapiens
ccacgcagtgggtgc

SEQ ID NO: 466289 - DNA, 15 bp, Homo sapiens
accacgcagtgggtg

SEQ ID NO: 466290 - DNA, 15 bp, Homo sapiens
caccacgcagtgggt

SEQ ID NO: 466291 - DNA, 15 bp, Homo sapiens
gcaccacgcagtggg

SEQ ID NO: 466292 - DNA, 15 bp, Homo sapiens
ggcaccacgcagtgg

SEQ ID NO: 466293 - DNA, 15 bp, Homo sapiens
tggcaccacgcagtg

SEQ ID NO: 466294 - DNA, 15 bp, Homo sapiens
ctggcaccacgcagt

SEQ ID NO: 466295 - DNA, 15 bp, Homo sapiens
tctggcaccacgcag

SEQ ID NO: 466296 - DNA, 15 bp, Homo sapiens
ctctggcaccacgca

SEQ ID NO: 466297 - DNA, 15 bp, Homo sapiens
gctctggcaccacgc

SEQ ID NO: 466298 - DNA, 15 bp, Homo sapiens
agctctggcaccacg

SEQ ID NO: 466299 - DNA, 15 bp, Homo sapiens
gagctctggcaccac

SEQ ID NO: 466300 - DNA, 15 bp, Homo sapiens
tgagctctggcacca

SEQ ID NO: 466301 - DNA, 15 bp, Homo sapiens
atgagctctggcacc

SEQ ID NO: 466302 - DNA, 15 bp, Homo sapiens
gatgagctctggcac

SEQ ID NO: 466303 - DNA, 15 bp, Homo sapiens
tgatgagctctggca

SEQ ID NO: 466304 - DNA, 15 bp, Homo sapiens
atgatgagctctggc

SEQ ID NO: 466305 - DNA, 15 bp, Homo sapiens
aatgatgagctctgg

SEQ ID NO: 466306 - DNA, 15 bp, Homo sapiens
caatgatgagctctg

SEQ ID NO: 466307 - DNA, 15 bp, Homo sapiens
ccaatgatgagctct

SEQ ID NO: 466308 - DNA, 15 bp, Homo sapiens
gccaatgatgagctc

SEQ ID NO: 466309 - DNA, 15 bp, Homo sapiens
tgccaatgatgagct

SEQ ID NO: 466310 - DNA, 15 bp, Homo sapiens
ttgccaatgatgagc

SEQ ID NO: 466311 - DNA, 15 bp, Homo sapiens
attgccaatgatgag

SEQ ID NO: 466312 - DNA, 15 bp, Homo sapiens
cattgccaatgatga

SEQ ID NO: 466313 - DNA, 15 bp, Homo sapiens
ccattgccaatgatg

SEQ ID NO: 466314 - DNA, 15 bp, Homo sapiens
gccattgccaatgat

SEQ ID NO: 466315 - DNA, 15 bp, Homo sapiens
agccattgccaatga

SEQ ID NO: 466316 - DNA, 15 bp, Homo sapiens
tagccattgccaatg

SEQ ID NO: 466317 - DNA, 15 bp, Homo sapiens
gtagccattgccaat

SEQ ID NO: 466318 - DNA, 15 bp, Homo sapiens
agtagccattgccaa

SEQ ID NO: 466319 - DNA, 15 bp, Homo sapiens
tagtagccattgcca

SEQ ID NO: 466320 - DNA, 15 bp, Homo sapiens
gtagtagccattgcc

SEQ ID NO: 466321 - DNA, 15 bp, Homo sapiens
agtagtagccattgc

SEQ ID NO: 466322 - DNA, 15 bp, Homo sapiens
aagtagtagccattg

SEQ ID NO: 466323 - DNA, 15 bp, Homo sapiens
gaagtagtagccatt

SEQ ID NO: 466324 - DNA, 15 bp, Homo sapiens
ggaagtagtagccat

SEQ ID NO: 466325 - DNA, 15 bp, Homo sapiens
cggaagtagtagcca

SEQ ID NO: 466326 - DNA, 15 bp, Homo sapiens
gcggaagtagtagcc

SEQ ID NO: 466327 - DNA, 15 bp, Homo sapiens
cgcggaagtagtagc

SEQ ID NO: 466328 - DNA, 15 bp, Homo sapiens
acgcggaagtagtag

SEQ ID NO: 466329 - DNA, 15 bp, Homo sapiens
gacgcggaagtagta

SEQ ID NO: 466330 - DNA, 15 bp, Homo sapiens
agacgcggaagtagt

SEQ ID NO: 466331 - DNA, 15 bp, Homo sapiens
aagacgcggaagtag

SEQ ID NO: 466332 - DNA, 15 bp, Homo sapiens
gaagacgcggaagta

SEQ ID NO: 466333 - DNA, 15 bp, Homo sapiens
tgaagacgcggaagt

SEQ ID NO: 466334 - DNA, 15 bp, Homo sapiens
ctgaagacgcggaag

SEQ ID NO: 466335 - DNA, 15 bp, Homo sapiens
gctgaagacgcggaa

SEQ ID NO: 466336 - DNA, 15 bp, Homo sapiens
ggctgaagacgcgga

SEQ ID NO: 466337 - DNA, 15 bp, Homo sapiens
tggctgaagacgcgg

SEQ ID NO: 466338 - DNA, 15 bp, Homo sapiens
ctggctgaagacgcg

SEQ ID NO: 466339 - DNA, 15 bp, Homo sapiens
tctggctgaagacgc

SEQ ID NO: 466340 - DNA, 15 bp, Homo sapiens
ttctggctgaagacg

SEQ ID NO: 466341 - DNA, 15 bp, Homo sapiens
attctggctgaagac

SEQ ID NO: 466342 - DNA, 15 bp, Homo sapiens
tattctggctgaaga

SEQ ID NO: 466343 - DNA, 15 bp, Homo sapiens
atattctggctgaag

SEQ ID NO: 466344 - DNA, 15 bp, Homo sapiens
catattctggctgaa

SEQ ID NO: 466345 - DNA, 15 bp, Homo sapiens
ccatattctggctga

SEQ ID NO: 466346 - DNA, 15 bp, Homo sapiens
accatattctggctg

SEQ ID NO: 466347 - DNA, 15 bp, Homo sapiens
aaccatattctggct

SEQ ID NO: 466348 - DNA, 15 bp, Homo sapiens
caaccatattctggc

SEQ ID NO: 466349 - DNA, 15 bp, Homo sapiens
ccaaccatattctgg

SEQ ID NO: 466350 - DNA, 15 bp, Homo sapiens
gccaaccatattctg

SEQ ID NO: 466351 - DNA, 15 bp, Homo sapiens
agccaaccatattct

SEQ ID NO: 466352 - DNA, 15 bp, Homo sapiens
aagccaaccatattc

SEQ ID NO: 466353 - DNA, 15 bp, Homo sapiens
aaagccaaccatatt

SEQ ID NO: 466354 - DNA, 15 bp, Homo sapiens
taaagccaaccatat

SEQ ID NO: 466355 - DNA, 15 bp, Homo sapiens
ctaaagccaaccata

SEQ ID NO: 466356 - DNA, 15 bp, Homo sapiens
actaaagccaaccat

SEQ ID NO: 466357 - DNA, 15 bp, Homo sapiens
cactaaagccaacca

SEQ ID NO: 466358 - DNA, 15 bp, Homo sapiens
tcactaaagccaacc

SEQ ID NO: 466359 - DNA, 15 bp, Homo sapiens
gtcactaaagccaac

SEQ ID NO: 466360 - DNA, 15 bp, Homo sapiens
tgtcactaaagccaa

SEQ ID NO: 466361 - DNA, 15 bp, Homo sapiens
ctgtcactaaagcca

SEQ ID NO: 466362 - DNA, 15 bp, Homo sapiens
tctgtcactaaagcc

SEQ ID NO: 466363 - DNA, 15 bp, Homo sapiens
ctctgtcactaaagc

SEQ ID NO: 466364 - DNA, 15 bp, Homo sapiens
gctctgtcactaaag

SEQ ID NO: 466365 - DNA, 15 bp, Homo sapiens
cgctctgtcactaaa

SEQ ID NO: 466366 - DNA, 15 bp, Homo sapiens
ccgctctgtcactaa

SEQ ID NO: 466367 - DNA, 15 bp, Homo sapiens
gccgctctgtcacta

SEQ ID NO: 466368 - DNA, 15 bp, Homo sapiens
ggccgctctgtcact

SEQ ID NO: 466369 - DNA, 15 bp, Homo sapiens
tggccgctctgtcac

SEQ ID NO: 466370 - DNA, 15 bp, Homo sapiens
gtggccgctctgtca

SEQ ID NO: 466371 - DNA, 15 bp, Homo sapiens
ggtggccgctctgtc

SEQ ID NO: 466372 - DNA, 15 bp, Homo sapiens
tggtggccgctctgt

SEQ ID NO: 466373 - DNA, 15 bp, Homo sapiens
gtggtggccgctctg

SEQ ID NO: 466374 - DNA, 15 bp, Homo sapiens
ggtggtggccgctct

SEQ ID NO: 466375 - DNA, 15 bp, Homo sapiens
tggtggtggccgctc

SEQ ID NO: 466376 - DNA, 15 bp, Homo sapiens
ttggtggtggccgct

SEQ ID NO: 466377 - DNA, 15 bp, Homo sapiens
cttggtggtggccgc

SEQ ID NO: 466378 - DNA, 15 bp, Homo sapiens
ccttggtggtggccg

SEQ ID NO: 466379 - DNA, 15 bp, Homo sapiens
tccttggtggtggcc

SEQ ID NO: 466380 - DNA, 15 bp, Homo sapiens
ctccttggtggtggc

SEQ ID NO: 466381 - DNA, 15 bp, Homo sapiens
gctccttggtggtgg

SEQ ID NO: 466382 - DNA, 15 bp, Homo sapiens
ggctccttggtggtg

SEQ ID NO: 466383 - DNA, 15 bp, Homo sapiens
gggctccttggtggt

SEQ ID NO: 466384 - DNA, 15 bp, Homo sapiens
cgggctccttggtgg

SEQ ID NO: 466385 - DNA, 15 bp, Homo sapiens
acgggctccttggtg

SEQ ID NO: 466386 - DNA, 15 bp, Homo sapiens
gacgggctccttggt

SEQ ID NO: 466387 - DNA, 15 bp, Homo sapiens
agacgggctccttgg

SEQ ID NO: 466388 - DNA, 15 bp, Homo sapiens
aagacgggctccttg

SEQ ID NO: 466389 - DNA, 15 bp, Homo sapiens
aaagacgggctcctt

SEQ ID NO: 466390 - DNA, 15 bp, Homo sapiens
taaagacgggctcct

SEQ ID NO: 466391 - DNA, 15 bp, Homo sapiens
ataaagacgggctcc

SEQ ID NO: 466392 - DNA, 15 bp, Homo sapiens
gataaagacgggctc

SEQ ID NO: 466393 - DNA, 15 bp, Homo sapiens
ggataaagacgggct

SEQ ID NO: 466394 - DNA, 15 bp, Homo sapiens
gggataaagacgggc

SEQ ID NO: 466395 - DNA, 15 bp, Homo sapiens
ggggataaagacggg

SEQ ID NO: 466396 - DNA, 15 bp, Homo sapiens
tggggataaagacgg

SEQ ID NO: 466397 - DNA, 15 bp, Homo sapiens
ctggggataaagacg

SEQ ID NO: 466398 - DNA, 15 bp, Homo sapiens
tctggggataaagac

SEQ ID NO: 466399 - DNA, 15 bp, Homo sapiens
gtctggggataaaga

SEQ ID NO: 466400 - DNA, 15 bp, Homo sapiens
ggtctggggataaag

SEQ ID NO: 466401 - DNA, 15 bp, Homo sapiens
tggtctggggataaa

SEQ ID NO: 466402 - DNA, 15 bp, Homo sapiens
ctggtctggggataa

SEQ ID NO: 466403 - DNA, 15 bp, Homo sapiens
cctggtctggggata

SEQ ID NO: 466404 - DNA, 15 bp, Homo sapiens
acctggtctggggat

SEQ ID NO: 466405 - DNA, 15 bp, Homo sapiens
cacctggtctgggga

SEQ ID NO: 466406 - DNA, 15 bp, Homo sapiens
gcacctggtctgggg

SEQ ID NO: 466407 - DNA, 15 bp, Homo sapiens
agcacctggtctggg

SEQ ID NO: 466408 - DNA, 15 bp, Homo sapiens
cagcacctggtctgg

SEQ ID NO: 466409 - DNA, 15 bp, Homo sapiens
acagcacctggtctg

SEQ ID NO: 466410 - DNA, 15 bp, Homo sapiens
tacagcacctggtct

SEQ ID NO: 466411 - DNA, 15 bp, Homo sapiens
gtacagcacctggtc

SEQ ID NO: 466412 - DNA, 15 bp, Homo sapiens
ggtacagcacctggt

SEQ ID NO: 466413 - DNA, 15 bp, Homo sapiens
gggtacagcacctgg

SEQ ID NO: 466414 - DNA, 15 bp, Homo sapiens
agggtacagcacctg

SEQ ID NO: 466415 - DNA, 15 bp, Homo sapiens
gagggtacagcacct

SEQ ID NO: 466416 - DNA, 15 bp, Homo sapiens
tgagggtacagcacc

SEQ ID NO: 466417 - DNA, 15 bp, Homo sapiens
atgagggtacagcac

SEQ ID NO: 466418 - DNA, 15 bp, Homo sapiens
aatgagggtacagca

SEQ ID NO: 466419 - DNA, 15 bp, Homo sapiens
gaatgagggtacagc

SEQ ID NO: 466420 - DNA, 15 bp, Homo sapiens
agaatgagggtacag

SEQ ID NO: 466421 - DNA, 15 bp, Homo sapiens
aagaatgagggtaca

SEQ ID NO: 466422 - DNA, 15 bp, Homo sapiens
gaagaatgagggtac

SEQ ID NO: 466423 - DNA, 15 bp, Homo sapiens
ggaagaatgagggta

SEQ ID NO: 466424 - DNA, 15 bp, Homo sapiens
tggaagaatgagggt

SEQ ID NO: 466425 - DNA, 15 bp, Homo sapiens
ttggaagaatgaggg

SEQ ID NO: 466426 - DNA, 15 bp, Homo sapiens
gttggaagaatgagg

SEQ ID NO: 466427 - DNA, 15 bp, Homo sapiens
ggttggaagaatgag

SEQ ID NO: 466428 - DNA, 15 bp, Homo sapiens
tggttggaagaatga

SEQ ID NO: 466429 - DNA, 15 bp, Homo sapiens
ctggttggaagaatg

SEQ ID NO: 466430 - DNA, 15 bp, Homo sapiens
cctggttggaagaat

SEQ ID NO: 466431 - DNA, 15 bp, Homo sapiens
ccctggttggaagaa

SEQ ID NO: 466432 - DNA, 15 bp, Homo sapiens
cccctggttggaaga

SEQ ID NO: 466433 - DNA, 15 bp, Homo sapiens
gcccctggttggaag

SEQ ID NO: 466434 - DNA, 15 bp, Homo sapiens
agcccctggttggaa

SEQ ID NO: 466435 - DNA, 15 bp, Homo sapiens
cagcccctggttgga

SEQ ID NO: 466436 - DNA, 15 bp, Homo sapiens
ccagcccctggttgg

SEQ ID NO: 466437 - DNA, 15 bp, Homo sapiens
cccagcccctggttg

SEQ ID NO: 466438 - DNA, 15 bp, Homo sapiens
ccccagcccctggtt

SEQ ID NO: 466439 - DNA, 15 bp, Homo sapiens
gccccagcccctggt

SEQ ID NO: 466440 - DNA, 15 bp, Homo sapiens
tgccccagcccctgg

SEQ ID NO: 466441 - DNA, 15 bp, Homo sapiens
ctgccccagcccctg

SEQ ID NO: 466442 - DNA, 15 bp, Homo sapiens
cctgccccagcccct

SEQ ID NO: 466443 - DNA, 15 bp, Homo sapiens
ccctgccccagcccc

SEQ ID NO: 466444 - DNA, 15 bp, Homo sapiens
tccctgccccagccc

SEQ ID NO: 466445 - DNA, 15 bp, Homo sapiens
ctccctgccccagcc

SEQ ID NO: 466446 - DNA, 15 bp, Homo sapiens
cctccctgccccagc

SEQ ID NO: 466447 - DNA, 15 bp, Homo sapiens
gcctccctgccccag

SEQ ID NO: 466448 - DNA, 15 bp, Homo sapiens
agcctccctgcccca

SEQ ID NO: 466449 - DNA, 15 bp, Homo sapiens
cagcctccctgcccc

SEQ ID NO: 466450 - DNA, 15 bp, Homo sapiens
acagcctccctgccc

SEQ ID NO: 466451 - DNA, 15 bp, Homo sapiens
cacagcctccctgcc

SEQ ID NO: 466452 - DNA, 15 bp, Homo sapiens
ccacagcctccctgc

SEQ ID NO: 466453 - DNA, 15 bp, Homo sapiens
cccacagcctccctg

SEQ ID NO: 466454 - DNA, 15 bp, Homo sapiens
tcccacagcctccct

SEQ ID NO: 466455 - DNA, 15 bp, Homo sapiens
ttcccacagcctccc

SEQ ID NO: 466456 - DNA, 15 bp, Homo sapiens
gttcccacagcctcc

SEQ ID NO: 466457 - DNA, 15 bp, Homo sapiens
tgttcccacagcctc

SEQ ID NO: 466458 - DNA, 15 bp, Homo sapiens
ctgttcccacagcct

SEQ ID NO: 466459 - DNA, 15 bp, Homo sapiens
cctgttcccacagcc

SEQ ID NO: 466460 - DNA, 15 bp, Homo sapiens
ccctgttcccacagc

SEQ ID NO: 466461 - DNA, 15 bp, Homo sapiens
tccctgttcccacag

SEQ ID NO: 466462 - DNA, 15 bp, Homo sapiens
ctccctgttcccaca

SEQ ID NO: 466463 - DNA, 15 bp, Homo sapiens
tctccctgttcccac

SEQ ID NO: 466464 - DNA, 15 bp, Homo sapiens
ctctccctgttccca

SEQ ID NO: 466465 - DNA, 15 bp, Homo sapiens
cctctccctgttccc

SEQ ID NO: 466466 - DNA, 15 bp, Homo sapiens
ccctctccctgttcc

SEQ ID NO: 466467 - DNA, 15 bp, Homo sapiens
cccctctccctgttc

SEQ ID NO: 466468 - DNA, 15 bp, Homo sapiens
gcccctctccctgtt

SEQ ID NO: 466469 - DNA, 15 bp, Homo sapiens
ggcccctctccctgt

SEQ ID NO: 466470 - DNA, 15 bp, Homo sapiens
aggcccctctccctg

SEQ ID NO: 466471 - DNA, 15 bp, Homo sapiens
taggcccctctccct

SEQ ID NO: 466472 - DNA, 15 bp, Homo sapiens
ctaggcccctctccc

SEQ ID NO: 466473 - DNA, 15 bp, Homo sapiens
gctaggcccctctcc

SEQ ID NO: 466474 - DNA, 15 bp, Homo sapiens
agctaggcccctctc

SEQ ID NO: 466475 - DNA, 15 bp, Homo sapiens
aagctaggcccctct

SEQ ID NO: 466476 - DNA, 15 bp, Homo sapiens
aaagctaggcccctc

SEQ ID NO: 466477 - DNA, 15 bp, Homo sapiens
caaagctaggcccct

SEQ ID NO: 466478 - DNA, 15 bp, Homo sapiens
acaaagctaggcccc

SEQ ID NO: 466479 - DNA, 15 bp, Homo sapiens
cacaaagctaggccc

SEQ ID NO: 466480 - DNA, 15 bp, Homo sapiens
acacaaagctaggcc

SEQ ID NO: 466481 - DNA, 15 bp, Homo sapiens
cacacaaagctaggc

SEQ ID NO: 466482 - DNA, 15 bp, Homo sapiens
ccacacaaagctagg

SEQ ID NO: 466483 - DNA, 15 bp, Homo sapiens
gccacacaaagctag

SEQ ID NO: 466484 - DNA, 15 bp, Homo sapiens
ggccacacaaagcta

SEQ ID NO: 466485 - DNA, 15 bp, Homo sapiens
gggccacacaaagct

SEQ ID NO: 466486 - DNA, 15 bp, Homo sapiens
agggccacacaaagc

SEQ ID NO: 466487 - DNA, 15 bp, Homo sapiens
gagggccacacaaag

SEQ ID NO: 466488 - DNA, 15 bp, Homo sapiens
agagggccacacaaa

SEQ ID NO: 466489 - DNA, 15 bp, Homo sapiens
gagagggccacacaa

SEQ ID NO: 466490 - DNA, 15 bp, Homo sapiens
cgagagggccacaca

SEQ ID NO: 466491 - DNA, 15 bp, Homo sapiens
ccgagagggccacac

SEQ ID NO: 466492 - DNA, 15 bp, Homo sapiens
accgagagggccaca

SEQ ID NO: 466493 - DNA, 15 bp, Homo sapiens
taccgagagggccac

SEQ ID NO: 466494 - DNA, 15 bp, Homo sapiens
gtaccgagagggcca

SEQ ID NO: 466495 - DNA, 15 bp, Homo sapiens
ggtaccgagagggcc

SEQ ID NO: 466496 - DNA, 15 bp, Homo sapiens
tggtaccgagagggc

SEQ ID NO: 466497 - DNA, 15 bp, Homo sapiens
ttggtaccgagaggg

SEQ ID NO: 466498 - DNA, 15 bp, Homo sapiens
cttggtaccgagagg

SEQ ID NO: 466499 - DNA, 15 bp, Homo sapiens
acttggtaccgagag

SEQ ID NO: 466500 - DNA, 15 bp, Homo sapiens
gacttggtaccgaga

SEQ ID NO: 466501 - DNA, 15 bp, Homo sapiens
ggacttggtaccgag

SEQ ID NO: 466502 - DNA, 15 bp, Homo sapiens
aggacttggtaccga

SEQ ID NO: 466503 - DNA, 15 bp, Homo sapiens
caggacttggtaccg

SEQ ID NO: 466504 - DNA, 15 bp, Homo sapiens
acaggacttggtacc

SEQ ID NO: 466505 - DNA, 15 bp, Homo sapiens
gacaggacttggtac

SEQ ID NO: 466506 - DNA, 15 bp, Homo sapiens
tgacaggacttggta

SEQ ID NO: 466507 - DNA, 15 bp, Homo sapiens
gtgacaggacttggt

SEQ ID NO: 466508 - DNA, 15 bp, Homo sapiens
ggtgacaggacttgg

SEQ ID NO: 466509 - DNA, 15 bp, Homo sapiens
tggtgacaggacttg

SEQ ID NO: 466510 - DNA, 15 bp, Homo sapiens
ttggtgacaggactt

SEQ ID NO: 466511 - DNA, 15 bp, Homo sapiens
gttggtgacaggact

SEQ ID NO: 466512 - DNA, 15 bp, Homo sapiens
tgttggtgacaggac

SEQ ID NO: 466513 - DNA, 15 bp, Homo sapiens
ctgttggtgacagga

SEQ ID NO: 466514 - DNA, 15 bp, Homo sapiens
cctgttggtgacagg

SEQ ID NO: 466515 - DNA, 15 bp, Homo sapiens
gcctgttggtgacag

SEQ ID NO: 466516 - DNA, 15 bp, Homo sapiens
tgcctgttggtgaca

SEQ ID NO: 466517 - DNA, 15 bp, Homo sapiens
atgcctgttggtgac

SEQ ID NO: 466518 - DNA, 15 bp, Homo sapiens
gatgcctgttggtga

SEQ ID NO: 466519 - DNA, 15 bp, Homo sapiens
tgatgcctgttggtg

SEQ ID NO: 466520 - DNA, 15 bp, Homo sapiens
gtgatgcctgttggt

SEQ ID NO: 466521 - DNA, 15 bp, Homo sapiens
ggtgatgcctgttgg

SEQ ID NO: 466522 - DNA, 15 bp, Homo sapiens
aggtgatgcctgttg

SEQ ID NO: 466523 - DNA, 15 bp, Homo sapiens
taggtgatgcctgtt

SEQ ID NO: 466524 - DNA, 15 bp, Homo sapiens
ataggtgatgcctgt

SEQ ID NO: 466525 - DNA, 15 bp, Homo sapiens
cataggtgatgcctg

SEQ ID NO: 466526 - DNA, 15 bp, Homo sapiens
tcataggtgatgcct

SEQ ID NO: 466527 - DNA, 15 bp, Homo sapiens
ctcataggtgatgcc

SEQ ID NO: 466528 - DNA, 15 bp, Homo sapiens
gctcataggtgatgc

SEQ ID NO: 466529 - DNA, 15 bp, Homo sapiens
ggctcataggtgatg

SEQ ID NO: 466530 - DNA, 15 bp, Homo sapiens
tggctcataggtgat

SEQ ID NO: 466531 - DNA, 15 bp, Homo sapiens
gtggctcataggtga

SEQ ID NO: 466532 - DNA, 15 bp, Homo sapiens
ggtggctcataggtg

SEQ ID NO: 466533 - DNA, 15 bp, Homo sapiens
gggtggctcataggt

SEQ ID NO: 466534 - DNA, 15 bp, Homo sapiens
tgggtggctcatagg

SEQ ID NO: 466535 - DNA, 15 bp, Homo sapiens
ttgggtggctcatag

SEQ ID NO: 466536 - DNA, 15 bp, Homo sapiens
gttgggtggctcata

SEQ ID NO: 466537 - DNA, 15 bp, Homo sapiens
agttgggtggctcat

SEQ ID NO: 466538 - DNA, 15 bp, Homo sapiens
tagttgggtggctca

SEQ ID NO: 466539 - DNA, 15 bp, Homo sapiens
atagttgggtggctc

SEQ ID NO: 466540 - DNA, 15 bp, Homo sapiens
tatagttgggtggct

SEQ ID NO: 466541 - DNA, 15 bp, Homo sapiens
ttatagttgggtggc

SEQ ID NO: 466542 - DNA, 15 bp, Homo sapiens
cttatagttgggtgg

SEQ ID NO: 466543 - DNA, 15 bp, Homo sapiens
ccttatagttgggtg

SEQ ID NO: 466544 - DNA, 15 bp, Homo sapiens
gccttatagttgggt

SEQ ID NO: 466545 - DNA, 15 bp, Homo sapiens
ggccttatagttggg

SEQ ID NO: 466546 - DNA, 15 bp, Homo sapiens
gggccttatagttgg

SEQ ID NO: 466547 - DNA, 15 bp, Homo sapiens
agggccttatagttg

SEQ ID NO: 466548 - DNA, 15 bp, Homo sapiens
cagggccttatagtt

SEQ ID NO: 466549 - DNA, 15 bp, Homo sapiens
ccagggccttatagt

SEQ ID NO: 466550 - DNA, 15 bp, Homo sapiens
tccagggccttatag

SEQ ID NO: 466551 - DNA, 15 bp, Homo sapiens
gtccagggccttata

SEQ ID NO: 466552 - DNA, 15 bp, Homo sapiens
agtccagggccttat

SEQ ID NO: 466553 - DNA, 15 bp, Homo sapiens
aagtccagggcctta

SEQ ID NO: 466554 - DNA, 15 bp, Homo sapiens
gaagtccagggcctt

SEQ ID NO: 466555 - DNA, 15 bp, Homo sapiens
agaagtccagggcct

SEQ ID NO: 466556 - DNA, 15 bp, Homo sapiens
gagaagtccagggcc

SEQ ID NO: 466557 - DNA, 15 bp, Homo sapiens
ggagaagtccagggc

SEQ ID NO: 466558 - DNA, 15 bp, Homo sapiens
cggagaagtccaggg

SEQ ID NO: 466559 - DNA, 15 bp, Homo sapiens
tcggagaagtccagg

SEQ ID NO: 466560 - DNA, 15 bp, Homo sapiens
ctcggagaagtccag

SEQ ID NO: 466561 - DNA, 15 bp, Homo sapiens
cctcggagaagtcca

SEQ ID NO: 466562 - DNA, 15 bp, Homo sapiens
gcctcggagaagtcc

SEQ ID NO: 466563 - DNA, 15 bp, Homo sapiens
ggcctcggagaagtc

SEQ ID NO: 466564 - DNA, 15 bp, Homo sapiens
gggcctcggagaagt

SEQ ID NO: 466565 - DNA, 15 bp, Homo sapiens
ggggcctcggagaag

SEQ ID NO: 466566 - DNA, 15 bp, Homo sapiens
tggggcctcggagaa

SEQ ID NO: 466567 - DNA, 15 bp, Homo sapiens
ttggggcctcggaga

SEQ ID NO: 466568 - DNA, 15 bp, Homo sapiens
cttggggcctcggag

SEQ ID NO: 466569 - DNA, 15 bp, Homo sapiens
gcttggggcctcgga

SEQ ID NO: 466570 - DNA, 15 bp, Homo sapiens
agcttggggcctcgg

SEQ ID NO: 466571 - DNA, 15 bp, Homo sapiens
aagcttggggcctcg

SEQ ID NO: 466572 - DNA, 15 bp, Homo sapiens
gaagcttggggcctc

SEQ ID NO: 466573 - DNA, 15 bp, Homo sapiens
tgaagcttggggcct

SEQ ID NO: 466574 - DNA, 15 bp, Homo sapiens
gtgaagcttggggcc

SEQ ID NO: 466575 - DNA, 15 bp, Homo sapiens
ggtgaagcttggggc

SEQ ID NO: 466576 - DNA, 15 bp, Homo sapiens
gggtgaagcttgggg

SEQ ID NO: 466577 - DNA, 15 bp, Homo sapiens
tgggtgaagcttggg

SEQ ID NO: 466578 - DNA, 15 bp, Homo sapiens
ctgggtgaagcttgg

SEQ ID NO: 466579 - DNA, 15 bp, Homo sapiens
gctgggtgaagcttg

SEQ ID NO: 466580 - DNA, 15 bp, Homo sapiens
ggctgggtgaagctt

SEQ ID NO: 466581 - DNA, 15 bp, Homo sapiens
gggctgggtgaagct

SEQ ID NO: 466582 - DNA, 15 bp, Homo sapiens
ggggctgggtgaagc

SEQ ID NO: 466583 - DNA, 15 bp, Homo sapiens
aggggctgggtgaag

SEQ ID NO: 466584 - DNA, 15 bp, Homo sapiens
caggggctgggtgaa

SEQ ID NO: 466585 - DNA, 15 bp, Homo sapiens
ccaggggctgggtga

SEQ ID NO: 466586 - DNA, 15 bp, Homo sapiens
accaggggctgggtg

SEQ ID NO: 466587 - DNA, 15 bp, Homo sapiens
caccaggggctgggt

SEQ ID NO: 466588 - DNA, 15 bp, Homo sapiens
tcaccaggggctggg

SEQ ID NO: 466589 - DNA, 15 bp, Homo sapiens
ttcaccaggggctgg

SEQ ID NO: 466590 - DNA, 15 bp, Homo sapiens
gttcaccaggggctg

SEQ ID NO: 466591 - DNA, 15 bp, Homo sapiens
ggttcaccaggggct

SEQ ID NO: 466592 - DNA, 15 bp, Homo sapiens
cggttcaccaggggc

SEQ ID NO: 466593 - DNA, 15 bp, Homo sapiens
gcggttcaccagggg

SEQ ID NO: 466594 - DNA, 15 bp, Homo sapiens
agcggttcaccaggg

SEQ ID NO: 466595 - DNA, 15 bp, Homo sapiens
gagcggttcaccagg

SEQ ID NO: 466596 - DNA, 15 bp, Homo sapiens
cgagcggttcaccag

SEQ ID NO: 466597 - DNA, 15 bp, Homo sapiens
ccgagcggttcacca

SEQ ID NO: 466598 - DNA, 15 bp, Homo sapiens
accgagcggttcacc

SEQ ID NO: 466599 - DNA, 15 bp, Homo sapiens
gaccgagcggttcac

SEQ ID NO: 466600 - DNA, 15 bp, Homo sapiens
tgaccgagcggttca

SEQ ID NO: 466601 - DNA, 15 bp, Homo sapiens
atgaccgagcggttc

SEQ ID NO: 466602 - DNA, 15 bp, Homo sapiens
gatgaccgagcggtt

SEQ ID NO: 466603 - DNA, 15 bp, Homo sapiens
cgatgaccgagcggt

SEQ ID NO: 466604 - DNA, 15 bp, Homo sapiens
gcgatgaccgagcgg

SEQ ID NO: 466605 - DNA, 15 bp, Homo sapiens
cgcgatgaccgagcg

SEQ ID NO: 466606 - DNA, 15 bp, Homo sapiens
ccgcgatgaccgagc

SEQ ID NO: 466607 - DNA, 15 bp, Homo sapiens
cccgcgatgaccgag

SEQ ID NO: 466608 - DNA, 15 bp, Homo sapiens
gcccgcgatgaccga

SEQ ID NO: 466609 - DNA, 15 bp, Homo sapiens
agcccgcgatgaccg

SEQ ID NO: 466610 - DNA, 15 bp, Homo sapiens
tagcccgcgatgacc

SEQ ID NO: 466611 - DNA, 15 bp, Homo sapiens
gtagcccgcgatgac

SEQ ID NO: 466612 - DNA, 15 bp, Homo sapiens
tgtagcccgcgatga

SEQ ID NO: 466613 - DNA, 15 bp, Homo sapiens
gtgtagcccgcgatg

SEQ ID NO: 466614 - DNA, 15 bp, Homo sapiens
agtgtagcccgcgat

SEQ ID NO: 466615 - DNA, 15 bp, Homo sapiens
cagtgtagcccgcga

SEQ ID NO: 466616 - DNA, 15 bp, Homo sapiens
gcagtgtagcccgcg

SEQ ID NO: 466617 - DNA, 15 bp, Homo sapiens
agcagtgtagcccgc

SEQ ID NO: 466618 - DNA, 15 bp, Homo sapiens
tagcagtgtagcccg

SEQ ID NO: 466619 - DNA, 15 bp, Homo sapiens
atagcagtgtagccc

SEQ ID NO: 466620 - DNA, 15 bp, Homo sapiens
catagcagtgtagcc

SEQ ID NO: 466621 - DNA, 15 bp, Homo sapiens
gcatagcagtgtagc

SEQ ID NO: 466622 - DNA, 15 bp, Homo sapiens
agcatagcagtgtag

SEQ ID NO: 466623 - DNA, 15 bp, Homo sapiens
gagcatagcagtgta

SEQ ID NO: 466624 - DNA, 15 bp, Homo sapiens
agagcatagcagtgt

SEQ ID NO: 466625 - DNA, 15 bp, Homo sapiens
cagagcatagcagtg

SEQ ID NO: 466626 - DNA, 15 bp, Homo sapiens
gcagagcatagcagt

SEQ ID NO: 466627 - DNA, 15 bp, Homo sapiens
agcagagcatagcag

SEQ ID NO: 466628 - DNA, 15 bp, Homo sapiens
cagcagagcatagca

SEQ ID NO: 466629 - DNA, 15 bp, Homo sapiens
acagcagagcatagc

SEQ ID NO: 466630 - DNA, 15 bp, Homo sapiens
cacagcagagcatag

SEQ ID NO: 466631 - DNA, 15 bp, Homo sapiens
gcacagcagagcata

SEQ ID NO: 466632 - DNA, 15 bp, Homo sapiens
agcacagcagagcat

SEQ ID NO: 466633 - DNA, 15 bp, Homo sapiens
cagcacagcagagca

SEQ ID NO: 466634 - DNA, 15 bp, Homo sapiens
acagcacagcagagc

SEQ ID NO: 466635 - DNA, 15 bp, Homo sapiens
gacagcacagcagag

SEQ ID NO: 466636 - DNA, 15 bp, Homo sapiens
ggacagcacagcaga

SEQ ID NO: 466637 - DNA, 15 bp, Homo sapiens
cggacagcacagcag

SEQ ID NO: 466638 - DNA, 15 bp, Homo sapiens
ccggacagcacagca

SEQ ID NO: 466639 - DNA, 15 bp, Homo sapiens
cccggacagcacagc

SEQ ID NO: 466640 - DNA, 15 bp, Homo sapiens
ccccggacagcacag

SEQ ID NO: 466641 - DNA, 15 bp, Homo sapiens
accccggacagcaca

SEQ ID NO: 466642 - DNA, 15 bp, Homo sapiens
taccccggacagcac

SEQ ID NO: 466643 - DNA, 15 bp, Homo sapiens
ctaccccggacagca

SEQ ID NO: 466644 - DNA, 15 bp, Homo sapiens
gctaccccggacagc

SEQ ID NO: 466645 - DNA, 15 bp, Homo sapiens
ggctaccccggacag

SEQ ID NO: 466646 - DNA, 15 bp, Homo sapiens
gggctaccccggaca

SEQ ID NO: 466647 - DNA, 15 bp, Homo sapiens
ggggctaccccggac

SEQ ID NO: 466648 - DNA, 15 bp, Homo sapiens
tggggctaccccgga

SEQ ID NO: 466649 - DNA, 15 bp, Homo sapiens
ttggggctaccccgg

SEQ ID NO: 466650 - DNA, 15 bp, Homo sapiens
cttggggctaccccg

SEQ ID NO: 466651 - DNA, 15 bp, Homo sapiens
ccttggggctacccc

SEQ ID NO: 466652 - DNA, 15 bp, Homo sapiens
accttggggctaccc

SEQ ID NO: 466653 - DNA, 15 bp, Homo sapiens
taccttggggctacc

SEQ ID NO: 466654 - DNA, 15 bp, Homo sapiens
ctaccttggggctac

SEQ ID NO: 466655 - DNA, 15 bp, Homo sapiens
cctaccttggggcta

SEQ ID NO: 466656 - DNA, 15 bp, Homo sapiens
ccctaccttggggct

SEQ ID NO: 466657 - DNA, 15 bp, Homo sapiens
tccctaccttggggc

SEQ ID NO: 466658 - DNA, 15 bp, Homo sapiens
ttccctaccttgggg

SEQ ID NO: 466659 - DNA, 15 bp, Homo sapiens
gttccctaccttggg

SEQ ID NO: 466660 - DNA, 15 bp, Homo sapiens
agttccctaccttgg

SEQ ID NO: 466661 - DNA, 15 bp, Homo sapiens
aagttccctaccttg

SEQ ID NO: 466662 - DNA, 15 bp, Homo sapiens
aaagttccctacctt

SEQ ID NO: 466663 - DNA, 15 bp, Homo sapiens
taaagttccctacct

SEQ ID NO: 466664 - DNA, 15 bp, Homo sapiens
ctaaagttccctacc

SEQ ID NO: 466665 - DNA, 15 bp, Homo sapiens
cctaaagttccctac

SEQ ID NO: 466666 - DNA, 15 bp, Homo sapiens
gcctaaagttcccta

SEQ ID NO: 466667 - DNA, 15 bp, Homo sapiens
cgcctaaagttccct

SEQ ID NO: 466668 - DNA, 15 bp, Homo sapiens
gcgcctaaagttccc

SEQ ID NO: 466669 - DNA, 15 bp, Homo sapiens
agcgcctaaagttcc

SEQ ID NO: 466670 - DNA, 15 bp, Homo sapiens
cagcgcctaaagttc

SEQ ID NO: 466671 - DNA, 15 bp, Homo sapiens
ccagcgcctaaagtt

SEQ ID NO: 466672 - DNA, 15 bp, Homo sapiens
accagcgcctaaagt

SEQ ID NO: 466673 - DNA, 15 bp, Homo sapiens
gaccagcgcctaaag

SEQ ID NO: 466674 - DNA, 15 bp, Homo sapiens
ggaccagcgcctaaa

SEQ ID NO: 466675 - DNA, 15 bp, Homo sapiens
tggaccagcgcctaa

SEQ ID NO: 466676 - DNA, 15 bp, Homo sapiens
ctggaccagcgccta

SEQ ID NO: 466677 - DNA, 15 bp, Homo sapiens
cctggaccagcgcct

SEQ ID NO: 466678 - DNA, 15 bp, Homo sapiens
gcctggaccagcgcc

SEQ ID NO: 466679 - DNA, 15 bp, Homo sapiens
ggcctggaccagcgc

SEQ ID NO: 466680 - DNA, 15 bp, Homo sapiens
cggcctggaccagcg

SEQ ID NO: 466681 - DNA, 15 bp, Homo sapiens
tcggcctggaccagc

SEQ ID NO: 466682 - DNA, 15 bp, Homo sapiens
gtcggcctggaccag

SEQ ID NO: 466683 - DNA, 15 bp, Homo sapiens
ggtcggcctggacca

SEQ ID NO: 466684 - DNA, 15 bp, Homo sapiens
tggtcggcctggacc

SEQ ID NO: 466685 - DNA, 15 bp, Homo sapiens
ctggtcggcctggac

SEQ ID NO: 466686 - DNA, 15 bp, Homo sapiens
cctggtcggcctgga

SEQ ID NO: 466687 - DNA, 15 bp, Homo sapiens
tcctggtcggcctgg

SEQ ID NO: 466688 - DNA, 15 bp, Homo sapiens
ctcctggtcggcctg

SEQ ID NO: 466689 - DNA, 15 bp, Homo sapiens
cctcctggtcggcct

SEQ ID NO: 466690 - DNA, 15 bp, Homo sapiens
gcctcctggtcggcc

SEQ ID NO: 466691 - DNA, 15 bp, Homo sapiens
tgcctcctggtcggc

SEQ ID NO: 466692 - DNA, 15 bp, Homo sapiens
ctgcctcctggtcgg

SEQ ID NO: 466693 - DNA, 15 bp, Homo sapiens
cctgcctcctggtcg

SEQ ID NO: 466694 - DNA, 15 bp, Homo sapiens
ccctgcctcctggtc

SEQ ID NO: 466695 - DNA, 15 bp, Homo sapiens
gccctgcctcctggt

SEQ ID NO: 466696 - DNA, 15 bp, Homo sapiens
agccctgcctcctgg

SEQ ID NO: 466697 - DNA, 15 bp, Homo sapiens
gagccctgcctcctg

SEQ ID NO: 466698 - DNA, 15 bp, Homo sapiens
tgagccctgcctcct

SEQ ID NO: 466699 - DNA, 15 bp, Homo sapiens
gtgagccctgcctcc

SEQ ID NO: 466700 - DNA, 15 bp, Homo sapiens
tgtgagccctgcctc

SEQ ID NO: 466701 - DNA, 15 bp, Homo sapiens
ctgtgagccctgcct

SEQ ID NO: 466702 - DNA, 15 bp, Homo sapiens
cctgtgagccctgcc

SEQ ID NO: 466703 - DNA, 15 bp, Homo sapiens
gcctgtgagccctgc

SEQ ID NO: 466704 - DNA, 15 bp, Homo sapiens
ggcctgtgagccctg

SEQ ID NO: 466705 - DNA, 15 bp, Homo sapiens
gggcctgtgagccct

SEQ ID NO: 466706 - DNA, 15 bp, Homo sapiens
ggggcctgtgagccc

SEQ ID NO: 466707 - DNA, 15 bp, Homo sapiens
cggggcctgtgagcc

SEQ ID NO: 466708 - DNA, 15 bp, Homo sapiens
tcggggcctgtgagc

SEQ ID NO: 466709 - DNA, 15 bp, Homo sapiens
gtcggggcctgtgag

SEQ ID NO: 466710 - DNA, 15 bp, Homo sapiens
cgtcggggcctgtga

SEQ ID NO: 466711 - DNA, 15 bp, Homo sapiens
acgtcggggcctgtg

SEQ ID NO: 466712 - DNA, 15 bp, Homo sapiens
aacgtcggggcctgt

SEQ ID NO: 466713 - DNA, 15 bp, Homo sapiens
caacgtcggggcctg

SEQ ID NO: 466714 - DNA, 15 bp, Homo sapiens
tcaacgtcggggcct

SEQ ID NO: 466715 - DNA, 15 bp, Homo sapiens
ctcaacgtcggggcc

SEQ ID NO: 466716 - DNA, 15 bp, Homo sapiens
gctcaacgtcggggc

SEQ ID NO: 466717 - DNA, 15 bp, Homo sapiens
tgctcaacgtcgggg

SEQ ID NO: 466718 - DNA, 15 bp, Homo sapiens
ctgctcaacgtcggg

SEQ ID NO: 466719 - DNA, 15 bp, Homo sapiens
actgctcaacgtcgg

SEQ ID NO: 466720 - DNA, 15 bp, Homo sapiens
gactgctcaacgtcg

SEQ ID NO: 466721 - DNA, 15 bp, Homo sapiens
ggactgctcaacgtc

SEQ ID NO: 466722 - DNA, 15 bp, Homo sapiens
aggactgctcaacgt

SEQ ID NO: 466723 - DNA, 15 bp, Homo sapiens
gaggactgctcaacg

SEQ ID NO: 466724 - DNA, 15 bp, Homo sapiens
agaggactgctcaac

SEQ ID NO: 466725 - DNA, 15 bp, Homo sapiens
gagaggactgctcaa

SEQ ID NO: 466726 - DNA, 15 bp, Homo sapiens
ggagaggactgctca

SEQ ID NO: 466727 - DNA, 15 bp, Homo sapiens
gggagaggactgctc

SEQ ID NO: 466728 - DNA, 15 bp, Homo sapiens
ggggagaggactgct

SEQ ID NO: 466729 - DNA, 15 bp, Homo sapiens
tggggagaggactgc

SEQ ID NO: 466730 - DNA, 15 bp, Homo sapiens
ctggggagaggactg

SEQ ID NO: 466731 - DNA, 15 bp, Homo sapiens
gctggggagaggact

SEQ ID NO: 466732 - DNA, 15 bp, Homo sapiens
ggctggggagaggac

SEQ ID NO: 466733 - DNA, 15 bp, Homo sapiens
aggctggggagagga

SEQ ID NO: 466734 - DNA, 15 bp, Homo sapiens
caggctggggagagg

SEQ ID NO: 466735 - DNA, 15 bp, Homo sapiens
acaggctggggagag

SEQ ID NO: 466736 - DNA, 15 bp, Homo sapiens
gacaggctggggaga

SEQ ID NO: 466737 - DNA, 15 bp, Homo sapiens
agacaggctggggag

SEQ ID NO: 466738 - DNA, 15 bp, Homo sapiens
gagacaggctgggga

SEQ ID NO: 466739 - DNA, 15 bp, Homo sapiens
ggagacaggctgggg

SEQ ID NO: 466740 - DNA, 15 bp, Homo sapiens
gggagacaggctggg

SEQ ID NO: 466741 - DNA, 15 bp, Homo sapiens
ggggagacaggctgg

SEQ ID NO: 466742 - DNA, 15 bp, Homo sapiens
aggggagacaggctg

SEQ ID NO: 466743 - DNA, 15 bp, Homo sapiens
caggggagacaggct

SEQ ID NO: 466744 - DNA, 15 bp, Homo sapiens
gcaggggagacaggc

SEQ ID NO: 466745 - DNA, 15 bp, Homo sapiens
agcaggggagacagg

SEQ ID NO: 466746 - DNA, 15 bp, Homo sapiens
aagcaggggagacag

SEQ ID NO: 466747 - DNA, 15 bp, Homo sapiens
aaagcaggggagaca

SEQ ID NO: 466748 - DNA, 15 bp, Homo sapiens
gaaagcaggggagac

SEQ ID NO: 466749 - DNA, 15 bp, Homo sapiens
agaaagcaggggaga

SEQ ID NO: 466750 - DNA, 15 bp, Homo sapiens
gagaaagcaggggag

SEQ ID NO: 466751 - DNA, 15 bp, Homo sapiens
agagaaagcagggga

SEQ ID NO: 466752 - DNA, 15 bp, Homo sapiens
gagagaaagcagggg

SEQ ID NO: 466753 - DNA, 15 bp, Homo sapiens
ggagagaaagcaggg

SEQ ID NO: 466754 - DNA, 15 bp, Homo sapiens
tggagagaaagcagg

SEQ ID NO: 466755 - DNA, 15 bp, Homo sapiens
gtggagagaaagcag

SEQ ID NO: 466756 - DNA, 15 bp, Homo sapiens
ggtggagagaaagca

SEQ ID NO: 466757 - DNA, 15 bp, Homo sapiens
aggtggagagaaagc

SEQ ID NO: 466758 - DNA, 15 bp, Homo sapiens
aaggtggagagaaag

SEQ ID NO: 466759 - DNA, 15 bp, Homo sapiens
caaggtggagagaaa

SEQ ID NO: 466760 - DNA, 15 bp, Homo sapiens
ccaaggtggagagaa

SEQ ID NO: 466761 - DNA, 15 bp, Homo sapiens
cccaaggtggagaga

SEQ ID NO: 466762 - DNA, 15 bp, Homo sapiens
ccccaaggtggagag

SEQ ID NO: 466763 - DNA, 15 bp, Homo sapiens
accccaaggtggaga

SEQ ID NO: 466764 - DNA, 15 bp, Homo sapiens
caccccaaggtggag

SEQ ID NO: 466765 - DNA, 15 bp, Homo sapiens
acaccccaaggtgga

SEQ ID NO: 466766 - DNA, 15 bp, Homo sapiens
ttggtggccctgcag

SEQ ID NO: 466767 - DNA, 15 bp, Homo sapiens
gttggtggccctgca

SEQ ID NO: 466768 - DNA, 15 bp, Homo sapiens
agttggtggccctgc

SEQ ID NO: 466769 - DNA, 15 bp, Homo sapiens
aagttggtggccctg

SEQ ID NO: 466770 - DNA, 15 bp, Homo sapiens
taagttggtggccct

SEQ ID NO: 466771 - DNA, 15 bp, Homo sapiens
gtaagttggtggccc

SEQ ID NO: 466772 - DNA, 15 bp, Homo sapiens
tgtaagttggtggcc

SEQ ID NO: 466773 - DNA, 15 bp, Homo sapiens
ctgtaagttggtggc

SEQ ID NO: 466774 - DNA, 15 bp, Homo sapiens
cctgtaagttggtgg

SEQ ID NO: 466775 - DNA, 15 bp, Homo sapiens
ccctgtaagttggtg

SEQ ID NO: 466776 - DNA, 15 bp, Homo sapiens
gccctgtaagttggt

SEQ ID NO: 466777 - DNA, 15 bp, Homo sapiens
cgccctgtaagttgg

SEQ ID NO: 466778 - DNA, 15 bp, Homo sapiens
tcgccctgtaagttg

SEQ ID NO: 466779 - DNA, 15 bp, Homo sapiens
ctcgccctgtaagtt

SEQ ID NO: 466780 - DNA, 15 bp, Homo sapiens
cctcgccctgtaagt

SEQ ID NO: 466781 - DNA, 15 bp, Homo sapiens
gcctcgccctgtaag

SEQ ID NO: 466782 - DNA, 15 bp, Homo sapiens
tgcctcgccctgtaa

SEQ ID NO: 466783 - DNA, 15 bp, Homo sapiens
gtgcctcgccctgta

SEQ ID NO: 466784 - DNA, 15 bp, Homo sapiens
cgtgcctcgccctgt

SEQ ID NO: 466785 - DNA, 15 bp, Homo sapiens
ccgtgcctcgccctg

SEQ ID NO: 466786 - DNA, 15 bp, Homo sapiens
accgtgcctcgccct

SEQ ID NO: 466787 - DNA, 15 bp, Homo sapiens
caccgtgcctcgccc

SEQ ID NO: 466788 - DNA, 15 bp, Homo sapiens
acaccgtgcctcgcc

SEQ ID NO: 466789 - DNA, 15 bp, Homo sapiens
cacaccgtgcctcgc

SEQ ID NO: 466790 - DNA, 15 bp, Homo sapiens
tcacaccgtgcctcg

SEQ ID NO: 466791 - DNA, 15 bp, Homo sapiens
ctcacaccgtgcctc

SEQ ID NO: 466792 - DNA, 15 bp, Homo sapiens
actcacaccgtgcct

SEQ ID NO: 466793 - DNA, 15 bp, Homo sapiens
cactcacaccgtgcc

SEQ ID NO: 466794 - DNA, 15 bp, Homo sapiens
gcactcacaccgtgc

SEQ ID NO: 466795 - DNA, 15 bp, Homo sapiens
ggcactcacaccgtg

SEQ ID NO: 466796 - DNA, 15 bp, Homo sapiens
cggcactcacaccgt

SEQ ID NO: 466797 - DNA, 15 bp, Homo sapiens
gcggcactcacaccg

SEQ ID NO: 466798 - DNA, 15 bp, Homo sapiens
ggcggcactcacacc

SEQ ID NO: 466799 - DNA, 15 bp, Homo sapiens
aggcggcactcacac

SEQ ID NO: 466800 - DNA, 15 bp, Homo sapiens
caggcggcactcaca

SEQ ID NO: 466801 - DNA, 15 bp, Homo sapiens
ccaggcggcactcac

SEQ ID NO: 466802 - DNA, 15 bp, Homo sapiens
tccaggcggcactca

SEQ ID NO: 466803 - DNA, 15 bp, Homo sapiens
ctccaggcggcactc

SEQ ID NO: 466804 - DNA, 15 bp, Homo sapiens
cctccaggcggcact

SEQ ID NO: 466805 - DNA, 15 bp, Homo sapiens
acctccaggcggcac

SEQ ID NO: 466806 - DNA, 15 bp, Homo sapiens
cacctccaggcggca

SEQ ID NO: 466807 - DNA, 15 bp, Homo sapiens
gcacctccaggcggc

SEQ ID NO: 466808 - DNA, 15 bp, Homo sapiens
cgcacctccaggcgg

SEQ ID NO: 466809 - DNA, 15 bp, Homo sapiens
tcgcacctccaggcg

SEQ ID NO: 466810 - DNA, 15 bp, Homo sapiens
ctcgcacctccaggc

SEQ ID NO: 466811 - DNA, 15 bp, Homo sapiens
cctcgcacctccagg

SEQ ID NO: 466812 - DNA, 15 bp, Homo sapiens
acctcgcacctccag

SEQ ID NO: 466813 - DNA, 15 bp, Homo sapiens
cacctcgcacctcca

SEQ ID NO: 466814 - DNA, 15 bp, Homo sapiens
tcacctcgcacctcc

SEQ ID NO: 466815 - DNA, 15 bp, Homo sapiens
ctcacctcgcacctc

SEQ ID NO: 466816 - DNA, 15 bp, Homo sapiens
cctcacctcgcacct

SEQ ID NO: 466817 - DNA, 15 bp, Homo sapiens
tcctcacctcgcacc

SEQ ID NO: 466818 - DNA, 15 bp, Homo sapiens
ctcctcacctcgcac

SEQ ID NO: 466819 - DNA, 15 bp, Homo sapiens
gctcctcacctcgca

SEQ ID NO: 466820 - DNA, 15 bp, Homo sapiens
ggctcctcacctcgc

SEQ ID NO: 466821 - DNA, 15 bp, Homo sapiens
gggctcctcacctcg

SEQ ID NO: 466822 - DNA, 15 bp, Homo sapiens
agggctcctcacctc

SEQ ID NO: 466823 - DNA, 15 bp, Homo sapiens
gagggctcctcacct

SEQ ID NO: 466824 - DNA, 15 bp, Homo sapiens
cgagggctcctcacc

SEQ ID NO: 466825 - DNA, 15 bp, Homo sapiens
ccgagggctcctcac

SEQ ID NO: 466826 - DNA, 15 bp, Homo sapiens
cccgagggctcctca

SEQ ID NO: 466827 - DNA, 15 bp, Homo sapiens
ccccgagggctcctc

SEQ ID NO: 466828 - DNA, 15 bp, Homo sapiens
gccccgagggctcct

SEQ ID NO: 466829 - DNA, 15 bp, Homo sapiens
ggccccgagggctcc

SEQ ID NO: 466830 - DNA, 15 bp, Homo sapiens
tggccccgagggctc

SEQ ID NO: 466831 - DNA, 15 bp, Homo sapiens
ctggccccgagggct

SEQ ID NO: 466832 - DNA, 15 bp, Homo sapiens
cctggccccgagggc

SEQ ID NO: 466833 - DNA, 15 bp, Homo sapiens
ccctggccccgaggg

SEQ ID NO: 466834 - DNA, 15 bp, Homo sapiens
gccctggccccgagg

SEQ ID NO: 466835 - DNA, 15 bp, Homo sapiens
ggccctggccccgag

SEQ ID NO: 466836 - DNA, 15 bp, Homo sapiens
aggccctggccccga

SEQ ID NO: 466837 - DNA, 15 bp, Homo sapiens
caggccctggccccg

SEQ ID NO: 466838 - DNA, 15 bp, Homo sapiens
ccaggccctggcccc

SEQ ID NO: 466839 - DNA, 15 bp, Homo sapiens
cccaggccctggccc

SEQ ID NO: 466840 - DNA, 15 bp, Homo sapiens
tcccaggccctggcc

SEQ ID NO: 466841 - DNA, 15 bp, Homo sapiens
ctcccaggccctggc

SEQ ID NO: 466842 - DNA, 15 bp, Homo sapiens
tctcccaggccctgg

SEQ ID NO: 466843 - DNA, 15 bp, Homo sapiens
atctcccaggccctg

SEQ ID NO: 466844 - DNA, 15 bp, Homo sapiens
catctcccaggccct

SEQ ID NO: 466845 - DNA, 15 bp, Homo sapiens
ccatctcccaggccc

SEQ ID NO: 466846 - DNA, 15 bp, Homo sapiens
cccatctcccaggcc

SEQ ID NO: 466847 - DNA, 15 bp, Homo sapiens
tcccatctcccaggc

SEQ ID NO: 466848 - DNA, 15 bp, Homo sapiens
ttcccatctcccagg

SEQ ID NO: 466849 - DNA, 15 bp, Homo sapiens
cttcccatctcccag

SEQ ID NO: 466850 - DNA, 15 bp, Homo sapiens
tcttcccatctccca

SEQ ID NO: 466851 - DNA, 15 bp, Homo sapiens
ctcttcccatctccc

SEQ ID NO: 466852 - DNA, 15 bp, Homo sapiens
gctcttcccatctcc

SEQ ID NO: 466853 - DNA, 15 bp, Homo sapiens
cgctcttcccatctc

SEQ ID NO: 466854 - DNA, 15 bp, Homo sapiens
ccgctcttcccatct

SEQ ID NO: 466855 - DNA, 15 bp, Homo sapiens
cccgctcttcccatc

SEQ ID NO: 466856 - DNA, 15 bp, Homo sapiens
gcccgctcttcccat

SEQ ID NO: 466857 - DNA, 15 bp, Homo sapiens
cgcccgctcttccca

SEQ ID NO: 466858 - DNA, 15 bp, Homo sapiens
ccgcccgctcttccc

SEQ ID NO: 466859 - DNA, 15 bp, Homo sapiens
gccgcccgctcttcc

SEQ ID NO: 466860 - DNA, 15 bp, Homo sapiens
tgccgcccgctcttc

SEQ ID NO: 466861 - DNA, 15 bp, Homo sapiens
ctgccgcccgctctt

SEQ ID NO: 466862 - DNA, 15 bp, Homo sapiens
actgccgcccgctct

SEQ ID NO: 466863 - DNA, 15 bp, Homo sapiens
cactgccgcccgctc

SEQ ID NO: 466864 - DNA, 15 bp, Homo sapiens
ccactgccgcccgct

SEQ ID NO: 466865 - DNA, 15 bp, Homo sapiens
cccactgccgcccgc

SEQ ID NO: 466866 - DNA, 15 bp, Homo sapiens
ccccactgccgcccg

SEQ ID NO: 466867 - DNA, 15 bp, Homo sapiens
tccccactgccgccc

SEQ ID NO: 466868 - DNA, 15 bp, Homo sapiens
gtccccactgccgcc

SEQ ID NO: 466869 - DNA, 15 bp, Homo sapiens
ggtccccactgccgc

SEQ ID NO: 466870 - DNA, 15 bp, Homo sapiens
gggtccccactgccg

SEQ ID NO: 466871 - DNA, 15 bp, Homo sapiens
agggtccccactgcc

SEQ ID NO: 466872 - DNA, 15 bp, Homo sapiens
cagggtccccactgc

SEQ ID NO: 466873 - DNA, 15 bp, Homo sapiens
ccagggtccccactg

SEQ ID NO: 466874 - DNA, 15 bp, Homo sapiens
cccagggtccccact

SEQ ID NO: 466875 - DNA, 15 bp, Homo sapiens
gcccagggtccccac

SEQ ID NO: 466876 - DNA, 15 bp, Homo sapiens
agcccagggtcccca

SEQ ID NO: 466877 - DNA, 15 bp, Homo sapiens
aagcccagggtcccc

SEQ ID NO: 466878 - DNA, 15 bp, Homo sapiens
aaagcccagggtccc

SEQ ID NO: 466879 - DNA, 15 bp, Homo sapiens
caaagcccagggtcc

SEQ ID NO: 466880 - DNA, 15 bp, Homo sapiens
gcaaagcccagggtc

SEQ ID NO: 466881 - DNA, 15 bp, Homo sapiens
agcaaagcccagggt

SEQ ID NO: 466882 - DNA, 15 bp, Homo sapiens
gagcaaagcccaggg

SEQ ID NO: 466883 - DNA, 15 bp, Homo sapiens
ggagcaaagcccagg

SEQ ID NO: 466884 - DNA, 15 bp, Homo sapiens
cggagcaaagcccag

SEQ ID NO: 466885 - DNA, 15 bp, Homo sapiens
acggagcaaagccca

SEQ ID NO: 466886 - DNA, 15 bp, Homo sapiens
aacggagcaaagccc

SEQ ID NO: 466887 - DNA, 15 bp, Homo sapiens
caacggagcaaagcc

SEQ ID NO: 466888 - DNA, 15 bp, Homo sapiens
acaacggagcaaagc

SEQ ID NO: 466889 - DNA, 15 bp, Homo sapiens
gacaacggagcaaag

SEQ ID NO: 466890 - DNA, 15 bp, Homo sapiens
ggacaacggagcaaa

SEQ ID NO: 466891 - DNA, 15 bp, Homo sapiens
aggacaacggagcaa

SEQ ID NO: 466892 - DNA, 15 bp, Homo sapiens
gaggacaacggagca

SEQ ID NO: 466893 - DNA, 15 bp, Homo sapiens
cgaggacaacggagc

SEQ ID NO: 466894 - DNA, 15 bp, Homo sapiens
ccgaggacaacggag

SEQ ID NO: 466895 - DNA, 15 bp, Homo sapiens
gccgaggacaacgga

SEQ ID NO: 466896 - DNA, 15 bp, Homo sapiens
ggccgaggacaacgg

SEQ ID NO: 466897 - DNA, 15 bp, Homo sapiens
tggccgaggacaacg

SEQ ID NO: 466898 - DNA, 15 bp, Homo sapiens
ttggccgaggacaac

SEQ ID NO: 466899 - DNA, 15 bp, Homo sapiens
cttggccgaggacaa

SEQ ID NO: 466900 - DNA, 15 bp, Homo sapiens
gcttggccgaggaca

SEQ ID NO: 466901 - DNA, 15 bp, Homo sapiens
tgcttggccgaggac

SEQ ID NO: 466902 - DNA, 15 bp, Homo sapiens
gtgcttggccgagga

SEQ ID NO: 466903 - DNA, 15 bp, Homo sapiens
ggtgcttggccgagg

SEQ ID NO: 466904 - DNA, 15 bp, Homo sapiens
aggtgcttggccgag

SEQ ID NO: 466905 - DNA, 15 bp, Homo sapiens
caggtgcttggccga

SEQ ID NO: 466906 - DNA, 15 bp, Homo sapiens
gcaggtgcttggccg

SEQ ID NO: 466907 - DNA, 15 bp, Homo sapiens
ggcaggtgcttggcc

SEQ ID NO: 466908 - DNA, 15 bp, Homo sapiens
gggcaggtgcttggc

SEQ ID NO: 466909 - DNA, 15 bp, Homo sapiens
agggcaggtgcttgg

SEQ ID NO: 466910 - DNA, 15 bp, Homo sapiens
cagggcaggtgcttg

SEQ ID NO: 466911 - DNA, 15 bp, Homo sapiens
ccagggcaggtgctt

SEQ ID NO: 466912 - DNA, 15 bp, Homo sapiens
gccagggcaggtgct

SEQ ID NO: 466913 - DNA, 15 bp, Homo sapiens
agccagggcaggtgc

SEQ ID NO: 466914 - DNA, 15 bp, Homo sapiens
cagccagggcaggtg

SEQ ID NO: 466915 - DNA, 15 bp, Homo sapiens
gcagccagggcaggt

SEQ ID NO: 466916 - DNA, 15 bp, Homo sapiens
tgcagccagggcagg

SEQ ID NO: 466917 - DNA, 15 bp, Homo sapiens
ttgcagccagggcag

SEQ ID NO: 466918 - DNA, 15 bp, Homo sapiens
cttgcagccagggca

SEQ ID NO: 466919 - DNA, 15 bp, Homo sapiens
ccttgcagccagggc

SEQ ID NO: 466920 - DNA, 15 bp, Homo sapiens
cccttgcagccaggg

SEQ ID NO: 466921 - DNA, 15 bp, Homo sapiens
gcccttgcagccagg

SEQ ID NO: 466922 - DNA, 15 bp, Homo sapiens
tgcccttgcagccag

SEQ ID NO: 466923 - DNA, 15 bp, Homo sapiens
gtgcccttgcagcca

SEQ ID NO: 466924 - DNA, 15 bp, Homo sapiens
cgtgcccttgcagcc

SEQ ID NO: 466925 - DNA, 15 bp, Homo sapiens
ccgtgcccttgcagc

SEQ ID NO: 466926 - DNA, 15 bp, Homo sapiens
tccgtgcccttgcag

SEQ ID NO: 466927 - DNA, 15 bp, Homo sapiens
gtccgtgcccttgca

SEQ ID NO: 466928 - DNA, 15 bp, Homo sapiens
ggtccgtgcccttgc

SEQ ID NO: 466929 - DNA, 15 bp, Homo sapiens
gggtccgtgcccttg

SEQ ID NO: 466930 - DNA, 15 bp, Homo sapiens
agggtccgtgccctt

SEQ ID NO: 466931 - DNA, 15 bp, Homo sapiens
cagggtccgtgccct

SEQ ID NO: 466932 - DNA, 15 bp, Homo sapiens
gcagggtccgtgccc

SEQ ID NO: 466933 - DNA, 15 bp, Homo sapiens
ggcagggtccgtgcc

SEQ ID NO: 466934 - DNA, 15 bp, Homo sapiens
tggcagggtccgtgc

SEQ ID NO: 466935 - DNA, 15 bp, Homo sapiens
gtggcagggtccgtg

SEQ ID NO: 466936 - DNA, 15 bp, Homo sapiens
cgtggcagggtccgt

SEQ ID NO: 466937 - DNA, 15 bp, Homo sapiens
gcgtggcagggtccg

SEQ ID NO: 466938 - DNA, 15 bp, Homo sapiens
ggcgtggcagggtcc

SEQ ID NO: 466939 - DNA, 15 bp, Homo sapiens
gggcgtggcagggtc

SEQ ID NO: 466940 - DNA, 15 bp, Homo sapiens
tgggcgtggcagggt

SEQ ID NO: 466941 - DNA, 15 bp, Homo sapiens
ctgggcgtggcaggg

SEQ ID NO: 466942 - DNA, 15 bp, Homo sapiens
tctgggcgtggcagg

SEQ ID NO: 466943 - DNA, 15 bp, Homo sapiens
atctgggcgtggcag

SEQ ID NO: 466944 - DNA, 15 bp, Homo sapiens
catctgggcgtggca

SEQ ID NO: 466945 - DNA, 15 bp, Homo sapiens
ccatctgggcgtggc

SEQ ID NO: 466946 - DNA, 15 bp, Homo sapiens
cccatctgggcgtgg

SEQ ID NO: 466947 - DNA, 15 bp, Homo sapiens
gcccatctgggcgtg

SEQ ID NO: 466948 - DNA, 15 bp, Homo sapiens
tgcccatctgggcgt

SEQ ID NO: 466949 - DNA, 15 bp, Homo sapiens
ttgcccatctgggcg

SEQ ID NO: 466950 - DNA, 15 bp, Homo sapiens
attgcccatctgggc

SEQ ID NO: 466951 - DNA, 15 bp, Homo sapiens
tattgcccatctggg

SEQ ID NO: 466952 - DNA, 15 bp, Homo sapiens
ctattgcccatctgg

SEQ ID NO: 466953 - DNA, 15 bp, Homo sapiens
gctattgcccatctg

SEQ ID NO: 466954 - DNA, 15 bp, Homo sapiens
agctattgcccatct

SEQ ID NO: 466955 - DNA, 15 bp, Homo sapiens
aagctattgcccatc

SEQ ID NO: 466956 - DNA, 15 bp, Homo sapiens
gaagctattgcccat

SEQ ID NO: 466957 - DNA, 15 bp, Homo sapiens
ggaagctattgccca

SEQ ID NO: 466958 - DNA, 15 bp, Homo sapiens
tggaagctattgccc

SEQ ID NO: 466959 - DNA, 15 bp, Homo sapiens
ctggaagctattgcc

SEQ ID NO: 466960 - DNA, 15 bp, Homo sapiens
tctggaagctattgc

SEQ ID NO: 466961 - DNA, 15 bp, Homo sapiens
ttctggaagctattg

SEQ ID NO: 466962 - DNA, 15 bp, Homo sapiens
cttctggaagctatt

SEQ ID NO: 466963 - DNA, 15 bp, Homo sapiens
ccttctggaagctat

SEQ ID NO: 466964 - DNA, 15 bp, Homo sapiens
gccttctggaagcta

SEQ ID NO: 466965 - DNA, 15 bp, Homo sapiens
agccttctggaagct

SEQ ID NO: 466966 - DNA, 15 bp, Homo sapiens
cagccttctggaagc

SEQ ID NO: 466967 - DNA, 15 bp, Homo sapiens
ccagccttctggaag

SEQ ID NO: 466968 - DNA, 15 bp, Homo sapiens
cccagccttctggaa

SEQ ID NO: 466969 - DNA, 15 bp, Homo sapiens
tcccagccttctgga

SEQ ID NO: 466970 - DNA, 15 bp, Homo sapiens
ctcccagccttctgg

SEQ ID NO: 466971 - DNA, 15 bp, Homo sapiens
cctcccagccttctg

SEQ ID NO: 466972 - DNA, 15 bp, Homo sapiens
tcctcccagccttct

SEQ ID NO: 466973 - DNA, 15 bp, Homo sapiens
gtcctcccagccttc

SEQ ID NO: 466974 - DNA, 15 bp, Homo sapiens
tgtcctcccagcctt

SEQ ID NO: 466975 - DNA, 15 bp, Homo sapiens
gtgtcctcccagcct

SEQ ID NO: 466976 - DNA, 15 bp, Homo sapiens
tgtgtcctcccagcc

SEQ ID NO: 466977 - DNA, 15 bp, Homo sapiens
ctgtgtcctcccagc

SEQ ID NO: 466978 - DNA, 15 bp, Homo sapiens
actgtgtcctcccag

SEQ ID NO: 466979 - DNA, 15 bp, Homo sapiens
cactgtgtcctccca

SEQ ID NO: 466980 - DNA, 15 bp, Homo sapiens
tcactgtgtcctccc

SEQ ID NO: 466981 - DNA, 15 bp, Homo sapiens
gtcactgtgtcctcc

SEQ ID NO: 466982 - DNA, 15 bp, Homo sapiens
tgtcactgtgtcctc

SEQ ID NO: 466983 - DNA, 15 bp, Homo sapiens
atgtcactgtgtcct

SEQ ID NO: 466984 - DNA, 15 bp, Homo sapiens
catgtcactgtgtcc

SEQ ID NO: 466985 - DNA, 15 bp, Homo sapiens
ccatgtcactgtgtc

SEQ ID NO: 466986 - DNA, 15 bp, Homo sapiens
gccatgtcactgtgt

SEQ ID NO: 466987 - DNA, 15 bp, Homo sapiens
ggccatgtcactgtg

SEQ ID NO: 466988 - DNA, 15 bp, Homo sapiens
aggccatgtcactgt

SEQ ID NO: 466989 - DNA, 15 bp, Homo sapiens
gaggccatgtcactg

SEQ ID NO: 466990 - DNA, 15 bp, Homo sapiens
ggaggccatgtcact

SEQ ID NO: 466991 - DNA, 15 bp, Homo sapiens
aggaggccatgtcac

SEQ ID NO: 466992 - DNA, 15 bp, Homo sapiens
gaggaggccatgtca

SEQ ID NO: 466993 - DNA, 15 bp, Homo sapiens
agaggaggccatgtc

SEQ ID NO: 466994 - DNA, 15 bp, Homo sapiens
aagaggaggccatgt

SEQ ID NO: 466995 - DNA, 15 bp, Homo sapiens
gaagaggaggccatg

SEQ ID NO: 466996 - DNA, 15 bp, Homo sapiens
agaagaggaggccat

SEQ ID NO: 466997 - DNA, 15 bp, Homo sapiens
cagaagaggaggcca

SEQ ID NO: 466998 - DNA, 15 bp, Homo sapiens
gcagaagaggaggcc

SEQ ID NO: 466999 - DNA, 15 bp, Homo sapiens
tgcagaagaggaggc

SEQ ID NO: 467000 - DNA, 15 bp, Homo sapiens
ctgcagaagaggagg

SEQ ID NO: 467001 - DNA, 15 bp, Homo sapiens
actgcagaagaggag

SEQ ID NO: 467002 - DNA, 15 bp, Homo sapiens
cactgcagaagagga

SEQ ID NO: 467003 - DNA, 15 bp, Homo sapiens
gcactgcagaagagg

SEQ ID NO: 467004 - DNA, 15 bp, Homo sapiens
ggcactgcagaagag

SEQ ID NO: 467005 - DNA, 15 bp, Homo sapiens
aggcactgcagaaga

SEQ ID NO: 467006 - DNA, 15 bp, Homo sapiens
gaggcactgcagaag

SEQ ID NO: 467007 - DNA, 15 bp, Homo sapiens
tgaggcactgcagaa

SEQ ID NO: 467008 - DNA, 15 bp, Homo sapiens
ctgaggcactgcaga

SEQ ID NO: 467009 - DNA, 15 bp, Homo sapiens
actgaggcactgcag

SEQ ID NO: 467010 - DNA, 15 bp, Homo sapiens
cactgaggcactgca

SEQ ID NO: 467011 - DNA, 15 bp, Homo sapiens
tcactgaggcactgc

SEQ ID NO: 467012 - DNA, 15 bp, Homo sapiens
gtcactgaggcactg

SEQ ID NO: 467013 - DNA, 15 bp, Homo sapiens
ggtcactgaggcact

SEQ ID NO: 467014 - DNA, 15 bp, Homo sapiens
tggtcactgaggcac

SEQ ID NO: 467015 - DNA, 15 bp, Homo sapiens
ctggtcactgaggca

SEQ ID NO: 467016 - DNA, 15 bp, Homo sapiens
cctggtcactgaggc

SEQ ID NO: 467017 - DNA, 15 bp, Homo sapiens
gcctggtcactgagg

SEQ ID NO: 467018 - DNA, 15 bp, Homo sapiens
agcctggtcactgag

SEQ ID NO: 467019 - DNA, 15 bp, Homo sapiens
cagcctggtcactga

SEQ ID NO: 467020 - DNA, 15 bp, Homo sapiens
ccagcctggtcactg

SEQ ID NO: 467021 - DNA, 15 bp, Homo sapiens
gccagcctggtcact

SEQ ID NO: 467022 - DNA, 15 bp, Homo sapiens
agccagcctggtcac

SEQ ID NO: 467023 - DNA, 15 bp, Homo sapiens
gagccagcctggtca

SEQ ID NO: 467024 - DNA, 15 bp, Homo sapiens
ggagccagcctggtc

SEQ ID NO: 467025 - DNA, 15 bp, Homo sapiens
aggagccagcctggt

SEQ ID NO: 467026 - DNA, 15 bp, Homo sapiens
caggagccagcctgg

SEQ ID NO: 467027 - DNA, 15 bp, Homo sapiens
ccaggagccagcctg

SEQ ID NO: 467028 - DNA, 15 bp, Homo sapiens
cccaggagccagcct

SEQ ID NO: 467029 - DNA, 15 bp, Homo sapiens
ccccaggagccagcc

SEQ ID NO: 467030 - DNA, 15 bp, Homo sapiens
tccccaggagccagc

SEQ ID NO: 467031 - DNA, 15 bp, Homo sapiens
atccccaggagccag

SEQ ID NO: 467032 - DNA, 15 bp, Homo sapiens
catccccaggagcca

SEQ ID NO: 467033 - DNA, 15 bp, Homo sapiens
ccatccccaggagcc

SEQ ID NO: 467034 - DNA, 15 bp, Homo sapiens
gccatccccaggagc

SEQ ID NO: 467035 - DNA, 15 bp, Homo sapiens
ggccatccccaggag

SEQ ID NO: 467036 - DNA, 15 bp, Homo sapiens
tggccatccccagga

SEQ ID NO: 467037 - DNA, 15 bp, Homo sapiens
ctggccatccccagg

SEQ ID NO: 467038 - DNA, 15 bp, Homo sapiens
cctggccatccccag

SEQ ID NO: 467039 - DNA, 15 bp, Homo sapiens
acctggccatcccca

SEQ ID NO: 467040 - DNA, 15 bp, Homo sapiens
tacctggccatcccc

SEQ ID NO: 467041 - DNA, 15 bp, Homo sapiens
atacctggccatccc

SEQ ID NO: 467042 - DNA, 15 bp, Homo sapiens
catacctggccatcc

SEQ ID NO: 467043 - DNA, 15 bp, Homo sapiens
acatacctggccatc

SEQ ID NO: 467044 - DNA, 15 bp, Homo sapiens
tacatacctggccat

SEQ ID NO: 467045 - DNA, 15 bp, Homo sapiens
gtacatacctggcca

SEQ ID NO: 467046 - DNA, 15 bp, Homo sapiens
ggtacatacctggcc

SEQ ID NO: 467047 - DNA, 15 bp, Homo sapiens
tggtacatacctggc

SEQ ID NO: 467048 - DNA, 15 bp, Homo sapiens
gtggtacatacctgg

SEQ ID NO: 467049 - DNA, 15 bp, Homo sapiens
ggtggtacatacctg

SEQ ID NO: 467050 - DNA, 15 bp, Homo sapiens
gggtggtacatacct

SEQ ID NO: 467051 - DNA, 15 bp, Homo sapiens
cgggtggtacatacc

SEQ ID NO: 467052 - DNA, 15 bp, Homo sapiens
tcgggtggtacatac

SEQ ID NO: 467053 - DNA, 15 bp, Homo sapiens
gtcgggtggtacata

SEQ ID NO: 467054 - DNA, 15 bp, Homo sapiens
tgtcgggtggtacat

SEQ ID NO: 467055 - DNA, 15 bp, Homo sapiens
gtgtcgggtggtaca

SEQ ID NO: 467056 - DNA, 15 bp, Homo sapiens
ggtgtcgggtggtac

SEQ ID NO: 467057 - DNA, 15 bp, Homo sapiens
gggtgtcgggtggta

SEQ ID NO: 467058 - DNA, 15 bp, Homo sapiens
tgggtgtcgggtggt

SEQ ID NO: 467059 - DNA, 15 bp, Homo sapiens
ctgggtgtcgggtgg

SEQ ID NO: 467060 - DNA, 15 bp, Homo sapiens
cctgggtgtcgggtg

SEQ ID NO: 467061 - DNA, 15 bp, Homo sapiens
ccctgggtgtcgggt

SEQ ID NO: 467062 - DNA, 15 bp, Homo sapiens
gccctgggtgtcggg

SEQ ID NO: 467063 - DNA, 15 bp, Homo sapiens
tgccctgggtgtcgg

SEQ ID NO: 467064 - DNA, 15 bp, Homo sapiens
gtgccctgggtgtcg

SEQ ID NO: 467065 - DNA, 15 bp, Homo sapiens
tgtgccctgggtgtc

SEQ ID NO: 467066 - DNA, 15 bp, Homo sapiens
ttgtgccctgggtgt

SEQ ID NO: 467067 - DNA, 15 bp, Homo sapiens
cttgtgccctgggtg

SEQ ID NO: 467068 - DNA, 15 bp, Homo sapiens
acttgtgccctgggt

SEQ ID NO: 467069 - DNA, 15 bp, Homo sapiens
gacttgtgccctggg

SEQ ID NO: 467070 - DNA, 15 bp, Homo sapiens
tgacttgtgccctgg

SEQ ID NO: 467071 - DNA, 15 bp, Homo sapiens
ctgacttgtgccctg

SEQ ID NO: 467072 - DNA, 15 bp, Homo sapiens
actgacttgtgccct

SEQ ID NO: 467073 - DNA, 15 bp, Homo sapiens
cactgacttgtgccc

SEQ ID NO: 467074 - DNA, 15 bp, Homo sapiens
ccactgacttgtgcc

SEQ ID NO: 467075 - DNA, 15 bp, Homo sapiens
gccactgacttgtgc

SEQ ID NO: 467076 - DNA, 15 bp, Homo sapiens
agccactgacttgtg

SEQ ID NO: 467077 - DNA, 15 bp, Homo sapiens
cagccactgacttgt

SEQ ID NO: 467078 - DNA, 15 bp, Homo sapiens
tcagccactgacttg

SEQ ID NO: 467079 - DNA, 15 bp, Homo sapiens
ctcagccactgactt

SEQ ID NO: 467080 - DNA, 15 bp, Homo sapiens
gctcagccactgact

SEQ ID NO: 467081 - DNA, 15 bp, Homo sapiens
ggctcagccactgac

SEQ ID NO: 467082 - DNA, 15 bp, Homo sapiens
gggctcagccactga

SEQ ID NO: 467083 - DNA, 15 bp, Homo sapiens
agggctcagccactg

SEQ ID NO: 467084 - DNA, 15 bp, Homo sapiens
cagggctcagccact

SEQ ID NO: 467085 - DNA, 15 bp, Homo sapiens
ccagggctcagccac

SEQ ID NO: 467086 - DNA, 15 bp, Homo sapiens
gccagggctcagcca

SEQ ID NO: 467087 - DNA, 15 bp, Homo sapiens
ggccagggctcagcc

SEQ ID NO: 467088 - DNA, 15 bp, Homo sapiens
gggccagggctcagc

SEQ ID NO: 467089 - DNA, 15 bp, Homo sapiens
agggccagggctcag

SEQ ID NO: 467090 - DNA, 15 bp, Homo sapiens
aagggccagggctca

SEQ ID NO: 467091 - DNA, 15 bp, Homo sapiens
caagggccagggctc

SEQ ID NO: 467092 - DNA, 15 bp, Homo sapiens
ccaagggccagggct

SEQ ID NO: 467093 - DNA, 15 bp, Homo sapiens
accaagggccagggc

SEQ ID NO: 467094 - DNA, 15 bp, Homo sapiens
gaccaagggccaggg

SEQ ID NO: 467095 - DNA, 15 bp, Homo sapiens
ggaccaagggccagg

SEQ ID NO: 467096 - DNA, 15 bp, Homo sapiens
aggaccaagggccag

SEQ ID NO: 467097 - DNA, 15 bp, Homo sapiens
caggaccaagggcca

SEQ ID NO: 467098 - DNA, 15 bp, Homo sapiens
ccaggaccaagggcc

SEQ ID NO: 467099 - DNA, 15 bp, Homo sapiens
cccaggaccaagggc

SEQ ID NO: 467100 - DNA, 15 bp, Homo sapiens
ccccaggaccaaggg

SEQ ID NO: 467101 - DNA, 15 bp, Homo sapiens
gccccaggaccaagg

SEQ ID NO: 467102 - DNA, 15 bp, Homo sapiens
tgccccaggaccaag

SEQ ID NO: 467103 - DNA, 15 bp, Homo sapiens
ctgccccaggaccaa

SEQ ID NO: 467104 - DNA, 15 bp, Homo sapiens
gctgccccaggacca

SEQ ID NO: 467105 - DNA, 15 bp, Homo sapiens
ggctgccccaggacc

SEQ ID NO: 467106 - DNA, 15 bp, Homo sapiens
tggctgccccaggac

SEQ ID NO: 467107 - DNA, 15 bp, Homo sapiens
atggctgccccagga

SEQ ID NO: 467108 - DNA, 15 bp, Homo sapiens
gatggctgccccagg

SEQ ID NO: 467109 - DNA, 15 bp, Homo sapiens
tgatggctgccccag

SEQ ID NO: 467110 - DNA, 15 bp, Homo sapiens
ctgatggctgcccca

SEQ ID NO: 467111 - DNA, 15 bp, Homo sapiens
actgatggctgcccc

SEQ ID NO: 467112 - DNA, 15 bp, Homo sapiens
tactgatggctgccc

SEQ ID NO: 467113 - DNA, 15 bp, Homo sapiens
ttactgatggctgcc

SEQ ID NO: 467114 - DNA, 15 bp, Homo sapiens
tttactgatggctgc

SEQ ID NO: 467115 - DNA, 15 bp, Homo sapiens
atttactgatggctg

SEQ ID NO: 467116 - DNA, 15 bp, Homo sapiens
catttactgatggct

SEQ ID NO: 467117 - DNA, 15 bp, Homo sapiens
ccatttactgatggc

SEQ ID NO: 467118 - DNA, 15 bp, Homo sapiens
cccatttactgatgg

SEQ ID NO: 467119 - DNA, 15 bp, Homo sapiens
tcccatttactgatg

SEQ ID NO: 467120 - DNA, 15 bp, Homo sapiens
ctcccatttactgat

SEQ ID NO: 467121 - DNA, 15 bp, Homo sapiens
cctcccatttactga

SEQ ID NO: 467122 - DNA, 15 bp, Homo sapiens
gcctcccatttactg

SEQ ID NO: 467123 - DNA, 15 bp, Homo sapiens
agcctcccatttact

SEQ ID NO: 467124 - DNA, 15 bp, Homo sapiens
cagcctcccatttac

SEQ ID NO: 467125 - DNA, 15 bp, Homo sapiens
acagcctcccattta

SEQ ID NO: 467126 - DNA, 15 bp, Homo sapiens
tacagcctcccattt

SEQ ID NO: 467127 - DNA, 15 bp, Homo sapiens
ctacagcctcccatt

SEQ ID NO: 467128 - DNA, 15 bp, Homo sapiens
cctacagcctcccat

SEQ ID NO: 467129 - DNA, 15 bp, Homo sapiens
ccctacagcctccca

SEQ ID NO: 467130 - DNA, 15 bp, Homo sapiens
cccctacagcctccc

SEQ ID NO: 467131 - DNA, 15 bp, Homo sapiens
gcccctacagcctcc

SEQ ID NO: 467132 - DNA, 15 bp, Homo sapiens
ggcccctacagcctc

SEQ ID NO: 467133 - DNA, 15 bp, Homo sapiens
gggcccctacagcct

SEQ ID NO: 467134 - DNA, 15 bp, Homo sapiens
agggcccctacagcc

SEQ ID NO: 467135 - DNA, 15 bp, Homo sapiens
gagggcccctacagc

SEQ ID NO: 467136 - DNA, 15 bp, Homo sapiens
ggagggcccctacag

SEQ ID NO: 467137 - DNA, 15 bp, Homo sapiens
tggagggcccctaca

SEQ ID NO: 467138 - DNA, 15 bp, Homo sapiens
atggagggcccctac

SEQ ID NO: 467139 - DNA, 15 bp, Homo sapiens
aatggagggccccta

SEQ ID NO: 467140 - DNA, 15 bp, Homo sapiens
gaatggagggcccct

SEQ ID NO: 467141 - DNA, 15 bp, Homo sapiens
tgaatggagggcccc

SEQ ID NO: 467142 - DNA, 15 bp, Homo sapiens
gtgaatggagggccc

SEQ ID NO: 467143 - DNA, 15 bp, Homo sapiens
agtgaatggagggcc

SEQ ID NO: 467144 - DNA, 15 bp, Homo sapiens
gagtgaatggagggc

SEQ ID NO: 467145 - DNA, 15 bp, Homo sapiens
cgagtgaatggaggg

SEQ ID NO: 467146 - DNA, 15 bp, Homo sapiens
acgagtgaatggagg

SEQ ID NO: 467147 - DNA, 15 bp, Homo sapiens
tacgagtgaatggag

SEQ ID NO: 467148 - DNA, 15 bp, Homo sapiens
ttacgagtgaatgga

SEQ ID NO: 467149 - DNA, 15 bp, Homo sapiens
cttacgagtgaatgg

SEQ ID NO: 467150 - DNA, 15 bp, Homo sapiens
tcttacgagtgaatg

SEQ ID NO: 467151 - DNA, 15 bp, Homo sapiens
atcttacgagtgaat

SEQ ID NO: 467152 - DNA, 15 bp, Homo sapiens
tatcttacgagtgaa

SEQ ID NO: 467153 - DNA, 15 bp, Homo sapiens
ttatcttacgagtga

SEQ ID NO: 467154 - DNA, 15 bp, Homo sapiens
gttatcttacgagtg

SEQ ID NO: 467155 - DNA, 15 bp, Homo sapiens
ggttatcttacgagt

SEQ ID NO: 467156 - DNA, 15 bp, Homo sapiens
aggttatcttacgag

SEQ ID NO: 467157 - DNA, 15 bp, Homo sapiens
caggttatcttacga

SEQ ID NO: 467158 - DNA, 15 bp, Homo sapiens
acaggttatcttacg

SEQ ID NO: 467159 - DNA, 15 bp, Homo sapiens
cacaggttatcttac

SEQ ID NO: 467160 - DNA, 15 bp, Homo sapiens
acacaggttatctta

SEQ ID NO: 467161 - DNA, 15 bp, Homo sapiens
aacacaggttatctt

SEQ ID NO: 467162 - DNA, 15 bp, Homo sapiens
caacacaggttatct

SEQ ID NO: 467163 - DNA, 15 bp, Homo sapiens
gcaacacaggttatc

SEQ ID NO: 467164 - DNA, 15 bp, Homo sapiens
tgcaacacaggttat

SEQ ID NO: 467165 - DNA, 15 bp, Homo sapiens
ctgcaacacaggtta

SEQ ID NO: 467166 - DNA, 15 bp, Homo sapiens
cctgcaacacaggtt

SEQ ID NO: 467167 - DNA, 15 bp, Homo sapiens
acctgcaacacaggt

SEQ ID NO: 467168 - DNA, 15 bp, Homo sapiens
tacctgcaacacagg

SEQ ID NO: 467169 - DNA, 15 bp, Homo sapiens
gtacctgcaacacag

SEQ ID NO: 467170 - DNA, 15 bp, Homo sapiens
tgtacctgcaacaca

SEQ ID NO: 467171 - DNA, 15 bp, Homo sapiens
ttgtacctgcaacac

SEQ ID NO: 467172 - DNA, 15 bp, Homo sapiens
gttgtacctgcaaca

SEQ ID NO: 467173 - DNA, 15 bp, Homo sapiens
ggttgtacctgcaac

SEQ ID NO: 467174 - DNA, 15 bp, Homo sapiens
cggttgtacctgcaa

SEQ ID NO: 467175 - DNA, 15 bp, Homo sapiens
ccggttgtacctgca

SEQ ID NO: 467176 - DNA, 15 bp, Homo sapiens
tccggttgtacctgc

SEQ ID NO: 467177 - DNA, 15 bp, Homo sapiens
atccggttgtacctg

SEQ ID NO: 467178 - DNA, 15 bp, Homo sapiens
catccggttgtacct

SEQ ID NO: 467179 - DNA, 15 bp, Homo sapiens
gcatccggttgtacc

SEQ ID NO: 467180 - DNA, 15 bp, Homo sapiens
ggcatccggttgtac

SEQ ID NO: 467181 - DNA, 15 bp, Homo sapiens
tggcatccggttgta

SEQ ID NO: 467182 - DNA, 15 bp, Homo sapiens
ctggcatccggttgt

SEQ ID NO: 467183 - DNA, 15 bp, Homo sapiens
gctggcatccggttg

SEQ ID NO: 467184 - DNA, 15 bp, Homo sapiens
ggctggcatccggtt

SEQ ID NO: 467185 - DNA, 15 bp, Homo sapiens
gggctggcatccggt

SEQ ID NO: 467186 - DNA, 15 bp, Homo sapiens
ggggctggcatccgg

SEQ ID NO: 467187 - DNA, 15 bp, Homo sapiens
cggggctggcatccg

SEQ ID NO: 467188 - DNA, 15 bp, Homo sapiens
acggggctggcatcc

SEQ ID NO: 467189 - DNA, 15 bp, Homo sapiens
cacggggctggcatc

SEQ ID NO: 467190 - DNA, 15 bp, Homo sapiens
gcacggggctggcat

SEQ ID NO: 467191 - DNA, 15 bp, Homo sapiens
ggcacggggctggca

SEQ ID NO: 467192 - DNA, 15 bp, Homo sapiens
tggcacggggctggc

SEQ ID NO: 467193 - DNA, 15 bp, Homo sapiens
ctggcacggggctgg

SEQ ID NO: 467194 - DNA, 15 bp, Homo sapiens
cctggcacggggctg

SEQ ID NO: 467195 - DNA, 15 bp, Homo sapiens
tcctggcacggggct

SEQ ID NO: 467196 - DNA, 15 bp, Homo sapiens
ctcctggcacggggc

SEQ ID NO: 467197 - DNA, 15 bp, Homo sapiens
gctcctggcacgggg

SEQ ID NO: 467198 - DNA, 15 bp, Homo sapiens
ggctcctggcacggg

SEQ ID NO: 467199 - DNA, 15 bp, Homo sapiens
aggctcctggcacgg

SEQ ID NO: 467200 - DNA, 15 bp, Homo sapiens
caggctcctggcacg

SEQ ID NO: 467201 - DNA, 15 bp, Homo sapiens
ccaggctcctggcac

SEQ ID NO: 467202 - DNA, 15 bp, Homo sapiens
tccaggctcctggca

SEQ ID NO: 467203 - DNA, 15 bp, Homo sapiens
ctccaggctcctggc

SEQ ID NO: 467204 - DNA, 15 bp, Homo sapiens
cctccaggctcctgg

SEQ ID NO: 467205 - DNA, 15 bp, Homo sapiens
ccctccaggctcctg

SEQ ID NO: 467206 - DNA, 15 bp, Homo sapiens
tccctccaggctcct

SEQ ID NO: 467207 - DNA, 15 bp, Homo sapiens
ttccctccaggctcc

SEQ ID NO: 467208 - DNA, 15 bp, Homo sapiens
cttccctccaggctc

SEQ ID NO: 467209 - DNA, 15 bp, Homo sapiens
acttccctccaggct

SEQ ID NO: 467210 - DNA, 15 bp, Homo sapiens
aacttccctccaggc

SEQ ID NO: 467211 - DNA, 15 bp, Homo sapiens
caacttccctccagg

SEQ ID NO: 467212 - DNA, 15 bp, Homo sapiens
ccaacttccctccag

SEQ ID NO: 467213 - DNA, 15 bp, Homo sapiens
cccaacttccctcca

SEQ ID NO: 467214 - DNA, 15 bp, Homo sapiens
ccccaacttccctcc

SEQ ID NO: 467215 - DNA, 15 bp, Homo sapiens
tccccaacttccctc

SEQ ID NO: 467216 - DNA, 15 bp, Homo sapiens
ttccccaacttccct

SEQ ID NO: 467217 - DNA, 15 bp, Homo sapiens
tttccccaacttccc

SEQ ID NO: 467218 - DNA, 15 bp, Homo sapiens
gtttccccaacttcc

SEQ ID NO: 467219 - DNA, 15 bp, Homo sapiens
ggtttccccaacttc

SEQ ID NO: 467220 - DNA, 15 bp, Homo sapiens
gggtttccccaactt

SEQ ID NO: 467221 - DNA, 15 bp, Homo sapiens
ggggtttccccaact

SEQ ID NO: 467222 - DNA, 15 bp, Homo sapiens
aggggtttccccaac

SEQ ID NO: 467223 - DNA, 15 bp, Homo sapiens
gaggggtttccccaa

SEQ ID NO: 467224 - DNA, 15 bp, Homo sapiens
ggaggggtttcccca

SEQ ID NO: 467225 - DNA, 15 bp, Homo sapiens
gggaggggtttcccc

SEQ ID NO: 467226 - DNA, 15 bp, Homo sapiens
agggaggggtttccc

SEQ ID NO: 467227 - DNA, 15 bp, Homo sapiens
tagggaggggtttcc

SEQ ID NO: 467228 - DNA, 15 bp, Homo sapiens
gtagggaggggtttc

SEQ ID NO: 467229 - DNA, 15 bp, Homo sapiens
agtagggaggggttt

SEQ ID NO: 467230 - DNA, 15 bp, Homo sapiens
cagtagggaggggtt

SEQ ID NO: 467231 - DNA, 15 bp, Homo sapiens
acagtagggaggggt

SEQ ID NO: 467232 - DNA, 15 bp, Homo sapiens
aacagtagggagggg

SEQ ID NO: 467233 - DNA, 15 bp, Homo sapiens
caacagtagggaggg

SEQ ID NO: 467234 - DNA, 15 bp, Homo sapiens
ccaacagtagggagg

SEQ ID NO: 467235 - DNA, 15 bp, Homo sapiens
tccaacagtagggag

SEQ ID NO: 467236 - DNA, 15 bp, Homo sapiens
atccaacagtaggga

SEQ ID NO: 467237 - DNA, 15 bp, Homo sapiens
catccaacagtaggg

SEQ ID NO: 467238 - DNA, 15 bp, Homo sapiens
acatccaacagtagg

SEQ ID NO: 467239 - DNA, 15 bp, Homo sapiens
tacatccaacagtag

SEQ ID NO: 467240 - DNA, 15 bp, Homo sapiens
atacatccaacagta

SEQ ID NO: 467241 - DNA, 15 bp, Homo sapiens
catacatccaacagt

SEQ ID NO: 467242 - DNA, 15 bp, Homo sapiens
acatacatccaacag

SEQ ID NO: 467243 - DNA, 15 bp, Homo sapiens
cacatacatccaaca

SEQ ID NO: 467244 - DNA, 15 bp, Homo sapiens
acacatacatccaac

SEQ ID NO: 467245 - DNA, 15 bp, Homo sapiens
cacacatacatccaa

SEQ ID NO: 467246 - DNA, 15 bp, Homo sapiens
tcacacatacatcca

SEQ ID NO: 467247 - DNA, 15 bp, Homo sapiens
gtcacacatacatcc

SEQ ID NO: 467248 - DNA, 15 bp, Homo sapiens
tgtcacacatacatc

SEQ ID NO: 467249 - DNA, 15 bp, Homo sapiens
ttgtcacacatacat

SEQ ID NO: 467250 - DNA, 15 bp, Homo sapiens
cttgtcacacataca

SEQ ID NO: 467251 - DNA, 15 bp, Homo sapiens
acttgtcacacatac

SEQ ID NO: 467252 - DNA, 15 bp, Homo sapiens
cacttgtcacacata

SEQ ID NO: 467253 - DNA, 15 bp, Homo sapiens
acacttgtcacacat

SEQ ID NO: 467254 - DNA, 15 bp, Homo sapiens
cacacttgtcacaca

SEQ ID NO: 467255 - DNA, 15 bp, Homo sapiens
acacacttgtcacac

SEQ ID NO: 467256 - DNA, 15 bp, Homo sapiens
gacacacttgtcaca

SEQ ID NO: 467257 - DNA, 15 bp, Homo sapiens
agacacacttgtcac

SEQ ID NO: 467258 - DNA, 15 bp, Homo sapiens
gagacacacttgtca

SEQ ID NO: 467259 - DNA, 15 bp, Homo sapiens
ggagacacacttgtc

SEQ ID NO: 467260 - DNA, 15 bp, Homo sapiens
aggagacacacttgt

SEQ ID NO: 467261 - DNA, 15 bp, Homo sapiens
caggagacacacttg

SEQ ID NO: 467262 - DNA, 15 bp, Homo sapiens
acaggagacacactt

SEQ ID NO: 467263 - DNA, 15 bp, Homo sapiens
cacaggagacacact

SEQ ID NO: 467264 - DNA, 15 bp, Homo sapiens
gcacaggagacacac

SEQ ID NO: 467265 - DNA, 15 bp, Homo sapiens
agcacaggagacaca

SEQ ID NO: 467266 - DNA, 15 bp, Homo sapiens
cagcacaggagacac

SEQ ID NO: 467267 - DNA, 15 bp, Homo sapiens
gcagcacaggagaca

SEQ ID NO: 467268 - DNA, 15 bp, Homo sapiens
cgcagcacaggagac

SEQ ID NO: 467269 - DNA, 15 bp, Homo sapiens
tcgcagcacaggaga

SEQ ID NO: 467270 - DNA, 15 bp, Homo sapiens
atcgcagcacaggag

SEQ ID NO: 467271 - DNA, 15 bp, Homo sapiens
catcgcagcacagga

SEQ ID NO: 467272 - DNA, 15 bp, Homo sapiens
ccatcgcagcacagg

SEQ ID NO: 467273 - DNA, 15 bp, Homo sapiens
cccatcgcagcacag

SEQ ID NO: 467274 - DNA, 15 bp, Homo sapiens
ccccatcgcagcaca

SEQ ID NO: 467275 - DNA, 15 bp, Homo sapiens
cccccatcgcagcac

SEQ ID NO: 467276 - DNA, 15 bp, Homo sapiens
tcccccatcgcagca

SEQ ID NO: 467277 - DNA, 15 bp, Homo sapiens
atcccccatcgcagc

SEQ ID NO: 467278 - DNA, 15 bp, Homo sapiens
gatcccccatcgcag

SEQ ID NO: 467279 - DNA, 15 bp, Homo sapiens
tgatcccccatcgca

SEQ ID NO: 467280 - DNA, 15 bp, Homo sapiens
ctgatcccccatcgc

SEQ ID NO: 467281 - DNA, 15 bp, Homo sapiens
gctgatcccccatcg

SEQ ID NO: 467282 - DNA, 15 bp, Homo sapiens
tgctgatcccccatc

SEQ ID NO: 467283 - DNA, 15 bp, Homo sapiens
ctgctgatcccccat

SEQ ID NO: 467284 - DNA, 15 bp, Homo sapiens
cctgctgatccccca

SEQ ID NO: 467285 - DNA, 15 bp, Homo sapiens
ccctgctgatccccc

SEQ ID NO: 467286 - DNA, 15 bp, Homo sapiens
gccctgctgatcccc

SEQ ID NO: 467287 - DNA, 15 bp, Homo sapiens
tgccctgctgatccc

SEQ ID NO: 467288 - DNA, 15 bp, Homo sapiens
ctgccctgctgatcc

SEQ ID NO: 467289 - DNA, 15 bp, Homo sapiens
actgccctgctgatc

SEQ ID NO: 467290 - DNA, 15 bp, Homo sapiens
aactgccctgctgat

SEQ ID NO: 467291 - DNA, 15 bp, Homo sapiens
caactgccctgctga

SEQ ID NO: 467292 - DNA, 15 bp, Homo sapiens
acaactgccctgctg

SEQ ID NO: 467293 - DNA, 15 bp, Homo sapiens
gacaactgccctgct

SEQ ID NO: 467294 - DNA, 15 bp, Homo sapiens
cgacaactgccctgc

SEQ ID NO: 467295 - DNA, 15 bp, Homo sapiens
ccgacaactgccctg

SEQ ID NO: 467296 - DNA, 15 bp, Homo sapiens
cccgacaactgccct

SEQ ID NO: 467297 - DNA, 15 bp, Homo sapiens
gcccgacaactgccc

SEQ ID NO: 467298 - DNA, 15 bp, Homo sapiens
tgcccgacaactgcc

SEQ ID NO: 467299 - DNA, 15 bp, Homo sapiens
ctgcccgacaactgc

SEQ ID NO: 467300 - DNA, 15 bp, Homo sapiens
actgcccgacaactg

SEQ ID NO: 467301 - DNA, 15 bp, Homo sapiens
gactgcccgacaact

SEQ ID NO: 467302 - DNA, 15 bp, Homo sapiens
ggactgcccgacaac

SEQ ID NO: 467303 - DNA, 15 bp, Homo sapiens
aggactgcccgacaa

SEQ ID NO: 467304 - DNA, 15 bp, Homo sapiens
caggactgcccgaca

SEQ ID NO: 467305 - DNA, 15 bp, Homo sapiens
tcaggactgcccgac

SEQ ID NO: 467306 - DNA, 15 bp, Homo sapiens
ctcaggactgcccga

SEQ ID NO: 467307 - DNA, 15 bp, Homo sapiens
actcaggactgcccg

SEQ ID NO: 467308 - DNA, 15 bp, Homo sapiens
cactcaggactgccc

SEQ ID NO: 467309 - DNA, 15 bp, Homo sapiens
ccactcaggactgcc

SEQ ID NO: 467310 - DNA, 15 bp, Homo sapiens
cccactcaggactgc

SEQ ID NO: 467311 - DNA, 15 bp, Homo sapiens
acccactcaggactg

SEQ ID NO: 467312 - DNA, 15 bp, Homo sapiens
cacccactcaggact

SEQ ID NO: 467313 - DNA, 15 bp, Homo sapiens
acacccactcaggac

SEQ ID NO: 467314 - DNA, 15 bp, Homo sapiens
aacacccactcagga

SEQ ID NO: 467315 - DNA, 15 bp, Homo sapiens
caacacccactcagg

SEQ ID NO: 467316 - DNA, 15 bp, Homo sapiens
gcaacacccactcag

SEQ ID NO: 467317 - DNA, 15 bp, Homo sapiens
tgcaacacccactca

SEQ ID NO: 467318 - DNA, 15 bp, Homo sapiens
gtgcaacacccactc

SEQ ID NO: 467319 - DNA, 15 bp, Homo sapiens
tgtgcaacacccact

SEQ ID NO: 467320 - DNA, 15 bp, Homo sapiens
ctgtgcaacacccac

SEQ ID NO: 467321 - DNA, 15 bp, Homo sapiens
tctgtgcaacaccca

SEQ ID NO: 467322 - DNA, 15 bp, Homo sapiens
gtctgtgcaacaccc

SEQ ID NO: 467323 - DNA, 15 bp, Homo sapiens
agtctgtgcaacacc

SEQ ID NO: 467324 - DNA, 15 bp, Homo sapiens
cagtctgtgcaacac

SEQ ID NO: 467325 - DNA, 15 bp, Homo sapiens
ccagtctgtgcaaca

SEQ ID NO: 467326 - DNA, 15 bp, Homo sapiens
accagtctgtgcaac

SEQ ID NO: 467327 - DNA, 15 bp, Homo sapiens
gaccagtctgtgcaa

SEQ ID NO: 467328 - DNA, 15 bp, Homo sapiens
ggaccagtctgtgca

SEQ ID NO: 467329 - DNA, 15 bp, Homo sapiens
tggaccagtctgtgc

SEQ ID NO: 467330 - DNA, 15 bp, Homo sapiens
gtggaccagtctgtg

SEQ ID NO: 467331 - DNA, 15 bp, Homo sapiens
tgtggaccagtctgt

SEQ ID NO: 467332 - DNA, 15 bp, Homo sapiens
ctgtggaccagtctg

SEQ ID NO: 467333 - DNA, 15 bp, Homo sapiens
cctgtggaccagtct

SEQ ID NO: 467334 - DNA, 15 bp, Homo sapiens
ccctgtggaccagtc

SEQ ID NO: 467335 - DNA, 15 bp, Homo sapiens
gccctgtggaccagt

SEQ ID NO: 467336 - DNA, 15 bp, Homo sapiens
agccctgtggaccag

SEQ ID NO: 467337 - DNA, 15 bp, Homo sapiens
gagccctgtggacca

SEQ ID NO: 467338 - DNA, 15 bp, Homo sapiens
ggagccctgtggacc

SEQ ID NO: 467339 - DNA, 15 bp, Homo sapiens
aggagccctgtggac

SEQ ID NO: 467340 - DNA, 15 bp, Homo sapiens
caggagccctgtgga

SEQ ID NO: 467341 - DNA, 15 bp, Homo sapiens
tcaggagccctgtgg

SEQ ID NO: 467342 - DNA, 15 bp, Homo sapiens
ttcaggagccctgtg

SEQ ID NO: 467343 - DNA, 15 bp, Homo sapiens
cttcaggagccctgt

SEQ ID NO: 467344 - DNA, 15 bp, Homo sapiens
ccttcaggagccctg

SEQ ID NO: 467345 - DNA, 15 bp, Homo sapiens
tccttcaggagccct

SEQ ID NO: 467346 - DNA, 15 bp, Homo sapiens
ttccttcaggagccc

SEQ ID NO: 467347 - DNA, 15 bp, Homo sapiens
cttccttcaggagcc

SEQ ID NO: 467348 - DNA, 15 bp, Homo sapiens
gcttccttcaggagc

SEQ ID NO: 467349 - DNA, 15 bp, Homo sapiens
ggcttccttcaggag

SEQ ID NO: 467350 - DNA, 15 bp, Homo sapiens
gggcttccttcagga

SEQ ID NO: 467351 - DNA, 15 bp, Homo sapiens
ggggcttccttcagg

SEQ ID NO: 467352 - DNA, 15 bp, Homo sapiens
aggggcttccttcag

SEQ ID NO: 467353 - DNA, 15 bp, Homo sapiens
caggggcttccttca

SEQ ID NO: 467354 - DNA, 15 bp, Homo sapiens
ccaggggcttccttc

SEQ ID NO: 467355 - DNA, 15 bp, Homo sapiens
tccaggggcttcctt

SEQ ID NO: 467356 - DNA, 15 bp, Homo sapiens
atccaggggcttcct

SEQ ID NO: 467357 - DNA, 15 bp, Homo sapiens
gatccaggggcttcc

SEQ ID NO: 467358 - DNA, 15 bp, Homo sapiens
agatccaggggcttc

SEQ ID NO: 467359 - DNA, 15 bp, Homo sapiens
aagatccaggggctt

SEQ ID NO: 467360 - DNA, 15 bp, Homo sapiens
aaagatccaggggct

SEQ ID NO: 467361 - DNA, 15 bp, Homo sapiens
caaagatccaggggc

SEQ ID NO: 467362 - DNA, 15 bp, Homo sapiens
ccaaagatccagggg

SEQ ID NO: 467363 - DNA, 15 bp, Homo sapiens
cccaaagatccaggg

SEQ ID NO: 467364 - DNA, 15 bp, Homo sapiens
ccccaaagatccagg

SEQ ID NO: 467365 - DNA, 15 bp, Homo sapiens
accccaaagatccag

SEQ ID NO: 467366 - DNA, 15 bp, Homo sapiens
taccccaaagatcca

SEQ ID NO: 467367 - DNA, 15 bp, Homo sapiens
ttaccccaaagatcc

SEQ ID NO: 467368 - DNA, 15 bp, Homo sapiens
tttaccccaaagatc

SEQ ID NO: 467369 - DNA, 15 bp, Homo sapiens
ttttaccccaaagat

SEQ ID NO: 467370 - DNA, 15 bp, Homo sapiens
cttttaccccaaaga

SEQ ID NO: 467371 - DNA, 15 bp, Homo sapiens
ccttttaccccaaag

SEQ ID NO: 467372 - DNA, 15 bp, Homo sapiens
tccttttaccccaaa

SEQ ID NO: 467373 - DNA, 15 bp, Homo sapiens
ctccttttaccccaa

SEQ ID NO: 467374 - DNA, 15 bp, Homo sapiens
cctccttttacccca

SEQ ID NO: 467375 - DNA, 15 bp, Homo sapiens
ccctccttttacccc

SEQ ID NO: 467376 - DNA, 15 bp, Homo sapiens
accctccttttaccc

SEQ ID NO: 467377 - DNA, 15 bp, Homo sapiens
caccctccttttacc

SEQ ID NO: 467378 - DNA, 15 bp, Homo sapiens
ccaccctccttttac

SEQ ID NO: 467379 - DNA, 15 bp, Homo sapiens
gccaccctcctttta

SEQ ID NO: 467380 - DNA, 15 bp, Homo sapiens
ggccaccctcctttt

SEQ ID NO: 467381 - DNA, 15 bp, Homo sapiens
aggccaccctccttt

SEQ ID NO: 467382 - DNA, 15 bp, Homo sapiens
gaggccaccctcctt

SEQ ID NO: 467383 - DNA, 15 bp, Homo sapiens
tgaggccaccctcct

SEQ ID NO: 467384 - DNA, 15 bp, Homo sapiens
ttgaggccaccctcc

SEQ ID NO: 467385 - DNA, 15 bp, Homo sapiens
cttgaggccaccctc

SEQ ID NO: 467386 - DNA, 15 bp, Homo sapiens
tcttgaggccaccct

SEQ ID NO: 467387 - DNA, 15 bp, Homo sapiens
ttcttgaggccaccc

SEQ ID NO: 467388 - DNA, 15 bp, Homo sapiens
tttcttgaggccacc

SEQ ID NO: 467389 - DNA, 15 bp, Homo sapiens
gtttcttgaggccac

SEQ ID NO: 467390 - DNA, 15 bp, Homo sapiens
tgtttcttgaggcca

SEQ ID NO: 467391 - DNA, 15 bp, Homo sapiens
ttgtttcttgaggcc

SEQ ID NO: 467392 - DNA, 15 bp, Homo sapiens
attgtttcttgaggc

SEQ ID NO: 467393 - DNA, 15 bp, Homo sapiens
cattgtttcttgagg

SEQ ID NO: 467394 - DNA, 15 bp, Homo sapiens
acattgtttcttgag

SEQ ID NO: 467395 - DNA, 15 bp, Homo sapiens
gacattgtttcttga

SEQ ID NO: 467396 - DNA, 15 bp, Homo sapiens
agacattgtttcttg

SEQ ID NO: 467397 - DNA, 15 bp, Homo sapiens
cagacattgtttctt

SEQ ID NO: 467398 - DNA, 15 bp, Homo sapiens
ccagacattgtttct

SEQ ID NO: 467399 - DNA, 15 bp, Homo sapiens
cccagacattgtttc

SEQ ID NO: 467400 - DNA, 15 bp, Homo sapiens
ccccagacattgttt

SEQ ID NO: 467401 - DNA, 15 bp, Homo sapiens
tccccagacattgtt

SEQ ID NO: 467402 - DNA, 15 bp, Homo sapiens
gtccccagacattgt

SEQ ID NO: 467403 - DNA, 15 bp, Homo sapiens
tgtccccagacattg

SEQ ID NO: 467404 - DNA, 15 bp, Homo sapiens
ctgtccccagacatt

SEQ ID NO: 467405 - DNA, 15 bp, Homo sapiens
cctgtccccagacat

SEQ ID NO: 467406 - DNA, 15 bp, Homo sapiens
gcctgtccccagaca

SEQ ID NO: 467407 - DNA, 15 bp, Homo sapiens
ggcctgtccccagac

SEQ ID NO: 467408 - DNA, 15 bp, Homo sapiens
aggcctgtccccaga

SEQ ID NO: 467409 - DNA, 15 bp, Homo sapiens
aaggcctgtccccag

SEQ ID NO: 467410 - DNA, 15 bp, Homo sapiens
aaaggcctgtcccca

SEQ ID NO: 467411 - DNA, 15 bp, Homo sapiens
gaaaggcctgtcccc

SEQ ID NO: 467412 - DNA, 15 bp, Homo sapiens
agaaaggcctgtccc

SEQ ID NO: 467413 - DNA, 15 bp, Homo sapiens
cagaaaggcctgtcc

SEQ ID NO: 467414 - DNA, 15 bp, Homo sapiens
ccagaaaggcctgtc

SEQ ID NO: 467415 - DNA, 15 bp, Homo sapiens
gccagaaaggcctgt

SEQ ID NO: 467416 - DNA, 15 bp, Homo sapiens
ggccagaaaggcctg

SEQ ID NO: 467417 - DNA, 15 bp, Homo sapiens
aggccagaaaggcct

SEQ ID NO: 467418 - DNA, 15 bp, Homo sapiens
caggccagaaaggcc

SEQ ID NO: 467419 - DNA, 15 bp, Homo sapiens
gcaggccagaaaggc

SEQ ID NO: 467420 - DNA, 15 bp, Homo sapiens
agcaggccagaaagg

SEQ ID NO: 467421 - DNA, 15 bp, Homo sapiens
tagcaggccagaaag

SEQ ID NO: 467422 - DNA, 15 bp, Homo sapiens
atagcaggccagaaa

SEQ ID NO: 467423 - DNA, 15 bp, Homo sapiens
catagcaggccagaa

SEQ ID NO: 467424 - DNA, 15 bp, Homo sapiens
acatagcaggccaga

SEQ ID NO: 467425 - DNA, 15 bp, Homo sapiens
gacatagcaggccag

SEQ ID NO: 467426 - DNA, 15 bp, Homo sapiens
agacatagcaggcca

SEQ ID NO: 467427 - DNA, 15 bp, Homo sapiens
aagacatagcaggcc

SEQ ID NO: 467428 - DNA, 15 bp, Homo sapiens
gaagacatagcaggc

SEQ ID NO: 467429 - DNA, 15 bp, Homo sapiens
ggaagacatagcagg

SEQ ID NO: 467430 - DNA, 15 bp, Homo sapiens
gggaagacatagcag

SEQ ID NO: 467431 - DNA, 15 bp, Homo sapiens
tgggaagacatagca

SEQ ID NO: 467432 - DNA, 15 bp, Homo sapiens
ttgggaagacatagc

SEQ ID NO: 467433 - DNA, 15 bp, Homo sapiens
attgggaagacatag

SEQ ID NO: 467434 - DNA, 15 bp, Homo sapiens
cattgggaagacata

SEQ ID NO: 467435 - DNA, 15 bp, Homo sapiens
acattgggaagacat

SEQ ID NO: 467436 - DNA, 15 bp, Homo sapiens
aacattgggaagaca

SEQ ID NO: 467437 - DNA, 15 bp, Homo sapiens
aaacattgggaagac

SEQ ID NO: 467438 - DNA, 15 bp, Homo sapiens
taaacattgggaaga

SEQ ID NO: 467439 - DNA, 15 bp, Homo sapiens
ataaacattgggaag

SEQ ID NO: 467440 - DNA, 15 bp, Homo sapiens
aataaacattgggaa

SEQ ID NO: 467441 - DNA, 15 bp, Homo sapiens
caataaacattggga

SEQ ID NO: 467442 - DNA, 15 bp, Homo sapiens
ccaataaacattggg

SEQ ID NO: 467443 - DNA, 15 bp, Homo sapiens
cccaataaacattgg

SEQ ID NO: 467444 - DNA, 15 bp, Homo sapiens
gcccaataaacattg

SEQ ID NO: 467445 - DNA, 15 bp, Homo sapiens
tgcccaataaacatt

SEQ ID NO: 467446 - DNA, 15 bp, Homo sapiens
ttgcccaataaacat

SEQ ID NO: 467447 - DNA, 15 bp, Homo sapiens
attgcccaataaaca

SEQ ID NO: 467448 - DNA, 15 bp, Homo sapiens
tattgcccaataaac

SEQ ID NO: 467449 - DNA, 15 bp, Homo sapiens
ttattgcccaataaa

SEQ ID NO: 467450 - DNA, 15 bp, Homo sapiens
tttattgcccaataa

SEQ ID NO: 467451 - DNA, 15 bp, Homo sapiens
ttttattgcccaata

SEQ ID NO: 467452 - DNA, 15 bp, Homo sapiens
cttttattgcccaat

SEQ ID NO: 467453 - DNA, 15 bp, Homo sapiens
tcttttattgcccaa

SEQ ID NO: 467454 - DNA, 15 bp, Homo sapiens
atcttttattgccca

SEQ ID NO: 467455 - DNA, 15 bp, Homo sapiens
tatcttttattgccc

SEQ ID NO: 467456 - DNA, 15 bp, Homo sapiens
ttatcttttattgcc

SEQ ID NO: 467457 - DNA, 15 bp, Homo sapiens
cttatcttttattgc

SEQ ID NO: 467458 - DNA, 15 bp, Homo sapiens
acttatcttttattg

SEQ ID NO: 467459 - DNA, 15 bp, Homo sapiens
cacttatcttttatt

SEQ ID NO: 467460 - DNA, 15 bp, Homo sapiens
gcacttatcttttat

SEQ ID NO: 467461 - DNA, 15 bp, Homo sapiens
tgcacttatctttta

SEQ ID NO: 467462 - DNA, 15 bp, Homo sapiens
ctgcacttatctttt

SEQ ID NO: 467463 - DNA, 15 bp, Homo sapiens
actgcacttatcttt

SEQ ID NO: 467464 - DNA, 15 bp, Homo sapiens
gactgcacttatctt

SEQ ID NO: 467465 - DNA, 15 bp, Homo sapiens
tgactgcacttatct

SEQ ID NO: 467466 - DNA, 15 bp, Homo sapiens
gtgactgcacttatc

SEQ ID NO: 467467 - DNA, 15 bp, Homo sapiens
tgtgactgcacttat

SEQ ID NO: 467468 - DNA, 15 bp, Homo sapiens
ctgtgactgcactta

SEQ ID NO: 467469 - DNA, 15 bp, Homo sapiens
tctgtgactgcactt

SEQ ID NO: 467470 - DNA, 15 bp, Homo sapiens
ctctgtgactgcact

SEQ ID NO: 467471 - DNA, 15 bp, Homo sapiens
tctctgtgactgcac

SEQ ID NO: 467472 - DNA, 15 bp, Homo sapiens
ttctctgtgactgca

SEQ ID NO: 467473 - DNA, 15 bp, Homo sapiens
gttctctgtgactgc

SEQ ID NO: 467474 - DNA, 15 bp, Homo sapiens
agttctctgtgactg

SEQ ID NO: 467475 - DNA, 15 bp, Homo sapiens
gagttctctgtgact

SEQ ID NO: 467476 - DNA, 15 bp, Homo sapiens
tgagttctctgtgac

SEQ ID NO: 467477 - DNA, 15 bp, Homo sapiens
gtgagttctctgtga

SEQ ID NO: 467478 - DNA, 15 bp, Homo sapiens
agtgagttctctgtg

SEQ ID NO: 467479 - DNA, 15 bp, Homo sapiens
gagtgagttctctgt

SEQ ID NO: 467480 - DNA, 15 bp, Homo sapiens
agagtgagttctctg

SEQ ID NO: 467481 - DNA, 15 bp, Homo sapiens
aagagtgagttctct

SEQ ID NO: 467482 - DNA, 15 bp, Homo sapiens
gaagagtgagttctc

SEQ ID NO: 467483 - DNA, 15 bp, Homo sapiens
agaagagtgagttct

SEQ ID NO: 467484 - DNA, 15 bp, Homo sapiens
gagaagagtgagttc

SEQ ID NO: 467485 - DNA, 15 bp, Homo sapiens
tgagaagagtgagtt

SEQ ID NO: 467486 - DNA, 15 bp, Homo sapiens
ttgagaagagtgagt

SEQ ID NO: 467487 - DNA, 15 bp, Homo sapiens
attgagaagagtgag

SEQ ID NO: 467488 - DNA, 15 bp, Homo sapiens
aattgagaagagtga

SEQ ID NO: 467489 - DNA, 15 bp, Homo sapiens
aaattgagaagagtg

SEQ ID NO: 467490 - DNA, 15 bp, Homo sapiens
gaaattgagaagagt

SEQ ID NO: 467491 - DNA, 15 bp, Homo sapiens
cgaaattgagaagag

SEQ ID NO: 467492 - DNA, 15 bp, Homo sapiens
ccgaaattgagaaga

SEQ ID NO: 467493 - DNA, 15 bp, Homo sapiens
accgaaattgagaag

SEQ ID NO: 467494 - DNA, 15 bp, Homo sapiens
caccgaaattgagaa

SEQ ID NO: 467495 - DNA, 15 bp, Homo sapiens
acaccgaaattgaga

SEQ ID NO: 467496 - DNA, 15 bp, Homo sapiens
cacaccgaaattgag

SEQ ID NO: 467497 - DNA, 15 bp, Homo sapiens
gcacaccgaaattga

SEQ ID NO: 467498 - DNA, 15 bp, Homo sapiens
ggcacaccgaaattg

SEQ ID NO: 467499 - DNA, 15 bp, Homo sapiens
aggcacaccgaaatt

SEQ ID NO: 467500 - DNA, 15 bp, Homo sapiens
caggcacaccgaaat

SEQ ID NO: 467501 - DNA, 15 bp, Homo sapiens
acaggcacaccgaaa

SEQ ID NO: 467502 - DNA, 15 bp, Homo sapiens
aacaggcacaccgaa

SEQ ID NO: 467503 - DNA, 15 bp, Homo sapiens
aaacaggcacaccga

SEQ ID NO: 467504 - DNA, 15 bp, Homo sapiens
aaaacaggcacaccg

SEQ ID NO: 467505 - DNA, 15 bp, Homo sapiens
gaaaacaggcacacc

SEQ ID NO: 467506 - DNA, 15 bp, Homo sapiens
tgaaaacaggcacac

SEQ ID NO: 467507 - DNA, 15 bp, Homo sapiens
atgaaaacaggcaca

SEQ ID NO: 467508 - DNA, 15 bp, Homo sapiens
tatgaaaacaggcac

SEQ ID NO: 467509 - DNA, 15 bp, Homo sapiens
ttatgaaaacaggca

SEQ ID NO: 467510 - DNA, 15 bp, Homo sapiens
tttatgaaaacaggc

SEQ ID NO: 467511 - DNA, 15 bp, Homo sapiens
ttttatgaaaacagg

SEQ ID NO: 467512 - DNA, 15 bp, Homo sapiens
tttttatgaaaacag

SEQ ID NO: 467513 - DNA, 15 bp, Homo sapiens
atttttatgaaaaca

SEQ ID NO: 467514 - DNA, 15 bp, Homo sapiens
catttttatgaaaac

SEQ ID NO: 467515 - DNA, 15 bp, Homo sapiens
gcatttttatgaaaa

SEQ ID NO: 467516 - DNA, 15 bp, Homo sapiens
tgcatttttatgaaa

SEQ ID NO: 467517 - DNA, 15 bp, Homo sapiens
gtgcatttttatgaa

SEQ ID NO: 467518 - DNA, 15 bp, Homo sapiens
tgtgcatttttatga

SEQ ID NO: 467519 - DNA, 15 bp, Homo sapiens
ctgtgcatttttatg

SEQ ID NO: 467520 - DNA, 15 bp, Homo sapiens
cctgtgcatttttat

SEQ ID NO: 467521 - DNA, 15 bp, Homo sapiens
ccctgtgcattttta

SEQ ID NO: 467522 - DNA, 15 bp, Homo sapiens
cccctgtgcattttt

SEQ ID NO: 467523 - DNA, 15 bp, Homo sapiens
tcccctgtgcatttt

SEQ ID NO: 467524 - DNA, 15 bp, Homo sapiens
atcccctgtgcattt

SEQ ID NO: 467525 - DNA, 15 bp, Homo sapiens
catcccctgtgcatt

SEQ ID NO: 467526 - DNA, 15 bp, Homo sapiens
ccatcccctgtgcat

SEQ ID NO: 467527 - DNA, 15 bp, Homo sapiens
gccatcccctgtgca

SEQ ID NO: 467528 - DNA, 15 bp, Homo sapiens
ggccatcccctgtgc

SEQ ID NO: 467529 - DNA, 15 bp, Homo sapiens
tggccatcccctgtg

SEQ ID NO: 467530 - DNA, 15 bp, Homo sapiens
ctggccatcccctgt

SEQ ID NO: 467531 - DNA, 15 bp, Homo sapiens
cctggccatcccctg

SEQ ID NO: 467532 - DNA, 15 bp, Homo sapiens
acctggccatcccct

SEQ ID NO: 467533 - DNA, 15 bp, Homo sapiens
cacctggccatcccc

SEQ ID NO: 467534 - DNA, 15 bp, Homo sapiens
gcacctggccatccc

SEQ ID NO: 467535 - DNA, 15 bp, Homo sapiens
cgcacctggccatcc

SEQ ID NO: 467536 - DNA, 15 bp, Homo sapiens
ccgcacctggccatc

SEQ ID NO: 467537 - DNA, 15 bp, Homo sapiens
accgcacctggccat

SEQ ID NO: 467538 - DNA, 15 bp, Homo sapiens
caccgcacctggcca

SEQ ID NO: 467539 - DNA, 15 bp, Homo sapiens
atgagccaccgcacc

SEQ ID NO: 467540 - DNA, 15 bp, Homo sapiens
catgagccaccgcac

SEQ ID NO: 467541 - DNA, 15 bp, Homo sapiens
gcatgagccaccgca

SEQ ID NO: 467542 - DNA, 15 bp, Homo sapiens
ggcatgagccaccgc

SEQ ID NO: 467543 - DNA, 15 bp, Homo sapiens
aacaggcatgagcca

SEQ ID NO: 467544 - DNA, 15 bp, Homo sapiens
taacaggcatgagcc

SEQ ID NO: 467545 - DNA, 15 bp, Homo sapiens
ataacaggcatgagc

SEQ ID NO: 467546 - DNA, 15 bp, Homo sapiens
gataacaggcatgag

SEQ ID NO: 467547 - DNA, 15 bp, Homo sapiens
ggataacaggcatga

SEQ ID NO: 467548 - DNA, 15 bp, Homo sapiens
gggataacaggcatg

SEQ ID NO: 467549 - DNA, 15 bp, Homo sapiens
tgggataacaggcat

SEQ ID NO: 467550 - DNA, 15 bp, Homo sapiens
ctgggataacaggca

SEQ ID NO: 467551 - DNA, 15 bp, Homo sapiens
gctgggataacaggc

SEQ ID NO: 467552 - DNA, 15 bp, Homo sapiens
tgctgggataacagg

SEQ ID NO: 467553 - DNA, 15 bp, Homo sapiens
gtgctgggataacag

SEQ ID NO: 467554 - DNA, 15 bp, Homo sapiens
agtgctgggataaca

SEQ ID NO: 467555 - DNA, 15 bp, Homo sapiens
aagtgctgggataac

SEQ ID NO: 467556 - DNA, 15 bp, Homo sapiens
aaagtgctgggataa

SEQ ID NO: 467557 - DNA, 15 bp, Homo sapiens
cgcctcccaaagtgc

SEQ ID NO: 467558 - DNA, 15 bp, Homo sapiens
ccgcctcccaaagtg

SEQ ID NO: 467559 - DNA, 15 bp, Homo sapiens
tccgcctcccaaagt

SEQ ID NO: 467560 - DNA, 15 bp, Homo sapiens
ctccgcctcccaaag

SEQ ID NO: 467561 - DNA, 15 bp, Homo sapiens
cctccgcctcccaaa

SEQ ID NO: 467562 - DNA, 15 bp, Homo sapiens
gcctccgcctcccaa

SEQ ID NO: 467563 - DNA, 15 bp, Homo sapiens
cgcctccgcctccca

SEQ ID NO: 467564 - DNA, 15 bp, Homo sapiens
ccgcctccgcctccc

SEQ ID NO: 467565 - DNA, 15 bp, Homo sapiens
cccgcctccgcctcc

SEQ ID NO: 467566 - DNA, 15 bp, Homo sapiens
gcccgcctccgcctc

SEQ ID NO: 467567 - DNA, 15 bp, Homo sapiens
ggcccgcctccgcct

SEQ ID NO: 467568 - DNA, 15 bp, Homo sapiens
cggcccgcctccgcc

SEQ ID NO: 467569 - DNA, 15 bp, Homo sapiens
tcggcccgcctccgc

SEQ ID NO: 467570 - DNA, 15 bp, Homo sapiens
atcggcccgcctccg

SEQ ID NO: 467571 - DNA, 15 bp, Homo sapiens
gatcggcccgcctcc

SEQ ID NO: 467572 - DNA, 15 bp, Homo sapiens
tgatcggcccgcctc

SEQ ID NO: 467573 - DNA, 15 bp, Homo sapiens
gtgatcggcccgcct

SEQ ID NO: 467574 - DNA, 15 bp, Homo sapiens
ggtgatcggcccgcc

SEQ ID NO: 467575 - DNA, 15 bp, Homo sapiens
aggtgatcggcccgc

SEQ ID NO: 467576 - DNA, 15 bp, Homo sapiens
caggtgatcggcccg

SEQ ID NO: 467577 - DNA, 15 bp, Homo sapiens
tcaggtgatcggccc

SEQ ID NO: 467578 - DNA, 15 bp, Homo sapiens
ctcaggtgatcggcc

SEQ ID NO: 467579 - DNA, 15 bp, Homo sapiens
cctcaggtgatcggc

SEQ ID NO: 467580 - DNA, 15 bp, Homo sapiens
acctcaggtgatcgg

SEQ ID NO: 467581 - DNA, 15 bp, Homo sapiens
gacctcaggtgatcg

SEQ ID NO: 467582 - DNA, 15 bp, Homo sapiens
ctcctgacctcaggt

SEQ ID NO: 467583 - DNA, 15 bp, Homo sapiens
tctcctgacctcagg

SEQ ID NO: 467584 - DNA, 15 bp, Homo sapiens
atctcctgacctcag

SEQ ID NO: 467585 - DNA, 15 bp, Homo sapiens
gatctcctgacctca

SEQ ID NO: 467586 - DNA, 15 bp, Homo sapiens
accatgttggccagg

SEQ ID NO: 467587 - DNA, 15 bp, Homo sapiens
caccatgttggccag

SEQ ID NO: 467588 - DNA, 15 bp, Homo sapiens
tcaccatgttggcca

SEQ ID NO: 467589 - DNA, 15 bp, Homo sapiens
ttcaccatgttggcc

SEQ ID NO: 467590 - DNA, 15 bp, Homo sapiens
tttcaccatgttggc

SEQ ID NO: 467591 - DNA, 15 bp, Homo sapiens
ttgcccagctaattt

SEQ ID NO: 467592 - DNA, 15 bp, Homo sapiens
cttgcccagctaatt

SEQ ID NO: 467593 - DNA, 15 bp, Homo sapiens
ccttgcccagctaat

SEQ ID NO: 467594 - DNA, 15 bp, Homo sapiens
accttgcccagctaa

SEQ ID NO: 467595 - DNA, 15 bp, Homo sapiens
caccttgcccagcta

SEQ ID NO: 467596 - DNA, 15 bp, Homo sapiens
ccaccttgcccagct

SEQ ID NO: 467597 - DNA, 15 bp, Homo sapiens
gccaccttgcccagc

SEQ ID NO: 467598 - DNA, 15 bp, Homo sapiens
cgccaccttgcccag

SEQ ID NO: 467599 - DNA, 15 bp, Homo sapiens
gcgccaccttgccca

SEQ ID NO: 467600 - DNA, 15 bp, Homo sapiens
cgcgccaccttgccc

SEQ ID NO: 467601 - DNA, 15 bp, Homo sapiens
gcgcgccaccttgcc

SEQ ID NO: 467602 - DNA, 15 bp, Homo sapiens
ggcgcgccaccttgc

SEQ ID NO: 467603 - DNA, 15 bp, Homo sapiens
aggcgcgccaccttg

SEQ ID NO: 467604 - DNA, 15 bp, Homo sapiens
taggcgcgccacctt

SEQ ID NO: 467605 - DNA, 15 bp, Homo sapiens
ataggcgcgccacct

SEQ ID NO: 467606 - DNA, 15 bp, Homo sapiens
tataggcgcgccacc

SEQ ID NO: 467607 - DNA, 15 bp, Homo sapiens
ttataggcgcgccac

SEQ ID NO: 467608 - DNA, 15 bp, Homo sapiens
attataggcgcgcca

SEQ ID NO: 467609 - DNA, 15 bp, Homo sapiens
gattataggcgcgcc

SEQ ID NO: 467610 - DNA, 15 bp, Homo sapiens
ggattataggcgcgc

SEQ ID NO: 467611 - DNA, 15 bp, Homo sapiens
gggattataggcgcg

SEQ ID NO: 467612 - DNA, 15 bp, Homo sapiens
tgggattataggcgc

SEQ ID NO: 467613 - DNA, 15 bp, Homo sapiens
ctgggattataggcg

SEQ ID NO: 467614 - DNA, 15 bp, Homo sapiens
gctgggattataggc

SEQ ID NO: 467615 - DNA, 15 bp, Homo sapiens
agctgggattatagg

SEQ ID NO: 467616 - DNA, 15 bp, Homo sapiens
tagctgggattatag

SEQ ID NO: 467617 - DNA, 15 bp, Homo sapiens
atagctgggattata

SEQ ID NO: 467618 - DNA, 15 bp, Homo sapiens
aatagctgggattat

SEQ ID NO: 467619 - DNA, 15 bp, Homo sapiens
aaatagctgggatta

SEQ ID NO: 467620 - DNA, 15 bp, Homo sapiens
caaatagctgggatt

SEQ ID NO: 467621 - DNA, 15 bp, Homo sapiens
ccaaatagctgggat

SEQ ID NO: 467622 - DNA, 15 bp, Homo sapiens
tccaaatagctggga

SEQ ID NO: 467623 - DNA, 15 bp, Homo sapiens
ttccaaatagctggg

SEQ ID NO: 467624 - DNA, 15 bp, Homo sapiens
cttccaaatagctgg

SEQ ID NO: 467625 - DNA, 15 bp, Homo sapiens
ccttccaaatagctg

SEQ ID NO: 467626 - DNA, 15 bp, Homo sapiens
gccttccaaatagct

SEQ ID NO: 467627 - DNA, 15 bp, Homo sapiens
agccttccaaatagc

SEQ ID NO: 467628 - DNA, 15 bp, Homo sapiens
cagccttccaaatag

SEQ ID NO: 467629 - DNA, 15 bp, Homo sapiens
tcagccttccaaata

SEQ ID NO: 467630 - DNA, 15 bp, Homo sapiens
ctcagccttccaaat

SEQ ID NO: 467631 - DNA, 15 bp, Homo sapiens
cctcagccttccaaa

SEQ ID NO: 467632 - DNA, 15 bp, Homo sapiens
gcctcagccttccaa

SEQ ID NO: 467633 - DNA, 15 bp, Homo sapiens
tgcctcagccttcca

SEQ ID NO: 467634 - DNA, 15 bp, Homo sapiens
ctgcctcagccttcc

SEQ ID NO: 467635 - DNA, 15 bp, Homo sapiens
cctgcctcagccttc

SEQ ID NO: 467636 - DNA, 15 bp, Homo sapiens
tcctgcctcagcctt

SEQ ID NO: 467637 - DNA, 15 bp, Homo sapiens
ggtgattctcctgcc

SEQ ID NO: 467638 - DNA, 15 bp, Homo sapiens
aggtgattctcctgc

SEQ ID NO: 467639 - DNA, 15 bp, Homo sapiens
caggtgattctcctg

SEQ ID NO: 467640 - DNA, 15 bp, Homo sapiens
tcaggtgattctcct

SEQ ID NO: 467641 - DNA, 15 bp, Homo sapiens
ttcaggtgattctcc

SEQ ID NO: 467642 - DNA, 15 bp, Homo sapiens
gttcaggtgattctc

SEQ ID NO: 467643 - DNA, 15 bp, Homo sapiens
ggttcaggtgattct

SEQ ID NO: 467644 - DNA, 15 bp, Homo sapiens
gggttcaggtgattc

SEQ ID NO: 467645 - DNA, 15 bp, Homo sapiens
tgggttcaggtgatt

SEQ ID NO: 467646 - DNA, 15 bp, Homo sapiens
ctgggttcaggtgat

SEQ ID NO: 467647 - DNA, 15 bp, Homo sapiens
cctgggttcaggtga

SEQ ID NO: 467648 - DNA, 15 bp, Homo sapiens
tcctgggttcaggtg

SEQ ID NO: 467649 - DNA, 15 bp, Homo sapiens
ctcctgggttcaggt

SEQ ID NO: 467650 - DNA, 15 bp, Homo sapiens
cctcctgggttcagg

SEQ ID NO: 467651 - DNA, 15 bp, Homo sapiens
acctcctgggttcag

SEQ ID NO: 467652 - DNA, 15 bp, Homo sapiens
tacctcctgggttca

SEQ ID NO: 467653 - DNA, 15 bp, Homo sapiens
ctacctcctgggttc

SEQ ID NO: 467654 - DNA, 15 bp, Homo sapiens
tctacctcctgggtt

SEQ ID NO: 467655 - DNA, 15 bp, Homo sapiens
ctctacctcctgggt

SEQ ID NO: 467656 - DNA, 15 bp, Homo sapiens
actctacctcctggg

SEQ ID NO: 467657 - DNA, 15 bp, Homo sapiens
aactctacctcctgg

SEQ ID NO: 467658 - DNA, 15 bp, Homo sapiens
aaactctacctcctg

SEQ ID NO: 467659 - DNA, 15 bp, Homo sapiens
caaactctacctcct

SEQ ID NO: 467660 - DNA, 15 bp, Homo sapiens
tcaaactctacctcc

SEQ ID NO: 467661 - DNA, 15 bp, Homo sapiens
ctcaaactctacctc

SEQ ID NO: 467662 - DNA, 15 bp, Homo sapiens
cctcaaactctacct

SEQ ID NO: 467663 - DNA, 15 bp, Homo sapiens
acctcaaactctacc

SEQ ID NO: 467664 - DNA, 15 bp, Homo sapiens
cacctcaaactctac

SEQ ID NO: 467665 - DNA, 15 bp, Homo sapiens
ccacctcaaactcta

SEQ ID NO: 467666 - DNA, 15 bp, Homo sapiens
cccacctcaaactct

SEQ ID NO: 467667 - DNA, 15 bp, Homo sapiens
gcccacctcaaactc

SEQ ID NO: 467668 - DNA, 15 bp, Homo sapiens
ggcccacctcaaact

SEQ ID NO: 467669 - DNA, 15 bp, Homo sapiens
cggcccacctcaaac

SEQ ID NO: 467670 - DNA, 15 bp, Homo sapiens
tcggcccacctcaaa

SEQ ID NO: 467671 - DNA, 15 bp, Homo sapiens
ctcggcccacctcaa

SEQ ID NO: 467672 - DNA, 15 bp, Homo sapiens
tctcggcccacctca

SEQ ID NO: 467673 - DNA, 15 bp, Homo sapiens
atctcggcccacctc

SEQ ID NO: 467674 - DNA, 15 bp, Homo sapiens
gatctcggcccacct

SEQ ID NO: 467675 - DNA, 15 bp, Homo sapiens
tgatctcggcccacc

SEQ ID NO: 467676 - DNA, 15 bp, Homo sapiens
atgatctcggcccac

SEQ ID NO: 467677 - DNA, 15 bp, Homo sapiens
catgatctcggccca

SEQ ID NO: 467678 - DNA, 15 bp, Homo sapiens
gcatgatctcggccc

SEQ ID NO: 467679 - DNA, 15 bp, Homo sapiens
ggcatgatctcggcc

SEQ ID NO: 467680 - DNA, 15 bp, Homo sapiens
tggcatgatctcggc

SEQ ID NO: 467681 - DNA, 15 bp, Homo sapiens
gtggcatgatctcgg

SEQ ID NO: 467682 - DNA, 15 bp, Homo sapiens
agtggcatgatctcg

SEQ ID NO: 467683 - DNA, 15 bp, Homo sapiens
cagtggcatgatctc

SEQ ID NO: 467684 - DNA, 15 bp, Homo sapiens
gcagtggcatgatct

SEQ ID NO: 467685 - DNA, 15 bp, Homo sapiens
tgcagtggcatgatc

SEQ ID NO: 467686 - DNA, 15 bp, Homo sapiens
gtgcagtggcatgat

SEQ ID NO: 467687 - DNA, 15 bp, Homo sapiens
agtgcagtggcatga

SEQ ID NO: 467688 - DNA, 15 bp, Homo sapiens
aagtgcagtggcatg

SEQ ID NO: 467689 - DNA, 15 bp, Homo sapiens
gaagtgcagtggcat

SEQ ID NO: 467690 - DNA, 15 bp, Homo sapiens
tgaagtgcagtggca

SEQ ID NO: 467691 - DNA, 15 bp, Homo sapiens
ctgaagtgcagtggc

SEQ ID NO: 467692 - DNA, 15 bp, Homo sapiens
gctgaagtgcagtgg

SEQ ID NO: 467693 - DNA, 15 bp, Homo sapiens
ggctgaagtgcagtg

SEQ ID NO: 467694 - DNA, 15 bp, Homo sapiens
aggctgaagtgcagt

SEQ ID NO: 467695 - DNA, 15 bp, Homo sapiens
caggctgaagtgcag

SEQ ID NO: 467696 - DNA, 15 bp, Homo sapiens
ccaggctgaagtgca

SEQ ID NO: 467697 - DNA, 15 bp, Homo sapiens
cccaggctgaagtgc

SEQ ID NO: 467698 - DNA, 15 bp, Homo sapiens
acccaggctgaagtg

SEQ ID NO: 467699 - DNA, 15 bp, Homo sapiens
cacccaggctgaagt

SEQ ID NO: 467700 - DNA, 15 bp, Homo sapiens
tcacccaggctgaag

SEQ ID NO: 467701 - DNA, 15 bp, Homo sapiens
atcacccaggctgaa

SEQ ID NO: 467702 - DNA, 15 bp, Homo sapiens
catcacccaggctga

SEQ ID NO: 467703 - DNA, 15 bp, Homo sapiens
ccatcacccaggctg

SEQ ID NO: 467704 - DNA, 15 bp, Homo sapiens
tccatcacccaggct

SEQ ID NO: 467705 - DNA, 15 bp, Homo sapiens
ctccatcacccaggc

SEQ ID NO: 467706 - DNA, 15 bp, Homo sapiens
actccatcacccagg

SEQ ID NO: 467707 - DNA, 15 bp, Homo sapiens
cactccatcacccag

SEQ ID NO: 467708 - DNA, 15 bp, Homo sapiens
tcactccatcaccca

SEQ ID NO: 467709 - DNA, 15 bp, Homo sapiens
ctcactccatcaccc

SEQ ID NO: 467710 - DNA, 15 bp, Homo sapiens
tctcactccatcacc

SEQ ID NO: 467711 - DNA, 15 bp, Homo sapiens
gtctcactccatcac

SEQ ID NO: 467712 - DNA, 15 bp, Homo sapiens
ggtctcactccatca

SEQ ID NO: 467713 - DNA, 15 bp, Homo sapiens
tggtctcactccatc

SEQ ID NO: 467714 - DNA, 15 bp, Homo sapiens
atggtctcactccat

SEQ ID NO: 467715 - DNA, 15 bp, Homo sapiens
catggtctcactcca

SEQ ID NO: 467716 - DNA, 15 bp, Homo sapiens
acatggtctcactcc

SEQ ID NO: 467717 - DNA, 15 bp, Homo sapiens
gacatggtctcactc

SEQ ID NO: 467718 - DNA, 15 bp, Homo sapiens
agacatggtctcact

SEQ ID NO: 467719 - DNA, 15 bp, Homo sapiens
gagacatggtctcac

SEQ ID NO: 467720 - DNA, 15 bp, Homo sapiens
tgagacatggtctca

SEQ ID NO: 467721 - DNA, 15 bp, Homo sapiens
ttgagacatggtctc

SEQ ID NO: 467722 - DNA, 15 bp, Homo sapiens
tttgagacatggtct

SEQ ID NO: 467723 - DNA, 15 bp, Homo sapiens
ttttgagacatggtc

SEQ ID NO: 467724 - DNA, 15 bp, Homo sapiens
tttttgagacatggt

SEQ ID NO: 467725 - DNA, 15 bp, Homo sapiens
ttttttgagacatgg

SEQ ID NO: 467726 - DNA, 15 bp, Homo sapiens
tttttttgagacatg

SEQ ID NO: 467727 - DNA, 15 bp, Homo sapiens
ttttttttgagacat

SEQ ID NO: 467728 - DNA, 15 bp, Homo sapiens
tttttttttgagaca

SEQ ID NO: 467729 - DNA, 15 bp, Homo sapiens
ttctttttttttttt

SEQ ID NO: 467730 - DNA, 15 bp, Homo sapiens
tttcttttttttttt

SEQ ID NO: 467731 - DNA, 15 bp, Homo sapiens
tttttcttttttttt

SEQ ID NO: 467732 - DNA, 15 bp, Homo sapiens
ttttttctttttttt

SEQ ID NO: 467733 - DNA, 15 bp, Homo sapiens
cttttttcttttttt

SEQ ID NO: 467734 - DNA, 15 bp, Homo sapiens
gcttttttctttttt

SEQ ID NO: 467735 - DNA, 15 bp, Homo sapiens
ggcttttttcttttt

SEQ ID NO: 467736 - DNA, 15 bp, Homo sapiens
gggcttttttctttt

SEQ ID NO: 467737 - DNA, 15 bp, Homo sapiens
tgggcttttttcttt

SEQ ID NO: 467738 - DNA, 15 bp, Homo sapiens
ctgggcttttttctt

SEQ ID NO: 467739 - DNA, 15 bp, Homo sapiens
cctgggcttttttct

SEQ ID NO: 467740 - DNA, 15 bp, Homo sapiens
ccctgggcttttttc

SEQ ID NO: 467741 - DNA, 15 bp, Homo sapiens
tccctgggctttttt

SEQ ID NO: 467742 - DNA, 15 bp, Homo sapiens
gtccctgggcttttt

SEQ ID NO: 467743 - DNA, 15 bp, Homo sapiens
tgtccctgggctttt

SEQ ID NO: 467744 - DNA, 15 bp, Homo sapiens
atgtccctgggcttt

SEQ ID NO: 467745 - DNA, 15 bp, Homo sapiens
aatgtccctgggctt

SEQ ID NO: 467746 - DNA, 15 bp, Homo sapiens
caatgtccctgggct

SEQ ID NO: 467747 - DNA, 15 bp, Homo sapiens
tcaatgtccctgggc

SEQ ID NO: 467748 - DNA, 15 bp, Homo sapiens
atcaatgtccctggg

SEQ ID NO: 467749 - DNA, 15 bp, Homo sapiens
gatcaatgtccctgg

SEQ ID NO: 467750 - DNA, 15 bp, Homo sapiens
agatcaatgtccctg

SEQ ID NO: 467751 - DNA, 15 bp, Homo sapiens
aagatcaatgtccct

SEQ ID NO: 467752 - DNA, 15 bp, Homo sapiens
gaagatcaatgtccc

SEQ ID NO: 467753 - DNA, 15 bp, Homo sapiens
tgaagatcaatgtcc

SEQ ID NO: 467754 - DNA, 15 bp, Homo sapiens
gtgaagatcaatgtc

SEQ ID NO: 467755 - DNA, 15 bp, Homo sapiens
tgtgaagatcaatgt

SEQ ID NO: 467756 - DNA, 15 bp, Homo sapiens
ctgtgaagatcaatg

SEQ ID NO: 467757 - DNA, 15 bp, Homo sapiens
gctgtgaagatcaat

SEQ ID NO: 467758 - DNA, 15 bp, Homo sapiens
tgctgtgaagatcaa

SEQ ID NO: 467759 - DNA, 15 bp, Homo sapiens
ttgctgtgaagatca

SEQ ID NO: 467760 - DNA, 15 bp, Homo sapiens
tttgctgtgaagatc

SEQ ID NO: 467761 - DNA, 15 bp, Homo sapiens
ctttgctgtgaagat

SEQ ID NO: 467762 - DNA, 15 bp, Homo sapiens
actttgctgtgaaga

SEQ ID NO: 467763 - DNA, 15 bp, Homo sapiens
cactttgctgtgaag

SEQ ID NO: 467764 - DNA, 15 bp, Homo sapiens
tcactttgctgtgaa

SEQ ID NO: 467765 - DNA, 15 bp, Homo sapiens
ctcactttgctgtga

SEQ ID NO: 467766 - DNA, 15 bp, Homo sapiens
tctcactttgctgtg

SEQ ID NO: 467767 - DNA, 15 bp, Homo sapiens
ctctcactttgctgt

SEQ ID NO: 467768 - DNA, 15 bp, Homo sapiens
gctctcactttgctg

SEQ ID NO: 467769 - DNA, 15 bp, Homo sapiens
tgctctcactttgct

SEQ ID NO: 467770 - DNA, 15 bp, Homo sapiens
ctgctctcactttgc

SEQ ID NO: 467771 - DNA, 15 bp, Homo sapiens
tctgctctcactttg

SEQ ID NO: 467772 - DNA, 15 bp, Homo sapiens
atctgctctcacttt

SEQ ID NO: 467773 - DNA, 15 bp, Homo sapiens
tatctgctctcactt

SEQ ID NO: 467774 - DNA, 15 bp, Homo sapiens
gtatctgctctcact

SEQ ID NO: 467775 - DNA, 15 bp, Homo sapiens
agtatctgctctcac

SEQ ID NO: 467776 - DNA, 15 bp, Homo sapiens
cagtatctgctctca

SEQ ID NO: 467777 - DNA, 15 bp, Homo sapiens
acagtatctgctctc

SEQ ID NO: 467778 - DNA, 15 bp, Homo sapiens
aacagtatctgctct

SEQ ID NO: 467779 - DNA, 15 bp, Homo sapiens
aaacagtatctgctc

SEQ ID NO: 467780 - DNA, 15 bp, Homo sapiens
aaaacagtatctgct

SEQ ID NO: 467781 - DNA, 15 bp, Homo sapiens
aaaaacagtatctgc

SEQ ID NO: 467782 - DNA, 15 bp, Homo sapiens
aaaaaacagtatctg

SEQ ID NO: 467783 - DNA, 15 bp, Homo sapiens
caaaaaacagtatct

SEQ ID NO: 467784 - DNA, 15 bp, Homo sapiens
acaaaaaacagtatc

SEQ ID NO: 467785 - DNA, 15 bp, Homo sapiens
aacaaaaaacagtat

SEQ ID NO: 467786 - DNA, 15 bp, Homo sapiens
aaacaaaaaacagta

SEQ ID NO: 467787 - DNA, 15 bp, Homo sapiens
aaaacaaaaaacagt

SEQ ID NO: 467788 - DNA, 15 bp, Homo sapiens
caaaacaaaaaacag

SEQ ID NO: 467789 - DNA, 15 bp, Homo sapiens
acaaaacaaaaaaca

SEQ ID NO: 467790 - DNA, 15 bp, Homo sapiens
aacaaaacaaaaaac

SEQ ID NO: 467791 - DNA, 15 bp, Homo sapiens
aaacaaaacaaaaaa

SEQ ID NO: 467792 - DNA, 15 bp, Homo sapiens
aaaacaaaacaaaaa

SEQ ID NO: 467793 - DNA, 15 bp, Homo sapiens
ggaaaacaaaacaaa

SEQ ID NO: 467794 - DNA, 15 bp, Homo sapiens
gggaaaacaaaacaa

SEQ ID NO: 467795 - DNA, 15 bp, Homo sapiens
cgggaaaacaaaaca

SEQ ID NO: 467796 - DNA, 15 bp, Homo sapiens
tcgggaaaacaaaac

SEQ ID NO: 467797 - DNA, 15 bp, Homo sapiens
atcgggaaaacaaaa

SEQ ID NO: 467798 - DNA, 15 bp, Homo sapiens
catcgggaaaacaaa

SEQ ID NO: 467799 - DNA, 15 bp, Homo sapiens
tcatcgggaaaacaa

SEQ ID NO: 467800 - DNA, 15 bp, Homo sapiens
atcatcgggaaaaca

SEQ ID NO: 467801 - DNA, 15 bp, Homo sapiens
aatcatcgggaaaac

SEQ ID NO: 467802 - DNA, 15 bp, Homo sapiens
taatcatcgggaaaa

SEQ ID NO: 467803 - DNA, 15 bp, Homo sapiens
ttaatcatcgggaaa

SEQ ID NO: 467804 - DNA, 15 bp, Homo sapiens
tttaatcatcgggaa

SEQ ID NO: 467805 - DNA, 15 bp, Homo sapiens
gtttaatcatcggga

SEQ ID NO: 467806 - DNA, 15 bp, Homo sapiens
ggtttaatcatcggg

SEQ ID NO: 467807 - DNA, 15 bp, Homo sapiens
tggtttaatcatcgg

SEQ ID NO: 467808 - DNA, 15 bp, Homo sapiens
ctggtttaatcatcg

SEQ ID NO: 467809 - DNA, 15 bp, Homo sapiens
cctggtttaatcatc

SEQ ID NO: 467810 - DNA, 15 bp, Homo sapiens
gcctggtttaatcat

SEQ ID NO: 467811 - DNA, 15 bp, Homo sapiens
ggcctggtttaatca

SEQ ID NO: 467812 - DNA, 15 bp, Homo sapiens
gggcctggtttaatc

SEQ ID NO: 467813 - DNA, 15 bp, Homo sapiens
tgggcctggtttaat

SEQ ID NO: 467814 - DNA, 15 bp, Homo sapiens
ctgggcctggtttaa

SEQ ID NO: 467815 - DNA, 15 bp, Homo sapiens
tctgggcctggttta

SEQ ID NO: 467816 - DNA, 15 bp, Homo sapiens
ctctgggcctggttt

SEQ ID NO: 467817 - DNA, 15 bp, Homo sapiens
actctgggcctggtt

SEQ ID NO: 467818 - DNA, 15 bp, Homo sapiens
cactctgggcctggt

SEQ ID NO: 467819 - DNA, 15 bp, Homo sapiens
ccactctgggcctgg

SEQ ID NO: 467820 - DNA, 15 bp, Homo sapiens
accactctgggcctg

SEQ ID NO: 467821 - DNA, 15 bp, Homo sapiens
aaccactctgggcct

SEQ ID NO: 467822 - DNA, 15 bp, Homo sapiens
aaaccactctgggcc

SEQ ID NO: 467823 - DNA, 15 bp, Homo sapiens
gaaaccactctgggc

SEQ ID NO: 467824 - DNA, 15 bp, Homo sapiens
agaaaccactctggg

SEQ ID NO: 467825 - DNA, 15 bp, Homo sapiens
cagaaaccactctgg

SEQ ID NO: 467826 - DNA, 15 bp, Homo sapiens
tcagaaaccactctg

SEQ ID NO: 467827 - DNA, 15 bp, Homo sapiens
ctcagaaaccactct

SEQ ID NO: 467828 - DNA, 15 bp, Homo sapiens
actcagaaaccactc

SEQ ID NO: 467829 - DNA, 15 bp, Homo sapiens
aactcagaaaccact

SEQ ID NO: 467830 - DNA, 15 bp, Homo sapiens
gaactcagaaaccac

SEQ ID NO: 467831 - DNA, 15 bp, Homo sapiens
tgaactcagaaacca

SEQ ID NO: 467832 - DNA, 15 bp, Homo sapiens
atgaactcagaaacc

SEQ ID NO: 467833 - DNA, 15 bp, Homo sapiens
tatgaactcagaaac

SEQ ID NO: 467834 - DNA, 15 bp, Homo sapiens
ttatgaactcagaaa

SEQ ID NO: 467835 - DNA, 15 bp, Homo sapiens
tttatgaactcagaa

SEQ ID NO: 467836 - DNA, 15 bp, Homo sapiens
ttttatgaactcaga

SEQ ID NO: 467837 - DNA, 15 bp, Homo sapiens
gttttatgaactcag

SEQ ID NO: 467838 - DNA, 15 bp, Homo sapiens
tgttttatgaactca

SEQ ID NO: 467839 - DNA, 15 bp, Homo sapiens
atgttttatgaactc

SEQ ID NO: 467840 - DNA, 15 bp, Homo sapiens
aatgttttatgaact

SEQ ID NO: 467841 - DNA, 15 bp, Homo sapiens
taatgttttatgaac

SEQ ID NO: 467842 - DNA, 15 bp, Homo sapiens
ttaatgttttatgaa

SEQ ID NO: 467843 - DNA, 15 bp, Homo sapiens
gttaatgttttatga

SEQ ID NO: 467844 - DNA, 15 bp, Homo sapiens
cgttaatgttttatg

SEQ ID NO: 467845 - DNA, 15 bp, Homo sapiens
gcgttaatgttttat

SEQ ID NO: 467846 - DNA, 15 bp, Homo sapiens
agcgttaatgtttta

SEQ ID NO: 467847 - DNA, 15 bp, Homo sapiens
tagcgttaatgtttt

SEQ ID NO: 467848 - DNA, 15 bp, Homo sapiens
ctagcgttaatgttt

SEQ ID NO: 467849 - DNA, 15 bp, Homo sapiens
tctagcgttaatgtt

SEQ ID NO: 467850 - DNA, 15 bp, Homo sapiens
ttctagcgttaatgt

SEQ ID NO: 467851 - DNA, 15 bp, Homo sapiens
cttctagcgttaatg

SEQ ID NO: 467852 - DNA, 15 bp, Homo sapiens
ccttctagcgttaat

SEQ ID NO: 467853 - DNA, 15 bp, Homo sapiens
tccttctagcgttaa

SEQ ID NO: 467854 - DNA, 15 bp, Homo sapiens
ttccttctagcgtta

SEQ ID NO: 467855 - DNA, 15 bp, Homo sapiens
gttccttctagcgtt

SEQ ID NO: 467856 - DNA, 15 bp, Homo sapiens
ggttccttctagcgt

SEQ ID NO: 467857 - DNA, 15 bp, Homo sapiens
aggttccttctagcg

SEQ ID NO: 467858 - DNA, 15 bp, Homo sapiens
caggttccttctagc

SEQ ID NO: 467859 - DNA, 15 bp, Homo sapiens
acaggttccttctag

SEQ ID NO: 467860 - DNA, 15 bp, Homo sapiens
gacaggttccttcta

SEQ ID NO: 467861 - DNA, 15 bp, Homo sapiens
agacaggttccttct

SEQ ID NO: 467862 - DNA, 15 bp, Homo sapiens
aagacaggttccttc

SEQ ID NO: 467863 - DNA, 15 bp, Homo sapiens
gaagacaggttcctt

SEQ ID NO: 467864 - DNA, 15 bp, Homo sapiens
ggaagacaggttcct

SEQ ID NO: 467865 - DNA, 15 bp, Homo sapiens
gggaagacaggttcc

SEQ ID NO: 467866 - DNA, 15 bp, Homo sapiens
ggggaagacaggttc

SEQ ID NO: 467867 - DNA, 15 bp, Homo sapiens
aggggaagacaggtt

SEQ ID NO: 467868 - DNA, 15 bp, Homo sapiens
taggggaagacaggt

SEQ ID NO: 467869 - DNA, 15 bp, Homo sapiens
gtaggggaagacagg

SEQ ID NO: 467870 - DNA, 15 bp, Homo sapiens
tgtaggggaagacag

SEQ ID NO: 467871 - DNA, 15 bp, Homo sapiens
ctgtaggggaagaca

SEQ ID NO: 467872 - DNA, 15 bp, Homo sapiens
gctgtaggggaagac

SEQ ID NO: 467873 - DNA, 15 bp, Homo sapiens
tgctgtaggggaaga

SEQ ID NO: 467874 - DNA, 15 bp, Homo sapiens
atgctgtaggggaag

SEQ ID NO: 467875 - DNA, 15 bp, Homo sapiens
aatgctgtaggggaa

SEQ ID NO: 467876 - DNA, 15 bp, Homo sapiens
gaatgctgtagggga

SEQ ID NO: 467877 - DNA, 15 bp, Homo sapiens
tgaatgctgtagggg

SEQ ID NO: 467878 - DNA, 15 bp, Homo sapiens
gtgaatgctgtaggg

SEQ ID NO: 467879 - DNA, 15 bp, Homo sapiens
agtgaatgctgtagg

SEQ ID NO: 467880 - DNA, 15 bp, Homo sapiens
gagtgaatgctgtag

SEQ ID NO: 467881 - DNA, 15 bp, Homo sapiens
agagtgaatgctgta

SEQ ID NO: 467882 - DNA, 15 bp, Homo sapiens
aagagtgaatgctgt

SEQ ID NO: 467883 - DNA, 15 bp, Homo sapiens
gaagagtgaatgctg

SEQ ID NO: 467884 - DNA, 15 bp, Homo sapiens
tgaagagtgaatgct

SEQ ID NO: 467885 - DNA, 15 bp, Homo sapiens
ctgaagagtgaatgc

SEQ ID NO: 467886 - DNA, 15 bp, Homo sapiens
tctgaagagtgaatg

SEQ ID NO: 467887 - DNA, 15 bp, Homo sapiens
atctgaagagtgaat

SEQ ID NO: 467888 - DNA, 15 bp, Homo sapiens
catctgaagagtgaa

SEQ ID NO: 467889 - DNA, 15 bp, Homo sapiens
tcatctgaagagtga

SEQ ID NO: 467890 - DNA, 15 bp, Homo sapiens
atcatctgaagagtg

SEQ ID NO: 467891 - DNA, 15 bp, Homo sapiens
catcatctgaagagt

SEQ ID NO: 467892 - DNA, 15 bp, Homo sapiens
tcatcatctgaagag

SEQ ID NO: 467893 - DNA, 15 bp, Homo sapiens
ttcatcatctgaaga

SEQ ID NO: 467894 - DNA, 15 bp, Homo sapiens
tttcatcatctgaag

SEQ ID NO: 467895 - DNA, 15 bp, Homo sapiens
gtttcatcatctgaa

SEQ ID NO: 467896 - DNA, 15 bp, Homo sapiens
agtttcatcatctga

SEQ ID NO: 467897 - DNA, 15 bp, Homo sapiens
cagtttcatcatctg

SEQ ID NO: 467898 - DNA, 15 bp, Homo sapiens
tcagtttcatcatct

SEQ ID NO: 467899 - DNA, 15 bp, Homo sapiens
ctcagtttcatcatc

SEQ ID NO: 467900 - DNA, 15 bp, Homo sapiens
gctcagtttcatcat

SEQ ID NO: 467901 - DNA, 15 bp, Homo sapiens
agctcagtttcatca

SEQ ID NO: 467902 - DNA, 15 bp, Homo sapiens
cagctcagtttcatc

SEQ ID NO: 467903 - DNA, 15 bp, Homo sapiens
acagctcagtttcat

SEQ ID NO: 467904 - DNA, 15 bp, Homo sapiens
cacagctcagtttca

SEQ ID NO: 467905 - DNA, 15 bp, Homo sapiens
tcacagctcagtttc

SEQ ID NO: 467906 - DNA, 15 bp, Homo sapiens
gtcacagctcagttt

SEQ ID NO: 467907 - DNA, 15 bp, Homo sapiens
tgtcacagctcagtt

SEQ ID NO: 467908 - DNA, 15 bp, Homo sapiens
ctgtcacagctcagt

SEQ ID NO: 467909 - DNA, 15 bp, Homo sapiens
gctgtcacagctcag

SEQ ID NO: 467910 - DNA, 15 bp, Homo sapiens
cgctgtcacagctca

SEQ ID NO: 467911 - DNA, 15 bp, Homo sapiens
ccgctgtcacagctc

SEQ ID NO: 467912 - DNA, 15 bp, Homo sapiens
tccgctgtcacagct

SEQ ID NO: 467913 - DNA, 15 bp, Homo sapiens
ttccgctgtcacagc

SEQ ID NO: 467914 - DNA, 15 bp, Homo sapiens
tttccgctgtcacag

SEQ ID NO: 467915 - DNA, 15 bp, Homo sapiens
ctttccgctgtcaca

SEQ ID NO: 467916 - DNA, 15 bp, Homo sapiens
actttccgctgtcac

SEQ ID NO: 467917 - DNA, 15 bp, Homo sapiens
cactttccgctgtca

SEQ ID NO: 467918 - DNA, 15 bp, Homo sapiens
gcactttccgctgtc

SEQ ID NO: 467919 - DNA, 15 bp, Homo sapiens
tgcactttccgctgt

SEQ ID NO: 467920 - DNA, 15 bp, Homo sapiens
atgcactttccgctg

SEQ ID NO: 467921 - DNA, 15 bp, Homo sapiens
aatgcactttccgct

SEQ ID NO: 467922 - DNA, 15 bp, Homo sapiens
aaatgcactttccgc

SEQ ID NO: 467923 - DNA, 15 bp, Homo sapiens
taaatgcactttccg

SEQ ID NO: 467924 - DNA, 15 bp, Homo sapiens
ttaaatgcactttcc

SEQ ID NO: 467925 - DNA, 15 bp, Homo sapiens
gttaaatgcactttc

SEQ ID NO: 467926 - DNA, 15 bp, Homo sapiens
agttaaatgcacttt

SEQ ID NO: 467927 - DNA, 15 bp, Homo sapiens
cagttaaatgcactt

SEQ ID NO: 467928 - DNA, 15 bp, Homo sapiens
ccagttaaatgcact

SEQ ID NO: 467929 - DNA, 15 bp, Homo sapiens
accagttaaatgcac

SEQ ID NO: 467930 - DNA, 15 bp, Homo sapiens
gaccagttaaatgca

SEQ ID NO: 467931 - DNA, 15 bp, Homo sapiens
ggaccagttaaatgc

SEQ ID NO: 467932 - DNA, 15 bp, Homo sapiens
gggaccagttaaatg

SEQ ID NO: 467933 - DNA, 15 bp, Homo sapiens
tgggaccagttaaat

SEQ ID NO: 467934 - DNA, 15 bp, Homo sapiens
ctgggaccagttaaa

SEQ ID NO: 467935 - DNA, 15 bp, Homo sapiens
cctgggaccagttaa

SEQ ID NO: 467936 - DNA, 15 bp, Homo sapiens
acctgggaccagtta

SEQ ID NO: 467937 - DNA, 15 bp, Homo sapiens
cacctgggaccagtt

SEQ ID NO: 467938 - DNA, 15 bp, Homo sapiens
gcacctgggaccagt

SEQ ID NO: 467939 - DNA, 15 bp, Homo sapiens
agcacctgggaccag

SEQ ID NO: 467940 - DNA, 15 bp, Homo sapiens
gagcacctgggacca

SEQ ID NO: 467941 - DNA, 15 bp, Homo sapiens
tgagcacctgggacc

SEQ ID NO: 467942 - DNA, 15 bp, Homo sapiens
ctgagcacctgggac

SEQ ID NO: 467943 - DNA, 15 bp, Homo sapiens
gctgagcacctggga

SEQ ID NO: 467944 - DNA, 15 bp, Homo sapiens
cgctgagcacctggg

SEQ ID NO: 467945 - DNA, 15 bp, Homo sapiens
acgctgagcacctgg

SEQ ID NO: 467946 - DNA, 15 bp, Homo sapiens
cacgctgagcacctg

SEQ ID NO: 467947 - DNA, 15 bp, Homo sapiens
tcacgctgagcacct

SEQ ID NO: 467948 - DNA, 15 bp, Homo sapiens
atcacgctgagcacc

SEQ ID NO: 467949 - DNA, 15 bp, Homo sapiens
gatcacgctgagcac

SEQ ID NO: 467950 - DNA, 15 bp, Homo sapiens
ggatcacgctgagca

SEQ ID NO: 467951 - DNA, 15 bp, Homo sapiens
aggatcacgctgagc

SEQ ID NO: 467952 - DNA, 15 bp, Homo sapiens
aaggatcacgctgag

SEQ ID NO: 467953 - DNA, 15 bp, Homo sapiens
caaggatcacgctga

SEQ ID NO: 467954 - DNA, 15 bp, Homo sapiens
acaaggatcacgctg

SEQ ID NO: 467955 - DNA, 15 bp, Homo sapiens
cacaaggatcacgct

SEQ ID NO: 467956 - DNA, 15 bp, Homo sapiens
gcacaaggatcacgc

SEQ ID NO: 467957 - DNA, 15 bp, Homo sapiens
ggcacaaggatcacg

SEQ ID NO: 467958 - DNA, 15 bp, Homo sapiens
tggcacaaggatcac

SEQ ID NO: 467959 - DNA, 15 bp, Homo sapiens
ctggcacaaggatca

SEQ ID NO: 467960 - DNA, 15 bp, Homo sapiens
cctggcacaaggatc

SEQ ID NO: 467961 - DNA, 15 bp, Homo sapiens
ccctggcacaaggat

SEQ ID NO: 467962 - DNA, 15 bp, Homo sapiens
cccctggcacaagga

SEQ ID NO: 467963 - DNA, 15 bp, Homo sapiens
gcccctggcacaagg

SEQ ID NO: 467964 - DNA, 15 bp, Homo sapiens
ggcccctggcacaag

SEQ ID NO: 467965 - DNA, 15 bp, Homo sapiens
cggcccctggcacaa

SEQ ID NO: 467966 - DNA, 15 bp, Homo sapiens
acggcccctggcaca

SEQ ID NO: 467967 - DNA, 15 bp, Homo sapiens
cacggcccctggcac

SEQ ID NO: 467968 - DNA, 15 bp, Homo sapiens
ccacggcccctggca

SEQ ID NO: 467969 - DNA, 15 bp, Homo sapiens
accacggcccctggc

SEQ ID NO: 467970 - DNA, 15 bp, Homo sapiens
gaccacggcccctgg

SEQ ID NO: 467971 - DNA, 15 bp, Homo sapiens
tgaccacggcccctg

SEQ ID NO: 467972 - DNA, 15 bp, Homo sapiens
gtgaccacggcccct

SEQ ID NO: 467973 - DNA, 15 bp, Homo sapiens
tgtgaccacggcccc

SEQ ID NO: 467974 - DNA, 15 bp, Homo sapiens
ttgtgaccacggccc

SEQ ID NO: 467975 - DNA, 15 bp, Homo sapiens
gttgtgaccacggcc

SEQ ID NO: 467976 - DNA, 15 bp, Homo sapiens
ggttgtgaccacggc

SEQ ID NO: 467977 - DNA, 15 bp, Homo sapiens
cggttgtgaccacgg

SEQ ID NO: 467978 - DNA, 15 bp, Homo sapiens
gcggttgtgaccacg

SEQ ID NO: 467979 - DNA, 15 bp, Homo sapiens
ggcggttgtgaccac

SEQ ID NO: 467980 - DNA, 15 bp, Homo sapiens
aggcggttgtgacca

SEQ ID NO: 467981 - DNA, 15 bp, Homo sapiens
caggcggttgtgacc

SEQ ID NO: 467982 - DNA, 15 bp, Homo sapiens
ccaggcggttgtgac

SEQ ID NO: 467983 - DNA, 15 bp, Homo sapiens
tccaggcggttgtga

SEQ ID NO: 467984 - DNA, 15 bp, Homo sapiens
ctccaggcggttgtg

SEQ ID NO: 467985 - DNA, 15 bp, Homo sapiens
cctccaggcggttgt

SEQ ID NO: 467986 - DNA, 15 bp, Homo sapiens
acctccaggcggttg

SEQ ID NO: 467987 - DNA, 15 bp, Homo sapiens
cacctccaggcggtt

SEQ ID NO: 467988 - DNA, 15 bp, Homo sapiens
ccacctccaggcggt

SEQ ID NO: 467989 - DNA, 15 bp, Homo sapiens
cccacctccaggcgg

SEQ ID NO: 467990 - DNA, 15 bp, Homo sapiens
ccccacctccaggcg

SEQ ID NO: 467991 - DNA, 15 bp, Homo sapiens
accccacctccaggc

SEQ ID NO: 467992 - DNA, 15 bp, Homo sapiens
caccccacctccagg

SEQ ID NO: 467993 - DNA, 15 bp, Homo sapiens
tcaccccacctccag

SEQ ID NO: 467994 - DNA, 15 bp, Homo sapiens
ctcaccccacctcca

SEQ ID NO: 467995 - DNA, 15 bp, Homo sapiens
cctcaccccacctcc

SEQ ID NO: 467996 - DNA, 15 bp, Homo sapiens
gcctcaccccacctc

SEQ ID NO: 467997 - DNA, 15 bp, Homo sapiens
tgcctcaccccacct

SEQ ID NO: 467998 - DNA, 15 bp, Homo sapiens
ctgcctcaccccacc

SEQ ID NO: 467999 - DNA, 15 bp, Homo sapiens
tctgcctcaccccac

SEQ ID NO: 468000 - DNA, 15 bp, Homo sapiens
ttctgcctcacccca

SEQ ID NO: 468001 - DNA, 15 bp, Homo sapiens
attctgcctcacccc

SEQ ID NO: 468002 - DNA, 15 bp, Homo sapiens
gattctgcctcaccc

SEQ ID NO: 468003 - DNA, 15 bp, Homo sapiens
agattctgcctcacc

SEQ ID NO: 468004 - DNA, 15 bp, Homo sapiens
gagattctgcctcac

SEQ ID NO: 468005 - DNA, 15 bp, Homo sapiens
tgagattctgcctca

SEQ ID NO: 468006 - DNA, 15 bp, Homo sapiens
ctgagattctgcctc

SEQ ID NO: 468007 - DNA, 15 bp, Homo sapiens
actgagattctgcct

SEQ ID NO: 468008 - DNA, 15 bp, Homo sapiens
cactgagattctgcc

SEQ ID NO: 468009 - DNA, 15 bp, Homo sapiens
acactgagattctgc

SEQ ID NO: 468010 - DNA, 15 bp, Homo sapiens
aacactgagattctg

SEQ ID NO: 468011 - DNA, 15 bp, Homo sapiens
caacactgagattct

SEQ ID NO: 468012 - DNA, 15 bp, Homo sapiens
acaacactgagattc

SEQ ID NO: 468013 - DNA, 15 bp, Homo sapiens
cacaacactgagatt

SEQ ID NO: 468014 - DNA, 15 bp, Homo sapiens
tcacaacactgagat

SEQ ID NO: 468015 - DNA, 15 bp, Homo sapiens
atcacaacactgaga

SEQ ID NO: 468016 - DNA, 15 bp, Homo sapiens
aatcacaacactgag

SEQ ID NO: 468017 - DNA, 15 bp, Homo sapiens
caatcacaacactga

SEQ ID NO: 468018 - DNA, 15 bp, Homo sapiens
acaatcacaacactg

SEQ ID NO: 468019 - DNA, 15 bp, Homo sapiens
cacaatcacaacact

SEQ ID NO: 468020 - DNA, 15 bp, Homo sapiens
gcacaatcacaacac

SEQ ID NO: 468021 - DNA, 15 bp, Homo sapiens
agcacaatcacaaca

SEQ ID NO: 468022 - DNA, 15 bp, Homo sapiens
cagcacaatcacaac

SEQ ID NO: 468023 - DNA, 15 bp, Homo sapiens
ccagcacaatcacaa

SEQ ID NO: 468024 - DNA, 15 bp, Homo sapiens
cccagcacaatcaca

SEQ ID NO: 468025 - DNA, 15 bp, Homo sapiens
ccccagcacaatcac

SEQ ID NO: 468026 - DNA, 15 bp, Homo sapiens
accccagcacaatca

SEQ ID NO: 468027 - DNA, 15 bp, Homo sapiens
caccccagcacaatc

SEQ ID NO: 468028 - DNA, 15 bp, Homo sapiens
ccaccccagcacaat

SEQ ID NO: 468029 - DNA, 15 bp, Homo sapiens
tccaccccagcacaa

SEQ ID NO: 468030 - DNA, 15 bp, Homo sapiens
ctccaccccagcaca

SEQ ID NO: 468031 - DNA, 15 bp, Homo sapiens
gctccaccccagcac

SEQ ID NO: 468032 - DNA, 15 bp, Homo sapiens
agctccaccccagca

SEQ ID NO: 468033 - DNA, 15 bp, Homo sapiens
cagctccaccccagc

SEQ ID NO: 468034 - DNA, 15 bp, Homo sapiens
gcagctccaccccag

SEQ ID NO: 468035 - DNA, 15 bp, Homo sapiens
tgcagctccacccca

SEQ ID NO: 468036 - DNA, 15 bp, Homo sapiens
gtgcagctccacccc

SEQ ID NO: 468037 - DNA, 15 bp, Homo sapiens
agtgcagctccaccc

SEQ ID NO: 468038 - DNA, 15 bp, Homo sapiens
tagtgcagctccacc

SEQ ID NO: 468039 - DNA, 15 bp, Homo sapiens
ctagtgcagctccac

SEQ ID NO: 468040 - DNA, 15 bp, Homo sapiens
cctagtgcagctcca

SEQ ID NO: 468041 - DNA, 15 bp, Homo sapiens
acctagtgcagctcc

SEQ ID NO: 468042 - DNA, 15 bp, Homo sapiens
cacctagtgcagctc

SEQ ID NO: 468043 - DNA, 15 bp, Homo sapiens
ccacctagtgcagct

SEQ ID NO: 468044 - DNA, 15 bp, Homo sapiens
gccacctagtgcagc

SEQ ID NO: 468045 - DNA, 15 bp, Homo sapiens
agccacctagtgcag

SEQ ID NO: 468046 - DNA, 15 bp, Homo sapiens
aagccacctagtgca

SEQ ID NO: 468047 - DNA, 15 bp, Homo sapiens
aaagccacctagtgc

SEQ ID NO: 468048 - DNA, 15 bp, Homo sapiens
caaagccacctagtg

SEQ ID NO: 468049 - DNA, 15 bp, Homo sapiens
ccaaagccacctagt

SEQ ID NO: 468050 - DNA, 15 bp, Homo sapiens
tccaaagccacctag

SEQ ID NO: 468051 - DNA, 15 bp, Homo sapiens
ctccaaagccaccta

SEQ ID NO: 468052 - DNA, 15 bp, Homo sapiens
actccaaagccacct

SEQ ID NO: 468053 - DNA, 15 bp, Homo sapiens
gactccaaagccacc

SEQ ID NO: 468054 - DNA, 15 bp, Homo sapiens
ggactccaaagccac

SEQ ID NO: 468055 - DNA, 15 bp, Homo sapiens
gggactccaaagcca

SEQ ID NO: 468056 - DNA, 15 bp, Homo sapiens
tgggactccaaagcc

SEQ ID NO: 468057 - DNA, 15 bp, Homo sapiens
ctgggactccaaagc

SEQ ID NO: 468058 - DNA, 15 bp, Homo sapiens
gctgggactccaaag

SEQ ID NO: 468059 - DNA, 15 bp, Homo sapiens
ggctgggactccaaa

SEQ ID NO: 468060 - DNA, 15 bp, Homo sapiens
tggctgggactccaa

SEQ ID NO: 468061 - DNA, 15 bp, Homo sapiens
ctggctgggactcca

SEQ ID NO: 468062 - DNA, 15 bp, Homo sapiens
gctggctgggactcc

SEQ ID NO: 468063 - DNA, 15 bp, Homo sapiens
tgctggctgggactc

SEQ ID NO: 468064 - DNA, 15 bp, Homo sapiens
ttgctggctgggact

SEQ ID NO: 468065 - DNA, 15 bp, Homo sapiens
attgctggctgggac

SEQ ID NO: 468066 - DNA, 15 bp, Homo sapiens
tattgctggctggga

SEQ ID NO: 468067 - DNA, 15 bp, Homo sapiens
ttattgctggctggg

SEQ ID NO: 468068 - DNA, 15 bp, Homo sapiens
cttattgctggctgg

SEQ ID NO: 468069 - DNA, 15 bp, Homo sapiens
gcttattgctggctg

SEQ ID NO: 468070 - DNA, 15 bp, Homo sapiens
ggcttattgctggct

SEQ ID NO: 468071 - DNA, 15 bp, Homo sapiens
tggcttattgctggc

SEQ ID NO: 468072 - DNA, 15 bp, Homo sapiens
ctggcttattgctgg

SEQ ID NO: 468073 - DNA, 15 bp, Homo sapiens
gctggcttattgctg

SEQ ID NO: 468074 - DNA, 15 bp, Homo sapiens
tgctggcttattgct

SEQ ID NO: 468075 - DNA, 15 bp, Homo sapiens
ctgctggcttattgc

SEQ ID NO: 468076 - DNA, 15 bp, Homo sapiens
gctgctggcttattg

SEQ ID NO: 468077 - DNA, 15 bp, Homo sapiens
cgctgctggcttatt

SEQ ID NO: 468078 - DNA, 15 bp, Homo sapiens
ccgctgctggcttat

SEQ ID NO: 468079 - DNA, 15 bp, Homo sapiens
cccgctgctggctta

SEQ ID NO: 468080 - DNA, 15 bp, Homo sapiens
acccgctgctggctt

SEQ ID NO: 468081 - DNA, 15 bp, Homo sapiens
aacccgctgctggct

SEQ ID NO: 468082 - DNA, 15 bp, Homo sapiens
gaacccgctgctggc

SEQ ID NO: 468083 - DNA, 15 bp, Homo sapiens
tgaacccgctgctgg

SEQ ID NO: 468084 - DNA, 15 bp, Homo sapiens
ctgaacccgctgctg

SEQ ID NO: 468085 - DNA, 15 bp, Homo sapiens
tctgaacccgctgct

SEQ ID NO: 468086 - DNA, 15 bp, Homo sapiens
gtctgaacccgctgc

SEQ ID NO: 468087 - DNA, 15 bp, Homo sapiens
ggtctgaacccgctg

SEQ ID NO: 468088 - DNA, 15 bp, Homo sapiens
gggtctgaacccgct

SEQ ID NO: 468089 - DNA, 15 bp, Homo sapiens
tgggtctgaacccgc

SEQ ID NO: 468090 - DNA, 15 bp, Homo sapiens
atgggtctgaacccg

SEQ ID NO: 468091 - DNA, 15 bp, Homo sapiens
tatgggtctgaaccc

SEQ ID NO: 468092 - DNA, 15 bp, Homo sapiens
atatgggtctgaacc

SEQ ID NO: 468093 - DNA, 15 bp, Homo sapiens
gatatgggtctgaac

SEQ ID NO: 468094 - DNA, 15 bp, Homo sapiens
ggatatgggtctgaa

SEQ ID NO: 468095 - DNA, 15 bp, Homo sapiens
gggatatgggtctga

SEQ ID NO: 468096 - DNA, 15 bp, Homo sapiens
ggggatatgggtctg

SEQ ID NO: 468097 - DNA, 15 bp, Homo sapiens
cggggatatgggtct

SEQ ID NO: 468098 - DNA, 15 bp, Homo sapiens
ccggggatatgggtc

SEQ ID NO: 468099 - DNA, 15 bp, Homo sapiens
accggggatatgggt

SEQ ID NO: 468100 - DNA, 15 bp, Homo sapiens
caccggggatatggg

SEQ ID NO: 468101 - DNA, 15 bp, Homo sapiens
ccaccggggatatgg

SEQ ID NO: 468102 - DNA, 15 bp, Homo sapiens
cccaccggggatatg

SEQ ID NO: 468103 - DNA, 15 bp, Homo sapiens
tcccaccggggatat

SEQ ID NO: 468104 - DNA, 15 bp, Homo sapiens
ctcccaccggggata

SEQ ID NO: 468105 - DNA, 15 bp, Homo sapiens
tctcccaccggggat

SEQ ID NO: 468106 - DNA, 15 bp, Homo sapiens
gtctcccaccgggga

SEQ ID NO: 468107 - DNA, 15 bp, Homo sapiens
tgtctcccaccgggg

SEQ ID NO: 468108 - DNA, 15 bp, Homo sapiens
ctgtctcccaccggg

SEQ ID NO: 468109 - DNA, 15 bp, Homo sapiens
gctgtctcccaccgg

SEQ ID NO: 468110 - DNA, 15 bp, Homo sapiens
tgctgtctcccaccg

SEQ ID NO: 468111 - DNA, 15 bp, Homo sapiens
ttgctgtctcccacc

SEQ ID NO: 468112 - DNA, 15 bp, Homo sapiens
gttgctgtctcccac

SEQ ID NO: 468113 - DNA, 15 bp, Homo sapiens
ggttgctgtctccca

SEQ ID NO: 468114 - DNA, 15 bp, Homo sapiens
gggttgctgtctccc

SEQ ID NO: 468115 - DNA, 15 bp, Homo sapiens
tgggttgctgtctcc

SEQ ID NO: 468116 - DNA, 15 bp, Homo sapiens
ttgggttgctgtctc

SEQ ID NO: 468117 - DNA, 15 bp, Homo sapiens
attgggttgctgtct

SEQ ID NO: 468118 - DNA, 15 bp, Homo sapiens
gattgggttgctgtc

SEQ ID NO: 468119 - DNA, 15 bp, Homo sapiens
ggattgggttgctgt

SEQ ID NO: 468120 - DNA, 15 bp, Homo sapiens
tggattgggttgctg

SEQ ID NO: 468121 - DNA, 15 bp, Homo sapiens
ctggattgggttgct

SEQ ID NO: 468122 - DNA, 15 bp, Homo sapiens
actggattgggttgc

SEQ ID NO: 468123 - DNA, 15 bp, Homo sapiens
gactggattgggttg

SEQ ID NO: 468124 - DNA, 15 bp, Homo sapiens
ggactggattgggtt

SEQ ID NO: 468125 - DNA, 15 bp, Homo sapiens
tggactggattgggt

SEQ ID NO: 468126 - DNA, 15 bp, Homo sapiens
ctggactggattggg

SEQ ID NO: 468127 - DNA, 15 bp, Homo sapiens
cctggactggattgg

SEQ ID NO: 468128 - DNA, 15 bp, Homo sapiens
tcctggactggattg

SEQ ID NO: 468129 - DNA, 15 bp, Homo sapiens
gtcctggactggatt

SEQ ID NO: 468130 - DNA, 15 bp, Homo sapiens
cgtcctggactggat

SEQ ID NO: 468131 - DNA, 15 bp, Homo sapiens
gcgtcctggactgga

SEQ ID NO: 468132 - DNA, 15 bp, Homo sapiens
agcgtcctggactgg

SEQ ID NO: 468133 - DNA, 15 bp, Homo sapiens
cagcgtcctggactg

SEQ ID NO: 468134 - DNA, 15 bp, Homo sapiens
ccagcgtcctggact

SEQ ID NO: 468135 - DNA, 15 bp, Homo sapiens
cccagcgtcctggac

SEQ ID NO: 468136 - DNA, 15 bp, Homo sapiens
gcccagcgtcctgga

SEQ ID NO: 468137 - DNA, 15 bp, Homo sapiens
tgcccagcgtcctgg

SEQ ID NO: 468138 - DNA, 15 bp, Homo sapiens
gtgcccagcgtcctg

SEQ ID NO: 468139 - DNA, 15 bp, Homo sapiens
ggtgcccagcgtcct

SEQ ID NO: 468140 - DNA, 15 bp, Homo sapiens
tggtgcccagcgtcc

SEQ ID NO: 468141 - DNA, 15 bp, Homo sapiens
ctggtgcccagcgtc

SEQ ID NO: 468142 - DNA, 15 bp, Homo sapiens
tctggtgcccagcgt

SEQ ID NO: 468143 - DNA, 15 bp, Homo sapiens
ttctggtgcccagcg

SEQ ID NO: 468144 - DNA, 15 bp, Homo sapiens
tttctggtgcccagc

SEQ ID NO: 468145 - DNA, 15 bp, Homo sapiens
ctttctggtgcccag

SEQ ID NO: 468146 - DNA, 15 bp, Homo sapiens
cctttctggtgccca

SEQ ID NO: 468147 - DNA, 15 bp, Homo sapiens
acctttctggtgccc

SEQ ID NO: 468148 - DNA, 15 bp, Homo sapiens
cacctttctggtgcc

SEQ ID NO: 468149 - DNA, 15 bp, Homo sapiens
acacctttctggtgc

SEQ ID NO: 468150 - DNA, 15 bp, Homo sapiens
gacacctttctggtg

SEQ ID NO: 468151 - DNA, 15 bp, Homo sapiens
tgacacctttctggt

SEQ ID NO: 468152 - DNA, 15 bp, Homo sapiens
ctgacacctttctgg

SEQ ID NO: 468153 - DNA, 15 bp, Homo sapiens
cctgacacctttctg

SEQ ID NO: 468154 - DNA, 15 bp, Homo sapiens
ccctgacacctttct

SEQ ID NO: 468155 - DNA, 15 bp, Homo sapiens
gccctgacacctttc

SEQ ID NO: 468156 - DNA, 15 bp, Homo sapiens
ggccctgacaccttt

SEQ ID NO: 468157 - DNA, 15 bp, Homo sapiens
tggccctgacacctt

SEQ ID NO: 468158 - DNA, 15 bp, Homo sapiens
ctggccctgacacct

SEQ ID NO: 468159 - DNA, 15 bp, Homo sapiens
cctggccctgacacc

SEQ ID NO: 468160 - DNA, 15 bp, Homo sapiens
ccctggccctgacac

SEQ ID NO: 468161 - DNA, 15 bp, Homo sapiens
gccctggccctgaca

SEQ ID NO: 468162 - DNA, 15 bp, Homo sapiens
ggccctggccctgac

SEQ ID NO: 468163 - DNA, 15 bp, Homo sapiens
gggccctggccctga

SEQ ID NO: 468164 - DNA, 15 bp, Homo sapiens
ggggccctggccctg

SEQ ID NO: 468165 - DNA, 15 bp, Homo sapiens
tggggccctggccct

SEQ ID NO: 468166 - DNA, 15 bp, Homo sapiens
gtggggccctggccc

SEQ ID NO: 468167 - DNA, 15 bp, Homo sapiens
agtggggccctggcc

SEQ ID NO: 468168 - DNA, 15 bp, Homo sapiens
gagtggggccctggc

SEQ ID NO: 468169 - DNA, 15 bp, Homo sapiens
agagtggggccctgg

SEQ ID NO: 468170 - DNA, 15 bp, Homo sapiens
cagagtggggccctg

SEQ ID NO: 468171 - DNA, 15 bp, Homo sapiens
gcagagtggggccct

SEQ ID NO: 468172 - DNA, 15 bp, Homo sapiens
agcagagtggggccc

SEQ ID NO: 468173 - DNA, 15 bp, Homo sapiens
gagcagagtggggcc

SEQ ID NO: 468174 - DNA, 15 bp, Homo sapiens
agagcagagtggggc

SEQ ID NO: 468175 - DNA, 15 bp, Homo sapiens
gagagcagagtgggg

SEQ ID NO: 468176 - DNA, 15 bp, Homo sapiens
tgagagcagagtggg

SEQ ID NO: 468177 - DNA, 15 bp, Homo sapiens
gtgagagcagagtgg

SEQ ID NO: 468178 - DNA, 15 bp, Homo sapiens
agtgagagcagagtg

SEQ ID NO: 468179 - DNA, 15 bp, Homo sapiens
aagtgagagcagagt

SEQ ID NO: 468180 - DNA, 15 bp, Homo sapiens
gaagtgagagcagag

SEQ ID NO: 468181 - DNA, 15 bp, Homo sapiens
ggaagtgagagcaga

SEQ ID NO: 468182 - DNA, 15 bp, Homo sapiens
gggaagtgagagcag

SEQ ID NO: 468183 - DNA, 15 bp, Homo sapiens
ggggaagtgagagca

SEQ ID NO: 468184 - DNA, 15 bp, Homo sapiens
gggggaagtgagagc

SEQ ID NO: 468185 - DNA, 15 bp, Homo sapiens
tgggggaagtgagag

SEQ ID NO: 468186 - DNA, 15 bp, Homo sapiens
atgggggaagtgaga

SEQ ID NO: 468187 - DNA, 15 bp, Homo sapiens
catgggggaagtgag

SEQ ID NO: 468188 - DNA, 15 bp, Homo sapiens
ccatgggggaagtga

SEQ ID NO: 468189 - DNA, 15 bp, Homo sapiens
cccatgggggaagtg

SEQ ID NO: 468190 - DNA, 15 bp, Homo sapiens
ccccatgggggaagt

SEQ ID NO: 468191 - DNA, 15 bp, Homo sapiens
tccccatgggggaag

SEQ ID NO: 468192 - DNA, 15 bp, Homo sapiens
ctccccatgggggaa

SEQ ID NO: 468193 - DNA, 15 bp, Homo sapiens
gctccccatggggga

SEQ ID NO: 468194 - DNA, 15 bp, Homo sapiens
ggctccccatggggg

SEQ ID NO: 468195 - DNA, 15 bp, Homo sapiens
aggctccccatgggg

SEQ ID NO: 468196 - DNA, 15 bp, Homo sapiens
taggctccccatggg

SEQ ID NO: 468197 - DNA, 15 bp, Homo sapiens
ttaggctccccatgg

SEQ ID NO: 468198 - DNA, 15 bp, Homo sapiens
tttaggctccccatg

SEQ ID NO: 468199 - DNA, 15 bp, Homo sapiens
atttaggctccccat

SEQ ID NO: 468200 - DNA, 15 bp, Homo sapiens
gatttaggctcccca

SEQ ID NO: 468201 - DNA, 15 bp, Homo sapiens
ggatttaggctcccc

SEQ ID NO: 468202 - DNA, 15 bp, Homo sapiens
cggatttaggctccc

SEQ ID NO: 468203 - DNA, 15 bp, Homo sapiens
tcggatttaggctcc

SEQ ID NO: 468204 - DNA, 15 bp, Homo sapiens
ctcggatttaggctc

SEQ ID NO: 468205 - DNA, 15 bp, Homo sapiens
gctcggatttaggct

SEQ ID NO: 468206 - DNA, 15 bp, Homo sapiens
tgctcggatttaggc

SEQ ID NO: 468207 - DNA, 15 bp, Homo sapiens
atgctcggatttagg

SEQ ID NO: 468208 - DNA, 15 bp, Homo sapiens
gatgctcggatttag

SEQ ID NO: 468209 - DNA, 15 bp, Homo sapiens
agatgctcggattta

SEQ ID NO: 468210 - DNA, 15 bp, Homo sapiens
cagatgctcggattt

SEQ ID NO: 468211 - DNA, 15 bp, Homo sapiens
acagatgctcggatt

SEQ ID NO: 468212 - DNA, 15 bp, Homo sapiens
aacagatgctcggat

SEQ ID NO: 468213 - DNA, 15 bp, Homo sapiens
aaacagatgctcgga

SEQ ID NO: 468214 - DNA, 15 bp, Homo sapiens
gaaacagatgctcgg

SEQ ID NO: 468215 - DNA, 15 bp, Homo sapiens
ggaaacagatgctcg

SEQ ID NO: 468216 - DNA, 15 bp, Homo sapiens
aggaaacagatgctc

SEQ ID NO: 468217 - DNA, 15 bp, Homo sapiens
aaggaaacagatgct

SEQ ID NO: 468218 - DNA, 15 bp, Homo sapiens
aaaggaaacagatgc

SEQ ID NO: 468219 - DNA, 15 bp, Homo sapiens
aaaaggaaacagatg

SEQ ID NO: 468220 - DNA, 15 bp, Homo sapiens
caaaaggaaacagat

SEQ ID NO: 468221 - DNA, 15 bp, Homo sapiens
ccaaaaggaaacaga

SEQ ID NO: 468222 - DNA, 15 bp, Homo sapiens
cccaaaaggaaacag

SEQ ID NO: 468223 - DNA, 15 bp, Homo sapiens
gcccaaaaggaaaca

SEQ ID NO: 468224 - DNA, 15 bp, Homo sapiens
cgcccaaaaggaaac

SEQ ID NO: 468225 - DNA, 15 bp, Homo sapiens
gcgcccaaaaggaaa

SEQ ID NO: 468226 - DNA, 15 bp, Homo sapiens
cgcgcccaaaaggaa

SEQ ID NO: 468227 - DNA, 15 bp, Homo sapiens
ccgcgcccaaaagga

SEQ ID NO: 468228 - DNA, 15 bp, Homo sapiens
cccgcgcccaaaagg

SEQ ID NO: 468229 - DNA, 15 bp, Homo sapiens
tcccgcgcccaaaag

SEQ ID NO: 468230 - DNA, 15 bp, Homo sapiens
ttcccgcgcccaaaa

SEQ ID NO: 468231 - DNA, 15 bp, Homo sapiens
cttcccgcgcccaaa

SEQ ID NO: 468232 - DNA, 15 bp, Homo sapiens
gcttcccgcgcccaa

SEQ ID NO: 468233 - DNA, 15 bp, Homo sapiens
ggcttcccgcgccca

SEQ ID NO: 468234 - DNA, 15 bp, Homo sapiens
tggcttcccgcgccc

SEQ ID NO: 468235 - DNA, 15 bp, Homo sapiens
ctggcttcccgcgcc

SEQ ID NO: 468236 - DNA, 15 bp, Homo sapiens
gctggcttcccgcgc

SEQ ID NO: 468237 - DNA, 15 bp, Homo sapiens
tgctggcttcccgcg

SEQ ID NO: 468238 - DNA, 15 bp, Homo sapiens
ctgctggcttcccgc

SEQ ID NO: 468239 - DNA, 15 bp, Homo sapiens
cctgctggcttcccg

SEQ ID NO: 468240 - DNA, 15 bp, Homo sapiens
acctgctggcttccc

SEQ ID NO: 468241 - DNA, 15 bp, Homo sapiens
gacctgctggcttcc

SEQ ID NO: 468242 - DNA, 15 bp, Homo sapiens
agacctgctggcttc

SEQ ID NO: 468243 - DNA, 15 bp, Homo sapiens
gagacctgctggctt

SEQ ID NO: 468244 - DNA, 15 bp, Homo sapiens
tgagacctgctggct

SEQ ID NO: 468245 - DNA, 15 bp, Homo sapiens
ttgagacctgctggc

SEQ ID NO: 468246 - DNA, 15 bp, Homo sapiens
tttgagacctgctgg

SEQ ID NO: 468247 - DNA, 15 bp, Homo sapiens
atttgagacctgctg

SEQ ID NO: 468248 - DNA, 15 bp, Homo sapiens
aatttgagacctgct

SEQ ID NO: 468249 - DNA, 15 bp, Homo sapiens
gaatttgagacctgc

SEQ ID NO: 468250 - DNA, 15 bp, Homo sapiens
ggaatttgagacctg

SEQ ID NO: 468251 - DNA, 15 bp, Homo sapiens
gggaatttgagacct

SEQ ID NO: 468252 - DNA, 15 bp, Homo sapiens
agggaatttgagacc

SEQ ID NO: 468253 - DNA, 15 bp, Homo sapiens
cagggaatttgagac

SEQ ID NO: 468254 - DNA, 15 bp, Homo sapiens
tcagggaatttgaga

SEQ ID NO: 468255 - DNA, 15 bp, Homo sapiens
ctcagggaatttgag

SEQ ID NO: 468256 - DNA, 15 bp, Homo sapiens
tctcagggaatttga

SEQ ID NO: 468257 - DNA, 15 bp, Homo sapiens
ctctcagggaatttg

SEQ ID NO: 468258 - DNA, 15 bp, Homo sapiens
actctcagggaattt

SEQ ID NO: 468259 - DNA, 15 bp, Homo sapiens
cactctcagggaatt

SEQ ID NO: 468260 - DNA, 15 bp, Homo sapiens
gcactctcagggaat

SEQ ID NO: 468261 - DNA, 15 bp, Homo sapiens
tgcactctcagggaa

SEQ ID NO: 468262 - DNA, 15 bp, Homo sapiens
ctgcactctcaggga

SEQ ID NO: 468263 - DNA, 15 bp, Homo sapiens
gctgcactctcaggg

SEQ ID NO: 468264 - DNA, 15 bp, Homo sapiens
ggctgcactctcagg

SEQ ID NO: 468265 - DNA, 15 bp, Homo sapiens
tggctgcactctcag

SEQ ID NO: 468266 - DNA, 15 bp, Homo sapiens
ctggctgcactctca

SEQ ID NO: 468267 - DNA, 15 bp, Homo sapiens
cctggctgcactctc

SEQ ID NO: 468268 - DNA, 15 bp, Homo sapiens
acctggctgcactct

SEQ ID NO: 468269 - DNA, 15 bp, Homo sapiens
aacctggctgcactc

SEQ ID NO: 468270 - DNA, 15 bp, Homo sapiens
aaacctggctgcact

SEQ ID NO: 468271 - DNA, 15 bp, Homo sapiens
aaaacctggctgcac

SEQ ID NO: 468272 - DNA, 15 bp, Homo sapiens
aaaaacctggctgca

SEQ ID NO: 468273 - DNA, 15 bp, Homo sapiens
gaaaaacctggctgc

SEQ ID NO: 468274 - DNA, 15 bp, Homo sapiens
ggaaaaacctggctg

SEQ ID NO: 468275 - DNA, 15 bp, Homo sapiens
tggaaaaacctggct

SEQ ID NO: 468276 - DNA, 15 bp, Homo sapiens
ctggaaaaacctggc

SEQ ID NO: 468277 - DNA, 15 bp, Homo sapiens
cctggaaaaacctgg

SEQ ID NO: 468278 - DNA, 15 bp, Homo sapiens
tcctggaaaaacctg

SEQ ID NO: 468279 - DNA, 15 bp, Homo sapiens
gtcctggaaaaacct

SEQ ID NO: 468280 - DNA, 15 bp, Homo sapiens
tgtcctggaaaaacc

SEQ ID NO: 468281 - DNA, 15 bp, Homo sapiens
ctgtcctggaaaaac

SEQ ID NO: 468282 - DNA, 15 bp, Homo sapiens
tctgtcctggaaaaa

SEQ ID NO: 468283 - DNA, 15 bp, Homo sapiens
ttctgtcctggaaaa

SEQ ID NO: 468284 - DNA, 15 bp, Homo sapiens
attctgtcctggaaa

SEQ ID NO: 468285 - DNA, 15 bp, Homo sapiens
aattctgtcctggaa

SEQ ID NO: 468286 - DNA, 15 bp, Homo sapiens
gaattctgtcctgga

SEQ ID NO: 468287 - DNA, 15 bp, Homo sapiens
ggaattctgtcctgg

SEQ ID NO: 468288 - DNA, 15 bp, Homo sapiens
tggaattctgtcctg

SEQ ID NO: 468289 - DNA, 15 bp, Homo sapiens
atggaattctgtcct

SEQ ID NO: 468290 - DNA, 15 bp, Homo sapiens
catggaattctgtcc

SEQ ID NO: 468291 - DNA, 15 bp, Homo sapiens
tcatggaattctgtc

SEQ ID NO: 468292 - DNA, 15 bp, Homo sapiens
ttcatggaattctgt

SEQ ID NO: 468293 - DNA, 15 bp, Homo sapiens
cttcatggaattctg

SEQ ID NO: 468294 - DNA, 15 bp, Homo sapiens
ccttcatggaattct

SEQ ID NO: 468295 - DNA, 15 bp, Homo sapiens
gccttcatggaattc

SEQ ID NO: 468296 - DNA, 15 bp, Homo sapiens
tgccttcatggaatt

SEQ ID NO: 468297 - DNA, 15 bp, Homo sapiens
ctgccttcatggaat

SEQ ID NO: 468298 - DNA, 15 bp, Homo sapiens
gctgccttcatggaa

SEQ ID NO: 468299 - DNA, 15 bp, Homo sapiens
agctgccttcatgga

SEQ ID NO: 468300 - DNA, 15 bp, Homo sapiens
gagctgccttcatgg

SEQ ID NO: 468301 - DNA, 15 bp, Homo sapiens
ggagctgccttcatg

SEQ ID NO: 468302 - DNA, 15 bp, Homo sapiens
aggagctgccttcat

SEQ ID NO: 468303 - DNA, 15 bp, Homo sapiens
taggagctgccttca

SEQ ID NO: 468304 - DNA, 15 bp, Homo sapiens
ctaggagctgccttc

SEQ ID NO: 468305 - DNA, 15 bp, Homo sapiens
cctaggagctgcctt

SEQ ID NO: 468306 - DNA, 15 bp, Homo sapiens
ccctaggagctgcct

SEQ ID NO: 468307 - DNA, 15 bp, Homo sapiens
cccctaggagctgcc

SEQ ID NO: 468308 - DNA, 15 bp, Homo sapiens
tcccctaggagctgc

SEQ ID NO: 468309 - DNA, 15 bp, Homo sapiens
ctcccctaggagctg

SEQ ID NO: 468310 - DNA, 15 bp, Homo sapiens
gctcccctaggagct

SEQ ID NO: 468311 - DNA, 15 bp, Homo sapiens
agctcccctaggagc

SEQ ID NO: 468312 - DNA, 15 bp, Homo sapiens
aagctcccctaggag

SEQ ID NO: 468313 - DNA, 15 bp, Homo sapiens
gaagctcccctagga

SEQ ID NO: 468314 - DNA, 15 bp, Homo sapiens
agaagctcccctagg

SEQ ID NO: 468315 - DNA, 15 bp, Homo sapiens
cagaagctcccctag

SEQ ID NO: 468316 - DNA, 15 bp, Homo sapiens
ccagaagctccccta

SEQ ID NO: 468317 - DNA, 15 bp, Homo sapiens
cccagaagctcccct

SEQ ID NO: 468318 - DNA, 15 bp, Homo sapiens
tcccagaagctcccc

SEQ ID NO: 468319 - DNA, 15 bp, Homo sapiens
ctcccagaagctccc

SEQ ID NO: 468320 - DNA, 15 bp, Homo sapiens
actcccagaagctcc

SEQ ID NO: 468321 - DNA, 15 bp, Homo sapiens
aactcccagaagctc

SEQ ID NO: 468322 - DNA, 15 bp, Homo sapiens
gaactcccagaagct

SEQ ID NO: 468323 - DNA, 15 bp, Homo sapiens
agaactcccagaagc

SEQ ID NO: 468324 - DNA, 15 bp, Homo sapiens
tagaactcccagaag

SEQ ID NO: 468325 - DNA, 15 bp, Homo sapiens
atagaactcccagaa

SEQ ID NO: 468326 - DNA, 15 bp, Homo sapiens
catagaactcccaga

SEQ ID NO: 468327 - DNA, 15 bp, Homo sapiens
gcatagaactcccag

SEQ ID NO: 468328 - DNA, 15 bp, Homo sapiens
tgcatagaactccca

SEQ ID NO: 468329 - DNA, 15 bp, Homo sapiens
ctgcatagaactccc

SEQ ID NO: 468330 - DNA, 15 bp, Homo sapiens
actgcatagaactcc

SEQ ID NO: 468331 - DNA, 15 bp, Homo sapiens
cactgcatagaactc

SEQ ID NO: 468332 - DNA, 15 bp, Homo sapiens
ccactgcatagaact

SEQ ID NO: 468333 - DNA, 15 bp, Homo sapiens
tccactgcatagaac

SEQ ID NO: 468334 - DNA, 15 bp, Homo sapiens
ttccactgcatagaa

SEQ ID NO: 468335 - DNA, 15 bp, Homo sapiens
cttccactgcataga

SEQ ID NO: 468336 - DNA, 15 bp, Homo sapiens
tcttccactgcatag

SEQ ID NO: 468337 - DNA, 15 bp, Homo sapiens
gtcttccactgcata

SEQ ID NO: 468338 - DNA, 15 bp, Homo sapiens
tgtcttccactgcat

SEQ ID NO: 468339 - DNA, 15 bp, Homo sapiens
gtgtcttccactgca

SEQ ID NO: 468340 - DNA, 15 bp, Homo sapiens
agtgtcttccactgc

SEQ ID NO: 468341 - DNA, 15 bp, Homo sapiens
gagtgtcttccactg

SEQ ID NO: 468342 - DNA, 15 bp, Homo sapiens
ggagtgtcttccact

SEQ ID NO: 468343 - DNA, 15 bp, Homo sapiens
aggagtgtcttccac

SEQ ID NO: 468344 - DNA, 15 bp, Homo sapiens
caggagtgtcttcca

SEQ ID NO: 468345 - DNA, 15 bp, Homo sapiens
ccaggagtgtcttcc

SEQ ID NO: 468346 - DNA, 15 bp, Homo sapiens
gccaggagtgtcttc

SEQ ID NO: 468347 - DNA, 15 bp, Homo sapiens
ggccaggagtgtctt

SEQ ID NO: 468348 - DNA, 15 bp, Homo sapiens
tggccaggagtgtct

SEQ ID NO: 468349 - DNA, 15 bp, Homo sapiens
ctggccaggagtgtc

SEQ ID NO: 468350 - DNA, 15 bp, Homo sapiens
cctggccaggagtgt

SEQ ID NO: 468351 - DNA, 15 bp, Homo sapiens
tcctggccaggagtg

SEQ ID NO: 468352 - DNA, 15 bp, Homo sapiens
ctcctggccaggagt

SEQ ID NO: 468353 - DNA, 15 bp, Homo sapiens
actcctggccaggag

SEQ ID NO: 468354 - DNA, 15 bp, Homo sapiens
gactcctggccagga

SEQ ID NO: 468355 - DNA, 15 bp, Homo sapiens
ggactcctggccagg

SEQ ID NO: 468356 - DNA, 15 bp, Homo sapiens
cggactcctggccag

SEQ ID NO: 468357 - DNA, 15 bp, Homo sapiens
ccggactcctggcca

SEQ ID NO: 468358 - DNA, 15 bp, Homo sapiens
cccggactcctggcc

SEQ ID NO: 468359 - DNA, 15 bp, Homo sapiens
ccccggactcctggc

SEQ ID NO: 468360 - DNA, 15 bp, Homo sapiens
gccccggactcctgg

SEQ ID NO: 468361 - DNA, 15 bp, Homo sapiens
ggccccggactcctg

SEQ ID NO: 468362 - DNA, 15 bp, Homo sapiens
gggccccggactcct

SEQ ID NO: 468363 - DNA, 15 bp, Homo sapiens
agggccccggactcc

SEQ ID NO: 468364 - DNA, 15 bp, Homo sapiens
cagggccccggactc

SEQ ID NO: 468365 - DNA, 15 bp, Homo sapiens
acagggccccggact

SEQ ID NO: 468366 - DNA, 15 bp, Homo sapiens
cacagggccccggac

SEQ ID NO: 468367 - DNA, 15 bp, Homo sapiens
ccacagggccccgga

SEQ ID NO: 468368 - DNA, 15 bp, Homo sapiens
cccacagggccccgg

SEQ ID NO: 468369 - DNA, 15 bp, Homo sapiens
tcccacagggccccg

SEQ ID NO: 468370 - DNA, 15 bp, Homo sapiens
ctcccacagggcccc

SEQ ID NO: 468371 - DNA, 15 bp, Homo sapiens
cctcccacagggccc

SEQ ID NO: 468372 - DNA, 15 bp, Homo sapiens
gcctcccacagggcc

SEQ ID NO: 468373 - DNA, 15 bp, Homo sapiens
ggcctcccacagggc

SEQ ID NO: 468374 - DNA, 15 bp, Homo sapiens
gggcctcccacaggg

SEQ ID NO: 468375 - DNA, 15 bp, Homo sapiens
agggcctcccacagg

SEQ ID NO: 468376 - DNA, 15 bp, Homo sapiens
cagggcctcccacag

SEQ ID NO: 468377 - DNA, 15 bp, Homo sapiens
ccagggcctcccaca

SEQ ID NO: 468378 - DNA, 15 bp, Homo sapiens
gccagggcctcccac

SEQ ID NO: 468379 - DNA, 15 bp, Homo sapiens
agccagggcctccca

SEQ ID NO: 468380 - DNA, 15 bp, Homo sapiens
cagccagggcctccc

SEQ ID NO: 468381 - DNA, 15 bp, Homo sapiens
tcagccagggcctcc

SEQ ID NO: 468382 - DNA, 15 bp, Homo sapiens
ttcagccagggcctc

SEQ ID NO: 468383 - DNA, 15 bp, Homo sapiens
attcagccagggcct

SEQ ID NO: 468384 - DNA, 15 bp, Homo sapiens
gattcagccagggcc

SEQ ID NO: 468385 - DNA, 15 bp, Homo sapiens
tgattcagccagggc

SEQ ID NO: 468386 - DNA, 15 bp, Homo sapiens
gtgattcagccaggg

SEQ ID NO: 468387 - DNA, 15 bp, Homo sapiens
ggtgattcagccagg

SEQ ID NO: 468388 - DNA, 15 bp, Homo sapiens
tggtgattcagccag

SEQ ID NO: 468389 - DNA, 15 bp, Homo sapiens
gtggtgattcagcca

SEQ ID NO: 468390 - DNA, 15 bp, Homo sapiens
tgtggtgattcagcc

SEQ ID NO: 468391 - DNA, 15 bp, Homo sapiens
gtgtggtgattcagc

SEQ ID NO: 468392 - DNA, 15 bp, Homo sapiens
ggtgtggtgattcag

SEQ ID NO: 468393 - DNA, 15 bp, Homo sapiens
aggtgtggtgattca

SEQ ID NO: 468394 - DNA, 15 bp, Homo sapiens
gaggtgtggtgattc

SEQ ID NO: 468395 - DNA, 15 bp, Homo sapiens
agaggtgtggtgatt

SEQ ID NO: 468396 - DNA, 15 bp, Homo sapiens
gagaggtgtggtgat

SEQ ID NO: 468397 - DNA, 15 bp, Homo sapiens
agagaggtgtggtga

SEQ ID NO: 468398 - DNA, 15 bp, Homo sapiens
gagagaggtgtggtg

SEQ ID NO: 468399 - DNA, 15 bp, Homo sapiens
cgagagaggtgtggt

SEQ ID NO: 468400 - DNA, 15 bp, Homo sapiens
tcgagagaggtgtgg

SEQ ID NO: 468401 - DNA, 15 bp, Homo sapiens
gtcgagagaggtgtg

SEQ ID NO: 468402 - DNA, 15 bp, Homo sapiens
ggtcgagagaggtgt

SEQ ID NO: 468403 - DNA, 15 bp, Homo sapiens
tggtcgagagaggtg

SEQ ID NO: 468404 - DNA, 15 bp, Homo sapiens
atggtcgagagaggt

SEQ ID NO: 468405 - DNA, 15 bp, Homo sapiens
tatggtcgagagagg

SEQ ID NO: 468406 - DNA, 15 bp, Homo sapiens
gtatggtcgagagag

SEQ ID NO: 468407 - DNA, 15 bp, Homo sapiens
ggtatggtcgagaga

SEQ ID NO: 468408 - DNA, 15 bp, Homo sapiens
gggtatggtcgagag

SEQ ID NO: 468409 - DNA, 15 bp, Homo sapiens
tgggtatggtcgaga

SEQ ID NO: 468410 - DNA, 15 bp, Homo sapiens
gtgggtatggtcgag

SEQ ID NO: 468411 - DNA, 15 bp, Homo sapiens
ggtgggtatggtcga

SEQ ID NO: 468412 - DNA, 15 bp, Homo sapiens
aggtgggtatggtcg

SEQ ID NO: 468413 - DNA, 15 bp, Homo sapiens
caggtgggtatggtc

SEQ ID NO: 468414 - DNA, 15 bp, Homo sapiens
acaggtgggtatggt

SEQ ID NO: 468415 - DNA, 15 bp, Homo sapiens
tacaggtgggtatgg

SEQ ID NO: 468416 - DNA, 15 bp, Homo sapiens
ttacaggtgggtatg

SEQ ID NO: 468417 - DNA, 15 bp, Homo sapiens
cttacaggtgggtat

SEQ ID NO: 468418 - DNA, 15 bp, Homo sapiens
ccttacaggtgggta

SEQ ID NO: 468419 - DNA, 15 bp, Homo sapiens
cccttacaggtgggt

SEQ ID NO: 468420 - DNA, 15 bp, Homo sapiens
tcccttacaggtggg

SEQ ID NO: 468421 - DNA, 15 bp, Homo sapiens
ttcccttacaggtgg

SEQ ID NO: 468422 - DNA, 15 bp, Homo sapiens
gttcccttacaggtg

SEQ ID NO: 468423 - DNA, 15 bp, Homo sapiens
cgttcccttacaggt

SEQ ID NO: 468424 - DNA, 15 bp, Homo sapiens
ccgttcccttacagg

SEQ ID NO: 468425 - DNA, 15 bp, Homo sapiens
tccgttcccttacag

SEQ ID NO: 468426 - DNA, 15 bp, Homo sapiens
ctccgttcccttaca

SEQ ID NO: 468427 - DNA, 15 bp, Homo sapiens
tctccgttcccttac

SEQ ID NO: 468428 - DNA, 15 bp, Homo sapiens
ctctccgttccctta

SEQ ID NO: 468429 - DNA, 15 bp, Homo sapiens
cctctccgttccctt

SEQ ID NO: 468430 - DNA, 15 bp, Homo sapiens
ccctctccgttccct

SEQ ID NO: 468431 - DNA, 15 bp, Homo sapiens
gccctctccgttccc

SEQ ID NO: 468432 - DNA, 15 bp, Homo sapiens
ggccctctccgttcc

SEQ ID NO: 468433 - DNA, 15 bp, Homo sapiens
tggccctctccgttc

SEQ ID NO: 468434 - DNA, 15 bp, Homo sapiens
ctggccctctccgtt

SEQ ID NO: 468435 - DNA, 15 bp, Homo sapiens
cctggccctctccgt

SEQ ID NO: 468436 - DNA, 15 bp, Homo sapiens
ccctggccctctccg

SEQ ID NO: 468437 - DNA, 15 bp, Homo sapiens
gccctggccctctcc

SEQ ID NO: 468438 - DNA, 15 bp, Homo sapiens
ggccctggccctctc

SEQ ID NO: 468439 - DNA, 15 bp, Homo sapiens
aggccctggccctct

SEQ ID NO: 468440 - DNA, 15 bp, Homo sapiens
aaggccctggccctc

SEQ ID NO: 468441 - DNA, 15 bp, Homo sapiens
caaggccctggccct

SEQ ID NO: 468442 - DNA, 15 bp, Homo sapiens
ccaaggccctggccc

SEQ ID NO: 468443 - DNA, 15 bp, Homo sapiens
gccaaggccctggcc

SEQ ID NO: 468444 - DNA, 15 bp, Homo sapiens
agccaaggccctggc

SEQ ID NO: 468445 - DNA, 15 bp, Homo sapiens
aagccaaggccctgg

SEQ ID NO: 468446 - DNA, 15 bp, Homo sapiens
aaagccaaggccctg

SEQ ID NO: 468447 - DNA, 15 bp, Homo sapiens
gaaagccaaggccct

SEQ ID NO: 468448 - DNA, 15 bp, Homo sapiens
agaaagccaaggccc

SEQ ID NO: 468449 - DNA, 15 bp, Homo sapiens
aagaaagccaaggcc

SEQ ID NO: 468450 - DNA, 15 bp, Homo sapiens
aaagaaagccaaggc

SEQ ID NO: 468451 - DNA, 15 bp, Homo sapiens
gaaagaaagccaagg

SEQ ID NO: 468452 - DNA, 15 bp, Homo sapiens
tgaaagaaagccaag

SEQ ID NO: 468453 - DNA, 15 bp, Homo sapiens
gtgaaagaaagccaa

SEQ ID NO: 468454 - DNA, 15 bp, Homo sapiens
agtgaaagaaagcca

SEQ ID NO: 468455 - DNA, 15 bp, Homo sapiens
aagtgaaagaaagcc

SEQ ID NO: 468456 - DNA, 15 bp, Homo sapiens
taagtgaaagaaagc

SEQ ID NO: 468457 - DNA, 15 bp, Homo sapiens
ttaagtgaaagaaag

SEQ ID NO: 468458 - DNA, 15 bp, Homo sapiens
attaagtgaaagaaa

SEQ ID NO: 468459 - DNA, 15 bp, Homo sapiens
gattaagtgaaagaa

SEQ ID NO: 468460 - DNA, 15 bp, Homo sapiens
agattaagtgaaaga

SEQ ID NO: 468461 - DNA, 15 bp, Homo sapiens
gagattaagtgaaag

SEQ ID NO: 468462 - DNA, 15 bp, Homo sapiens
tgagattaagtgaaa

SEQ ID NO: 468463 - DNA, 15 bp, Homo sapiens
ctgagattaagtgaa

SEQ ID NO: 468464 - DNA, 15 bp, Homo sapiens
actgagattaagtga

SEQ ID NO: 468465 - DNA, 15 bp, Homo sapiens
aactgagattaagtg

SEQ ID NO: 468466 - DNA, 15 bp, Homo sapiens
gaactgagattaagt

SEQ ID NO: 468467 - DNA, 15 bp, Homo sapiens
tgaactgagattaag

SEQ ID NO: 468468 - DNA, 15 bp, Homo sapiens
ctgaactgagattaa

SEQ ID NO: 468469 - DNA, 15 bp, Homo sapiens
cctgaactgagatta

SEQ ID NO: 468470 - DNA, 15 bp, Homo sapiens
acctgaactgagatt

SEQ ID NO: 468471 - DNA, 15 bp, Homo sapiens
cacctgaactgagat

SEQ ID NO: 468472 - DNA, 15 bp, Homo sapiens
tcacctgaactgaga

SEQ ID NO: 468473 - DNA, 15 bp, Homo sapiens
ctcacctgaactgag

SEQ ID NO: 468474 - DNA, 15 bp, Homo sapiens
cctcacctgaactga

SEQ ID NO: 468475 - DNA, 15 bp, Homo sapiens
tcctcacctgaactg

SEQ ID NO: 468476 - DNA, 15 bp, Homo sapiens
gtcctcacctgaact

SEQ ID NO: 468477 - DNA, 15 bp, Homo sapiens
cgtcctcacctgaac

SEQ ID NO: 468478 - DNA, 15 bp, Homo sapiens
gcgtcctcacctgaa

SEQ ID NO: 468479 - DNA, 15 bp, Homo sapiens
ggcgtcctcacctga

SEQ ID NO: 468480 - DNA, 15 bp, Homo sapiens
gggcgtcctcacctg

SEQ ID NO: 468481 - DNA, 15 bp, Homo sapiens
tgggcgtcctcacct

SEQ ID NO: 468482 - DNA, 15 bp, Homo sapiens
ctgggcgtcctcacc

SEQ ID NO: 468483 - DNA, 15 bp, Homo sapiens
actgggcgtcctcac

SEQ ID NO: 468484 - DNA, 15 bp, Homo sapiens
gactgggcgtcctca

SEQ ID NO: 468485 - DNA, 15 bp, Homo sapiens
agactgggcgtcctc

SEQ ID NO: 468486 - DNA, 15 bp, Homo sapiens
cagactgggcgtcct

SEQ ID NO: 468487 - DNA, 15 bp, Homo sapiens
ccagactgggcgtcc

SEQ ID NO: 468488 - DNA, 15 bp, Homo sapiens
gccagactgggcgtc

SEQ ID NO: 468489 - DNA, 15 bp, Homo sapiens
agccagactgggcgt

SEQ ID NO: 468490 - DNA, 15 bp, Homo sapiens
cagccagactgggcg

SEQ ID NO: 468491 - DNA, 15 bp, Homo sapiens
gcagccagactgggc

SEQ ID NO: 468492 - DNA, 15 bp, Homo sapiens
agcagccagactggg

SEQ ID NO: 468493 - DNA, 15 bp, Homo sapiens
gagcagccagactgg

SEQ ID NO: 468494 - DNA, 15 bp, Homo sapiens
ggagcagccagactg

SEQ ID NO: 468495 - DNA, 15 bp, Homo sapiens
gggagcagccagact

SEQ ID NO: 468496 - DNA, 15 bp, Homo sapiens
agggagcagccagac

SEQ ID NO: 468497 - DNA, 15 bp, Homo sapiens
gagggagcagccaga

SEQ ID NO: 468498 - DNA, 15 bp, Homo sapiens
agagggagcagccag

SEQ ID NO: 468499 - DNA, 15 bp, Homo sapiens
tagagggagcagcca

SEQ ID NO: 468500 - DNA, 15 bp, Homo sapiens
ctagagggagcagcc

SEQ ID NO: 468501 - DNA, 15 bp, Homo sapiens
gctagagggagcagc

SEQ ID NO: 468502 - DNA, 15 bp, Homo sapiens
tgctagagggagcag

SEQ ID NO: 468503 - DNA, 15 bp, Homo sapiens
ctgctagagggagca

SEQ ID NO: 468504 - DNA, 15 bp, Homo sapiens
gctgctagagggagc

SEQ ID NO: 468505 - DNA, 15 bp, Homo sapiens
ggctgctagagggag

SEQ ID NO: 468506 - DNA, 15 bp, Homo sapiens
aggctgctagaggga

SEQ ID NO: 468507 - DNA, 15 bp, Homo sapiens
caggctgctagaggg

SEQ ID NO: 468508 - DNA, 15 bp, Homo sapiens
acaggctgctagagg

SEQ ID NO: 468509 - DNA, 15 bp, Homo sapiens
aacaggctgctagag

SEQ ID NO: 468510 - DNA, 15 bp, Homo sapiens
gaacaggctgctaga

SEQ ID NO: 468511 - DNA, 15 bp, Homo sapiens
tgaacaggctgctag

SEQ ID NO: 468512 - DNA, 15 bp, Homo sapiens
atgaacaggctgcta

SEQ ID NO: 468513 - DNA, 15 bp, Homo sapiens
aatgaacaggctgct

SEQ ID NO: 468514 - DNA, 15 bp, Homo sapiens
gaatgaacaggctgc

SEQ ID NO: 468515 - DNA, 15 bp, Homo sapiens
tgaatgaacaggctg

SEQ ID NO: 468516 - DNA, 15 bp, Homo sapiens
atgaatgaacaggct

SEQ ID NO: 468517 - DNA, 15 bp, Homo sapiens
catgaatgaacaggc

SEQ ID NO: 468518 - DNA, 15 bp, Homo sapiens
ccatgaatgaacagg

SEQ ID NO: 468519 - DNA, 15 bp, Homo sapiens
gccatgaatgaacag

SEQ ID NO: 468520 - DNA, 15 bp, Homo sapiens
tgccatgaatgaaca

SEQ ID NO: 468521 - DNA, 15 bp, Homo sapiens
ctgccatgaatgaac

SEQ ID NO: 468522 - DNA, 15 bp, Homo sapiens
gctgccatgaatgaa

SEQ ID NO: 468523 - DNA, 15 bp, Homo sapiens
ggctgccatgaatga

SEQ ID NO: 468524 - DNA, 15 bp, Homo sapiens
gggctgccatgaatg

SEQ ID NO: 468525 - DNA, 15 bp, Homo sapiens
tgggctgccatgaat

SEQ ID NO: 468526 - DNA, 15 bp, Homo sapiens
ctgggctgccatgaa

SEQ ID NO: 468527 - DNA, 15 bp, Homo sapiens
gctgggctgccatga

SEQ ID NO: 468528 - DNA, 15 bp, Homo sapiens
agctgggctgccatg

SEQ ID NO: 468529 - DNA, 15 bp, Homo sapiens
gagctgggctgccat

SEQ ID NO: 468530 - DNA, 15 bp, Homo sapiens
agagctgggctgcca

SEQ ID NO: 468531 - DNA, 15 bp, Homo sapiens
gagagctgggctgcc

SEQ ID NO: 468532 - DNA, 15 bp, Homo sapiens
agagagctgggctgc

SEQ ID NO: 468533 - DNA, 15 bp, Homo sapiens
cagagagctgggctg

SEQ ID NO: 468534 - DNA, 15 bp, Homo sapiens
gcagagagctgggct

SEQ ID NO: 468535 - DNA, 15 bp, Homo sapiens
tgcagagagctgggc

SEQ ID NO: 468536 - DNA, 15 bp, Homo sapiens
ctgcagagagctggg

SEQ ID NO: 468537 - DNA, 15 bp, Homo sapiens
cctgcagagagctgg

SEQ ID NO: 468538 - DNA, 15 bp, Homo sapiens
ccctgcagagagctg

SEQ ID NO: 468539 - DNA, 15 bp, Homo sapiens
gccctgcagagagct

SEQ ID NO: 468540 - DNA, 15 bp, Homo sapiens
ggccctgcagagagc

SEQ ID NO: 468541 - DNA, 15 bp, Homo sapiens
gggccctgcagagag

SEQ ID NO: 468542 - DNA, 15 bp, Homo sapiens
agggccctgcagaga

SEQ ID NO: 468543 - DNA, 15 bp, Homo sapiens
gagggccctgcagag

SEQ ID NO: 468544 - DNA, 15 bp, Homo sapiens
tgagggccctgcaga

SEQ ID NO: 468545 - DNA, 15 bp, Homo sapiens
ctgagggccctgcag

SEQ ID NO: 468546 - DNA, 15 bp, Homo sapiens
cctgagggccctgca

SEQ ID NO: 468547 - DNA, 15 bp, Homo sapiens
acctgagggccctgc

SEQ ID NO: 468548 - DNA, 15 bp, Homo sapiens
cacctgagggccctg

SEQ ID NO: 468549 - DNA, 15 bp, Homo sapiens
gcacctgagggccct

SEQ ID NO: 468550 - DNA, 15 bp, Homo sapiens
ggcacctgagggccc

SEQ ID NO: 468551 - DNA, 15 bp, Homo sapiens
gggcacctgagggcc

SEQ ID NO: 468552 - DNA, 15 bp, Homo sapiens
tgggcacctgagggc

SEQ ID NO: 468553 - DNA, 15 bp, Homo sapiens
ctgggcacctgaggg

SEQ ID NO: 468554 - DNA, 15 bp, Homo sapiens
cctgggcacctgagg

SEQ ID NO: 468555 - DNA, 15 bp, Homo sapiens
tcctgggcacctgag

SEQ ID NO: 468556 - DNA, 15 bp, Homo sapiens
ttcctgggcacctga

SEQ ID NO: 468557 - DNA, 15 bp, Homo sapiens
cttcctgggcacctg

SEQ ID NO: 468558 - DNA, 15 bp, Homo sapiens
ccttcctgggcacct

SEQ ID NO: 468559 - DNA, 15 bp, Homo sapiens
tccttcctgggcacc

SEQ ID NO: 468560 - DNA, 15 bp, Homo sapiens
ttccttcctgggcac

SEQ ID NO: 468561 - DNA, 15 bp, Homo sapiens
tttccttcctgggca

SEQ ID NO: 468562 - DNA, 15 bp, Homo sapiens
ctttccttcctgggc

SEQ ID NO: 468563 - DNA, 15 bp, Homo sapiens
gctttccttcctggg

SEQ ID NO: 468564 - DNA, 15 bp, Homo sapiens
agctttccttcctgg

SEQ ID NO: 468565 - DNA, 15 bp, Homo sapiens
gagctttccttcctg

SEQ ID NO: 468566 - DNA, 15 bp, Homo sapiens
ggagctttccttcct

SEQ ID NO: 468567 - DNA, 15 bp, Homo sapiens
aggagctttccttcc

SEQ ID NO: 468568 - DNA, 15 bp, Homo sapiens
gaggagctttccttc

SEQ ID NO: 468569 - DNA, 15 bp, Homo sapiens
ggaggagctttcctt

SEQ ID NO: 468570 - DNA, 15 bp, Homo sapiens
gggaggagctttcct

SEQ ID NO: 468571 - DNA, 15 bp, Homo sapiens
cgggaggagctttcc

SEQ ID NO: 468572 - DNA, 15 bp, Homo sapiens
gcgggaggagctttc

SEQ ID NO: 468573 - DNA, 15 bp, Homo sapiens
tgcgggaggagcttt

SEQ ID NO: 468574 - DNA, 15 bp, Homo sapiens
ctgcgggaggagctt

SEQ ID NO: 468575 - DNA, 15 bp, Homo sapiens
gctgcgggaggagct

SEQ ID NO: 468576 - DNA, 15 bp, Homo sapiens
ggctgcgggaggagc

SEQ ID NO: 468577 - DNA, 15 bp, Homo sapiens
aggctgcgggaggag

SEQ ID NO: 468578 - DNA, 15 bp, Homo sapiens
aaggctgcgggagga

SEQ ID NO: 468579 - DNA, 15 bp, Homo sapiens
caaggctgcgggagg

SEQ ID NO: 468580 - DNA, 15 bp, Homo sapiens
gcaaggctgcgggag

SEQ ID NO: 468581 - DNA, 15 bp, Homo sapiens
agcaaggctgcggga

SEQ ID NO: 468582 - DNA, 15 bp, Homo sapiens
gagcaaggctgcggg

SEQ ID NO: 468583 - DNA, 15 bp, Homo sapiens
agagcaaggctgcgg

SEQ ID NO: 468584 - DNA, 15 bp, Homo sapiens
tagagcaaggctgcg

SEQ ID NO: 468585 - DNA, 15 bp, Homo sapiens
ctagagcaaggctgc

SEQ ID NO: 468586 - DNA, 15 bp, Homo sapiens
cctagagcaaggctg

SEQ ID NO: 468587 - DNA, 15 bp, Homo sapiens
tcctagagcaaggct

SEQ ID NO: 468588 - DNA, 15 bp, Homo sapiens
ctcctagagcaaggc

SEQ ID NO: 468589 - DNA, 15 bp, Homo sapiens
gctcctagagcaagg

SEQ ID NO: 468590 - DNA, 15 bp, Homo sapiens
ggctcctagagcaag

SEQ ID NO: 468591 - DNA, 15 bp, Homo sapiens
gggctcctagagcaa

SEQ ID NO: 468592 - DNA, 15 bp, Homo sapiens
tgggctcctagagca

SEQ ID NO: 468593 - DNA, 15 bp, Homo sapiens
ctgggctcctagagc

SEQ ID NO: 468594 - DNA, 15 bp, Homo sapiens
tctgggctcctagag

SEQ ID NO: 468595 - DNA, 15 bp, Homo sapiens
ttctgggctcctaga

SEQ ID NO: 468596 - DNA, 15 bp, Homo sapiens
gttctgggctcctag

SEQ ID NO: 468597 - DNA, 15 bp, Homo sapiens
tgttctgggctccta

SEQ ID NO: 468598 - DNA, 15 bp, Homo sapiens
ctgttctgggctcct

SEQ ID NO: 468599 - DNA, 15 bp, Homo sapiens
cctgttctgggctcc

SEQ ID NO: 468600 - DNA, 15 bp, Homo sapiens
ccctgttctgggctc

SEQ ID NO: 468601 - DNA, 15 bp, Homo sapiens
cccctgttctgggct

SEQ ID NO: 468602 - DNA, 15 bp, Homo sapiens
tcccctgttctgggc

SEQ ID NO: 468603 - DNA, 15 bp, Homo sapiens
ctcccctgttctggg

SEQ ID NO: 468604 - DNA, 15 bp, Homo sapiens
gctcccctgttctgg

SEQ ID NO: 468605 - DNA, 15 bp, Homo sapiens
agctcccctgttctg

SEQ ID NO: 468606 - DNA, 15 bp, Homo sapiens
cagctcccctgttct

SEQ ID NO: 468607 - DNA, 15 bp, Homo sapiens
ccagctcccctgttc

SEQ ID NO: 468608 - DNA, 15 bp, Homo sapiens
cccagctcccctgtt

SEQ ID NO: 468609 - DNA, 15 bp, Homo sapiens
ccccagctcccctgt

SEQ ID NO: 468610 - DNA, 15 bp, Homo sapiens
gccccagctcccctg

SEQ ID NO: 468611 - DNA, 15 bp, Homo sapiens
ggccccagctcccct

SEQ ID NO: 468612 - DNA, 15 bp, Homo sapiens
aggccccagctcccc

SEQ ID NO: 468613 - DNA, 15 bp, Homo sapiens
gaggccccagctccc

SEQ ID NO: 468614 - DNA, 15 bp, Homo sapiens
ggaggccccagctcc

SEQ ID NO: 468615 - DNA, 15 bp, Homo sapiens
cggaggccccagctc

SEQ ID NO: 468616 - DNA, 15 bp, Homo sapiens
acggaggccccagct

SEQ ID NO: 468617 - DNA, 15 bp, Homo sapiens
cacggaggccccagc

SEQ ID NO: 468618 - DNA, 15 bp, Homo sapiens
acacggaggccccag

SEQ ID NO: 468619 - DNA, 15 bp, Homo sapiens
cacacggaggcccca

SEQ ID NO: 468620 - DNA, 15 bp, Homo sapiens
gcacacggaggcccc

SEQ ID NO: 468621 - DNA, 15 bp, Homo sapiens
ggcacacggaggccc

SEQ ID NO: 468622 - DNA, 15 bp, Homo sapiens
tggcacacggaggcc

SEQ ID NO: 468623 - DNA, 15 bp, Homo sapiens
ttggcacacggaggc

SEQ ID NO: 468624 - DNA, 15 bp, Homo sapiens
tttggcacacggagg

SEQ ID NO: 468625 - DNA, 15 bp, Homo sapiens
ctttggcacacggag

SEQ ID NO: 468626 - DNA, 15 bp, Homo sapiens
gctttggcacacgga

SEQ ID NO: 468627 - DNA, 15 bp, Homo sapiens
agctttggcacacgg

SEQ ID NO: 468628 - DNA, 15 bp, Homo sapiens
aagctttggcacacg

SEQ ID NO: 468629 - DNA, 15 bp, Homo sapiens
caagctttggcacac

SEQ ID NO: 468630 - DNA, 15 bp, Homo sapiens
ccaagctttggcaca

SEQ ID NO: 468631 - DNA, 15 bp, Homo sapiens
tccaagctttggcac

SEQ ID NO: 468632 - DNA, 15 bp, Homo sapiens
gtccaagctttggca

SEQ ID NO: 468633 - DNA, 15 bp, Homo sapiens
tgtccaagctttggc

SEQ ID NO: 468634 - DNA, 15 bp, Homo sapiens
atgtccaagctttgg

SEQ ID NO: 468635 - DNA, 15 bp, Homo sapiens
catgtccaagctttg

SEQ ID NO: 468636 - DNA, 15 bp, Homo sapiens
ccatgtccaagcttt

SEQ ID NO: 468637 - DNA, 15 bp, Homo sapiens
tccatgtccaagctt

SEQ ID NO: 468638 - DNA, 15 bp, Homo sapiens
atccatgtccaagct

SEQ ID NO: 468639 - DNA, 15 bp, Homo sapiens
catccatgtccaagc

SEQ ID NO: 468640 - DNA, 15 bp, Homo sapiens
tcatccatgtccaag

SEQ ID NO: 468641 - DNA, 15 bp, Homo sapiens
gtcatccatgtccaa

SEQ ID NO: 468642 - DNA, 15 bp, Homo sapiens
ggtcatccatgtcca

SEQ ID NO: 468643 - DNA, 15 bp, Homo sapiens
aggtcatccatgtcc

SEQ ID NO: 468644 - DNA, 15 bp, Homo sapiens
gaggtcatccatgtc

SEQ ID NO: 468645 - DNA, 15 bp, Homo sapiens
tgaggtcatccatgt

SEQ ID NO: 468646 - DNA, 15 bp, Homo sapiens
atgaggtcatccatg

SEQ ID NO: 468647 - DNA, 15 bp, Homo sapiens
gatgaggtcatccat

SEQ ID NO: 468648 - DNA, 15 bp, Homo sapiens
agatgaggtcatcca

SEQ ID NO: 468649 - DNA, 15 bp, Homo sapiens
gagatgaggtcatcc

SEQ ID NO: 468650 - DNA, 15 bp, Homo sapiens
ggagatgaggtcatc

SEQ ID NO: 468651 - DNA, 15 bp, Homo sapiens
aggagatgaggtcat

SEQ ID NO: 468652 - DNA, 15 bp, Homo sapiens
aaggagatgaggtca

SEQ ID NO: 468653 - DNA, 15 bp, Homo sapiens
gaaggagatgaggtc

SEQ ID NO: 468654 - DNA, 15 bp, Homo sapiens
ggaaggagatgaggt

SEQ ID NO: 468655 - DNA, 15 bp, Homo sapiens
aggaaggagatgagg

SEQ ID NO: 468656 - DNA, 15 bp, Homo sapiens
aaggaaggagatgag

SEQ ID NO: 468657 - DNA, 15 bp, Homo sapiens
gaaggaaggagatga

SEQ ID NO: 468658 - DNA, 15 bp, Homo sapiens
ggaaggaaggagatg

SEQ ID NO: 468659 - DNA, 15 bp, Homo sapiens
aggaaggaaggagat

SEQ ID NO: 468660 - DNA, 15 bp, Homo sapiens
aaggaaggaaggaga

SEQ ID NO: 468661 - DNA, 15 bp, Homo sapiens
gaaggaaggaaggag

SEQ ID NO: 468662 - DNA, 15 bp, Homo sapiens
ggaaggaaggaagga

SEQ ID NO: 468663 - DNA, 15 bp, Homo sapiens
tggaaggaaggaagg

SEQ ID NO: 468664 - DNA, 15 bp, Homo sapiens
ctggaaggaaggaag

SEQ ID NO: 468665 - DNA, 15 bp, Homo sapiens
gctggaaggaaggaa

SEQ ID NO: 468666 - DNA, 15 bp, Homo sapiens
ggctggaaggaagga

SEQ ID NO: 468667 - DNA, 15 bp, Homo sapiens
aggctggaaggaagg

SEQ ID NO: 468668 - DNA, 15 bp, Homo sapiens
caggctggaaggaag

SEQ ID NO: 468669 - DNA, 15 bp, Homo sapiens
tcaggctggaaggaa

SEQ ID NO: 468670 - DNA, 15 bp, Homo sapiens
ctcaggctggaagga

SEQ ID NO: 468671 - DNA, 15 bp, Homo sapiens
cctcaggctggaagg

SEQ ID NO: 468672 - DNA, 15 bp, Homo sapiens
acctcaggctggaag

SEQ ID NO: 468673 - DNA, 15 bp, Homo sapiens
cacctcaggctggaa

SEQ ID NO: 468674 - DNA, 15 bp, Homo sapiens
tcacctcaggctgga

SEQ ID NO: 468675 - DNA, 15 bp, Homo sapiens
gtcacctcaggctgg

SEQ ID NO: 468676 - DNA, 15 bp, Homo sapiens
agtcacctcaggctg

SEQ ID NO: 468677 - DNA, 15 bp, Homo sapiens
aagtcacctcaggct

SEQ ID NO: 468678 - DNA, 15 bp, Homo sapiens
aaagtcacctcaggc

SEQ ID NO: 468679 - DNA, 15 bp, Homo sapiens
aaaagtcacctcagg

SEQ ID NO: 468680 - DNA, 15 bp, Homo sapiens
aaaaagtcacctcag

SEQ ID NO: 468681 - DNA, 15 bp, Homo sapiens
taaaaagtcacctca

SEQ ID NO: 468682 - DNA, 15 bp, Homo sapiens
ctaaaaagtcacctc

SEQ ID NO: 468683 - DNA, 15 bp, Homo sapiens
tctaaaaagtcacct

SEQ ID NO: 468684 - DNA, 15 bp, Homo sapiens
ctctaaaaagtcacc

SEQ ID NO: 468685 - DNA, 15 bp, Homo sapiens
actctaaaaagtcac

SEQ ID NO: 468686 - DNA, 15 bp, Homo sapiens
gactctaaaaagtca

SEQ ID NO: 468687 - DNA, 15 bp, Homo sapiens
ggactctaaaaagtc

SEQ ID NO: 468688 - DNA, 15 bp, Homo sapiens
tggactctaaaaagt

SEQ ID NO: 468689 - DNA, 15 bp, Homo sapiens
ctggactctaaaaag

SEQ ID NO: 468690 - DNA, 15 bp, Homo sapiens
cctggactctaaaaa

SEQ ID NO: 468691 - DNA, 15 bp, Homo sapiens
ccctggactctaaaa

SEQ ID NO: 468692 - DNA, 15 bp, Homo sapiens
tccctggactctaaa

SEQ ID NO: 468693 - DNA, 15 bp, Homo sapiens
atccctggactctaa

SEQ ID NO: 468694 - DNA, 15 bp, Homo sapiens
tatccctggactcta

SEQ ID NO: 468695 - DNA, 15 bp, Homo sapiens
ctatccctggactct

SEQ ID NO: 468696 - DNA, 15 bp, Homo sapiens
gctatccctggactc

SEQ ID NO: 468697 - DNA, 15 bp, Homo sapiens
agctatccctggact

SEQ ID NO: 468698 - DNA, 15 bp, Homo sapiens
aagctatccctggac

SEQ ID NO: 468699 - DNA, 15 bp, Homo sapiens
aaagctatccctgga

SEQ ID NO: 468700 - DNA, 15 bp, Homo sapiens
gaaagctatccctgg

SEQ ID NO: 468701 - DNA, 15 bp, Homo sapiens
ggaaagctatccctg

SEQ ID NO: 468702 - DNA, 15 bp, Homo sapiens
aggaaagctatccct

SEQ ID NO: 468703 - DNA, 15 bp, Homo sapiens
gaggaaagctatccc

SEQ ID NO: 468704 - DNA, 15 bp, Homo sapiens
tgaggaaagctatcc

SEQ ID NO: 468705 - DNA, 15 bp, Homo sapiens
ctgaggaaagctatc

SEQ ID NO: 468706 - DNA, 15 bp, Homo sapiens
cctgaggaaagctat

SEQ ID NO: 468707 - DNA, 15 bp, Homo sapiens
gcctgaggaaagcta

SEQ ID NO: 468708 - DNA, 15 bp, Homo sapiens
ggcctgaggaaagct

SEQ ID NO: 468709 - DNA, 15 bp, Homo sapiens
aggcctgaggaaagc

SEQ ID NO: 468710 - DNA, 15 bp, Homo sapiens
caggcctgaggaaag

SEQ ID NO: 468711 - DNA, 15 bp, Homo sapiens
tcaggcctgaggaaa

SEQ ID NO: 468712 - DNA, 15 bp, Homo sapiens
ctcaggcctgaggaa

SEQ ID NO: 468713 - DNA, 15 bp, Homo sapiens
gctcaggcctgagga

SEQ ID NO: 468714 - DNA, 15 bp, Homo sapiens
ggctcaggcctgagg

SEQ ID NO: 468715 - DNA, 15 bp, Homo sapiens
tggctcaggcctgag

SEQ ID NO: 468716 - DNA, 15 bp, Homo sapiens
ttggctcaggcctga

SEQ ID NO: 468717 - DNA, 15 bp, Homo sapiens
cttggctcaggcctg

SEQ ID NO: 468718 - DNA, 15 bp, Homo sapiens
tcttggctcaggcct

SEQ ID NO: 468719 - DNA, 15 bp, Homo sapiens
ctcttggctcaggcc

SEQ ID NO: 468720 - DNA, 15 bp, Homo sapiens
cctcttggctcaggc

SEQ ID NO: 468721 - DNA, 15 bp, Homo sapiens
tcctcttggctcagg

SEQ ID NO: 468722 - DNA, 15 bp, Homo sapiens
ctcctcttggctcag

SEQ ID NO: 468723 - DNA, 15 bp, Homo sapiens
cctcctcttggctca

SEQ ID NO: 468724 - DNA, 15 bp, Homo sapiens
acctcctcttggctc

SEQ ID NO: 468725 - DNA, 15 bp, Homo sapiens
cacctcctcttggct

SEQ ID NO: 468726 - DNA, 15 bp, Homo sapiens
acacctcctcttggc

SEQ ID NO: 468727 - DNA, 15 bp, Homo sapiens
gacacctcctcttgg

SEQ ID NO: 468728 - DNA, 15 bp, Homo sapiens
tgacacctcctcttg

SEQ ID NO: 468729 - DNA, 15 bp, Homo sapiens
atgacacctcctctt

SEQ ID NO: 468730 - DNA, 15 bp, Homo sapiens
aatgacacctcctct

SEQ ID NO: 468731 - DNA, 15 bp, Homo sapiens
aaatgacacctcctc

SEQ ID NO: 468732 - DNA, 15 bp, Homo sapiens
taaatgacacctcct

SEQ ID NO: 468733 - DNA, 15 bp, Homo sapiens
ttaaatgacacctcc

SEQ ID NO: 468734 - DNA, 15 bp, Homo sapiens
gttaaatgacacctc

SEQ ID NO: 468735 - DNA, 15 bp, Homo sapiens
tgttaaatgacacct

SEQ ID NO: 468736 - DNA, 15 bp, Homo sapiens
gtgttaaatgacacc

SEQ ID NO: 468737 - DNA, 15 bp, Homo sapiens
tgtgttaaatgacac

SEQ ID NO: 468738 - DNA, 15 bp, Homo sapiens
ttgtgttaaatgaca

SEQ ID NO: 468739 - DNA, 15 bp, Homo sapiens
cttgtgttaaatgac

SEQ ID NO: 468740 - DNA, 15 bp, Homo sapiens
ccttgtgttaaatga

SEQ ID NO: 468741 - DNA, 15 bp, Homo sapiens
gccttgtgttaaatg

SEQ ID NO: 468742 - DNA, 15 bp, Homo sapiens
tgccttgtgttaaat

SEQ ID NO: 468743 - DNA, 15 bp, Homo sapiens
ctgccttgtgttaaa

SEQ ID NO: 468744 - DNA, 15 bp, Homo sapiens
gctgccttgtgttaa

SEQ ID NO: 468745 - DNA, 15 bp, Homo sapiens
ggctgccttgtgtta

SEQ ID NO: 468746 - DNA, 15 bp, Homo sapiens
tggctgccttgtgtt

SEQ ID NO: 468747 - DNA, 15 bp, Homo sapiens
ctggctgccttgtgt

SEQ ID NO: 468748 - DNA, 15 bp, Homo sapiens
cctggctgccttgtg

SEQ ID NO: 468749 - DNA, 15 bp, Homo sapiens
ccctggctgccttgt

SEQ ID NO: 468750 - DNA, 15 bp, Homo sapiens
tccctggctgccttg

SEQ ID NO: 468751 - DNA, 15 bp, Homo sapiens
ctccctggctgcctt

SEQ ID NO: 468752 - DNA, 15 bp, Homo sapiens
gctccctggctgcct

SEQ ID NO: 468753 - DNA, 15 bp, Homo sapiens
ggctccctggctgcc

SEQ ID NO: 468754 - DNA, 15 bp, Homo sapiens
aggctccctggctgc

SEQ ID NO: 468755 - DNA, 15 bp, Homo sapiens
caggctccctggctg

SEQ ID NO: 468756 - DNA, 15 bp, Homo sapiens
tcaggctccctggct

SEQ ID NO: 468757 - DNA, 15 bp, Homo sapiens
ttcaggctccctggc

SEQ ID NO: 468758 - DNA, 15 bp, Homo sapiens
cttcaggctccctgg

SEQ ID NO: 468759 - DNA, 15 bp, Homo sapiens
ccttcaggctccctg

SEQ ID NO: 468760 - DNA, 15 bp, Homo sapiens
cccttcaggctccct

SEQ ID NO: 468761 - DNA, 15 bp, Homo sapiens
tcccttcaggctccc

SEQ ID NO: 468762 - DNA, 15 bp, Homo sapiens
ctcccttcaggctcc

SEQ ID NO: 468763 - DNA, 15 bp, Homo sapiens
actcccttcaggctc

SEQ ID NO: 468764 - DNA, 15 bp, Homo sapiens
aactcccttcaggct

SEQ ID NO: 468765 - DNA, 15 bp, Homo sapiens
caactcccttcaggc

SEQ ID NO: 468766 - DNA, 15 bp, Homo sapiens
tcaactcccttcagg

SEQ ID NO: 468767 - DNA, 15 bp, Homo sapiens
ctcaactcccttcag

SEQ ID NO: 468768 - DNA, 15 bp, Homo sapiens
cctcaactcccttca

SEQ ID NO: 468769 - DNA, 15 bp, Homo sapiens
tcctcaactcccttc

SEQ ID NO: 468770 - DNA, 15 bp, Homo sapiens
gtcctcaactccctt

SEQ ID NO: 468771 - DNA, 15 bp, Homo sapiens
tgtcctcaactccct

SEQ ID NO: 468772 - DNA, 15 bp, Homo sapiens
atgtcctcaactccc

SEQ ID NO: 468773 - DNA, 15 bp, Homo sapiens
aatgtcctcaactcc

SEQ ID NO: 468774 - DNA, 15 bp, Homo sapiens
aaatgtcctcaactc

SEQ ID NO: 468775 - DNA, 15 bp, Homo sapiens
taaatgtcctcaact

SEQ ID NO: 468776 - DNA, 15 bp, Homo sapiens
ataaatgtcctcaac

SEQ ID NO: 468777 - DNA, 15 bp, Homo sapiens
aataaatgtcctcaa

SEQ ID NO: 468778 - DNA, 15 bp, Homo sapiens
aaataaatgtcctca

SEQ ID NO: 468779 - DNA, 15 bp, Homo sapiens
gaaataaatgtcctc

SEQ ID NO: 468780 - DNA, 15 bp, Homo sapiens
tgaaataaatgtcct

SEQ ID NO: 468781 - DNA, 15 bp, Homo sapiens
gtgaaataaatgtcc

SEQ ID NO: 468782 - DNA, 15 bp, Homo sapiens
tgtgaaataaatgtc

SEQ ID NO: 468783 - DNA, 15 bp, Homo sapiens
atgtgaaataaatgt

SEQ ID NO: 468784 - DNA, 15 bp, Homo sapiens
aatgtgaaataaatg

SEQ ID NO: 468785 - DNA, 15 bp, Homo sapiens
gaatgtgaaataaat

SEQ ID NO: 468786 - DNA, 15 bp, Homo sapiens
tgaatgtgaaataaa

SEQ ID NO: 468787 - DNA, 15 bp, Homo sapiens
gtgaatgtgaaataa

SEQ ID NO: 468788 - DNA, 15 bp, Homo sapiens
tgtgaatgtgaaata

SEQ ID NO: 468789 - DNA, 15 bp, Homo sapiens
gtgtgaatgtgaaat

SEQ ID NO: 468790 - DNA, 15 bp, Homo sapiens
tgtgtgaatgtgaaa

SEQ ID NO: 468791 - DNA, 15 bp, Homo sapiens
ttgtgtgaatgtgaa

SEQ ID NO: 468792 - DNA, 15 bp, Homo sapiens
gttgtgtgaatgtga

SEQ ID NO: 468793 - DNA, 15 bp, Homo sapiens
agttgtgtgaatgtg

SEQ ID NO: 468794 - DNA, 15 bp, Homo sapiens
cagttgtgtgaatgt

SEQ ID NO: 468795 - DNA, 15 bp, Homo sapiens
acagttgtgtgaatg

SEQ ID NO: 468796 - DNA, 15 bp, Homo sapiens
tacagttgtgtgaat

SEQ ID NO: 468797 - DNA, 15 bp, Homo sapiens
gtacagttgtgtgaa

SEQ ID NO: 468798 - DNA, 15 bp, Homo sapiens
tgtacagttgtgtga

SEQ ID NO: 468799 - DNA, 15 bp, Homo sapiens
atgtacagttgtgtg

SEQ ID NO: 468800 - DNA, 15 bp, Homo sapiens
aatgtacagttgtgt

SEQ ID NO: 468801 - DNA, 15 bp, Homo sapiens
aaatgtacagttgtg

SEQ ID NO: 468802 - DNA, 15 bp, Homo sapiens
aaaatgtacagttgt

SEQ ID NO: 468803 - DNA, 15 bp, Homo sapiens
gaaaatgtacagttg

SEQ ID NO: 468804 - DNA, 15 bp, Homo sapiens
agaaaatgtacagtt

SEQ ID NO: 468805 - DNA, 15 bp, Homo sapiens
tagaaaatgtacagt

SEQ ID NO: 468806 - DNA, 15 bp, Homo sapiens
atagaaaatgtacag

SEQ ID NO: 468807 - DNA, 15 bp, Homo sapiens
tatagaaaatgtaca

SEQ ID NO: 468808 - DNA, 15 bp, Homo sapiens
ttatagaaaatgtac

SEQ ID NO: 468809 - DNA, 15 bp, Homo sapiens
tttatagaaaatgta

SEQ ID NO: 468810 - DNA, 15 bp, Homo sapiens
atttatagaaaatgt

SEQ ID NO: 468811 - DNA, 15 bp, Homo sapiens
tatttatagaaaatg

SEQ ID NO: 468812 - DNA, 15 bp, Homo sapiens
ttatttatagaaaat

SEQ ID NO: 468813 - DNA, 15 bp, Homo sapiens
attatttatagaaaa

SEQ ID NO: 468814 - DNA, 15 bp, Homo sapiens
cattatttatagaaa

SEQ ID NO: 468815 - DNA, 15 bp, Homo sapiens
acattatttatagaa

SEQ ID NO: 468816 - DNA, 15 bp, Homo sapiens
cacattatttataga

SEQ ID NO: 468817 - DNA, 15 bp, Homo sapiens
ccacattatttatag

SEQ ID NO: 468818 - DNA, 15 bp, Homo sapiens
cccacattatttata

SEQ ID NO: 468819 - DNA, 15 bp, Homo sapiens
ccccacattatttat

SEQ ID NO: 468820 - DNA, 15 bp, Homo sapiens
gccccacattattta

SEQ ID NO: 468821 - DNA, 15 bp, Homo sapiens
agccccacattattt

SEQ ID NO: 468822 - DNA, 15 bp, Homo sapiens
cagccccacattatt

SEQ ID NO: 468823 - DNA, 15 bp, Homo sapiens
tcagccccacattat

SEQ ID NO: 468824 - DNA, 15 bp, Homo sapiens
ttcagccccacatta

SEQ ID NO: 468825 - DNA, 15 bp, Homo sapiens
tttcagccccacatt

SEQ ID NO: 468826 - DNA, 15 bp, Homo sapiens
atttcagccccacat

SEQ ID NO: 468827 - DNA, 15 bp, Homo sapiens
tatttcagccccaca

SEQ ID NO: 468828 - DNA, 15 bp, Homo sapiens
atatttcagccccac

SEQ ID NO: 468829 - DNA, 15 bp, Homo sapiens
aatatttcagcccca

SEQ ID NO: 468830 - DNA, 15 bp, Homo sapiens
aaatatttcagcccc

SEQ ID NO: 468831 - DNA, 15 bp, Homo sapiens
taaatatttcagccc

SEQ ID NO: 468832 - DNA, 15 bp, Homo sapiens
gtaaatatttcagcc

SEQ ID NO: 468833 - DNA, 15 bp, Homo sapiens
tgtaaatatttcagc

SEQ ID NO: 468834 - DNA, 15 bp, Homo sapiens
ctgtaaatatttcag

SEQ ID NO: 468835 - DNA, 15 bp, Homo sapiens
actgtaaatatttca

SEQ ID NO: 468836 - DNA, 15 bp, Homo sapiens
gactgtaaatatttc

SEQ ID NO: 468837 - DNA, 15 bp, Homo sapiens
tgactgtaaatattt

SEQ ID NO: 468838 - DNA, 15 bp, Homo sapiens
atgactgtaaatatt

SEQ ID NO: 468839 - DNA, 15 bp, Homo sapiens
aatgactgtaaatat

SEQ ID NO: 468840 - DNA, 15 bp, Homo sapiens
aaatgactgtaaata

SEQ ID NO: 468841 - DNA, 15 bp, Homo sapiens
gaaatgactgtaaat

SEQ ID NO: 468842 - DNA, 15 bp, Homo sapiens
agaaatgactgtaaa

SEQ ID NO: 468843 - DNA, 15 bp, Homo sapiens
aagaaatgactgtaa

SEQ ID NO: 468844 - DNA, 15 bp, Homo sapiens
caagaaatgactgta

SEQ ID NO: 468845 - DNA, 15 bp, Homo sapiens
gcaagaaatgactgt

SEQ ID NO: 468846 - DNA, 15 bp, Homo sapiens
ggcaagaaatgactg

SEQ ID NO: 468847 - DNA, 15 bp, Homo sapiens
gggcaagaaatgact

SEQ ID NO: 468848 - DNA, 15 bp, Homo sapiens
tgggcaagaaatgac

SEQ ID NO: 468849 - DNA, 15 bp, Homo sapiens
atgggcaagaaatga

SEQ ID NO: 468850 - DNA, 15 bp, Homo sapiens
tatgggcaagaaatg

SEQ ID NO: 468851 - DNA, 15 bp, Homo sapiens
gtatgggcaagaaat

SEQ ID NO: 468852 - DNA, 15 bp, Homo sapiens
ggtatgggcaagaaa

SEQ ID NO: 468853 - DNA, 15 bp, Homo sapiens
gggtatgggcaagaa

SEQ ID NO: 468854 - DNA, 15 bp, Homo sapiens
tgggtatgggcaaga

SEQ ID NO: 468855 - DNA, 15 bp, Homo sapiens
ctgggtatgggcaag

SEQ ID NO: 468856 - DNA, 15 bp, Homo sapiens
cctgggtatgggcaa

SEQ ID NO: 468857 - DNA, 15 bp, Homo sapiens
gcctgggtatgggca

SEQ ID NO: 468858 - DNA, 15 bp, Homo sapiens
agcctgggtatgggc

SEQ ID NO: 468859 - DNA, 15 bp, Homo sapiens
cagcctgggtatggg

SEQ ID NO: 468860 - DNA, 15 bp, Homo sapiens
acagcctgggtatgg

SEQ ID NO: 468861 - DNA, 15 bp, Homo sapiens
gacagcctgggtatg

SEQ ID NO: 468862 - DNA, 15 bp, Homo sapiens
agacagcctgggtat

SEQ ID NO: 468863 - DNA, 15 bp, Homo sapiens
gagacagcctgggta

SEQ ID NO: 468864 - DNA, 15 bp, Homo sapiens
agagacagcctgggt

SEQ ID NO: 468865 - DNA, 15 bp, Homo sapiens
gagagacagcctggg

SEQ ID NO: 468866 - DNA, 15 bp, Homo sapiens
ggagagacagcctgg

SEQ ID NO: 468867 - DNA, 15 bp, Homo sapiens
gggagagacagcctg

SEQ ID NO: 468868 - DNA, 15 bp, Homo sapiens
agggagagacagcct

SEQ ID NO: 468869 - DNA, 15 bp, Homo sapiens
gagggagagacagcc

SEQ ID NO: 468870 - DNA, 15 bp, Homo sapiens
ggagggagagacagc

SEQ ID NO: 468871 - DNA, 15 bp, Homo sapiens
aggagggagagacag

SEQ ID NO: 468872 - DNA, 15 bp, Homo sapiens
caggagggagagaca

SEQ ID NO: 468873 - DNA, 15 bp, Homo sapiens
tcaggagggagagac

SEQ ID NO: 468874 - DNA, 15 bp, Homo sapiens
gtcaggagggagaga

SEQ ID NO: 468875 - DNA, 15 bp, Homo sapiens
tgtcaggagggagag

SEQ ID NO: 468876 - DNA, 15 bp, Homo sapiens
gtgtcaggagggaga

SEQ ID NO: 468877 - DNA, 15 bp, Homo sapiens
ggtgtcaggagggag

SEQ ID NO: 468878 - DNA, 15 bp, Homo sapiens
gggtgtcaggaggga

SEQ ID NO: 468879 - DNA, 15 bp, Homo sapiens
ggggtgtcaggaggg

SEQ ID NO: 468880 - DNA, 15 bp, Homo sapiens
cggggtgtcaggagg

SEQ ID NO: 468881 - DNA, 15 bp, Homo sapiens
acggggtgtcaggag

SEQ ID NO: 468882 - DNA, 15 bp, Homo sapiens
cacggggtgtcagga

SEQ ID NO: 468883 - DNA, 15 bp, Homo sapiens
gcacggggtgtcagg

SEQ ID NO: 468884 - DNA, 15 bp, Homo sapiens
ggcacggggtgtcag

SEQ ID NO: 468885 - DNA, 15 bp, Homo sapiens
aggcacggggtgtca

SEQ ID NO: 468886 - DNA, 15 bp, Homo sapiens
caggcacggggtgtc

SEQ ID NO: 468887 - DNA, 15 bp, Homo sapiens
ccaggcacggggtgt

SEQ ID NO: 468888 - DNA, 15 bp, Homo sapiens
tccaggcacggggtg

SEQ ID NO: 468889 - DNA, 15 bp, Homo sapiens
ctccaggcacggggt

SEQ ID NO: 468890 - DNA, 15 bp, Homo sapiens
tctccaggcacgggg

SEQ ID NO: 468891 - DNA, 15 bp, Homo sapiens
ctctccaggcacggg

SEQ ID NO: 468892 - DNA, 15 bp, Homo sapiens
tctctccaggcacgg

SEQ ID NO: 468893 - DNA, 15 bp, Homo sapiens
gtctctccaggcacg

SEQ ID NO: 468894 - DNA, 15 bp, Homo sapiens
tgtctctccaggcac

SEQ ID NO: 468895 - DNA, 15 bp, Homo sapiens
ctgtctctccaggca

SEQ ID NO: 468896 - DNA, 15 bp, Homo sapiens
gctgtctctccaggc

SEQ ID NO: 468897 - DNA, 15 bp, Homo sapiens
ggctgtctctccagg

SEQ ID NO: 468898 - DNA, 15 bp, Homo sapiens
aggctgtctctccag

SEQ ID NO: 468899 - DNA, 15 bp, Homo sapiens
caggctgtctctcca

SEQ ID NO: 468900 - DNA, 15 bp, Homo sapiens
gcaggctgtctctcc

SEQ ID NO: 468901 - DNA, 15 bp, Homo sapiens
tgcaggctgtctctc

SEQ ID NO: 468902 - DNA, 15 bp, Homo sapiens
ctgcaggctgtctct

SEQ ID NO: 468903 - DNA, 15 bp, Homo sapiens
tctgcaggctgtctc

SEQ ID NO: 468904 - DNA, 15 bp, Homo sapiens
gtctgcaggctgtct

SEQ ID NO: 468905 - DNA, 15 bp, Homo sapiens
tgtctgcaggctgtc

SEQ ID NO: 468906 - DNA, 15 bp, Homo sapiens
ctgtctgcaggctgt

SEQ ID NO: 468907 - DNA, 15 bp, Homo sapiens
tctgtctgcaggctg

SEQ ID NO: 468908 - DNA, 15 bp, Homo sapiens
atctgtctgcaggct

SEQ ID NO: 468909 - DNA, 15 bp, Homo sapiens
catctgtctgcaggc

SEQ ID NO: 468910 - DNA, 15 bp, Homo sapiens
acatctgtctgcagg

SEQ ID NO: 468911 - DNA, 15 bp, Homo sapiens
cacatctgtctgcag

SEQ ID NO: 468912 - DNA, 15 bp, Homo sapiens
gcacatctgtctgca

SEQ ID NO: 468913 - DNA, 15 bp, Homo sapiens
tgcacatctgtctgc

SEQ ID NO: 468914 - DNA, 15 bp, Homo sapiens
ttgcacatctgtctg

SEQ ID NO: 468915 - DNA, 15 bp, Homo sapiens
tttgcacatctgtct

SEQ ID NO: 468916 - DNA, 15 bp, Homo sapiens
gtttgcacatctgtc

SEQ ID NO: 468917 - DNA, 15 bp, Homo sapiens
ggtttgcacatctgt

SEQ ID NO: 468918 - DNA, 15 bp, Homo sapiens
gggtttgcacatctg

SEQ ID NO: 468919 - DNA, 15 bp, Homo sapiens
tgggtttgcacatct

SEQ ID NO: 468920 - DNA, 15 bp, Homo sapiens
ctgggtttgcacatc

SEQ ID NO: 468921 - DNA, 15 bp, Homo sapiens
gctgggtttgcacat

SEQ ID NO: 468922 - DNA, 15 bp, Homo sapiens
agctgggtttgcaca

SEQ ID NO: 468923 - DNA, 15 bp, Homo sapiens
aagctgggtttgcac

SEQ ID NO: 468924 - DNA, 15 bp, Homo sapiens
caagctgggtttgca

SEQ ID NO: 468925 - DNA, 15 bp, Homo sapiens
ccaagctgggtttgc

SEQ ID NO: 468926 - DNA, 15 bp, Homo sapiens
accaagctgggtttg

SEQ ID NO: 468927 - DNA, 15 bp, Homo sapiens
gaccaagctgggttt

SEQ ID NO: 468928 - DNA, 15 bp, Homo sapiens
agaccaagctgggtt

SEQ ID NO: 468929 - DNA, 15 bp, Homo sapiens
aagaccaagctgggt

SEQ ID NO: 468930 - DNA, 15 bp, Homo sapiens
aaagaccaagctggg

SEQ ID NO: 468931 - DNA, 15 bp, Homo sapiens
gaaagaccaagctgg

SEQ ID NO: 468932 - DNA, 15 bp, Homo sapiens
ggaaagaccaagctg

SEQ ID NO: 468933 - DNA, 15 bp, Homo sapiens
aggaaagaccaagct

SEQ ID NO: 468934 - DNA, 15 bp, Homo sapiens
caggaaagaccaagc

SEQ ID NO: 468935 - DNA, 15 bp, Homo sapiens
gcaggaaagaccaag

SEQ ID NO: 468936 - DNA, 15 bp, Homo sapiens
ggcaggaaagaccaa

SEQ ID NO: 468937 - DNA, 15 bp, Homo sapiens
gggcaggaaagacca

SEQ ID NO: 468938 - DNA, 15 bp, Homo sapiens
ggggcaggaaagacc

SEQ ID NO: 468939 - DNA, 15 bp, Homo sapiens
gggggcaggaaagac

SEQ ID NO: 468940 - DNA, 15 bp, Homo sapiens
agggggcaggaaaga

SEQ ID NO: 468941 - DNA, 15 bp, Homo sapiens
gagggggcaggaaag

SEQ ID NO: 468942 - DNA, 15 bp, Homo sapiens
ggagggggcaggaaa

SEQ ID NO: 468943 - DNA, 15 bp, Homo sapiens
gggagggggcaggaa

SEQ ID NO: 468944 - DNA, 15 bp, Homo sapiens
agggagggggcagga

SEQ ID NO: 468945 - DNA, 15 bp, Homo sapiens
cagggagggggcagg

SEQ ID NO: 468946 - DNA, 15 bp, Homo sapiens
tcagggagggggcag

SEQ ID NO: 468947 - DNA, 15 bp, Homo sapiens
atcagggagggggca

SEQ ID NO: 468948 - DNA, 15 bp, Homo sapiens
catcagggagggggc

SEQ ID NO: 468949 - DNA, 15 bp, Homo sapiens
gcatcagggaggggg

SEQ ID NO: 468950 - DNA, 15 bp, Homo sapiens
agcatcagggagggg

SEQ ID NO: 468951 - DNA, 15 bp, Homo sapiens
gagcatcagggaggg

SEQ ID NO: 468952 - DNA, 15 bp, Homo sapiens
tgagcatcagggagg

SEQ ID NO: 468953 - DNA, 15 bp, Homo sapiens
ctgagcatcagggag

SEQ ID NO: 468954 - DNA, 15 bp, Homo sapiens
cctgagcatcaggga

SEQ ID NO: 468955 - DNA, 15 bp, Homo sapiens
gcctgagcatcaggg

SEQ ID NO: 468956 - DNA, 15 bp, Homo sapiens
tgcctgagcatcagg

SEQ ID NO: 468957 - DNA, 15 bp, Homo sapiens
ctgcctgagcatcag

SEQ ID NO: 468958 - DNA, 15 bp, Homo sapiens
tctgcctgagcatca

SEQ ID NO: 468959 - DNA, 15 bp, Homo sapiens
ctctgcctgagcatc

SEQ ID NO: 468960 - DNA, 15 bp, Homo sapiens
gctctgcctgagcat

SEQ ID NO: 468961 - DNA, 15 bp, Homo sapiens
tgctctgcctgagca

SEQ ID NO: 468962 - DNA, 15 bp, Homo sapiens
ctgctctgcctgagc

SEQ ID NO: 468963 - DNA, 15 bp, Homo sapiens
gctgctctgcctgag

SEQ ID NO: 468964 - DNA, 15 bp, Homo sapiens
ggctgctctgcctga

SEQ ID NO: 468965 - DNA, 15 bp, Homo sapiens
tggctgctctgcctg

SEQ ID NO: 468966 - DNA, 15 bp, Homo sapiens
ctggctgctctgcct

SEQ ID NO: 468967 - DNA, 15 bp, Homo sapiens
gctggctgctctgcc

SEQ ID NO: 468968 - DNA, 15 bp, Homo sapiens
cgctggctgctctgc

SEQ ID NO: 468969 - DNA, 15 bp, Homo sapiens
ccgctggctgctctg

SEQ ID NO: 468970 - DNA, 15 bp, Homo sapiens
accgctggctgctct

SEQ ID NO: 468971 - DNA, 15 bp, Homo sapiens
gaccgctggctgctc

SEQ ID NO: 468972 - DNA, 15 bp, Homo sapiens
ggaccgctggctgct

SEQ ID NO: 468973 - DNA, 15 bp, Homo sapiens
gggaccgctggctgc

SEQ ID NO: 468974 - DNA, 15 bp, Homo sapiens
agggaccgctggctg

SEQ ID NO: 468975 - DNA, 15 bp, Homo sapiens
cagggaccgctggct

SEQ ID NO: 468976 - DNA, 15 bp, Homo sapiens
ccagggaccgctggc

SEQ ID NO: 468977 - DNA, 15 bp, Homo sapiens
cccagggaccgctgg

SEQ ID NO: 468978 - DNA, 15 bp, Homo sapiens
tcccagggaccgctg

SEQ ID NO: 468979 - DNA, 15 bp, Homo sapiens
gtcccagggaccgct

SEQ ID NO: 468980 - DNA, 15 bp, Homo sapiens
agtcccagggaccgc

SEQ ID NO: 468981 - DNA, 15 bp, Homo sapiens
gagtcccagggaccg

SEQ ID NO: 468982 - DNA, 15 bp, Homo sapiens
ggagtcccagggacc

SEQ ID NO: 468983 - DNA, 15 bp, Homo sapiens
tggagtcccagggac

SEQ ID NO: 468984 - DNA, 15 bp, Homo sapiens
gtggagtcccaggga

SEQ ID NO: 468985 - DNA, 15 bp, Homo sapiens
agtggagtcccaggg

SEQ ID NO: 468986 - DNA, 15 bp, Homo sapiens
tagtggagtcccagg

SEQ ID NO: 468987 - DNA, 15 bp, Homo sapiens
ctagtggagtcccag

SEQ ID NO: 468988 - DNA, 15 bp, Homo sapiens
gctagtggagtccca

SEQ ID NO: 468989 - DNA, 15 bp, Homo sapiens
ggctagtggagtccc

SEQ ID NO: 468990 - DNA, 15 bp, Homo sapiens
aggctagtggagtcc

SEQ ID NO: 468991 - DNA, 15 bp, Homo sapiens
gaggctagtggagtc

SEQ ID NO: 468992 - DNA, 15 bp, Homo sapiens
cgaggctagtggagt

SEQ ID NO: 468993 - DNA, 15 bp, Homo sapiens
tcgaggctagtggag

SEQ ID NO: 468994 - DNA, 15 bp, Homo sapiens
gtcgaggctagtgga

SEQ ID NO: 468995 - DNA, 15 bp, Homo sapiens
ggtcgaggctagtgg

SEQ ID NO: 468996 - DNA, 15 bp, Homo sapiens
tggtcgaggctagtg

SEQ ID NO: 468997 - DNA, 15 bp, Homo sapiens
gtggtcgaggctagt

SEQ ID NO: 468998 - DNA, 15 bp, Homo sapiens
agtggtcgaggctag

SEQ ID NO: 468999 - DNA, 15 bp, Homo sapiens
gagtggtcgaggcta

SEQ ID NO: 469000 - DNA, 15 bp, Homo sapiens
ggagtggtcgaggct

SEQ ID NO: 469001 - DNA, 15 bp, Homo sapiens
tggagtggtcgaggc

SEQ ID NO: 469002 - DNA, 15 bp, Homo sapiens
atggagtggtcgagg

SEQ ID NO: 469003 - DNA, 15 bp, Homo sapiens
gatggagtggtcgag

SEQ ID NO: 469004 - DNA, 15 bp, Homo sapiens
ggatggagtggtcga

SEQ ID NO: 469005 - DNA, 15 bp, Homo sapiens
aggatggagtggtcg

SEQ ID NO: 469006 - DNA, 15 bp, Homo sapiens
gaggatggagtggtc

SEQ ID NO: 469007 - DNA, 15 bp, Homo sapiens
agaggatggagtggt

SEQ ID NO: 469008 - DNA, 15 bp, Homo sapiens
cagaggatggagtgg

SEQ ID NO: 469009 - DNA, 15 bp, Homo sapiens
tcagaggatggagtg

SEQ ID NO: 469010 - DNA, 15 bp, Homo sapiens
atcagaggatggagt

SEQ ID NO: 469011 - DNA, 15 bp, Homo sapiens
catcagaggatggag

SEQ ID NO: 469012 - DNA, 15 bp, Homo sapiens
gcatcagaggatgga

SEQ ID NO: 469013 - DNA, 15 bp, Homo sapiens
ggcatcagaggatgg

SEQ ID NO: 469014 - DNA, 15 bp, Homo sapiens
cggcatcagaggatg

SEQ ID NO: 469015 - DNA, 15 bp, Homo sapiens
tcggcatcagaggat

SEQ ID NO: 469016 - DNA, 15 bp, Homo sapiens
ttcggcatcagagga

SEQ ID NO: 469017 - DNA, 15 bp, Homo sapiens
cttcggcatcagagg

SEQ ID NO: 469018 - DNA, 15 bp, Homo sapiens
ccttcggcatcagag

SEQ ID NO: 469019 - DNA, 15 bp, Homo sapiens
gccttcggcatcaga

SEQ ID NO: 469020 - DNA, 15 bp, Homo sapiens
tgccttcggcatcag

SEQ ID NO: 469021 - DNA, 15 bp, Homo sapiens
atgccttcggcatca

SEQ ID NO: 469022 - DNA, 15 bp, Homo sapiens
catgccttcggcatc

SEQ ID NO: 469023 - DNA, 15 bp, Homo sapiens
ccatgccttcggcat

SEQ ID NO: 469024 - DNA, 15 bp, Homo sapiens
gccatgccttcggca

SEQ ID NO: 469025 - DNA, 15 bp, Homo sapiens
tgccatgccttcggc

SEQ ID NO: 469026 - DNA, 15 bp, Homo sapiens
ctgccatgccttcgg

SEQ ID NO: 469027 - DNA, 15 bp, Homo sapiens
cctgccatgccttcg

SEQ ID NO: 469028 - DNA, 15 bp, Homo sapiens
gcctgccatgccttc

SEQ ID NO: 469029 - DNA, 15 bp, Homo sapiens
ggcctgccatgcctt

SEQ ID NO: 469030 - DNA, 15 bp, Homo sapiens
tggcctgccatgcct

SEQ ID NO: 469031 - DNA, 15 bp, Homo sapiens
gtggcctgccatgcc

SEQ ID NO: 469032 - DNA, 15 bp, Homo sapiens
tgtggcctgccatgc

SEQ ID NO: 469033 - DNA, 15 bp, Homo sapiens
ctgtggcctgccatg

SEQ ID NO: 469034 - DNA, 15 bp, Homo sapiens
cctgtggcctgccat

SEQ ID NO: 469035 - DNA, 15 bp, Homo sapiens
ccctgtggcctgcca

SEQ ID NO: 469036 - DNA, 15 bp, Homo sapiens
tccctgtggcctgcc

SEQ ID NO: 469037 - DNA, 15 bp, Homo sapiens
ttccctgtggcctgc

SEQ ID NO: 469038 - DNA, 15 bp, Homo sapiens
attccctgtggcctg

SEQ ID NO: 469039 - DNA, 15 bp, Homo sapiens
aattccctgtggcct

SEQ ID NO: 469040 - DNA, 15 bp, Homo sapiens
gaattccctgtggcc

SEQ ID NO: 469041 - DNA, 15 bp, Homo sapiens
cgaattccctgtggc

SEQ ID NO: 469042 - DNA, 15 bp, Homo sapiens
gcgaattccctgtgg

SEQ ID NO: 469043 - DNA, 15 bp, Homo sapiens
ggcgaattccctgtg

SEQ ID NO: 469044 - DNA, 15 bp, Homo sapiens
cggcgaattccctgt

SEQ ID NO: 469045 - DNA, 15 bp, Homo sapiens
gcggcgaattccctg

SEQ ID NO: 469046 - DNA, 15 bp, Homo sapiens
agcggcgaattccct

SEQ ID NO: 469047 - DNA, 15 bp, Homo sapiens
gagcggcgaattccc

SEQ ID NO: 469048 - DNA, 15 bp, Homo sapiens
ggagcggcgaattcc

SEQ ID NO: 469049 - DNA, 15 bp, Homo sapiens
tggagcggcgaattc

SEQ ID NO: 469050 - DNA, 15 bp, Homo sapiens
gtggagcggcgaatt

SEQ ID NO: 469051 - DNA, 15 bp, Homo sapiens
agtggagcggcgaat

SEQ ID NO: 469052 - DNA, 15 bp, Homo sapiens
cagtggagcggcgaa

SEQ ID NO: 469053 - DNA, 15 bp, Homo sapiens
gcagtggagcggcga

SEQ ID NO: 469054 - DNA, 15 bp, Homo sapiens
tgcagtggagcggcg

SEQ ID NO: 469055 - DNA, 15 bp, Homo sapiens
ctgcagtggagcggc

SEQ ID NO: 469056 - DNA, 15 bp, Homo sapiens
actgcagtggagcgg

SEQ ID NO: 469057 - DNA, 15 bp, Homo sapiens
gactgcagtggagcg

SEQ ID NO: 469058 - DNA, 15 bp, Homo sapiens
tgactgcagtggagc

SEQ ID NO: 469059 - DNA, 15 bp, Homo sapiens
gtgactgcagtggag

SEQ ID NO: 469060 - DNA, 15 bp, Homo sapiens
tgtgactgcagtgga

SEQ ID NO: 469061 - DNA, 15 bp, Homo sapiens
ctgtgactgcagtgg

SEQ ID NO: 469062 - DNA, 15 bp, Homo sapiens
tctgtgactgcagtg

SEQ ID NO: 469063 - DNA, 15 bp, Homo sapiens
ctctgtgactgcagt

SEQ ID NO: 469064 - DNA, 15 bp, Homo sapiens
cctctgtgactgcag

SEQ ID NO: 469065 - DNA, 15 bp, Homo sapiens
gcctctgtgactgca

SEQ ID NO: 469066 - DNA, 15 bp, Homo sapiens
agcctctgtgactgc

SEQ ID NO: 469067 - DNA, 15 bp, Homo sapiens
cagcctctgtgactg

SEQ ID NO: 469068 - DNA, 15 bp, Homo sapiens
acagcctctgtgact

SEQ ID NO: 469069 - DNA, 15 bp, Homo sapiens
cacagcctctgtgac

SEQ ID NO: 469070 - DNA, 15 bp, Homo sapiens
ccacagcctctgtga

SEQ ID NO: 469071 - DNA, 15 bp, Homo sapiens
gccacagcctctgtg

SEQ ID NO: 469072 - DNA, 15 bp, Homo sapiens
tgccacagcctctgt

SEQ ID NO: 469073 - DNA, 15 bp, Homo sapiens
ctgccacagcctctg

SEQ ID NO: 469074 - DNA, 15 bp, Homo sapiens
cctgccacagcctct

SEQ ID NO: 469075 - DNA, 15 bp, Homo sapiens
gcctgccacagcctc

SEQ ID NO: 469076 - DNA, 15 bp, Homo sapiens
tgcctgccacagcct

SEQ ID NO: 469077 - DNA, 15 bp, Homo sapiens
ctgcctgccacagcc

SEQ ID NO: 469078 - DNA, 15 bp, Homo sapiens
gctgcctgccacagc

SEQ ID NO: 469079 - DNA, 15 bp, Homo sapiens
tgctgcctgccacag

SEQ ID NO: 469080 - DNA, 15 bp, Homo sapiens
ctgctgcctgccaca

SEQ ID NO: 469081 - DNA, 15 bp, Homo sapiens
gctgctgcctgccac

SEQ ID NO: 469082 - DNA, 15 bp, Homo sapiens
ggctgctgcctgcca

SEQ ID NO: 469083 - DNA, 15 bp, Homo sapiens
tggctgctgcctgcc

SEQ ID NO: 469084 - DNA, 15 bp, Homo sapiens
ttggctgctgcctgc

SEQ ID NO: 469085 - DNA, 15 bp, Homo sapiens
gttggctgctgcctg

SEQ ID NO: 469086 - DNA, 15 bp, Homo sapiens
tgttggctgctgcct

SEQ ID NO: 469087 - DNA, 15 bp, Homo sapiens
gtgttggctgctgcc

SEQ ID NO: 469088 - DNA, 15 bp, Homo sapiens
agtgttggctgctgc

SEQ ID NO: 469089 - DNA, 15 bp, Homo sapiens
cagtgttggctgctg

SEQ ID NO: 469090 - DNA, 15 bp, Homo sapiens
gcagtgttggctgct

SEQ ID NO: 469091 - DNA, 15 bp, Homo sapiens
cgcagtgttggctgc

SEQ ID NO: 469092 - DNA, 15 bp, Homo sapiens
ccgcagtgttggctg

SEQ ID NO: 469093 - DNA, 15 bp, Homo sapiens
cccgcagtgttggct

SEQ ID NO: 469094 - DNA, 15 bp, Homo sapiens
gcccgcagtgttggc

SEQ ID NO: 469095 - DNA, 15 bp, Homo sapiens
ggcccgcagtgttgg

SEQ ID NO: 469096 - DNA, 15 bp, Homo sapiens
gggcccgcagtgttg

SEQ ID NO: 469097 - DNA, 15 bp, Homo sapiens
agggcccgcagtgtt

SEQ ID NO: 469098 - DNA, 15 bp, Homo sapiens
cagggcccgcagtgt

SEQ ID NO: 469099 - DNA, 15 bp, Homo sapiens
ccagggcccgcagtg

SEQ ID NO: 469100 - DNA, 15 bp, Homo sapiens
cccagggcccgcagt

SEQ ID NO: 469101 - DNA, 15 bp, Homo sapiens
gcccagggcccgcag

SEQ ID NO: 469102 - DNA, 15 bp, Homo sapiens
tgcccagggcccgca

SEQ ID NO: 469103 - DNA, 15 bp, Homo sapiens
ctgcccagggcccgc

SEQ ID NO: 469104 - DNA, 15 bp, Homo sapiens
actgcccagggcccg

SEQ ID NO: 469105 - DNA, 15 bp, Homo sapiens
tactgcccagggccc

SEQ ID NO: 469106 - DNA, 15 bp, Homo sapiens
ctactgcccagggcc

SEQ ID NO: 469107 - DNA, 15 bp, Homo sapiens
gctactgcccagggc

SEQ ID NO: 469108 - DNA, 15 bp, Homo sapiens
agctactgcccaggg

SEQ ID NO: 469109 - DNA, 15 bp, Homo sapiens
cagctactgcccagg

SEQ ID NO: 469110 - DNA, 15 bp, Homo sapiens
gcagctactgcccag

SEQ ID NO: 469111 - DNA, 15 bp, Homo sapiens
ggcagctactgccca

SEQ ID NO: 469112 - DNA, 15 bp, Homo sapiens
cggcagctactgccc

SEQ ID NO: 469113 - DNA, 15 bp, Homo sapiens
ccggcagctactgcc

SEQ ID NO: 469114 - DNA, 15 bp, Homo sapiens
gccggcagctactgc

SEQ ID NO: 469115 - DNA, 15 bp, Homo sapiens
agccggcagctactg

SEQ ID NO: 469116 - DNA, 15 bp, Homo sapiens
aagccggcagctact

SEQ ID NO: 469117 - DNA, 15 bp, Homo sapiens
caagccggcagctac

SEQ ID NO: 469118 - DNA, 15 bp, Homo sapiens
ccaagccggcagcta

SEQ ID NO: 469119 - DNA, 15 bp, Homo sapiens
cccaagccggcagct

SEQ ID NO: 469120 - DNA, 15 bp, Homo sapiens
tcccaagccggcagc

SEQ ID NO: 469121 - DNA, 15 bp, Homo sapiens
ttcccaagccggcag

SEQ ID NO: 469122 - DNA, 15 bp, Homo sapiens
attcccaagccggca

SEQ ID NO: 469123 - DNA, 15 bp, Homo sapiens
cattcccaagccggc

SEQ ID NO: 469124 - DNA, 15 bp, Homo sapiens
gcattcccaagccgg

SEQ ID NO: 469125 - DNA, 15 bp, Homo sapiens
tgcattcccaagccg

SEQ ID NO: 469126 - DNA, 15 bp, Homo sapiens
ctgcattcccaagcc

SEQ ID NO: 469127 - DNA, 15 bp, Homo sapiens
tctgcattcccaagc

SEQ ID NO: 469128 - DNA, 15 bp, Homo sapiens
ttctgcattcccaag

SEQ ID NO: 469129 - DNA, 15 bp, Homo sapiens
cttctgcattcccaa

SEQ ID NO: 469130 - DNA, 15 bp, Homo sapiens
ccttctgcattccca

SEQ ID NO: 469131 - DNA, 15 bp, Homo sapiens
tccttctgcattccc

SEQ ID NO: 469132 - DNA, 15 bp, Homo sapiens
ttccttctgcattcc

SEQ ID NO: 469133 - DNA, 15 bp, Homo sapiens
cttccttctgcattc

SEQ ID NO: 469134 - DNA, 15 bp, Homo sapiens
gcttccttctgcatt

SEQ ID NO: 469135 - DNA, 15 bp, Homo sapiens
tgcttccttctgcat

SEQ ID NO: 469136 - DNA, 15 bp, Homo sapiens
ctgcttccttctgca

SEQ ID NO: 469137 - DNA, 15 bp, Homo sapiens
cctgcttccttctgc

SEQ ID NO: 469138 - DNA, 15 bp, Homo sapiens
ccctgcttccttctg

SEQ ID NO: 469139 - DNA, 15 bp, Homo sapiens
tccctgcttccttct

SEQ ID NO: 469140 - DNA, 15 bp, Homo sapiens
ctccctgcttccttc

SEQ ID NO: 469141 - DNA, 15 bp, Homo sapiens
cctccctgcttcctt

SEQ ID NO: 469142 - DNA, 15 bp, Homo sapiens
gcctccctgcttcct

SEQ ID NO: 469143 - DNA, 15 bp, Homo sapiens
agcctccctgcttcc

SEQ ID NO: 469144 - DNA, 15 bp, Homo sapiens
cagcctccctgcttc

SEQ ID NO: 469145 - DNA, 15 bp, Homo sapiens
gcagcctccctgctt

SEQ ID NO: 469146 - DNA, 15 bp, Homo sapiens
ggcagcctccctgct

SEQ ID NO: 469147 - DNA, 15 bp, Homo sapiens
tggcagcctccctgc

SEQ ID NO: 469148 - DNA, 15 bp, Homo sapiens
gtggcagcctccctg

SEQ ID NO: 469149 - DNA, 15 bp, Homo sapiens
agtggcagcctccct

SEQ ID NO: 469150 - DNA, 15 bp, Homo sapiens
gagtggcagcctccc

SEQ ID NO: 469151 - DNA, 15 bp, Homo sapiens
tgagtggcagcctcc

SEQ ID NO: 469152 - DNA, 15 bp, Homo sapiens
gtgagtggcagcctc

SEQ ID NO: 469153 - DNA, 15 bp, Homo sapiens
agtgagtggcagcct

SEQ ID NO: 469154 - DNA, 15 bp, Homo sapiens
gagtgagtggcagcc

SEQ ID NO: 469155 - DNA, 15 bp, Homo sapiens
ggagtgagtggcagc

SEQ ID NO: 469156 - DNA, 15 bp, Homo sapiens
cggagtgagtggcag

SEQ ID NO: 469157 - DNA, 15 bp, Homo sapiens
ccggagtgagtggca

SEQ ID NO: 469158 - DNA, 15 bp, Homo sapiens
gccggagtgagtggc

SEQ ID NO: 469159 - DNA, 15 bp, Homo sapiens
agccggagtgagtgg

SEQ ID NO: 469160 - DNA, 15 bp, Homo sapiens
cagccggagtgagtg

SEQ ID NO: 469161 - DNA, 15 bp, Homo sapiens
gcagccggagtgagt

SEQ ID NO: 469162 - DNA, 15 bp, Homo sapiens
ggcagccggagtgag

SEQ ID NO: 469163 - DNA, 15 bp, Homo sapiens
gggcagccggagtga

SEQ ID NO: 469164 - DNA, 15 bp, Homo sapiens
ggggcagccggagtg

SEQ ID NO: 469165 - DNA, 15 bp, Homo sapiens
gggggcagccggagt

SEQ ID NO: 469166 - DNA, 15 bp, Homo sapiens
ggggggcagccggag

SEQ ID NO: 469167 - DNA, 15 bp, Homo sapiens
tggggggcagccgga

SEQ ID NO: 469168 - DNA, 15 bp, Homo sapiens
ttggggggcagccgg

SEQ ID NO: 469169 - DNA, 15 bp, Homo sapiens
attggggggcagccg

SEQ ID NO: 469170 - DNA, 15 bp, Homo sapiens
aattggggggcagcc

SEQ ID NO: 469171 - DNA, 15 bp, Homo sapiens
gaattggggggcagc

SEQ ID NO: 469172 - DNA, 15 bp, Homo sapiens
agaattggggggcag

SEQ ID NO: 469173 - DNA, 15 bp, Homo sapiens
aagaattggggggca

SEQ ID NO: 469174 - DNA, 15 bp, Homo sapiens
gaagaattggggggc

SEQ ID NO: 469175 - DNA, 15 bp, Homo sapiens
ggaagaattgggggg

SEQ ID NO: 469176 - DNA, 15 bp, Homo sapiens
gggaagaattggggg

SEQ ID NO: 469177 - DNA, 15 bp, Homo sapiens
agggaagaattgggg

SEQ ID NO: 469178 - DNA, 15 bp, Homo sapiens
aagggaagaattggg

SEQ ID NO: 469179 - DNA, 15 bp, Homo sapiens
gaagggaagaattgg

SEQ ID NO: 469180 - DNA, 15 bp, Homo sapiens
ggaagggaagaattg

SEQ ID NO: 469181 - DNA, 15 bp, Homo sapiens
aggaagggaagaatt

SEQ ID NO: 469182 - DNA, 15 bp, Homo sapiens
gaggaagggaagaat

SEQ ID NO: 469183 - DNA, 15 bp, Homo sapiens
agaggaagggaagaa

SEQ ID NO: 469184 - DNA, 15 bp, Homo sapiens
gagaggaagggaaga

SEQ ID NO: 469185 - DNA, 15 bp, Homo sapiens
agagaggaagggaag

SEQ ID NO: 469186 - DNA, 15 bp, Homo sapiens
cagagaggaagggaa

SEQ ID NO: 469187 - DNA, 15 bp, Homo sapiens
acagagaggaaggga

SEQ ID NO: 469188 - DNA, 15 bp, Homo sapiens
cacagagaggaaggg

SEQ ID NO: 469189 - DNA, 15 bp, Homo sapiens
gcacagagaggaagg

SEQ ID NO: 469190 - DNA, 15 bp, Homo sapiens
ggcacagagaggaag

SEQ ID NO: 469191 - DNA, 15 bp, Homo sapiens
gggcacagagaggaa

SEQ ID NO: 469192 - DNA, 15 bp, Homo sapiens
agggcacagagagga

SEQ ID NO: 469193 - DNA, 15 bp, Homo sapiens
aagggcacagagagg

SEQ ID NO: 469194 - DNA, 15 bp, Homo sapiens
gaagggcacagagag

SEQ ID NO: 469195 - DNA, 15 bp, Homo sapiens
ggaagggcacagaga

SEQ ID NO: 469196 - DNA, 15 bp, Homo sapiens
aggaagggcacagag

SEQ ID NO: 469197 - DNA, 15 bp, Homo sapiens
gaggaagggcacaga

SEQ ID NO: 469198 - DNA, 15 bp, Homo sapiens
agaggaagggcacag

SEQ ID NO: 469199 - DNA, 15 bp, Homo sapiens
cagaggaagggcaca

SEQ ID NO: 469200 - DNA, 15 bp, Homo sapiens
tcagaggaagggcac

SEQ ID NO: 469201 - DNA, 15 bp, Homo sapiens
ctcagaggaagggca

SEQ ID NO: 469202 - DNA, 15 bp, Homo sapiens
tctcagaggaagggc

SEQ ID NO: 469203 - DNA, 15 bp, Homo sapiens
ctctcagaggaaggg

SEQ ID NO: 469204 - DNA, 15 bp, Homo sapiens
cctctcagaggaagg

SEQ ID NO: 469205 - DNA, 15 bp, Homo sapiens
ccctctcagaggaag

SEQ ID NO: 469206 - DNA, 15 bp, Homo sapiens
accctctcagaggaa

SEQ ID NO: 469207 - DNA, 15 bp, Homo sapiens
caccctctcagagga

SEQ ID NO: 469208 - DNA, 15 bp, Homo sapiens
tcaccctctcagagg

SEQ ID NO: 469209 - DNA, 15 bp, Homo sapiens
ctcaccctctcagag

SEQ ID NO: 469210 - DNA, 15 bp, Homo sapiens
gctcaccctctcaga

SEQ ID NO: 469211 - DNA, 15 bp, Homo sapiens
ggctcaccctctcag

SEQ ID NO: 469212 - DNA, 15 bp, Homo sapiens
gggctcaccctctca

SEQ ID NO: 469213 - DNA, 15 bp, Homo sapiens
ggggctcaccctctc

SEQ ID NO: 469214 - DNA, 15 bp, Homo sapiens
tggggctcaccctct

SEQ ID NO: 469215 - DNA, 15 bp, Homo sapiens
ctggggctcaccctc

SEQ ID NO: 469216 - DNA, 15 bp, Homo sapiens
cctggggctcaccct

SEQ ID NO: 469217 - DNA, 15 bp, Homo sapiens
ccctggggctcaccc

SEQ ID NO: 469218 - DNA, 15 bp, Homo sapiens
accctggggctcacc

SEQ ID NO: 469219 - DNA, 15 bp, Homo sapiens
aaccctggggctcac

SEQ ID NO: 469220 - DNA, 15 bp, Homo sapiens
gaaccctggggctca

SEQ ID NO: 469221 - DNA, 15 bp, Homo sapiens
ggaaccctggggctc

SEQ ID NO: 469222 - DNA, 15 bp, Homo sapiens
gggaaccctggggct

SEQ ID NO: 469223 - DNA, 15 bp, Homo sapiens
agggaaccctggggc

SEQ ID NO: 469224 - DNA, 15 bp, Homo sapiens
gagggaaccctgggg

SEQ ID NO: 469225 - DNA, 15 bp, Homo sapiens
tgagggaaccctggg

SEQ ID NO: 469226 - DNA, 15 bp, Homo sapiens
gtgagggaaccctgg

SEQ ID NO: 469227 - DNA, 15 bp, Homo sapiens
agtgagggaaccctg

SEQ ID NO: 469228 - DNA, 15 bp, Homo sapiens
gagtgagggaaccct

SEQ ID NO: 469229 - DNA, 15 bp, Homo sapiens
ggagtgagggaaccc

SEQ ID NO: 469230 - DNA, 15 bp, Homo sapiens
aggagtgagggaacc

SEQ ID NO: 469231 - DNA, 15 bp, Homo sapiens
gaggagtgagggaac

SEQ ID NO: 469232 - DNA, 15 bp, Homo sapiens
tgaggagtgagggaa

SEQ ID NO: 469233 - DNA, 15 bp, Homo sapiens
gtgaggagtgaggga

SEQ ID NO: 469234 - DNA, 15 bp, Homo sapiens
tgtgaggagtgaggg

SEQ ID NO: 469235 - DNA, 15 bp, Homo sapiens
ctgtgaggagtgagg

SEQ ID NO: 469236 - DNA, 15 bp, Homo sapiens
tctgtgaggagtgag

SEQ ID NO: 469237 - DNA, 15 bp, Homo sapiens
ctctgtgaggagtga

SEQ ID NO: 469238 - DNA, 15 bp, Homo sapiens
actctgtgaggagtg

SEQ ID NO: 469239 - DNA, 15 bp, Homo sapiens
cactctgtgaggagt

SEQ ID NO: 469240 - DNA, 15 bp, Homo sapiens
tcactctgtgaggag

SEQ ID NO: 469241 - DNA, 15 bp, Homo sapiens
ttcactctgtgagga

SEQ ID NO: 469242 - DNA, 15 bp, Homo sapiens
tttcactctgtgagg

SEQ ID NO: 469243 - DNA, 15 bp, Homo sapiens
gtttcactctgtgag

SEQ ID NO: 469244 - DNA, 15 bp, Homo sapiens
agtttcactctgtga

SEQ ID NO: 469245 - DNA, 15 bp, Homo sapiens
cagtttcactctgtg

SEQ ID NO: 469246 - DNA, 15 bp, Homo sapiens
gcagtttcactctgt

SEQ ID NO: 469247 - DNA, 15 bp, Homo sapiens
agcagtttcactctg

SEQ ID NO: 469248 - DNA, 15 bp, Homo sapiens
gagcagtttcactct

SEQ ID NO: 469249 - DNA, 15 bp, Homo sapiens
ggagcagtttcactc

SEQ ID NO: 469250 - DNA, 15 bp, Homo sapiens
tggagcagtttcact

SEQ ID NO: 469251 - DNA, 15 bp, Homo sapiens
ctggagcagtttcac

SEQ ID NO: 469252 - DNA, 15 bp, Homo sapiens
cctggagcagtttca

SEQ ID NO: 469253 - DNA, 15 bp, Homo sapiens
gcctggagcagtttc

SEQ ID NO: 469254 - DNA, 15 bp, Homo sapiens
cgcctggagcagttt

SEQ ID NO: 469255 - DNA, 15 bp, Homo sapiens
gcgcctggagcagtt

SEQ ID NO: 469256 - DNA, 15 bp, Homo sapiens
ggcgcctggagcagt

SEQ ID NO: 469257 - DNA, 15 bp, Homo sapiens
gggcgcctggagcag

SEQ ID NO: 469258 - DNA, 15 bp, Homo sapiens
tgggcgcctggagca

SEQ ID NO: 469259 - DNA, 15 bp, Homo sapiens
ctgggcgcctggagc

SEQ ID NO: 469260 - DNA, 15 bp, Homo sapiens
actgggcgcctggag

SEQ ID NO: 469261 - DNA, 15 bp, Homo sapiens
gactgggcgcctgga

SEQ ID NO: 469262 - DNA, 15 bp, Homo sapiens
tgactgggcgcctgg

SEQ ID NO: 469263 - DNA, 15 bp, Homo sapiens
atgactgggcgcctg

SEQ ID NO: 469264 - DNA, 15 bp, Homo sapiens
catgactgggcgcct

SEQ ID NO: 469265 - DNA, 15 bp, Homo sapiens
gcatgactgggcgcc

SEQ ID NO: 469266 - DNA, 15 bp, Homo sapiens
ggcatgactgggcgc

SEQ ID NO: 469267 - DNA, 15 bp, Homo sapiens
cggcatgactgggcg

SEQ ID NO: 469268 - DNA, 15 bp, Homo sapiens
ccggcatgactgggc

SEQ ID NO: 469269 - DNA, 15 bp, Homo sapiens
cccggcatgactggg

SEQ ID NO: 469270 - DNA, 15 bp, Homo sapiens
acccggcatgactgg

SEQ ID NO: 469271 - DNA, 15 bp, Homo sapiens
gacccggcatgactg

SEQ ID NO: 469272 - DNA, 15 bp, Homo sapiens
tgacccggcatgact

SEQ ID NO: 469273 - DNA, 15 bp, Homo sapiens
gtgacccggcatgac

SEQ ID NO: 469274 - DNA, 15 bp, Homo sapiens
tgtgacccggcatga

SEQ ID NO: 469275 - DNA, 15 bp, Homo sapiens
ctgtgacccggcatg

SEQ ID NO: 469276 - DNA, 15 bp, Homo sapiens
tctgtgacccggcat

SEQ ID NO: 469277 - DNA, 15 bp, Homo sapiens
ctctgtgacccggca

SEQ ID NO: 469278 - DNA, 15 bp, Homo sapiens
tctctgtgacccggc

SEQ ID NO: 469279 - DNA, 15 bp, Homo sapiens
ttctctgtgacccgg

SEQ ID NO: 469280 - DNA, 15 bp, Homo sapiens
cttctctgtgacccg

SEQ ID NO: 469281 - DNA, 15 bp, Homo sapiens
ccttctctgtgaccc

SEQ ID NO: 469282 - DNA, 15 bp, Homo sapiens
cccttctctgtgacc

SEQ ID NO: 469283 - DNA, 15 bp, Homo sapiens
tcccttctctgtgac

SEQ ID NO: 469284 - DNA, 15 bp, Homo sapiens
ctcccttctctgtga

SEQ ID NO: 469285 - DNA, 15 bp, Homo sapiens
tctcccttctctgtg

SEQ ID NO: 469286 - DNA, 15 bp, Homo sapiens
ctctcccttctctgt

SEQ ID NO: 469287 - DNA, 15 bp, Homo sapiens
gctctcccttctctg

SEQ ID NO: 469288 - DNA, 15 bp, Homo sapiens
ggctctcccttctct

SEQ ID NO: 469289 - DNA, 15 bp, Homo sapiens
tggctctcccttctc

SEQ ID NO: 469290 - DNA, 15 bp, Homo sapiens
ctggctctcccttct

SEQ ID NO: 469291 - DNA, 15 bp, Homo sapiens
tctggctctcccttc

SEQ ID NO: 469292 - DNA, 15 bp, Homo sapiens
gtctggctctccctt

SEQ ID NO: 469293 - DNA, 15 bp, Homo sapiens
agtctggctctccct

SEQ ID NO: 469294 - DNA, 15 bp, Homo sapiens
gagtctggctctccc

SEQ ID NO: 469295 - DNA, 15 bp, Homo sapiens
agagtctggctctcc

SEQ ID NO: 469296 - DNA, 15 bp, Homo sapiens
aagagtctggctctc

SEQ ID NO: 469297 - DNA, 15 bp, Homo sapiens
caagagtctggctct

SEQ ID NO: 469298 - DNA, 15 bp, Homo sapiens
gcaagagtctggctc

SEQ ID NO: 469299 - DNA, 15 bp, Homo sapiens
tgcaagagtctggct

SEQ ID NO: 469300 - DNA, 15 bp, Homo sapiens
ctgcaagagtctggc

SEQ ID NO: 469301 - DNA, 15 bp, Homo sapiens
actgcaagagtctgg

SEQ ID NO: 469302 - DNA, 15 bp, Homo sapiens
cactgcaagagtctg

SEQ ID NO: 469303 - DNA, 15 bp, Homo sapiens
ccactgcaagagtct

SEQ ID NO: 469304 - DNA, 15 bp, Homo sapiens
tccactgcaagagtc

SEQ ID NO: 469305 - DNA, 15 bp, Homo sapiens
gtccactgcaagagt

SEQ ID NO: 469306 - DNA, 15 bp, Homo sapiens
tgtccactgcaagag

SEQ ID NO: 469307 - DNA, 15 bp, Homo sapiens
ctgtccactgcaaga

SEQ ID NO: 469308 - DNA, 15 bp, Homo sapiens
actgtccactgcaag

SEQ ID NO: 469309 - DNA, 15 bp, Homo sapiens
aactgtccactgcaa

SEQ ID NO: 469310 - DNA, 15 bp, Homo sapiens
taactgtccactgca

SEQ ID NO: 469311 - DNA, 15 bp, Homo sapiens
ataactgtccactgc

SEQ ID NO: 469312 - DNA, 15 bp, Homo sapiens
tataactgtccactg

SEQ ID NO: 469313 - DNA, 15 bp, Homo sapiens
ttataactgtccact

SEQ ID NO: 469314 - DNA, 15 bp, Homo sapiens
gttataactgtccac

SEQ ID NO: 469315 - DNA, 15 bp, Homo sapiens
cgttataactgtcca

SEQ ID NO: 469316 - DNA, 15 bp, Homo sapiens
gcgttataactgtcc

SEQ ID NO: 469317 - DNA, 15 bp, Homo sapiens
ggcgttataactgtc

SEQ ID NO: 469318 - DNA, 15 bp, Homo sapiens
tggcgttataactgt

SEQ ID NO: 469319 - DNA, 15 bp, Homo sapiens
ctggcgttataactg

SEQ ID NO: 469320 - DNA, 15 bp, Homo sapiens
cctggcgttataact

SEQ ID NO: 469321 - DNA, 15 bp, Homo sapiens
ccctggcgttataac

SEQ ID NO: 469322 - DNA, 15 bp, Homo sapiens
tccctggcgttataa

SEQ ID NO: 469323 - DNA, 15 bp, Homo sapiens
gtccctggcgttata

SEQ ID NO: 469324 - DNA, 15 bp, Homo sapiens
tgtccctggcgttat

SEQ ID NO: 469325 - DNA, 15 bp, Homo sapiens
ttgtccctggcgtta

SEQ ID NO: 469326 - DNA, 15 bp, Homo sapiens
cttgtccctggcgtt

SEQ ID NO: 469327 - DNA, 15 bp, Homo sapiens
ccttgtccctggcgt

SEQ ID NO: 469328 - DNA, 15 bp, Homo sapiens
tccttgtccctggcg

SEQ ID NO: 469329 - DNA, 15 bp, Homo sapiens
gtccttgtccctggc

SEQ ID NO: 469330 - DNA, 15 bp, Homo sapiens
tgtccttgtccctgg

SEQ ID NO: 469331 - DNA, 15 bp, Homo sapiens
ttgtccttgtccctg

SEQ ID NO: 469332 - DNA, 15 bp, Homo sapiens
cttgtccttgtccct

SEQ ID NO: 469333 - DNA, 15 bp, Homo sapiens
ccttgtccttgtccc

SEQ ID NO: 469334 - DNA, 15 bp, Homo sapiens
tccttgtccttgtcc

SEQ ID NO: 469335 - DNA, 15 bp, Homo sapiens
ttccttgtccttgtc

SEQ ID NO: 469336 - DNA, 15 bp, Homo sapiens
gttccttgtccttgt

SEQ ID NO: 469337 - DNA, 15 bp, Homo sapiens
ggttccttgtccttg

SEQ ID NO: 469338 - DNA, 15 bp, Homo sapiens
tggttccttgtcctt

SEQ ID NO: 469339 - DNA, 15 bp, Homo sapiens
gtggttccttgtcct

SEQ ID NO: 469340 - DNA, 15 bp, Homo sapiens
tgtggttccttgtcc

SEQ ID NO: 469341 - DNA, 15 bp, Homo sapiens
ttgtggttccttgtc

SEQ ID NO: 469342 - DNA, 15 bp, Homo sapiens
gttgtggttccttgt

SEQ ID NO: 469343 - DNA, 15 bp, Homo sapiens
tgttgtggttccttg

SEQ ID NO: 469344 - DNA, 15 bp, Homo sapiens
gtgttgtggttcctt

SEQ ID NO: 469345 - DNA, 15 bp, Homo sapiens
tgtgttgtggttcct

SEQ ID NO: 469346 - DNA, 15 bp, Homo sapiens
ttgtgttgtggttcc

SEQ ID NO: 469347 - DNA, 15 bp, Homo sapiens
tttgtgttgtggttc

SEQ ID NO: 469348 - DNA, 15 bp, Homo sapiens
atttgtgttgtggtt

SEQ ID NO: 469349 - DNA, 15 bp, Homo sapiens
catttgtgttgtggt

SEQ ID NO: 469350 - DNA, 15 bp, Homo sapiens
acatttgtgttgtgg

SEQ ID NO: 469351 - DNA, 15 bp, Homo sapiens
gacatttgtgttgtg

SEQ ID NO: 469352 - DNA, 15 bp, Homo sapiens
agacatttgtgttgt

SEQ ID NO: 469353 - DNA, 15 bp, Homo sapiens
gagacatttgtgttg

SEQ ID NO: 469354 - DNA, 15 bp, Homo sapiens
tgagacatttgtgtt

SEQ ID NO: 469355 - DNA, 15 bp, Homo sapiens
ttgagacatttgtgt

SEQ ID NO: 469356 - DNA, 15 bp, Homo sapiens
cttgagacatttgtg

SEQ ID NO: 469357 - DNA, 15 bp, Homo sapiens
ccttgagacatttgt

SEQ ID NO: 469358 - DNA, 15 bp, Homo sapiens
tccttgagacatttg

SEQ ID NO: 469359 - DNA, 15 bp, Homo sapiens
gtccttgagacattt

SEQ ID NO: 469360 - DNA, 15 bp, Homo sapiens
tgtccttgagacatt

SEQ ID NO: 469361 - DNA, 15 bp, Homo sapiens
gtgtccttgagacat

SEQ ID NO: 469362 - DNA, 15 bp, Homo sapiens
tgtgtccttgagaca

SEQ ID NO: 469363 - DNA, 15 bp, Homo sapiens
ttgtgtccttgagac

SEQ ID NO: 469364 - DNA, 15 bp, Homo sapiens
tttgtgtccttgaga

SEQ ID NO: 469365 - DNA, 15 bp, Homo sapiens
ttttgtgtccttgag

SEQ ID NO: 469366 - DNA, 15 bp, Homo sapiens
attttgtgtccttga

SEQ ID NO: 469367 - DNA, 15 bp, Homo sapiens
tattttgtgtccttg

SEQ ID NO: 469368 - DNA, 15 bp, Homo sapiens
ctattttgtgtcctt

SEQ ID NO: 469369 - DNA, 15 bp, Homo sapiens
actattttgtgtcct

SEQ ID NO: 469370 - DNA, 15 bp, Homo sapiens
cactattttgtgtcc

SEQ ID NO: 469371 - DNA, 15 bp, Homo sapiens
ccactattttgtgtc

SEQ ID NO: 469372 - DNA, 15 bp, Homo sapiens
cccactattttgtgt

SEQ ID NO: 469373 - DNA, 15 bp, Homo sapiens
acccactattttgtg

SEQ ID NO: 469374 - DNA, 15 bp, Homo sapiens
aacccactattttgt

SEQ ID NO: 469375 - DNA, 15 bp, Homo sapiens
gaacccactattttg

SEQ ID NO: 469376 - DNA, 15 bp, Homo sapiens
tgaacccactatttt

SEQ ID NO: 469377 - DNA, 15 bp, Homo sapiens
gtgaacccactattt

SEQ ID NO: 469378 - DNA, 15 bp, Homo sapiens
tgtgaacccactatt

SEQ ID NO: 469379 - DNA, 15 bp, Homo sapiens
gtgtgaacccactat

SEQ ID NO: 469380 - DNA, 15 bp, Homo sapiens
ggtgtgaacccacta

SEQ ID NO: 469381 - DNA, 15 bp, Homo sapiens
cggtgtgaacccact

SEQ ID NO: 469382 - DNA, 15 bp, Homo sapiens
ccggtgtgaacccac

SEQ ID NO: 469383 - DNA, 15 bp, Homo sapiens
gccggtgtgaaccca

SEQ ID NO: 469384 - DNA, 15 bp, Homo sapiens
ggccggtgtgaaccc

SEQ ID NO: 469385 - DNA, 15 bp, Homo sapiens
gggccggtgtgaacc

SEQ ID NO: 469386 - DNA, 15 bp, Homo sapiens
ggggccggtgtgaac

SEQ ID NO: 469387 - DNA, 15 bp, Homo sapiens
tggggccggtgtgaa

SEQ ID NO: 469388 - DNA, 15 bp, Homo sapiens
gtggggccggtgtga

SEQ ID NO: 469389 - DNA, 15 bp, Homo sapiens
tgtggggccggtgtg

SEQ ID NO: 469390 - DNA, 15 bp, Homo sapiens
ctgtggggccggtgt

SEQ ID NO: 469391 - DNA, 15 bp, Homo sapiens
tctgtggggccggtg

SEQ ID NO: 469392 - DNA, 15 bp, Homo sapiens
gtctgtggggccggt

SEQ ID NO: 469393 - DNA, 15 bp, Homo sapiens
agtctgtggggccgg

SEQ ID NO: 469394 - DNA, 15 bp, Homo sapiens
cagtctgtggggccg

SEQ ID NO: 469395 - DNA, 15 bp, Homo sapiens
acagtctgtggggcc

SEQ ID NO: 469396 - DNA, 15 bp, Homo sapiens
tacagtctgtggggc

SEQ ID NO: 469397 - DNA, 15 bp, Homo sapiens
gtacagtctgtgggg

SEQ ID NO: 469398 - DNA, 15 bp, Homo sapiens
tgtacagtctgtggg

SEQ ID NO: 469399 - DNA, 15 bp, Homo sapiens
gtgtacagtctgtgg

SEQ ID NO: 469400 - DNA, 15 bp, Homo sapiens
tgtgtacagtctgtg

SEQ ID NO: 469401 - DNA, 15 bp, Homo sapiens
atgtgtacagtctgt

SEQ ID NO: 469402 - DNA, 15 bp, Homo sapiens
aatgtgtacagtctg

SEQ ID NO: 469403 - DNA, 15 bp, Homo sapiens
gaatgtgtacagtct

SEQ ID NO: 469404 - DNA, 15 bp, Homo sapiens
agaatgtgtacagtc

SEQ ID NO: 469405 - DNA, 15 bp, Homo sapiens
aagaatgtgtacagt

SEQ ID NO: 469406 - DNA, 15 bp, Homo sapiens
caagaatgtgtacag

SEQ ID NO: 469407 - DNA, 15 bp, Homo sapiens
tcaagaatgtgtaca

SEQ ID NO: 469408 - DNA, 15 bp, Homo sapiens
ctcaagaatgtgtac

SEQ ID NO: 469409 - DNA, 15 bp, Homo sapiens
gctcaagaatgtgta

SEQ ID NO: 469410 - DNA, 15 bp, Homo sapiens
ggctcaagaatgtgt

SEQ ID NO: 469411 - DNA, 15 bp, Homo sapiens
gggctcaagaatgtg

SEQ ID NO: 469412 - DNA, 15 bp, Homo sapiens
agggctcaagaatgt

SEQ ID NO: 469413 - DNA, 15 bp, Homo sapiens
cagggctcaagaatg

SEQ ID NO: 469414 - DNA, 15 bp, Homo sapiens
tcagggctcaagaat

SEQ ID NO: 469415 - DNA, 15 bp, Homo sapiens
ctcagggctcaagaa

SEQ ID NO: 469416 - DNA, 15 bp, Homo sapiens
cctcagggctcaaga

SEQ ID NO: 469417 - DNA, 15 bp, Homo sapiens
ccctcagggctcaag

SEQ ID NO: 469418 - DNA, 15 bp, Homo sapiens
cccctcagggctcaa

SEQ ID NO: 469419 - DNA, 15 bp, Homo sapiens
tcccctcagggctca

SEQ ID NO: 469420 - DNA, 15 bp, Homo sapiens
ttcccctcagggctc

SEQ ID NO: 469421 - DNA, 15 bp, Homo sapiens
cttcccctcagggct

SEQ ID NO: 469422 - DNA, 15 bp, Homo sapiens
ccttcccctcagggc

SEQ ID NO: 469423 - DNA, 15 bp, Homo sapiens
gccttcccctcaggg

SEQ ID NO: 469424 - DNA, 15 bp, Homo sapiens
tgccttcccctcagg

SEQ ID NO: 469425 - DNA, 15 bp, Homo sapiens
ctgccttcccctcag

SEQ ID NO: 469426 - DNA, 15 bp, Homo sapiens
actgccttcccctca

SEQ ID NO: 469427 - DNA, 15 bp, Homo sapiens
aactgccttcccctc

SEQ ID NO: 469428 - DNA, 15 bp, Homo sapiens
aaactgccttcccct

SEQ ID NO: 469429 - DNA, 15 bp, Homo sapiens
caaactgccttcccc

SEQ ID NO: 469430 - DNA, 15 bp, Homo sapiens
ccaaactgccttccc

SEQ ID NO: 469431 - DNA, 15 bp, Homo sapiens
accaaactgccttcc

SEQ ID NO: 469432 - DNA, 15 bp, Homo sapiens
gaccaaactgccttc

SEQ ID NO: 469433 - DNA, 15 bp, Homo sapiens
agaccaaactgcctt

SEQ ID NO: 469434 - DNA, 15 bp, Homo sapiens
aagaccaaactgcct

SEQ ID NO: 469435 - DNA, 15 bp, Homo sapiens
gaagaccaaactgcc

SEQ ID NO: 469436 - DNA, 15 bp, Homo sapiens
agaagaccaaactgc

SEQ ID NO: 469437 - DNA, 15 bp, Homo sapiens
cagaagaccaaactg

SEQ ID NO: 469438 - DNA, 15 bp, Homo sapiens
ccagaagaccaaact

SEQ ID NO: 469439 - DNA, 15 bp, Homo sapiens
cccagaagaccaaac

SEQ ID NO: 469440 - DNA, 15 bp, Homo sapiens
tcccagaagaccaaa

SEQ ID NO: 469441 - DNA, 15 bp, Homo sapiens
ctcccagaagaccaa

SEQ ID NO: 469442 - DNA, 15 bp, Homo sapiens
actcccagaagacca

SEQ ID NO: 469443 - DNA, 15 bp, Homo sapiens
cactcccagaagacc

SEQ ID NO: 469444 - DNA, 15 bp, Homo sapiens
ccactcccagaagac

SEQ ID NO: 469445 - DNA, 15 bp, Homo sapiens
tccactcccagaaga

SEQ ID NO: 469446 - DNA, 15 bp, Homo sapiens
ctccactcccagaag

SEQ ID NO: 469447 - DNA, 15 bp, Homo sapiens
tctccactcccagaa

SEQ ID NO: 469448 - DNA, 15 bp, Homo sapiens
ctctccactcccaga

SEQ ID NO: 469449 - DNA, 15 bp, Homo sapiens
cctctccactcccag

SEQ ID NO: 469450 - DNA, 15 bp, Homo sapiens
ccctctccactccca

SEQ ID NO: 469451 - DNA, 15 bp, Homo sapiens
tccctctccactccc

SEQ ID NO: 469452 - DNA, 15 bp, Homo sapiens
ctccctctccactcc

SEQ ID NO: 469453 - DNA, 15 bp, Homo sapiens
tctccctctccactc

SEQ ID NO: 469454 - DNA, 15 bp, Homo sapiens
ttctccctctccact

SEQ ID NO: 469455 - DNA, 15 bp, Homo sapiens
cttctccctctccac

SEQ ID NO: 469456 - DNA, 15 bp, Homo sapiens
ccttctccctctcca

SEQ ID NO: 469457 - DNA, 15 bp, Homo sapiens
accttctccctctcc

SEQ ID NO: 469458 - DNA, 15 bp, Homo sapiens
caccttctccctctc

SEQ ID NO: 469459 - DNA, 15 bp, Homo sapiens
ccaccttctccctct

SEQ ID NO: 469460 - DNA, 15 bp, Homo sapiens
tccaccttctccctc

SEQ ID NO: 469461 - DNA, 15 bp, Homo sapiens
gtccaccttctccct

SEQ ID NO: 469462 - DNA, 15 bp, Homo sapiens
tgtccaccttctccc

SEQ ID NO: 469463 - DNA, 15 bp, Homo sapiens
gtgtccaccttctcc

SEQ ID NO: 469464 - DNA, 15 bp, Homo sapiens
cgtgtccaccttctc

SEQ ID NO: 469465 - DNA, 15 bp, Homo sapiens
gcgtgtccaccttct

SEQ ID NO: 469466 - DNA, 15 bp, Homo sapiens
agcgtgtccaccttc

SEQ ID NO: 469467 - DNA, 15 bp, Homo sapiens
gagcgtgtccacctt

SEQ ID NO: 469468 - DNA, 15 bp, Homo sapiens
tgagcgtgtccacct

SEQ ID NO: 469469 - DNA, 15 bp, Homo sapiens
ttgagcgtgtccacc

SEQ ID NO: 469470 - DNA, 15 bp, Homo sapiens
cttgagcgtgtccac

SEQ ID NO: 469471 - DNA, 15 bp, Homo sapiens
tcttgagcgtgtcca

SEQ ID NO: 469472 - DNA, 15 bp, Homo sapiens
gtcttgagcgtgtcc

SEQ ID NO: 469473 - DNA, 15 bp, Homo sapiens
tgtcttgagcgtgtc

SEQ ID NO: 469474 - DNA, 15 bp, Homo sapiens
gtgtcttgagcgtgt

SEQ ID NO: 469475 - DNA, 15 bp, Homo sapiens
tgtgtcttgagcgtg

SEQ ID NO: 469476 - DNA, 15 bp, Homo sapiens
gtgtgtcttgagcgt

SEQ ID NO: 469477 - DNA, 15 bp, Homo sapiens
agtgtgtcttgagcg

SEQ ID NO: 469478 - DNA, 15 bp, Homo sapiens
gagtgtgtcttgagc

SEQ ID NO: 469479 - DNA, 15 bp, Homo sapiens
tgagtgtgtcttgag

SEQ ID NO: 469480 - DNA, 15 bp, Homo sapiens
ctgagtgtgtcttga

SEQ ID NO: 469481 - DNA, 15 bp, Homo sapiens
tctgagtgtgtcttg

SEQ ID NO: 469482 - DNA, 15 bp, Homo sapiens
ctctgagtgtgtctt

SEQ ID NO: 469483 - DNA, 15 bp, Homo sapiens
cctctgagtgtgtct

SEQ ID NO: 469484 - DNA, 15 bp, Homo sapiens
ccctctgagtgtgtc

SEQ ID NO: 469485 - DNA, 15 bp, Homo sapiens
tccctctgagtgtgt

SEQ ID NO: 469486 - DNA, 15 bp, Homo sapiens
gtccctctgagtgtg

SEQ ID NO: 469487 - DNA, 15 bp, Homo sapiens
tgtccctctgagtgt

SEQ ID NO: 469488 - DNA, 15 bp, Homo sapiens
gtgtccctctgagtg

SEQ ID NO: 469489 - DNA, 15 bp, Homo sapiens
tgtgtccctctgagt

SEQ ID NO: 469490 - DNA, 15 bp, Homo sapiens
atgtgtccctctgag

SEQ ID NO: 469491 - DNA, 15 bp, Homo sapiens
tatgtgtccctctga

SEQ ID NO: 469492 - DNA, 15 bp, Homo sapiens
ttatgtgtccctctg

SEQ ID NO: 469493 - DNA, 15 bp, Homo sapiens
gttatgtgtccctct

SEQ ID NO: 469494 - DNA, 15 bp, Homo sapiens
ggttatgtgtccctc

SEQ ID NO: 469495 - DNA, 15 bp, Homo sapiens
cggttatgtgtccct

SEQ ID NO: 469496 - DNA, 15 bp, Homo sapiens
ccggttatgtgtccc

SEQ ID NO: 469497 - DNA, 15 bp, Homo sapiens
accggttatgtgtcc

SEQ ID NO: 469498 - DNA, 15 bp, Homo sapiens
taccggttatgtgtc

SEQ ID NO: 469499 - DNA, 15 bp, Homo sapiens
ttaccggttatgtgt

SEQ ID NO: 469500 - DNA, 15 bp, Homo sapiens
gttaccggttatgtg

SEQ ID NO: 469501 - DNA, 15 bp, Homo sapiens
ggttaccggttatgt

SEQ ID NO: 469502 - DNA, 15 bp, Homo sapiens
tggttaccggttatg

SEQ ID NO: 469503 - DNA, 15 bp, Homo sapiens
ttggttaccggttat

SEQ ID NO: 469504 - DNA, 15 bp, Homo sapiens
gttggttaccggtta

SEQ ID NO: 469505 - DNA, 15 bp, Homo sapiens
ggttggttaccggtt

SEQ ID NO: 469506 - DNA, 15 bp, Homo sapiens
tggttggttaccggt

SEQ ID NO: 469507 - DNA, 15 bp, Homo sapiens
ttggttggttaccgg

SEQ ID NO: 469508 - DNA, 15 bp, Homo sapiens
cttggttggttaccg

SEQ ID NO: 469509 - DNA, 15 bp, Homo sapiens
gcttggttggttacc

SEQ ID NO: 469510 - DNA, 15 bp, Homo sapiens
ggcttggttggttac

SEQ ID NO: 469511 - DNA, 15 bp, Homo sapiens
tggcttggttggtta

SEQ ID NO: 469512 - DNA, 15 bp, Homo sapiens
gtggcttggttggtt

SEQ ID NO: 469513 - DNA, 15 bp, Homo sapiens
tgtggcttggttggt

SEQ ID NO: 469514 - DNA, 15 bp, Homo sapiens
ctgtggcttggttgg

SEQ ID NO: 469515 - DNA, 15 bp, Homo sapiens
gctgtggcttggttg

SEQ ID NO: 469516 - DNA, 15 bp, Homo sapiens
tgctgtggcttggtt

SEQ ID NO: 469517 - DNA, 15 bp, Homo sapiens
ctgctgtggcttggt

SEQ ID NO: 469518 - DNA, 15 bp, Homo sapiens
cctgctgtggcttgg

SEQ ID NO: 469519 - DNA, 15 bp, Homo sapiens
ccctgctgtggcttg

SEQ ID NO: 469520 - DNA, 15 bp, Homo sapiens
cccctgctgtggctt

SEQ ID NO: 469521 - DNA, 15 bp, Homo sapiens
ccccctgctgtggct

SEQ ID NO: 469522 - DNA, 15 bp, Homo sapiens
gccccctgctgtggc

SEQ ID NO: 469523 - DNA, 15 bp, Homo sapiens
agccccctgctgtgg

SEQ ID NO: 469524 - DNA, 15 bp, Homo sapiens
aagccccctgctgtg

SEQ ID NO: 469525 - DNA, 15 bp, Homo sapiens
caagccccctgctgt

SEQ ID NO: 469526 - DNA, 15 bp, Homo sapiens
gcaagccccctgctg

SEQ ID NO: 469527 - DNA, 15 bp, Homo sapiens
tgcaagccccctgct

SEQ ID NO: 469528 - DNA, 15 bp, Homo sapiens
ctgcaagccccctgc

SEQ ID NO: 469529 - DNA, 15 bp, Homo sapiens
tctgcaagccccctg

SEQ ID NO: 469530 - DNA, 15 bp, Homo sapiens
ctctgcaagccccct

SEQ ID NO: 469531 - DNA, 15 bp, Homo sapiens
cctctgcaagccccc

SEQ ID NO: 469532 - DNA, 15 bp, Homo sapiens
tcctctgcaagcccc

SEQ ID NO: 469533 - DNA, 15 bp, Homo sapiens
gtcctctgcaagccc

SEQ ID NO: 469534 - DNA, 15 bp, Homo sapiens
tgtcctctgcaagcc

SEQ ID NO: 469535 - DNA, 15 bp, Homo sapiens
gtgtcctctgcaagc

SEQ ID NO: 469536 - DNA, 15 bp, Homo sapiens
tgtgtcctctgcaag

SEQ ID NO: 469537 - DNA, 15 bp, Homo sapiens
gtgtgtcctctgcaa

SEQ ID NO: 469538 - DNA, 15 bp, Homo sapiens
cgtgtgtcctctgca

SEQ ID NO: 469539 - DNA, 15 bp, Homo sapiens
tcgtgtgtcctctgc

SEQ ID NO: 469540 - DNA, 15 bp, Homo sapiens
ctcgtgtgtcctctg

SEQ ID NO: 469541 - DNA, 15 bp, Homo sapiens
gctcgtgtgtcctct

SEQ ID NO: 469542 - DNA, 15 bp, Homo sapiens
tgctcgtgtgtcctc

SEQ ID NO: 469543 - DNA, 15 bp, Homo sapiens
atgctcgtgtgtcct

SEQ ID NO: 469544 - DNA, 15 bp, Homo sapiens
gatgctcgtgtgtcc

SEQ ID NO: 469545 - DNA, 15 bp, Homo sapiens
tgatgctcgtgtgtc

SEQ ID NO: 469546 - DNA, 15 bp, Homo sapiens
atgatgctcgtgtgt

SEQ ID NO: 469547 - DNA, 15 bp, Homo sapiens
gatgatgctcgtgtg

SEQ ID NO: 469548 - DNA, 15 bp, Homo sapiens
ggatgatgctcgtgt

SEQ ID NO: 469549 - DNA, 15 bp, Homo sapiens
tggatgatgctcgtg

SEQ ID NO: 469550 - DNA, 15 bp, Homo sapiens
gtggatgatgctcgt

SEQ ID NO: 469551 - DNA, 15 bp, Homo sapiens
agtggatgatgctcg

SEQ ID NO: 469552 - DNA, 15 bp, Homo sapiens
gagtggatgatgctc

SEQ ID NO: 469553 - DNA, 15 bp, Homo sapiens
ggagtggatgatgct

SEQ ID NO: 469554 - DNA, 15 bp, Homo sapiens
aggagtggatgatgc

SEQ ID NO: 469555 - DNA, 15 bp, Homo sapiens
gaggagtggatgatg

SEQ ID NO: 469556 - DNA, 15 bp, Homo sapiens
tgaggagtggatgat

SEQ ID NO: 469557 - DNA, 15 bp, Homo sapiens
ctgaggagtggatga

SEQ ID NO: 469558 - DNA, 15 bp, Homo sapiens
actgaggagtggatg

SEQ ID NO: 469559 - DNA, 15 bp, Homo sapiens
gactgaggagtggat

SEQ ID NO: 469560 - DNA, 15 bp, Homo sapiens
tgactgaggagtgga

SEQ ID NO: 469561 - DNA, 15 bp, Homo sapiens
gtgactgaggagtgg

SEQ ID NO: 469562 - DNA, 15 bp, Homo sapiens
tgtgactgaggagtg

SEQ ID NO: 469563 - DNA, 15 bp, Homo sapiens
ctgtgactgaggagt

SEQ ID NO: 469564 - DNA, 15 bp, Homo sapiens
gctgtgactgaggag

SEQ ID NO: 469565 - DNA, 15 bp, Homo sapiens
tgctgtgactgagga

SEQ ID NO: 469566 - DNA, 15 bp, Homo sapiens
ctgctgtgactgagg

SEQ ID NO: 469567 - DNA, 15 bp, Homo sapiens
gctgctgtgactgag

SEQ ID NO: 469568 - DNA, 15 bp, Homo sapiens
tgctgctgtgactga

SEQ ID NO: 469569 - DNA, 15 bp, Homo sapiens
atgctgctgtgactg

SEQ ID NO: 469570 - DNA, 15 bp, Homo sapiens
gatgctgctgtgact

SEQ ID NO: 469571 - DNA, 15 bp, Homo sapiens
cgatgctgctgtgac

SEQ ID NO: 469572 - DNA, 15 bp, Homo sapiens
acgatgctgctgtga

SEQ ID NO: 469573 - DNA, 15 bp, Homo sapiens
cacgatgctgctgtg

SEQ ID NO: 469574 - DNA, 15 bp, Homo sapiens
gcacgatgctgctgt

SEQ ID NO: 469575 - DNA, 15 bp, Homo sapiens
tgcacgatgctgctg

SEQ ID NO: 469576 - DNA, 15 bp, Homo sapiens
gtgcacgatgctgct

SEQ ID NO: 469577 - DNA, 15 bp, Homo sapiens
agtgcacgatgctgc

SEQ ID NO: 469578 - DNA, 15 bp, Homo sapiens
aagtgcacgatgctg

SEQ ID NO: 469579 - DNA, 15 bp, Homo sapiens
caagtgcacgatgct

SEQ ID NO: 469580 - DNA, 15 bp, Homo sapiens
ccaagtgcacgatgc

SEQ ID NO: 469581 - DNA, 15 bp, Homo sapiens
cccaagtgcacgatg

SEQ ID NO: 469582 - DNA, 15 bp, Homo sapiens
tcccaagtgcacgat

SEQ ID NO: 469583 - DNA, 15 bp, Homo sapiens
ttcccaagtgcacga

SEQ ID NO: 469584 - DNA, 15 bp, Homo sapiens
gttcccaagtgcacg

SEQ ID NO: 469585 - DNA, 15 bp, Homo sapiens
tgttcccaagtgcac

SEQ ID NO: 469586 - DNA, 15 bp, Homo sapiens
ctgttcccaagtgca

SEQ ID NO: 469587 - DNA, 15 bp, Homo sapiens
gctgttcccaagtgc

SEQ ID NO: 469588 - DNA, 15 bp, Homo sapiens
tgctgttcccaagtg

SEQ ID NO: 469589 - DNA, 15 bp, Homo sapiens
ttgctgttcccaagt

SEQ ID NO: 469590 - DNA, 15 bp, Homo sapiens
cttgctgttcccaag

SEQ ID NO: 469591 - DNA, 15 bp, Homo sapiens
ccttgctgttcccaa

SEQ ID NO: 469592 - DNA, 15 bp, Homo sapiens
cccttgctgttccca

SEQ ID NO: 469593 - DNA, 15 bp, Homo sapiens
ccccttgctgttccc

SEQ ID NO: 469594 - DNA, 15 bp, Homo sapiens
gccccttgctgttcc

SEQ ID NO: 469595 - DNA, 15 bp, Homo sapiens
ggccccttgctgttc

SEQ ID NO: 469596 - DNA, 15 bp, Homo sapiens
tggccccttgctgtt

SEQ ID NO: 469597 - DNA, 15 bp, Homo sapiens
ctggccccttgctgt

SEQ ID NO: 469598 - DNA, 15 bp, Homo sapiens
cctggccccttgctg

SEQ ID NO: 469599 - DNA, 15 bp, Homo sapiens
ccctggccccttgct

SEQ ID NO: 469600 - DNA, 15 bp, Homo sapiens
cccctggccccttgc

SEQ ID NO: 469601 - DNA, 15 bp, Homo sapiens
gcccctggccccttg

SEQ ID NO: 469602 - DNA, 15 bp, Homo sapiens
cgcccctggcccctt

SEQ ID NO: 469603 - DNA, 15 bp, Homo sapiens
acgcccctggcccct

SEQ ID NO: 469604 - DNA, 15 bp, Homo sapiens
cacgcccctggcccc

SEQ ID NO: 469605 - DNA, 15 bp, Homo sapiens
gcacgcccctggccc

SEQ ID NO: 469606 - DNA, 15 bp, Homo sapiens
ggcacgcccctggcc

SEQ ID NO: 469607 - DNA, 15 bp, Homo sapiens
gggcacgcccctggc

SEQ ID NO: 469608 - DNA, 15 bp, Homo sapiens
agggcacgcccctgg

SEQ ID NO: 469609 - DNA, 15 bp, Homo sapiens
cagggcacgcccctg

SEQ ID NO: 469610 - DNA, 15 bp, Homo sapiens
ccagggcacgcccct

SEQ ID NO: 469611 - DNA, 15 bp, Homo sapiens
cccagggcacgcccc

SEQ ID NO: 469612 - DNA, 15 bp, Homo sapiens
gcccagggcacgccc

SEQ ID NO: 469613 - DNA, 15 bp, Homo sapiens
agcccagggcacgcc

SEQ ID NO: 469614 - DNA, 15 bp, Homo sapiens
cagcccagggcacgc

SEQ ID NO: 469615 - DNA, 15 bp, Homo sapiens
ccagcccagggcacg

SEQ ID NO: 469616 - DNA, 15 bp, Homo sapiens
cccagcccagggcac

SEQ ID NO: 469617 - DNA, 15 bp, Homo sapiens
ccccagcccagggca

SEQ ID NO: 469618 - DNA, 15 bp, Homo sapiens
gccccagcccagggc

SEQ ID NO: 469619 - DNA, 15 bp, Homo sapiens
tgccccagcccaggg

SEQ ID NO: 469620 - DNA, 15 bp, Homo sapiens
ctgccccagcccagg

SEQ ID NO: 469621 - DNA, 15 bp, Homo sapiens
gctgccccagcccag

SEQ ID NO: 469622 - DNA, 15 bp, Homo sapiens
agctgccccagccca

SEQ ID NO: 469623 - DNA, 15 bp, Homo sapiens
cagctgccccagccc

SEQ ID NO: 469624 - DNA, 15 bp, Homo sapiens
gcagctgccccagcc

SEQ ID NO: 469625 - DNA, 15 bp, Homo sapiens
cgcagctgccccagc

SEQ ID NO: 469626 - DNA, 15 bp, Homo sapiens
acgcagctgccccag

SEQ ID NO: 469627 - DNA, 15 bp, Homo sapiens
tacgcagctgcccca

SEQ ID NO: 469628 - DNA, 15 bp, Homo sapiens
ctacgcagctgcccc

SEQ ID NO: 469629 - DNA, 15 bp, Homo sapiens
gctacgcagctgccc

SEQ ID NO: 469630 - DNA, 15 bp, Homo sapiens
ggctacgcagctgcc

SEQ ID NO: 469631 - DNA, 15 bp, Homo sapiens
gggctacgcagctgc

SEQ ID NO: 469632 - DNA, 15 bp, Homo sapiens
ggggctacgcagctg

SEQ ID NO: 469633 - DNA, 15 bp, Homo sapiens
aggggctacgcagct

SEQ ID NO: 469634 - DNA, 15 bp, Homo sapiens
gaggggctacgcagc

SEQ ID NO: 469635 - DNA, 15 bp, Homo sapiens
agaggggctacgcag

SEQ ID NO: 469636 - DNA, 15 bp, Homo sapiens
gagaggggctacgca

SEQ ID NO: 469637 - DNA, 15 bp, Homo sapiens
ggagaggggctacgc

SEQ ID NO: 469638 - DNA, 15 bp, Homo sapiens
tggagaggggctacg

SEQ ID NO: 469639 - DNA, 15 bp, Homo sapiens
atggagaggggctac

SEQ ID NO: 469640 - DNA, 15 bp, Homo sapiens
gatggagaggggcta

SEQ ID NO: 469641 - DNA, 15 bp, Homo sapiens
tgatggagaggggct

SEQ ID NO: 469642 - DNA, 15 bp, Homo sapiens
ctgatggagaggggc

SEQ ID NO: 469643 - DNA, 15 bp, Homo sapiens
gctgatggagagggg

SEQ ID NO: 469644 - DNA, 15 bp, Homo sapiens
agctgatggagaggg

SEQ ID NO: 469645 - DNA, 15 bp, Homo sapiens
tagctgatggagagg

SEQ ID NO: 469646 - DNA, 15 bp, Homo sapiens
ctagctgatggagag

SEQ ID NO: 469647 - DNA, 15 bp, Homo sapiens
tctagctgatggaga

SEQ ID NO: 469648 - DNA, 15 bp, Homo sapiens
ctctagctgatggag

SEQ ID NO: 469649 - DNA, 15 bp, Homo sapiens
tctctagctgatgga

SEQ ID NO: 469650 - DNA, 15 bp, Homo sapiens
gtctctagctgatgg

SEQ ID NO: 469651 - DNA, 15 bp, Homo sapiens
tgtctctagctgatg

SEQ ID NO: 469652 - DNA, 15 bp, Homo sapiens
ctgtctctagctgat

SEQ ID NO: 469653 - DNA, 15 bp, Homo sapiens
cctgtctctagctga

SEQ ID NO: 469654 - DNA, 15 bp, Homo sapiens
gcctgtctctagctg

SEQ ID NO: 469655 - DNA, 15 bp, Homo sapiens
ggcctgtctctagct

SEQ ID NO: 469656 - DNA, 15 bp, Homo sapiens
cggcctgtctctagc

SEQ ID NO: 469657 - DNA, 15 bp, Homo sapiens
ccggcctgtctctag

SEQ ID NO: 469658 - DNA, 15 bp, Homo sapiens
cccggcctgtctcta

SEQ ID NO: 469659 - DNA, 15 bp, Homo sapiens
ccccggcctgtctct

SEQ ID NO: 469660 - DNA, 15 bp, Homo sapiens
gccccggcctgtctc

SEQ ID NO: 469661 - DNA, 15 bp, Homo sapiens
cgccccggcctgtct

SEQ ID NO: 469662 - DNA, 15 bp, Homo sapiens
ccgccccggcctgtc

SEQ ID NO: 469663 - DNA, 15 bp, Homo sapiens
cccgccccggcctgt

SEQ ID NO: 469664 - DNA, 15 bp, Homo sapiens
ccccgccccggcctg

SEQ ID NO: 469665 - DNA, 15 bp, Homo sapiens
accccgccccggcct

SEQ ID NO: 469666 - DNA, 15 bp, Homo sapiens
aaccccgccccggcc

SEQ ID NO: 469667 - DNA, 15 bp, Homo sapiens
gaaccccgccccggc

SEQ ID NO: 469668 - DNA, 15 bp, Homo sapiens
agaaccccgccccgg

SEQ ID NO: 469669 - DNA, 15 bp, Homo sapiens
cagaaccccgccccg

SEQ ID NO: 469670 - DNA, 15 bp, Homo sapiens
tcagaaccccgcccc

SEQ ID NO: 469671 - DNA, 15 bp, Homo sapiens
ctcagaaccccgccc

SEQ ID NO: 469672 - DNA, 15 bp, Homo sapiens
tctcagaaccccgcc

SEQ ID NO: 469673 - DNA, 15 bp, Homo sapiens
atctcagaaccccgc

SEQ ID NO: 469674 - DNA, 15 bp, Homo sapiens
gatctcagaaccccg

SEQ ID NO: 469675 - DNA, 15 bp, Homo sapiens
agatctcagaacccc

SEQ ID NO: 469676 - DNA, 15 bp, Homo sapiens
aagatctcagaaccc

SEQ ID NO: 469677 - DNA, 15 bp, Homo sapiens
gaagatctcagaacc

SEQ ID NO: 469678 - DNA, 15 bp, Homo sapiens
ggaagatctcagaac

SEQ ID NO: 469679 - DNA, 15 bp, Homo sapiens
aggaagatctcagaa

SEQ ID NO: 469680 - DNA, 15 bp, Homo sapiens
gaggaagatctcaga

SEQ ID NO: 469681 - DNA, 15 bp, Homo sapiens
tgaggaagatctcag

SEQ ID NO: 469682 - DNA, 15 bp, Homo sapiens
gtgaggaagatctca

SEQ ID NO: 469683 - DNA, 15 bp, Homo sapiens
agtgaggaagatctc

SEQ ID NO: 469684 - DNA, 15 bp, Homo sapiens
cagtgaggaagatct

SEQ ID NO: 469685 - DNA, 15 bp, Homo sapiens
gcagtgaggaagatc

SEQ ID NO: 469686 - DNA, 15 bp, Homo sapiens
agcagtgaggaagat

SEQ ID NO: 469687 - DNA, 15 bp, Homo sapiens
tagcagtgaggaaga

SEQ ID NO: 469688 - DNA, 15 bp, Homo sapiens
atagcagtgaggaag

SEQ ID NO: 469689 - DNA, 15 bp, Homo sapiens
catagcagtgaggaa

SEQ ID NO: 469690 - DNA, 15 bp, Homo sapiens
tcatagcagtgagga

SEQ ID NO: 469691 - DNA, 15 bp, Homo sapiens
ttcatagcagtgagg

SEQ ID NO: 469692 - DNA, 15 bp, Homo sapiens
gttcatagcagtgag

SEQ ID NO: 469693 - DNA, 15 bp, Homo sapiens
agttcatagcagtga

SEQ ID NO: 469694 - DNA, 15 bp, Homo sapiens
cagttcatagcagtg

SEQ ID NO: 469695 - DNA, 15 bp, Homo sapiens
gcagttcatagcagt

SEQ ID NO: 469696 - DNA, 15 bp, Homo sapiens
tgcagttcatagcag

SEQ ID NO: 469697 - DNA, 15 bp, Homo sapiens
ctgcagttcatagca

SEQ ID NO: 469698 - DNA, 15 bp, Homo sapiens
gctgcagttcatagc

SEQ ID NO: 469699 - DNA, 15 bp, Homo sapiens
ggctgcagttcatag

SEQ ID NO: 469700 - DNA, 15 bp, Homo sapiens
tggctgcagttcata

SEQ ID NO: 469701 - DNA, 15 bp, Homo sapiens
gtggctgcagttcat

SEQ ID NO: 469702 - DNA, 15 bp, Homo sapiens
cgtggctgcagttca

SEQ ID NO: 469703 - DNA, 15 bp, Homo sapiens
acgtggctgcagttc

SEQ ID NO: 469704 - DNA, 15 bp, Homo sapiens
tacgtggctgcagtt

SEQ ID NO: 469705 - DNA, 15 bp, Homo sapiens
gtacgtggctgcagt

SEQ ID NO: 469706 - DNA, 15 bp, Homo sapiens
cgtacgtggctgcag

SEQ ID NO: 469707 - DNA, 15 bp, Homo sapiens
tcgtacgtggctgca

SEQ ID NO: 469708 - DNA, 15 bp, Homo sapiens
ctcgtacgtggctgc

SEQ ID NO: 469709 - DNA, 15 bp, Homo sapiens
tctcgtacgtggctg

SEQ ID NO: 469710 - DNA, 15 bp, Homo sapiens
ttctcgtacgtggct

SEQ ID NO: 469711 - DNA, 15 bp, Homo sapiens
cttctcgtacgtggc

SEQ ID NO: 469712 - DNA, 15 bp, Homo sapiens
tcttctcgtacgtgg

SEQ ID NO: 469713 - DNA, 15 bp, Homo sapiens
ctcttctcgtacgtg

SEQ ID NO: 469714 - DNA, 15 bp, Homo sapiens
tctcttctcgtacgt

SEQ ID NO: 469715 - DNA, 15 bp, Homo sapiens
gtctcttctcgtacg

SEQ ID NO: 469716 - DNA, 15 bp, Homo sapiens
tgtctcttctcgtac

SEQ ID NO: 469717 - DNA, 15 bp, Homo sapiens
atgtctcttctcgta

SEQ ID NO: 469718 - DNA, 15 bp, Homo sapiens
tatgtctcttctcgt

SEQ ID NO: 469719 - DNA, 15 bp, Homo sapiens
ttatgtctcttctcg

SEQ ID NO: 469720 - DNA, 15 bp, Homo sapiens
attatgtctcttctc

SEQ ID NO: 469721 - DNA, 15 bp, Homo sapiens
tattatgtctcttct

SEQ ID NO: 469722 - DNA, 15 bp, Homo sapiens
gtattatgtctcttc

SEQ ID NO: 469723 - DNA, 15 bp, Homo sapiens
cgtattatgtctctt

SEQ ID NO: 469724 - DNA, 15 bp, Homo sapiens
ccgtattatgtctct

SEQ ID NO: 469725 - DNA, 15 bp, Homo sapiens
tccgtattatgtctc

SEQ ID NO: 469726 - DNA, 15 bp, Homo sapiens
ctccgtattatgtct

SEQ ID NO: 469727 - DNA, 15 bp, Homo sapiens
actccgtattatgtc

SEQ ID NO: 469728 - DNA, 15 bp, Homo sapiens
tactccgtattatgt

SEQ ID NO: 469729 - DNA, 15 bp, Homo sapiens
ctactccgtattatg

SEQ ID NO: 469730 - DNA, 15 bp, Homo sapiens
gctactccgtattat

SEQ ID NO: 469731 - DNA, 15 bp, Homo sapiens
tgctactccgtatta

SEQ ID NO: 469732 - DNA, 15 bp, Homo sapiens
ctgctactccgtatt

SEQ ID NO: 469733 - DNA, 15 bp, Homo sapiens
tctgctactccgtat

SEQ ID NO: 469734 - DNA, 15 bp, Homo sapiens
atctgctactccgta

SEQ ID NO: 469735 - DNA, 15 bp, Homo sapiens
aatctgctactccgt

SEQ ID NO: 469736 - DNA, 15 bp, Homo sapiens
aaatctgctactccg

SEQ ID NO: 469737 - DNA, 15 bp, Homo sapiens
gaaatctgctactcc

SEQ ID NO: 469738 - DNA, 15 bp, Homo sapiens
cgaaatctgctactc

SEQ ID NO: 469739 - DNA, 15 bp, Homo sapiens
acgaaatctgctact

SEQ ID NO: 469740 - DNA, 15 bp, Homo sapiens
cacgaaatctgctac

SEQ ID NO: 469741 - DNA, 15 bp, Homo sapiens
ccacgaaatctgcta

SEQ ID NO: 469742 - DNA, 15 bp, Homo sapiens
cccacgaaatctgct

SEQ ID NO: 469743 - DNA, 15 bp, Homo sapiens
gcccacgaaatctgc

SEQ ID NO: 469744 - DNA, 15 bp, Homo sapiens
ggcccacgaaatctg

SEQ ID NO: 469745 - DNA, 15 bp, Homo sapiens
aggcccacgaaatct

SEQ ID NO: 469746 - DNA, 15 bp, Homo sapiens
taggcccacgaaatc

SEQ ID NO: 469747 - DNA, 15 bp, Homo sapiens
ctaggcccacgaaat

SEQ ID NO: 469748 - DNA, 15 bp, Homo sapiens
tctaggcccacgaaa

SEQ ID NO: 469749 - DNA, 15 bp, Homo sapiens
ctctaggcccacgaa

SEQ ID NO: 469750 - DNA, 15 bp, Homo sapiens
cctctaggcccacga

SEQ ID NO: 469751 - DNA, 15 bp, Homo sapiens
tcctctaggcccacg

SEQ ID NO: 469752 - DNA, 15 bp, Homo sapiens
ctcctctaggcccac

SEQ ID NO: 469753 - DNA, 15 bp, Homo sapiens
tctcctctaggccca

SEQ ID NO: 469754 - DNA, 15 bp, Homo sapiens
ctctcctctaggccc

SEQ ID NO: 469755 - DNA, 15 bp, Homo sapiens
tctctcctctaggcc

SEQ ID NO: 469756 - DNA, 15 bp, Homo sapiens
ttctctcctctaggc

SEQ ID NO: 469757 - DNA, 15 bp, Homo sapiens
tttctctcctctagg

SEQ ID NO: 469758 - DNA, 15 bp, Homo sapiens
ttttctctcctctag

SEQ ID NO: 469759 - DNA, 15 bp, Homo sapiens
gttttctctcctcta

SEQ ID NO: 469760 - DNA, 15 bp, Homo sapiens
ggttttctctcctct

SEQ ID NO: 469761 - DNA, 15 bp, Homo sapiens
tggttttctctcctc

SEQ ID NO: 469762 - DNA, 15 bp, Homo sapiens
ctggttttctctcct

SEQ ID NO: 469763 - DNA, 15 bp, Homo sapiens
cctggttttctctcc

SEQ ID NO: 469764 - DNA, 15 bp, Homo sapiens
gcctggttttctctc

SEQ ID NO: 469765 - DNA, 15 bp, Homo sapiens
cgcctggttttctct

SEQ ID NO: 469766 - DNA, 15 bp, Homo sapiens
ccgcctggttttctc

SEQ ID NO: 469767 - DNA, 15 bp, Homo sapiens
tccgcctggttttct

SEQ ID NO: 469768 - DNA, 15 bp, Homo sapiens
atccgcctggttttc

SEQ ID NO: 469769 - DNA, 15 bp, Homo sapiens
gatccgcctggtttt

SEQ ID NO: 469770 - DNA, 15 bp, Homo sapiens
tgatccgcctggttt

SEQ ID NO: 469771 - DNA, 15 bp, Homo sapiens
gtgatccgcctggtt

SEQ ID NO: 469772 - DNA, 15 bp, Homo sapiens
cgtgatccgcctggt

SEQ ID NO: 469773 - DNA, 15 bp, Homo sapiens
tcgtgatccgcctgg

SEQ ID NO: 469774 - DNA, 15 bp, Homo sapiens
atcgtgatccgcctg

SEQ ID NO: 469775 - DNA, 15 bp, Homo sapiens
tatcgtgatccgcct

SEQ ID NO: 469776 - DNA, 15 bp, Homo sapiens
gtatcgtgatccgcc

SEQ ID NO: 469777 - DNA, 15 bp, Homo sapiens
agtatcgtgatccgc

SEQ ID NO: 469778 - DNA, 15 bp, Homo sapiens
cagtatcgtgatccg

SEQ ID NO: 469779 - DNA, 15 bp, Homo sapiens
tcagtatcgtgatcc

SEQ ID NO: 469780 - DNA, 15 bp, Homo sapiens
ctcagtatcgtgatc

SEQ ID NO: 469781 - DNA, 15 bp, Homo sapiens
tctcagtatcgtgat

SEQ ID NO: 469782 - DNA, 15 bp, Homo sapiens
gtctcagtatcgtga

SEQ ID NO: 469783 - DNA, 15 bp, Homo sapiens
agtctcagtatcgtg

SEQ ID NO: 469784 - DNA, 15 bp, Homo sapiens
gagtctcagtatcgt

SEQ ID NO: 469785 - DNA, 15 bp, Homo sapiens
ggagtctcagtatcg

SEQ ID NO: 469786 - DNA, 15 bp, Homo sapiens
aggagtctcagtatc

SEQ ID NO: 469787 - DNA, 15 bp, Homo sapiens
gaggagtctcagtat

SEQ ID NO: 469788 - DNA, 15 bp, Homo sapiens
ggaggagtctcagta

SEQ ID NO: 469789 - DNA, 15 bp, Homo sapiens
tggaggagtctcagt

SEQ ID NO: 469790 - DNA, 15 bp, Homo sapiens
atggaggagtctcag

SEQ ID NO: 469791 - DNA, 15 bp, Homo sapiens
gatggaggagtctca

SEQ ID NO: 469792 - DNA, 15 bp, Homo sapiens
agatggaggagtctc

SEQ ID NO: 469793 - DNA, 15 bp, Homo sapiens
gagatggaggagtct

SEQ ID NO: 469794 - DNA, 15 bp, Homo sapiens
ggagatggaggagtc

SEQ ID NO: 469795 - DNA, 15 bp, Homo sapiens
tggagatggaggagt

SEQ ID NO: 469796 - DNA, 15 bp, Homo sapiens
atggagatggaggag

SEQ ID NO: 469797 - DNA, 15 bp, Homo sapiens
tatggagatggagga

SEQ ID NO: 469798 - DNA, 15 bp, Homo sapiens
atatggagatggagg

SEQ ID NO: 469799 - DNA, 15 bp, Homo sapiens
catatggagatggag

SEQ ID NO: 469800 - DNA, 15 bp, Homo sapiens
acatatggagatgga

SEQ ID NO: 469801 - DNA, 15 bp, Homo sapiens
cacatatggagatgg

SEQ ID NO: 469802 - DNA, 15 bp, Homo sapiens
tcacatatggagatg

SEQ ID NO: 469803 - DNA, 15 bp, Homo sapiens
ttcacatatggagat

SEQ ID NO: 469804 - DNA, 15 bp, Homo sapiens
cttcacatatggaga

SEQ ID NO: 469805 - DNA, 15 bp, Homo sapiens
ccttcacatatggag

SEQ ID NO: 469806 - DNA, 15 bp, Homo sapiens
tccttcacatatgga

SEQ ID NO: 469807 - DNA, 15 bp, Homo sapiens
atccttcacatatgg

SEQ ID NO: 469808 - DNA, 15 bp, Homo sapiens
gatccttcacatatg

SEQ ID NO: 469809 - DNA, 15 bp, Homo sapiens
agatccttcacatat

SEQ ID NO: 469810 - DNA, 15 bp, Homo sapiens
cagatccttcacata

SEQ ID NO: 469811 - DNA, 15 bp, Homo sapiens
gcagatccttcacat

SEQ ID NO: 469812 - DNA, 15 bp, Homo sapiens
ggcagatccttcaca

SEQ ID NO: 469813 - DNA, 15 bp, Homo sapiens
tggcagatccttcac

SEQ ID NO: 469814 - DNA, 15 bp, Homo sapiens
ttggcagatccttca

SEQ ID NO: 469815 - DNA, 15 bp, Homo sapiens
attggcagatccttc

SEQ ID NO: 469816 - DNA, 15 bp, Homo sapiens
cattggcagatcctt

SEQ ID NO: 469817 - DNA, 15 bp, Homo sapiens
ccattggcagatcct

SEQ ID NO: 469818 - DNA, 15 bp, Homo sapiens
cccattggcagatcc

SEQ ID NO: 469819 - DNA, 15 bp, Homo sapiens
gcccattggcagatc

SEQ ID NO: 469820 - DNA, 15 bp, Homo sapiens
tgcccattggcagat

SEQ ID NO: 469821 - DNA, 15 bp, Homo sapiens
ttgcccattggcaga

SEQ ID NO: 469822 - DNA, 15 bp, Homo sapiens
gttgcccattggcag

SEQ ID NO: 469823 - DNA, 15 bp, Homo sapiens
agttgcccattggca

SEQ ID NO: 469824 - DNA, 15 bp, Homo sapiens
gagttgcccattggc

SEQ ID NO: 469825 - DNA, 15 bp, Homo sapiens
ggagttgcccattgg

SEQ ID NO: 469826 - DNA, 15 bp, Homo sapiens
aggagttgcccattg

SEQ ID NO: 469827 - DNA, 15 bp, Homo sapiens
caggagttgcccatt

SEQ ID NO: 469828 - DNA, 15 bp, Homo sapiens
gcaggagttgcccat

SEQ ID NO: 469829 - DNA, 15 bp, Homo sapiens
ggcaggagttgccca

SEQ ID NO: 469830 - DNA, 15 bp, Homo sapiens
gggcaggagttgccc

SEQ ID NO: 469831 - DNA, 15 bp, Homo sapiens
agggcaggagttgcc

SEQ ID NO: 469832 - DNA, 15 bp, Homo sapiens
tagggcaggagttgc

SEQ ID NO: 469833 - DNA, 15 bp, Homo sapiens
ttagggcaggagttg

SEQ ID NO: 469834 - DNA, 15 bp, Homo sapiens
gttagggcaggagtt

SEQ ID NO: 469835 - DNA, 15 bp, Homo sapiens
tgttagggcaggagt

SEQ ID NO: 469836 - DNA, 15 bp, Homo sapiens
gtgttagggcaggag

SEQ ID NO: 469837 - DNA, 15 bp, Homo sapiens
agtgttagggcagga

SEQ ID NO: 469838 - DNA, 15 bp, Homo sapiens
cagtgttagggcagg

SEQ ID NO: 469839 - DNA, 15 bp, Homo sapiens
ccagtgttagggcag

SEQ ID NO: 469840 - DNA, 15 bp, Homo sapiens
cccagtgttagggca

SEQ ID NO: 469841 - DNA, 15 bp, Homo sapiens
gcccagtgttagggc

SEQ ID NO: 469842 - DNA, 15 bp, Homo sapiens
tgcccagtgttaggg

SEQ ID NO: 469843 - DNA, 15 bp, Homo sapiens
atgcccagtgttagg

SEQ ID NO: 469844 - DNA, 15 bp, Homo sapiens
catgcccagtgttag

SEQ ID NO: 469845 - DNA, 15 bp, Homo sapiens
ccatgcccagtgtta

SEQ ID NO: 469846 - DNA, 15 bp, Homo sapiens
cccatgcccagtgtt

SEQ ID NO: 469847 - DNA, 15 bp, Homo sapiens
gcccatgcccagtgt

SEQ ID NO: 469848 - DNA, 15 bp, Homo sapiens
ggcccatgcccagtg

SEQ ID NO: 469849 - DNA, 15 bp, Homo sapiens
aggcccatgcccagt

SEQ ID NO: 469850 - DNA, 15 bp, Homo sapiens
gaggcccatgcccag

SEQ ID NO: 469851 - DNA, 15 bp, Homo sapiens
agaggcccatgccca

SEQ ID NO: 469852 - DNA, 15 bp, Homo sapiens
cagaggcccatgccc

SEQ ID NO: 469853 - DNA, 15 bp, Homo sapiens
ccagaggcccatgcc

SEQ ID NO: 469854 - DNA, 15 bp, Homo sapiens
cccagaggcccatgc

SEQ ID NO: 469855 - DNA, 15 bp, Homo sapiens
gcccagaggcccatg

SEQ ID NO: 469856 - DNA, 15 bp, Homo sapiens
agcccagaggcccat

SEQ ID NO: 469857 - DNA, 15 bp, Homo sapiens
tagcccagaggccca

SEQ ID NO: 469858 - DNA, 15 bp, Homo sapiens
ttagcccagaggccc

SEQ ID NO: 469859 - DNA, 15 bp, Homo sapiens
tttagcccagaggcc

SEQ ID NO: 469860 - DNA, 15 bp, Homo sapiens
gtttagcccagaggc

SEQ ID NO: 469861 - DNA, 15 bp, Homo sapiens
cgtttagcccagagg

SEQ ID NO: 469862 - DNA, 15 bp, Homo sapiens
acgtttagcccagag

SEQ ID NO: 469863 - DNA, 15 bp, Homo sapiens
cacgtttagcccaga

SEQ ID NO: 469864 - DNA, 15 bp, Homo sapiens
tcacgtttagcccag

SEQ ID NO: 469865 - DNA, 15 bp, Homo sapiens
ctcacgtttagccca

SEQ ID NO: 469866 - DNA, 15 bp, Homo sapiens
gctcacgtttagccc

SEQ ID NO: 469867 - DNA, 15 bp, Homo sapiens
agctcacgtttagcc

SEQ ID NO: 469868 - DNA, 15 bp, Homo sapiens
gagctcacgtttagc

SEQ ID NO: 469869 - DNA, 15 bp, Homo sapiens
ggagctcacgtttag

SEQ ID NO: 469870 - DNA, 15 bp, Homo sapiens
tggagctcacgttta

SEQ ID NO: 469871 - DNA, 15 bp, Homo sapiens
ttggagctcacgttt

SEQ ID NO: 469872 - DNA, 15 bp, Homo sapiens
cttggagctcacgtt

SEQ ID NO: 469873 - DNA, 15 bp, Homo sapiens
gcttggagctcacgt

SEQ ID NO: 469874 - DNA, 15 bp, Homo sapiens
tgcttggagctcacg

SEQ ID NO: 469875 - DNA, 15 bp, Homo sapiens
ttgcttggagctcac

SEQ ID NO: 469876 - DNA, 15 bp, Homo sapiens
cttgcttggagctca

SEQ ID NO: 469877 - DNA, 15 bp, Homo sapiens
ccttgcttggagctc

SEQ ID NO: 469878 - DNA, 15 bp, Homo sapiens
tccttgcttggagct

SEQ ID NO: 469879 - DNA, 15 bp, Homo sapiens
ttccttgcttggagc

SEQ ID NO: 469880 - DNA, 15 bp, Homo sapiens
cttccttgcttggag

SEQ ID NO: 469881 - DNA, 15 bp, Homo sapiens
gcttccttgcttgga

SEQ ID NO: 469882 - DNA, 15 bp, Homo sapiens
agcttccttgcttgg

SEQ ID NO: 469883 - DNA, 15 bp, Homo sapiens
cagcttccttgcttg

SEQ ID NO: 469884 - DNA, 15 bp, Homo sapiens
acagcttccttgctt

SEQ ID NO: 469885 - DNA, 15 bp, Homo sapiens
gacagcttccttgct

SEQ ID NO: 469886 - DNA, 15 bp, Homo sapiens
ggacagcttccttgc

SEQ ID NO: 469887 - DNA, 15 bp, Homo sapiens
gggacagcttccttg

SEQ ID NO: 469888 - DNA, 15 bp, Homo sapiens
ggggacagcttcctt

SEQ ID NO: 469889 - DNA, 15 bp, Homo sapiens
tggggacagcttcct

SEQ ID NO: 469890 - DNA, 15 bp, Homo sapiens
atggggacagcttcc

SEQ ID NO: 469891 - DNA, 15 bp, Homo sapiens
catggggacagcttc

SEQ ID NO: 469892 - DNA, 15 bp, Homo sapiens
ccatggggacagctt

SEQ ID NO: 469893 - DNA, 15 bp, Homo sapiens
cccatggggacagct

SEQ ID NO: 469894 - DNA, 15 bp, Homo sapiens
tcccatggggacagc

SEQ ID NO: 469895 - DNA, 15 bp, Homo sapiens
ctcccatggggacag

SEQ ID NO: 469896 - DNA, 15 bp, Homo sapiens
tctcccatggggaca

SEQ ID NO: 469897 - DNA, 15 bp, Homo sapiens
ctctcccatggggac

SEQ ID NO: 469898 - DNA, 15 bp, Homo sapiens
cctctcccatgggga

SEQ ID NO: 469899 - DNA, 15 bp, Homo sapiens
ccctctcccatgggg

SEQ ID NO: 469900 - DNA, 15 bp, Homo sapiens
cccctctcccatggg

SEQ ID NO: 469901 - DNA, 15 bp, Homo sapiens
tcccctctcccatgg

SEQ ID NO: 469902 - DNA, 15 bp, Homo sapiens
atcccctctcccatg

SEQ ID NO: 469903 - DNA, 15 bp, Homo sapiens
gatcccctctcccat

SEQ ID NO: 469904 - DNA, 15 bp, Homo sapiens
ggatcccctctccca

SEQ ID NO: 469905 - DNA, 15 bp, Homo sapiens
cggatcccctctccc

SEQ ID NO: 469906 - DNA, 15 bp, Homo sapiens
acggatcccctctcc

SEQ ID NO: 469907 - DNA, 15 bp, Homo sapiens
cacggatcccctctc

SEQ ID NO: 469908 - DNA, 15 bp, Homo sapiens
acacggatcccctct

SEQ ID NO: 469909 - DNA, 15 bp, Homo sapiens
cacacggatcccctc

SEQ ID NO: 469910 - DNA, 15 bp, Homo sapiens
acacacggatcccct

SEQ ID NO: 469911 - DNA, 15 bp, Homo sapiens
cacacacggatcccc

SEQ ID NO: 469912 - DNA, 15 bp, Homo sapiens
acacacacggatccc

SEQ ID NO: 469913 - DNA, 15 bp, Homo sapiens
cacacacacggatcc

SEQ ID NO: 469914 - DNA, 15 bp, Homo sapiens
acacacacacggatc

SEQ ID NO: 469915 - DNA, 15 bp, Homo sapiens
cacacacacacggat

SEQ ID NO: 469916 - DNA, 15 bp, Homo sapiens
acacacacacacgga

SEQ ID NO: 469917 - DNA, 15 bp, Homo sapiens
gacacacacacacgg

SEQ ID NO: 469918 - DNA, 15 bp, Homo sapiens
agacacacacacacg

SEQ ID NO: 469919 - DNA, 15 bp, Homo sapiens
cagacacacacacac

SEQ ID NO: 469920 - DNA, 15 bp, Homo sapiens
acagacacacacaca

SEQ ID NO: 469921 - DNA, 15 bp, Homo sapiens
gacagacacacacac

SEQ ID NO: 469922 - DNA, 15 bp, Homo sapiens
agacagacacacaca

SEQ ID NO: 469923 - DNA, 15 bp, Homo sapiens
gagacagacacacac

SEQ ID NO: 469924 - DNA, 15 bp, Homo sapiens
agagacagacacaca

SEQ ID NO: 469925 - DNA, 15 bp, Homo sapiens
gagagacagacacac

SEQ ID NO: 469926 - DNA, 15 bp, Homo sapiens
tgagagacagacaca

SEQ ID NO: 469927 - DNA, 15 bp, Homo sapiens
ctgagagacagacac

SEQ ID NO: 469928 - DNA, 15 bp, Homo sapiens
cctgagagacagaca

SEQ ID NO: 469929 - DNA, 15 bp, Homo sapiens
ccctgagagacagac

SEQ ID NO: 469930 - DNA, 15 bp, Homo sapiens
gccctgagagacaga

SEQ ID NO: 469931 - DNA, 15 bp, Homo sapiens
agccctgagagacag

SEQ ID NO: 469932 - DNA, 15 bp, Homo sapiens
gagccctgagagaca

SEQ ID NO: 469933 - DNA, 15 bp, Homo sapiens
tgagccctgagagac

SEQ ID NO: 469934 - DNA, 15 bp, Homo sapiens
ttgagccctgagaga

SEQ ID NO: 469935 - DNA, 15 bp, Homo sapiens
cttgagccctgagag

SEQ ID NO: 469936 - DNA, 15 bp, Homo sapiens
tcttgagccctgaga

SEQ ID NO: 469937 - DNA, 15 bp, Homo sapiens
gtcttgagccctgag

SEQ ID NO: 469938 - DNA, 15 bp, Homo sapiens
ggtcttgagccctga

SEQ ID NO: 469939 - DNA, 15 bp, Homo sapiens
aggtcttgagccctg

SEQ ID NO: 469940 - DNA, 15 bp, Homo sapiens
caggtcttgagccct

SEQ ID NO: 469941 - DNA, 15 bp, Homo sapiens
acaggtcttgagccc

SEQ ID NO: 469942 - DNA, 15 bp, Homo sapiens
aacaggtcttgagcc

SEQ ID NO: 469943 - DNA, 15 bp, Homo sapiens
aaacaggtcttgagc

SEQ ID NO: 469944 - DNA, 15 bp, Homo sapiens
gaaacaggtcttgag

SEQ ID NO: 469945 - DNA, 15 bp, Homo sapiens
tgaaacaggtcttga

SEQ ID NO: 469946 - DNA, 15 bp, Homo sapiens
ctgaaacaggtcttg

SEQ ID NO: 469947 - DNA, 15 bp, Homo sapiens
gctgaaacaggtctt

SEQ ID NO: 469948 - DNA, 15 bp, Homo sapiens
ggctgaaacaggtct

SEQ ID NO: 469949 - DNA, 15 bp, Homo sapiens
aggctgaaacaggtc

SEQ ID NO: 469950 - DNA, 15 bp, Homo sapiens
caggctgaaacaggt

SEQ ID NO: 469951 - DNA, 15 bp, Homo sapiens
tcaggctgaaacagg

SEQ ID NO: 469952 - DNA, 15 bp, Homo sapiens
ctcaggctgaaacag

SEQ ID NO: 469953 - DNA, 15 bp, Homo sapiens
actcaggctgaaaca

SEQ ID NO: 469954 - DNA, 15 bp, Homo sapiens
aactcaggctgaaac

SEQ ID NO: 469955 - DNA, 15 bp, Homo sapiens
caactcaggctgaaa

SEQ ID NO: 469956 - DNA, 15 bp, Homo sapiens
tcaactcaggctgaa

SEQ ID NO: 469957 - DNA, 15 bp, Homo sapiens
ttcaactcaggctga

SEQ ID NO: 469958 - DNA, 15 bp, Homo sapiens
gttcaactcaggctg

SEQ ID NO: 469959 - DNA, 15 bp, Homo sapiens
ggttcaactcaggct

SEQ ID NO: 469960 - DNA, 15 bp, Homo sapiens
aggttcaactcaggc

SEQ ID NO: 469961 - DNA, 15 bp, Homo sapiens
aaggttcaactcagg

SEQ ID NO: 469962 - DNA, 15 bp, Homo sapiens
aaaggttcaactcag

SEQ ID NO: 469963 - DNA, 15 bp, Homo sapiens
caaaggttcaactca

SEQ ID NO: 469964 - DNA, 15 bp, Homo sapiens
ccaaaggttcaactc

SEQ ID NO: 469965 - DNA, 15 bp, Homo sapiens
gccaaaggttcaact

SEQ ID NO: 469966 - DNA, 15 bp, Homo sapiens
tgccaaaggttcaac

SEQ ID NO: 469967 - DNA, 15 bp, Homo sapiens
ttgccaaaggttcaa

SEQ ID NO: 469968 - DNA, 15 bp, Homo sapiens
gttgccaaaggttca

SEQ ID NO: 469969 - DNA, 15 bp, Homo sapiens
tgttgccaaaggttc

SEQ ID NO: 469970 - DNA, 15 bp, Homo sapiens
ttgttgccaaaggtt

SEQ ID NO: 469971 - DNA, 15 bp, Homo sapiens
tttgttgccaaaggt

SEQ ID NO: 469972 - DNA, 15 bp, Homo sapiens
ttttgttgccaaagg

SEQ ID NO: 469973 - DNA, 15 bp, Homo sapiens
gttttgttgccaaag

SEQ ID NO: 469974 - DNA, 15 bp, Homo sapiens
cgttttgttgccaaa

SEQ ID NO: 469975 - DNA, 15 bp, Homo sapiens
tcgttttgttgccaa

SEQ ID NO: 469976 - DNA, 15 bp, Homo sapiens
ctcgttttgttgcca

SEQ ID NO: 469977 - DNA, 15 bp, Homo sapiens
cctcgttttgttgcc

SEQ ID NO: 469978 - DNA, 15 bp, Homo sapiens
acctcgttttgttgc

SEQ ID NO: 469979 - DNA, 15 bp, Homo sapiens
gacctcgttttgttg

SEQ ID NO: 469980 - DNA, 15 bp, Homo sapiens
ggacctcgttttgtt

SEQ ID NO: 469981 - DNA, 15 bp, Homo sapiens
gggacctcgttttgt

SEQ ID NO: 469982 - DNA, 15 bp, Homo sapiens
ggggacctcgttttg

SEQ ID NO: 469983 - DNA, 15 bp, Homo sapiens
tggggacctcgtttt

SEQ ID NO: 469984 - DNA, 15 bp, Homo sapiens
gtggggacctcgttt

SEQ ID NO: 469985 - DNA, 15 bp, Homo sapiens
agtggggacctcgtt

SEQ ID NO: 469986 - DNA, 15 bp, Homo sapiens
gagtggggacctcgt

SEQ ID NO: 469987 - DNA, 15 bp, Homo sapiens
tgagtggggacctcg

SEQ ID NO: 469988 - DNA, 15 bp, Homo sapiens
gtgagtggggacctc

SEQ ID NO: 469989 - DNA, 15 bp, Homo sapiens
ggtgagtggggacct

SEQ ID NO: 469990 - DNA, 15 bp, Homo sapiens
gggtgagtggggacc

SEQ ID NO: 469991 - DNA, 15 bp, Homo sapiens
ggggtgagtggggac

SEQ ID NO: 469992 - DNA, 15 bp, Homo sapiens
aggggtgagtgggga

SEQ ID NO: 469993 - DNA, 15 bp, Homo sapiens
caggggtgagtgggg

SEQ ID NO: 469994 - DNA, 15 bp, Homo sapiens
acaggggtgagtggg

SEQ ID NO: 469995 - DNA, 15 bp, Homo sapiens
cacaggggtgagtgg

SEQ ID NO: 469996 - DNA, 15 bp, Homo sapiens
gcacaggggtgagtg

SEQ ID NO: 469997 - DNA, 15 bp, Homo sapiens
cgcacaggggtgagt

SEQ ID NO: 469998 - DNA, 15 bp, Homo sapiens
gcgcacaggggtgag

SEQ ID NO: 469999 - DNA, 15 bp, Homo sapiens
agcgcacaggggtga

SEQ ID NO: 470000 - DNA, 15 bp, Homo sapiens
gagcgcacaggggtg

SEQ ID NO: 470001 - DNA, 15 bp, Homo sapiens
tgagcgcacaggggt

SEQ ID NO: 470002 - DNA, 15 bp, Homo sapiens
ctgagcgcacagggg

SEQ ID NO: 470003 - DNA, 15 bp, Homo sapiens
tctgagcgcacaggg

SEQ ID NO: 470004 - DNA, 15 bp, Homo sapiens
ctctgagcgcacagg

SEQ ID NO: 470005 - DNA, 15 bp, Homo sapiens
cctctgagcgcacag

SEQ ID NO: 470006 - DNA, 15 bp, Homo sapiens
ccctctgagcgcaca

SEQ ID NO: 470007 - DNA, 15 bp, Homo sapiens
gccctctgagcgcac

SEQ ID NO: 470008 - DNA, 15 bp, Homo sapiens
ggccctctgagcgca

SEQ ID NO: 470009 - DNA, 15 bp, Homo sapiens
gggccctctgagcgc

SEQ ID NO: 470010 - DNA, 15 bp, Homo sapiens
agggccctctgagcg

SEQ ID NO: 470011 - DNA, 15 bp, Homo sapiens
gagggccctctgagc

SEQ ID NO: 470012 - DNA, 15 bp, Homo sapiens
ggagggccctctgag

SEQ ID NO: 470013 - DNA, 15 bp, Homo sapiens
gggagggccctctga

SEQ ID NO: 470014 - DNA, 15 bp, Homo sapiens
ggggagggccctctg

SEQ ID NO: 470015 - DNA, 15 bp, Homo sapiens
aggggagggccctct

SEQ ID NO: 470016 - DNA, 15 bp, Homo sapiens
gaggggagggccctc

SEQ ID NO: 470017 - DNA, 15 bp, Homo sapiens
ggaggggagggccct

SEQ ID NO: 470018 - DNA, 15 bp, Homo sapiens
aggaggggagggccc

SEQ ID NO: 470019 - DNA, 15 bp, Homo sapiens
gaggaggggagggcc

SEQ ID NO: 470020 - DNA, 15 bp, Homo sapiens
ggaggaggggagggc

SEQ ID NO: 470021 - DNA, 15 bp, Homo sapiens
aggaggaggggaggg

SEQ ID NO: 470022 - DNA, 15 bp, Homo sapiens
caggaggaggggagg

SEQ ID NO: 470023 - DNA, 15 bp, Homo sapiens
acaggaggaggggag

SEQ ID NO: 470024 - DNA, 15 bp, Homo sapiens
gacaggaggagggga

SEQ ID NO: 470025 - DNA, 15 bp, Homo sapiens
ggacaggaggagggg

SEQ ID NO: 470026 - DNA, 15 bp, Homo sapiens
cggacaggaggaggg

SEQ ID NO: 470027 - DNA, 15 bp, Homo sapiens
tcggacaggaggagg

SEQ ID NO: 470028 - DNA, 15 bp, Homo sapiens
ttcggacaggaggag

SEQ ID NO: 470029 - DNA, 15 bp, Homo sapiens
cttcggacaggagga

SEQ ID NO: 470030 - DNA, 15 bp, Homo sapiens
ccttcggacaggagg

SEQ ID NO: 470031 - DNA, 15 bp, Homo sapiens
accttcggacaggag

SEQ ID NO: 470032 - DNA, 15 bp, Homo sapiens
gaccttcggacagga

SEQ ID NO: 470033 - DNA, 15 bp, Homo sapiens
ggaccttcggacagg

SEQ ID NO: 470034 - DNA, 15 bp, Homo sapiens
gggaccttcggacag

SEQ ID NO: 470035 - DNA, 15 bp, Homo sapiens
ggggaccttcggaca

SEQ ID NO: 470036 - DNA, 15 bp, Homo sapiens
gggggaccttcggac

SEQ ID NO: 470037 - DNA, 15 bp, Homo sapiens
tgggggaccttcgga

SEQ ID NO: 470038 - DNA, 15 bp, Homo sapiens
ctgggggaccttcgg

SEQ ID NO: 470039 - DNA, 15 bp, Homo sapiens
cctgggggaccttcg

SEQ ID NO: 470040 - DNA, 15 bp, Homo sapiens
ccctgggggaccttc

SEQ ID NO: 470041 - DNA, 15 bp, Homo sapiens
tccctgggggacctt

SEQ ID NO: 470042 - DNA, 15 bp, Homo sapiens
ctccctgggggacct

SEQ ID NO: 470043 - DNA, 15 bp, Homo sapiens
gctccctgggggacc

SEQ ID NO: 470044 - DNA, 15 bp, Homo sapiens
ggctccctgggggac

SEQ ID NO: 470045 - DNA, 15 bp, Homo sapiens
gggctccctggggga

SEQ ID NO: 470046 - DNA, 15 bp, Homo sapiens
agggctccctggggg

SEQ ID NO: 470047 - DNA, 15 bp, Homo sapiens
cagggctccctgggg

SEQ ID NO: 470048 - DNA, 15 bp, Homo sapiens
gcagggctccctggg

SEQ ID NO: 470049 - DNA, 15 bp, Homo sapiens
cgcagggctccctgg

SEQ ID NO: 470050 - DNA, 15 bp, Homo sapiens
gcgcagggctccctg

SEQ ID NO: 470051 - DNA, 15 bp, Homo sapiens
tgcgcagggctccct

SEQ ID NO: 470052 - DNA, 15 bp, Homo sapiens
gtgcgcagggctccc

SEQ ID NO: 470053 - DNA, 15 bp, Homo sapiens
ggtgcgcagggctcc

SEQ ID NO: 470054 - DNA, 15 bp, Homo sapiens
cggtgcgcagggctc

SEQ ID NO: 470055 - DNA, 15 bp, Homo sapiens
acggtgcgcagggct

SEQ ID NO: 470056 - DNA, 15 bp, Homo sapiens
cacggtgcgcagggc

SEQ ID NO: 470057 - DNA, 15 bp, Homo sapiens
ccacggtgcgcaggg

SEQ ID NO: 470058 - DNA, 15 bp, Homo sapiens
gccacggtgcgcagg

SEQ ID NO: 470059 - DNA, 15 bp, Homo sapiens
ggccacggtgcgcag

SEQ ID NO: 470060 - DNA, 15 bp, Homo sapiens
gggccacggtgcgca

SEQ ID NO: 470061 - DNA, 15 bp, Homo sapiens
tgggccacggtgcgc

SEQ ID NO: 470062 - DNA, 15 bp, Homo sapiens
atgggccacggtgcg

SEQ ID NO: 470063 - DNA, 15 bp, Homo sapiens
gatgggccacggtgc

SEQ ID NO: 470064 - DNA, 15 bp, Homo sapiens
tgatgggccacggtg

SEQ ID NO: 470065 - DNA, 15 bp, Homo sapiens
ctgatgggccacggt

SEQ ID NO: 470066 - DNA, 15 bp, Homo sapiens
cctgatgggccacgg

SEQ ID NO: 470067 - DNA, 15 bp, Homo sapiens
ccctgatgggccacg

SEQ ID NO: 470068 - DNA, 15 bp, Homo sapiens
accctgatgggccac

SEQ ID NO: 470069 - DNA, 15 bp, Homo sapiens
aaccctgatgggcca

SEQ ID NO: 470070 - DNA, 15 bp, Homo sapiens
caaccctgatgggcc

SEQ ID NO: 470071 - DNA, 15 bp, Homo sapiens
tcaaccctgatgggc

SEQ ID NO: 470072 - DNA, 15 bp, Homo sapiens
ctcaaccctgatggg

SEQ ID NO: 470073 - DNA, 15 bp, Homo sapiens
gctcaaccctgatgg

SEQ ID NO: 470074 - DNA, 15 bp, Homo sapiens
cgctcaaccctgatg

SEQ ID NO: 470075 - DNA, 15 bp, Homo sapiens
ccgctcaaccctgat

SEQ ID NO: 470076 - DNA, 15 bp, Homo sapiens
gccgctcaaccctga

SEQ ID NO: 470077 - DNA, 15 bp, Homo sapiens
tgccgctcaaccctg

SEQ ID NO: 470078 - DNA, 15 bp, Homo sapiens
gtgccgctcaaccct

SEQ ID NO: 470079 - DNA, 15 bp, Homo sapiens
tgtgccgctcaaccc

SEQ ID NO: 470080 - DNA, 15 bp, Homo sapiens
gtgtgccgctcaacc

SEQ ID NO: 470081 - DNA, 15 bp, Homo sapiens
agtgtgccgctcaac

SEQ ID NO: 470082 - DNA, 15 bp, Homo sapiens
gagtgtgccgctcaa

SEQ ID NO: 470083 - DNA, 15 bp, Homo sapiens
tgagtgtgccgctca

SEQ ID NO: 470084 - DNA, 15 bp, Homo sapiens
gtgagtgtgccgctc

SEQ ID NO: 470085 - DNA, 15 bp, Homo sapiens
ggtgagtgtgccgct

SEQ ID NO: 470086 - DNA, 15 bp, Homo sapiens
tggtgagtgtgccgc

SEQ ID NO: 470087 - DNA, 15 bp, Homo sapiens
atggtgagtgtgccg

SEQ ID NO: 470088 - DNA, 15 bp, Homo sapiens
aatggtgagtgtgcc

SEQ ID NO: 470089 - DNA, 15 bp, Homo sapiens
caatggtgagtgtgc

SEQ ID NO: 470090 - DNA, 15 bp, Homo sapiens
ccaatggtgagtgtg

SEQ ID NO: 470091 - DNA, 15 bp, Homo sapiens
accaatggtgagtgt

SEQ ID NO: 470092 - DNA, 15 bp, Homo sapiens
caccaatggtgagtg

SEQ ID NO: 470093 - DNA, 15 bp, Homo sapiens
acaccaatggtgagt

SEQ ID NO: 470094 - DNA, 15 bp, Homo sapiens
gacaccaatggtgag

SEQ ID NO: 470095 - DNA, 15 bp, Homo sapiens
agacaccaatggtga

SEQ ID NO: 470096 - DNA, 15 bp, Homo sapiens
aagacaccaatggtg

SEQ ID NO: 470097 - DNA, 15 bp, Homo sapiens
caagacaccaatggt

SEQ ID NO: 470098 - DNA, 15 bp, Homo sapiens
acaagacaccaatgg

SEQ ID NO: 470099 - DNA, 15 bp, Homo sapiens
tacaagacaccaatg

SEQ ID NO: 470100 - DNA, 15 bp, Homo sapiens
gtacaagacaccaat

SEQ ID NO: 470101 - DNA, 15 bp, Homo sapiens
agtacaagacaccaa

SEQ ID NO: 470102 - DNA, 15 bp, Homo sapiens
aagtacaagacacca

SEQ ID NO: 470103 - DNA, 15 bp, Homo sapiens
caagtacaagacacc

SEQ ID NO: 470104 - DNA, 15 bp, Homo sapiens
acaagtacaagacac

SEQ ID NO: 470105 - DNA, 15 bp, Homo sapiens
cacaagtacaagaca

SEQ ID NO: 470106 - DNA, 15 bp, Homo sapiens
ccacaagtacaagac

SEQ ID NO: 470107 - DNA, 15 bp, Homo sapiens
gccacaagtacaaga

SEQ ID NO: 470108 - DNA, 15 bp, Homo sapiens
agccacaagtacaag

SEQ ID NO: 470109 - DNA, 15 bp, Homo sapiens
gagccacaagtacaa

SEQ ID NO: 470110 - DNA, 15 bp, Homo sapiens
tgagccacaagtaca

SEQ ID NO: 470111 - DNA, 15 bp, Homo sapiens
gtgagccacaagtac

SEQ ID NO: 470112 - DNA, 15 bp, Homo sapiens
ggtgagccacaagta

SEQ ID NO: 470113 - DNA, 15 bp, Homo sapiens
tggtgagccacaagt

SEQ ID NO: 470114 - DNA, 15 bp, Homo sapiens
gtggtgagccacaag

SEQ ID NO: 470115 - DNA, 15 bp, Homo sapiens
agtggtgagccacaa

SEQ ID NO: 470116 - DNA, 15 bp, Homo sapiens
aagtggtgagccaca

SEQ ID NO: 470117 - DNA, 15 bp, Homo sapiens
gaagtggtgagccac

SEQ ID NO: 470118 - DNA, 15 bp, Homo sapiens
agaagtggtgagcca

SEQ ID NO: 470119 - DNA, 15 bp, Homo sapiens
aagaagtggtgagcc

SEQ ID NO: 470120 - DNA, 15 bp, Homo sapiens
aaagaagtggtgagc

SEQ ID NO: 470121 - DNA, 15 bp, Homo sapiens
taaagaagtggtgag

SEQ ID NO: 470122 - DNA, 15 bp, Homo sapiens
ttaaagaagtggtga

SEQ ID NO: 470123 - DNA, 15 bp, Homo sapiens
attaaagaagtggtg

SEQ ID NO: 470124 - DNA, 15 bp, Homo sapiens
aattaaagaagtggt

SEQ ID NO: 470125 - DNA, 15 bp, Homo sapiens
aaattaaagaagtgg

SEQ ID NO: 470126 - DNA, 15 bp, Homo sapiens
gaaattaaagaagtg

SEQ ID NO: 470127 - DNA, 15 bp, Homo sapiens
tgaaattaaagaagt

SEQ ID NO: 470128 - DNA, 15 bp, Homo sapiens
ctgaaattaaagaag

SEQ ID NO: 470129 - DNA, 15 bp, Homo sapiens
cctgaaattaaagaa

SEQ ID NO: 470130 - DNA, 15 bp, Homo sapiens
tcctgaaattaaaga

SEQ ID NO: 470131 - DNA, 15 bp, Homo sapiens
ttcctgaaattaaag

SEQ ID NO: 470132 - DNA, 15 bp, Homo sapiens
gttcctgaaattaaa

SEQ ID NO: 470133 - DNA, 15 bp, Homo sapiens
agttcctgaaattaa

SEQ ID NO: 470134 - DNA, 15 bp, Homo sapiens
tagttcctgaaatta

SEQ ID NO: 470135 - DNA, 15 bp, Homo sapiens
ttagttcctgaaatt

SEQ ID NO: 470136 - DNA, 15 bp, Homo sapiens
tttagttcctgaaat

SEQ ID NO: 470137 - DNA, 15 bp, Homo sapiens
ttttagttcctgaaa

SEQ ID NO: 470138 - DNA, 15 bp, Homo sapiens
gttttagttcctgaa

SEQ ID NO: 470139 - DNA, 15 bp, Homo sapiens
ggttttagttcctga

SEQ ID NO: 470140 - DNA, 15 bp, Homo sapiens
cggttttagttcctg

SEQ ID NO: 470141 - DNA, 15 bp, Homo sapiens
ccggttttagttcct

SEQ ID NO: 470142 - DNA, 15 bp, Homo sapiens
tccggttttagttcc

SEQ ID NO: 470143 - DNA, 15 bp, Homo sapiens
gtccggttttagttc

SEQ ID NO: 470144 - DNA, 15 bp, Homo sapiens
cgtccggttttagtt

SEQ ID NO: 470145 - DNA, 15 bp, Homo sapiens
ccgtccggttttagt

SEQ ID NO: 470146 - DNA, 15 bp, Homo sapiens
cccgtccggttttag

SEQ ID NO: 470147 - DNA, 15 bp, Homo sapiens
gcccgtccggtttta

SEQ ID NO: 470148 - DNA, 15 bp, Homo sapiens
tgcccgtccggtttt

SEQ ID NO: 470149 - DNA, 15 bp, Homo sapiens
ttgcccgtccggttt

SEQ ID NO: 470150 - DNA, 15 bp, Homo sapiens
cttgcccgtccggtt

SEQ ID NO: 470151 - DNA, 15 bp, Homo sapiens
tcttgcccgtccggt

SEQ ID NO: 470152 - DNA, 15 bp, Homo sapiens
ctcttgcccgtccgg

SEQ ID NO: 470153 - DNA, 15 bp, Homo sapiens
tctcttgcccgtccg

SEQ ID NO: 470154 - DNA, 15 bp, Homo sapiens
gtctcttgcccgtcc

SEQ ID NO: 470155 - DNA, 15 bp, Homo sapiens
tgtctcttgcccgtc

SEQ ID NO: 470156 - DNA, 15 bp, Homo sapiens
ttgtctcttgcccgt

SEQ ID NO: 470157 - DNA, 15 bp, Homo sapiens
tttgtctcttgcccg

SEQ ID NO: 470158 - DNA, 15 bp, Homo sapiens
ttttgtctcttgccc

SEQ ID NO: 470159 - DNA, 15 bp, Homo sapiens
gttttgtctcttgcc

SEQ ID NO: 470160 - DNA, 15 bp, Homo sapiens
tgttttgtctcttgc

SEQ ID NO: 470161 - DNA, 15 bp, Homo sapiens
ctgttttgtctcttg

SEQ ID NO: 470162 - DNA, 15 bp, Homo sapiens
tctgttttgtctctt

SEQ ID NO: 470163 - DNA, 15 bp, Homo sapiens
ttctgttttgtctct

SEQ ID NO: 470164 - DNA, 15 bp, Homo sapiens
tttctgttttgtctc

SEQ ID NO: 470165 - DNA, 15 bp, Homo sapiens
ctttctgttttgtct

SEQ ID NO: 470166 - DNA, 15 bp, Homo sapiens
actttctgttttgtc

SEQ ID NO: 470167 - DNA, 15 bp, Homo sapiens
aactttctgttttgt

SEQ ID NO: 470168 - DNA, 15 bp, Homo sapiens
gaactttctgttttg

SEQ ID NO: 470169 - DNA, 15 bp, Homo sapiens
tgaactttctgtttt

SEQ ID NO: 470170 - DNA, 15 bp, Homo sapiens
ttgaactttctgttt

SEQ ID NO: 470171 - DNA, 15 bp, Homo sapiens
gttgaactttctgtt

SEQ ID NO: 470172 - DNA, 15 bp, Homo sapiens
tgttgaactttctgt

SEQ ID NO: 470173 - DNA, 15 bp, Homo sapiens
gtgttgaactttctg
